(19) United States
(12) Patent Application Publication
(10) Pub. No.: US 2007/0021600 A1
(43) Pub. Date: Jan. 25, 2007

(54) Nucleic acid and amino acid sequences relating to Enterococcus faecalis for diagnostics and therapeutics

(75) Inventors: Lynn A. Doucette-Stamm, Framingham, MA (US); David Bush, Somerville, MA (US)

Correspondence Address: GENOME THERAPEUTICS CORPORATION, 100 BEAVER STREET, WALTHAM, MA, 02453, US

(73) Assignee: Genome Therapeutics Corp.

(21) Appl. No.: 10/434,665

(22) Filed: May 9, 2003

Related U.S. Application Data
(62) Division of application No. 09/134,000, filed on Aug. 13, 1998, now Pat. No. 6,617,156.
(60) Provisional application No. 60/055,778, filed on Aug. 15, 1997.

(51) Int. Cl. C07H 21/04; C12P 21/02; C12N 1/21; C07K 14/24

(52) U.S. Cl. 536/23.7; 435/69.1; 435/320.1; 435/252.3; 530/350

(57) ABSTRACT

The invention provides isolated polypeptide and nucleic acid sequences derived from Enterococcus faecalis that are useful in diagnosis and therapy of pathological conditions; antibodies against the polypeptides; and methods for the production of the polypeptides. The invention also provides methods for the detection, prevention and treatment of pathological conditions resulting from bacterial infection.

[0001] This application claims priority of U.S. Provisional application 60/055,778, filed Aug. 15, 1997, all of which is hereby incorporated herein by reference in its entirety.

### FIELD OF THE INVENTION

[0002] The invention relates to isolated nucleic acids and polypeptides derived from Enterococcus faecalis that are useful as molecular targets for diagnosis, prophylaxis and treatment of pathological conditions, as well as materials and methods for the diagnosis, prevention, and amelioration of pathological conditions resulting from bacterial infection.

### BACKGROUND OF THE INVENTION

[0003] Enterococcus faecalis (E. faecalis) is a gram-positive, facultative, anaerobic cocci, that is widely distributed in nature, animals, and humans. Enterococci are part of the normal gastrointestinal and genital tract flora, and among the 17 known species, E. faecalis is dominant in humans, accounting for 80-90% of clinically isolated specimens, and it exhibits increasing levels of multidrug resistance (Kaufhold, A and Klein, R (1995) Zentralblatt Fuer Bakterilogie 282 (4): 507-518; and Svec, P, Sedlacek, I, and Pakrova, E (1996) Epidemiologie Mikrobiologie Imunologie 45: 153-157). E. faecalis infections include urinary tract infections (UTI), bacteremia, endocarditis, and wound and abdominal-pelvic infections, accounting for 16% of all UTIs, and 8% of all becteremias (Ardino, R C, and Murray, B E (1990) Principles and Practice of Infectious Diseases, 3rd ed., Mandell et al, eds., Update Vol. 2, No. 4).

[0004] Vancomycin resistant enterococci (VRE) have emerged in the midst of high level resistance to penicillin and aminoglycosides (Centers for Disease Control and Prevention (1993) MMWR 42:597-599; and Handwerger, S, et al (1993) Clin Infect Dis 16:750-755). Resistance can be intrinsic (chromosomally mediated), or acquired (plasmid or transposon mediated), with higher levels of resistance in acquired. VRE are characterized by resistance to virtually all available antibiotics, including vancomycin, considered the “last resort” antibiotic effective against gram-positive bacteria. Treatment options for physicians are limited, with the latest strategy being combinations of antimicrobials or the use of new unproven compounds (Moellering, R C Jr. (1991) J Antimicrob Chemother 28: 1-12; and Hayden, M K et al (1994) Antimicrob Agents Chemother 38 1225-1229; and Mobarakai, N et al (1994) J Antimicrob Chemother 33: 319-321). From 1989 through 1993, the percentage of nosocomial (hospital incurred) infections by VRE increased from 0.3% to 7.9% (Centers for Disease Control and Prevention (1993) MMWR 42:597-599). There was a 34-fold increase in ICU patients, and a increasing trend among non-ICU patients (Centers for Disease Control and Prevention (1993) MMWR 42:597-599). These numbers may not be an accurate reflection of the actual total, as clinical identification of vancomycin resistance is not consistently detected, especially in the VanB phenotype which confers moderate resistance (Tenover, F C (1993) J Clin Microbiol 31:1695-1699; and Sahm, D F (1990) Antimicrob Agents Chemother 34: 1846-1848; and Zabransky, R J (1994) Microbiol Infect Dis 20:113-116). Patients can be colonized and carry VRE without symptoms, with chief areas of colonization being anus, axilla, stool, perineal, umbilicus, wounds, foley catheters, and colostomy sites.

[0005] Epidemiology of E. faecalis is not completely understood, but it is thought that most infections and colonizations are a result of the patient's endogenous flora (Murray, B E (1990) Clin Microbiol Rev 3:46-65). Recent evidence suggests that E. faecalis can be spread by direct contact with other infected patients, indirect transmission from hospital personnel (Boyce, J M et al (1994) J Clin Microbiol 32:1148-53; and Rhineheart, E et al (1990) N Engl J Med 323:1814-1818), or from contaminated hospital surfaces and equipment (Karanfil, L V et al (1992) Infect Control Hosp Epidemiol 13:195-200; and Boyce, J M et al (1994) J Clin Microbiol 32:1148-53; and Livornese, L L Jr. (1992) Ann Intern Med 117:112-116). Increased risk for the critically ill, those with underlying disease or immunosuppression (i.e. ICU, oncology, and transplant patients), cardio-thoracic/intraabdominal surgical patients and those with urinary or central venous catheters has been demonstrated. In addition, risk for E. faecalis infection increases for patients with long hospital stays or previous multiantimicrobial or vancomycin treatments (Boyce, J M et al (1994) J Clin Microbiol 32:1148-1153; Boyle, J F et al (1993) J Clin Microbiol 31:1280-1285; Karanfil, L V et al (1992) Infect Control Hosp Epidemiol 13:195-200; Handwerger, S et al (1993) Clin Infect Dis 16:750-755; Montecalvo, M A et al (1994) Antimicrob Agents Chemother 38:1363-1367).

[0006] Additional concern stems from the ability of the E. faecalis plasmid borne VanA gene, which confers high level vancomycin resistance, to transfer in vitro to several gram positive microorganisms such as Staphylococcus aureus (Leclercq, R et al (1989) Antimicrob Agents Chemother 33:10-15; and Noble, W C, et al (1992) FEMS Microbiology Letters 72:195-198). To date, no clinical isolates of S. aureus or S. epidermidis have shown vancomycin resistance conferred by plasmid transfer, but clinically isolated strains of S. haemolyticus have (Degner, J E, et al (1994) J Clin Microbiol 32:2260-2265; and Veach, L A, et al (1990) J Clin Microbiol 28:2064-2068).

[0007] These concerns point to the need for diagnostic tools and therapeutics aimed at proper identification of strain and eradication of virulence. The design of vaccines that will limit the spread of infection and halt transfer of resistance factors is very desirable.

### SUMMARY OF THE INVENTION

[0008] The present invention fulfills the need for diagnostic tools and therapeutics by providing bacterial-specific compositions and methods for detecting, treating, and preventing bacterial infection, in particular E. faecalis infection.

[0009] The present invention encompasses isolated nucleic acids and polypeptides derived from E. faecalis that are useful as reagents for diagnosis of bacterial disease, components of effective antibacterial vaccines, and/or as targets for antibacterial drugs, including anti-E. faecalis drugs. They can also be used to detect the presence of E. faecalis and other Enterococcus species in a sample; and in screening compounds for the ability to interfere with the E. faecalis life cycle or to inhibit E. faecalis infection. They also has use as biocontrol agents for plants

[0010] The present invention also provides a genome-wide comparison by FASTA of the predicted amino acid sequences of several E. faecalis open reading frames (ORFs) with the predicted amino acid sequence of several E. faecium ORFs (Table 3). Together, E. faecalis and E. faecium account for >95% of all VRE infections. Genomic comparison of E. faecalis with E. faecium at the sequence, open reading frame (ORF), and gene level provides valuable information on shared targets, which can be exploited in designing diagnostics and therapeutics for VRE. Identifying common essential genes through sequencing and analysis of both genomes provides a much quicker route to these targets, and speeds the progress of probe design for identification of VRE infection, and vaccine compositions for protection from and treatment of these infections.

[0011] More specifically, this invention features compositions of nucleic acids corresponding to entire coding sequences of E. faecalis proteins, including surface or secreted proteins or parts thereof, nucleic acids capable of binding mRNA from E. faecalis proteins to block protein translation, and methods for producing E. faecalis proteins or parts thereof using peptide synthesis and recombinant DNA techniques. This invention also features antibodies and nucleic acids useful as probes to detect E. faecalis infection. In addition, vaccine compositions and methods for the protection or treatment of infection by E. faecalis are within the scope of this invention.

[0012] The nucleotide sequences provided in SEQ ID NO: 1-SEQ ID NO: 3405, a fragment thereof, or a nucleotide sequence at least 99.5% identical to a sequence contained within SEQ ID NO: 1-SEQ ID NO: 3405 may be “provided” in a variety of medias to facilitate use thereof. As used herein, “provided” refers to a manufacture, other than an isolated nucleic acid molecule, which contains a nucleotide sequence of the present invention, i.e., the nucleotide sequence provided in SEQ ID NO: 1-SEQ ID NO: 3405, a fragment thereof, or a nucleotide sequence at least 99.5% identical to a sequence contained within SEQ ID NO: 1-SEQ ID NO: 3405. Uses for and methods for providing nucleotide sequences in a variety of media is well known in the art (see e.g., EPO Publication No. EP 0 756 006)

[0013] In one application of this embodiment, a nucleotide sequence of the present invention can be recorded on computer readable media. As used herein, “computer readable media” refers to any media which can be read and accessed directly by a computer. Such media include, but are not limited to: magnetic storage media, such as floppy discs, hard disc storage media, and magnetic tape; optical storage media such as CD-ROM; electrical storage media such as RAM and ROM; and hybrids of these categories such as magnetic/optical storage media. A person skilled in the art can readily appreciate how any of the presently known computer readable media can be used to create a manufacture comprising computer readable media having recorded thereon a nucleotide sequence of the present invention.

[0014] As used herein, “recorded” refers to a process for storing information on computer readable media. A person skilled in the art can readily adopt any of the presently known methods for recording information on computer readable media to generate manufactures comprising the nucleotide sequence information of the present invention.

[0015] A variety of data storage structures are available to a person skilled in the art for creating a computer readable media having recorded thereon a nucleotide sequence of the present invention. The choice of the data storage structure will generally be based on the means chosen to access the stored information. In addition, a variety of data processor programs and formats can be used to store the nucleotide sequence information of the present invention on computer readable media. The sequence information can be represented in a word processing text file, formatted in commercially-available software such as WordPerfect and Microsoft Word, or represented in the form of an ASCII file, stored in a database application, such as DB2, Sybase, Oracle, or the like. A person skilled in the art can readily adapt any number of data processor structuring formats (e.g. text file or database) in order to obtain computer readable media having recorded thereon the nucleotide sequence information of the present invention.

[0016] By providing the nucleotide sequences of SEQ ID NO: 1-SEQ ID NO: 3405, a fragment thereof, or a nucleotide sequence at least 99.5% identical to SEQ ID NO: 1-SEQ ID NO: 3405 in computer readable form, a person skilled in the art can routinely access the coding sequence information for a variety of purposes. Computer software is publicly available which allows a person skilled in the art to access sequence information provided in a computer readable media. Examples of such computer software include programs of the “Staden Package”, “DNA Star”, “MacVector”, GCG “Wisconsin Package” (Genetics Computer Group, Madison, Wis.) and “NCBI Toolbox” (National Center For Biotechnology Information).

[0017] Computer algorithms enable the identification of open reading frames (ORFs) within SEQ ID NO: 1-SEQ ID NO: 3405 which contain homology to ORFs or proteins from other organisms. Examples of such similarity-search algorithms include the BLAST [Altschul et al., J. Mol. Biol. 215:403-410 (1990)] and Smith-Waterman [Smith and Waterman (1981) Advances in Applied Mathematics, 2:482-489] search algorithms. These algorithms are utilized on computer systems as exemplified below. The ORFs so identified represent protein encoding fragments within the E. faecalis genome and are useful in producing commercially important proteins such as enzymes used in fermentation reactions and in the production of commercially useful metabolites.

[0018] The present invention further provides systems, particularly computer-based systems, which contain the sequence information described herein. Such systems are designed to identify commercially important fragments of the E. faecalis genome. As used herein, “a computer-based system” refers to the hardware means, software means, and data storage means used to analyze the nucleotide sequence information of the present invention. The minimum hardware means of the computer-based systems of the present invention comprises a central processing unit (CPU), input means, output means, and data storage means. A person skilled in the artcan readily appreciate that any one of the currently available computer-based systems is suitable for use in the present invention. The computer-based systems of the present invention comprise a data storage means having stored therein a nucleotide sequence of the present invention and the necessary hardware means and software means for supporting and implementing a search means. As used herein, “data storage means” refers to memory which can store nucleotide sequence information of the present invention, or a memory access means which can access manufactures having recorded thereon the nucleotide sequence information of the present invention.

[0019] As used herein, “search means” refers to one or more programs which are implemented on the computer-based system to compare a target sequence or target structural motif with the sequence information stored within the data storage means. Search means are used to identify fragments or regions of the E. faecalis genome which are similar to, or “match”, a particular target sequence or target motif. A variety of known algorithms are known in the art and have been disclosed publicly, and a variety of commercially available software for conducting homology-based similarity searches are available and can be used in the computer-based systems of the present invention. Examples of such software includes, but is not limited to, FASTA (GCG Wisconsin Package), Bic_SW (Compugen Bioccelerator), BLASTN2, BLASTP2, BLASTX2 (NCBI) and Motifs (GCG). A person skilled in the art can readily recognize that any one of the available algorithms or implementing software packages for conducting homology searches can be adapted for use in the present computer-based systems.

[0020] As used herein, a “target sequence” can be any DNA or amino acid sequence of six or more nucleotides or two or more amino acids. A person skilled in the art can readily recognize that the longer a target sequence is, the less likely a target sequence will be present as a random occurrence in the database. The most preferred sequence length of a target sequence is from about 10 to 100 amino acids or from about 30 to 300 nucleotide residues. However, it is well recognized that many genes are longer than 500 amino acids, or 1.5 kb in length, and that commercially important fragments of the E. faecalis genome, such as sequence fragments involved in gene expression and protein processing, will often be shorter than 30 nucleotides.

[0021] As used herein, “a target structural motif,” or “target motif,” refers to any rationally selected sequence or combination of sequences in which the sequence(s) are chosen based on a specific functional domain or three-dimensional configuration which is formed upon the folding of the target polypeptide. There are a variety of target motifs known in the art. Protein target motifs include, but are not limited to, enzymatic active sites, membrane spanning regions, and signal sequences. Nucleic acid target motifs include, but are not limited to, promoter sequences, hairpin structures and inducible expression elements (protein binding sequences).

[0022] A variety of structural formats for the input and output means can be used to input and output the information in the computer-based systems of the present invention. A preferred format for an output means ranks fragments of the E. faecalis genome possessing varying degrees of homology to the target sequence or target motif. Such presentation provides a person skilled in the art with a ranking of sequences which contain various amounts of the target sequence or target motif and identifies the degree of homology contained in the identified fragment.

[0023] A variety of comparing means can be used to compare a target sequence or target motif with the data storage means to identify sequence fragments of the E. faecalis genome. In the present examples, implementing software which implement the BLASTP2 and bic_SW algorithms (Altschul et al., J. Mol. Biol. 215:403-410 (1990); Compugen Biocellerator) was used to identify open reading frames within the E. faecalis genome. A person skilled in the art can readily recognize that any one of the publicly available homology search programs can be used as the search means for the computer-based systems of the present invention.

[0024] The invention features E. faecalis polypeptides, preferably a substantially pure preparation of an E. faecalis polypeptide, or a recombinant E. faecalis polypeptide. In preferred embodiments: the polypeptide has biological activity; the polypeptide has an amino acid sequence at least 60%, 70%, 80%, 90%, 95%, 98%, or 99% identical to an amino acid sequence of the invention contained in the Sequence Listing, preferably it has about 65% sequence identity with an amino acid sequence of the invention contained in the Sequence Listing, and most preferably it has about 92% to about 99% sequence identity with an amino acid sequence of the invention contained in the Sequence Listing; the polypeptide has an amino acid sequence essentially the same as an amino acid sequence of the invention contained in the Sequence Listing; the polypeptide is at least 5, 10, 20, 50, 100, or 150 amino acid residues in length; the polypeptide includes at least 5, preferably at least 10, more preferably at least 20, more preferably at least 50, 100, or 150 contiguous amino acid residues of the invention contained in the Sequence Listing. In yet another preferred embodiment, the amino acid sequence which differs in sequence identity by about 7% to about 8% from the E. faecalis amino acid sequences of the invention contained in the Sequence Listing is also encompassed by the invention.

[0025] In preferred embodiments: the E. faecalis polypeptide is encoded by a nucleic acid of the invention contained in the Sequence Listing, or by a nucleic acid having at least 60%, 70%, 80%, 90%, 95%, 98%, or 99% homology with a nucleic acid of the invention contained in the Sequence Listing.

[0026] In a preferred embodiment, the subject E. faecalis polypeptide differs in amino acid sequence at 1, 2, 3, 5, 10 or more residues from a sequence of the invention contained in the Sequence Listing. The differences, however, are such that the E. faecalis polypeptide exhibits an E. faecalis biological activity, e.g., the E. faecalis polypeptide retains a biological activity of a naturally occurring E. faecalis enzyme.

[0027] In preferred embodiments, the polypeptide includes all or a fragment of an amino acid sequence of the invention contained in the Sequence Listing; fused, in reading frame, to additional amino acid residues, preferably to residues encoded by genomic DNA 5′ or 3′ to the genomic DNA which encodes a sequence of the invention contained in the Sequence Listing.

[0028] In yet other preferred embodiments, the E. faecalis polypeptide is a recombinant fusion protein having a first E. faecalis polypeptide portion and a second polypeptide portion, e.g., a second polypeptide portion having an amino acid sequence unrelated to E. faecalis. The second polypeptide portion can be, e.g., any of glutathione-5-transferase, a DNA binding domain, or a polymerase activating domain. In preferred embodiment the fusion protein can be used in a two-hybrid assay.

[0029] Polypeptides of the invention include those which arise as a result of alternative transcription events, alternative RNA splicing events, and alternative translational and postranslational events.

[0030] In a preferred embodiment, the encoded E. faecalis polypeptide differs (e.g., by amino acid substitution, addition or deletion of at least one amino acid residue) in amino acid sequence at 1, 2, 3, 5, 10 or more residues, from a sequence of the invention contained in the Sequence Listing. The differences, however, are such that: the E. faecalis encoded polypeptide exhibits a E. faecalis biological activity, e.g., the encoded E. faecalis enzyme retains a biological activity of a naturally occurring E. faecalis.

[0031] In preferred embodiments, the encoded polypeptide includes all or a fragment of an amino acid sequence of the invention contained in the Sequence Listing; fused, in reading frame, to additional amino acid residues, preferably to residues encoded by genomic DNA 5′ or 3′ to the genomic DNA which encodes a sequence of the invention contained in the Sequence Listing.

[0032] The E. faecalis strain, from which the nucleotide sequences have been sequenced, was deposited on Jun. 26, 1997 in the American Type Culture Collection (ATCC # 55986) as strain 14336.

[0033] Included in the invention are: allelic variations; natural mutants; induced mutants; proteins encoded by DNA that hybridize under high or low stringency conditions to a nucleic acid which encodes a polypeptide of the invention contained in the Sequence Listing (for definitions of high and low stringency see Current Protocols in Molecular Biology, John Wiley & Sons, New York, 1989, 6.3.1-6.3.6, hereby incorporated by reference); and, polypeptides specifically bound by antisera to E. faecalis polypeptides, especially by antisera to an active site or binding domain of E. faecalis polypeptide. The invention also includes fragments, preferably biologically active fragments. These and other polypeptides are also referred to herein as E. faecalis polypeptide analogs or variants.

[0034] The invention further provides nucleic acids, e.g., RNA or DNA, encoding a polypeptide of the invention. This includes double stranded nucleic acids as well as coding and antisense single strands.

[0035] In preferred embodiments, the subject E. faecalis nucleic acid will include a transcriptional regulatory sequence, e.g. at least one of a transcriptional promoter or transcriptional enhancer sequence, operably linked to the E. faecalis gene sequence, e.g., to render the E. faecalis gene sequence suitable for expression in a recombinant host cell.

[0036] In yet a further preferred embodiment, the nucleic acid which encodes an E. faecalis polypeptide of the invention, hybridizes under stringent conditions to a nucleic acid probe corresponding to at least 8 consecutive nucleotides of the invention contained in the Sequence Listing; more preferably to at least 12 consecutive nucleotides of the invention contained in the Sequence Listing; more preferably to at least 20 consecutive nucleotides of the invention contained in the Sequence Listing; more preferably to at least 40 consecutive nucleotides of the invention contained in the Sequence Listing.

[0037] In another aspect, the invention provides a substantially pure nucleic acid having a nucleotide sequence which encodes an E. faecalis polypeptide. In preferred embodiments: the encoded polypeptide has biological activity; the encoded polypeptide has an amino acid sequence at least 60%, 70%, 80%, 90%, 95%, 98%, or 99% homologous to an amino acid sequence of the invention contained in the Sequence Listing; the encoded polypeptide has an amino acid sequence essentially the same as an amino acid sequence of the invention contained in the Sequence Listing; the encoded polypeptide is at least 5, 10, 20, 50, 100, or 150 amino acids in length; the encoded polypeptide comprises at least 5, preferably at least 10, more preferably at least 20, more preferably at least 50, 100, or 150 contiguous amino acids of the invention contained in the Sequence Listing.

[0038] In another aspect, the invention encompasses: a vector including a nucleic acid which encodes an E. faecalis polypeptide or an E. faecalis polypeptide variant as described herein; a host cell transfected with the vector; and a method of producing a recombinant E. faecalis polypeptide or E. faecalis polypeptide variant; including culturing the cell, e.g., in a cell culture medium, and isolating the E. faecalis or E. faecalis polypeptide variant, e.g., from the cell or from the cell culture medium.

[0039] One embodiment of the invention is directed to substantially isolated nucleic acids. Nucleic acids of the invention include sequences comprising at least about 8 nucleotides in length, more preferably at least about 12 nucleotides in length, even more preferably at least about 15-20 nucleotides in length, that correspond to a subsequence of any one of SEQ ID NO: 1-SEQ ID NO: 3405 or complements thereof. Alternatively, the nucleic acids comprise sequences contained within any ORF (open reading frame), including a complete protein-coding sequence, of which any of SEQ ID NO: 1-SEQ ID NO: 3405 forms a part. The invention encompasses sequence-conservative variants and function-conservative variants of these sequences. The nucleic acids may be DNA, RNA, DNA/RNA duplexes, protein-nucleic acid (PNA), or derivatives thereof.

[0040] In another aspect, the invention features, a purified recombinant nucleic acid having at least 50%, 60%, 70%, 80%, 90%, 95%, 98%, or 99% homology with a sequence of the invention contained in the Sequence Listing The invention also encompasses recombinant DNA (including DNA cloning and expression vectors) comprising these E. faecalis-derived sequences; host cells comprising such DNA, including fungal, bacterial, yeast, plant, insect, and mammalian host cells; and methods for producing expression products comprising RNA and polypeptides encoded by the E. faecalis sequences. These methods are carried out by incubating a host cell comprising a E. faecalis-derived nucleic acid sequence under conditions in which the sequence is expressed. The host cell may be native or recombinant. The polypeptides can be obtained by (a) harvesting the incubated cells to produce a cell fraction and a medium fraction; and (b) recovering the E. faecalis polypeptide from the cell fraction, the medium fraction, or both. The polypeptides can also be made by in vitro translation.

[0041] In another aspect, the invention features nucleic acids capable of binding mRNA of E. faecalis. Such nucleic acid is capable of acting as antisense nucleic acid to control the translation of mRNA of E. faecalis. A further aspect features a nucleic acid which is capable of binding specifically to an E. faecalis nucleic acid. These nucleic acids are also referred to herein as complements and have utility as probes and as capture reagents.

[0042] In another aspect, the invention features an expression system comprising an open reading frame corresponding to E. faecalis nucleic acid. The nucleic acid further comprises a control sequence compatible with an intended host. The expression system is useful for making polypeptides corresponding to E. faecalis nucleic acid.

[0043] In another aspect, the invention encompasses: a vector including a nucleic acid which encodes a E. faecalis polypeptide or a E. faecalis polypeptide variant as described herein; a host cell transfected with the vector; and a method of producing a recombinant E. faecalis polypeptide or E. faecalis polypeptide variant; including culturing the cell, e.g., in a cell culture medium, and isolating the E. faecalis or E. faecalis polypeptide variant, e.g., from the cell or from the cell culture medium.

[0044] In yet another embodiment, the invention encompasses reagents for detecting bacterial infection, including E. faecalis infection, which comprise at least one E. faecalis-derived nucleic acid defined by any one of SEQ ID NO: 1-SEQ ID NO: 3405, or sequence-conservative or function-conservative variants thereof. Alternatively, the diagnostic reagents comprise polypeptide sequences that are contained within any open reading frames (ORFs), including complete protein-coding sequences, contained within any of SEQ ID NO: 1-SEQ ID NO: 3405, or polypeptide sequences contained within any of SEQ ID NO: 3406-SEQ ID NO: 6810, or polypeptides of which any of the above sequences forms a part, or antibodies directed against any of the above peptide sequences or function-conservative variants and/or fragments thereof.

[0045] The invention further provides antibodies, preferably monoclonal antibodies, which specifically bind to the polypeptides of the invention. Methods are also provided for producing antibodies in a host animal. The methods of the invention comprise immunizing an animal with at least one E. faecalis-derived immunogenic component, wherein the immunogenic component comprises one or more of the polypeptides encoded by any one of SEQ ID NO: 1-SEQ ID NO: 3405 or sequence-conservative or function-conservative variants thereof; or polypeptides that are contained within any ORFs, including complete protein-coding sequences, of which any of SEQ ID NO: 1-SEQ ID NO: 3405 forms a part; or polypeptide sequences contained within any of SEQ ID NO: 3406-SEQ ID NO: 6810; or polypeptides of which any of SEQ ID NO: 3406-SEQ ID NO: 6810 forms a part. Host animals include any warm blooded animal, including without limitation mammals and birds. Such antibodies have utility as reagents for immunoassays to evaluate the abundance and distribution of E. faecalis-specific antigens.

[0046] In yet another aspect, the invention provides diagnostic methods for detecting E. faecalis antigenic components or anti-E. faecalis antibodies in a sample. E. faecalis antigenic components are detected by a process comprising: (i) contacting a sample suspected to contain a bacterial antigenic component with a bacterial-specific antibody, under conditions in which a stable antigen-antibody complex can form between the antibody and bacterial antigenic components in the sample; and (ii) detecting any antigen-antibody complex formed in step (i), wherein detection of an antigen-antibody complex indicates the presence of at least one bacterial antigenic component in the sample. In different embodiments of this method, the antibodies used are directed against a sequence encoded by any of SEQ ID NO: 1-SEQ ID NO: 3405 or sequence-conservative or function-conservative variants thereof, or against a polypeptide sequence contained in any of SEQ ID NO: 3406-SEQ ID NO: 6810 or function-conservative variants thereof.

[0047] In yet another aspect, the invention provides a method for detecting antibacterial-specific antibodies in a sample, which comprises: (i) contacting a sample suspected to contain antibacterial-specific antibodies with a E. faecalis antigenic component, under conditions in which a stable antigen-antibody complex can form between the E. faecalis antigenic component and antibacterial antibodies in the sample; and (ii) detecting any antigen-antibody complex formed in step (i), wherein detection of an antigen-antibody complex indicates the presence of antibacterial antibodies in the sample. In different embodiments of this method, the antigenic component is encoded by a sequence contained in any of SEQ ID NO: 1-SEQ ID NO: 3405 or sequence-conservative and function-conservative variants thereof, or is a polypeptide sequence contained in any of SEQ ID NO: 3406-SEQ ID NO: 6810 or function-conservative variants thereof.

[0048] In another aspect, the invention features a method of generating vaccines for immunizing an individual against E. faecalis. The method includes: immunizing a subject with an E. faecalis polypeptide, e.g., a surface or secreted polypeptide, or a combination of such peptides or active portion(s) thereof, and a pharmaceutically acceptable carrier. Such vaccines have therapeutic and prophylactic utilities.

[0049] In another aspect, the invention features a method of evaluating a compound, e.g. a polypeptide, e.g., a fragment of a host cell polypeptide, for the ability to bind an E. faecalis polypeptide. The method includes: contacting the Enterococcus compound with an E. faecalis polypeptide and determining if the compound binds or otherwise interacts with an E. faecalis polypeptide. Compounds which bind E. faecalis are candidates as activators or inhibitors of the bacterial life cycle. These assays can be performed in vitro or in vivo.

[0050] In another aspect, the invention features a method of evaluating a compound, e.g. a polypeptide, e.g., a fragment of a host cell polypeptide, for the ability to bind an E. faecalis nucleic acid, e.g., DNA or RNA. The method includes: contacting the Enterococcus compound with an E. faecalis nucleic acid and determining if the compound binds or otherwise interacts with an E. faecalis polypeptide. Compounds which bind E. faecalis are candidates as activators or inhibitors of the bacterial life cycle. These assays can be performed in vitro or in vivo.

[0051] A particularly preferred embodiment of the invention is directed to a method of screening test compounds for anti-bacterial activity, which method comprises: selecting as a target a bacterial specific sequence, which sequence is essential to the viability of a bacterial species; contacting a test compound with said target sequence; and selecting those test compounds which bind to said target sequence as potential anti-bacterial candidates. In one embodiment, the target sequence selected is specific to a single species, or even a single strain, i.e., the E. faecalis strain 14336. In a second embodiment, the target sequence is common to at least two species of bacteria. In a third embodiment, the target sequence is common to a family of bacteria. The target sequence may be a nucleic acid sequence or a polypeptide sequence. Methods employing sequences common to more than one species of microorganism may be used to screen candidates for broad spectrum anti-bacterial activity.

[0052] The invention also provides methods for preventing or treating disease caused by certain bacteria, including E. faecalis, which are carried out by administering to an animal in need of such treatment, in particular a warm-blooded vertebrate, including but not limited to birds and mammals, a compound that specifically inhibits or interferes with the function of a bacterial polypeptide or nucleic acid. In a particularly preferred embodiment, the mammal to be treated is human.

### DETAILED DESCRIPTION OF THE INVENTION

[0053] The sequences of the present invention include the specific nucleic acid and amino acid sequences set forth in the Sequence Listing that forms a part of the present specification, and which are designated SEQ ID NO: 1-SEQ ID NO: 6810. Use of the terms “SEQ ID NO: 1-SEQ ID NO: 3405”, “SEQ ID NO: 3406-SEQ ID NO: 6810”, “the sequences depicted in Table 2”, etc., is intended, for convenience, to refer to each individual SEQ ID NO individually, and is not intended to refer to the genus of these sequences. In other words, it is a shorthand for listing all of these sequences individually. The invention encompasses each sequence individually, as well as any combination thereof.

Definitions

[0054] “Nucleic acid” or “polynucleotide” as used herein refers to purine- and pyrimidine-containing polymers of any length, either polyribonucleotides or polydeoxyribonucleotides or mixed polyribo-polydeoxyribo nucleotides. This includes single- and double-stranded molecules, i.e., DNA-DNA, DNA-RNA and RNA-RNA hybrids, as well as “protein nucleic acids” (PNA) formed by conjugating bases to an amino acid backbone. This also includes nucleic acids containing modified bases.

[0055] A nucleic acid or polypeptide sequence that is “derived from” a designated sequence refers to a sequence that corresponds to a region of the designated sequence. For nucleic acid sequences, this encompasses sequences that are homologous or complementary to the sequence, as well as “sequence-conservative variants” and “function-conservative variants.” For polypeptide sequences, this encompasses “function-conservative variants.” Sequence-conservative variants are those in which a change of one or more nucleotides in a given codon position results in no alteration in the amino acid encoded at that position. Function-conservative variants are those in which a given amino acid residue in a polypeptide has been changed without altering the overall conformation and function of the native polypeptide, including, but not limited to, replacement of an amino acid with one having similar physico-chemical properties (such as, for example, acidic, basic, hydrophobic, and the like). “Function-conservative” variants also include any polypeptides that have the ability to elicit antibodies specific to a designated polypeptide.

[0056] An “E. faecalis-derived” nucleic acid or polypeptide sequence may or may not be present in other bacterial species, and may or may not be present in all E. faecalis strains. This term is intended to refer to the source from which the sequence was originally isolated. Thus, a E. faecalis-derived polypeptide, as used herein, may be used, e.g., as a target to screen for a broad spectrum antibacterial agent, to search for homologous proteins in other species of bacteria or in eukaryotic organisms such as fungi and humans, etc.

[0057] A purified or isolated polypeptide or a substantially pure preparation of a polypeptide are used interchangeably herein and, as used herein, mean a polypeptide that has been separated from other proteins, lipids, and nucleic acids with which it naturally occurs. Preferably, the polypeptide is also separated from substances, e.g., antibodies or gel matrix, e.g., polyacrylamide, which are used to purify it. Preferably, the polypeptide constitutes at least 10, 20, 50 70, 80 or 95% dry weight of the purified preparation. Preferably, the preparation contains: sufficient polypeptide to allow protein sequencing; at least 1, 10, or 100 mg of the polypeptide.

[0058] A purified preparation of cells refers to, in the case of plant or animal cells, an in vitro preparation of cells and not an entire intact plant or animal. In the case of cultured cells or microbial cells, it consists of a preparation of at least 10% and more preferably 50% of the subject cells.

[0059] A purified or isolated or a substantially pure nucleic acid, e.g., a substantially pure DNA, (are terms used interchangeably herein) is a nucleic acid which is one or both of the following: not immediately contiguous with both of the coding sequences with which it is immediately contiguous (i.e., one at the 5′ end and one at the 3′ end) in the naturally-occurring genome of the organism from which the nucleic acid is derived; or which is substantially free of a nucleic acid with which it occurs in the organism from which the nucleic acid is derived. The term includes, for example, a recombinant DNA which is incorporated into a vector, e.g., into an autonomously replicating plasmid or virus, or into the genomic DNA of a prokaryote or eukaryote, or which exists as a separate molecule (e.g., a cDNA or a genomic DNA fragment produced by PCR or restriction endonuclease treatment) independent of other DNA sequences. Substantially pure DNA also includes a recombinant DNA which is part of a hybrid gene encoding additional E. faecalis DNA sequence.

[0060] A “contig” as used herein is a nucleic acid representing a continuous stretch of genomic sequence of an organism.

[0061] An “open reading frame”, also referred to herein as ORF, is a region of nucleic acid which encodes a polypeptide. This region may represent a portion of a coding sequence or a total sequence and can be determined from a stop to stop codon or from a start to stop codon.

[0062] As used herein, a “coding sequence” is a nucleic acid which is transcribed into messenger RNA and/or translated into a polypeptide when placed under the control of appropriate regulatory sequences. The boundaries of the coding sequence are determined by a translation start codon at the five prime terminus and a translation stop code at the three prime terminus. A coding sequence can include but is not limited to messenger RNA, synthetic DNA, and recombinant nucleic acid sequences.

[0063] A “complement” of a nucleic acid as used herein refers to an anti-parallel or antisense sequence that participates in Watson-Crick base-pairing with the original sequence.

[0064] A “gene product” is a protein Or structural RNA which is specifically encoded by a gene.

[0065] As used herein, the term “probe” refers to a nucleic acid, peptide or other chemical entity which specifically binds to a molecule of interest. Probes are often associated with or capable of associating with a label. A label is a chemical moiety capable of detection. Typical labels comprise dyes, radioisotopes, luminescent and chemiluminescent moieties, fluorophores, enzymes, precipitating agents, amplification sequences, and the like. Similarly, a nucleic acid, peptide or other chemical entity which specifically binds to a molecule of interest and immobilizes such molecule is referred herein as a “capture ligand”. Capture ligands are typically associated with or capable of associating with a support such as nitro-cellulose, glass, nylon membranes, beads, particles and the like. The specificity of hybridization is dependent on conditions such as the base pair composition of the nucleotides, and the temperature and salt concentration of the reaction. These conditions are readily discernable to one of ordinary skill in the art using routine experimentation.

[0066] “Homologous” refers to the sequence similarity or sequence identity between two polypeptides or between two nucleic acid molecules. When a position in both of the two compared sequences is occupied by the same base or amino acid monomer subunit, e.g., if a position in each of two DNA molecules is occupied by adenine, then the molecules are homologous at that position. The percent of homology between two sequences is a function of the number of matching or homologous positions shared by the two sequences divided by the number of positions compared×100. For example, if 6 of 10 of the positions in two sequences are matched or homologous then the two sequences are 60% homologous. By way of example, the DNA sequences ATTGCC and TATGGC share 50% homology. Generally, a comparison is made when two sequences are aligned to give maximum homology.

[0067] Nucleic acids are hybridizable to each other when at least one strand of a nucleic acid can anneal to the other nucleic acid under defined stringency conditions. Stringency of hybridization is determined by: (a) the temperature at which hybridization and/or washing is performed; and (b) the ionic strength and polarity of the hybridization and washing solutions. Hybridization requires that the two nucleic acids contain complementary sequences; depending on the stringency of hybridization, however, mismatches may be tolerated. Typically, hybridization of two sequences at high stingency (such as, for example, in a solution of 0.5×SSC, at 65° C.) requires that the sequences be essentially completely homologous. Conditions of intermediate stringency (such as, for example, 2×SSC at 65° C.) and low stringency (such as, for example 2×SSC at 55° C.), require correspondingly less overall complementarity between the hybridizing sequences. (1×SSC is 0.15 MNaCl, 0.015 MNa citrate).

[0068] The terms peptides, proteins, and polypeptides are used interchangeably herein.

[0069] As used herein, the term “surface protein” refers to all surface accessible proteins, e.g. inner and outer membrane proteins, proteins adhering to the cell wall, and secreted proteins.

[0070] A polypeptide has E. faecalis biological activity if it has one, two and preferably more of the following properties: (1) if when expressed in the course of an E. faecalis infection, it can promote, or mediate the attachment of E. faecalis to a cell; (2) it has an enzymatic activity, structural or regulatory function characteristic of an E. faecalis protein; (3) or the gene which encodes it can rescue a lethal mutation in an E. faecalis gene. A polypeptide has biological activity if it is an antagonist, agonist, or super-agonist of a polypeptide having one of the above-listed properties.

[0071] A biologically active fragment or analog is one having an in vivo or in vitro activity which is characteristic of the E. faecalis polypeptides of the invention contained in the Sequence Listing, or of other naturally occurring E. faecalis polypeptides, e.g., one or more of the biological activities described herein. Especially preferred are fragments which exist in vivo, e.g., fragments which arise from post transcriptional processing or which arise from translation of alternatively spliced RNA's. Fragments include those expressed in native or endogenous cells as well as those made in expression systems, e.g., in CHO cells. Because peptides such as E. faecalis polypeptides often exhibit a range of physiological properties and because such properties may be attributable to different portions of the molecule, a useful E. faecalis fragment or E. faecalis analog is one which exhibits a biological activity in any biological assay for E. faecalis activity. Most preferably the fragment or analog possesses 10%, preferably 40%, more preferably 60%, 70%, 80% or 90% or greater of the activity of E. faecalis, in any in vivo or in vitro assay.

[0072] Analogs can differ from naturally occurring E. faecalis polypeptides in amino acid sequence or in ways that do not involve sequence, or both. Non-sequence modifications include changes in acetylation, methylation, phosphorylation, carboxylation, or glycosylation. Preferred analogs include E. faecalis polypeptides (or biologically active fragments thereof) whose sequences differ from the wild-type sequence by one or more conservative amino acid substitutions or by one or more non-conservative amino acid substitutions, deletions, or insertions which do not substantially diminish the biological activity of the E. faecalis polypeptide. Conservative substitutions typically include the substitution of one amino acid for another with similar characteristics, e.g., substitutions within the following groups: valine, glycine; glycine, alanine; valine, isoleucine, leucine; aspartic acid, glutamic acid; asparagine, glutamine; serine, threonine; lysine, arginine; and phenylalanine, tyrosine. Other conservative substitutions can be made in view of the table below.

TABLE 1
CONSERVATIVE AMINO ACID REPLACEMENTS

| For Amino Acid | Code | Replace with any of |
|---|---|---|
| Alanine | A | D-Ala, Gly, beta-Ala, L-Cys, D-Cys |
| Arginine | R | D-Arg, Lys, D-Lys, homo-Arg, D-homo-Arg, |
| | | Met, Ile, D-Met, D-Ile, Orn, D-Orn |
| Asparagine | N | D-Asn, Asp, D-Asp, Glu, D-Glu, Gln, D-Gln |
| Aspartic Acid | D | D-Asp, D-Asn, Asn, Glu, D-Glu, Gln, D-Gln |
| Cysteine | C | D-Cys, S-Me-Cys, Met, D-Met, Thr, D-Thr |
| Glutamine | Q | D-Gln, Asn, D-Asn, Glu, D-Glu, Asp, D-Asp |
| Glutamic Acid | E | D-Glu, D-Asp, Asp, Asn, D-Asn, Gln, D-Gln |
| Glycine | G | Ala, D-Ala, Pro, D-Pro, β-Ala, Acp |
| Isoleucine | I | D-Ile, Val, D-Val, Leu, D-Leu, Met, D-Met |
| Leucine | L | D-Leu, Val, D-Val, Leu, D-Leu, Met, D-Met |
| Lysine | K | D-Lys, Arg, D-Arg, homo-Arg, D-homo-Arg, |
| | | Met, D-Met, Ile, D-Ile, Orn, D-Orn |
| Methionine | M | D-Met, S-Me-Cys, Ile, D-Ile, Leu, D-Leu, |
| | | Val, D-Val |
| Phenylalanine | F | D-Phe, Tyr, D-Thr, L-Dopa, His, D-His, Trp, |
| | | D-Trp, Trans-3, 4, or 5-phenylproline, cis-3, 4, |
| | | or 5-phenylproline |
| Proline | P | D-Pro, L-I-thioazolidine-4-carboxylic acid, |
| | | D-or L-1-oxazolidine-4-carboxylic acid |
| Serine | S | D-Ser, Thr, D-Thr, allo-Thr, Met, D-Met, |
| | | Met(O), D-Met(O), L-Cys, D-Cys |
| Threonine | T | D-Thr, Ser, D-Ser, allo-Thr, Met, D-Met, |
| | | Met(O), D-Met(O), Val, D-Val |
| Tyrosine | Y | D-Tyr, Phe, D-Phe, L-Dopa, His, D-His |
| Valine | V | D-Val, Leu, D-Leu, Ile, D-Ile, Met, D-Met |

[0073] Other analogs within the invention are those with modifications which increase peptide stability; such analogs may contain, for example, one or more non-peptide bonds (which replace the peptide bonds) in the peptide sequence. Also included are: analogs that include residues other than naturally occurring L-amino acids, e.g., D-amino acids or non-naturally occurring or synthetic amino acids, e.g., β or γ amino acids; and cyclic analogs.

[0074] As used herein, the term “fragment”, as applied to an E. faecalis analog, will ordinarily be at least about 20 residues, more typically at least about 40 residues, preferably at least about 60 residues in length. Fragments of E. faecalis polypeptides can be generated by methods known to those skilled in the art. The ability of a candidate fragment to exhibit a biological activity of E. faecalis polypeptide can be assessed by methods known to those skilled in the art as described herein. Also included are E. faecalis polypeptides containing residues that are not required for biological activity of the peptide or that result from alternative mRNA splicing or alternative protein processing events.

[0075] An “immunogenic component” as used herein is a moiety, such as an E. faecalis polypeptide, analog or fragment thereof, that is capable of eliciting a humoral and/or cellular immune response in a host animal.

[0076] An “antigenic component” as used herein is a moiety, such as an E. faecalis polypeptide, analog or fragment thereof, that is capable of binding to a specific antibody with sufficiently high affinity to form a detectable antigen-antibody complex.

[0077] The term “antibody” as used herein is intended to include fragments thereof which are specifically reactive with E. faecalis polypeptides.

[0078] As used herein, the term “cell-specific promoter” means a DNA sequence that serves as a promoter, i.e., regulates expression of a selected DNA sequence operably linked to the promoter, and which effects expression of the selected DNA sequence in specific cells of a tissue. The term also covers so-called “leaky” promoters, which regulate expression of a selected DNA primarily in one tissue, but cause expression in other tissues as well.

[0079] Misexpression, as used herein, refers to a non-wild type pattern of gene expression. It includes: expression at non-wild type levels, i.e., over or under expression; a pattern of expression that differs from wild type in terms of the time or stage at which the gene is expressed, e.g., increased or decreased expression (as compared with wild type) at a predetermined developmental period or stage; a pattern of expression that differs from wild type in terms of increased expression (as compared with wild type) in a predetermined cell type or tissue type; a pattern of expression that differs from wild type in terms of the splicing size, amino acid sequence, post-translational modification, or biological activity of the expressed polypeptide; a pattern of expression that differs from wild type in terms of the effect of an environmental stimulus or extracellular stimulus on expression of the gene, e.g., a pattern of increased or decreased expression (as compared with wild type) in the presence of an increase or decrease in the strength of the stimulus.

[0080] As used herein, “host cells” and other such terms denoting microorganisms or higher eukaryotic cell lines cultured as unicellular entities refers to cells which can become or have been used as recipients for a recombinant vector or other transfer DNA, and include the progeny of the original cell which has been transfected. It is understood by individuals skilled in the art that the progeny of a single parental cell may not necessarily be completely identical in genomic or total DNA compliment to the original parent, due to accident or deliberate mutation.

[0081] As used herein, the term “control sequence” refers to a nucleic acid having a base sequence which is recognized by the host organism to effect the expression of encoded sequences to which they are ligated. The nature of such control sequences differs depending upon the host organism; in prokaryotes, such control sequences generally include a promoter, ribosomal binding site, terminators, and in some cases operators; in eukaryotes, generally such control sequences include promoters, terminators and in some instances, enhancers. The term control sequence is intended to include at a minimum, all components whose presence is necessary for expression, and may also include additional components whose presence is advantageous, for example, leader sequences.

[0082] As used herein, the term “operably linked” refers to sequences joined or ligated to function in their intended manner. For example, a control sequence is operably linked to coding sequence by ligation in such a way that expression of the coding sequence is achieved under conditions compatible with the control sequence and host cell.

[0083] The “metabolism” of a substance, as used herein, means any aspect of the expression, function, action, or regulation of the substance. The metabolism of a substance includes modifications, e.g., covalent or non-covalent modifications of the substance. The metabolism of a substance includes modifications, e.g., covalent or non-covalent modification, the substance induces in other substances. The metabolism of a substance also includes changes in the distribution of the substance. The metabolism of a substance includes changes the substance induces in the distribution of other substances.

[0084] A “sample” as used herein refers to a biological sample, such as, for example, tissue or fluid isloated from an individual (including without limitation plasma, serum, cerebrospinal fluid, lymph, tears, saliva and tissue sections) or from in vitro cell culture constituents, as well as samples from the environment.

[0085] Technical and scientific terms used herein have the meanings commonly understood by one of ordinary skill in the art to which the present invention pertains, unless otherwise defined. Reference is made herein to various methodologies known to those of skill in the art. Publications and other materials setting forth such known methodologies to which reference is made are incorporated herein by reference in their entireties as though set forth in full. The practice of the invention will employ, unless otherwise indicated, conventional techniques of chemistry, molecular biology, microbiology, recombinant DNA, and immunology, which are within the skill of the art. Such techniques are explained fully in the literature. See e.g., Sambrook, Fritsch, and Maniatis, Molecular Cloning; Laboratory Manual 2nd ed. (1989); DNA Cloning, Volumes I and II (D. N Glover ed. 1985); Oligonucleotide Synthesis (M. J. Gait ed, 1984); Nucleic Acid Hybridization (B. D. Hames & S. J. Higgins eds. 1984); the series, Methods in Enzymoloqy (Academic Press, Inc.), particularly Vol. 154 and Vol. 155 (Wu and Grossman, eds.); PCR—A Practical Approach (McPherson, Quirke, and Taylor, eds., 1991); Immunology, 2d. Edition, 1989, Roitt et al., C.V. Mosby Company, and New York; Advanced Immunology, 2d Edition, 1991, Male et al., Grower Medical Publishing, New York.; DNA Cloning: A Practical Approach, Volumes I and II, 1985 (D. N. Glover ed.); Oligonucleotide Synthesis, 1984, (M. L. Gait ed); Transcription and Translation, 1984 (Hames and Higgins eds.); Animal Cell Culture, 1986 (R. I. Freshney ed.); Immobilized Cells and Enzymes, 1986 (IRL Press); Perbal, 1984, A Practical Guide to Molecular Cloning; and Gene Transfer Vectors for Mammalian Cells, 1987 (J. H. Miller and M. P. Calos eds., Cold Spring Harbor Laboratory);

[0086] Any suitable materials and/or methods known to those of skill can be utilized in carrying out the present invention: however preferred materials and/or methods are described. Materials, reagents and the like to which reference is made in the following description and examples are obtainable from commercial sources, unless otherwise noted.

E. faecalis Genomic Sequence

[0087] This invention provides nucleotide sequences of the genome of E. faecalis which thus comprises a DNA sequence library of E. faecalis genomic DNA. The detailed description that follows provides nucleotide sequences of E. faecalis, and also describes how the sequences were obtained and how ORFs and protein-coding sequences were identified. Also described are methods of using the disclosed E. faecalis sequences in methods including diagnostic and therapeutic applications. Furthermore, the library can be used as a database for identification and comparison of medically important sequences in this and other strains of E. faecalis.

[0088] To determine the genomic sequence of E. faecalis, DNA from strain 14336 of E. faecalis was isolated after Zymolyase digestion, sodium dodecyl sulfate lysis, potassium acetate precipitation, phenol:chloroform extractionand ethanol precipitation (Soll, D. R., T. Srikantha and S. R. Lockhart: Characterizing Developmentally Regulated Genes in. E. faecalis. In Microbial Genome Methods. K. W. Adolph, editor. CRC Press. New York. p 17-37.). DNA was sheared hydrodynamically using an HPLC (Oefner, et. al., 1996) to an insert size of 2000-3000 bp. After size fractionation by gel electrophoresis the fragments were blunt-ended, ligated to adapter oligonucleotides and cloned into the pGTC (Thomann) vector to construct a “shotgun” subclone library

[0089] DNA sequencing was achieved using established ABI sequencing methods on ABI377 automated DNA sequencers. The cloning and sequencing procedures are described in more detail in the Exemplification.

[0090] Individual sequence reads were assembled using PHRAP (P. Green, Abstracts of DOE Human Genome Program Contractor-Grantee Workshop V, January 1996, p. 157). The average contig length was about 3-4 kb.

[0091] All subsequent steps were based on sequencing by ABI377 automated DNA sequencing methods. The cloning and sequencing procedures are described in more detail in the Exemplification.

[0092] A variety of approaches are used to order the contigs so as to obtain a continuous sequence representing the entire E. faecalis genome. Synthetic oligonucleotides are designed that are complementary to sequences at the end of each contig. These oligonucleotides may be hybridized to libaries of E. faecalis genomic DNA in, for example, lambda phage vectors or plasmid vectors to identify clones that contain sequences corresponding to the junctional regions between individual contigs. Such clones are then used to isolate template DNA and the same oligonucleotides are used as primers in polymerase chain reaction (PCR) to amplify junctional fragments, the nucleotide sequence of which is then determined.

[0093] The E. faecalis sequences were analyzed for the presence of open reading frames (ORFs) comprising at least 180 nucleotides. As a result of the analysis of ORFs based on stop-to-stop codon reads, it should be understood that these ORFs may not correspond to the ORF of a naturally-occurring E. faecalis polypeptide. These ORFs may contain start codons which indicate the initiation of protein synthesis of a naturally-occurring E. faecalis polypeptide. Such start codons within the ORFs provided herein can be identified by those of ordinary skill in the relevant art, and the resulting ORF and the encoded E. faecalis polypeptide is within the scope of this invention. For example, within the ORFs a codon such as AUG or GUG (encoding methionine or valine) which is part of the initiation signal for protein synthesis can be identified and the portion of an ORF to corresponding to a naturally-occurring E. faecalis polypeptide can be recognized. The predicted coding regions were defined by evaluating the coding potential of such sequences with the program GENEMARK™ (Borodovsky and McIninch, 1993, Comp. 17:123).

[0094] Each predicted ORF amino acid sequence was compared with all sequences found in current GENBANK, SWISS-PROT, and PIR databases using the BLAST algorithm. BLAST identifies local alignments occurring by chance between the ORF sequence and the sequence in the databank (Altschal et al., 1990, L Mol. Biol. 215:403-410). Homologous ORFs (probabilities less than 10⁻⁵ by chance) and ORF's that are probably non-homologous (probabilities greater than 10⁻⁵ by chance) but have good codon usage were identified. Both homologous, sequences and non-homologous sequences with good codon usage, are likely to encode proteins and are encompassed by the invention.

E. faecalis Nucleic Acids

[0095] The present invention provides a library of E. faecalis-derived nucleic acid sequences. The libraries provide probes, primers, and markers which are used as markers in epidemiological studies. The present invention also provides a library of E. faecalis-derived nucleic acid sequences which comprise or encode targets for therapeutic drugs.

[0096] The nucleic acids of this invention may be obtained directly from the DNA of the above referenced E. faecalis strain by using the polymerase chain reaction (PCR). See “PCR, A Practical Approach” (McPherson, Quirke, and Taylor, eds., IRL Press, Oxford, UK, 1991) for details about the PCR. High fidelity PCR can be used to ensure a faithful DNA copy prior to expression. In addition, the authenticity of amplified products can be verified by conventional sequencing methods. Clones carrying the desired sequences described in this invention may also be obtained by screening the libraries by means of the PCR or by hybridization of synthetic oligonucleotide probes to filter lifts of the library colonies or plaques as known in the art (see, e.g., Sambrook et al., Molecular Cloning, A Laboratory Manual 2nd edition, 1989, Cold Spring Harbor Press, NY).

[0097] It is also possible to obtain nucleic acids encoding E. faecalis polypeptides from a cDNA library in accordance with protocols herein described. A cDNA encoding an E. faecalis polypeptide can be obtained by isolating total mRNA from an appropriate strain. Double stranded cDNAs can then be prepared from the total mRNA. Subsequently, the cDNAs can be inserted into a suitable plasmid or viral (e.g., bacteriophage) vector using any one of a number of known techniques. Genes encoding E. faecalis polypeptides can also be cloned using established polymerase chain reaction techniques in accordance with the nucleotide sequence information provided by the invention. The nucleic acids of the invention can be DNA or RNA. Preferred nucleic acids of the invention are contained in the Sequence Listing.

[0098] The nucleic acids of the invention can also be chemically synthesized using standard techniques. Various methods of chemically synthesizing polydeoxynucleotides are known, including solid-phase synthesis which, like peptide synthesis, has been fully automated in commercially available DNA synthesizers (See e.g., Itakura et al. U.S. Pat. No. 4,598,049; Caruthers et al. U.S. Pat. No. 4,458,066; and Itakura U.S. Pat. Nos. 4,401,796 and 4,373,071, incorporated by reference herein).

[0099] In another example, DNA can be chemically synthesized using, e.g., the phosphoramidite solid support method of Matteucci et al., 1981, J. Am. Chem. Soc. 103:3185, the method of Yoo et al., 1989, J. Biol. Chem. 764:17078, or other well known methods. This can be done by sequentially linking a series of oligonucleotide cassettes comprising pairs of synthetic oligonucleotides, as described below.

[0100] Nucleic acids isolated or synthesized in accordance with features of the present invention are useful, by way of example, without limitation, as probes, primers, capture ligands, antisense genes and for developing expression systems for the synthesis of proteins and peptides corresponding to such sequences. As probes, primers, capture ligands and antisense agents, the nucleic acid normally consists of all or part (approximately twenty or more nucleotides for specificity as well as the ability to form stable hybridization products) of the nucleic acids of the invention contained in the Sequence Listing. These uses are described in further detail below.

[0101] Probes

[0102] A nucleic acid isolated or synthesized in accordance with the sequence of the invention contained in the Sequence Listing can be used as a probe to specifically detect E. faecalis. With the sequence information set forth in the present application, sequences of twenty or more nucleotides are identified which provide the desired inclusivity and exclusivity with respect to E. faecalis, and extraneous nucleic acids likely to be encountered during hybridization conditions. More preferably, the sequence will comprise at least twenty to thirty nucleotides to convey stability to the hybridization product formed between the probe and the intended target molecules.

[0103] Sequences larger than 1000 nucleotides in length are difficult to synthesize but can be generated by recombinant DNA techniques. Individuals skilled in the art will readily recognize that the nucleic acids, for use as probes, can be provided with a label to facilitate detection of a hybridization product.

[0104] Nucleic acid isolated and synthesized in accordance with the sequence of the invention contained in the Sequence Listing can also be useful as probes to detect homologous regions (especially homologous genes) of other Enterococcus species using appropriate stringency hybridization conditions as described herein.

[0105] Capture Ligand

[0106] For use as a capture ligand, the nucleic acid selected in the manner described above with respect to probes, can be readily associated with a support. The manner in which nucleic acid is associated with supports is well known. Nucleic acid having twenty or more nucleotides in a sequence of the invention contained in the Sequence Listing have utility to separate E. faecalis nucleic acid from one strain from the nucleic acid of other another strain as well as from other organisms. Nucleic acid having twenty or more nucleotides in a sequence of the invention contained in the Sequence Listing can also have utility to separate other Enterococcus species from each other and from other organisms. Preferably, the sequence will comprise at least twenty nucleotides to convey stability to the hybridization product formed between the probe and the intended target molecules. Sequences larger than 1000 nucleotides in length are difficult to synthesize but can be generated by recombinant DNA techniques.

[0107] Primers

[0108] Nucleic acid isolated or synthesized in accordance with the sequences described herein have utility as primers for the amplification of E. faecalis nucleic acid. These nucleic acids may also have utility as primers for the amplification of nucleic acids in other Enterococcus species. With respect to polymerase chain reaction (PCR) techniques, nucleic acid sequences of ≧10-15 nucleotides of the invention contained in the Sequence Listing have utility in conjunction with suitable enzymes and reagents to create copies of E. faecalis nucleic acid. More preferably, the sequence will comprise twenty or more nucleotides to convey stability to the hybridization product formed between the primer and the intended target molecules. Binding conditions of primers greater than 100 nucleotides are more difficult to control to obtain specificity. High fidelity PCR can be used to ensure a faithful DNA copy prior to expression. In addition, amplified products can be checked by conventional sequencing methods.

[0109] The copies can be used in diagnostic assays to detect specific sequences, including genes from E. faecalis and/or other Enterococcus species. The copies can also be incorporated into cloning and expression vectors to generate polypeptides corresponding to the nucleic acid synthesized by PCR, as is described in greater detail herein. The nucleic acids of the present invention find use as templates for the recombinant production of E. faecalis-derived peptides or polypeptides

[0110] Antisense

[0111] Nucleic acid or nucleic acid-hybridizing derivatives isolated or synthesized in accordance with the sequences described herein have utility as antisense agents to prevent the expression of E. faecalis genes. These sequences also have utility as antisense agents to prevent expression of genes of other Enterococcus species.

[0112] In one embodiment, nucleic acid or derivatives corresponding to E. faecalis nucleic acids is loaded into a suitable carrier such as a liposome or bacteriophage for introduction into bacterial cells. For example, a nucleic acid having twenty or more nucleotides is capable of binding to bacteria nucleic acid or bacteria messenger RNA. Preferably, the antisense nucleic acid is comprised of 20 or more nucleotides to provide necessary stability of a hybridization product of non-naturally occurring nucleic acid and bacterial nucleic acid and/or bacterial messenger RNA. Nucleic acid having a sequence greater than 1000 nucleotides in length is difficult to synthesize but can be generated by recombinant DNA techniques. Methods for loading antisense nucleic acid in liposomes is known in the art as exemplified by U.S. Pat. No. 4,241,046 issued Dec. 23, 1980 to Papahadjopoulos et al.

[0113] The present invention encompasses isolated polypeptides and nucleic acids derived from E. faecalis that are useful as reagents for diagnosis of bacterial infection, components of effective anti-bacterial vaccines, and/or as targets for anti-bacterial drugs, including anti-E. faecalis drugs.

[0114] The present invention also provides a genome-wide comparison by FASTA of the predicted amino acid sequences of several E. faecalis open reading frames (ORFs) with the predicted amino acid sequence of several E. faecium ORFs (Table 3). Together, E. faecalis and E. faecium account for >95% of all VRE infections. Genomic comparison of E. faecalis ORFs with E. faecium ORFs at the amino acid sequence level provides valuable information on shared targets, which can be exploited in designing diagnostics and therapeutics for VRE. Identifying common essential genes through sequencing and analysis of both genomes provides a much quicker route to these targets, and speeds the progress of (1) probe design for identification of VRE infection, (2) identification of vaccine compositions for protection from and treatment of these infections, and (3) development of screening assays for inhibitors of gene products common to both 10 organisms. In all cases, the homology relationships described in Table 3 are highly significant. The percentage identity between the ORFs of the two organisms shown in Table 3 ranges from about 18% up to 100%. Approximately 800 ORFs show complete amino acid sequence identity between the two organisms. Many ORFs do not share significant amino acid sequence identity between these two species, and they are not shown in Table 3. Therefore, Table 3 represents a useful listing of some gene targets common in the two species.

Expression of E. faecalis Nucleic Acids

[0115] Table 2, which is appended herewith and which forms part of the present specification, provides a list of open reading frames (ORFs) in both strands and a putative identification of the particular function of a polypeptide which is encoded by each ORF, based on the homology match (determined by the BLAST algorithm) of the predicted polypeptide with known proteins encoded by ORFs in other organisms. An ORF is a region of nucleic acid which encodes a polypeptide. This region may represent a portion of a coding sequence or a total sequence and was determined from stop to stop codons. The first column contains a designation for the contig from which each ORF was identified (numbered arbitrarily). Each contig represents a continuous stretch of the genomic sequence of the organism. The second column lists the ORF designation. The third and fourth columns list the SEQ ID numbers for the nucleic acid and amino acid sequences corresponding to each ORF, respectively. The fifth and sixth columns list the length of the nucleic acid ORF and the length of the amino acid ORF, respectively. The nucleotide sequence corresponding to each ORF begins at the first nucleotide immediately following a stop codon and ends at the nucleotide immediately preceding the next downstream stop codon in the same reading frame. It will be recognized by one skilled in the art that the natural translation initiation sites will correspond to ATG, GTG, or TTG codons located within the ORFs. The natural initiation sites depend not only on the sequence of a start codon but also on the context of the DNA sequence adjacent to the start codon. Usually, a recognizable ribosome binding site is found within 20 nucleotides upstream from the initiation codon. In some cases where genes are translationally coupled and coordinately expressed together in “operons”, ribosome binding sites are not present, but the initiation codon of a downstream gene may occur very close to, or overlap, the stop codon of the an upstream gene in the same operon. The correct start codons can be generally identified without undue experimentation because only a few codons need be tested. It is recognized that the translational machinery in bacteria initiates all polypeptide chains with the amino acid methionine, regardless of the sequence of the start codon. In some cases, polypeptides are post-translationally modified, resulting in an N-terminal amino acid other than methionine in vivo. The seventh and eighth columns in Table 2 provide metrics for assessing the likelihood of the homology match (determined by the BLASTP2 algorithm), as is known in the art, to the genes indicated in the ninth column. Specifically, the seventh column represents the “score” for the match (a higher score is a better match), and the eighth column represents the “P-value” for the match (the probability that such a match could have occurred by chance; the lower the value, the more likely the match is valid). If a BLASP2 score of less than 46 was obtained, no value is reported in the table. The ninth column provides, where available, the accession number (AC) or the Swissprot accession number (SP), the organism (OR), the gene name (GN), the product name (PN), and the description (DE) or notes (NT) for each ORF. This information allows one of ordinary skill in the art to determine a potential use for each identified coding sequence and, as a result, allows to use the polypeptides of the present invention for commercial and industrial purposes consistent with the type of putative identification of the polypeptide.

[0116] Using the information provided in SEQ ID NO: 1-SEQ ID NO: 3405 and in Table 2 together with routine cloning and sequencing methods, one of ordinary skill in the art will be able to clone and sequence all the nucleic acid fragments of interest including open reading frames (ORFs) encoding a large variety proteins of E. faecalis.

[0117] Nucleic acid isolated or synthesized in accordance with the sequences described herein have utility to generate polypeptides. The nucleic acid of the invention exemplified in SEQ ID NO: 1-SEQ ID NO: 3405 and in Table 2 or fragments of said nucleic acid encoding active portions of E. faecalis polypeptides can be cloned into suitable vectors or used to isolate nucleic acid. The isolated nucleic acid is combined with suitable DNA linkers and cloned into a suitable vector.

[0118] The function of a specific gene or operon can be ascertained by expression in a bacterial strain under conditions where the activity of the gene product(s) specified by the gene or operon in question can be specifically measured. Alternatively, a gene product may be produced in large quantities in an expressing strain for use as an antigen, an industrial reagent, for structural studies, etc. This expression can be accomplished in a mutant strain which lacks the activity of the gene to be tested, or in a strain that does not produce the same gene product(s). This includes, but is not limited to, Eucaryotic species such as the yeast Saccharomyces cerevisiae, Methanobacterium strains or other Archaea, and Eubacteria such as E. coli, B. Subtilis, S. Aureus, S. Pneumonia or Pseudomonas putida. In some cases the expression host will utilize the natural E. faecalis promoter whereas in others, it will be necessary to drive the gene with a promoter sequence derived from the expressing organism (e.g., an E. coli beta-galactosidase promoter for expression in E. coli).

[0119] To express a gene product using the natural E. faecalis promoter, a procedure such as the following can be used. A restriction fragment containing the gene of interest, together with its associated natural promoter element and regulatory sequences (identified using the DNA sequence data) is cloned into an appropriate recombinant plasmid containing an origin of replication that functions in the host organism and an appropriate selectable marker. This can be accomplished by a number of procedures known to those skilled in the art. It is most preferably done by cutting the plasmid and the fragment to be cloned with the same restriction enzyme to produce compatible ends that can be ligated to join the two pieces together. The recombinant plasmid is introduced into the host organism by, for example, electroporation and cells containing the recombinant plasmid are identified by selection for the marker on the plasmid. Expression of the desired gene product is detected using an assay specific for that gene product.

[0120] In the case of a gene that requires a different promoter, the body of the gene (coding sequence) is specifically excised and cloned into an appropriate expression plasmid. This subcloning can be done by several methods, but is most easily accomplished by PCR amplification of a specific fragment and ligation into an expression plasmid after treating the PCR product with a restriction enzyme or exonuclease to create suitable ends for cloning.

[0121] A suitable host cell for expression of a gene can be any procaryotic or eucaryotic cell. Suitable methods for transforming host cells can be found in Sambrook et al. (Molecular Cloning: A Laboratory Manual, 2nd Edition, Cold Spring Harbor Laboratory press (1989)), and other laboratory textbooks.

[0122] For example, a host cell transfected with a nucleic acid vector directing expression of a nucleotide sequence encoding an E. faecalis polypeptide can be cultured under appropriate conditions to allow expression of the polypeptide to occur. Suitable media for cell culture are well known in the art. Polypeptides of the invention can be isolated from cell culture medium, host cells, or both using techniques known in the art for purifying proteins including ion-exchange chromatography, gel filtration chromatography, ultrafiltration, electrophoresis, and immunoaffinity purification with antibodies specific for such polypeptides. Additionally, in many situations, polypeptides can be produced by chemical cleavage of a native protein (e.g., tryptic digestion) and the cleavage products can then be purified by standard techniques.

[0123] In the case of membrane bound proteins, these can be isolated from a host cell by contacting a membrane-associated protein fraction with a detergent forming a solubilized complex, where the membrane-associated protein is no longer entirely embedded in the membrane fraction and is solubilized at least to an extent which allows it to be chromatographically isolated from the membrane fraction. Chromatographic techniques which can be used in the final purification step are known in the art and include hydrophobic interaction, lectin affinity, ion exchange, dye affinity and immunoaffinity.

[0124] One strategy to maximize recombinant E. faecalis peptide expression in E. coli is to express the protein in a host bacteria with an impaired capacity to proteolytically cleave the recombinant protein (Gottesman, S., Gene Expression Technology: Methods in Enzymology 185, Academic Press, San Diego, Calif. (1990) 119-128). Another strategy would be to alter the nucleic acid encoding an E. faecalis peptide to be inserted into an expression vector so that the individual codons for each amino acid would be those preferentially utilized in highly expressed E. coli proteins (Wada et al., (1992) Nuc. Acids Res. 20:2111-2118). Such alteration of nucleic acids of the invention can be carried out by standard DNA synthesis techniques.

[0125] The nucleic acids of the invention can also be chemically synthesized using standard techniques. Various methods of chemically synthesizing polydeoxynucleotides are known, including solid-phase synthesis which, like peptide synthesis, has been fully automated in commercially available DNA synthesizers (See, e.g., Itakura et al. U.S. Pat. No. 4,598,049; Caruthers et al. U.S. Pat. No. 4,458,066; and Itakura U.S. Pat. Nos. 4,401,796 and 4,373,071, incorporated by reference herein).

[0126] The present invention provides a library of E. faecalis-derived nucleic acid sequences. The libraries provide probes, primers, and markers which can be used as markers in epidemiological studies. The present invention also provides a library of E. faecalis-derived nucleic acid sequences which comprise or encode targets for therapeutic drugs.

[0127] Nucleic acids comprising any of the sequences disclosed herein or sub-sequences thereof can be prepared by standard methods using the nucleic acid sequence information provided in SEQ ID NO: 1-SEQ ID NO: 3405. For example, DNA can be chemically synthesized using, e.g., the phosphoramidite solid support method of Matteucci et al., 1981, J. Am. Chem. Soc. 103:3185, the method of Yoo et al., 1989, J. Biol. Chem. 764:17078, or other well known methods. This can be done by sequentially linking a series of oligonucleotide cassettes comprising pairs of synthetic oligonucleotides, as described below.

[0128] Of course, due to the degeneracy of the genetic code, many different nucleotide sequences can encode polypeptides having the amino acid sequences defined by SEQ ID NO: 3406-SEQ ID NO: 6810 or sub-sequences thereof. The codons can be selected for optimal expression in prokaryotic or eukaryotic systems. Such degenerate variants are also encompassed by this invention.

[0129] Insertion of nucleic acids (typically DNAs) encoding the polypeptides of the invention into a vector is easily accomplished when the termini of both the DNAs and the vector comprise compatible restriction sites. If this cannot be done, it may be necessary to modify the termini of the DNAs and/or vector by digesting back single-stranded DNA overhangs generated by restriction endonuclease cleavage to produce blunt ends, or to achieve the same result by filling in the single-stranded termini with an appropriate DNA polymerase.

[0130] Alternatively, any site desired may be produced, e.g., by ligating nucleotide sequences (linkers) onto the termini. Such linkers may comprise specific oligonucleotide sequences that define desired restriction sites. Restriction sites can also be generated by the use of the polymerase chain reaction (PCR). See, e.g., Saiki et al., 1988, Science 239:48. The cleaved vector and the DNA fragments may also be modified if required by homopolymeric tailing.

[0131] The nucleic acids of the invention may be isolated directly from cells. Alternatively, the polymerase chain reaction (PCR) method can be used to produce the nucleic acids of the invention, using either chemically synthesized strands or genomic material as templates. Primers used for PCR can be synthesized using the sequence information provided herein and can further be designed to introduce appropriate new restriction sites, if desirable, to facilitate incorporation into a given vector for recombinant expression.

[0132] The nucleic acids of the present invention may be flanked by natural E. faecalis regulatory sequences, or may be associated with heterologous sequences, including promoters, enhancers, response elements, signal sequences, polyadenylation sequences, introns, 5′- and 3′-noncoding regions, and the like. The nucleic acids may also be modified by many means known in the art. Non-limiting examples of such modifications include methylation, “caps”, substitution of one or more of the naturally occurring nucleotides with an analog, internucleotide modifications such as, for example, those with uncharged linkages (e.g., methyl phosphonates, phosphotriesters, phosphoroamidates, carbamates, etc.) and with charged linkages (e.g., phosphorothioates, phosphorodithioates, etc.). Nucleic acids may contain one or more additional covalently linked moieties, such as, for example, proteins (e.g., nucleases, toxins, antibodies, signal peptides, poly-L-lysine, etc.), intercalators (e.g., acridine, psoralen, etc.), chelators (e.g., metals, radioactive metals, iron, oxidative metals, etc.), and alkylators. PNAs are also included. The nucleic acid may be derivatized by formation of a methyl or ethyl phosphotriester or an alkyl phosphoramidate linkage. Furthermore, the nucleic acid sequences of the present invention may also be modified with a label capable of providing a detectable signal, either directly or indirectly. Exemplary labels include radioisotopes, fluorescent molecules, biotin, and the like.

[0133] The invention also provides nucleic acid vectors comprising the disclosed E. faecalis-derived sequences or derivatives or fragments thereof. A large number of vectors, including plasmid and bacterial vectors, have been described for replication and/or expression in a variety of eukaryotic and prokaryotic hosts, and may be used for cloning or protein expression.

[0134] The encoded E. faecalis polypeptides may be expressed by using many known vectors, such as pUC plasmids, pET plasmids (Novagen, Inc., Madison, Wis.), or pRSET or pREP (Invitrogen, San Diego, Calif.), and many appropriate host cells, using methods disclosed or cited herein or otherwise known to those skilled in the relevant art. The particular choice of vector/host is not critical to the practice of the invention.

[0135] Recombinant cloning vectors will often include one or more replication systems for cloning or expression, one or more markers for selection in the host, e.g. antibiotic resistance, and one or more expression cassettes. The inserted E. faecalis coding sequences may be synthesized by standard methods, isolated from natural sources, or prepared as hybrids, etc. Ligation of the E. faecalis coding sequences to transcriptional regulatory elements and/or to other amino acid coding sequences may be achieved by known methods. Suitable host cells may be transformed/transfected/infected as appropriate by any suitable method including electroporation, CaCl₂ mediated DNA uptake, bacterial infection, microinjection, microprojectile, or other established methods.

[0136] Appropriate host cells include bacteria, archebacteria, fungi, especially yeast, and plant and animal cells, especially mammalian cells. Of particular interest are E. faecalis, E. coli, B. Subtilis, Saccharomyces cerevisiae, Saccharomyces carlsbergensis, Schizosaccharomyces pombi, SF9 cells, C129 cells, 293 cells, Neurospora, and CHO cells, COS cells, HeLa cells, and immortalized mammalian myeloid and lymphoid cell lines. Preferred replication systems include M13, ColE1, SV40, baculovirus, lambda, adenovirus, and the like. A large number of transcription initiation and termination regulatory regions have been isolated and shown to be effective in the transcription and translation of heterologous proteins in the various hosts. Examples of these regions, methods of isolation, manner of manipulation, etc. are known in the art. Under appropriate expression conditions, host cells can be used as a source of recombinantly produced E. faecalis-derived peptides and polypeptides.

[0137] Advantageously, vectors may also include a transcription regulatory element (i.e., a promoter) operably linked to the E. faecalis portion. The promoter may optionally contain operator portions and/or ribosome binding sites. Non-limiting examples of bacterial promoters compatible with E. coli include: b-lactamase (penicillinase) promoter; lactose promoter; tryptophan (trp) promoter; araBAD (arabinose) operon promoter; lambda-derived P₁ promoter and N gene ribosome binding site; and the hybrid tac promoter derived from sequences of the trp and lac UV5 promoters. Non-limiting examples of yeast promoters include 3-phosphoglycerate kinase promoter, glyceraldehyde-3-phosphate dehydrogenase (GAPDH) promoter, galactokinase (GAL1) promoter, galactoepimerase promoter, and alcohol dehydrogenase (ADH) promoter. Suitable promoters for mammalian cells include without limitation viral promoters such as that from Simian Virus 40 (SV40), Rous sarcoma virus (RSV), adenovirus (ADV), and bovine papilloma virus (BPV). Mammalian cells may also require terminator sequences, polyA addition sequences and enhancer sequences to increase expression. Sequences which cause amplification of the gene may also be desirable. Furthermore, sequences that facilitate secretion of the recombinant product from cells, including, but not limited to, bacteria, yeast, and animal cells, such as secretory signal sequences and/or prohormone pro region sequences, may also be included. These sequences are well described in the art.

[0138] Nucleic acids encoding wild-type or variant E. faecalis-derived polypeptides may also be introduced into cells by recombination events. For example, such a sequence can be introduced into a cell, and thereby effect homologous recombination at the site of an endogenous gene or a sequence with substantial identity to the gene. Other recombination-based methods such as nonhomologous recombinations or deletion of endogenous genes by homologous recombination may also be used.

[0139] The nucleic acids of the present invention find use as templates for the recombinant production of E. faecalis-derived peptides or polypeptides.

Identification and Use of E. faecalis Nucleic Acid Sequences

[0140] The disclosed E. faecalis polypeptide and nucleic acid sequences, or other sequences that are contained within ORFs, including complete protein-coding sequences, of which any of the disclosed E. faecalis-specific sequences forms a part, are useful as target components for diagnosis and/or treatment of E. faecalis-caused infection

[0141] It will be understood that the sequence of an entire protein-coding sequence of which each disclosed nucleic acid sequence forms a part can be isolated and identified based on each disclosed sequence. This can be achieved, for example, by using an isolated nucleic acid encoding the disclosed sequence, or fragments thereof, to prime a sequencing reaction with genomic E. faecalis DNA as template; this is followed by sequencing the amplified product. The isolated nucleic acid encoding the disclosed sequence, or fragments thereof, can also be hybridized to E. faecalis genomic libraries to identify clones containing additional complete segments of the protein-coding sequence of which the shorter sequence forms a part. Then, the entire protein-coding sequence, or fragments thereof, or nucleic acids encoding all or part of the sequence, or sequence-conservative or function-conservative variants thereof, may be employed in practicing the present invention.

[0142] Preferred sequences are those that are useful in diagnostic and/or therapeutic applications. Diagnostic applications include without limitation nucleic-acid-based and antibody-based methods for detecting bacterial infection. Therapeutic applications include without limitation vaccines, passive immunotherapy, and drug treatments directed against gene products that are both unique to bacteria and essential for growth and/or replication of bacteria.

Identification of Nucleic Acids Encoding Vaccine Components and Targets for Agents Effective Against E. faecalis

[0143] The disclosed E. faecalis genome sequence includes segments that direct the synthesis of ribonucleic acids and polypeptides, as well as origins of replication, promoters, other types of regulatory sequences, and intergenic nucleic acids. The invention encompasses nucleic acids encoding immunogenic components of vaccines and targets for agents effective against E. faecalis. Identification of said immunogenic components involved in the determination of the function of the disclosed sequences, which can be achieved using a variety of approaches. Non-limiting examples of these approaches are described briefly below.

Homology to Known Sequences:

[0144] Computer-assisted comparison of the disclosed E. faecalis sequences with previously reported sequences present in publicly available databases is useful for identifying functional E. faecalis nucleic acid and polypeptide sequences. It will be understood that protein-coding sequences, for example, may be compared as a whole, and that a high degree of sequence homology between two proteins (such as, for example, >80-90%) at the amino acid level indicates that the two proteins also possess some degree of functional homology, such as, for example, among enzymes involved in metabolism, DNA synthesis, or cell wall synthesis, and proteins involved in transport, cell division, etc. In addition, many structural features of particular protein classes have been identified and correlate with specific consensus sequences, such as, for example, binding domains for nucleotides, DNA, metal ions, and other small molecules; sites for covalent modifications such as phosphorylation, acylation, and the like; sites of protein:protein interactions, etc. These consensus sequences may be quite short and thus may represent only a fraction of the entire protein-coding sequence. Identification of such a feature in an E. faecalis sequence is therefore useful in determining the function of the encoded protein and identifying useful targets of antibacterial drugs.

[0145] Of particular relevance to the present invention are structural features that are common to secretory, transmembrane, and surface proteins, including secretion signal peptides and hydrophobic transmembrane domains. E. faecalis proteins identified as containing putative signal sequences and/or transmembrane domains are useful as immunogenic components of vaccines.

[0146] Targets for therapeutic drugs according to the invention include, but are not limited to, polypeptides of the invention, whether unique to E. faecalis or not, that are essential for growth and/or viability of E. faecalis under at least one growth condition. Polypeptides essential for growth and/or viability can be determined by examining the effect of deleting and/or disrupting the genes, i.e., by so-called gene “knockout”. Alternatively, genetic footprinting can be used (Smith et al., 1995, Proc. Natl. Acad. Sci. USA 92:5479-6433; Published International Application WO 94/26933; U.S. Pat. No. 5,612,180). Still other methods for assessing essentiality includes the ability to isolate conditional lethal mutations in the specific gene (e.g., temperature sensitive mutations). Other useful targets for therapeutic drugs, which include polypeptides that are not essential for growth or viability per se but lead to loss of viability of the cell, can be used to target therapeutic agents to cells.

Strain-Specific Sequences:

[0147] Because of the evolutionary relationship between different E. faecalis strains, it is believed that the presently disclosed E. faecalis sequences are useful for identifying, and/or discriminating between, previously known and new E. faecalis strains. It is believed that other E. faecalis strains will exhibit at least 70% sequence homology with the presently disclosed sequence. Systematic and routine analyses of DNA sequences derived from samples containing E. faecalis strains, and comparison with the present sequence allows for the identification of sequences that can be used to discriminate between strains, as well as those that are common to all E. faecalis strains. In one embodiment, the invention provides nucleic acids, including probes, and peptide and polypeptide sequences that discriminate between different strains of E. faecalis. Strain-specific components can also be identified functionally by their ability to elicit or react with antibodies that selectively recognize one or more E. faecalis strains.

[0148] In another embodiment, the invention provides nucleic acids, including probes, and peptide and polypeptide sequences that are common to all E. faecalis strains but are not found in other bacterial species.

E. faecalis Polypeptides

[0149] This invention encompasses isolated E. faecalis polypeptides encoded by the disclosed E. faecalis genomic sequences, including the polypeptides of the invention contained in the Sequence Listing. Polypeptides of the invention are preferably at least 5 amino acid residues in length. Using the DNA sequence information provided herein, the amino acid sequences of the polypeptides encompassed by the invention can be deduced using methods well-known in the art. It will be understood that the sequence of an entire nucleic acid encoding an E. faecalis polypeptide can be isolated and identified based on an ORF that encodes only a fragment of the cognate protein-coding region. This can be achieved, for example, by using the isolated nucleic acid encoding the ORF, or fragments thereof, to prime a polymerase chain reaction with genomic E. faecalis DNA as template; this is followed by sequencing the amplified product.

[0150] The polypeptides of the present invention, including function-conservative variants of the disclosed ORFs, may be isolated from wild-type or mutant E. faecalis cells, or from heterologous organisms or cells (including, but not limited to, bacteria, fungi, insect, plant, and mammalian cells) including E. faecalis into which a E. faecalis-derived protein-coding sequence has been introduced and expressed. Furthermore, the polypeptides may be part of recombinant fusion proteins.

[0151] E. faecalis polypeptides of the invention can be chemically synthesized using commercially automated procedures such as those referenced herein, including, without limitation, exclusive solid phase synthesis, partial solid phase methods, fragment condensation or classical solution synthesis. The polypeptides are preferably prepared by solid phase peptide synthesis as described by Merrifield, 1963, J. Am. Chem. Soc. 85:2149. The synthesis is carried out with amino acids that are protected at the alpha-amino terminus. Trifunctional amino acids with labile side-chains are also protected with suitable groups to prevent undesired chemical reactions from occurring during the assembly of the polypeptides. The alpha-amino protecting group is selectively removed to allow subsequent reaction to take place at the amino-terminus. The conditions for the removal of the alpha-amino protecting group do not remove the side-chain protecting groups.

[0152] Methods for polypeptide purification are well-known in the art, including, without limitation, preparative disc-gel electrophoresis, isoelectric focusing, HPLC, reversed-phase HPLC, gel filtration, ion exchange and partition chromatography, and countercurrent distribution. For some purposes, it is preferable to produce the polypeptide in a recombinant system in which the E. faecalis protein contains an additional sequence tag that facilitates purification, such as, but not limited to, a polyhistidine sequence. The polypeptide can then be purified from a crude lysate of the host cell by chromatography on an appropriate solid-phase matrix. Alternatively, antibodies produced against a E. faecalis protein or against peptides derived therefrom can be used as purification reagents. Other purification methods are possible.

[0153] The present invention also encompasses derivatives and homologues of E. faecalis-encoded polypeptides. For some purposes, nucleic acid sequences encoding the peptides may be altered by substitutions, additions, or deletions that provide for functionally equivalent molecules, i.e., function-conservative variants. For example, one or more amino acid residues within the sequence can be substituted by another amino acid of similar properties, such as, for example, positively charged amino acids (arginine, lysine, and histidine); negatively charged amino acids (aspartate and glutamate); polar neutral amino acids; and non-polar amino acids.

[0154] The isolated polypeptides may be modified by, for example, phosphorylation, sulfation, acylation, or other protein modifications. They may also be modified with a label capable of providing a detectable signal, either directly or indirectly, including, but not limited to, radioisotopes and fluorescent compounds.

[0155] To identify E. faecalis-derived polypeptides for use in the present invention, essentially the complete genomic sequence of a virulent, methicillin-resistant isolate of Enterococcus faecalise isolate was analyzed. While, in very rare instances, a nucleic acid sequencing error may be revealed, resolving a rare sequencing error is well within the art, and such an occurrence will not prevent one skilled in the art from practicing the invention.

[0156] Also encompassed are any E. faecalis polypeptide sequences that are contained within the open reading frames (ORFs), including complete protein-coding sequences, of which any of SEQ ID NO: 1-SEQ ID NO: 3405 forms a part. Table 2, which is appended herewith and which forms part of the present specification, provides a putative identification of the particular function of a polypeptide which is encoded by each ORF, based on the homology match (determined by the BLAST algorithm) of the predicted polypeptide with known proteins encoded by ORFs in other organisms. As a result, one skilled in the art can use the polypeptides of the present invention for commercial and industrial purposes consistent with the type of putative identification of the polypeptide.

[0157] The present invention provides a library of E. faecalis-derived polypeptide sequences, and a corresponding library of nucleic acid sequences encoding the polypeptides, wherein the polypeptides themselves, or polypeptides contained within ORFs of which they form a part, comprise sequences that are contemplated for use as components of vaccines. Non-limiting examples of such sequences are listed by SEQ ID NO in Table 2, which is appended herewith and which forms part of the present specification.

[0158] The present invention also provides a library of E. faecalis-derived polypeptide sequences, and a corresponding library of nucleic acid sequences encoding the polypeptides, wherein the polypeptides themselves, or polypeptides contained within ORFs of which they form a part, comprise sequences lacking homology to any known prokaryotic or eukaryotic sequences. Such libraries provide probes, primers, and markers which can be used to diagnose E. faecalis infection, including use as markers in epidemiological studies. Non-limiting examples of such sequences are listed by SEQ ID NO in Table 2, which is appended

[0159] The present invention also provides a library of E. faecalis-derived polypeptide sequences, and a corresponding library of nucleic acid sequences encoding the polypeptides, wherein the polypeptides themselves, or polypeptides contained within ORFs of which they form a part, comprise targets for therapeutic drugs.

### SPECIFIC EXAMPLE

### Determination of Enterococcus Protein Antigens for Antibody and Vaccine Development

[0160] The selection of Enterococcus protein antigens for vaccine development can be derived from the nucleic acids encoding E. faecalis polypeptides. First, the ORF's can be analyzed for homology to other known exported or membrane proteins and analyzed using the discriminant analysis described by Klein, et al. (Klein, P., Kanehsia, M., and DeLisi, C. (1985) Biochimica et Biophysica Acta 815, 468-476) for predicting exported and membrane proteins.

[0161] Homology searches can be performed using the BLAST algorithm contained in the Wisconsin Sequence Analysis Package (Genetics Computer Group, University Research Park, 575 Science Drive, Madison, Wis. 53711) to compare each predicted ORF amino acid sequence with all sequences found in the current GenBank, SWISS-PROT and PIR databases. BLAST searches for local alignments between the ORF and the databank sequences and reports a probability score which indicates the probability of finding this sequence by chance in the database. ORF's with significant homology (e.g. probabilities lower than 1×10⁻⁶ that the homology is only due to random chance) to membrane or exported proteins represent protein antigens for vaccine development. Possible functions can be provided to E. faecalis genes based on sequence homology to genes cloned in other organisms.

[0162] Discriminant analysis (Klein, et al. supra) can be used to examine the ORF amino acid sequences. This algorithm uses the intrinsic information contained in the ORF amino acid sequence and compares it to information derived from the properties of known membrane and exported proteins. This comparison predicts which proteins will be exported, membrane associated or cytoplasmic. ORF amino acid sequences identified as exported or membrane associated by this algorithm are likely protein antigens for vaccine development.

Production of Fragments and Analogs of E. faecalis Nucleic Acids and Polypeptides

[0163] Based on the discovery of the E. faecalis gene products of the invention provided in the Sequence Listing, one skilled in the art can alter the disclosed structure (of E. faecalis genes), e.g., by producing fragments or analogs, and test the newly produced structures for activity. Examples of techniques known to those skilled in the relevant art which allow the production and testing of fragments and analogs are discussed below. These, or analogous methods can be used to make and screen libraries of polypeptides, e.g., libraries of random peptides or libraries of fragments or analogs of cellular proteins for the ability to bind E. faecalis polypeptides. Such screens are useful for the identification of inhibitors of E. faecalis.

[0164] Generation of Fragments

[0165] Fragments of a protein can be produced in several ways, e.g., recombinantly, by proteolytic digestion, or by chemical synthesis. Internal or terminal fragments of a polypeptide can be generated by removing one or more nucleotides from one end (for a terminal fragment) or both ends (for an internal fragment) of a nucleic acid which encodes the polypeptide. Expression of the mutagenized DNA produces polypeptide fragments. Digestion with “end-nibbling” endonucleases can thus generate DNA's which encode an array of fragments. DNA's which encode fragments of a protein can also be generated by random shearing, restriction digestion or a combination of the above-discussed methods.

[0166] Fragments can also be chemically synthesized using techniques known in the art such as conventional Merrifield solid phase f-Moc or t-Boc chemistry. For example, peptides of the present invention may be arbitrarily divided into fragments of desired length with no overlap of the fragments, or divided into overlapping fragments of a desired length.

Alteration of Nucleic Acids and Polypeptides: Random Methods

[0167] Amino acid sequence variants of a protein can be prepared by random mutagenesis of DNA which encodes a protein or a particular domain or region of a protein. Useful methods include PCR mutagenesis and saturation mutagenesis. A library of random amino acid sequence variants can also be generated by the synthesis of a set of degenerate oligonucleotide sequences. (Methods for screening proteins in a library of variants are elsewhere herein).

[0168] PCR Mutagenesis

[0169] In PCR mutagenesis, reduced Taq polymerase fidelity is used to introduce random mutations into a cloned fragment of DNA (Leung et al., 1989, Technique 1:11-15). The DNA region to be mutagenized is amplified using the polymerase chain reaction (PCR) under conditions that reduce the fidelity of DNA synthesis by Taq DNA polymerase, e.g., by using a dGTP/dATP ratio of five and adding Mn²⁺ to the PCR reaction. The pool of amplified DNA fragments are inserted into appropriate cloning vectors to provide random mutant libraries.

[0170] Saturation Mutagenesis

[0171] Saturation mutagenesis allows for the rapid introduction of a large number of single base substitutions into cloned DNA fragments (Mayers et al., 1985, Science 229:242). This technique includes generation of mutations, e.g., by chemical treatment or irradiation of single-stranded DNA in vitro, and synthesis of a complimentary DNA strand. The mutation frequency can be modulated by modulating the severity of the treatment, and essentially all possible base substitutions can be obtained. Because this procedure does not involve a genetic selection for mutant fragments both neutral substitutions, as well as those that alter function, are obtained. The distribution of point mutations is not biased toward conserved sequence elements.

[0172] Degenerate Oligonucleotides

[0173] A library of homologs can also be generated from a set of degenerate oligonucleotide sequences. Chemical synthesis of a degenerate sequences can be carried out in an automatic DNA synthesizer, and the synthetic genes then ligated into an appropriate expression vector. The synthesis of degenerate oligonucleotides is known in the art (see for example, Narang, S A (1983) Tetrahedron 39:3; Itakura et al. (1981) Recombinant DNA, Proc 3rd Cleveland Sympos. Macromolecules, ed. A G Walton, Amsterdam: Elsevier pp 273-289; Itakura et al. (1984) Annu. Rev. Biochem. 53:323; Itakura et al. (1984) Science 198:1056; Ike et al. (1983) Nucleic Acid Res. 11:477. Such techniques have been employed in the directed evolution of other proteins (see, for example, Scott et al. (1990) Science 249:386-390; Roberts et al. (1992) PNAS 89:2429-2433; Devlin et al. (1990) Science 249: 404-406; Cwirla et al. (1990) PNAS 87: 6378-6382; as well as U.S. Pat. Nos. 5,223,409, 5,198,346, and 5,096,815).

Alteration of Nucleic Acids and Polypeptides: Methods for Directed Mutagenesis

[0174] Non-random or directed, mutagenesis techniques can be used to provide specific sequences or mutations in specific regions. These techniques can be used to create variants which include, e.g., deletions, insertions, or substitutions, of residues of the known amino acid sequence of a protein. The sites for mutation can be modified individually or in series, e.g., by (1) substituting first with conserved amino acids and then with more radical choices depending upon results achieved, (2) deleting the target residue, or (3) inserting residues of the same or a different class adjacent to the located site, or combinations of options 1-3.

[0175] Alanine Scanning Mutagenesis

[0176] Alanine scanning mutagenesis is a useful method for identification of certain residues or regions of the desired protein that are preferred locations or domains for mutagenesis, Cunningham and Wells (Science 244:1081-1085, 1989). In alanine scanning, a residue or group of target residues are identified (e.g., charged residues such as Arg, Asp, His, Lys, and Glu) and replaced by a neutral or negatively charged amino acid (most preferably alanine or polyalanine). Replacement of an amino acid can affect the interaction of the amino acids with the surrounding aqueous environment in or outside the cell. Those domains demonstrating functional sensitivity to the substitutions are then refined by introducing further or other variants at or for the sites of substitution. Thus, while the site for introducing an amino acid sequence variation is predetermined, the nature of the mutation per se need not be predetermined. For example, to optimize the performance of a mutation at a given site, alanine scanning or random mutagenesis may be conducted at the target codon or region and the expressed desired protein subunit variants are screened for the optimal combination of desired activity.

[0177] Oligonucleotide-Mediated Mutagenesis

[0178] Oligonucleotide-mediated mutagenesis is a useful method for preparing substitution, deletion, and insertion variants of DNA, see, e.g., Adelman et al., (DNA 2:183, 1983). Briefly, the desired DNA is altered by hybridizing an oligonucleotide encoding a mutation to a DNA template, where the template is the single-stranded form of a plasmid or bacteriophage containing the unaltered or native DNA sequence of the desired protein. After hybridization, a DNA polymerase is used to synthesize an entire second complementary strand of the template that will thus incorporate the oligonucleotide primer, and will code for the selected alteration in the desired protein DNA. Generally, oligonucleotides of at least 25 nucleotides in length are used. An optimal oligonucleotide will have 12 to 15 nucleotides that are completely complementary to the template on either side of the nucleotide(s) coding for the mutation. This ensures that the oligonucleotide will hybridize properly to the single-stranded DNA template molecule. The oligonucleotides are readily synthesized using techniques known in the art such as that described by Crea et al. (Proc. Natl. Acad. Sci. USA, 75: 5765[1978]).

[0179] Cassette Mutagenesis

[0180] Another method for preparing variants, cassette mutagenesis, is based on the technique described by Wells et al. (Gene, 34:315[1985]). The starting material is a plasmid (or other vector) which includes the protein subunit DNA to be mutated. The codon(s) in the protein subunit DNA to be mutated are identified. There must be a unique restriction endonuclease site on each side of the identified mutation site(s). If no such restriction sites exist, they may be generated using the above-described oligonucleotide-mediated mutagenesis method to introduce them at appropriate locations in the desired protein subunit DNA. After the restriction sites have been introduced into the plasmid, the plasmid is cut at these sites to linearize it. A double-stranded oligonucleotide encoding the sequence of the DNA between the restriction sites but containing the desired mutation(s) is synthesized using standard procedures. The two strands are synthesized separately and then hybridized together using standard techniques. This double-stranded oligonucleotide is referred to as the cassette. This cassette is designed to have 3′ and 5′ ends that are comparable with the ends of the linearized plasmid, such that it can be directly ligated to the plasmid. This plasmid now contains the mutated desired protein subunit DNA sequence.

[0181] Combinatorial Mutagenesis

[0182] Combinatorial mutagenesis can also be used to generate mutants (Ladner et al., WO 88/06630). In this method, the amino acid sequences for a group of homologs or other related proteins are aligned, preferably to promote the highest homology possible. All of the amino acids which appear at a given position of the aligned sequences can be selected to create a degenerate set of combinatorial sequences. The variegated library of variants is generated by combinatorial mutagenesis at the nucleic acid level, and is encoded by a variegated gene library. For example, a mixture of synthetic oligonucleotides can be enzymatically ligated into gene sequences such that the degenerate set of potential sequences are expressible as individual peptides, or alternatively, as a set of larger fusion proteins containing the set of degenerate sequences.

Other Modifications of E. faecalis Nucleic Acids and Polypeptides

[0183] It is possible to modify the structure of an E. faecalis polypeptide for such purposes as increasing solubility, enhancing stability (e.g., shelf life ex vivo and resistance to proteolytic degradation in vivo). A modified E. faecalis protein or peptide can be produced in which the amino acid sequence has been altered, such as by amino acid substitution, deletion, or addition as described herein.

[0184] An E. faecalis peptide can also be modified by substitution of cysteine residues preferably with alanine, serine, threonine, leucine or glutamic acid residues to minimize dimerization via disulfide linkages. In addition, amino acid side chains of fragments of the protein of the invention can be chemically modified. Another modification is cyclization of the peptide.

[0185] In order to enhance stability and/or reactivity, an E. faecalis polypeptide can be modified to incorporate one or more polymorphisms in the amino acid sequence of the protein resulting from any natural allelic variation. Additionally, D-amino acids, non-natural amino acids, or non-amino acid analogs can be substituted or added to produce a modified protein within the scope of this invention. Furthermore, an E. faecalis polypeptide can be modified using polyethylene glycol (PEG) according to the method of A. Sehon and co-workers (Wie et al., supra) to produce a protein conjugated with PEG. In addition, PEG can be added during chemical synthesis of the protein. Other modifications of E. faecalis proteins include reduction/alkylation (Tarr, Methods of Protein Microcharacterization, J. E. Silver ed., Humana Press, Clifton N.J. 155-194 (1986)); acylation (Tarr, supra); chemical coupling to an appropriate carrier (Mishell and Shiigi, eds, Selected Methods in Cellular Immunology, WH Freeman, San Francisco, Calif. (1980), U.S. Pat. No. 4,939,239, or mild formalin treatment (Marsh, (1971) Int. Arch. of Allergy and Appl. Immunol., 41: 199-215).

[0186] To facilitate purification and potentially increase solubility of an E. faecalis protein or peptide, it is possible to add an amino acid fusion moiety to the peptide backbone. For example, hexa-histidine can be added to the protein for purification by immobilized metal ion affinity chromatography (Hochuli, E. et al., (1988) Bio/Technology, 6: 1321-1325). In addition, to facilitate isolation of peptides free of irrelevant sequences, specific endoprotease cleavage sites can be introduced between the sequences of the fusion moiety and the peptide.

[0187] To potentially aid proper antigen processing of epitopes within an E. faecalis polypeptide, canonical protease sensitive sites can be engineered between regions, each comprising at least one epitope via recombinant or synthetic methods. For example, charged amino acid pairs, such as KK or RR, can be introduced between regions within a protein or fragment during recombinant construction thereof. The resulting peptide can be rendered sensitive to cleavage by cathepsin and/or other trypsin-like enzymes which would generate portions of the protein containing one or more epitopes. In addition, such charged amino acid residues can result in an increase in the solubility of the peptide.

Primary Methods for Screening Polypeptides and Analogs

[0188] Various techniques are known in the art for screening generated mutant gene products. Techniques for screening large gene libraries often include cloning the gene library into replicable expression vectors, transforming appropriate cells with the resulting library of vectors, and expressing the genes under conditions in which detection of a desired activity, e.g., in this case, binding to E. faecalis polypeptide or an interacting protein, facilitates relatively easy isolation of the vector encoding the gene whose product was detected. Each of the techniques described below is amenable to high through-put analysis for screening large numbers of sequences created, e.g., by random mutagenesis techniques.

[0189] Two Hybrid Systems

[0190] Two hybrid assays such as the system described below (as with the other screening methods described herein), can be used to identify polypeptides, e.g., fragments or analogs of a naturally-occurring E. faecalis polypeptide, e.g., of cellular proteins, or of randomly generated polypeptides which bind to an E. faecalis protein. (The E. faecalis domain is used as the bait protein and the library of variants are expressed as prey fusion proteins.) In an analogous fashion, a two hybrid assay (as with the other screening methods described herein), can be used to find polypeptides which bind a E. faecalis polypeptide.

[0191] Display Libraries

[0192] In one approach to screening assays, the Enterococcus peptides are displayed on the surface of a cell or viral particle, and the ability of particular cells or viral particles to bind an appropriate receptor protein via the displayed product is detected in a “panning assay”. For example, the gene library can be cloned into the gene for a surface membrane protein of a bacterial cell, and the resulting fusion protein detected by panning (Ladner et al., WO 88/06630; Fuchs et al. (1991) Bio/Technology 9:1370-1371; and Goward et al. (1992) TIBS 18:136-140). In a similar fashion, a detectably labeled ligand can be used to score for potentially functional peptide homologs. Fluorescently labeled ligands, e.g., receptors, can be used to detect homologs which retain ligand-binding activity. The use of fluorescently labeled ligands, allows cells to be visually inspected and separated under a fluorescence microscope, or, where the morphology of the cell permits, to be separated by a fluorescence-activated cell sorter.

[0193] A gene library can be expressed as a fusion protein on the surface of a viral particle. For instance, in the filamentous phage system, foreign peptide sequences can be expressed on the surface of infectious phage, thereby conferring two significant benefits. First, since these phage can be applied to affinity matrices at concentrations well over 10¹³ phage per milliliter, a large number of phage can be screened at one time. Second, since each infectious phage displays a gene product on its surface, if a particular phage is recovered from an affinity matrix in low yield, the phage can be amplified by another round of infection. The group of almost identical E. coli filamentous phages M13, fd., and fl are most often used in phage display libraries. Either of the phage gIII or gVIII coat proteins can be used to generate fusion proteins without disrupting the ultimate packaging of the viral particle. Foreign epitopes can be expressed at the NH₂-terminal end of pIII and phage bearing such epitopes recovered from a large excess of phage lacking this epitope (Ladner et al. PCT publication WO 90/02909; Garrard et al., PCT publication WO 92/09690; Marks et al. (1992) J. Biol. Chem. 267:16007-16010; Griffiths et al. (1993) EMBO J 12:725-734; Clackson et al. (1991) Nature 352:624-628; and Barbas et al. (1992) PNAS 89:4457-4461).

[0194] A common approach uses the maltose receptor of E. coli (the outer membrane protein, LamB) as a peptide fusion partner (Charbit et al. (1986) EMBO 5, 3029-3037). Oligonucleotides have been inserted into plasmids encoding the LamB gene to produce peptides fused into one of the extracellular loops of the protein. These peptides are available for binding to ligands, e.g., to antibodies, and can elicit an immune response when the cells are administered to animals. Other cell surface proteins, e.g., OmpA (Schorr et al. (1991) Vaccines 91, pp. 387-392), PhoE (Agterberg, et al. (1990) Gene 88, 37-45), and PAL (Fuchs et al. (1991) Bio/Tech 9, 1369-1372), as well as large bacterial surface structures have served as vehicles for peptide display. Peptides can be fused to pilin, a protein which polymerizes to form the pilus-a conduit for interbacterial exchange of genetic information (Thiry et al. (1989) Appl. Environ. Microbiol 55, 984-993). Because of its role in interacting with other cells, the pilus provides a useful support for the presentation of peptides to the extracellular environment. Another large surface structure used for peptide display is the bacterial motive organ, the flagellum. Fusion of peptides to the subunit protein flagellin offers a dense array of many peptide copies on the host cells (Kuwajima et al. (1988) Bio/Tech. 6, 1080-1083). Surface proteins of other bacterial species have also served as peptide fusion partners. Examples include the Staphylococcus protein A and the outer membrane IgA protease of Neisseria (Hansson et al. (1992) J. Bacteriol. 174, 4239-4245 and Klauser et al. (1990) EMBO J. 9, 1991-1999).

[0195] In the filamentous phage systems and the LamB system described above, the physical link between the peptide and its encoding DNA occurs by the containment of the DNA within a particle (cell or phage) that carries the peptide on its surface. Capturing the peptide captures the particle and the DNA within. An alternative scheme uses the DNA-binding protein LacI to form a link between peptide and DNA (Cull et al. (1992) PNAS USA 89:1865-1869). This system uses a plasmid containing the LacI gene with an oligonucleotide cloning site at its 3′-end. Under the controlled induction by arabinose, a LacI-peptide fusion protein is produced. This fusion retains the natural ability of LacI to bind to a short DNA sequence known as LacO operator (LacO). By installing two copies of LacO on the expression plasmid, the LacI-peptide fusion binds tightly to the plasmid that encoded it. Because the plasmids in each cell contain only a single oligonucleotide sequence and each cell expresses only a single peptide sequence, the peptides become specifically and stablely associated with the DNA sequence that directed its synthesis. The cells of the library are gently lysed and the peptide-DNA complexes are exposed to a matrix of immobilized receptor to recover the complexes containing active peptides. The associated plasmid DNA is then reintroduced into cells for amplification and DNA sequencing to determine the identity of the peptide ligands. As a demonstration of the practical utility of the method, a large random library of dodecapeptides was made and selected on a monoclonal antibody raised against the opioid peptide dynorphin B. A cohort of peptides was recovered, all related by a consensus sequence corresponding to a six-residue portion of dynorphin B. (Cull et al. (1992) Proc. Natl. Acad. Sci. U.S.A. 89-1869)

[0196] This scheme, sometimes referred to as peptides-on-plasmids, differs in two important ways from the phage display methods. First, the peptides are attached to the C-terminus of the fusion protein, resulting in the display of the library members as peptides having free carboxy termini. Both of the filamentous phage coat proteins, pIII and pVIII, are anchored to the phage through their C-termini, and the guest peptides are placed into the outward-extending N-terminal domains. In some designs, the phage-displayed peptides are presented right at the amino terminus of the fusion protein. (Cwirla, et al. (1990) Proc. Natl. Acad. Sci. U.S.A. 87, 6378-6382) A second difference is the set of biological biases affecting the population of peptides actually present in the libraries. The LacI fusion molecules are confined to the cytoplasm of the host cells. The phage coat fusions are exposed briefly to the cytoplasm during translation but are rapidly secreted through the inner membrane into the periplasmic compartment, remaining anchored in the membrane by their C-terminal hydrophobic domains, with the N-termini, containing the peptides, protruding into the periplasm while awaiting assembly into phage particles. The peptides in the LacI and phage libraries may differ significantly as a result of their exposure to different proteolytic activities. The phage coat proteins require transport across the inner membrane and signal peptidase processing as a prelude to incorporation into phage. Certain peptides exert a deleterious effect on these processes and are underrepresented in the libraries (Gallop et al. (1994) J. Med. Chem. 37(9):1233-1251). These particular biases are not a factor in the LacI display system.

[0197] The number of small peptides available in recombinant random libraries is enormous. Libraries of 10⁷-10⁹ independent clones are routinely prepared. Libraries as large as 10¹¹ recombinants have been created, but this size approaches the practical limit for clone libraries. This limitation in library size occurs at the step of transforming the DNA containing randomized segments into the host bacterial cells. To circumvent this limitation, an in vitro system based on the display of nascent peptides in polysome complexes has recently been developed. This display library method has the potential of producing libraries 3-6 orders of magnitude larger than the currently available phage/phagemid or plasmid libraries. Furthermore, the construction of the libraries, expression of the peptides, and screening, is done in an entirely cell-free format.

[0198] In one application of this method (Gallop et al. (1994) J. Med. Chem. 37(9):1233-1251), a molecular DNA library encoding 1012 decapeptides was constructed and the library expressed in an E. coli S30 in vitro coupled transcription/translation system. Conditions were chosen to stall the ribosomes on the mRNA, causing the accumulation of a substantial proportion of the RNA in polysomes and yielding complexes containing nascent peptides still linked to their encoding RNA. The polysomes are sufficiently robust to be affinity purified on immobilized receptors in much the same way as the more conventional recombinant peptide display libraries are screened. RNA from the bound complexes is recovered, converted to cDNA, and amplified by PCR to produce a template for the next round of synthesis and screening. The polysome display method can be coupled to the phage display system. Following several rounds of screening, cDNA from the enriched pool of polysomes was cloned into a phagemid vector. This vector serves as both a peptide expression vector, displaying peptides fused to the coat proteins, and as a DNA sequencing vector for peptide identification. By expressing the polysome-derived peptides on phage, one can either continue the affinity selection procedure in this format or assay the peptides on individual clones for binding activity in a phage ELISA, or for binding specificity in a completion phage ELISA (Barret, et al. (1992) Anal. Biochem 204, 357-364). To identify the sequences of the active peptides one sequences the DNA produced by the phagemid host.

Secondary Screening of Polypeptides and Analogs

[0199] The high through-put assays described above can be followed by secondary screens in order to identify further biological activities which will, e.g., allow one skilled in the art to differentiate agonists from antagonists. The type of a secondary screen used will depend on the desired activity that needs to be tested. For example, an assay can be developed in which the ability to inhibit an interaction between a protein of interest and its respective ligand can be used to identify antagonists from a group of peptide fragments isolated though one of the primary screens described above.

[0200] Therefore, methods for generating fragments and analogs and testing them for activity are known in the art. Once the core sequence of interest is identified, it is routine for one skilled in the art to obtain analogs and fragments.

Peptide Mimetics of E. faecalis Polypeptides

[0201] The invention also provides for reduction of the protein binding domains of the subject E. faecalis polypeptides to generate mimetics, e.g. peptide or non-peptide agents. The peptide mimetics are able to disrupt binding of a polypeptide to its counter ligand, e.g., in the case of an E. faecalis polypeptide binding to a naturally occurring ligand. The critical residues of a subject E. faecalis polypeptide which are involved in molecular recognition of a polypeptide can be determined and used to generate E. faecalis-derived peptidomimetics which competitively or noncompetitively inhibit binding of the E. faecalis polypeptide with an interacting polypeptide (see, for example, European patent applications EP-412,762A and EP-B31,080A).

[0202] For example, scanning mutagenesis can be used to map the amino acid residues of a particular E. faecalis polypeptide involved in binding an interacting polypeptide, peptidomimetic compounds (e.g. diazepine or isoquinoline derivatives) can be generated which mimic those residues in binding to an interacting polypeptide, and which therefore can inhibit binding of an E. faecalis polypeptide to an interacting polypeptide and thereby interfere with the function of E. faecalis polypeptide. For instance, non-hydrolyzable peptide analogs of such residues can be generated using benzodiazepine (e.g., see Freidinger et al. in Peptides: Chemistry and Biology, G. R. Marshall ed., ESCOM Publisher: Leiden, Netherlands, 1988), azepine (e.g., see Huffman et al. in Peptides: Chemistry and Biology, G. R. Marshall ed., ESCOM Publisher: Leiden, Netherlands, 1988), substituted gama lactam rings (Garvey et al. in Peptides: Chemistry and Biology, G. R. Marshall ed., ESCOM Publisher: Leiden, Netherlands, 1988), keto-methylene pseudopeptides (Ewenson et al. (1986) J Med Chem 29:295; and Ewenson et al. in Peptides: Structure and Function (Proceedings of the 9th American Peptide Symposium) Pierce Chemical Co. Rockland, Ill., 1985), b-turn dipeptide cores (Nagai et al. (1985) Tetrahedron Lett 26:647; and Sato et al. (1986) J Chem Soc Perkin Trans 1: 1231), and b-aminoalcohols (Gordon et al. (1985) Biochem Biophys Res Commun 126:419; and et al. (1986) Biochem Biophys Res Commun 134:71).

Vaccine Formulations for E. faecalis Nucleic Acids and Polypeptides

[0203] This invention also features vaccine compositions for protection against infection by E. faecalis or for treatment of E. faecalis infection, a gram-positive bacterium. In one embodiment, the vaccine compositions contain one or more immunogenic components such as a surface protein from E. faecalis, or portion thereof, and a pharmaceutically acceptable carrier. Nucleic acids within the scope of the invention are exemplified by the nucleic acids of the invention contained in the Sequence Listing which encode E. faecalis surface proteins. Any nucleic acid encoding an immunogenic E. faecalis protein, or portion thereof, which is capable of expression in a cell, can be used in the present invention. These vaccines have therapeutic and prophylactic utilities.

[0204] One aspect of the invention provides a vaccine composition for protection against infection by E. faecalis which contains at least one immunogenic fragment of an E. faecalis protein and a pharmaceutically acceptable carrier. Preferred fragments include peptides of at least about 10 amino acid residues in length, preferably about 10-20 amino acid residues in length, and more preferably about 12-16 amino acid residues in length.

[0205] Immunogenic components of the invention can be obtained, for example, by screening polypeptides recombinantly produced from the corresponding fragment of the nucleic acid encoding the full-length E. faecalis protein. In addition, fragments can be chemically synthesized using techniques known in the art such as conventional Merrifield solid phase f-Moc or t-Boc chemistry.

[0206] In one embodiment, immunogenic components are identified by the ability of the peptide to stimulate T cells. Peptides which stimulate T cells, as determined by, for example, T cell proliferation or cytokine secretion are defined herein as comprising at least one T cell epitope. T cell epitopes are believed to be involved in initiation and perpetuation of the immune response to the protein allergen which is responsible for the clinical symptoms of allergy. These T cell epitopes are thought to trigger early events at the level of the T helper cell by binding to an appropriate HLA molecule on the surface of an antigen presenting cell, thereby stimulating the T cell subpopulation with the relevant T cell receptor for the epitope. These events lead to T cell proliferation, lymphokine secretion, local inflammatory reactions, recruitment of additional immune cells to the site of antigen/T cell interaction, and activation of the B cell cascade, leading to the production of antibodies. A T cell epitope is the basic element, or smallest unit of recognition by a T cell receptor, where the epitope comprises amino acids essential to receptor recognition (e.g., approximately 6 or 7 amino acid residues). Amino acid sequences which mimic those of the T cell epitopes are within the scope of this invention.

[0207] Screening immunogenic components can be accomplished using one or more of several different assays. For example, in vitro, peptide T cell stimulatory activity is assayed by contacting a peptide known or suspected of being immunogenic with an antigen presenting cell which presents appropriate MHC molecules in a T cell culture. Presentation of an immunogenic E. faecalis peptide in association with appropriate MHC molecules to T cells in conjunction with the necessary co-stimulation has the effect of transmitting a signal to the T cell that induces the production of increased levels of cytokines, particularly of interleukin-2 and interleukin-4. The culture supernatant can be obtained and assayed for interleukin-2 or other known cytokines. For example, any one of several conventional assays for interleukin-2 can be employed, such as the assay described in Proc. Natl. Acad Sci USA, 86: 1333 (1989) the pertinent portions of which are incorporated herein by reference. A kit for an assay for the production of interferon is also available from Genzyme Corporation (Cambridge, Mass.).

[0208] Alternatively, a common assay for T cell proliferation entails measuring tritiated thymidine incorporation. The proliferation of T cells can be measured in vitro by determining the amount of ³H-labeled thymidine incorporated into the replicating DNA of cultured cells. Therefore, the rate of DNA synthesis and, in turn, the rate of cell division can be quantified.

[0209] Vaccine compositions of the invention containing immunogenic components (e.g., E. faecalis polypeptide or fragment thereof or nucleic acid encoding an E. faecalis polypeptide or fragment thereof) preferably include a pharmaceutically acceptable carrier. The term “pharmaceutically acceptable carrier” refers to a carrier that does not cause an allergic reaction or other untoward effect in patients to whom it is administered. Suitable pharmaceutically acceptable carriers include, for example, one or more of water, saline, phosphate buffered saline, dextrose, glycerol, ethanol and the like, as well as combinations thereof. Pharmaceutically acceptable carriers may further comprise minor amounts of auxiliary substances such as wetting or emulsifying agents, preservatives or buffers, which enhance the shelf life or effectiveness of the antibody. For vaccines of the invention containing E. faecalis polypeptides, the polypeptide is co-administered with a suitable adjuvant.

[0210] It will be apparent to those of skill in the art that the therapeutically effective amount of DNA or protein of this invention will depend, inter alia, upon the administration schedule, the unit dose of antibody administered, whether the protein or DNA is administered in combination with other therapeutic agents, the immune status and health of the patient, and the therapeutic activity of the particular protein or DNA.

[0211] Vaccine compositions are conventionally administered parenterally, e.g., by injection, either subcutaneously or intramuscularly. Methods for intramuscular immunization are described by Wolff et al. (1990) Science 247: 1465-1468 and by Sedegah et al. (1994) Immunology 91: 9866-9870. Other modes of administration include oral and pulmonary formulations, suppositories, and transdermal applications. Oral immunization is preferred over parenteral methods for inducing protection against infection by E. faecalis. Cain et. al. (1993) Vaccine 11: 637-642. Oral formulations include such normally employed excipients as, for example, pharmaceutical grades of mannitol, lactose, starch, magnesium stearate, sodium saccharine, cellulose, magnesium carbonate, and the like.

[0212] The vaccine compositions of the invention can include an adjuvant, including, but not limited to aluminum hydroxide; N-acetyl-muramyl-L-threonyl-D-isoglutamine (thr-MDP); N-acetyl-nor-muramyl-L-alanyl-D-isoglutamine (CGP 11637, referred to as nor-MDP); N-acetylmuramyl-L-alanyl-D-isoglutaminyl-L-alanine-2-(1′-2′-dipalmitoyl-sn-glycero-3-hydroxyphos-phoryloxy)-ethylamine (CGP 19835A, referred to a MTP-PE); RIBI, which contains three components from bacteria; monophosphoryl lipid A; trehalose dimycoloate; cell wall skeleton (MPL+TDM+CWS) in a 2% squalene/Tween 80 emulsion; and cholera toxin. Others which may be used are non-toxic derivatives of cholera toxin, including its B subunit, and/or conjugates or genetically engineered fusions of the E. faecalis polypeptide with cholera toxin or its B subunit, procholeragenoid, fungal polysaccharides, including schizophyllan, muramyl dipeptide, muramyl dipeptide derivatives, phorbol esters, labile toxin of E. coli, non-E. faecalis bacterial lysates, block polymers or saponins.

[0213] Other suitable delivery methods include biodegradable microcapsules or immuno-stimulating complexes (ISCOMs), cochleates, or liposomes, genetically engineered attenuated live vectors such as viruses or bacteria, and recombinant (chimeric) virus-like particles, e.g., bluetongue. The amount of adjuvant employed will depend on the type of adjuvant used. For example, when the mucosal adjuvant is cholera toxin, it is suitably used in an amount of 5 mg to 50 mg, for example 10 mg to 35 mg. When used in the form of microcapsules, the amount used will depend on the amount employed in the matrix of the microcapsule to achieve the desired dosage. The determination of this amount is within the skill of a person of ordinary skill in the art.

[0214] Carrier systems in humans may include enteric release capsules protecting the antigen from the acidic environment of the stomach, and including E. faecalis polypeptide in an insoluble form as fusion proteins. Suitable carriers for the vaccines of the invention are enteric coated capsules and polylactide-glycolide microspheres. Suitable diluents are 0.2 N NaHCO3 and/or saline.

[0215] Vaccines of the invention can be administered as a primary prophylactic agent in adults or in children, as a secondary prevention, after successful eradication of E. faecalis in an infected host, or as a therapeutic agent in the aim to induce an immune response in a susceptible host to prevent infection by E. faecalis. The vaccines of the invention are administered in amounts readily determined by persons of ordinary skill in the art. Thus, for adults a suitable dosage will be in the range of 10 mg to 10 g, preferably 10 mg to 100 mg. A suitable dosage for adults will also be in the range of 5 mg to 500 mg. Similar dosage ranges will be applicable for children. Those skilled in the art will recognize that the optimal dose may be more or less depending upon the patient's body weight, disease, the route of administration, and other factors. Those skilled in the art will also recognize that appropriate dosage levels can be obtained based on results with known oral vaccines such as, for example, a vaccine based on an E. coli lysate (6 mg dose daily up to total of 540 mg) and with an enterotoxigenic E. coli purified antigen (4 doses of 1 mg) (Schulman et al., J. Urol. 150:917-921 (1993); Boedecker et al., American Gastroenterological Assoc. 999:A-222 (1993)). The number of doses will depend upon the disease, the formulation, and efficacy data from clinical trials. Without intending any limitation as to the course of treatment, the treatment can be administered over 3 to 8 doses for a primary immunization schedule over 1 month (Boedeker, American Gastroenterological Assoc. 888:A-222 (1993)).

[0216] In a preferred embodiment, a vaccine composition of the invention can be based on a killed whole E. coli preparation with an immunogenic fragment of an E. faecalis protein of the invention expressed on its surface or it can be based on an E. coli lysate, wherein the killed E. coli acts as a carrier or an adjuvant.

[0217] It will be apparent to those skilled in the art that some of the vaccine compositions of the invention are useful only for preventing E. faecalis infection, some are useful only for treating E. faecalis infection, and some are useful for both preventing and treating E. faecalis infection. In a preferred embodiment, the vaccine composition of the invention provides protection against E. faecalis infection by stimulating humoral and/or cell-mediated immunity against E. faecalis. It should be understood that amelioration of any of the symptoms of E. faecalis infection is a desirable clinical goal, including a lessening of the dosage of medication used to treat E. faecalis-caused disease, or an increase in the production of antibodies in the serum or mucous of patients.

Antibodies Reactive with E. faecalis Polypeptides

[0218] The invention also includes antibodies specifically reactive with the subject E. faecalis polypeptide. Anti-protein/anti-peptide antisera or monoclonal antibodies can be made by standard protocols (See, for example, Antibodies: A Laboratory Manual ed. by Harlow and Lane (Cold Spring Harbor Press: 1988)). A mammal such as a mouse, a hamster or rabbit can be immunized with an immunogenic form of the peptide. Techniques for conferring immunogenicity on a protein or peptide include conjugation to carriers or other techniques well known in the art. An immunogenic portion of the subject E. faecalis polypeptide can be administered in the presence of adjuvant. The progress of immunization can be monitored by detection of antibody titers in plasma or serum. Standard ELISA or other immunoassays can be used with the immunogen as antigen to assess the levels of antibodies.

[0219] In a preferred embodiment, the subject antibodies are immunospecific for antigenic determinants of the E. faecalis polypeptides of the invention, e.g. antigenic determinants of a polypeptide of the invention contained in the Sequence Listing, or a closely related human or non-human mammalian homolog (e.g., 90% homologous, more preferably at least 95% homologous). In yet a further preferred embodiment of the invention, the anti-E. faecalis antibodies do not substantially cross react (i.e., react specifically) with a protein which is for example, less than 80% percent homologous to a sequence of the invention contained in the Sequence Listing. By “not substantially cross react”, it is meant that the antibody has a binding affinity for a non-homologous protein which is less than 10 percent, more preferably less than 5 percent, and even more preferably less than 1 percent, of the binding affinity for a protein of the invention contained in the Sequence Listing. In a most preferred embodiment, there is no cross-reactivity between bacterial and mammalian antigens.

[0220] The term antibody as used herein is intended to include fragments thereof which are also specifically reactive with E. faecalis polypeptides. Antibodies can be fragmented using conventional techniques and the fragments screened for utility in the same manner as described above for whole antibodies. For example, F(ab′)₂ fragments can be generated by treating antibody with pepsin. The resulting F(ab′)₂ fragment can be treated to reduce disulfide bridges to produce Fab′ fragments. The antibody of the invention is further intended to include bispecific and chimeric molecules having an anti-E. faecalis portion.

[0221] Both monoclonal and polyclonal antibodies (Ab) directed against E. faecalis polypeptides or E. faecalis polypeptide variants, and antibody fragments such as Fab′ and F(ab′)₂, can be used to block the action of E. faecalis polypeptide and allow the study of the role of a particular E. faecalis polypeptide of the invention in aberrant or unwanted intracellular signaling, as well as the normal cellular function of the E. faecalis and by microinjection of anti-E. faecalis polypeptide antibodies of the present invention.

[0222] Antibodies which specifically bind E. faecalis epitopes can also be used in immunohistochemical staining of tissue samples in order to evaluate the abundance and pattern of expression of E. faecalis antigens. Anti E. faecalis polypeptide antibodies can be used diagnostically in immuno-precipitation and immuno-blotting to detect and evaluate E. faecalis levels in tissue or bodily fluid as part of a clinical testing procedure. Likewise, the ability to monitor E. faecalis polypeptide levels in an individual can allow determination of the efficacy of a given treatment regimen for an individual afflicted with such a disorder. The level of an E. faecalis polypeptide can be measured in cells found in bodily fluid, such as in urine samples or can be measured in tissue, such as produced by gastric biopsy. Diagnostic assays using anti-E. faecalis antibodies can include, for example, immunoassays designed to aid in early diagnosis of E. faecalis infections. The present invention can also be used as a method of detecting antibodies contained in samples from individuals infected by this bacterium using specific E. faecalis antigens.

[0223] Another application of anti-E. faecalis polypeptide antibodies of the invention is in the immunological screening of cDNA libraries constructed in expression vectors such as λgt11, λgt18-23, λZAP, and λORF8. Messenger libraries of this type, having coding sequences inserted in the correct reading frame and orientation, can produce fusion proteins. For instance, λgt11 will produce fusion proteins whose amino termini consist of β-galactosidase amino acid sequences and whose carboxy termini consist of a foreign polypeptide. Antigenic epitopes of a subject E. faecalis polypeptide can then be detected with antibodies, as, for example, reacting nitrocellulose filters lifted from infected plates with anti-E. faecalis polypeptide antibodies. Phage, scored by this assay, can then be isolated from the infected plate. Thus, the presence of E. faecalis gene homologs can be detected and cloned from other species, and alternate isoforms (including splicing variants) can be detected and cloned.

Kits Containing Nucleic Acids, Polypeptides or Antibodies of the Invention

[0224] The nucleic acid, polypeptides and antibodies of the invention can be combined with other reagents and articles to form kits. Kits for diagnostic purposes typically comprise the nucleic acid, polypeptides or antibodies in vials or other suitable vessels. Kits typically comprise other reagents for performing hybridization reactions, polymerase chain reactions (PCR), or for reconstitution of lyophilized components, such as aqueous media, salts, buffers, and the like. Kits may also comprise reagents for sample processing such as detergents, chaotropic salts and the like. Kits may also comprise immobilization means such as particles, supports, wells, dipsticks and the like. Kits may also comprise labeling means such as dyes, developing reagents, radioisotopes, fluorescent agents, luminescent or chemiluminescent agents, enzymes, intercalating agents and the like. With the nucleic acid and amino acid sequence information provided herein, individuals skilled in art can readily assemble kits to serve their particular purpose. Kits further can include instructions for use.

Drug Screening Assays Using E. faecalis Polypeptides

[0225] By making available purified and recombinant E. faecalis polypeptides, the present invention provides assays which can be used to screen for drugs which are either agonists or antagonists of the normal cellular function, in this case, of the subject E. faecalis polypeptides, or of their role in intracellular signaling. Such inhibitors or potentiators may be useful as new therapeutic agents to combat E. faecalis infections in humans. A variety of assay formats will suffice and, in light of the present inventions, will be comprehended by the person skilled in the art.

[0226] In many drug screening programs which test libraries of compounds and natural extracts, high throughput assays are desirable in order to maximize the number of compounds surveyed in a given period of time. Assays which are performed in cell-free systems, such as may be derived with purified or semi-purified proteins, are often preferred as “primary” screens in that they can be generated to permit rapid development and relatively easy detection of an alteration in a molecular target which is mediated by a test compound. Moreover, the effects of cellular toxicity and/or bioavailability of the test compound can be generally ignored in the in vitro system, the assay instead being focused primarily on the effect of the drug on the molecular target as may be manifest in an alteration of binding affinity with other proteins or change in enzymatic properties of the molecular target. Accordingly, in an exemplary screening assay of the present invention, the compound of interest is contacted with an isolated and purified E. faecalis polypeptide.

[0227] Screening assays can be constructed in vitro with a purified E. faecalis polypeptide or fragment thereof, such as an E. faecalis polypeptide having enzymatic activity, such that the activity of the polypeptide produces a detectable reaction product. The efficacy of the compound can be assessed by generating dose response curves from data obtained using various concentrations of the test compound. Moreover, a control assay can also be performed to provide a baseline for comparison. Suitable products include those with distinctive absorption, fluorescence, or chemi-luminescence properties, for example, because detection may be easily automated. A variety of synthetic or naturally occurring compounds can be tested in the assay to identify those which inhibit or potentiate the activity of the E. faecalis polypeptide. Some of these active compounds may directly, or with chemical alterations to promote membrane permeability or solubility, also inhibit or potentiate the same activity (e.g., enzymatic activity) in whole, live E. faecalis cells.

[0228] Overexpression Assays

[0229] Overexpression assays are based on the premise that overproduction of a protein would lead to a higher level of resistance to compounds that selectively interfere with the function of that protein. Overexpression assays may be used to identify compounds that interfere with the function of virtually any type of protein, including without limitation enzymes, receptors, DNA- or RNA-binding proteins, or any proteins that are directly or indirectly involved in regulating cell growth.

[0230] Typically, two bacterial strains are constructed. One contains a single copy of the gene of interest, and a second contains several copies of the same gene. Identification of useful inhibitory compounds of this type of assay is based on a comparison of the activity of a test compound in inhibiting growth and/or viability of the two strains. The method involves constructing a nucleic acid vector that directs high level expression of a particular target nucleic acid. The vectors are then transformed into host cells in single or multiple copies to produce strains that express low to moderate and high levels of protein encoding by the target sequence (strain A and B, respectively). Nucleic acid comprising sequences encoding the target gene can, of course, be directly integrated into the host cell.

[0231] Large numbers of compounds (or crude substances which may contain active compounds) are screened for their effect on the growth of the two strains. Agents which interfere with an unrelated target equally inhibit the growth of both strains. Agents which interfere with the function of the target at high concentration should inhibit the growth of both strains. It should be possible, however, to titrate out the inhibitory effect of the compound in the overexpressing strain. That is, if the compound is affecting the particular target that is being tested, it should be possible to inhibit the growth of strain A at a concentration of the compound that allows strain B to grow.

[0232] Alternatively, a bacterial strain is constructed that contains the gene of interest under the control of an inducible promoter. Identification of useful inhibitory agents using this type of assay is based on a comparison of the activity of a test compound in inhibiting growth and/or viability of this strain under both inducing and non-inducing conditions. The method involves constructing a nucleic acid vector that directs high-level expression of a particular target nucleic acid. The vector is then transformed into host cells that are grown under both non-inducing and inducing conditions (conditions A and B, respectively).

[0233] Large numbers of compounds (or crude substances which may contain active compounds) are screened for their effect on growth under these two conditions. Agents that interfere with the function of the target should inhibit growth under both conditions. It should be possible, however, to titrate out the inhibitory effect of the compound in the overexpressing strain. That is, if the compound is affecting the particular target that is being tested, it should be possible to inhibit growth under condition A at a concentration that allows the strain to grow under condition B.

[0234] Ligand-Binding Assays

[0235] Many of the targets according to the invention have functions that have not yet been identified. Ligand-binding assays are useful to identify inhibitor compounds that interfere with the function of a particular target, even when that function is unknown. These assays are designed to detect binding of test compounds to particular targets. The detection may involve direct measurement of binding. Alternatively, indirect indications of binding may involve stabilization of protein structure or disruption of a biological function. Non-limiting examples of useful ligand-binding assays are detailed below.

[0236] A useful method for the detection and isolation of binding proteins is the Biomolecular Interaction Assay (BIAcore) system developed by Pharmacia Biosensor and described in the manufacturer's protocol (LKB Pharmacia, Sweden). The BIAcore system uses an affinity purified anti-GST antibody to immobilize GST-fusion proteins onto a sensor chip. The sensor utilizes surface plasmon resonance which is an optical phenomenon that detects changes in refractive indices. In accordance with the practice of the invention, a protein of interest is coated onto a chip and test compounds are passed over the chip. Binding is detected by a change in the refractive index (surface plasmon resonance).

[0237] A different type of ligand-binding assay involves scintillation proximity assays (SPA, described in U.S. Pat. No. 4,568,649).

[0238] Another type of ligand binding assay, also undergoing development, is based on the fact that proteins containing mitochondrial targeting signals are imported into isolated mitochondria in vitro (Hurt et al., 1985, Embo J 4:2061-2068; Eilers and Schatz, Nature, 1986, 322:228-231). In a mitochondrial import assay, expression vectors are constructed in which nucleic acids encoding particular target proteins are inserted downstream of sequences encoding mitochondrial import signals. The chimeric proteins are synthesized and tested for their ability to be imported into isolated mitochondria in the absence and presence of test compounds. A test compound that binds to the target protein should inhibit its uptake into isolated mitochondria in vitro.

[0239] Another ligand-binding assay is the yeast two-hybrid system (Fields and Song, 1989, Nature 340:245-246). The yeast two-hybrid system takes advantage of the properties of the GAL4 protein of the yeast Saccharomyces cerevisiae. The GAL4 protein is a transcriptional activator required for the expression of genes encoding enzymes of galactose utilization. This protein consists of two separable and functionally essential domains: an N-terminal domain which binds to specific DNA sequences (UAS_{G}); and a C-terminal domain containing acidic regions, which is necessary to activate transcription. The native GAL4 protein, containing both domains, is a potent activator of transcription when yeast are grown on galactose media. The N-terminal domain binds to DNA in a sequence-specific manner but is unable to activate transcription. The C-terminal domain contains the activating regions but cannot activate transcription because it fails to be localized to UAS_{G}. In the two-hybrid system, a system of two hybrid proteins containing parts of GAL4: (1) a GAL4 DNA-binding domain fused to a protein ‘X’ and (2) a GAL4 activation region fused to a protein ‘Y’. If X and Y can form a protein-protein complex and reconstitute proximity of the GAL4 domains, transcription of a gene regulated by UAS_{G} occurs. Creation of two hybrid proteins, each containing one of the interacting proteins X and Y, allows the activation region of UAS_{G} to be brought to its normal site of action.

[0240] The binding assay described in Fodor et al., 1991, Science 251:767-773, which involves testing the binding affinity of test compounds for a plurality of defined polymers synthesized on a solid substrate, may also be useful.

[0241] Compounds which bind to the polypeptides of the invention are potentially useful as antibacterial agents for use in therapeutic compositions.

[0242] Pharmaceutical formulations suitable for antibacterial therapy comprise the antibacterial agent in conjunction with one or more biologically acceptable carriers. Suitable biologically acceptable carriers include, but are not limited to, phosphate-buffered saline, saline, deionized water, or the like. Preferred biologically acceptable carriers are physiologically or pharmaceutically acceptable carriers.

[0243] The antibacterial compositions include an antibacterial effective amount of active agent. Antibacterial effective amounts are those quantities of the antibacterial agents of the present invention that afford prophylactic protection against bacterial infections or which result in amelioration or cure of an existing bacterial infection. This antibacterial effective amount will depend upon the agent, the location and nature of the infection, and the particular host. The amount can be determined by experimentation known in the art, such as by establishing a matrix of dosages and frequencies and comparing a group of experimental units or subjects to each point in the matrix.

[0244] The antibacterial active agents or compositions can be formed into dosage unit forms, such as for example, creams, ointments, lotions, powders, liquids, tablets, capsules, suppositories, sprays, aerosols or the like. If the antibacterial composition is formulated into a dosage unit form, the dosage unit form may contain an antibacterial effective amount of active agent. Alternatively, the dosage unit form may include less than such an amount if multiple dosage unit forms or multiple dosages are to be used to administer a total dosage of the active agent. Dosage unit forms can include, in addition, one or more excipient(s), diluent(s), disintegrant(s), lubricant(s), plasticizer(s), colorant(s), dosage vehicle(s), absorption enhancer(s), stabilizer(s), bactericide(s), or the like.

[0245] For general information concerning formulations, see, e.g., Gilman et al. (eds.), 1990, Goodman and Gilman's: The Pharmacological Basis of Therapeutics, 8th ed., Pergamon Press; and Remington's Pharmaceutical Sciences, 17th ed., 1990, Mack Publishing Co., Easton, Pa.; Avis et al. (eds.), 1993, Pharmaceutical Dosage Forms: Parenteral Medications, Dekker, New York; Lieberman et al (eds.), 1990, Pharmaceutical Dosage Forms: Disperse Systems, Dekker, New York.

[0246] The antibacterial agents and compositions of the present invention are useful for preventing or treating E. faecalis infections. Infection prevention methods incorporate a prophylactically effective amount of an antibacterial agent or composition. A prophylactically effective amount is an amount effective to prevent E. faecalis infection and will depend upon the specific bacterial strain, the agent, and the host. These amounts can be determined experimentally by methods known in the art and as described above.

[0247] E. faecalis infection treatment methods incorporate a therapeutically effective amount of an antibacterial agent or composition. A therapeutically effective amount is an amount sufficient to ameliorate or eliminate the infection. The prophylactically and/or therapeutically effective amounts can be administered in one administration or over repeated administrations. Therapeutic administration can be followed by prophylactic administration, once the initial bacterial infection has been resolved.

[0248] The antibacterial agents and compositions can be administered topically or systemically. Topical application is typically achieved by administration of creams, ointments, lotions, or sprays as described above. Systemic administration includes both oral and parental routes. Parental routes include, without limitation, subcutaneous, intramuscular, intraperitoneal, intravenous, transdermal, inhalation and intranasal administration.

Exemplification

Cloning and Sequencing E. faecalis Genomic Sequence

[0249] This invention provides nucleotide sequences of the genome of E. faecalis which thus comprises a DNA sequence library of E. faecalis genomic DNA. The detailed description that follows provides nucleotide sequences of E. faecalis, and also describes how the sequences were obtained and how ORFs (Open Reading Frames) and protein-coding sequences can be identified. Also described are methods of using the disclosed E. faecalis sequences in methods including diagnostic and therapeutic applications. Furthermore, the library can be used as a database for identification and comparison of medically important sequences in this and other strains of E. faecalis as well as other species of Enterococcus.

[0250] Chromosomal DNA from strain 14336 of E. faecalis was isolated after Zymolyase digestion, sodium dodecyl sulfate lysis, potassium acetate precipitation, phenol:chloroform extraction and ethanol precipitation (Soll, D. R., T. Srikantha and S. R. Lockhart: Characterizing Developmentally Regulated Genes in E. faecalis. In Microbial Genome Methods. K. W. Adolph, editor. CRC Press. New York. p 17-37.). Genomic E. faecalis DNA was hydrodynamically sheared in an HPLC and then separated on a standard 1% agarose gel. Fractions corresponding to 2500-3000 bp in length were excised from the gel and purifed by the GeneClean procedure (Bio101, Inc.).

[0251] The purified DNA fragments were then blunt-ended using T4 DNA polymerase. The healed DNA was then ligated to unique BstXI-linker adapters (5′-GTCTTCACCACGGGG-3′ and 5′-GTGGTGAAGAC-3′ in 100-1000 fold molar excess). These linkers are complimentary to the BstXI-cut pGTC vector, while the overhang is not self-complimentary. Therefore, the linkers will not concatermerize nor will the cut-vector religate itself easily. The linker-adapted inserts were separated from the unincorporated linkers on a 1% agarose gel and purified using GeneClean. The linker-adapted inserts were then ligated to BstXI-cut vector to construct a “shotgun” sublclone libraries.

[0252] Only major modifications to the protocols are highlighted. Briefly, the library was then transformed into DH5á competent cells (Gibco/BRL, DH5á transformation protocol). It was assessed by plating onto antibiotic plates containing ampicillin and IPTG/Xgal. The plates were incubated overnight at 37° C. Transformants were then used for plating of clones and picking for sequencing. The cultures were grown overnight at 37° C. DNA was purified using a silica bead DNA preparation (Engelstein, 1996) method. In this manner, 25 μg of DNA was obtained per clone.

[0253] These purified DNA samples were then sequenced using primarily ABI dye-terminator chemistry. All subsequent steps were based on sequencing by ABI377 automated DNA sequencing methods. The ABI dye terminator sequence reads were run on ABI377 machines and the data was transferred to UNIX machines following lane tracking of the gels. Base calls and quality scores were determined using the program PHRED (Ewing et al., 1998, Genome Res. 8:175-185; Ewing and Green, 1998, Genome Res. 8: 685-734). Reads were assembled using PHRAP (P. Green, Abstracts of DOE Human Genome Program Contractor-Grantee Workshop V, January 1996, p. 157) with default program parameters and quality scores. The initial assembly was done at 2.3-fold coverage and yielded 712 contigs.

[0254] Finishing can follow the initial assembly. Missing mates (sequences from clones that only gave reads from one end of the Enterococcus DNA inserted in the plasmid) can be identified and sequenced with ABI technology to allow the identification of additional overlapping contigs.

[0255] End-sequencing of randomly picked genomic lambda was also performed. Sequencing on a both sides was done for all lambda sequences. The lambda library backbone helped to verify the integrity of the assembly and allowed closure of some of the physical gaps. Primers for walking off the ends of contigs would be selected using pick primer (a GTC program) near the ends of the clones to facilitate gap closure. These walks can be sequenced using the selected clones and primers. These data are then reassembled with PHRAP. Additional sequencing using PCR-generated templates and screened and/or unscreened lambda templates can be done in addition.

[0256] To identify E. faecalis polypeptides the complete genomic sequence of E. faecalis were analyzed essentially as follows: First, all possible stop-to-stop open reading frames (ORFs) greater than 180 nucleotides in all six reading frames were translated into amino acid sequences. Second, the identified ORFs were analyzed for homology to known (archeabacter, prokaryotic and eukaryotic) protein sequences. Third, the coding potential of non-homologous sequences were evaluated with the program GENEMARK™ (Borodovsky and McIninch, 1993, Comp. Chem. 17:123).

Identification, Cloning and Expression of E. faecalis Nucleic Acids

[0257] Expression and purification of the E. faecalis polypeptides of the invention can be performed essentially as outlined below.

[0258] To facilitate the cloning, expression and purification of membrane and secreted proteins from E. faecalis, a gene expression system, such as the pET System (Novagen), for cloning and expression of recombinant proteins in E. coli, is selected. Also, a DNA sequence encoding a peptide tag, the His-Tag, is fused to the 3′ end of DNA sequences of interest in order to facilitate purification of the recombinant protein products. The 3′ end is selected for fusion in order to avoid alteration of any 5′ terminal signal sequence.

PCR Amplification and Cloning of Nucleic Acids Containing ORF's Encoding Enzymes

[0259] Nucleic acids chosen (for example, from the nucleic acids set forth in SEQ ID NO: 1-SEQ ID NO: 3405) for cloning from the 14336 strain of E. faecalis are prepared for amplification cloning by polymerase chain reaction (PCR). Synthetic oligonucleotide primers specific for the 5^{/} and 3^{/} ends of open reading frames (ORFs) are designed and purchased from GibcoBRL Life Technologies (Gaithersburg, Md., USA). All forward primers (specific for the 5^{/} end of the sequence) are designed to include an NcoI cloning site at the extreme 5^{/} terminus. These primers are designed to permit initiation of protein translation at a methionine residue followed by a valine residue and the coding sequence for the remainder of the native E. faecalis DNA sequence. All reverse primers (specific for the 3^{/} end of any E. faecalis ORF) include a EcoRI site at the extreme 5^{/} terminus to permit cloning of each E. faecalis sequence into the reading frame of the pET-28b. The pET-28b vector provides sequence encoding an additional 20 carboxy-terminal amino acids including six histidine residues (at the extreme C-terminus), which comprise the His-Tag.

[0260] Genomic DNA prepared from the 14336 strain of E. faecalis is used as the source of template DNA for PCR amplification reactions (Current Protocols in Molecular Biology, John Wiley and Sons, Inc., F. Ausubel et al., eds., 1994). To amplify a DNA sequence containing an E. faecalis ORF, genomic DNA (50 nanograms) is introduced into a reaction vial containing 2 mM MgCl₂, 1 micromolar synthetic oligonucleotide primers (forward and reverse primers) complementary to and flanking a defined E. faecalis ORF, 0.2 mM of each deoxynucleotide triphosphate; dATP, dGTP, dCTP, dTTP and 2.5 units of heat stable DNA polymerase (Amplitaq, Roche Molecular Systems, Inc., Branchburg, N.J., USA) in a final volume of 100 microliters.

[0261] Upon completion of thermal cycling reactions, each sample of amplified DNA is washed and purified using the Qiaquick Spin PCR purification kit (Qiagen, Gaithersburg, Md., USA). All amplified DNA samples are subjected to digestion with the restriction endonucleases, e.g., NcoI and EcoRI (New England BioLabs, Beverly, Mass., USA)(Current Protocols in Molecular Biology, John Wiley and Sons, Inc., F. Ausubel et al., eds., 1994). DNA samples are then subjected to electrophoresis on 1.0% NuSeive (FMC BioProducts, Rockland, Me. USA) agarose gels. DNA is visualized by exposure to ethidium bromide and long wave uv irradiation. DNA contained in slices isolated from the agarose gel is purified using the Bio 101 GeneClean Kit protocol (Bio 101 Vista, Calif., USA).

Cloning of E. faecalis Nucleic Acids into an Expression Vector

[0262] The pET-28b vector is prepared for cloning by digestion with endonucleases, e.g., NcoI and EcoRI (Current Protocols in Molecular Biology, John Wiley and Sons, Inc., F. Ausubel et al., eds., 1994). The pET-28a vector, which encodes a His-Tag that can be fused to the 5^{/} end of an inserted gene, is prepared by digestion with appropriate restriction endonucleases.

[0263] Following digestion, DNA inserts are cloned (Current Protocols in Molecular Biology, John Wiley and Sons, Inc., F. Ausubel et al., eds., 1994) into the previously digested pET-28b expression vector. Products of the ligation reaction are then used to transform the BL21 strain of E. coli (Current Protocols in Molecular Biology, John Wiley and Sons, Inc., F. Ausubel et al., eds., 1994) as described below.

Transformation of Competent Bacteria with Recombinant Plasmids

[0264] Competent bacteria, E coli strain BL21 or E. coli strain BL21 (DE3), are transformed with recombinant pET expression plasmids carrying the cloned E. faecalis sequences according to standard methods (Current Protocols in Molecular, John Wiley and Sons, Inc., F. Ausubel et al., eds., 1994). Briefly, 1 microliter of ligation reaction is mixed with 50 microliters of electrocompetent cells and subjected to a high voltage pulse, after which, samples are incubated in 0.45 milliliters SOC medium (0.5% yeast extract, 2.0% tryptone, 10 mM NaCl, 2.5 mM KCl, 10 mM MgCl2, 10 mM MgSO4 and 20, mM glucose) at 37° C. with shaking for 1 hour. Samples are then spread on LB agar plates containing 25 microgram/ml kanamycin sulfate for growth overnight. Transformed colonies of BL21 are then picked and analyzed to evaluate cloned inserts as described below.

Identification of Recombinant Expression Vectors with E. faecalis Nucleic Acids

[0265] Individual BL21 clones transformed with recombinant pET-28b E. faecalis ORFs are analyzed by PCR amplification of the cloned inserts using the same forward and reverse primers, specific for each E. faecalis sequence, that were used in the original PCR amplification cloning reactions. Successful amplification verifies the integration of the E. faecalis sequences in the expression vector (Current Protocols in Molecular Biology, John Wiley and Sons, Inc., F. Ausubel et al., eds., 1994).

Isolation and Preparation of Nucleic Acids from Transformants

[0266] Individual clones of recombinant pET-28b vectors carrying properly cloned E. faecalis ORFs are picked and incubated in 5 mls of LB broth plus 25 microgram/ml kanamycin sulfate overnight. The following day plasmid DNA is isolated and purified using the Qiagen plasmid purification protocol (Qiagen Inc., Chatsworth, Calif., USA).

Expression of Recombinant E. faecalis Sequences in E. coli

[0267] The pET vector can be propagated in any E. coli K-12 strain e.g. HMS174, HB101, JM109, DH5, etc. for the purpose of cloning or plasmid preparation. Hosts for expression include E. coli strains containing a chromosomal copy of the gene for T7 RNA polymerase. These hosts are lysogens of bacteriophage DE3, a lambda derivative that carries the lacI gene, the lacUV5 promoter and the gene for T7 RNA polymerase. T7 RNA polymerase is induced by addition of isopropyl-B-D-thiogalactoside (IPTG), and the T7 RNA polymerase transcribes any target plasmid, such as pET-28b, carrying its gene of interest. Strains used include: BL21(DE3) (Studier, F. W., Rosenberg, A. H., Dunn, J. J., and Dubendorff, J. W. (1990) Meth. Enzymol. 185, 60-89).

[0268] To express recombinant E. faecalis sequences, 50 nanograms of plasmid DNA isolated as described above is used to transform competent BL21(DE3) bacteria as described above (provided by Novagen as part of the pET expression system kit). The lacZ gene (beta-galactosidase) is expressed in the pET-System as described for the E. faecalis recombinant constructions. Transformed cells are cultured in SOC medium for 1 hour, and the culture is then plated on LB plates containing 25 micrograms/ml kanamycin sulfate. The following day, bacterial colonies are pooled and grown in LB medium containing kanamycin sulfate (25 micrograms/ml) to an optical density at 600 nM of 0.5 to 1.0 O.D. units, at which point, 1 millimolar IPTG was added to the culture for 3 hours to induce gene expression of the E. faecalis recombinant DNA constructions.

[0269] After induction of gene expression with IPTG, bacteria are pelleted by centrifugation in a Sorvall RC-3B centrifuge at 3500×g for 15 minutes at 4° C. Pellets are resuspended in 50 milliliters of cold 10 mM Tris-HCl, pH 8.0, 0.1 M NaCl and 0.1 mM EDTA (STE buffer). Cells are then centrifuged at 2000×g for 20 min at 4° C. Wet pellets are weighed and frozen at −80° C. until ready for protein purification.

[0270] A variety of methodologies known in the art can be utilized to purify the isolated proteins. (Current Protocols in Protein Science, John Wiley and Sons, Inc., J. E. Coligan et al., eds., 1995). For example, the frozen cells are thawed, resupended in buffer and ruptured by several passages through a small volume microfluidizer (Model M-110S, Microfluidics International Corporation, Newton, Mass.). The resultant homogenate is centrifuged to yield a clear supernatant (crude extract) and following filtration the crude extract is fractionated over columns. Fractions are monitored by absorbance at OD₂₈₀ nm. and peak fractions may analyzed by SDS-PAGE

[0271] The concentrations of purified protein preparations are quantified spectrophotometrically using absorbance coefficients calculated from amino acid content (Perkins, S. J. 1986 Eur. J. Biochem. 157, 169-180). Protein concentrations are also measured by the method of Bradford, M. M. (1976) Anal. Biochem. 72, 248-254, and Lowry, O. H., Rosebrough, N., Farr, A. L. & Randall, R. J. (1951) J. Biol. Chem. 193, pages 265-275, using bovine serum albumin as a standard.

[0272] SDS-polyacrylamide gels of various concentrations are purchased from BioRad (Hercules, Calif., USA), and stained with Coomassie blue. Molecular weight markers may include rabbit skeletal muscle myosin (200 kDa), E. coli (-galactosidase (116 kDa), rabbit muscle phosphorylase B (97.4 kDa), bovine serum albumin (66.2 kDa), ovalbumin (45 kDa), bovine carbonic anhydrase (31 kDa), soybean trypsin inhibitor (21.5 kDa), egg white lysozyme (14.4 kDa) and bovine aprotinin (6.5 kDa).

### EQUIVALENTS

[0273] Those skilled in the art will recognize, or be able to ascertain using no more than routine experimentation, many equivalents to the specific embodiments and methods described herein. The specific embodiments described herein are offered by way of example only, and the invention is to limited only by the terms of the appended claims, along with the full scope of equivalents to which such claims are entitled.

LENGTHY TABLE REFERENCED HERE
US20070021600A1-20070125-T00001
Please refer to the end of the specification for access instructions.

LENGTHY TABLE REFERENCED HERE
US20070021600A1-20070125-T00002
Please refer to the end of the specification for access instructions.

LENGTHY TABLE
The patent application contains a lengthy table section. A copy of the table is available in electronic form from the USPTO web site (http://seqdata.uspto.gov/?pageRequest=docDetail&DocID=US20070021600A1) An electronic copy of the table will also be available from the USPTO upon request and payment of the fee set forth in 37 CFR 1.19(b)(3).

1. An isolated nucleic acid comprising a nucleotide sequence encoding an E. faecalis polypeptide selected from the group consisting of SEQ ID NO: 3406-SEQ ID NO: 6810.

2. A recombinant expression vector comprising the nucleic acid of claim 1 operably linked to a transcription regulatory element.

3. A cell comprising a recombinant expression vector of claim 2.

4. A method for producing an E. faecalis polypeptide comprising culturing a cell of claim 3 under conditions that permit expression of the polypeptide.

5. An isolated nucleic acid comprising a nucleotide sequence encoding an E. faecalis polypeptide or a fragment thereof, said nucleic acid selected from the group consisting of SEQ ID NO: 1-SEQ ID NO: 3405.

6. A recombinant expression vector comprising the nucleic acid of claim 5 operably linked to a transcription regulatory element.

7. A cell comprising a recombinant expression vector of claim 6.

8. A method for producing an E. faecalis polypeptide comprising culturing a cell of claim 7 under conditions that permit expression of the polypeptide.

9. A probe comprising a nucleotide sequence consisting of at least 8 nucleotides of a nucleotide sequence selected from the group consisting of SEQ ID NO: 1-SEQ ID NO: 3405.

10. An isolated nucleic acid comprising a nucleotide sequence of at least 8 nucleotides in length, wherein the sequence is hybridizable to a nucleic acid having a nucleotide sequence selected from the group consisting of SEQ ID NO: 1-SEQ ID NO: 3405.

11. A vaccine composition for prevention or treatment of an E. faecalis infection comprising an effective amount of a nucleic acid of claim 5.

12. A vaccine composition of claim 11, further comprising a pharmaceutically acceptable carrier.

13. A vaccine composition of claim 12, wherein the pharmaceutically acceptable carrier is an adjuvant.

14. A method of treating a subject for E. faecalis infection comprising administering to a subject a vaccine composition of claim 11, such that treatment of E. faecalis infection occurs.

15. A method of claim 14, wherein the treatment is a prophylactic treatment.

16. A method of claim 14, wherein the treatment is a therapeutic treatment.

17. A recombinant or substantially pure preparation of an E. faecalis polypeptide or a fragment thereof, wherein said polypeptide is selected from the group consisting of SEQ ID NO: 3406-SEQ ID NO: 6810.

18. A vaccine composition for prevention or treatment of an E. faecalis infection comprising an effective amount of an E. faecalis polypeptide of claim 17.

19. A vaccine composition of claim 18, further comprising a pharmaceutically acceptable carrier.

20. A vaccine composition of claim 19, wherein the pharmaceutically acceptable carrier is an adjuvant.

21. A method of treating a subject for E. faecalis infection comprising administering to a subject a vaccine composition of claim 18, such that treatment of E. faecalis infection occurs.

22. A method of claim 21, wherein the treatment is a prophylactic treatment.

23. A method of claim 21, wherein the treatment is a therapeutic treatment.

24. A method for detecting the presence of an Enterococcus nucleic acid in a sample comprising:
(a) contacting a sample with a nucleic acid of claim 5 under conditions in which a hybrid can form between the probe and an Enterococcus nucleic acid in the sample; and
(b) detecting the hybrid formed in step (a), wherein detection of a hybrid indicates the presence of an Enterococcus nucleic acid in the sample.

25. A computer readable medium having recorded thereon the nucleotide sequences depicted in SEQ ID NO: 1-SEQ ID NO: 3405 or fragments thereof.

26. A computer based system for identifying fragments of the Enterococcus genome of commercial importance comprising the following elements;
a) a data storage means comprising the nucleotide sequences SEQ ID NO: 1-SEQ ID NO: 3405 or fragments thereof,
b) a search means for comparing a target sequence to the nucleotide sequences of the data storage means of step (a) to identify homologous sequences, and;
c) a retrieval means for obtaining said homologous sequences(s) of step (b).

27. A method of identifying commercially important nucleic acid fragments of the Enterococcus genome comprising the step of comparing a database comprising the nucleotide sequences SEQ ID NO: 1-SEQ ID NO: 3405 or fragments thereof with a target sequence to obtain a nucleic acid molecule comprised of a complementary nucleotide sequence to said target sequence, wherein said target sequence is not randomly selected.

28. A method for identifying an expression modulating fragment of the Enterococcus genome comprising the step of comparing a database comprising the nucleotide sequences SEQ ID NO: 1-SEQ ID NO: 3405 or fragments thereof with a target sequence to obtain a nucleic acid molecule comprised of a complementary nucleotide sequence to said target sequence, wherein said target sequence comprises sequences known regulate gene expression.

The application's sequence listing, which the Patent Office published only in electronic form, follows.

SEQUENCE LISTING (6812 sequences)

SEQ ID NO: 1 - DNA, 918 bp, Enterococcus faecalis
tcgatccgtggggcagaggcgggtacgattggcgcaggtctttgtaaaggaagtggcgaagcaattggtattgctggtccttctgttttaatcgcctttctaattggcggtgctgttctcttcatcgtcatgagtggtttaggaaaacttgttttagatggcggagacacacatcatggtttgtctggcttggttcgaccatttttaggtgcacattctgctgattttattgattgggtttattattccatgtggacaattaatattatcgcagaagcggttgccgcagcttcctttttacaactttggtttcctaatattcctgcttggttttttgtttttattttagctattttaacgacgctcattaatctttactcggttcgtttatttgcagaaacagaatattggttggcgtttgctaaaattagtgtcatcattttgttaattatttttggtgtttatctggtgggacaacaaatgctaggcagtggtgtcttccctactttacaaagtatcaccgatcatggtggcttcgccccacatggcatgaaaggtatagttaattctttattagtagttatttattcttatggcggttcagaattaatcgcgattactgtcagtgaagcagatgatcctaaaaaagccattcctaaagcgattcgtggtgtgatgggacggattatttccttctatatcattccattattcttacttttgattattttcccttggaataccttagcaggcacaacggtgagtccatttgttatggtttttgaaaaaatgaatattccttttgctgctgacatcgtaaattttgtgattattttaaacccttgttttcttctattaattctggaagtatacgcctcttctcgccttttatattttcgcttaaaagataaaaaatga

SEQ ID NO: 2 - DNA, 738 bp, Enterococcus faecalis
atgccattccgtggggaagaggcgttattattaactgggtgcggagctcaaggaggcacaactgaaaaatccagcgaagcggatagtaacaaaccagttaaaattgtcgctgttggttccaccgctttacaaccgttagtagatgctgcgaaagatcaatttacacaagaacatcctaattatacagtttctgtccaaggtggcggcagcggaacaggactttcgcaagttgcagatggcgcagtgaccattggaaattccgatgtgtttgccgaagagaaagatggcgtggatgcctctaaattagtcgatcatcgggtggccgtggtcggtatgggaccagtggtcaacaaagaagtcggcgtgaagaatttaacgaagcaacaattgattgatgtctttactggcaaagtcaaaaactggaaagaagtgggcggcaaagatcaagaaatcgtcgtaataaaccgcgcaaacggaagtggcacccgagcaacatttgaaaaatggggcttagatggagctaaaccagttcaatcacaagaacaagattcttcgggaacagttcgtaaaattgttgaacaaacaccaggagcaatcagctatttagctttttcttatatggatgattccactgttgccttaagcattgatggtgttgaaccaaaagaagaacacgtgaaagacaattcatggaaaatctggtcttatgaacatatgtatacaaaaggggagcctaat

SEQ ID NO: 3 - DNA, 627 bp, Enterococcus faecalis
caaagacagcgggttgcgttagcaagtgctctgattatcgaacctaaactattattactagatgaaccgttgagtaatttagatgcaaaattgcgagtggcaatgcggattgaaatcaaacggattcaacaacaattaggcattacgacagtttttgtcacacatgaccaagaagaatgtttttctatttcagataaagtggccattatgaataatggcgtgattgaacaatatgattcaccagaaacgatttatcgtttgcctcgtactaagtttgttgcagaatttatcggttttgaaaactttttctctgtcgaaaaaatggaagccggtcattatcggacacaaacaaatcaaatagtgaaaacgactaatcctgaaccaaatgttacaacgacggtggcaacgattcgtccagaggacattgagattgtttcagaagctgctactaatactgtcgcaggtactgtcgctgtccgaacatttttagggaaaagctatcaatatgaagtggaaacagcgttaggtacattgctggttaatggaacaagtgaacagttatatgaaacaaacgaaaccattcacttggcttttccagctgagaaattagttattttagaaaaataa

SEQ ID NO: 4 - DNA, 534 bp, Enterococcus faecalis
cttacctttggtcgacacgtcttatatgaacgaaatgcagtttggctcttcgattgtggggaagggactcaattgcaaattttaaaaagtagtattcgcccaagaaaaattgaaaagatttttattacacatttacatggggatcatatttttggtttacctggtttgttaagtagtcgttcttttcagggcgggacagaacctttagaaatctatggaccagttgggattgctgactttgtcaagacttctttacgggtctcgcaatcgcggttgtcctatccactgaaatttattgaattaacgaaagaaaatgacgttatttttaaagataaacaattcactgttcgctgtaatatcttggaccatggcatcacgagctttggctatcgaattgaggaagcagcgcatgaaggagaattacaagtagagaaacttcaagctttagggattccttctgggccgttgtatggcaaactcaaacgtggtgaaacgattgtttttgatggacaggaaattaatggacaagcgttt

SEQ ID NO: 5 - DNA, 651 bp, Enterococcus faecalis
ttcattttattgatgcacaattccaattcactggcgggtgattttaaaattgggccagcgaaaacggggatgttagcagatagtgagcgtgtcgaagctgttgttcgcaatttgcagaaagttgattttggtccgttgattgtcgatcctgtaatggtggctaaaggtggacatcatttgttagaagccgaggcagttcaaacgattaaagagcaactgttgccattagcaacggtcgtgacacctaatttaccagaagcggaagttttactagagacgaccatcaagacagaacaagaaatgcagaccgcagcaaaaaaattacagcaattgggcacaaaaaatattattatgaaaggcggacatagcacaaatcaacaagcggctgattatgtgttaatggaagacggttcgagcttttggctaagtgcaccacgaattgtaacgaaaaatactcatggaacaggagatactttttcagcgtgtatcgcagccgaattagcaaaaggtacgccgttagaagcggcgattgtgattggcaaacagtttatacaaggggccattagccaagcaatttctgttggacatggtcacggacctactaatcattgggcccaattaacgcaagatattcaagttattaaagcataa

SEQ ID NO: 6 - DNA, 510 bp, Enterococcus faecalis
tggagagaaaaaatggctaaacaaaagaatttttatgatacatatgatgcgctttttcaaaagccaaaatggtcgttttttcctgtcacaagaacagatacagcaaagcaacttcctaaccccaataaaaaagtggtaaaaccacagacgatgaaggagaaaaaacttgaaaagaacaaaaaaattatttggataggcattgctgtagcaattggctttatagtatatattgatcttgcggagaaagatgattattgggattactccgcttcatcagaagatgtgtatcctttaaaagaagctggacttaccacaactggacctgttgatttagaaaaaccactaaaagtcacaatagaagaaaataaacttttatttaatcaatgctaccaaatagaaattatcggcgatgccgatattgaaaccagtggcgggaaagaactttttaattttaccttctaccgaggaatatccagatacaaaatatctacggcatatcattttttatga

SEQ ID NO: 7 - DNA, 555 bp, Enterococcus faecalis
aaaggagtacatgatttgaatgggataatggttttgttagtggggactgggtacattggttgggttacttatagaaatgttcgtacgtatttccgttataaaaaaaatctaaaaaaatatcaaacgacgcaccatctaacggacagtgacctagagatgtaccaaagaattatggacgaattaaaaaaacaaattatttatttaaacgaactaacgaataagtcacgaaatttaaaaaaaattgaacaagtaaaactgggtgttgcttccgctaaaggcatctttaaacacttagtgaagtatcctgaagcaattactcattttagtgattttttatatcataaggtaccagagattttacgagcatcagaacggtttttaagcattaaagaagataaattgtcaacagaagaaataacacttgcaaccaatggtatcttaagtaccatacgagtgttgtcggaaagtatcacagatgattatgaaagattagtctccgaagcatctgaggaaattgccttatcaaaaaaattagtggagagaaaaaatggctaa

SEQ ID NO: 8 - DNA, 255 bp, Enterococcus faecalis
agagaagtgatatacgtgacacaacttaaaaaattgtgccaaaatcgtttagcaatcgttttgacagctgttttctttttctggctgaagacgatcattgcctactatgcagatttttcattaggtgtggaaggtacgatccagtactttatcttgtggatcaacccaattgcgactaccttattgttttttggcctttctttgtatattaaaaagccaaagccagcgttagctattcttttgatcattgatatt

SEQ ID NO: 9 - DNA, 372 bp, Enterococcus faecalis
ctcggcggcgcaatcggccgtggtgaagggtctgtcctcgttgtttcaaacaagaaagacagccggattaaacgcgttgttgaaaagtttgacttagattatgtagcacgtgccttgaaaccaaccgcacgtggcttcaaattagcagaaaaaaaattaggcttgaagccatctgaaatgttaatggtcggcgatcagattatgacagatattcggggagctaacgcagcgggtatacgcaatgttttagttcaaccgattgtcgatacagatggctggaatactagaatcaatcggttctttgaacggaaaattatgaaatacttatcaaaaaaacatccagaaatgacatggagaggcggattagaatga

SEQ ID NO: 10 - DNA, 366 bp, Enterococcus faecalis
acggaaaattatgaaatacttatcaaaaaaacatccagaaatgacatggagaggcggattagaatgacagaggcaattcattgtattggctgtggtgcgattatccaaacggaaaatcctcatgaattaggctatacaccaaaaacagctttcgaaaaaggaatggaaacaggggaagtttattgccaacgttgttttcgcttaagacattataatgacattcaagatgtccaattaacagatgatgactttttacgtttattgaatggtttaggaacagaagatgcactgattgtgaacgtagtggatatttttgactttaaaggctctccttattccaggactacatcgttttatcggagataa

SEQ ID NO: 11 - DNA, 591 bp, Enterococcus faecalis
  misc_feature (184)..(184): Nucleotide 184 is "n" wherein "n" = any nucleotide.
tttttccccaggcgcagtctcccgcaaggaggaaccggcatggattcgctgaaaggcatggcgatcttcgccactgtggtggacaagggctcgatggcagccgcggcccagagcctgggcatgaccccttcggcagtcagccagcagatccgcaagctggagagccgcgcccaggtcactttgntgcatcgcaccacccgccggctgaccctgaccgaggccggcgaggcgttctatcgcagttgcgcgcagatgctggcgatcgccgaggaagccgagcggcggcttggcgaatggcgcgatgcgccggtgggtgagttgcgcctggcggcgccggtggggttctccggcacgctgatcacccaggcgctgaaaccgttgctggagaaccaccgccagttgcgcctgcagctgttcttccaggacgagcgcatcgatctggtcgccgagcgcatcgacctggcgatacgcgtcggcaatctcgccgactccagcctggtggcgcgccacctcggcgattgggccagcgtgctttgcgcgattccggcctatttgagccgccgggcgcccatcagtcttaaccgcgccccc

SEQ ID NO: 12 - DNA, 213 bp, Enterococcus faecalis
tgggcgcccggcggctcaaataggccggaatcgcgcaaagcacgctggcccaatcgccgaggtggcgcgccaccaggctggagtcggcgagattgccgacgcgtatcgccaggtcgatgcgctcggcgaccagatcgatgcgctcgtcctggaagaacagctgcaggcgcaactggcggtggttctccagcaacggtttcagcgcctgggtga

SEQ ID NO: 13 - DNA, 366 bp, Enterococcus faecalis
  misc_feature (233)..(233): Nucleotide 233 is "n" wherein "n" = any nucleotide.
ctcgacgacctcgcccgctgggcatgctttctcgcgctttttccggtgatttttccccaggcgcagtctcccgcaaggaggaaccggcatggattcgctgaaaggcatggcgatcttcgccactgtggtggacaagggctcgatggcagccgcggcccagagcctgggcatgaccccttcggcagtcagccagcagatccgcaagctggagagccgcgcccaggtcactttgntgcatcgcaccacccgccggctgaccctgaccgaggccggcgaggcgttctatcgcagttgcgcgcagatgctggcgatcgccgaggaagccgagcggcggcttggcgaatggcgcgatgcgccggtgggtga

SEQ ID NO: 14 - DNA, 324 bp, Enterococcus faecalis
aacaatctttttgggattaaagcatatgggaatcaaccaaaagtcaatttagaaacaaaagaatatgtcaatgaggtctggattacgattcagggtgattttcgagtttatgacaattgggaagaatccatgcgagatcataccaagttatttgttgatggggtcgattgggatccaaatttatatgaaaaagtcttgttagccaaaaattataaagaggctgcacaagcgcttcaagatgctggatacgcaacggatcctacatacgctgataagatcattcatgtaattgaagaatacaatttaaataaatacgaccgttaa

SEQ ID NO: 15 - DNA, 654 bp, Enterococcus faecalis
ataaatacgaccgttaagcatggaggaatgatgacaatgagcgaaaagtggattccagaaattatgacgccgctgaaacaagatattgtaaaaatgccagagattattcggcaagccagtggcattaaaatttttggccgtaaaataaaatcaattatttttacgacagatattgcgattatccgcaatacggatgcacaggcagtgattgctgtatatccttttacaccgcatccagcgattacaaaaggcattattgaagcagcggatattcctgtcttttcaggagtcggcggcggtttaacgcaaggcatgcgttctgcttatatgagtttatttgcagaagcacaaggctcaatgggtgtcgttttgaatggtcctacaccaattgaaacaattaaaatggtggatgaagcaatcgatattcctattatcagcacagtaacttctattcatacaccaattgatgaaaaacttgcggctggcgtggatatgattaatatcagtgcaggaaaagacactgcagccaccgtacgctatttccgtggcaagtatccagaattaccgattattgcaacaggaggaccaactgaatcgagtattcatgaaaccattatcgccggagcgaatgctattacatatacgccccctagt

SEQ ID NO: 16 - DNA, 690 bp, Enterococcus faecalis
  misc_feature (4)..(667): Nucleotides 4, 12-16, 18 and 667 are "n" wherein "n" = any nucleotide. 1
actngcgccggnnnnntnattcaaccccgtggtcaagaccaagtagataagcaacgagcagatttcaaacgcctaggagttgcaggagattgggaacatccttatgttacattagatccttcttatgaagctgcacaagtacgcgtatttggtaaaatggctgaaaaaagctatatttacaaaggattgaaaccaatttactggtctccgtcaagtgagtcttctttagcggaagctgaaattgaatataaagatgtaaaatctccatctatttttgtagctttcaatgtcaaagacaggaaagatattcttgatgaagatacagcttttgtcatttggacgacaacaccatggacattgccagcaaaccaaggtattgctgtaaatccaaaatttacgtatgtattggtggaagccgatggccgtaagtttgtcgtagcgaaagatttgctagaaacagtccaatcagaaatcggttgggaaaatgtaacagttctaaaagaatttgctggacaagaaatggaatatatgactgcaagtcatccattctatgaacgtgaatcacttgtgattttacgcgatcatgttactttagacgctggtactggattagtccatactgctccagcacatggggaagatgactatatcgccggtgaccaatatnaactatctgtagtgtccctgtag

SEQ ID NO: 17 - DNA, 963 bp, Enterococcus faecalis
  misc_feature (928)..(928): Nucleotide 928 is "n" wherein "n" = any nucleotide.
caattgaatagaaaaggatgtgaacaaatggcaaaagaaacaaatgttaagttagtcacggtgagtgtttttgtggcaacatttatgacagccattgaagggaccattgtgtctactgcgatgccaacgattgtcggctcgttacatggcatggaaattatgaactgggtattttcaatttatttattaacgaatgcgatgttaacaccgatttatgggaaacttgcggataaaattggtcgtaaacctgtcttcatgattggcattatcatttttattttgggctcctcgttgtgtggctttgctcaagatatgttgactttaattattgcccgcgcaattcaaggtgtgggggcaggcgcaattttaccagttgcgttaacgattattgccgatatgtatacattggacaagcgagcgaaaattttaggtttaaacagtgccgcctggggaattgctagtatttttggtccgttagcaggtggttttattgtagatacagtcggttggcattggattttcttcattaatgttcctattggacttgttttattgggcttgattagtattttcttagttgaaccaaagcgggaacggaccaagatgccaatggatattttgggcagcgttactttgatggtagtgctgctaacgttattgctaggttttcaaatgattagcgataatggttttacattagtaacatttggttgtttaagtttgagtgtgctcttttttgtagcatttgtgatgatagaaaaacgcgcgcaagaaccagtgattgatttgcatttatttaatcaaccaacgtttgttttagtaaatcttattgcagcgcttattagcggtttcttaatggggattgatgtctacattccgatgtggatgcaaggtgtcttaggaaaaagtgcaggaattggtggcttanttttaccgcctatgtctttactttggatggctgga

SEQ ID NO: 18 - DNA, 405 bp, Enterococcus faecalis
tatggcggttatgctcgtcatggcggcggtgctttttctggaaaagatgcaaccaaagttgaccgctctgctagttatgctgcgcgttatatcgcgaaaaacattgttgctgctggtttggcgaaaaaagtagaagtccaattagcttatgcaattggtgtggcgcaaccagtgtctatttctattaatacgtttggtacgagtgatcttccagaaagtaaattaatcgaagcagttcgtaaaaactttgatttacgtccagcaggcattattgaaatgctagatttacgtcgcccaatttataaacaaactgcggcttatggtcattttggtcgaacagatattgatttaccttgggaacaaacagataaagttgaagcgttaaaagctagtttagctgaataa

SEQ ID NO: 19 - DNA, 192 bp, Enterococcus faecalis
aaggtgtctatcaaggaatccagcaaccgggaatacttattgagccggacttgcttaaaaacagagccagaaaagttttatcaattcgttaaaacgctctatcatccagacgcacaacctaatatcattcaccaggaaaatggcccaattagagcaaatgaaacggggaaaaattgtttcacaaaatattga

SEQ ID NO: 20 - DNA, 540 bp, Enterococcus faecalis
aaacagagccagaaaagttttatcaattcgttaaaacgctctatcatccagacgcacaacctaatatcattcaccaggaaaatggcccaattagagcaaatgaaacggggaaaaattgtttcacaaaatattgatgggcttcatcgaaaagcaggtagccaagaagtggtggactttcatggtaatttatatgaatgttattgccaaacttgtggtgcaacggttccttggcaagactatttgcttagtgatcggcacgctgattgtcatggacaaatccgtccagctattactttgtatgaagaaggactatccgaagaggcaattgaaaaagccattcaggccgttgcttctgccgacttaatcgtgattgtcggcacgagttttcaagtgcatccattttgcgatttgattcattataaacaaccaacggcaactattttagccattaatcaaacgccgctatttttacaacaaccttattattttttagaagcgaaagccgaaacgatatttgcagaattaacgataaaggagtaa

SEQ ID NO: 21 - DNA, 396 bp, Enterococcus faecalis
aatgggctggaccagggggcgtttttagcacctacgttattagcgaatggtacgaatgcaatgtgtgtggcccaagaagaaatctttggtcctgttgcaacagtgattaaatttgaaacggaagaagaagtcattcgtttagctaatgattctgaatatggtctaggtggtgccgtcttttctcaagatatcaatgtggcattacgggttgctcgtggtgtacggacaggtcgaatgtgggtcaacacatacaatcaattgcctgcgggcgcgccatttggcggttataaaaaatcaggaattggtcgagaaacgcataaatcaatgctagatgcttatacgcaaatgaaaaatatttacattgtgacaaaagaagaagcagatggactgtattaa

SEQ ID NO: 22 - DNA, 369 bp, Enterococcus faecalis
aataatcctgacgtcgatgaagaagcaatggttaatttattcttcaacgtacgcgacgctgcttacacaatcatcgagaaaaaaggagatactttctatggaatcgcggttgcactagcgcgtatcactaaagctatcctaaacgatgaaaactctgtgttaccattatctgtttatttagaaggtgaatatggtcaaaacgatatttatatcggtgcaccagcgatcatcaaccgccaaggagttaaacaagtcattgaaattccattaacagatgctgaacaagaaaaaatggaagcttctgcttctgcattaaaagaagttattgaaacagcttttgctaaatttgaagcagaagaagcaaaataa

SEQ ID NO: 23 - DNA, 273 bp, Enterococcus faecalis
agacctgacttgcgtgaagttatcaaccaaccatttggcgtaactgaaacaaaaggcgcttacgatgtaatcgtaaacgtaaacggtggtggctatgctggacaatcaggagctatccgtcacggaatcgctcgtgcattgttacaagtagatcctgacttccgttctgctttaaaacgcgctgggttacttactcgtgacgcacgtatggttgaacgtaaaaaaccaggtcttaagaaagcccgtaaagcttcacagttctcaaaacgttaa

SEQ ID NO: 24 - DNA, 588 bp, Enterococcus faecalis
catgtaacctttcaagattttctcctttttaccttaacattaaatttaggcgatcgtaaaagtgaaagttatgctctgcaatggaaacatgtcgatttacagaatggaacaatactacttgtccaaagcaaagacaagctaggaaatttaactcctaccaaaggaagaaaaaacagtaaattccaattgccttcctcccttatagagttgttaatgaaatggaaaaaagaacaagcacaagaacttttacaacttggaattaaacaaaatgcagagcaatttcttttcacttatattgatagaaagggaaatgtgaatgtcccggtacacatagactatcttaactaccgcatcaactcagttaaacgtcgacacaaacacttaataaatacttcttctcataagttaagacatacttttagtacgctagcatatgaaggtggcgcaaccatggaacaaatttctagagcgctcacccattctgatacaaaaacaacagaagtctatgtgaatacaccaaacatcgttgatctatccacttatgaaaaatttgaacaacgattagcagaagcaaaaaatataaaatga

SEQ ID NO: 25 - DNA, 756 bp, Enterococcus faecalis
aatcccgttgtgaagagcttgccttctttgacagatttttgtgggattggtcgcagaatggctaaacgactgaatcgtttaggaattgattctgtatatgagttagcgcaagcgaatccgcatcttttacaagaaacatttggcatgatggggcttcaattgtatgctcattcatgggggattgatcgtacctttttagggaaaaaagcaccacataaagctgaaaaatcatttgggaatagtcagattttaccgagagattatgcgcgaagagatcagattgaactagtcttaaaggaactgacagaacaagtggctgctcgtttaagaaaagcgcattgtcaaacggaatgtatcacagtctacgttggttattccaaaggtcaaattgaccgtgaaggacgaactggttggcgaaaacaacaaacgattcctgcaacaaacaatacaaaagttttgatcacctatgtattagccctttttagagaacattatctagcgggaaccgatgtccggcaattagggctttcatatgggaaattagtttggaatgaatctttacaattagatttattttcggaaccagaagagcaaattagtgaaatggagttaaactatctgattgataaaatccgacaaaaatttggctttcaagctttaattcacacctcttctttgttggaaggcgcgacggcaattcatcgttcaggattagtcggtggacatgctggaagaaatgtcggtttaggaggataa

SEQ ID NO: 26 - DNA, 198 bp, Enterococcus faecalis
  misc_feature (112)..(170): Nucleotides 112, 167, 168 & 170 are "n" wherein "n" = any nucleotide. 1
gaggataacatcatgaaacgaacaaaaaaagaatttacaccttataatgagtaccatgatcggccctttgaactgaaatgggcgaccgcttttgcattgggggagttacaanaaagaatcgaagcttctgacgaatattctaagagagcgtttgaacgcttaccgcnncngaaccacgaagaaattgaagaatactga

SEQ ID NO: 27 - DNA, 843 bp, Enterococcus faecalis
  misc_feature (160)..(160): Nucleotide 160 is "n" wherein "n" = any nucleotide.
ccagcaacacaaatcagtttcccatttattaatgctggcgaagcaggaccattgcaattagaaatgaacttaactcgggcaaaatttgaggaattaacaagtgatttagttgaacgtacaaaagtaccagtacgtcaagccttaaaagatggtggattanatccttctgaaatcgacgaagttatcctagttggtggttcaacacgtattccagctgtagttgaagctgttcgcaaagaaacaaacaaagaaccaaacaaatcagttaaccctgacgaagtagtagcaatgggtgctgcaatccaaggtggtgtaatcactggtgatgttaaagacgttgtcttattagacgtaacaccgttgtcattagggattgaaacaatgggtggcgtatttacaaaattaattgatcgtaacactacgattccaacaagtaaatcacaagtattctcaactgctgctgacaatcaaccagctgttgatattcacgttttacaaggtgaacgtccaatggccgctgataataaaacattaggtcgtttccaattaacagatattcctgcagctcctcgtggtgtgccacaaattgaagtaagctttgacattgataaaaacgggattgtaaatgttcgtgcgaaagacttaggcactcaaaaagaacaaacaatcacgattaaatcttcttcaggtttatctgatgatgaaatcgaacgtatggtgaaagatgctgaagcaaacgctgaagcagataaacaacgtaaagaagaagttgacttacgtaacgatgcagatgctttcttattcactgttgataaaacattggacgatcttcaccacgagccg

SEQ ID NO: 28 - DNA, 717 bp, Enterococcus faecalis
ccattccgttttgaagagtccctggttatgccttattatgggtatgcacgtcaagaccgtaaagcacgtgcccgggaaccaatcactgctaaacttgttgcaaacatgattgaaaaagctggtgcaacaagaatgttgacattggacttacatgcggtccaaattcaaggattctttgatattccagtggatcatttgatgggtgcaccattaattgccgattacttcatcgaacacggcattcaaggcgatgacgtcgttgttgtttcccctgaccatggtggtgtaacgcgtgcgcgtaaattggcagaattcttaaaagcaccaattgcgatcattgacaaacgtcgtccaaaagcgaacgtagcagaagtaatgaatatcattggtcatgtggaaggcaaaacatgtgtcttaattgatgacatgattgacacagcggggacaatttctcttgctgcaaacgcattgaaagaagccggagcaaaagacgtttacgcttcttgtacacatcccgttttatcaggaccagccttacaacgtattgaagattcagcaattgaacgcttagttgtaacagactctatttacctatctgatgatcgtaaaattgttaaaattgacgaagtcagcgttggtgaattaatcggagatgcgattaaacgtatccacgaaaacaaaccagttagtccgttatttgaaacaaaaaataaataa

SEQ ID NO: 29 - DNA, 1338 bp, Enterococcus faecalis
gaaaacgaaacgattgaaagctttaccaatcaaataggtaataaattaggtatcggaaataaactttataataatggagtgatttatttagtagctgtcaaagacaggcaagcaagacttgaagtaggttatgggtttgaagagataatcccagatagtttaaccgatgaaataacagatagtaccgtgaaagatttttataaattaaaggattttaatgcaggaatacatattgtcaccattcggattaaggaactacttactattgatactatttccaaaacgacttcgctacataaggttagtttttggcagaaaatttggttatatttattaggaataggaaggtcgttaaaaccttggctaattatagtttttattattgttatgttgtattttttatgggaattacgtaatgcggggaaagaacttagtgcccgcttggctctagttgacatggcaaatcgctataaggaagatgtagctatgttttataatggcggtatttcctctaaggcaattgttttaggagaacaatcagttgaatttaaagctgccaaggcgcgtttggagaaaaatattttatatcctgaaaattcgaaaaaagagataataattcccgcatactatgatatggattttgcctttggcgaggtgacaccaaagaaatttatttataattatgttgcacagtggaaagatttaagaagctcttctatgtgtgcttgtttttggaaggtgaatcaaccatggatctacttaccgcgtttttggataggtgaagtatattgggaaaaagttccagaaaagaaactgcctgcgtgtcggattagtggaattaatgataacttaatatctgcttacctaaaaattattttgtttcctctttcgattttattaaaacatccttttttggtatccgtgactctgattatttatgttcaagttagtttatcagagcagtcgtttccttcgacagttttcacactaatcacagagattctgacatttttagaagacgaagactctttagtacccatggttagtctggtctattttttgattccggtctttttcttatttggttatataaaatcaataggtgttggcttacaaaatagattgcacctggattctatgatccgtaggtttttaaaagaaatccagcaagtaagttcagaaaaatcaaaatcattaaaacaattagcaaacgatttagacaaccagcaatataaaattgaaaaaaaattattgcggaaaaaaattagagaaaaaaagattaccaacaaaaaagcttcaaaatccttctacccgataagacatagtcttcaccaacgg

SEQ ID NO: 30 - DNA, 504 bp, Enterococcus faecalis
catcccgtggtgaagacaatgactggtgccgctgggcgagccattgaaacggcccttgttcaacaaacaaagcactattttgacaatggcgattttgtggtttttgccattgatgggcatgaccccctagatcgctatcatcctgaaaataaacttttcccgccccacaatgtcttaggaactgacgggcgtaatctgtttggctcgctagctgatttttatcaagctcacaaaaatgaggcaaccatttattggatggacaaacggcactattctgcttttagtggcacggatttggacattcgattacgagaacgaggaattacagagctttgtttaactggtgtttgtacagatatttgcgtgttgcatacggctgtcgatgcctataatttaggctatcaattaatgattcctgaacgcgccgttgctagttttgatgaacaaggacacgaatgggcgttacgccactttaaacaaactttaggagcaaccattctataa

SEQ ID NO: 31 - DNA, 282 bp, Enterococcus faecalis
atttctcaaactgttggcggcattgcttccattacggcgtttactgtaatcttcaatggtgtactaacctatgccttgggtcgaattgcattgaaatggtttaagattaacaatccaatcgccaaaggtttagctttaggtgcggccggacatgccctaggtgtggcagttggcatagaaatgggcgaaacagaggctgctatggctagtatttctgtcgtagtggttggcgtagttactgttttagtagttcctttctttgcaacggtcattggtctataa

SEQ ID NO: 32 - DNA, 720 bp, Enterococcus faecalis
ttaggtatcaaaaataaggtcgtttatgcaagtaaagcatttagttgtttagctatttatcaagtgttaaaggaagaagatattgcttgtgatgttgtctctggtggagaactattcacagctttaaaagggggcatggagccagcggaaattgagttccatggaaataataaaacccctgaagaattacgttatgctttggataacaaaataggtacaattgtcattgataatttttacgaaattgacttgttggaagaattattagctacacgaaaccaaacacaaaaagttctttttcgagtgagtcctggcgtggatgcagaaacacatgattacattttgacaggccaagaagattcaaaatttggttttgatgttgcaagtggccaggcaacagaagcactcgttcgtcttttatcaaacccctcttttgatgtacaaggggtccattgccatattggctcgcaaatttttgctgtggaaggctttttagctgctgttgaaaaaatgttcactattttagaagactggcggcaagtccatcaatttacagcatgtgttttaaatatgggtggtggttttggtgtgcagtacatgcagcaagatgagccattagcaccagcaacatttgttgaaaaaattgtttattccttgaaaggtcattgtgaacaattagggtatccaatgcctgagttttggattgacccaggccgcagt

SEQ ID NO: 33 - DNA, 570 bp, Enterococcus faecalis
  misc_feature (27)..(27): Nucleotide 27 is "n" wherein "n" = any nucleotide.
cactactatgaaggtcattccatgcanacagtgacctatccagtacgtgtgatggccggactaggggcccattcagtcattgtgactaatgcatgtggtggtgtcaacgaatcatttgtaccaggagatttgatgctgattaccgatcatatcaattttactggtgaaaatcctttgatcggtccgaatgaagatgcaatgggccctagatttccagatatgagtcaagcttatacgcctgactatcaagcaacagcaaaagcagcagcagaaaaactaggtttggatcttaaagaaggcgtatatatgggctattctggaccaacttatgaaacgcctgcggagatccgaatgtctcggacaataggagccgatgcagtagggatgtcgactgttccagaagtcatcgtagcagctcacagcggattaaaagtgttaggaatctcttgtattaccaacttagcagcaggtatgcaagcgaatctgagccatgaagaagttgtagaaacaactcagagagtcaaacaatcttttaaagcattggttaaagaaacattgacattattgtaa

SEQ ID NO: 34 - DNA, 501 bp, Enterococcus faecalis
accttgtggtggacagtcattcgaattgaaacacagcaaggccaaaaaggtcaaatgatggatacgtatgatttactgcctgtttttcaaaagattcaattatttttacaaacgagcaaagaaaaacaagttgtcgcaaaccacgaagatgaaattaaacagctttaccaaggctttgaaaaagaattcggacgtccactttcaccaattgaattagaaatgattggtcagtggttgaacacggaccattattcccctgaattaatccggttagcgttgcgagaagctgttttaaatcaggcgtatagtttgaaatatattgatcgtattttacttgcgtgggagcgtaaaaatattaccaccaaagaacaagttgctgctgatcagaaaaaacgaaaagattctatgattcaaaatgagattgaacaacaaggtcagacacaagaatcgttgccaaaggttacattacacaattggttaaatccagaagacagtgaataa

SEQ ID NO: 35 - DNA, 555 bp, Enterococcus faecalis
  misc_feature (507)..(524): Nucleotides 507, 521 & 524 are "n" wherein "n" = any nucleotide. 1
ataaaaaggaggtgggccatgctatcaaaagagaaaacaatggaagctattgaaattatgtatgagatgtttccaaatgcagaatgtgaattaaaacataagaatccttttgaattattaattgctgtgattttaagtgcgcaagcaaccgatgtatcggtaaataaagcgactcctggtttattcgcagcttttccaacaccagaagctttagcagctgcgccggtggaggagattattgctaaaataaaaaccattggcttatatcgcaataaagcaaaaaatattaaagcgtgcgcacaacaacttttagaacgtttcaatggagaagttccgcaaaccagagatgaactggtcagtttacctggcgtggggagaaaaacagccaatgtagtaatgggagatgctttcggcgaaccggcttttgcagtagatacacatgtggaacgagtgtccaagcgccttagaatttgtaaggtaaatgcaaatgttactgaagttgagctnagaccgatcgcccnatntaataccaatatgttgggcagacccgacatc

SEQ ID NO: 36 - DNA, 819 bp, Enterococcus faecalis
ttgtcatgcaaaaatacacatagtgagataatctttaaatggtataggaggataaaaatgtctcaatttttaaaagtaatcggaataattgctgttttgttagtcataataggcgatgcagcgtattggttgatactcaaaaagttcactcctgaggcagaaaccccagcaatgtacaatcaagagagaatggttaaaacgattggagaccaattaaaagaaacagatgtacagaaagctcggaccaaagcaccgttgattattgaaaaaaatatcactgaattacagcaagcgattgccaacggaacattgacctatgaagaacttacggcgttttatttggaccgtattttacagttcgatcaaatagataatggcatgaacagcatctctgaaatcaatccgcaagcaattaaggaagccaaggcatttgaccagcaagcctctcaaacaccgaagaagcctttgtatggtattcctgtgactttgaaagaaaatataaatacgaccaacatgatttcgagtgcaggagcttatgccttacgcacgttcaagcctaaggaagatgcggaagtagttaagaagttaacagaggcgcaagctttgattttaggaaaagtaaacttatctgaactagcgaattatatgtcaatgaaagcaccaagtggctatagttccaagcatggacaaacacttaatccttatgggccgctcaaaataacaccttcaggttcaagttctgggagtggggctagtgtgacgatgaatatcggcgccttctccttaggcactgagtcgaagggtgtccaacacggcgat

SEQ ID NO: 37 - DNA, 621 bp, Enterococcus faecalis
agattaccaagcagaagattagctggtaaagaagcagtcttcaaagtaactgttcatgaagtaaaagcaaaagaattaccagaattggatgatgaatttgcaaaagacgttgacgattcagtagaatcattagacgaattaaaagaaaaattccgtaaagaattgacagaagcaaaagaagcagcagctgaagaagcaaaagacgaagaagcaattcgtttagctgttgaaaatgctgaaatcgttgaattaccacacgtaatggttcacgacgaagttcaccgttcaatggatgaattcttaaacaacatgcaacgccaaggaatttctcctgaaatgtactaccaattaactggttctacagaagaagatttacacaaacaatttgaaggcgaagcagaaacacgcacaaaaacaaacttagtgattgaagcagttgccaaagctgaaaacatcgaagtaacacaagaagacatcgatgctgaagtgaaagatttagcagaacaatacaacatgcctgaagcgcaagtacgtaaagtattaaacaacgacatgttagaacacgatattcgtatgaaacgtgctgttgaaacaattactgaaacagctgttgaaaaataa

SEQ ID NO: 38 - DNA, 540 bp, Enterococcus faecalis
atggaaggtgtctttcatctacagtttttttcatataaaataacttttgaaaggtgtgtcaaaatggataaaaattattcgaaaattaaatatggattagtggtgtttggcatcttatgcttgacgtacaatctctgggaattttttacggctaagtattcaacaaaacaaggtgtgacgtttgttatcgaatgtttacttggaattggtctaatctttttaccggatcttgtcaataaatttttaaaaattattatgccaccgactatcgtttatttttactggtttttcttatttatttcagtattcctaggaacctcgttgcatatgatctcaatcatttcgttctgggataaaattttacactttgttagtccgatgctgttaactgctgtgggttatggtattgctggtttcctattgaaaaaaacgaagtacgccgatgtttccccggtggttatttttattatttggggtttgcatttgcacggctttgtggcgtcctctgggaattctgggaaattatctggcattccttag

SEQ ID NO: 39 - DNA, 318 bp, Enterococcus faecalis
cgacaaaaacatacccaggaggacttttacatgacccaagtacattttacactgaaaagcgaagagattcaaagcattattgaatattctgtaaaggatgacgtttctaaaaatattttaacaacggtatttaatcaactaatggaaaatcaacgaacagaatatattcaagcaaaagaatatgaacgaacagaaaaccgacaaagtcaacgaaatggctattatgagcgcagctttacgacacgtgtaggcacgctagaattaaaagtacccagaacacgtgatggccatttttcacccacagtgtttgcacgttag

SEQ ID NO: 40 - DNA, 678 bp, Enterococcus faecalis
  misc_feature (661)..(661): Nucleotide 661 is "n" wherein "n" = any nucleotide.
aatatttttagaaacgtcatcctttacagaatattcaataatgctttgaatctcttcgcttttcagtgtaaaatgtacttgggtcatgtaaaagtcctcctgggtatgtttttgtcgttaaaaacattgtaccgtaaaaggactgttatatggcctttttacttttacacaattatacggactttatcaaaaaatatgcaattagaatatccattaacgaatcatatgaaaggaaatattgttttaacacaagaaaaaacagcgatagcttactatcgtgttcgttctgaaacggtaatgttgactgatgttgaaaaaaaattaaaaacgaaaagaaaagttgctcgtgcgttaaatcgcttaaaagcaaatgatggatttgaaattaaccttttgccagttaatgccgacattcgagggaaaatgggtgctatgcgttctttaattgattctaataattatgaagtaggcgtagataaattgatgaaaacggcaatggttttagaacaagaaatgggtatggtttacgaatatacgtggattattggtgtgcctttaatcaagaaagatctcgctgttgatttaaaagaaaccgttactaattcaattagcaacgtatcggaaaaatttgttaaagggctaagttttgatgtggaactancagaatattgggaatag

SEQ ID NO: 41 - DNA, 1230 bp, Enterococcus faecalis
tggaaaaaatttatgggcgggatcttagcgattagtcctgggctatttttgggacgtgaaggtccttcaattcaactaggtgcagtggttggacaaggctatagtcaatggcggcaaagcaccaagtctgaagaaaaaattttaatcagtagtggtgccagtgctggtttagccgccgcttttaatgcaccaatcgcaggacttttatttgttctagaagaggttcaccattccttttcacctttagtttggttaacctctttttctgcggccatttccgctaactttgtttctttgcatttcttcggattgcagccagttctttatattggtccggttaaatctttgcctttagagtactattggacattagtactgctgggcgttttgctaggattattacgttggatatatcaaaaaacattgttgtccttaccaaaagtatatggaaaaatcaaaggcctttcttctaattattatggttttgtttcttttattttgattttaccgattggttatttctttccacatttacttggcggtgggaatcaaattgttttagctttaggcaatcaaccgactacgatttgggctttagtcggcttactggttttacgttttgttttttcaatggtttcttacggttcgaatctccctggtggtattttcttgcctattctaactttaggtgccattatcggaacattgtatggcagtctacttgtccaatacgtagggatggatccaatttttgtgaaaaactttttaatttttgccatggctggttattttactgcgattggtaaagcaccgttaacagcgattattttagtaacagaaatggtcggcaatttttctcatttaatgtctttaggggttgtcgctttagttagttatattaccatcgatagtcttggcggcaagccaatttatgaaagcttattagaacgtttggttccttctaaagtaagtaatattcgtggccacaaaacgattatcgaattacctatcactgcagaaagttccttagatgatacgatggtacgtgattttgtctggcctaaacaaatgttgctcacttccattcggcgtggcgaatcggaaattttaacacatggtgatactgttatgcatgttggcgatgtgctcattattttgaccgatgaacaactcgcttaccaagtcgaaaaagagatttatcaaaaaactttaccgaatgatttagtgaaa

SEQ ID NO: 42 - DNA, 408 bp, Enterococcus faecalis
ccattcccgttaggtgaaggactggttcagcatggggaaaaagtggatcaatttggccgagtttttgaagcggcctttgctacaaccgaaaatggccatttgttatcaggtcccatgaaacgattattgggattgttgttacaagttttatggagccagcaagtcaatcactttgactttcaatttaaaaattttatcatttggtttattcgcttaggttttccggtggcgtttccaaaagaaattttaagtgctgattacgcagaacaagttttgcttcacacagaaacactaggtcctcctatggtgttggaaaaaatcggtcaactaggagcagctttaaagccaacgcccgatcaactgttaacaacgattgaaagataccaagaaattttaaaagagatttga

SEQ ID NO: 43 - DNA, 423 bp, Enterococcus faecalis
ggggaaattatgtcatatagtgaaaaaatggttcaagcattacaagctgaaaatttagcagaagcacagttaatgtttgaagaagcattaaagaaagatgatgaaaataccttagctgatttaggggaaacgttattatctttaggttttctagaagaagccaaacaaattttccaacagttgttggaacaatttcccgatgcagatggcttaaacattccattagcagaaatcgccattgaaaataatgaaatagatgacgcattcatctatttagaaaaaattccagaaactagtgacagttatgtccaaagtctcttagtaactgcggatttgtaccaagttttagggattccagaagtcagtgaagcgaaattaaaagaagcagccaatcttatgccagaagagccgttaattcaattt

SEQ ID NO: 44 - DNA, 195 bp, Enterococcus faecalis
tctaaaggagtcaaacgtatgagttcatttcgttatattttagtaacattattgaaaattctagtggtcatttcgttagtcattatcttatttgttgtgggaacaatgattggttatggtttgattggaaatgggaatccaatggatgtctttgatgaaaaaatttggactcatattatgaacttctttaaataa

SEQ ID NO: 45 - DNA, 393 bp, Enterococcus faecalis
gataatgaaggagtgggatggaagatgcaagcaaccgtaacagaaataggcaaacatgcaatcgatgattcagaaaaaatgattattctttttggagaaactgctaccgataccttgaagcaacatgcagttattcaatcattcccagaaaaagaccaagttaccttggcagaaggagatcatctgaaaattggcgatacaaactatacaatcacaaaagtgggttcttttgccaatagtaacttgcaaagtatcgctcacagcactttaatctttgctgatgcaccaaccgatgaggatgatgttatccggaatggtgtttatttaacgccccatcagttaccaaagataactattggaacaacaattgattatttagtaaatggagcgtga

SEQ ID NO: 46 - DNA, 471 bp, Enterococcus faecalis
gaggtaaatatcttgattaataacgttacattagttggacgattaaccaaagacccagatttaaggtatacgcaaagtggaacagccgtaggtcaatttacgttggccattaatcgcaactttaccaatgctaacaatgaaagggaagcagattttatcaactgtgttatttggcggaaagctgcagagtcattagcaaattatgcaacaaaagggactctgatcggtttaactggtcgcattcaaacaagaaactatgagaatcaacaaggccagcgtatttatgtaactgaggttgtcacagaaagcttccaactattagaatcaagagaagtaaacgagcaacgaaaagaacaggctacaggtaaagctacgtttgataaaaagtcaatggataaacctgatcctctggatccattttcgccagaaaatagcatagtggatatttctgataatgacctgccgcattag

SEQ ID NO: 47 - DNA, 234 bp, Enterococcus faecalis
ctaaaagaattgtttgttaacacgtcattttatataaccattaatgaattaaataaagtaggtcataaggctactttatccgtcaaagctaaagcaaaaaatttaaggaaactggggcagttaattaaagaatacagaagttgtaattgcaaatatttaaaggataaagtaaccgaaataattggtgatgatgggcgtgtttatttagataggataagtgaacggatggactaa

SEQ ID NO: 48 - DNA, 435 bp, Enterococcus faecalis
gatttatttggaaattactactctttttatttaaaaattggtacactattactaggttatagcacagaaaggagtgtgggaaaagtgttagaaggtctaccattggaaacggtttatttttatgcattagtggggagcgcggtcctcgcttttttactaattatttttggggatgtttttaattttgatggaccggttgacccaatgctgattattccatggattgcttttacctcgctgtttgggtaccttggggaagaattaacagcggtgaatagttggcttattttaattgtcagtggtattctttcaaccattattgttttcttcctaaatttttatgtgttggtccctttgaaaaattcggaggccacaatttccatttcggagaacgacatgaaggtgcgtcttaaccagcatattggccggcgggga

SEQ ID NO: 49 - DNA, 735 bp, Enterococcus faecalis
cgggttatcattaatgaaaaattagttaaattatttggtataaaagtcggagatcaattaaatttagaaaatagtgataatcaaacctatcacgtgaaaattgccgcgattgcagagaactacacgggtcattttgtttatatgacgccgaaactctaccagacgatgacgaaacagaagccggagtataatacagaattcctactttttgacaaaaagttatcctcaaaacaagaaacctcaatcggagaggcgttgacaaaacagccgaaagtgttgaacattacgtttttaactgcgatgaaaggttcgtttgatgatatgctgaaaagccttgatattgtcatttgggtactaattgctgtttctggttctttagcgttaattgtgttatataatttaaccaacattaatgtttctgaacggattcgagaactttccacgattaaggttttagggttttacgatcgtgaagtcaccacctatgtttaccgtgaaaacattattttaacgttcattggtattattgttggctgcttctttgggaaaattttgcatcagtatattttagcaaccgttgaagttgatttaattatgttttcgccaattattcattggccaagttatctgtattccgcagtcatcaccatgtgtttcacgttgtttgtgatggtcattatgcatcggaaattgaagaaaatcaatatgattgaagcgttaaaatcaaatgaatag

SEQ ID NO: 50 - DNA, 204 bp, Enterococcus faecalis
aaaaacagaggaggaacgacaatgaatttaattaatcaaaaactttttgactttgaatgtgatgcctatcacgatggtgaatttacacgagtatcaacagaagatattttaggaaaatggatattttcttcttttatccagctcattttctttcttgttctatacgaccttagcccatatgcaagattttacaacccgggttgg

SEQ ID NO: 51 - DNA, 801 bp, Enterococcus faecalis
gaagacatgaatgtgcatgttattttcaaacaaataataagaatcctatttcaatcctttacagaggaacaaggacttcgtataataaagaaacgaaaaggagcgaaagtgatgagaaacgaaatgatgcatcgaccagtcgttaaaccagaattggttgagtatatgcgtacaaaacaaaagaaacttcccggagaattaggtgcagtggaggcggaagccaatgaagcaggggtgccgattattccgcacgaaacagtagtttttctacaatttttgctaggacaactaaagcccaaaaatattttagaaatcggggcagcaattggtttttcttcaagcttgatggcccaatttgttggtgaagatggtcacgtgaccacgattgatcgttttgacgtaatgataaaaaaagcgaagaaaacctatcaacgcctagagttagaagaaaaggtcactcttttagaaggacaagcagctgagattctaccaacgttggaaggaccttatgactttatttttatggatagtgccaaatcaaaatacattgaatttttacctgaatgtttacggttgttaccagttggcggcgttttaatggtggatgatgtatttcaagctgggacaattttagaccctgctgaggaagtaccgaaaaaaaatcgagcgattcatcgtaaattaaaccaatttttagatgtagtcatggctcaccctgatttaacttctactttagttcctcttggtgatggagttattttaattaccaaagagaaagaaacgattattttagatagttaa

SEQ ID NO: 52 - DNA, 207 bp, Enterococcus faecalis
  misc_feature (45)..(169): Nucleotides 45 & 169 are "n" wherein "n" = any nucleotide.
gttttaggaaagttagccaaggcgcaaattcgtcgaaagattttnattcaggaactttccaatagttcgcgtgcaaaagtactggaaccaagtcaagtccgggaatttggttattggtttcaatataaatcactatctgtaaagagtataccagatgtctttctttttntgatatcagatttgaacagacaaagtagtaaaatttga

SEQ ID NO: 53 - DNA, 369 bp, Enterococcus faecalis
  misc_feature (24)..(121): Nucleotides 24, 98-118 and 121 are "n" wherein "n" = any nucleotide. 1
aaaaacccccacaagaagaaacantgtttattttttttcccccccccccttttgagagaacaacccccccccaaaatttttggcaaacaagagatgcnnnnnnnnnnnnnnnnnnnnntgntgttgaattttaacgcaacagcgcaacaacacgttgatcaaggaatgagtttaaccttgtttatgcgttcagaaatccctgaaggcttgtatgaatggaaagaaacaccaaaacaaacaacccgtgacttgaacattttacgtcattatgcgttcaacaaagggattaaatcaatttactatattcgtacatttacagatgatgctgaagaaattggcagcaatcaaggcgcgtcttcaccacaaatt

SEQ ID NO: 54 - DNA, 258 bp, Enterococcus faecalis
tggactttaatggaaagtaaccaaattgcgaaagaacgtaaccagtttttccataattctgaaaattcagattatgcttctggtgcttacttcgataaatatattgaaggcaactttacaccaaaatttgataaagtgaaagaatttttcaaagacattcagattccaacggctgaagattgggctgcaaaacgcgatgaaaagaaaaaattttttttttattatcaccgtccgccccccccgtttttttttttttaa

SEQ ID NO: 55 - DNA, 222 bp, Enterococcus faecalis
  misc_feature (143)..(143): Nucleotide 143 is "n" wherein "n" = any nucleotide.
ttctccaaagccgtattccatatgatttttagcgaaaaaaagtgtgtaagcccaatgcgcctaatccgattgtttggcttaaaacgatttccatttttggatatttgggaacaacatcaaattccaaaagcatctgttaacanaagtttaaggcacggcttcataagggcggacagaatttcccaaagtcagggaatttcaattaaaatgaaccatggttag

SEQ ID NO: 56 - DNA, 189 bp, Enterococcus faecalis
ttctcctatggaaaatttcttcagtatcctaaaacaagaagtgtattatggaaaaatctatcaaagtcaaatgaattgatagaagcaattgagaactacatttattattacaatcatcaccgaatcaaggaaaaacttaactggaaaagcccagtagaatttcgacaattcaatcaaaaaactgcataa

SEQ ID NO: 57 - DNA, 489 bp, Enterococcus faecalis
aatccaattggttctgaaaatatgactggtttggcacgtgtgattcgtggtcatgtcattactgcctttgaaaatgtgagtttatggcatgaacgagatatttctcactcgtctgctgaacggattattattccagatacgacgattttactaaattacatgttgaatcgttttggtaatattgtcaaaaacttaacggtcttcccagaaaatatgaaacgtaacatggatgcgacctatggtctaatttacagccaacgtgtcttgttaaaattgattgatcatggcatgacacgtgaagaagcgtatgatctggtccaaccaaaaacagcttacgcatgggatcatcaaacggcgttccgtccgttgctagatgcggatgaaaaaattacatctgtcttatcaaaagaagagctagatgatgcctttgattaccattatcatttaaaaaatgttgacacgatttttgaacgtgttggtttagggtaa

SEQ ID NO: 58 - DNA, 504 bp, Enterococcus faecalis
cttaatttattaagcacgacaactatgagcaaattacacaagaatatttatattgctatgctcgttgcccaaggggtcattattggcttaatcgaaaatatgattccttaccctttcgcatttgctcctggggcaaagctcggtctagcaaatttaattaccattattgcgattttcaccatgcgtaagcgtgatagttttttcctggtctgtttacgtttgattttaacgacattactgggcggcacactttcgacctttttctatagtgccagtggtgccttattaagttatttcggcatgttgcttgtcaagcagctggggccaaaacgggtcagcattatcgggattagtgccgttggtggtttcttacacaacgttggtcagttgctaacgacctctttctttgctcattcgtgggcgccgatgctgtacttaccatttttatctctgtttgggttactctcggggattgccattgggattgccgctaattatttacta

SEQ ID NO: 59 - DNA, 798 bp, Enterococcus faecalis
ggggtaatagacgtgactaacgttgccgatttgacatctgtcgaaaaaattattgttttagactttggtagtcagtttaaccaattgattactcgtcgtattcgtgaatttggcgtattctctgagttattaagccaccgaactacggcagaagaaattcgcaaaatcgcgcctaaaggaatcatcttctcaggtggaccaaacagcgtgtatgacaaagatgcttttagcattgatccagaaatttatgagttaggaattcccattcttggcatctgctacggtatgcaattaatgactcataacttaggcggaaaagtagaacctgccgcaaaccgtgaatacggaaaagcagaattagaaatccttggtgatgcgacattattccaaggaacacctgcgaaacaaaccgtttggatgagccacggtgatttagtaacagaaatcgctcctggattcgaaaaagttgggacaagcaacgattgtccaatcgcttctatcgaagatgccaaccgcaaattctacggcgtacaatttcacccagaagttcgtcattcagaatatggtaacgacttattacgtcattttgcttttgatgtgtgtggctgtactggtgactggagcatggaaaacttcatcgatatggaagtcgctaaaatccgtgaacaagtaggcgataaaaaagtcttacttggtttatcacgtggcgttgactcaagtgttgtccgcgtgcttttaccaaaagccattggcgaaccaattaacttgtatcttcgtggaccagggattattacgtaa

SEQ ID NO: 60 - DNA, 741 bp, Enterococcus faecalis
agacacacaattattggttcagggcgcgttgattccgttaaccgccgaacgaccaaaagaagtacattatcaataaaggagcgaaccacaatgacgattggatttatttttgatttggatggtgtcattactgacaccgccaaatttcattatcaagcttggaaagcgttggccgattcgctaggtatccccattgacgaaaccttcaacgaaacattaaaaggcattagtcggatggattccttggaccgtattttagtccatggccaccgcgaaaatgcgtttactccagcagaaaaagaagccttagctcagcaaaaaaatgaccactacgttcaattattagaacaattaacaacagaagatgttttacctggtgtcgtgccattgctacagcaagcccaagcacgtcacattccctgcgccgtggcttcggcttcaaaaaacgcgcccctgattttggaaaaattaggcgtgcgcgcgtacttcgccacaattgtcgatcccgactcgttaagtaaaggcaaacctgatcctgaaatctttttagccgccgctgacagtattggcgtgctaccgcaaaacgccattggctttgaagatgcacaatcaggcattgacggcttgaaagccgcgggcatttatgccgtcggcttgtcggccagccaacccttaatcggagccgacatgcaagtttctgaaatgactgaactaagcgttgatgcactgctcaatcgctaa

SEQ ID NO: 61 - DNA, 351 bp, Enterococcus faecalis
gagctatcttggcaactttatcaagaagcgttgtattccgattatcgtgacattcaaggtggcacgaccgctgaagggattcatacaggggtcatggctgcgacgatccacgttactttagcgacgtatgcaggcgttgacacgcgccagaacgagttatcaatttgtccaaacttacctgaacattggcaagcgctggccttccagtttattcatcaaggcgtgacgtatcaattttcattaacacaaaccagtgtcacgattacagcagatagagacacacaattattggttcagggcgcgttgattccgttaaccgccgaacgaccaaaagaagtacattatcaataa

SEQ ID NO: 62 - DNA, 717 bp, Enterococcus faecalis
ttaaagggttataaaaataaatttaagcacggtgttagtattcatacacgccttgctttaaccgtgaccgccacctttttattcttagggacgttattttttaacatttcagaatatcgccattttccagttgacagttctttttggcagcgtcttttcaacagttggttcttgtcggttacaccaagaacggctggcttttattcggttgattatttgaaaatgagtaatccaggcctgattgtcacgattttgtggatgtttattggtggcacttcaggatcaaccgctggcggcttgaaaaccactacgtttggtgtgttatttttacaatttcgtgcaatttttaaagggaaacagcgagtggaattccatgaacgcacaattcctgagcgagtagtgctccaagcatttactttgttcttcttggcaacttttttatgtgtaactgcttcggttattctctcgtttacagaaacattacctttaaaaaacgggattgagtatattgtttttgaagtgatttctgcatttggaacggtcggtttaacaatggggttaacaccagatttaactgtttttggtaaactggtgattatttttctaatgttcgtcggtcgtgtgggtgtgtacacggtgttattgtcattaattaagaaaggcttggaaagtcagtcgaaagttcaatatccaaaagaatcagtgatgattggttaa

SEQ ID NO: 63 - DNA, 348 bp, Enterococcus faecalis
gaaaggcttggaaagtcagtcgaaagttcaatatccaaaagaatcagtgatgattggttaatagagaaagagggaaatagtatggaatttttaggtattttatgtttgattttaattacaacgactttagcaggtgttgcttgtaaaagagtaggaattcctgcggtaattgggcaattgctagtagggattgtgttaggtccagcgatgttaaatattgtgcatcaagatgtgtttgtgcatgacttttcagaaattggtgtcattatgctgatgtttattgctggaatggaatgtgaattggaattattgaaaaaatatgcgaaaactattgtcatgggtccctaa

SEQ ID NO: 64 - DNA, 186 bp, Enterococcus faecalis
ctacccgttgtgaagagccaaatggtctattctcgtcatggactgagcgaatggaatgccttaaaccaatttactggatgggctgacgtacatttagcacctgaaggtgttgaagaagcaaaagaagcggccgtaaaattaaagaagcaggcatcgaattcgacgttgcttatacttctgttttaa

SEQ ID NO: 65 - DNA, 585 bp, Enterococcus faecalis
agaagcaaaagaagcggccgtaaaattaaagaagcaggcatcgaattcgacgttgcttatacttctgttttaactcgtgccatcaaaacttgtaactatttactagaatactcagatcaattatgggtacctcaaatcaaatcttggcgcttaaacgaacgtcactatggtaaattacaaggactaaacaaaaaagaaactgctgaaaaatacggagacgaacaagtccacatctggcgtcgttcttacgatactcttcctccattaatggaagcaacagatgaaggttctgcagcaaacgaccgtcgttatgcaatgttagaccaacgcgatattcctggtggcgaaaacttgaaagttactttggaacgtgcattaccattctggcaagatgaaattgcgccagctttaaaagacaacaaaactgttttagtagcggctcatggtaattcattacgtgctttagctaaacacatcgaaggcatttctgatgaaaaatatatggatcttgaaatcccaacaggtaaaccattattttatgaattaaacgatgatttactgttgaaagaaaaatactacttataa

SEQ ID NO: 66 - DNA, 621 bp, Enterococcus faecalis
ttggatccaacgaatatttttaggtttcgtcaaaatcaaacagcagttggctcggcggatattttcagtcatttgattgaaaactattttagtatttcgacaggcgcggacgtccaagattttgtgtcagaaggcttaatgcgaacggttatcaaaaattgtcctattgctttagaaaatccagaagattatgatgcacgtgctaatttaatgtgggcaagtagtttagccttaaatggtttaacagggcgcggcaaacaaggtgtttggtcttgtcacccaatggaacatgaattaagtgcgttttatgacattacgcatgggattggcttagcaattttaacgcctcgttggatgaattacgttttgtctgaacaaaccgtaggcaaatttgcacagtttgctcgaaatgtttggggaatagtcgaacaagaggaggaagtagcagcgaaaaaaggtattcaagcattgtatgattactttgtggcttgtggcattccaatgacattaccagaagttggcatcgaagcagataaatttgaagaaatggcacaacaagctgtggaccatagtgcaattgccgaaaaaggcttatgtaccattggatggcagcggatatag

SEQ ID NO: 67 - DNA, 1047 bp, Enterococcus faecalis
agtgaaaaaagaaacaaagcaatactatcaatcggcggttatatggcaaaatggttgctcattaccgcaattattggtttatttatgggggcgttatccgcctttttcttaaagagtctcacctatgtaacagatgttcgtttagcaaatccttggttactctttatcctccccattagcggtgtcgtttttacgtatttctatacgcgttttgggaaaaatgctagccgaggaaataacttagtgattgaacaaggcaatggcggggaagaagatattcccttgcgcttaattcctttaacattgtttggcacgattactacgcacttatttggtggttctgttggtcgtgaagggacggcggtgcaaatggggggcgcaatcgcaaatgctgtaggaaaagtctttaaactgtccgctttggaacgacaagtaattattattagcggaattagtgcaggttttagttctgtttttggcacaccattagcgggaacggttttcggattagaagttttggcggttggaaaagttcgtgcagaggcacttttcccaagtttttttgcaggcttatttgctaattttgtaactgaaagttttggtgtaacacatacgcattatccgatgggcaaaattccgacttggtcggttgaactatttgtaaaattatttttggcatcgatttgttttggtttggcaggttgggtttttagtcgttccattgtctttttaaaaaagacctatgcaaattggtttgctaatgtctaccttcgtgcgtttcttggcgctgccattgtcgttctgtttgtgctcgtcttaaacaaccaacgttatttaggcttgagtttacctttactagaagatgcttttgcaggtaatgcgcagccttttgattttgttgggaaattattctttacggtgttatccttgggcgccggattccaaggaggagaagtgacgccattgtttgaaattggggctacgttagggagttctttggcccctttgttacatctatcgactccttttttagcatgtgtctattag

SEQ ID NO: 68 - DNA, 1110 bp, Enterococcus faecalis
aactttcgtggtgaagacccgccctggtatatactcgagagaatgatttatcaatatgatgaaacaacaaccaaaaacggttactatcaacaaattattgaaaaaattattttactaggtgaagccaaacgtttcgtaacagaattagcttatctaatccaacgtctgattatcgatcacctacatgttattggggatatctatgaccgggggccagcaccagataaaattatggatcgattaatgtcctatcactccttggatattcaactaggcaatcatgatatgatttggctggctgcttatagtggttcactggcttgtttagccaatgtagtacgtatttgtgctcgctatggaaatttagatttgttagaagaacgttatgctatcgatttaaccgccttaaaaaaatttagtttagaaacgtataaagaaaatcctgcttttgcacccaagaaaaatccctatcgtgcgttaactgaagctgaaaaacaagtagcgatgcgtgtgcaacaagccattgccattattcaagaaaaactagaaggccaaattattggtcgacgccctgattttaacttggcacatcggctacgcttagataagattcaaggggaaactattacttttgacgaatgtcgttatacattaattaacagctgtttccaaaccgtttctgaagagcaaccttaccaattaacacgtgaggaaaaacagataattgatgatttattaacgcaatttcagtcttcaccgcggttaacaaaacacatgcgctttctaatggaaaaagcttctctttaccttgtgtataatcaaaatttattgattcatggctgtctgcctctgaatgcggacggtacttttcaagtttatacatttaaaggccactcctattcaggaaaagctttagttgacttctttcaggaaatgttagaagaagcttacgctcagcctgctagtacagatgactatgcaacagattgtttatggtatctttggtgtggcgaaggttcctcattatttggtaaacgagctatgaaaacctttgagcgttattttctcgctgaaaaagaaacacattacgaagaaaagaatccttattaa

SEQ ID NO: 69 - DNA, 228 bp, Enterococcus faecalis
atgtataaacttgaaaagtaccgtccgcattcagaggcagacagccatgaatcaataaattttgattatacacaaggtaaagagaagctttttccattagaaagcgcatgtgttttgttaaccgcggtgaagactgaaattgcgttaataaatcatcaattatctgtttttcctcacgtgttaattggtaaggttgctcttcagaaacggtttggaaacagctgttaa

SEQ ID NO: 70 - DNA, 480 bp, Enterococcus faecalis
aatgaggagaagcgaatgattggtattagtagttgcttaggtgggatttgttgccgttacgatggaaaatctcaagaacaagaagcgttaaaacaacttgtaactaatggaaaagcaataatgatttgtcccgaagttttaggggagttgcctattccacgtccgccagcagaaatcattggcggggatggctttgatgtttgggcgaatactgcttatgtatatacggataacggggaagatgtgactgagacatttaaagcaggggcacaacgcgcgtatcaaaaattaaaagccttacaaattacaaccttgattttgaaagaaaaaagtcccagctgtggcagccagctgatttatgatggacaattttctggcattaaaaaagctggagttggagtcgcaactgcttattttattcaacaaggaatgaccgtttattctgaagaaacatggcaacttgcggacatttctttttaa

SEQ ID NO: 71 - DNA, 324 bp, Enterococcus faecalis
aaatttacaaagcacttcgtcaaaaaaaaattgacccccctaatttggatcttaactggcaaagaagaaccatttgaaaaaaatcttcggcttaaaatattgggggcagaagaattactttacaaaaccctttcagtcccagaaaaatccttatcccgcccgaaaagctatttccccggcctcttaaaaacctaccccgaaccgaaactgctctcacaaagaacctatctaatactccctttggttaattggggagaatcttgttggaatcaacacacttttgtgaatttctttgcgccccattccgtccccttgaaactaaat

SEQ ID NO: 72 - DNA, 1035 bp, Enterococcus faecalis
agacaaatcacaattattggtgccggtttagccggaagtgaagcggcatggcaagtggccaatgctggggtaccagttgatttatatgaaatgcgccctgtcaaaaagacaccagcgcatcaaacagaaaattttgcagagttagtttgttctaattcattacgtggaaatagtttaaccaatgcggtaggtgttttgaaagaagaaatgcgccgtttaaattcaatcattattggtagtgcagatcaaaccgctgtaccagctggcggcgccttagcagttgaccgtgattctttttctgaaacaatcactgaaaaaattaaaagtcatccattaattacaatcaaaaatgaagagatcaccgatattccggaagggattgtaattattgcaacgggtcctttaacctctgaaagcttatctcaaaaaattcaagaatttaatggttctgaaggcttttatttttacgatgcagcagcaccaattattgataaatcaacaattgacatggataaagtttatttaaaatctcgttataacaagggggaagcggcttacttaaactgtccgatgactgaagaagaattcaatgcttttcatgaagcactagtcaatgcagaagtggttcctttacgcacgtttgaaaaagagaagtttttcgaaggctgtatgcccatcgaagtaatggcgcaacgtggcattaaaaccatgttgtttggcccaatgaaacctgtcggactagaagaccctaaaacaggtaaacgcccttatgctgtaattcaattacgtcaagacaatgctgcagcttctttatacaatattgttggtttccaaacgcatttaaaatggggcgaacaaaaacgagtattccgtatgattccgggattagaaaatgctgaatttgttcgctatggcgtcatgcatcgtaatagttttatgaattctccagagttgctaaaaccaacctaccaatcaaaaaaacgtgacgacctgttttttgctggacaaatgactggtgttgaaaggatatgttga

SEQ ID NO: 73 - DNA, 183 bp, Enterococcus faecalis
  misc_feature (4)..(5): Nucleotides 4 & 5 are "n" wherein "n" = any nucleotide.
ttgnncatccccgggctgtggactgtacatatgaatcgttgtatgttatacaacgtgaatggttactatgatttactagctgctttttttgataaaatggtagaaactaatttcttaacagaagcggatcgagctaaaattttcatttcagattccttagaaaaaaattggtgcatttattga

SEQ ID NO: 74 - DNA, 279 bp, Enterococcus faecalis
tcaatggatccagatgttttacttttcgatgaaccaacttctgcattggatcctgaaatggttggcgaagtgctaaaaacgatgaaaaatcttgcccatactgggctaacaatggtgattgtaacacatgaaatggaatttgcgcgggacgtatccgatcgtgttattttcatggataaaggtgtcattgccgaagaagggaccgctgaagatatttttgtccatccaaaagaagctcggacaaaagagttcttacatcggattttaacgaaaaactag

SEQ ID NO: 75 - DNA, 243 bp, Enterococcus faecalis
aagagttcaagacaagttacgaccttaaatgaaaattttaaggtcgttattttatataaaaaaatatataaacgacttgactggcatcaaataaaggcgtatgattcatttgtgaataaatgtgaaataaaacacaatctttcgtggagaggaagtcttgaggtgcaacaaagtcaaactatttatttgatgggcacagtaatcgatgtatttataggccctaaatgcctcaaaacggggaag

SEQ ID NO: 76 - DNA, 810 bp, Enterococcus faecalis
ctaaagggatttgtacgcaagtcacggttagtcgctttgaaaaagaatggtcaattcccaacttgtaaaataatgatccaactatgtaatcgtttagagctacctttgggggaactcttcccgcgcgtagggattaaacaacctgaaattcttgaaaaaatggaagaagcagaattcttgttgattaccagcgaacatgaccaattgcaaacaattttaaaaaatattccttttgatgaaatcaaagattcccaactgttattagaatattattatttacaaggctttgtcatgatttttcaaaatgcttcgttgatggattgcttatttacctttgaaaaacttctgtttgaagagcaaaaatacacgagcgatatttaccgtttgttagcttttactggaattggcatggcctatgccaaagaaggcgaaattgagaaagccgaattttatttcaataaggtcttcaaggaaatttatctctatactattcaatcaatggaagatacttggcgagtattaaatgttgtctttcactgtggtgttttttatgcagaaaaaggcgatttagaaacaagtgatgctttgttagagtatgcgatttccatctgttctgataatcacgtcacgtattacttggcaagagcagctttccaacttgcgaaaaatcccttagctgaagaaaacccgcaagagcaaattttagaactactacaagatgcccgcgcgtatgcaaaaatcaataaaaatcgcatcttgttggaagcaattcaaacattgaaagaaacaattttatctaagggaaattag

SEQ ID NO: 77 - DNA, 396 bp, Enterococcus faecalis
  misc_feature (39)..(39): Nucleotide 39 is "n" wherein "n" = any nucleotide.
atttattcacccaaatgcgcatggttgcgaattttcatnaagacagcacaccaagatcgctccttgtttcctgctaaagaaattgtttatctggcaacgatggggggcgctaaaacgttaggcttggcggagcaagtcggctcattggaagtggacaaaaaagcggatataacattaattgaaacgcaatcagttaatatgtttccgatttttgatgcctattcagcgttggtttattcagcaaatgctagcaatgttgaagccgtttgggtgaacggtcaacagttagttgccaataaagaattacaacaagctaatctcaaagaaatcaaggaaaaattatatcaggccatgaatacgtttgtgaaagaagctaaaaaaagagctgctctctaa

SEQ ID NO: 78 - DNA, 333 bp, Enterococcus faecalis
gtcagaagaatagcgaaggagcgaagaaaaatgagtcgattggttagtacttaccaaaggaatgaatcgataaaaaaaatagcagtgatggcgataaccgctttgacttctgcggtcggtttgaatttctttttgattccggcaaaagttttttcggcagggatgaacggaattgcgcaaatcattgctacattattatatacaaatttaggaatccatattaatacagggattttcattttatttttaaacattcccgtcttcattctagggtttgtaaaattagggaaacaatcaacgatcttatttcagtcttcaccacggggatgggca

SEQ ID NO: 79 - DNA, 258 bp, Enterococcus faecalis
aataagatcgttgattgtttccctaattttacaaaccctagaatgaagacgggaatgtttaaaaataaaatgaaaatccctgtattaatatggattcctaaatttgtatataataatgtagcaatgatttgcgcaattccgttcatccctgccgaaaaaacttttgccggaatcaaaaagaaattcaaaccgaccgcagaagtcaaagcggttatcgccatcactgctattttttttatcgattcattcctttggtaa

SEQ ID NO: 80 - DNA, 531 bp, Enterococcus faecalis
tatgatgaagcaaagaatattttaggaggtttttacatggctgcaaaagaagcaagttttgatgtagtttcagaggtcaatatggaggaagtcaaaaacgcaattcaaattgccttgaaagaattgaaaaatcgttttgactttaaagggtcaattgctgatattaaattggaaaacgataaattagtagtcgtagctgaagatgattataaagtcgagcaagtgaaggatattttatttggaaaattagtcaaacgcaatgttccgattaaaaatattcatttttcagaaagtgaaaaagccttaggcggtactgctcgccaatatggtgatttaatcagtggtattgataaagaaaatgcaaaaaaaatcaacacagctatcaaaaactctgggattaaagttaagtcacaaatccaagaagacaaaattcgggtaactggaaaaagtcgggatgatttacaaaaagtcatggctcttttacgagaattagatttaccaatggctcttgagtttaataattatcgctaa

SEQ ID NO: 81 - DNA, 414 bp, Enterococcus faecalis
gaaagaggttttaaaatgaaaaagtttagtaagtttttattatcattagttgtagttacaggattattgttaccaactgccgcagatgcttatcaagtggaacaagatcctatcgattttggcggatattttccaggttatgcgactaacgaattaattgtcttgcacgagtcaggaaatgggaacaacgttggcctaaacagtctagacaatgaaacggcatatatgaaacgcaactggacgagcgcttatgtttcatattttgtcggttctggtggtcgcgtgaagcagttagcgccagttggccagattcaatggggagcgggagcgacagccaatgcaaaagcatatgcacagatcgaacttgctcgaacgaataataaagaaacattcaagaaagactttgctgcctag

SEQ ID NO: 82 - DNA, 198 bp, Enterococcus faecalis
atgaaaattaattggaaacataaattcacaagcagaaagttttgggctgcagtgacaggagtaatcattgctttgttagcggttttcaatgtagatgatttaacatctgaaaaagtggtcactttagtagcagctattggcttattagctgcatatattgttggcgaaggatttgttgattcaaatagagataattaa

SEQ ID NO: 83 - DNA, 243 bp, Enterococcus faecalis
caaagcaatgattactcctgtcactgcagcccaaaactttctgcttgtgaatttatgtttccaattaattttcatttagcgcctcctaaaaatgtgcttaaccagttaaataaaatagttattgctccgctagaaacaaatatagctagtattactttccatatattttcagtgttaagtttttttagttcgtcttttctttcatccgcttcactgtttctattcaaaatagcatttagaatt

SEQ ID NO: 84 - DNA, 252 bp, Enterococcus faecalis
cttgatcaaggctcttcaatggcagatgggcttgaagctgtggctcaagtggtcggtttcctccatttcgaaggaacttatttaggaaaaaaaggcacctttactgcttgcgaaaaagggacgtttacacagggtcttttagactgcccaagtaaactatttcaagcatcaggtgagcttgccggtttatccggtcgctacacttatgaatttagtcaagaagaagcgctgcttcatttagactttgtataa

SEQ ID NO: 85 - DNA, 942 bp, Enterococcus faecalis
attaaacttttaaggagaaaaatcatgaaaaacacccgaaacaccgtcccatcattactaattattattttgcttgtgggatttccacaaatcagcgagtcgattttcacacccattttgccagcgcttagttctgcttttaacattcacgatagcgtggcacaattaaccatgagtatttattttgttgcctttgccgttggcgttttattctggggaattctatccgatacgattggacgtcgcccaaatatgttattaggaattttatgctatttaattggaaatattggcctttttttgagtccgacatttccttggctgttattcttccgtttaattcaagcatttggtgcaagcgttggttctgtcattacccaatcgatgatgcgggaaagctttaacgatcttcaaagagggaaaatttttgctcaaacaagcgctgccctatcgctatctcctgccatcggacccttagtcggcggacttgttcaaacctattttggctatcagcatgtctttagcaccttaattgtcatggctgttctattacttttctatagtttttatcgtttaccagaaacctttcacttaggaaataccttaacgaaagcgcctttttggtccgtggcgaaacgcctttccttcgactcgaaagtttggtgctacggcttattgattgggggcattaatggtttattgtttagctactatgcagaagctccgtttattttcatcaatcactttggctttagcagtgtccaatatggctttcttggtttagttttagctgtgtctagtattcttgctgcggttcttatcaattggttgctaggatattggtcagcggaaaaaattgcctttgctggtttgctgctaagtatctttgcggcttgctgtttattaataatgacacaatttgaacacaatcattggtcttaa

SEQ ID NO: 86 - DNA, 993 bp, Enterococcus faecalis
agaagatggagatttacgcttcaagagcgtcgttgcctaattgtttgggtatacacattaaaaccgttaaaacagttacgccgatatggactgattcactatgtttcacgaaaaatgaaatatgtggtgatttacatgaatgaagaaaatattgaaagtaacatggaaaaaattaatcagttacattttgttcgtagtgtcgataaatcgtatcgaccagatgtcgaaatgaattttgctgaaaaaattggtaccaaagcggcttatcaagaacaagaagatcgacggctatgtagtagaggaattatctacagagattcgcttagcagagaatgtctaatgcaaaagagtgagaaatgttatgagaaatttcaaacatttttcactctttttgttataatgaattataaaagaatgattgataaaggagtcgaaacaatgcgtgttatttctggagaatatggtggccggcgcttgaaagcgttagatggcgacaatactaggcccacaacagataaagtaaaagaatctatttttaatatgattggtccatatttcgatggcggaatggcgctggatttatattcaggaagtggcgggttagcgattgaagccgtttctcgtggaatggacaaaagtatttgtattgaaaagaattttgctgcactaaaagtaattaaagaaaatattgcgattacaaaagaaccagaaaaatttgaagttagaaaaatggatgctaatcgtgccttagaacagttttatgaagagaagttacaatttgatttggtcttattggatccgccctatgccaaacaagaaattgtttcacaattagaaaagatgttagaacggcagttattaacaaacgaagccgttatcgtttgtgaaacagataaaactgtcaaattaccggaaacgattggtacactaaaaaaaacaagagaaaccgtttacggaatcactcaagtaacgatttatcgtcaggaggcgtaa

SEQ ID NO: 87 - DNA, 276 bp, Enterococcus faecalis
cgatttatcgtcaggaggcgtaagatgcgtaaaattgctctatttcccggaagttttgatccgatgacaaatggtcatttaaatttgattgaacgcagtgcgaagttatttgacgaagtcattattggcgtttttataaatacaagtaagcaaacattatttacgccagaagagaaaaaatatttaattgaagaagcaactaaagaaatgccaaatgtgcgtgttattatgcaagaaacccagttaactgtggaaagtgcaaaatcattaggggct

SEQ ID NO: 88 - DNA, 462 bp, Enterococcus faecalis
aagagaaaagggaaaagagggatggttatgagaccaaatttaagattttacgttcaaacaattaatgatatcgttaaaacaacagaagacattggcgaagtcatgaatccatattacgaagaagttcgtcaagcgatcgataagaataaagtgaatgatttaacagccgaacgaattgcagaaattcaagcaaaatttaaagaaggtactgaaaaatatgaattaatgctcaaaaaagtcggaacattaaaaccgacgccacaagtacttggcattcacaaaaaatttcaacatgcttatacagaatatgtagcaggatgcaatgaaatgattttagcaacagatccagaaacaggtatcgatgcagatttatttaatgcttcagaggaaaagcaggatcaagcaacggatgaattaacctttgccattacgcggatgagcaacattcttttgaaaaaataa

SEQ ID NO: 89 - DNA, 201 bp, Enterococcus faecalis
  misc_feature (57)..(60): Nucleotides 57 & 60 are "n" wherein "n" = any nucleotide.
cgctcgtggtctttaacacaagtgttcctgctcttgaaaacaacaagtctgagcctnttnttcaagcctttcgaaaatttttattttgaattaaaacaacattttttcaatgaagaagatgaaaccaatcaattgaatgaacgtttagaggaaatgaaaattgcctttgaacaattgacggatgactacaatgttctataa

SEQ ID NO: 90 - DNA, 303 bp, Enterococcus faecalis
ctgggtataaacaaggggcggcaggttctacttacttatcttggcaacgaaggcaattggagtttagtcgtacgggcctcaaatatcaatggtgaatcgcctgatgatttagcgaaaaatgttgtcaacattttggaacaagaaacattaccagcaccgaataccgttggtcaaatcacactgaacgtggcaggaaccactgactataatcgaaactcagtagtttggcaagccggtacagtcgtttactctgtccatcattttgacccaattcaagcagtgaagatggcaacatcaatgtaa

SEQ ID NO: 91 - DNA, 474 bp, Enterococcus faecalis
acagctaaaggaggttatctagaaatgaaaaagtttttacgcgtatttttaatttttattggggtattctttcttgcaagttgcggttcaaaaatagagacaaaaacctttgtaggttcgccacaagatgggattgattccaccttaacctatacgtaccaaggagataaagtcttaacgcaaacggccaaaaacattgtttcttatgacaaattggggattacaaaagaagaggcaaaaacagcgttggaacccgtttctaaacaatatgaggacatcaaagggcttgattacaaactgacctatgaggacaaacaagccatcgaaaaattgacgattaattatgaaaaacttgattatgataaagccaaaaaagtggatggtatccagattgatggagattcttctaagggaatcagcatgaagaaaagccaagaattggtggagtcacaaggttatacagaacaaaaataa

SEQ ID NO: 92 - DNA, 195 bp, Enterococcus faecalis
  misc_feature (5)..(22): Nucleotides 5, 21 & 22 are "n" wherein "n" = any nucleotide.
atgtntatggatctatcgttnntacgaactatggtatattcgaacaaggtaaaaccaggcattttaaaagagttaaatgcgcatgatgccgaacatgtccacacattcttggatgatatcgtgggcgcaattgcggctgcggctgccagtcggttggcccactcacaaccagatttaagtgatattactaaataa

SEQ ID NO: 93 - DNA, 1299 bp, Enterococcus faecalis
agacatattgactggtctgagttaaaggatatgagcttaggccatgtgatggaactgtttggcgaatcaccagaagaagaaagtaatgatgacaaaaaagaagagtcgacagaagataacttaatagtctctgattcagaggatgtttctggtctagaagcatcgcttcaagaaggggctagtgaggagactcatgattcggtggaggagtcgataccagcgacagaagagacgcctactcattcaacagaagaaaaactagcaacggacgaagcagttaatttagaggaaacaacagaagaaacaacggaagaaacaactactgttgaagcagaaacagctgaggtatctgagacggtgaagtcagaagaggaagctttaacagagatttcaggaactgaagttatctctaccacttctgaagaagaaattttttcacaaccaccgatagaagatcaagatgtaacaccaaacgaaactttgcaagcttatattcaagcgcatcgagcagatacagaaatgtctgaaaatccatcagaagaaacagcagagacccaagagttagaaaacagcggtgaggcagtattaacccaagccgaaacaccaactgaatccatttcagattctgaagaagggttaacaagtgcagcgtcgctagaggcaccgagcgacgctgatgcaaccgagggaaaagtttcagattcaggtgtgataccaccgatgaatgaaactgggaatgctcaaccagcgcctgctccgaagaaaccatcaaaaaaagtagttttcgttgcgcttgcggttgttttattaactggaggtagtgcttgggcgtatcatgatcaaacgcaaaaagctgccgcgcaagaggcggcggcactaaccaagaaaacagatacgctgaaagatgaactagcagccttttataccacgaaggagcaagtttttattaaacccgatatggtgactgttagtccaaaaaaactctcaaaacaagtcgcggaaattaaagattccgaagattattctcaattaaataaacaaattccaacattgaaagaaaagccacaaaacattccacaaatcaaacaatttatttgggggcgccgaattgtgcatggggcaatgagtttgataccgggcgattctagctggctggatcaaaccaaatttccgttaaaaaaattaaccaggaaaatgaatccatttggaccaaattggattgaaccaagccaattcgatcaatccgaaacccaccaattaccaaccaattttccaaaaaacttaaaaaaagcgggttaa

SEQ ID NO: 94 - DNA, 351 bp, Enterococcus faecalis
  misc_feature (284)..(284): Nucleotide 284 is "n" wherein "n" = any nucleotide.
gcatttttagccatagtgattaaatggctcggctttttaggatcggttggtgtcttcttgtttatatttggtggagtaattaaaggaagttttaataaattgttgaatgaaacttatttttattcagaacatgttggtcatcctgagtatgcccctaagcaaacaaaaacagaggaaggttctgtgggaaatcctgtcggtgcaattattgcatccatttattggcccttagttgtggcactctatctatttattaattttgttttaggggattggcggtttanttggttaatctttatgttcgcaggaatcttttataacaccatccaagcatttttacacaaacattga

SEQ ID NO: 95 - DNA, 471 bp, Enterococcus faecalis
actggattacttttaactcatccaattgttgaggtgattgctatgtggcaacttaaaaaagaacaaaatgttcccatttatcgcagtattatggagatgattgttcaaaagattcaaacaggcgaattattaccaggcgaaaaaatcccttcggaacgtaaactggcagagtacttgtctgtcaatcgttcaaccgttgttcatgcattagacgaactggtggacttaggctggattgtgcgaaaaagaaggagtggaacgattgtcaacgaaggaaaatggggggtaatgatgacgccacgaacggattggcatcgttatttaaaacaaaatgtgttcaaacaagttcatcccttggtgacagagattgagttacgtgctaaacaaaatttgccgactgacttagatatgtatacaggcgagtcgccgttagacttaattcccagtgtcgattttccagcattaaattgg

SEQ ID NO: 96 - DNA, 459 bp, Enterococcus faecalis
aaaacttggctgatcatctgcaagactaaattcggcttgcgcctccgttcagttggtgaaaatcctcaagctgccgacacattaggtatcaatgtatatgctatgcgttattcaggcgtactgatttctggcttgttaggcggtatgggcggtgctgtttttgctcagtcgatttccggtaacttttcagctggtacgatcgttggacaagggttcatctccatggctgctatgatctttggtaagtggaatcctttaggggcaatgggtgcctcattgttctttggttttgctcaaagcttgagtatcattggcgcacaattaccagttatttcttcgattccgccagtattgctgcaaattgctccatatttgctgacaatcattgtgctggttgttttcttagggaaagcttctggtccaaaagcaaacgggaagaactatatcaaatcaaaataa

SEQ ID NO: 97 - DNA, 408 bp, Enterococcus faecalis
acgaagtgttctttatccaaaggtcaccttcatagaggagtgaataccatgccaaaagaagaaatactgacaggcccagcggtcatcaaaattgtaagtacctatatgggaccagaacatgttgagttggttcaaaaagcattaacttatgctgaaaaagcacacgaaggtcaagtccgacaatcaggtgaaccttacatcatccatccgattcaagtggcaggcattctggctgaattacatatggatccccatactgtagcaacaggatttttacatgatgttgtcgaagatacggacgtaacactggacgatttaaaagaagaatttggcgaagacatcgcaatgttagtcgatggcgtgacgaaactaggaaaaattaaatatacatcttcaccacgagtggac

SEQ ID NO: 98 - DNA, 261 bp, Enterococcus faecalis
aacacagtcttggttgcgtatgaagaatcagcaaaacaaggagaaaaaagtcaattagcacaagtattatccacttgccagccaggcgcacgtttgtgtgtgctctttggacctgaaggtggctttgcaccgcaagaaattgaacaatttttgcaggctggggcgaaactttgcgggttgggtccgagaattttacgagcagaaacagcaccgttgtatcttttaagtgtggttagctaccaaatggaacttttaaattaa

SEQ ID NO: 99 - DNA, 192 bp, Enterococcus faecalis
gaaagggacaaagaattcccaattgaagtgacgattgcgtgtggtctaccaaaaggggacaagttagaatggattgttcaaaaaggcacggagatagcggcacaatcagttgattcggctttcaagaagaaaacttcgggtggtcagagtgagaccacagggggaggcggggaagaaaggagaaaaatttaa

SEQ ID NO: 100 - DNA, 603 bp, Enterococcus faecalis
gagaaactaatgattgagaaaaaagattttgacacaattagaaaggcgttcttaatttatgacaccaacttcaataatcatatgttcacttatacatatcaacatcggaaaacaaagaaattgttagaaatgaacgttcaatttgaagctgggaattttatgcatttatgcggagttgactattatcaaatagataaacaagggagctgtaaatttcgttttaaggctactcaattttacagagctttaaaaaataataaagtttcactgcgcgggattaaacctaaagatgatggaaccacaggccaaaaattacaagtaattcctctattagaaatgcttatttctccaggtgtacgaatatgcgatggaggaaaattttataatttacagtatgaaaaagcaattcgttcaggcaaaatgattgtggcgttaacatgtaaagagaataacaaaaagtacgttccacaatctttattatcgttaataaatcagccacgaaagagccaatcgaaatctttaactgaatcccatgaagtaattaagataagtaagtctgagctgaatagcacctcagtaattgaagtttacgataaattttaa

SEQ ID NO: 101 - DNA, 186 bp, Enterococcus faecalis
ataattcaaaaagtcaccgtcttaaacggctctacatcagagaggtatgttgaagcatatctctcttttcattttcattatagcgcattttcccgaaaagtacgaataaatttagcgttaatccgtgaaatcctaaaagctgttaaagaggagaaaaacctctgggctttttctctttgcctatag

SEQ ID NO: 102 - DNA, 291 bp, Enterococcus faecalis
atactacggatgactactgttccatataaatcagcaaaagaaggactaatgaactcttattactatgcattcagagaccgtcgtcaaaagaaacgtgacttccgtaaattatggattgcacgtatcaacgcggcagctcgcatgaatggcttaagctattctaaattaatgcacggtttgaaattggcagagattgatatcaaccgcaaaatgttagctgacttagccgttaacgatgcagcagcatttacagcgttagctgaacaagcaaaagacgctttaagcaaataa

SEQ ID NO: 103 - DNA, 387 bp, Enterococcus faecalis
atagatatgcctagccttaacgaaaggaagaaacctatgacttttcaagaaactattagcgcctatatccaagaacgttatcagataacgcccgattttccttttaaaaaacacccagactatctcgtctttcgtcatcctagaaatgcaaaatggtttgctttaattatgccactggatgcacaactgctcggcgctaccgagaataagcagctcactattttaaccgttaaacttgcgcctgaattgattgccttattaaagaaccaacctggctattttcctgcctatcatatgaataaagagcattggttaagtctttctgaagaaattccgctctcacaagttttttcatttatagatgaaagttaccaacggagttattaa

SEQ ID NO: 104 - DNA, 204 bp, Enterococcus faecalis
  misc_feature (22)..(196): Nucleotides 22, 49, 50, 51, 115, 119, 134, 136, 138, 139, 196 are "n" wherein "n" = any nucleotide. 1               5
tggactaatcggtgcacgaacntaattatagtgtctaatttgcgcaggnnngtttacattattacttattttttaatgattaatattaatttaaatgggggggttaggggaaatnaaanagtgaccaaaaaaanantnnaaaccaagcccgttcaacttattttgttccccaccaccccccctgttttatcctttngaaattaa

SEQ ID NO: 105 - DNA, 240 bp, Enterococcus faecalis
tatgagctgaatattatcgctccaagatcaaggcaaaggaggaaacttaaaatggcaaaagtatgttacttcactggtcgtaagacttcaagtggtaataaccgttcacatgcgatgaactcaacaaaacgcactgtgaaacctaacttacaaaaagttcgcgtattaatcgatggtaaacctaaaaaagtttgggtgtcaactcgtgctttgaaatctggtaaaatcgaacgtgtttaa

SEQ ID NO: 106 - DNA, 510 bp, Enterococcus faecalis
  misc_feature (87)..(208): Nucleotides 87, 88, 175 & 208 are "n" wherein "n" = any nucleotide. 1
cggtgggggattttgattctttttcaggagaagaataccttttgttcccagaaactaccgaaacactcattcaagcacctgctgaannaagttgatacagatacacaattagcgcttcaagaagctttacaacgatttccacaagcagagatgacaattatcggtgcgacagggngcagaattgaccacctgttagccaatctttgtntaccctttgaaccacgatttcaaggcgtacttcgtcaaatccgtctatgcgatcgtcaaaatagcatccagtattacgcccctggttcatatatcgtaccaaaagagccagataaagaatatctggcctactgctgtttgacgcctgtagaaaacttgacgctacgacgcagtaaatatttattaaccaatcaagatgttccttacccaacatcgtatgcaagtaatgaatttatcgaagaagccgctgctttttccttcgatgcagggatgattgcggttattcaaagtaaagacaagtaa

SEQ ID NO: 107 - DNA, 309 bp, Enterococcus faecalis
ttgattaacaaaatcagtattagatcacttagattcttccatacgattcgtccatcatcttgtttcacgataaaaactcctaaaaattatttagatagaatcctatcacatcaactttttagtagaaaagtacatgttttggctttttcgaaaaaagtcgacccttttagtaactcgggttcagaagttgctaaattcggtaaatgttttggtatttttcgtattaaatttgtcgtcaaattgactacgaaattttgccctattttgacgacactgatagtcaaaatcggacaatctagggcaatttaa

SEQ ID NO: 108 - DNA, 402 bp, Enterococcus faecalis
tttttaggagtttttatcgtgaaacaagatgatggacgaatcgtatggaagaatctaagtgatctaatactgattttgttaatcaatcaatttatcgaaaaacacgaaataaaatctagccgtcaatatcataggaaattattagaaaatcccaattctgcaccaagtatgtggtttatcaatcaaaaatatggttcatggaaaaacttattagttagtcttgggtgtgataatggagaatatgggaaatgggcaaaaatatcagaaaaagatttattgaaaatagtagagtcttttatcacggttgagaaaataacttctcagcgtatgtatgaaaaaagatcagtaggaaaagacgttccttcattgagtacattaaaaaagagatttgggcagcactcc

SEQ ID NO: 109 - DNA, 513 bp, Enterococcus faecalis
gctcattgtgtctacaaggacatcaatgtactaagaggactagtagggcaatctgtcattctcggtccgattattttcatgttaattcagattattcaagtggttattccgattattcctggtggtgttagctgtgctgcaggggtcttgattttcgggccaacaatgggcttcgtctataattacgttggtattgcacttggctctattatcattttcttattaggtcgtaattatgggaaaccattcattatgagccttgtcagtgataaaacatataacaagtatatcggttggttagacaatgaaaaacgttttgaacgattgtttgctttagcaattttcttcccgattgcaccggatgatgcgctttgtttaatggccggtttaacaaaaatgtctgtgaaaaaatttactctgattattttattatcaaaacctgcttctatctatttatatagtcttgcgttaatttatggcggtacatttttaactagcttactgggaatgtaa

SEQ ID NO: 110 - DNA, 312 bp, Enterococcus faecalis
tccttttattatggaattttggtagaaactgggggacttttgatgtttagttattttaaaaatagtattgtgaatacgctagattttcttaaagggacaacggcgtattttcgcgatgtgctcttgatgcacggatttatgttattcgttctattgcctttattgacaagtttgtccaaattggtactcaaagaaagtgggattgattatatttcctacgataacttagggggcaattgctacgcaacatctctatgtccttttgacttttctactaattgggctgtcaattttactggcgctctgttatga

SEQ ID NO: 111 - DNA, 456 bp, Enterococcus faecalis
ttgggctgtcaattttactggcgctctgttatgaatttacctttttattgcttaatgtctattttattagagaaaaagcaaccaattactctaacgcaattattgcacggcaccttgcttcagatcaaaaaagttcgaggaaataactttctgtttttcctggcatatttctttttgattttaccattaagtgggttaaacttcccctcttatttattaaccagaattaagaatccaccctttatcttagaatttaatttggcaaagcgcctccataataataatgggttcctaatgttacaaatgattatctttaatttagcgattccaattgcttttggcctttcacatttgatttaccttaagttggggtttcgcgaattcttaaaaagctatttggcaaatattcaaaacggcgctttttccacaatttatggggcattttattttctttga

SEQ ID NO: 112 - DNA, 234 bp, Enterococcus faecalis
ttggtgcgtttagttattggtagcagaaagagttctaggaggaaagaagaaatgagaaggattttggtattaacaaagaacattttagttgagcaaacatttcagcagcaattacaacatttaaattatgaaatcttttgtacgaactgctgtgaagaaactatagaacatgagttaactttttttaattattttgatgcaattgtattaagcgcttcaccacggggatgggaa

SEQ ID NO: 113 - DNA, 546 bp, Enterococcus faecalis
aaagttgccaaatttcatggagacataccaccacgcgaaagaaaacgtgtgatgcgtcaagttcaaaatcttgattaccaatatgtagtagctactgatttagccgcacgtgggattgatattgaaggggtttcacatgtcatcaatgcagaagttccacatgaattggacttctttatccatcgggttggccgcacaggacgtaatggattgaatgggactgccataacattatattcaccagcagatgatgaagcgattactcagattgagcagttaggtgtttctttcaaaccaaaagaaattaaaaatggtgagattgtagagacgtatgatcgtaatcgtcgaacaaaacgagaaaaatctcgagaagaattagacccaacgttaattggtttagtgaaaaagaaaaagaaaaaaattaaaccaggatacaagaaaaaaattaattgggcaattgaagacagcaataagaaaaaacgtaaaattgaacgtcgtcaaaaagatcgttctgctaggaaagcaaaaaagaattcttctaactaa

SEQ ID NO: 114 - DNA, 804 bp, Enterococcus faecalis
atactggaaacgggtggcgaaaatgtatgggtctccacttttcactccatgtgtgtaagaattttacgtcgtgatgtggatcagattggttacaaccgtaattttacaattattgacccatcggaacaaaaaacattaatgaaacgcatcttaaacgacttaaatattgattcaaaaaaatatgatcctcgctcaattttaggtacgattagcaatgccaaaaatgaattacaaacgcctgaaaaagttgctgaaatgcaaggttccttatatgaagaaattgtcgcaaaatgctatgaagcctatcaaaaagaattgcgcaaaaaccaatgtatggattttgatgatttgattatgaatacgattcgtttatttaatgaacaaccagatacgttggctttctaccaaaataaatttcactatattcatgtggatgaataccaagataccaatcatgcacaatataccttagtcaatttattggctgcacgtttcaaaaatctgtgtgtcgtaggtgatgccgaccaaagtatctatggttggcgcggggcggatatgcaaaatatcttggattttgaaaaagattatccagatgccagtgtaattttgctagaacaaaattatcgatccaccaaaaacattttggcggctgcgaatgatgtcatcaaaaataaccgtaaccgccgcgagaaagaactgtggacagaaaatatagacggtgaaaaaattgtctattatcgcggggacacagaacgggatgaaacacaatttattgtgagccaaatccaaaaagaaatgcgggaa

SEQ ID NO: 115 - DNA, 1059 bp, Enterococcus faecalis
tgggccgatttcccgggcgtgaaggacgcagtgctgtttgtggcagctgcttgttcctcaaaaccagaagcgaaaattaatacagaaccatactctgaccgtcaaacaatgcttggtacctacgttcaaattcgcatctacgatgatggcaaagaagacgtcttaccgaaagcctttgcccgtgtcaaagaactaggcgataaaatcaccgtcaaccaaccaggttcagaaattgatgaaatcaaccaagaagcaggcgtgaaaccagtcaaagtctcagatgacttgtatcctttgttgaaaaaagcctatgaatacagcaaagactcccgcggcggctttgacatggcaattggcccaatcacctctatgtggcacattggcttcgatgatgcccgcaaaccaagccaagccgaaattgatcaagccttgaaacttgtcgattacacgaaagtcaaattcaacgacaaagagcaaaccgtttatcttgaagaaaaaggcatgcaactagatttaggcgcaattgccaaaggcttcatcaccgatgaagtcgtgaaagttctgaaagacaacggcgttaccaccgctattgtcgatttaggtgggaatgtttacgtcttaggacacagcccgcgtggcaaagacatggattggacagtcgggattcaagatccgaataaagcccgcaacacagtcttaggtcaagtcaaagaaagcaacaaaaccttagtcacatcaggaatttatgaacgctacttaaaagtcgatggcaaaacctaccaccatctctttgatcgtgaaactggctatccgtttgataacgacatcgcgggtgtcaccattatcaccgacaaatccatcgatggtgatggtctctcaacagccgtcttctcaatgggcgtcaaaaaaggactagaatatgtcgaaagtctgaaaggaaccgatgccattttcgtcaccaaagatgacaaagtctacatcagcaaagatatcgaatgcaactttgacatccgcaaagactctggctataccaatgggaaaccggccgatttgaaataa

SEQ ID NO: 116 - DNA, 270 bp, Enterococcus faecalis
atttgccccgaaattggtccattgaaaacaagacccctgataaggaagggaaaagagactggcaagtctcgtctgaattccaatacttttaaagacacatctaaagacatttttagtcgctcgttatttcaaatcggccggtttcccattggtatagccagagtctttgcggatgtcaaagttgcattcgatatctttgctgatgtagactttgtcatctttggtgacgaaaatggcatcggttcctttcagactttcgacatattctag

SEQ ID NO: 117 - DNA, 501 bp, Enterococcus faecalis
atgagtgaagcagcaatcgctaaaaaagaaaccctagttcaagcagccgctgagaaatttgaatcagcagcatcagttgtaatcgtggactaccgtggtttaacagttgaagaagtcactaacttacgtaaacaattacgtgatgcaggcgtagaaatgaaagtcatcaaaaactcaatcctttctcgtgcagctaaaaaagttggtttagacggcttagacgaagtctttacaggcccaactgctgtcgcattcagcaacgacgatgtagtagcaccagctaaaatcatcgacgaatttgctaaagatgcaaaagcattagaaatcaaaggtggcgtcatcgaaggaaaagtttcttcagtggaacaaattactgcgttggcaaaactaccaaaccgcgaaggtgtactatctatgctattatctgtattacaagcgccagtccgcaacgtggcttacgctgtcaaagcagtggcagaaaaaaacgaagaagttgcttaa

SEQ ID NO: 118 - DNA, 966 bp, Enterococcus faecalis
taccccgtggtggacattattgatgcaacatctgctttgatgaatcatccagggattgccattgttttagcaactggtggcgcaggcatggtaaaatctgcgtactcaacaggtaaaccagcactaggcgttggtcctgggaacgtaccagcttatattgaaaaaacagctaaagtaaaacgtgcggttaatgatttaattgtttcaaaatcatttgataatggaatgatttgtgcttctgagcaagcggtcattgtggataaagaaatttatgcttctgtcaaagctgagtttgaagcacacaatgtttacttcgtgaaaccgaatgaattacaaaaactagaagatgcagtgatgaatgaaggcaaatacgcagtaaatccagcgattgtcggtaactctgcagaaaaaattgctgaattagcaggaattagtgtaccaaaaggcacaaaaattttagtcgctgaattagaaggtgcaggtccagaatatccattatcaagagaaaaattatcgccagttttagcaatgatgaaatcaaacaatgcagagcatgcttttgaactatgtgaagcgatgttaaacttaggtggtttaggacatacagcagtaattcatacagaagatgaagagttacaagttgcttttggtttacgtatgaaagcttgtcgtattttagtgaatactccatcagcagaaggcggtatcggtaacatttataacgaaatgattccatccttaacacttggttgtggttcatacgggaaaaactctgtttctaaaaacgtatcagccattaacttaattaatattaaaacggtagcgaaacggagaaataatatgcaatggtttaaattacctccaaaaattttctttgaaaaaaattctttacaatatctacaaaaaatggaaaatgttgaacgtgtcatgttagtttgtgacccaggtatggttcaatttggctat

SEQ ID NO: 119 - DNA, 327 bp, Enterococcus faecalis
caacgcctatccatagcacgggcttttttgaaaaatgcgccaattttaattttagatgaaattactgccagtttagatgtggaaaatgaaaaacgtattcaggaaagtttaaatcgtttaatacaagataagacagtactaattatatcgcaccgcttgaagtctattgaaaaggtaaataaaattgtagtgatggatcaaggaaaagtagttgatcaaggtactcatagtgagttgtatcgaagatcagaaatatacaaaaatctcataaagaaaactaaactatctgagaaattcgtctatgaaaaagaagctcaatcacgatga

SEQ ID NO: 120 - DNA, 414 bp, Enterococcus faecalis
agaaagaattattatattgtttgtaaaattggaggatgtaggattatgactaaaggttatgtaaaatcagtaacagagttaattggtcaaagcccagttgtgaaattaaaacggatggtaccagaaggagctgcagatgtttttgttaaactagagttctttaatcctggtggcagtgtgaaagatcgaattgctttaagcatgatccaacaagccgaagcagatggtcgcctaaaacctggacaaacgattattgagccgactagtggtaatacaggcattgggttagcaatggtaggtgctgcgttgggatatccagttaagattgtgatgccagatactatgagtattgaacgccgcaaattaatgcaagcatatggggctgatctattattaacccctggtgccgaatga

SEQ ID NO: 121 - DNA, 591 bp, Enterococcus faecalis
tctattattaacccctggtgccgaatgaatgaaaggggcaattgcaaaagctacagcattagcagaagaacacggtacttcatgcctttgcaatttaataatccagctaatccaatggtacatgaacaaaaaacaggaaaagaaattgttgatgtctttggtaaacgtggcttagatgcgtttgtttctggtgttggcactggaggaaccgttacaggagttggccatgaattgaaacggatttttccagatattgaaattgttgcagtagaaccaacagagtcgcctgttttagaaggtggcgaaccaggtccacataaaatccaaggaataggcgctggttttgtcccagaagttttagacaccaccgtttatcaaaaagttgccgctgtttctagtgaagacgcattagaaactgctcgtttaatggggccaaaagaaggtatccttgtggggatttcagcaggggcagcaattaaagctgccattgatttggcagtcgaattaggcgcaggcaaacgtgtcttagcgctggttccggataacggtgaacgttatctttcgacagctctttacgaatttccagaataa

SEQ ID NO: 122 - DNA, 876 bp, Enterococcus faecalis
cttcccgcaaccatgggtcaagtgccgtcttggtttggcatttggactattatggctccgtgcctggggaaaaatgaatatgcggtggagtccctgttaactgtcggcaatggctttttaggcttgcgcggcacgacacctgagatgacgatttctgatgatcattatccagcgacctacattgcggggctttataatacagcggcttcggaagttgcgggtcaagtagtggaaaatgaagatttcgtcaatgctcctgacaaccaacacatcgctttaaaaattggcgatgccactgactggttaacgatttctccagacacgctacaacaattacatcgtcaattgaacttgaaaacggggttgtttgtcgcagaaatgattttgaaagatgcggacaatcagcaaattaaattaacgacgaaaaaaatcgccaatatggcacagccgaatgactatcatctgcaatatacgtttgagccgttaaacttttcagccccgattactttgaaaaccgtcacggatggcagtgtctacaactataacgtggcgcggtatcgcaacttaacagcgaaacattttcaggtgacagcattaagcgcgcaggaaaacaaaaccgtgattgaggtttgtaccaatcaatccaacttaagcgtccgagaaacgtctttgataaccggtgatttttttgaaaaagaagccattacgattcaagaagaagcggagaaaatcgcccaagtggtgaccgtgatggcgcaccaaggaacgcgctatacgctagaaaaacaagtctttgtacaagccagccacgccgaacaaagttggcaggtaccgtttacgccgaaggactcttttgcggccgccgctcacgaaagc

SEQ ID NO: 123 - DNA, 1023 bp, Enterococcus faecalis
caaatcacaaagaaaagagtgacgtatcaaatggtggaaatggcgcttagaaatgtgtataaaaaatatgacaatgcagaacattattctgttacagattttaacttagaaattacagaccgtgaatttatcgtctttgtcggaccttctggttgcggtaaatcaacaacattgcgcatgattgctggcttagaagatattactgaaggtgaattatcaattggggacaaagtcatgaatgacgttgcaccgaaagatcgtgatattcccatggttttccaaaactatgcgctttacccgcatatgactgtttttgataacatggcctttggtttaaaactaagaaaatatgataaagctgaaattaaaaaacgggtggaaaatgctgcggatattttgggcttaacagagtacttacaacgtaaacctgcggcgctttttgttggacaacgccaacgtgttgcacttggccgggcaattgtccgtgatgccaaagtctttttaatggatgaacttttatcaaacttggatgcaaaattacgtgtagccatgcgtgctgaaatcgctaaactacaccaacgtttagaaactacgacaatttatgtgacacatgaccaaaccgaagcgatgaccatggctgaccgaatcgtaattatgaaagatggctttattcaacaaattggttcaccaaaagaagtttacaatacacctaaaaatatgttcgtagctgggttcatcggctcacctgccatgaatttcttcaaagttaccttaaacaatggggttatttctaaccaacatggcttaaaactagcaattcctgaaggaagaaacaaagagcttgttgaacatggttatgaaggcaaagaattaattttcggtattcgtccagaagatattcatagcgaacaagtggctttaacagcaatgaaagatgcggtgattaaatctgaagtcgttgtttctgaattattaggggctgaatccatgctttatacaaaaattggtgatacagagtttatc

SEQ ID NO: 124 - DNA, 495 bp, Enterococcus faecalis
ctacccctaggtggacattgtccaagatgtcatcataataattcccgtgttattgatagccgtcaagcagatgatggacgtgcaattcgccgtcgtcgtgaatgtgaaaattgcagttatcggttcactacatttgaaagaattgaagcggcgccattacttgtaatcaagaaaaatggggatcgtgaagaatttaatcgtgataaaattttgcgtgggctcattcgctctgcggaaaaaagacccgttgctatggaacaaatggttcaaattgtcgataatgttgaaaatcgagtgcgtagtttaggggaaaatgaagtctctacaacgcttatcggtgaatatgtgatggaagatttagtcaatctagatgaaattgcctacatccgctttgcgagtgtttatcgacaattcaaagatatgagcgtgtttttgaaagagttacaggacattgtcgacaaagcaaaatcttcttctcctgactcagaaaattaa

SEQ ID NO: 125 - DNA, 309 bp, Enterococcus faecalis
aaaggaggtctttctttgaaaggaaatcggcaaagaatccaaccaaaaaatatttttcaagcggttattgattcaccgctttctgatcaagagaaagaggttttaacctttttatatcaaccaattgtcggcgccaatgcgtttagtttatattggcttttgttatctgaaacaacagactcagaggagaatggctcgctgtttcatgcagatttaattagtttgctggacttgagttgccaacaattagaagaagcttgctacaaattagaaggcattgggttgcttaaaacgttttacaaaacctaa

SEQ ID NO: 126 - DNA, 489 bp, Enterococcus faecalis
ataccccgtggtggagcttttgcgctttgtttatgttttggcgtgattgcaacgtctttaggctttttagaaaagcaaccattgcagaaagcaaatagctttggttttgcgattttagggttaatgctttttgtctttgatggcttaaaacaagccacacctgaaatgttgatggatttatttttaccaatgattgggattattgtgattggtgttatcgggatgtacatcttttcagcaattgttggtcgtgtattaggtgtgagtaaagagatggcattcgctgtttcgttgacagctttatatggctttccagccgattatattattactaatgaagtgattcaatcattgacagaagatgaacaagaacaggcggctttaacgagccatttaatgccaccgatgttagtggcaggtttcgtaacagtcaccattgtttcggttattttagcgggtattttttcaagtattttattaagtttgtag

SEQ ID NO: 127 - DNA, 321 bp, Enterococcus faecalis
aaacggggcgtaagtatgaaaaaaatcaaagcactagtcaagcagcatgcacaagaaatgattgcttttcgacgggatttacaccaacatccagaattacaatttgaagaatttcgaacgacagaaaaagtcgcggcagttcttgatcaattaggaattacttatcgcaaaacagaaccgacgggtttaattgctgaaattgtgggcggcaaaaccagccgagtggttgccctgcgggcggatatggatgccttacctgtacaagaattaaatgaagaattagcttataaatctttagaacctggcaagatgcatgcatgt

SEQ ID NO: 128 - DNA, 720 bp, Enterococcus faecalis
acaatggaaagattacaaaaagcaattgctcatgctggggtgacttcgcgtcgcaaagcagaggaattaattgtcaaaggtcgcgtaaaagtcaatggccaagtggtcaaagaattaggaacacaagtaagtaaacaagatactgttgaggttgatggtgtaccaatttatcaagaagaatatggttattatttattctataaaccaagaggggttatttctgcggtgtctgacgataaaggccgtaaagtagtaacggattattttacagatgttactgagcgaatttatccagtcggtcgtctggattatgatacttctgggttgttacttttaacgaatgatggaagtttttcacaaaaattaacccatcctaaacatgaagtagataaagtctacgtagcaaaaattaaaggtgttccaactaaacgggatctattgccattagccaaaggcattcgcattgatggcaaacgcacagcaccagccaattttcaaattctttcagcggacattaaaacaggtagcagtgtcgtggaattaacgattcatgaaggacgtaatcatcaagtgaagaaaatgtttcaagctgttggtttccctgttcaaaaattaaaacgtgaacgttacggtgagttgaccttacaaggtttgcgaccagggcaatatcgtgatctaactaaaaaagaaatcagtcaattattaaatcaagctaaataa

SEQ ID NO: 129 - DNA, 306 bp, Enterococcus faecalis
gattgtgtagaaaataccgtaggaggaatacaaatggaactgataggacatggacattcatgtattgaaattcgtctaaacgacggcacgaaccttttatttgatccttttattaatggcaaccctttagcggacgtttcacttgcagatttacaccctgattacatcttaatcacccacggacacagcgatcatattggcgatatgctagcaattgttcaagccaacaaggcaacgattattgcgatagctgaagtggctacgtatgcgcattcgctaggcataagactcttcaaaacggattgg

SEQ ID NO: 130 - DNA, 501 bp, Enterococcus faecalis
  misc_feature (123)..(123): Nucleotide 123 is "n" wherein "n" = any nucleotide.
ttcgccatacccggggtgaggctattggtggttggggctcctctgactggctatttgacggataaaattggcccaggtattttaacatttggcggattgttgctcttgtgctgtacgtcgttnatgtatatgtttttagatatgaattcgcctatctggtattatgtgattgcaacggccattatgggcttgggaaatgcacttttccagtctccaaacaatacaatggttatgagcagtgttgaaaagcaagatttaggtgtagcaggaagtatgaattcttttgctagaaacttaggaatggtcattgggattgcgttgtcaacgaccattttatatcgtggcatgagcgaagcctatggtgaacgagtaaccacgtatctggctaatcgcccagatatatttattgtgggaatgcgtgaaaccttttttgtcgcctttctattatgtgtggcggcctttatattaacgattttacgttttcggaaaacaaccaaataa

SEQ ID NO: 131 - DNA, 666 bp, Enterococcus faecalis
caattcctgaaaaaacaaaaattagcgattttagggcgcagtgtttccggaaagagtacgttggcttcgctcattcgtggtgatttacggcatacttcgggagaattctttttaggaaatatcccaactgaggcatttggtgagacgatgactgaatatattggggttatgcatcaagcaccgtacctatttcgaacaaccattttaaataatattcggattggtagagaagaagcaagcgaagcagaagtttgggcggttttagaaaaagttggcttaaaagaaatggttgcccaattaccagaaggtttacaaacaatggtggatgaagcaggtttgcgtttttctggtggcgaacgacatcgcttggcgctagcgcggattcttttgcaagatacaccgattgtgttattagacgaaccaactactggtttagatccaattacagaacagcaattgctggaaaccttttttgaggcattaaaagataaaaccgtcatctggattacccaccatttgcaaggcgtaactttgatggatcaagtgatctttattgaagatggccaattagagatgagtggtacgccagaagaattacttgcaaccaatgcgcattatcagaaactttaccgaattgatcgtggcattagttctttcgaggaataa

SEQ ID NO: 132 - DNA, 213 bp, Enterococcus faecalis
ttccttgaagggggagttgactcaacaggagcgcccttttcagcccaaattgcacccgttttatcgatagaacattgttcttttgcatttgaaaatcaagcgaaaaaggtattaactgacttatcgttaacaattcctgaaaaaacaaaaattagcgattttagggcgcagtgtttccggaaagagtacgttggcttcgctcattcgtggtga

SEQ ID NO: 133 - DNA, 876 bp, Enterococcus faecalis
tccaacgtcaccaagggaaaaggaagttttgttcaagcaccaaagcatcctcttcatacctctttaaataaagttctttttttattgccttttgcagacgatttatcagtaggaaatttctatagcggtttggcccctactattcaagcagctggtttagaagtctttatgacctcgcctaattttttgagagagaaaaatgctgcggacattgtgaatgagtttgccgggcttgtctattatgctgctactagtaatgactatctcgacttactgttcgagttggctttgatgaattttccagtcgttgtcttggataaaaagatccatgatttaccttttgcaaccattcaatcagacaactttgctggtggtaaaacagcaaccgaacgcttaattggcttaggacatacaaaaattggatatatcctttcaggaagtccagccctacaatccgttcggcaacgttatttaggttatctccaagctttaaaagaagccaatctggcgtgtcatacagcaatcacggaaaccaatctcttagatgaacacaactttaaacagtattttgaggcgcaccaactcacagccgtggtctgcgataatgacttcagcgcgttacattgtgtacgaaactgtaaaaacctaggtattcatgtgccagaagaattatccattattggttttgacgatattcaagcagcagcatttgtcgaaccgccattaacaaccatggcgcaagactttaaagaaatgggaaaactagctggtgaagtgttattacaaacgatgcaacaagaccttcaaatcatagaagacattcaagtgcctgtcacattaattgaaagagaaaccatttctactgtttcaaaatga

SEQ ID NO: 134 - DNA, 384 bp, Enterococcus faecalis
gccaagcaaaaagaaattcatttagagggattagttccctatccacaagttcgctttaatcaagaaggaagcaatttttcctatttttctgaagatttagttgaaattcctgaacaggaatcggtcattcatactacggatcgtggaaccttgatgaatttgttggtagaaaccaatgcttatgcttctggttcaggagtcgtaacgggttttacgaagaaagaaattcggttagtgccattggcgccagctttggaaaatcgtatttgtttactctttcccaaaaatcgggaaatcagtccaattggtcgctactttatcaaagaattaaaagcgttgtttaaaaaagaggtagataccaaaacatttagcactaaggaataa

SEQ ID NO: 135 - DNA, 786 bp, Enterococcus faecalis
ggagaaatgatggaaagaaaactttttgcatttgatattgatgggacgttgttaaattcggagaagaaagcattggatagcacgagagaagcgctagcaaaattgcgggagcaaggacacttagttacgctggcaactggcagaagtcgttatatggcgcaagaggtgatttgggatttagattttaccaattacgtattatgtaatggcgccgcggcttttgtggatcatgagcaatattatcaaaatttattgcacgctgaagcgttggaacgtttggcacaagacagtgatcaacgcggcttaggatttgcttgtgtgggcttagatgatattaagaagagcaaccagcaccgtgctgaaaaaatggaaattgcgatgaactcttttcattttcattcacctgcttatgatgaacacttttatcgtcaaaatgatatttaccaagcgctggctttttatgacgcagaagatcagtgtacgtttgaagaagaatacccagaatttcgctttattcgctggcatcaacatagcgtagatgttgtgcctaaagatggctcaaaatcagctacgttaacgtatttagctaaacgtgtgggtattgatgcaaaaaatatcattgcctttggggacggcgagaatgaccgacaaatgttaagccatgcagggattggcgtcgcaatgggcaatgcgagtccttccattcaaaaagtggccacaatggtcacagataccaatgataatgatgggatttggaaagccttaaaagaaatgaaggccatttaa

SEQ ID NO: 136 - DNA, 609 bp, Enterococcus faecalis
ttcctcgaaaatttaaatgagcaattggctgtcggcatgcgtgtaaaagtgccttttggtaacggtaatcggcatgttcaagggtttgttctagccattgaaccagtggctgcaacggttcttgacgaaaccaatgttcagttgaaagaactagtggcggtgttggatttaaaacctgttttaaatacagaaatgttggctttagctgattatatgaaggaaaaaacgtttgcttttaaaatcacttgtttgcaaaccatgttgcctagcgtaatgcgtgccgattaccaaaaatatatttatttaacggatgagctttctgaagaattacaagatcagttattttatggtttagaggaaatttcgtgggaccaagcgcaagaacgtgggcttttgcctcaactaatggcgttgcgtaaacagcaaaaagtcgatattcgctacgaagttacgacgagaaataaagtcaaaatggtccgcttcattcaagccgctaaggaatttgaacaactagaggaaattcgtttggggttacgcaagggagctaagaagaaagagcaacttctttactatttacaacgcttgggcactgaaaaaatcccgctgtga

SEQ ID NO: 137 - DNA, 240 bp, Enterococcus faecalis
  misc_feature (82)..(229): Nucleotides 82, 160 & 229 are "n" wherein "n" = any nucleotide.
atgaaacggccaaaaaacggctggtgtacgttcattgaaaaaaaaacgtatcgtgatccgtttgctaatcaaacgtttgatnaaacgactgcgtggtctgtgaatgcacaacacaaggtggtgttggaaacaatcttacaatccgtccaggaaccacaanagcaaacctacttattggaaaggtgttccggaaaccgggaaaaccaaattttactttcaggtcttggcnaaattcctttc

SEQ ID NO: 138 - DNA, 570 bp, Enterococcus faecalis
aagtacctgatgctttacgagatttatttaatgttcaaccacgaacaaccaccccttcaagcacaccagcaccaagaaggagataatcccggacccatcgaaaatggtaaagccacattttcagcagaggaattaaaggataactcaaacggctggattacttatcattctctagatcgtctaaaacgagcgacaggcgctgatgcgctattaaaacccgcaatggtcaatacaggaacttccgctaataaagatattcgaccagctggtttcatttcaggaaaagctaatcattcgcgtggccacctaatcggccgtcaaatgggaggcagtggtgatgatccacgtaacttaaccaccttgtatcagaatcctgtcaacactccttatatgacgaaatatgaaaatcagattcgggcagctcttaatcgcggcgaaaccgttcgctatcgcgtgacacctgtatataacggaaacgatttgttggctgaaaaaatcatcttagaagccaaaagccttaaaacaaattcacccattgatttttcagtaactattttaaacaaacaataa

SEQ ID NO: 139 - DNA, 267 bp, Enterococcus faecalis
acaaacaataaggaggaactttcattggattttgaacagctaaaagaaacattacccgatgcaaaaccacaaacatttttgcaagcaatcctctctcaacctcaagaagaggatgctgaattaactttcagtgaagaaattgatgaacagtttgtcgaaaattgtaaatttttagcctctccagaaaccatttctgaaacagatgtggaacattggcgcgaacaagaatttttagttgtcgcccaaagtttagatgggcgattatct

SEQ ID NO: 140 - DNA, 1638 bp, Enterococcus faecalis
aggaccttggctcttgatctacccttcaagtttgctttttcgtggcatacggaaaagtttttcttaggttgttttgtgctaagcgtttctttactttttttatgtactttggcaggttcattaggagttggcgctcttttatatagtgtcataataggtgtcttaggatttgcggactatcaaaagatgttttatcgtgtcgaacctatttatccagacgacttaaaaatgatcacagaagttagtttattaaaagaaatggttggtttatggccgtgtatttttgtggtaccgttaggttgtgtaacactttttttcttaagaaaagccttttataaaagtttctttttatcgaagaaaaaacaaacgattcgtgtgttaagtcttgttctttcgattggtctattttcatatattggtgattttaacaatccgcaaaatttgttacgtaaagcctataataaaaccgcgttatggattccttacagccaaaaaatgaattactacaatacaggatttattggtggttttctatataatttaaaagtagaggctatggaccaaccaaagggctattcaaaagaagctatttcagaaattactcagaagtatcaaaagttggccgaggcgaaaacactgccgagcaatgagcaaccaaatattgtgtttgtcatgagtgaaagtttttcaaatccagatcatctgaaaggcttgtccattattggtaatcctttagctgattatcagcaaatcgctgataaaacttacagtggccagatgctttcacaaaactatgggggcggaactgcgaatattgaatttgaagccttaacaagtttttcgatggaattaatgaatgctcaaatgactacaccttatacgatgatgattcctaagatgacggaattgccttccattgtttcattacttaaggaacaaaagtaccaaacaacggctattcatccgtacaatacatctatgtataaacgaaaagatgtgtataaaattttaggttttgatcaatttatcaatgaaaaaacaatgaactatacggataaactagaaaataatccttacatttcagatcaagcagcgtatcaggaagtgacgacactgcttaaagaaaaagagcaaccgcaattcattcatttagttactatgcaaacacatatgccctatgaaaacaaatacacaacgtccaattatttttctcaaggaaacggcaatcaagtcgcgctcaataattacttgcaagatattgcctacagtagcgaagctttgaaaaatttcctacaagaaatcgaaaaaatgcccaaacgcacattagtcgttttttggggagatcacttaccaagtatttatgatgaaaacattcaagcgttgaatgaaggggcagcccttcaccagacagaatttctaatgtatgatacggcgaaccagttaacacaaaaaaatcagcatcaagcaatcattagtccattttattttgctccctcacttttcaaacaaaatggcttaccgccaacgggattttacgctatgcctaatgaggtacaacaaacattgcctgcttttggacaaaggggaattactatcctcggtgggggaaatggaaaaaaacagttttacatgaattag

SEQ ID NO: 141 - DNA, 852 bp, Enterococcus faecalis
attttgatggtggttaaattaacggatgtagcaaagcttgctggggtgagcccgacaacggtaagccgcgtgattaataattatggttatcttagtcaaaaaacaattgataaagttcatcaagcgatggaagaattaaattatcaacctaatggattagccagaagcctccaaggaaaaagtacgcagctgattggtttagtcttcccttctgttagtcatccattttttggtgaattaattgaaacactggaaagaaagctctttgttcaaggatataaagtgattttatgtgatagtgaaaaagatccagaaaaagagcgcgcctatttacgaatgctcgctgcaaataaagtggacggtgtaatcactggtagccataacttagctattaacgaatatgaaaatgtttcactacctattgtttcctttgaccgtttcttggcacctggcattccaattgtctcttcgcaaaactttcaagggggccaaaaagccactgaagccttatttgcaagtggtgcacaaaagattgcaattattactggtgctaataacacaggcgcacctagcgattatcgattggctggttataaacaaacaatggaaaaatatggcgcagaaaaaacgattctacaaattgataatgggacctcaacaacattaaaaaatctagaaatcgaacgtttgcttcaaaataaaactgtagacggcatcttttgtacagatgatttgacagcaattacagttatgaatattgctcaaaaattgaagaatatcattcctgaaaaatttaaaattattgggtttggaaggggaacaaaattaatcctaaaaaattgccccccctaa

SEQ ID NO: 142 - DNA, 738 bp, Enterococcus faecalis
ttacccgcgttgtgggacacatggttcaacctaaaagaaggcatgaaagtcatggtggtggggcgtatttcgctttatgaaaacagcggctcctatcaaatttatattgaacatatggaaccagatggtgtaggtgcactttatcaagcattggcagaattaagagaaaaactaggaaaagaaggactttttgaagggcctaaacaacagttgcctcgttatcccaaacgaatcgctgtggttacaagtcctagtggtgctgttattcgggatatcattacgacagtcaaaagacggtatccgattgcacaactggtcctttttccaaccttggtccaaggcgagcaggcggcggatgacattgtgcggaacattcagcgagccgatgcgcaaagcgattttgatacgatgatcatcggccgtggcggtggttcaatcgaggatttatggccatttaatgaagaaaaagtggctcgagccattcatgctgccaccacaccgattatttcatcggttggtcacgaaacagatgtgacaattgccgatatggtagcagatgttcgtgcagcaacgccaacggcagcagcggaactcccggtaccagttttaaatgaagaactattaagaattagtgaacggcgtactcgtctagaacaaagctttttatatttcttacaacaacgaacagaacgtttccaacgactacaaaattcttatgtgtttaagcaacctgagtga

SEQ ID NO: 143 - DNA, 375 bp, Enterococcus faecalis
gccggttccgtggtgaagagtgtgtggcgcttagttcggcaacgggagattgaaggggaagtcgatattttagatattgattacttgattaaagagattgtcccagaactgccgaagcaccgtgccgaagattcgattttcgattatctggaaaacgaccttggcttggcgattagttatgcccagaaagaaattaccgtggaaccgctcacagagatggacaagcagctgattggtgaagtcgaaggcaatcatgtcgtcgtggttcgtagtatcatgaacttggaagatacccgttgttttggctatacggaatcccgtcaccgcttaaacaaatttaagtttgtggaattcgcccgtcgccgtaaattgtaa

SEQ ID NO: 144 - DNA, 690 bp, Enterococcus faecalis
caaaatgatggcaacttcatcatttgggtagcgcaatccttggcccgtaatttacacccactttccgcacaggctgttacgacagggaatacgcccttgcaggtggagtttggtggaggaacattagataacgagacaggaaatgctggagataacacagcaccagacccgacagtacctaacactaatttcgacttagtaaagataccaaaagcagttacatttaacaccacaaaaattagcgatagtctacaaaatattagttctacacaacaatatcttggctatgcaatcggagatataagaggaacgaaagaagggtggcatgtcacagcttcagcaactttggctaatgggagtgaagccttagctggaaaccttaattttagtcaaatcggatattattcaaaatttgatgcaacaaaacaaatatatgtttatttaactgatgctgagagtttagctaattatgaagctgatccaactacacctgatttttcgggaacgaatattccgttaagcggtgatgctattgcaattgcgacagcaagttcaggaaaaggacaaggcatatggtattcaggtattcgtaccatgaatcttgaagttactactccataccaacaaatcaaagcaggtgcctacacaggcaacatcacatggaacctcgtcgcagggacatcaatttaa

SEQ ID NO: 145 - DNA, 213 bp, Enterococcus faecalis
agaaaatatatatattctaaaaactatccatcatctcttagattacgagctttttttgctgcaaaggaagttaaaaaaagcagggatcgagtaatcgattcctgctatatcttgtaccaatatatttctttccaaaacttaatatacattgtatacttcaatcaatatgattcattaaaacaagtttcattattcgtgataaagaaatcataa

SEQ ID NO: 146 - DNA, 495 bp, Enterococcus faecalis
aagatggcagaagcacttatgatcacagtttttttaggactgctgattattttgcaaataatcgatcaaaagaaaattatcgtgtttgctcagagtagtcctgtaaggaagagtttgagtattttactgacagtcgccatcctgttgattttctggccggcacatcttactgatcagattaaactggttgcttttgcttctgtcattttgatcaatggttttttgaaggagggtctagcaaaagattctgttgttagatttggagtattgaacggtaactttaatcgatatcctcaagtccaagtagaaaaactaggtgacgataaatcatttatttcattttacaaaagcaagaataattctttttcaatgatttttgataaagatcaaactgaaatgatggatgtctttcaagaacttgatatccattccaaaattactttagatcaaagttcggaagaaaaaagagcagttgtaaaaaaagataatgaatga

SEQ ID NO: 147 - DNA, 720 bp, Enterococcus faecalis
aagatgaacgcgacagaagagctgcattatatcgattcctaccaaaaagttgatgaagtggtggaacgagttgcatctattcgcgaacgttttggtgatgcaatggatattggtgttgattttcatggacgggtccataaaccgatggcaaaagtgctagcaaaagctttggagccattccatccaatgtttttggaagaagtcgttttacctgaaaatgaagaacactttaaagaagtagctgattctgtggctgtaccattagctactggtgaacgcttgtacactcgttggcaattcaagaacctctttaaacaaggtactgttgatattatccaaccagatgtggctctttgtgggggaatcttggaaacccgtaaaatcgcagcgatggcggaagcttacgacatggctgttgcgcctcatgcgccatatggtcctgttgcactagcagcaactctgcaagtagactcatgtacgccaaacgtctttatccaagaacaaagcttagggatccactaccacaaaggttttaatctcttagattttgtgaagaacaaagaagttttccaatataaagacggatacgtagatctaccttcaaaaccaggtctgggcttggaaatggatgaagacaaaatcaaagaaattgcacaagaaggtttgatttggaccaatccgcaatggaaaaattatgacggtacgatcgctgagtggtga

SEQ ID NO: 148 - DNA, 813 bp, Enterococcus faecalis
accagtaatacaagcgaaagcagcacctcaagcacgacaagtgaaacaagcaatacaaatgaaagcaacacaccaagtacaactagcgaaaccagtaatacaagcgaaagtagtacctcaagcacgacaagtgaaagcagtagtaccagcgaaagcagcacgccaagcacgacaagtgagagcagtagtaccagcgaaagcagcacctcaagcacgacaagtgaaaccagtaatacaagcgaaagcagcacgccaagcacgacaagtgagagcagtagtacgagtgaaagcaacacgccaagcacaaccagcgaaaccagtagtaccagcgaaagtagtacctcaagtacgacaagtgaaacaagcaatacaaatgaaagcaacacaccaagtacaaccagtaaaacaagtagtaccagcgaaagtagtgcttcaagtacaaccagcgcaaccaacaatacaagtgagagtagcaccccaagcactgtaaacgaaagtagccaaagcaaaggccagaattctgtcatttacgcggtagagtctaatcaagatcctaatgacgctcaaagtaattcaaagccctctgccaaggctagtcaaacaaaggaatcagtagcagaaaaccaagcaactaaacagatacagacaaatcaagaatcgtcaggaacagtcaaaaaagcggataatacgaccaaaattgccaagaaaaaattccccaaaacaggggaacaatcttcagcagttgggagcttcctaggcctgagctttttatcgttagccatagcaacctattgttttaaagtgaaaagataa

SEQ ID NO: 149 - DNA, 615 bp, Enterococcus faecalis
  misc_feature (43)..(43): Nucleotide 43 is "n" wherein "n" = any nucleotide.
aacaggagggagaccgaccttaagcaaaacagtgaaaccagtnatacaagcgaaagcagcacctcaagtacaacaagtgaaacaagcaatacaaatgaaagcaatacaccaagtacaaccagtaaaccagtaatacaagcgaaagcagcacctcaagcacgacaagtgaaacaagcaatacaaatgaaagcaacacaccaagtacaactagcgaaaccagtaatacaagcgaaagtagtacctcaagcacgacaagtgaaagcagtagtaccagcgaaagcagcacgccaagcacgacaagtgagagcagtagtaccagcgaaagcagcacctcaagcacgacaagtgaaaccagtaatacaagcgaaagcagcacgccaagcacgacaagtgagagcagtagtacgagtgaaagcaacacgccaagcacaaccagcgaaaccagtagtaccagcgaaagtagtacctcaagtacgacaagtgaaacaagcaatacaaatgaaagcaacacaccaagtacaaccagtaaaacaagtagtaccagcgaaagtagtgcttcaagtacaaccagcgcaaccaacaatacaagtgagagtagcaccccaagcactgtaa

SEQ ID NO: 150 - DNA, 243 bp, Enterococcus faecalis
caacctctggaagaagcggttgcgcataaacgttacagcggtcctatcatgggggatgcagatattttagtggtcccaactattgatgttggaaattgtttatacaaatcattaaccttgtttgggcacgccaaggtgggaggaacgattgttggcacaaaagtcccagttgttttaacatctagaagcgattcgacagaaagcaaattccattcattaagatttgccatgagacaagtttaa

SEQ ID NO: 151 - DNA, 696 bp, Enterococcus faecalis
aaaaaggagcagaaaacaatggaaacagtattggttattaatcctggctcgacctccacgaagttagcgctttttgctaatcatgattgcttggcagaagaaacgcttagacatagcgtccaagaattggcaccttttgaaaatgttgtcagtcaaacatcatttcgaaaacaaatgatcgcggaatttttagaaacacataacatcatacaattagccgctgttgtagggcgtggtggtttgcttaagcctattcctggcggtacgtatcttgtcgaccaacaaatgctagaagacttgcggacagaacgctttaatacccatgcttcaaatttaggggcgattttagctaatgagtttgcagaaaaatatcacgtgccagcctttattgtcgatcctgttgttgtagatgagctacagccattagccaggatttctggattaaaaggcattcagcggcgtagcgttggtcacgccttaaatcaaaaagcggtcgctcgaaaaatcgctgaggatttagggaaaacatatgagcaaagcaattttatcgttgttcatttaggtgggggcattagcttgggggcgcatcaaaaaggccgcatggtggatgtggtaaatgggcttgatggtgaaggtccttatacgccagaacgcagtggtgccttaccgctcgatggactattcaccacggaatgg

SEQ ID NO: 152 - DNA, 450 bp, Enterococcus faecalis
acccaaagcgtgttgtcttatcttgaaaccagtttgctgacgaagtggcaggcgcatcagcaacagcaattgatggcgttgacactgaaagaaacgcaacatttggatgtgaccgtggtgcaagccattgtcaatggtgaactattaagctacttacagcagcagcttttacaaaaaacgcaaggtgatttttttgtttatcgcctaatactgcaagcagaggaaccaacgaaagaaccgatctatttagccgctagtcccaacttattaacggcattagaaaaaacatacttagatccagttatttttgaagataccaccaaggaattgttacgttatccagaatttgctggaattttttcaatggatgagcagtggcgattagagagcttgcgcctagcacatgagcaaattaatgaagactttactattcaggaggacccactatga

SEQ ID NO: 153 - DNA, 528 bp, Enterococcus faecalis
agactttactattcaggaggacccactatgaaattactcgcagtagagattgtgggctttggaaaatggcaacaacagaaaattacatttgaatctggtaatcaattgctgtacggcgcaaatgaagttggcaagtccacattgtatcaatttattcaagcaatgctgtttgggtttcccacaaagggcaaaagaaaacgcgattacgcacctaaaaatggtggctcgtatggtggtcgtttgtggttggcacatcctgtgtttggggaagttcaagtcgagcgttttaaagaaaaaaataaagggcaagcaatcatttattatcaacaacaaatgggggatgaaaaaaccttacagcaaatgttacatccgctaacgaaaaagttatttcaagaggtttttactctcccaccagaaccaccaatacgattgacagttgaaccaaaaagactgccactcctcgttaccatgggttctcgtattcacaacttgagatacgaaatcttcttaaggaaccaaaaatcttaa

SEQ ID NO: 154 - DNA, 801 bp, Enterococcus faecalis
gaaaaacttgaaatcgaagtcttaaaaacaggcaaaagttttggttatgggaaagtattgactgtcctaaaaagcagtgaacagcgtgtgcccgtgaaagatgaaaactttacaaaagtcgggattagtccgttgcaacatttagcgtacggcgcccaactatcatttaaaacacaacaagtagaaaatgttatgcaacgtgtcgctaaattgcaagaagtccctgttttaccaacaattgggatgaacgatccgtggcattaccggaacaaagcacaaattcccgtgcgtaaaattgacaaccaactacaaacaggttttttccggaaaaatagccatgatttaattccgatggaacatttctatattcaagacccagaaattgatgcagcaattgttaaaatccgtgacattatgcgtaaatatagcgtaaaaccttataacgaatctgataatacagggaacttacgccatattgtcgttcgtcgtggctaccatactggggagatgatggttgttctaattacgagaacaccgaaattattcccaattagtaaaattgtgccagatattttggaagctattccggaagtagtcagcattgtacaaaatgtaaatccaaaacgaaccaatgtcatttttggcgacgaaaccatcttattacatgggtctgaaaaaattacagatactatttttgatttgaaatttgaaatttccgcgcgttcattttatcaagtaaatccacaacaaacagaagtgatgtatcaaaaagttaaagagtatgcggctttaacaggcaat

SEQ ID NO: 155 - DNA, 579 bp, Enterococcus faecalis
cgggattttatgccagatgttgagattcctaaagaggaattaatggccataattgaggaagcgatgtccgcgccaaatagtaccaatttaaattcatggcgttttttaattgtcacagaaaaagaacaaaaagaggccctttacgaagtttcgatgcaacaaccagcagttaaaggggcagcggcggtgattattttattaggtgatttgactgcttatacagtggccaatgcagatgaaatcagtgctaaagctgtcgcacaaggaacgatgacggaagaaattcgtcaaggaattaatgaaaatgtttcttggtactatgatgttagcgaagaacaaaaaagagagtggctaatgttagaccaaggcttagttgcgatgcagctgatgctttctgcaaaagatcgaggctatgatactgtggcgatgtctggttttgaaacagaagctgttcgcaagttatttaatattgaggatcatttagtgaacggactgattattccgattggcaaagctcaaacacccggctttgaaacagtccgacgagatgtttcagaagtagtaacttggttagattaa

SEQ ID NO: 156 - DNA, 546 bp, Enterococcus faecalis
ttggcaaaatatctgacaattccagcgcaaattggtggtatgatggtctcagcgattatttctgatacattattatttaaatcaccaacttgcacacaagaaagactcgatgcagcgcacgccctagctgatattgctgaaatcaatttagaaggctatggtcttgacttattaaaagcaggaacaaatttaagcgataaatcagctgaagtccttttagatttagatgctaagagcttcccaatgaacggcaaaacagttcgcgttgcccaagtaaataccgtcgatttagcagaagttttagatcgtcaagctgaattagaagcagctatggccgcagaaaatgcagccaataattatgacttgtttgtcttaattattacgaatatcctagacagtgattctgaattattagcgattggtgcggaacaagccaaaattgaagcagcgttcaatgtaacattagttaacaatcgtgcgttcttacccggcgttgtttctcgtaaaaaacaagtagtaccacaattaacagaagtctttaactaa

SEQ ID NO: 157 - DNA, 780 bp, Enterococcus faecalis
acatcgggaagaaagatcattttaagacaattaaaagcggcctttgcaacagaagccaagttagaacaatttttatcagaaatgattgattgtcagttaatcattcgggaaaatcgtcaatatcgtttgaattttcctatttatacggcagctgaagttgcgagtttgcccttggctgaagacgaacttcctaagtttaaaggaactgtaacagagcaattattttggctagctgaatctttttggccacaagtgtttccagaagaggaagactatttttttggcgtgagcggtggcctcacattttatcaaaaacaaagattggcctcggcacaactatctataattacgcttgaaaaagaaaagacagaggttccaacaatgcctcgttattttgattacttgggcaaagagcaatccttgccagaagccttcagcgctttatatgacttgctaggggacgtaaatcctgaatactatctttcgcaagcgagaagagtcattaaacaagctctgcgaggccgcaaagtcagtactgtgcctaatatttttcaagaaagtttgcacttgacccaagtgattacgattgaccaggaccacttaaaactccttttaccagtagcaacggaacaagccgagcctttagaagcacagtcggatattctagcattttattatgaaaaaattgctaaccgatcggccatcgaacgcttagtttttatgcaacaattgattgagcaactaggtacgaactctctaagttatcttagaataaattaa

SEQ ID NO: 158 - DNA, 318 bp, Enterococcus faecalis
  misc_feature (65)..(77): Nucleotides 65 & 77 are "n" wherein "n" = any nucleotide.
gaatttaaaatcgaagattatttgcccttgggtaatattatggtatcggtatacctcccttttantactgaacaatntcatttaccagaaacacttcgtgaacacggctatgttgttacgcaaagtgtcgcctacggacgcgaaggagaacgaatggttttagaaatcctttccccaagaaaaaacgaacgtacattgtacaaattaatcaatcaattagagccgagagcatttatcatttcctatgagcctaagttcatttccggtggtttttggacgaaaaaagttcgcaaaagaaatgacgccatttctcactaa

SEQ ID NO: 159 - DNA, 246 bp, Enterococcus faecalis
agaagcagattacgaaggagtgcttggaaaatgagtgaaatgaaacaaatcgatcaattatggatcttaccaacagaagcaggttataaaattggtttaaccgccgaagcccaagaggatttagggaagattacttttgcgacatttcccaaagtcggacaaacattagctaaaggtgattctttaattgaattagaagcagaaaaagcagtcagtgaattcagtaatctgtcccaccacggggta

SEQ ID NO: 160 - DNA, 384 bp, Enterococcus faecalis
  misc_feature (4)..(4): Nucleotide 4 is "n" wherein "n" = any nucleotide.
aganagaagaaagaaggggtagaaatgtacacactttatgaatatcctaaatgctcaacttgtaaaaaagcgaaagcgtggttagaccaacaaggcgttaaataccaagcaattgatattaaagcaacaccgcctagtagtgaacaattagcaaaatggatgaaagagaccggcttgcctgttcgtcgtttttttaacacaagcggggttttatatagagaacaaggcttaaaagatcttgttgacagtttttctattgaagaagcaagtcagcgtttagctgcggatggcatgttgattaagcgtccaattctcttaaaagacaatacatttctaacgaatggttttaaagaagcagattacgaaggagtgcttggaaaatga

SEQ ID NO: 161 - DNA, 687 bp, Enterococcus faecalis
tatgtggaccgaacactcaaaagcgaattttggctaatcgctaaaatgctattaattgcgattccggtaattgttttagtacttttactaaaaaacaactggacgatattttttttcttagccatttttgggggagttttcttaatgtctggcattacttggaaaattattgtgccagtttttattttagctgctctagtgggggcaggaactatttacttgattacaacagaaacaggtagagatttattgtctaagttaggggtcgaagcctataaatttgatcggattgatttatggctaaatcctttccatacagatccagaccgctcattccaaccagcgctagcattaacagcaattggttctgggggccttttcggaaaaggctttaacgtgagtgatgtgtatgtccctgttcgtgagtcagatatgatttttacagttgttggtgaaaactttggctttattggtggctgtttcattattttgttgtattttattttaatctaccgcatgattcgcgtttgttttgatacaaataatgaattttatgcctacattgccacaggaattatcatgatgattttgttccatgtttttgaaaacattggagcgaatattggtttactaccattaactgggattccattaccgtctattagtcaaggtgttcttccattttag

SEQ ID NO: 162 - DNA, 510 bp, Enterococcus faecalis
attttggctggaaggatgaagaaaatgaaaaaagcaacaatgctcacatacttagaggaacaacttgaaaaacacttaggagattacgaagtaggccttgattgggatcgcaaaaaccataccatcgaagtcattgttcgtttatatgcagaaaacaatgagcaagtggcgattgatgatgttgatggtacgctttcagaagaagaattcattgaatttgaagatggtttgttattttacaatccgcaaaagtctgtcgttgatgacgaagagtatttagtcacaattccttatgaagggaaaaaagggctacgcaaagcagttttagacggattcattcactatttaaaagtggttttagatgaagggcaaagtgatttgttagactttttatcagatgaaacagcggaagtttttgaattgcattgggagccagcagattttgaagcgatgattaaaaaagtggcagaaacagaaaaagaacaatggattgcgtatccaagttattaa

SEQ ID NO: 163 - DNA, 945 bp, Enterococcus faecalis
tttagaggtgagaacatgaagtggacagaagtaaaagtcgaaacggctagcgaagcagttgaagcaatttcaaacattatgatggaagctggcgcaagtggcgtggccattgaagatgcgttggacattgaaaattttgaaagtgatctgtatggggaaattttagataaagagcaattcacccacattaaagaaggggcgattgtgatggcttattttcctgaaacaaccttcttaccagaaattttaccatttatgaaagaaaatattttacgcttgcctgagtacggcttatccattggtaaaaacgaaatgacaattagtgaagtagcagaaagcgactgggcaactgcttggaaaaaatattatcatcctgtccgtgtcacacgattcttaacgattgtgccaagttgggaagcctatcacgcacaagatgaagcagaaaaaattatcacattggatccgggcatggctttcggtacaggcacgcatccaacgactcgtttaaccttgcaagctttagaaactgttttacgtggtggcgaaacagttctagatgtacgaacgggttctggtgttttgagtattgcaagtcgctatttacgggctaaagacgtctacgcatatgatttagatgaagtagcagttgcagcggcaaaagaaaatatggatttaaatcccattgcggccgatgttcatgtgtcagccaatgatttactaaaagggattgaccattctgctgatgtaatcgtcgcaaatattttggcagatattattgtgttaatgattgaagatgcttggcgtttgctaaaacaagacggtaccttcattatttctggaattattgaagataaaaaagcaatggttttagaagcactaacgaaagtccgtcttgtggtggaccaactctttaatcaaggcgattggtatgcgattatcttgaac

SEQ ID NO: 164 - DNA, 372 bp, Enterococcus faecalis
aacaaacggaggtgtttttatatgaccatcattgcaaactatattcgccagcaaccccaacatcaaacacagttaacagaaatctaccaagcaattttagcagttgttcctcaggagactactgaaaaaatcgcttatggaatgccgaccttttacttaaatggcaatttagtgcattttgcggcggctaagcaacatttaggtttctatcctacgccatcagccatccaacgtttcagcaaagaattacgcccttttaaaacctcaaaaggtgccattcaatttccctacacgcaagagttacctctttcattaatacaggaaatagttaaattccgtgtacaagagaacatgaaaacagggtctcattga

SEQ ID NO: 165 - DNA, 387 bp, Enterococcus faecalis
actgaagagagaatacttcagaaagtaggaaaaccaatgacaaaaccgaaaatctatacaatgacctttgccagtgtttacccgctatacatccaaaaagcagaacgtaaaaatcgaacgcaagcggaggttgacgaaattatttactggttaactggttatgatgaaaaaggcttgcaacaacaattggctcaaaaagtaacgatggaaacattttttgaagaagcacccaattttaatgaaaacgcccaattgatcaaaggcgtaatttgtggctatcgcgtggaagaaattgaagatcctttaatgcaaaaaatccgttacctagataaattaatcgacgaattggccaagggaaaagcgatggaaaaaattttaagaacatga

SEQ ID NO: 166 - DNA, 306 bp, Enterococcus faecalis
gcagagttcttacatggaacgctagaaattgtagatgaaactacgccagtaacgttgtttattggagaagacgagcagcgtccgttggcagaacgagtagcaaaattattgccgaaaatctgtgccaattatacaattattgattcgaaagcgtatgaacttccaggaattagtgaaaaatatcgtggccgagttgtttcatttctcctaatgcatgcggtaacgcaacgcattgatgcgcatgtagaaaaattaaattgtcacccattagagattcgtcgttattatcgtcaatttgattactaa

SEQ ID NO: 167 - DNA, 849 bp, Enterococcus faecalis
ttggccactccccggcgtgaggcattggaagttgttttatctgatggtaccaaagtgaaaggcgaattagtcggaaccgatgcttacacggatttagccgtgattaaaatttcttccgacaaagttgatcaagtcgctgagtttggaaattctagtaaaatcacagtcggtgagcctgctattgcaattggttcccctctaggctctgattatgctaactctgtcacacaaggaatcatctcttctgtgaatagaaatattaccaataaaaacgagtctggtgaaaccatcaatattaatgctattcaaaccgatgctgccatcaatccaggaaactctggtggtccactaatcaatattgaaggacaagtcattggaattaactcagtaaaaattgtgcaatcaactagtcaagtgagcgttgaagggatgggctttgccattccaagtaatgacgtagtcaacattatcaaccaattagaaaaagatggtaaagtgacgcggccagctctcgggattacgatgtctgatttaacaggtatctcttcacaacaacaagaacaaattttaaaaattccaacttctgtaaaaactggcgtagtggttcgtggtgttgaagcagcgacccctgctgaaaaggctggattggaaaaatacgatgttatcacgaaagttgacggccaagacgtaagctctactacagatttacaaagcgcgctttacaagaaaaaagttggcgacaaaatggaagtgacttattatcgtggttctaaagaaatgaaagcaactatcgatttaaccattgataaatcagctttaacacaacaaaataatcgcagcaatcaataa

SEQ ID NO: 168 - DNA, 366 bp, Enterococcus faecalis
ttttcagacacccttgaaaaagacgacacccctaaaattgtggttggctttgtcaaatcatgtaaaacacacccagattcagatcatttatctatcacacaaacagaagtagacaacggcgaaatcttacaaattgtttgtggcgcaccgaacatcaaagcaggacaaaaagtagttgtggccaaaccaggcgcaatgatgcctgatggtttaatgatttggccaggggttttacgtggtgaagaaagttttggaatgatttgttcagcaaaagaattacgtttaccaaatgcaccagctaaaaaaggaatcttagaattgccttttgatgcagaagttggttctgcatttgcggtaggagaataa

SEQ ID NO: 169 - DNA, 372 bp, Enterococcus faecalis
gcttggtcaggggctgtaaaaattcaaacacccgcaggtaccattgagattaccaatgatgtgatcgctacagtagttggcggagctgccacagatatttacggaattgtcggaatggcaagcaaaaatcaaattaaagataacttaaacgatattttacgtcgtgagaattactcacgtggtgtcgttgttcgtcaagaagacaacggaatcgcagtggatgtctacacgattgttagttatggtacaaaaatttctgaagtttctcgtaacgtccaagaaaaagtaaaatataatcttgaaacattattaggtgtcactgcgaattcagttaacgtttttgttcaaggagttcgtgtattaccggattag

SEQ ID NO: 170 - DNA, 531 bp, Enterococcus faecalis
gtgaatgtaacagaaatcagcgcaggtcagttccaggaaatggtccaggcaggtgcgactcgtctgcacacaaatgcagaatatgtcaactcattaaacgttttccctgtacccgatggtgatacaggaacaaatatgaacttatcaatgaccagtggtgcaaaggctgtggccgattctcgctctgaaaaagtaggagaattagcaggtgcgttatccaaagggttattaatgggtgctcgtggaaactctggggttattttatctcaattattccgaggcttctcaaaacaaattcctgaggttacaacattaaatgccaaagacttggccgctgcctttacacatggtgtagaaacagcgtataaagcagtgatgaaacccgttgaaggaacaatcttaactgtttctcgtgaagcggcgcgttctggtgaacgtaaagcgaaagaaacagatgactgtttcgaagttatgacagctgttgtagcaggtgctaaacgtgcctttagcgaaaacactgatttattacct

SEQ ID NO: 171 - DNA, 885 bp, Enterococcus faecalis
aaaggagcgaatcaatcaatgagtttaaacgtaattgccctaggtgggaatgctattttagatacggatccaacagatgaaggccaaaaagccgtcgttaatcacgcggccaaatatattgcagaatttgttgctaaaggggaacaagtcattgtctgtcacggaaacggaccacaagtagggaatttgcttttacaacaaaaagcaggcgaaagtgaaaaaaatccagcgttgaaattggatacttgtgttgcgatgacacaaggaagcatcggttactggttacaaaatgctttaactaatgagtttgaaaaacgtaacattgctaaaccagttatctctgtagttacgcaagtacgtgtggacaaagaagatccttcgtttaaaaaaccatccaaaccaattggtccattctatacaaaagaagaagctgacgcagaagcagccaaagatggctctacgtatgtggaagatgctggccgtggctaccgaaaagttgttccatcaccaatgcctaaagaaattgttgaaaaagaggcggttcgtgctttagtagaggcggacgttttaactatctgttctggtggcgggggcattccggtcgtagcagaagacggacaatacgtaggtgtggaagcggttaacgacaaagatttctctgcacgtgttttagctgaaaacgttgatgcagaccgtttgattattttgacaggcgttgataacatctacattaattacaatcaaccagatcaaaaagcattagaacaaatcagtgtagccgaagcagaagaatacattaaagaaggtcactttgctgctggtagtatgctaccaaaaatcgaacctgccttagacgtcctaaaagtgcctattcaccacgattgg

SEQ ID NO: 172 - DNA, 654 bp, Enterococcus faecalis
ttcgtccctggtgaagaagctgcacgagcagctgctgaagaaggaccgcaagaaaagatctcattaaaagaaattttctcaaatcgtaatttattagccgcatttattttatgtttcacaagtatttatgcaaactttgtcattattacttggttgccacaatttttaattgctgaacgtggctttacaggagcgagcgttggtttcatttcatcacttgtaccatgggcctttattccaggcgccttaatcttcgctcgtttgaatgataaaacaggtgcgacgaaaaaattagtctttacattagtacctttagcaatcctatctgtctttgcgattgcttttgtaacaaatcggacattgttaatttctgttttaattctttatgggttaacagggaaattagcgttagatccaattatggtgacttttgttaccaaacatgcaccaaaagcggccttaggaacaacgttaagtgcctataattttatcgggatgtcagggtcaatcctagcaccgtatgtcacaggatatttagcagatacagcaggctcaatgcaagttggcttctatctttcttgtgtactattagttattggtttactagcttttgctttcttagctaaagatgagagtaaaccgaaattaggttaa

SEQ ID NO: 173 - DNA, 1086 bp, Enterococcus faecalis
  misc_feature (1072)..(1072): Nucleotide 1072 is "n" wherein "n" = any nucleotide.
cccatacccgtggtgagcaactgcgtgggcggacataaattctacgaccgtaaagaaattaaagatattttggcttatttaagtttgattgccaatccagatgattcgattagttttgaacgaattgtcaatgaaccaaaacgaggaatcggtaaaagttcaattgaaaaattacggctatttgcggatacgcatggttgggctttgctggaagctgcccaaaatgttgatttggcaaatatttcaggaaaagcgggtaaagagcttggtaattttggcatgatgattcaagacttaacgaaaacagtgccctatttaacgattacagaattggtgaaagaaactttacaacgtagtggttatcgggaagctttgatggcgcaaaataatttagagtctcaagctcgcttagaaaacttggacgaatttttatctgtgacacaagaatttgataaacgttttgaagcgcaaaacaacgacgatccaaatggcgaagaaacaaaattggcggatttcttaacagatttagccttggtttctgatttagataatttagaagagagctcttcgcaggtaaccttaatgacgttgcatgcggccaaagggctggaatttccagtggtctttttaatgggcttagaagaaggggttttcccattatcacgtgccatgctagaagaaagtgaactggaagaagaacggcgcttggcttatgttggtatcacacgagcggaagaagccttgttcttaacgaatgcttattcgagaacattatatggtcgcacgcaatataatcgaccaagtcgctttttagaagaaattgaggcggagcgtttaatgaaacaaggggcggcagccaatttacagaaagctccagcgcgcacctttgatcctaaagtatttaagcccagcgcaagtaaaccagcttatacacaaccagctacaaaatcagttagcaacaaagtggcaagtggtggcgaaaaagtttcttggcaagcaggtgataaggtccaacataaagcatggggcgttggtacagtcgttcgtgtaggcggttcggcccaagacttanaattggacattgct

SEQ ID NO: 174 - DNA, 864 bp, Enterococcus faecalis
tacggtagaagttgtttatgggggcggcaatattcactgtatcacacaacaagaaccaaagcgctaggagggaaacagatgtcaaaaatagtgattgcattaggtggaaatgcgttaggaaattcttcgaaagaacaattggcaaaagcacaaaccgctgcaaaatccattgttgatttaattgaacaaggccatcaagtggtgattgctcatggcaacgggccacaagttggcaaaattcgcttagcttttgaggaaacgagtcaatctccagaagatgtcgtgccgtttcctgaatgcacagcaatgagccaaggctatattggctatcatttacaacaagcaattgatgaagaactagtagccagaaatttaggggaacaaccagttgttacgttaattacacaagtcgtggtggatccaaaagacccagcgtttacaaaaccaacaaaaccaattggtggttattatgacgaagaaacagccaaacagttgatggcggaaactgggaacgtctatcaagaagatgcgggtcgaggctggcgacgggtagttccttcaccaaaaccaattgatatttacgaaaaagttagcttgcgaacacttgttgatgcaggacaaatcgtaattgcttgtggtggtggcggggttcctattgcctatgatggtccagtctatcatggtgtagatgcagtcattgataaagactttgcggcagcaaaaatggctgaactcattgaagcagatgtttttgtggtattaactgcagtggaacatgtttttgttaactttggtcaagcaaatcaacaagctttgaccgatgtcacggttacggcaatgcgacaagactcttcacaacggaat

SEQ ID NO: 175 - DNA, 300 bp, Enterococcus faecalis
gtccacaaattatgctgtcctgtcaaaaatgtaaccattaaaggttctttcaaaattgatttcgtggaaggaaccatgccacgagaagacggcgatatttgtatcgcatcctatatgaactttttaattacaaatgatggcgtgattgtgccacagtatggtgatgaaaatgatcatttggctttagagcaagttcaaacgatgttcccagataaaaaaattgtcggcgttaatacggtagaagttgtttatgggggcggcaatattcactgtatcacacaacaagaaccaaagcgctag

SEQ ID NO: 176 - DNA, 543 bp, Enterococcus faecalis
actaattggcgaattagtaacaacaatcacgctagaagaatggctgcaacagtatcaacactaaccaaaagaaaaagaagaattattaggaggaaccacatgttattaggatcacacgttagtatgagtggcaagaaaatgctattaggctctgccgaggaagcggctagttatggctcaacaacctttatgatttatacaggtgcgccacaaaacacgcgtcggaaaccgattgaagaaatgaatattgaagctgggcaagcttttatgaaggaacacaatttaagtaatatcgtcgttcatgccccgtatattattaatttaggtaatacaattaaaacggaaaatttcggttttgccgtagactttttgcgtcaagaaattgagcgagcacaagcgttgggagcaacgcaaatcacgttacacccaggtgcgcatgttggtgcaggtccagaagccggcattaaacaaattgttaaaggtctaaacgaagtcttgtggcaagcgcaaatccctcaaatcgcattagctgttcaccacgga

SEQ ID NO: 177 - DNA, 327 bp, Enterococcus faecalis
ccaatgccaatatggcattccccacttttgttttcccgttttcagtatttccggaaggtattttttacccgtgtggttggaccgttaccatttatcagcttaggcgctattaaaaggccagtagctttatatcacatgggattaatgggaaatgaagccgtccgaagttggtttcaagaagcttatcaggaacaagtttcaacaaagctaaacatggggaaaagttgtcttcgcttcactaatcctaagcgaataccttatgaactaattggcgaattagtaacaacaatcacgctagaagaatggctgcaacagtatcaacactaa

SEQ ID NO: 178 - DNA, 279 bp, Enterococcus faecalis
ttcgatccttggtgtccagacttatataaaagtaataaggacctgatcacaaaacccactacgactaaacaggcgttagatgggttactgcctcatttggtaaaaggaagtcgcattattttagtcgtttattatggccacgaaggtggttcagaggaacttgatttggtcacgaattacacgcaagccttaccacaagatgtttacagtgtcttacgttatgagtttatcaatcaaaaaaatcagccacctgttcttttctgtattgaaaagaaataa

SEQ ID NO: 179 - DNA, 690 bp, Enterococcus faecalis
tcgcgattggaggttagagacatggcaaatgttttagaaatgaaaaatatttataaaaaatatggtgaaaaacatacagaagtgatcgcgttaaaagaattatcttttgcggttcagccaggtgaatttgtcgcagtaattggtccttctggttctggtaaaagtacctttttaacgattgcagctggtttacaggcaccgacaagtggcgaagtcattgttggcgggcaatcactaaataagttaacgaagaagcaacgtttggcgcaacgttttcaaaaaatcggctttattttacaaagctctaatttggtgccatttttaacagtggaagatcaatttcacttaattgaaaaagttgataagtcacgtaaaaatagtgaattaaaagagcaattgttagagacgttgggtttaaaagaattacgaaatagttatcctcgtgatctctctggtggggaaagacaacgggtatccattgcgtgtgcattgtatcatgagccagacgtaattttggcagatgaaccaacggctagtttagatacagaaaaggcgtttgatgttgtcaaattactagcgaaagaggccaaagagaaagataaagggattatcatggtgacacatgatgagcgtttgttgaaatactgtgatcgagtggttcgtattcgtgatggtgaattgacagagtaa

SEQ ID NO: 180 - DNA, 219 bp, Enterococcus faecalis
atgctacaaaccgctttattggctgttctaggagtggcgattggtcttgctttaacgggaattaccgtgctctttttaccagaagcgatgccttatgcaactaatggaccacgcatgattttgtttagtgtactattgattttatctgcattaattggcggggcattttcaattcgaacgattgctaaaattgatccgttaatcgcgattggaggttag

SEQ ID NO: 181 - DNA, 732 bp, Enterococcus faecalis
catatgacgaatatcgtgtctgtcttaaagaaagtcgatcatcaaagtttagtactatttgatgaattaggtgctgggacagatccgcaagaaggggccgctttagcgattgccattttagattcattgggcgctaaaggagcatatgtgatggcaacaacccattatcctgaattaaaagtgtatggctataatcgagctggaacaatcaatgccagtatggaatttgatgtagatactttgagtccaacctatcgtttattaattggcgtgcctggccgaagtaatgcttttgaaatttcgaaacgtcttggattagacaacagtattattgaggctgcaaaacaaataatggacggtgaaagtcaagatttaaacgaaatgattgaagacttggaaaaccgtcgcaaaatggccgaaactgaatatttagaagctcgccactatgtcgatgaatcggccgctttgcataaggaactgaaagaagcctatcaagtattttttgaagaacgagaaaaagaattacaaaaagcacggaaagaagcaaataaaattattgcagaagcggaagaaaacgcagaaaccattatttctgatattcgcaaaatgcaattggaaagtggccaacaaggtggtgtcaaagaacatcagttaattgatgcgaaaacacaactttctcaattacaccatgacgaaaccaagcttgatagacacaggctcttcaaacggata

SEQ ID NO: 182 - DNA, 543 bp, Enterococcus faecalis
aaacaagaatataaaaatatttttggtggcgtggttcacgaccaaagtgcttcaggacaaaccttatttattgaacctaaacaaattttagaaatgaataatcgtttgcgacaacaacaaattgccgaaagaaatgagattactcgcatcttggcagaactgtcggctgagttggttccttatcgccgagaaattacgcataatgcttatgtcattggtaaacttgattttattaatgctaaggcgcgactaggaaaagaactaaaagcagttgttccagaaattagtcaagcaaatcatgtagtttttaaacaagcccggcacccactattaaatccagaaaaagctgtagccaatgacattgtgattggagaagaatatcaagcaattgtgattacagggcctaataccggcgggaaaaccattactctgaaaacgttaggtcttttacaattaatgggtcaagctggattacctattccagttgaagaagagagtaaaatggggattttcaacagaagtatttgcggatatcggggatga

SEQ ID NO: 183 - DNA, 291 bp, Enterococcus faecalis
tccgttgtgaagagtgacggatcagcagcagctcctgtagcagtagctggaccagcagcaggtggagcagcagaagaacaaactgaattcactgttgaattaacagcagctggcgatcaaaaagttaaagttatcaaagcagttcgtgaagcaactggcttaggcttgaaagaagctaaagctgtagttgatggcgctcctgcaccagttaaagaagctgtttctaaagaagaagcagaagctttaaaagctgctttagaagaagttggcgcttcagtaacagtaaaataa

SEQ ID NO: 184 - DNA, 198 bp, Enterococcus faecalis
agaagaagcagaagctttaaaagctgctttagaagaagttggcgcttcagtaacagtaaaataattcattcaacttttgaatgttcgagaacccttgtgttgcaagggttcttttttattaagcttttaaatggtggtaaagttagtgaattgattgtcaaaataatcttttcgtttaataaagataagcattcctag

SEQ ID NO: 185 - DNA, 438 bp, Enterococcus faecalis
ttaaaaaattatttacctcaaattcgactttcgttaatttatgtatatgatttaaatagtgatgttgtaaataatttaagcgatcaaacactcgtcgatttaattaatcaagtcaaggtagactacgctaaccaaaattacccatctgatgtccgtggtgattatggtttagcagcaatggcagataaaataaaagcaaacgattatacgtcaattaatcaaagtgctgaaagtgtttcttcggatactactaatacagaatctacattacaaacaactacgagcagttcgaagaaagctactacatcaagttcaaccgagcacaaaaaggggatatttcccagtactggcgaaaaaaaatcagttttatttactatcattggaatcatcttactatctttagttagtatattcattataaaaaataaaaagaaatag

SEQ ID NO: 186 - DNA, 945 bp, Enterococcus faecalis
aaatatttggtgggccataggtcgtatttatcattagatgtggcaccgggcgcaggtgggtatccacgtggccgaattattgaagtatatggtcctgagagttcaggtaaaacaactgtttctttacacgcaattgcagaagtgcaacgaaatggtggaacagccgcttttatcgatgctgagcatgcattggatcctcaatatgcggagaaactaggcgttaacatcgatgaattacttttatctcaaccagatacgggcgagcaaggcttagagattgccgatgccttagtttcaagtggtgcgattgacatcgttgtcatcgactcggttgctgcgttagttcctcgtgcagagattgatggtgagatgggagcgagccatgtcggcttacaagctcgactaatgtctcaagcactacgtaaattatcaggctcaattaataagacaaaaacaattgctattttcattaaccaaattcgtgaaaaagttggcgtgatgttcggaaatcctgaaacaactcctggtggacgtgcattgaaattctacgcaacggttcgtctacaagtccgtcgtgcagaacagttaaaacaaggaacagacatcgtcggtaaccgcacaaaaattaaagtcgttaaaaacaaagtggcgccaccatttaaagtggcagaagttgatatcatgtatggccaaggtatttcccaagaaggcgaattactagatatggctgtggaaaaagaccttatcagtaaaagtggtgcttggtatggctacaaagaagaacgaattggccaaggccgtgaaaatgccaaacaatacatggcggatcatcctgaaatgatggcagaagtgtctaaattggtccgtgatgcatacggcatcggtgacggttcaaccattacagaagaagcagaaggtcaagaagaattacccttagatgaatag

SEQ ID NO: 187 - DNA, 183 bp, Enterococcus faecalis
  misc_feature (68)..(68): Nucleotide 68 is "n" wherein "n" = any nucleotide.
ctaagctgcttgatgtggatgggttcggacatggacaacagtctatttaacgatttagttctaaccanaaaaagacgacacctgtcctgttcagtaagtgtgtctttcttcttaacgagtcgtattcactcgttatctattcatctaagggtaattcttcttgaccttctgcttcttctgtaa

SEQ ID NO: 188 - DNA, 522 bp, Enterococcus faecalis
agtttttttctctttttagcgttcaaatacttgtcagcttcctatttcttactatataattgttcaatatgcaaaactaggaggtattttatgaaaaggaaacactttttactttctttctttgtgatgatggtaactctgctaacattcattagtggcacttcagcacatgcagaaggaaagaaatatacaattggaacggatttaacattcgccccttttgaattccaagactcaaaaggaaaatacattggtattgacgttgatttattagatgcgattgccaaagatcaagattttgaagtggatttaaaaccattaggcttcgatagtgcagtccaagcgattcaatctaaacaaattgatggcatgattgctggaatgagtattacggatgagcgaaaaaaatcctttgatttttcagatccatacttcgatagcggtttacaattagcggttaatgatggaaacgacaaaattcaatcatatgttgatttaaaaggcaaaacgggttgcggttaa

SEQ ID NO: 189 - DNA, 852 bp, Enterococcus faecalis
aaggcaaaacgggttgcggttaaagttggaggtgaaggtgccaatttccttgaaaaaaataaagagaaatatgactacaccatcaaaaattttgacgatgcaacgggtctttataaagccttagaaaacggcgaagcggatgcaatcgttgatgattatcctgtattgggctacgcagtgaaaaatggccaaaaattacaattagttggcgataaagaaacaggcagttcttatggtttcgcagtgaaaaaaggtcaaaaccctgaattaatcaaaaagttcaacgctggtttgaaaaatcttaaagacaatggtacttatgataaaattttaaacaactacttagcgacaggcgatgaaacaaacacacaagacgctggcgaacagatgaaaaaaatcactcctaaaaaagagaaatatgtgattgctagtgattctacatttgctccgtttgagtttcaaaatgcccaaggcgattatgtcggaattgatgtagatttagtcaaacgtgcagctgaattgcaaggttttactgttgaatttaaatttattggttttagttctgctgtccaagctgttgaatctggtcaagcagatgggatggttgcaggcatgacgattacggatgatcgtaaaaaagccttcgacttctctgttccttactttgatagcggtattcaaattgcggtcaaaaaaggcaatgacaaaattaaatcgtatgatgatttaaaaggcaaaaaagtcggcgtaaaaattggtactgaaagtgctgatttcttagaaaaaaataaaaagaaatatgattactcaattaagtatttagacacaactgatgcattatacagtgcatta

SEQ ID NO: 190 - DNA, 1245 bp, Enterococcus faecalis
gcgatgaaaatttttgtttggattttgttatttttattagtaattaacgttattgctgccttaattactgtttttagaaaacctcgtagtatttccagcgttttagcatggatgatgacgttgattttcttgcctggtatcggctttattatttacttattctgtgggcgaggtatcgatggacaagaagtttttaaattgtctgatgatgaaaaacaaatggttcaacgaattaaagaaaaagtggacgttgataacaaaaaagcagggcgcgataaacgttatgatttactttatgatgcgaaagttttaaatcgttatttccggaatatggacgcatcaccgttggccaaaagaaatagtttgcaattattcacagatggccaagaaaaattccaagcattatttgaagatattcgtgcagcgaaagaaaccgttcatgtggagtattatgcgttttttaatgacacaattggcaatcaatttttagatgtattaatcgaaaagttgcatgaaggcgtggaagtttacttaatttacgatccttggggttcacccggcgcaaataaaaagttttttgctcgttacgttgacgctggaggaaaagtagctccctttattacttctcgtgatatgatccgtaaaacacgtctaaattatcacttgcatcgaaaaattgttgtcatcgatgggaaaattggctggaccggcgggttcaatgttggggatcaatatttgaatgtcaccgaaaaatttggttactggcgagatacccatattcgtttggtcgggacggccgtattttcattgcaagagatatttatcatggattggaatgcttcagtcaaatatcctgaagaacgtatgacgtatcatgaaaaatattttaaattaccagaagatcatgaagtggagcatttgtccttacaagttgtttcagatggtcctgattcagaagaagaaattttgaaaagcgggtttgttcggatgattttctctgcagaaaagagtgtctggattcaaacaccgtatttaatccctgatgatagtatgattaatgcgttgttagtggcggttcgttcaggtgtcgacgtgcgaattatgattccttgtatgcctgaccatccctttatttaccgcgcgacacaatattacgcaaattacttacacaaacgcggcattaaaatttatatttatgatagtgggtttattcatgcaaaaacaatggtgattgatgatgaatta

SEQ ID NO: 191 - DNA, 183 bp, Enterococcus faecalis
atgaacttacaacgctataatatgtccaacggccaaccatttattgggcgtgctgctttaatggatacgatgggggatttatttaccaatacccttggggcctttgtgatgggcgtgtacacgtatatcagaagcaaaggaaatcctgagtatttagaaaattatgcgataaagagaaaataa

SEQ ID NO: 192 - DNA, 216 bp, Enterococcus faecalis
cccattacgtgtgattccaagtttcgtggtaggttctgcctttactgtgcgttggttggtgcgtttggtatcaaattattggcaccacatggaggaattttcgtcgtcttcctattaagtaatccattactatatctattgttcatcttaattggggcgattatttcaggaattgtttacggacttttgaaaaaacctgtcgaagtacctgcttaa

SEQ ID NO: 193 - DNA, 1392 bp, Enterococcus faecalis
  misc_feature (784)..(784): Nucleotide 784 is "n" wherein "n" = any nucleotide.
ttttccaagcagcggaaattcaaaaagaagccggaagaaaaagcagaacaagaacaaacaacgccagcaccagaaagcaatcgtaaatatattattgctgtgactgcttgtcctacaggaattgctcatacttacatggccgaagatgcgctgaagaaaaaagcaaaagaaatgggcgtagacattaaagtagaaacaaacggttcagaaggaattaaaaatcgtttaactgctgaagatattgctcgtgctgatggcgtgattgtcgcagccgataaaaaagtagaaatgaatcgatttgatggtaaaaaattagtcaatcgtcccgtcagtgatggaattcgtaaaaccgaagaactaattaacttagccattagtggtgaagctcctactttccatggcagtgactcggctgcaagcgaccaagaggattcagcggaaggttcaatcggttctcgtatctataaagatttaatgaatggtgtttctcatatgttacctttcgttattggtggcggaattgccattgctctttcctttatgattgatcaatttatcggggttcctcaagatcaattagccaatttagggaattacaatgacgtagctagctggtttaaccaaattggtggcgcagcatttggctttatgttacctgtcttagctggttttattgcttctagtatcggggatcgtccaggcttagttgctggtttcgcggctggtgcattagcaaacgccggaggagctgggttccttggggccctaatcggtggtttcttanctggttatgtagtggttcttttacgtaaagtattcaaaggcttgccaaaatcattagatggaattaaaaccattttattctatccagtttttggtttgattattacaggcttattaatgttagtcattaacatcccaatgaaagcaattaatgatgcgttaaatcatttcctacttggcttagatggcacaaatgctgctttacttggtgccttattagctggtatgatggccatcgacttaggtggaccagttaacaaagctgcttatgttttcggtacagctacgctagcaagtactgttgcagaaggtggcagcgtggtcatggcttctgtaatggctggcggaatggttcctccattagcaattttcgtagcaactcgtttatttaaaaataaatttacaaaagatcaacaagatgccggcttaaccaatattgtaatgggactttcttttgtcactgaaggggcaattccttttgcagcagctgacccattacgtgtgattccaagtttcgtggtaggttctgcctttactgtgcgttggttggtgcgtttggtatcaaattattggcaccacatggaggaattttcgtcgtcttcctattaa

SEQ ID NO: 194 - DNA, 735 bp, Enterococcus faecalis
aaacgaaatcatttaagtaaaattgaaaatcaagtactggattatattttgacgcatatgacggaaattagttcacaaaccatttatgaggtggcgcaggcgttgtttgtctcaacagccactatttctcggacagcaaaacacttaggttatcgaggcttccaagaattaaaatacgcaatcgtccaatcggtgcagagcgagagcacagaaagcgatagtcgtagttttcaagctattacgcaacagttgattgccaatgtgcaagatagttttcaacaaatggatgaagccaaagtcgcggaaatgcttaaaatgattgagcgtgcgaatacgattgaagtgttcggtgttggtggcagttttcctatttgtactgattttgcacgaaagctaacatttttaggaaaaaaagcctatgcacgatctgattgggatgaacaagcggcagcagttaagaatctggatggacaggatttagccatttttgtcagttatacaggagaaactaaggggattttagcgtatgcacgtgtagcgcaggaacagcaagtgccgatgattagtttgatttcgactaaaggaagcaccttggaaaaattgtcgacgacgacgttatttgccaaagggacgacacgttatcatcagcgcgtggatttaagttcaagaattgctgtcatttgtttgttcgatacggttttattaatgtacgcagaggcaaagcaaccgcggtaa

SEQ ID NO: 195 - DNA, 957 bp, Enterococcus faecalis
  misc_feature (5)..(5): Nucleotide 5 is "n" wherein "n" = any nucleotide.
agacnatttatcccccaatgttctccaccttttttctttggtatactaaaacccatagggaaatgggaggcgaaagtatggagggcgtttgagaagattccagcgtttcagcaatggcaaaaagttgaagctattcaccgtggttggtcaactgatttaaagtttaaagttaccaaaaatcaagaaacctttttattgcgaatttttcaacaagaagagttattagccaaacaacaagaatatcaatttatcaaaaaagtagcggcgttaggatttcccagttctaaaccttttttatgtgcacctattcctgaaagtgaacaaggatacatgttattaacgtatctagaaggtgaagacttaagcgatgttttacccgctctttctcccaaaagacaactgaacttaggcgtagaggcaggccgctatttaaacaaaatccataagcttttgttgcctgaaaggattagtcaaagagagattgcgcaaaatttatacgaaaaaaagcagagccaactaaataagtataaggaatctcaattttgtatgccgtaccagcagccaataatttcatatttagaaaaacaattaccgttattgcaacaacggcctgtggtttatcagcatggagatttccatgtgggaaattttatttacttgccaactaggcaggtcggtgtgattgattttaatcgatgggattttggggatccttatgaagaattttacaagttacaatttttttcaagaaatgtttcgccattgtttgcttatggtcaattacaaggttattttgctgggaaagttcctaccttattttggcagtttcaaaagctttatacttttcacgcaggactctattctttagtttgggcactgagctttggtgaaaaagaaatcaggactatggaacagcaataccaacaattaatagggctcttgaccacggagttcgga

SEQ ID NO: 196 - DNA, 603 bp, Enterococcus faecalis
gtgaatacaaatgcaagtagttgtagtgaaattattgttgatttttggcaacagcatttagcagaattaacgatgacagataatgcagctcgtttattgtatgctgggattgtgggggatacaggacgttttctttatccttccacttcggcgcatacactcgctgtcgctgcgcaattgcgtacgtttaactttaatgccgcagacttaaatcgtgagttagaccaaatgcctttaaaggttgctaaattagcgggttatatttatcaaaatttagaaatcgacgcaaatggcgctgctcgtgtcgttttaccacaaagtattttaaacagttatgatattgtcgattctgaaacggcagccattgtttcaatgccaggaaaaattgaagatgttctctcatgggcaatctttgttgaacagccggaaggttattatcgcgttcggttacgttccaaaggaccaatcattaatacaattgctaaaaaacatcatggcggcggccatcctttggcaagtggcgctaatgcacgtgatgcggctgaaattgaagtgatttaccaagaaatccaagcagcttgccaagagtgggctcaaaaataa

SEQ ID NO: 197 - DNA, 285 bp, Enterococcus faecalis
acattagataaggacagatatagtatgaaaacttacgaaaagataaaacaattaagagaaaatagagaaatcactcaaaaagaaatttcaaacgcactagacattaatgttagtgtatataataaaatagaacttggaatacgtccattaagagaagaagaacttactgctattgctgatttttttaatgtttcaattgattatttaacaggacgcactgataaccctacaacaccttcaaataatcaaaaagaagctggacaaaatattatttcacatttcaga

SEQ ID NO: 198 - DNA, 462 bp, Enterococcus faecalis
tatccaaataatacggtccaacacgcaggcgttattttaggattaggtggtgtcgctggacatggtcattatggttatccccatggtgacttaggctattttggtcggttagctattaatgttaattattcagcagtaactgccgcatgcttacttatgaaaaaagcagattttgatgcagttggtggttttgaagaagcgtttaccgtagctttcaatgatgttgatttatgcttgaaagtccaagctttaggacgtgacaatgtctggcttcatgaagcagagctttatcattttgaatctcaaactcgtggatatgatgataaaggcaaaaagaaaaaacgttttgaacaagaaaaagtgatgatggaagaaaaatggggacctttaattgaaaatgatccattttataatcctaatctgacaagggatattcccaacttttcattacgaattgactag

SEQ ID NO: 199 - DNA, 387 bp, Enterococcus faecalis
atgcaattgcggatgacgaaatggagcgaaaagatggaacaacaactaactacaagaaaagaaaaacaaccattacgcaaccaagctgagcagagtgctcgcttggttgatcatttgttacgctggcgctatctgctagcggcagtcatttttattttactggtcgcctttaaagtccatggtagttcattaaacatgtgggatgcgtatgtttctgaatatgcggatggtcaaaaaagttcattaattgctggtgaaccaagaggtgttcgctcggatgaatggctcgttcaaaccccatttagcctctcacaaacacaaacaagtttgatcacacataatgatgtgattaccttaaatgggcaagacttggtggtaagctattaa

SEQ ID NO: 200 - DNA, 201 bp, Enterococcus faecalis
acaagtgccgcaagtcgtgtaacaagtaaagaaacgattcaagctatttcaaaagttgttccaagtttctggggcggttcagctgatttatctgcctcaaataatacaatggttgctgcagaaaaagattcgaacctggtcaatacgaaggccgtaatatttggtttggtgttcgcgaatttgcaatggctgcagcaatga

SEQ ID NO: 201 - DNA, 837 bp, Enterococcus faecalis
tacaatggttgctgcagaaaaagattcgaacctggtcaatacgaaggccgtaatatttggtttggtgttcgcgaatttgcaatggctgcagcaatgaacgggattcaattacatggtggtagccatgtttatggcgggacattcttcgtctttactgactacttacgtccagcaatccgtttagccgctttacaaaaagttcctgtaacttacgtcttaacgcatgactctgttgcggtgggtgaagatgggccaacacacgaaccaattgagcaattagcaagtgttcgttgcattccaaatgttcatgtgattcgtccagcagacggcaatgaaactgttgctgcttggagaattgctatgacttctacggaaacaccaactattttagttctaagtcgtcaaaacttacctgttttagaaggaacgttagaacacgcttctgattctgttcaaaaaggtgcttatgtattgtcaccacaaaaaggtgaacaaccagcagggattttaattgcgactggttctgaagtaaatctagcggtggaagcacaagcgaaattagcggaagaaggcatcgatgtatctgtcgtgtcaatgccaagttttgatttatttgaaaaacaatctgctgaatataaagaaagtgtgttacctaaagctgtgacaaaacgtgtggcgattgaagctgcagcaagctttggttgggaacgctatgtagggacggaaggcaaaacaattacaattgatcacttcggcgcttctgcacctggcggtctagttcttgaaaaattcggctttactcctgaaaatgtggttaatacctataaatcactataa

SEQ ID NO: 202 - DNA, 507 bp, Enterococcus faecalis
  misc_feature (12)..(278): Nucleotides 12, 19, 21, 26, 31, 61, 99, 210, 211, 213 & 278 are "n" wherein "n" = any nucleotide. 1               5
gttgcaaccctntcaatcntnggttncacantaatttctttgttagtagtccagcttatanttgggaccgaaagaagtcgtatttttagcatttttgtnttatcgggagcattcgtagcacccatcattgttcgtctatccgattattatccagagcggaagattgttttgattggcctgttgatgcagttcggtagttttatctacttnntnctaggtggaacacatgtgttcttactaatcttagcaattattgttttagatatcgtaactcaatntgggcaagtagccaatcaaacacgcgtccaaaatttgggagaagaagccagcaatcgtaacaataccgtctttatgtttttctatttcatcggcggttcactgggttcattgattggtacattaatgtggcaaaactatggttggtctggtgttactttaactggtattgggttccaattgttcgcattattttttcactttatgctctttgctcccaaaaagaaatga

SEQ ID NO: 203 - DNA, 999 bp, Enterococcus faecalis
agccgaacatcgtggtcgaataccgtcagttatttaatgaagcccaaagcggctgaactagggatgacaaatactacctattacaactgcagtggagcgcaagcaagtgcctttaacggcctgtatcaaatgcaaggaattgacccaaatggcgataacgtctctacagctagagatttagcttcactaacctatcattttctgaaaaattatccagaaattttagaaatcaccaataaaccagtggtgaaaacaatggtcggcacgccttacgaggaaacgtttgaagcgtacaattattctttaccaggagctaagtatggctaccaaggcgtggatggtttaaaaacaggctctagtccaacaggcggctttaactatattgcgactgtcaaacaaggagatttccgtttaattgaagtcattttaggcgttggtaattggcaaaaccaagatggtgaatacgaacggcatgtggctgggaatgctttgctggactatgcctatacgacatacgaacgcaaaaaacttttagacaaaggaccacaaaccattgatcacaaaaaagttactttggctaacgatttatacggtgtcgttcccaaaggcagtcagcctacttttaaattagtagcagggcaagtgcaagtcgacacgcccttgacattgttaaatagtacggttcaagcacccaaagtggcttaccaagaagttaagccaaaacaaacaacagcggaagctgcggaagaatcaaacgaacattctggggataccaccgttgcagaaccgaatcattttattcccaaatcgattgccacaagtgttttagtccttttcgggctgattttctcagtaattacccgtcagcttcaaaaacgtttagaacgtcagaaaaaacacggcaaagaaagcagtaaaactgcatccatgcggacaatctttttaagtgccgcagttctgtctttcctatgcgccgttggcttgtttcttttattctaa

SEQ ID NO: 204 - DNA, 192 bp, Enterococcus faecalis
tgcttaccaaggggcgataattatacgatgggaccagaggatgcgctagaagcaatcgcttacttaaatcccgaaataaccattccaattcattacaatacctttcctgttatccaacaaaatccagcaatattcgtagagcaagtagttggcgggaaagtattaaacccaggagagacgatcctagtttag

SEQ ID NO: 205 - DNA, 1329 bp, Enterococcus faecalis
gaggaaattatggcgacgaaacatgatcaaattttaaaacatattgaagacttaccaattggcgatcgaatctctgttcgaagcattgccaaaagtttaagtgttagtgaaggaacagcgtatcgggccatcagagatgcagaaaatattgggcttgtttccaccattcaacgtgttggtacgatacgaattgagcggaagttaaaaaaacatattgaaaaattaacatttggtgaagtggtccggattattgaaggggatgtgttaggcggtagctctggtctagacaaagtccttaataaatttgtaattggtgcgatgacagaaaccgcgatgacgcgatatattactcccggatccttaatgattgttggtaaccgccaaggtgtgcaaaagcttgctttagaaaatggggcagccgttttaattacaggtggatttgaaacatctgaagagattgcgcagttagcagatcgtctgggtatgcctgtcttgagaaccacatatgatacatttactgtggctactatgattaaccgtgctttaagtgatcagctgattaaaaaagacattttactcgtcagtgatatttatacagcgcttgaaaaaaccaattatttattgacaactcagacgattgcagattatcaggcattatctgaaagtacccatcattctcgtttcccagtagtaaataagaaattacgtttagtggggattgtcacaaccaaagatgtcattggtaaaagtgaacatttaaccgtggataaagtcatgacaaacgatcccaatgttgtgaaaaagatgatgagtgtagcgagtgtcagtcatcaaatgatttgggatggtctagaagtcatgccggtggtggaagatgatttagcgcttgttgggattgtttctcgccaagatgtgatgaaagctatgcaattggtgcaacgacaaccacaaattgcagatacaatttcagatcaaatttccggggaagtgatgcctgttgaagaaaatggcaaagaaacaacccgttttcgtttttcggttgcgccccaaatggttaacagtgttggtaccatctcgttcggtgtcctaagtgaaattatttctaacgtgacacaacgaacaatgttgatgaatcaaaaaagaaatgtactaattgaacaagtgaatctacattatttgcggctaatccagttggaaagtgaattggacattcgtccacggattttagaaattggccgtcgctctgcaaaattagatattgaagtttatttagaaaatgtcattgtggcaaaagcaattgttgtttgccaagtgatggagagaacgtag

SEQ ID NO: 206 - DNA, 231 bp, Enterococcus faecalis
tggagagaacgtaggaggctacaaagaatggacgtagtaaaagaaattatggcagcaattaaacaatatgaaacaattattattcatagacatcaaaggccggatccagatgcaattggctcacaggttgggttagcagaactcttaagagcgagctttcctgaaaaaaatatttatcaagtaggcggaccagtggaaggcttagagtgtcatcgccacgggaaggggaag

SEQ ID NO: 207 - DNA, 417 bp, Enterococcus faecalis
  misc_feature (84)..(84): Nucleotide 84 is "n" wherein "n" = any nucleotide.
catttggagcatcaaggatcgttcctcccttataggcagcgcaaaaatttaggcgtgccaatgatcttcgttcgtaaggcaaanagtttaaccatggatgaagagctttttacggcttcagtttattcatttacaaaacaagtgacaagtcaaatttccatttcaagaaaatttttatctgatgctgataaagtgttgattattgatgactttttagctaacggacaagctgccaaaggattggtagaattatgccagcaggctggtgcaaaggttgaaggaattggtatcgtaattgaaaaatcattccaagatggtcgtcagttattaaaaaacatgggcttaaatgtagtctctttagcacgtattgcttcattaagtgaaggaacggtgacgtttttagaggaggatgcataa

SEQ ID NO: 208 - DNA, 666 bp, Enterococcus faecalis
aggaacggtgacgtttttagaggaggatgcataatcttggaaacaaaacaattgaatacaccacaacagacggaaacaccaaatgggaaagccgccgttttaggattgcaacatttattagcgatgtatgctggagcagttgccgtacctttattaatcggaaccggcttgaattttgattcgcaacaaatgacgtatttgatttcaatcgatatttttatgtgcggcgttgcgacacttttacaattaacggtgaataagttttttgggattggcttgccagtcgttttaggttgtgccattcaagcagttgcgcctttaatcatgattggtacgaacaaaggggttggtgcaatttacggttcaattattgcttcgggcatttttgtcgttcttattgcaggatttttctcaaaaattaaacgtctatttccgcctttagtcaccggcacagtcattacagttattggtttgaccttaattcctgttgctgttgaaaaaatgggtggcggcttagcaacggacaaaagttttggtgatcctaaaaacttgctcctcgcatttgtaacaattgccttaatcattgttgtgcaagtttggggacgtggctttatcaagtcaattgccgtgttaatcggcctagtcggtggcacaattttagctgcg

SEQ ID NO: 209 - DNA, 399 bp, Enterococcus faecalis
cgattgattattcacctagcggaggagaagttgatgggctataaaccaactcaaagagatattgttattatcgactttgcgccttctaaaggttatgaaatcagaaaacgacgacctgctctcgtaatgagcaaagacagttacaatatttcaacaaatttagttattgtctgtccaataacctcgttggataaggaacgtccttttcttgtccctatttatagcgaaaaacttcatacctccgataatgcagtaagtaaagtgaatacgctccaagtctattcactcgactatacagaacaggcacaacgcagaataaaatatgtagatacgttagacgaagaaacattttacgaaattgctcaaaagtgtttacaaaacttttcttttgctgtttaa

SEQ ID NO: 210 - DNA, 249 bp, Enterococcus faecalis
aaaatggaggtgttagctatgacatcaacaaaaacaagaaaacaaggaaactcattagttataacaattcctgctactttaggagttaaagaaggggaagaatttgttattcttcgcaaaaataatggctccatcgcattgattccaaaagtagaagatttttttgaaaatactgctgaaggagagttttatcttcctgaattagcgattgattattcacctagcggaggagaagttgatgggctataa

SEQ ID NO: 211 - DNA, 894 bp, Enterococcus faecalis
agaaaagtgattcaacaactcaagcaacaagaacttaaatatacggctctttacactgattacgctggacatgaaaaagaattgacgaaggaacttgcagaaacaactttacttccttggtctgaagacttagacgtttcaacttttccaatcctagtcgtgctaggcggcgatggcacactacataatgtcattaattcattacttccatatgattcaactattcctttaagctatattccatgcggctctggaaatgattttgcacgaggggtgggattatcaagaaatattgataaagcattgcatcaaatcctgcgcaccagacgaccaaaagaaattcaaacaattcattatgtaaaagccaaccaagaagaaatcggcttagccaccaataatgttggcttagggttggatgcggcaatcgtggaaaaaaccaacgaatcgtcatcaaaaaaagccttaaataaatttaagcttggctcgctttcctatatttcttcaatcattcatgtcttttttagacaaaaaggctttccaattttagttgaaatgaatggtaaacaatacacatttaatcgtgctttcctatgtacggtcacaaatcatccttattttggcgggggcgtatcaattatgccgacggccaatcctcgcaaagcagtcgtggacttagttgtcgtggaacgaatcaatatttttaaaattttgtggcttattttcctattgcttcgccaaaaacaagggaaatctaagcattttcatcattttcaatcaagcaaaattcgaattgtttcgacgattccacaaaccattcacgcagatggcgagattttaggcaaacgaagtattgatatggtttataccacacaaaaacgtttgttttggttttaa

SEQ ID NO: 212 - DNA, 822 bp, Enterococcus faecalis
atgatgaattatgaaatttttttaaataaagaagatcaacgaagttattccttgctaaggcatttagaagaaagtcccacgctatcaggtacttttattgcacttcgcgaagaattatcaatgtcgaattttttagtcaaaaaaacattagaaaaattaaaagcagatattgacaatctaaagttaagcgacagcttaactttagtcgtttctgatgtagatgttacacttgaaattgatggaaactattcaagtaaacttttgctcacgaaatacttaacagaatcgctctcttttaaattagtgttgtcttactttagaggaaattatagtttgacaaagtttgctgaatgtaatcatgtcagcacctctgtggcgtatagtaccttacagcggctaaaaaaagccttaaaggagtatcagatctattttagtaaacgggaaattgtcggcaatcaaaaagcaatttcattttttttgtataaattgttcacgctttccaatcaaccaatttcggaattatattcggtaaaagtctataatgaagcgaaacgtgtattacagtctgttgagttaaactatactttcaccacctatgagcgacgcaattttttccattatttagctattatgattaacaacgaaggacgtgcggtggaagggatcgatacgcgtgcactgaatacattttcagaggaactaataaaaaaatcgcaagtggcatgggcattggcttcaaaatcattaacgtatacgattgtttttttcttgtatttgcatggcaaactagagaaaaaatatgtcatgtctgaccacggaatg

SEQ ID NO: 213 - DNA, 183 bp, Enterococcus faecalis
agaaagccttcttccaagaaaagtcagcatcaagtatttttcacggatgaattatttgatgctagccatatcaccattgtaccaaatagcacaggcggtgctggaacggaggggcaaaacactttttacttgaatttcatacgggaattagtaggaacggctatttatgggagaaagaactga

SEQ ID NO: 214 - DNA, 429 bp, Enterococcus faecalis
ctaaagtatttggcaatatatgtgagaaaaatggataaatacaaacatttactattatggagtacattgttactctcgttttttcaagtaaccaatgtgcaagcagcagaagaacggaatccaatttataatccgaccaatccaacagaagaaatttatccgattgagaatactggcacaccagaaaaaatggaagaaacaaatgaaagtactatgactagcgaaacgcaagcggaagaaagtagcgaagacgttagtaaaaaagaagtgacaaccaataatccaaaaacaaatgaagaaagccttcttccaagaaaagtcagcatcaagtatttttcacggatgaattatttgatgctagccatatcaccattgtaccaaatagcacaggcggtgctggaacggaggggcaaaacactttttacttga

SEQ ID NO: 215 - DNA, 558 bp, Enterococcus faecalis
  misc_feature (540)..(540): Nucleotide 540 is "n" wherein "n" = any nucleotide.
aaaaaagttgagccgaatttacttttgaaaaaagtctcaccaggacagattaatgctagaaatgtgattttagtcaatctacaaaatgatcaaaaaacatatattaaccaagttgcattttcggcagagattaccaaaaagggacatgaagaagttttatataaagaggaaaaagcaaacatgcaaattgcaccaaataccaatttttctgttcccattgcgctaaaagggcaaccgcttaagccaggagattaccatttgtctatgaccgttgttgggaataaagatgctgcaggctcatttaaaaaatcaataaacaatgaatcgatatcttttagaaatcaatggcaatttgaaaaagactttacaattaatggtgaagttgccaaagaattaaatgaaaaagatgtcaccttagaagaaaatcattcgaatttatatttgatgattggcttactactattattgatagtgattttaatcattgcctggttgatttggcgaaaaaagaaacaggaaaaaaacgaaagagaaatattnagagtacttaatttttga

SEQ ID NO: 216 - DNA, 801 bp, Enterococcus faecalis
  misc_feature (275)..(275): Nucleotide 275 is "n" wherein "n" = any nucleotide.
caacctgtggggaagacttggccattcttttatgcttcattagcacgtggcattgacgacgtacctacaatgtataaatacaatatcattttagctaattcagatggagacgatcaaaaagaagttactgtattaaacaatttacttgccaagcaagtagatgggattatctttatgggtcatcgcattacagatgatattcgtggtgaattttcacgttcaaaaacacctgttgtcttagcaggttcaattgatccagacgaacaagttggtancgttaatattgattacacagaagcaacgaaagatgcaacagcgactttagcgaaaaatggaaacaaaaaaattgcttttgttagtggtgcattaatcgatccaattaatggtcaaaaccgaatgaaaggctacaaagaagctttagccgaaaatggcttatcttataatgaaggcttagtttttgaatctgaatataaatttaaagcacgcattaatttggctgagcgtgtccgtaatactggggcaactgctgcctttgttacagatgatgagctaacaattggcttattacatgggatgctacatgctggtgtgaaagttccagaagaatttgaaatcattactagcaataactcattgcttacagaagtctctcgtccacgtctatcaagtattacacaacctttatatgatatcggtgccgtgtcaatgcgtttattaccaaaacttttgatcaaagaagaaattgaagaaaaaacagtcgttttaccttatggaattgatcaaaaacgttcaaccaaataa

SEQ ID NO: 217 - DNA, 621 bp, Enterococcus faecalis
aagaacgccaagtttattcacccggcgaccgtttctattatgaatgacttgttgcgctcagtggtggattctgcgaatacgacaaaattcaaaccaacgttagctggcttgaatcctcatctagctagtgctgattgggtcggaaaaactgggacaactgatgagtttaaagattcatggctgattgtctctaccccaactgtgacactaagttcttgggcaggacatgatctaccagcaccaatgacgatgaccagcggcgacaataatgggaattatatggcgaacttagccaacgcgctgtactatgcgaatccagaattgtttggcattggtcaaaaatttgaattagatccaagcgttattaaatcaaaagtttctgaatttactggtgaaaaacctggctcaattacctataatggtgccaagttcaacacacctggcaaaacaacgacttcatactatgccaaagatggtgcaccacaaagtacctataaatttgggatcggtggaacagacagcaattacgcttcttactggggaaatcttgctccacgtgccactacaaataataacaacaataacaataaaaacaacgataataaaaagaataataattaa

SEQ ID NO: 218 - DNA, 723 bp, Enterococcus faecalis
atgtctaaattcatgtggggaggaattgtaatgagtaaaaatggtaaagtgatttcaattatcaatatgaagggtggagttggtaaaacagcgttgagcgtaggaatatcatcttttttgtcagaaaaaaaagatgaaaaagtacttttgattgatagtgaccctcaattcaatgcaactcaagcgttcatagatccagaagattatctgaaaagtgaaaaaaccatttttaagttatttaagccccagacagaattacatcagtcttttgtaatgccaaaaagagaagagctggttactaaaataaacaaaaacttagatatattaatgggtgatttgaatctagtattagttaataaaagtagcgattcaggtttaattaaacgtttaaaacgatttattacaaaaaataacttaaggaattattatgattatattataattgattgtccaccaactttaacgttatacacagatagtgcactagttagttctgattattatttaattcctaaccgtatagacagatactcaaatataggaattagctcactgaatagagctattggggatttgatagatcaagaagacttagaattaaagtgtttaggactaatttatacgatggttcaaaatcatctatcagataaacaaaaagaagtaaaagccgaattggaatctaacaaagcgatggaaaatatatatgtgtttaaatctagtact

SEQ ID NO: 219 - DNA, 537 bp, Enterococcus faecalis
aaccttcgtggtgatgacagagatttacgcattcagaaaaattacacaagaagattaggcgaaagaacggatttatccaaaggctatatttcccaattggagcgggatttaagctcaccatcaatggaaacatttttctcaattttagaagtactaggcgtgacgccagagcagttttttagtcagcaaccgcttgaacagaaaattgtctacaatgaagaagaaagtaccctctattatgatgaagaacatggctatgaactaaaatggttaattccagcctcgaatgaaaaagaaatggaacctgtcattattacttttgataaaaatggcgaatacaaaacgtttgaaccttctctatcagaaacatttatttatgtgattgatggctccattcgtttgacattaggggaagccacgtatattgctaaaaaaggtcaaaccatgtattaccaagcaacagaacctcaccaaattagcaacaatggtcgaggaaaaagtcgtgcgttaattgtggcgacagaatcgtatttataa

SEQ ID NO: 220 - DNA, 384 bp, Enterococcus faecalis
ttgtggcgacagaatcgtatttataaaggacgaaatggaggagtttatccagtgagaaaccatgtgatttcatttgaaaatgttgtcaaacaatttgacgatgaaccagtattaaaaaatgtcagctttgaaattgaagaaggaaaattttatacgttattaggaccttcaggatgtggcaaaacaacgattttgcgtattattgcgggattcaatgacgtgacttctggcgatgtttattttgatggtaaaagaataaatgatgtacctgccaataaacgccaagtcaataccgtgtttcaggattatgctttgtttcctcacatgaatgtttttgataatgttgcgtttggtttaaaaatcaaaaaactatccaaagcataa

SEQ ID NO: 221 - DNA, 225 bp, Enterococcus faecalis
attgaaaaaaaagtgaaagaggcattacgtttggttcaattaccgggctacgaaacacgtgaaattagtgaaatgtctgggggccaacgtcagcgggtcccaattgcacgagcgattgtcaatgagccaaaagtattgcttttagatgatccgttatccgctttagatttgaaattacgcacagcgatgcaatatgaactacgtgatttacaacaacgtttatga

SEQ ID NO: 222 - DNA, 216 bp, Enterococcus faecalis
  misc_feature (191)..(191): Nucleotide 191 is "n" wherein "n" = any nucleotide.
attacttttatttttgtgagccatgatcaagaagaagcattatcgatgagtgatgaaatttttgtcatgaataaacgtcatatcgtgcaaagtggcacaccactccatatttatgatgaaccgattaatcactttgttgctgactttgtgggggaaaataatattgtggatggcgtgaatgccggaagatnatttaatttccactgggggggcaag

SEQ ID NO: 223 - DNA, 459 bp, Enterococcus faecalis
actattatcatcttagcaatcgttgtcattgctctgtttattgtttggaaatattatgctgaagcattatggctctttattaatactgccttaattgctggcgtaggtaattctttattaaaattattctttatgcgccaacgtcctactttggagcatttagtaactgaacatacgtatagttttcctagcggacatgctgtaggaagtaccttgttctacggcactattttattgattctgccaattttcattaaaaataaaacggtccgcctttgtgtgcaaattttactaggtattgggattttcatgattggggttagtcgaatctatttaggtgtccatttccctagcgatatcttaggtggtttttgtcttggtttagcttggttgttattaagttaccctatttatttagaaaaacgctttgtttggcgatttcaaagcaaacaacgctag

SEQ ID NO: 224 - DNA, 708 bp, Enterococcus faecalis
ctgttcaaacgattgaagggattgagcgaaaggaggaaaatttctgattttataaaattgtctgataatgatatgatttctcacttacggatggaaggaaaatatgagtttcatcaggctgatgatgaaattgccaaacatacccatgtaatgtttacttttacagatggcacgcaattacgttatttagatgtacggaaatttgggcgtatgacattggttcctaagaatcaaggtcatcaatataaagggattttagctttgggcccagagccaacaccagacgttttccaattagctacttttcaacaaggcttgaaaaagcatcataaagcaattaagccattgctgttagatcaaaagctagtgacgggtttggggaatatttatgtagatgaagcactttggcaagcgcaaatccatccagaacaaccagcagattccttaaaacctgcggaagttgctacgttgtatcaagcaatcattgacgtcttggcacgcgctgttgaagcaggtggaaccaccatccgcacctatctaaacgcgttaggagaagcagggacttttcaagtagcgttgaatgtctacgggcaaacaggcttaccttgcaatcgttgtggtacgccaattgttaaaacaaaagtggcacaacgtggtacgcattattgtccacaatgccaacaattgaaaggtcgtcgattgaaatga

SEQ ID NO: 225 - DNA, 687 bp, Enterococcus faecalis
atgaaaaaaacagtcgtctactccttgttattcggaacaatgttgcttggcgccactgttcctgctgaagcggcgacggtcgtttttgatagcgaacagtcgattgtttttaccccaagcacagatgggacggatccagtaaatccagaaaatcccgatccagaaaaaccagttcgaccagtcgatccaacgaatcctgatggacctaatccaggtacccctggtccactttccatcgattatgcctcaagtttggattttgggagtaatgagatatcgaataaggatcaaacgtattttgccagagcgcaaacctatagaaatccagatggttcagcaagtgaattggcaactgctaattatgtacaagtaagtgatttacggggaaccaatgctggctgggttttaaaagtgaaacaaaatggtcaatttcgtaatgcagaaacattacacaaagaattaacaggcgccaccgtcgcctttactgagcccagtgttcgctcaaatgcgacggacgtattgccgccaactgctaccgcaaacattcaattagatgctgcgggcgcagaaactgttgtcatgcaagccccagaaaagaccggcgccggaacgtggatcacgctgtgggggcaagcagaaaaagtgaccgcaaaaaatcaacaaagacgctcttccccacggaatggc

SEQ ID NO: 226 - DNA, 360 bp, Enterococcus faecalis
aaggctgtttatcaagctaactcaaaagaagaagcgaataccttcttatccggcatgattgagaaatggaagaaaaactatcctaaagtgacgcagtcactcatagaaaaccaagacttattaactttttatgattttccacctagcattcgtagaaccatttactcaaccaatctaatcgagtctttcaataagcaaattaaaagatacagccgtagaaaagagcagtttcaaaatgaagaatcactagaacgctttctagtcagcatttttgatacatacaatcaaaaatttctaaacagaagccataaaggttttcaacaggtaaccgatacattagtttcaatgtttactgagtaa

SEQ ID NO: 227 - DNA, 762 bp, Enterococcus faecalis
cgacgcatgtttgcaaaaacgattattgatagtgatgcgtttttagatatgcccttatcaagtcaggctctgtattttcatttagcgatgcgtgccgatgatgatggatttatcaataatcccaaaaaattgcagcgaatggtcggttgtggggaagacgatctaaaattgttgatggttaaaaaatttattctagtatttgaaagtggtgtgatcgttatcaaacattggaaaattcataattatattcgcagtgatcgttacaaaccaaccttgtatcaagaagagaaaaatcagattgttgaaaaaaatagcaaagcttatacgtttaaagcagaatcgtctgtcggtggtcaaccagctgactaccaacggttaccacaggaaagcatagtccagtctaagttaggtcagagtcaaggcagtagttcagaaaacgattgtttaaagatgatttatcatttttatgaggaaaacggctttggtacactggcctcaaaaacaagccaagattttaagtattggttgcaagattttatacaaaaaggggctagccaagaggaagcatgccaattaatcttgcatgctttaggaattgccgtcgatcgaaataaacggaattacggctatgtaaatgctattttgaaaagttgggagcaacaaaattatttatccgtacatgaagttctggtaaatgataaaaaacaagtgttggagcatgcgccgcaaatgacagaagaatatcaagagttaggtttttaa

SEQ ID NO: 228 - DNA, 333 bp, Enterococcus faecalis
agaaaggaggaaatcagtatgcatgcgacagatcaaacttttcaaatactattgagtcaattgttagaaaaagttgaagaccgttgtcctgaatgtggcagtgaacaatatgtttggcaacaaaaaaataaagatggcacagaacgttgtgccccaacttgttggtcgtgtgggtataaaatgctaaaaaaacatgaacaacaagccaatcaacaacgttctcaagagagttttatggcacgtacacaaaaattttttcatcaagggtccttaattgctgatgatgcgctacggcaatgtcgtttaaccaattaccaaaccactgaattataa

SEQ ID NO: 229 - DNA, 432 bp, Enterococcus faecalis
ccaatggaagaaatcaatttgcattttactggtgatatgcatgcgattacgacagccaataatgccttagctgcgttactagataatcatttacagcaaggaaatgaattaaagattgattctcgacgggtgatttggaaacgggcagtggatctaaatgatcgtgcgctcagacaggtcgttgttggtttaggcggtcctttccaaggtgtaccaagagaagacggtttcgatattactgtggcaagcgaaattatggcgattctttgtttagcgcaaaatttaacggacttaaaagaacgcttaagtcggattattgtcgcctataatgaccaaagagagccggtgacggttaaagatttaaacgtggcaggtgcgctgactttattattaaaagacgctttaaaacctaatttagttcaaatcgattga

SEQ ID NO: 230 - DNA, 903 bp, Enterococcus faecalis
ttcaaatcgattgaaggaactccagcttttgttcacggtggtccttttgccaatatcgctcatggatgtaacagtattttagcgacaaaaacggctttgcatctaggggattatgtcgtaacagaagcaggttttggtggcgacttaggtggcgaaaaatttttagatattaaagtaccttctttaggaaaagcacccgatgccgttgtgattgtggcaacgattcgcgcgttgaaaatgcatggcggtttggcgaaagatcagttagcagaagaaaatttaccagcgttacaaaaaggctttgccaacttagaaaaacatattcaaaacatgcaacgttatgatgtaccagtagttgttgcaattaatgagtttacacaggatacagagaaggaaattcaactgttgaaagaagcctgccaagcgttaggcgtgcccgtcgagttaacaagtgtttgggcgcaaggtggcgcaggtggcacgaatctagcgaaaacagtagtagcagagattgaagccgatacaaaacagtttcaacctttatataatcctcgccaaactattgaagaaaaaattcaagccattgtacaaacgatttacggcggggaacaggcgattttttctccgaaagcgcaaaaacaaatcgcagactttacaaaaaatggttgggatcaattaccaatctgcatggcgaagacacagtattcactttctgacgatcctcaaaaattaggacggccagaaggatttacgattacaattcgtgaactagttccaaaaatcggtgcagggtttatcgtggcgttaacgggtgacattttaacgatgcctggcttgccgaaggttcctgctgcgttaaatatggatgtggacgaaacgggtccagcgagcggtctcttttaa

SEQ ID NO: 231 - DNA, 708 bp, Enterococcus faecalis
tataacagacactgccgaatttttcatcaaattaaaataaaggaagtgaatttattggaaaaaacgcatttctcaaaaaaatacctaatcgtgaacgaagtcttgaatgcagttacacatggcataggcgcaggtttaagtattgctggcttagtcattttacttgttaaaggagctcgtttaggctcaccgattcacgtggtatcttatgctatttatggctccatgttgattctactttttttatcttcaacgttatttcatagtttaatttttacaagagccaaaaaggtctttcaggtcttcgatcatagttctattttcttattgattgctggcagctatacgccgttttgcttaattagtattggcggttggttaggttggaccttatttagtttagtctggttaatcgccatcgtcggtattgtctataaatccctcacgttgcataaacaagaaacagtgaaaaacatttcaacgattatttatattgttttaggttggctctgtatcatagctgctcgtccgttatatgaatctcttgggtttacaggaacagcgttattggtcgcagggggtgtgtcttacacattaggtgcagccttctattcattgaaaaatgtgcggtttatgcatgtggtttggcatttgttcgtcatgcttgcagccatcctcagtggctttctatttgcacaccacggggaa

SEQ ID NO: 232 - DNA, 369 bp, Enterococcus faecalis
agaaagagtgataaatttatgacaaacgttaaaatcgtaacggattcttcatgtacgatggaaaaaagtcttagagatgaattaaatatccatatgatgcctttatcaattatggttgatggcgttgtttatccaaatgatgatcatttgccaggcgaaaaatttatggacatgatggctaatgcgaaggccttacccaaaacgagtcaaccaccaattggtgaatttgtagaattatatgatcgcttaggtgaagatggcagtgaagtaatttcgattcacatgacaaaaggcttaagtggaacggttgaagcggcccgtcaagctagcaacttatcatcaagtaaagtaacggtgattgataccgat

SEQ ID NO: 233 - DNA, 918 bp, Enterococcus faecalis
ctcctgaacaacaagcagacgttatttcaagaacttcacacgacagactataaaaaacatttacattatttaactgaaagggtgacatttaacgtgtcatccttttcgtttgaaagaagagggatcattatgacaacaccagttacaggtagaattcattcaacagaaaattttggtaccgttgatggcccaggtgtccgttttatcgtatttacacaagggtgtcgcatgagatgtcaattctgtcataatccagatacttggaaaattggttccggtggtcgtgtggtgacgactgacgaagtattagaggaagcattacgttttcgctcttattggggcgaaaagggtggtatcactgtcagtggtggtgagccgctattgcaaatggactttttgatcgatttatttaaaaaagccaaagcacaaggcattcatacaaccttagatacgtgtggcaagccttttactcgggaagaacccttcattagtcaatttgatgaattgatgaagtatacagatttactcttatttgacatcaaacatattgataacgagcaacataaactgttaacaacgcaatcaaatgataatattttagagatggctacctatttatctgaaattgacaaacctgtttggattcgccacgtattggtgcctcaacgtagtgattacgacgaatatttaatccgtctggatgccttcataaaaacattaaacaatgtagataaagttgaagtgcttccttaccatacgatgggcaagtacaaatgggaagaactaggtattccttatccattagaaggaattgagcctcctaaaaatgatcgtgttgaaaatgcgaaaaaactactacatgtcgtggactatcgagcctatctagcacgtttacaaacgggcctcgaccacgggtaa

SEQ ID NO: 234 - DNA, 435 bp, Enterococcus faecalis
tcccaatatcgtggtgaagaggctcgttctggaaagcctcttgcaagggctgcgaacccaagttatcaagaaggtaaatgcttaggtgagaaaaatggcttattagcttcattaaactcaacagctcgtttagaatatacaatcgctttagatggtatttctaatacacaaaccatcaaccctaatggtttaggtaaagacgacgacacaagaattaacaacttacgtaacgtattagatggctacttcgataaaggtggttaccactttaaaatttacctttttacaaacgaattattattagatgcacaagcacatccagaaaaatatccaaacttaactatccgtgtatctggatatgccgtgaaattccgtgacttaactcctgaacaacaagcagacgttatttcaagaacttcacacgacagactataa

SEQ ID NO: 235 - DNA, 279 bp, Enterococcus faecalis
gcggagcgcttaccagtagggcgttctttgtggcggcccccttcccactgtcaaggttgccaccagcctctacaactctatgaattaattccagttgtttcgattttgctgcagcgctttcgttgtcgaaagtgtcaacagccagtagctaagtgttatcttttagcaaaacttgtcatgggcgggttaaccgcaagctgtttttttgctggcctgacgattgatgctttgattctctggtggtggctgaacaacgctttccacattatccttgattga

SEQ ID NO: 236 - DNA, 297 bp, Enterococcus faecalis
gtaagcccaaacttaaaaaggggacaaagggaagtgtctgttcaactggataccccaaaaatttacagctgtagccatagattaggccataactactggcaaaaaatagtagcatcagcaactgaggtacctgtaaaaaacagccccacaaacccagtaacaaaagatcccctcgtcccatggcttccggaaaataatgtaagacggcttggaaaaaacaaaaacaaaaaagaccagtcagtaagtaaaacgaatgctgacccgcaattttcagcaagcaaagcacaaaaaaactag

SEQ ID NO: 237 - DNA, 399 bp, Enterococcus faecalis
acactgaaatcctttccaggaacattaatggacatcgcagaatttaaagaccgtaactacgacacattagttgctggtggcgtccctgctactagtcgtccagtcttacttggtattaccaaagcgtcattggaaacaaacagcttcttatctgctgcatccttccaagaaacaacacgcgtgttaacagatgctgctatccgtggcaaaaaagatccattacttggattgaaagaaaatgttatcattggtaaaatcatcccagctggtactggtatggctcgttaccgtaacatggaaccaaaagaagttggcgtagctagcgaaaacgtttatagtatttcagatattgaagcacaaatggctgctgaagatgcgatgaaaaacatcaataaataa

SEQ ID NO: 238 - DNA, 924 bp, Enterococcus faecalis
atgcaaaagagttataaactagaaggacttgattgtgcaagttgtgcagacaaaattgaaaaatctgtccaaaaaattcacggagtagaaaaagcgcgtgtggacttcatggctgaaaagatgacactggaagttgaatcaggacatgatttagaagtcgaaaatgaagcgcgtgcagtgattggtaagttagaatcagatgtcaaagttatttctttaaaagatgtcaaagaagaagaaggacgtaatccaaataagaatcgcttaattcgtatcattattgcatttgttttatttttagcacttattatcattaaaccaagtaataattgggttgctttggcatcttatttagtcgtttatgtcttaattggtggcgacattgtcaaacgagcggtaacgaatatttttcgtggggaagtgtttgatgaaaatttcttaatgtctgtggcaacgatcggggcattctttattggggaatatcccgaagctgtggcagtaatgttgttctaccaagtcggcgaatggttccaaagtgctgcggttgatcaatccagaaaatcaattgccaaattaatggatattcgtccagattcagcaaatcttttagtaaatggacaaataaaagcggtcgctccagatacaattgaaattgggcaacaaatattagtgaaaccaggtgaaaaagttccattagatggtcaaattattgatggatcaagtatggtagatacctctgcgttgactggtgaatccgttccaagaacggtcaaagtcggcgatgaaatcttaggtggttttatcaataaaaatggggccttgaccattaatgttacgaaaaaatttggggattcaacagttagcaaaattttagatttagttgaaaatgctagcagtaaaaaagcccctgcagaggaatttatt

SEQ ID NO: 239 - DNA, 1305 bp, Enterococcus faecalis
atcttggtggccactgtcagaattataatggaaaaggagaaccgggaactgaaaggtatctcatttaccaaaaaaatggtgatttcattggtgggaggattaatcgttgggctcggctttttatttttaagagagcaccttattcgcagcaatcaaggcgctgtgtggcagacaatcaatcagattcttttccaagatatttcagatcctgaaaaaggacaatctgcgattgggcttttctatattattggtcaactatttatcaacggcctacaattagtgattgtgccgatggtctttacttcaattactttagccatttgtcatattaccgatacgcaaaaattaggacgaatttcttataaaacaatttttggctttttatcgatgtcactgattgctctattaacggctggaattgtgggctatagcgtatatttaactggcgcttttaatgtgtcgttatctgaaacgctagctcctgtcgaagtaagtacgagcggcaacccattaatggtgattgtcaatgctgtcacgaaaaatatcggttctgcatttagcgacaatggtgcaattttagccgttgttgtgttggcagtgattactggtttatgtattaatgcattaggggataaaattcgtgttttcaaaaaattaattgaagaagtcaatgcgatggtcacgttatttttaacctttgtaattactaaatttgctcctattgccgtctttatgttgttagttcggacgtttgcttcttacgggattgattatttaaaaccagcgttagtctacgtcgtaaccacgacagcgacgctcttagcctttttgatgatcggttacccattatttatcttatttgcgacaaaattaaatcctgttccttttattaaaaagattatgaaagttgtggtctttggattttctacttcttcttcggcagccactttaccgttaaatacaaaaacaacggttgaagagttaggtgtcgacagcgatgttgccgcctttgtcttgccgttaggaatgactatcaatatgaacggcacagcgattatgcaagtaattgcggctatttttgtggcgggcgtagctggttatgaagtgacaccagctaatattgccttgattgccattttagctttaatgtcatccattggtacaccggcggcacctggcgctggcgggattatccttttcactattttaactggtttaaactataacaatgagattgcgattgcgacgtattcattgattttagccattaatcgtccaatcgaaatgctcgttactagcctaaac

SEQ ID NO: 240 - DNA, 867 bp, Enterococcus faecalis
cccgcccttaacgcctggtgggccaatgatgaaaaagtccagcggattctagcaaataactatgattggcttggagagctttcgttaattgatttcttacgtgatgttggaaaaaactttacaattaactatatgatgagtaaagaaagtgtgaaacgtcgaatcgaaacaggaatttcttatactgaatttgcgtatcaattattacaagcgtatgatttcttgaaattgtacgaaacagaaggttgtttattgcaattaggcggcagtgatcaatggggaaacattacttcagggattgaattattacgccgagaacaagaagttcaaggatttggcttaactatgcctttaattacaaaagcagatggtaccaaatttggtaaaacagaaggaaacgcagtttggctagatgcggaaaaaacttcgccatatgaattttatcaattctggattaacacagatgatcgtgatgtcgtgaaattcttgaaatactttactttcttaacattggatgaaattgcaacaattgaagaagaatttacagcgaacccaggtcaacgtgctgcgcaaaaagcgttagccaaagaagtgactactttagtccacggtgaagcagcctatcatcaagcggttaaaatttcagaagctttattcagcggggatatccaaagcttatcagcagaagaaattaaacaaggctttaaagatgtaccgacgtatgaggtgcaaccagaagatccattaagtttagtcgaacttatagttacctcaaaaaatagaaccaatccggacgtccagccccgtgaaagatgttcaaaatgggagcgaatttacgtcaatggaagaccgtggcaccagaattga

SEQ ID NO: 241 - DNA, 417 bp, Enterococcus faecalis
gagagtgaggcgaaggtcgtggatggagaaatcagaagaagagagattgttaaaagattaagagagaccgaaaagccaattagtgccactcgttttgcaaaagcttttgatgtcagcagacaaattattgtaggagatgtcgctctattacgggcgacaggggtcgaaattgtcgcaacagctcgagggtatatgttggaacaacctttagaaggaattgaacggaaaattgcttgtcaacatacacctgaacaaacgagagaagaattgtcagtcattgttgccaaaggtggagaagtggtagatgtgagtattgcacatccgctttatggggaattaatcggcagtttgcgcattcaatcagagaaagatattgataaatttatggacaagtatcacaaagagcatgctacatag

SEQ ID NO: 242 - DNA, 645 bp, Enterococcus faecalis
tttcaaggtgattatggctacaacatttctgtgggaaaaaatttctatgccaattttaataacgtttttttagatgtttgtccaatcgaaattggcgataactgtatgtttggacccaatgtgcaactttatacagccgagcatccattacaagcggccaagcgtaatagcggaatggaatcagggaaacgaattatcattggcaacaatgtttggattggcggtggagcgattgtccttcctggcgtaacattaggcgataatgtagtggtggcagcaggtgctgttgtgaccaaatcgtttccagaaaactgtgtgatcgcaggtaatccagcacggataattaaagaattgactgaagatgacgccccaacaacttctttagaacaacaacgagcaaagattaaccaaatcgataaggaactggtccgtttattagaacagcggatggacgtcgtcgcagagattgctgcagtgaaaaagaaagcaggtcatgcggtttttgattctgaaagagaacaacaagtattagaaactattctgaatcatgttgaaaatgccgagtatgaagaaacattatctgagactttccagggaattatggacgcctttaaacgtttccaagaaaaacatttaggagagtga

SEQ ID NO: 243 - DNA, 843 bp, Enterococcus faecalis
ataggagctattgtgatgaattctttaggtgcagttattaaagaaattagaaaaaatagaaaattgacacagaaaatgttatcagaagacatctgttcgcaaagcgttttaagtcgcattgaaaacaatgaagagttgccaaacgttctcgtaatgcaacaactttgtgatcgtttaggtgtgactgttgatcagattatgcgttataaatctggtgatgtgcacgttgttacgtattcatttgaaaaaatggctgaatattttcgccataaaaaatatcaattattattaaattatttaaaggaaaatcgtattgaagaacaattgtatttagatacggactggcaaaaatattattattatttaggtagttgtgaattgtttgttctaaatgattatgaaaaagctattgctagcttgcgtaaagggttatctttcacctataaagccgataagttaaatgtttctgatttagagattcaattaattagttgtctaggtgccacttatggttacatgggcaatcgagtagaagcagaacgatttttaagtttgagtattcattattttaatcaattgccaaatgaacgcagtaatgcagagttaacgaaaatattttttaattatgctgatttcttatttaaaaattatacagaaaaagatgccgaaatttatgtggatcaaggaattacttgggcccgcaaaaaaaatagttattattatttaagtgaattattaaatctaaaatatttagttttaatgagaaagaataaacacgaagaagcagaacgttatctgaacttagcacaacaaatgaaaaatgtggaaagtggcaatctttaa

SEQ ID NO: 244 - DNA, 510 bp, Enterococcus faecalis
  misc_feature (330)..(491): Nucleotides 330, 382, 430, 440, 449 & 491 are "n" wherein "n" = any nucleotide. 1
aataaagaaagaaggatgaagatgaaaacatttatctttgcagacaagttctttttaaaaagcgatgttaaaggacctggttatttagaaatcacggatggtatctttggtaattatacaaaagatgaaccgcaaggggacgtaaaaattattcgtgaggaaggcaaatggattgccccaggtttagtcgatactcatattcatggttacatgaatcatgacgtaatggataacgatgcagaaggcattaaagtgatgtctgaaggcttattatcttgtggtgtaacttcatttttaccaacaacgttaacttcaagtaaagaacgtttnacagacgttgcacgtacgattgggtcaagtctacaaagaagtactggtgcanaaattcaagggatttactttgaaggactttctttactgaagaacctanaggcgcacanaatcaaggnattttgggagaatcccaccttgattcttccacgaaatggcantaactctccggcgaactaa

SEQ ID NO: 245 - DNA, 312 bp, Enterococcus faecalis
  misc_feature (282)..(282): Nucleotide 282 is "n" wherein "n" = any nucleotide.
ttccttaccccgtggccgacatttgtgattggtttaagtttggcgattccgatgacggcttgcgcttacaccatcgaagcggatccaatcaactttacttattttcccggctctgcaagcaatgaattaattgttttacatgaatctggaaacgagcggaacctaggaccacacagtttagacaatgaagtggcctatatgaaacgaaattggtcaaatgcttatgtctcatattttgtcggatctggtggacgagtgaaacaattagctcctgctggccanaattcaatatggcgcaggttctttagctaa

SEQ ID NO: 246 - DNA, 822 bp, Enterococcus faecalis
  misc_feature (14)..(14): Nucleotide 14 is "n" wherein "n" = any nucleotide.
ctcctgctggccanaattcaatatggcgcaggttctttagctaatcaaaaagcctatgcgcaaatcgaattggctcgaacgaataatgcggcgacatttaaaaaagattatgctgcctatgttaatttggcccgtgatttggctcagaacattggtgctgatttttctctggacgatggaacaggttatggcatagtcactcatgattggattacaaaaaattggtggggagatcatacagatccttatggttatttagcgcgttgggggattagtaaagcgcagttggcacaagatttacaaacgggcgtttctgaaacaggtgagactgtcattattcagccaggtaaacctaatgcgccaaaatatcaagtaggacaagcaattcgtttcacttcaatctatccaacaccagatgctttaatcaatgaacatctatcagcagaggcactttggacacaagtaggaacaattacagcgaaattaccggaccgacaaaacctttaccgtgttgaaaatagcggacatttgttaggttatgtgaacgacggcgacattgctgaactttggcgcccgcaaacgaagaaatcatttctaattggtgtggacgaaggcattgttttaagagcaggacaacctagtctgttagcacccatttatggtatttggcctaaaaatactcgcttttattacgatacgttttatattgcagatgggtatgtttttattggtggaacagatacgacaggcgcgagaatttatttgccaatcggaccaaacgatggcaacgcacagaatacatggggatcatttgctagctaa

SEQ ID NO: 247 - DNA, 567 bp, Enterococcus faecalis
atatttttatgctataaacacaaatttagtattttcggaagtggaggaactataatggacggcattttaccgttatggaaggaacgtggcatgacaagtcatgactgcgtatttaaattgagaaaaattttacataccaaaaaaattggtcatggtggtacgctagatccagatgtcgaaggggtcttacccatctgcgttggcaaaggaacgaaagtgatcgaatacatggtagattctggcaaaacctatgaaggtgaaattacacttggatttgctacgacaaccgaagatgttagtggcgaaattgttgaaaaaaaactagttacagcacctctgtcaactgaacaaattgatcaagcaatggccgaaatgacaggtgaaatcacacaaatcccaccgatgttttatgcggtgaaagtcaatggtaaacgtttatatgaatatgcgcggaacggggaagaagttgaacggccccaacgaaaagctatgatttattcatttgaacgcactagtgaaccaatttttaacgaatccgctcatacacaaagttggcggtttaaatag

SEQ ID NO: 248 - DNA, 396 bp, Enterococcus faecalis
cgaatgaatagaaaagagaaaacaaatttagatagtcgaattgattacggcgtgatattaccagtttttcttttatcactaattggtatgctatcgctttacgtagcgctttacaatgatccaagcaaacctaaaattggtagcttgttaatgaaacaaggactgtggtatttagtcggaggattaagtattgtcattattatgcattttagctcaaaattactctggcggttaacgcccgttttttatgcacttggattagtattaatgggattactactgaaattctatgaccccgtgctagcagagcaaacaggttctaaaaactggattcgctttggtggcaccacattccaaccatcggaattgatgaagattgcgtttattttcatgtcg

SEQ ID NO: 249 - DNA, 663 bp, Enterococcus faecalis
aaagactcattgaaggacggcaatttatcggtctatcaaagtgaacttatttcggaacatttgctgagttctcacaatgaggcaattacggctacgaaaacattattcttttcttatatgccgtttacaatttcggacgaagaattttatcaagaaattgttccgattatttatcaacatcgttttattacgccgttcatcgatatcaccttacgaattatggatttagaattttttcaggaacgctacccaattgtttttaatagctgtcgtcagtttttatttgcgttggattgctcggcgtttgagtttagtaagctttctttattttttgatttgctattagtgttatcccgtctttatgaccaaaggaatgaaaaaagcacgatcaatctttatgtgaattttacgcaaggagaaaaatatactcagtttatcaaagaacaaatcaaaatattcgaatctttcagcattcactttcattcagcgattcgaccagatactgatttagtagtttcggattatttaccaaaaacgttattttcagtaaaatgtttaatttggctagcgcccccgcgagccagtgactggcaaaattttggcaacgaaattgtccgaattaataaagagctacaacaaacgaaacaaagaaaaagcgaataa

SEQ ID NO: 250 - DNA, 252 bp, Enterococcus faecalis
acagaatctaaagggaaatcgggggatttaatgcagagcaggaaagttttatgggacaccaagaagggttggaaacaccggggaaagtttcccacatgggtttcaaatttttcgcggaagcgtaagcgaaagcaaaaagaagctggctgtgatgagtggacaggcgtacaagcatataattatggactggattatattcagtttgttaacgaacccggcgggatacaaagcgccgagacccacccatcgcat

SEQ ID NO: 251 - DNA, 234 bp, Enterococcus faecalis
catagaacgtatcttaaaagaaaaagtttggatgattcgatgcgtagagtaagaaaaataatttataaaatcatgctacttttgtttgttggtttagttgctggtcttggctatcttggctataaaatacatcaaaatgttgaaacggtaatgacctttgaaaaacaagtagaagcagaagtcaaaaaaaataaaatacctgaatacaaaacattagctttagcgattatctaa

SEQ ID NO: 252 - DNA, 948 bp, Enterococcus faecalis
aaaaacccagtcgggaatcatccaatgatgttggtgtttcaaggactgttctttgcagcaatttactatttcggtttcggtttggcaatcactaagtttaacttaatgacaccaggacgtgaagaaggcgatggcgaagaaacgccagatgttgcagaaggtgacaacaaatttgcttctctagttcgtcgtatttatgatggtttaggcgctgatgctaatgtaacttctattgataactgtacaactcgtttacgcttaacagtgaatgatacaggcaaagtggatcaagcaaaaattaaagcaactgggtttcctggtgtgaaagtcattgatgacaccaatatccaagtgatcgttggtacggaagtacaatttgttgctgacgaaatgcaacgattatataaccaccaagcgccagcaacaccagtcaaagaaacacctgtttctcaatcagttgttgaagaaaaagcaccagtttcaacgaaagaaactgaattatattctgtagcgaatgggaaagttattcctatttctgaagtaccagatgatgttttctcagcaaaaatgatgggtgacggttttgctgtcgtaccaacagacggcgaagtttcaacacccgttgctggtaaaattactagcattttcccaacaaaacatgcgttaggtatccaaacagattcaggcattgaagtattattacacatgggtctagatactgttgagttacaaggtggaccatttacattacatgttgaagaaggccaagttgtaaaacaaggcgataaaattgcaaccattgatttagcggcattagaacaagctggcaaaaaatcagatttaattgttgttttcacaaatcaagatattgttgctcaatacgatttacaaaaagcaggtcaaacgacttcaatgaatgatgtaatcggaaatgttaccgtaaaataa

SEQ ID NO: 253 - DNA, 684 bp, Enterococcus faecalis
cccccctgtggtgaagacgggcgtggtggagcggatgtttgtgatggagccagaaggatgaaaaaacttcaagtactgctatcacaaattgaagacaaatactttttagcgagtgaagaaattatccaacatgctgaaacggtattgggtgaaaagttgaatgaacatattaatattgggttgagtgatcacattgcttttgcagctgaaaatattcaaaataatattattgttcggaacaagcttttaagtgaaattgagattttatatagtgaagaatttgctattgctcaatgggctgtagaatatttaacacaaaccttagagattccatttagttatgatgaagcggggtatattgcgattcatatccatagtgctcgcagcgggcgtactgataatagtaaaagtatccgtgaagttacaatcgtttctgaaattattcatttaatcgagcaggaattggctattgatattcatgatgataaaaatagtctcagttattcacgtttggtgaatcatttacgtttgtttattcatcgcttccaacaaaatcaatacgctgttttagatgaagaaattttggaagtcgtaaagaaaaagtatgctgaaagctatgaaatctcaaaaaaagtacaagtattattaatgagaaattttcattatcaagtaccaaatgaataa

SEQ ID NO: 254 - DNA, 615 bp, Enterococcus faecalis
aaattaaatagtttatgtgaggagttacgtataatgaaagcgtatatgcaaagaatgggacgttcgttaatgttaccagttgctgtattaccggcggcttctttattagtcggtattgctaactggatcgtgggaacaatcggtgctagtccagccacaacttttctaatgaatggtggtttggctatcttaaacaacttagcattattatttgcggttggtttagcgttaggaatgtcaaaagataaagatggatcggcagcattagctggtttagtcgcttatttagtgccaaaaactgttttagcgcctgcttctatccaagccattaaaggcttcaaggatattgctgaagtaaacccagccttcaacagcatggacaacaatgtctttgtcgggattgtcgctggtttagttgccgcggcaatgtataatcgtttctctggtgtgaaattgccaatggctttatcattctttagtggaaaacgtttagttcctattatgtcagctatttcgatgttagcaatctcagctgtcttattcttcttctggccagttgtttataacggattagttgcatttggtaaaggaatctctagcttaggtttcgtatga

SEQ ID NO: 255 - DNA, 609 bp, Enterococcus faecalis
agattaacggttaacgtgttaggagaggatcatatgttgcctaaatatgagattataaagcgggatatcatagagaagattgaatctggagagtttagtacgggtgagaaagtttattcagaaggtgatttaaaaagaaagtataatgtcagtaatacaacagtagtaaaggctttgaacgatctggtaaatgaagggtatttaattcggcgtcagggcgagggaacctttgtcagaaaaaatttgaagcatagaaaagttttcttctcagagaagttatcgatgtccaataacgaaaaacaaaagtcggttgaggaaacgatcactttagtttcggaagaatttactgataaagagatcgcacagatattaggcgacaaatcaggcagcaaagcgttgcttaagctaacccaaattgcattaacgaatgattttccatggaaaattcaaaatcgctatctctttgcagataaacttagggatgattcagtaaaacgcctgattgaaggagctagtttatccgatgaattgggtcttcaaggaaatatggctaatcttcccgatgacgatggaggtgagcacgattttattaacgaaggattcagatga

SEQ ID NO: 256 - DNA, 192 bp, Enterococcus faecalis
aagaggacaattttattcgccttacgaatatctataaacaaaaaggctattctcccacctttatttttgtctaccataaacaaaacaatttgttcattgattcacttgactaaatcaaaattcactactacactagatactgttcattttatctatacaataaacaaatcagtgaaattttatgattattaa

SEQ ID NO: 257 - DNA, 264 bp, Enterococcus faecalis
aattttatgattattaatgaaggaagcgttagtatggctaagtctttgatttgcctttttagagaaagaaaatatcgatgcaatcagtacattgttcaaaattttcaaacagtaatatttttcattcttgtattctatttccttctttttggttttggacctcaatatttgatttttgtttcaatttttactgtaatgtttaaacttaattataaaaaaaaattgcactttctgggatttgataaagtccgtataattgtgtaa

SEQ ID NO: 258 - DNA, 1062 bp, Enterococcus faecalis
tatgaaaagtattgtactgaaagcaaaggatctaagaaaaaaatattggcatatattaataataatttacaaaatcttatagttagaaatgtaatcagaccaactcaaagatatgctgatatgttggaattttcataccatcctaattgcttttctaatgcaatagagagagaaaaagtacttcataatatgtgggcctatccatataagaataaaaaggtagttcattacgaattttcagacttaatagatggagacatacccattttttataacaatatctcaaaaacatcattaatagctagtgacgggtgcttagtagaagatttttatcaagaaagcgctctgaatagatgcctaaataaaataaatgatctttgtgatgaagatatttctattcaaaccgtttggctagaaattgctttgaatatttataatccatataaatatattaatgatttgaaaaatcaaaattcaaataaatatatttatactggcttagagctaaacggtaaaattattcaagcatgtcagaagatagagaaaaaaattttcaagagagctatttttaataaaaaaaccaatactgtaaattggattgacataaagttggatcaagattggaatgtgggaatcctaaataataatatgtacgatggattgcctggtatattcatattttatgtggctcttaaatacattacaaagaatcataaatatgactatgtaattgaatgtataaaaaattcaatttatacaataccatctgaagatatattgtcagctttttttggaaaaggaagtttaatatatcctttacttgtagattaccgcttaaataatgatataaactctttaaatgtagccgtagaaattgcagacatgttgattgaaaagaaaccgataaataatggcgagttaaaaaatgattggatccacgggcataatagtataataaaagttttattattgttatccgagataacagaggatgaaaaatatagaaaattttcattagaaatttttgaaaaattatccgaagaaccctattttaatttcaga

SEQ ID NO: 259 - DNA, 1230 bp, Enterococcus faecalis
agaatttccagaatttccaagaaaaaaagttttgaactttatagtcaaaagatgccgacggaggagcaacaacagtttacagactttttttcctcgttaaataggatgcctctgactaagaaaaatgatgttgaaatttttacggatggtacggaaaaattcaatgcgttgatggcggatataaaaaaagctcagcactccattcatattgaatattatgcctttgtaacggatcatatcggcaccaaaattttgaacttattagaaaaaaaggcggctgaaggggttgaagtgcggttgctttacgatgcctttggctcaaagggcaccaaggttcatcatttgaatgaattgaaaaaaaacggtggttttgtccaaacgtttattacttctcaaaaagcacttttgaagtttcgtttgaattatcatgatcaccggaaaattgttgttattgacggaaaagtaggctacattggcggctttaatgttgccgatcaatatgccggaacgactaaaaagtttggctattggcgggatacacatttacggattcaagggccagcagcctcattactgcaaatgcgttttttaatggattggaacgtctcttcccccgagaaaaatcgtgtggcgtatcaattggattatttctttaaacttgaagcattggtgccagaggcaaatacatccattcagatgattgccagtggtcctaacagtgaccgtgaacaaattaaattggcctttattaaattgattacttctgccaagaaaagagtctggattcaaacgccgtatttagttcctgatgatagtgtcttggctgctttaaaggttgctgcggcttcaggagtagatgttaaaattatgattccagataagcccgaccatccgtttatttatcgagcaacacagtattacggccgcttattgatgaaagaaaatattgaaattttaatttataacggtggtttcttacatgcgaaaacaatgatcatggatgatgaagtctgcacagttggttcagccaatcaagatatccgaagttacaaattaaactttgaagcaaatgctgtgttatatgataaaaaaatcattgatcaattagaagcaattttcttagaagatcgaaaaaaatgtacaacaatgactccagaagttgttcgcgacatgtcaaaatggttgatttttaaacaacaaatttcacgattattttcaccaattctttaa

SEQ ID NO: 260 - DNA, 846 bp, Enterococcus faecalis
ggaggttatttccgtatgaaaaaacgacttttacctatttttttcctaatacttcttacctttggccttgccctacccgtttcggcggctgaaaattcaattgatgatggcgcacaattactgacacctgatcaaatcaaccaactaaagcaagagatacaacctttagaagaaaaaacaaaagcctctgtctttattgtaaccacaaataataatacctatggcgatgaacaagaatatgcagatcattatcttttaaataaagttggcaaggaccaaaatgcgattctttttctcattgatatggacttacggaaaatctacatctctacttctggaaacatgattgattatatgacagatgcacgaattgatgataccttagataaaatatgggataatatgagtcaaggaaattatttcgcggctgctcaaacctttgttcaggaaactcaagcatttgttaataaaggggttcctggggggcactatcgtgtggacagcgaaacaggtaaaatcactcgttataaagtcattaccccgctggaaatggtaattgcttttgctgctgcgctgatactcagtttggtcttcttaggcattaatatttctaaatatcaattaaaattttcaagttatcaatatccctttagggaaaaaacaactttaaacttaacctcccgcacagatcagttaaccaactctttcatcactacgcgtcgtattcctaaaaacaatggcggcagtggcggaatgggcggtggtggtagcaccacccactcaactgggcgggggacattccggtggggggtgtccaaatttttacaattttttatctttttttaa

SEQ ID NO: 261 - DNA, 387 bp, Enterococcus faecalis
aaaaaattagaagcagaaacacttacattttgtaaggaatgtgctatactcattgaagaggtgaggaagatggaaaaagtaaaaacagaatcgtttgtactttgtcccaaatttgaaaaatcattttcaatacttggtaaaaaatggaatggtttaattattgatgttttattagaacgaggtcctcaacgttttggcgaattaaaagaaaaaattccaatgttaagtgatcgtgtcttagtagagcgattgaaggaactagaagctgaaggaattatcaccaaagctgttcgttgcggtgaaggaaatcgcttagaatatttcctgaccgaaaaaggtgaagacttggacctagcattggaactagccttcgccagggatggccca

SEQ ID NO: 262 - DNA, 387 bp, Enterococcus faecalis
  misc_feature (62)..(100): Nucleotides 62 and 100 are "n" wherein "n" = any nucleotide.
acaccgcccttaggaaaacaattgattccacaccatcaaaccgttagaagggaacaaccttnttctatgctgattgaagcagaagagctcattcaaaatnatccagaaacgacacaagatgatttattaattcatgggattattgatggctatatcgaattagacaatcaatgcattttgtatgactataaaaccgatcatgtaaaaggcacctctccccaagcaatttctgaaattgtcgaacggtatcgcggacagatgaatctttatcgtagagcgctacaagaggcaacgcataaagaggtgtcgcacgtctatttaattttattaaatggaggagtaattattgacatgcagacaggaaatgttgtagattttataaagtag

SEQ ID NO: 263 - DNA, 1194 bp, Enterococcus faecalis
agggagaataggatggaagcttacaagcaatctgtcgatactgtcacaaaagaagtttcagtcaatactgaaactggtttaacacaacaagaggcccaacaacggctgaaagaaaatggccgcaatcaatttgaagaggctaagaaggattctgtgttaaagaaatttattcacagtttatctgattttacaacgattattttattagttgctgcggcaatttcgttttatacagcaatcgtaacagaacatggcgaatattttgaaggaatcttaattattgcaattgtgattatcaatgctgttttagccattgttcaagaaggaaatgctgaaaaatctctggcggctttacaagacatgaacaagcaaagtagtgtagtcttacgagatggcaaggtaatcgaagtcgatgctgaagaactagtagtaggagatgttctagttcttgaagctggttctatgattacagccgatgcacgacttattcaagcttctcaaatgcgcgtagaagagtcagcactaacaggtgaaagtgaacctgttgaaaaagatcctacatacgtggggcatgacgatgatggcttaggagatcaaataaatatgattttcaaaggctgtaccgttgtgaatggccgcggacgagcagtagtaactgcaacaggaatgaatacggaaatgggtaaaattgctgggttactgaataacagcgatcagcaaaaaacaccattacaaaaacgcttgaatcaattaggcaaacgtattagtttgttagccttaggggctgcagcaattgttttcattattggtgaactgcaaggagaaccgcttcttgaaatgtttatgacagccgtttccttagcggtggcagctgtaccagaaacactaaccgtgattgtaacgttaaccttagcatatggtgttcaaaaaatggctaagaaacatgcgattattcgtcgattgccagcagtagaaacgctaggaactgcgaatgttatctgttctgataagacaggaacactgacacaaaataaaatgcgcgtccgccgagtatggcatcgtggtgatgaagtaacggatacggaagatgccatgaccgatgaagccatggaagtactgaaaatggctgctttatgtacagattcgatcgtggaacaagaagtcgaagatgccaacgccggatatgcgcacccc

SEQ ID NO: 264 - DNA, 726 bp, Enterococcus faecalis
gggccaatccgtggtgaagagctgcattttactagattaagaaatgataaacctgcgtatgtagaattaaataatgaagttttgaaagaaattccgttaaatcctggagaatatattgctgaggatattagttgcttgtatgatagagagctatctgttttaatggtacaaagaaatattcatagtttgtcaccttcaggtattgaagattattttactgaaatgagtgatgatttagtagagattgaattattgccagttgtaaataaagagattattagtaaagccttagctaatgaaaaatttcgtaaactagagttaagagcaggttctatgaatacaactagtgatagaagtggattgagaaaagtattaggtccttttatggaactatttgagaaatttgaaggtacaaattttgttatagaaattagttcagggagatcaaaaaaagatttatcagaagatcaaatgaaagaagtaataacagcaattgaacaagataagagtttatttagttcagcaattgtttcagcaaaaaaatcaaaagaggtacctgttgaaaagtatgatttaataaatggaaagctctatgtgtatcgttcttttgatttgccagatggtgcatttttaaaatcagatagtgttatagacaatattaaaaattattattttcatcctaatgaaggtgggtatagaaaacaaattatcgatgctgtaaaatag

SEQ ID NO: 265 - DNA, 252 bp, Enterococcus faecalis
gatatcatgaacaaggaacatcatatatttttttggatttttccatttttaactggtgctgtatttgtcttgatatgttcgttaacccaattttcttataatgacaaagggtttgataacttattagattctatgattaattttacttcaatcattataggtttctattcggctttttatggaattcttataactataaaagatactagttttatgaagaatatacgaggatctgctatagaaaaaaattaa

SEQ ID NO: 266 - DNA, 858 bp, Enterococcus faecalis
ggtgggaaaacaatgaaaaaagtgttaatgggagttctttccctagggttattattaggtgcagcaacaggttgtacaagcgatcaagaaaaagccgctggtaaaacaaaagcgtcttctgaaaaaacagaagcaacatctggtgcctctgctaatggttatacagatccaagtgaactaaaagacagttatgatgttgttattgttggttcaggtggtgcggggatgaccgctgcattacaagccaaagaagctggcatgaatccagttattttagaaaaaatgcctgttgcaggtgggaatacaattaaatcgtcttcaggaatgaatgcttcacaaacaaaattccaagaaaaagaaggcattaaagatagcaacgataaattctttgaagaaacactaaaaggcggtaaaggaaccaacgatcaagaattactacgttattttgttgatcattcagctgaagcaattgattggttagatacaaaaggaattacattgagcaatttaacgattacaggtggaatgagcgaaaaacgcacacaccgacctgctgacggatcagcaattgggggctatctagttgacggtttagtacgtaacgttcgcgaagaaaaaattccattgtttgttgatgctgacgtcacagacttagttgaagaaaacggtcaaatcgatggcgtaaaagtgaaaatgaaagatgataaagaaaaaacagttaaagcaaaagcagtcgttgtcacaacaggtggtttcggtgccaacgaaaaattaattacacaatacaaaccagaattgaaaaactatgttacaacgaacccagaaggcaccacaggtgaagggtcccaaatggcatga

SEQ ID NO: 267 - DNA, 861 bp, Enterococcus faecalis
ctgtcacagtcgagtgtgggacataagtcgatcaggcctgtctctcatgttctgtctttttttatgtcatcattcactaaactaataaataattggaggtattttatgaacaaattttttacagcccaacgtttaaaagacaccgcctatgtaacagtcggtgcattcattttggccatttcaatcaatgcggtcttattgccaaataaacttgtcgcaggcggagccaatggcattagtattgttattaattatgttttcgggattagtcccgccattgttctttacgccatcaatattcctcttttagtgctttgtttcttacttcttgggaaagaggtcggtgtcaaaaccatttatggcagtcttatttatccattttttgtaggaattacttcagggatgcctgttttaacacataatatttttctagcagcattatttggcggtattattacaggtgctggcctaggcttggttttccgtggcaatgcctcaactggtgggacagcaatcatttcacaaattgtcaataaatacttcaaagtttccttaggtattgctattttattcgtcgatggtttagtcattttatcagcaatgtacgcttttaatgcagatattgtgttattctctttaatttgtttatttacaattggtcgtgtcgttgacatgattcaagttggtctggttcgctcgaaaaatgtgatgattatttcaccaaaatatgtcgcaattcaagaacgcttattacgtgaactagataaaggtgtgaccttggtgccaatcgaaggcggttatcgaaacgcgaaaggcatgctcttaatgaccgttattcgtgaaaaagatttccccgcttaa

SEQ ID NO: 268 - DNA, 822 bp, Enterococcus faecalis
atgagcgaacagttaacaagaagtagtaaacatattcaaaaagctcttaaaaagcaaaaagcttataaacgtgctaccgccgttgcggggacttcaatgattttagcacctgtggttggtgctgcggtacctgcccaagcagaatcaagccagcaagcatttattaatgaaatcggaaattcagcagcagccgttgccaatagcaatgatatgtatgcttccgtcatgattgctcaagcgttgctagaaagtagttatggtagttctgggttagcatctgcaccgaactataacttgtttggtgtaaaaggaagttataatggacaatctgtttatatgccaacaaaagaatatttagacggacaatgggtgaccgtcacagcagcatttagaagttataattcttatgcggaatcgttccaagatcatgccaatgttattcgttccactgcttttggggatacataccattattcaggcgtttggaagagtaatactagcagttatcgcgatgcaacagccgctttagctggaagttatgcaactgatccaggctatgccgaaaaattgaattggttaattgaagcatataatttaactcaatatgattggggagcaccagtcgctcaaaccactagttattcagatacaacgggaaccgttgatacaacaatcgatacagcggcttttgcaacagcaacagcagaaactgtagctagtcaaagttacactgtcgcaaacggcgacacattgtgggacattgctgcacgttttggtacgacagttgataatttaatatcagacgtgccccacggaacgagc

SEQ ID NO: 269 - DNA, 348 bp, Enterococcus faecalis
atgaagaaacaacaatcgggtttaacaaatcaagtgacgtttttattagcgttaacttgcggggtcgtggtcgccaatatgtattatattcaaccaattggcacccaaattgctcaggcctttcaagtcagtattggttctattggttttgttactatgctgacccaattaggctatgcgctaggcttactttttcttgttccattaggcgatgtcgttgatcgtcgcaaattaatcattcgagtaaccgcgctctcctcgctgtctctaagtgctgcattttttgcaccaagtttcctcctgttttgcaccctcttcctttttttaatcggggctggttctctattg

SEQ ID NO: 270 - DNA, 1704 bp, Enterococcus faecalis
attgatcagtggaacttaaaaaatgaagcaacggctaaaaatttagacaaagtgaaacgcctattacaagttccttattttggcaaaattggcgtgacttttgaagacagccctgaagagccagaaaacttttatattggcgtaaacgattttacttctttagaagaagaaacgcgcattcacgattggcgctcaccgattgcttcgttattttatgacaatgttttagggaaaacagcctacacggcacatcaacaaaccattcctgtacaacttgatttgaaaagacagttaattattgaaaaagatcaattaatcaactattttgacacaaccattgcgattcaagatgatgtgttattgcattctttagaagaagatgcttctccttatatgaaggacattacgacaaccattcaacaagaacaaaatcaaataattcgtgacgaaacgcagccactcctactagtcaacgggattgctggtagtgggaaaacgtctgcgattatgcaacggattgcttatttactttatcaacatcgagcagaaattacagcggataatattttattactttcaccaaattcaacatttattgattatatttctcaagttttaccgaatttaggcgaacgaaatcccttgaatttgactcttttacaatttttgcgcttcactaccaaagaatcatggccaatggaagaagaaacggactatttcgaacgcattactcgctctgaggcaacggagcaagagcacgttattcgttcaaaagaatttgcaacgtttcttttaagcaatcctgaaaaagcggttgtgcagccacattttttccgtcctttaacttttaaaaagcagaccttatttacttcagaaacaatttttaaactttatcaagaaacaccagctgacttgagtattcgccaacgaatttcagccacaaaagaaaaattaaccagtctttggacacggtacttattaaaacaagcccattctaaaaaaatgttggatcaattccaagatttaacagaggctgaacaagttcgttattttggcacagtgattaccgaagataatgaaaaacatctggctgattttgctttaaaacgtttgaagaaaaaatatcgctctatcactgccgctattaaaaatgatgcttggctagatcaatgggccttttttgaaacgttttattctttattcactgaaaaatcgtatcaaaaagagacagctgttttcacagccgatgaaattgtggcccttattttggtgaaacatgcatttattgaaaacctcgccaaccagcaaatggcttttatcctagtcgatgaagtccaagattatacagaagcccaattattattactgctgacacttttccctaaagctagttttactttagctggtgatgaaaatcaagccatttttaatacagccattgaattttctgaagcccatgatttattggttaacgaaaccagccgttctgttggaacctatcaattattaaacagctatcgttcaagtatagaaattacacgactcttccaaacattacgcactcaaccagatcaattaaccattgtgcccatccggcatgatggagaataccgacatttattccttgtgactctgcgtctgactatcttaaaacaaccgtcacttccattacaacctttgaattcaaagaaagcaccgccataa

SEQ ID NO: 271 - DNA, 495 bp, Enterococcus faecalis
  misc_feature (367)..(367): Nucleotide 367 is "n" wherein "n" = any nucleotide.
cagaagtattctcctttaaaaagacagaatcgcttttgctcagctgattatcaaagcttgttgattgaaaaaagacaaaacgatcaatcagacaagaaatttaaaggagagaaaaagatgaacaaaaaagttttttcattcagtctactacttgtcacgctattttcgttacttggcatgacaaccaacgcttcggcggaggaaaatggtgaatttcgtgtcggcatggaagctggctacgccccttttaactggtcacagaaaaatgacgcacatggcgcagtgcctattcaaggcaactcttatgcaggcggctatgatgttcaaatttctaaaaaaattgccgatggtttaggtcgtaaattantaatcgtccaaaccaaatgggatggcttggcgcccgccttacaatctggaaaaattgatgccattatcgccggaatgagcccaaccgctgaacgaaaaaaagagtttgcttttactaaccccttataa

SEQ ID NO: 272 - DNA, 309 bp, Enterococcus faecalis
ggtgacacaacaatggtcgcatttattatttattgggctgcaattattgcctgcatcgcttggggcgttttaagcatttggttctctgttttttatctttctcgtaaagaaaacggaaatctttgggcttttgcgttcttcaacgttatcgctattatcgccttagcaattgttttattagtttacaaaacttgggatttcggtatcttaacttactcaagtctaatttatacaattttagcttctttaggtgtattgactgttcttcaagctattttaggtcgtgaaccaaaagctgtcaaagcttaa

SEQ ID NO: 273 - DNA, 750 bp, Enterococcus faecalis
aaatgtgttgaaatatacgttttccttgcgtatactgatgaagtgaaaaaacgaacgaggagtgtacgaatgaacaagaaagttccttatttaattgtggcaccggggctagtactattattatttttcttaatgattccattaattactagcattttgccaaccatttttactgatcatggcttgacactaaatcagtatgttactttttttaaagatgactataatgtttcaattttctggcgaacgataagagtttcgttaattgtgacgggtatttcaatcgtgttgggcattccaacggcatactttattgctggagtttccaaaaaatggcgtggctttttaatggctatgaccttgtttccattattaaccaattcagttattcgaagttttgcttggattaacattttaggaaaaaacggtgtagtgaatacgttgttattaaaaacaggcttaattgagcaaccgctgaatttattgtatacagaatttgcaattattatcggttcagtgtatttatttttaccaacaatgattatgaccttagttggggttatggaaaacattgaaggagaaatgctagaagcggctgagacgctaggcgccaatccaatgacggcttttcggaaaattgttttacctttatcaattccaggcaccattgtaggaagtatattagtgtttacaggaactttaacggcttatacgacgccacagctgttaggtggtaaccaaaaaatgatg

SEQ ID NO: 274 - DNA, 453 bp, Enterococcus faecalis
aagaaatcatcaggtatcactaatgaaaagggagaggaggagaaaactttgagtaagtgtttcgggttgttggtgattttatttgtattaactggctgttcaggaagtaggaattcgcaacaggaagtcgttatagaaaagtctgctaataatgacaaagcaagacaatttgttgatcaaaaaaatccgcatttaggaacgcaattagaagcagaattttatactaaacaggaagcgattgaatttttacaaaatggtttagggataccaacaaatgactcggcgtttcattatacgtttaagcagtcaaataaaggaagttatgttgttcaaattagatctgaaaagaatagtgtctcaaaagagaatgaattgttcggatattatcaggtgtatcaagatggtattatagtgaaaatgatggaaaaggatcaaacgttccaagaaaattaa

SEQ ID NO: 275 - DNA, 759 bp, Enterococcus faecalis
aaaaatcgagaagaggtccatcaaccaaagatcacttatgaacaacgctttaatgcaaatgattcaacttcggaactgatggctgtcaatcaacaagctgggcaaaaaccagtcagcgttcatccagagttgtatcaattaattgcattatggaaaaaacatagttgtgatccagctagtcatttgaatgttaccattggcccgttagttcaaacatggcgaatcggttttaaagatgcccgtgtcccgtcagaagaggaaattaaagcctgtttgaaaaaaattaatccagaaaagattcacttaaatcccttaaaacaaacggtttttttggaagaagaaggaatgaaattagatctgggggctttagcaaaaggctatatcgctgatttactaattgcctatttgaaagaagtccatgtgacgtctgctttgattaatctgggcggcaatattgtgacgttggggccctctacgcatcaaaacaaaaaatggcgaattggtattcgcaatccgcaagaatccagagaaacaatcagcttacttgtcgaagtggctaatcaatcggttgtgacgtcgggcatttatgaaagaagtttaaccgaagctgggcgagtctatcaccatctgttggatccgacaaccggttacccattggaaactgaaatggccagcctcacaattatctcggatgcttcagtggatggtgagatttggacaacgcgtttatttggtgatccaattccacaaacgctttga

SEQ ID NO: 276 - DNA, 675 bp, Enterococcus faecalis
cagcgggttagcagatactcttcacattatccattcatagaaccgaaaaagaaaggacagctcattatgaaaaaaattatcggcttagtaggaacgaactcagagcaatcaaccaatcgtcaacttttgcaatttatgcaacactattttgcgcaggaggctgatattgaactagttgaaattgttgactttcctatgtttaacaagccagaagacaaagttttgccagaaatagttaaaacggttgctgaaaaaattgaagcagcagatggcgtcattatcagtacgcctgaatatgaccatgcggtgccggcttctttgatgaatgccctaagttggttatcttacgggatttttccgtttgttgataaaccagttatgattactggtgcatcctatggcacgttaggttcctctagagcacaagcgcatctgcgtcaaattttagatgctcctgaattgaaagcacgaattatgccaagctctgaatttctattagcgcattccttacaagcttttgatgaaaacaatgcgttaaaagattcagaacaaatagataaactagctggtctgtttgcagatttttgtgtatttattgaaattacagaacagctgaaacatgcgcatgcgcaaaataaaaaagaagcagaaaatttctcatgggaaacgatttaa

SEQ ID NO: 277 - DNA, 297 bp, Enterococcus faecalis
cgaaatggagtgaataaaatgaaattaattgggatcgtcggatcaaacgctgattcttcttataatcggttactactgcaatatattggcaaagagttttataaaatgttcgacttggaaattttagaaattaaagatattccaatgtgtaatcaaagtaaggatcaaacgaacagtgtcttgattcagaatatgaatcgcaaaattttacaagcagacggcgtaattattgcgacgcccgaacataaccataccattcctgccggtttgaaaagtgtgttagaatggttatcattc

SEQ ID NO: 278 - DNA, 201 bp, Enterococcus faecalis
cttcccgtggtgaagactgtgaatgttactgaagttgagcaaaccttaatgcgtaaagttccgaaagaactctgggtgaaaacgcaccataccatgattttctttgggcgttatcactgcctagcaagagcgcctaaatgtgaagcctgtccgctactctatatgtgtcaagaaggcaaagaacggatgaaagggaaataa

SEQ ID NO: 279 - DNA, 699 bp, Enterococcus faecalis
agaaagataggcgatgaaatgacagaaaatgcacccaaatttaagcaaatttctgcagaaattgaaaagaagattcgagacggtctgtatgtaagtgcacaaaaattaccttcagaatatgatttagctaaagaatataactgcagtcgcttgaccatccgtaaagcgattgatgatttgatccgcaaaaatattttggtaaaacgacatggtaaaggtagttatgtgatgtcgcaagcgaaaattcaaagtggtcgcgctggcttacaaggttttactgaggcagccaaagcttacgggaaaaaaagccagacagaagtcatttcctttgaagaagtagtacatcccgctgagaaaattcgggaggcgctccaagtaggcaaaaatgaggcaatttatgaactgattcgccgccgaatgttagacggcgaaccaatgacagttgaaaaaatttatttgccacaggcatacgtacaaggccatacgaagcaagacttcgagggctctcttttctgcttaatcgagaagaacgtcgagattgcttattcgcatcaagaaattgaagcaatcttagttgaagccgaattttccgaatttattaaaatttcctgttggggccaaccacttttaaaagttcccctcctatcacctatgccccctgaaaccaccccccaaatttatatggaagttcctctttaa

SEQ ID NO: 280 - DNA, 681 bp, Enterococcus faecalis
ttccagcagacgaaatttttaaagaatcaaataaacttacaaagtatttggattaataccaatacgattggtgcaacgtcgatgttttcaacaatgatggccagtagtttgatcaaagcatatagaaataaggtttttaacctgctgcttttacctgtatacattggtggtgttttaggtacatgggtcagtcaatcaaaaacctcttttgccattttagttggttttattctggtggataatcttttaccaaaacgtttcttgcaacgttcgaaagtttggctatttggttttgtcggagtagctgcattgggaccattgttattttacttatgtgcggaatcggatactgttgatttatttacaggaagagaacgaatttggcatgagttttttgctaaatggttatctgatcctcaacatattaaagtcggtatggaaccttttgtggcctcatggaaaccgctggggacacataatgcttttctatttacgttaagtaattttggtgtcattggctatctgattttatttggttttttagtcagtatgattttattgattggtttccgcaaaaaaacattggatcgtttgcaagttagtttacttttaggcttccttttaatctggattcattcatttatggaagatattttattggcccctccttggatgctgtaa

SEQ ID NO: 281 - DNA, 1302 bp, Enterococcus faecalis
acgatttcctataaagagataattataaatatggagggtgataacatgaatatcattgacgagctagcatggcgtgatgcaatcaatcaacaaacaaacgaagaacgactaagagaacttacagaaaatacgagcatttcgctatattgcggtgtcgatccaactggagatagcatgcatattggacatttaattccttttatgatgatgaaacgattccaattagcaggtcatcacccatacattttaattggtggcggaactggaacaattggtgacccaagtggacgaacaaccgaacgtgtcttacaaacgatggaagctgtgcaacataatgtggacagtctttcaaaccaaatgaaaaaattatttggtaaagatgctgaggtaacaatggtgaacaactacgattggttatcagaactatctttattagattttttaagagattacgggaaaaactttaatgtcaacacgatgttggcaaaagacattgtcgctagtcgtttagaaagtggcatttcctttacagaattcacataccaaattcttcaatcaattgacttttacacattgcataaaaaacataatattcaattgcaaattggtggcgctgatcaatggggcaatatcactgcaggattagatttgattcgtaaaaaagaaggaccagaagccaaagtattcgggttaaccattcctttaatgctaaaagcagatggtacaaaatttgggaaaacagcgggtggcgctatctggttagatcctaagaaaacctcaccatttgaattctaccaattctggttaaaccaagatgatcgtgatgtcatcaaatacttgaaattctttactttcttagataaagaagaaatcgatgcgttagctgaaaaagttgaaaaagaaccaggtaaacgtgaagcacaaagacgcttagctgaagaagtgacacgatttgttcacgatgatgcagcattagaagaagcgcaaaaaatttcagaagctcttttctcaggcaacattaaagacttaacgattgaggaaatcgagcaagggttagaacatgtgccaactgttgaaattaccaaagatgctaaaaacatcgtagattggttagttgacacagaaatcgaaccatcaaaacgtcaagctcgcgaagatgtgagcggaggagctataagtattaacggtgaccgagttaccgatttagattttgcagtcgatccaacacaacatttcgatggaaaattcgtggctgtacggaaagggaagagaaatgactttttagcaaaagtaatggattag

SEQ ID NO: 282 - DNA, 276 bp, Enterococcus faecalis
agtgatgcagcaatggtcaccactctatatgacaatgaagaaggggctgcggttttaattaactcaaactttgccgtggatcaaggattaaatccgaaaaaagatgcgattgccttagaaaaagaaagttcaccttatgccaatattattgcggttcgtaaagaagacgaaaacaacgaaaatgtaaaaaaattagtcaaagtgttacgtagcaaagaagtccaagattggattacgaaaaaatggaacggcgctattgttccagtcaatgaataa

SEQ ID NO: 283 - DNA, 849 bp, Enterococcus faecalis
ttaaaatacaatttttggaatggagggaaaaagatgttacgtttttttccgcaaaaaaataaatatgtagaagaagcaagccagtacgcctttgataaacaaggccaaattccgcagcacattgccattattatggacggaaatggccggtgggcacataatcgaagactgccgagaattgctggacataaagaaggcatggatacggtcaaaaaaataacgaagcatgctagtcatttaggcgttaaagttttaacactttatgcattttcaacggaaaattggaagagaccaacagatgaagtcaatttcttaatgcaattgcctgttgatttttttgatacattcgtgcctgaattaattaaggaaaatgttaaagtcaatgtaatgggctaccaagagtttctaccaagccatacgcaagatactgttaagcgcgccattgagcaaaccaaggacaatacgggcatggttttgaactttgctttgaattatggggcgcgtgcggagctactaactgccatgaaacagattgctgcagaggtttcagaaaaagcatatacggcagatgagattacagaagaaacgatcgcagatcacttaatgactggctttttacccacggaacttcgtgatccagaattgttgattcgaacaagtggggaagagagaattagtaatttcttgctatggcaaattgcttatagcgagttgttttttacaaaagcattatggcctgatttttcaggagacactttagaaaccgcgattgcttctttccaaaatcgtaatcgtcgttttggtggtctaaaagaaactacagaaacagaagggagcgatccgcagtga

SEQ ID NO: 284 - DNA, 195 bp, Enterococcus faecalis
tcgtcgttttggtggtctaaaagaaactacagaaacagaagggagcgatccgcagtgagacaacgtgtcatcacagctatcgtcgcattaatcatctttattccaattatctggtatggtggttttgcaattgagattgccgctgttgctttggcagtagtcggcgtgtacgagttattccgtatgaaaggatta

SEQ ID NO: 285 - DNA, 1044 bp, Enterococcus faecalis
ctactggccatgatttcgaattacgaatcgggaaaaacaattcctagagcagatagcatattaaaactaatttctgttttacaatttccccgtagtttcttttcagcagatacatttgaattgtattcaggcgcaactttttttataagccgaattgcggcgacgaacaaagtaacagatatgcaaaaagagcggttaaaatatgtgcaagaagtgtataaagtattagcaacatatgtgaactttcccaaagtttgtttaccagaattaattgaaaagagtatttatgaaatcacagaagaagaaattgtgaaaaaggctgaggaattacggaaaatttggggcttagacttgatttcgccagtccctaatctcattcagttggctgaacaaaatggtgtgattatttcagaagccaacatgtccaatccaacactagatgcggtctcgcgttggatgattggtcggccgtttattatgctcacagataatcatgaatctgctgtccgtcgtcgttttaacgtggcgcatgaactaggacatattttattacacaacggtgttgaaagtattcatgagtattcgcaaacagaattaaagaacattattgagtatcaagcaaatctatttgctgcgcattttctccttccttcagcggctttttctgattcgctcttgtctatttcgttagaatactatattgatttgaaaaagtattggaaagtttctcttcaatcaatgattcaaaaaatatacacattagcgttaattaatgatgatcaacgtctctatttaaataaaagaattgctaaaaataaatggaaaacgaaagagccttacgatgaacaactgactatcgaacagccagaagttttccaaaaagtttaccacatgattttagagcaccaagtcattcctgcaagtcaactaaatcaagcttttaaattacctaaagaagaaatagaaaagatattaggaacagctattcaaacggagcaggacaaaacagaaattgttcttgaattattacgttctaacaagtaa

SEQ ID NO: 286 - DNA, 399 bp, Enterococcus faecalis
gaacagctattcaaacggagcaggacaaaacagaaattgttcttgaattattacgttctaacaagtaatcaaaaagaaggaggaataactatggctaaattattcgcctaccaaattggtcaaaaccctcgtattcaaacggaccttttggtagatcctcagctgtttgaagatgagcatggctgtatgggtgcagtgggcttcgggttagcagattgtgttcaaaccggaatgtttacagatattgaagtgataaaacggtatcttcacgaagcaacctacgtttttattaatggtgactttgaccgactaagttatttagaaattgggattgcactttccgtagcgcaaaacactttattcgacgtgtccaccacaggtaagggctcgcacggaagg

SEQ ID NO: 287 - DNA, 1089 bp, Enterococcus faecalis
  misc_feature (973)..(973): Nucleotide 973 is "n" wherein "n" = any nucleotide.
caaaagaagttgaaacagttggttaagtttaaaaaggataagagaggaaaatattattttactgctagtttgggttttgacgaagtaactggtaagaggattcaaaaaatgcgttcgggtttttccacgattaaagaagcgagagaagcttatgctgagataattagtaactttggtaaagaagcatattcttcaaacagtacaatgctgtatgaagaatttttttatactatttttttgccatattataagggacgagttaaagaaagaacttataataataggcttagtacgataaaaaatacctttgcctatttttttaaaatgaagttgaaaagtatagctcctgttcatatacagaagtggcagaatgagcttttggaacagtatgaaaacacgtatgtaagaaacatttatggactgtttcaaatgtctttagatcgagctgttgtgttaggaatgatttcttcaaatccagcaaaaatcgttggtaatgtgaaaaaaagtaagaaagaaattgatttttggacaaaagaagaatttgaaaaagttattaagactttttatatagaagattattatcaaaatttttcttttatttgtatctggttattatttatgacaggcatgagaataggtgaggctactgctttaacttggaaagatgtgaatttagatggaagatatttaacagtaaaaaattcactatattataaaaatgcacaaacttatgaatttgtatctccaaagactagagccagtattaggacgatttatttagatgaagatacagttcactatttaagagattggaaaaaaaggcaagatgatgttggaggaattgaatttgttttatcttataattcagttcctactcaaaaacatacagtaagacatattattaaacgtcatgcaaaattagcagaggtacatgatattaggattcatgctttaagacattctcatgcgtctntaataataagtatgggtactaatgctttgttaattaaagaccgattggggtctgaagaagtgcagaccattttaggtacttatggacacttatatcccagtaactcactggaataa

SEQ ID NO: 288 - DNA, 306 bp, Enterococcus faecalis
caactcgtgttgaagatggccttgcagttagacaatggtgctgaaatcctccttcacattggaatcaataccgtcgaattaaaagggcgggcatttgaaacgttcgtaaaagtaggagaaagagtcaggctaggacaaaagctgctctcttttgataaacaaatcatccaagctgctggttatgatccaaccgtcttagtcatcgtaacaaatactgcggaaatggctgtaattgagacaaccaaacaaacagagattacaccacaaacaaatttatttttcatgcaagtaaaggagcaaaactaa

SEQ ID NO: 289 - DNA, 1479 bp, Enterococcus faecalis
gacaaccaaacaaacagagattacaccacaaacaaatttatttttcatgcaagtaaaggagcaaaactaatggttaaacaatttaagaacgattttttatggggcgcttcttcctccgcttttcaaattgagggcgcttggaatgaggacggcaaaggcctaacagtcgctgattacaattcttttaaaaagtcagctgtacaagcagatacgaaagtcgccagcgatttttaccatcgtttcaaagaggacattgcgttaatgaaagaattaggcttaaaaacctatcgtttttctctttcatgggcacgaatcattccaacaggtgatggcgaaatcaatcaagccggcatcgatttttataatgctgtcattgatacacttttagaaaacgatattttgccgtttgtcacactttatcattttgatttaccttttgcgttggtggaaaaatacaatggttgggcggatcgtcgctgcgtttccgcatttcaacgctatgcgcaagtctgttatcaagcatttggtgatcgagtcaaaaattggcaagttacgaacgaacaaaacttaatgattcgtgttgatgaacgaatgaatatgtacgatgttgcaccagaaaatgttgaaaaaattcgtgcacaaatggattaccatatgtttgttgcccatgcgttagcgacgaatgattgtcaccaattggtcgctgggggaaaagtcggtccctctgtttcctcaacgatgacttatcctagttctaataagcctgaagatgtttgggcagctcgtatgaatgataactttaaaacgaattacgctctagaaatgtattgttttggcgaataccctggttactatcaagagtatttaaccaaatgcggcatttatcccgaaacacagccagaagatcaagcaattttgaaagccgctaaaccagattttatcgctcttaattattatcggacgttagtcgctagctatttaccgacagatgagcaacacccattgggtacgaaagaaaaggacattgattttgatctatacggttattttaaaatcgaaaaaaatcaacatttaaaaacctctaagtatggtgcccaaattgatccaactggtctacgtttagttttaaatgattattatcgtcaataccgtttgccgttaatcattacagaaaacggcttaggcacaccagatcacctaacagaggacggaaaaattcatgatgattatcgaattgcgtatttgcatgatcatattgctgcttgtcatgcggctatttctgacggtgttgagttgtttggctattgcccttggtcggtcatggatattttaagttcccatcaaggattcaaaaaacgctacggttttatttacgttaatcgtgaagaccatgagttaaaagatttacgacgcattaaaaaagatagtttttattggtaccaatcagttattaaaaataatgggttatcagaagaatag

SEQ ID NO: 290 - DNA, 402 bp, Enterococcus faecalis
gacagcttgccattggagccggcgagagtacaagccgttcatcaggaattaaagcaacaaatcacctgggaaacattaggctattccacaattgatgcgcaaaatattgcgacacgttttacacaaaatacatatcaggctctggggattttaacagatatcgccaaccattcagaccttcaattgaaagtcataaccattaataatccctatctagcaacagctaaaattggtacctttaagtgggaaactgtaactcctgaagttggtggggaccatgaaacagcagacaatgaactaaccacaccgacaccgactgttgccagtcttcaagagattgacgtagaaattgaatacgacgaaaatgaaattgagttcacctatgaaataaaatcgaactga

SEQ ID NO: 291 - DNA, 228 bp, Enterococcus faecalis
acaattgaagcaacgtatgaagatgaatctgctgatttagaattagaaggtaaggcagcacaagacaaaatcatgactcttttagatggattgtcaatcaaaacagctacaaatgaacaaattaaagaacacattacgaaaaagttagccgtgaatgaacaagtaaaacaatttgagtttgaagctaattttactgataaaacagaaattgagtttgtattaaaataa

SEQ ID NO: 292 - DNA, 240 bp, Enterococcus faecalis
  misc_feature (203)..(203): Nucleotide 203 is "n" wherein "n" = any nucleotide.
tataattcagcaattaaaacagcattgacaaaaatgtcaatgctgtttttctatgaaagaatagaaatctttataagaatgattgaaaagctttctttgatacgcccggggtgtgataatatagtgatgcaagtgaagggaagtgtgaatatgccagaaaaattacaactggttattattacaggaatgagtggcgctggaanaacattcgctgttcaaagctttgaagacatgggctaa

SEQ ID NO: 293 - DNA, 627 bp, Enterococcus faecalis
gtgacttgtggtgagcaacggctcgtaccagttcaagcacgcggcacgaaagtcctattgtctattttaggcaaccatgaaggcgctggctttgctaacttcccaacttacgaaagtgcggatgcctttgcagctcaattagaacaagtcgttaatacgtatcatttagatggtattgattttgatgatgagtatgctgaatacggaaaaaatgggacgcctcaaccaaataattcttcgttcatttggttacttcaagccttaagaaatcgcttaggtaatgataaattaattactttttataatattggaccagcggctgcgaactcttcagctaatcctcaaatgagttctttaattgattatgcttggaacccttattatagtacctggaatccgccacaaattgcggggatgcctgcttctcgtttaggtgcttctgccgttgaagttggtgtcaatcaaaatctagctgcgcaatatgctaaacgtacaaaagcggagcaatatggtatttatctaatgtataacctcccaggaaaagattcatctgcgtatatctcggcggcgacacaagaactttatggtcgaaaaacgaactattcaccaactgttccaacaccttaa

SEQ ID NO: 294 - DNA, 1209 bp, Enterococcus faecalis
tcactcccgtggtgcaagacggattttatggcagtatatagcgaaccaattaaatgggcaatcattattttcccgtttctagcattttttatttctggggcattattaatctatgaataccgcaaatatggttcatttgtttggacacgagcaatgattttgtattcatttgttttttatttattatgtgcctatttcttggtaattttaccgttgccatctcgagcagaagtggctcaatacacaggaccaacaatggaactgcggccttttcattttatttcagggattttaaacgaaactgttttttcgatcaaagatcctagtacgtatttgccagcattaaaacagcatgccgttttagaaccactgtttaatgttttattagttttaccttttggtgtgtatttacggtattatttcaaatgttcatttttaaaaacagttcttgcgagttttttattgtcattattttttgaattaacacagttatctggcctttattttatttatccacgttcgtatcgcttggcggatgtcaatgatttaattaataataccgtcggaggcatagttggttattggttgacgccgctctttacctttttattgccaacaagagaagaaattgatgccacctcttatgaaaaagggcagacagttagcctgttaagacgtttctttgcatggggaattgattggttggtgattggctttgtgcaaggcctgctcgtttttggactaaatttcattccagcttataaaaattgggcaaccaattatccgattttttcagatcggatgtggttctttatcatggtgtttgcggtctttatcgtcatgatgaaactgacaaatggtcaaacgttagggaaaaaagttgttcgcattcgggtggttgaaacaggacatgaaaaaattcgtttaaaagccttgtttgttcgctacggttatttgtattttgtgtatggtttaattagtatttatctagccaatgccactgagttattgaattcttctaataggatgttgcaaatggtgtcactgcttctgtatttgttctgtttaattttatatttactatttttgatcaacgttttgttaaccttgattcgtaaaaaacggcgtttgttttatgaaaaagccagccacacttatacagtcagtacattagaagttgcgaaaacaaaggaatcagcaggtgagtaa

SEQ ID NO: 295 - DNA, 792 bp, Enterococcus faecalis
gacaatggaaatacgcactttgtgggcgaaaaagctgtcgatggcgatgaaacaacacgctggtccgctgataagcaagatgaacaatggttaattgttgatttgggtgaagtaaaaaacattggcgaactcgttttacagttgcatgcagaaagtcctgtgtatgaaatcttagtttcaacagatggtgaaagctatcaatctatctttaaagaaaagaatgggaaaggtggccaacctactaaaaaatatattgatggcaataatgtacaagcacgttttgtaaaatatcagcagatgaaaatgtggcaacacacaaataagcaattttacagttcaagtattatttcgtttgaagcatatgaaaaaaaacgactgccagaagcgattaaacttttaacagagaacctgactattagtgaaaaaagaaagcaacagctagcctttgaagtgtcaccagctggagtagatatcacagaggatcagattgagtggtcgagtagtgatcctaccattgtgacggttgaccaaacgggtaatttaacagcagttaagagtggtgaagcgaaggtaacagtcaaaattaaaggaacagaaattagtgatacaattcctgtgactgttgtagcagaaaataaacaatatgcggaaatgcgagcaaaatggaaaatgcgattgttaggtacaacgcagtatgataacgatgcagatgttgcaacagtatcgtgcccacaattggttccggaaaaaattttggtttgtggagggaatatcttttttctccccccataa

SEQ ID NO: 296 - DNA, 210 bp, Enterococcus faecalis
aaaacaaccttttggggggatgaaacaacaactgagctttttgaaaaaccagaagtttatgatgcgattgttaaaggcattgaatttatgattgatacaaaaaaatactatggaacgtattacacaggtaactggtgggattggcaaattggttccgcgcacccgctaacagatacattgattttattacatgatgacctattgaataca

SEQ ID NO: 297 - DNA, 456 bp, Enterococcus faecalis
gtgaaaacaatggaaatacattttgataaagtaacaagcgataatcgtaaagcagtggaaaacctacaagtattcgctgaacaacaagccttcattgaatcaatggcagaaaatctaaaagaatcagaccaatttccagaatgcgaatcggcaggtatttatgacggcaatcaattaatcggctatgccatgaatggacgttggcaagatgggcgcgtttggctagaccgctttttaattgatcaacggttccaaggacaaggttatgggaaagcagcctgtcgacttttaatgttaaaggtaatagaaaaataccaaacaaacaagctatacttgagtgtttatgatacgaacagctcagcaattcggttgtatcagcaactcggttttgtatttaatggtgaattagatacgaatggtgagcgggtaatggaatggacacatcagaataagtag

SEQ ID NO: 298 - DNA, 258 bp, Enterococcus faecalis
acgagaggtgagtttatgaaaacaaaaatcggaaaaacagttatcttgtcagcatttttattcacaagtttccttttactgagtggttgtacctcggctggcgaagagatggaaaaaacaattgatcgacagaaagaaaaagtcgataaaacggtcgataagcagaaacataaaaatgaaaattccatggaaagttacgacgaaaaagttgaccgttctttagatagtcaagaagacaaaatcgatactactgagtaa

SEQ ID NO: 299 - DNA, 498 bp, Enterococcus faecalis
ccactaaaatgtaacacagctgttgtgttagttttgattcttaatttggttaaggaggcggataaaatgtcagtatatcaacatattttggttgctcttgatggctcagatcaatctgaaaaagcttttcatgaagctgtcaggattgccaaagaggaacaagccactctttatttagctacaattattaatgatgctgaatttacgacgagtccattttcttttgaagaattgtatgatttagaaaaacacaagtcagaagagatgctcactggaaaggcaaaacaagcgagtgaaattggtgtaaaaacagtcaaaaaaattgttgagcttgggagcccaaaacgttatcttgccaacacgatttctgaaaattatgccatagatttaattgtgctaggtgccacgggaagaggtgctattcaacgaaccttgattggttctactacagattatgtggttaaccatgctttgtgcaatgtcttagtcgttcgctaa

SEQ ID NO: 300 - DNA, 576 bp, Enterococcus faecalis
attcaattcgtggtggccactgcgattttagcgaattgtgaagactgggtcgttaacactggtgtgttctatgtttttgttgctgatttgtatcgtcatgcaacgattttgtcaaaagaggggcaatcattggaacccttaaagacaccagaatcattattagtagctgccgttgatacaacgattgctgcgcaaaacatggccattgcggctgaatctatggatttagggatttgttatattggcggcattcgaaatgacttagacacagtagccaaacgcttatctttgcctgaattaactgtaccacttttcggattaacaatcggtgtaccagaaacgttaaatggtgtaaaaccacggatgccttttgaaaatattttaagtgaaaatcactaccaatcagacaaattgacagatatgcacacatatgatgaattattaaaagattattatgccagccgctcaagtaacgcccaaacagcggattggtcacagaaatctttgtcctatttttcttataatcgtcgcccagaagtaaaaattttcttgcaaaaacaaggatttgatgtctaa

SEQ ID NO: 301 - DNA, 1170 bp, Enterococcus faecalis
ctcaatcgtactaatggtcaagtaaataaaattgctgtttctttaattcgtcaatttgacgaacaagtctcaggaattgaaggtattttaaaattaacgctaggagagccggatttttacacacctgagcatgtcaaaaaagcagccaaagaagcaattgatgcgaatttttctcattatacagggatgtctggtttattagatgtccgtgaagcagccgcttattttatgaaagaaaagtaccatttgacttaccagcctgcgacagaaattttagtaacagttggagcaacagaagcgatttcagcttcgttattagcaattttagaacaaggtgacaaagtgctattgccagcacctatttacccagggtatgaaccaattattacattggcgggggcggaaccggtatatttggatacacgagacaacgattttgttttgacccctgaaatgattgaagcggcaatggccgagcatggggaacaagtcaaagcaattattttaaattatcctagcaacccaactggtgtcacctataaccgccaagagttgcaagcaattgctgatgttctaaaaaaatacgacatttttgtgattagtgatgaaatttatagtgagttaacttatgatgagagtcatgtttcgattgctgaaatgttacgtgaccaaacgattttaattaacggtttgtcgaaatcacatgccatgacaggctggcggattggctttatttttgcaccagcgattttaacagcggagatcattaaagttcatcagtatttagttactgcggctgcaactgtgtctcaaaaagcggctgttcgtgccctaatcgaaggaatgcatgatgctgaaattatgaaagaagagtatcggaaacggcgcgattttgtttatgaacagatgactcaattggggtttgaggttgcgcgtccaaatggggccttttatatttttgctaagattcctactggttatgaacaagattctatgaaattttgtattgatttagcgcaaaaagaagcagtagcgttgattccaggtatttcttttggcccagaagcagaaggatacgtccgaattatttatgcgtccgatatggataaattaacaacggccatggaacgaattgcacattacatggcgacactacgcgtaacgcactag

SEQ ID NO: 302 - DNA, 243 bp, Enterococcus faecalis
accaccgctttgaacgttcaggagcccaacaaattcaaagggttcgtttgggggttttattcgaacagccgccaaatattccttgtgaatttcacgaagggaaaccaaccggcgattttttttaacgaagctattaggaggaccgttgaacaccaggggttagcagtgagtgcaccattacttccgtttggaaatttgaacatggcgtttcgtaaaattaataaattaggagaacttttttga

SEQ ID NO: 303 - DNA, 183 bp, Enterococcus faecalis
gtagcaccgaaaccatgttttaatttgtcctacggcaagaagggcccatgttgtgtgaaccaccgctttgaacgttcaggagcccaacaaattcaaagggttcgtttgggggttttattcgaacagccgccaaatattccttgtgaatttcacgaagggaaaccaaccggcgattttttttaa

SEQ ID NO: 304 - DNA, 1434 bp, Enterococcus faecalis
agaatgagtatgaaaaaacaatttgccctgttttttaccttattacttttaggttcatcaatgccagtaggtgcatttgcagaaggtaataacttggtagctgaaaatagttctgtcgcagaaacaaccgcagaagcaacaactgctgaagccactgaaacgacagcgactagtgaaacaacagaagcgacagaagaatcaacaactgaaacagaaagttcaaccgaatcaagtgaatctgcaaccacggagtccacggaaacgtcaggaaccgaaacgacagattccacaacggattctacatccacaagtacgacagaatcgactactgactccacctcgacgagtacaacagagtcaaccacagattctacgtcaacaagtacaactgaatcaagtaccacgccaacgaccacaccaagttcttctaaagaacagccaaaacctggcacgagtacttctgaatcaaaacagccggcgaaaccagtgacaccaacagcgccagctgaaaagccagtagaacaaccagcagcgtcaacaccgcagcctgaaatagtcccaccagttacaaatgaaacggttgggttagtggaagacgatgagacgtttacggtcagcaaaacgaagaagacagaagagtttattcaagaaatcggtgaatctgctcggaaagtggccaaggacaaaaacttatatgctagtgtgatgattgctcaagcaattttagaaagtggcagcggcaatagtaaattaagccagaaaccaaactacaatttgtttggtattaaaggcgattacaaaggtcaatctgtttcttttattacctatgaagacaatggtttcggtaacctatacacagtagaagcaaaattccgtcaatatccaacgtataaagaatcaatggaagattatgcgaaattattgaaaaatggtttagattccaataaagatttctatcatggtgtctggaaaacggaagccaaatcatacaaagaagcgacacgtttcctaacaggaaaatacgcaacggacaaagattaccataagaaattaaatgcgttaattaaaacatacgatttaacttattatgataaagaaaaagcaaccgttgaaccaatggaatcaaatttcccagcctataatggcaaaaactatgacacctttaatagttatgcttggggcaactgtacacaatatgtctacaaccgtattacgcaattaggtaaacgtgtggacttaacaatggggaatggtcaagattggggcgaaacaggtcgtgcacgcgggtacaaagtaagtcgtacaccaaaagcaggtgcagcggtttccttcccagctggtgttttaggcgcagacaatacttatggtcatgtcgcatttgtggaaaaagtctttaaagatggtagcatcttaatttctgaaatgaacgtgaag

SEQ ID NO: 305 - DNA, 492 bp, Enterococcus faecalis
aggaatttctcaggtaaaatagatgaaaagagaagaggtgcgccaatgaaaacgccaacgtttggaaaaagagaagagacattgacctatcaaacaagatatgctgcatacattattgtttcaaagccagaaaataacacaatggttctggtacaagcgccaaatggagcttattttttaccaggaggcgaaattgaaggcaccgaaacgaaagaagaagcgatccaccgagaagtgctagaagaattaggaattagtgtagaaattggctgttatttaggggaagctgatgaatatttttattcgaaccatcgccaaactgcctattataatcctggatatttttatgtagcgaatacttggcggcaacttagcgaacccttagaaaggaccaatactttacactgggttgcaccagaagaagcagtccgtttattaaaaagaggaagccaccgttgggccgttgaaaaatggctagcggcagcatcataa

SEQ ID NO: 306 - DNA, 474 bp, Enterococcus faecalis
aacaagtcagaaaccaagcgtttttctctacatttcacgtttatctatgctactattaacgttggaaatataattaagtttgaaagggagtttttaactatgaaaatggctcatacatgtgtgcgtgtaaaagatttagaggcatcattagatttctatcaaaaagccttcaattttgaagaaagtcgccgtcgtgattttccagaaaataaatttactttggtttatttaactttaccaggagacgactacgaactagaactaacttataattatgatcatgaagcatacgatttaggaaacggttatggtcatatcgccatcagtacagatgatttagaaggattacacgaaaaacatcaagcggctggctttactgtcactgacttaaaaggcttacctggaactgcaccatcttattactttgttgtcgacccagatggttataaaatcgaagtcattcgtgaacgttaa

SEQ ID NO: 307 - DNA, 441 bp, Enterococcus faecalis
ggatgtgatgttattatgacaaaaaaaattattggaatcgctggcaatcaacttttgcaggcagctgaagtgtttcacggtaaccaagtgacgtacaccccacaaggttttgtcagcgctgttcaagccgcaggtggcgttcctctcgttttgccaattggccccaaagaattagccgctacgtatatacaacaaattgataaactacttttagcaggcggtcaagatgttgcccctgaattttacggacaagaaccccatataaaattagaagaaacgaatcgtgatcgtgacgagtttgagttagccctaattgaagaagccttaaaacaaaacaaacctatttttgcggtttgccgtggaatgcaattagtcaatgttgctttaggtggcacattatatcaagatttatcgatgtatcctcaatggtcagttaagcac

SEQ ID NO: 308 - DNA, 828 bp, Enterococcus faecalis
cacgaaaaaagtggaattaaattaaaaaaaaagagaggaagcaaagaggtgaagaaactattaattactggaggagctggctttattggttctaatttggctaatttttatagtcaacagtatcaagtttttgtgattgatgatttgtccatggggcgagtgtcaaatttgcaacaaactgagcagttggtttttattaaaggaagtgtgacggatcagcaattattggacgaagtactttcaaagcattcgtttgagtatatctttcatcttgcggccgtggcaagcgtggcaagttctgtggcacagcctctagagacccatgaggtcaattttttaagtgtattgaaaatactggaatcaataaaaaaatatcaaaaaaagctcaaacgttttgtttttgcttcgtcagcagccgtttacggtgcagagccaacgttgcctaaaagagaaacttcggtgatttgccctttgagtccctatgctattgataagtttgctgctgaacgttatgttctcaatgaataccatttacacggggtacccacgagcgcagttcgcttctttaacgtctatggtctcaatcaaaatcctgcttcaccctattctggtgtcctgtccattttgatggatcgttatatccaattagagcaagggcaagtgagccaatttcaaatatttggagatggtcagcaaacacgtgactttatctacattgaggatgtcctaactgcattaaatttagtagcaaccaaaagtgaagcgttgggacatgtttataatgtgggtaccgaagttgccatttcccgtcttcaccacgagttgccc

SEQ ID NO: 309 - DNA, 537 bp, Enterococcus faecalis
cattattcattaaaatttcttcaattgtttaatcaaatgaattggggaaaaatttttttttgggtagcgttgttcttttatttactcttgttaccaattttaatcaagagaattacgaagtcgaaagaaatgcctgaatcgaccattcctttattgacgattatgacagcgccaggttcgttatgtttagctggctatatttcaatgggtggtcatttgtatatgccattagttgttttcttgctaattttatctcaatgtatttatgggattgtagtagtgaatctatataaaattatgcaagtgacattctatccaagttatgctgcctttacattcccattagtaatttctgcgacagcattagtcaaagttaaacctttatttgcagaaaaggtaggcctaacgagtctgttaaatattttgtctacttttgaactcttattagctgtggctattgtaagttatgtgttcattcgatattgcatttttttattccaaagagaaaataacacgaaaaaagtggaattaaattaa

SEQ ID NO: 310 - DNA, 375 bp, Enterococcus faecalis
attctgattagtccgtcggtgactattttacggtttggcgatgatgcaacaattggtttggggcgaaatccgcagcgtattcggttgtttgccagtataacgattttgcttttatcaggattgtctgtggcgctagttggctcggtcagttttgttggtttggtggtgcctcatgtgatgcgaacagtttctggagaaaattaccggcgcttgattccgttctcggcgttaggtggtgcgctcctcgttttggtggcagatttaatcgctcgaatggtgaatccgccttttgaaacaccatttgggattatcacggccttaattggcatcccattctttctttatttatttcgtaaaggagggaaactaggatga

SEQ ID NO: 311 - DNA, 873 bp, Enterococcus faecalis
aggagggaaactaggatgacacagaaaaaagtgtctcgttgggtggctatcttaatagttgggattatcctaactgcttgtatcagtttaacgcaaggggaattatctgtttccgtcatggatttaaaagcccttattttgggacagggaagtcaggccaaacaactgttagtttgggattttcggttaccacggattgtgcttgcggtcctagcgggcgcagctttaggcttaagcggcgctattcttcaagggattactcggaatccgttagcagatactgggattttaggtattaatgcgggtgcgggtttggcagtgattttgtttattagttttgttgagacgacaagtatcacaacgtttgcacttccactcgtggccttagttggcggcttgctagcggctgttgggattttggtaatcgcgtatcatcatcgtttaggattgacgccagttcgaatggtcttagcgggtgtcattttgagtacgggtatttcagcactcaccttattaattacatcaaaaattgacactgaaaagtaccgttttgttacaatgtggcaagcaggcagtatctggggcagtaattggttctttgtgggcgctttgttgccttggctagtcatcgggttcttttttgcgatgaagcgtcatcgtctgttggatattttacaattgggggacgaaacagctatttctgtaggtattgctgtgaaaaaagaacgaatcgtttcgttgctgttagcggtgatgttggcggcatcagcgatttccgttacagggggaattaattttttaggtttacttgcgccacatattgctcgcaaatgtggttttacgcaacaaaaacaggtattgccattggcggcg

SEQ ID NO: 312 - DNA, 243 bp, Enterococcus faecalis
acgatatttcaagatgttttggcggttgacgtttttactaacgtttgtgttgtatgtgttgcttatcttgctaaatatcagtcattatctactgtaataaagcgtggagacaataggggaaatacgctgtgggaaaatgtcccccacaactccccactccgtggggtttttttgttatttgtggggttattttataaaaaacatagtaaaaaccttgttataataacattttttgttgggtga

SEQ ID NO: 313 - DNA, 426 bp, Enterococcus faecalis
catgatgaacaaaatgctcgagtggaaggcttccgccacgaaaaattacaaacgcctacgttacttttatttcgttatcccaaagctagtatcagtcctagtggctatctgcaagtagaaacggtgccgattgctttaatcgcaaccatcgataacaaactaattactgttagcaacgggcctaacgacatcgttcatgggattcaaaaagaggcgttcacccatcaagatctttctattgagaaggccttaattttagccctttcatggaagatggccctttccttcaataaaaacttacaagcacttatccaacaaaccaacaaacttgaaggagagctccaagtagccacagaaaatagtcaattgtatcagattatggacattcaaaaaagtctagtttatttcgaagcagctttaacggat

SEQ ID NO: 314 - DNA, 615 bp, Enterococcus faecalis
acagcaattttaagcgcaacagtggagagaattagcttaccacattctaaatatgggattgccgcttactatattattgcctcttcagaagcaagttcaaacttacaacgctttgatggcattcgttatggttaccgttccgaaaatgtccaaaatctagaagacgtctatgttaattcgcgttccgaaggctttggtactgaagtcaaacgtcggattatgttaggaaccttctctttaagtgctggttattatgatgcgcactttaaaaaggctggtcaagtccgtacactaatcaaacaagattttgagaatgtctttgcggattatgacttaatcattggcccatcaacaccaactgttgcttttggtttgggtgaaaatatcaatgacccaatcacgatgtatatgtatgatattttaactgttcctgttaacttagctgggttaccaggcatgtcaattccagcaggcttctcagaaggattgccagttggtttacaaattattggaaaacattttgacgaacatacaatgtataaagcagcctatgcttttgaacaagcgacagatttccatacgaaaaaaccagtcattttaggggggaacgattaa

SEQ ID NO: 315 - DNA, 801 bp, Enterococcus faecalis
acaagcgacagatttccatacgaaaaaaccagtcattttaggggggaacgattaatgaactttgaaactgtcattggattagaagtccacgtagaattgaaaaccaactctaaaattttctcctctgcgccagcgcatttcggagcagaaccaaacagcaacacaaacgtggttgactggagttacccaggtgttttacctgtgatgaataaaggtgctttagaatttggcatgaaagcagcacttgccttgaactgtgaaatttcaaaagaaacacattttgaccgtaaaaactatttttacccagataacccgaaagcataccaaatttctcaatttgatcaaccaatcggacatgatggttggattgaaattgaagtcgaaggcaaaaagaaaaaaattcgcattgaacgtgtgcatttagaagaagatgctgggaaaaatattcacggcacagatggctattcttatgtagacttgaatcgtcaaggcacgcctttaattgaaatcgtttctgaagcagacatgcgttcaccagaagaagcgtatgcttatttagaagcgttgcgttcaattatccaatttacagaagtttctgatgtgaaaatggaagaaggttctatgcgttgtgatgccaatatttctttacgtccgtatggtcaagaagaatttcgtactaaagcggaattaaagaacttgaactctatgaactttgtaaaaaaaggtgtagcttatgaagaaaaacgccaggccaaagtcctattatctggtggcgaaattcacaagaaacacgcgctttga

SEQ ID NO: 316 - DNA, 468 bp, Enterococcus faecalis
gtagaaatggtaaaaacattgtatagcattttacacaggagtctggacttgactatttgggttgttttttttctttttaatatgtatatgccgacagtgagagctgatgacttagtttacgtaaatagattagataaattaggatatttgggtgcttcaatagaacattataaaacatggagttcaagagttattattgaattattcttgatgtttttttctaaacaccttatgttatggaaattattaaattcaacgataatgacaggttctatagtattgctttgcaaatatgttttcaacaagttatattctaaaaatttgctactagttttttctatattttgtctaattcctttaacaataatgggggaaactggttggatcgctactacgttaaattaccaatggccagtagcttttggtttgctagctttttaccctttttttccaagtgttaagcggtag

SEQ ID NO: 317 - DNA, 234 bp, Enterococcus faecalis
tttaacgtagtagcgatccaaccagtttcccccattattgttaaaggaattagacaaaatatagaaaaaactagtagcaaatttttagaatataacttgttgaaaacatatttgcaaagcaatactatagaacctgtcattatcgttgaatttaataatttccataacataaggtgtttagaaaaaaacatcaagaataattcaataataactcttgaactccatgttttataa

SEQ ID NO: 318 - DNA, 636 bp, Enterococcus faecalis
tcctcaaaaagctgtcaaatagcgattggaataaccaaagatggcgaccgtgaaattatcggcttcatgattcaaagtggcgaaagcgaagagacctggacaacattttttgaatacctaaaagaacgcggtttacaaggtacggaactcgttatttttgatgcgcacaaaggattagtctctgccattagaaaatccttcaccaacgtaagttggcaaagatgccaagttcacttcctaagaaatatctttaccaccattcttaaaaaaaattcaaaatctttcagagaagctgttaaaggaatttttaagttcacagatattaacttagcgcgtgaggctaaaaatcgattgattcatgattatatcgatcaaccaaaatattcaaaagcttgcgcatcattggatgatggattcgaagacgcctttcaatataccgtacaaggaaattcccacaatcgactaaagagtaccaatctaattgaacgactgaatcaagaagtacgcagaagagaaaagattattcgcatcttccccaatcaaacatcagccaatcgcttaattggagccgttcttatggacctacatgatgaatggatttattcttcaagaaaatacatcaattttgataagtag

SEQ ID NO: 319 - DNA, 837 bp, Enterococcus faecalis
cccgctaccccgtcgttgtcaaatttcggtggtagggtttgggaaaaattacctggggaagatgcctactactttcatgcctttcataaaaaacagccggatttaaattgggaaaatcctgaactacgcaaagaaatctatcaaatgattcgtttttggttaaacaaaggaattgctggttttcgtgtagatgcgattaattttattaagaaagatttgacttggacaaacttacctgctgatggggcagatcaattagccaaagtaacaaaagctagtagaaacatgccaggaatgagtgactttctgaacgaattaaaagaaaaagcttttgctggctttgatattgtcacagttgccgaagcggccggcgtcaattatctaaatttatcagaatttattggagaaacagggtatttcgacatgatttttgacttcaaatgggctgatttggatgtgaaatcaggaagcgaatggttttatagaatcgattggtcttggaatgatttacgcacattaattttcaaacagcaagaagccatgcaagaggctggttggagtgcaaattttattgaaaatcatgatcaacctcgagcgacaacgaaatatttaaaagaacaggctcaacagccaaatgcggttaaaacattcggcgccatgtatttctttttaaggggcacgccttttatttaccaaggacaagaattaggaatgaccaattttgaaaggggttcgattgatgaattcgatgatatttctagcattgatcaatactatcgagcaataaaagaaagatttacgccccaaagaagccttgtcacttgtcaatttgcgtag

SEQ ID NO: 320 - DNA, 489 bp, Enterococcus faecalis
aagaaagatttacgccccaaagaagccttgtcacttgtcaatttgcgtagtcgagacaatgcccgcacgccttttccatggaatgattctatgtatggcggtttttcaagcgtcaagccttggttaggaatggtggataattataaagaaatcaatgccgaagcagaaataaaaaatagtcaaagtatttttcatttctataagcggatgattgcatttcgtcaaaagagtccctatacagacatcttactttatggaacatttgagggtctgtcaaatcttccagataatgttattgcttataaacgcaaattaaatgaaaaaacgatttacgccttttttaattttggtgaggcggttccaatccctcattatttagttaatggcacagttatttttgatacacagtctgaagaacgagagcaattagttcagcagggaacattattaaaaagctatcaaggactattgattactataaatgagtag

SEQ ID NO: 321 - DNA, 276 bp, Enterococcus faecalis
gaggagtataacatggcagaaaattatcagcaggcagccaaagacattattcaattaatcggtatggataacattatatcggtcacccattgtcaaacgccgttacgtgttattttgaaggaccatgaacaagtagatggtaaacaactagaaaaaatcgatttagtcaacggggttttttataatggtggtcaataccaagtgattttaggaactggtattgtgactaaagtgtttgatgaaatagaaaaaattggaatcaatgttgttttttaa

SEQ ID NO: 322 - DNA, 213 bp, Enterococcus faecalis
  misc_feature (86)..(86): Nucleotide 86 is "n" wherein "n" = any nucleotide.
attactttgtttttccgttcaagcgaagggacattagtccctcatagtttcgtaaggaaaaagaggaatagtcccaaggtactccnttccgatacgcttgtaatattaagtttttgttcgcaaggaaactacggaattcgctatactaaaatttatgtgaatatactaaacagacaatcaattttttatctctttaattggggtataaattga

SEQ ID NO: 323 - DNA, 768 bp, Enterococcus faecalis
ttttatatctttctagagaaagggatgagtgaacaaatggctatttatatattagaagaccaaattattcaagcaaaagcgttagaagtattgttaacaaatatcctacattcaagaaatatttataaggaaacaatccatttattttcacgttcagatgaattattacaagtggcacaccaggacgcccaactaaatatctttttcctagatattcaaatgaacaatcatatccaggcaggatttgaggttgctaaagaaatcagaaaaacagacagtgaaagtctgattgtatttatttctactcacacagaattagttttaacttcctacaaatatatggtttcagctcttcaatttattcaaaagaacgtggattttctagatttccaaaaagaggtcgaaacatgtgtcgatgcatatattcaacaaaaagaaaatataaagacaaaaagtgaatatattatcattaacttaaaagcgtcttctataaaaatggatattaatgatatttatttctttcaaacggaatacgatcatcgtgtgtcaatggttggtaaaaattttaaaagagaattttatggaacgttatcaaaaattgaacaactgcatccagatttgattagagtccatcaatcaatcatcatcaataaaaaatatgcgtcaaaattaaattataaaacgcatcttttaactatgagagacggaacggaagtaccagtctcaagaagatattatactcaggtcaaggcactatttcttacttag

SEQ ID NO: 324 - DNA, 759 bp, Enterococcus faecalis
tttagtgcaatacttgaagaggagggcgatatgctaatcgattggattctaaaaaatattatggatatggatcaggaagatcaatcaggaaaaacacaatggacaaagtattatctaaccgtttatttttctggcttatttaatcttctgatgattctgattttatcagttttatttgggacgttaagcgaaacctttattgtatacgtcgtactgatttttttacggcctgtcgcaggtggctggcatgcaaaaactaaatggctctgtcgtctagaaagcattgttatctatgtcgccataccatttgtattgaaaaattcttctgtgagcttaccgtttatttataaaattctattgatgtgcctcttagtcgtattattttattggtatgcgccacaaggaacagcgattgaacctgttcagccatctgatttaaacgtgctcaaaaagcaaagccttataagggtgtgtttacttattttatgtagtctgtttgtcaaagaaaagattgcttcagtaatactctacggtctcgtcatccaaggtctgatgatactccctgtaacaaaaaatttaattgaaggaagtgtttttatgaaatttggtaaaaaaataattaaaaatgttattgaaaaaagagttgcaaaagttagtgatggtgtgggaactaagcctagattaaatcaaaattcgcccaatatatttggacaatggatgggacaaactgaaaaacctaaaaagaatattgaaaaatga

SEQ ID NO: 325 - DNA, 720 bp, Enterococcus faecalis
tcatcagataatcctattttatttttcccctgcagaaaaatagggtttttttgtatgacaaagaagcgaatcaaaaagttcgttgaagatggttccttaattggaggatttcagatgaacaacaaggtacaaaaaatggtcagcattgcaatgttggccgcaatcggtacagtattacaatttgtggcatttccgattatgccggcgtttagttttttgaaaatcgattttagtgatattccgattctactcggaatgttcttgtacggaccgttagcaggagtaattactgcttttgttcgttcgttgctacacctgttcttaaccggactagcaccgcaaaatatggtgggagatttcgctagctttttagcaagtagtatcttcaccttgccaattttttatttctttggtaaaaagaaaaatatccgtacaaatcggatagtgggcttagtaagtgggatcttagccttgacaattttcatgagtattgcgaattattttgtcattacacccatttacttacaattatatggtgtgaccacacaacaatttttaggaacatctttagcaagctatgtggcgattggtattgtgccattcaaccttattaaaggcctcttagtcagtggtgtttttctagtactacatgcgaagttattgccatggctatcaaaaaaacaacatactattcagaaaaaaacaccgttaacaaaataa

SEQ ID NO: 326 - DNA, 639 bp, Enterococcus faecalis
ggagattacacaatgtcaaaattattagttgttaaagcacatccattaacaaaagaagaatcgcgctcagtacgtgcgttagaaacatttttagcttcataccgtgaaacaaatccatcatacgaaatcgaaattttagatgtttatgccccagaaacaaacatgccggaaatcgatgaagaattattatctgcttggggtgcacttcgcgctggcgcagcatttgaaacattaagcgaaaaccaacaacaaaaagtggctcgttttaatgaattaactgatcaatttttatctgcagacaaagtagtaattgctaatccaatgtggaacttaaacgtaccgacacgcttaaaagcttgggtagatacaatcaacgttgctggaaaaacattccaatatactgcagaaggaccaaaacctctaacaagtggtaaaaaagccttacacatccaatcaaatggcggcttctacgaaggaaaagattttgcttctcaatacattaaagcgattctaaactttattggcgttgatcaagttgacggattattcatcgaaggaatcgatcatttccctgatcgcgcggaagaccttttaaatactgccatgaacaaagcaactgaataccgtaaaacattctaa

SEQ ID NO: 327 - DNA, 1185 bp, Enterococcus faecalis
atggagcgtgaatcaatggataaaaaacaaacgactgataaacgcctgtcttggttttggcgttggtttttaaataatcaagtagtaacagccttactgattgtcttattggtgctgttaattattctaacttttacgaaagtttcttatttatttaagcccgtctggcagtttttcggcgttgtcggcttaccagtaattatggcggggattttatattatttattaaatccaattgtcgattatttagagaaaaaacaaatctcacgtgtctggagtattatcggcctatttattttaattgtggcactactcatttggggtggtattgtaatcgttcctaaaattcgtgagcaatctgtcagctttgtgaatcattttcctcaatatattgatacaattgatcaaaaatcgcaggaaatattaagtgatccacttttcgcgcaatttagagaacaacttgaagcggcaggcgataaagttgtcagctcgttaggtaccatcattaaaaacgtctcaacgttcacagtacaaggaattggtaatttctttggggcggtggctacgatctttgtcgccatcattacgatgccgtttattctattttatttactgaaagatggcaaaaacttagcgccatatttaatgaagtttttaccagtgaagatgcgtaaaccaaccttaaaagttcttgcagaagtcaatgatcaattctcttcttatattagaggacaattaactgtcgctttcgcagtggcaattatgtttatgattggtttttctgtcattggcttagattatgcagtcactttaggtattgcagcaggctttttaaatttaatcccttatttagggtcatttttagccatgattccagcagtctttttaggaattgtcagtgggccagctttgttaattaaagtcttgattgtttttgccattgagcaaacggtcgaaggtcggtttatttcaccacttgtcctaggcagtcagttatccattcatccagtcaccattttggttgttttattaacgtctggtaaactatttgggattgtcggggtgattttaggaattcctgtttatgccgcagctaaggtgataattacacacatttttgagtggtaccaaatcgtttccggtttgtatgatgaagataagccagatcaacaagaatttacgtaa

SEQ ID NO: 328 - DNA, 900 bp, Enterococcus faecalis
acacttttatttctttttcaatggctattttttggtatagtttgcattttgatagttcctataaccttttttataacttctcttaccactcccaagatattagctgttgacttgttgatgttgttttttttaagtggaattatttttgtttctttcatgagaataatgtatgtaagcatgcacttgtttgaagcaagatatgcagtcgaaacactagactccctttatttagaaatgaagcaagaccaactaaaatatgggaacgagacacagattaaaaattgtgacattgcatttgaaaatgtcagcttttcatacaaagaagagtgtgttttagaaaatttcaacttagttttagaacaaaaaagaatttatgcattagtaggaaaatcaggaagcggaaaaagtacgatagctaaactaatttcaggtttctacaatgtggataagggacagattaaaattggtggtaagcctttaaatcactattcaaaagacacgattattaacacaattgcttttgtctttcaagatacgaaactattcaatcagagtatttacgataacgtttctatagcaaatcctcaagcgccagcaagtaaagtatttgacgcgctaagattagccggttgcgaatcgattttagaaaaatttcccgaaagagagcataccttaattggtagtaaaggagtttatctgtcaggaggagaaaaacaacgtatagctattgccagagcaattttaaaagatgcaaagattgttattatggatgaagccagtgcatctattgatccagataatgagtatgaactacaaaaggcttttcaatatttgatgaaagaaaaaacagttattatgatagctcatcgattatccagcattaaatctgtagatgaaatt

SEQ ID NO: 329 - DNA, 207 bp, Enterococcus faecalis
agggagtctagtgtttcgactgcatatcttgcttcaaacaagtgcatgcttacatacattattctcatgaaagaaacaaaaataattccacttaaaaaaaacaacatcaacaagtcaacagctaatatcttgggagtggtaagagaagttataaaaaaggttataggaactatcaaaatgcaaactataccaaaaaatagccattga

SEQ ID NO: 330 - DNA, 1257 bp, Enterococcus faecalis
gacaaatctgcaatttacatttcaatcttttttatctttttgaatttgttgttaggtgcgtatattttttataatcgcaaaattagtgacatcatttttgtcacggtgattggtcaaattttaatgactttaacgattatgattgtgacatttgccggacgttggtttacgttcccgcgttctgttttaggatattcctttataatcggaattattgttctaagtctttggcgaattcttgtttattatctttacttaaaggtcagcaatgagcgaaaagttgttttactaggtaaagaaaatcaagttatgcggtcaattcaaaactttatgtctgataaaaataacaagcataaagtaacgagcgttgttgtcagcaattactatgaaaacttaaaaaaaattatcgatgaaatcgatattgtttatatttcaagtaatgttgatgagaacgaaaaagtaaaattgtatcaattaattgtcaaacacaagaaaaaaatctttttagatacaagttttgaaaatctaattatgttaaaaccaaacatgatgaactttgaagatgaaagtattatcgaagtctcaaattttgaaattcaaccagaagagaattttattaaacgtttattcgatattttagtctctgtttgcctatttgtgattacctcccccttaatgcttattgcagcgattttagtcaaagcaacctcaccgggaccagtgatttacaaacaaactcggattacattagatcaacgtgagttctcgattttaaaatttagaacgatgtcggtaacagcagaagcaaaatcaggcccagtcttatctacaagtaacgacagtcgcgtcactacagttggtaaatacttgcgcgctttacgtattgatgagttgccacaactaatcaatgttattcgcggggatatgtccattgtcggaccacgtcctgaacgaccattctttgttgatcaatttaatcaggaaaacccgaattactatttacgtcacaatgtacgtgcggggattactggctatgcccaagtttatgggaagtatgcttctgactacaatagtaaattgaactttgatttactgtacatcaagaattattcattgctattggatatgaaaattctgcttcaaaccatcaaaattctctttgataaagtatcatcaagaggattggatgagtctgaagaacgtgaagaattgacgatggattattgtaaagagaatgctattagaatttaccgttaa

SEQ ID NO: 331 - DNA, 624 bp, Enterococcus faecalis
gatcctttaatgtcagagtattcagaaaaaagattagaggagagtaacgaaatgaaagaaaaacagaaaaagaagaccgtgagtgttcgagaagcaagtatcgtattattaattattgtggcagctattgcaacaggagtaattggcttaaagatatcgccaaatattactattttgtttgtgattgcattgattttaggctacgcaatgtttcgtaaagtaccatttgatcaaatgcataaagggattgttgatggcttgaagccaggaattattccaatttttattttcattttagtgggggcattgattgccgtttggattcaagctggaattattccaacgattatggtttttggttttaaaatgattagtgttaaatggtttgtgccgtcagtttttattgtctgtgcgattgtcggcagtgcagtaggtagtgcttttacagtgatgtcaacaattggaattgcctttttcggtattggcagtaccttagggttaaatcctgctttagttgtgggtgcgattgtttctggttcagtttttggtgataaaatgtcacctttatcaaaatcaacaaacttagccgcagcgattgttgaagcggatttgtttaaacatata

SEQ ID NO: 332 - DNA, 885 bp, Enterococcus faecalis
ctccccgtggtgaggattcaacccttttgccaactggtacgtcactcccctgagctctcgaaactttgtgaaaaatgtgatgctcgtggtggcttggaagctgttcgcactggtcagccttttatctaccgttgtcactttaacatcgttgatatggccatccccattattgttgatgaccagtatgtaggagccattatggctggtgaagttttgctcgaagatcaccaagaagagttagaacaggttttaaccatgaatgatgccttcattcaagaatttttagtaacacaccaagagctgtatcaacaataccctgttttagaactagcagacttagaaaagagcgcgacattaatcgctgatctaagccaatatattatttctgaagccatcaaaaaagattatttaatcaatacgtacaaacaatccttacagattagttcgcgaaaagaagagctggagccattgaatatgatccaaaaagatattcaacaaactttattaactgctcaattaactccttcaagtgcctatcaaactaaaaataagcaattacaaccggttttagatgccctttgggaaaacaaatcgctgcgtttaaatttacaagaactggcagaccttgttcatttgacaccgacgtatttaagtcgtttattaaaagaggagtttggtattccctttagtcaattttatcgacaattaaaaatcacatgggctaaacagcttcttttggagacagataaaacaattgcccaaatcagtgaagatttagggtttgttgaagatagctattttgtccggatctttaaacaagaaacgggtgaaacaccccttaaataccgtagaagagagaacagagcatataagaacgacgactcc

SEQ ID NO: 333 - DNA, 1146 bp, Enterococcus faecalis
  misc_feature (979)..(982): Nucleotides 979 and 982 are "n" wherein "n" = any nucleotide.
gcaggtccttgtggtggtgatgggggagctggcgccgaaaaagcaaagggcggatcagagaaaactgccgctaaacaagaatttaaagtagtagttcaacaagaaatgccttctgcagatttatctttaggaacagatacaattagttttacggcactgaataatgcgtatgaaggaatttatcgtttagatgataaaagcaagccgcaaccagcaggggctaaagaaaaagtgcaagtcagtgatgatggtctgacgtacacagtgaaactaagagaagaagcaaaatggtccaatggtgatcctgtcacagctgccgattatgtttttagttggcaacgtacagcagatcctcagactggcgctgagtatgcttattttctagaaatgattgaaaacggtgcagacattgtagctggtaagaaaccagtctctgaattaggcattaaagcaaacggagattacgagctagaaattaaactggcaaaaccaacaccatattttgattatttactggcctttccactatttttcccgcaacatcaagcaaccgtagagaaatatggcaaagattacgctgcttccagtgaaaaagcagtctataatggtccgtttgtcttagctaactttgaaggggctggctcagataccaattggactttggaaaaaaatgaaaactattgggataaagacaatgtcaaattagataaaatcaattttgatgttgtcaaggaggcgccaaccgccttgaacttattccaagatggccaggcagacgatgttattttaagcggcgaattggcccagcaaatggcgaaggatccagaattggttatcgaaaaagaagcacgaaccagctatttggaatttaatcagcgagataaaaattcaccgtataataatgtgaatttacgcaaagcaatttcagcagcgattgatcgcaacgcattagtagataaaattttaggcgacggctcantantcgctaccggcttaattccagaagggatgtcgtattcgccgacagatgacacagattttgctgatgaaaataaaaaaattgttgaatatagcccagaaaaaccaaaatatatggggcaaagcgacgatggattgggcttaaacaccctcccaatggatattgtt

SEQ ID NO: 334 - DNA, 528 bp, Enterococcus faecalis
agccgatgcgacatcactgttcaattattcccagaacaagcgcctaaaacggttaaaaattttgttgaattagcgaaaaagggctactatgatggcgttattttccatcgtgtgattcctgattttatgattcaaggcggtgacccaaccggaacaggaatgggcggcgaaagtatttatggagaagcatttgaggatgaattttctcgggatgttttcaatttgcgtggcgcattgtcaatggcaaatgctggtcctaacacaaatggtagccaattctttgttgttactaatcaaaatgttccagctcaaatgatgagtcagttagaagatgctggttttccagaagaaattattgaagcttacaaacaaggcggaacaccttggttagacttccgtcatactgtttttggtcatgttgttgatggtatggatgtagtggatgaaattggtggagtccaacgggatgcccaagaccgtccaacatttgacgtcgtgatggacacagttgaaatcattggtgaataa

SEQ ID NO: 335 - DNA, 231 bp, Enterococcus faecalis
agaatagaaggagaggaagcaaatttgttagaaaaatacagatatccaatggccttggctttgtttgcagtaatactcccatttataggaacgttttttacgtatgtagatcagcaaggaatcgttcatgaaccaggattttatacaatcataattggagaaattttacttctattttcaggtatctggttcgtcagagtttatttagctaaacgcaaaagaaagaattaa

SEQ ID NO: 336 - DNA, 378 bp, Enterococcus faecalis
aaaaatcatcaaggcggcatcaatacttttgggtacgttggaacggcagctgcctatcaaacaggggaggaatggctaacggcattacttgattatttaaaagaaaatattgattttgccctttcttttttccgtgaagagctgcctagcgttcgtgtaatggagcctgaagggacctatcttttatggttagactttagttcttattcactaacggatcgagaacttcgcgataccttaattcataaggggaaagtggttctaaatccaggaattagttttggtccccaaggttctcaacacatgcgtttaaacttagcttgttcaaaagaaactctcgaagaaggccttttacgtatcaaaaaagcctttaattaa

SEQ ID NO: 337 - DNA, 1005 bp, Enterococcus faecalis
atggcactactactattctttttgtttatcgccctactaggatttggtatattaaaaattaataaccgcagtatcctcggcggtatcactctggcttccggcaccttattgtcattagtcaccttactatttatcggattagacaaaatttatttacattttaagaatggcgacctaattaccttggccattgcttatctattaattcccgctgtgtttatcggcatttgcctttactttatttttaactcacgtacgatgcaaacgaaagaaggcaaaagtgtcacggctaaattgtcggcgggcttagggctgaacttattaattgctttaccagcctttctatatttattatcagttggcacagcgcaaataccttatgtgctttttctgttcttactttttctattgttaatggatcttttgctgacctttctatttgctgcttacgtcttgtattcatggatgtaccaaatgattcctttaaaaaaagcggttgattatatcattgttttaggttcgggaattcgtagcgaggaagtacctccacttttgaagagtcggttagataaagggattgaatattatgaaaaaaatcccactgctaaatttgtagtcagcggtggtcaaggtcctgacgaacctgtggccgaagctttcgcaatgaaaaaatatttgctttcacaaaatattcctgcagaagcaattttgatggaggaccaatccacaaccacttatgaaaatatgttgttttctaaagcaataattcaggcagattggcaaaagatgccgtctgattctaaacaaccctctgttattttttcaacaaataactatcatgtcttacgaggagctatgtatgcccatcgtgtcggcttaaaagctgaaggtgtcggggcgccaactgccttatattttttaccaactgctctaatccgagaatacattgccttactggttcatgataagcgaatgtgccttattgctcttaaccacggattgggc

SEQ ID NO: 338 - DNA, 216 bp, Enterococcus faecalis
tataatcaaccgctttttttaaaggaatcatttggtacatccatgaatacaagacgtaagcagcaaatagaaaggtcagcaaaagatccattaacaatagaaaaagtaagaacagaaaaagcacataaggtatttgcgctgtgccaactgataataaatatagaaaggctggtaaagcaattaataagttcagccctaagcccgccgacaatttag

SEQ ID NO: 339 - DNA, 285 bp, Enterococcus faecalis
ggtgagaaaatgatcactgtttcaattgcaggaggttcacaaccagagattttacagttagttaaaaaagcactaaaagaagccgagcaaccgttgcagtttattgtatttgatacaaatgaaaatcttgatactgaaaatctttggaaatatgttcattgctcagatgaggccgcggtagcacaggaagctgtcagtttagttgcaaccggtcaagcacaaattttattgaaaggaattattcagacccacacattactgaaagaaatgttgaaaagtgagcat

SEQ ID NO: 340 - DNA, 1620 bp, Enterococcus faecalis
ttttttatgacaaaaagtgtaaaatttttagtgttactgttggtaatgattctaccaattgcgggggcgttattgattggtccaatttcgtttggcgccgaattgagcaaaagttcaatcgttgacaaagtagaattagatcacactactttatatcaaggagagatgacctcaattaaagtatcttttagtgacaaagaaaatcagaaaataaaacctggagatactattactttaactttaccagacgcactagttggaatgaccgagaacgatagttcaccacgaaaaatcaatttaaatggtttaggggaagtttttatctataaagatcatgttgtagcaacatttaacgaaaaagttgaatctttacataatgtgaatgggcatttttctttcgggattaaaacgcttatcaccaatagttctcaaccgaatgtgatagaaacggatttcggaacagcaacggcgactcaacgtttgacgattgaaggagtgactaacacagagactggccaaattgagcgagactatccgtttttttataaagtaggcgatttggctggagagtcaaatcaagtacgttggtttttaaatgtgaacctcaataaatccgatgtcacagaagatatttcaattgcggatcgacaaggaagtggtcaacaattaaataaagagagttttacatttgatattgtgaatgacaaagaaactaaatatatttcacttgccgagtttgagcaacaaggttatggcaaaattgacttcgtaacagataatgactttaacttacgtttttatcgggataaagcacgctttacttcctttatcgtccgttacacttcgacaatcacagaagcaggccaacatcaagcaacatttgaaaatagttatgacatcaattatcaactaaacaatcaagacgcaacgaatgaaaaaaatacatcacaggttaaaaatgtttttgtagaaggcgaggcaagcggcaatcaaaatgtggaaatgccaacagaagaaagtctagacattcctttagagacaatagatgaatgggaaccaaagacacctacttcggaacaggcaacagaaacaagtgaaaagacagacacaacagaaaccgcagaaagcagccaaccagaagttcatgtctcaccaacagaagaagaaaatccagatgaaggtgaaacactaggcacgattgagccaatcatacctgaaaaaccaagtgtgacaactgaagagaatggcacgacagaaactgcagaaagcagccaaccagaagttcatgtctcaccaacagaagaagaaaatccagatgaaagtgaaacactaggcacgattgagccaatcatacctgaaaaaccaagtgtgacaactgaagagaacggcacaacagaaaccgcagaaagcagccaaccagaagttcatgtctcaccagcggaagaagaaaatccagatgaaagtgaaacgttaggtacaattttaccaatcctacctgaaaaaccaagtgtgacaactgaagagaatggcacaacggaaactgcagaaagcagtcaaccagaagtccatgtgtcgccaacggaagaagaaaatcgacaagatcctcacaacgcgcacggc

SEQ ID NO: 341 - DNA, 516 bp, Enterococcus faecalis
aggaggtttattatggaacgaattccatgcgaccaatattttatgcgacaaagcgtcttattatcattaagaagtacttgcacacggttaactgtcggagcaaccattgttcgcgacaaacgaattattgcaggaggttacaatggttcagtcagtggcggaacgcattgtattgatgaaggatgttatgttgttgataatcattgcgttcgaacaatccacgcagaaatgaatgcaattttacaatgtgcgaagtttggcgtccctacagaaggggcagaaatttatgtgacacatttcccttgcctgcaatgtacaaagatgattttacaagcagggattaaaaagatttattatttaaaggattaccgtaatgatgcgtacgccctaaatttaattgaacaagtaggacccacggttgaaaaagtgactttagtaccaaaatattttgccgaattacaatggggagaagaatttgccacacttgaggacaatccttcctcagctgaagaataa

SEQ ID NO: 342 - DNA, 681 bp, Enterococcus faecalis
aaaatgcgtaattatattttgaagggagggcaaacgatggattggttgaaacagttacctaaaaagtggctattgctaggtagtggcgtgttcatggtcattttgataactctattagtgggcatttatttgatggttaataaggagctacaagtagacaccacaatgtgggaagaaacaagtttgaccactacgacagaggtcgccacagatgccacaaaagaaagggcagaaacaatgatctatgttgatattaaaggcgcagtgaaagtaccaggaatctatcaactaaaaaatcagcagcggatttgggatgctttagctttagctggaggcgtgagcgaggaagctgatactacccaggtcaattacgctcaaaaagtaaaagatcaaatgattatttacgtgcccaaaaaaggagaaccagtggcacaatcattagaaacgctgcaggaatcagcacctgctcagcaaaatcaggaggaaaaaatcaaccttaatacggcaacagaagcagagctacaaacgatttcaggaatcggtgcgaaaaaagcacaagagattattcgttttcgtgacgaacaaggaccgtttaaaaccgtcgaggaactgaaaaatgttccaggtattggagagaaaacagtagaacgtttaaaagacatgttgacagtgactggctaa

SEQ ID NO: 343 - DNA, 1095 bp, Enterococcus faecalis
cccccctgtggcgaagacacgaataatgatggagctaaaattatgaataaaaaaacagaaaaattttcgtttaaatcactcattccaatggtattggcattgctgctaattggtttgtttatcgtcccaattccttattatattgaaggaccaggaacgacagaaaatttaaaagagtttgtaactgtcgatggaaaaaaagatacgcagtctggtgctttttatttaacaacggtgggcattcgttcggccactattttttctgccataaaagcaaacttttcggattttcaagaagtcatgtccaaaaaagaattaatgggtgatagtagtaatagcgaatataatcgaattcaacaatactatatggattcctcaaaaaacgccgcaattgagcaagccttaaaattagcgaaggttccatatgagatgaaatttaaaggcgtctatgtgttagcgatggaagacaactcaagttttaaaggaaaaattgaagttggcgataccgtgacaggcgtggatggtaaatcttttaaaagcagtgaagaattaatgaattacattaaagcacaaaaagtgaatcaaaaagtcactgttcaatttattcaagatggcaaagcaaaagaagcgaccggcaaattaattgaattgccaacagataaaaaagcggggattggtattggtttgaacgatcatacagaaattgattcttctatcccagtatctattgaagcgggtgatattggtgggccatcggctggtttaatgtttactttgcagacctatgaacaattaagtcataaagatttacgtaaaggtcatgaaattgctggaacaggtacgatgaacagtcaaggaatcgttggtagaatcggaggcattgacaaaaaagttgtaactgccagtgagaacggcgcagaaattttctttgcacctgatgatgaaataacttcagaaatgaaaaaagttgagccaaaaatcaaatcgaattatcaagaagcacaagaagctgcgaaaaaaattgggacaaaaatgaaaattgtcccagtaaaaacggttcaagatgccttgaactatctagagaaattaaaataa

SEQ ID NO: 344 - DNA, 543 bp, Enterococcus faecalis
ttgccaatgggactggaaaagaaagatttaacaacactacagtctttaaaagatgtcgaaacagttgtgccgcggtatacaatagatgccacgattgggccgcaaaataatgcagtaaaattgtttggctatcgaaaaaatcaagcaggatcggttaactatcaagtagttgacggtcggttacctaaacaaacaaatgaaattgcattagatacattagcgaaaactagatatgactataaaatgggtgataaaatcactttaaacgatgcagcgattaaagaaaaagggctgaaacaaactcattttactgttgttggatttatcaattcaccagaatatattgataatacatccaggggaaccacaacggtcgggtctggaacgttaaacttttttggcgtggtttcggaaaaagcctttgacagtcaacggtatccagaattgctaatctcatttcgttcattaaaacatcaaaatacgtattcctctgattatgaaaagaaaagagagcaggccttaaatcaagtaaaagaggcactg

SEQ ID NO: 345 - DNA, 1416 bp, Enterococcus faecalis
ttacatcgtggtgaggacaggttgcgtagaatgcttttacaaagaccagacattttaattctggacgagcctacaaaccacttagatatcgagacgctttcttggctggaatcttatttgccaagttatgccggcgccctattaattgtttcccacgatcgttattttttagataaggtagttaatgaagtttatgaactgagtcgcaaaaaaatgactcactacaaaggaaactattccaaatacttagagttaaaagcagaacaattagccagtgaatggaaagcgtatgaaaagcaacaagaagaaatcaataagttagaagatttcgttgccaaaaatctggttcgtgcatctacaacgaaacgtgcacaaagtcgccgaaaagtattagaaaaaatggaccgtttagaccgacctcaaggagatgaaaaatcggcgcattttcttttcgatagtgaaaaagtctcgggaaatgttgttttacaagtcgaagatgccgccattggttacgaccaagaacatattttatccgaacctattcacttggatattcgtcgcaaagaagccattgccttagtcggaccgaacggaattggtaaatccactctcttgaaatcaattattgaccgcattcctttcattaaaggaagtaaaacttttggcaccaatgtttctgtaggttactatgaccaagagcaagccaatttacatggcaataaaacggtcttagcggaattatgggatgaacacccaaccacacctgaaaaagagattcgaagtattttaggcggctttctcttcagtggagacgatgttgaaaaaacgattcctttattaagcggtggcgaaaaagcccgtgtggcattagcaaaactagcgatggatcgtgacaatttcttgattctcgatgagccaaccaatcacttggatatcgataataaagaagttttagaaaatgcgctgattgattatgaaggaaccatcctcttcgtttcccatgaccgttactttatcaatcgaattgcaacaaaagttgttgagctttctgaaaaaggcagcaaactttatttaggcgactatgattattatttagaaaagaaacaagaggaagaagaaatcgctgccctcttagctaatgaagaagcggcgaaaaaacccgaaccagttacagccaaaaataccttttatcaaaacaaggagcaacaaaaattactccgtactttgcaaagaaaaataacacaagtcgaagaaaatcttgctcagttagatacgacaattgcacaattagaagcacaaatgagtcaaccagacattctagaaaatcatgttgaattgctggctttaaaccaacaattagatgaagttcgtcagcaacaagatgaactacttgagcaatgggaaaattcagtttag

SEQ ID NO: 346 - DNA, 336 bp, Enterococcus faecalis
cgaagcgggagaccgggtttactaatgaaaaaatacaatccagaaaatcaaccaaaagcatggctcttccttctgccatcattaggaatcattttactgtttagcgtttatccactgtttcgttctttgtggatgagtttccaaaaaggttccttaattaaccaacgctacgctggtttagaaaattatcaacgtgtattgaatgatccaatcttctataaagcgttaaaaaatacagcgctctatgcatttgctgtggtaccgattgccttgataatttccctagcaattgcttggattatctttgaaaaagttaaacataagagttttctttga

SEQ ID NO: 347 - DNA, 1221 bp, Enterococcus faecalis
aatttttcagaaagaacacattttttacttaaaaaatacattaactttacctatttttatcttaatgacacagctttgctctcgcggttgcaagaaataaatgttaaaatcaaaaggtatgctattaaatgtttttttggaggttgggtcatgatagaagttatcgacttgaaaaaagtattcgataatgggtttgaagcgttaaaatcggtcaattttacgattgagcaaggggacttggtttgtttgttaggaccaagtgggtgtgggaaatccacaattttaaacttaattgcaggtttattgcatccaagtgatggagatattcagtttcgacagcaatcggttgtcaaaacagcaccaaaagatcggaacatcgggttcgtttttcaaaactatgccttatatccacatatgactgttctagaaaacgtaatgtttcctttgacggtaggaagtaagaaagttcccaaggcagaggcacaagctattgccgaagaatatatgaaactaacgaatattgaagagttaagccataaaaagccaggcacactttctggtggtcaacaacagcgtgttgcgattacccgggcgttagttcaaaaaccagatgttttattattagatgagcctttaagtaacttggatgcacgtttgcgtttgaaaattcgtgaagaaatccgccgcttggtgaaagaagtagggattacaacaatctttgtaacgcacgaccaagaggaagcgctatcaatcagtgataaaattattttattaaacgaaggggttattcaacaaaatgatgaacctcaaaacctttacttagaaccaaataacttatttgttgctcagttcataggtaacccaattattaatttattgtctgttgaagtgaaagacggcaaaatgtaccacaaaagttttgaaattccgcttgagcgttttgagcaagcacgctttaaaatgccaatgactgatgggaaatatacgtttgcttctcgtccggaagatgtggtaccagctgaaacaggtctctttaccacaacgacagatttagtggaattgattggtcgagaacgtattttacgatttacattaggaaatgaacaagtgaaatcaattgtaagtgtagaagaagcgattgaagaaggagacactttatcttttgatttttcatataaaaaagtatttatctttaacgaagcgggagaccgggtttactaa

SEQ ID NO: 348 - DNA, 732 bp, Enterococcus faecalis
caagtagatttaattatcgctttaaccaaagcacaacaattagatgcaatgtttaaagcgattcaaccaatgattactgaaaaaacgtatgtactatgtttattaaatggcttaagtcatgaagatgtactagaaaaatatgtaccaaaagaaaacatcttggttggcattaccatgtggacagctggtttagaaggaccgggacgtgttaaacttttaggtgatggcgaaattgaattagaaaatattgatccttctggtaaaaaatttgctttagaagtcgttgatgtcttccaaaaagctggtttaaatccaagctatagtagcaatgttcgctactctatttggcggaaagcctgtgtcaatggcacgctaaacggtttgtgtacaatccttgattgtaatattgccgaatttggcgcactacctgttagtgaatcccttgttaaaacattaatcagtgaatttgcagcagtcgcagaaaaagaagccatttatttagatcaagcagaagtctatacacatattgttcaaacttatgatccaaatggcattggcttgcactatccgtctatgtatcaagatttaattaaaaatcatcgtctcacagaaattgattacattaatggtgccgtttggcgcaaaggacaaaaatacaacgtagcaacacctttctgtgccatgttgacacagcttgttcacggaaaagaagaactattaggagctaaataa

SEQ ID NO: 349 - DNA, 1080 bp, Enterococcus faecalis
cctccgccccattcccgtcggtgtaaggacacgattaaaaggatcgagccaatggagttacaaaaagctttgaaagaagtgcgagagcaaaaaatcgctccagtgtatttattaataggaacagaactttatttaactgaattatttaaaacaacattgatgaaagaattgttgacggaagaggatgatcaatttaactttttctcatttgatatggaggaaacacctttaagtgcagcgattgctgaagcggaaacaattccgttttttggtgattatcgccttgtctttgtggaaaatccttactttttaactgccgaaagaaaaacaaacggtgtggaacatgatgtcaatcttttattgaattatttggaaagtccatcaccaacaactgttcttgtttttatggcctcatatgaaaaattagatgaacgcaaaaaaattaccaaagcattgaaaaaaaatgccacagtagttgacgtcaatccaatggatgaaaaggctattcgtcagtacatttctcaaacgattgagagcgaagggtacactattcgctccgatgcttttgatttattacttcaattgacagacttgaacttatcaaaaattatgggagaattacagaagctgtatttatatgcccttgaaacgaagacaattacacgaggtgcggttcaagaattagtccctaagtctctggaacataatgtttttgacttaaccaacgaagtactttctggaaacagtgaaaaagctgttcaattgtatgaagatttacttttacaaggagaagaaaccattaagttaaatgcaatcttattgaatcagattcgcctttttctgcaaacaaaaattttggctaagatgggctatcaacaagcgaatattgctgatacattaaaggttcatccttatcgagtcaagttagcgttacaacaagtccgacgatttgaattgtctcgattagaaagactttatgatgaattagttgaaaatgattaccgcatgaaaacgggccaaatggataaagaattactattccaattatttattttaaaattgactgcacaagcaaaataa

SEQ ID NO: 350 - DNA, 1032 bp, Enterococcus faecalis
ttcccacccctttggtgccagattaggggcttatttacaccaagaagtccagtaatggactatacaaatgaacgtttggtcagctactttatggctgaattgaaaaaatttggcaagaaaaaacgagctttatttataaaaatggatccagcggttcattatcaagattttcatttgggagaagaacaccaaccgcatgctgaagcgacatctattattgagaccttgaaagaagcaggtgccaaatatcaaggactgacaatggatatgggggccaccatccagcctcgcttccaagcgaatatttatcgtgaagattttagtgaggaacaattgtcaaaaagtaccaagaaaatgattaaaacagctgaaaaaaaaggggtcgttgtgcagcaagggcatgttgactttgttgatgaatttgaaaaagtcattcaatcaaccatggaacgccaacatatttctttgcggaatagtgattactttaagaagctgttgaacatttacccagaagactcctttattatgctggcgcaagtcaatttaaaggaacgcttagatagcacgcgacaacgctatgacaaaaatcaaaaagacttgagtaatttgaaagaaaatcaagtgaaaaagcgccataatttagaagaattagatgcttccttgactcgggaactaaaagaattagaagaaaatatcgcagaagctggtgaaatcgtcacggttgctggcgctttggctgtgacatttggtccaacaagtgaaatcctttatgctggcttagatgatcgttataaacgctacatgccaacatatgtgacttggcgagatgccattcaagaatgttttaaccgtggctgcgaaagctgtaatatgggcggcttagaaggtagtttaaatgatggcttaattaagtttaaagcgaacttcaacccaacgattaatgaatttattggggaattcgatttaccggttaataaattattatttaaagccagtgaatatgcctataaattacgaaaacaaaaaaaataa

SEQ ID NO: 351 - DNA, 276 bp, Enterococcus faecalis
tttacgaaggaaaaagcgcaacctgtctccttatttgtggctggtgttttaggctcagcaacgaataccattttagtcatgaacatgatttattttctttttaattcagcttatgctgaaattattggtaaagctggaactgctgtttacctagctattattgcgacgattttcagttctggtgtgccagaagctcttgttgctggtgtagctgcttcagcaattgctagcgttttgcttcgcttaatgaaacggaatgcaacgcaaaaactatag

SEQ ID NO: 352 - DNA, 768 bp, Enterococcus faecalis
aggattaaattaatgaaaaaaagtgttataactagttctatgttagcggttttgttgtcgggatttctcgttacccctatttctgcttacgctttggaacgctctaagggaactactgaagaaacggtggcttcagaaacatctctaacggagcgacaaatgagtagcggtgtcactgaagaaatgaacccaagcatcataaattctcaagaggaaacagaaacaacgtccacttcctcaacctccgattccaccactgaagtttctacatcagaagtaacaactgttaatgatacagaaaatagtagcgacgatactgaaactactttggaaacatcacaaagtaatgaggacacacctatagcaccggcaaaagcagaagaaaaagttcctgatattaattatcagacacatatccaagacatcggatggcaaggggttgtcaaaaacggggaaatttctgggactagcagacgctctttacgtcttgaaggaattaaaatgaatatttcaaattcagatttggctggatctgtacaatatagaacacatgtccaagaaattgggtggcaaggatatgtgaaacataatcaattgtctggtacaagcggaaagtctttgcggctcgaagcgattcaaattcgcttaactggagaaatagctaacgcatatgatgtttattatcgtgtgcatatagaagataaaggttggttgaattgggcaaaaaacagtgagtccgcatgtagtctaagcgccgctaaaagatga

SEQ ID NO: 353 - DNA, 228 bp, Enterococcus faecalis
gaagccattcaaattaaattagtgaaaaagggcgaagcggcacctgaaggatatggaaaagccttattaattggaaatgaagcaaaacgtccagatgacatcaaaccaactgtcaattatcaaacacacgtgcaaaatattggttggcaaggggttgtcaaaaatggcgatataactgggtacaattgggaatattttacaactgggaagcattcaaattcaacctga

SEQ ID NO: 354 - DNA, 747 bp, Enterococcus faecalis
tggggtgaagacatggtaattagatatgacaaagcctttattaaggattttaaagaaactgatgaaggttatttgacaatcacagcttgtccaattacacgaccaggtgttttcccttaccgccgaactgatggtggattatcaatggaggcaaaattgcctgatgaattattttctaaggcaactgtactttcagcaaatgctaagccaatgactgatgatcatccgaccgaaccagtaacagcagctaattacaataaatattcaaaaggcatgactcataatgatgctcacgttttagataataagctattggtttcgttcacaattacagatgcagagacaataaagaaaattaacgatggaaaacgtgaactgagcatcggttttcaagcagatgtttcaaaagaaactggcgtgtataatggcatgcaatatgattctgtgcaaaggaatatgcaaattaatcatattgctatagtagatgaggggagagctggtcccgaagttgctattcggggagattcagtcgctttcatgattgatactaaagataaacaaacaggaggaaatggaatgtctaaattaattattgattcaaaggaatttgaagtggattcaattgtaaaagcaaaatttgaatctttagaagcaaaattagatgcagccgaacaacgtaaagcaaacgttgagaaattagaaggtgagcgagatgctattgacggtattgcccacgagttcggccac

SEQ ID NO: 355 - DNA, 228 bp, Enterococcus faecalis
ctgaaggaggtgatcaaaatggctaaagagaaaaaagcttctagtaaagaagaaaacaaaaaagagttgtcaaaaactacgcagaaaacgattcatactgtttctgagggagaaactgctagtgaaattgcgacacgctatcatatgagcctacgaaaattactggatcttaatgagttagaatcgagtaatcaagtaaccgaaggcattcgcttattagtcgaataa

SEQ ID NO: 356 - DNA, 330 bp, Enterococcus faecalis
gttggggctattttttatactcaaaaaacaggagggacattaatggatagtcaaaaatttattgatttatgtaaaaagcatgtagttgattttgctaacagtcaattggattacacagatcaaaaaaaaataagcgagtctgatatttacgtggtctggttagcgaaaaccctgcaaaataataaagcattattaagtaccaatctatttgatggtatgtattacgaagttaccttcaacggtgataaaaatgaactatatttcgatgcttataaaaagtggagaaatatcaggtttgatgtaactgaaggaggtgatcaaaatggctaa

SEQ ID NO: 357 - DNA, 432 bp, Enterococcus faecalis
ggtgctacgacaatggaaaaagccaatcttgattggaataatttaggattttcttacattaaaacgccctttcgttatattagttattggcgagatggcaagtgggaagaaggcacgctaacagataacaatcagttaacgattagtgaaggttcgcctgctctacattatggccaacaatgttttgaaggattaaaagcatatcaatgtgcagatggttctgtcaatttgtttcgtccagatgaaaatgccaaacggctacaaaaaagttgtgcgcgtctactgatgccacaagtgccagtagaaacctttgtttctgcatgccaagaagtggtgaaagccaaccttgcttatttaccgccatatggaacgggcggtacgttgtatgttcgcccttatatgattggtatgtgtcaacgacgggtatgggga

SEQ ID NO: 358 - DNA, 477 bp, Enterococcus faecalis
acagaatttaaggaggagattttgatgccttggaatatgaatgattatcctacatcaatgaaaaatttagcacctttgattcggaaaaaagcgatagatattggcaatgcgttgcttgcggatggctaccctgatgatcgcgccattccaattgcgattagtcaagcggagaaatggtatcaagaggcaagtgcagcagacaaaaaggcatttgaacaagaagcaaatcctacgaaacaagattcgcataaacaggataaacatgcgggaaaattattaacggcggctgtcaacgttaaatataaagacggccaatggttggtgatttcagacagcgctgaaaaagcaagtaatacatttacccacaaacaagaggcgattgaacgagcccaagaaattgctcggaataagcaaacaaagctgaaaatctataagcaagatggtacgttacaagaaaccaaagagtatactgaataa

SEQ ID NO: 359 - DNA, 1092 bp, Enterococcus faecalis
cctggtccagtgattgtattcattggtggcggacatttagcaaaaatgatggcccttagtgcaagagaaatggggtttcgagtgggtgtgctagatccacaaattgattgtcctgctgcacaagttgccgattggcaattattaggagcatataatgatcctgaagcgttagagaaattggcaaaacgtgcccaagtgattacgtatgaatttgaacatgcagatgttgatgcgttaacagcgattcaacatttggcgaatataccgcaaggaacagacattttagcgattacgcaagatcgcttaatggaaaaaagtttcttggaagataataatattgtgattgcaccttatgcaacgattgttagtccgactgatattcaagaagcaattgatggcattggttatccgtgtatcttgaagaatacgcgaggggaaggtcgttatgtactacatagtacttcagacttagcgccatccatgaatcttctgagagaaggaacctgtgtcttggaagcttggattccttacgaaaaagaattatctgttctgatttctggtaatggtcgtggcgaatttgcgacatttccagttgtggaaacaattaaaaaagagcgtaagctacatgaaacgattgcaccagcccgaattgatgacgaagtcagtggtgagttgcaacgaattgctaaggtgattgctaaagcagttggtttagtcggcaccctttcaattgaaatgttttatacagaaacaggcgggatttatgtaaataaaattttacctcgtccagaagatgctgggaatttttcaatagatgcttgttcttttagccaatatgatacgcatattcgtggtttatgtaattggccaatgccaacgattcaactgttgtctgaagcagtcacggtcaatgtgcttggaaatgaagcctatgaaacgatggacattattaatgaacatccagattggcatttccactattatggccacagtgaagcaaaagcgcaacgagcgatggggcatattactatattaaccaaagaaatcgatgaaacactggaagaaattaaagaaacaaagatttggtcgtaa

SEQ ID NO: 360 - DNA, 393 bp, Enterococcus faecalis
  misc_feature (263)..(263): Nucleotide 263 is "n" wherein "n" = any nucleotide.
ggcacaatgattgatcgttatacaagacccgaaatgggcgcaatttggacagataagaaccgctacaaggcatggctagaagttgaaattttggcggatgaagcttgggcagaacttggcgaaattcctaaagaagatgtacaaaaaatccgagaaaatgcatcatttgatgttgcacgtattttagaaattgaagcagaaacacgtcatgatgttgtcgcttttactcgtgcggtttcagaaacgcttggtgaagaacgaanatgggtacactatgggttaacccacacagatgttgtggatactgcctatggttatctaatgaaacaagcgaatgattttttacggaaagatttacaacattttacgggagatggtccgagcccaagctaa

SEQ ID NO: 361 - DNA, 1089 bp, Enterococcus faecalis
aaagaagatcgtttagtcggtcgtatcgtgttaattgtagtttctgtattagttttaatgatggcaatctttgggtttactttttataaatatgtagatgctgggctacagccactagacaagaacaataagaagcttgttcaagtgcatatcccagaaggatcttctaataagcaaattgctgcggttttagaagaaagcaacgtcattaaaagcggaatggtttttaactactacgtaaaatttaaaaacttaacagattttcaagcgggctattatcaaatgtctccaagcatgacactcgatgaaattggtgaaatgctaaaagaaggaggtacgccagaaccaactaaaattgcagatggcaaagtaacgattcctgaaggctacgatatagataaaattggcgaagctattgaaaaaaatacagatttcaagaaagcagatttcattgcattaatgaaaaacgaagacttcttcaatcaaatgaaagctaagtatcctgatttacttgaaagtgctgcaactgcagaaggtgttcgttatcgcttagaaggctatttgttcccggcaacttatgattactacaaaaaagcaacacttcctgaatttgtcgaacaaatgattgctaaaatgaacacagtaatggaacaatatacgccgacaattcatgcaaagaatttaaccaatcagcaagtcttaacgttagcttcattggttgaaaaagaaggagtcaaagaagcagaccgcaaacaaattgcgcaagtattctttaaccgcttggctgccgatatgccaatccaatcagatatttctattttgtatgctctaggagaacacaaagaaactgtaacgtatgctgacttggaagtggactcgtcttataacttgtataaaaatactggttatggaccaggaccattagatagcccaagtgaggagtcaattaaagcagtcttgaatccgacaccaagtgactatttatactttgtagcagatatttctacaggaaaagtctacttctcaaaaacatatgaagaacatcaagtattagtagatcagtatgtcaataattcaagtagtgaataa

SEQ ID NO: 362 - DNA, 1548 bp, Enterococcus faecalis
tatgatacagatggaaaagctgtttctgcagagagtgttttttcagaagcagattataaacaagcaactgcactggagttagcaactttagtaagagaaaaaaaggtgacgagcgaagaattagtaaaaattgcgttggccatcactaaacgtgaaaatcctacattaaatgcggtcattactttacgagaagaagcggctttgacagaagcaaaagctttacaagatacaggtcaaccatttctaggtgtgccgctcttactaaaagggttaggacaatccttgaaaggtgaaagcaacacgaacggttttggttttctccaagatcaagtagctggtgggacatcgacctttgtcaaagcactacaaaatgccggattcataatcattggtcaaacgaattatccagaattaggttggaagaatatttcagattcaaagttatatggcgtttccgtcaatccatggaatcctaaccattattcaggtggttcttcaggcggagcgggtgctagtgtcgccgcggcatttgttcccattgcttctggaagtgatgctggtggctctatccgcatccctgcttcttggacaggcaccgtaggcttgaaaccttctagaggagtaatcattggtaattctaatagtgcaaaaggtcaaactgttcactttggtttaagtcgaaccgtggcggatacaaatgcattatttgaaaccttattaaccaaaaaagatcttcctgcgggacatttaagtcaagcgcaacccattgcttatacaacagaatcccctgccggaacgcctataagtgccgaagcaaaagaggcggtcgctgaagctgttgcttttttaaaagaccaagggtacacattggttgaagtgaagcaccctgttgatggggaacgtctaatgaaaaattattatactgtagctgctggctcagcaggaattgccgattttatggcgcggcagaaattgaaaagaccgcttgaacgaaatgatgtagaactgttaacatgggcgctttttcaaacaggaaaaaatataacgagtgaagagacaactgcggcttggacagatattgctttacaagcacaagcgatggacgaattttatcaacagtatcctatcttattaacaccaacgacggctgccacggcacctagtattgataatccgttactaaaaccagaacatgcagcacagatggaaaaaattgatcaattgtcaccagcagaacaaaaacaattgatttatgaccaatggctgacggcgttcacatatacaccgtttacacaacaagcaaatttatttggacatccagcattaagtgtaccaacttacgtttcaaaagaaggactgcctttggggattcaatttaatagtgcattaaatgaagaccgaacattgctacaattaggtgctttatttgaaaataaccacaagataaatcaaccacatgttgaagaaccagacaaagacaaagaaccagattccagtggccgaaccagactaagaccaagaaccccatgccagtggcgaactggataa

SEQ ID NO: 363 - DNA, 183 bp, Enterococcus faecalis
  misc_feature (13)..(41): Nucleotides 13 & 41 are "n" wherein "n" = any nucleotide.
gaacaagaaacgnaaacaagtgaaggaccaatccaaagaanagatcaaaacccaaaccaaaacccaaacccacacaaatctggaaaaactaacagtgaattcttccctaaaatattcgctgaattcctcccgccaatccggaacccaatctcaccgaaagttctcctgccttttcctgattaa

SEQ ID NO: 364 - DNA, 438 bp, Enterococcus faecalis
catccccgtttggtgaggacaaatgcctatcgcttacacgatgttgctggtgctgaaaactggttgttaaaagctttggaattaggtgagaaaacagatgaaagtcgtttgaccttaagtaatctctacatcacggaagagcgttttgaggaagtaattactatcttaaatgatttagaggaaacggatcatccttatgctgaatggaacttagcaaaagcgtacaacgaattagaagactttgccgtcgctaaagttcattatgaacaagcagcgcaagaattgtctcacgaaccagaatttctaaaagaatacgcattgttcttacgagaagaaggcgaacttgaaaaagcaaaacacttgttataccactatttggaacatgaacctggtgatgtcgacatgcaatctgtgctagcagatatggaagaaagatag

SEQ ID NO: 365 - DNA, 453 bp, Enterococcus faecalis
gaaacgacgatgtttgttagtttatcagaaaagaaaaaatttttaacttggttagtgaataccgcgccttttggaagaagagaagtactgtggattttaaattacttattaacgcacgatgcgattttaaataatgttcattttgttgagaacgtagaaaaaaccgatcgggggattcgtgtggtaccggatggtttaggtaaggagccgttattgctttttatccaagcacaagaatttacagatccggaacaaatttttcacgagattcggatgaattggcggaaagctctttatttagaatgtgtttttccacaggctggggaaacgaaccaatatttttctgttttagaagataaccgtttggggcatggaatggaccaattggatcacgaagtggccccaccgattgatctattttttgagcaagaaaaaaaaccgccgcgaatgggc

SEQ ID NO: 366 - DNA, 447 bp, Enterococcus faecalis
catccttccccgtggtcaagaccgttaatcaaaccagaaacaccttttttctggcgaaatacgcaaattcacggcattcatgaatcagatgttgtcaatgcgcccaaattccctgaagtctggcaacaaattcagcattgttttcaaccaaatcggttagtggtcgctcacaatgcaagttttgattgtagtgttttggctggctgtttagattactatggcttagaacaacctaattacctttctttatgtacagtcaaaacgagtcgcaaactgtttcctgaatttcctaatcataaattaaataccgtttgtgaaaacctcaatatcactttaaataatcatcatgatgctttagaagatagccgagcttgtgccgaaattcttttacagcaagaacaacgatttggggttgaacctttaaaaaaattagtattggtgaaataa

SEQ ID NO: 367 - DNA, 219 bp, Enterococcus faecalis
acctttaaaaaaattagtattggtgaaataatccagttcttgtttccagcgaaggcgttatctctttcagtggctagttggcaggagataacgtcttttcttttacataacttttcccctaaaacaaaaatttttcagaaaggacgcgatgatgtattcgattctttacttattcacagactctctcaaaaatgcgtggcgctcaaaaaaccaatttag

SEQ ID NO: 368 - DNA, 306 bp, Enterococcus faecalis
agcaaaaaaaacgacttactgatcttagctcttttaggtacgacaaaattacaaattttaattaactatgccttacaacccatctattatttgatttttattttgcctttagctgcttttctagccaataagctcattcaacagtttatccatgattttttcagcgaggtacctggtttaatgcatatcgatagctacatgcaaggtatctttttaccactaacaggaagcctattgttcatttgctgttgtgtctttttaattctttttaggaaactcaatcgcctaatcaaaagagagacttga

SEQ ID NO: 369 - DNA, 201 bp, Enterococcus faecalis
aggccaaactgcggcgagtatacgcagcctgcatctactctgtcacttcgtgccaatcgtagtgcttgtcaggatttaactgcgacgaggatcgcaactttggtgagaatcgcaggagcacttttctacgaatgggacaacgttctcttcgctcaccttgtactactcatcatctactctgtcacttcgtgccaatcgtag

SEQ ID NO: 370 - DNA, 858 bp, Enterococcus faecalis
ataatggttttattattaaaaagaaaaagttgccaaacaaaagggcagttaggagaatgcaaaatgaaaaataaacgtttaacgtttgtcgtgtctttattagctatttatttaatcggtgctttttttgtgaatcaaaaagtgacgaattcaaagaaagaaacagttactgtaggggttttgcagtttgtcagtcaccccgcattggatgaaatttataaaggtgtcgaagaaggattaaaggaaaatggctatgacaaaggcaaaaacttagaaattatttttcaaaatggtcaagccgaccagagtaagttagcaatcatgagtcaacaattagtacaaaaaaaggcagacgttttaattggcatcgccacgccagctgcgcaagcgttagccaacactacccaagaaatcccaatcattttaggcgccattacggaccctgttagtgcaggattggtgaaagacaatcaaaagccaggcggtaatatcacgggtgttagtgatcaatctcctttgtcagcccagatggatttactaaaagaattgataccagctgccaaaaaaataggtattctctatgcttcctcagaagaaaattctcgataccaagtagctgaagcgcagaaagcggctgaagccaaaggattgacagtgaaaacatatgctgtgccatcaagtaatgaaattgcacaaacggttcaagtgatgactaaggaaacagatgtgatttatataccaactgataatacgattgctaatgccatgcaaacggtagtcggagaagcaaatcgaaccaagacgccgattattccttcggtggatacaatggtagaccaaggcctcttcaacacggat

SEQ ID NO: 371 - DNA, 879 bp, Enterococcus faecalis
aagaggtgttttttgttggaaattttacaacgacaattattatttaaattagcggtatgccaaggaattggcaatttagggatcttaaaagtgttacaagaagctatcgcacaaaagcgtgttgatttttccagtacagaaattattagaattgctgaaatcaagaaatatcgtgaattatttgaacaatcttggttacaccatacgattcatagtgaagcgttatatatacgacaatgccaacaccaatttatgacaattttagatgccgtctatcctaaattattacgagaaatttataatccaccagcaattcttttttatagaggaaatttacaattgttaagtagaaggaaaattggcatcgtcggcgctcgctatgccacttcgtatgggttaagagtgactgaagctctggttcctaaaatagtcaaagaagggttcacaatcgtcagtggtcttgccaaaggtatcgatagtcgtagccatgagatggccatccagaacgggggtcagacaattggaattttaggcactggattagatgtatattatccgtatgaaaagaaagaattacagcaaactatgaagcagaatcagcttgttttaacagaatatgtgaatgggagtgggccgaaaaaatatcattttcctgcacgtaatcgcattattgctggattatctttaggggtctgcgtgatggaagctcgtaagaatagtggctctttaattactgcacaagcggcgatggattacgggcgcgaggtatttgccgtaccgggaagtattttccagtctttttcaacaggctgccatgaattaattcaggacggcgctaaatgtgttcagacaattgatgatatttgtgcagaattgtga

SEQ ID NO: 372 - DNA, 222 bp, Enterococcus faecalis
  misc_feature (99)..(99): Nucleotide 99 is "n" wherein "n" = any nucleotide.
cattattattccaaaattaaacaagagattcgattaatgggaagattatggaggattattatccttggatatggatttaaaaacaatgcgggttatggnaccaaagaactactcttcgggttagaaaatacgggtgtcacgcccaatcatcgacgtacgtttgccccaataaaagatatgattttaaaaataaaacactttttttacgtattcttattttaa

SEQ ID NO: 373 - DNA, 648 bp, Enterococcus faecalis
gaaaaaatcgaaagcttattaaataaagtagaagaattatgcttttactttaagcacgatgaagcctatgatttgttgaaagactatccagatgatatcgaaagttcaaacagaattttagaaacaaaatttttctattataaaggaattacgagtttattaggtaagaaaaataatagcgaagcattgttctatttacatcgtggttctgaaattagtcgtgatattaatatttataatattttgagtatgaatgcgatcggtattttatatgaattagaagatgatattgaaaaagcaaaagtttattacgataaatctttacaattgctaagcgaattcaaattagattatccattagagcaatgccgtatttattataataccgcaaaattctattcattaattaaagactatgcaaagagtattgaattaagtgataaaggaatcgaaattaatcggacgcacagttctatttactctttagattgcttattatacgaaaaagcgtttaataaacaaatgctaggactagatgctgttgaagattatcgtattgcgtactactttacacgtttctttgaaaataaaaaattacttacttatattgaaaaagatatgcaagagtttaatatcagttttaaataa

SEQ ID NO: 374 - DNA, 555 bp, Enterococcus faecalis
tccctaatagcatctttaggctctctaaaagaggtcgaccgtgcagcgattctgaacgaaacagatacagctctgccaccacaccacgcagaaattgcgaagctaaccaatcgggaacaccgtaccggtgatttagctactgctcttgaaggcgctgatgtctttgttggtgtttcggcaccaggtgttttaaaacctgagtggattcaacagatgaatgagcagccagttatttttgcaatggctaacccagttcctgaaatttttcctgatgaagctttagcggcaggcgcttatattgtcggaactggtcgtagtgactttccgaatcaaattaataatgtgttagccttccctggtatcttccgtggtgccttagatgctcgggcgaaaaagattacgattgaaatgcaaattgccgctgccaaaggtattgcaaaattgattcccgataatgaactcacgccgactaatattattcccgatccattccaagaaggagtcgcaaaagtcgtcgccgaaagcgtccgtaacgctgtcaaagaaacaaattaa

SEQ ID NO: 375 - DNA, 777 bp, Enterococcus faecalis
aaaaggacattacgttcacaaatgacaggagggatcagcatgctgtttttaacctacgatccacaattaaatccaacaggattagagatttacaagtatattagccacaatattgaaaaagttccttatatgacaattcgagaattagcagatgaaattcatttcagtaaaacggcaatctggcgtttttgtcaaaaattcgagtgtgaaggctatacagattttaaatttaaattgaagaattatctaagcgaacgaaaaaaaacagcccaaccaaaatctttagatgaaacaatgctgattcattttttgcaacgctcatcagaagaattattagaaggacggattgttcaagctgcggaattactggcaaaaaaagaatttgttctttttattggcgaaggaacgtccaaagtcctagctgaatttggtgaaatttatttttccagtatctataatttatctgcttctgtatcccaccttttttcccatcccgttagcaaattatccgaagaaacggctaaaaaagtgggtgttatcgccttatcagtttcgggtgaaacacaaaaagttcggcaaaatattgattattttatcgaaatggggattgatgtaattgctattacaaatagtgaaaaaagcacgattgctcaactttcaacagtcacgatcccctactatataacaaccgagaaaagttccattgcagacgtaacgtcccaactacctgcactattcttaatagaaaagttggcgaaaactgtttccacgatgtga

SEQ ID NO: 376 - DNA, 765 bp, Enterococcus faecalis
aaattcatgaaacagaagagagagtggggaaaaatgagcaataaaaaattaattatcaacgctgatgattttggttacacgccagcggtaacgcaaggaatcattgaagcacacaaacgtggcgtggttacttcaacaactgcattaccaacttctccttattttttagaggccatggagagtgctcgaatcagtgcaccgactttagctatcggtgtccatttaacattgacattgaaccaagcaaaacctattttacctcgagaaatggtcccttccttagtagatgaagctggttatttttggcatcaatcgatttttgaagaaaaagtcaatttagaagaggtttataacgaatgggatgctcaaattatttcatttatgaaaagtggcagacgccctgatcatattgattctcatcataatgttcacggaaaaaataaaaagttattgggcgtagctttggcacttgctcgcaaatatcaattacctttacgtaacgcctcaagaagtattgaaacaaaagactatttagagttatatcaggatgttcgcacgccagatgaaatgttgtaccaattttatgacaaggcgatttcaactgaaaccatcttgcaattgcttgatatggttgtttgtagtgaaggagaggtctttgaaatcaattgtcatcctgcgtttatcgatactattttacaaaatcaatcagggtattgtatgcctcgaattcgtgaagtggaaatattaacgtctcaagaagtctaa

SEQ ID NO: 377 - DNA, 237 bp, Enterococcus faecalis
aggagtttttcgatgttatttagtattaaaaaaagcgaatggttaggcaatgaacgaaatgatctctttgccggtctcgtttcttctgtcgccattttaccagaagtaatcgggtttgcgattattgctggtgttcacccgctttctgcagtgtttgcttcagctgttactttacttgtgattactttccacgggccgccgtccggcaatgggtccaggtgcctcttcaccacgatt

SEQ ID NO: 378 - DNA, 966 bp, Enterococcus faecalis
cagtttccttgtccctgccctaagcaagtatcttccatttggttacgtagcttaggcgccgctacgatagctattttactaggaatctttttgggaaatacctttgttcgcggtgccaatttaaatcgcggaaccaaagtagccgaaagtaaattactagaattttctgttgttttattgggaaccaccgtgacctttcaaacgattgcccaaattggcttacaaggtgtcgcatttattctcattcaaatgtcgctgaccattatttttgcctatttgatcggtaaaaaactggctttttctgataatatgtctttattgatggctggtggtaatgccgtttgtgggtcttctgctattgcttcgattgctccagcaattcaagcagatgaggaagaaaaaggccaaatcattactttagtaaacttattaggaaccgttttaatgttgaccttacccattttaagtgggattctctatggtaccaatttgttggctcgtagcgcactaatcggagggactttacaatcagttggtcaggttgtcgccagtgccaatatggtcaatgagaacgcagttcaacttgcgatgctctttaaaattatgcggattgtcctactcgtagcagttgtctatttatttggacgtttcaagcaaagtaagacggcagaatcagaggctgagttggtagaagtcaccaaaaaaagcagcgccctaccttggtatgtagttggctttttcattgcctgtgtctttaatagtttgattcatttccccgtcgtgatcagtgagactgctcatttctttagttcttggtttgaaattactgccttggcagcaatcgggttacgactcgattttaaaaagtttttccaagaaggcaaacgtttcttaatctatggtttatcagtaggaactgttcaagtcgtcctagccattttgttgttggcactgctacagttctaa

SEQ ID NO: 379 - DNA, 375 bp, Enterococcus faecalis
ggtttgcctctccgtaattacaaggtaaacgattccttcctgtgggaaattttgaccattgttaaacaggacgctaatctcttcaatttgaatggtgagaccgctgttggaaatatggcggtagggttgggaagttattgttcaacacattggaagtctttaaaattaaactggatctttgaaaacttctatataaaattatttactattattctcaatgtaaaaattcgtatactgagttatgaacagaagggagtttttttcatgaaaagtcagaaaagattatatcaatcttattccaaattgttccggcttgctaacagtttccttgtccctgccctaagcaagtatcttccatttggttacgtagcttag

SEQ ID NO: 380 - DNA, 240 bp, Enterococcus faecalis
  misc_feature (164)..(203): Nucleotides 164 & 203 are "n" wherein "n" = any nucleotide.
acaataacttcccaaccctaccgccatatttccaacagcggtctcaccattcaaattgaagagattagcgtcctgtttaacaatggtcaaaatttcccacaggaaggaatcgtttaccttgtaattacggagaggcaaaccttaccgctcccggcgaaaccaanaaacgcgatgggtcctaatcgcgtttatttgccccgagnctttcacaccttgccatattggttaataaaacaaaaa

SEQ ID NO: 381 - DNA, 1200 bp, Enterococcus faecalis
aggccgcaattaattgatgagcgagaaaaagaagtagaaaacttaattaatcagcaacatcaagaattagaacgaattgcttccctttcaaaagaagaagcaaaatcgattattatgaagtcaacagaagaagagttgaatcatgaactaaccttgatggtcaaggagtcagaacaacgtgccaaagaagaatctgatcgcaaagcgaagaacttgctttccctagcaattcaacgttgcgccgccgattctgtttctgaaacaactgtttccgtggtcactttaccaaatgatgagatgaaaggtcgcattattggtcgtgaaggacgtaatattcgtacattggaaacattaacagggattgacttaatcattgatgatacgccagaagcggttgtgttatccggatttgatccaatcagacgagaaatcgctcgaatgaccttggaaaaattaatccaagatggtcggattcatcccgctcgtatcgaagaaatggtagaaaaatcacgtaaagaaatggatgaacggattcgtgaatacggagaacaagcagcctttgaagtaggtgctcatacgttacatcctgatttaattaaaattttaggccgtttacgtttcagaacaagttatggtcaaaatgtcttgaaccattcaatcgaagtagcaaaactagctggcgttttagccgccgaattaggcgaagatgttcaattagccaaacgtgcaggtttactacatgatattgggaaagcattggatcatgaaattgaaggttctcacgttgagattggcgcagaattagctgcgaaatataaagaaaattcagtagttattaatgccattgcctcgcatcatggtgatgtggaagcaacctcagttatttctgttttagtggcagccgcagatgcgttatctgcagcccgtccaggtgcacgtagtgaatcgttagaaaactacattcgccgcttagaaaacttagaaaatatttctaatagttttgaaggcgttgattcaagttttgctgttcaagcaggacgtgaagttcgtgtcatggtgaaaccagaagaaatttctgatttagaatctgttcgtttagttcgagacattcggaagaaaattgaagatgacttggattatccaggacatatcaaagtaacggttatccgtgaaacacgtgccgtagactatgcgaaataa

SEQ ID NO: 382 - DNA, 876 bp, Enterococcus faecalis
caagagatgtataaaatgggagagaagaaaatggaggtaacagaaaaaatgactgaatttcaattagaaaaagctgcgacattaaaaacaattgccattcgtgcgaaaaaagttggcgaaatggtcgacttttataaaaaagtaatgggttttgttttaaagtcagaagaaaataacctgtctatctggggtacacgtgaagcaggaacgcaattattaattttagaagaaactagaaaagccgaagattttcataatgaagaaaagcaaatggcttatttctcaattaaagttcctacggaaaaagaatttttacaaattgctcaacgagtgcttgagcaagactacccaattgatgaaagtttccaaattggcacacgacaaagcatgttcattactgatcttgaaggtaatcaatttgagatttttcacgatgaagcaacagcaaattcgacttctgaaaagcaaccaattgtgcttaaagatcttatcagtgaggacttagagccacatcaagggttagccgctgggtcatatttagcgcatgtgcaattaaaaacaaacaatcaaaaagaaataaaagcatactatgaggaagttctgggtttaaaacgcaatgaaaaagatcaatttgttttagaagatggcaaagcaactattggattccaaaaacctgaaacaagtgaagtggatcaattacctgatccacacttaggtttagatttctttaccattaagctctctgatcaagaacatattttagcaatggagcaacaattaacggcaaaaaatcaagagttctttattgaccagaaaaaagcgattgtcactgtgtttgatccaattggcttggaatggtggtttgtcttaaaataa

SEQ ID NO: 383 - DNA, 477 bp, Enterococcus faecalis
acttttcctttaatattaaaaatagaaggtgaaaaaatgtacgaaaaaacaaagtggaaaattcaaaaaatgatgaaaaaaggtgttttttcgggggctagtttttgtttcattgaaggtgaaaaagaggagagcaattgttggggactggcacaagtaaaacccaccaaagaacaattaacctcggccatgctgtttgatgtggcttctttaaccaaagtagtcggcaccaccaccgttattttgcaattagtggaagaaggaaaaattattttagatcaatcattacaaacttattatccctcttttcaagattctaatattacaatccggcatttgttgacacatacggcagatttacaaggctatattcctaatcgtgatcagctgaatgcccaagaattaaaagacgcctacaatcattcatttcacgcagtcaaagcaagacgtaaaaagccggtattcaccactagttgg

SEQ ID NO: 384 - DNA, 684 bp, Enterococcus faecalis
ttccgtggtgaaggcggtctgactatttttattaaaaatagtacgtatcaagcaaccgattcagccttaaaaataagccaaagtgccacgcaagaaaaaaactatgattattatacaaacgggcaaaaaaatgatacagcactgattttttatccaggtgcattggttgcgcccgctagttatagtgaatgggcgcaagaagttgctacgaaaggttatgatgtctatgttgttcattttcctttgaatttagcggttcttgcaccaaatgctgcagaacaaattataaaggatcatccacaacaaaacttcgttttggctggacattctctgggtggtgtgatggctagccgttttgtagcggaaaatgagcaacgaatcaaaggcatgatttatttagctagctatcctgacgaaaaaggtgcactaaacaagaaaaatctgccggttctgtcaataacagccacaaacgatggtgttttaaattggactagctaccaaaaagccaaacagtttttgccaaaagatacgcagtatgtatctatcgaaggtgggaatcatgcagggtttggtaattacggtgtccaaaaaggagatagcaaagcgacaatttctaatgagcaacagcaaacagaaatcagtcaattgattgtagcatggctacaatcacgccccaataaataa

SEQ ID NO: 385 - DNA, 477 bp, Enterococcus faecalis
ccacaactaaaattttttgttgttctttggtgcccttcccgtgtgcccaataagaaccacgttctgattttcaaaacggctcaggaagctttaacacttggttttcgtccatgtaaaagatgtcaaccaaccgggcaagtcgttcctaacgaggaatgggttgttcaaattaagcaatttattgatcggcattcagcggaaccattaagtttagactatttagcgcaagcctgccacggtagtccctttcatttgcagcgaacctttaaggaacagacaaaacaaaccccgtcagcttatttaacaagtgtccgaattaggcaagcccaagaattgcttctccattcaccccttacgattcaacaaatcgcgaaaaaagttggcttccaaaccgcagcatattttgccaccacttttaaaaaagaaacaggcgtaaccccctctgtttatcgcagtaaaaatgagccgaaaaaataa

SEQ ID NO: 386 - DNA, 1200 bp, Enterococcus faecalis
atccccgtggtgaggcacatggatatcgtggaacaagaaaccgagcaaacccatgcttcctctgaaaacgatgaacctatggcacctacgccagctagtgtttctgttggtaatagcaccttaaaaagtaccttaagcacgggaacgtataaccaagatattatcacactttcgtatgaatacagtgtgacacttatcggcttagcaattaatgatcgaccgattattgctattcaacttcctacagaaatttcaagccagttagataacgacactctaaagcaacaagattttctgactcttttaacagggactgtcagttatccaggaacagccactcaagatattcacagttcaactaacggcgtcagcctctcttatagtagcacttatcattctgtttatctgacttttccaagtagcaccttggtgttacttcccggaaccaaatggtctgccgccatttcgtttgatgtgggcgcactttataaacgaggaatttcaatccctcctgctcttaacggcaaagactatccgattcgaggaacctttacagatgtcggcactggattaggcgcaattaatattatcattgggaataatacaaaaacaggcataattagcaaagctcaacttagtttaggtaattatcccgttcctcaagtcacaccagccaaactaactcaaccaaatcatctggacactactgtaacagggaccattcaacaagtacaagacccaaactataactactctgttcaattaaccttgaaccgccatgatggcaccactacccccattgtggtgaaagggatttctgtcgatgcagccggaaatttctcgacatcgttagcttcaccattagaatatggcgacacgctctctacaattgtctttgctcgttcaaaaacgtcaaccgactatattcaaagcagcccctcagctgaccaaagtgtcaattggtcaatccaaccagtcacaaacgtagtcgccaatgccggctcaactcaactttcaggtaaagattctcaagtatctaacggaacctatcaagttaaagtacaaataaatggtggttctatttccacaacgtccttagattccaatggccattttcaatttgctaatttacccactttccaagggggagaaacggtcagcttgtgggtccaaggtctcagcaatcgcactggcctgcct

SEQ ID NO: 387 - DNA, 336 bp, Enterococcus faecalis
tcatcaacgccagaatcatcgacaggcgaatcatcaacaccaggaactggctctggtcgtgtgcttcagatggaatcaactgcttattcttggcgcgaagctggtgcaagtaatctaagtgctactggtattgacttaagtaaagaaagcaatgtagttgcagtcgatccaagtgtaattcctctaggttcattagtgaaagtctctggttatggctttgctattgctggggatacaggtggcgctattcaaggcaatattattgatgttcattttgattcagtagaccaatgccgtctttggggacgacgtcaggttacagtagaaattcaataa

SEQ ID NO: 388 - DNA, 504 bp, Enterococcus faecalis
aggagaattacaatgattcgctcagcaacaaaagaagacggtcaagcgattgctcggctggtcttagttattttaaaagatatggagttaccaattttagaagaagtctcagaagaacaaatgattgacctgttagcagaggcaacggcgtatccaacctatcgctatggctatcaacgaattttagtttatgaacatgcaggtgaagttgcagggattgctgtcggctatcctgcagaagatgaaaagattattgatgaacctttaagagaagtctttaaaaaacatggcttagcagaagatgttcggctatttattgaagaagaaaccttgcctaatgaatggtatttagacacgatctctgtggatgaacgtttccgtggaatgggaattggttctaagttattagatgctttacctgaagtagccaaagctagcgggaagcaagccttgggtctaaatgttgattttgacaatccaggggcgagaaagttatacgcaagc

SEQ ID NO: 389 - DNA, 1347 bp, Enterococcus faecalis
cagtggtgggatgaaaaaaatcttaagacgatggacttaatttttctaggaattggggctgtagtaggaacagggatttttgttgtgacaggtgtcgcagcggaacgctatgcaggtccagggctcgtcttatcatttctggtagcagcagccgcgattattttatctggtttatgctatgcagaatttgcatcacgtattccggtcattggtgggccgtatgcctacatgtatgtggtctttggagaaattgtggcttggatgactggttggatgattatttgtgagtttttcttggcggtttcatccgttgcttcaggttggtcaggctatgtccatggctttttggatagcttaggtttttctttgccgcaagcgttaagtggcgcttataatccaacaaatggtacatatattgatttgattgccatgttggtcgttgtagccgtaactttttgggtatctttagaagcgaaaacagcgttacgtttaaataacttaatggttttcgtgaagtttgggattattttattatttgttctcgtgggaatcttttatgtgaaaccaacgaactggcaaccatttattccttatggtttttcaggcgttttcagtggtgctgctttagttttctttgcctttctagggtttgatgcggtcagcatggccgcggaggaagtgaataatccgaaaaaagatattccaaaagggattattggttccattattatttcaacattgttatatattgttgttacgttagttttaactgggattgttccatttacggatttaggggtcaaggatccggtggcttttgcgatgcgcttcattaatcatggcgcaattgcgacaatcatttcagttggtgctattttaaccttattaacagtgacgattgcgatgatgtacagtttagcccgtgtgatttatgcgattagtaaagatggattattgccgcagtttatgagcaaaatcgatgagaagcggcacacacctaaaaatgcaacctatgtagctggatttttagcaatggtttttgctgggattgttccaatggagatgttggctgaacttacaaatatcgtgacactcttttatctgatgtttctcgctttaggaattatcaaattacggacaatgaaaggagaaccgcaagcaggtgaatttaaagtaccacttgtgccggttctaccattaatttcaatcgtggtttgcgccgctctgatgttccaattgtctttagctacttggcaagtatttggcgtagccgtagtgattggtttggctatttatttcttttatggacgtcaccatagtatcgttcgtttcgagacaaaagaataa

SEQ ID NO: 390 - DNA, 240 bp, Enterococcus faecalis
  misc_feature (231)..(231): Nucleotide 231 is "n" wherein "n" = any nucleotide.
gggtttaggaaaatgactaaaggaggttttttctgtatgtcacagaaagaaacattttatattaccaccccaatttattacccaagtgggaagttacatattgggaattcatatacaacaatcgcctgcgatgcaatggcccgttacaagcgtttaatgggttttgatgtattttatttaacaggtgtggatgaacaccgcccaaaaattgaaaaaaaaactgctgagttngaatgtgac

SEQ ID NO: 391 - DNA, 1452 bp, Enterococcus faecalis
gtgggattaccgtggggcaaggtcttattactagtaatcgtgattagtgctgcggtgctatacttaattggttattttatgcgcaaaaaaaatcaagaacaattagatgaattagaagttcgtaaagaagccctgtttgacttgccagtctttgaagaaatcgatgacattaaaaaaatgcatctagttggacagagtcaaaatagtttccgtgaatggaatcaacgttgggtagaactatcgacgcgttctttcgccgaactagagagtcaaatttatgaagtcgaaaatcaaaatgaaattttccgtttcatgaaagcgaagaaagcggtcgtggaagcgaatgaaacgatgaccgaaatggaagccgaagtggaagtcattcgtaatggcttgaaagaattacgtgaaagtgaagagcgcaattcattagaagttcaaaaagctttggatgtctatgaagaattaagtaaatcactaaaagatgataaagctagctttggtccagcttactccgaaatccaaaaacaattaagaaacgtcgaaattgaattcacacaatttgtcacactaaatacatcgggggacccaatcgaggctcgagaagtcctagaagatgcagaacgtcatacgtatgaattggaagacttaatgaaacggattccaccaatgtatgaagaattaaatgaaactttcccagatcaattaaaagaaatcgaagaaggctacaaccaattattagctgacgattatgtgttccctgaacaaaactttgctgaagaaattcaacatgcgaaaaaacgtgtcgagaattcaatggctgatttagagaaaacagagattgctgcagtagaggtcgcaaatcgcgacacagcaacggcgattgatgcattatatgaagtgatggaacgtgaaattgaagcgaagaaatatgtcgtgaccaatcaaaaaattattgacgattatatttctcattccttaaaaaataaccgtcaattaatgattgaattggaccatgtatcacaaagctacaccttaaacaacaacgagctaggacgtagtcgtggcttccaaacggaaattgaagaaattatccgccgtcaaaaagacttggaacctcgaatgaaagaacataccgttccttactctgaaattcaagcgttctataaagaatgctataagattttagatgatattgaaaatcaacaattagaaattgatgcttcattgaaagaactaagaaaaggcgaaaaggtcgcccaagaaaaagtcgacgaatacgaattccgtttacggagtatcaaacgatatgttgaaaagcaacgattaccaggtttgtctgctgattacttagaatttttctatgtggcaacggatcgaattgaagatttaagccgagccttaaataaaatgcgcattaacatggatgaaatcaatcgtttgtgtgactga

SEQ ID NO: 392 - DNA, 405 bp, Enterococcus faecalis
  misc_feature (297)..(297): Nucleotide 297 is "n" wherein "n" = any nucleotide.
acaactacagaattagtctatgccgcagctctgaacgaaccaatgatgccatatgcaaaccgctatcgtcattctcacgagaacatccgaacgggtttagaatataacatgtttttaatctcgaccgaattccggtgggcagatgcatttatgaaattggaaccggattggaaaccgtgtaaacacaggcgttccatccaatccaaaaatttatttttaaaaggctctcaaccccatttatcccccatttttttttcacgctccttaaccaagggtggtctaagaaaaacactctgntttatggcgtggggggtaatgaaatttatctttaaaagttataaggggagagatattggggaaaaaggtgggggggtatattttgaaaaaaggggccccacccaataa

SEQ ID NO: 393 - DNA, 603 bp, Enterococcus faecalis
ggactacttatgaatggaattccaacagttattgaacaatcatctcgcggtgaacgtgcttatgacatttactctcgtttattaaaagaccgcatcattatgctaagcggccctatcgatgataacgtggcaaactcagtgattgcacagttattattcttagatgcccaagattcagaaaaagacatttacttgtacattaactctcctggtggcagcgtttctgcaggcttagcgattttcgataccatgaatttcgttaaagcggatgtccaaacgatcgtattaggaatggcagcttcaatgggtagcttcttattaacagctggtcaaaaaggcaaacgtttcgctttaccaaatgcggaaatcatgattcaccaaccacttggtggcgctcaagggcaagcaacagaaattgaaattgctgctcgtcacattttagacactcgtcaacgtttaaattcaattttagctgaacgaactggccaaccaattgaagtgattgaacgtgataccgatcgtgataactatatgactgctgaacaagcaaaagaatatggtttaatcgatgaagtaatggaaaatagtagcgccttaaattaa

SEQ ID NO: 394 - DNA, 543 bp, Enterococcus faecalis
aggtttgaaaggatgaggttttttatggatatttcagtaattgatgcaacaaaagttaacacagaaacagggcttcacattggtgagagtaatgcccctgtcaaaatgatagaatttatcaatgttcgctgtccttattgcagaaaatggtttgaagagtctgaggaactgttagcacaatctgtcaaaagtggtaaagttgaacgtatcattaagttgtttgataaagaaaaagaaagtttacaacgcggcaatgtgatgcatcactacattgactattcagcgcctgaacaagcgctgtcagcattgcataaaatgtttgctacgcaagatgaatggggaaacttaaccttagaagaagtagcgacgtatgctgaaaaaaatctgggcttaaaagaacaaaaagatgcaacgcttgtttccgcagtgattgctgaagccaatgcggcgcacattcaatttgtaccaacgatcatcattggtgagtatatctttgacgaaagtgtcactgaagaagaattacgcggatacattgaaaaataa

SEQ ID NO: 395 - DNA, 585 bp, Enterococcus faecalis
aaaatggaaaaattagtcgaacgatttttaacttacgtgaaagttaacacccgttcagatgccaacagtcaaaccacaccgacgacggtcggtcaagtggttttagccaaaatgattgaaacagaacttcatgaattaggcttggccgatgtgcattataacgaacaaaacggctttttaacggcacggttgcctggtaaccaacctgcagcgaagagtatcggcttgattgcacatctggatacggcggatttttcagcagaaaacatccgtccccaagtcatcactaattatgatggtcaagatgtcctcttgaatcaagaacaaggcatcgttttatcagttgctgaatttcccaatttaaaagagtatcaaggggaaacgttgattactacagacggaaccacacttttaggagcagatgacaaagcgggaattgtcgagatattagctgctgttgagtattttttggcacatccagaagtagcgcggggggatgtttggctcgccttcggtccagatgaagagattggacgcggggccgatcaatttgatgcgccgaacttcccagtcccttttacgtag

SEQ ID NO: 396 - DNA, 546 bp, Enterococcus faecalis
agttcaaaaaagttcaaagctgaatggacgaaagcccaagcggatgtcggtaaaaaagtgaaactttcattgctggcggcagacacagatcaaggaaaacgaattgctgaatatgttcaaagtcagttgcaagaaaatctgccaggtttagaaattaccatttcatcgcaaccaagtaataatgtgaaccaatcgcgacgtgaaaaaaattatgagttgtctctttcaggatggattgccggcagtagtgaattagactcttactttaacttatatgcaggagaatcaagttacaattacggcaattatcataatgccaaatacgaccaattggtagaagaggcacgaacgattaatgccaataatccagagaaacagtttgcagaatacaaagaagcggaagacatcttgttgaaccaagatgctgcccaagtaccgctgtatcaaagtgcctcaaattatctaatcaatcctaaattgaaaggcattagttatcacttgtatggggattatttccacttgcgcaatgcctatttaacagaatga

SEQ ID NO: 397 - DNA, 1758 bp, Enterococcus faecalis
  misc_feature (1743)..(1743): Nucleotide 1743 is "n" wherein "n" = any nucleotide.
ttggtggcacaatttggtagctatttaattgccaccttgctactgttagcgggtattttcttgatgagtatgtgggattttcagcaaattgttgatcatttccaaagtattcaagatcgcctaagtcatgtttcggcaaaatcacaggcgcgacaagaagaaaaagaggcgaagcgagcagcgaagaaagaagccaaagctgcagaacgccaagcaaaaattgaagccgctgcccaacaaaaattacaagatcgggaacgcatggaacaagcggcagccgagcgcttaacaaaaacacctgttgaaacccaccaaccaatggtggaagaaccggccgcaccaacgcctgttcaaattgattcgtttcaacagcaaaatcaggcgatgcctgtaccaccaattgcagcaacaaaaccgcaacgagagcaggaagaagaggcggcagatgaagctggtgttctcgaatttgaaatttctgaagaagcggaagatcgtgattatcaactaccaccaactgatttgttagatacaattcaagcaacggatcaaagtggtgaatatgaaaaaatcgaaaaaaatattggcgtcttagaacaaaccttcaagagttttggtgttgatgctaaagtagtcaaagctagtttaggaccatctgtcacaaaatttgaagttcaacccgctgttggggtaaaagttagcaaaattgttaacttgacggatgacattgctttagcgcttgcggccaaagacgttcgtatggaggctccgattcctgggaaatcactaatcgggattgaagttcctaatagtgcaattagtacagtatcctttagagatattgttgaggcacaaccaagtcatccagataaactattagaagtacctttaggtcgagatatttcagggatggttcaaactgcagatctatcaaaaatgccgcatttattaattgcgggatcgacagggagtgggaaatcggttgctatcaatggcatcatcacaggtattttgatgcaagcgaaacctcatgaagtaaaattaatgatgattgacccgaaaatggtagaattgaatgtgtataacgggattcctcatttattaacgccagtggttactaatccgagaaaagcggcccaagccctgcaaaaagtagttcaagaaatggaatttcgttatgaaaaatttgcagcaacaggcgtccgaaatatcactggttacaatcaactaattcaacagaaaaatgcggaagatggcgaaaatcgtccaattctaccatttattgttgtcattgttgatgagttagctgatttaatgatggtggcaagtaacgaagtagaagatgcgattatccgtttagcccaaatggcacgggcagcaggtattcatatgattttagcgacacaacggccaagtgtggatgtcattacaggaatcatcaaagcaaatgtcccttctcgaatggcttttgcggtctcaagtgggacagactcgcgtaccattattgataccaacggggcggagaaactattaggtcgaggcgatatgctcttcttaccaatgggagaaaataaaccaattcgtatccaaggggcctttatctctgatcaagaagtcgaacgagtggttgcgtttgttacggatcaacaagaaactgaatatcgagaaagcatgatgcccacagatgaaccgaccacttcaggcggtggcgaagctcctcaagatgagttgtttgaagaagcgaanaacttggtggtttga

SEQ ID NO: 398 - DNA, 774 bp, Enterococcus faecalis
ggctcattggaccagtaccgcactggtgattttactttgattagacgaacattcgttaaagacgaagataaactggtgcaagcgttagaagatgccaaaaaagcagaggccatggtactgcatactatcattaatgatcatctcgtggcgattgctaatcaatttttcaatgagcatcaattgttccattttgacattttgacaccaccagttgcggaaatcgaacgattaacaggtgtcgcgcccatgcgggaaccaggtgccttacatcatctgaatgaaaattattttaaacgaattgaagcaatggaatttgctgtcaaatatgacgatggcaaggacccacgaggctttttagaagcggatgtgttacttcttggcgtttcccgaacttctaaaacaccgctaagtctctttttagccaacaagaacttaaaagttgctaatttgccactaattcctgaagcacatttaccgaaacaattattcgaaatggaccctaaaaaaattgttggcttaaccaatgatcccaatgttttaaacgggattcgtaaagaacgaatgcgcgcatatggattgcctgaaaatacttcttattcagatattgaaaaaattcggcgagaactggcttttgctaatgatctttatcaaaaattaggttgtatcgttattgatgtcgcttctctttcaattgaagaaactgcctcaatgattcttaatgctttgaacttagaagatcatagttattattccacggaaacatccgaggattaa

SEQ ID NO: 399 - DNA, 816 bp, Enterococcus faecalis
  misc_feature (32)..(32): Nucleotide 32 is "n" wherein "n" = any nucleotide.
gtgacgttgaagaaatggggcccggttttttnttttgcacttacgaaaaggagtcgcaacactatgaaaataagagtacctgccactagtgccaacttaggacctggctttgattcatgtggcattgcattatccgcttatttaacaatcaacgttttaggtgaaagtgaattttgggaaattcaacatactctgggagaagagatttctactaatgaagagaatttattaattcaaacggcattgaaaattgcaccagaattaacaccaaaagttattcggatggtttctgacattccccttgcaagaggactaggcagtagctcaagtgtgattgtagcaggcattgaattagctaaccgactagcacatttaaatttgtcccctaaagaaaaagtccgtttggccacagagatggaaggacatccggataatgtggccccagctattttaggagatttcgtggtggctagccatgtagaaaaccaagtctaccatgtcaaacatcactttccaatgtgtgatgtcattgcatttattccagaggaaccattatttaccgaaaaaagtcgcgctgttttgcccgaaaaattggcttataaagaagcggtcgcggccagctcaattgccaatgttatgattgccgcaattttaaacggggatttacctttagcaggcaaaatgatggaacaagataaatggcatgaaacgtatcgtcgttcattggttcctcacttaaaagaaattcgtcgtttaactcaggcaaaaaggtgcttatggttctttcttaagcgggggctggtccaactgtgctaa

SEQ ID NO: 400 - DNA, 351 bp, Enterococcus faecalis
  misc_feature (294)..(294): Nucleotide 294 is "n" wherein "n" = any nucleotide.
cagaccaggcacgggagaattccggggtgttcattgagcccggaacaattcaagaaatttaaccggcttaccggaaaatttgtggttcaagatgggtttttcattgaaccttgtttggttgtttcattaagttggaattatttcaacattttaaagcggttaaaatcaaaggcaggtgaaaccttcgtggcattctttactggtaacggactgaaagatcctgatacagcaatggagacagaagtagctatttcaaaaatgagtgacgttgaagaaatggggcccggttttttnttttgcacttacgaaaaggagtcgcaacactatgaaaataagagtacctgccactag

SEQ ID NO: 401 - DNA, 324 bp, Enterococcus faecalis
agctgttccactaagccaatcattggtgccactagtatggaacagctacaacattttcgttttaacaaagcttttttaggaactaacggcgcacatttagagtttggtttaacgacgcctgatcccgaagaagcagcgctaaaagccttggctattcatcaagcagaaacagcctatgttttactggatcatacaaaatttaatgaagtaacgtttaccaaagtggaagaattagagtcagttactttactaactgactactgccctgctgaatcgcttcaaggattccagcaaaaaactattttaatggaggcaaacaaatga

SEQ ID NO: 402 - DNA, 966 bp, Enterococcus faecalis
atcgcttcaaggattccagcaaaaaactattttaatggaggcaaacaaatgatttacacagtgactttaaacccttctatcgactttatcgttcatgtcgatcatctacaaattggtgatttaaatcggatgacgaatgattttaaattacctggcggcaaaggaatcaacgtttcacgtattttaaaacgtatggagacagaatccactgccttaggttttttaggtggttttacaggctcattcattgctgattggttgaaaaaagaagaaatccaaacgaatttcactcccgtgtctgctgatacacgaatcaacattaaattgaaatcagatactgaaacagaaattaacggcttaggacctgctctaacaaacgaagaaattcaagaactaaaacaagcagttagtcgtgttcaggctggtgatattgttgttctttcaggaagtacacctgcttctctacgcaaaggattttacgaagaattaatccaaattgtgaaggaaaaaggcgcagaatttgttattgatacgacaggtgaagatttaatgaacgctttgtcacaaaagcctttattggtcaagccaaataatcatgagttggcagaattatatcatacaacctttacaagtattgaagatattttaccttatggacatcggttactagaagaaggagcacaacacgtaattatctcaatggctggtgatggtgcattacttttcacaacagaaggtgtttatcgttccaacgttttaaaacgtccactgaaaaattctgtcggcgctggcgactcaatgattgctggttttattggcaacttttcaaaaacacaagatcctttagaggctttcaaatggggtgtcgcttgcggtagcgcgaccgcattttctgatgatttagcctcagaagattttatccaagaacttattcacgaagtaacaattgaaaaaatgtcagaataa

SEQ ID NO: 403 - DNA, 1791 bp, Enterococcus faecalis
gacggctcgatccttaggaacatccgtactagacccttagataaagaaaatctacgtttacaagaatcattaacaagcattggcaacggctatatggggatgcggggaaattttgaagaacactattctggcgaccaccatcaaggaacctatttagcaggtgtttggtatccagacaaaacacgtgttggttggtggaaaaatggttatcctgaatattttggtaaagtgattaacgcaattaatttcatcgcaatggacttacaaattgatggacaaacaattgatttagccactacaccttacgaagatttttctttagaattagacatgcaaaacggggttctttctcggcaattcaccatccaaacaccgaagaataaagtgcgcttctcttttgaacgttttttaagcttagaaaaaaaagaggcagcttacatccacttaacaattgaaatgctggaaggtacaggcacaatcactcttcactcaaaattggatggcgatgttcaaaatgaagacagcaattatgaagaacatttttgggaagaaagagctattgaaacacaagaaacacttggctttgttacgactaagaccattcctaacaactttgaaatagagcgttttacagtgactgcaggcatgcgccatttcatcgatggagcctctgttgtgcctacatatacacaacagcccttggctttaaccgcagaattgacagtgtctttaaacgaaggcgaaacgaccgccatcacaaaagaagtgcttgtcgttaccagtcgtgatgtgccagaaacgcaacaaatcacacgagtaaacgaattatttgcagaaatgactaccttgtaccctgaagcaaaagctgggcaagctgccgcttgggcaaaacgttggcaattagctgatgttgttattgaaggagatgacgaagcccaacaaggcattcgttttaatctgttccaacttttctcaacctactatggagaagacgatcgtttaaacatcggaccaaaaggctttacgggcgaaaaatatggaggtgccacatattgggatacagaagcatatgctgtcccactttacttggcgttggctaagcccgaagttactaaaaatctactgaaatatcgccacaatcaattgcctcaagccattcataatgcccaacaacaagggttaaagggtgcgctttacccaatggttacttttactggtgtcgaatgtcataatgagtgggaaatcacttttgaagagattcacagaaatggtgcgattgcttatgcgatttataattatgtcaactatacaggagacgaagattatctaaaagatgctggtctagaagtacttgtaacaatcgctcgtttttgggcagatcgggtccacttttcccaacgtcacaaacaatatatgattcatggcgtaacggggccaaatgaatatgaaaataatatcaataataactggtataccaataccatcgctgcgtgggttctacgttacacccgtgagtcttatttaaaattccaagaagaaacaacgctcaaaattgcagacgacgaattagctaaatgggcagacattgtagaaaatatgtacttcccagtggataacgaattaggcatttttgttcaacatgacactttcttagataaagatttaatgcctgtttctgatttaccacttagtgagctgcctttaaatcaacattggtcatgggataaaattttacggtcttgtttcattaaacaagccgatgttcttcaaggaatttatttctttcaatga

SEQ ID NO: 404 - DNA, 321 bp, Enterococcus faecalis
aaagtaggtgaatcaatgattgaactgaaaacaacagatttgcaccgtaatacatgtcaactgaccttgtttaatcgacaaaggtttaaattgtacaacggcacaacagaacgtattgtatatgatttttcaggaagaaatctgttgatcaatcctgtgagttttgatacggagcaagacatggaacgtttctttcgactagtaaaactgatttattttgatggaaaagtagtcggttatcgtggctgctcggaacttccgttaaaacttgaatgtagagcgttccaaaaaatggataggcaagtgcccaccacggggatg

SEQ ID NO: 405 - DNA, 183 bp, Enterococcus faecalis
attattccacaagcgagtcattttaaaaaaaatgagaatgcttgttacttggttttttattttttcaacaatttaacagacaacaaaaaaagcggggaacatatacatgaactgtatacattccccgctgctccaacatttatacaactaataaaaacaattcactgtaaaaacttttcctag

SEQ ID NO: 406 - DNA, 1734 bp, Enterococcus faecalis
aaggatacaataaaaggggcaggttttttaatggaatggattgaaattaagcacgcaacacaaaataatttgaagaatatctctgtcaatatccctaaaaagcaactaactgttgttactggactttcgggttcaggaaagtcctccttactatttgacacattagccgctgaatcacgtcgtgaactaaatgatacatttagttcgtttgttcaaaattacttacccaaatatggtcgtccagaagttgaaaaaatcgagaatcttcctgttgcaattgtcattgaccagaaaaaagtagcaggtaattctcgttcgacagtgggaacgtacacagatatttatacgtttttacgtttgctgttttcacgagcaggttctccatttgttggttattcagatactttttcgtttaatcatccggatggaaaatgtccaacatgcgatggcttaggaaagattaccgaaatcaatcttcatcagctagttgattatgacaaatcattaaacaaagggcctatcgatttccccacatttacagttggcaactggcggtggaagcgttatgcccatagtggtctatttgatttggataaaaaaatcaaggactattctcctgaagagttagcattatttttatatgctccacaacaaaaactagctaatccacccaaagagtggcctcatacagctttgtatgaaggaatcgtcccgcgtatgcaacgtagcatattgcatacagacgaaggcaaacgtcatcaaaaataccttaatcactttgttaccgtaaaaagatgtcctgattgtttaggaagtagagtcaatgaacgtgttcgtagctgcaaaattaatcagaaaagtattgctgatgctgttgacatgccactcactgaattacattcttttattcgttcaatggacctatccttaataaaaactattcaagaagagctacttgtacgtctagaagcattaattaatatcggtctctcctacctcacattaggacgagcaactgaaacactttctggtggtgaagcacagcggattaaaattgctaagtatgtaaacagcgccttaaatgatattatgtatattttagatgaaccaagtgctggcttacatccaaaggacatcgaacggatcagtcgtgcattgctcaatttaaaaaataaaggaaacaccgtggttctcgtggaacataatccacaattaattagagaagctgattttatcatcgatatcggacctttcgcaggcgaaaatggtggccatgtccagttttcaggaacgtatgacgcatttttagtctccaaaaccttgactagtcaagcgcttcaagagccgctccctttaaacgaccaaccaagaaaagcaaggaagtctttatcaatcgaacatgcgacactgcataatttaaacaatctatctgtcgaagttccgttaggagttttgactgttatttgtggggtcgctggttcaggtaaatcatcattagcggaagaaatttatcaaaaagcccaggctgataaccaagaaattattcatctttcacaaaaaagcattaccgcaaatttacgatccacacctatgacctatcttaatatttttgataaggtccgcaaactgtttgcggaagaaaaacatgtaattccagctttatttagctataattccaaaagcgcctgttctacttgcaaagggacaggcataatggtctccgatatgtctttt

SEQ ID NO: 407 - DNA, 429 bp, Enterococcus faecalis
cccaaaaaaacaattatttactggtcttgcacattttgtatattatttattagtttaattttagcattggaaaataatggtccttacttgattagtaatctggtgatggttccattttttgtgtttgcttatctaggaattgcgcggtcttttaatatgacagaaacatctttaattgtcagagatgttttgtggtttcgcaaaaaagcacttccgctttctcagatagaaaaagtaacctacaatgaaaaaagcatcgaaattttttcctcagaatttaaggaaggctcaaaagtctttttaatgaaaaagaaaacgattccgttatttcttgaggcacttaaggtaaaaaagcctgaattgaaggtagcagaagatcattctttgggccttcataaaaaagaagaaaaaaacaagagtgagtcataa

SEQ ID NO: 408 - DNA, 1035 bp, Enterococcus faecalis
gaaagtagcaggcaaaccatgaaaaaagctagagtgatttataatccaacgtcaggaaaagagttaatcaaaaagaacttagccgatattttatctattttagaagaatgtggttatgaagccagtgcatttgcgaccacaccagaagaaaattcagcacgcaatgaagcacatcgtgctgcgcgggcaggatttgatttactagtagctgcaggtggagatgggaccattaatgaagtcgtgaatgggattgctccgttgaagcggcgccctaaaatggctattattcctgctggaacgacgaatgactatgcacgggccttgaagattcctcgtgataatatcgttaaggcagcagaagtgattaaaaaaaatcaaactgtcaaaatggatattggccaagccggcaaaaattactttatcaatattgcggcgggtggtcatttaacggaactgacttatgaagttccgtcagagttgaaaagtatttttggttacttagcgtacttagccaaaggagccgaaatgttgccgcgagtgaagccgattaaaatgcgcatgacgtatgatgaaggtgtgtacgaaggcaatgcatcaatgtttttcctagggctgactaactcggtgggtggttttgagcaaatcgtaccagatgctaaattagacgatggtaagttttcattaatcattgtaaaaacagccaatatttttgagattcttcatttagttgcgttaatgttaaatggtggaaagcatgttgaagatcatcgactgatctatacaaagaccagctatttacatgcagaaacgttagaaaagaacaataaaatgatgattaatttagatggtgaatatggaggcgatgctccaatgacctttaaaaatatgcatcaacacattgaaatttttgcaaatggtgatgcactgccgtccaatgcaattatgggttctgtcttaactggtagcgatgagattgtcgtagaatcagcagacgaagcggaagaagcatataagcgagtcttcaccacgagttgt

SEQ ID NO: 409 - DNA, 1008 bp, Enterococcus faecalis
ttgccgaactcacgtggtcgaatacgtcatgccaatgcgtttaatgaaacagataatcatgcaggccatcaaactgataagacagaaatgaatggctggatttgggaacggaaatatgaaattgattcattatgttacccggtccaattagcctatttactttataagaatactgggatgaccgaacaatttaattcagattttgtggaaggcgtcaaaaaaattctcaacgtttttacaacagaacaagatcacgcacagtcaccttatttatttgaacgagatacgtggcgtcaagaagatacgttggttgaagcagggaaaggaacaccagttggcaaaacagggatgacatggtcaggcttccgtcctagtgatgatgcctgccaatatggttacttagttccttctaatatgtttgcagtcgtaattttaggctatattcaagaaattttctctgatgttttagaagatgctacgattggggcgattgctaaaaaattacaagaagagattgaagaaggcatccaaacatttggacgaacaaaaaatcaaaataacgaaacgatttacgcgtatgaagtggatggcttaggcaatgcaagcgtgatggatgacagtaatgttcccaatttagtagcagccccttatctgggttattgttcaacagaggatgaacaatatttaacaacgcgtcaaaccttattaagtaaagaaaatccttacttctatgaaggcaaatacgcgaaagggattggtagctcgcatacaccagaaaattacgtgtggccgattgctttagcaatggaaggaatgacaaccaaagataaagcagaaaaagaacgaattttagatttattagttgccacagatgcggggactcatttgatgcatgaaggttttgacgtagataatcctgaaaattatacaagagaatggttttcatgggctaatatgatgttttgtgaattagttatggattattttgacatccgagtggaaaaatag

SEQ ID NO: 410 - DNA, 390 bp, Enterococcus faecalis
catccgagtggaaaaataggaggaaaagtaatgacaaagaaaaaagtctatattgtttcccatagtcattgggatcgtgaatggtatctgccttatgaagaacatcatatgcgcttaattgaattagtggataatgtattagatttaattgaaaatgatccagagtttaacagtttccatttagatggacaaacgattatcttagacgactatttacaagttcgcccagagaaaaaagaagccgtgaaaaaagctgtccaagcaggcaaactaaaaatcggaccattttatattttacaagatgactttttaattagctctgaatccaatgttcgaaacatgctgattgggcatttagaaagtcaaaaatggggagcaccagttcaataa

SEQ ID NO: 411 - DNA, 207 bp, Enterococcus faecalis
  misc_feature (162)..(162): Nucleotide 162 is "n" wherein "n" = any nucleotide.
atccaatgttcgaaacatgctgattgggcatttagaaagtcaaaaatggggagcaccagttcaataaggttacttcccggatacattgggaatatgggtcaaacgcctcaaatgatgcaattagcaaatctgcttgcggctgcctttggacgcggggttganaccgattgggctttgataaccaagttcttagaaaagcgactatag

SEQ ID NO: 412 - DNA, 1290 bp, Enterococcus faecalis
ccttttgaagaacattcaagtaagaataagcaaaaaccaacgacctcttctggcggcaatgtctttttacttattttaaatgtcattattcgcgtttttcagtcattagtggtttttggggttattctgattgtcttaggtggctctcttggcttaggtattggaatgggctattttgcttttctagttgaagatacacagcccccaacgaaggaagaattgcaaaaagaaatcagtgatattaccgaagtgtcaaaaatgacttacgcagatggtactccgattgctaacatcaaatcagatttaattcggacacgaattaatggcgatcaaatgtctccattgctaaaaaaagccattatttcaacagaagatgaatattttgaagaacatcatggggtggtaccaaaagcgctagttcgagcgttgatttctgatgcgacaggtatcggcggttcttctggtggttcaacattgactcagcaattggtcaagcaacagattttaactgatgaaacgacctttaaacggaaagccaacgaaattttattagctttacgtattgaaaaatacttttctaaggacgaaatcgtgacaacttatctaaatgtctccccttttggtcgtaataacaaaggtgaaaatattgcaggcgtggaagaagcagccaaaggactctttggtaaaagtgccaaggacttgaatcttcctcaagcggcctttatcgcaggacttccccaaagtcccattgtttacacgccctatactaacactggtgccttgaaagacgatttgtctttaggaatgaagagaaaagattttgttcttttcagtatgtaccgagaaaaagctatttcgcaaaaggaatatgaagaagccaaagcttacgacttgaaaaaagactttttaccaactgaacaggccaatgtcaatacagaaggctatctatactatacggtgttagataaagcagttgagattgtcatggatttagatatgaaaaaagctaaagttaatcgtgatgatttagatcaagttggtttagatcaatatgaagaacaagcacgtcgcgaaatccagtcgcaaggctatacaatccaatcaaccattgatcagaatatttacaacacgatgcaaaccgctgtcgcaaattatggttatttgcttgatgatggcactgcacatgtcgatgggaatacaatgattgatactgggcatattttaatggataacgctacgggtcgtatccttgggtttatcggcggtagaaacttccatttttatccataa

SEQ ID NO: 413 - DNA, 189 bp, Enterococcus faecalis
aaacttggccttaattgccgatcgtccagttgggtcctacgattataccaattttctgtttatggtccggcaattgatcagggaatcatgggttccgaaagtcctccgggcaactacccaccaaactatgccgaaggggcggaaatttggttaatcccaccaatgttggattttaaatcattcgcgtaa

SEQ ID NO: 414 - DNA, 645 bp, Enterococcus faecalis
ggcaacggaggaacaggtaaatggacaagccaaagtgcgttagatcttggcgtaccattaccattaattacagaatcagtatttgcacgttttatttcggcttacaaagaagaacgcgtaaaagcaagtggcattttatcaaaacctgcagcctttaactttgcaggcgataaaaaagaattgattgaaaaaattcgcgaagcattatactttagtaaattaatgagttatgcgcaaggttttgcacaactccgtgcagcttctgaagaatacggatgggatttaccatttggtgaaattgcaaaaatctggcgagcaggttgtattatccgtgcacaattcttacaaaaaattaccgatgcatatgaaaaaaatccagcacttgaaaacttgttgttagatgaatacttcgtagaaattacgaaaaaatatcaacaagccgttcgtgaagttgttgcgattgctgttcaagcaggtgttcctgtaccaacattctcatctgcaattgcttattacgattcttatcgttcagatcgcttaccagcgaatttaattcaagcacaacgtgattacttcggtgctcatacgtacgaacgcacagacaaagaaggaatctaccattacagctggtacaacgaagaataa

SEQ ID NO: 415 - DNA, 555 bp, Enterococcus faecalis
agagaaaggacaattaatcaaatgagcaacattttaattattgaagatgaaaagaacttagcgagattcgttgagcttgaattaaaacatgaggggtatacgacagaagtacactacaatggtcgtacaggattggaagccgctcttaacaacgaatgggatgctatccttcttgatttgatgttaccagaattaaatggattagaagtatgtcgccgtgttcgccaagtgaaaaatacaccaattattatgatgactgcgcgtgattcagtaattgaccgtgtttctggcttagaccatggagcggatgattatattgttaaaccatttgcaattgaagaattgttagctcgtttacgtgcgttacttcgtcgtattgatattgagggcgataaaaacgttgcaaaacaaacaacgattacgtatcgtgacttaactattgaaaaagaaaatcgtgtcgttcgtcgtaattctgaaatgattgaattatcaacaacgcgaatacgaattactattaacgctaatggaaaacgtgaacgtcgtcttggcacgtga

SEQ ID NO: 416 - DNA, 486 bp, Enterococcus faecalis
gtcactttccaagtgttgcctaaaaatgatggtttagaactgtttattagtaaaaatgtcgctatggacgacttgtcttccttagaaggtctgagcgaagtcaatgcagatgttagcgaattgattcgcaaacaaattgaagcagacaaagcagccgccgatgaacttgacgagatggaagccacagatgaaacaaacagaaatgtaatctttgaattagataattttgaagcgatgattcaattatccaaagaagtcttcatgcaatctgttttgactaacttatacacgtacaacgatcgttattacttacaagttttgttcttaaccgatgaattagaaaaaacaaatgttgacaatgaaattgcacagattttagaatttgctcataaaacaactgtcactcaggatactttagtcgaatatggcacttgtattatggaacgcagtgcattggaattaacacgttattactttaatgattaa

SEQ ID NO: 417 - DNA, 846 bp, Enterococcus faecalis
  misc_feature (751)..(792): Nucleotides 751 & 792 are "n" wherein "n" = any nucleotide.
gaggtgaaaatcatgttaacagctttaacggcagacaaccaagaattattttctttaatcgattgctcgattgatgaattaacacagatacgaagcgaacaagcttttgtgtgtccaatgtgtcatcaatcggtcattttgaaggcaggccccattaaaataccccattttgctcatcgtaaaaagaatagttgttggtacgaagcagaagctgaaacagaagaacacctccgcttgaagcagctttttgcggaaaagtgtttacgcgaaaagctgtccttccaagttgaggcatacttacccaccttgaagcaacgcccagatttactcattgggaagatagccattgaaattcaatgtagtccattgccaattaaacgtttggtagaacggacggagacttatcaaactcatggctatcaagttgtttggattttaggtgaacgattagtgcctaaagacaagctcacgcaattaacgaaacaattcctttacttttcggagtccttgggattttatttatggtcggccaataagaagcaagaacgaatagaattactttgtcatattgaagagagtcaatgtcaacaattttatagaagaaaacaatcatgggatttttacgaaaaacaattactagaaatcttccgactaccgaccgctaatttaaatttactgccagatagacggcacactggccaattgatgcatgattattatcaaaaattgacgccccaacttgttgccgganatgctcattggctagaacccaaagctttttatatccggagnagggtgtcaacttctccaggtacactccttgggtgttaccactccggggagtga

SEQ ID NO: 418 - DNA, 246 bp, Enterococcus faecalis
  misc_feature (21)..(157): Nucleotides 21, 116 & 157 are "n" wherein "n" = any nucleotide.
ggcttcccccaacacgccttntttaaaggaaattcttctctcaggaggaaggcattgcgcttcactccccggagtggtaacacccaaggagtgtacctggagaagttgacaccctnctccggatataaaaagctttgggttctagccaatgagcatntccggcaacaagttggggcgtcaatttttgataataatcatgcatcaattggccagtgtgccgtctatctggcagtaaatttaaattag

SEQ ID NO: 419 - DNA, 750 bp, Enterococcus faecalis
tttaccatcgtagaacgtgtcagttttcccacaacaaccccagaagaaacaatgaaaaaagtaatagaatttttccaacaatatcctttaaaagcgattgggattggttcatttggtccgattgatattcacgttgattctcctacgtatggttatatcacttctacaccaaaattagcttggcgtaactttgacttgttaggaactatgaaacaacattttgatgtgccaatggcttggacaacggatgtgaatgctgcggcatatggtgagtatgttgctggaaatgggcaacatacatctagttgtgtatattatacaattggaactggtgttggcgctggagcgattcaaaacggtgagtttattgaaggctttagccacccagaaatggggcatgcgttagttcgtcgtcatcctgaagatacgtatgcaggaaattgtccttatcatggagattgtttagaagggattgcagcaggaccagcagttgaaggtcgttctggtaaaaaaggacatttattggaagaggatcataaaacttgggaattagaagcttattatttagcgcaagcggcgtacaatacgactttattattagcgccagaagtgatcattttaggtggcggcgtcatgaaacaacgtcatttgatgccgaaagttcgtgaaaaatttgctgaattagtcaatggatatgtggaaacaccgcctttaggaaaaatacttggtgacgcctcttttagaagataa

SEQ ID NO: 420 - DNA, 1227 bp, Enterococcus faecalis
cgtggtggtcgtgaacatgcaatcgccaaaaaattacagcaagaagacaaagtcaagactgtttattgtgcaccaggtaatcctggtatgagtggtgataatattcggactgtacctatcggtgaagagcagcaaacggaactaattcaatttgcgaaggataatcagattgattggacattcgtcggaccggaaacgccattaattgaaggaattgtagatgcctttcaagcagcgggattactgatttttggcccgacgaaagcagctgcaataattgaaggttcaaaaagttttgcgaaagattttatgcaaaaataccagattccaacggcggaatatcgggtctttcgacgtttggcacctgccttagaatatattgaacagcaaggagtaccaattgttattaaggcagatggtttggcagctggaaaaggagtagtagttgccgaaacaaaagcagccgcaaaacgggcgctagttgcgatgatggaggaccaacaatttggagcaagcggtcaaacggttgtaatcgaagaatttttgcaaggagaagaattttccttaatggcttttgtttctaatgagaaggtatatccgatggtgattgctcaagatcataagcggattttcgatggggatgctggtccgaatacaggggggatgggcgcttatacaccagtgcctcaggtcccagaagaagcggttcagcaagccattagccaagtcctgaaaccgactgctaaaggaatggtggctgaaaaacgtccgtttcaagggattttatatgctggtttaatccaaacagcaactggccccaaggttattgaatttaatgctcgatttggggatccagaaacacaagttgtgttggcacgtttagagagtcccctttcagaaataatttcttcattgctggtgaaagagcaaccaacgattgcatggaatgagttagcgagtgttggtgttgttgtagcagcagaaggctatcctaatcaatataagacaaatctaccattgccagaaatgtctggtgcaaccatctattatgcaggggtaactcgttcagaacaggctctggtttcggctggcggacgaatctttttagcagaagcaactgcttcgactcttgaagaagcccgcaaaaaagtttatcaaacattggataattactcatttcctggaatgtactaccgaaaagatataggtgtgaaaggcttgatttag

SEQ ID NO: 421 - DNA, 849 bp, Enterococcus faecalis
actggagaagatggacgagtggccagcgtaaatattggagaaacactaaaagaagcaagattgcagaagaacatctcaattgatgaactgcaacaaatgacaaaaattcaaaaaagatatttagaaattattgaacaaaacgattttgagtccttaccaggcaccttttatgtgcgggcgtttatccgccaatatgcaagtgcggtcggcttagatggcaatcaattggtagatatctatgatggcaaagaaccagcaattgtcgaagaacccaagccagtgtatgaagagcttgaaggatcacgtaagcaattgcatgacgaagaaaagcaatccagttggttactgcggaacttaccggccattgccttttcgttaattggtttagccattgcggtcgtggtgctgtacattatgtggcaagatcaaaaagccgaaccgattattcaaacaccggcaactagtgccagtgtggaaaagcccaaagaatcaagtcaagccccagaaagtagcacacaaagtagtacaccgccgtcttcttcaagcgaaccagagaagaaaacagctgtggctgtggtgagtgatgctaacaatcaagtgactgcaacggttaaagatgcgaatagtccaatcaacattacctttaaagggactgaaggctcttgctggattggcgtgatggtcgatggcaactatacgtaccaacacaccctgcaagcaggagagacccaaacaacagctttacctgcgaatgccgccaatgcaacactgattctaggcgcctcaaataacgtcgccattcaagtcgatggcgccgatttaacaatggtcttgcccacggggatgaaa

SEQ ID NO: 422 - DNA, 279 bp, Enterococcus faecalis
atttttgtcatttgttgcagttcatcaattgagatgttcttctgcaatcttgcttcttttagtgtttctccaatatttacgctggccactcgtccatcttctccagtctattttgttaatttatcgattgtctcatcagtctttttcaattgccaaggaaaacattcccgtcctttaagaataccacaaaagaagccaactgaggataacaaaattgaaagatttcaaagatttttctttttcttaaacagttggtttattgctcggtttctcctttag

SEQ ID NO: 423 - DNA, 294 bp, Enterococcus faecalis
cgactatcaacagtgggtcatggcgcttatagtgccttaatcggaatcatcattgcgatgttgctaaatatgttccttttacacagtaatgctgtagaattctttatttccattttaatggtcctaattttctcagggattactgcttatgataaccaacgtatacgccaagtctatgcgcaaacaggtgatcaagcaggtactgggatggccgttttcttcgcattacaattataccttgacttcatcaacttattcttagctttcttaagaatttttggtaaaaacaactaa

SEQ ID NO: 424 - DNA, 1149 bp, Enterococcus faecalis
cggattttagggccattttatattcattggaggatttttttagggattttcacggggggaaatttctggaattttgaagttcaaaccgcagttggaaacgttttaaaccggagtgttgttaacttaggggtgtcattcgttaagacactcttcaaggtaaggaggctcttaaaacttggggtgtgtagggtggttatttttaacattattgtggatgatatggaagaggaggggattttgcctgacacgccagaatgttcacccccgaaatcagaggttcgggtagaatggaccaccttcagagtcgttcttttttgtttgattgcaatcatcttcggaattggtgtaggcacctataatacgaattacctaagtcatacacctgaccgaaaaccggttaccatctcccatcgtggtgttaatggtaacaatggcgttcaaaacaccttggactctttaatcgagaccaataaggcaaaacctgattatgttgaaatggatattcaagaaaccaaagaccatcaatttattgtcatgcacgattttaatttacgggcgttaacgggcgttaataaacgaccgaatcaattaacacttaaagaattaacgaatatgaatgtcacagaaaatggtcaaactgctaaaatggtttctttcgatgattatttagccaaagccaatcaattaaaacaacgtttattaattgaaatcaaaaccacgcctcaagatagccctgatttagtacagcgctttgtcaaacaataccgtgaaaatatttttgaaaacggccatatccttcataccttaacctatgatacggcgatggccttaaagaaagaagaaccacgcttttatgtaggctacgttattcctttcaacattgtgggaccgcctaaaatgccagttgacttttttactatggaatacagtacaatgaatcgtaactttgtaaatgccgctcatcatgatgggaaaaaggtttatgcttggacagcaaatgatgaagatgttatgacacgaatgattttttatggcgtcgatggcatcattaccgatcagctcagtctactgaacgaaacaatgaaaaccgatttagaaaacccaacatactccgataaactgttgaatttcgctattggaatgggttaa

SEQ ID NO: 425 - DNA, 1134 bp, Enterococcus faecalis
ttttcaccagccagagctgctagaattgcccagaaaacccggcagttaaaacccatcgttgatgaagcacgtaggaattttaacgctgaaaatgaaaaagtaattgtcgattatattccattcacattggatggacaacgagaaaatgtgcgcacacgagagaccaacttagggaatttgattggtgatgcgattatgtcatatggccaagacgcgtttagccaacctgctgattttgcagtaactaatggtggcggcattcgcgctgatattaaacaagggccaattaaagttggggatgtcattgctgtgttaccttttggcaatagcattgcgcaaattcaagtaaccggcgcccaagttaaagaaatgtttgaaatgtctgttcgttcgattccacaaaaagatgagaatggcacaattttactagatgatgctggccaaccaaaacttggcgcaaatggtggtttcctacatgtttcaagctccattcgtatccactatgattccacaaaaccaggtactcgcttggctagtgacgaaggcaatgaaacaggacaaacgattgtcggtagtcgcgtattaggaatagaaattaaaaatcggcaaacacaaaagtttgaaccattggatgagaagaaacaataccggatggctaccaatgatttcttagctgctggtggtgatggttacgatatgctaggtggtgaacgagaagaagggatttcactagattctgtcttaattgaatacttgaaaagtgcaaccagcttgcggttgtatcgtgcagcaacgacgattgatttagcacaatataaagaaccattcccaggcgaacgaattgtttctatttcggaagaagcttacaaagagttaatcggtggaggagagacgccaaaaccagatccaaaaccagacccgaaaccaacaccagaaacaccagtagcaaccaataaacaaaaccaagcgggagcaagacagagcaatccatccgtaacagagaagaaaaagtatggcggctttttacctaaaacgggtacagaaacagaaacgcttgcattatatggtttactgttcgttggactttcttcttctggctggtatatttataaacgacgtaacaaagctagttag

SEQ ID NO: 426 - DNA, 288 bp, Enterococcus faecalis
cggggggggcctttcccctcggtgaggcagctgtccgaaggattcattaacggacactatgcgattgccagcttttttattaccccgatgtccttattattatcaaatcttgcacgacagcaagtcattagtaatcttttaaactatcgattagtcgggattgtgttaggtagtttacttggttttgccggcgcttatgttttcacaactgcgctacgtttctataatcgggcctactcaattgatgaaacctttgaaaatcaacaagaagaaagaggcgttttatga

SEQ ID NO: 427 - DNA, 663 bp, Enterococcus faecalis
aaatcaacaagaagaaagaggcgttttatgaaaataacttatcccttgccaccaaatctaccagaacaacttcctctattaacgaactgtcaattagaagatgaggcaatcttagaaaatcatttgtatcagcagattgatttaccgaatcaagaagttcgtaacttagtctttcgggatgctgttttcgatcatctttcattagcaaatggccagtttgcttcttttgattgtagtaatgtgcgttttgaagcttgcgatttttctaacgtcgaatggctgtctggcagttttcatcgagtgactttccttcgttgcaatttgacaggaacgaattttgcagatagctatttaaaagattgtctatttgaggattgcaaagccgattatgcttcttttcgttttgcaaattttaatcttgttcactttaatcagactcgtttagtcgaaagtgaatttttcgaggtcacctggaaaaaactccttctagaagcttgcgatttaaccgaaagtaattggctaaatacttctttaaaaggattggatttttcccaaaacacctttgaacgcttgactttctcaccaaactatttatcaggtcttaaagtcacccctgaacaagccatttatttggcaagtgcccttggtttggtgattacctaa

SEQ ID NO: 428 - DNA, 246 bp, Enterococcus faecalis
gaaatgatcccaaagtttctcttgttccaaaagaagagatggcttaaccctaagatagttcacctaaaaatagaggcacaagtaaaatgtctccgttggtttttccaaaaaattaataacaatttaataagaaagaaccgacagaaccagttattcggctatttttttaaaattttcttaggtaatcaccaaaccaagggcacttgccaaataaatggcttgttcaggggtgactttaagacctga

SEQ ID NO: 429 - DNA, 255 bp, Enterococcus faecalis
gtactttcgaaaaatcaggtgaggttatttatgaaaaataaaagtaggcagtttttaaaaaacaactggccttatatgttagccagtttcttcattccatttttaattatggcaattatctatttgagtattgggatttatccaggaagtagtcgcagtgttttagccagcgatgccttttctcaattttcaaattttcacgcaagctttaacaatgttcttcatggaaaacaaatcttttctgtacgtggcagt

SEQ ID NO: 430 - DNA, 1335 bp, Enterococcus faecalis
aataggaggacaaattatatgtccatgtttttagatcaagtgacgattgatgtcaaagctggtaaaggcggcgacggaatggttgctttccgtagagaaaaatatgtaccagacgggggtcccgctggtggtgatggcggtcgcggtggcgacgttgttttagttgttgaagaaggattacgcacattaatggatttccggtttaatcgtcattttaaggcgacacctggagaaaatggtatgagtaaaggaatgcacggtcgtggttcagaagatttacttgtcaaagttccaccaggtacaacagttcgtgatgcagaaactggagccttaattggggatttaattgagaatggtcagaccttagtagtagcgaaaggcggacgcggtggtcgtgggaatattcgctttgcttccccaagaaaccctgcaccagaaattgccgaaaacggcgaaccgggtcaagaacgtaaaatcgaattagaattaaaagtcttagcagatgttggtttagttgggtttccttctgtagggaaatcaacgttactctctgttatctcgtccgctcgtccgaaaattggtgcctatcattttacgacgttagttccaaacttagggatggtgactactagtgacggtcgaagcttcgctgcagcagatttgccaggcttaattgaaggagcttctcaaggtgtcggcttaggaacacagttcttacgccacattgaacggacgcgtgttattttacatgtcattgatatgagtggcatggaaggacgcgatccttatgaagattatttggcaatcaataaagaattggcttcacacaatttacgtttgatggagcgacctcaaattattgttgccaataaaatggacatgcctgaagcagaagagaatttagcgaaatttaaagagcaacttgcgaaggaacgcaccgatgagtatgctgatgagctacctattttcccaatctctggggttactcgcaaaggtattgaacctttattaaatgcaacagctgacttgttggaagtaacgcctgaattcccattatatgaagatgaagtggtagaggaagaaaccgttcgttatggcttccaaccagaaggtccagaatttacgattgatcgtgaaccagatgcttcatgggttttatctggtgaaaaattagaaaaattatttgaaatgacgaatttcgatcatgatgaaacagtaatgcgttttgcacgtcaattacgtggtatgggtgtcgatgaggcattacgagcacgtggcgcgaaagatggcgacattgttcggattggtaattttgaatttgaatttgtcgaataa

SEQ ID NO: 431 - DNA, 876 bp, Enterococcus faecalis
acaactttggggattttaaagcagtgtgatcatgtatcctttacgataccggacgggaaaattttaggattaattggccaaaatggtgccgggaaaacaactacatttcgcttgattttaaattttttaacacaagatagcgggtcggttttatggaatggtcaaccattaaatgaaaaagagtacaatattattggttatttaccagaagaacggggtttatatcctaaaattacgattgaagaccaactaatttatttcgcttcgttgcggggaaaaactaaaaaagaaattgaacctaaaattgacttttggatggaaaaatttcaagttaaaggcaaaaaaacagataaagttaaatctttatcaaaaggcaatcaacaaaaagttcaattgattgcgacacttattcatgaaccgaagttaattattttagacgaaccattcagtggcttggatccagttaatgcagaattattaaaagacggcattattgaattgaaaaatcaaggttcttgtgtcattttttccagtcataatatggacaatgtggagaaaatctgtgaccatttagtcatgttaaaaaatggacgcatggttttagatggtcaggttcatgaaattcgacaacaatttggtcgaacaaaattattcttagaatcaccgttatctgttgaggaagttgctgctacagcaggtgtgaaagaagcacacttgcgacaagatggcgtcttagaagcgacattagaaaacgctgaagtgggcaaagtgttgtttgataaagcgacagccaacggctacattccaatgtttaatcaacaaccaccaacattggaagaaattttcaaaatgaaagtaggtgggcaagatgagtaa

SEQ ID NO: 432 - DNA, 249 bp, Enterococcus faecalis
  misc_feature (121)..(121): Nucleotide 121 is "n" wherein "n" = any nucleotide.
gtgggcaagatgagtaaattttggattattgcgactgatgtctataagaaaaatgtgaagtcgctgtctttcttaatcatgattttagcgccatttcttcttgtaggaattgtttacttancgggctctctagctagcggtttttcaggagatactaccattggtctggtttcggaaaatcaagcgctcgttaaagagttgaccaagaatagaacagacgacttttctttcaaagctgtttcttcttga

SEQ ID NO: 433 - DNA, 1659 bp, Enterococcus faecalis
atgagtacgttaaaggggcaagacatggtggtaggctataattcaccatcgtggaatttggccacgttagcgaaaccttttacgtggggctatgtactattaggcaaagaatatggcttatcatggtattggaatcttaaattaattggcttaattttattttcttttgaaattggcttgatcgtcacacggcggaataaatatttagctttgttagcaagtgtttggattccgttttcttcggcccttcaatggtggtttgtctcgccagttggagatttagtattttttggcttaggttttttagtgggaatttataattatttctattatcatagtagtgttcgacgtcgtgtcatttgtgcgataacggctgttattatggcctcaggatttgttttagttatttatcctgcgttacaagtaccacttggttatttgattttattatttttaattttattctttttagaatttcgtaaaaaaattaagttggataagtgggatggggtcctgataggtggggcactcttgatgacggcgattattgttggcggatcgctatatggctcattggattccttaaaagcagtaatggataccgcttatccaggaaaacgggtaagtttaggtggcgatatgcctaaacgcgatattttgttatttttaacaaattggaaaatgccgtttcaagatgttccatattccaataattcggaaatcagtagtttttatcaattattttttgttattttgccgctctcaccatttattttttataaaaaaatcaaagaaaacatttacggttttgtcttattcgtgtattgtttatttaacttagtttggatgagcgtgcaatttccaacaatttttgataagttgacattgtggtcttatgtgccaaaacaacgggcgatgttatccttcgggtttgccgctgtgttgttaagtttatggttcatcgattatttatggaatcgccaagcaaaaattccaatgatggcctggttatgggcactacgattaaatgttgttctgtatttctttgttttatatacgggcaatttactgttatacgttacacgaatggacatcattggtgtcttagttgtcgctaccgttttaattgttgctttatttaaacgttggcgcacgttatttgtccttgtcttattaggaatcattatggtttctggagcctttgtaaatccaatttctcgtggcgtttctgctgtctatggtaaaaaattagcggtagaagtggaagaaattaacaaaaaagaccccaaccaattgtgggtgggcgaacgcttgatgtatggctatttgccaatgttaggtgtgcatacatttaacggtgttgcttttacacctgacttagaggcttggaaaccattagatccaaaaggaaaagacacatttatttataatcgctatgcgcacatcaatgttgaagtaggaaatcagacccctgttttagagttgatgcaaaaagatgcgattattgctcgtttatctccagaaaaattaaaagaatatgggattaaatatgcggtcgtttataaaccattagaaccgttagacacaccaacgattcattttgaaaaattatatggacctgatcagaacggggcatatatttatcgaataaacgactag

SEQ ID NO: 434 - DNA, 192 bp, Enterococcus faecalis
tgtacaactgtgaaaatcaagcataccgttattgatggtaaacgcctttattttgacggtacagctatgcaattattcggtcattggattaaatggcttttattaactataattactttaggaatttatggtttttggttgaatatccgtttgcaacaatggattacaaaacatacccacacactttcataa

SEQ ID NO: 435 - DNA, 210 bp, Enterococcus faecalis
cagagtgttatcctactctttgaaaaaacaaggaatttatgctatactttgataagtatcaagggatacttatgttatttcgggggcgttacggattcgacaggcatagttgagcttgaattgcgtttcgtaggttacggctacgttaaaacgttacagttaaatataactgctaaaaacgaaaacaattctttcgctttagctgcctaa

SEQ ID NO: 436 - DNA, 255 bp, Enterococcus faecalis
aaagataatgtgataggaattgtaagaggaggtaacgagctttctcttgcttatagaaaaaaagagttaaaacctttatttgataaggttttagctctttttgttcctctctacttttctaaaaatggagacggcgggagtcgaacccgcgtccaaacatattgccacttaaatctctacgttcatagacactcatttaaaggttcgctttacagcgtgccgagtgacaggcattctgtattgctagtctggtaa

SEQ ID NO: 437 - DNA, 369 bp, Enterococcus faecalis
gaggatataatgaaaaaaaaacttattgtactattgttagccttatttttaacggcatgtagtaataatactgggggaaaaaatagcgacgcttcatctactgaagtatcaactaagcagcaaactacccagtcttctaaaaaagatagtagtaatccggacacaacaccaacttgtacatcatctataacaattgaaacaaccgagaatttaaagaatagagaattgaatccaacagatgatgtttcaaaaactagacgacaattgtatgaacaaggaattaacagttcaacaattacgaataaagaactaaaggaatataactcacaggctaaagaacaaaagaaagcgtcttcaccacgaattcgg

SEQ ID NO: 438 - DNA, 465 bp, Enterococcus faecalis
cagaagatggcactagtaaaaattgtttatgcaagtatgactggacacacagaagaaatttccgagactttggaagaacagtttcaagaagctggagttgaagtacaacgtgaagaatgttcagaagttgatgtagacttctttgatgatgcagatgcttgtattatcgcaacgtatacttatggtgatggggaactgccttttgaatttgaagatttctttgatgaattaactgagaaggatttagcaggtaagccatttggtgttgttggctccggtgatcgtgaatatggtgaatttttctgtaaatcagcgcatgattttgtaggagcttttgaaaaagctggtgctaaaaaagtagctgaaacagttgaaattgaaaacaatgcagaagaagaagacatcgaaatgctaaaaacatttgttaaaagtgtcgccacaactttatctgatagcgttgcctaa

SEQ ID NO: 439 - DNA, 438 bp, Enterococcus faecalis
aaaggaacgatgaaggtaggtatttcaatgtttaatattcttcaatcgactcaattatctagtaatacatttgatttttggctggaagcgccaagaatagcgacacatgctcaggctggacagtttgttattttaagaattgacgaaaagggagaacggatccccttaacgattgcggagacaaatccacaagcaggcagtattcgaattattttccaagtaatcggtaagacaacagctgcactttcccaacttaaaacttcagactctttgttggatatcactggacctttaggtatgcccacagaagtgaagcaatatgaaacggtgatggttgtcggtggcggggttggtatcgcggctatttatccaattatcaaggctttaaaagaagcaggcaacccgagtgattacgattttgggagcacgaacagctga

SEQ ID NO: 440 - DNA, 210 bp, Enterococcus faecalis
aagaagcaggcaacccgagtgattacgattttgggagcacgaacagctgagttagttctgttacaagaagaatgccgtcgttattcagatgagctaatcattacaacggatgatggttcattaggtaaaaagggcttaataacagaagcgaaggaagaaatcattgcccgtgaatctgtaccgtggcattggggcgatggggcccaccat

SEQ ID NO: 441 - DNA, 723 bp, Enterococcus faecalis
atggatcaaagaaaaaagtgcgcaacaagattttctaatcgtcacgcatcggctagaacctctctctggcgtgagcaattaccgaatagaattgctgcagcaacaactgattatctggcaggagggaaccacatgcaaataaagcaaacaaatgcagcaatttatgcttctttgattcttattttgacctttgaattatctttttctcagtcaattttggcaaatttggcggtttttatgggttgtgtcatttttttaataggccagcgaaaatcccgcttactgctttggttatttttcttgccacttttaccagcaatcgggacgttttggtctatttatttgcatggtacgagtagtcaacaagcctggcttttgtttagccgaacgtatgcctttgccggtttaggactagcttttgctgtaggtgttgattttgaagaattattgttgttattggaacaaaaggggctagcaccgaactttgtttatggaattttagtggtggttcacgccttaccggaagtgaaaagagaaattaatgatttaaaagaagcaagcctactccgtggcaaaacgtttcatttttggtcgccgatgctttatgttaaaacactgctcgtcgctgtttcttggcgagataaatatactgaagcaatgtctgcccatggctatgaagaaggagccaccagaagtcgaaacgtgcaatttggccttttcaca

SEQ ID NO: 442 - DNA, 801 bp, Enterococcus faecalis
caaaacgatttggtgtgcgaccacgatttcagcgattacgctgatgttgtggaccaagtcgtcacgttgaaaaatggccagtttgaaaagcaaccgttgacgtttatcaaaacaaaaccacagacatttcagcttacaacttctgtggtaaaacaaccaatgctccaattgaaaaattttcgtttgtctcagggaaaacgagtgctacttgaagaaaaagaagcgcttttgtttaaaggaattaccacgttgacggggccaaatggggcgggaaaatccaccttattaaaagccatcgttcagagacaaaaatatcaagggaaaatgttcttggcaggccgccgcttgcgggcttcaaaaaaattgtatcaacacatgacattagcggtgcaacaagccaatcgtcagtttgtcacgttgactttacgagaagagcttttgtttggtcagaacatgacagcagaaaaaagaagaaaacaagaggaagccttaacttttttaggtttaaaagaaaaactagagcacagtgtttttcaactaagtgaagggcaaaaaaagatggtgcaattaattagtttgctgagcttagatttggactgtttacttttagatgaaccttttgctggattagatgagcgagcatgcaattattttgttgaatggatcaaagaaaaaagtgcgcaacaagattttctaatcgtcacgcatcggctagaacctctctctggcgtgagcaattaccgaatagaattgctgcagcaacaactgattatctggcaggagggaaccacatgcaaataa

SEQ ID NO: 443 - DNA, 1671 bp, Enterococcus faecalis
aaggatgtgtttcattcaatgatttgtcaaaattgtcaacaaaatgaagcaacaattcatttatatgcaaatgtgaatggtcaaagaaaacaactggactattgccaaagctgctatcaaaaattaaaaaatcaagcaaataattcccctcaaaatatgggacaagacccttttggctttgggagtttagacgatttatatcgttctctttctcgccaaatgcaacaaggtaatccttatgaacaacaaacaccacccactcaatttggtgatggtggtaatggaggtcaaccccctcgcggaggcgctggcgctggtcaaggtttactaggcgagtatgggattaacatcaccgaagcggcacgccaaggagatatcgatcctgtggtaggacgtgaccaagaaattaagcgtgtcattgaaatcttaaatcgccgtacaaaaaacaaccccgttttaatcggtgaaccaggtgttggtaaaacagccgttgtcgaaggtttagcccaaaaaattgtcgatggcgatgtgccccaaaaattattggacaaagaagtcattcgtttagatgtggtttcacttgttcaaggaactggtattcgcggacaatttgaagaacggatgcaaaaattgattgaagaaatcactgaagctgaaaatgtcattttatttattgatgaagtccatgaaattgtgggtgctggtgctgctggtgatggcaatatggatgctggcaatattttaaaaccagccttagcacgtggtgaattacaattagtcggtgccacaactttaaatgagtaccgtattattgaaaaagatgctgccttagaacgtcggatgcaaccagtccaagtagatgagccaaccgttgccgaaaccataacgattttacatggtttgcaaaaacgttatgaagattatcatcatgttaaatatacagatgaagcgattaacgcagcagcaaacttatccaatcgttacattcaagatcgctttttaccagataaagcgattgacttgttagatgaatctggttcaaaaatgaatctaactatccaactcgtcgatccaaaaacaattgataaaaaattagcagaagcggaacaacaaaaacaacaagcttccgcagaagaagattttgaaaaagcggcttattatcgtgatcaaatcaataaattacaagcaatgaaagaaaaacaaatcagcgatgaagaaacaccagtcatcactgaaaaagatattgaagccattgtggaacaaaaaactggcattcctgtcggtgacttaaaagaaaaagaacaaacccaattgaaaaatttagctgttgacttaaaagctcatgttgtcggacaagatgatgccgtcgataaagtagctaaagcgattcgtcgcaatcgtgtaggcctaggcaaacaaaaccgcccaattggttccttcttatttgttgggccaacaggcgttggtaaaacagaattagcaaaacaattagcttttgagctattcggttcagaagattcgatggttcgttttgatatgagtgagtatatggaaaaacacagtgtttctaaactgattggttctcctccaggctatgttggttatgacgaagctggacaactcacagaaaaattccgtcgtaatccttataatttaattttattggaataa

SEQ ID NO: 444 - DNA, 1356 bp, Enterococcus faecalis
tgggccattccgtggcgaatagccattactaatttaaaggagattggggaatatttagtagatattcatggccaaaacgaacatcaagaattgatgcaaagtgaacgccatattgatatgttagatgaatttggtgggaaaaaacttttagcagtcaaagaaaaatatacacaggcgtatcaagagtatcgcgcactcgaagccaaagtcagaaagcgacaaaaaaatgaaaaagaatttgcccaaagaatggacatgcttcattttcaaagtgatgaaattgctagtgcacagttagtcgctggcgaagaagaacaattgttagaagaacgcaataaactgaacaattttcaaaagattgctgatgcactgacgattagttatgccgcgctaaatggtgaagacgatagtagtttggataaaatcggaacaagtatggatgaactcgcttcgattgaatcccttgattcagaatataaaacattgtcagatactgttcaaaatgcttactacttactacaagaagccagtggagatctttctaggttgattgatggcttagaactagacgaaggccgcttgaatgaagtagaaaatcgtttggaattaatccgtcaaatgaaacgtaaatatggcgattcaatcgaaacgattttatcttactatgaagaaatcaccaaagagttagcagaggctgattttttggaaggcggtacaggtgacttagaagcgttgcttgcagagaaacaacaagcggctcatcaacaagcgttagctttacgaaaagaacgaaagcgcctagccaaagagctcgaacaacaaattttaaccgaattaaaagaactatatttggagcgaactgaatttgaagtccgctttacagaacttgagcatttacaagaaaatggcttagacggagtagaattttatattactactaacccaggggaaccattaaaaccgttagttcgggtggcttctggcggagaactttcgcgagtgatgttggctatgaaaacaatcttttctcaaacgcaagggatcactagtattgtttttgatgaagtggatacaggagttagtggccgagtagcacaggcgattgccgataaaatttatcaaatttcagaaaattcgcaggtgttgtgtatcacgcacttgccacaagtggcggccgttgccgatgaacattattttattgaaaaagaaattgtggcggggcggacagaaacaagcgtccgaattttatctgaaaaagagcgagtaaacgaaattgcgcgtatgctcgcaggaagtgaaattacgaaattaaccattgaacatgcacaagagctgttggcgatggcgaaaaaatag

SEQ ID NO: 445 - DNA, 783 bp, Enterococcus faecalis
acccgcgttgaggactctagaagaaaaactcaaaagatgtattggtcaggtcgtccagaaatcggggaagttcaaggggattattatcatcatgaagtcgtgtttgatggcggctatacggctttaattgatgtcgttgttaaggatcaacaaattcagttagtggaatttgatgaacgtggacctaaaaactattattctgaagaatgggcaggagtgacaaaacgtttatccggctatgcaaattttcaagcgaacaacgcccgaactgatcaatcgttagtgaccgttgttaatacgatgacttttctagaaaatcaaatggttgctgaaaatcgcctagatggcgccttccagacagccaaaggtcaatccaatagcgctaataatggctatcttcctgctgctagggctttagccaaggaaatcaaagaaccttcaaaagaacattatacaagtctaacagaagattttgaggaggggctttctggacgtttaactgttattacgttaaaagattcagggaaaataaccgatcttcgttatgatgaatattttgcagatacagaagaagagattaaagatgcgaaactgaaggcttattctcgccaatcaaaatatttttctaaagattatgctcaaaaatcgggggaaaatttcaaaaaagaagtggatgacttaagaaaaaaagcaatcgaggaaaataaattagtcagtccgacaaatgaggaagcctggtcggaaaattatcaaagtcttgtaaaaaaaataacgtcacaataa

SEQ ID NO: 446 - DNA, 324 bp, Enterococcus faecalis
ggtgataaaatgaaattagtgaatgtgaccaatagctacaaacaattagtaaataaacaattggaaaacacggatgcttactttgtaaaagtctactcagcaggaaatacgaccgctgtctattcagaagcagctcaccatgtggaagttctgattatgaataaaaatcgtcgcattcgtccgacagaagtaaaagaaattttagcaaaactgttaaaacgattacctaaagaggcttatgacccagatgaaatttctatcattgagttaaaccatgtgaccgaagtgtctgttccattaaaagtttccctcatggaaaactaa

SEQ ID NO: 447 - DNA, 222 bp, Enterococcus faecalis
aaagagaaactcgttgatttaggttatgatcctgcaatgggcgctcgtcctttacgtcgaacaattcaagaacaaattgaagacggcattgctgaatatattttagatcatcctgaaaatcatcaattagtcgcagcgttagataacgaaggtaaaattatcgtaactggcgcacaagaagtgactaaaacagaaacttcaacatctgaccaagcagaataa

SEQ ID NO: 448 - DNA, 1188 bp, Enterococcus faecalis
ggccatccccgggctgggcacaattgttatgaaactgacgaagaaatgacaaaaatcttcacagaatacagaaaaacacataaccaaggtgtttttgatgcctacacagctgaaatgcgtttagcacgtaaaaacaaaatcattactggtcttccagatgcttatggccgtggccgtattatcggtgactatcgtcgtatcgcattatatggtatcgactacttaatggaacaaaagaaaaaagatcatgataacactggtaacaaagaaatgacagacgatgttattcgcttacgtgaagaaatttctgaacaataccgtgcgttaaatgacttaaaacaaatggctgcttcttatggtttcgatatttctcgtcctgctgcaaatgcgcaagaagcaatccaatggttatactttggttacctaggtgccattaaatctcaaaatggtgcggcaatgtcaattggtcgtatctcagcattcttagatatctatatccaacgtgacttagaagcaggtttaatcactgaatttgaagcacaagaaatgattgaccatttaatcatgaaattacgtatggttaaatttgcacgtacaccagaatacaaccaattattctctggttatccaatttgggcaacattatctattgctggtatgggtattgacggtcgttcattagttaccaaaaatgacttccgtatcttacacaccttaacaaacatgggaccatctccagaacctaacttaactgtattgtattcttctcacttaccagaaggtttcagaacatatgcagctaaaatcgcgaaagaaagctcatctatccaatttgaaaacgatgacttattacgtgaaaactggggctctgacgactgtgcaatcgcatgttgtgtttctgcaacagttatgggtaaagatatgcaattcttcggcgctcgtgcgaacttagcgaaagctgttctttatgcaattaacggcggggtcgacgaaaaaactaaaatgcaagtagcaccaaaatatcgtccaatgactggtgacaaattagattaccatgaattcatggaacgctataaagacatcttagactggttagctgaattgtacgttaacacattaaacattattcattacatgcatgataaatatgcatatgaagcaccacaattagctttaatggatactgat

SEQ ID NO: 449 - DNA, 219 bp, Enterococcus faecalis
ctaattgccacgttatgcacatatggggcacccagagcattaaaccgtggcattggttatcaatacccacataattttgaaaacggttgggtcaatcagcaatacttacctgacaaattaaaagaggcacgttattacgaaccgattgatattggtaaatatgaacaagccttacatcagcaactcaagcgtatccaagaatggaaacagaaaaaataa

SEQ ID NO: 450 - DNA, 255 bp, Enterococcus faecalis
ctggctacgcctgtgacaacggcgagtaatagtacgagtatacgaatcatcttgtcctccaaaaaaaaacaacttgccagagcaaattgtttagaaatcttcataaaaatggtaaaatccgtcgatgccggtaatcgtcctagagtattgaacccgcaagataagcaggtgggttcctcgatcgcagtattgaactaccaaaagaaaaggcatgttaccaactttgatacaagcaggatccctagatatcaataa

SEQ ID NO: 451 - DNA, 213 bp, Enterococcus faecalis
agaaaatgcagctttttaccactcttaaaaaaagaaactgcaacagaaagtcaacagtttatcgaacgttttgggcgttattacttgattatcgccattctaggtgttctagcggctatttttaatcgcccgttattgtcaattggttttatcttttttgttttattactttcaacgttgtttagtttaacttttgcaaaaaaaatgtcataa

SEQ ID NO: 452 - DNA, 516 bp, Enterococcus faecalis
aaacaattaatgattttttttacgctgaaaggagcggttattatgttacaacaatatcaaaaaattatgatagcaatcgatggttctgacgaagcagacttagcctttaaaaaagcggtcaacgtcgctaaacgaaacgatgctgaattactattagcacatgttgttgatacgcgctctttccaatcagtgtcctcttttgatggtgcgctagcagaagaagcaatgtcaatggcaaaagaaaccttagacacctaccaacaacaagcggtggatatgggacaaacaaaagtctctagcgttctagcctatggttctcctaagaacattattgccaaagaattaccaaaagaatacaacattgatttaattatgttaggagcaactggattaaatgccgttgagcgtttatttattggctctgtctctgaatcagttatccgtaatgctagttgcgatgttctcgttgtacggacggatttagacaacaaattaccaaaaaatgaagaaaaataa

SEQ ID NO: 453 - DNA, 1002 bp, Enterococcus faecalis
ggaggaattgagatgaaaacaattcatttccctaccgaactatgggtaggagaaggcgcattagccaatttggaaacacttcatgatagacgtgttttcattgtcacagatccattcatggttgactctggatttgtgaatgaagtgacaaagcatttaacaaaaagtgaatggcaaatttttagtgatatcatccccgatccaccaattgataagattgctgcgggaattaagcatttagcgacatttcaaggagatacgatattagctttaggtgggggatccgctattgatgcggccaaagcaatgaaattttttggcaaacgtactttgcaaactcagattgctgagtttattgcggttcctacaactagtggaactggttcagaagttacgaatttttcagtgattacggttgctgaaactggcaccaaaatcccgcttgtaacggatgaaattcaaccagaaattgcgattttagatacaaatttagtgatgagtgtcccaccaaaaatcacagcggatacaggaatggacgtcttaacgcatgttattgaagcgtatgtttcaacagaagcaaatccgatttcagatgcgttgtgcgaaaaagtcgttcgcttagtattcgacaatttagaaatagcctttaatgagggtagcaaccaacaagcccgtgaaaatatgcatttagcttcatgtatggcagggatggcgtttaatgttacttcgttaggcttgaatcacggtattgctcatgcggccggtgcacgtttacatgtgccacatggacgaatgaatgcaatgctcttacctgaagtcattgcatataacagtggcttagcgaatggcaaagtcaccaacgaaccaacagctaaacgttatgcgcagttagcaaattgtctaaatgatacacagacaaccaatgcacggattggtgttcaacaatttattcgacaaatcaagcaactccgtccaaaattaaacatgcctgcccacttttaa

SEQ ID NO: 454 - DNA, 261 bp, Enterococcus faecalis
  misc_feature (97)..(213): Nucleotides 97 & 213 are "n" wherein "n" = any nucleotide.
gaaaaatcctggttttgcctcgaaacagcatgcccaaataatgaaaaaatgaaaagaactgacttaaaagccaaccttggctccttctcagatggcngggaacgtgcgccaaaatcccaattgggtctcaatccacaattttccacaaaattaatcgttataactcacctggaaatatacaccaaatttttttataaaaaacaactggtttanaacaccactctctctgtatttatagggaaaacaatctccctctcgtcc

SEQ ID NO: 455 - DNA, 396 bp, Enterococcus faecalis
cgaaagggcggatggaaaatgacttggggtgcaattgcgacatggcggatggcacatgatgggttactaaaagctacagaagaattacaacaaggaggtgctgcaggcacggccgtggaacaattaattaaagaagtagaagactatcctttttataagtcagtgggctacggcggtttacctaatgaggaagggattttagaaatggatgctgcctatatggatggagacacatttgcaattggtgctgtggcgggaattacagatgttaaaaatccgatttcagtggctaaagcattaagtaaagagaagtttaatagttttcgtgttggcgcaggtgcaacgaaatattcaatgttgcacggttttgatagagacaagcctcaccaagggaat

SEQ ID NO: 456 - DNA, 1278 bp, Enterococcus faecalis
ccggtccaaaaagatttattttatgaagacttaaccaaaattatggcgattcgaagtgtgaaaggttcgcctaaaaaagaggcactttttggcgaaggaccgaaaagagccttggaagaaacgctgaaacttgcagagcgttatggttttcaaactgggattgtcaatgacgcagttggctatgcgcaatggggaacagcggaagaatatctgggaattattggtcatttagatgtagtaccagaaggttctggttggtcagtgccgccctttcaattaacgaaaaaaaatcaacgtttgtatggtagaggaattctagataataaaggtcctatcttggcttgcctgtatggaatgaaattactgaaagaacttggttaccaaccaaagaaaaccattcgcttaatgtttggcacggatgaagaaagtgggagtggagatatccccttatatttagagaaggaaaacgcacccgtttttggatttactccagattgtaaatatccagtagtttatggggagcgagggattgttaattatgagatcacaacgaccatcccagatgattcaagtgaacaaattggtcagattataggtgatcaagcaaaagaccacgtacctgatcaattaagtgtggtgattgcgggaaaaacaacagcaatcacgggaaaacgtgctccttccaatgcgccagaactaggcaagaacgcgattactttattggcacagaaaattagcgaggaacagttagtcaaaggaaatttattacagtatttcgactggttaaccgctagttttcacgaaaagcactatggcgaaggagtagctctggactttaaggatcaggatagtgggcaattgattttaacgccctatgcgttggaaaaaagaggacagcaattggtgttatcattggccgtgcgttatcctgtttctattacagaaaacgaagtaaccacgcagctaacgaaggcactatttccagaaagtgaagtgaccgtcatccgccgcctccctagtacgctgtttccaaaagatgagcgcaatgttcaaaaattaaccaaggtttatgaacaaattactggcttagatgggacgccagtcacaactacaggtgctacgtatgctcgctttatgccgaatatcgttgcttttggtccatcatttcctggtcaaaaaggcattgcgcataaccaagatgaatatatggatgaaaaagatttactgcttaatctggaaatctatatgcaagcgatgattgcattaacagaagcataa

SEQ ID NO: 457 - DNA, 195 bp, Enterococcus faecalis
aggaaaaatgaaaagtccaaaataggaagtggtaaaatgattgagttaattgtgttgttaacagtttttacttatggaacaaactttgttttatatcttattttgaaaaataaaaagtccatgccaattgtcgaaaaagcttctattgtattaggaattaatatgtctgtgttattattagatggtatttttgct

SEQ ID NO: 458 - DNA, 948 bp, Enterococcus faecalis
ataaatactaaaacgttctctttgtttatttatcaatctttgactacactaaagaaaacgaaggagggaaccacaatgcctaaattttcaccatgtttatggtttaacacacaagcggaagaagctgctaacttctatacaacaatctttgaaaaaggtgcgattctaagtaaaacgaactacgttaatgaggagcatcaacctcaaggaacatcattaatgaccattgaatttaccttggcgaaccaaacaatcattggtttaaatggcggaccagaattttcctttacgccagctagttcattttttgttgaatgtacaacattaccacaaacagaaacgttgtggaaaaatttaacagcagatggacagatattgatgccttttggggaatatccttttagtcctttatatggttgggtagtggacaaatttggtgtctcttggcaagtgtctttttcaggaaaagaacaaacaattgtaccaacctttatgtttgctaatgaaaaatatggcgaagcagccaaagctctatcagaatggttggcgattttcggtccaggcgaaataattgaaaaagttgaatatgaagatgggaacattgcgcaagcacttttcacattacaggagcaaccgtttcgagtaatggatgcacgagataaacatgattttgattttaccatggccttctccatttatattgattgtgaaaatcaggaggaaatagatcggctatggcaacaagtgactgctaaagggaaagaatggccgtgtggctggatggaagatcaatttggagtcagttggcaaacaggcaatcctgaactgaaacgttatttatctgactcaaatccagctagagcaaatgaagtgaccaaaaaattgtaccaaatgaaaaaaatagatttaaaccagttaaaagaagtgtatgacaaatataatcattag

SEQ ID NO: 459 - DNA, 216 bp, Enterococcus faecalis
ttggcgggcccaatccgcggtggtgaagactgggcatggggcaatcgttgctttcaagaaaggcgaattactgaaaaaattcctttccaaacgttaggtgaaaagtattggcgttccttttattttttgacacggggacatttaaaatcctccttgcttcaagaagtaaaacaagcaatttatcgattctatcagacggaaatgaataaatactaa

SEQ ID NO: 460 - DNA, 840 bp, Enterococcus faecalis
agaaacaatagagggagcgaaggaatgagtacagtaattaacggtcgtgaattagcagatcaaatgcaagcagagattcaaaaagatgtagaaaagatgacacaacaaggcatccaaccaggattagttgttttattagttggggaaaatcctgccagccaaacgtatgtgagaaataaagaacgtgcagcagccaaaattggcattctgtcaaaggtcgaaaaactgccagaaactatttcagaagaagaattattggctgagattgacaaatataatcaagattcacgctttcatggcattcttgtacaactacctttgccaaaacatattgatgaagaaaagattttattagcgattgatcccaaaaaagatgtagatgggttccatccaatgaatttaggccgtttgtttgtaggcaaacctgaaatgattccttgcacgccgtatggaattatgaagatgtttgaagcttatgatattgatttaacaggtaaacgtgcggtggttattggtcgaagcaatattgttggcaagccaatggcacaattattgttaatgaaaaatgcgaccgtgacgattgcccattctaaaactgaacatttagcagaagttgcaaaagaagcggatattttagttgtagcaattggacgcgggcattttgtcaccaaagagttcgtgaaaccaggtgcggtagtgattgatgtgggcatgaatcgcaatcaagaaggaaaactgattggtgatgtagcattcgatgaagtttctgaaattgcaagctatatcacgccggttcccaaaggtgttggcccaatgaggcgtcttcaaccacggagttcg

SEQ ID NO: 461 - DNA, 489 bp, Enterococcus faecalis
atgaattattcccagaagatgaagatggagaagagaatgagtaaaacagaattaacccgtcacgagattcgtgaaaaagcgctccaagccctttttcctttagattttaatgctgatttaaccaaacaagatgccattgattatgcattggcttatgataatcgggaaatcgtcagtgaagatggcgaagacctagtccctacgtatttagatttacttgtcggcggtgtgtgtagccgcaaagcagaactagacgaagtgattacgaaccatttaggtaataactggtctatgcaacgcttagcaaaaatagatattgttattttacgtttagctatttttgaaatgctatacgtttcagatgtgccaaacattgtggcattaaatgaagccgttgagttaagtaaaaaatacagcgacgaccgttcacgtaaatttgttaatggtgtgttatcaaatgtactgaaagaaattgattcagaggcgtaa

SEQ ID NO: 462 - DNA, 480 bp, Enterococcus faecalis
  misc_feature (19)..(19): Nucleotide 19 is "n" wherein "n" = any nucleotide.
ggccaatcccgggctgaanagcgcgtaataaataaggaggacaagcacatgtcagaaaaaaaaaatcttgtaatcaatgcaaacgattctttaggagaaatcgtgatcgctcctgaagtcattgaagtaattatcggaatcgctgcttcaaaagtagagggcgtttatgggatgcgcggcacgtttgccaataatgtgaatgaattattaggccgtgcagcacacggcaaaggtgtatatttacgaacagaagaagaaggcttaaaagtcgatatctattgttacttgaactacggtgtttctgtaccaaaagttgcgttagaaatgcaagaccgtgtgaaacaacaagtcttatttatgacagatattgatttagttgaagtgaatattcatgttgtagcggtagtacctgaaaaaatccctcaaccagacttaaatgaattattcccagaagatgaagatggagaagagaatgagtaa

SEQ ID NO: 463 - DNA, 780 bp, Enterococcus faecalis
gggggaaacgaaatgaaaccagttgttgaattaaaaaatgcgacaaaaatcattgataatgggatgaatgaaaaaaaagtgattttggatcatgtgaacttagccatttatcctggggacttcattactgttttaggtggaaatggcgcaggcaagagtacgctattcaatagtttagcaggaactttgacactaacagaaggacaatttttaattgaaggagtcaatcgcaccaatctttctgaagtcaaacgggccaaatctctagcgcgtgtttttcaagatcctaaaatggggacagcaccaagaatgactgtggcagaaaatttattgcttgccatgaaacgcggacaaaaacgtcccttaacattacggaagataaatgagcaacgcgccttgtttacaaaaatctgccaagaagttggcaatggcttggaaaatcatctggatacaccgacaggtaacctttctggcggtcaacgccaagccttaagtttattaatggccactatcacaaaaccagaattattacttttagatgagcatactgctgccttagatcccaaaacatccaagcagttgatgcacttaacggaacaacggattgaagaagggaacttaacttgtttaatgattacccatcgaatggaagatgctttacgatatggcaatcgtttaattgttttacaaaaaggtaaaattgttcaagatttaaacgctgctgaaaaagcacaattaacgctacaagatttgttgctgttctttgaagaagtagaataa

SEQ ID NO: 464 - DNA, 912 bp, Enterococcus faecalis
  misc_feature (91)..(106): Nucleotides 91 and 106 are "n" wherein "n" = any nucleotide.
ttatcaaagaaagtaggagaagcgatgattgtttcaccaattgaacaaggaatgttatgggccttgttaggactaggtatttttatgactnatcgtattttaaatnttccagatatgaccacagaaggttcatttccgttagggggggcggtttgtgtaactgccattacaacaggggtttcaccatttatagcgactcttttaggggtcggagcaggaatgcttgccggtttagtgactggtttactgtttacaaaaggaaaaattccaattattttagcaggaattttagtgatgtctggtttaaattccgtgattttatttgtgatgaagtcgccaaataagtctttattaaaccaaccgaagattcaagatgtttttcaaaaaatggccttacccgattattatgatactatttttttagggattagtgttttggctgtggtaatgattttactgttatttttctttaacactagtttaggacaagcctatattgcgacaggtgacaatgaagaaatggctcgctcgattggcattcaaacggatcgcatgaaaattttaggattggttttatcgaatggcttgattggcttatctggcgctttgattgcccaaaatgatggatatgcggatgtaagtaaaggaaccggtgtcattgtgattggcttggcttcactcattattggtgaagtactgtttggagaattaacgtttggtgaacggctgatggcgattgttgtagggagtattatttatcaactattgattttattagtgattaaattaggctttgatacgacgtatttgaaaatcttctcagcagtgattttagcaatctgtttaatgatcccacaattgaaaaaagcattacgactacacggcttttctgataagggggaaacgaaatga

SEQ ID NO: 465 - DNA, 1815 bp, Enterococcus faecalis
  misc_feature (1800)..(1800): Nucleotide 1800 is "n" wherein "n" = any nucleotide.
ccaattccgtgggcaagagtctttgaaaatatgggctgttcaggtggtgaaacatctaaaacaatggatagcttaaagaaaagtatccaagggctgcctacgccgttagatagcgctattaaaggtgttcaattaatcgcttcatcaacaaatgatttaggtaaatcagaacagattttcgcagctttaaataacggtatcctcggttttggtggttctgctgaaatggtagaaaatgctattatccagctgtcccaatcgttctcaaatggtaaagtagatgctgaaacttggaattcaatgattaatagtggtttaggaccagcattaaacgctttagcaaaacagatgggattaacagctggacagatgaaagcagggctttctgatggctcaatttcagttgaagaatttcaagatgctttaatcaaattaaataaagaaggcggtggcggtcttaaatcattagaacagattgctaaagattctaccgctggtattaaaacaggtttagctaacatgaagactgcaatcgttcgtggtgtggctaacgttgtaactaaaattgacgaaggcttaaaaagtgcaggttttggaagtattagtgaaatcattgctgacaaaggggcaaaaatggaagcagctttatctaaatttgccgagatgattccgccaatgattaaaacagccaaaacattgtatgatacgttaaaaccttatgctccattgcttgcaggtttagctggcagtattggaacgttgatgcttgctaaaaaagtaagtgcagcattcacggcttggcaaaaagcaacagaaggattatcaattgcgcaagcgatacttaattcaactatgttggcgaatccgtttgtcgctattttagctgcagttgtaggtttagttacaggatttatttatctttggaagactaacgaagggtttagggatgctgttaaaaatatttggaaaaatatacaagaatttatttctagtgctgcagaaacagttgtgaaagcttgggattccacaatgaaatttttcagtaacatgtgggatggcacaaaagaggctttttcgaatgctggcacatggatgaaagaagtacctggaaatgcagccgactgggttaaaaataagtggaacggtaccaaggaatttttcagtggactttggaattcaacaaaagaaggctcaaaaaatacatgggaaaatattaaacaaagtgctgctgacagtgctaaaagtgttggagaaagttttaaaaatggctttgataatgtgaaagattggtttaagggtgttggcaaatcaatatcagatgttttcacaacagcatttgattttgtctggaaatatattggtccatatgtaacaggaatcaaaaatgcgtttaaaatggttgttaacgctatgaaagcgaacattgaaaatgtcaaaatgatcgctgaaaatgtcgtcaccattctaaaaaatgttctattagctccaattcttttcattacatcaatgatcacaggtggatgggaagaggcaaaagaaaacatgattgccgtttgggataatattgctgaagctgctcagactatttggttcgggattaaaaatatcttttataacactgttacagctatttcctattcagtcacttctatttttaatggattgatgttgacaattaaaaagatttggattgatgtgaagttatttttcaccttactctggattgacataaaatatggagcgatcaacgtttggattgaaattaaatattctatcatcgaaacgttggataaatattantttggaagcaattag

SEQ ID NO: 466 - DNA, 1923 bp, Enterococcus faecalis
atacagaatttcaattggaaagtaggaattagcattatgtgtggaattgtcggaatgattggaaaagaaaatgtcacggaaagtttgattcaaggattaacaaaattggaatatagacgttatgattctgctgggatttgtgtgaatgatcaaagccaacagccccatgtagttaaggcagttgggggcattgccgatttagcagcaaaattaacgccagaaatcgatggaacagttggtattggtcatactcgttgggccactcatggcgaaccaactgtcgccaatgcacatccccatgtttcaagcgatcaacgctttgcattagtgcataatggtgtcattgaaaactttgaagaattaaaagaacaatttttaagtggtgctcacttaattggtgatacagatactgaaatcgtcgttcaattaattgctcattttgctgaaaatggtttttcaacaaaagatgcttttaaagcggctttagccgaaattaaaggttcatacgcttttgcattaatggataaaatggaccccaatattatctatgtagcgaaaaataaaagcccgttacttatcggtctaggtgaaggctttaatgttatttgtagtgatgcgatggcgatgattaaagaaaccaatcaatttgttgagattgttgatggtgagattgtaactgttacagcggacaaagtagtaatcgaaacgccagaaggacaagtaatcaaccgagaaccttttgaagcgcaattagatttaaatgacattgaaaaaggaacatatccgttttatatgctcaaagaaattgatgaacaacctgcagtgatgcgcaaaattgttcaagcgtatactcaaggtgaaaaagtgactttagatgaggcgttactggaaaaaattaatcaatgtaaccgaatttacattattgcttgtgggacaagttataatgcaggttgggtcggaaaatctttaattgaaacgattgccagtattcctgtggaagttcatttatcaagcgaatttggctacaacatgcctattttatctgaaaaaccgttcttcattttcttaagtcaaagtggtgaaacggcagatagtcgccaagtactggtacaggttaatgaattagggcatccatcacttacattaacaaatgttgctggctcaacattatcacgtgaagcggacgataccttgttattacacgctggaccagaaattgctgtcgcttccaccaaagcttatactgctcaaatcgctgtcttagctattttagcaaaagcaattggcgaagaacgccaaacattagcagccgtctcatttgatgtggctcacgaattgagcgtggtagcagctgtcatggaaaccttgattgatgaaaaacaacaaatgaaagccttggtggaagattatctgacgtatactcgaaatgccttctatttcgggcgaggagtcgaccattatgtgtctattgttcctgccccctctctcgtcctcttattctctctattcctcctctccccttcccctccgtttctttttttttcttctccttcttctctttctctctctttcttttctccttctcctttcatctctctctcttttttctctctcttctcattcttcttttcttctttgttctctctacttcttacttcttccttttttccttcttctcctcctctttcttcctctcctctctcatcatctctcttctttccttctctttctctcctcctctctcatttctcctccctctcttctctttctctccttccttctcccctctccctccttcttctcctgcgccttcctccctcttttctctcttccctctctccttccttcgttcctctctcctctctcttcctctcctcctctctttttgctcttcttcttccttctttcttctttacttcctaa

SEQ ID NO: 467 - DNA, 285 bp, Enterococcus faecalis
gagaggaggagagaaagagaaggaaagaagagagatgatgagagaggagaggaagaaagaggaggagaagaaggaaaaaaggaagaagtaagaagtagagagaacaaagaagaaaagaagaatgagaagagagagaaaaaagagagagagatgaaaggagaaggagaaaagaaagagagagaaagagaagaaggagaagaaaaaaaaagaaacggaggggaaggggagaggaggaatagagagaataagaggacgagagagggggcaggaacaatagacacataa

SEQ ID NO: 468 - DNA, 261 bp, Enterococcus faecalis
agaagaaagaaggaagaagaagagcaaaaagagaggaggagaggaagagagaggagagaggaacgaaggaaggagagagggaagagagaaaagagggaggaaggcgcaggagaagaaggagggagaggggagaaggaaggagagaaagagaagagagggaggagaaatgagagaggaggagagaaagagaaggaaagaagagagatgatgagagaggagaggaagaaagaggaggagaagaaggaaaaaaggaagaagtaa

SEQ ID NO: 469 - DNA, 1314 bp, Enterococcus faecalis
  misc_feature (718)..(718): Nucleotide 718 is "n" wherein "n" = any nucleotide.
tttaaaaacgtttatttttttttcccacaaaaaaaaaggggccccccccccttttttttttttttaaaaaaaagggggggaaaaaaaaatttggggtttttttttgcgattatgccgttaacaattattggatcgatttttatgttgattacagattttccagtagcagggtatggcgattttatggctggaattttcggtgcaggttgggcggatatgatttcacccgcttatcgagcaactttcaacatgatgggaattatttttgccgggacgatgtcctataaattggcggaaagttacgaaatggatcgtttaacttcattaattttaggaattgttgcttacgtagtcgttttaccgaaaacggtgaccactgaatcaggcgaagttgtgacgaaagttttatcgtttgattggttaggaacgcaaggggtgattacggccattattatgtcaattctttcggttgagttgactcgtttctgtattaagaaaaaattagtcatcaaaatgcctgacagcgtgccttctatggtgagccaagcttttagtgcattgattcctgggatttttgtggtagcggtggctttattgattaatgggattgggctttcgtttgcggattccttcccacaattaatttatgcggtgattcaagcgccactgcaaggtttaatcggaaccccttttgcaattattattgtggctggcttanatggactgttctggtggttcgggattcatccaactgtcatcaattccatgctatatcctattttatatgcgaatgcagacaaaaaccaaagcttagcggaattaggacaattaactgctcaaagtggcaactttggcacggtccaaatgctcgatcaatttgctacaattggaggcgctggttgcacgattggcttggctattgcaatggccatcgtcggacattcatctagaatgaaagccatgtcgaaaatttcgtttgttccagcatttttcaacattaatgaacccttgatttttggactcccagttatttttaaccctttattattgattccgattgcggtcgcgccgattgtatcggtcttgattgcctttctgtcaatgaaaattgggttcatgccaatgtttacaaacattcaagcaccatgggctacgccctttctgttttcgggctttttagtgggaaaatggcaaggtgcagtgacgcaagttttagctgttgccgctagtgtcgttatttattatccatttgtaaaagccttagatcgacaatatcaaaaagaagaagcccatgaagtaccagaaacattgtag

SEQ ID NO: 470 - DNA, 264 bp, Enterococcus faecalis
atgtttgtaaacattggcatgaacccaattttcattgacagaaaggcaatcaagaccgatacaatcggcgcgaccgcaatcggaatcaataataaagggttaaaaataactgggagtccaaaaatcaagggttcattaatgttgaaaaatgctggaacaaacgaaattttcgacatggctttcattctagatgaatgtccgacgatggccattgcaatagccaagccaatcgtgcaaccagcgcctccaattgtagcaaattga

SEQ ID NO: 471 - DNA, 309 bp, Enterococcus faecalis
atcgacaatatcaaaaagaagaagcccatgaagtaccagaaacattgtagagaaagaggagtgaaggaaatgcatgttgagaatgatgaaaatatttgctgtgaagtggaaaaaggaatggaaaaaatgtatcatccgatggtgcccgagttggttcaaacctcttccttttattttccaacttacgaagaatttatggcagcgagtatagatgaaaaaaataattatgtttacacacgttggcaccaaccccacaacagaaattttagagaaaaaaattgctcgtttggaacgtggaaaaaaatgtaa

SEQ ID NO: 472 - DNA, 243 bp, Enterococcus faecalis
atgaaaaaaataattatgtttacacacgttggcaccaaccccacaacagaaattttagagaaaaaaattgctcgtttggaacgtggaaaaaaatgtaaagtttttgcctcaggaatgggcgctatttcggcaacgctgtttacgttgctccaacaaggtgatcatgttttaatggtcaatacaatttatggaaaaatctgtttcgtttgtgcaatatttagaaaaaatttggggtttccttga

SEQ ID NO: 473 - DNA, 888 bp, Enterococcus faecalis
  misc_feature (386)..(386): Nucleotide 386 is "n" wherein "n" = any nucleotide.
caggagaataatagcatgtataatcacgtttatttaaaagaagatatagatgctttaataaatgaatttggaaaattgaatgctgaggatgaatctttatttagatttctaagtaaaaagattatattcttaaaggaaataaaaataagtatagtaaatactactgtgatattttatatagaccaaatgatatcggatttaatgtacttaatggctagttatcataagggtgaagtgagatatttttatttaaatattagatcagtaattgaggcattttcccgtttgtttagtgaggtagaaacaagtactaatagaataactatgacaactttattagataatatagctaactacattactttaaatgatttgcgtgatagtanagaggattctctggactatcctagactaaaaggtctttatagagaatgctgtctttacgtacacggaaatattaatgctaaatattcattaattgagttttacaacgagttgcttaatgaagaaataactagtgctcaaaaaagaaaaatgagcaatgatattaaattcttagcgagtattttaactaatatttcttgctacagatactcaattactttaaatgatgttttttttagaggtaagaataaacttggctatttgataggggaatttggtgttaaaatagtaaaaacatattcgaactttatattctcatgtttatcaggaggcgagtctatatataatgtggttttaacatccaaaaaaggaagtaagttaaaagtgatagattttaattctgatgaatatgagatgtcttattgttttagaccagatactctattttttgaagattatgatgtctattcaaaatgtatacttaaaaaaaagagctatcgttaa

SEQ ID NO: 474 - DNA, 345 bp, Enterococcus faecalis
ttcaccagattttctacttgggtccatgcttatgccaatagtttaggaggctcaacaattggcaaactactttctttattcgtcggagtcctgatttttacatttggctgcgccttatacatggctacagatcaaggcgagtccccctatgatgcgattgcgccaaccatctgtcaacaaaccaacaaaccttacgcttctgttcgaaaagcacaagatttgttggtcctattaattggctttattgctggtggtccaattgggattggtacaattatttgtgcatttggtgctggcccacttattagtttctggaacaagttacttcaacctttagtaaaataa

SEQ ID NO: 475 - DNA, 555 bp, Enterococcus faecalis
ttgctcattagtgagagcttagcggtttcgcaggccacgactacttttattgatcaattgcgtattttggcgccttttgggaccgataatactgttccaacttttgtatttaaggaaatcacgcctacgcaaattcggcaaattggtgcagataatgcacatctgaaatttcaaatgaatcaagaaggggcacaattggatgcaattgcttttcaaatggggcctcaagcggatgaactagcacaaggaaccgccgatgtggcaggccaactttccatcaatgaatggaatggtcgtaagaaaccacaattaatggtgactgattttgctgtattgggaagacaattatttgattttcgtggcaaaaataatcaaacgaaaccaattccttcagaagcaacagcttatcttttgtttgatgaaaaaaatcaaaaattcatttcagatccaaccgctaatattattgtttggtcaaaccaagaagaattggtggaagctgtttctcaaaatcaaatcgaacaactgtttttgtcaacgtctcgaccacgggaagga

SEQ ID NO: 476 - DNA, 354 bp, Enterococcus faecalis
ggtggaaccatggcatttacaacaacggctgctgttgaaggctcaacagttttttacaaagtacatcctagtgcaaaacgctatacattaaaagataacggctttactgaaacaaaatcagggaactttcaattgattcgttccttagatccaacgcctcagagaaatgaaggcttcaaattgaaaattacgatcactgctgatctaaaagagttgaaaatgtccattacaacggcaaatggtttaaaaccaatgaatattttcaagaatgaacaacatgaaatgagtaaagaaaaatactttttcttaatggatggcttaattagccgtggtgtattagagaaagtagaataa

SEQ ID NO: 477 - DNA, 444 bp, Enterococcus faecalis
aatgatggtgataaaatggcagataacagcaaaacgcgtgtcgtggtaggcatgagtggcggtgtcgattcatctgtcacagcgttgcttttaaaagagcaaggctatgatgtaattgggatctttatgaaaaattgggacgatacagacgaaaatggtgtctgtaccgcaactgaggattataaagatgtcgcaaaagtagcggatcaaattgggattccgtattattcggtcaattttgaaaaagaatattgggaccgtgtgtttgaatattttttagcagaatatcggttaggacggacaccaaatccagatgtcatgtgtaataaagaaattaaatttaaagcattcctagattatgctatgcaactaggcgctgactatgttgcaactggccactatgcgcaagtagaaacagatgaaaatggcgtagtgcatatgtga

SEQ ID NO: 478 - DNA, 600 bp, Enterococcus faecalis
cgtggaattgacaataataaagaccaaacctattttttaagccaattatcacaagcccaattggcaaaaacaatgtttccattgggtggcatggaaaaatcagaagttcgtgcaattgctgaacgtgctggattagccacagccaagaaaaaagactcaacgggcgtttgttttattggtgaaaagaatttcaaagaatttttgagtaattatttaccagctaaaaaaggcaacatggtgacagaagatggcgaaatcaaaggacaacatgatggtctgatgtattatactatcggtcaacgccaaggcttaggaattggtggcggcggtaaaacacaagaaccatggtttgtgattgggaaagatttaactaccaatacattatatgtgggacaaggatttcaccatgaaaaactatatgcaacacatttagaagctagtgaggttcattttactgttgatacaccaatgccaaaagagtttgactgtacggctaaattccgttatcgtcaagcagatattccagtgcatgtttccttatctgaagatcgcacaaaagcaaccgttaagtttgtcttcacgcccgggaatcggcgcaac

SEQ ID NO: 479 - DNA, 1347 bp, Enterococcus faecalis
atggacgcaaaacaatatgttaaaaatattcaagaaaaaattcaccaattagaccaaggtcaaacagaatatttacaagcagtcgatgagtttttaccaaccgtagaaggttttttagaaaaaaatcctcaatacattgaagcaaatgttttaggtgtcttgattgaacctgaacgtatttttcaatttcgtgtgccgtggcaagatgaccagggcaattggcatgtgaacagaggctatcgtgtccaatataattcagcgattggaccatacaaaggtggtttgcggtttcatccaagtgtgaatttaagtgtgatgaagtttttggcctttgaacaaatttttaaaaatagtttaactggtttgccaatcggtggcggcaaaggcggtagtgattttgatccaaaaggtaagtcagatgctgaagtgatgcgcttttgtcaaagtttcatgaccgaacttcaaaaacatattggtccaagcacagatgttccagcaggcgatattggcgtaggcgctcgtgaaattggttatttgtttggcatgtataaacgcttgcgcaactatgatgcaggagtgttgactggcaaacctttaggatactggggaagccaagcaagaacagaagcgacgggttatggaacggtttattttgttaaacatttattagcagataaaaacgatacgtttgaaggcaaaaaagtcgctgtttctggtagtgggaatgtcgcaatttatgccatggaaaaagcaactgagctaggcgccacagtaatcacatgttccgattcgtctggttttgtctatgatccagaaggaattgatgtggcgttagtaaaagaactaaaagaaaaaaatcgtgagcgcatttcaaaatatgttgaaacacgtaaaggcgcaacttattatgataaagaatctgtttggaatttcgaaacagcgtatgacattgcgttaccatgtgcaacacaaaatgaaatcaacgaaaagcaagccgctattttagtgaaaaacggagtgaaagtcgtggcagaaggcgcaaatatgccttgtacactagaagcagtcgccgtttttgctaaatcagctgtaatttattgtccaggcaaagccgctaatgcaggtggtgttgcggtttctgcattagagatgagccaaaatgctgaacgtttagcttggtcctttgaaaaagttgacggtatgctagatcaaattatgcaaaacatttatgagacttgtcgtgatacagctaacgaatatcaggcacgagataactttgttttaggtgcgaatattgctggctttgaaaaagtagcggcagcgatgctaagtcacggactcgtttaa

SEQ ID NO: 480 - DNA, 801 bp, Enterococcus faecalis
tcaaacgtttattttttccttaaatccagaaaaaatcccgtaattatggtacactacctattgaattggaggagaactatgaagaactttgatgtaattattgtcggtgctgggacgagcggtatgatggccacgattgcggccgccgaagcaggcgctcaagtattattgattgaaaaaaatcgccgtgttgggaaaaaattattaatgactggtggcggccgctgtaatgtaaccaataatcggcccgcagaagaaatcatttcatttattcctgggaatggaaaatttttatacagcgcattttcacaatttgatagctatgatatcatgaacttttttgaatccaatggtattcacttaaaacaagaagatcacggacgcatgttccctgttacagataaatcgaagtcaattgttgatgcgctatttaaccgcattaacgaattaggagtcactgtttttacaaaaacacaggtcacaaaattactacgaaaagacgatcaaataattggcgttgaaaccgaactggaaaaaatttatgcaccgtgtgttgtattaacaactggcggccgcacttatccttccacaggagcaactggtgatggctataaactagccaaaaaaatggggcataccatcagcccgctctaccctaccgaatcacctattatttctgaagaaccttttatcctggataaaacgttgcaaggtctctctttacaagatgttaatttaactgttttgaaccaaaaaggaaaacctttagttaatcatcaaatggatatgctgtttacacat

SEQ ID NO: 481 - DNA, 216 bp, Enterococcus faecalis
gatttttttgcgaagttgcccactggctactcccattcaacatattatatatttaatatccataaaatcacaaaaggaatatacacaataatgaatatttattcaacggttgataatccaacaaaaaagagcatgggacaaaaatcactttggatttttgctccacgctcaaaaactgataaacggcgggaacagaagcaactccttcggaaataa

SEQ ID NO: 482 - DNA, 945 bp, Enterococcus faecalis
gaaattcctttaactgaaaatgatttagtattcgtaacgaatggctcaattactgaaagttcgacgcaaggagatcatcatacaccagcaccaaatactcatgaactagggagaagtttgaatctctggaaacacttagcaaaacaatccccagaatttgggcacccagaagttttctgtgaaaatttaccagatgaaagttggtttgtctcagcaacgattacgtgggaaaatttcgatattgaaccgtatctttctcggttaacacatcgtaaattacgcacaggaaaaattgtcacaggtggtattattactatcaaagactctaattggatgatgagtttcgctatgcatagacaaccgcattttaaagaacaaaatgatcaacaatctataacttgggtatatggattgctttctaataaaccaggaaattatatcaaaaaaccaatcgaacaatgtacaggccaagaaattacgcaagagttactttatcatttagggttcccggaaggggaaattgaacgtatttcagaagaatcggctaccactattccggtttatatgccgtttatcacttcttactttatgttaagagaaccaggcgatcgaccattagttgtaccaaacggctctaaaaatcttgctttcattgggaacttcgcagatactgaacgagatacggtgtttacaacagagtattctgtacggacagcgatggaagctgtttatcaattgctagaggttgaacgcggagtaccagaagtgtttgcttctgcatacgacttgcgcgtcttagcaaactctgtttattatttatctgacaagaaaaaattaacagaaatggatatgccgttcgtggaacgcaaaatggttgaacactttgtgaagaaatttgaggatacgtatattggtgatattttaagagaaaatcatttaatttag

SEQ ID NO: 483 - DNA, 375 bp, Enterococcus faecalis
aaaaagtgtggcttgatcatgaaggataatcgtatcaccgtaaccgatattccaaacacaaacttaaaaaaaattactttgaagaacgactttttagaagtcgttcttctcaattatggcgcgcgcctccatcaacttttgatgccaaacaaaaataatcattgggaaaatatccttttatcgtatgattcgtatcaagatgtattaaaggatcaaagcttttttggtgccactgttggaccagttgctggacgcatacgtaatggccattggcaaaatggaatattagaacaaaacagcgacggtcatcatatccatggtggctcaaaggggtgtcttttcaatattggacagtcgagctcttcaccacggaat

SEQ ID NO: 484 - DNA, 696 bp, Enterococcus faecalis
ttttaccgatcagaaaggaagaagttcatgtttaaaggcgttttgtttgatttagatggcgttattactgatacagcagaatttcattaccacgcttggaaaaaattagggaacgaaattggaatttccattgaccgtgttttcaacgaacaactgaaaggtgtaagccgtgaagattctctgcagttactgttaaaatacggaaaaaaagaaggcacgttttcttctgaagaatttgcccagttagcgcaacggaaaaacgattattacttggaaatgatccaagcgattacgcctgaagatgtctacccaggaattctttctttattaacggaattacgtgaagccaatattaaaatcgccttggcttctgcaagtaaaaatgggccttttcttttagaaaaaatgcaattgacgcccctttttgatgccattgctaatccagcagacgtccaggcaggtaaacccgctccagatattttcattttagctgcgaaagaaattgatttgacaccagcagaatgtcttggcattgaagatgccaaagctgggattcaagcgattcttgctagtggagcgcaacctgttggcgttggccgcaaagaagagttaggcgaagggttgcctatcgtgccagagacgagcgctttaacgtttgattacttaaaaaaagtgtggcttgatcatgaaggataa

SEQ ID NO: 485 - DNA, 387 bp, Enterococcus faecalis
gctgctgaattaggcatggaagaaaaagcagtggaaatgtatcaacgaacagcgcgccttgacttagataattacaataatgatacagaagatggcttacacattacctcaatgactggtagttggctagcgattgttcaaggttttgcccaaatgaaaacggaccatcaacaactaaaatttgcaccctttttaccagcgacatggacagcctactcattccacattaattatcggaatcgtttactatttgttgaagttgcagcagaccaagtggccttcactttactcgacggtcctgcaattccattaactgtttacgatcaaaaatacacgttaaaagatcgattagttttaccgatcagaaaggaagaagttcatgtttaa

SEQ ID NO: 486 - DNA, 540 bp, Enterococcus faecalis
agactggaagagcaacaaacgtatcgatataacgcattaaaaatgaatggtttttctgaactggatattcaaatgattatggatagtgaaaagaatccgcctattccatatttagaagctttaaaaaatagtcgaggaggctatacgacaccaccagaacgttcattagtgaaatatttggttgccaaatcaagcttaccgactagtgtgattaatattttgattaactatgtttacaatattcaacaacaaccgactttaaaagcggagtatgtgaatcgaattgcgaatgaatggggacaaagtggcattcatgcaccagaaaaagcaattgaacatgtcagagaatcggcaaaacaaagccaaaccaaacaaaaacagcgacaacaaaattattcagggaaacgccaaactgttcgacaagagcgattgccagaatgggcagatcagccaaacgatgaaacaaaactttccccagaagaacaagccgagttagatcgacaaattcaagaatttttaaaccaaggaggtgaccaatga

SEQ ID NO: 487 - DNA, 936 bp, Enterococcus faecalis
ccaatgatggaagacgtaggaaaagaaatgtcaaaaattatccagaagcgtgacatcaatgaacgatatgaagagctggttaacgaagtattgaaagatcaagatgttcaagcctttatacaagcaaaccgagagcgtttaaccgatgaagatattcgtaaaagttatgctaagctgtatgaatttgttcaagaaaaaaagaaatttcaagtaaacgatccggcaatgattgcccctggctatgagccaagattaatgttgaattttcattacattgatgtaacgtatgtcccaacggctgatttaatcgcccgtcagaaggaagaagaaattcgtaatcgagtaagggcaatggacatgccaaaagatgtccgagaagcaaatttacgagatttcgatccatcttctcaaggtcgagccaaagcgttagcagaagcaatgcaatttttaagagaatatcctgcgacaccaaaagaatttcataaagggctctatttacaaggccccttcggtgtaggaaaatctttcttattaggtgcgatggctaatgctttagcagaacgtggatttactacgacaattgttcattttccaacatttacagtagaaatgaagcaagccattggtcgcgatcaagttggtgaaaagctcgatgcagtaaaaaaatcccctatattaatgattgatgacattggtgcggaatccatgactagttggattcgtgacgacgttttaagcgtaatcttgcaataccgaatgcaagaacaattagttacttttttctcttccaatctagatttaaaagctttagaagagcatttaaccgtgacgcaacgaggagaacaagagccgctaaaagccagacgaattatggaacgtgtgcgttatctgtcaaaagagattacgatgacaggaaatgatcgacgaaacggttaa

SEQ ID NO: 488 - DNA, 1419 bp, Enterococcus faecalis
ggagttttttctttggctaaaaaaattaacaatgagtacaatgatgcctctatccaagtcctagaaggattggaagcagtgaggaaaagacctggtatgtatatcggttcaaccgatagccgtggactccatcacttagtctatgaaattgtcgataacgcagtcgatgaagcgttatctggctacgggaatgaaatcaacgtaactatccaaaaagataatagtatttgtgttgcagactctggccgcggaatgccaacagggatgcatgcttctggtatcccaacagtagaagtaatttttactgtcttacatgcgggtggtaagtttggccaaggtggctataaaacttcaggcggactccatggggtaggtgccagtgttgttaatgccttatctaagtggttagaagttcatattgttcgtgatggcgtagaatacatggaacgatttgaggacggcggtaaaccagttggtaccttaaaaaaaatcggcaaaacaaaaaaacgcaacggtacctccgttacttttttacctgacgacaccattttctctacgacaaatttttcttacgaaattttagcagaacgtttgagagaatcagctttcttattaaaaggcgtcaaaattactttaacagatgaacgtggggaagaacccaaagaagaagtcttccactacgaagaaggtattaaagaatttgttgcctatctaaatgaagaaaaagatacattaacacccgttgtttatttttcaggagccaaagaaggtattgaagttgaattagcttaccaatacaacgatggctattctgaaaatgttttatctttcgttaacaatgtccgcacaaaagatggcggtacccacgaagtcggtatgaaaacgtcaatgacgaaggcgtacaatgaatatgcacggaaagtgggactattaaaagaaaaagataaaaatttagaaggtagcgacttccgtgaaggcttagcagccgtcctttctattcgagtaccagaaaacttactacagtttgagggccaaaccaaaggaaaattaggtacacctttagcaagaaccgttgtcgataacgtcgtaggcgaacaaatgggcttctatttacaagaaaacagtgaaatgagtcaatcattaattcggaaagcgattaaagcccgtgaagcccgtgaagcggctcgtaaagcccgtgaagaaagccggaacggtaaaaaacggaaaaaaggtgaatcgttactttctggaaaattaacaccggctcaatccagaaatcctaagaaaaatgaactatatcttgtcgaaggagactcggccggtggctcagcaaaacaagggcgcgaccggaaattccaagccattttaccgctacgaggaaaagtcattaataccgaaaaagcgaaaatgcaagactag

SEQ ID NO: 489 - DNA, 1341 bp, Enterococcus faecalis
aaaccgttggaggaaccgccacaaaatgttatttttatcttagcaacgactgaaccacacaagattccgttaacgattatctcacggacgcaacgctttgattttaagcgaattagtacgcaagatatcgtcgatcatatggcccatatcatgcaggaaatggctctcgattatgaggaacaagccctttatgtgattgggcgtgctgcggaaggtgggatgcgagatgccttgagtatcttggatcaaacgatttcctttagtgatgaaaaagtaacactggaagatgcaatgcaagtgacaggcagcctaacctatgaaatgatggatcattatattcagtgctgtgtcgccggtgatgttgaacgagcattagaaggcttggaaagtattttaggcgaaggcaaagaagcgcgccgtttcttagaagatttgttattatattgtcgagatttgctgatgtatcagcaagcaccgaagttattagcagaaaaagcaggaactttgacagaagcatttaaggaactagctacacaaacgcctgctgaaaaaatctaccaactaatccaaattttaagtgacacacaaaatgagatccgctttaccaacaatgcgaatatctatctggaagtagccactgtcaaattagctaaaacggtgcaacccaataaacacaacacgccagaaacagctaatcaagatggtagtgcagagggaaatccagaattagcagatttacaaaatcaaatcgggcaactgaagaaagaactggctgaattaaagaaacacggtgtagctgccaaagaagcagatgcgccacgtcaacaagcacgaccacaagcgccaaaaagttcgttccgtgtacccacagaacgcgtatatcaagtcctaaacgaagcgactagaacacatttaatgaatgtgaaaaatgtctgggaagacttactgcaaacattatctgtgactcaacgagcgatgctcaaggctagtgaacctgtcgcagcgagtcctaagggcatcgtggtggcatttgactatgagattgtttgtgctcgtgcaacagacgatgaagagatgcagttagctttcaataataatttaagccgtttgatggactatacaccagagatggtctgcattactagagaaagctggccaaaactaagacaaagttttattaaccaaaatcagggcagtttgaatcattctgaacctgaaaatgaaatggctcgtctagcggacgaaccgcctgtaacaaatgaacattcacaagaaaatccagtagtagatgaagcaatcgctatgtttggtgaagagcttgtcgaagtactagatgattaa

SEQ ID NO: 490 - DNA, 327 bp, Enterococcus faecalis
  misc_feature (243)..(243): Nucleotide 243 is "n" wherein "n" = any nucleotide.
aggagtcgaggaattatgatgcgaggaatgggcaacatgcaaggcatgatgaaacaagtacaaaaaatgcaaaaagaaatggccaaagcgcaagaagcactaaatgaaaaagaatttatcggtgaagccaccaatcaacttgtgacagcgacatttactggtgatcgcacaatgaaagatttgatcattaaagaagacgtggttgatcctgaagacgttgatatgctacaagatttagtcatnatggctgttcacgacgcgttagtaaaaattgaaaaagaaaccgaagcaactttaagccaatacccaaaagaatgccagaatcct

SEQ ID NO: 491 - DNA, 471 bp, Enterococcus faecalis
gaactggatattttctgcttttatccagctgatttttctttcgtgtgtcctacggaattaggggatatgcaagagcattatgcgcatttacaggaattaaattgtgaggtttactctgtttcagaagatagtcattatgtgcataaagcatgggctgacgctacagaaacgattggaaaaattaaatatccaatgttagccgatcccaacggtcaacttgctcgtttctttggcgttttagatgaagcttctggaatggcttaccgtgcttcatttattgtgagtccagaaggggacatcaaatcttatgaaatcaacgacatgggtattggtcgtaatgctgaagaacttgttcgtaaattagaagcttctcaatttgtagcagaacatggtgataaagtttgtccagccaattggcaaccaggagaagaaacaattgcgccaagcttagatttagttggtaaaatttaa

SEQ ID NO: 492 - DNA, 987 bp, Enterococcus faecalis
aacagagaaaatgttttgttcagctctttttctgaaacacagaaaaaagaggagaagcaagtgacagaagaaatctacgatttgattattattggtggcggctcagctgctttatctgcaggtatctatgcaggtcgcgcaatgatggataccttaattattgaaaaagacaaaattggcggacaggtaacgacgacttctgaaattgtgaactatccagcgattcgtcacacaacaggtccagaactaatggaagaaatgcgcattcaagcacaagacttcggtgtagcttttacaaacgacgagattattgatgttgattttagtcaaacgataaaaactgttcaatcggcgagtcaaacctatcaagcatatgcagtattgattgcgacaggggcctctgctcgtaaaattggtttccctggtgaaagtgaatttacaggacgcggcgtggcctattgttctacttgtgatggggagtttttccaaggcctagatatttttgtgattggtggcggttatgcagcagcggaagaggccgtttatttgacacgttacggtaaatcagtaacgatgattatccgagaacccgattttacatgtgcaaaattaactgcggaggcggctaaaaatcacccgaaaattaagattgtttataacatagaagtgaaagaaattacgggagatgattttgtccgaaaagctgtgtttgtcaataaccagacgggagaagaaacggtttatgaagcgccaaaagacagtacatttggtctgtttgtttttgctggaaataaaccaagtacagaaatttttgaaggaaaaattgccttagaccgtgggtatgtgccaacaactgagaatatggaaaccaatattcctggagtttatgcagcaggagatttacgaataaaagaattacgtcaaattgtgacggcggttgcagacggtgcaattgccgccactcatgcgcaacgttacgtgacagaa

SEQ ID NO: 493 - DNA, 657 bp, Enterococcus faecalis
aagagaggcgtttatactatgggtaaaacattaactggctttcatttgaaagtcattggggttatttcaatggtctttgaccatctattgcaattttttagttttttaggcgtgcctggttggttcggatggattggacgaattgctgcacctattttcttatttgaaagttctgaaggcttcattcacacaagcaatcggcgaaaatacatgttccggttattgttaggcttctggattatggggattctgaacggcattttaaatgcgtatttttcaacaggtggcttaattatcaataatatttttgggacgttatttttaggtacggtctacatgcagtctatggactattttaaacaaaaacaaattggtaaagggcttctttggtttattgtgcctttattaatcagtgccctacctctcgttgtttttagttctccagacatattaagcaaccctgctatcttaattggtttccaaattttcaatctgattgtgccatcactaatgatgacagaaggtgggtttttatttgttctcttggccgtagctttttatttattccatggcaaaaagtggttacaaatttcagcaattggcgttgttgcgttgatttcagcagccagctataatttccaagaactattcgggtga

SEQ ID NO: 494 - DNA, 207 bp, Enterococcus faecalis
aaagctacggccaagagaacaaataaaaacccaccttctgtcatcattagtgatggcacaatcagattgaaaatttggaaaccaattaagatagcagggttgcttaatatgtctggagaactaaaaacaacgagaggtagggcactgattaataaaggcacaataaaccaaagaagccctttaccaatttgtttttgtttaaaatag

SEQ ID NO: 495 - DNA, 390 bp, Enterococcus faecalis
gagaaaggagtttttttattgaaaaaatggtcattgcaacaagtcgtcttactcgcttttttagcctttttgtttggcggtgtttttatgggggcaggattcctctatgcgttattgaatgctgcgctgttaccattaggactgagtccatttgccaatgagcttttatttggaatgtggaccatggtggcaccaattgcagcgatgctgattccacaagcgggaagtgctgttttggcggaagttttagccgctttggcacaaatgctttatggttcgtatttcggtcctagtgtattaatttctggtgtgattcaaggtctaagtaatgaaagtggttttttgggtgacacgctacaagcggtacgatacactaacgttaccttatag

SEQ ID NO: 496 - DNA, 228 bp, Enterococcus faecalis
gttcgttatagtaagtattctatctcaaaaaaaacaatcacccctactttaataccttataacaagaaaaagctcagcgcaatcatcttgagaatgactgcgccgagcttcaatcttctaaagattcagctactgattgattacaaattaattttacatcaaacttttcagttcaacatctggatatttatccgcaaaccagcgttccgcaaattggttttcaaataa

SEQ ID NO: 497 - DNA, 1491 bp, Enterococcus faecalis
ctgaacaattattattatttgggggcgccatccgccaagctggaacagtcaaagggaaaaaaacagggaactttgccaaatctgactggatggcaaattgaaaaacaacggggaatttcggtaacgagttctgtgatgcaatttgactatcaagacaaacggattaatatcttggacaccccagggcatgaggatttctcaaaagatacgtatcggaccttaatggccgtggatagtgctgtgatggttattgacagtgccaaagggattgaagcacaaacgaaaaaacttttccaagttgttaaaaaacgtggtattccaatttttacttttattaacaaattggaccgtgacggacgggaaccattggaacttttagaagaattggaagaactattggatattgaatcttatccaatgaactggccaattggtatgggaaaaggcctagaaggtctatacgatatttataatgaacgcgtggaattatatcgtccagaaaataatggcggggagcgttttattcctttaaaagatggcgatataccaagcgatttaccattgcacaataacagcgtttatcaacaagtgttggaagatgttgagttattggtagaagcaggcgatgaatttagcgaggaaaaaatcgctcgtggtgatcaaacgccagtcttcttcggttctgctttgacaaactttggggttcaaacatttttagaaaccttcttacaatttgcgcctgcgccacatgcgcataaaacagaagagggtggcgaagtaagtccttatgaaaaagaattttcaggctttgtctttaaaattcaagcgaatatgaaccccgcccatcgtgatcgaattgcttttgttcgaatttgttcaggtgtttttgaaagaggcatggacgtgaccttaggtagaacaggcaaaaaagtcaaattaagtaacgtgacgcaatttatggcggatgcccgcgaaaacgtcacagaagctgttgcaggcgatattatcggcgtgtatgacacaggaaattaccaaattggcgatactttgtatgaagggaaaatgaatgttcaatacgaagagttgccgtcatttacccctgaattattcatgaaagtgactgccaaaaacgtaatgaaacaaaaatctttccataaaggaatttaccaactggttcaagaaggagccattcaattatacaaaacatatttaacggaagaatatatcattggcgccgtaggtcaattgcagtttgaagttttccaataccgaatgtctaatgaatacaatgctgaagtggtaatgacgccaatgggttctaaaattgcccgctggattaatccagaagatttagatgaacgcatgagctctagccgaaacattttggcacgggaccgtttcgatcaacctttgttcttatttgaaaaccaatttgcggaacgctggtttgcggataaatatccagatgttgaactgaaaagtttgatgtaa

SEQ ID NO: 498 - DNA, 528 bp, Enterococcus faecalis
ggaggacaaataaaaatggatttaagagattacattgcaagcattccagattatcctgagaaagggatcgtgttccgtgacatttctccattaatggctaatggggatgcctatcgtgaagcaacgaaacaaatcgtggattacgcgaaagaaaaaagaattgatatggttgtaggaccggaagctcgtggctttattgtcggctgtccagtggcttatgaactaggggttggctttgctccggttcgtaaaaaaggaaaacttcctcgtgaaaccatcgaagtgacttatgacttagaatatggttcagatacattaacgttgcacaaagatgccatcacaccaggccaacgtgttttgatttgtgatgacttgttagcaactggtggtacaattaaagcaaccatcgaattagtcgaacaattaggtggtattgtggttggttgtgcgttcctaattgaattaatggatttacatggccgcgataaaattgatggctacgatattgttaccttaatggaatactaa

SEQ ID NO: 499 - DNA, 438 bp, Enterococcus faecalis
ccagattcttttgagcttttaaaagaattaggtgttagtgaatgcttattagtagaagatttcttagcaactcctgttaaagcattgatgaaacagcgttttgcttttgcaattgacaccactggtggggaaattacttctgctgttttaccacaacttcgttatgatggccgttcagccatttgtggccgcgctgctggaattacattagagacaaccgttttaccctttattttacggggcgttcatttattgggcattgattcggttaatgttggtatggacaaacgaaaaatagtctggcaacgtcttgccactgatttagatatcactgaaaaagctgtgtatcaagagattactttagaagaacttccccctgtttttgaagcattacaagcaggccaacatattggacggaccattgtccgaatttcttaa

SEQ ID NO: 500 - DNA, 789 bp, Enterococcus faecalis
ggaggcgttttgattatggatgttttagttactgctggcggaacgtcagaaccgattgataatgttcgttcgattaccaatcattcttctggcggactaggaaaagcaattgctgaaagttttttagctgctggacacaccgtaacctacgtaacaaccaaacatgcattacgtccaacccaacaattggacttatcaattaaagaaatagaaacaacggttgaattagccactacgttagaacaactctttgctgaaaagcaatttgatgcgattgttcacgcaatggcagtcagtgattttacgacggaaaccgcgcaaacggaagaacaatttattgattcttttgctcaacaattaagcgaacaaacattgccaaagaccaaagaagccttggtaactatcgttcaaaacacattgaatcagattgctgatattcctcaaacagcaacaaaaatttcatctgatacggaccgattattaatttttctaaagaaaaatcctaaagtcatccaaatgattcgtgacaagcaaccccaaactgttttagtgggctttaaattacttgtcaacgtttcacaagaagaacttgtccaagttgcacaagccgctttggttaaaaatcggtgtgactttgtcttagccaatgacttgatgaacgttcatgaaacagaacacaaaggattattaattaacgaaacgggcattgtccaagaagcttattcaaaacaagggattggttcaatgatcgttaaaaatgttgaaaagaaatggagagaacaacaatga

SEQ ID NO: 501 - DNA, 1665 bp, Enterococcus faecalis
aatcgagcccgatcccaaacggcccgtttacttagtaactgtccgtggctttggctaccgttttcaggagccaaaacgatgaaaaagagactgcggattgaatattttttagttgcggcagtcatgcttttattatttgtcgggagtattgcagcgaccaattttttctttcaaaaagaaatggttgctcagcaagaaacctatttaagaagaaaaaatacccttttaacagaccagttgcccccttccgttttcgaaaaagggcaactgacaaaccaacaacaactccttgtcacccatgcgttagatgatgcagaagaacgggtaactttgttgcaaaaaaatggtaccgtcttttttgacagcagccaaaatgaaccgctagagtcgcacaaaaaacgacctgaaatcgctgcggttctatcaggagctacctatggttcagctttacgaaagagtaaaacgttaaataaagaacttctgtacgttgccacgcctgttttaaaatcaggagaaatcgttggcattattcggatttcggaacaaaccgcgctattttctaaaaatattcaatcttttcgtcgctatattatctttacatttggcatcttgttcctactaattaccttgtttatctttttattgttacggcaaaaaaatcaaccgctagtgactgtcttaccgattctgaaacgaatgcttaaacatccagatgaaaatcgatccattatccagcaatcttctgaatggaatgaactttacgaaactattaacctactgagtcaacaagtaagtcaaacgtataaagcgtatacgtctgcggatgagcaatttcacgaacttttagatgagttgatgattggtgtctttatcattgatacgcaaggacggcttcgtctgttgaaccctaaaatgcaggaaatgttaggactctctgctaaaaatatgcaaagcaattatctcgaagtgattcaagacgccgatttgattcatttaatccatcaagtcgtcgctgaaaaaaacagtttacatcaagaaatcactgtgacacaaggaccaacacctttacgattagatctttctcttcgttacttggatgatcaaagcgccaatgattatcaagtgttaggaattgcctatgatttaacgcgcgttcgccaactagaaaaaatgcaaaaagattttgtatcaaacgtgtctcatgaattaaaaacgcctgtcacttctcttttgggctttaccgagacactcatagacggtgccaaagaagatccggaagtccttaatcaatttttgcacatcatgcaaaaagatgcccagcgtctgcaacaattaattcaagaaattttagaactttctcggggcagcgcgacaattccttatgcagaacaagaaattactttagaaaaatttattacagaaattctcggttcttatcagcaacaattggcagcaaaacagctgaaaacagtcgttcatggtctgccagagagccagtttttcaccaaatacgaattgttttatccaatcgtgaagaatctaattgaaaatgccattcagtattcccaagaaaatggtcagattactatttcttatgctagagcaaatccccaattacgtttatcttatcaagacataggcatggtattaataacgacccccccc

SEQ ID NO: 502 - DNA, 393 bp, Enterococcus faecalis
tggggccatcccgtggtgaagacagttattttccgtcgtttaaaacctaccacgaccgaaacgcttcaagaggacacacctaaagctccgcttgtgattggcgagattcgtgtggatgaacaaaattatgaagtctttgtgcgcaatcagcccattgagctaacaccgaaagaatttgaattactcgtttacttcatgaaacgcaaagatcgggtcattaatcgggaaaccttgttggaacgaatttggcaatatgacttcgctggacaaagtcgcatcgtcgatgtccacattagtcatttacgtgataaaatcgagcccgatcccaaacggcccgtttacttagtaactgtccgtggctttggctaccgttttcaggagccaaaacgatga

SEQ ID NO: 503 - DNA, 1341 bp, Enterococcus faecalis
tatcaaccccggtcgtcaagttcgggatacgaaaaagatcgaaagttttcgcctaatattcatttgttaatgaccttagctgcagttggttcagcattaatgggaagttttgaagaatcagcattgttgattttgatttttgcggcggcgcatttccttgaagattatgcccaaggcaaaagtcaacgtgaaattacaaaactattaaatttaaatccaacagaagctcgcctgataacagacgacggctcaattcaaactgtgtcagttgaacaattgaagattggtgaccgcgtgcaagtcctcaatggtgcgcaaattccgacagatggcgtcgtgattgaaggaagtaccgctgtggatgaatcatctattaatggggaaagtattcccaaagaaaaaaatagtggggacccagtttttggtagtaccatgaacggttcaggcacaattgttgttgaagtaacgaaagatagttcagaaacagtttttgcaaaaatcgtacagctcgtgaaccaatcacaagaaaatcaatcagaaattgcaagcaaaattaaacgatttgaaccgaaatatgtcacactagttttagcagtttttccactaattgttttaggtggcgcattgcttttccaattgacttgggctgaaagtttttacagaggcttggtcttcttaattgctgcctccccttgtgcattagcagcgagtgccgttccggcaactttatcaggaatttccaatttagcaaaacaaggcgttttgtttaaaggtggctcattcttatcaaatttagctgaagtgaaagcactcgcttttgataaaacaggcacgctaacaaaaggcaaacctgaggtcacagattatctttttgttgatggcttagaagatcgccaagaagaattagtagctgttttaacaaatatggagaaaaaatccaatcatccattggcgacggcgattgttaatcgctttgaagcagaaacaacggctttaaatttagaagtagaaaatattgtcggggtgggtttagtaacgaccattgcagaaacaacttttagaattggtaaaccatctagtttcgaacaagtgccaacaatcattgagaaacaaacaacgaaattagcaagtgaaggcaaaacggtagtgtactttgccgaaaatgaacaagtgattggtttggtggcattgatggatgttcctaatgaagaagcaatgaacgccattcactatttcaagtcacaaaatattgaaacaacaatgattacaggagatgcaaaacttacgggtgaagcagttggtcgcttagtaggcgtggaccaagtttttgctaatgtctaa

SEQ ID NO: 504 - DNA, 234 bp, Enterococcus faecalis
atagccggtcagtaccatcatcatattgggacaaatacatggagcggcaaacagctgccaacgattcaagaaaatcaatttggcttagaaaattacaccttccgtttaccaactgcggcagatttagagatagtccaagccaatgcggaagaagcaaagttacattttattgccaaagatcatttacttgcgttagaagatcctagcggcatgattattcaatttacctattaa

SEQ ID NO: 505 - DNA, 768 bp, Enterococcus faecalis
ggaagcatgttgattgaagaacgtttagccaagattcaaaaaatagtgaatgaacaaaaaagtatttccatggaagcgttagcggagcaagtctccgtttcaaaagatactattcggcgagatttaattcgtttagaaaaggaaggacatttaaagagaacgcacggtggcgctatctcagtgcagtctgaagcaactatttacgattatgctcaacgaatagtgaagcatccagagaaaaaacaagcgattgcccaaaaagtttgggcaaatattcccaaacaagcgtccattttttttgattcatcaaccacggtggaagcagctattcgagcgatggaaaatagtccgattcacgcgataacgaactctctcagtcatgcgctacttctagcgcaaatggatcagacaaaaattacagtattacctgggcaactgcataaacaacaactctttttgtttggggcagaaacagtcgctaaggttggggaatttgcccccgactatacattattaggtgtgtttgcgttatctgaacaaggattatttattcacacagaagaagaaggtcaagtcaagcggcgaatgattcaacaaggcaaacaagtcattgccttagcagaccaaacgaaattaaacaaaacgggtttatttaaaatttgcgaattaacagaaattgattgtttagtgacagatacacgacctgatgaaaaattctgtgagcagttagcgcaagcaggcgtaacgttgattgtcgcagatgaataa

SEQ ID NO: 506 - DNA, 276 bp, Enterococcus faecalis
tggaggataataatgaagcgaaaaattaattatacacatattgctgaacctactgtttttgagaatgtttttccaacgtatttgacgaatgaaacgatgatggcgcgcaagcagaaagtattacaacgaatggaaacagaaaaattcgatcaattggtcttctatgcagacaaagagcatggcagtaattttgaatacttaactggctttattccgaggtttgaagaaggacttcttgtgttaaataacgatcttcaccacaagttgtccccacac

SEQ ID NO: 507 - DNA, 861 bp, Enterococcus faecalis
attgtggttaagaagatttttctctatactaagtcttcggaaatcaaagaaaagaaaggagcgagtgatgtggttaaaaaaattggtttaagtataatgctcttattttttttcttaattatcgcactcccaatctatgcgtggaagattgacccgaatttagttcacgttaatcaggtgactttgggaaagaaaaatcaacgagaaccattgaatgttgtgcaactttcggatatacaagtttcagaattttatgagacgaagcggttagataaagtcataaaaaaagtcaatcgtgaaaaaccagatattatcgtttttacaggtgatttatttgacaattatgccaaaaatccgcaacaaaaagaaccgatgattgaaaagttaaaacagttacaagcgacaattggaaaatatgcagtttggggaaatcatgattatggtggcggtgcttttgcggtgtatgatgaagtcatggaggccagtggctttaccgttatgaaaaaccaaggagaaacagtaaccttagcagatggacgccgtctttttattggtggtttagatgactcgttattgggaaatccttccgtttcagaaacattatcctatcgagaaacgtatgactatgcgttattaatgacccatgaaccagatgtcgcggatgcatttgttggtacgggtacacagttagttttagcaggacatagccatggcggacaaatttggattcctttttatccaatcacaaatgttttagcagaaaagtataccagaggattgtatcagttggaccaagaaacgcaactatatgttaatacaggcttaggaacgaccgccagtattcaccacgagttgccgcac

SEQ ID NO: 508 - DNA, 618 bp, Enterococcus faecalis
gaacaagcaggtaactataaagatttaactggccaaaagtttggtgagttgacagtagtagcaccaacggcaaaaagaaaagaagggctgattgtttgggcctgtcgctgttcttgtgggagctatgcagaagcttcaagaagacaactaattcgtgggtatcgaacgaaatgtgctcaccaccgctatcaaacaatgttgaaaaaaaactatcatgaattagtcgtggtacggattgaaagtattcaacagacaatgaaagcgtattgtctgtgttcgtgcggacaatcttgctgggttcgctgtgaaaatttgttgaatggccataccaaaagttgcggtcatcgtaaaaagaaggattaccgacaaagagttgctggcgtaattccagggaagttacaaagtaaacgccccaaaaataatagcagtggacacaaaggggtgagccagaccgcttctgggaaatggctggcttatatctctttgaaaggcaagcgccataacttaggtatctttacgaaaaaaagtgaagcaattttagcaagaaaattagcagaacgtcgtctatttcaaccaattttacaacaagaaatagtgactataaataaggaagattag

SEQ ID NO: 509 - DNA, 663 bp, Enterococcus faecalis
  misc_feature (647)..(647): Nucleotide 647 is "n" wherein "n" = any nucleotide.
gggggcctcaacttcgtggtgggagacggcttatacgaatttattgatcatatgaatagtgttattcctttctttgaaaagcgaattacggtggaaacaaaagaaaaattaaagttgatttgttatcgctgggaccgcctatacttttcggtggctgcatttattcccgccaagcagagcagtttctttgaagagcggtttcctcaaattcatcgcgccttagatggttttatacaaaagacagagtcgctgtatcaaaaacgatttttaatgtatgaacgcgtgcatctatactatgattttatgttttgtttgttaaatgatcggtctttttgcgcaattgaaaaaacgattcatgtatttgttgatttttctggtggggaggattataaccgctttattgcaaaaattattgcttctttcaattatatggatgtcatgattgatcacaaattaaccttagaaaccgatttgtatttgtccgatttttatagttcgaaagtacggtgtcgtcaattgacatggcgtcatttgccggaaacaaaagattggcaagtatttgctgaggtggtcagagaactaagaaagggagagactcagaaaaatgagcactatgagagagacccaatcgagatgtggcgagaacnagaatacgagggatag

SEQ ID NO: 510 - DNA, 894 bp, Enterococcus faecalis
tttttccagaggatggagttcttttgcatgaaaacactcattaaaaatgtgcatatactaacaatggatgagcaattttcagaaatcaaagccggctatttagtgattgaagaagacacaattgtggaattagcaccaatgaccacacttgatgaaaagcgaatggctgcaaatcaagtaatcgatggtcaaaatggaattttaatgcctgggatgattaacacccatacccatgtaggcatgattccgtttcgttcgttaggagacgatgtgccagatcgactccggcgttttctttttccattagaacaattcatgacaaaagaattagtaggatgcagtagtgattatgcaattgccgaaatgttactgagtggtattacgagcttttgtgatatgtattattttgaagatgaaattgctaaaagttgtgaaaaaatgagtgttcgtgctttgctcggagagacgatcattgatatgcccacttgtgatagtccggagccttcaggcggtcttttttacgcggaaacctttattcgcaagtggcaaggccatccgttgattacgcctatgcttgcgccacatgcaccgaataccaattcaccagaagtgttggcgaaaattattgaacttagtcggcaataccaagttcctgtgaccatgcacgttgctgaaatgacttatgaaatggctgagtttgaaaaagcctatcaaaaaacaccaattgctttcttagaagaactgggttatttgagcgagccgtttattttagcgcattgtattttggcaacagatgaagatcttgcgagtttagctgctactaatggaaaagcgcgtgtcgctcattgtatcggtgcgaatactaaatcagccaaaggagtagcgccgaattaa

SEQ ID NO: 511 - DNA, 255 bp, Enterococcus faecalis
tccttgagcatgggtgggattttatcgcaagcaccgattgaacaattaggcgcttctttacaaaaagtccgacaagctatgcaagcgttaggctatcaaaatatgaatgaaatcatgtccttttctacactatcattacctgtctcgccagccattaaagtgacagattttgggatgatggatacgaagtcacaacgtttctatccattagtttttccagaggatggagttcttttgcatgaaaacactcattaa

SEQ ID NO: 512 - DNA, 198 bp, Enterococcus faecalis
aaggaggtggtatctatgcgtaacttcaaatatctttttgaagtaatctttgttatcgctgctgttttagcgacaactcttatttacggaccaatcgtaaatagattgcttttcttaggactttgtgcaattgcatttctatatgcaaccgacaaagttttagaaaaagttttaaaagtgaagattattcacttctaa

SEQ ID NO: 513 - DNA, 273 bp, Enterococcus faecalis
attaccaagaggagggaagtcatgatagaagaattattacttttcgttgagaagtttgttgaacgtatgaaacgtcagaaaaaagcattctctatttcagatatagaaaagagctataacttagaacgtaagaagttaggtaagagtgcagttaagttaacaaatatggaccgtctaacaattgaaagtcaattgttaaaatatcagattttacagcggacatataaaatgacaggttatcataaaccttgtcaagttgtgttttttagttag

SEQ ID NO: 514 - DNA, 342 bp, Enterococcus faecalis
aagaaggaaattattttggcaaatagaattcaggaaattgcattaacagaaaaaaatctaggaagtaaaattaaagctatttataaaacagaacgtgatatttatgtgaatggtgcgccagtacgtggtcgtgtattcactgcttcaagcgaaaaacaacgtgattttgaaatttttgtccctcatttacgaaattcacaaatgttgaatggtcgtgaagaagttaaattaattgatccagtagcacgaatcaatgtgaaacgaaataacattggtaatagtcgctcaattgatatggtagtttatgcaaaacgtgtagaagtagttggaggtaataaataa

SEQ ID NO: 515 - DNA, 465 bp, Enterococcus faecalis
cttacatttttaaactacctatgctattatttaataaaaaagattgggtatacaataattttgttatgtaaacaaaaaggaggttgtaaattgaaagaatttacaattataagggaaaaaaatgcagataaaaagactcaggcagcacaagaagtattgtttaatcttccagaatggtttggccttgaaaaagagacccgcaagtatatcgatatagctagcactttacctatgtgggtggcaaaggatgtagagaataaaatactcggttttataacactttcagaaacaagtaaagatacagtagaaatccattgtatggcagttaaaaagcggtatcatcgcaaaggtatcggcaagttattgatagaaagcgtggaaacgtattctaaaaataactatttttttattcaagtcaaaacagttgacgaaggaagtcatatccgtcttcacaccggggtatgg

SEQ ID NO: 516 - DNA, 204 bp, Enterococcus faecalis
gttctcgtagttcttggtaacgttcttgatcaaaagcatctttcccgtaaaaaagaccagcatctgccaatgctagcaaccgcttataagtgttcagataatccatatacgcacgctcctcatagacttaatacgtttagtttaacagaaaaaaataaagaaagggcagatttagcgagaaaaggcgtcgttttaaggaaataa

SEQ ID NO: 517 - DNA, 630 bp, Enterococcus faecalis
gtctatgaggagcgtgcgtatatggattatctgaacacttataagcggttgctagcattggcagatgctggtcttttttacgggaaagatgcttttgatcaagaacgttaccaagaactacgagaacttacgttacaacttattagcgcaaccggacacgaagcgactgtcttgcccgacttagaaaaaatcttaactaaagaagaaggttatccaacaccgaaagtagatgttcgcggtttgataaaaaaagagaatcgttttttattagttgaagatttacggaccaaagaatggtcattacctggtggctatgccgaaattggctgctctcctaaagaaaatattgaaaaagaagtattggaagaaactggcttagttgttacagcaaaagaattgcttgctgtttatgatacagataaacgaaaagacattcctcaactatttcagtactataaaatgatcttttcttgtgacattctagaaaatcatccctttgaaaaaaacattgaaacctcgaattgtgcttacttttctttagataatctcccctctctttctatcaaacgaacaacgaaagagcaattaatggcattaatgaaccaaacaactggagcgcttagtgactaa

SEQ ID NO: 518 - DNA, 402 bp, Enterococcus faecalis
actgaacaaaaattggcttatcgtggcacacagggaacttctggtttatatttattcggttggaaaattggttcaacaggtgtgacaaaagaaagtgccaaattaaacggactagatgtcgaagcgactgttttcgaagataactatcgtccagagtttatgccaacaactgaaaaagttctgatggaattagtctatgaaaaaggaacacaacgcattgttggtggtcaattgatgtctaaatatgatatcacacaatctgccaatactttatcattagcggtccaaaataaaatgactgtcgaagatttagcgatttctgatttcttcttccaaccacattttgatcgcccttggaactacttaaacttattagcccaagccgctttagaaaatatgtaa

SEQ ID NO: 519 - DNA, 189 bp, Enterococcus faecalis
  misc_feature (114)..(114): Nucleotide 114 is "n" wherein "n" = any nucleotide.
gatttaaacccattaggtaagggtggggtgaaagaacaaaacccagggaacgtaaaaaggatcattcacagaacaccttgtacttgggaaataaagccaagtataatgcttatntcgaatggtgtttcttataacaaactgattaaaattcattatcgacaccttcaatctcagccagtttcaccatga

SEQ ID NO: 520 - DNA, 774 bp, Enterococcus faecalis
gtgagaagaataggagtggaaaatatgttagaagtacaaaatttaaaaaaagtttacggaaacgaaattaaatatgaagccttaaaagggattaatttaactgtccaagatggtgaatttattggtattatgggaccttctggaagtgggaaaagtacacttttaaatttattggcaacaatcgatagtccaacagacggtgaaatacttttaaatggaaaaaatccaaacaatttgaatcaagaacaaattgctaaattccgtcgtacagaattaggatttgtttttcaaagctttaatttaatgccaacattaactgttgaagaaaatattattttgccattgacacttgatggagaaaaagtctctgtaatgaaacgacaattagcagaattaagtgagcgtttaggtatcaatcatctgttgaaaaaacgaattgcagaaatttctggtggacaagcacaacgggtcgccgttgctcgggcaatgattcatcatccacaattattattggctgatgaaccaacaggaaacttagatacgaaatcatctaaggatgtgatgggcttgttacaacaattaaatgaagaagaagcggcgactattttaatggtgacccatgatccgctagccgcaagttattgcaagcgcatcgtctttattaaagatggtgaattaattgatgaaattgtccaaaatggcaatcaaaaagagttctacgaatttatcatggtgaaactggctgagattgaaggtgtcgataatgaattttaa

SEQ ID NO: 521 - DNA, 756 bp, Enterococcus faecalis
tcatcattttctggtaaaatagaaaggaatagtgcggttgggagggagcgtatcatgagaagaaaaagcgtgctttatttagaagtagcagatcagattaaagaagatattttgagtggcaagtatccagtaggaacgtttttaccaacagaaacagaattggaagagctgtttaacgttagtaaaattacgattcggcgggcaatcgaaatgttagcaacagaagaatttgttgagaaaaaaagtggtcgaggcacaactgtgttaagcaatcgtccctataataaactatcaaaagcagggacattcactgaatttttgaatgaatcaggtcagaaagtaactaaaaaagttttacaagttgaaaacttgacgttgtcaaaagagatgccggcttatcaatttttaggagaagaagtggttcatctttcacggttatatctaatcgatgaacaaccctatatttattttaattactatttgccagctgccatgaaagacgtatcattgactgaatacaaagaagaatccttgtatcgtttgatggatcgacatgccattgaaatttataaatttgaagaccgttttgaagttgcaactttgacagaagcagagcaaaagatgttgcaaacaactgaaacaacgggcttaaaaagaattcggcgttcgttaagcccaacaggtcgttgcgtagaatattcagaagctatttataatacgaagattcatccttatgtgattgaatatgaagcataa

SEQ ID NO: 522 - DNA, 969 bp, Enterococcus faecalis
aaggtgtcaaaaagtgacaccgatggagggaaaaatgaaaaaatcagaacgtttaaatcagggatttttttcttgagaacccatcctcagtttaatttaaatcagttaatgaaaagttttgggatttctaaaagcacagctttgcgggatattgaagctttggaaaatttaggcgtgccgctatatgtggagaatggtcgttatggtggctatcgagttttaaacaaaccgttgttgccgccgatttattttaacgaaaatgaagtgttagcaatctttttttcgttacaattactgaaattagtcgcagagtcaccgtttggtcattcctatcagcaaattaagcaaaaattattgcattctttagatgaaccaacccaatttaaaatcagtcaaatgagtaaggtcgtctattacgaaggaattgaacaagtagaagcaccaggcaatttagagcagctgtttcattgtattttggcgcaacaagtaattcagtttaactataccagatatgaagcaacaacgaaaaaaatcttaccaacccggttaactattttagaagggtattggtattgttcaggctatgatgtgactaaaaaggcttggcgtacttaccgctgtgattttatggaggctattcagcaattaaaccaaacactggattttacgactgaagaattgaaagaatcgtatcgccatcaacaaacgacggcacgtacgattccatttaaagcaatcattacagaaaaaggcaaagaatttttttataaacatcgctttgacaatattcagttggaagaaacgcccacgcagtgttttttagttggacagattcatccaacagaaacacaatttttagccaactattttatgggctttggtgaagaagtgacaattttagatccagtccaagtgaaacaagcatatgtagaaagtataatgaggattcaaaaaaaatatcaagaatag

SEQ ID NO: 523 - DNA, 294 bp, Enterococcus faecalis
aagtcgttgattctttggacgaagccatccagcatattaatcgctacaatacaaaacattctggaaagtattattagtgataattactttgccacacaacaatttttacaacaagtggatgcagccgctgtttatgcgaatgcttcaactcgtttcacggacggttttgaatttggatttggcgccgaaatcggcattagtacgcaaaaattacatgcccgtggacctatgggtctagcagagcttacttcgacaaaatatgttatttatggaaatgggcaagcacgttcttag

SEQ ID NO: 524 - DNA, 279 bp, Enterococcus faecalis
ccttctgtctgtaacgccgccgaaacgttattaattcatcaagagttggctgaagcctttttaccaacaattgaaaagcccttgaaggagtttcacgtggaacttcgggcagatgaacgtgcgttagcaatttttgaagaagccattccagcgactgaacaagattgggaaacggaatttctcgactttatcttagcagtgaaagtcgttgattctttggacgaagccatccagcatattaatcgctacaatacaaaacattctggaaagtattattag

SEQ ID NO: 525 - DNA, 894 bp, Enterococcus faecalis
  misc_feature (53)..(53): Nucleotide 53 is "n" wherein "n" = any nucleotide.
cgacccaaggaatcccttactatattcaaacgctttacaaagagtatggggtnttctggtcgcatgcactataatgaatttaaaacggcagtattgaatgctacaacaggagaagttaacgtttatgacagtcaaaaagccccaagtttcgttgatgcgccgattactagctcagcggcgaatagcttaaatgaattctttggtcgttacagtcaaggctggtggaaccagacaatgtttggtgccaaaaaagatgtcaaaattccaactgaaaatggtatttatgcatcaggacaaattacgccgatgatgaacaaggaagggaaccagttgctttattttacggactttacaagtagtgaaaaagaccaagattccgctttaggttattccttaatcaatgcccgaacaggccaagttacgtattatcgtgatactaaagtcggcattatggatagtgatggcgccatttctatcgcttcaaaaatttatccagaaaagaaatggaaagctagtatgccagtcctttataacattgatggcgtgccaacgtggattgtttcgttaatggacagtaaagggattttcaaaaaatatgtctatataaacgccgtagataatgatattgtaattgatgcagacacggcacaaggcgcattagacgcttatcgaattgagttagtaacaaaaggaagcaacaatgaaaatacagacaaagccaacttgaaaacgatgcaaggtaaagtagctcgtgtctcagtagtagctggggaagcgcaaacggtagtttcatttttactagaagatgaaaaaaccatttttagcgtaacgactaataacagtccgctggcgctattcttaaaagagccgaccaaggtgaccaccacgggggag

SEQ ID NO: 526 - DNA, 348 bp, Enterococcus faecalis
accgatgatatgcgagtacctgattcagaagtagagacagatttacgtgtcagtttttcaccaattgaagtagaagaagaaaattatccagaaaatagctcagcacttgttgctcgcttagaatttcgaattgtctttgacgaatttgttttatcaggggcgattagccaaattaatcacattattgatcgtaaaattgaaaaacaagaagatatttcgcaagaagaagtcgatgaacttgtgcgtcctttatttagcatcgtcgaacgtttatcttatgaagtaactgaaattgctctggatcgtccaggtgttcaattgaattttcaacaatcagaagaagcttaa

SEQ ID NO: 527 - DNA, 369 bp, Enterococcus faecalis
cgtggtatacttagttctaggaggtgtaagcgtatgcaaaaaatttgttggatcctttctgtcaaccgtgatggagcgacgttgtttgtggggagccctgcaaatggaggtccttggctcttttcaaataaagagcagcaaaacatcaaagccttttttcaaccaacctatgaaattgactttatcagttatgatgttctttcagaggaagtaccagaagctgcgttcattttgtacaatgaaatgctcgctccctatcttcccgaaaaaatcaccaaagttggtcagccgattgcttatgtggatatcgctacaaaaaattatgaacagtttaaaaaagctttggttgctaaatcttcacaagaataa

SEQ ID NO: 528 - DNA, 684 bp, Enterococcus faecalis
ggaggaactaaaatgacaacattcatcactgtattagtgatccttgcatttattgctgtgttattcggtttctaccaaatgcaaaagaaacatttaaaattctcaacacgtgtcttttcagcattgggcgtggggattgttttaggtgcaattattcaatttgcttttggtacagacagtaaaattactacgcaatcaatggaatggatcgggattgtaggtaatggttatgtagcgtttctacaaatgctcgtaattccgttagtatttgtatctattgtaggtgcatttacaaaaatgaaagaatccaataaattaggaaaaattagctttaatgtgttagccaccttactaggaacaacagcagtagctgccttggtggggattggaacaaccttagcgtttggtcttcaaggggcaaaattcacgcaaggtgctgcagaaacgtcaagaattgccgagttagcgacgcgtcaagatgcgattcaagatttgacgattccccaacaaatcgtttcattcattcctaaaaatgtctttgctgactttgcgggaacacgaccaatgaataccattggggtggtaatctctgctgcgtctgttggtgtcgcttatttaagcgttcgtcgtacagcgccccaagaagctgaatattttgctaatttaattgaaagtttatattaa

SEQ ID NO: 529 - DNA, 222 bp, Enterococcus faecalis
gaaacttttaaagttaaaggaacaaatgaatacaaattatggtcgcttattggcggaaaagcgtcatcaatttatggaactttatctggaggaattttatcaagagtgggatggacaccgataaatgagggccaactaatacagtcagtacatttctttttgaattttaagagaattcttttttacaaatacctcagaagtggtaaaatgatggatgaataa

SEQ ID NO: 530 - DNA, 687 bp, Enterococcus faecalis
aggagtgttaggatgtttgaaaatgaatctcttagttttgaagaacaaacaattattcaagcagcagagcgttatgttcaacaagaattagccaacgaagcaagtggccatgactggtggcatatttatcgggtgacacaattagcaaaaacaattgcagagaaagaacaagcaaatttatttttatgtatattaacagcattgttacatgatattggcgatgaaaaatttaacgaaagtgaagaggctggcttgctaaaggtgcaacaatggttggaagcaaataacgtatcaacagagcaaacgaatcacatcctttccattattgctaatatgtcctttaaaggaggaaatactgggaaaacagtcactacattagaaggaaaagtggtccaggatgcggatcgattagatgccatcggtgcgattggaattgcacgggtgatggcttattcgggaaataaaggccgtttaattcacgatcctcacaaacaacctcgtgaacagttaacccaagaagaataccggaatggggaagatactgctattatgcatttttatgagaaacttttaaagttaaaggaacaaatgaatacaaattatggtcgcttattggcggaaaagcgtcatcaatttatggaactttatctggaggaattttatcaagagtgggatggacaccgataa

SEQ ID NO: 531 - DNA, 525 bp, Enterococcus faecalis
aaggaggcggcgatgaacaactatcaatggtatacagaacaatggggaaaacctacaagagaggatgatttgctgtttttattgttgacggtgggtgtttttcaagttggtttaagttggaaagcagcagcagggaaaaaagtagcattcatgaaaaatttttgccaaatgaagccggaaaaagttgccgcgctgttgcctgacgaagtcgatcgaatagtagctgatccagatatgattcgcaatcggcgcaaaattgaagcaaccattaaaaatgcgcaagcaattttaaaagtacaagaagaatttggcagttttgccaattatctatggcaatttgtaaaaaacgtccccgttttatctatttatgaagaagcataccaagtcccacgcacacagcttttatcagataacgtagcaaaagacttaaaaaaaagaggattttcttttgtaggtccgattgtcaccaatatgtttctgaaagctagcgggattatccaagtggaaattttaaatccagaataa

SEQ ID NO: 532 - DNA, 252 bp, Enterococcus faecalis
  misc_feature (96)..(126): Nucleotides 96, 98, 105, 106 & 126 are "n" wherein "n" = any nucleotide. 1
ttacgaacgaaggagaacgctcaccccgaaattgagatatggggagaagctagcagactattttcaatggtggcagttacttatttaatgggtctnantaccgannagtctaaatctagatttttnaagttgattaagatgatttttctgagcccctttgaaatccttcgaaaattaaatgaatttggttctcaccttatgacgaaaacaatggatgtttgccgttcaatttatcaacttacggaaatctga

SEQ ID NO: 533 - DNA, 279 bp, Enterococcus faecalis
cttcctttttcgggtacgttatattttaattgttctcgtaagcggaacataagagggagaggtgagaatatgtttgagctagatttagagatgatagccaagctacgtgagcgccgagcgagaaaaaatattactttagaaaaggcatctcatgaaattggtatttcatctaaaacgctaggacagattgaaaatgaaaaaatcttgtctgtgcgtaaaacagtctacaaaaaattagttgactggctggtaaacgaaaaaatttataaggaggcatga

SEQ ID NO: 534 - DNA, 348 bp, Enterococcus faecalis
acgaaaaaatttataaggaggcatgacagcatgacaatggagcaactaaaaacaccgcctatagtcgtcgaggtgtcgcacacgctttctaaggagcaattcaatgccattagacaagaggcgtatctcgcaacaatggaaggtattgaaaaagctagaaaagatagcgagttagacagcgacctcatctatacccgcgttggggtaagacgttttttagacaactgttctgaagcttatttagatgaattgatagcgaaaggactgccaacaggaaggcgtttatctgatcgtaaaacctgctggagcaaacgtcaaatgaccgcttggcttctcgaaaatgaataa

SEQ ID NO: 535 - DNA, 414 bp, Enterococcus faecalis
ccgcttggcttctcgaaaatgaataataaaaaccatcacgccgatagagaaagccgagcaaagcacatatttaattgtcagtcacagaagtcaatcgtccgttactacagaattaattttaggaggcaaattattatgaatgaaaatttaaaagaggtagtaaataagattttagaatttgaaccagatacacctttggaatcaattaaacaagagatcggacagttagccgatgcaatattatttccagaacagtcaacagtaaaatccgttttacaggaaatgtatgaaattaatcaggcagaaggaatcacgacagacggtaagccaatcactgttgctgattatcaagacttaatttaccaatatattgaacaattgagcgacctattaggcattgaattggaggattag

SEQ ID NO: 536 - DNA, 675 bp, Enterococcus faecalis
aaaatggaagaattagtatttttacgctcacaatacattgaggaggagccatttaccaccagtaagattattgccgaatatgcagaaatcgaacacagagcagtgcgacaattaattagaacttatgaaaaggatctaaatgaatttggcaaaacgacatttgaaatgtcgaaaataaataaaggtcgaggaagaaagcagaaaatttatcatctaaatgaggaacaagcgaccttgcttatcacctatctagataataccgaaccagttcgacgatttaagaaagcgctggtgcgacagttctatgacatgaaaaacggactctacgctagacgtatggaacgacaaaaggaaaaaagtgtgcgtaagtcaatgacggatgttatcaaggagttagggctttccccgcattactacaagcattatacagaccttgtttataaaacagcgttaggatttaatgctaagcaattaacagaagctcgacaggtaagcaagaagtccacgacattagattttttaacgtctgaagagatcgaagcagtgaataagagagagcaacaagtagctacattgcttactcttaaaatggattatgacacgatgaaaagtattttgagcggtcaacgtgttttatatcaaacaacgcttaaaatgccagcagcgacaaattaa

SEQ ID NO: 537 - DNA, 363 bp, Enterococcus faecalis
ggacacttggataatttggttaaaggtggacgaatcagccgtacaacaggattattatcaaacatttttaatatgaaagttgtcatggactttgaaaatacggaattgattcctgtagcgaaaggccgaggcgttaaaacgtttaataaatggtttgacgaattgaaatcagaattaagtaagattccaaatgttcgacaaattggcatttctcatgcggatgggctagaactagcaaatggattcaaagaaggattacaagcaatctttaaagacatggatattcccgtattacatacgaatccagtcattgcaacacatacaggaaaaaatgcctttgctattatgtactatacagactaa

SEQ ID NO: 538 - DNA, 915 bp, Enterococcus faecalis
aaggaagtgacgaagatgaaaaaacaaacacagcatattttgctgaccgtcttaacacctatcctcattgcgctaggtgtttttacattgttaagtgtggccatccccaaagcaaagccactattaaagcaagagaaagtggccacaactgctcaaaaaaatcaaaaagaagtcattcattatacagctatcggtgattctttaactgaaggaattggcgatttgacgaatagtggaggttttgttcctattgtggcagatgatttaaaagaacactacaacttgaacggtgttcaaacagacaattttgggaaaaatggggatcgtagtgatcaaattttaaaacgaatcaaagagaaacctgaaattcaaaagggccttgcctctgcggacgtgattacgctaacggttggtggaaatgacttaatgaaagtaattagtagtaatattttcgacttgaaagtcagctcgttcaatcgtccacaaaaagcctatcaacgccgagtaagacgactacttgaagaaatccgagagtacaacgagaaggcccctatttatgtcttaggaatttacaatcccttctacttaaacttttccgaaattacagaaatgcaagaaatcgttgataattggaatcaagcaaccgaagaaatggttcaagagcaaaaacgagcctatttcattcctatcaatgatttactctataaaggtcgtggcgatgaagttggcgtaactggtggtgactcagaaactacaggaagtagtgctagcaaagaggatttaaacaatttgttatatgaagaagatcgcttccatccgaataatcttggctaccaaattatggccggagctgtccgggatgaaatggtcaagacagagaaagaatggataaccaaatcagaaggtagtgaataa

SEQ ID NO: 539 - DNA, 612 bp, Enterococcus faecalis
ccaaatcagaaggtagtgaataaaatgaatgaagaaaagccaaaaacaagtaaatcaattaaaaagacacaaccaaccaatcttaaacgaaatccctggaaaatcgcttttcttgttctagtgggtttaatcattggtagtgtagctttcgtgacatttcgagcaacacaagttcgcgaaccagatttaaagaaaataccagcaattgttgaaaaagaaggcgagccagtcgtcaccattcagtcaaaaaaacaacaagtgaacaaactgattgacttttatttagccgactttcaaaaaggttcggagatcaaatataaattttatttagaaaatgatgctttattaaatggaacatttcaggtgttagggcatgacattcctttttacttatattttgatccttacgtgatggcgaatggtaatgtacaattaaaagcaaaaagtttatctataggaacgttaggcttgccaattaaagaagtattgaaatttgctaaacgttcttacaaactacctaaatgggttgaaatcaatccagatgatcaaactgttttattacgttcagatcagtttagaatgcagactgtgctatcttcaacacgagttggc

SEQ ID NO: 540 - DNA, 582 bp, Enterococcus faecalis
gcccatccccgggctgagcactattcagccaatatgcccaatgataatattgcgcgcgccataaaaaaagccagtagtgctggtgaaggggaacattatgacgaggtaacttatgaaggatacgggccaggtggcgtggcagttttagttcatgcactaacagataaccgcaaccgaacggccaccaatgttcgcgtcgcgtttactcgaaatggtggctctttaggtgaaacgggttcggtgaattatatgtttgatcgtaaaggctatattgtcattaagcgagaagatcatgcaattgaggaagacgacatgctagaagtcgttttggaagcaggcggcgaggatatagaaacatcaccagaagtatttgaaatttacacagcaccagaagattttacagcggttcgcgatgctttagaacaagcaggttattcattagcacaagctgaattaacaatggttccgcaaaccttactaaccttgaacgatgaacaaaaagcgcaattagagcgcttggttgacaagttagaagacgatgatgatgtgtcagaagtatttacctctgcagaaaatctataa

SEQ ID NO: 541 - DNA, 489 bp, Enterococcus faecalis
aatgaaagcggatacagaatggagggcattttgaaaaagagaatttgtttacaagcaatcagggaagaagcggaagcctattatcgtaacggtgatttttattgctcggaagcgattgtggcgaccattcggcaacacttcgatgcggagattcccattgaagctgtggccatggcttctgggtttcctgtaggtgttggaggagcgaagtgtatttgtggtgctctttcaggcggggttatgtgtctgggctacttttttggtcggacagaagccaaaggagaacaagtaaataaaacgatggctttagccaacgaattgcatcaaagttttcgacaaaagcatcgagtggtttgctgcagtattttgacaagtaaaatgacgatgggttcacctgaacatatggaacaatgcattggctttactggagaaatcgctgaaacaaccgcaaaaattattgcacgagaacttgcttacgaattagtctag

SEQ ID NO: 542 - DNA, 840 bp, Enterococcus faecalis
acggcttggacacgttcaagtaacttgagggtcagcagtagaaatgctaaactttttgatggagggaacagtatggaaaaaaattacacaataaaagatgtttctgagttgttaaatatccctaagtccacgattcgttattgggacgagcaagggttgattagtacaacacgcaatgaagaaaacggatatcgaacctttgatttagaagatttgttcaaaatatatgatattgatttttatcgaaaaatggggattcctatcaaagatatgttgaatttatataaaaagacacctaccgatctctatgccaccatggaagcaacagaagaacaactggggcaagaaataaaaaggcttcaacataaatacaaagaaatcaagaaaagaaaattacatttacatgcgttaattgatttagaaacattggttttttcagatgaaccaattccttttgataaaattgttgttgttgatattgaggatccagaagagatgaaagtttacatggaacacatttcaactttaggtatttacggggatttaagtgaatccaatgaactgacgtatgggatttgtttggcaaatcatgtgaataaaaaaagtttagataaagtgatttggctcaaagaatcaagtagccaatacaaaggctttattttaaaagtcaatacacaagatacccgtttgaataatatcgaagaagtaaaaaagcgtttagcaaaacaaggatttgaaacaggcatcgttgtcggagagcatatcttgacacaactagaagaggaaaaccaatatattgaatattattatggttggattgaaattttaggggaaaagtaa

SEQ ID NO: 543 - DNA, 183 bp, Enterococcus faecalis
tttttaaaacaatttagaacgaatgttattaaagggaaaacaataaaaaaattactcttaaagctagaacttacctatgtttgtaattttttagggaaagtcaatatatttgcttcatataaaacgtgttatttaattcacgattttttgttgaaatatcgggttttttctttttttagctaa

SEQ ID NO: 544 - DNA, 603 bp, Enterococcus faecalis
atgaataaagcagttaaaaattttgtgagttaccttatgattaccatgctgtttattttaaatttgttaccaatgatgaacgcatttgctcaagaagtaacaagtgatgctgagaagactgttgaaaaagacgggctcaaagtaatagggaaaatagaagatacatcgtctcaagaagatattaaaacggtcacttacgaagtaacaaatacgcgagatgtaccaatcaaagatctcattttaaaacaaaaaaataccaatgatagtccaatcaaatttgttttagatactttaagtgaagagcgaggacctacgtctttagaagaacaagcaaaggttgaaacaaatgagaaagatcaaacaaccgatattaaactgcttaaccttcaaccaaattcgacaagaaagattaccataaatgggcaaataactacaaaagcgtcgaacaagttattggtcagcgtactaatagaagataatgaaaaaggaacactagtaattgatttacctagtaaagatatactagcagataaagagtcggtttcgaaggaaaaacaggaaacttcagaaacaaaagtagaaaatcaggcaaacgaaacagcc

SEQ ID NO: 545 - DNA, 1311 bp, Enterococcus faecalis
ttccgtggtgaagagcttttggcaggggacttgcgcttagggagcttgacttcttttattccgtcaccggtcattaccgggtttacttcaggaattgctattattattgcgttggggcagcttgataatttctttggggttcgttcagaaggacacaatttaattgagaaaatcagcagttatcgttcattgggctttgatttaagtataccaacgacggttatgtcgattttagtggtgcttggattagtgttctttccgaaaaagtggaatgcgatgataccagcttcattggtgatgattattttagctactttagcaacagtggtttttcaactgccagtggccactgtagggaaaattccgacaagtatttttagtgatacacgtttggaacttggttcacttcaattaagtgcgtttcaggatattttggtgccttcgattagcattgctatgttaggtatgattgaaagtttgctttgtggcgcttcggctggtcgcatgacagggaaaccattagacagtaatcaggaactagtggcacaaggaattggcaacttaattttgccatttttcggtggcgtgcctgcgacggcagcgattgcccggacgagcgtagtgattaaatctggtgcgcaaacacgtttagcgggtatttttcatgcagtctttttattgttatcgatgttgcttttatcgccagtcatgtctaaaattcccatgcctgcgttagctggtgttttagtggtgacagcgtggcgaatgaatgaatggtcggtgattaaagaattcttccagaaacgtttccacacagctttatgtttattcttcttaacgatggtagcgaccgttatttttgacttgagtttagcgattgttttaggggtcttagcgggttgcctgtttttcattgcgaaaagtgccgtgattacgattaatgtcgaggaagttgattggtcaagaatggggctagtaccgaccgattgtacggaaaattgggtggtagtttatttgagtggcccgttatttttcatgtcttctgaacgattgaaacaaacgttactgcaattggaaacaaaaagtggtgtagtattttcaatgcgaggagttcctagcattgatagtacggcgttagatattttagaagaattttgtctcgcagcagaaggtcgtggacaacaagttcaatttgccgctctgcaaccagaagttgaaaaaatgattcgaaccattcaaggaaatcaagagaaagaataccatttctcagtcgcagaatttttacaaacggtgcatgttgcagaacaataa

SEQ ID NO: 546 - DNA, 1275 bp, Enterococcus faecalis
  misc_feature (23)..(23): Nucleotide 23 is "n" wherein "n" = any nucleotide.
attgagttttttacgatttctantggttttacaggcggaaaaatgttcgaggaacaacgtggcggcgttgttgctgctattgcgacagtgggcgtgattgtttccacagatgttccacagttgtttggtgatatgtttattggccctttagcaggatatactttcgccaaaattgaacaaattctcttaccgaaagttaaagaaggctacgagatgctgactaaaaactttttagcaggaattgtgggaggactgctgtgctgttttggtattctggttgtagctccggctgttgaaagcgctagtttttggctgtatcaattttcttcttggttaattgaagccaatcttttaccattggttcacgttttcttagagcccttaaaagtgttattttttaataatgcgattaaccatggcttattaacgcctctaggtttagaaggtgctagtcaaacaggtcagtccattttatttctattggaaacaaaccctggaccaggcgtgggcgttttggttgcttttctgctgtttgggcctgtaggacaacgaaaaacagcaggaggtgccaccatgattcaactgattgggggcattcatgaaatttattttccgtttgttttgatggacccgcgcttatttttagcagtaattgctggaggaatgagtggtacgcttgtttttcaaatatttaatgtgggtctaagtgctccagcttcgccaggttcattggttgcgattttagccaatgccccgactgatgcgaggctggcggtttttagcggaatttttgttagctttctgtgctcttttgcaatagcaagcttgttattaaaacgtcaacgaggaattgaaccagtttcaatgataaagatgaaggaggaagaccaagtggaaacagtcacacctaactatcagcaaattttatttgtttgtgatgcaggaatgggctcaagtgccatgggggctagtttgctaagccgacaattaaaagctgtgaacttggagatgcctgtgacttaccagtccgttcatcagatgaagtggcagcctaagacattagtggtcattcaagcagaattgaaacagttagcacaaaagtacgtcccagaaaaggatatggtgagtgttcaaaattttttagaaattaaatcctattacccgcaagttttagccaaactgactgcttcttctcaagagcaatcttcacttggttcagagtctactgaaacgaactcgacaaaacaaatacagaagcttgtttttttatatgcc

SEQ ID NO: 547 - DNA, 642 bp, Enterococcus faecalis
tcttacccgtgggcaggacttaattacaaaggagaaacatacatgaaatcaatcaaaacgattttacttggaacaactttggccgcaggtttaggattattcttaggaacagacgcaaacgcagaaagcttatatacagttaaagcaggagatactttatcaacaatttctcatcaatttgcaggagacaatagcttaattcaaaaaattgcttctgataacaaattgccaaaccttgatttaatttttgaaggagaacaattagttattcgttcagaaaaagaagttgctaatactccagcaccagctgtagaagttgcaccagttcaacaagtagttgaacaacctgttgcacaaccagtacaacaagaagtacaacaacctgttgctcaagaagtagcgcaaccagcagcacctgctgcaagcagtgatgcaaaagagtggatcgcacaacgtgaatctagtggttcttacgatgcaacaaacggtcagtatatcggtcgttaccaattatctgcctcttatttaaatggtgactattcacctgccaaccaagaacgcgtggcagatcagtacgtagcaggtcgctatggttcatgggatgcagctaaatcattctggttagcaaatggttggtactaa

SEQ ID NO: 548 - DNA, 387 bp, Enterococcus faecalis
aaaggactgattactattcatcttttagagtatttaggcatcacgattcaacaggtttctgctgagaaatgtcagcttactttaacggtaaaagacgtgcataaacaaccctatggccttgtccacgggggcttaaacggcgtcttaattgaaactgcctgtagtttaggtgcgaacgaaaacgttcctgaaaacacttttgctgtcggcatagacttacaagtaaatcatcttcgtagtgtccatgatggtagccttaccgtgattgcgacgcccgatcactcgggaaagacccttcaagtttgggaagcaaaaatttataacgcagaccaccaattgacgagcgttgggcgttgtaccttaacaaatcgacaaaaaaaacagtaa

SEQ ID NO: 549 - DNA, 381 bp, Enterococcus faecalis
aattcaagcgactttttctctaaagtgccgattcttgtgtataatagaaaagatgagattaatgaaggaggtttcctaatgagaaactggacaacaattaaagaatatgatgaaattttatttgagcaagcaggcaaagtagcaaaaattactatcaaccgcccgcatgttcacaacgcattcacaccaaaaacagtcatggaaatgattgatgcattcaacattagtcgtgataaagaagatgtcggggttattattttaacaggcgcaggtgaacaagcattctgttctggtggcgatcaaaaagttcgaggtaatggtggttacgttggcgaaaacaacattccacgttttaaatgtgttagatttacaacgggttaa

SEQ ID NO: 550 - DNA, 189 bp, Enterococcus faecalis
atttacaacgggttaatccgtgtcattcccaaaccagtcatcgcaatggtgaaaggctggtccattggtgggcggcaatgttatacaattagtttgttgatattaacaatggcgggggataatgcaaatttggggcaaacaagaccaaatgtccgtaactttgatggtggatacggccacgttacttaa

SEQ ID NO: 551 - DNA, 654 bp, Enterococcus faecalis
acgagttttaaaaagaagaatagcggggaacatagttacctgctattcactacatatagaaaaggagtaaataatttgaacagaaaaaaacaacgatttcttttttttccgatactactaattcttttagcgttagtacctagcaatggttttgccagtgaatttaattttgcggttacgcctattccatcagaaaaacaagtagataaagaaaaaacttactttgatttattactagcaccaaatgaagaaactgagttgaaagtgaacttgcgcaatgatacagataaagaagtaaaggtaggtatttccatcaatagtgccattaccaattcaaatgtaatcgtggagtatggtgaaaataaggggaaaaaagatcaaagtttagcgtttgatataaaagactacgttcaataccctagctcagttcgtttaaaaccgaaaagtgaacaaacggtttctattaacgtcaaaatgcctaatacaccctttgatggagtgttagctagtggtatcacttttaaagaagaaacgtcggatgaaggcaaacgccaagacgataagagtcaggggttatccattaaaaatgaatattcgtatgtcgttgcattattgatgcagcaaaatagtcttacaccacgggatggcccgcat

SEQ ID NO: 552 - DNA, 648 bp, Enterococcus faecalis
acatctaatggtatcgtagaattaacacccagtgaagagccaattatccgtgtgaccccaacggatccaactaatccagttgatcctattgatccaacagatcctgaacgtcctaatccaggaacaaacggtccgttgtcaattgattatgcctcaagtctagacttcggtgttcaaaaaatcacgtcgaaggatcagacttattttgctgctacccaaaaatacaagacggtaggcgcaaccgatgaagtcaaagaagggcctaactatgtccaagtaacagataaccgtggaaccgaagctggctggtcattaaaagtgaaacaagaaggacaatttaaatcaacttctggtaaagaattgactggggcagctatcacgtttaaaaacggaaatgtagtgactgcttcagattcaggcaaaccaacaggcccagccacaatcacgctaaattcagatggtagtcaatcagatgtaatgagtgcagcgaaaggaaacggtgcaggaacttatttatttgattggggaacagatgcaactacagccgctaaaagtattgagttaactgttccaggttctacaaccaaatacgctgaaaaatacgccacaaaattaacatggacgttgacagacgctccaggaaattaa

SEQ ID NO: 553 - DNA, 240 bp, Enterococcus faecalis
acaaaaaaaaccaccacgaccgtcgtctgtggtggaaatgaaggttgttatttactcttggtaggagtaagtatgaaaaaaccaattcgggataattggcataacgtaagtatagtggtttgtgccttttttatcatgagtttcagctatattttttataaaacttttattagaacaccattaacagtcctttatttagattatttaaagcgttttcttttattgaacatattgttttaa

SEQ ID NO: 554 - DNA, 390 bp, Enterococcus faecalis
tttaaaattagcaaacggaaaacacaaggaggacttgaaatgaccttaatttctcgcattaaacaattagctcagtcaaagcaaataaccttcgcccaattagaaagaaacgtcggcatttccaatggacaaattcgtcgttgggatacctcttcgcctaaagtagagaatcttttaaaaatagcagactatttttctgtctccttggactatttaatgggccgcacccaacaaacagagattaatcatcaggcacctatgaaaagcacacaaaaagagttacatattcacattactacggaagagttaacagaagaagaaattactcagttagaggaagaagcaaatcgtttcttgcggttccgtaaatttgaaatgacaaattcttaa

SEQ ID NO: 555 - DNA, 228 bp, Enterococcus faecalis
aagtccgttgtgaaaaggctatatttccaaaatgactttggcgatacagcattgattgaggcagtggggttacgtgaagggaaccaactttaccaagatattgtaaaattgttaatggaaaatggtgcggatcaatccattaaagacaattctggtcgaacagcaatggactatgccaatcaaaaaggttatacggaaattagtaaaattttagcacagtacaactaa

SEQ ID NO: 556 - DNA, 1236 bp, Enterococcus faecalis
atacaggtaggagtgaaggaaagcatgaattattggttaaaaaatgttcgaattgaaacagagtatcaaaaagaaggtgactggttatctgggacagtaaccaaagaagtggcaattgaaataacagatggagtatttacgaaaatcatccccaatgaagaattggtagaagaacctgggttgacaattattgatggtcaccatcaattgattttaccaggtttgattgaaaaacattgtcactttgataaaagtaaactaggtgttccgtggtatccggtgacgccagcgaagtcaattgtggaacgtgtcgaagcagaaatcccttatttagatagtttagaactttctttaacagaacgcgccaaccatttaattgacttagaattaccacatggcgcgacagccttcagaacacatgtcgacgtggaaccgatgacagacttacgttattttgatgaagtccaagcgttggcccaaacgaaaccatttgcggtagaaattgtcgtctttccacagcacggcttactgcgttcagattccgttgaattagttgatcaagcattggcaaaaggcgccgattttattggtggcgtggatccttattcactagatggtgattacaaaaaatcattggctgaaacattccgcttagcagataaacatggtgtcggtgtggatattcatttacatgaccgtcacgaagctgggacaacaacgattaaagaaattatccgtttaacgaaagaatatggcctacaagacaaagtatttatcagccatgccttcgggttaaatgatttcattggtgaagaacgtgccgaagtttatgatgctttagcagcagaaaaaattcatattaattccagcgtgccaatcacacctaatacgattccgccaattatggaattgttacgtcatggagtcaatgtccatcttggttgtgacaatatctacgattgctggtctccctatggtgatggttcattacaagaaaaattggctcgtttaggtgaactttttaacgtgaaagatcaagatgctttaacccaattattaggcttagtgacagatggtgtcacaactttagacgaacaagggcaagtaaattggccgcaagttgatgctgaagcaacttacttactcactgaagcagaatgtgcggcggcttttgtcgctcgtcagacaccggtggaaatcagtgtggtaaaaggaaccacactttatcaaaaataa

SEQ ID NO: 557 - DNA, 1128 bp, Enterococcus faecalis
tttttaaaacacaaaatgaatatgataagttattacaattggatcgacaattacctgttgttcgaaccgtttttgataaaaccggtttttatttccgtggaacctattttttcaaaagaaacacgagaaaagattggctatattcaagcgttttatgaactttcttctttttatgaaattcgtaatcatttattattaacacttgtagttttagaagtgatttctctgattgtaagtagtgtcttaggctttatcctctcttcttatttcttaaaaccattaaaagtattgagagacacgatggatacaatccgcaaagacccgcaatcagatgtccacatgccggagattaatacgagagatgagttagcagatatctcggaaatctttaatgaaatgttagatcgtatgagacgctatatcgaacaacaagagcagtttgttgaagatgtttcccatgaattaagaacgcccgttgcgattatggaaggccatttaaaccttttaaatcgttgggggaaagacgatcctgaaattttagatgaatcattaaaggccagtttacaagaaattagtcgtatgaagagtttggtccaagaaatgcttgacctttcacgcgctgaacaagtggacacccaatatgcaaatgaacgaacagatgctaaacaagtagtctaccaagtatttaataacttccaattggtttatcctgagtttcatatcacattagatgacgatttaccaaccgaagttgagctgaaaatctatcgtaatcactttgaacaattgctaattattctattagataatgcgattaaatattcaaccgatcgaaaagaagtgcatatttccatttctcgaacgatgaatgaatttgaaatagctgtgcaagattttggtgaaggaatcactgaagaagacttggagaaaatatttgatcgattctatcgagtagataaagcccgtgcaagaaataaaggtggtaatggcttaggtctatcgattgcaaaacaattagtcgaaaactataaaggacgtattgatgcagaaagcgtattgcatcaaggaacgatctttagaatttttattccaatcgctggaataaaagaagagagcaacgtacaataa

SEQ ID NO: 558 - DNA, 249 bp, Enterococcus faecalis
  misc_feature (40)..(57): Nucleotides 40 & 57 are "n" wherein "n" = any nucleotide.
aaagtttgttttatggaaatggacagtttcatatttgaantagacaacccagaactntatttatctgtgtatgacacaaaccaaaagctagtttttaaaacacaaaatgaatatgataagttattacaattggatcgacaattacctgttgttcgaaccgtttttgataaaaccggtttttatttccgtggaacctattttttcaaaagaaacacgagaaaagattggctatattcaagcgttttatga

SEQ ID NO: 559 - DNA, 537 bp, Enterococcus faecalis
cccctccccgtggtgaggctgttgtccattgctagtgaacgtgctggtcaagatattacaaaagataacgggaaggccgcttttgaagcgatgaaagaattaaaaccaaacgttgttaaaacgtattcaaaatcgtcagacttagctaatatgttccaatctggtgaaattgaagcagctgtggttgctgattttgcggttgatattattcaaggcgcagcagaaaacgtgacgtatatcgttccagaaagcggcacgtatgccaactataatacagtcaatattcctaaaaaagcacaaaacaaagaaaccgcctttaaatttgttaacgcacggattagtgaagaatcacaaaaggccaaagcgatttcgttaaatgaaggacctacaaatcaacaagtaacgttaagcgaaaaagaagcgaaaaataaaacatatggtgccattgccgaacgtgccaaaacagtcgattttaattttattaatagtcaactagcggattggattgatcaatggaatcggacgatgaatcaatag

SEQ ID NO: 560 - DNA, 477 bp, Enterococcus faecalis
tcaatggaatcggacgatgaatcaatagttttagaaaagagggacaaaatgaacgtcgatgtattactaaaaaatgtgtggctgtatcaaacagtcactcaaacattcgttcaacgaaatgttgcgattaaaaatgataaattttattacatttatgaagaagagaacgtcaatttgcagccccaaaaaacaattaatgccgagaatcaatggatgattcccggcttaattgatgcacacatgcatattgaaagttccatgacgacacctactattttttccaaagcagtagtgcgttacggtgtgacaacggtgattgccgatgcccatgaaatggctaacgtatttggcttagaaggcttaaaagcttttatggccgctgaaacagaactagatatctttcacgcaattccttcctcggttccttcgaccactcccgaattagaaacaactggtgggattatcggcttagcataa

SEQ ID NO: 561 - DNA, 846 bp, Enterococcus faecalis
gtagcagaattactcaaagagccaaaagtgatttgtttaggggaagccatgaattttaaagggatttcctatgagccagattctttaattcgtcaaattatcgatttgtgtcaaaaacaacgaccaaccatgcctttagaaggccactgtcctaaaatcgaagatcaagagttagcagattttctatatagtggtatcacttcagatcatacccatcaatttcctaaaacgttaaaagaaaaaattgaagcgggcgtctttattcaatttcaaaataaatcaatcactcctgaaaatattcaggtgatagtagacaatgacttctacaattatgcaagtattatcacggatgacgtgatggctgatgatttgctaaaaggtcatctaaatgcaaatgtcaaaaaagctgttcatgcagggttgcctatcgaaaaagccatttatatggcaacttatacgccagccaaacgaatgggtctccatgatcgcggcgaaattgcacctggtaaaaaagctgactttttgttattaaatgacttagaaagttttgatattaatacggtttataaatctggaaaggtcgtttttgaaaaaggcgagcccttccattatccagaaaaaatcgaagagtttccagccacttatcaacaaaccatccaatgtaaaaagttaacagaagaagatttacttttaaaggtggctacaacaaaagaaacagttcgttgtaatgtgattcaaaaacaagaaattggcacatttacagagcgaattacaaaagaaattcctgttgaaaatggattgttgcaatggcaaaaagccaactgcgcctcattaattctgatgtaa

SEQ ID NO: 562 - DNA, 972 bp, Enterococcus faecalis
agaccatacaaaaccaacccatctatgaatggtatggtcgcttctgtcatttacctgatggtatgtaccccggtgacaaaaggaacaataaacttaaattatttgggaactaatggccttttcgtagctatcatcatcgggttattagttgttgaagtcaatcgagtgtttgaagtgaaaaacatcaagttaaaattaccagatactgtccctcctatggtagctactttcatcaatactttagttccactgttgacaaacatcattcttttttatggcatcaatctgattttcttagcgacaacgaaaaagattttcccagaaacagtgatgcaggttttaacgcctgctacaaatattgctggtagccttggtggattcttattgattgtcactttgggaaacattctatggttattcggtatcaatggttcatctatcattttcccaatcgtcttcactttaggaatggcacaaacaggtttgaatgcagaacagatggcaaataaagaagcaatgactcatctgatgaatctacaaatgttccgtatatcggttttaggtggtgcgggtggaactcttggtttagtactcttaatgatacgtagcaaagtttcagaatatcgaacaatcggaaagctttcccttattcccgggatatgctcaatcaatgaaccggtcatatttgggcttccgattgttttcaatcccattttagctattccatttttgcttacaccaattgtttcattgttgttgacgtatattgcgcagagtgttggactgattagcgttggatttatcatcgacccatctttcacaccattttttgcacaagcatatctctcaagtatggactggcgaaatattgttttttgctttgtattaatcctaattagtgctgctatttactatccattttttaaggtgatggagaataacaagactaaactcattgatgaagaattgtaa

SEQ ID NO: 563 - DNA, 387 bp, Enterococcus faecalis
atagcagcactaattaggattaatacaaagcaaaaaacaatatttcgccagtccatacttgagagatatgcttgtgcaaaaaatggtgtgaaagatgggtcgatgataaatccaacgctaatcagtccaacactctgcgcaatatacgtcaacaacaatgaaacaattggtgtaagcaaaaatggaatagctaaaatgggattgaaaacaatcggaagcccaaatatgaccggttcattgattgagcatatcccgggaataagggaaagctttccgattgttcgatattctgaaactttgctacgtatcattaagagtactaaaccaagagttccacccgcaccacctaaaaccgatatacggaacatttgtagattcatcagatga

SEQ ID NO: 564 - DNA, 186 bp, Enterococcus faecalis
atgaaatggctcctcgggttactgatcatttttgcaataattggcgttgttttttctttttacattgccaattattttttgaaaattgcgttgcttaaagacaacccttggtatcataaaaaagggcatcggttattaaatcctgataattttcaagaacgggaaacaagatatacaaaaatataa

SEQ ID NO: 565 - DNA, 807 bp, Enterococcus faecalis
gaacaacaaaaacaagaaggcgaagctttttggacagagtcttttgctgaagatcgttggttgaaaattaaagatgaaacattgtatgcacggtgctttattccttatccagataaccatcgttgggcgatttgtgtgcatggttatcgttcaaacggaaaacgcgatatggcatatactgcattacgttttgcaaaaaaaggctacaatgttttagttcccgatttgcgtgcgcacgggaaaagttcagggaataaaattgggatgggatggctggatcggttagatttattaagttggcttagtgaagttcttgccattgatatggaagcagaaattattttagtgggcggttccatgggagcggctactgtcatgatggcaagtggtgaaaagttaccaacgaatgtccgcggattaatagtggattgtggctacacttctgtttatgatgaatttaaatacgtcctacatgaatcttttcatttacccgcttttcctattttaacaattgctaatcaattagcattaaataactatggctttcaattgaaaaccgcttcttccgtgagacaattacacaaaaatacgttgcccacattctttattcacggtacaggtgatcgctttgttccaatgacaatgtttgaagaaaatttagcggcaactcaggggataaaaaaaggcctcattgttgctaaagcaccacatttatcttcaagtgtctacgaacctgaaaattattacagtagtatttttgaatttttggaagaaaactgtcctgcggtaaaaacaatatccgactaa

SEQ ID NO: 566 - DNA, 480 bp, Enterococcus faecalis
  misc_feature (1)..(5): Nucleotides 1-5 are "n" wherein "n" = any nucleotide.
nnnnncgtccaccctcgtggtcaagattatggtctttatatggccctttttgatgtgccttttacaattaaaaatacattcatcggcagactacttttcccgaaagcttttatgaatgcaggaagtgcgaatctgattttttatttgattagtttttttggttttttatggtcaattttcatttttgcttatctattgaataagacacgcctcaaattattaaataaaacatttccttatcttttggaaatattagaagtctgtattttgcctttagtgattctttttgcttacatttatatttatttgcgggtccatggcgaaggtttcagctatatacgagaatctcttttacagcaagagttaacttattcaatgaaatggtttctttgccttggtagtttggcgccgttatttttctttttaagcactttaaatttaactaaacgagtcagacaaaaaaaagacatggaatcatga

SEQ ID NO: 567 - DNA, 600 bp, Enterococcus faecalis
agaaaaagtggaaaggtgtttctctttatgaaggtacttttaatcattcctgcttacaatgaggaagaaaacattttgcggacgattgcttccattgaaacatttaaacaggaagttacgcattttcaacatgaattggattatgtggtaattaatgatggctcgacagatggaaccaaacaaattttagaagccaaccaaattaatgccattcatttagtgttgaatttaggtattggcggggcggtacagaccggctataaatatgccttagaaaatgagtatgatgttgcggttcagtttgatggtgatggtcaacatgatatcaatagtttacctattttactggaaccattagcagagggtaaatgtgatttttcgattggctctcgtttcattcctggaaacgaagcgtcttttcaaagtacgaaaatgcgccgttttggtattcgtttgttatctttttgcattcgaatggcttctggtaaaacaatttatgatgtgacttctggttatcgagcgggaaatcggaaagtgattgctttttttgcaaagcgttatccgacaaattatcccgagccagaatcgattgttcactga

SEQ ID NO: 568 - DNA, 936 bp, Enterococcus faecalis
ttttttctgacatgtgagataacagtggaaaggcgttggcaaagtaccaaagttaattttgccttgcatttttttcaagaaagagcgaaaaaaatgattttaattactggtggaaatggccaattgggcacagaattacgtcacctattagacgaacaaggaattgagtatgtttcaacggattccacagaattagatattactgatgcggatagtacgttggcaaaagtgaaagaaattcaaccaagcgtcatttatcattgtgctgcttatacagctgttgataaagcagaagacgaaggcaaggaattagatgaaaaagtgaatgtagatggcacacgtcatgttgcagaagctgctaaagcagtgggggcgacacttgtttacgtaagtacagattatatttttgatggaactaaaaaagaaggcgtctatgcgattgatgatcaaccgaatcctttaaatgagtatggtcggacgaagttattaggtgaacaagcggtccaagaaatcctggacgactattatattattcgaacatcatgggtatttggtcaatacggtcataactttgtctttaccatgcaaaaattagcggaaacaagagaccaactaaaggtagtggacgatcagtttggccgcccaacttggacaagaacgttagccgaatttatggcatttgttattgcagaaaaagcgccatttggtgtttatcatttgtctaatgaaaacagctgtagctggtatcagtttgctaaagaaattttaaaagatactgaagtggaagtattgccagtggattcaactcaatttccacaaaaggcgcaaagaccacaatattctgtcatggatttaagtaaaacagaagcgttaggctttaaaattcctacttggcaagaagccttagcacaaatgttagaaaatgttcaacaataa

SEQ ID NO: 569 - DNA, 768 bp, Enterococcus faecalis
caacgttcttttttagatggacatcaatttgatgttgaagcagggaccgttttactcattcattatcatgatttacatcgaattattaagcagagtactgatgatttcgaacggatgtatatttttttaacacccgattttttacaacaacgatctagtaaacggacaaacttgtctgcttgttttcaacattttggtcagcgtcgtagtaaagttatcaaagtggatgtagcaaaattagcaaactacttgaccccgttagatcattctcctttgccagaagaatatggtgcggatgttcgttatgaacaacaactgttagactttttaatttacttaaatcaattagttctgaaagaagagaatgagagccaaccaaaacaaatgattgaaaatgaacgaattgaagcaatgattacctacatttctcaaaatttggatcaaccattaaccttagaacagatggaaaaaaatttttttgtgactaagtattatgtaacgcgggaatttaagaaacatacaggatttactttccatcaatttgtgctgaaaaagaaactactttacgctaaacagttattaaaagaatatcgcagtgctagtgatgtttacctgaaatgtggatttaaatcatatccacactttttgaaatcctttaaaaaagagtttaatatgacaccaaaagaatttttggtgcaacataagaataatcagatcattcattttgatcattacgaagaatctatcaagaaagtgaggcttgagtaa

SEQ ID NO: 570 - DNA, 849 bp, Enterococcus faecalis
ggcttgagtaaaatgttgacacttgcagtacgtgcccatgatgttggcaccaaaatatctcctgtggaattggctaaaaaaattgctgaaacgaacataacttcaattcaatttgccttaggtatttcttatccagaatatgcaagtgctgctgttctatctccaggactaggaagccaattgaagaatattttcgaagatgaaaagattacgattagcgtcctaagttgttatattaatctgattcatccagatttagaagagcgagaaaaacgactgcatcaatttgaaacatacattcgttacgattcaatgtttggggcaaaaatcgttgcaactgaaacaggcagtatatatgaaacgatttattacactgaagataattatacggaagaagcctacgaagaagttttatttgctgttagaagattatgtcgagaagctgaaaagtatgggataattgttgggattgaaccaggaatcaatcatccaattcatacaattgaaaaaatgcaacgattgattgacgaggttgcttcaactaatttaggtattattttggatcctaccaacttaattcgagtagatatagataaaacgtatttggaaatagtacaagaagcgtttgagtgttttggtgaaaaaatcgttgcttttcatttgaaagatttcattataagaaatcagcagatatttccggtagccattggcgaagggcaggtacctcttacagaaaccattcaatttttgaataaacataagcccggactgttcactatttttgaggaaacaccatttgaaaaaatagcaagtgcctatcaaaaagtttcgcaatatcattccatttag

SEQ ID NO: 571 - DNA, 216 bp, Enterococcus faecalis
aaggaggacgaggacatgcgtttctcaaatggcggtatttttttattgattagtatgtggcaattcattgttactggacggacattttcgtacttaaagaaagagggcggtaaaagaacctcaccatttattctgttaggactatggagtagtttagtgtttgctattatttcatttgctgtggcgattggttctttcttttatgtgagtttttaa

SEQ ID NO: 572 - DNA, 813 bp, Enterococcus faecalis
  misc_feature (760)..(760): Nucleotide 760 is "n" wherein "n" = any nucleotide.
tcccgttgtgaaggaccaagacaaattgctaaagcattgatgttggcaattgtcgttgctttacttatttttggtggcgcctatgtcacaggacatttaacaattgatttctttattaataccatcagcgtgttaggaatcctgttaccagtttattatttcagcaaaatgttaacgtctaaagatgtcactgctgaagaaaaaccaaaagttctggcttacttgccattattcttagcagcaattgttttctggtcattggaagaacaaggttcgtctattcttgctctatttgcaaatgaacggacacaaacaagtttgtttggcttcccaattgccgctagctggttccaatcattaaatcctgtattcgtagttattttgacccctatttttgttacattatggacaaaactaggtaaacgtcaaccatcaacagttgtgaagttttcactagggctagtctttgctggtctttccttcgtcttattaatgttgccaggtctactttatggtaccgaaggacgagtgagtccactttggttattctttagtttcttcattatgattgtcggagaaatgtgtgtatctcccgttggcttatcgattactacaaaattagcaccgaaagctttcgaagctcaaaccgttgctatttggttattagcagatgccgcttcacaagccattaacgctcagattgctcgtttctataccactggaacagagtcagcatattttgggattgtcggactgttanctgtcgttgctgggaatcctcttatcattgtgaaaaaacaatcccaaaactaa

SEQ ID NO: 573 - DNA, 609 bp, Enterococcus faecalis
atgcactatcctgaacatctgaaaaaagcagttttagctaaagcgaaagacttaccattagaaggttttgtggaaggtcaaggtccgcaacagccaaaagtgatgctgattggggaagcccctggaaaagaagaaattaaagaaaacgtaccatttatagggcgttcaggtcaattgttgatggaacaattacaacaagttggcttaagtcgtgaaacggtgtatatcaccagtgcggttaggagtcggcctttttctgtaaaaacgaagcagattgcaaaaacgggagaaagagtaaccaaatttcctaatcgaacgccaaccaaagaagaaatcaaaatttttgcacctttgcttgattgggaaatcgctgtttgccaacctgaactaattttgacactggggaatattgggttgcaacgacttttaggaccaaagccaacaatcactgcagtgcacggaacggtcattcagtcgcccattcaaacatttgatgagcaatcacaaaactatcattggacgcagaaaacctatcaaatcattccactcttccatccagcggctgtcttttataattatcgtttgaacgaagtggcgcaagtagattag

SEQ ID NO: 574 - DNA, 735 bp, Enterococcus faecalis
ggacagcgtgaaacggacattggggctttgttaaatgatgaagttcaaacgccgacggtagtaaccattgcggcaactggtcaacgttttgaatatgcaaacatgtatccgactgccaaagaaattcagttaggtgatgccttatcattaactacaggctacaaaggcggcttgtctagccgaacaggttttgttattgaaaacgagcagcaattgccagaagcgcaacgtgattatttagagcgcgtagcaaaaccctattttcaagctgtcgttcactggcttgaaaccattcgaatcggactgttagggcgagaaatgtaccaagcgattgaagaacagttaccaaaagaaatctatcactggcatttgaatcctgggcatttagtttcggatgatgaatggatgtcgtcgcctatttatccagattcagccattcgcttggaaagtggcatgctctttcaagtggatattattccttctgtacctggttatacaggggtgagtgcagaagaatgtgtggctttggctgatgaaacactgcaaaaagagattcagcaaacttatccagacatgtggcaacggattgcgacacgcaaagcctatttaaaggagacattaaagctcgatttaccatcggaggttttaccaatgtctaatttagttggttacttacggcctttttatttagctaaagacaaagctttgtgtgtagaaaaaccagcgcttaaatga

SEQ ID NO: 575 - DNA, 843 bp, Enterococcus faecalis
tttggagttgaaaatgtgactactttgttagatgaattattagaccaagaattccgagataaattacttatttatcaaacttttatgaatagtgaaggtccattattaaaagaagaattttatggatattttgatttatccactcaaaagttagaatcgttgtgccgtcaaataaattatgaatgtacacagatttcttcaaggagtcaaattctttttccagctaaaggactgattagtgcgcaaaaattatcgcaaattgattatcaagccttaagaaaatattattttgatcaatcactaatggccaagttgcttcttgatgtgggcctctatcaaaagcacacgattcaagaattttctcaaattcattttatgagcaaaagcaaaatttatgccttctcgtataaactaaatctgattttagctaattggcatattaaattaaagtcaacaggcttggttggagaagagaaaaatatccgaagtttttgttttcaatgcttgtattatttttatggaagtaatcaagaaaggctgcctaacattttgctggaaaatagtcctggcattaaacgatttataaacgatttacaactgatgtatcaaagaacgtttagtcttaatcaaagcgcacaactatttattcttttaacgatccaacgttttcgtgtattttctgatcatgtagtggactctttttcggaagttcatgtgcctagctgtttacagcaggcctttgaaaaaatttatactagcgaaacccctctttttagagaggattttggcaaagacacttcatatatttttctttttgtaagtttgaatgaatacattgataat

SEQ ID NO: 576 - DNA, 993 bp, Enterococcus faecalis
aatgttattcattcaaaattcatccgctggaaaataaaaccagtaatgattgttggttgctcttattatgatcaaggaacctcgcgtgcgcaattacatctccgtcaaattcttgatgcacctggtgtcaatgcaatcgtgatgcctgggaacgagtttttattagggaaagctaaagaagcatttgatgaaaacggcaacttaattgcggagggaacacgtcaatttttagaaagcacattacaaaaattcgtggaattcattgatgtgatttcaaaattagaaggagctaagccaaaagacttacctgaggatttacatgcaaaaggaaccattgaaacaacgatcgaaggggttgatatggcagcagatgattgggtagaacaagcagcagaagcggttcaggctgtggaaggcgacacatatgtaaaattagatcgaggcattttaaccgtagatcagctaaattatttcttaaaatcaatgccaatggaattgacttatgcagacagtaacaatcaatttttatattacaataaaaaaatggctgctgaagaaatgtttgctaaacggcaaccaggacaagttggtaatccattagcgaattgccatccgccaaaagcattgaaaaatgtagaatgggtgattcaacaattacggtcaggaaaaacagatgctattcgcgttcatgttccaatgcacggaccagatacctatgtagtgcataactatcaagcgatgtatgatgataatggaaattacgcgggaattaatgagtatattttagactttaaaccaattgttgattggtatttaaaacaaactgggcaagaattagtcggtggaaaaaacgtcgatgcagtcagtggtgcctccaaaaaagaagcgccagaaacggcagatagtgtctcaagtgcatcagtccatgaagaagagtcagcgaccgaaaagccaacagttgacagcgtttctagcgcttcaattaaagagtaa

SEQ ID NO: 577 - DNA, 1026 bp, Enterococcus faecalis
acgtatagcatgaaagctttagaaaagggcaaacatattgtgactgccaataaagatttactggcgcaacatgggagtgaattagtagcgttagcccaaaaacatcattgtgatttatattacgaagcaagtgttgctggcgggattccaattttaagaacaattgctaatagcttagcggcagacaatattcaacaagttttagggattgtgaacggtacgacgaattatatgcttacgcaaatggtttctgctgataaaagttatgaagaagctttagcagaagcgcaagcgttggggtttgctgaagcggatccgacaaatgatgtcgatggaattgacgcagcctataaaatggttattttaagtcaatttgcttttgggatgaatgtttcattaccacaagttgatattcgtggaattcgcggattgtctttagatgatgtcgctatggctaaacaactggggtatgaaatcaaattgattggctctgctgaacaaaatgagaatagtatctcggtggaagtggcgcctatgctagtcaatcaaaagcaccctattgcatctgttcggaatgagtacaatgcagtatttattaaaagtgcaggcgtgggggaatcaatgtattacggtccaggagctggagctaaaccgacagcaaccagtgtggtcagtgatttaattacgattgctaaaaacattcgcttggcaacgactggccatatgttcaattcgtatcaacataaaacacaattgacgagttccgaaaatgtatttgggcagtactatttttcattagatgttccagatacaccaggacaatttttgcagttgacgcaattaatgactaaagcagaagtcagctttgatcaattagttcaacagaaatcagatggacagcgagcaagaattgttgccattacacaccagatatcaaaagcacaaatgcaacaagttgtgatagctattcaaaatacggaagcctttcagttattgaatgtaatgaaggttataggagatgagtaa

SEQ ID NO: 578 - DNA, 678 bp, Enterococcus faecalis
gtaaacatgtatgaaggtttgttaaaacagtatcaagcgtatttgcccgtaacagaaaaaacaccaatgatttctttagccgaaggaaatacgccactgattcctttacctaatttatccaaagaattaggtattcaattatatggaaaatacgaaggcttaaatcccactggctcattcaaagatcgcgggatggtgatggctgtagcaaaagcggtagaagaaggtgccaaagcgattgtttgtgcttctacaggaaatactagtgccgccgctgctgcgtatgccacaagagcaggcattaaagcgtatgtagtgattccagaagggaaaatcgcactgggaaaattggcgcaagctattatgtatggggcggacattatttcgattccaggtaactttgatgaagcattaaaagcggtgcgagagattgcgaaaactgaggcagttgcgctagttaattcagtgaatccttatcgcttagaagggcaaaaaacagcagcttttgaagtttgtgaacaattaggtcaagcgcccgatgtcttagcgattccagttggaaatgccggcaatatttccgcttactggaaaggctttaaagaatggcatgaaaaacaaggaacaactttaccaagaatgcatggttttgaagcagaaagtgcccgcagcgatcgttga

SEQ ID NO: 579 - DNA, 756 bp, Enterococcus faecalis
  misc_feature (163)..(163): Nucleotide 163 is "n" wherein "n" = any nucleotide.
ctgctttttttctattggagaaaaaagtggtttttttgtattgttttgacgttgagacaaaggaggttcatttcagaaaattttccccaaaataaaatagacgaatgcgaggatgaaaaaatgaaaaaatttactttaacaatgatgactttaggtttagtancaacacttggcttaacaggatgtggtaaacaggaaaagaaagcaactacctcttctgaaaaaacagaagtaacgttaccaaccaaagaccgtagcggcaaagaaattactttacccaaagaagcaaccaaaattatttccctagtgccatcaacaacagaagtgattgaagacttaggtaaaaccgaccaattaatcgcagttgatactcaaagtagtacaatgatgactgatttaaaaaaattaccacaaatggatatgatggctgtcgatgccgaaaaattgattgccttgaaaccacaaattgtttatgtgaatgacatcaatttagctagctcagaaagtgtttggaagcaagtggaagatgctggaattacagtcgttaatatccccactagtacaagcatcaaagcaatcaaagaagacgtccaattcatcgctgatagcttatctgaacatgaaaaaggacaaaagttaatcaaaacaatggatcaagaaatcgacgaaatagcgaaaattggtaaaactattaaaaaaccaaaaactgttttgtttgaagtggctgccttaccagacatttatagttttggtaat

SEQ ID NO: 580 - DNA, 369 bp, Enterococcus faecalis
cataatgtgaaaggaacatcggaatcaatgaaaaagttttttaaatatctcggtagcttgatggtccttcttttaagcatagctttaattttgataggatatttaaccttccgagagtttcgaccacgagcggttgaaccagttgctataaataaacaattttcagagcaaaccatcgaaaaaaagcaatccatttctttagtcacgtataacataggctatgccggcctaggacaaacagaagatttttttatggacggtggcaaaactgtccaaccagttaataaggcaatggtccaacagaatttaacaggcattgaagaaaccttaaaagaattaccagtgatgatttacttattcccagaataa

SEQ ID NO: 581 - DNA, 639 bp, Enterococcus faecalis
tgtgatatagtagaagatagccacctaaaaattagactagaggagggaaagttgatgtctttaatcgttttaattggtgcccaagctgtcgggaaaatgaccgttggcaaggctttagaaaagcagttagatgctaaattactatttaatcatcaaaccattgacttatttgcaaactatcttgggtatacggaacgtgcatttcaattgtctgattccgttagaaaggaactttttcatgcctttgtcgaaaatccagccacaaatacaacaaaaaacattatttttacagtggtgattgcttttgatcaagaacaggattttcaatttttagaagaaatatcagaaatttttcttagtaaacatgagtccgtttatttcgtcgaactcgtctcttcaacatcaatccgcctagaacgaaatgttcatccagaacggctagaggcaaaaccttcaaaacgcgatgtcgacttttctcgaaaagaattactcaatacctttaaagaacatcgattagtaagccacgaaggtgaactagaaagtatatttccaaatgtaaaaatagcgaaaataaataattcaaacatgacaccagaagaagtagccacgaagataattgctacttttggtttgacataa

SEQ ID NO: 582 - DNA, 741 bp, Enterococcus faecalis
cggagaatggcaatagaaaaatattttcaaacaatagatggcagtcaaattttttatcaaatttttggcaaagaaacaaattacccccttgtgttacttcatggtaatggcaatgatcatactttttttaattatcaaatttcttatttctccaaggagtatcaagttattgcggtggatacccgcggacatggacgttccaccaatacacaaagtcaattaacttttccgcttttggcagaagatttagctggtattattcaacaagaacacttaacaaaaattaatttattgggctttagtgacggagcaaatattgccatggtttttacccatttatatcctgatttcgtcaacaaactcgtcttaaattctggaaatgtcaccatgtctggtctgaaaaaatatgtaacgattgccacttattttcaatattggttttgtcgtattggcgcctttttttcaaaaaaattgcgcgcacggctccctatcgtggctctgttatttgaagatactggactgacaaaacaagatttagaacacatcccctgtcctactcttgttattactggcagtcgagatttaattgcgctttcccattcacgggcgattgctgatgccattcctgccggcaaattggtcttggtaaataaacagggtcatttatttgccaaaaactcaccagatatttttaataaaacaatcgaaaaattcttaaaggaaatgaaggtgtctaaatga

SEQ ID NO: 583 - DNA, 231 bp, Enterococcus faecalis
ccctgtttatttaccaagaccaatttgccggcaggaatggcatcagcaatcgcccgtgaatgggaaagcgcaattaaatctcgactgccagtaataacaagagtaggacaggggatgtgttctaaatcttgttttgtcagtccagtatcttcaaataacagagccacgatagggagccgtgcgcgcaatttttttgaaaaaaaggcgccaatacgacaaaaccaatattga

SEQ ID NO: 584 - DNA, 303 bp, Enterococcus faecalis
atgaaacaaattattcattggatcaaaacgcatacaggattactaaaaacactgtttgttattgcggtctcaattattgttgttgcccaacttttatcaattggtaaaacgatctcatttgaacagttaaaacagatgtttgatgagattccgctatggaaattgttattgatgatagttatcggtttagtttccgttactccgatgctcaattatgacttaacattaaatcccattttaaacttgaaagtctcaaaacgggaactccttgaaaccaactgggattgtcaataccatccataa

SEQ ID NO: 585 - DNA, 186 bp, Enterococcus faecalis
ctaaagcaggtaaaatttctaaaatataatccatcattttttcctccaacaatttttattaaaaaaacaaaaaagcattttggctgtgagccaagaggacgaatcgcattcgtggtgccacctcaatttacttatctttcacaagataagccttatgtagttgcgttgacaactactctctgttaa

SEQ ID NO: 586 - DNA, 663 bp, Enterococcus faecalis
aaattgttggaggaaaaaatgatggattatattttagaaattttacctgctttagttagcggagctggcatgacactgaaagtctttttctttacgctccttggctcgattccactggggatcatcattgcctttattttacaaagttcgtttaaacctttacgttacttaattaacctctacatttggttaatgcgcggcactccgctattgttacaattaatttttgttttttacggcttaccattaattggtattgtctttgaacgttacgatgcggccttattcgcatttattttaaattatgctgcgtactttgctgaaattttccgcggggggattcaagcaattccccaaggtcaatatgaagctgctaaggttttacgtttaacacgttttcaaacagtcacgcggattattttgccacaagttgttaaaatcgtgctgccttccgtaggaaatgaaattatcaatttggtcaaggatacttctcttatttatgttcttggcttaggcgatcttttacgtgctggtaaaattgcgatgagccgcgatgttacattagtgccattagctttagtgggagtgatttatttactctttacggcaattttgactgttgcttctaagaaaattgaaaaattctatcaatattataaatag

SEQ ID NO: 587 - DNA, 741 bp, Enterococcus faecalis
  misc_feature (648)..(710): Nucleotides 648, 651, 669, 685 & 710 are "n" wherein "n" = any nucleotide. 1               5
gaggactctaccatgttaactattaaaaatttaaccaaacattttgacaaccggaccattattgatcacttaaatttagaaattccagatggtaaaattttaacgattgttggtccttcaggcggcggaaaaaccactttacttcgttgtttggctggtttagaaaccattgattctggtgagcttttgttggatggtgttcctttcaatcctgctgaaatggacaatgccgatcaagtggttggggtcgttttccaggatttccaacttttccctcacttatcagttttagaaaacattaccttagcacctacattagtactaaaagaagaaaaagcaaaaagtcagcaagaagctttagaattactggaaaaattgggcttggctggtaaagaaaaactctatccgtaccaactttccggtggacaaaaacaacgagttgcacttgctcgtgccttagcaatgaagccaaaagttcttgggtacgatgaaccaacgagcgcgctagatccagctttacgccaacaagtggaagaagttattttacatttactgaaacaaggcatgacacagattgtcgtgacccacgatatggctttcgctgaaaaaattgcacacaatcttttgacggttgccccgttccaatanaanaggagttttatgatgaanaaaaaatatcctttancccttgctgggttatctgttggtanttttactccctatttggcaggttgttggtaa

SEQ ID NO: 588 - DNA, 366 bp, Enterococcus faecalis
aagtcaattcgtcgaattcctccaaaagatcctaatatttttttaattgagagacctacagcaggtgagattattgctctatggtggacaacctcttcccgtggcaaatcaactgataaatatataccaaaatatttcaagcgtatctatcgagtagatatgattaaacaacgtaaactattcatcaaagctaacgttatctccgaagaaaataatacttatgtactgactgaactaggagaaatgttagtacataaatacttttatattattgaagagcataataattcttccaatgattctttcaatactgaacgaagaaagttagctgataaaattctatattcgctaggcggtgaaatataa

SEQ ID NO: 589 - DNA, 876 bp, Enterococcus faecalis
aatataatgcaaacggaagttaaagagtttattgcttttgatattgaaacaacaggtttagacttccatcaggatgctgttattcagatatcagctgcaagatacgttgatggtattgaagttgattattttgatacattggtaaatagtgactacattccagatgaaattaccaaattaacaggaatcactaatgaccaagtactaaatgcgccaactttagatgaagttatgccttatctttttgattatttaggagatacgattctagttggacataatataaaaagttttgactttccttttttaaaagcaaaaggatataatattgcagaaggacatgaaatttatgatactcgctattttgcagccacacgaaagcatggggctgtaaacaatcaattaactacattgaaattactttttggtatcgatgcgatttcacataatgcattgaatgatgttaggatatctgcaattgtatttatggaattattaaagatagaacctcaagaaaaaagctctactcttaagaaaagtagcttggactcttttgaattagatgatgatactacacctttttttgaaggaatgtcttttgtagtaacgggggcatttgatgattctaaatataaccgtaaacaaattgaaacactgataaaacaacatggcggtagggtatcgtcaagtttatctgccaagactgattactttatccaaggtattcaaatttcttcccaacttaaagacggaaagcacagcagtaaagaactaaaatatatagagttacgtgaaaaaggggttgatatttataaatttaatggtaatcagttttatgaactaattacaaactatagaaaattgaggaaaaattaa

SEQ ID NO: 590 - DNA, 387 bp, Enterococcus faecalis
aaaattgaggaaaaattaatgacagaactaaagaaaataacttcaaaaaatggacatgtttacctctttaaagatatacaacataaacaacgaaatgagttaggcatagcctctggacaatcagtactgatttcaatttttgaaccggatccattctattttacagaagatattcgacttattcattataaagatatcgttaaaaccgaatccgtttcttcaaaagaaaatgaattttttgaatatgtaaaacaaaattcaccagttgcttataaaaagaaaatctcggatagtgatagtatctctgagtatattaattatgctccacaacttaaatttaaatatattataaaaggtggtatactaactattaccgggggaaattaa

SEQ ID NO: 591 - DNA, 279 bp, Enterococcus faecalis
ctattaccgggggaaattaaagacagaaatgttaactttccaatttctcagccttacgtatatgtcgataaaccagaaaatgaaattccgttagataataatttaaaattccaatatgtagtcaacgatttcgatatacatgctcccgaatacaaaatatcgtttattttaggtacttcaaaagccgagtatggtcgttctttcaatatgaaaaatttcgaaggtgttttacgcaccccatctgaaattagttctatgaaagcaaaaaaaaagaaatag

SEQ ID NO: 592 - DNA, 675 bp, Enterococcus faecalis
tcccgtggtgaagaccggaatcatgtctatcaagcagttgacttattaaagcgtacctataatattcataaaggaattaaaatatctattgacaaacgtatccccgtggcagctggtttaccaggggggaccactgactgtgccgcagcattacgaggcttgaacaaactgtggaatctggggttgacgatggacgaactctgtgaaattggcagccaaattggtatggatgttccttattgtttaaggggcggaacagcctttgcaaacggacgtggggagaaaattgaagcattaccgaccatgcctcaatgttggattgtgttagttaaaccaagaattagtgtatccactagtaccgtttttaatgatttagcggtagatgaattgcaccatccagatattgctggactaagaatagctattgaaaatggggattatactgggatgacccaaacggttggcaatgcgttggaaagtgtcacgattgccagacatccaatcgtgcaacaaatcaaggatcgcatgctgaagtacggcgctgatgcagcgttgatgagcggcagtggaccgacagtctttgctttatgtgaaaagaaaacacgagcacaacggatttataatggacttaaaggcttttgtgaagaagtttatttggttcggacattgaaataa

SEQ ID NO: 593 - DNA, 381 bp, Enterococcus faecalis
gacgtacttcgtatgttaaagactgccattcaaaatgatcagattaaagcgggccgtgaattgaacggagaagaagaactcactgtattgtctcgtgagatgaaacagagaaaagattctttatcagagtttgaaaaggcgggacgcgacgatcttgttgaaaaagtaaaagttgaaatagcaattgttgaaaaatatatgcctcaacaactaacggaggaagaaattcgtcaactagttcaagaggtaatgacgcaaactggcgccacttcaccaaaagattttggtaaagtgatgggcgctatgatgccgaaagtcaaaggcaaagccgatggcaaccaagttaacgcaattgtgaaagaattattacaagaaaactaa

SEQ ID NO: 594 - DNA, 1068 bp, Enterococcus faecalis
ctttcaaagtcaaatcaggtacgacttctttttaaacagataagaatgtggtatcattgtaaaggactatataataaaggagatggacgttttttgacagataatcagtcaaaatctttggaattaatacttactgattctgatgatgcacacatgcttttaggaacacatgataaacatatcaaatttttagaagagaatactcacgtaacgattaatagtcgtggcgaagttattcagttaattggcgaatcatcagaggtagagttagtcgcttccgtgttaagagcgctacaaacattaattcaacgaggcatcaaagtgcatacgccagatgtcgtttctgctttaaaaatggccaaagctggaaatttagaggcgtttattgccatgtatgaagaagaaattatgaaggaccatcatggtcgggccatccgaattaagaatgttggtcaaaaaaaatatatcgatgcagttaaaactcatgacgtcattttcggggtgggacctgcggggacaggaaaaacctttttagccgtggtgatggcagtagcagctttaaaaaaaggcgaagtacaaaaaattattttaactcgtccagcggtggaagctggcgaaagcttgggctttttaccaggtgacttaaaagaaaaagtcgatccttatttacgtccagtttacgatgccttgtatcaaatttttggtatggatcatacaaatcgtttaatggaacgcggcgttattgaaattgccccgcttgcttatatgcgtggtcgtacattggatgatgcttttgtcattctagatgaagcacaaaataccacggttgcccaaatgaaaatgtttttaactcgtttagggtttagttcaaaaatgattgttaatggagatactagtcagattgacttgccacgtggtgtaacaagtggtttagttaacgccgagcgtacgttaaaagacattgaaaaaattgcctttgtaaattttgaagccagtgacgttgtgcgtcatcctgttgtagcacaaattattcaagcctatgaaaaagaacaacaaaagcattcctaa

SEQ ID NO: 595 - DNA, 675 bp, Enterococcus faecalis
gttgaagaaacttacaaacaaacagtcgaaattagtagatgcagcttacgattacatgaaaaacgttgcaccaacaacgcggcgttgctttattcgtacgaactaaaaaacacaccacaagaagcaatcacacatgacgcaatccgcgctggtcaatactatgtaccccatccttggctccgtggtacgttaactaactgggatacaatccaaaaacgtattgctcgcttgaaaaaaatcaatgcaatggaagaagacggcactttcgaagttttacctaagaaagaagttgctggcttaaacaaagaacgtgaacgtttagaaaaattcttaggtggtatcgctgatatgccaagaattccagatgtaatgtacatcgttgacccgcgtaaagaacgcattgctgttcaagaagcacacaaattaaacattcctatcgttgcaatggttgatacaaactgtgatcctgatgagatcgatgttgtaatcccttcaaatgatgatgcaatccgcgctgtgaaattaatcactgctaaaatggctgacgctttcatcgaaggtaaccaaggggaagaccaagcaactgaagagttattcgttgaagaaacaccagaagcaacttcaatcgaagaaatcgttgatgttgttgaaggaaacaacgaatcagctgaataa

SEQ ID NO: 596 - DNA, 648 bp, Enterococcus faecalis
tatccgaggaggacacaaataatggcagacgttacagctaaaatggtaaaagaattacgcgatatgactggcgttggaatgatggacgctaaaaaagcattagtaaaagtagaaggcgacatggaaaaagccgtagactttttacgtgaaaatggtatggctaaagcagcgaagaaaaatgaccgcattgcggctgaaggtttagcaaacgtagcaactgtgggtaacgttgcagcaatcgttgaagtaaactcagaaactgacttcgtttctaaaaacgaaatgttccaagatttagttaaagacattgcgactaaagttgctgaaaacaaaccagctacgatggaagaagcaatggctattaaaactgaaaaaggcacaattgaatctgatttaatcgaagcaacaactgttatcggtgaaaaaatcagcttccgtcgttttgaagttgtcgaaaaagctgacaatgctgcatttggcgcttacttacacatgggtggccgtattgctgtattaacagttatcgatggcacaactgacgaagaagttgcgaaagatgttgctatgcacatcgcggcaatcaaccctcgctatgtcaacgaatctcaaattcctccagaagaattagaacacgaaaaaactgtgtga

SEQ ID NO: 597 - DNA, 702 bp, Enterococcus faecalis
tggttaccacgctttttcccttggcactggctgaaccacacgcctttaaatacaattcagtttccttggcggtttttagggattctttctgtaatgctcgcttttttcattgcacaagacgaatggggcgttttccgtaaatcttggaccgtggctttgttggttttccttgccatcagcaatttgggcatttatcaatatcaaagtattcagtcacaacaaggccgcctgttaacaaaagctgagtatgagcagccagcgcctttttatatcggtgcgggccatgaatatttgccagatgaaatcaattatcaggaattattgaaacagaaaaaacgaccacttgattattcggcagaacaagtaaccattacaaatgttagaatgccttatgggaaaatttcatttgactaccaagtggtgaatcaatcagcgaaggtgaccgttccttttatttattacttaggctatcaagccacgattcaaatgaaaaaccaaacgggcgctaaaaaaatgagcctaaccaatcaaggaggcttaaccgctctttctttatctggtacaggacatgtcgacatccgttaccaaagaacaaaagtgcaaaaaatagggacaatgattaccttactttctgttggtggttttggatttagccgatttttacaacaaaaaaagaaacacaagataaaagaacaacgatga

SEQ ID NO: 598 - DNA, 660 bp, Enterococcus faecalis
ccaagaaatggtaagctattatcaggacttacaacaaagagtaattgcgttagaaggaggaagcgtcaagtgaaaaaattacgtgaattaacagtagaagaactttttgaatcatttgttctaattaaaaatgccgatgtacgtgtagctaaaaatgggaaaaagtttattgcctttacctttcaagacacatctggcacgattgacggaaaatattgggacgcctctgaggatgaaattacacgatttactgcgggaaacgttgttttactgaatgggaaacgagaagtttatcaaaataaaccccaagtaaaaattttacacatgcgtttagcgacagcagaggaaccaagccagccaagtttatatatggaacgagcgcctttgaaaaaagaagagatggtcgaggaaatcaatcaagtgatttttgaaattaccaatgctcattggaatcgtattgtgcgctatctcatgacgaaataccaacaagaattttatgaatttcctgcagccaaacggaaccatcatgcttttgcgaatggcttagcttaccacactgtctcaatgttgcgcctaggcaaagcaattgctaaggaatatactgaaattaacacgtcactattatacgcggggattattttacatgacttagggaaaaaa

SEQ ID NO: 599 - DNA, 2025 bp, Enterococcus faecalis
acgcaacaggacttgttacaggttgcggaacagcaacgtctctttcccttgtacgaagaatggcagtcgctacctgaagaaacagagaacgttgttttagtcaaagaagaccaagttcaattagaagaaacctttcaagaatatatgttcctacacaaagaacgacaacgtttgaccaaagagttatctcttcagtcagaagcgctcgatgttccagaaggatatgctttttacctagaacaagatgcattgattcaacaattgttgaatcaacgctatgatatgcaacaattgatgacggaatcggaatggatgacccaaacctttgagcaaaatcgtcaagaaatggtccttttagagaacgaatgttcatggtcgcctgaacgaccaccacagcttttttatgacaacgaaaccgttcaaaagtggcgccaacaacaagttgcgtatacgcaagctcttcaaaaaggacaagaacagaaagcattcttggcttctcaaattgaaaatctggaagaccagttaacagattttgaaaaagcgcatgccgcattttttggtgaagcgacgcgtgcccaaaaagcacagaaaacaagtcaaccactttggttattgctaggaagtatccttgtattactcggtttctttttgccaagccctttaaaatggggcctagttctcgtgggagttagttttatcgcgaaagaagtgcttagctacgccactagaaaagaagcttcctctgatgaagtgaaagaagagtggcagacaaaactttcgcaactagattatttaaatgaacagttccaacaggcgctgaatcaagaacgtgaggcacaactgcaagtggaacaacttgaacaagcagtagcggagcaagcccaagtccatcaattaggaaaaatgcaacaaattgatactttaatgaatcagcgggaattgattacgcgctatttattgcttgttcaaacaaatgaagaactcatgagtcaattgaaggaaaatcaacaaaaacgccaagtatttgaagaacaaatcttcccattgatgacgcatttacccttgcaaggaaagagcctttccgaaaagttacactttttagaagggtttgctgaagaaatggagaaagttcgctttgctcaagagtatcaagcagatggctatctcaaacagcagttacgagagttgaaaactaaacagcaagaagcattaacacgaattcagcctttactaattcgttatcggattctatcaatcgctgatgttccaagtaggattcaacagctgaccactcagcaagcccaagttggtcgtgggcaagaattagcgacgcaattaggtaatctgtttccagaagcggtaacagaagcaacgttaaaagaccgttctttacaactggcgcagcaacaagcattggaagaaagccagttagataaaatacaagaacagtatcaagcgctgatttatgaaaaacaacaattaatgacggatggtaccttagatgagttgtatcaacgacaagcaattttaaaagcggaaatcaaagaactagctcaacgttggtctgggtatcaactagcgggacaactgctaatggacctattaacagagctttcggaacaacaattgcccagcttattacagtatgcatcaagctactttgcacttttaacaaatcagcgttatcaatcaatccaagtagccgaaggtcaactagttgcggtgacgaaagaacaagaaatgttttatttacatgaattatcaactggcactaaagatcaattgatgatggctgttcgttttgcctttttagcagtccaaggcgagcaactgatttgtccaattatcattgatgatggctggttacactatgatcatcaaagaaaagcccaattagctgaattatttactaaatttggtcaaaaacagcaagtcatttgtttttcttctgaccaagaaatggtaagctattatcaggacttacaacaaagagtaattgcgttagaaggaggaagcgtcaagtga

SEQ ID NO: 600 - DNA, 375 bp, Enterococcus faecalis
agaggcaacttgcaaaggagtagaagacgaatgagtgaacaacctcaacaacgttcaaccgaagaagtggaagcaattaaagaagatattttaactgcattagaaacagtgattgaccctgaattaggcatcgatattgttaatttaggactaatttatgaagttgaatttgcagaagaaactggtgatactgtcatcaaaatgaccttaaccacaatgggttgtccgttagcagatgttttaacagaacaaatccatggtgttttaaaagatattcctgaagtgaataatatcgaagtaaaattagtctggtaccctgcttggacaacggataaaatgagccgttacgcacgaattgctttgggtattcgctag

SEQ ID NO: 601 - DNA, 552 bp, Enterococcus faecalis
aaaggagcttttatgcaattcacattattaaatcaagaaaatcaagcctattgggaagcaacctacatagaagcttttccagaagaagagagactgccgtttgatcaattattgatgtcttctcaagcaggaaaatttcatttgtttgttattcaagaggcggatgagaacgtggggattttgttaaatagtccaattgcacctgaagcaacctatgtctttttctttgcaattgatcagcaccaccgaaacaaacgattaggttcaaccgtgttagcgttattgaagacacgttatcctaagggggttcttttggagagtgaagaaattggcaaaaatgcagcgaatgaagcccaaagagaaaaacgttatcagttttatgaaagaaatggcgtgctggatacagggtatctgattatggatagagggctcacttttcatatcatgtttgctggagcgtcaggcttcggtggaacgcagctacagtttttattagacttccatccagtagcaaaaatttggaaaaagccaagtattgatggcatcaggtag

SEQ ID NO: 602 - DNA, 501 bp, Enterococcus faecalis
atagcaagtatccgcctcatgattccggaccgatatttaacttattttgaccaagtttttcctgactatttaccaaatcctgtaccaaaaaaatatacatggaatgaatttcttctcgacaattttactaaatttgagcgagttcatcaggacccacaattaaagcgttttgccgaacttacccattcaattggaaacattacagtagttccactaggatttaacagcggaagaagtttatcgtttaaagattattgggattattctttagaacaactttcgatatttttagcttcatttcattcatgggaaagctacgttcatacgtatgagatgcaaccatttttaaatgaacagtatcaaccagtagcgctatggaaaaatcatttgaaaaaagactcgtttatcttacctcagaatatagaggagataaatgaatatttagttcaagtaaatcaacgaatagaaaaaagagggcagcgaatagtgaatcggttgtaa

SEQ ID NO: 603 - DNA, 423 bp, Enterococcus faecalis
aagaatatagagaaaatcgtaggatgggagttattcaaagtggcggaaattacagttaagacaatttcagagaaagatgatttaaagaagttgtttttgggtcaagagtatgaccaacagcagccagttaaaaatattttaaaagctagaacatcgaatgtccatattgaaaagtacgaggttgtggaggatgtttttttaaagttaactgggaaggcgaccgcgcacaaagatattatgaactcattttggacaacgtataaaattatgttacaacttgtttatcccgatttctttagaccagcggaggtaattggggaaaatcaagaaagctatttagaaaaaccttctgaacagaattttcttgcagtaaatagcaagtatccgcctcatgattccggaccgatatttaacttattttga

SEQ ID NO: 604 - DNA, 657 bp, Enterococcus faecalis
atgaaattaggggttattgccgcaatggatttagagcttcaaaaattattggaatattttccaccacaacgaaagatacagctagcaaaaaatacattttatatttatgaacaaaaaacatcgcaagtcattatggtttgtgcaggacaaggaaaaacgaatgctacgctatatagtcaaatacttattgattcatttcaaatagaacaactaattaatatcggtatttgtggctgtttaaatgaaaaactgcaactctttgagatggtgctaggtgaggaatactgccattacgatattcgtgaaagacagtcaatcaataaatttccttatcagctgtactataaaggagataaaggaatgctggccgaacttcaacatctagatgaaaagataaagtgtgttcgttttggaactggagaaggcttcgtttgtgacacaactgaaaaaagaaacttaattgaacaattctctattgactgtgtggatatggaatccgcagctattgcacaatgctgctttttaaatgattgcgcttttgtttctataagaattatttgcgatagagcggatgctaacgcagtcaaagtaacagaagatacacaaacacaggcaatggaaaaagtatttgaattggtctgtgcatatataaattaa

SEQ ID NO: 605 - DNA, 387 bp, Enterococcus faecalis
gacatggggagggaagttgttcacagcaaaagttcgcgactattatcccaagatacgttaaggaaatatgtaattgctggaggtgactttaatcaagttttcaaaggcagtcatcgatatcctgacttaggggaagctggttgggtaccaggagaaattgatccagcagacttacctaaacatttttcacttgcttatgatgatcaacaaccgactgtgcgggtgcttaataagccttacactggctcttatgaaacatcccaagtgtatgtaattgatggttttattgtttctgataatgtggctgttcatagcgtgaaaacaaaggacgaacaatttaaatatacagatcaccaacctgtgaagatggaagttgggttgaaatag

SEQ ID NO: 606 - DNA, 336 bp, Enterococcus faecalis
aaaagaggaggaagcactatgccgaatattttattaacaagaattgataatcgcttgattcatggtcaagtcgcaacacaatggaacggttctttaggcgccaacttaattttagtcgcaaatgatgcaatttctgaggatacactgcgccaacaattgttaaacatggcggcccctgcagaagtacaaacccgttttttttccattaagaaaacgattgaggtcattcataaagcctcagaaagacaaaagatttttctgttagttgataatcctgttgatgcattgcgcttggtagacggtgatgtgccaattgaaaaattaaacattgggtaa

SEQ ID NO: 607 - DNA, 438 bp, Enterococcus faecalis
atgataggtcttattttaacggggcatggggtattttcaactggaatgcatcaatcagttagtatgattgcaggagagcaagcaaatgttcaggcagtcccttttttcaatgatacagggcttgatgtattagagtcaaacattcgtaaagccgttgactctatgctggagacgtgtccagcagtggtcattttaactgaccttttaggtggcacaccgtttagaatttcaatgactgtcgcaagtaattatccaaatgtcgaagtgttagcaggaacaaatttaccgatggttcttgaagggcttgcattacgcacaatcagcacgaacgtagaagattttgtttcaatggtcacagattcagccagagatgggattgttcataaaaaactagaacaaccacaagcaaatactcaagaagaagcagacggaatctaa

SEQ ID NO: 608 - DNA, 855 bp, Enterococcus faecalis
aggaaaaattttatgaagtggtgcttccaaacgtggtctggtccagtctctatcaatacgcttttcatagtgcacaacaacgaatgccctatggaaacgtccgtaggatttgtaggaaaagttctcagtggtgatggcgcggcacatctatggtatgccgtaatgatgttgcaattccaattatttatgccgtattttatttggttggcaaccagaattacaaaaaacaaaaaagtgattttaccaattgtcttttttacaatcggtgcgcatatcctttggtgcttctggtaccagaaaatgatttttccatatgtagaaacttctctttggtacttaatagatcgttcagggcttagttatctcatttatggtattttcggggtcatcgcagcgaagtatcaagggaaaatttttactttcttgaaaaagacgagagtggcactatttctgttgtttctttttattttttggcaggcagtccaagggaatttatttgatggaacacagatgactccgaacgatctaccttatttggatcctcttcaaagtgcctatagtttattgattatcgggttggttttttatttgggaacgcaaggaatagccaaaaagattcgtcttttaccaatggttaaatggatagccacttatgcgtatcgcagttatttagcgaatgtttttatttttcaagtggtcttgaaactggtccacccgtttttaaccaatcaaccagtcagcttggttattcttgtgttgtatatgggtacatttgttggctcgtttggactcacggttgtagtcgagcattttttcaaaagcatctttaagttgggacgccttgtatctgtatag

SEQ ID NO: 609 - DNA, 204 bp, Enterococcus faecalis
cgcgaatgcgaaaattcatctcaaacaaacgcaatgcgtacagcaatcaagaaatttgaagaagctgtagctgctggagctgataacgtcgatgctttatacaacgaagctgttaaagctgttgatatggctgcaactaaaggtttaatccataaaaacaaagctaaccgcgataaaattcgtttaagcaaattagctaaataa

SEQ ID NO: 610 - DNA, 327 bp, Enterococcus faecalis
aatcactcagtgtgtgttgaaacgtttgtttctggcgtgcatcataaatcgatggaagtatttgttaaagttgtaggagaagatttaacaactggagagcgttatttagcggcgacttgttttacaacttttgtagccattccgtctcatatgaatcccgaaagtgacttccaattagcggcagtcgtcccagaaactgcagaagaaaagttgatttgttccaattatgaaacgagacgacaacaacgtttagctttgcgagaagagactaaattatttagtcaacatctcacaacggatttaccgtggattgattcacctttataa

SEQ ID NO: 611 - DNA, 684 bp, Enterococcus faecalis
tggtctagggagcagctaagtgttaaacgaaaacaagaagtgcaagagttgcggacgttaattgtgtccattgaacgagacggcttacaagaaagtctgaaacaaggagaaattagtgtcagaagttatcgtatgtatcaacgcttgattacacggatgcaacggtcgattgccaaacaattattatcgattgtaggcttttggttattatttgctcgacaaatcatttcgattcttttacatcctaagctatttttcaatcgtggtgaagcttctgaagaagaaaaagaattacgaaatgaagaactagaaaatattcgccaagtttttctaagaaattctcaagttattctgaagagtttagataatttgcgcggtgtctatgatgatgatttaattgatttcttcattgacggacgcttggatttagcccataagtttgaaaaaggcgaatttattgattcgtatattgttcatacggagacagactatgtcaaagacctattattaggcttccaagaagaacgacggatgattgatcattacgaacaatctgaacgcatttcaattatcgaagcgaacgagttacgaaaaaatgtcaatttattagagagttattcgattagcggcgaagtgaataatgttccgctgaaacgatttgttaaaaattttaataaagaataa

SEQ ID NO: 612 - DNA, 864 bp, Enterococcus faecalis
aaggagttggtagtgtcggtgaaagaattaaaagtaacagatttaaccaaaacatatggggaaaaaacactatttgatcatctttcttttttgattcatgaaaaagatcgcattggtttaattgggattaacggcacagggaaaaccagtttattaaatattattgctggcgtagatagcggtgatggtgatcttgctgcgattcagcagccaagtgattatcaaattgggtacctttcccagaatcaaacatttgacgagaatattacgattgcagaagccgtgtttcagggagacagcccgatcataaaagcggtcaaaaattatgaattagcgttagctgctttaagtgagaatggtttagacgaaggggttcaaagacgttacacgcaagcagaagaagccatgaataaacaagatgcttggacagcagataccaatgcaaaaattattttacaaaaattaggcattccaacattggaaaagaaaataggtgagctttctggtgggcagttaaaacgagtaagcttggcgcaagtcttaattgaagcgcctgatttactgttattggatgaaccaacgaaccatctggattatgaaacgattgaatggctggaaaactttttaaataactatcgtggcgcggttttaatggtgacccatgaccgctactttttagatcgagtaaccaatcggattttcgaactttcttttggaaaactgtatgaatacaaaggaaactatgaaacgtatgtgatggaaaaagccgaacgtgaacgtgtcgctgttgaacaagaagaaaaaagaaaacgcctcttcaaacaagaacttgcgtggatgcgagcaggcgttcaagcacgatga

SEQ ID NO: 613 - DNA, 492 bp, Enterococcus faecalis
gtccaacctgtggtgcaaactcgtgctgaaatctgggcagcagctaacgtattggctccaattatgctattagaagccattgtcctacctggcaataaacttttaccacttggcggaattattgcaatgggtgtaacccctgctctactagtagtaacaagaggtaaactcatccgaatgattatcattggagcaatcgaattacctttgttcttatggtctggtaccctaattgcaccgttcgttaccgaaaccgcaaaaaaagttggcgctttcccagcgggtctaaataataatactttaatttcacatactaccatggaagggccaatggaaaaattcttaggatacttagtcggcaatgcatcacaaggtcaactcgaatttattttatacgcatgtctggcgctagtcgcctatctactgattttcatttggtatgcaaaacaaatgaagaagcgaaatattatttatgctcaaaaagctcaataa

SEQ ID NO: 614 - DNA, 786 bp, Enterococcus faecalis
aataaaagatatactaacaatggagcgatgaaaatgctaaaagaagaaagattaaatgcgatagtctctctagtagatcaaaaaggggcaatcaaagttactgaaattatggaacgattaaatgtttcggatatgactgttcgtagagatttgacagaattagaagcagcggggcgtttaaaacgagtacatggaggagctagcagtttaaatacatatcgtccacatgaattgtctcatgctgataaacaaattattaatagtgttgaaaaaaaagaaattgtccaaaaagcattaagtttaattcacgaagaagaaactatctttctaggaccaggaacaactattgaacttttggccgaggcaatggaatttaaacatttaagagtagtaacaaactgtttgcctgtgtttgaaacgttaagtaaaaaaaagaatgcgttgaccatttatttggttggtggagaaatgcgacttttaactaaatctttttttggagaaatcgctaataaagcattagaagaaatgcatttccataaagcattttttagttgcaatgcgttaaaagataataaaattatgacagccactattgaagaaggacaaacacaagcaattgcattagataactcaatagaaaaatatttgttaatggatatttctaaagtagagaaacaggatttttattctttttatcaattagaagaagtgacagcggtagttacaaataaagataaatttgacacatctaaagtattggaaaaagttgtcagggtgatctactaa

SEQ ID NO: 615 - DNA, 267 bp, Enterococcus faecalis
gacacggcaaacgaattctcaactcaaattgactggcataactatcagcgggcaaattggcgggaggtagaaacaaaaggcgacacgttgacattgcattttgccaacgcgggcggtgctgggggctcatacacacaattcacgaaagttggtacgaatactgttgttgtatcatttgatggcaatgctgcttatcccgataacccaagtagcgttttactcgtgcaaaatagtgattataaagttttaaggactttgaatcagtaa

SEQ ID NO: 616 - DNA, 1896 bp, Enterococcus faecalis
aaaagttggaaagcacaaatgaatcagacagcaaatagcaagaaaaaacgctatattacaggttttgatggcattcggacgatcgctgtaattggcgtgattttgtatcacctttttccccaagtcatgcgaggtggctacttaggtgttccgattttctttgttgtttcaggttatcttattaacgacttgttgcggcaagaatgggcagaaaatcagaccattgatttaaaaggattttatgtgcgaaggatgaaacggctgtatccagcattaattgtgatgcttttaagtgcagttagttatattacactctttcagcaggatttattaaacaatattcgcagcgttgtcgctagtagtattttttattacaacaactggtggcaaatttttaaagggttttcttattttgatggatttgcgacacaatcgccatttgtacatatttggtcattggcagttgaagcgcaaaattatttaatttggccattactttttattcttctggaacgctttgttcgtaagcgcggtcgaattttcagcttagttttaatcggcgctttaatttcggtgacgctgatggccgttttatatgttcctggcgcagatcctacacgtgtctattatggaacagacacacgtgttttttctattttactaggtagtgcattggcgtatgtttggccaagcacacgtttgaaagaagaaattccagaagcctctaaaaaaatcttaaatggcgctggtttaagtgccttagttctttttatgtttaacccttttacattatcagatcatacaaattttgtttattacggcggcatgtttttaattagtttggcacccactttcttagtggccgtcactgcacatccaggggcagatatgaatcgttggttaacgaatccgttctttacgtggataggtaaacggagttatggcatttacttgtatcaattcccaatcatgattttttatgaggccaaaattaagaccttatcggaccatgtttttctacattcattggttgaaatagcattaattttagtcgtgagcgaattgtcttatcgttttatcgaacatccactgacacgattgtcttataaggatgtctggactcaattcactgagttcttacggaaaccgtgggaccttcgtgaaaaagggacaatggcctttatgacagtgattagcgtgattgcagtattcggtttaattgtggctccagcaaacgctaaaagtgcgcaacaagagcaactagaaaaaaatattgcgaaaaatcagcaaaaaattgaagaacgtaaaaaagaagtccaagaaagtggcacgaaaaatagtagcacgtccacagaaagtagtacaaaaccgagtgaaagccaagacgttctacccacacaactcacaccagagcaagtaaaaaaagcgcagaatttagaaatcacaactattggtgattctgttattctagatggtgctagcgggttacaagatattttccctaaaatgattatcgatggggaagtgggccgtcaattgtatagtagcatttcactaattggtgaactagacaaaaagaaaatgcttaaaaatactgttttagtgagtttaggtacgaatggtccttttacagaggcacaatttgatgaatttatgaaagcgttaggtaatcgaaaagtttattggattaatgttcgcgtcccaactagaagatggcaaaatcaagtgaatagtttacttagtcaaatggacaaaaaatacgataacttaacggtcattgactggtttaattatagtaacgcccatgatgattggttttatgatgaccgagttcatccaaatgtggcaggtggcgagcaatacacacactttatcgcggagaaaattttacagtag

SEQ ID NO: 617 - DNA, 555 bp, Enterococcus faecalis
ggattccattcctgtggcgaggcaataagtacgagtgggcgtcgtcgttataactggatatttgttttattgaccaattgtctaggcggatttcttgtggcgtatttatttggccatattgttgggttaactgaaggtgcgtttctggataaaacagtcgcagttgctcaggcgaaaattgctgatccaccgctagttgcttttgtttcagggattggctgtaatatttttgtttgtttagctgtttatctcggagcgttggcaaaatcatatttaggtaaaatgtttggcttatggtttcctgtcatggttttcgttgtttgtgggtttcaacacgtggtcgctaatgcatttattattccagcggcaattttttcacaaagtaccacaatcagttggtgggattatttgcagaatacattatgggtatttttaggcaatgcagtaggtggcagtctttttatggccgtaccattgatctttatgacaaaaccagcaactgtcaaaccaagagttgataaaacgattcatactgaggagctctatggcaattga

SEQ ID NO: 618 - DNA, 639 bp, Enterococcus faecalis
caaaaccagcaactgtcaaaccaagagttgataaaacgattcatactgaggagctctatggcaattgagataccaaacatgattcaaattggttctactggtcggaatagtggcaaaacgacattagccgaaacccttattaaacagtaccaagaagtctatccaatttatggcttgaagattattacgattagtggtcaacgaggggtgtgtcaacgaggcacaaaaggatgcggaatttgtaccagtattacagctggttatgaattagtagaagagcaagagacgattggcaataaagataccatgaaattattagctgcaggttgtcaaaaagtttttctattgaaagtttttcaagaaaatttggcggaagccattcagcaatttctgaaagctgtgccggcccaagcattaatcatttgtgaatcaaattcattacgtaatgttgtgcagccaggactatttcttatgatgaataaccagaatcgccaaaaagaatcagcaaaaaaagtcatagataaagccgatttttgtttactatctgctgaaataccaaaaaaattgcgtatctattatcaaggagaacaacttcaagtttcactaaaaagggggaataaaaaggaatgtgtgcattaa

SEQ ID NO: 619 - DNA, 192 bp, Enterococcus faecalis
atacgcaatttttttggtatttcagcagatagtaaacaaaaatcggctttatctatgactttttttgctgattctttttggcgattctggttattcatcataagaaatagtcctggctgcacaacattacgtaatgaatttgattcacaaatgattaatgcttgggccggcacagctttcagaaattgctga

SEQ ID NO: 620 - DNA, 477 bp, Enterococcus faecalis
aaaggaatgtgtgcattaagcttaattgaaaaagaagcgattattctagaaaacgatgctgatccacaacgaattttaaatattttaattgaattacaatttgcttcagaggaaaggtatatcgatcaggagacagctcaattagttgcagagcatctacatttaacggaagcgcgagtctatgaaatcgtcagtttttatgccattttaaagacggaaccgcaagcgaagtatgtcttgaagatttgtaacagcacaccgtgtcattatactggtggggccaatgttgccgaagttttagaaaccattttagaagtgccagagaatcagccgacagcagatggcttatttatgtatcataatattccttgtatcggggcttgtgatttaggtccagtaattaaaattaaggacaccgtttttagtcaactaacagaaagagaaaatttatcaattaattcaacatttacaaaatga

SEQ ID NO: 621 - DNA, 651 bp, Enterococcus faecalis
  misc_feature (423)..(636): Nucleotides 423, 483, 618 & 636 are "n" wherein "n" = any nucleotide. 1
aggactgtaggaggtgagtcaatgcttaagagaaaccaaccaatgttattagagagaatggggaaaatgcaatctgcgaccgatgttgctgaatattgtaaatacgatggatttgatggtttaaaaagagcaatttcactatcggatgaagaaattttaaacgaactggatattgcgcacttaagaggtcgcggtggagcagcctatcctttaggaaaaaaatggcgccatctttatcatgcaaaaggaaccacaaagtacattgtttgtaatgctgatgaaggcgaaccagggacctttaaggataaagtacttttatctgaagatccattgagtgtgattgaaggaatgattattgctggctatttattttcagcaaaagcaggttatatttatatgcgaggagaatatcgcagaatccanaaaacatttcaagaagcactcgataatgcacgacaagctggctttttaggggaaaacatnttaggaattgaaggattcaattatgatattacaattatttctggtgctggcgcctatatttgtggggaaaattcagcacttttaaattcaattgaaagaaaaaacgggcggccgcgtgtcaaacaccacacttancaaatgttgggttatatntgcaaccaacattaa

SEQ ID NO: 622 - DNA, 666 bp, Enterococcus faecalis
ataatgttgaatcatttgcaagtgtgcctggtaatattaagagaaggtggacaagcctttttagagatgggtactgccgatggtggcggaacaaagctaatttgtttgtctggacatattaaaaatcggggcttatacgaggtcaaccttggtacaccattagaagaaataatttatggcgagcaatacggcggaggctctgcaactggtcgagcattgaaatttattcacttcggtggacaatccggtccaattggtgctgtcgcaacgttaagggattgtttgtattcctacgaagatttatgggcccatgacttatctgtcggctctggtgcaattgtagtaatggatgattcagttaatgttgtggactatttagtacacgtggcggccttttttgctcatgagtcctgtggtaaatgcaccccttgtcgattgggaacaactaggattttggaattattgagtaaattcaatcggaacgaggcaacagctagtgatttgccgcgattggaaaagatgctcacacatgtcacgcgattatcagcttgtggtttgggccaatccgtcgcaaatccaatgaagagtgcattggctttgtttccagaagaatttgaaacgactgctgaaacagaaatctatgccaccagcaaaggaggttggtaa

SEQ ID NO: 623 - DNA, 336 bp, Enterococcus faecalis
aacagaaatctatgccaccagcaaaggaggttggtaaaaatgaaaacaaagttgcatacgcaaacagttacgttgtctattgataaccaagaagtaactgtgcctaaagggactaccattctcgaagcagcgaaagggctaggtgttgaaatcccaacgctctgtcatttaaaggaattagcacctgatggttcttgtcggatgtgcgtggttgaggtggaaggtggccgacgtggtggcttaacaactgcttgtacggcacattgtcaagaggacatggttgtggcaacacattctgaaaaagttgctgattccacgacgtcttcaccacgggat

SEQ ID NO: 624 - DNA, 834 bp, Enterococcus faecalis
  misc_feature (59)..(59): Nucleotide 59 is "n" wherein "n" = any nucleotide.
tccgttagaagttcgaacggccttattaacaggttccaccaaaacgaaagaacgtgttntattatcgaagaactggccaatggcgagattgacattgtggtagggacccatgcttggatacaacaagatgtcagtttccatcaattaggtttggtaatcaccgatgagcaacatcgttttggtgtgaatcagagaaaaatattaagagaaaaaggcttaaaaccagatgttctatttatgacggccactccgattcctcgaacgctggctattacagcctatggcgaaatggatgtatcaatcattgatgaaatgccagctggacggattccaatcgaaacacgttggattcggccgccgcagttagatactgttttagaatggatggaaaaagagctggctcgaggacatcaagcctatattatttgtccattgattgaagaatcagaagccttagatgtgaaaaacgcaacagaaatttttgaacatatgcaaagcttttattccccaagatatcaagtgggattactacatggtaaaatgaaaaaccaagaaaaagatgacattatgcaggagttcaaagacaatcagctgcaattattggtttctaccaccgttattgaagttggcgtgaatgtaccaaatgccacggtgatgttaattatggatgcggaccggtttgggttagcacagttacatcagttacggggccgtgttgggcgtggctccagtgcatcttattgtattttagtggccaatccgaaaaatgaaatgggcgttgagcgtatgaaactcatgacagagactaccaagtgtccaccacgggtaaggacc

SEQ ID NO: 625 - DNA, 1095 bp, Enterococcus faecalis
  misc_feature (1051)..(1051): Nucleotide 1051 is "n" wherein "n" = any nucleotide.
ggaggggattttatggacatcacagatttagtcagcgtattgcccggtgttggcccaaaacgtgctgaaaatttacaagaactggggattgctacaattgaagacttattgacgtattatcccttccgctacgatgatatccaagaaaaggatttaagtgagattcaggatcaggaaaaagttacgctaaaagggctagtggtttcggaagcagtcgttagtcggtacggttataagaagagccggttaacgtttcgaatgatgcaagaacatgcggtcattaatgtttccttcttcaaccaaccttttttaaaagacaaagtagttctttccgaagaaattgctgtttatggcaaatgggatgccaagagaaaatcattaaatggcatgaaaatcttagcttctaaaggagacaatgaagatttcgcccccatttatcatgtgaataaaaaagtccgccaaagcacgttggttcagttaatccgcactgcttttgaagagtatggttcactggttgaagagattttaccgaatgatttattagaaaagtaccgcttgatgcctagaaaagaagcaatgtgggcgatgcattttcccagtaatccagaagaaagccatcaagctaaacgacgagtagtctttgaagagtttttccttttccaacttaaaatgcaaggattgaagaaacaagaaaaagcggaaaaaaatggtttagctattcaatatgacgtggatcgcttaaaaacgttcacccaaggactgccttttgaattgacaggcgcccaaaaaaaagtgaccaatgaaatttgtcgagacttgcgaagtccgaagcatatgcaacgattgcttcaaggtgacgtggggagtgggaaaacggtagtggctgcgattgcgctatacgccaccatgaccgctggctttcaaggagcgttgatggttccgactgaaattttagcgcagcaacacatggaaagcttacagcagttgtttgatccgttagaagttcgaacggccttattaacaggttccaccaaaacgaaagaacgtgttntattatcgaagaactggccaatggcgagattgacattgtggtag

SEQ ID NO: 626 - DNA, 216 bp, Enterococcus faecalis
aacagcttggtgagtggtcaggtaccacagccgttagggaaacaaccatggaggacgttgacattaaaaaagaagatttcttacgaatggattgatggtaaaatagtcgattccgaagcagatcgttttaatgcatcattaaaaacgttgaaccgcatgatcgatgaagacactgaaatcgtgacaattattgtcggcgaaagatggttcggttga

SEQ ID NO: 627 - DNA, 627 bp, Enterococcus faecalis
gttgagaggagcttgagaaagttgacacaatcacctgatttagaaaatttttttaaaacctctatccaaaaaaatgtaattattgagcgaaaacaacaaaaccaaaccatttggcactggttactgcttattttatttggcttgctaacctttggctcactgacacagcagttactcctaattggcttgtttacacttattgccgctattgttaaaggtcccttaatgctcgtctggggaaccatctattcggcgttagtggctttgtttccacctttcgctttagtcctatctttacttttttttataattaatttaggcaccgttatgaaaagttggcgtattactttaacaagtgcttacttttatctagttcctttaggttttagtctcttgaaaacgaccaactgggtatcaacgccttatttcctgacaggcttggctttgttaagtattttagggctgcattttatattagagtggctctataaaaataatagcttaggccgtttactcacgtggcaaattatcagtgtccctttttcactcttactgatcattttaccaagtcgcctaacgaaaggccgttttggtaaaaaacgaatacctaaaaaagtgaaactctaa

SEQ ID NO: 628 - DNA, 291 bp, Enterococcus faecalis
tgtgggggaagtttgatggcttatcataaatttaaattttatgagcaacgaaaaaatgatcctaaatggcgtccgtattatttagaagctatgagagtaagggaacaagcacggctaacagtacaacgtagaaaaagaagggcaagaattagaacctttttagtggttgcgatactggttattttagtttttctgttattggctcattggacatattcacaaacaaatgaactctctttctccagttttatcgacgtcctaaaatcgaaaatcaacgaatttttaaattaa

SEQ ID NO: 629 - DNA, 1482 bp, Enterococcus faecalis
ggggatattcggttggtaacaatattacgaagaacatcccagatattaatcaaccagattctcgttaaaaatgagatgctaaataatttcatcaaaccaggattggaagatttagccgtttcaagaacgactttctcttggggaattccattaaaaaatgatccaaaacatgtggtttacgtatggattgatgcgttatcaaactatattacagcactaggttatggctcagaagatgattcattattccaaaaatattggcctgcgaacgtgcaaatggttgggaaagaaatcgtgcgtttccatacgatttattggccaattatgttaatggccttggatttaccattaccgaaaaaagtctttggacatggttggttattgatgaaagacggaaaaatgtctaaatctaaaggaaatgttgtttaccctgaaatgttagtagaacgctacggtctagatgcgttacgttattatttattacgagcaattccatttggtagtgatggcgtctttacaccagaagatttcgtttctcgcttaaattatgatttagctaatgacttaggaaacttgttgaatcgaacaattgcgatgattaataaatattgtgatggcaaagtaccagcctatgcttcaaaagttaccccatttgatagtgaactatcgacaactgcggcgaatgttattggaaaatatcatgaagcaatggaaaaaatggaatttaacacggccattgcagaaatctggacgctagtttctcgtgccaataaatatattgatgaaacagcgccttgggtattggctaaagaagaagagaaacgcaacgaattagaaagtgtcatgatccatttagcggaaagcttacgaattgtggcaatcttattgcaaccagtcatgacagaaacaccagggaaaattttcgaacaattaggcttagatccagaaacaatgaacatggaaaatattcattttggtgagttcccaacagacgtaacagtaacaagtaaaggaacacctattttcccacgtttagaaattgaaacagaagtaacgtatattcaaaagaaaatgtcccaaagcgaaagtgctacagaagaggatattaaatggaatccagaagaaacaacgttggtttcaacgaaagaaaaacaaattaagtacgatgatttcgataaagtggaattaaaagttgccgaagttattgactgtaaaaaagtcaaaggagcagataaattattgcaattccgtttagatgctggagatgaaaaccatcgtcaaattctttcaggtattgctgaattttatccagatccagctgcgctaattggcaaaaaagtagtcattgtggctaacttaaaaccaagaaaaatgcgtggtcaaattagccaaggaatgattctttcagctgaatcaccagaagggaaacttcaaattgttgaagcaccaaaagaaatgccaaatggtgcaggaatcgcataa

SEQ ID NO: 630 - DNA, 201 bp, Enterococcus faecalis
ctgttcagcatctttttaggcgagacagttgaacctttaaattatacaaacgtacctcgaggtgtttatacaaatcctgaaatagcaagtgtcggctatactagagaaactttaccagcagaaaaagaagtagtaattggcacctttaattttaacggtgacggtaaatcactatgtgtcacaggccgggtatgcgggatg

SEQ ID NO: 631 - DNA, 1047 bp, Enterococcus faecalis
gcaggagtgatcaaaatggcggaacaaacagatttactgattttaggtggcggaacaggaggctatgtagcagcaattcgagctgcacaaaaaggggtaaacgtcacaattgttgaaaaatacaaattaggtggcacttgtttgcacaaaggctgtatccctacaaaagctttattaagaagcgcagaggtttttgataccttaaaacaagcggcttcttttgggattgaaacagaggcagcgtccattgatttttctaaaatacaacaacggaaagaaggaattattgagcagttacacaaaggtgttgaaggcttatgcaagaaaaataaaatcaaaattttagcaggcgaaggtgcgattttaggtccctccattttttcaccagtctctggcgcagtggcagttacgtttaatgatccaacacgagaagaagaaattatcgttcctaaaaatgtcattattgcgacaggctctagttctaaaacgttacctaatttgccattggatgaagaatttatcttatcttctgatgggatgcttgaattagaagagctaccagaatcaattgcaattattggtggtggcgttattggtgtcgagtgggcttctttattaaatagtttaggtgtcaacgtaactatcattgaatttttggatcgtttacttataaatgagagtgcaacaatttctaaagaattaaagaaacgtttagagcaacgaggaattaacattttattaggaagcaaagtccaagaagcgaaagttactggacaaaaggttcaagtagaagttgcaggacaagaaaccctcaccgttgacaaagtcatggtagcaattggacgtcagcccaatatcaataagttagggttacagaatacctcagtgaaatatactgacaaaggcattgaagtaaatgaattttatcaaaccacagaaggacatatttatgcgattggtgattgtatcgatacactccaactagcacatgtggctatgaaagaaggagagttagctgttcagcatctttttaggcgagacagttga

SEQ ID NO: 632 - DNA, 396 bp, Enterococcus faecalis
ttaacgattagccaagtgaaaaagctaattgcggggaatagcggtcttaaatcatacctaggtgaaacagatttacggcatatccaagcacaaatagctgcaggtgatcaaacagcaaattactatttaaaaggaatgtgttaccaaatcgcaaaaagtattggcgagatggccgtggttcttgaaggcacaattgatgcaattattttaacagggggcgcagcctattcgcaaaccgttgttcaagaaattagtcaaaaagtcacttggattgcaccaattaaggtttacccaggtgaaatggagatggctgctttatatgaaggcgtcaatcgagtattaacaggggaagaacaagctttaaattatagtgaagcaaaaattgagcaggagtga

SEQ ID NO: 633 - DNA, 699 bp, Enterococcus faecalis
ctaccccgtggtggacacattgtttatatgggacgcggcttagcctttcaaaagaagattggagacacgatcaatccagattatgttgaaaaggaattcgtgttaaaggactccgctatggcagggcaattccagcagctgtttgaagacgtccccaccaaagaagtagaagtcgtcaaacaaatcgttgatttagcagaaacaacgctagcgattgagctttcatcaaatatttatttaactttaacggatcatattcactatgcgttacttcgagccaaagaaggaattgatattccgaatcctcttgtattcgaaacacgcaaattttatcctaaagaatttgaaatcgcaaagcaagcattagcgattattgctgaaaagctaggggttcaattttcagaaaatgaagcgggcttcattgcttttcatattgtgaatgctgaacaaggaaatggcaatatggaagttaccatggaagcaaccaagatggttcgtgatattttaacgattattagtcgctactttggacaggtgtttgatgaagattcattgaactatcaacgaattgttacacatcttcaatattttgcgcaacgttatttaaaacaagaagcgcatgatgaggaggacgaatttctttttgcattggtccaaggaaagtatcctaagggcgtttcaagcggtccaacgtattaa

SEQ ID NO: 634 - DNA, 192 bp, Enterococcus faecalis
aacaagaagcgcatgatgaggaggacgaatttctttttgcattggtccaaggaaagtatcctaagggcgtttcaagcggtccaacgtattaatgagtatttattaaaaagctatgatcgaccaattgatcaaccggaaatgatttatttaaccattcatatccaaagagtggtcaatgataaaaaagcataa

SEQ ID NO: 635 - DNA, 726 bp, Enterococcus faecalis
gtttttttgatattaaaaattaatggaaatgaggatctagagatgagtaaaaatcaagaaattgcagcacgtgtgttaaaagctgttgggggcgaaggcaacgttaatagtgttgttcactgtgctacacgcttacgttttaaattaaaagatgaaaataaagcagatacagctgcattgaatgctgacccagatgttattcaggtagttcaaagtgcaggacaatatcaagtggttattggcagtcacgttagtgatgtctataaggatttgatggccaacagtggactaggtaatgattctgataatagagaaaaagaaagtggcggaaatatctttaaccgtttaattgatattatttcttctatttttacaccgtttttaggtgcaatggccggcgctggggttctaaaaggcttcttaacattggctgtaactatgggctggttagctgacacttcaggcgtatatcttgttctcttttcgattgcagatggtttatttactttcttaccaattatgttagcgtttacggctgctaaaaaattcaatactaatccctttttagcggttgctttggcgatggccttggttcatcccagcattactgctttagcaggcaaaacaattagctttgctggtcttccagtgattattgggccaagtggctatacttcttcggttttaccaattattttggctgtttttgcacaaagttatgtataa

SEQ ID NO: 636 - DNA, 249 bp, Enterococcus faecalis
cgtttcttcaaaaaagtaattccgagttttctacaaattatctgcgttccgttagctgttttccttattatggcacctgttaccttcttagctattggtcctatcgggacggtcatcggcgattggttgggacaaggatacaacgcaatttacgcttttagtccaattatcgcacggtttattaaatgggttcgttggtggcaatcttgggtaaggtatggtatgcattggggcttttgtaccaattaa

SEQ ID NO: 637 - DNA, 360 bp, Enterococcus faecalis
atagaagaacggaggaaaacaatgaacgtacataatgcagaaatcgtgattagtgcggtatcccctaaacaatatcctgaatctcaattaccggagattgctttagctggacgttcgaacgttgggaaatcattttttattaataccttgattaatcgtaaaaatttagcaagaacttcaggcaaacctggtaaaacgcaaacgctaaatttttatttaattgaggatgccttacactttgtggatgttcctggctatggttatgccaaagtttctaaaacagaacgtgcgaagtggggaaaaatgattgggacctatatcacccaatttgagcaattagcgcggtattcgacaaaatag

SEQ ID NO: 638 - DNA, 264 bp, Enterococcus faecalis
aacaatatcaaaaattattgtctcattgatgacactaaattagaatttgaaccagaagcattaaaagccatcgcagccaaagccattgaacgtaatacaggcgcacgcggacttcgttcaatcattgaagaaattatgatggacgtaatgtttgatgttccttcagatgaaagcattgaaaaagttatcattactaaaatggccgctgaaggtaccggtaaaccaacaattatttataacaaaaaagataaagaagctgtataa

SEQ ID NO: 639 - DNA, 1008 bp, Enterococcus faecalis
acggataataacgggaccgttcgttgttcattttgtgggaaaacacaagaagaagtaaaaaaaattgttgctggtccgggtgtctatatttgtaatgaatgtattgatctatgtaaagagattattgatgaagaattttatgatgaagcagtccgagaattaacggatgtgccaaaaccccaagaaattttaaatgttttaaatgaatatgttattggacaagaacgtgcaaaacgcacactttctgttgctgtttacaatcactataaacgtgtgaatcaatcagaaacagctgcaactcaagatgacgttgaattgcaaaaaagtaacatttgtttaattggaccaacaggttcaggtaaaactttcttggctcaaacgttagcaaaaacattaaatgtaccttttgcaatcgctgatgcgaccagtttaacagaagcaggttatgtaggggaagatgttgaaaacatccttttaaaattactacaatctgctgactataatgttgaacgtgcggaaaagggcattatctatattgatgagattgataaaattgcccgtaagagtgaaaatgtttcgattactcgagatgtttcaggtgagggtgttcaacaagccttactaaaaattcttgaaggaacagttgcaagtgtaccaccacaagggggccgcaaacatccacatcaagaatttatccaaattgacacaacgaatgttctcttcatcgttggtggagcatttgatggaattgaaaccattgttaaaaaccgcttaggcgaaaaaactattggttttggtaaaactaattctgctttaaatgaagaagaaagcatcatgcaacatattattccagaagatttattgaaatttggtttaattccagaatttattggacgcttacctgtaatggctgcgcttgataaattaacgaatgatgatttggttcgaattttaacagaaccgaagaatgccttggtgaaacaatatcaaaaattattgtctcattga

SEQ ID NO: 640 - DNA, 303 bp, Enterococcus faecalis
tattgtttcaccaaggcattcttcggttctgttaaaattcgaaccaaatcatcattcgttaatttatcaagcgcagccattacaggtaagcgtccaataaattctggaattaaaccaaatttcaataaatcttctggaataatatgttgcatgatgctttcttcttcatttaaagcagaattagttttaccaaaaccaatagttttttcgcctaagcggtttttaacaatggtttcaattccatcaaatgctccaccaacgatgaagagaacattcgttgtgtcaatttggataaattcttga

SEQ ID NO: 641 - DNA, 783 bp, Enterococcus faecalis
aaggggcgttgctgcatgattgaattaaaaaaaacagctgtaacgctccaacaaacccccattttaaaagatatttccctcgtttttccgacaggtagtaaaacttgtattttaggtccaaatggttgcggtaaaacgacacttttaaaaacgattgccggacttgtcccttatagtggttctgttttaattgatggtcaagaagttcatggacaaaagcggaaggaattggcaacgaaagtagcgatgatgagtcaattcacgacagttgcttttgattatacggtttacgaaacagttttgatgggggcgtatcgacaacaagcacaacgttttttacctattgtttctaaacaagaaaaagaacgagtcctttattatttagaacgcacgggtttattgcctttaaaagataaagttgtcaatcagctttcaggaggacaacaacaacgagtatttttggctaaattatttgtacaagatccagaaattattttattggatgaacccaataatcatttggatattcggtatcaacaagaattgattcagcagttaaatgagtggagtgcgcaagaagggaaaacgttaatcggggtgtttcatgatatccgtttagcgttaacgctaagtgaaaaaattgtgtttatgaagcaagggaaagtggccgcgcaaggtgattttcaaacgttggcttccaaagaatttttacaaacgatttttgaaacagatattgtctcctattttcagaaacaacataaagtttgggaaactattcaataa

SEQ ID NO: 642 - DNA, 552 bp, Enterococcus faecalis
aggcaaagaatcagaaacacaatggcgtgttttaacaaatcggcaaaggagcccaagactaagtacgtgatggtacttgctttgggctccttttttatggaggtaacgatgaaacgaatcattttaatgggagctatcggttgtggcaaaaccacgttatgtcaagctctgcaaggcaaagaattaatttatgataaaacacaggcggtggaatttcatacagaaatgattgatacaccaggcgagtttattttgcatcgacaatattataatgcattaaacgtcacagcggcagaagcagatgtgattggtttggttcaaagtgctgtagaaacacaacaagttttttcaccaggatttggtagtattttcccgaaagaaatcattggtattttaaccaagattgatttagcacaagattctcagcagttagagattgttcggcaacaattaaaaagtgcgggtgcaacaagaatttttgaaatttcttctgttgaaaaaattggcttgcaagaattagtagattatttagaggaggatgaagcagaatga

SEQ ID NO: 643 - DNA, 573 bp, Enterococcus faecalis
agcagaatgaaaatttatacaaaaactggcgataagggaatgacgaaattagtcggcagctcaaccgtcgctaaggattctgatcgagttgaaagttatggaacgattgatgaattgaattcttgggtgggctatattatcagccaacttccacaagaaaatcaagaaattaaagaagaactagaagctttacaacatttactttttgatgcgggaacagatttgtcaacaccgattgaagcacaacgaccatttaaattacaaaaggcaagtgtgcattggctagaacagcggattgatttctacactgcacaatcaccagatattgatcgttttattttacctggcggaaccccagcagccagtatggttcatgtggctcggacgattgcacggcgcgcagaacgcatcattgttcgtttaaattggacagccaaaattaacgaagaggtattaatttttaccaatcgtttatcagattatttttatgcgttggctcgctgtttaaatgttcaagcacaacgacctgatgtttcttatgaacgaagtggacagttgctcttcaacacggaa

SEQ ID NO: 644 - DNA, 504 bp, Enterococcus faecalis
gacgttagcttggggattgatccaatatcaggcaaacaacgtagaaagagacttacagtttcaactaaaaaagaagctcaacaaattgaatcaaagtatttaaggttataccacgaaaataaattaacaactaattcagacttaactttaaaagatatttacgaagtttacgaagaaaaatacacgcaaaaccttaagccatcttacaagcaaacacaagaaagaatttttaaaaactatatagaaccttattttaaaaatactcaaatcaaactaataaaaaaacaacaaatctatgatttccaacagtttctattaactagtaaacctaagagaaaagagactttatcaaataagacaatcaatatgattattattcatctacagaaattatttaacgtagctatgaaagaaggattatcctacgaaaatccttgtaaccaaatagacaagttaaaagtgcaaaaaaaagaaattgatttgcaaacgcctcaccaagggaat

SEQ ID NO: 645 - DNA, 636 bp, Enterococcus faecalis
aagaaggtgcgggttttggcgaaacgtacagaaacaagacaattagaagtacttaaatatatatacgaacaagtcgaattaaagggctatccgccaaccgttcgcgaaattgggaaggctgttgatttatcctcaacttctaccgttcacggacatttagctcgtcttgaaaaaaagggtctaatcttacgtgacccaacaaaaccgcgagcaatcgaattaacaccacaaggcttggaaaagatcggaattcagccgacaactattccgatgttaggtgtcctaactgctggtgaaccaattttagcggtggaagaagcatcagatttcttcccgttacctcctgatttacgtacagaagaaaatgctttatttatgttgacgattcgaggagaaagtatgattaacgcaggtattctagatggcgaccaagtgattgttcgtaagcaatcgaatgccaataatggcgacatcgtaatcgcaatgaccgatgaagatgaagcaacctgtaaacgattcttccgagaagtagatcatatccgcttgcagcctgaaaatgatgcattagcgcctattcttttagataacgttacaattttaggtaaagttgttggtttatatcgcaatcatatttaa

SEQ ID NO: 646 - DNA, 1173 bp, Enterococcus faecalis
gcaatgccgacattgaaagaaaacattattcaagagattcaacgactaggcatcgataaaatcggctttactcatgctgaaccatttattgaattagaagattctctgcatgaacaacgagagcgaggatataactcgggatttgaacatcaaaatgtggaagaacgaatttacccagaaaaaacgtttgagcatcctaaaagtattatctccattgctttagcttatcccaccaaagctcaggaaaaaatgcctagagatgaaaagcgtggacaatttgcgcgagccttttggggaattgattatcatcacattttgcaggatcggttgcaaaaattaattgcttttattgaagagcaagctgccactgaagcagaaaaagaacactggcgctttcggccgcaagtagatactggcgaatatgttgacaccgctgttgctcagcgggcgggtttaggattcattggtaaaaatggtctactgattaccgaagaatttggttcctttgtatatttaggtgaggtgaccaccaatattcaatttgaaccagatgaacctgttccaaatggttgcggtgattgtactcgttgtatcacagggtgtcctacaggggctttgttaggggacggtcgaatgaatgctcaaaaatgtttgtcttatcaaacgcaaacaaaaggcatgatgcctgaagactatcggaaaaaaatgcgtaacgtcatttatggttgcgacatttgtcagctggtttgcccttataataaaggaaaagattttcattttcatgaagagatggaaccaaagattgaagaagtttatcccaaattagcaccgttattaactatttccaataaagagtttaaacagcaattcggacacttagcaggctcttggcgtggtaaaaaaccattgcaacggaatgctttaattgcgttagcgaatttgggcggccgtgaagctatcccacaaattattctctgtttaaatgatcagcgtcctgtcattcgcggaacagctgcttggtcgttaggtcagctcgcaaaaagagaacccgagcaaagtttagaagctttaaattatctactttctgtagaaactgaagaagaggttatcgaggaagcccaaaaggctattcacttgttaacaagcaaaaaaggaagccgctcaacggagtga

SEQ ID NO: 647 - DNA, 189 bp, Enterococcus faecalis
ccctttatttggtggagtttatgtggatttttaaagaattgtttcccgccatgcgaagtcttatatcggacgatgattcatgaaacgtttgaaggggacactttctttcaagaattagaatgttttgttgggagaaaaatttcccaattttcccggtgtcgtggacgagaaaaatctctatgcacatga

SEQ ID NO: 648 - DNA, 204 bp, Enterococcus faecalis
caattcccacgaattgatttatcagatgaattgtatcaaaaagtaaaaaatggcatgcgtttgcacaaaaaagaattaggaataaaggcaatgccagaatccttagtcgccttattttaccaaaatcaagtggttagtttatacatgccacacccaacgcatgataaattattgaaaccaagtaaagttctacggaacaattaa

SEQ ID NO: 649 - DNA, 972 bp, Enterococcus faecalis
aaaagaaggaagtttttgcacatgcaagttattcaactacatcatccctatgaacccaatcaaattcctaatgaagaagtcgtgatggtcctaggcttttttgacggtgttcacaaaggccaccaaaaagtaattgaaacaggtaaaaagattgcggaggaaaaaggcttgaagttagctgtgatgaccttcaaccaacacccatcaatcgtttttcaaaaagttttaccagaaaatatgaaatatttaactagcttggaacaaaaagaacgcctaatggccaacttgggcgttgatattttatatattgtcgaatttacttcagcgtttgctcaattaaagccgcaagattttgtcgatcagtatatcgttaatttaaatagtgcagtggcagtctctgggtttgattatacgtatggtcctaaagaaattgctggagtcaaacagttaccaacttatgcgcaaggccgttttgaagtggtgacagtaccaaaagaagaaatgactggtgccaaaattagctcaacaagaattcgcgaaaaaatggaagccggcgaaatggaggaggtcacggagttgttaggatatatttatgaaacagaaggaacagttgtccatggcgatgctcgtggccgtttattgggtttcccgaccgctaatgtcaaagtgaaaagcaccgtgcgtttaccaagaattggcgtctatgctgtgcaaatcgaagttggtggcaaatggtatgtcggcatgggctcaattggtcataatgacacctttggagaaggacgcgatttaaccgtggaagtctatattttggacttccatcaagacatctatggtgagcaagtggtggttcgttggaatcattatttacgtgaccaagtgaaattcaatggggctgaagccttgatcgaccaattaaaacaagatgaacgagatacggctgactatttccaacaatctgaggacaaataa

SEQ ID NO: 650 - DNA, 570 bp, Enterococcus faecalis
ggacaaataatgaagattcgtcaagaaaaacctgcagagtatcaagctgtagaacgtttaacgtatcaagcgtgtaaggaattaaacttgaccgaaaactggcgtcccacagagcattttatcgtgcatttattaagaaaaagtgccgactttattccggagttgtccttagtttcagaaactgatcaaggaaaattaacgggtcatattatgtcttcaaaagccaaactacgattacctgatcatacagaaaaggctgttttgaccgttgggccgctaagtgtccatccagaagcacagaacacgggcgtaggctcagcgttaattaagcattctgttcacaaggccaaagaattaggcatcggcggattgattatcctgggccatccaacttactatacgaagttcggttttgttccaccgactacttttcagattacgttaccggaaaaagaacatcagaagcattattggctttggaattactgccaggttattttggcacaagtggtggggagtggcatttttcaacatgctttgcttatccagaaacacaccctgcagaattag

SEQ ID NO: 651 - DNA, 276 bp, Enterococcus faecalis
gcattctgttcacaaggccaaagaattaggcatcggcggattgattatcctgggccatccaacttactatacgaagttcggttttgttccaccgactacttttcagattacgttaccggaaaaagaacatcagaagcattattggctttggaattactgccaggttattttggcacaagtggtggggagtggcatttttcaacatgctttgcttatccagaaacacaccctgcagaattagaagcctttgaagcagaactcggaataaatgaataa

SEQ ID NO: 652 - DNA, 1122 bp, Enterococcus faecalis
tcaatcccgtggggcagactaatcgcattagcaagtgccgcgctatttattggtggggttgccacgacagattctaccccgacactttcacttgatgcagagagtgtcgaaaccgatgccaatggctcagccaccatcaaaggcgaatacgacggcaacagcaaactaacggccaatggcaaggaagtaaaaacgaaagacaaaacgtttgcttacaaagtaaaactgtccgatgaaaaaacgcaaaaaatcacttttgttgctgagaagaaagataccaaagttgaaaaatcagtcgaagtcacaccgtcaaaagaatttattgcgagcatcacagattctgagcaagaattggccaaaacagaaaaagccttagcttacgctgaaaaacaaccttctcagaaaaactatgatgaagccgcaaccttagtatcttcattaagtcaagaatacgaggaatacaatgatcgccttgaaaaaatcaaagaagcagtacctgttgatgaagcagttacaactgctgaaaaatctaaaagtaaaagcgattatcaagcagctgaaaaattagtagctgctgccccagttggcaaagaaggatttcaacaacgattaacgactgttcaaaccgctatcgctgaaaaagaaaaaaatgaacaattagtcgccagtgcaactgccgctgttgaaaaagctgaacaagaaccaaccaatgaagcttactataatgaagcggtcaaacaaattgacgctttaaactccccaaatcaagctttaacaaaacgggtagccgttgttaaaactcaattagatgcccacaaagaaaaacaacgaaaagaagcagaagctcagaaactagccgctgaaaaagcgcaaaaagaacaagccgaagcggcagcaaaagcgcaagctgaagcagaggcgcaacaagccgcacaggcgccggcggaagtcgagacggctgctgcggaagcaccaagcggtaacgccttaattaaagggtcacgtaatggaatttatcatgtacctggaagtagatattataatagaactacgaatccagtagcttggttctctactgttgaagaagcagaagcagcaggataccgagcacccaaacagtaa

SEQ ID NO: 653 - DNA, 708 bp, Enterococcus faecalis
  misc_feature (636)..(636): Nucleotide 636 is "n" wherein "n" = any nucleotide.
aagttaagagagataagtaatctctctacttttaaagtattaaatgtaactattttagttctatttaaaaatgaaaggatgatttacatgaaagtagcagtattaggagcaacaggaaaagaaggacaattacttttagcagaagctaaacgtcgcgggatggacgtgacagccatcgttcgtaatgcctcaaaaataacagatggcacaccgaccattgaaaaagatgtttatcaattaacaacagaagatattcaagcgtttgatgtattaattagtgccttaggattccctgatgtgcaagatttcccaaaatctacccagcatttgattgagattttaaccaatcaaaaaacgcgcttgtttgtcgttgggggcgctggaactttgtatgtggacccagaacacacaattcaattaaaagatacaccatcattcccagcagaaattcagccattagcttcggcgatgggcgaagctttaaacttattgaaagaagctcaaaacatccactggacctatattagtcctgcagccatgtttgatgctgatggtcctgcgacaggccattatgaagtcgctggcgaagaattaacaaccaatagtcaaggtgacagctacattagttacgcagantacgccgttgccatgttagatgaagtggaaagtaatgcacacccaaatcaacgaattagtgtgtatcaataa

SEQ ID NO: 654 - DNA, 432 bp, Enterococcus faecalis
ttagacatggccatgtcaacgaaattaagtgttgcgattcatattttaagtttgattgaaacaggtcctcaagaacaagtgacttctgaatacattgcttcgagcgtgaatacgaatccagtcgttgttcgacgactaatgagccagttaaaaaaagccggcttgattcattccatgcgtggagccaataaaaataccttattaaagaaaccagaagagatctcactgtatgaaatttatacagcggttgaattggaacgagagattttcaatattcatcaaaatcctaatccaaactgttccgttggggcaaatatccaatcggtactagaaactgaatttactaaagtgcaacaaaaaatggaagaagaattgaaaagtatcaccttagcagatgtgattcatgaaatagaagttaagagagataagtaa

SEQ ID NO: 655 - DNA, 393 bp, Enterococcus faecalis
tgggccatcccggggtcgatggccaatattttatggttcatctttggcggcttttttggtggcttatcttggctattcgcaggcgtgatttggtgtattacaattatcggtattccgattggtttacaatgttttaaattagcggggttgagcttttggccgtttaaaaagcgagtcgtgtatagtgatagcggcgtatctttggttgtaaacattatttggctgattatcagtggactaccattagcaattgggcattgtattagtggcttgtttctttgtctgacaatcatcggtattccgtttgggcaacagtcctttaaattggcgaaattagcgttaatgccgtttggggcccgtgttgtttcaacaaatgatttttattttgaatag

SEQ ID NO: 656 - DNA, 798 bp, Enterococcus faecalis
caattatttaatcaggcctttttttcagtttcagaattacggcatgcgaaaaaaatggcgttttggaaagtaattctcaatgctgtttttgtaagtgctattttagcactacctattaccaaacaagtcttttctgtgctacaagaggtgcaacaagatggccaaaaaattgcagaaaagttgcctgacttttctattgaaaatggcacgttgcaaacaaaggccaaagaatctggctttatttatcaaaccgactcgattatttttacgtttgatccagatggaaaacgtacagccgctgatgtccaaaaggatttaattggtaatgcgtttggtttggcttttttacaagatgaatttgtagtcgccttaccaaattcaggcgcaactgaatcaattctaggcaccgaccaatttatcttcccctatagtaaaggaaccttagatggcgttaacgctcagagtatcaagactgcgctaagtgaggcagcgatcccctggtggacaaaactcattgtctttttagtggctatctaccctgttctaatcggtttagttttagacttactgattgccgctatcggtgcatctctctattcaaaattacgtttttattctttacgtttgattgattgtttaaaaattattacgtattgtgctaccgtgccagttatcttaagtgctattttaaacttcgtaaatccgatgtttaacgatggcatcctagttattttactaagtctgttctttttctttgtcacaaccaaaaacgaaccacggaatatccctggttcttaa

SEQ ID NO: 657 - DNA, 429 bp, Enterococcus faecalis
gaggatatgatgaaaccaaaattaattttaatgagccatggacggatggcagaagaaaccttagcttctactcaaatgattgtcggggaattagcagatgctgcgattgtgtcaatgaccgcagaagatggcttgagcggcacgcaagcaaaactggcagcaatcttaaaagaagctggcaatgtcccgacgcttgtattagctgatttaaaaggaggaacaccttgtaatgtggctatgatggccatgggcacttatccgcaattgcgagtagtcgctggacttaatttagcaatggcaattgaagcagccgtctcacctgtggaaaatgtggatgaattagctgcatatttaacgcaaattggccaatctgcggtgaccacgattgacttacctgaattaacagatgaagaagaatttgaagaatag

SEQ ID NO: 658 - DNA, 588 bp, Enterococcus faecalis
ttatctgaacgagggaaaaccacttattctgatttagggtattacttattgggagaaattattcaagtattggatcgctgctcattagaagagagctttcaaacatacgtatttcaaccaatgaacctacagcatacaagttttacggtcagcgattttgcccaggcagtgcccacagagattacaaaacaacgcggcgttattcagggagtggtccacgattcgaaagcctatcaactaaaagcgccaattggcagtgcaggtttatttgcaactttaccagatttactcacttttgttcagtgttttatgaacaatcgctacccgtctggcaaaccattattttctgaaaaaatgttcactgctctctggtctatgaatcaagggggacgtacatttggttgggaagtgaaaaagacgcaagcaggggcagactatttgtatcatactggctttactggaacggcgattggtatgaaaaaagagaccaaagaagccctaattttgttaacgaatcggattcatcccactcgtgaagaacgtggctttctgaaagcacgaacaaaaatttatcagcagtatttttag

SEQ ID NO: 659 - DNA, 486 bp, Enterococcus faecalis
atctgttcaaggaatttgaaaggaacgttcgggattagttatttggatttagaaacttggcggacagcgttccgtggatgggcccacatgaattttaaaccagttgttattattaaagtgcccctgaggatgttagttcccaacacggttgtttttggtcaaaaaaattggacagacctgtttccttataacgcggaagaagattttgaagaaggaactgggatcattgcttataatatccaaccagaatatccattaaaaacgttacaagaatatgccatcacctattctgataatatcgctaaaaatatggtctatgacacattgggtggtgatgcaaaagcaaaacgagaaatgtatcagcgttatttgcacaagacaccttcgattgaagagccacaattttcttctgaagatgcgcttgttattctacaaaaattatatactgaaaaaagcaacaaaaccagattaccaagcgatttatga

SEQ ID NO: 660 - DNA, 468 bp, Enterococcus faecalis
aaacgttacaagaatatgccatcacctattctgataatatcgctaaaaatatggtctatgacacattgggtggtgatgcaaaagcaaaacgagaaatgtatcagcgttatttgcacaagacaccttcgattgaagagccacaattttcttctgaagatgcgcttgttattctacaaaaattatatactgaaaaaagcaacaaaaccagattaccaagcgatttatgattctatgaaacaaagtgttttccatgaaagaatggaaactcccacaactcaaggaaaagttgctcataaaattggttcctatgatgaatttattcatgatatggggattttagaaacacctcacccctttgctttagcaatttttactaaaggacctgataatgctaagagtgctgcgtttattgcttcagtgacagataagttatggcaattacaggtgtctgaataccctaatcaataa

SEQ ID NO: 661 - DNA, 360 bp, Enterococcus faecalis
ctttcgtgctcgtttttaataaaaaagggagtggaaaaaatgaaaaatgaagaacgccgcaaagcgattgcactgaattgtcaaaaatacgaaagtgactatgctcgcttggtggaaccaatcaatgagctactgttaaacttgggagcggctatttcagaagaagccgcgaagcaaatcattctgaatgtaaaacgatatcatcacggcgtgaaatatcttcctgagtgtcatttagatgaaagtaaccaatttatcgaagatgggcttgaagctcttaaaaagggagatttaggcaacggtgcgttacaactatttggggccggcttaaactttgctagttttgcagcaaaagcataa

SEQ ID NO: 662 - DNA, 654 bp, Enterococcus faecalis
ctgaagggaagtagaaaaatggttcgattaaatgttaatccaacccgtatggaactttcccgattgaaaaaacagttaactacggccacgagaggtcataagttgctgaaagacaaacaagatgaattgatgcgacggtttattgcgctagtcaaagaaaacaatgagttacgtattcaggttgaacaagaagtgacggatgcgttatcaaattttgtattggcaaacgcaacgttgaacgaagcctttattgaagagttagtggcaattccagctgaaaaagttgaattagaaattattgaacagaacatcttaagtgtgccagttcctaaaatgatttttgattacgatgaatcggttcaagaagcacccttagattatggctacgtgaattcaaacagcgagcttgatcaagcttttgctaaaatttcaagcattttaccgaaattattagcacttgcaaatgttgaaaagacgtgccaattattatcaaaagaaattgaaaaaacgcgtcgtcgtgtcaacgccttagagtatatgacgattccacaattagaagaaacaatttactacattcaaatgaaattagaagaaaatgaacgtggcgaaattacacgtctaattaaaattaaaagcatgaacaaagaaaattag

SEQ ID NO: 663 - DNA, 255 bp, Enterococcus faecalis
ccctatgcacgagggacacaacccaaagaattagctgtcattttaggagaatcatttctttccgatgtcgataaaattaacgcagcttttgcccaacgttttgaagaagaatatgtcaatcaaggattggatacaaaccgttcgattgaagaaacgttatatcttgggtgggaactattaagtatgctaccgagaacagaactaaaacgaattaaagaggatatgttcgatcaatatttaactgaagggaagtag

SEQ ID NO: 664 - DNA, 720 bp, Enterococcus faecalis
aagaaacggctaaaaaaagtgggcacaagtacccaagcagcattaacagatattcccgtgttgtatttattacatgggatgggagggaatcacagtgtctgggctcgcagaacctctattgagcggtatgtcgctgatttggggattgctgtcattatgccgtccacggatttagcttggtatacggacacacaatacgatatgaactattggacgtttatctcagaagaattaccgaaaatttgtcatcaactctttccacagttaagtacaaaacgagaaaaaacctttgccgctggtttgtcaatgggtggttatggcgccttgaaattaggattagcgaaaccagaatcttttgcagccgttgcttctttgtctggggcagtcagtttatcatccactagttttggggaattattaaaagtccgtaagcgaagctattgggaaggtatttttggcccgttagatcaaattgaaggttccattcacgatccgctgtatttattacaacaattagtagaaagccaaacagaaatgccccaattttacctttgttgtggggagcaagatatgttactttctgctaatcaacagatggctcaagcgttggaacaggcacaggcaagttacacttttgaaactggaccaggagaacatgactgggtgttctgggatgaatggattcaaaaagccttggcttggctaccaataccaaaatag

SEQ ID NO: 665 - DNA, 576 bp, Enterococcus faecalis
aaattcgcccaaaccagttttggtgtacaggcgcccgcaatttattggtattttaaaaataagcaagccttacttcaaagtatggctgaagcgattgaagagcactttcaagaacctgcattatgtggtgaatggtattctgacttactagccttcatggaaaactattatgatctctatcaacaatttccctgtgccgtagctatcgaaatccaaaccgtccctgcctatccccaacgattacgccatttgaatcaaatgatgggcattttaagagaagcaggtttttcaccagaaatgactcatttagcagtaacgtctttacaacatcttttatttgggatgattatggacgcaacggaggaaaaacagctcgtttcgcaagtgttgaacggagatgactatttaaaagaacaagtgttgcacatgaaacaatatgtatccgacaatgagttaacgtacatggaggaaagcattcaatttcgacactccatccaccaaaaatccgcctttattcaagccgttaaaacctacttagatgggttgcaagcagacaacacatcttcatctaaataa

SEQ ID NO: 666 - DNA, 1662 bp, Enterococcus faecalis
aacttttcgtggtttaagacgactggggtggaccaccaacctgtacaaggagatattactaaggccatcgctttagccaatgaactattcccagaatatgaatttattcattccaatttcgatgactatttgaaagctgttcaagaggagttaccagaagatttaggaacagtaacaggtgaattaacgagtcaagaaacggatggctggtacacattagccaatacttcttctgctcgcgtctatttaaaacagtggaacacaaaagtccaacgccaattagaaaatatcgcagaacctttagcagcaatggcttacgaagtaactggcgactacccacatgaccaatttgattatgcttggaaaacattgcttcaaaaccatccgcacgatagtatttgtggctgttctgtcgacgaggttcaccgaggcatgatgactcgctttgaaaatgccaatgatgtcgggcatttcttagcagatgaagcaacacgacaattaacagaagcaattgatacaagtgttttcccagaaaaagcgcacccgtttgttttatttaatactagtggctatcagaaaacggaggttgtcactgtggaagtggagattgaacgattgccattttatacaggaaaacctgaagatctttatcatgaattaaaacaaaaagccaccccagattatcaagtgattgatccaactggaaaagccgttgcaagccgtattgtcaaagaagatgttcgttttggttacgatttacctaaagatgctttccgtcaaccgtacatggccaaatacttaacggtcgaattatctgtcaaagaaatggcgccattctcttgggatagctttgcattgattcaaggagaaacgaaagcttttgaaggaagtcttttggctcaaccagcaacaaatgaaatggaaaacgaatttattcaagtgaaaattgaaaacaatggtagcttaaccattgctgacaaaaaaacaggagaaacattttcaaaattgttaacatttgaagatactggcgacattgggaatgaatatatctttttcaaaccgaccgaagaccaaggaattacaaccgaaaatgtaacggctgaaatcacgaataaagaaaattcccctgtaaaagcaagttatcaaattaaacaaaccgtcatgttaccagttgcggcagatgaacgattagaagaagaacaaaaggctgttcgtgagtttagagaacgccttgcacaacgttcaacgacgcttcgcccgttcgaaataacgacaatggttacaatgatcaaagaaagtaaccaattgttctttgaaacaaccattaataatcaaatcaaagatcatcgtttacgcgtgcttttcccaactggcatggtcacagaaacacacgaagcggatagtatttatgaagtcgtgacacgaccaaatcaagtaagcgacacatgggaaaatccaacaaacccgcagcaccaacaagcgtttgtgaatgttcatgaccaaaacaaaggcgtgactatcttcaatgaaggcttaaatgagtatgaagtcttagcagatggaaccattgcggtcacattaattcgttgtgttggcgaactaggtgattggggctattttgcgacaccagaagcacaatgccaagggagaatatacctttaa

SEQ ID NO: 667 - DNA, 1878 bp, Enterococcus faecalis
attacaatgatgattatttacttcttgatgagtttactgctcttctcaaatgtcgtgtattatcgagaatttactgacttcatcacagttaatacgatgcttggtgctggcaaagtagctagcggtcttggcgaaagtgccttacgtctctttagaccttatgacgtcatttatttcttagacttcattattattggcgtattattattaacgaaaaaaattaaaacagatgcgcgtccagtccgcgcacgtgtagcagtctctgtcacactcctttctgttgtctttttcttattcaatctatttatggctgaaacagaacgtccccaattattaggacgtcaattctctcgtgactatatcgtgaaattcttaggcttaaatgcctttaccgtgtacgatggcattacgacttaccaaacaaaccaagtccgtgccgaagccagtgctaacgatatgaaacaagttgaagattacgtgaaacaacaatatgcggcacccgatgatagtaagtttggtattgcaaaaggcaaaaatgtaatttatatccatttagaaagtttccaacaatttttagttaattacaaattaaaagatgaaaatggcgtagaacacgaagtcacaccatttatcaatagtctttacaatagtaaaagtacctttagctttgataacttcttccaccaagttggtcaaggaaaaacaagtgatgccgaaacgttacttgaaaattcactatttggtttagaccaaggttcactctttacacaagttggtggcaaaaatacgtttgaagcagcacccgatattttaaaacaaacgcaaggttacactagcgctgctttccacggaaatgccggtaacttctggaatcgaaatgaaacctataaacgtttaggctatgactatttctttgatgctagttattatgatgttaattcagataactcattccaatatgggttacacgataaaccattctttaatcaatccgttcaatatttagaacatttacaacaaccgttctattctaaatttattgctgtgtccaatcattatccttattctcaatttacaaacgatgaagcaggattcccaattgcaaaaacctctgacgaaacaattaatggttactttgcaacagcgaattatttagataaagcggtcgaagaattctttaactacttgaaatcttcaggtctctatgaaaactcagtcattgttctttatggcgatcactatggggtttctaattcaagaaaccaaaacttagcagagttagtaggtaaaaccaaagcagattggaacgattttgacaacgccaatatgcaacgtgttccttatatgattcacgttcctggtcaagaaaatggcggtgtgaaccatacgtatggcggccaagttgatgccttaccaacccttctacacttgcttggtgtcgatacgaaaaactacattcagttaggccaagatttattctctaaacaacacaatcaaatcgttgctttccgcaacggcaatgttgtaacacctaaatatactattttaggttctagcatttacgatactaaaacaggcactttaattacagagccaaccgaagaagttaagaaagaagtcgctgatttaaaagccaaagcgacgaaacaattagaaacgtctgaccaaattactaacggtgacttgcttcgtttctataccaatagcggcttaaaaccagttaacccagaagactatgattacaagaaccaattgcaacaactggaagcaattgaaaaagaaaaaggtgaaaaatcaacgagtgtttacagtaaaaacaataataaatcaaccgttgatgaatatcacactgacagttatcaaggctatcaaaaaacg

SEQ ID NO: 668 - DNA, 225 bp, Enterococcus faecalis
aaatatacttgggccatgatcgcaaatattgccggcgccttagttaccttagttttcggtatgatttggttgaaatattccgcaaatctgccgtggccaaacgctttcgctggcgggtttgctccgtttattattcctggtatcatcaaggctgtcgcagctgcttatgttggtattttaattcgccaacgctttatgaaacgttttttagcacacctttcttaa

SEQ ID NO: 669 - DNA, 558 bp, Enterococcus faecalis
aaggacaaaggagtgaagtccatgtcctcattattaaaacgattggttcagttggttttgttagtcgtcgctgtcttgctgattcgacactatgttttctcccctgctgcggtgaacggctcttcaatggaaccaacacttcataacaacgaccgtttatgggtgacctcgattaaaaaaccacagcgctttgatattatcgctttccctagtcctcgcaacggccaacgagtagccaaacgtttaattggtttacctggcgaaacagtcgagtatcgcgatgataccctttatattaatggtgtatcactcagtgaagattacttagcaagtgctaaacgaaatgtctctaaaaatgaaaattatacccaagattttacgctagagaccttagaagccacccaatccctgaccgttccagaaggcatgtattttgtcttgggggataatcgcccgcgctcagacgacagtcgttattttggctttgttaaacaagcgagtgtggaaggtgttttgacttttcgttattatccattagataaaattggctttccataa

SEQ ID NO: 670 - DNA, 399 bp, Enterococcus faecalis
ttccctacccgtggtgagtaccaacgttatgctatcttggaatatttaatcgaaaatcatacacacccaacagctgatgaaatttatcgcgcactagaagatcattttccaaatatgagtgtagcaacggtttacaacaatctacgtttatttactgaaatcggtttcgttcaagaaatgagttatggcgatgcatctagtcgttttgattttagttcgaagaaacattatcacgtgatttgtcaaaaatgtggtaaaatcgttgattttcattatccagggttagaggacgttgaaatggccgctagtaaattaacaggcttcgaaattaatgaacatcgtttagaattatatggattatgtccagattgccaacaagcacaacaggagaatgtgtaa

SEQ ID NO: 671 - DNA, 912 bp, Enterococcus faecalis
acagacagagggagacgtcacctctgcaaaacaaagattgtgaaagaagggatttacaacatgaaagtcgtagtcgtaggatgtacccatgctggaacttcagcagttaaaagtattttagcaaatcacccggaggcggaagtcactgtatatgaaagaaatgacaatatttccttcctatcttgcggaattgccttgtacgttggaggcgtagttaaaaatgctgctgatttattttattcaaatccagaagaactggcttctttaggagcaacagtgaagatggaacacaatgttgaagaaatcaacgtggacgacaaaactgttacagcgaaaaacttacaaacgggcgcaactgagaccgtttcttatgataaattagtaatgacaactggttcttggccaattattccaccaattccaggaattgatgctgaaaatattttattatgtaaaaactattcacaagccaacgtgatcatcgaaaaagcgaaagatgccaaacgtgtcgttgtcgttggtggcggttatattggtattgaattagtagaagcttttgtagaatcaggtaaacaagttactttagttgacgggttagaccgcattttaaataaatatttagataagccattcacagatgttctagaaaaagaattagttgatcgtggcgttaatttagctttaggtgaaaatgtccaacaattcgtagcagatgagcaaggaaaagtagcaaaagtcattacaccaagtcaagaattcgaagcagatatggtgattatgtgtgttggtttccgtccaaatacagaattattaaaagataaagttgacatgttaccaaatggtgcaatcgaagtcaatgagaatatgcaaacaagcaatcctgtagggcctgctgcgggtgctcgttcatag

SEQ ID NO: 672 - DNA, 321 bp, Enterococcus faecalis
gtgaggaaaatcagtaaaaaagtacgaattacaacgcttattagtttaatgcttgttttaggggggatgatcgagaaaggcgggggtaaaattattaatatttgctcaatgatgagtgaattaggtcgtgagactgttagtgcttatgccgcggcaaagggtggtttgaagatgctaacaaaaaatattgcttctgaatatggtcaattcaatatccagtgcaacggtatcggtcctggttatattgcgacaccgcaaacagcgccgatgagagagctgcaagaaaacggggacgtgatccatttgacctatttatcttga

SEQ ID NO: 673 - DNA, 363 bp, Enterococcus faecalis
  misc_feature (44)..(44): Nucleotide 44 is "n" wherein "n" = any nucleotide.
gatgccttattttcacttgtgtttgactatgattctagcaatanagaacaaacagtcgctaaaagaaaagaaaaagcaactgtttatgcgacagagcaagggctatccggggtattcccaagggattcagataaagttgttcctagtgttgtgaccgtttctcaattagataaggcacctgaaatttatcgaaccacacaaaaagatacaggaaaagaaaaaacagcattggtccggctagaatattcagttcgaatcgcaggaagccaagcgcaacgtggaaattttatttataaggtaactttcaatgaagaaagcaagaaatttacaaccattgagaatttaggtgaggaaaatcagtaa

SEQ ID NO: 674 - DNA, 615 bp, Enterococcus faecalis
gatcctttggtgggcgcttctagggacgaagttgagcgctacatgattacagaatttttgcaatcccttcacgaagaacagcaagcttcagcaagtgtgattcggatgatttctagtttgagaggatttcatcaatttttacgtcaagaacgcttaagcgaacataatccgatgcaacatattgactcccccaagaaagttcaaaaattgccaagtacattatctgttgacgaagtgactcgattaattgaaacgcctgatacaagtaaaccactaggtatgcggaatcgtgctattttagaagtgatgtatgcaacgggcctgcgagttagtgaactaattgaaataaaattaggggatctgcatttatccattggtttattgcaaacaatcggaaaaggggacaaagaacgaattattcctttaggcgattatgcgattcaatggattgagcgctatatgaacgaagccagacctcaattgattaaaaaccatccgaatgaaacacacctgttcgttaatcatcatggcgaaccgttatctagacagggcatttggaaaaatttaaaacagattgttcgagaagcccagatagagaaaaatatgaccccgcat

SEQ ID NO: 675 - DNA, 969 bp, Enterococcus faecalis
gacagcttgtggtcgaactatctgcgagattacggtgccaaaggcggtataaagttattgcaggcgttgcaatgtgagagcttatgttttggaacagatagtacaagcgcaattgattatgcggctttcggccagtttgtccaagaaaatcaatccttaattgatcaaacgttccacgcattgacagacaaacaattgagttatccacaaaaaatgactgctgtttttcgtcaagtatatcctgaaagcaggtttgatttttcttcgcctaatcatattttggggatgagttatgcaaaggaaaatgccacgtatccaaccccgatgacgctctacccaattgctagaaaacaagcgggctttcatgatgcaacgatttctgggaaagttgctagcgccacggcgattaggcaaagtgtttttcaacaagaaataacgcaagtgctgccaacggtgccttctataaccgcacaacatttacaaacacagacaatgatttcatgggaaaattattggcccttcctaaagtataaaattgttcaatcctcgttagaagagttacaagccatttaccaaatgacggaaggacttgaatatcgactaaaagatcaaatccaagcagcaggttcttttcacgaattaatggaacgtatgaaaacgaagcgttatacttggacaagattgcaacgattagcaacctatatattgttaaatatgaccaaagaagaagttgaaactgtttggcaaaacagttatctccatgtgctaggatttacgccaaagggacaagcttatctaaaagaaaccaaagcacagattcaattgccggtaatttccaaagtatctaaagaaaaccgcgcaatgctttcgttagatattcgcgccaatcaactataccaaatgggagattcttctttaaaagaacaaaattttggtcggtttcccttacgattttcgccagatacctaa

SEQ ID NO: 676 - DNA, 768 bp, Enterococcus faecalis
acaagggataagatactaacaacaaatcagagaaagcgaagtgagaatatgggccgtaaatgggcaaatattaaagagaaaaaagctgccaaagacgcaaacaatagccgtgtttatgcaaaattcgggattgaaatttacgtagcagcgaagtcaggagaccctgatcctcatgcaaaccaaaaattacggtttgtaatcgaacgcgccaaaacatacaatgtaccaaaacatattattgatcgcgctattgaaaaagcaaaaggttcagcagatgaacaatattctgaattacgctatgaaggatttgggccaaatggttcaatggtcattgttgatgctttaacaaacaacgtgaaccgaacagcagcagatgtgcgggccgcatttggtaaaaacggcggaaacatgggtgtcagcggtgctgtttcctacatgtttgataatacaggtatcattggctttgctggtgacgatgcggatgaaattttagaatacttaatggaaaaagacattgatgttcgcgatgttgttgaagaagacggtcaaattatcgtttacacagaaccagaagatttccaccatgcacaagaagcgttaaaagaaaaaggcattgaagaattcacggttactgagttagaaatggttccacaaaacgaagtaacattagaaggcgacgatttagggaactttgaaaaaatgttagacgttttagaagatttagaagatgttcagaaagtccatcataatgtagatttacctgaataa

SEQ ID NO: 677 - DNA, 468 bp, Enterococcus faecalis
  misc_feature (177)..(177): Nucleotide 177 is "n" wherein "n" = any nucleotide.
gcgcttgggtcgactaaaatggcctatgaaacgtgtgctttcgtctatgacgaagtgatggacgaaagcctataccaaaaatggttggatttttccaatcgtcatctcccacaaggaaaccaacaaattcttgaaatggcttgtggtacacgcgctttagcagttgattttgcgaanagtggttacgatgtgacggccttagacttatcagaagaaatgtcgatgattgctagtgaacgggcctttgaagaagaagtgccagttcaatttgttcagggaaatatgctagatttatctgaagtggggacataccaagccatcacttgtttttctgattcactgtgctatatggctaatcgcccagaagttcaacaagtgtccgatgaaatttatccagcgttagaagaagaagggagcttcatttttgatgtttcatccaccttacagattgaatccgtttttccagaa

SEQ ID NO: 678 - DNA, 213 bp, Enterococcus faecalis
gagggaactatcatagatagccagaaaattttagaaattgctgtcaaagcagcagattcaaaacgagcagaagaaattgtcgcattagacgtaagagagatttcattattagcagattattttttaatttgccaagccaatagtgaacgtcaaatcaatgcgattgttgatgaaattaacgaacaagaagccaaaaatcaagttgaagtctaa

SEQ ID NO: 679 - DNA, 621 bp, Enterococcus faecalis
actatattcaagagaagggactgtatcaagatgagctggataacaaattatgatgctgcacaacgtgaattattaatgcaaaaagttcaaatgcaaatgagtgaacgccgttttcgccatgtgttaggagtcgaggaaacagctgtggccttggcagcgaaatatggtgccgatgaagcgaaagccagtattgctgctttgacgcatgattacgccaaagaacgtccaaacgatgaattcgagttgattattcgccgagatggttttgatttggctttattaaactatggcaatgaaatttggcatggcttagttggggcggatattgttcaacgggaattagccattgatgacgaagaaatcttgcaggcaattcgtgtgcatacaactggggctgctaagatgagcttgctagataaaattatttatgtcgcagattacattgaaccaggacgtgattttccaggtgtgaaagaagcccgtgaaattgcccttgttgacttagatgcagcggttgcttatgaaacgatacataccttgttacatttgattgaacaagaacataaaatttatccaaaaacgttagagacctacaatcaatgggtcgttaatcaaaaataa

SEQ ID NO: 680 - DNA, 663 bp, Enterococcus faecalis
acaatgggagaaaaaagacaagcgcgtcaaggagcggacgttctcttgcaagaggaaccgttacgttttcaaacaagaaagcaagtcggcttgttaggtggtaattttaatcccgttcatttagcacatcttgtcatggccgatcaagttcaaaatcaactaggtttggacaaagtttacttaatgcctacgtacttaccaccacatgtagacgaaaagaaaacaattagcagtgaacatcggttagcgatgttagaactagcagtggctgataatccctgcttagatattgagccaattgagttaattcgcaaaggcaaaagttacacgtatgatacgatgaaagctttaaaagaagccaatccagatactgattattattttataattggtggagatatggtggaatacttgcccaaatggcatcggattgatgacttactccatttagttcaatttgtcggcattcggcgtcctaattatccaacggaatctacctatccaattatttgggtcgatgttccgcagatggcgattagttccactttgattagacaaaaagtcaaaagtggttgctcaacacgctatcttcttccagagaatgtgataaactatattcaagagaagggactgtatcaagatgagctggataacaaattatga

SEQ ID NO: 681 - DNA, 351 bp, Enterococcus faecalis
aaaagcattaatttaaattttagagagaaggcaaacaatttgaaacttagaggaaaacaaaaacgttatttacgtagtcaggcacaccatttacaacctatttttcaagtaggcaaaggtggtttgaatgacgcaatgattacacaaattgatgaagcgttggaaaaacgtgaactgattaaaattacgttattacaaaatacagatgaagtagcagaagaggttgcagaagaactaacagcagccattcattgcgatgtggtacaaattattggtcgcgtgttggtcttattcaagccatcaagtaaagaaaaatatcaaaaaatttcagcagcagtcaaagagatttaa

SEQ ID NO: 682 - DNA, 462 bp, Enterococcus faecalis
tctttaatcgatacgcccggaattattcaccgtcatcaaatggcacattacctaggtaaaaaagacttgaaaattattgcaccgcaaaaagaaatcaaaccgaaagtttaccaattaaatgctgaacaaaccttgtttttaggtggcttggctcgctttgattatgtccaaggtgctaaaagttccttcattgcctacgtttccaatgacttaaaattacaccgaacaaaaacagcaaccgccgatgctttttatgaaaaacatgttggtggcttattgcagcctccacgtgccgatgaagtcgctgagtttcctgaattagtgcgctttgaattttccgtgaaagaaaaaacggatattgtgtttgctggtctaggttggattactgtcacagaacctggtgtagtcgctggttgggcgcctaaaggtgtcgatgttttacgtagaaaagcattaatttaa

SEQ ID NO: 683 - DNA, 1752 bp, Enterococcus faecalis
cgtggtgatcacgggcaattaggtgtcgatcgtgaaatggtcgttttgtggttattgctctatcgtttattctattatattattccgttcttaattggctgtttgttctttacaaaacacttaagccaaaagttggatactcattatcgtcaactgctaaaacaaattactttggaaattgcccacaagctacaagtggttttactttatttttcaggaattatgatggtgctcctagccactattccagaagccttcactcaagtgcattggttaagagatattaaccccttccgttcacatattattattcaaattccgagtattgttttaggctttgcattattaattatgggacgtgggattgctgatcgtgttaaaagagcctattatccaacgattattttattaattggtgctatcttgtattcatttgttgttgactttagtatgttttccattttctatttagctattttattatttatcgttattttttcaaaatcagaattgtaccgtgaacaactggtttactcttgggagtggatgacgattgatggctttatctttggcttgttgactttgttatacctggtaattggtgtttataatttaccgaacttcccacaccatcgtcatcattttgtggaatttttcttgttcccttccgaacggatctggttgtcaggatttatcgctatcctcttagttatgagttttaactttctatttgttcgctacctccaagggaaaaaacaccaagttggtgagtttccagaagatagtatcttgcataatatcttaacaacttatggcgggaatattgacagtgaacttgtctttcttcatgataaacaggttttcttatatcccaaagaagaaccgactgtctttttacaattcaacaccattaataataaatgcgttgtgatgggcaacccttctgggaacaaagaagattttcctgcggcgattgatgcattccttaaagaaacagatcgtttcggctatgtacccgtcttttacgaaaccaatgaggacagcgtgatgttactacacgaatatggctacgaatttatcaaaatgggcgaagaagccttagttaatctagaaacatttacgatgtctgggaaaaaattcaaaggtacccgcgcagtgtttaataaaattactaaagccggctattcatttgacgtactccaacctccttttagtaccgaacaaatgcacgaattaaaagctatttcggatagttggttagacaatcgaaaagaaaaaggcttttcactaggatttttcgatgaagcgtatcttcaaagaaacccaattgctgttgtccgaaatgctgaaggagaaatggtctctttcgctaatatcattcctagttacacaaatgaagttggtaccatcgacttgatgcgtcaccataaagaaaaagccccttctggaagtatggatttcttatttattcatttatttgaatatatgaaaacagaaaatattcattatttcaatttagggatggctccgttagccaacgttggtcaatcaagaaaaagttttattcaagaacggattgctgcgttaatttatgaatttggttcagaaatttactccttccaaggattacgcgaatacaaggaaaaatttgctagcaaatggcaaccccgctatacactttattctaaaagtagttggattgtctacgtgatgatcgctttactcattgtcgatcaaaaaaatattgactaa

SEQ ID NO: 684 - DNA, 186 bp, Enterococcus faecalis
  misc_feature (28)..(28): Nucleotide 28 is "n" wherein "n" = any nucleotide.
cagtcggtggcttccttaggtttagtanatgagaccagttataccaatgttgaacggattgaacaagaattagcttatgccgaagagatttttgcgaagtatggcatcccagtgattgatgtaaccgcaaaatctgtcgaagaaacagcctttttaattaaagaaaaactagatgaaagaaattaa

SEQ ID NO: 685 - DNA, 522 bp, Enterococcus faecalis
actataatttatagtttaaaaagagtcaatagatatgataaactaatacttgtccgaaatttaagaattggacgcgtcagaaagatggcaaaaaaacggaatttaacgaaagccaaaatccttgaaagtgcccgcaatctagcggaagaattgggcgttcaacaattaacctttcaaaatttagccgttgatttaggcatcaagtatccttcactctataatcactttaaaaatattgctgaagtaaaaaatgctctagtggacttgttaattcaagaattaaatgatgcattgcgaagagccttagtgggtaagagtggcgcagaagcaattcggatatatgctgaaacgtaccaacaatttgcttttgaaaattctgcagtctatgaattacttatcagtgtgccgaaaacgcaaaaccaacaattaattgaaggcatccatgaaaccaatcaaattatcttacaacttttagctttttatccatttaataatgaagaacgactgcataaaagtcgagaa

SEQ ID NO: 686 - DNA, 552 bp, Enterococcus faecalis
tttgtaaacatcatttttgaaagaaggctgtttggcatgcatattaccaaccgttctcatttggccgatcgttatggcaaacgaaccagtgcagaatttttattacacgaacgtcgtattttatcttttcctatttctttagcggccattcctaaagaagcccgttatttatcctgggaattaattgattatgacacgattcctctaatcggtttcccttttattcattggttagctgccaatgttcctgtaaccaatgagattcctgaagactttagtcgaacagcactcaagcctaccattcaaggaaaaaatagtcttgcttctcctttggggaaacagatgattcctgcgcttgccactgaaacgttacctgagttaaccgaacgttatctggggttaagccctcgctctggtgtgcacacctatacgttatatgtgtacactacaaaaaatccactaaatttaaaagaaggcttttttgcgaatgaattgcatcaagcattgaatgatcaactactcgccaaagccaaatttgaatttctttactag

SEQ ID NO: 687 - DNA, 1248 bp, Enterococcus faecalis
ggaaatagaatgtatgaattaattaaaagtaaaattttccgtccaagacaaccttgggaaaaaaatctgctcgttttatggtttggcacatttatggctggtattggctttagcttagtgatgccatttatgcctctttatatcaacacattaggtacttttacccaccaacaattgaatttttggagcggaatcacgttctcttccacttttttagtcacaaccattgtttcaccttggtggggccgtttagccgaccgaaaaggacgcaagttaatgttattacgcgcttcattagggatggctatcgtcattagtttaatgggcgcagtcacaagtgtttatcaattgattggcttacgcttattacaaggtgttttttctggttatatcagtaatgcgactgcgttagttgctacaggcacacctaaggaaaaaagcggtcaagtgcttggtactttagccactggttctgttaccggcacgttgcttggtcctcttttgggcggtgtcactgcgtctattttcggttatcggccaacctttttcattactggtacgattttattactcgtttttgttttgagtctcgtctttgtccatgaagagtttgtgccaattgaaaaaaatcaagccgcatctgggaaacaaattttaaaaaaactagaacatccccacgtgattcttggaatgtttattacgacattaatcattcaagcttccaataattcaattagtcccatcatcagtttatatattcaacaattgttgggtggtcacggaaatgtcaccttaattagcggagtcattgcttctattccagggattgcaacgttaatagccgcccctcgtttcggccggttaggcgatcgtattggcagtgaacgcatcttgacaattggcttaattttagccatttttgtttacctaccaatggcctttgttcaaaatgtctggcagcttgccatgcttcgtttcttagttgggatttccgatgcctgtttactaccagctgttcaaacgttgatcactcgttattccccaagtgacgctgcaggtcgtattttcagttacaatcaatctttccaagcgacaggaaatgtgattggtcctatgattggttcaagcgtatctgccgctttcggttatcgtggggtctttatttccacttcttgtctggttctccttaaccttctatgggttcgtcgaagcaccgccgaattaaaaaaagagaaaaatgatgactaa

SEQ ID NO: 688 - DNA, 1821 bp, Enterococcus faecalis
  misc_feature (50)..(50): Nucleotide 50 is "n" wherein "n" = any nucleotide.
tttaccgagggaaaaggaagctcgccatcaggagaaaccagtattcattnttttttagcatccggaaaggtattcatgtgtcgtcgttgtgcccgtgtctgtcaattgcggcagggaagagatgtacttagtattgctaatcgtggctttgaaacaaaaatgatgccgagttatgggcaggcgtttgatcaatctatctgtgaatcatgtggcaattgtgtctcttcctgtcctacaggtgcgttaacagcaaaagatacgaaagagtaccgcaaatgggaaacccagaaaattcctacaacttgtccgcattgtgggacaggctgtcagatgaatttactcgttaaaaataatcgtttggtgggtgttgaacccctggatggaccagctaataaaaatttactttgtgtgaaaggaaaatttgcttcatataaatttgttgggtcaggagatcgcttaacggagccattaattaaacggaatggcatttttgaacctgcttcttgggaagaagccttaacgcttgtttcgtcaaaatttaacgaaattaaagcagaaaacggtccggatgctcttgctggtttttcgtgctctagagcgacaaatgaagataattatgtctttcaaaaaatggtgcgtgctgcttttggtaccaataatgttgataactgtgcccgtgtttgtcattcggcttcggtccatggtttagcccaaaccttaggctctggtgcgatgactaatcctattgctgatatcactgaagatgtcgacatgattttattagtaggttccaatccagaagaagctcatccagttattggtgcgcaaattcgccaagccatccaaagaggaacgcaagttgttgttgttgatccgcggaaaattaacttagtgaaggatagtgcgctgcatttacaagttcaggcgggaacgaatgtcgcatttgctaatggcatgatgcatgtgattttgaaagaaggtttagcagatcgccattttattgaagaacggacagaaggatttttagatttagaaaaaatggtggctgattatacgccggaaaaagtcgcagaaatttgtcatattcatccagaagatttaattcaagcagcacgcatgtatgcaaaagcagagaaagcaccaatcatttattgtttaggtgtaacggaacattcgacaggaactgagggtgttatgagtatgtctaatttggcaatgttggttggtaaagttggaaaaccaggctgtggtgtcaatcctttgcgaggtcaaaataatgttcaaggtgcttgcgatatgggctgtatgccttatgatttcccaggctatcaaaaagtcaataatccagaagtgatcgacaaatttgaaaaagcttggcatgtgccgttaaatcgaaacacaggtttaacttctactaaagtcttaccagcagcaacggcaggaagcgtcaaaggcctttatatttttggagaagatccaattgttacggatccagacacaggacatgttcgtcaagctttagaaagtttagactttttagttgttcaagaattatttatgaccgaaacggctgcttatgcagatgtcgttttaccaggcatcagttatgcagaaaaagacgggacatttacaaatacagaacggcgcgtgcaaagagtccgtaaagctgttgaaccaagaagacaagcgcgagaagactatgaaatgttttgtgaagtcatgacacgaatgggctatccttgtgcgtatgaatctgcaaaagaaattatggaagaaatttcagctgtgacgccttccgtttgggtggaaattaaattatga

SEQ ID NO: 689 - DNA, 183 bp, Enterococcus faecalis
gttcaaatcctgcccccgcaattgcttttattttttaaagcatacatttgcataaagcaaaaacgaattggtttggtagttcagctggttagaatgcctgcctgtcacgcaggaggtcgcgggttcgagtcccgtccagaccgtttttggctcggtagctcagttggtagagcaatggattga

SEQ ID NO: 690 - DNA, 468 bp, Enterococcus faecalis
ggagggaatgctatgaaaattggctttatcggtgctggcagtatgggcggtgccatgattaaagggttactgaaagctgaggcagtcaagaaggaacatttatatgtgaaaggcggatcaagtggaaccgcagaagcacttcaaaaagagtggggctttcaacttgtcacagattatgcacttttccaagaatgtaaggttatttttattgcgacaggagcaaaggtcgtgttacctgttcttcaggaattagcccctcatttttccaacgaaagtctattgatttctgttgcaacaggtcataccatacaagaagcacaaatggctcttggcaataaagaagccaaagttgttcatgccattcctaatacaccagttagcgtgaatcaaggcgtgattggcgtagccttggcaccaacaattgaaggccaaacgaaggacctggcaatggaacttcttgcatcttga

SEQ ID NO: 691 - DNA, 1827 bp, Enterococcus faecalis
aaatcatttgctgagagaaaacgctacaacttcccttttctaaacgaatatccaatgctatacttaaaaagtaaaaacaaaaaaacaaatgaggtgttttccatgtcttgggaacaagtttaccaacaatggttagatgaagaaaatattccagaaaatttaaaaaatgaattaaaggacttaaatacagaccctgaaaaatgtgaagatgcattttacgcaccattagaatttgggactgccgggatgcgtgggattttaggcgccggtattaatcggatgaatatctttacggttcgtcaagcaacagaaggacttgcacgttttatggatacgcaagatcctgaaacaaaacgtcgcggtgtagctattgcctatgattcacgtcatatgtctccagaatttgcaatggaagcagctaaaacattagctaaacatgatattctttcttttgtgtttgaaagcttacgaccaacaccagaattatcttttgcggtccgctactttaaagcttttgcgggaatcatgattacggcttctcacaatccagctgcctataatggctacaaagtctatggtgaagacggtggtcaaatgccgccagctgatgcagatgcattaactaaatatgttcgtagtatcgaaaatcctttgaaaattgatgtcttatcagatgaagaagttgcccacagcggtttaattaacattgttggtgaagaagtcgataacgcgtatttgaaagaaattaaaacagttacgattaatcaagaattaattaacgaaatgggtaaagaattaaaattagtttacactcccttacatggaactgggaaaatgttaggagaaaaggcattaaaacaagccggttttgaaaaatttgttttagtacctgagcaagccgttgctgatcctgcctttactacagttaagtcaccaaaccctgaagaacattcagcttttgaatacgcgattcgtttaggggaaaaagaaggcgctgatttattgattgcaacagatccagatgctgatcgtttaggtgctgctgtgcggatgccaaacggagactaccaagtattaacaggaaatcaattaggttcaattatgattcattatattttagaagcccatcaacaagcaggcacgttacctcaaaatgctgcggttctaaaatcaatcgtttctagtgaacttgctacagcgattgctgagaaatgtaatacgaagatgtttaatgttttaacaggtttcaaatttattgctgaaaaaattcaacaatacgaagaagaccacagtcaaacgtttatgtttggttttgaagaaagttatggttacttagtgaaaccttttgttcgtgataaagatgcaattcaagcgttagttttattagcagaagtagcggctttctataaaaaacaaggaaaaacattatacgatggtttacaagatatctttgaagaatttggttactttgaagaaaaaactatttccgtaacaatgagcggaattgaaggcagcggtaaaatcaaagctttaatggcaaaatgtcgtgaacaagcgccaactgagtttgccgggattcaagttgctcaaacggaagattttaaagaattaacacgcacttttgcagatggtcaaacagaacaattacaaacgcctccttctgatgtgttgaaatatcatttagaagatggcagttggattgctatccgaccatcaggaacagaaccaaaaattaaattctatctagcgacaaaagcaacaagtagttcagaagcttctgaaaaaattgctgcgtttgaagcagtcgttaatgaattaacaaaataa

SEQ ID NO: 692 - DNA, 186 bp, Enterococcus faecalis
gattggcaagtgtttttacgagaaggtgttttggtagcaccaagtgtagcttttagtgaaaaacgtggaagtattcgcttgaactgttcccgaatttcaccagaagaaatgcctcttttttgtgagcgaatggtacggattacacgacagctttctgaaaatagacaaacaaaaatagaacagtaa

SEQ ID NO: 693 - DNA, 918 bp, Enterococcus faecalis
  misc_feature (27)..(30): Nucleotides 27 & 30 are "n" wherein "n" = any nucleotide.
tcccccctatgggcggttgagacactngcnaatggccgcttagaggtcattcccagtttcgattttccagcattaaattggaaacaatttttaaaagaggaagcacaagatgaattaggttatttgccgttaagaaaagaaatccaagccattacagcaacggaatatcagcttcatttaccaagtgaaagtttattgcttacttcaggtgcgcaacaagcactttttttagttttacaagttttattgagacaaggagatagtgttgccgtagaagatccatctttcttctatgccttaccaattttccaagctgctggtgtgcgcttatttggtgtgcccatgacagaggaagggattgatcttgaagcgctagaacaaacaattcgacaacatcgcatcaaaatggttatggttaatccttcctttcaaaatccgactgggacagtgatgcctttgagaaaaagagaacagcttgtgaaagtctgtcaaacgtatcaagttcctattttagaagatgatgtttttgggcagttaagttttatcccgaaaacagaaattcctcctttaaaaaaattagatccagataatgtcttgtatatcggttcgttgtcaaaaattttaggttcgaccacgaaaattggttggttaagtgcgcccgcctccgtgacgaaacaaattgcagaagccagaaaaatgatggatgtttcgttgagtatttttccacagatgctcgctaaaatggcgattgaagatccttctttctctgaaaaaattacgttattaaataaacaagtggaacaacgagcaacagctgtatatcaagtatttaaatcgttgtcagaatgggaagtttcgccagtaaaaggcggcttttatttatgggcacattggcgtcaaggggcacttaagccataa

SEQ ID NO: 694 - DNA, 1119 bp, Enterococcus faecalis
aaaagatggctactatgttcaattaatgaagcaaatgagaggaggacgccaatgatggaaaaacagccgacaacgaaagacgtttggaaaaacgatcaatgggttcgtcctttcttaaaacgctataaaaaaaccttgtattttgccttacttttaggcttcttgacgttctttagcgcaggggcattaatgtttacgtctggttacttaatcagtcgtgcggcttccttaccagagaatattttattaatttatattcccattgttttaacaagagcattcgggattggacgtcctgtttttcgttatgtggagcgtctaacgagtcataactgggtgttaaaaatgacctctgatctgcgcttgaaactttataatgtactagaaaaagatgcgattttctttaagacaaaatatcgcactggggatatcttaggtttgctttcggaggatattaatcatatccaaaacttgtatttacgaacgattttcccaaccgttattgcttggattttgtatatctttttagtgattgcattaggtttcttttcttggtggtttgctttatgcatgttactgatgttaggagtggttgtttttctattaccacttgtttcagttatagtgaatggtgcgcgtcaagaaaaacataaatatgccaaaaatgagttatatcaaacactaaccgacaatattctaggtgtgtctgattgggtatttagtcaacgaggctctgaattcgttgctcgttatgaaacagatgaagcaaacgttcgtgcattagatgaaaaaatgaagcaatttaaccgtggccgagactttgttttacaacttctgtttggtgtgattgcgattgctgtcttagcttggacaagtgtgcggtttccaggtaatcatgggggcgcagccaattggattggtgcctttgttttaaccgtttttccgttaattgatgcctttgctccgctacctgctgcagcacaggaaacaacgatttataaggattccattcgtcgttttaatgagcttcctgaaggggaagatgactcaacagaagcgcctgttcagccaaatggcaccggtttatggacagaacatttgtctcctgcatatgagctt

SEQ ID NO: 695 - DNA, 1317 bp, Enterococcus faecalis
ccaactcgtggtgaagatgtggcctttgtttttacacaagatattcgttcaggcataacattgctgattgtttttccgattattattatttttatgattgtgttaggctatgcagcacaaagtaaagcggacaagcaatatgcggcgtttcaaatgctttccaatcattttattgattccttgcgaggaattgacacgctgaaactgtttgggttgagcaaaaaatatgctgggagtatttaccatacaagtgaacgattcagaaaagcgaccatgagtacattgaaaattgctattttatcaacctttgcgttagacttttttacgacattatcggtagctgttgtggcagttttccttggattaagtttattaaacggcacgattttattatttcctgccttggttactttaattttagcacctgagttctttttaccgattcgtgatttttcaagtgattatcacgcaaccttagatggaaaaaactcttttcaagcgatccaagcggtattagcattgccagaagcagaacagaccgatgtgctcacgttagatgattggcatcaagaaagtcagttgtcagtcacagcgttaaatttttcctatgaagatgcaacgcaagaagcgattcaatcgttgcaattctctgttgatggtcgcaaaaagattggaattatcggggcgagtggttctggtaagtcaacgttaattaatttattaagcggctttttattaccaacagaagaaacgagtcaattggcgataaatggccaaacgattccacattttttacaaaaagactggcaaaaacaaatcctttatattccgcaagcaccatatattttccaagatactttggcaaacaatattcgcttttatacacctgaagcaacagatgaggcgattcagcaagcgattcagttagttggcttagacgagctggttaaagaccttcccgaaggaattcataccttgattggggaaagtggtcgaatgttaagtgggggacaagcgcaacgagtagcgttggcccgcgcctttgtcgatcaaaaacgccacgtcttgctgtttgatgagccgacagcgcatttggatattgaaacagaagttgaaatgaaagagcgcatgttgccattaatgaacaatcatcttgtcttttttgcgacacatcgtctgcattggatggaagaaatggattacattttagtgatggaaaaaggtcaattagtggaacaaggaacgctagcagagttgattgaaaaagatggctactatgttcaattaatgaagcaaatgagaggaggacgccaatga

SEQ ID NO: 696 - DNA, 807 bp, Enterococcus faecalis
ctacccttggtgaggactgtcttatctttgctattaacaccacttgttaagcttctagcgtttcggattggcgcctatgatgcaccaggagagcgacgaatcaataccaaaaatatgcctacagcaggaggacttgcaatctacattgcttttgctagttcatgtttattgatttttcgttcgattatcccacaagattatatttggccgattattttggctggtggaatggttgttttgacaggcctcattgatgatattaaagaaattactccaatgaaaaaaacaatcggtattttgttagcagcattagttatttattttgttgctggaattcggatagattttgtgacgttgccagttgttggaatgattgatttgcgctggtttagtttaccactaactttattgtggattttagcgattacgaatgcagtaaatttaattgatggtttggatggtttagcatcaggcgtatccattattggattaaccacgattggtattacagggtattttttcctacatgctaaaacggtctatatcccaattgtaatttttattttagttgcgagcattgcgggatttttcccatacaatttttatccggctaaaatatttctaggcatataccggggcgttattcctcgggtttatgattgcagtaatgtcgttacagggcttgaaaaatgctacgtttattacggtaattacgccaatggtgattttaggtgtgccaattacggatacggtttatgcaattattcgacggctattgaacaaaaagcccatttcctcagcaaataa

SEQ ID NO: 697 - DNA, 483 bp, Enterococcus faecalis
gcatataccggggcgttattcctcgggtttatgattgcagtaatgtcgttacagggcttgaaaaatgctacgtttattacggtaattacgccaatggtgattttaggtgtgccaattacggatacggtttatgcaattattcgacggctattgaacaaaaagcccatttcctcagcaaataaaatgcatttgcatcaccgcttgttatctttaggttttacccataaaggggcggtcatgactatttatgcattagcgttagttttttcctttgtctctttattgttcagctattcaagtacagtagcatcaattttattaattgtcttttgtttaattggcttagaactattcattgaactaatcggtctagttggcgaaggacatcaaccgttgatgtatttgttacggattttagggaatcgtgaatatcgtcaggagcaaatgaaaaagcgacttggcaagcattctaagagaaagtaa

SEQ ID NO: 698 - DNA, 795 bp, Enterococcus faecalis
ggagaaatgagcatgcaagaaatggtaacaatctcgattgtcacttataatagtcgttacatttttaatgtactagaccaattaaaagccgaactgggtactgatagtatctatgatattcatatctatgacaatcattctgaaacagcgtatcttgaaaaattaacaacatatgaaccatttattactatccatcgcgctgaagaaaatcaagggtttggtcatggtcataatcaagtgttattcaatgcttcgacaaagtatgcaattatttttaatcccgatgttttggttactaaagacgtgcttgatcgtctattaaaccgtatcaaaatagataagaacattgcagtcgttagccctaaagtgctaaatgaagatggcacgacgcaatatttagttcgtcaaaaattagatgttttcgattatatgttacgttttattccctttcaatttgtaaagaaaatttttgataaacgtttgagtatttatgaatgtcgcgatttgtcggatacagaaacaacggatattaaaatgggctcaggctgttttatgttgattgatcgtgaaaaattcgttgaaattggtgggttcgatgaacgtttcttcatgtactttgaagacaacgatttatgtttacgttttggcaaagcaggctatcggattctctatacgccttttgaaacggttgttcacatgtatgaaaagggcgcccataaaagtcgaaaattgtttaaaatctttatgcaatcaatgggaaaattttttaacaaatggggctggaggttcttttaa

SEQ ID NO: 699 - DNA, 759 bp, Enterococcus faecalis
caaatggggctggaggttcttttaatgagtcaaagattagaggtagtcatcgtcttatatcaaatgaaaatggctgatacgccgaattatttgttattaaaagaagtggtagatcaccccgaattgcacttatttatttatgacaacagcccacttcctcaagaagatgcattatttttacaacaaaatgttacttatcgacataatcctgataatccaggcctagcgaccgcttataatgaagccattgcttttagtcaaacgaatcaatgtgaattattgttgctccttgaccaagacacagaagtgccagcttcttattttgatacgttgatcatcatgccgttagatccgactgtggcagtctatgttccaattgtagaagcaaatggacaacaaatttcgccagtttatagtgatcaatatgttggacttaaaggagcaaagccaacagcagggatagccaaccaaccgttgatggctatcaattctggtacagtcattacggcagaaacactgcgctggttggaaggattttcggaagaatttcctttggactatttagatcattggttcttttatcaattgaatcaagccaataaaaagattgaagtcttaccaatccacctaaaacaagaattgtctgttttagattatcgtacaatgagtcctcaacgttatcgctctattattgaagcagaaacgttattttatcgtcgatatgatcaagtagctatttgctcacaaacggggtatggg

SEQ ID NO: 700 - DNA, 294 bp, Enterococcus faecalis
ggcggtccgccccatcccgtggataagactttatctgacttatcgaagcagggagggattcctattgttagtatcacacaagatgaaaaatcagtgattggtgaaaaaagtgatatcgtcctccaaacctctagtggggaagacgtgccattgagaactgcggctactgtttccttggtggcacaattgtatgtagtcgatgtttcattttttgcttatgcagcaaaaaactataaggaaaccttagaaaaaattctaatttcaagaaaaaacgtagaacgtgtaaaagaataa

SEQ ID NO: 701 - DNA, 732 bp, Enterococcus faecalis
agaaacttaggaggagtagcaatgactgaagcaacgacactttatattattcgtcacggaaaaacgatgtttaatacgattggccgtacccaaggctggtcagatacccccttaaccaaacaaggagaagaaggcatttatcatttaggcttaggtcttagggacatagactttaaggaagcctatagtagtgatagtggtcgtgccatgcaaaccgctcagattattttacaagaacatcaaaaccaccaaaagattccttacctaaccgataaacggattcgtgagtggtgttttggttctttagatggtggctatgatggtgaactttggggtgtggtgccacgcattttagcttttaaaagttatgaggacatgatgaccacgaagattacctatcgtgagctagcaaatgctattattgaagccgatacggctgactgggcggagccttatgaagttatccgtgatcgtgtttggtctggtttcgaagatatcgctcatcatcgagataaaaatggtggcggcaaagtcatggtggtttcccatggactaacaatttcttttttactttcctcaattgatgcaagtttgcttatgcagatggcgctggagtatgttagcgtgacgaccttaacttacgaaaaaggaacatttaccattcaaggaattaatgatattttttatattgaaaagggaaaaaagatcgctgaaaagcgcggtttgttgtaa

SEQ ID NO: 702 - DNA, 678 bp, Enterococcus faecalis
gattgtttggtatacttggagagaatcgttagaactttaggaggtcctgagatgatacagatcgaacaaattagaacaggtgttattcaagaaaactgttatcttgtttataatgaagaagcgttattaattattgatccaggtgcagaaggagcaaaactaattcaagaaattacccgtttagggaagaaaccagccgctattttattaacacatactcactatgatcatattggtgcggtagaagaattgcgccatcattatcaaatccctgtttatgttagtccattagaacaagcgtggctttccaatcctattttgaatctttcaggattaggcagacatgatgatatagcaaatattattgttcaacccgccgaacatgaatttaaactaaccgattatgaaattggcggcatgaaattttccgtagtcccaacacctggtcattcaattggtagcgtcagctttgtctttgatgattttgttgttgttggggatgcattgtttaaaggtagtattggtcgtaccgatttacacactggtgatatgcaacaattattacacagcattacgacctatctattcactttaccagaagaatttcctgtttatccaggccatggtgatgccacgaccattcaacatgaaaaagccacaaacccattttttaattag

SEQ ID NO: 703 - DNA, 1386 bp, Enterococcus faecalis
atgtttcattttgtaataaaaggaacaggtttttctagtaaaaatttgcaagagattaaagtttatgaagagacacttttttgtatagatgaggccggagtaattcaggaaataattgaaccagatgctgaagcgtatgaaactgtgctagcagaacaaaaagaggcacaacgttttcaagaattgccccaagattcttatcttttacccggctttgttgatttacatgtccatgcacctcagtgggcacaatcagggaccgccttggatattccattgtatgaatggctgaatacgtacacgtttcctttggagtccaagtttgcagatttagcatttgcccaacaagtctatgatgaattggtaacccaattgttagctaatgggacaacaacagccctttattttgcaaccattcattatgaagctagccgtcgtttggcagagatttgtgcggaaaaagggcagcgtggcttaattggtaaagttgtaatggatgatcttaatgagaatccagaatactatcgtgatcaaacaacgcaacaagcattagaagaaacggaacggtttattcaagaaattcaaacattagcgcagcaaacaaaacaaggcgtgtatcccgttgtaactccgcgtttcattccaagttgtacagaggaagcacttaaaggattaggagaattagcagcgaaatatcaagtccatgttcaaagtcattgtagtgagagtgattgggaacatcaatttgttcaagaacgttttgaaaaaaatgatgctcaagcattgaatgattttggtttattgacagaaaaagcagtgatggcacatgcaggctttttagaagaagcagatatgaatttattccatgaaacagggacggctgtggcgcactgcccaatctctaatgcttattttggtaatgcagtaacaccgattgcaaaattagtacatcaacatcaagtagaagttggtttaggtagtgatctttcaggtggtttttcaccaagtctttttgacaatttaaagcaagcggttatttcttctagaatgttagaagatggcgtcgatgctacaaaaaaaccagaagtacgaggtgttaaaacagcacggattaccgtaaatgaagcgttttatttagctactgctggtggtggtcaagcgctaagtttaccaattggaaaattagaaaaagggtatgcttgggatgttcaaattattaatacaagcttgtcacaagcacgaattcctaaaaatccaggggaatcattgcttgatattttccaaaaaatcttatatttagcacgaccagaaaatattcgagaagtctgggtacaaggtgaaaaagtacatgataaaaatttaatgtcagcaactaaaggagtataa

SEQ ID NO: 704 - DNA, 231 bp, Enterococcus faecalis
aaaatgagtgaaaagaaacaaaataatcttcatttaacagtggggccagaagattcagtatcttttgggcaggccactatgttagggattcagcatgtcttagcaatggacgtgtacgtcgtacctgtgatcattgcttcaattattgggattagcacagcacaaacgtcttctttaatccaagcaacatttatagcagcaggagtcgccagtcctcacaacgggaatggg

SEQ ID NO: 705 - DNA, 453 bp, Enterococcus faecalis
tgcagaacccatgaattttatttaaaaaatacagctttgaaaggagcacttatgcgctatccagttgtgattcacccgaacgaacacttgaaaatgaaggctcaacctgtgacgattattaccgatgaaattgtgcagttactagaggatatgtatgaaacaatgctggcccatgatgggattggcttagcagccccgcaaattggtaaaaatttgcaaatggcagtgattgaaatcgatgaagaatctggtcgttttgaactaattaatccagtgattattgaaaaaaagggaaccagtattgatgtggaaggctgtttaagtattccagaaacatatggaaccgttgaacgagcagatgaagtgactgtccgttattttgaccgtgaaggtgaagaaatggaagttacggcttacggctattttgcctcacgcactggggtatggcaacgg

SEQ ID NO: 706 - DNA, 282 bp, Enterococcus faecalis
  misc_feature (51)..(87): Nucleotides 51, 63, 64 & 87 are "n" wherein "n" = any nucleotide. 1
agcagcgaaacaaatgtttcaaatcgcgacgaaattaaaacaaggcttttntttaaaattttnncggcccccccggcccaaaaaggncttaaatttttgttgggaccaacacccaacgcaattatgcgtgtcaataatcgatacttttatcaagtgattatcaagtataaacaagaaccaatgcttcaaccattattgaaagaaattttaaccgatacacaacgagcaacggctcgtggcttaaagctttccattgatgcagaacccatgaattttatttaa

SEQ ID NO: 707 - DNA, 279 bp, Enterococcus faecalis
  misc_feature (266)..(279): Nucleotides 266, 278 & 279 are "n" wherein "n" = any nucleotide. 1
ttattgacacaggtcagcggtcgagctggtcgcgctgaaaaaccgggggaagtcatcattcaatcttttaaccccgagcattatgcgatacaattggcaaaagcccaagattatgaagatttttatacaaaagaaatgtatattcgtcatcgtggggattatccgccgtactattttacggtccaaattacggctagccatcctgaagaaaatgaagcagcgaaacaaatgtttcaaatcgcgacgaaattaaaacaaggcttttntttaaaattttnn

SEQ ID NO: 708 - DNA, 603 bp, Enterococcus faecalis
agttgtggaagggaaattaaaggaggacattttgtagtgaaaaagatttggcaattggtatgtttagaaaataattatgattcacacagctcttattttcgggatatggtaagatatttttcctatacactgttagcactacttttattctttttaggtttgtattttaacataggttgggtaagtggtttctgttttgtaggtttgatacttttaccatatatgggctttttatctcgtgataattatagagaatttgcaccgagagtatggaaaataagagatgttcgagagttagaagaattgtatcctgtagttgttgatagagtaagggatagattacttttttatgaaaagaaactctatttaaagggagatagtttgaagcatgcagattcaatgaaaggaggttttgttctttcagaaatttctttagaaaatgagttgatttttaatgctagtatagcaaagaaaagttgtatagttgttgaggagtatgtatatgaaaatgtaaattttaaagaagaattccagaataaaaagaatcaagaagctcctgtattacgctatatagtttatacaaataactttttaagtgaataa

SEQ ID NO: 709 - DNA, 618 bp, Enterococcus faecalis
attatgagtagagaatttattgaacgcaatactaaagtagcaatttctattactgaaaaaatgaaaaaaggtaaaaatgatttacaaaaaacaaaagaaaaaattgttcaattagatgaacaaggggaattgactattccttatttaaagattacttttgaaaagttttcagaatcaaatgaagagcttttaaaagaaatttcaagatatgaatatacttatgtggttcatgaagcagaaatggcggttaaagagaaagcaatttgggaagaatttttcagtataaaaaaattgtatgataaagagctttcagaatttgccagttttaaagagaagtataaatattttgagcctaaaaatagtgaagaattaaaaaaacaagctcgagtgttgctagaaaagaaagggtatattgttgacagtccatttgaaggagattttgaaagatggattggcgtttatgctagacctaaagataaaccaacttatttagatccaacggatggagaagaagctggattacaagaattgtacagtgtagatggatttaagcaagactttgcagaatggtttgagtttgaagttgtggaagggaaattaaaggaggacattttgtag

SEQ ID NO: 710 - DNA, 276 bp, Enterococcus faecalis
gtctgttgtgaaaggcacctctatggacaaaaccttcggtggttatcaaattatttagccccttcattaaagatgattaaagaaattgatcatttgttaggaacaaatgagctgatggaacgtatcgatttagcagaattaaaagagaaacatgaagaaataattgaaatggtctgtgttgatgcgaaagatttattgtttaccactaatcaaaatagcagtgttcgatcttatatggaacaagaatttgatttggaggaagtatatccattttaa

SEQ ID NO: 711 - DNA, 444 bp, Enterococcus faecalis
aaaaatccagttagtcatgctggttatggttatgctgctgaagtagctattctagatgacaaaggaaaagtagctaaatttgtggctgcgtatgatatggggcaagtggtgaatccacgagctgctgaaggtcaaattgaaggtgggattgcaatgggcatggggtatgctttaactgaaaaatttgccttagaagaaggctatgttaaagcaaaatatgcaacgctaggattagtgaacgccactcaagtaccaccaatcgaaacaattttggttcatgctgacaatcttcacgaaggtttagcttatggaattaaaggcgtaggtgagttagcaacgatccctaccgcaccagctttagcaggcgcatattttgccttggatggtcagctccgaccaagtctgcctttagaaaataccccttatcaaaagaaaaaaagataa

SEQ ID NO: 712 - DNA, 627 bp, Enterococcus faecalis
aaaataccccttatcaaaagaaaaaaagataaaaggagacaactcatgtcactcgttagtgtcattattctagcatcgggcaattcacaacggatgggccaaaataaattgttcttaaaatatcaaggaaaaacatttttagagcacacgttaaccttagtgaatcaattagacgtattagaacggattttagttgtttcgcctgagaatcagccagcgtttcctttacctaagaacattcagttgattctcaatcatcaatggcaagaaggacaaagtagcagtattcgtttaggaaccgaacaagctcggggagctggctatttatacttacctagcgatcaaccattgttaacacctaaaatgctacaactcgtgttagataaatgtcagagaaataaaattgtagtgccattacaaaaagatggctgtcctagtagtccagtattattcggtaatcaatttcgacaagaactattaacattgactggtgaaaaaggcggacgcatgatttatgaacgctttccagaagcagttcagatgctgagaatagcgactcctggccgtttgaaagatatcgacacgccagaagagtaccaaaaattaattcaagaaaccaatagttag

SEQ ID NO: 713 - DNA, 411 bp, Enterococcus faecalis
ttcaagaaaccaatagttagagaggaaaaacgtatgaaggacttggtttatttaaattatgcagcgacttcctataaaaaatttccagcaaccattgaggctttgactgcctatttagcagaaaatcagttcatgaattacggaagaaatgcccctttgcttagagaggggcttcctcttttagagacacgtcaattgttagcagacttttttcaggcacccagtgcggctcagattacgtttacgaataacgcaacaacttccttaaatcttgcattagcggggattttacaacctggcgaccatgtgattacaactatgttagaacatcatgcaggtagctttaaagggaaaaaaaaaccccccttttccccccttttttttcccccccaaaaaccctttttttttttt

SEQ ID NO: 714 - DNA, 192 bp, Enterococcus faecalis
aaattgaagggaggcccacatttggctccccaaatggttagtgaaccaattcaaaaattaaatgaagcaaacgggccacgagaatttcccaaaacaggcacaacaaaaacaccgtttatgctaatagcaggaatactggcaagtacatttgccgttttaggtgtaagttatctacaaatcagaaagaattaa

SEQ ID NO: 715 - DNA, 1101 bp, Enterococcus faecalis
atgactaaaaaaatatggtcgcactttcggaaaagcttcacttggtacattttgattggcgtgattgtttcattatgtagtgctttagcaatttatttttttcaacagttgttagatcattatcaaaaaagtttccaactagggttgttagtagcgtatggaacgacaattattttaattcctctattgtcttactgtgaacagaaaccgaaagcttacttaactaatggcatctatttctatttgaagaaattaagtttaataaaaatgagcaagatttcctatgaagaatatctaaaactgggagcgggggctttactacaaaaagtagaagttggtgcagcagctgggagaaatatccacttgaatttttatgggcgcttatttcgagagttaattccagagacgttatttaatttatttttcatagcattgattgataaaaaattattaccagcaattctaattggttatgtgattgtatttattttaaccaaaatacttttgaaaacgctacaaaaaatgaaagaaaaaacacttatttctgaagaagcaatgaatgctactttgatacgagggatgaccgaactagtaacttttagaattaatcgaaaatataaaaaagagattgaaaattacgcgttaatggcagaggaaaatagtcaaaatataacaaaaatgactatgatccatgaatttttctttggcttttttgccttgttagttgcacttatcaaagtaagtattgtcgtacttagttttactaacgtcgtgacgctaagtttaggtggacttgtagcgatagtgatgtatatcgatcgaatttatacgccgatagccatatttaatgttttatttgttcaatataatttggataaagtagcctatcagcgcttggaagatttttataaaaaagaagatgatcctgacttagcggtttccggcaaagcgttacctgaaattcaaacaatttcattaaaagatgtgtgttttagcgtagatagtcaaacgattatgtcccaacaaaatcgacaattttcaatgaataaaacctatggcttgattggaaaaattgggacaggtaaatctcccctgaattaa

SEQ ID NO: 716 - DNA, 501 bp, Enterococcus faecalis
attaaattgagtttaggattattgaagccgacagaagggacagtttatgtgaatcaatttcctctaacacaatttaatttggaagattattatgaaaaagttttttatttatctcaagatgtgccaatatttcaaggaacgttaaaagaaaatattgtatttaatcaagaaatttctgatgaacaagtaattgaagctatgtatcgttttcagttgggggaactttatgaacggttgccggaaggtttaaacactattgtgagtgaaaaaggaatgaatttttctggtggtgaaaaacaacggattgctttcacacgcttagcatttacacaagcagagatccttattttagatgaggcgacttctgcattggacgaaaagaccgaagaaaaagtgttacaagaagtacaaaaatttacccacaataagttgactattttggttactcatcgacctaaaaccctgcgatttgtagatgaaattattgatttaaatgagtga

SEQ ID NO: 717 - DNA, 438 bp, Enterococcus faecalis
ctctttggcgcttcttttgctacactttttataagaattgagagaaaggggcaactgttgatgaataataatgagcaagaattagcggaattttgggatgaatttgcagaagaatatgaagaaattcaacaagaatcgccatttccaattgctcgagaattacgtgatttcttggtccaagaaggcatttttccgtgtcagacatttctggatatcgcaggtgggacgggacgatacttacctttttttcaagagcaagtcacggagtatacgctagccgatatttctcagagaatgttggagattgcggaagcaaaagcacaaagcaacgttgtttttcttcaccaaagccaagaaagactgattgagactgggaaaaaatttcaagtcgttttttcagcgatgaaccctgctttggatacgccgggaaaaagttaa

SEQ ID NO: 718 - DNA, 315 bp, Enterococcus faecalis
accctgctttggatacgccgggaaaaagttaatgcattgtgccaattaagtgaagaatggtgtcttatatttcggctagtggaagagcaagattcgttgttttctccttttgagcaagagagcaacccgcagttaaaatggatggcacaatacaaagcatttctaaaaaaagaacagcgaccttttttcacaaaaaaatttttctttgaagcatcagaagctatttcaaaagactttttccgcagctattttgaagaacaatggtcagttccaattttagaacaacgcgtaccagaaatttttggtttctcatga

SEQ ID NO: 719 - DNA, 477 bp, Enterococcus faecalis
ctgttcgttttttcgatgttccatctccttcttcttttgctatgctatttttgtaaattgttaggaggagaaaaaatgaaaaaaatcggcgctattttatttattggcttattcattgttggtggttatacaggctatcgttattatgcagatacatataagggtgaaaaagcctatgcacaagttcctctagaaattcctgaacgaaaacaaacagtatatgacaatcaaaaaagcatagatggccaatattctttacactatcgactaacttttgttaaaagtaatggaaaaacgcaagttatggactacgaacggacagacaaaaatcctcaacctttggaaccaaatgcttacatagaagcaaccattagtaaaaaaagaatcatccaatctcctgtcaaaattgataaaaaagagattccagaaaaagctttcgcacaattaaataaccgaaaaacaaccagcgataattag

SEQ ID NO: 720 - DNA, 393 bp, Enterococcus faecalis
agaaggaccattgataaactaggggttttaaacaagcaccaagtacctcaacgttcagttttcttctgcgccagtgttttatatctgggcgttattctttcttattttgttggcgatgaattatttggttacttaaccggttctctctcttacactgtcttgctaatttggattttaattagcgctgcggcgtttgttctgtctttaaaacgagggtctctctttgaaaaaagtattaatctccttgcgttaatcattttaggtctcatctttattggcatcttatttacaaattcgttaggcgtcactcttttaacaggcctactgtactttgttattttctttagttatcgtaagaaaaatgattcctttctactctctgatgaaagctaa

SEQ ID NO: 721 - DNA, 198 bp, Enterococcus faecalis
ctaaagaaaataacaaagtacagtaggcctgttaaaagagtgacgcctaacgaatttgtaaataagatgccaataaagatgagacctaaaatgattaacgcaaggagattaatacttttttcaaagagagaccctcgttttaaagacagaacaaacgccgcagcgctaattaaaatccaaattagcaagacagtgtaa

SEQ ID NO: 722 - DNA, 270 bp, Enterococcus faecalis
gaaatgaaaaagaatagtaaatatttaggaagtataacagttatctatttgttagttcttgtgatcgaaacattatgggagctattccataccagtcgcacagaatcaacgaaagtcactaccttattaggaattacgattgataatcgtataagtaaacatgaaatttcaactacttttggtttgacaattaaggtattagtactctatttgttgttattgttagttgtctatattttgactgggttatttggaaaaaagaaaatatga

SEQ ID NO: 723 - DNA, 432 bp, Enterococcus faecalis
ggtattagtactctatttgttgttattgttagttgtctatattttgactgggttatttggaaaaaagaaaatatgattattaagttatcaatattgtatgtgttgtcaatatatgtcgtgttacttgtacatgagtggttacattttattttagccaaattcttcaaatacaatgcttatataaagagagttggtctatacccatttaaagtggtgtatacgaacagaaataatcctctagataatttattgatttcagcgatatctccgcttttcttggttatagtaggaataattttgccattaaattattatactgtgattttaaaagtatcttgtattagtaatatttttaatctcttaccgtttactgcagatggagaaataattttgctttcaatttttcaaatttttaggaggagaaataaatga

SEQ ID NO: 724 - DNA, 519 bp, Enterococcus faecalis
atgaaaaaaagaaaagtgttcattatttttcttgttagtttgattatatttgtttttggttattacttagcgtttaatcaaaataagtatgtatcatataatgacgagacaaaacagtttgtacatactgatacttcaaaaataatggaaaatctggtgaacagacaacaaggaatttattattttggctttccgacttgtccttggtgtctagaattattaccaatactagataaagaattagagaaggaaagtatgaatgcttatgctgtaaatactcgtggtgatgactatacagaaaatgatgatgaattattacaaaaattttatcaaaaatatactggggatgagtcgctttctgtaccttttattgttgctataaataataagaaagaggtgcaggttcatataggcacagtaaagaatcatgatgcgactaaaacaaaattaaaaagacgacaaaaagaagaattatcccaatctttaaatgagatgttaatatttagtgaaagtgaataa

SEQ ID NO: 725 - DNA, 192 bp, Enterococcus faecalis
ctgaatgctttttttattgtctcttgctggtacgtttattcaaaaaattccgagaaaacgttgctacgttttctctttttttatggggtagcagtggctgatttgatagctggagaggtgatttatttattttttctaaaaaataatgagaacacagtgaataacaggctttttctgaatagaaccatttaa

SEQ ID NO: 726 - DNA, 390 bp, Enterococcus faecalis
atagaaccatttaaaaaaagtgaaaaaaaaagtataatgaaacaaggtgtaaataaatgtaaaggaatgtggagaatggacaatcagttaacaacagagttaaaagaacgttacggcattgttttccatgatgtcaatctattagagcaagcttttactcattcatcctatgtgaatgagcatcgctatttaaaattatccgataatgaacgtcttgaatttttaggagatgcagttttagaattaattgtttcacaatatttgtatttaaaattcccagaacttccagaaggaaaattaacgaagatgcgcgcagccatcgttcgggaagatagtttagccaaatttgcgaaagaatgtcacttcgacaactacattttattagggtaa

SEQ ID NO: 727 - DNA, 825 bp, Enterococcus faecalis
aattattgcaaaacgaaagaaggaattgaattgaaaaattcagaagaacatgaaccaaagcaaagacatcatttgattgaatatgcaaatggtccttcgcttgaagaaattaatggcaccatcgacgtgcctaaaaatatgagtttttggaaaacgttatttgcttactcaggtccaggagcattggtagcagtggggtatatggatccaggaaactggtctacttcaattactgggggacaaaattttcaatatttattgatgtcgattattttaatttccagtttgattgcaatgttgctccaatatatggctgctaaattaggcattgtttcacagatggatttagcacaagcgattcgtgctagaactagtaagacgttaggtattgtattatggattttaacagagttagcaattatggctacagatatcgctgaagttatcgggggcgcaattgccttatatttattatttcatattcctttaggtctggctgtgttcattacggtatttgatgttttacttttgttgttattgacaaaaattggttttagaaaaattgaagctattgtagttgctttaattgttgttatttttgtgatttatgtttatcaagtggcattgtcaaatccagtatggggagatgtaattaaagggctggttcctagcgcagaagctttttctacatcacatgcggtgaatgggcaaacgccactgacaggtgcattggggattattggtgcaacagtgatgcctcataatttgtatttacattcttcatgttgtgcaaagtcggtcttcaccaccaggttgtccccgcaa

SEQ ID NO: 728 - DNA, 525 bp, Enterococcus faecalis
attaaacaacaaagaaatttgttcagaagaaaggaaattatgatgattatttggttaaacggtgcgtttggagccggaaaaacgaccattgcacatgagttacaacaaaaacttcccaatgcaatcatttatgatccagaaattattggtagtgcattgatggagttagttcccgaagaaatgaaagaaaatgattttcaggagtatcaggaatggcgttgctggaatgctcatttattaaaacgaatgtccaaagagtctggacggccgattattgttccaatgaccctttataaaaatgaatatgaagaagagctgattggatatctgagacgagcaggcattgacgtttatcattttttgttagcggtcgagaaagaagaaattttacagagattattgaaaagaaatgatggaacttttgaatgggggaaaaataagttgcccgaagtacttgaagttttcgtcagattcagtttaccgagatttttagcaatcattcagctgacacgacagaaattgtag

SEQ ID NO: 729 - DNA, 228 bp, Enterococcus faecalis
aaaagatttgatggagataagaaatcatctgttttacttggtgttgcgaggaattcttctgagggaagggtgtggagagggcgattcatttttagccaagagaagacgatgataaaaatgaaaatgcctaaaatgatgagcaaggtaagatttccgatacttttagcaagtagggtatttttcttagatgatgcagtgacagctttcaatttaaaaacctccaattaa

SEQ ID NO: 730 - DNA, 861 bp, Enterococcus faecalis
ttggaggtttttaaattgaaagctgtcactgcatcatctaagaaaaataccctacttgctaaaagtatcggaaatcttaccttgctcatcattttaggcattttcatttttatcatcgtcttctcttggctaaaaatgaatcgccctctccacacccttccctcagaagaattcctcgcaacaccaagtaaaacagatgatttcttatctccatcaaatcttttttacttttcaattcgaaccatgtttcgaatgattgtgggtatggcttggtccttcctgttttcctttgtttttggtattttagccgtaaaatataaaacggcacgaagagtcattttaccattagttaatttccttgaatctgttccattgctaggttttttgacctttacaactgcttggttacttggtttatttccaggaaatgtgatgggcgcagaagcggttgctatttttgccatcttcacaggtcaagcttggaacatcatgttgactctttatcaaataatggaagttattccttcagatctagtcaatgtgaccgatcagttcaagtacaatgcttgggaaaaattttggcggcttgaatttgtttactcaattcctggcttactttggaacgttattatttctcaaactgcggcttggtttgccttggtggccaacgagcaagcttctgttgcctttcctaaagaaaccaacctttatttaccaggaattggttcttatatccaagtagcattaaatcgagccgactttaaatcctgtttatgggctgtttttgccttattaatcaatgtggtgattttaaactttttagttttttcaacctttagttcgagccacttattattttaa

SEQ ID NO: 731 - DNA, 249 bp, Enterococcus faecalis
cctgtgaagatggcaaaaatagcaaccgcttctgcgcccatcacatttcctggaaataaaccaagtaaccaagcagttgtaaaggtcaaaaaacctagcaatggaacagattcaaggaaattaactaatggtaaaatgactcttcgtgccgttttatattttacggctaaaataccaaaaacaaaggaaaacaggaaggaccaagccatacccacaatcattcgaaacatggttcgaattgaaaagtaa

SEQ ID NO: 732 - DNA, 936 bp, Enterococcus faecalis
ttcgagccacttattattttaaatatggaaacagatgtcgaaagtacaacgccacctaaatccatcatttatcatttattaaaaaaagcaactttaacgaaatacttttcaaaagcttttgtgaaattcagtcatttttggatttacgatttaccaaaagtttggtactttttcaagctagactatttctatcgattactagcaaaattacgccatttcttcaaaacattatggtatgtcagcttaaccattattggggtttattgttctattaagctctatcatttcttgccccatcaagatttcagcatgattcctagattaaccctttatactacgctacgggttaccttggctatggtcgttgctggcattatctttactcccttagcaatctgggttgcgaatgataatcggcgcttaagtatcgttcaaccgattggacaaattttaggctccattccgtcaaatgtttatactccattcattgtgttgattattagtatgggcttcaacaaattagaatggtggattttaccactcatcatggttggttgccaatggtattttttctttaatgtaattgctggctacttagccatccctgatgatattcgtgacgtgaccaaactttttaaattatctaaatggcaatggtggacaaaatttttgatcccttctattttaccttacctcattacagcaattattaacgctgctggtgctgcttggaacgctgatatcgcagcagaaagcattcaatggggcaaaaaatcaatagatgttactggcctaggacaatatattgcggcaaacgatggtgtaaaagataaatctgccttaggaaccttagcgatgtgtttcgttgttggtttatgtatcgcctttgtttggcaacctttatatcgagcagcaaaacaaaaatttcactattaa

SEQ ID NO: 733 - DNA, 375 bp, Enterococcus faecalis
  misc_feature (371)..(371): Nucleotide 371 is "n" wherein "n" = any nucleotide.
gtgatttcccttgacctatctaataagacgatggaaaataaagaattattaagcataaaatcagtatataaagaatttgaaattgaaggacattcagaacatttaaaagtccttgaaaatattgatttaacagttaaaacgaatgaatttttaagtattatcggacaatcaggaacaggaaaatcaacgttgctcagaagtattgctggacttcttcgtacaactagaggtgaaattacttttgaagataaaatcattaatgagcctgatgccaatatcggcatggtttttcaacattttgccctttttccttggttgacagttgaaaaaaatatcagctttggcttagaaaaccgtaaagaaatttcccngtga

SEQ ID NO: 734 - DNA, 1152 bp, Enterococcus faecalis
aagggtaaaacaacagcggcttatttcaccaaatatattttagatgttgctacacaacaaaaaacagccttgctttctaccatgaattcgacattagatggcaaaacattctttaaatctgccttgactacacccgaatctttggacttgtatcgaatgatggcaaccgctgttgctaacgggatgactcattttattatggaagtttcttcccaagcctacaaaactaatcgtgtctacaagttattttttgatgtcggcatttttttaaacattacccccgaccatatcagtccaattgaacatccaacctttgacgattacttttattgcaaacgtcaattgattacacattctaaagtcattgtgttgaatcacgaagctgattattttccattacttaaagaaactgcacaacagcaaaaagtcccagccattgtctatggcagtcagccggctccagaagtagactattcattcgctgtttcttcagaggattccttacgttttatcgttgaaagtcctgcagatgcgttaggattggccggctcttatcaccttcgtttaggtggtgattttaacaaaggtaatgcgttaagtgcggcgattgctagtgtccttgtgggagcttcaaaagaagagtgtcaacaaggaatcgcagcaaccaccgtccctggccggatggaatctttaacgaataccaacggtgcaaccgtctatgttgattacgctcataactatgacagtttgaagaatcttttaacctttgtccgtgaagaacatcctgacggccgcttaattgttcttgtcggtagcacgggagacaaagcgatttctcgccgcaaagactttggtagggttctttctgaattggctgatgttgcagtcctaacaaccgatgacccagccagtgaagatccagcaaaaatttgccaagaaattcaagcccatattaccaaagaaatgcctgtttacaccgttttagatcgtggcgaagcaattgctcacgcattatctttaagcacaacggctgatgatgcgattgtcttagctggtaaaggcgccgacctttatcaaaaagtaaacggcgtagatgaaccttacgcaggagactttgcccttgcggaagctttcattaataaaaagaactaa

SEQ ID NO: 735 - DNA, 573 bp, Enterococcus faecalis
atgaaacaattttttcaaaaagggtcgaaacctaatcaattagttgtcgctttccatggtactggtggcaatgaatatcaattattaaccaccatcgcaaccctttatccagaagcgagtgttataagttacttagggacagaaggtgtaggcgaacagcgacgcttttttgcgccattagtcaatggagcattatttcgtgctaactttgatgagcgagtgacggcgtttatagaagaagtttggcaaccgcaaaagttatacgatgaagttatttttatagggtactctaacggtgccaattttattttaggcctgttagaaaagaacccaactattgctaacactgttattttactgcatccaagcaatttaggctatcaatatgtatctggtgagtttgcgacaaaagtgattgtcacaacaggggctcaggatgagttgagtattccgggacaagttctttctttagctaatcaattaaagaaacattttccagtcgactttttactagtggatggcggtcatggcttatcagaagaagaagtaacgaaaataaaagaagttctttaa

SEQ ID NO: 736 - DNA, 987 bp, Enterococcus faecalis
  misc_feature (976)..(976): Nucleotide 976 is "n" wherein "n" = any nucleotide.
ttgattaggtttcgaccctttttgaaaaaattgtttcatttaataaacctccaagaaaggaattttactatgtatgcacaaattcatcacatctctattttaaatcgattgataaagcctacatttgacttctatcataatacactgggattaaaattactaatgaaaacgatcaaccaagatgaccacaccatgtatcacttgtttttctcaaataatgagcaacgaacaggtaccgaattaactttttttgaattgaatgatggccaagatcaatcctttgggacaaatacgattgaacgaactattttaaaagtaccaacgcgcgcctctttggatttttgggcagaacgtcttgagcaagcgggtatctgccactatggtgtggaaacatttaaccaacacccaattttgcgttttgaagcgcccgataatacgcaaatggcgcttgttccgttacgtgaatttgaaaatgcggaagattattttccagctgagcattccgaaattccagtagaacatgcaattttaggcattgatgcaattcaattacgcgtccaatatgccgtagctaccaaacaacctttagtggattatttacattggcatgaaaaagaaacagtacctttttttgaaactgcgcatgaagtaaccgttctggaaaatcatcatccacagttttatcaagaggtgcatatcattgatgaccgtaccaatccgcttgccattgaaggaattggtggcgttcatcacgtcgcctttggggtggaagatacgcaagaattaacgcaagttgatagcctgttagaggaaaagaattttacaaactcaggaattaaagaccgcgaatttttcaaatcattgtattttagagaaccgaaccacttgttatttgaagtagccacacaaaaaggcctgctagatgccgaagcctatgaaaatcaaagctctaagtgtctagactccccctttattntcctgacttga

SEQ ID NO: 737 - DNA, 2139 bp, Enterococcus faecalis
aaaagacaaaacaataaacgggagggatcgtttatgaatattgaaaaaatgacaaccacgctacaagaggcgattgctgaagctcaaaaagttgcggtgacacgtcaacatcaagaaattgatatcgcacatttatggaaaatttttcttcaaccaaaccattttggacgtaatttttacacagatgctggtttagatgttgacgcatttgaacgagaagtagataacgcgttagatgaatatccaagtgtggcaggcggtaatgtgcaatatggtcaaaatttaagtcaaaatttgttccatttattgcaagaagctgattcacttcgagaagaattccaagatgaatttttatcaaccgaaattgtacttttagctttaatgaaattgaaaaattatcgtttaacaaaatatttaatgcaacaaggcattacggaaaaagagttaagaaaaaatattgaagagatgagaggaggagatcgtgtgacttctcaaaaccaggaagaacaatataaagcactagaaaaatacggtgttgacttagtacaacaagtaaaagcaggaaaacaagatccaatcattggtcgtgacgaagaaattcgtgacgttattcggattttatcaagaaaaactaaaaataatccagtcttaattggtgaaccaggtgttggtaaaacagcgattgttgaaggattagcacaacgaatcgttcgtaaagatgttcccgaaaacttaaaagataaaaccattttttctttagatatgggcgccttaattgcgggagcaaaattccgtggcgaatttgaagaacggttaaaagctgttttaaaagaagtgaaaaaaagtgatggcaaaatcattttattcattgatgaaattcataatatcgtcggagctggtaaaacagaaggcagtatggacgccggaaatttattaaaaccgatgctagcacgtggtgaattgcatttaatcggtgccacaacgcttgatgaatatcgccaatatatggaaaaagataaagccttagaacgtcgtttccaaaaagtattagtcaaagaaccaacagtagaagatacaatttctattttgcgtggcttaaaagaacgatttgaaattcaccacggcgtgaatattcatgacaatgctttagttgctgccgctactttatccgatcgctatattactgatcgtttcttaccagataaagcgattgacttagtcgatgaagcaagcgcaacgattcgagtggaaatgaattcgatgccaacagagctcgatcaagtaacacgtcggttaatgcaactagaaattgaagaagcggccttgaaaaaagaatcagatgatgcaagtaaaaaacggttagccaacttgcaagaagaattagcagatttgcgtgaagaagccaactcaatgaaaatgcaatgggaaacggaaaaagaagaagttaatgcggtttccaataaacgtgcagagattgataaagcaaaacacgaattagaagatgctgaaaataattatgatttagaacgagctgctgttttgcgtcatggaacaattccgcaattagaacatgaattgaaagaattggaagaaaagaacgctaaagataacgtcaaaatggtacaagaatcggttactgaaaacgaaattgcgcaagtggtcggtcgtttaactggcattcctgtgacaaaattagttgaaggcgaacgagaaaaattaatgaaactgaatgaaacattacacaaacgtgtgattggtcaagatgaagccgtcgatgctgttagtgatgcggtgattcgttcaagagcaggcttacaagatccaaatcgcccactcggttcgttccttttcctaggaccaactggtgttggtaaaacagaacttgctaaagctttagctgaagatttgtttgattctgaagatcatatggtacggattgacatgagtgaatacatggaaaaacatgccgtgtctcgtttggttggtgcccctccaggctatgttggttatgaagaaggtggccagttaacggaagctgttcgtcccaaaccccttattcggttggtcttttttatacgaaatgaagaacgcaccccgaaggtcttaatatccattacaagtttagaagatagtcgttga

SEQ ID NO: 738 - DNA, 654 bp, Enterococcus faecalis
  misc_feature (643)..(643): Nucleotide 643 is "n" wherein "n" = any nucleotide.
gaggtgtggaagattagtaacgagaacgatatattcaaaaaaagaaaaccattacctccaaaaaaatcggaagagtctcaacctgaactgacaccttggcaaaaacaaaaccaagaatatttgaagaagcaagcggaagaagctgcttcaaaaggtgaaaacgaacaagcagaagtcaccatcactttacaagaacaaagtcaagaagagcctcaacaacatcttccacaagaaacagtggaagaagaggagcattttgcagatcgtttaccgaacgttaagaaaacacggaacaagcgcttatataggcgtttagcctttattttaacttgtttagggacagccattttagtggcattgtattttgtttcgcctcttagtcgattgagtgaagtaacagtttcaggtaacaaaagtgtggagagccaagcgattattcagcagtcaaaacttgaaacgggcagtggcttatgggagcagtattcaaatagaaattatttttctgcaaatattcagaaaaagtttccaattataaaaaaggcgaacattaagttaaatggtattaattcatttaaaattgatattcaagagtatcaaattgtcgctcttgctgcgactaaaggcggctatcatccgattttanaagaatggtga

SEQ ID NO: 739 - DNA, 225 bp, Enterococcus faecalis
ataatcgcttggctctccacacttttgttacctgaaactgttacttcactcaatcgactaagaggcgaaacaaaatacaatgccactaaaatggctgtccctaaacaagttaaaataaaggctaaacgcctatataagcgcttgttccgtgttttcttaacgttcggtaaacgatctgcaaaatgctcctcttcttccactgtttcttgtggaagatgttgttga

SEQ ID NO: 740 - DNA, 1113 bp, Enterococcus faecalis
aagaaagtgaaatgtgagaaaatgaagatactagtaactggtggtggcacaggtgggcatatctatcctgcgttatccttcgtcgaacacgtcaaaaaagaagcacctgcaacagaattcttgtatgtgggaacagaaaatggtctagaaagtcaaattgtgccaaaggcgaaaattccatttaaaacgattaaaattcaaggattcaagcgttcgctaagtcctcaaaattttaaaacaatttatttatttttaacaagcattaataaagcaaaaaaaattattcgtgaatttcaaccagatgtggtcattggtacaggcggttatgtttctggtgcagtggtttatgcggcccaccaattaaaaataccgacaattattcatgaacaaaatagtatccccggaatgacaaataaatttttaagtcgttatgtggataaaattgcgatttgttttccggatgtcgctagttttttcccgaaagaaaaaacaattttaacagggaacccgcggggacaagaagtcgtaacggtggaaaagtcagctattttatcagagtttggcttggatccagcaaagaaaacggtggttttatttggcggaagtcgtggcgccttgaaaatcaatcaagcgtttgaacaggcctttcctttgtttgaagagagagagtatcaagttttatacgcttcaggagaaagatattatcaggaacttcaagaaagtctaaagttttctgaaaagaaattgacaaacataagtgtgcaaccgtatattgataaaatggttgaagtgatggctaataccgatttaatggtgggacgtgcaggagcaacctcaattgcggagttcaccgcattaggattaccagcaattttaattccgagtccttacgtcacgaatgatcatcaaacgaaaaacgcgcaaagcttagtaaaagttggtgctgttgaaatgattccagatgcagaattgaccggcgctcgtttagttgcggcaatagatgatattttattaaacaatgaaaaaagacaacagatggcaacggcgtccaaaggggaaggcatcccagatgcaagtgatcgtttgtatcaagttgtgaaaacgttagtctga

SEQ ID NO: 741 - DNA, 699 bp, Enterococcus faecalis
attggaaatcaagtagagtttcaaacgttagccaaaacaacaggtgccaaagtattgcctttttcaacgaaagaagcagtagaaggggcttatcttttagatgggaaattatatttcaatgaagaatatattatgcccgccgatgagctagggattcctggcagtcacaatattgaaaatgcactcgcagcgatttgtgtagctaaattaaaaaatgtatcgaatgctcagattagacaaactttgacaaacttttcaggcgttcctcatcgaacgcaatttgttggcgaagttcagcaaagacgtttttataacgattcaaaagcaaccaatattttagctacagagatggcgttaagtgggtttgacaaccaaaagctacttttacttgcgggtggcttggatcgcggtaactcatttgatgaattggttcctgccctgttgggactcaaagcaattgttttgtttggagaaaccaaagaaaaattggcggaagctgctaaaaaagcgaacattgaaacaattttatttgctgaaaatgttcaaacggcggttaccattgcctttgattattcggaaaaagatgatactattttactatcacctgcttgcgcaagttgggaccaatacccgaattttgaagtacgcggggaagcctttatgcaagctgttcaacaattaaaagaaagtgaaatgtga

SEQ ID NO: 742 - DNA, 384 bp, Enterococcus faecalis
ggccgtttatctattggagaaaatgggtgtgccggcgtttatccatctatgttagcaaccatcgttgcaccaactgttggaattgatgtctttagtttacaatttattttaatgttagtagcagttgtcacaatcagttcatttggcgtatccggtgtcggcggcggagcaacctttgcttctctaatcgttttaagcgcaatgaacttaccagttgcaattgttggtttagtaatttcaattgaaccacttattgacatggcgcggacagctgttaacgttaacgatagtatggttgcaggcgtgttaacaagtgctcgtattcatgaattagatcgtgatgtcttaaatgatcgcgacgttgtcttagatgcaaatatctaa

SEQ ID NO: 743 - DNA, 285 bp, Enterococcus faecalis
atacgagcacttgttaacacgcctgcaaccatactatcgttaacgttaacagctgtccgcgccatgtcaataagtggttcaattgaaattactaaaccaacaattgcaactggtaagttcattgcgcttaaaacgattagagaagcaaaggttgctccgccgccgacaccggatacgccaaatgaactgattgtgacaactgctactaacattaaaataaattgtaaactaaagacatcaattccaacagttggtgcaacgatggttgctaacatagatggataa

SEQ ID NO: 744 - DNA, 405 bp, Enterococcus faecalis
ctaaattcaaaaggacgtgaaggaatgttttcaaaccaagtaaagattatgttatatgtgaataatgttgaggaatctagtcaattttggcaaacgtttggctttgttgaaaaggaaagaaaggaagttgacggcacattggtggtagaaattgcaccaagtgaatcagcagaagcgattattgttttatatgatttggcctttattcaaaaacattcaccagaagtggcggggaataccccttctttaatgtttgctagcgatgatatcattggtctctataaaaaaatgcaagaggctggcgttactgttggtgaaatggttcaattgccaacaggcttagtttttaattttgcagataacgatgataattactttgctgtgatggggcaagaaagtaaataa

SEQ ID NO: 745 - DNA, 1158 bp, Enterococcus faecalis
gcggaggtaagcggtatgcgtaaacgacatgcaaagaaaagacatggaggagtgaattggctttttatagtatgtttgttggtggtgattggtggtagtggttatttaataaaaacgttctttttcactagagattcacaagttagtcaagaatcgaaagtggtcttggaagaagatcgccgaagtgataattatgcgaatttaacgaaagaaatagttgcaccagatagtggcgaacttgatcaaaaaattcaagaaacaaattatattggttcggctttgatcattaaagatgatcaggttttagtaaataaaggatatggctttgccaattttgaaaagcaacaagccaacacgccaaacacaaggtttcagattggctcaattcaaaaatcttttaccacaaccttgatcttaaaagcaattgaagaaggtaaacttacattagatacaaaactcgctacgttttatccgcaaattcaaggtgctgaggatattacgattagcgatatgttgaatatgacaagtggtttaaagttatcagcaatgcctaataatatcgttaccgatgaagaaattattcaatttgttaaacaaaataccattcaagtcaataaaggaaaatacaattattccccagtaaattttgtccttttagcaggaatgttagagaaaatgtatcaacgtacctatcaagaattatttaataatctttatcacaaaacggctggtttaaagaattttggcttctatgaaaccttattggaacagcccaataattcaacaagttataaatggacagaagataattcatataaccaagtgctctcaattcctgcagctagttttgcccatgaatttgggactggtaatgtggatatgacgacaggtgatttgtattggtacttacatcaattaacgagtggacatttagtttccaccgcacttttgcaaaaattatggacgtcttctcagcaaagctcttatcatggcggcatctatgttcatgataattatttacgtttacacggcgttgaagcgggtcaacaagccctggttttattttcaaaagatatgaagaactgggtcataatgctaactaactgtgtgaatccgcgacatacaaagaaaataatggttccgtggtccatgatgtaa

SEQ ID NO: 746 - DNA, 507 bp, Enterococcus faecalis
ttgacgaaccatattgttttatttgaaccacaaattccagcaaatactggaaatattgcacggacatgtgcagcgacgaatacaccgttgcatttaattgaacctttaggattttcaacagatgataaacacttaaaacgtgccggattagattattggaatgatgtaaatattacgtatcataaagatttggctgcctttttagcccatgtggcaggcaaacacttgcatttagtaaccaaatttgctcaccaaacatacagtgaggtcaattataatgatggcgaagaccattatttcctttttggaaaagaaacaacgggcttaccagaaacgtttatgcgagaaaacgaagaaaagtgtatccgaattcctatgaacgatgaacatgtgcgctcattgaatctttctaacactgccgcactaattgtttatgaagccttacgtcagcaaaattttccgaacttagaactgacgcatcattatgaaaatgataaattggattaa

SEQ ID NO: 747 - DNA, 657 bp, Enterococcus faecalis
agagataaagaagtttggagaagttacatgaaattatattttacacgacatggaaaaactgaatggaatcaacagaaacgatttcaaggaatgacaggagattcgccgttattaccaactagttatgacgaaattaaacaattaggccaatatttacaagatattccgtttgaaaaaatttattctagtccgctattacgtgccaaaaatactgcgcggggaattcaacaagaattgactcatccagttgaaattgtttatacagataccttaaaagaattaggtttaggtcgtctagaaggacaatatattgaagaaatgcgtaatttttatggagaagaattagatcatttacggcatcgtttagatttgtatgatccaacaatttttgatggtgaaccaatcgagcaagcgattcaacggatttcagaaacagttgctgaagcggcgaaacagcacgaaggtccagttctatttgtcggacacggagcagcgctgacggcggcaatccaagcgatggctggtaaaccattatcagaattacggacaatgggcgggctgttaaacaatagcctctcaatccttgaaaccaaagaggcatcaaggaacatgccgtacgacttaacgttatggaatgatacgtctttccttagctaa

SEQ ID NO: 748 - DNA, 375 bp, Enterococcus faecalis
ccttcctttggtgaagactgtcaaacgtatacaacgattgtttcaatattacctgaaattacatcagaaaatctacgcccgtggtttttccgagtaacatttaattactacattacgatgtatcgaaaaaagaaacgagaacgcacttttgtggcaaacagccatcctgtgcaatcaatagaaaaaatggaagggcaagagttattattattgatcgattccttaaaagatgaggaacaagaactagtacttttgaaatattattatcaattatcgtatgccgagattgcgttgattttagaattatctgttgaaaatgttcgcaaaaaattgtatcgcacacgtcaaaaattaaaaaaagaactggaggaatag

SEQ ID NO: 749 - DNA, 420 bp, Enterococcus faecalis
aaatgttcgcaaaaaattgtatcgcacacgtcaaaaattaaaaaaagaactggaggaatagaagtggatttaaaaaaaagtattcgtaaagcgaaaagaaaacaatttatcgtgattggtgccataaccgttgttagttttgccgtattgtttgtcggtttttttgtgggaatggataaactttcgacgaaaaactatcataccctactagaagtaattaatgatcaagaaatgattgcttcaccaaacactcaattagattcccaagtaattgctaatagttcgccttttgggggcgaagttgtgaccaatcgttcaaaaaatattgatggttacacggtggagtggagtaatttacgtagcagatatagctttttcagaaattcgattgactggaatgaagtctatcctggtagctat

SEQ ID NO: 750 - DNA, 921 bp, Enterococcus faecalis
aaggatcgtagtatatttatgaacacattttggaagtcgtttcctgacgttgaacgttctttaacggaaacatgtgaattaattgaacaaacgttgcatacacgcaacgaagacattgaagaagccttagtaactttggctcgttctggcggcaaattattacgccccgcttttttctttctttttgctcaactgggtgatgaagaaaaacaagagaaacaacaactattaaaaatagctgcatctttggaaatcctacatatggctacgttgattcacgatgacattattgacgattctccattgcgccgaggcgctgtgactattcaatcacaatatggtaaagacgtggctgtttacacaggtgatttactattcactgaattctttactttgattgcagatgccatgaatggctctgaatttatgaaaatcaatgcacaaggaatgaaacggttattacttggtgaactcgatcaaatgagtcatcgatttgaccgccgcatgtcgattcctgcttatttaagaagtgtcaacggcaaaacagccgaacttttttcactaagctgtcttgaaggggcctatttcggtcatagttcaaaagaagtccaacgtttagctaaacgaattggccgtcatattggcattgcttttcaagtctatgacgatattttagattatactgccgacacggaaaccttgaaaaagcccgctttagaagacttgtcacaaggtgtttatacgttacctcttctcttcgcttatcaagcagcacctgacgtattcagcccttatttggataaaggacgcgccattaccttagaagaggcagctgaagttgcggcgctagtcaatgactatcatggcgttacagaagcacatgcttttgctgaccaagtaacgaacctagcagtgacttaa

SEQ ID NO: 751 - DNA, 918 bp, Enterococcus faecalis
cggagggatagtttgaatcgagaaatattttttgaattagtagaattaaaagcaaaaacagctagtgttttgccatttttgttaggaatttgttttagttggtaccaatatgggcggcttcatgttggttatgttttaatttttttcattgcgatgtttatttttaatatggcggtcgatattttagataattataatgattaccatcatgccacagaagttcatgattataaggaaaaaacgaatattatcggtcgagaaaatttatctttgccattaatacgcaaaatgattttttggatgattctcgtttctgctttaatggggattgggttgtcatttattgtcggctggccgttattaattatgggtctttattgttacttaattggtattttttattcatcaggaccgaaacctttatctagtctaccattaggggaagttttctcaggatttacaatggggttcatgattacccttatttgtgtctacattaatacgtttgaagttttcaattggtcagcagctaatttatgggggattttcttagtcgccttacctaacacttgttacattgctaacttaatgttagcaaataatatctgtgacttagaggaagatgaaaataacaagagatatacattagttcattaccttggcaaagcaagttctttgaaattattcgtcggattaaatacaatagcaatgttagccattttgttagctgtcggtttaggattaaccccgccaacaatgttactcatgcttttaactttaccttttgtacggaaacaaacccaagccttactgaaggaacaagtgaagagtaaaacatttgtttgtgctgtgaagatcttagctgtgggagcaactgcacaagtgctattttttgccataggtttgtggtggctgtaa

SEQ ID NO: 752 - DNA, 270 bp, Enterococcus faecalis
aaaatttacagccaccacaaacctatggcaaaaaatagcacttgtgcagttgctcccacagctaagatcttcacagcacaaacaaatgttttactcttcacttgttccttcagtaaggcttgggtttgtttccgtacaaaaggtaaagttaaaagcatgagtaacattgttggcggggttaatcctaaaccgacagctaacaaaatggctaacattgctattgtatttaatccgacgaataatttcaaagaacttgctttgccaaggtaa

SEQ ID NO: 753 - DNA, 834 bp, Enterococcus faecalis
gtttgtggtggctgtaaattttttatagagtggaagggaatcaaaatgaataagaaacatgttgttattttaggtgctggttacgcaggcttaaaaacattacgcgaattacaaaaaggcgccaaagacgtcgaaattactttagtggatcgtaacaactatcactacgaagcaacggatttgcatgaagttgctgctggaacacaaccagctgaaaaaatcacatacaatattatggatgttgtcgatgaaaaaatgaccacctttatccaaggaacagttaaaacaattgatgctgcaacacaaacagttgctttagaagatggccaaacaatcaattatgattacttagttgtttctcttgggtttgaatcagaatcatttggtatccctggtgtgcaagaacatgctctacaaatggtagatgtgaaaacggctttaaacgtgtatgaacatatccaagaacaaatgcgtcaatataaagcaactcaaaacgaagaattcttaaaaattgttgtctgcggagcaggctttacagggattgaattattaggttctcttgttgaaaacaaaccaaaatttgctgaaatcgcaggtgtctcagcagatcaaatccaaatttattgtgtcgaagcagttactcgcctattgccgatgtttaacgaaaaacttgcgaactatggtgtgcaattattaaaagattcagctattcatttattattaggtaaactgattaaagaaatcaaaccaggcgcatttgtttatcaagataacgaagcaggcgacttggcagaactttctgctaaaacaattatttggaacaacgggtgttag

SEQ ID NO: 754 - DNA, 525 bp, Enterococcus faecalis
ttaaagaaatcaaaccaggcgcatttgtttatcaagataacgaagcaggcgacttggcagaactttctgctaaaacaattatttggaacaacgggtgttagtgggagccacgttgtaggcgattctggctttgaagctcgtcgtggtcgtgtcatggttcaaccagatttaacagatgcgaaccatagcaacgtctatattattggtgactgctcagcagttatggatacagaaaccaatcgaccttacccaacaacagcacaaatcgccttgaagatgggcgctcatgctgctaaaaatattcaagcacaattgaaaggggaagcaactaaacctttcagctttaaatcacaaggttctgtttgttctgtcggaaatacacgtgctttaggaatcgttggtaaaacagacattaaaggatacccagcttcattcatgaaaaaaattatcatgaacaaagcgctctttgaaacaggtggtaccaaagaaatgatggctaaaggtcgtttcgacttataccattaa

SEQ ID NO: 755 - DNA, 294 bp, Enterococcus faecalis
ttactcgggaggatttatgtgatgaaatttattaaatttttagttgtgacagcaattgttattggtggtggtttatttggggccaagttttacgcagagaagaactctggcgaattagctggtgtgttagatcaattaaatccattggttaaagaaggaaatgtgtatgttaaaacaaagaaagccgatagcgttaatggctatggaattgctagttatacgcaagtagccgcagatgtggaaggcaagaacgcgagaaataactttcacaagtgttcccaccgaccggggtaa

SEQ ID NO: 756 - DNA, 189 bp, Enterococcus faecalis
gaatcaagaaattcaattattaagtcaattattgatagaagagtagtgttttgttatttattcaaaataacaaaaatacgacataagtctgaggaaaaactggtcgttgcgcccgaggaaggattgtttaaaacttgctatactttggaagaagtaacagagaataattactcgggaggatttatgtga

SEQ ID NO: 757 - DNA, 564 bp, Enterococcus faecalis
ctaaaagagaaaaggggtatgaaaatggttagaacgaaggtatatacaaaggaaaaaatcttaaacgtagctgaaaaaattttagtagataaaggtttttctaatttaactgctagaaatattgcagatgctatggggatttctacgcagccaatttatttagaatttgtcaacatggacgatttaaaacgaaccttaattaaatcgttatttcatcgtatgcaattattttataaagcagatgtcggtgcctcagacccagtgattgcattgggtctgaactttatattatttgcccaaaaacatcaaaaaatctatacggcgttatttatgaaagcacatggttatgaagaagaattgcagcaaatgcttcaaactttttttgaagagcgtttattattggataaaaaatatgtacaaatggacaaaggaaaatttgtcgaattatttcctaaaatggtggtaatctatttaggtttagccacagcggttacaatgaaaacaattgacttaactaagaatcaagaaattcaattattaagtcaattattgatagaagagtag

SEQ ID NO: 758 - DNA, 1341 bp, Enterococcus faecalis
aggagttattttttaagagaaaaacagaggagagtgttatttatgttagataaactgactgtttggattgaaaatcatctagctggaccaatggctaaaattgccaatcagcgccatttacgtgcggtgcgggatgggattattgcgacattacctttaattattgtcggttctttttttctaattattgcgtttccgccgttaccagaatcttggggcattactcaatttttaacaagtaatgctgctacaatcttattgccttaccgaatgacaatgtacattatggcgttatatgcgacttttggcattggcgctagtttagcgaaatcatataatcttgatcaagtctctggagggattttggctacgattgcttttttattaacattagtacctgtagcgattcctgaagaagccagtaaagcagctggcgtttctgggtttgttttaccaatggctaatttgggtggtgcagggatgtttgtcgggattgtgacgtcaattattgctgtcgaaatctatcgagtgacagataagtctaagttcaaaattacaatgcctgataacgttccacctgctgttgctcgttcatttgaatcattgactccgactttaattgtcatgttattgattggttcaatcacttattatttaggctttgattggcacacatttgtagggaacttagtgggaccactagttcaagcagcggactctttattgagtgtcttgctgttagtctttttaaccacatttttctggttctttgggattcacggcgcttcaatcgtaggatcgttggcgcgtcctctatggctacaactattagaggaaaacacgactgctaaagcagctggcgaagcattacctcggattgcggcagaacctttttaccaatggtttatttggattggtggtgctggagccacaattggtttagctatattattagccttccgggcaaaatcagaatatggttcaaaactaggaaaagctattttagcaccgtctatttttaatattaatgagccagttattttcggtgtaccgattgtcttaaatccgattttaatgattccttttatctttgcaccaatggttttagcaacgattgcttggtttgccacaaaattaggtttagtaagtgaagttgtctttaccgctccttggaccttaccaggaccaattggcgcctttatggcgacaggcggcgattggcgtgctgctgttttgaatattgttttaattctagtggcaattttgatttactatccgttctttgtagcttatgataaaaatgagcttgccaaagaacaaggcaaacaaatagaagaataa

SEQ ID NO: 759 - DNA, 513 bp, Enterococcus faecalis
gggggaatcacgatggagcagatgcgtgtttatattgcgaaccttggaaaatacaatgaaggagagttggtgggggcgtggtttactccacctgtcgattttgatgaagtcaaagaacgaattgggttaaatgatgattatgaagaatatgcgattcatgattatgaactaccctttgagattgatgagtatacatcaattgaggaaattaatcgattgtgtggcttagcggaggaattagaaggaacgccaattggtgaggttgcttcagagattcagcacgctttctttaattctttcgaggaaatggtggagcatgtggatgatattgtgtattatccagattgtaatgatatggaagatttagcttatcaaatggtaaatgaggggtatttaggagatgctccagaaaattttgtaaggtatttcaattattcctcttttgctcgcgacttggagattgagggaaactatttagttactaatcgaggtatttttgaatatccaatctaa

SEQ ID NO: 760 - DNA, 246 bp, Enterococcus faecalis
tggaaaagaaaggaaagtgacgagatgaattttggacaaaatttatatcaatggtttttgaccaatgctcaatccttagtcttactagcgattgtagtcattggtttatttttaggatttaagcgggagttttctaaattaattggctttttggtgattgccttgattgcggtaggtttggtctttaatgcttctggtgtgaaggatgtcttactcaatttatttaaccgaattgttggtgcataa

SEQ ID NO: 761 - DNA, 183 bp, Enterococcus faecalis
aaaaattttggaacaacaaagtatggcaatcgaaaatttgattgtatgaaaagaggaattttgatgggaattgtaaaagatattttattggtatttggtggcagtatgcttggtgttactgtgatgtgcttgatgcatgcaagtacagcagcagaccgagtaatggaaaagaaaggaaagtga

SEQ ID NO: 762 - DNA, 1209 bp, Enterococcus faecalis
caccttgaatttggaggtgagaacttggcacaacggaatttagattatcgattattaaaagaccgacgtaatgaatatggtgtttcacaaaataaattagctatcgcttgtgggcttagtcggacctatttaaatctgatagaaaacggtggcgtaactgcctctacaaaaaccatgagaaaaatttttgaccaactggaaagttttaatcccgatttacctttaacgttactgtttgactatgtaaggattcgtttttccacaacggatgtgcggaagattattcaagagcttctccatctgaaatttgagtatatgcttcatgaagattacgccttttactcctatcaggaacaatatgtcatgggagatattgtagtgatgttgtctcatgaagaagataaaggtgttcttttggaattaaagggtcgtggttgccggcagtttgaaacttttttactcgctcaaaagcgtagctggtacgactttttcgaagattgtctaaaaaccggtggtgtgatgaaacgcttggacttggcaatcaatgatcgagtggggctactggatatttctgatttaacgaaaaaatgtcagaaggaagcatgtatctccttgtttcgtacctttaaaagttatcgttccggggaacttttaaaagctgatgaaaaggatggcatgggaaataccttatatatcggcagtctcaagagtgaggtttatttctgcttgtacgaaaaagattatgagcaatatatcaagttagggattccattagaccagactgagacgaaatatcgttttgagattcgactgaaaaatgaccgtgcttatcatgcgattcaagatttgttaaaaggtcgtagcattgagagcaccacgttttctattatcaatcgttacttgcgatttgcggataaggtggaaggcaaacggcgaaccaactggcccttgaatgaacaatggggtcgctttattggacggaatcggaaggaaattcaattaacttctgaaccgaaaccttataccattgaacgaaccttgaattggcttggacgtcaagtcgcccctacgtggaagatggcaaaggaattggatcggctgaatcagacaacgtatatacaggatatggtacggaatgcacggttatcagaccagcataaaaaaattttggaacaacaaagtatggcaatcgaaaatttgattgtatga

SEQ ID NO: 763 - DNA, 258 bp, Enterococcus faecalis
tgggtgattggcaagattcactcagatccggaactgaaagaagaattacgtcagcttaattttgatattcgcaaaaatgttgtgaaagtcactggtgattcgtatgtaatggacgagggaacagatactcgaattgagctgaatcaagtcatcaaagaattagaacggattgcgtaccttgcgaaagaatcggatatccgtcaatacttgtttgagataaaagcagaactggaagtaggtggcattactgaagggtag

SEQ ID NO: 764 - DNA, 618 bp, Enterococcus faecalis
cttccgccggttaagatctgtacgtctgatcaaaacctcggaaacttgttaaataccaatccttccaaccgaggaatgagtgaacaagtctatggttcagatgagtttgccccaaccgtaacaggcgatgaaggaattaaaatcgcactaccattaaatgatggaatttctgtaatgggtatgttgccgggaaattttgaacaaggtaatcggatttacgaggtaactggaacagctcccaccttgtcaacgaagcaagggggaacgaagattatgattcgaaaaaataaaatagaatatcaagaggttaagccagagggcagtgtgaatctggcttttcctcattccaaaagtcgccgaggtcgtcttgaaaagcaaagcgtccatacgttactaacaggagatcaacaagcagtcattacagaccagtatcaaattcggaagcttacaccaagagaatgttggcgtcttcagggttttcccgattggacttttgatcgagcctctcaagtcaattcagatagtcagttgtataagcaggccggaaactctgtaacagttccggtcatttttgatattgccaagagattaaaggaggtgaaaacggatgatttatga

SEQ ID NO: 765 - DNA, 1671 bp, Enterococcus faecalis
aaaaataacgaaactggcgtttttgcaatcggtggtttaggcgaaattggaaaaaacacatatggggtacaattccaagatgaaattatcattattgatgctgggatcaaattcccagaagatgatttacttgggattgactacgtgattccagattatagctacatcgttcaaaatttgcataaagtcaaagcactcgttattacccacggtcacgaagaccatattggtggcgttccttatcttatacgtcaagcgaatatcccaatctatgcgggaccactagccttggctttaattaccaacaaactagatgaacatggtttattgcgagaagcggaattacacgaaattaatgaagatacggtgattcgttttagaaaaacagcgattagctttttccggacgactcacagtattcctgatgccttgggcgttgtggttaaaacgccttctggtaacattgtcgcaacaggtgactttaagtttgactttacacccgttggtgagccggccaacttacacagaatggcgaaattaggtgaagaaggcgtcctttgtcttctttcagacagtaccaatgctgaaatacccacctttacaaaatccgaaaaaacaattggaacctctattttaaaaatctttgaaaaaattgatggtcggattatctttgccagttttgcttcaaacattttccgtttacaacaagctgctgatgcagccgtgaaaacaggtcgcaaaattgctgtttttggtcgtagcatggaaaatgccattgtcaatggcgaacgcttaggctacatcaaagtgccaaaaggaacgtttgtcgatgcggcggaactgaatcaattgccagcaaatgaaacaatgattttatgtactggctctcaaggagaacctatggccgcgcttagtcggattgctaacggtacacaccgccaaattagtattcaaccaggcgatacggttgttttctcaagttcaccaattcctgggaatacgacaagcgttaaccgtttaatcaacttattatctgaagccggtgcagaagttatccacggaaaaatcaataatatccatacttctggtcacggtggacaagaagagcaaaaattaatgcttcgtttgatgaagcctaaatatttcatgcctgttcatggtgaatttagaatgttaaaaatccatgcttcgctcgctcaagatacaggggttcctgaagaaaattgctttatcatgggcaacggcgatgtcttagctttaacggctgatagcgcacgccctgctggtcacttcaacgctaatgacgtgtacgttgatggaaatggtgtcggtgatatcgggaatgttgttttacgggatcgtcgtatcttatctgaagaaggtttagttttagcggtagcaacagttgatattaaaaataaagaaattatggctggtccagacattctttcccgtggttttgtctacatgcgtgagtctggtgatatgattcatgaaggccaacgtcttttattcaatgctctacgtgaagcaatgaaagataaaaactgtaccgaagcaaaattaggcgaagccatgacgaccgctttacagcctttcttgtttgaacaaacagaacgtcatccaatgattctgccaatgattatgactgccacagttagtgatcaataa

SEQ ID NO: 766 - DNA, 267 bp, Enterococcus faecalis
atattctattggaagcgagcaaagttacgactatttatgtgcaaatgcacgaggaggaacaaaagaatggaacaaggaacagtaaaatggtttaacgcagaaaaaggttttgggtttatctcacgcgaagacggaagcgacgtattcgtacacttctcagctatccaaggtgatggtttcaaaactttagaagaaggtcaagcagtgacttttgatgttgaagattcagaccgtggccctcaagcagttaacgtagaaaaaaactaa

SEQ ID NO: 767 - DNA, 609 bp, Enterococcus faecalis
attcaagagttttgggagattttgttacgtactggctcaaaagaagcagacgtgatgactgttgccgcaacgctgttaaaacagtttaagcaactttcttatttgcagcaagccacgttgaacgagttaatggctattaaaggcattggccaagtgaaagccattgaattacgtgcggccattgaattagggtgtcgaatttatcaaagtagtcaaatcaaatttggcaaagttacatccagtcaacaagtcgctcaacgattactccaagagatgaaggggctgcaacaagaacatttaatttgtatttacttgaataccaagaatgacattatccaacagaaaacgattttcaaaggatcactgaatcaaagtattgctcatccacgcgaaatttttcgggaagcggttaaatattcttctgctcgcatactattagctcataatcatccatctggcaatccgacaccgtctccacaagatatccaatttaccaaacgaatggaagaatgtggcgaaatgatggggattcaattgttggatcatattattcttggtgatagcggatacattagtttgagagaagagaatttttttgcttcagaatga

SEQ ID NO: 768 - DNA, 834 bp, Enterococcus faecalis
gatggtgcacaaacgaatcctatgattgggatgctcatcacgcaaatcaaagacgcatcgctttctgggaagattcaagtagatgccaaaaaagaaaaagcattcaacttagagatgaaattaaaagcgatgggaatggatgtaccgatttcattggttggatcgttagataacgagggcaaagagccaaaactctatttagcaacagatatgatggaatatattgtcgctgtcgcagactcaatgactgacggtgctatcgatagttctcagttagatacagaaaaactaaaaggaaaatacattgatcttttagccatgaacgaggaaagtacgaaagaatggcaagatacaatcaaagagtatcaagaatcggaaaaagaacgaaaacagtctgctaaggaatacaaagagtttttagaaggattagacaaggatacgttcgagaaaaaaggggacaccattacccatacgtttacaaaaaaagaattacaaaagttaatcaaaattacgacagaaacatctgaaaaaggtaaagaacaagatcctttcgaaaaagtcaaagatgtttctgccaaagtttctgttaatacaaaagaaaataaaacaaatatgttgattaatgtgaaaccgcagcaagacaagaacgttgatatgggacttgaatcattatctagtaaaattagcattacacaaaaagccaaaaaagcgacgatttcaatgcctaagaaagaaaatattttatcagaacaagaagttgaaaaaatattttccgatagcacctctatgacaggtctatcgactgaagacacgactgttgcgatcaatcaataa

SEQ ID NO: 769 - DNA, 759 bp, Enterococcus faecalis
gtgaaaaatcaacatttaactacgtcacaaggaagtccagttggcgataatcaaaattcgctaactgcaggagaatttggtcctgtcctaatccaagacgttcatttattagaaaaattagctcattttaatcgtgagcgcgtaccagaacgggttgttcatgccaaaggtgctggtgctcatgggattttcaaggtgagccaatcaatggcacaatatactaaagccgattttttatctgaagttggcaaagaaacacctttattcgctcgtttttcaactgtagctggagagttaggttcatcagatacattgcgtgatcctcgcggttttgcgcttaaattctatacagacgaaggaaattacgacttagttggcaataatacgcccatttttttcattcgtgatgcaattaagtttccagattttattcatagccaaaaaagaaatccgcggacgcatttgaaaagtccagaagctgtttgggatttttggtctcattcaccggaaagtcttcatcaagtaacaattttaatgagtgatcgtggcattccgttgtcgttccgtcatatgcatggttttggtagccatacattcaaatgggtcaatgctgctggagaagtattttttgttaaatatcacttcaagacgaatcaaggaatcaaaaatctagagagtcaattagcagaagaaattgctgggaaaaacccagatttccatattgaagatttgcataagtactcgaccacgggtagggat

SEQ ID NO: 770 - DNA, 1026 bp, Enterococcus faecalis
  misc_feature (751)..(751): Nucleotide 751 is "n" wherein "n" = any nucleotide.
atttctgttcctttaagtttcttcggtggaattggcggagccagcaaactaggtgttttaattaaaggaagtaactatttagaaattttagcgaatacggaaacaattgtttttgataaaactggtacgctaacaaaaggaaattttgtggttcaaaacataactagtgttgtcttacccgaagaagagttgttgcgtttaacagcaacagcagaacaattatccactcatccaattgctatttctattaaagaaagctatggcaaaaaaactgttccagcaacagcaattgaagaggttgccggacacggtatcaaagccacaattgaaggtaaaacagttttagtcggtaatgcgaagttaatgaaacaatttggtatcgaagcaccagaagtgaaggaagcgggaactttaatttttgtcgctattgataatcaatttgcaggctatttaatgattgcggatcaattgaaaccagacgccatttcagcaataaaagaattaaaggctgaaggggtcaaacaaactgttatgctgactggagacaatcaacaagttgcagaagctattgcaaaagaagttggtgttgacaaagtttatgcagaacttttaccagatggtaaagtggatcgtttagaagagttgttaaaagcatcttcacctaaaaacaaagttgcctttgttggtgatggtatgaatgatgcacctgttttagcccgggctgatgttgggattgccatgggtggtttangaagtgacgcggcaattgaagctgctgatgtggtgattatgaatgatgaaccaagtcgtatcgcctctgcgattaaattatcaagaaaaacattgagaattgttaaacaaaacattatctttgcgattgctgttaaaatcattgtcttggcactaggtgcattaggcttggcttcaatgcaagcagcagtgtttgctgatgttggtgtaactattatcgctgttttaaatgctatgcgttgtttacgtgtagaaaagatgaaagataataactaa

SEQ ID NO: 771 - DNA, 465 bp, Enterococcus faecalis
tttacaggagggaacctcaacatggcatcaaatgaaaaaacacgatataaagcaatcattgcagaccatacgtatacaattattggccaagagtcaaaacaacatatggatttagtcacaaaaattgtcaacgaacaactggcggaaattaaacatctttctccgcaaactgatacggaacaagcttctgttttattagcaattaatgcaatttcagatcaactaaaaaaacaagaatatgctttaaaattggaaaaacaagtagcagatttaaaacagaaaaccattcgtttggctgaattagagaatcgtgtgcgccgaatggaaattatcgaagaagaagcacgagatgttttgaaaaagaatggacaagaagatgtagaaattcataatcatgtggaagcccaacaaattttgaatgaaaatcgaaaacagcagattcaaaataaaggtgtttcggagtag

SEQ ID NO: 772 - DNA, 561 bp, Enterococcus faecalis
aaggatgacaagatgttaacaatacttattttattacttttagcctttggattttatacaggagctaaacgaggcttgattttacaagtgctctattcggtaggttacttaatttcatattttgttgctcgtacctattacaaagaggtcgcttctcatttagaattgtatattccatatccatcggttacgccaacgtcaaagcttgtcttttttaatcaagagatttctttagacttggacaaagccttttattcagcggttgcgtttctattattgctgtttgcaggctggttggtcgttcgttttttagctatctttttacatggattaacatttattccagttttgaaacaggtaaatggactattaggtggcgtattaagtgttcttgtgttatacgtgggtctttttctagtgttagctacggcgtcaatgattccgtcagatattgtccaaaatcagtttcggtcaagtggcttggcacgaggcattgtaaaaaataccccaattctaacaaaacaagcatatgaattatgggttgaaccaattacgaaataa

SEQ ID NO: 773 - DNA, 576 bp, Enterococcus faecalis
gcaaagcgaaacttcttatgttatgtctcagtcttttcaacaaatgaaaaagttagaaaagtaggtggaaaaatgaatcagcgtattctatcaacattagggtttgataaagtaaaacaacagttgttgcaatttattgtgacagctcaggggacaaacgaagtttcggaattattaccaattgctgatgaaaataaaattcaatcatggctaaatgaaacacaggatggtttaaaagttcaacgattacgtggtggaatccccattcctaaattagaaaatatccaaccacacatgaaacggattgaaattggtgcggatttaaatggcatagaattagcacaagtaggccgtgtcttgtcgactacttcagaactgactcgtttttttgatgagttaagtgaaaatgaagttgattttgaacgtttatatatgtggcgagagcaactagaagttttgcctgaattaaatcgccaactcaaacaagccattgatgatgatggctacgtcacagatgaagcttcgccagccttaaaggcaattcggcaaaatattcgtgctcttcacaacggaatg

SEQ ID NO: 774 - DNA, 1122 bp, Enterococcus faecalis
aacaaaccaaacgttccaggggttggccttaaaaatattaaggaacctgtgggtttacgggcccagcccgcaatccctgggaacgtggaacattcgccaggcggttccagtggcggcgctgccgcagttgtcgctagcgggattgttcatatacccggcgctagcgatggcggtggctccatcggaattcccgcctcttttagtggcttaattggcttaaaacctagccgtggttccatgcctgtcggcccagaaggctggcgaggctggcaaggtgcctcgattgactttgcgttgactatttctatgagagacaccaaagcgttattttatggcatacgtggtagccacagtggcgccccctaccaagcgcccttggcagaatggcaaacacaccctaaaaaacaacggctaaaaattgctctgtgtaccgcttcgcctatcggctcactgatttcgccagaagcaacacaagcggcgaaacaagcggctgattttctggcagccgctggccatgaaatcattgagattccttatccagtcgatggtgcagcgctgattcgctcctattatcaaatgaacggcgcagaaactacagcgatgatgaacagcattcaacaggggctcgggcgcccaattcgtaaagaagaaatcgaatctttttcatggaccatgcatcaatttggccaaaagattccagcagccacctatgttcattcattacagttgtgggatcaagcagcagtaacgatggaagaactttttcaaaaatttgatctgtttttatcaccaacaacggctttttcagcaccaaaaattaacgaagatttgcaaagtgagcacattcgtcaacgaatggcgcaagcagcagaattaacagaagcagaattagctgaattaatctatgattattttgataaaagtttacagctaacaccgtatactcaactagctaacttgacaggacaaccagccatcagcttgcccacacatgttacggcaacggggttacccttaggcattcaattgctggctgctcgtggacgtgaagatctcttattccaagtaggcgaacagtttgagcaagaaggcaaatttaaattaccagaaagttaccgctaa

SEQ ID NO: 775 - DNA, 537 bp, Enterococcus faecalis
ggtggaaaaatgctgtacgtagtgagacatggtgaaacagattataatgtggcccgtagaatttgtggtcatgcggaagcgcaattgaccgaaaaaggctatcaacaagcggaattggtagctgaaaaaattgccaaacaaggaattcaaatcgaccgtttactggcgtcgcctttaaaaagggcgcaagaaacagcccgtaaaattgcagaacgaaatcaattgacgattgaaacagaacctcgtttaattgagatgaattttggcatttatgatggtgaaccgattgaaacaacggctttccaagaaaatcgttctgagatttccttgccgtttccagaaggggaatcagtcctagatgtcgcgggtcgaatttatcccctgattgaggaagccttggcttcagaggaaacttacctatttgtttgccacaatgcggtcatgcgagtcattgataactacttcaatggtaaaaaaatccaagatttcttggactttcattgtgaaaatacacaacttgtacaatacggagaataa

SEQ ID NO: 776 - DNA, 1107 bp, Enterococcus faecalis
cttttggatcaaaaaagaaatggggaaaagactatgagaattgataatattcatcaagcgttaaaacagtttcacgtacaaaatccaagtagcaaagaaaccttgttgcccgcaacggcttcgcaattaagtcaggcctctggctatacccgaaccgctgttagtgaagagctttcagaattagtgagaaaagaccaagtcgttaaagttaaatcaagaccggtgttattttttgataaagactacttagaggaacagtttcctttttttaaaagtagcacgtgctatgattccctcgcttcgctgcaagaggacatttatcaacagacagaacagatacataagaaaaagcagctactgaaaatgaatccatttgcgaacgtaattggttttgatgggagcttagcagacgccatcaagaagttgaaagccgctattttatatccgcctaatggcttgaatattttacttactggagaatctggggtggggaaaaccttaattgcagaacaattacaccaattttatcaagttaaaatgaaccaagaagttccgtttatttattttaattgtgcagaatatttcaacaatccagaattattaacttcgcatctgtttggctataaaaaaggcagtttcactggtgccgtcaatgaccaaaaaggtttagtggagttggcagatggcggttttttatttttagatgaagtccatcgattaacgagcgaaggccaagaaaaattgtttacagttttggataaagggtattttacacggatgggcgaagccgaaaaacaaagaaatgtatcgataaaatttatttttgcaacaaccgaagcagtcaatcaacattttttgaaaacgtttttaagaaggatccctgtgacattagccattccagctttagccgagcgctctttgaaagaaaaaattcaattgattttgtcctttttcttagaagaaagtcaacggattcaaaagaatatccatattcgttatgaggcgttgaaacaattaacatttactcattttgaagcccacgtaggcgaattgaaagcggcgaatcaatttatgaagcgccaagcctattttagaagtgttcgatca

SEQ ID NO: 777 - DNA, 567 bp, Enterococcus faecalis
gaccttaccccgtgggctgagacaccgttggaaaatgggtttgtttctcaaacggggaacgcacaaattgatcaattattaagtcgtggcgggattatgagtatgatgccgactgtggcacttattattctaacgttgtctctaggtggcttattaatggaattaggattgatttctgcggtcatggaagttgtttcgcataaaatgagcagtacaccgaaattgattttatcaacgttattaacaggaattggcgtaaatatatttattggtgaacaattcctatcggttattttaccagggaatgcctttaaagaagtttacaaaaaagaaggcttggatccgactgttttaggcagaaccttggaggatggtgggacggttattaactacctcattccttgggggattgcaggtagcttcgtatcggggacctttggcgtaccaacgttgacttacttaccatttgttttctttagcttattatcgcctgtcttctcaatggtcagtgcatttactggtttaggaattaagcggctatcagcagaacctgttaccgaaaaatag

SEQ ID NO: 778 - DNA, 480 bp, Enterococcus faecalis
ttgactagtcaattgttgacgagtcatctttttaaggaggaaactatgtcgttatcattacgggaagtcagccaattattatgtcagttaaaggtattagatcaaaaaattaccaaagtttttgaagagcaagttggcttgaatttgactcgttatgagttgctgatgattttaaaagaacgtcagccgtgtcttcaaacggagattcaagaacacttaaaaatcgatagtggtgcggtcactcgccatttgaaaattttagaagagaaacagtatgtgacacgacagcgaaatccagaaaataatcgggaagtgctagtgcatttaacagaaaaagcacaacaagaactacagcaatgtacagccaagcaacaaacggtaacagaaattattcccagtacatttacaaaggacgactgtcgccagttaaaagaacttttgacaaaactagatcaaagcattacaacgaaagaggtatga

SEQ ID NO: 779 - DNA, 669 bp, Enterococcus faecalis
atcaaagcattacaacgaaagaggtatgatagaatgacaacatatacaacgaatgatttttcagagattgtttttggccgcaaatcggttcgggtgtacgatgaaacccataaaatttctcatgaagaaatgttaacaatgattcaagaagcgaccaccgccccttcttctgttaacatgcagccatggcgttttgtcgtagtggaaagtgaagcaggcaaagaaaaattaaaacccttaattcgctttaatacgcgtcaaaatgaaacatcttctgcaatgctcttaatttttggtgatttaaactgccatgagcgaggagaggagatttacaatcaagcctatgctagtggtaaaatgcctaaggaagtgcgggaccaacaattagcagccattattccccattatgaaagtttaagtagagaacaaatgaatgacatcgtaaaaattgatgcgagtttagcagctatgcaatttatgttagtggcccgagctcacggatatgaaacaaatccaatcggtggttttgaagcggaaaaattagccgaaacatttggtttagatcaagagcgctatgtcccagtaatgattttatctgtgggtaagggcatggaaactggttatgaatctgttcgtttagcaccagaaaaaatcacgacatttgaatag

SEQ ID NO: 780 - DNA, 741 bp, Enterococcus faecalis
tcccctacccgtggcgaggacctgatattggcttctggccgcccgactaacggtatgcggcccttaacagatgaattggagatggctcattataatggacacttactttcctataacggcgcttgtgtcacccatcacggcagtcagcaacaactatttaatcagacaatttcaaagtcattgagtcaacaaattttagagcatttgaaacaatttgacgtaattccaatgattaatgatgaaacatttatgtatgtcaatgatgtttttcataacaccttacatttagagactggtgattttaatattattgaatatgaatcacggggtggcaactttcaattatgtgagtggcgtgatttagccgccagactaaactttcccttgaacaaaattttaattgctggtgaacccgcctatttacaaaaatatcatgaggccatctacgcgcctttcaaagaaaccgtcaccgctgctttttccgctcctttctattttgaatttaccgctaaaaatattgataaagcgcgtgctttagaaaaactaaccctacagttacgtatagctgctgaagaagtaattgcttttggtgatggtcacaacgactatactatgttggaatgggccggcacggggattgctatggaaaacgccgttgacgagcttaaaagcatcgcaacggaagtcactttatccaacgacaatgacggcatcgctgttgcattaaccaactttctttaa

SEQ ID NO: 781 - DNA, 378 bp, Enterococcus faecalis
aaatggttgcaattagaagactatgcgcaacgccagattggcgaactttctggtggccaattacaacgtgtgtttatcgcccgtgttttggcccaaggtgctgaggtgatttttttagatgaacctttcgtcggcattgatatgtctagtgaaaaagtgattatggatattcttaaatcattaaaaaatcaaggtaaaatgattatcattgttcaccatgatttgcacaaagtgtcccactattttgatgaattaatcgttttgaaaaaccggctaattgctgcgggtcctgttgaacaaacatttactgcagaaacgctccaagaagcatacggtgatttgttaggtgatttattaatacagggggttgcaaaatga

SEQ ID NO: 782 - DNA, 894 bp, Enterococcus faecalis
tttattaatacagggggttgcaaaatgattgctgcatttattgatggtttattccgttatcaatttttacaaaatgcccttttgacgtctataattgtcggactcatttcaggggtaattggttcattcattattttacgtgggatgtctttgatgggtgatgcgatttcacatgctgttttaccaggggtcgctgtttcttatatgtttggtttcaattatatttttggcgcttctatttttggcttattagctgcattatcgatcggctttattacccaaaaaagtccactaaaaaatgatactgccattggtgttgtctttagttctttttttgctttagggattatttttatctcttttgcaaaaagttccaccgatttatatcatattctgtttggaaatgtattagcggtcgcagataccgatattttaattacttgtgtcgtcggtgtgattgttttgatttttgtggcattgttttataaagagttgcaactcacttcttttgatcccacaatggctcaggcctacggtttaaatattcaatttttccactatgcattgatgtttttactaacactagtcgctgtttcttctttacaaaccgtcggaactattttagtcattgccatgctgattacgccagcagcaacagcttatctattaacaaatcacttaccgacaatgattggcttagcctctacttttgggattttaagttcagtgattggcctattcttcagttattcttataacttagcttctggtgcgactattgttttaaccgccgccttattctttttattggctttctttttctcaccaaagaaaggcctagtatttgtaaaccgtgagaaagaaatggaggaatcaacgaatgaaaaaatttag

SEQ ID NO: 783 - DNA, 453 bp, Enterococcus faecalis
  misc_feature (426)..(426): Nucleotide 426 is "n" wherein "n" = any nucleotide.
accgtgagaaagaaatggaggaatcaacgaatgaaaaaatttagtttattttttttaacacttttagcagggttaacgttagctgcttgcgggaatcaagccgctgaaaagaaagaaaaattagcaattgtgacaacgaactcgatcctatctgatttagtgaaaaatgttgggcaagacaaaattgagctgcatagtattgtgccaattgggacagaccctcacgaatatgaaccgttaccagaagacattgcgaaagcttctgaagcggacattttattctttaacggcttgaacttagaaacaggcggaaatggctggtttaacaaattaatgaaaacggccaaaaaagttgagaataaagattacttttctacaagcaaaaatgttacgccacaatatttaacaagtgccggtcgaggaacnaacagaagatcccacatgctgggttag

SEQ ID NO: 784 - DNA, 207 bp, Enterococcus faecalis
  misc_feature (64)..(64): Nucleotide 64 is "n" wherein "n" = any nucleotide.
agattacttttctacaagcaaaaatgttacgccacaatatttaacaagtgccggtcgaggaacnaacagaagatcccacatgctgggttagacattgaaaatggcattaaatatgtagaacacattcgtgacgtgttagtagaaaaagatccaaaaaataaagatttctatacagaaacacgcgaaaaattataccgaaaaacttag

SEQ ID NO: 785 - DNA, 456 bp, Enterococcus faecalis
aaaaagatccaaaaaataaagatttctatacagaaacacgcgaaaaattataccgaaaaacttagcaaactacatgaggaagccaaagttaaattgggtgatattcctgatgataaaaaattattagtaacaagtgaaggtgcctttaaatatttctccaaagcttatgatttaaatgccgcttatatttgggaaattaacacagaaagtcaaggaacacctgaacaaatgaccacgattattgataccattaagaaatcaaaagcacctgtgttatttgttgaaaccagtgtcgataaacgtagtatggaacgggtctcaaaagaagtgaaacgaccaatttacgatacacttttcacagactctcttgccaaagaaggaacagaaggcgatacgtactacagcatgatgaactggaatttaacaaaaatccatgatggcttaatgagtaaataa

SEQ ID NO: 786 - DNA, 1362 bp, Enterococcus faecalis
ttccccgttgtggacacttgccagattgggtacttggatcagcacgtttctgtagaacaatcactaacgatggttgattttttgaaacaagcctttcaagaactttttgataaagaagcgaaactgacaaagctttatgaagaatacagtcaaacggcttcggaaaaacttttagaacaagcaggcaagttacaaacagatttagatgaaagtaatttttaccaaatcgacacgattattcaggatttagccaatgggttaggactacaagcaattggtttggataaaaagttaggggagctaagcggtggtcaacgttcaaaagtgattttagcaaaattattgttagaggcccctgatgtgttacttttagatgaacccaccaactatttagatgatacacatattcaatggcttgttcgctatctgaataattttgaaggaagctttctattagtctcccatgattatcaatttttaaatgaagtgacgaattgcatcgcagacattgagtttggcaagttaaccaaatatactggaaatgtagaaaaatcttttgcacaaaaagagcagaataaacaaacctatttgaaacagtatcaggcccaacaagaaaaaattgaaaaaatggaagcctatattcgtaaatacaaagctggaaatcgagcaacgatggctaaaagtcgacaaaaacaattggaccggttggaacgattgactccgcctggttccttgactaagccagcgattgaatttccttatcaagggttagttgcaacgcaagcactaacgacccagaagttagttgtcggctatcgggaacctttgttagaaccgttagatttaatggttcatgtcggtgaaaaagtcgcattgaaaggctttaatgggattggcaaatcaacattaattaaaacgttgacgaaagtgattccttcattagatggagaatttcattatccgctgaatacaaaaattgcttattttacccaagacttagcgtggcctaatgagcagttaacgccactagactatttatcagatcgttttccagatacaacgattaaagagcgaagaagtcatttggctagagcaggtttaccagataagttagcaatgcagtcgctagccctgttaagtggtggtgagcaaacaaaagtaaaactagcggaactaatgatgcaaacaagtaatttgttatttttagatgagccaaccaatcatattgatgaagcggccaaaaaaagtttacaagaagcaattcacgtttacccaggaacggtttttctggtttcccatgaagcagatttttatgaggaaattgtggatcgagtaattgatattgaggaattagttaaataa

SEQ ID NO: 787 - DNA, 408 bp, Enterococcus faecalis
ggcggtgaaaggacgagtgctatgagagagaaattgaaagtttatttggtgacaggccggtatgattttagtgatactgaatttttaaaacgaattgaaactgcttgtcgcagtggagtgacattggtccaactgcgcgaaaaggaagtgtcaacacggcgcttttacgaattagcagtgaaagttaaagtggtaacagatgcgtatcagattccgttgattattaatgatcgtgtcgatatttgcttggcagtggatgcagcaggtgtgcatataggggatgatgaattaccggttgctcttgtgcgaaaactggttgggtccacaaaaatcgtaggtgtttcagccaaaacgtggcacgaggagttgaagcggaaaacgaggggcgtcttccccacgatgttggga

SEQ ID NO: 788 - DNA, 831 bp, Enterococcus faecalis
gagggtacttttatgaaaacaagcgttaagtttgaaacgatttttccactgacaacggcaccattaattcagtgcattacgaatgaaattacgtgtgagtctatggcgaatgcattactttatattgatgctaaacccattatggcagatgatccccgggaatttccgcagatgtttcagcaaaccagtgctttggttttgaatttaggccatttatcacaagaacgagagcaaagcttgttagcagctagtgattatgctcggcaagtgaataaactgaccgtagtcgatttagtcggttatggcgccagtgatattcgaaatgaagtcggggaaaagctggtgcacaatcagccaaccgttgtgaaaggaaatctttcagaaatgcggactttttgccagttggtgagtcatggcagaggagtggatggcagccctttggatcaaagtgaagaagcaattgaggaactgattcaggctttacgtcaacaaacgcaaaagtttccccagacggtatttttagcaacagggattcaagatgttttggttagccaagagcaagtgattgtcttacaaaatggcgttcctgagttggattgtttcactggcacgggcgatttagtcggcgcattagttgccgctttattaggtgaaggcaacgcgccaatgactgcggcagtagccgcagtgagctattttaatctttgcggagaaaaagccaagactaagagccaagggctggccgattttcgccaaaatacgttaaatcagttatctcttttaatgaaggagaaggattggtttgaggcggtgaaaggacgagtgctatga

SEQ ID NO: 789 - DNA, 636 bp, Enterococcus faecalis
aattttgaccgattattgcacccaactacgtttatttgtggttgggtttttctgtctttttcagtcgcgcctccttttgcttctcgcagaaaggagtttttttacgtggaaaaaaatcgaatccacagagttacgttactggctttaatgattgcgatggacgttgtattatcgccgttaatgcgaattgagggaatggcccctatgtccagtgtcatgaacattattgccggagttttattaggtcctctttacggaacgctcatggcacttgtctgcggcttaatccgtatgacattcttaggtattccgccattagcgttaacaggtgccgtttttggcgcgttttttgctggtttattttatcaatggggacaaaaattaggctggtcgatgctaggggaaatttttgggacaggcatcattggctcgttattgtcctatcctgtaatggtttggtttactggcagtaagcagaatttttattggttcatttatacaccacgatttattggtgccacactgattggttcagtgattgcttggcttgtcttagtaaaactgaaagaaactcgggtatttaaacaaacacaggaattatttttaggagggtacttttatgaaaacaagcgttaa

SEQ ID NO: 790 - DNA, 978 bp, Enterococcus faecalis
ttacgattttccatgtctgctatgatgcaaggtgaagcatttttaagtttcattggacaattttatcaagagaatgagcattttgtgccaaaagaagtcttgattcctgatgacattgataaagaaagcgtcgaagctttattagctacgaaagtcttgcagccgcaacggggagaaaagaaaaaactggttaaattagccagtaaaaatgctgcagttgctttaaatgaaaaattcgatttgattgtacggaaacaagaacgaacaattggcgcagttgaaaaattaggcaatgcgatgaacatacctgcgcccattcgaattgaagcatttgataattcaaatattatgggaacaaatcctgtttctgcgatggttgtgtttattgacggacggccagctaaaaatgagtatcgaaaatataaaataaaaaccgtccaaggtcctgatgattacgcttctatgagagaagtcatttatcgcagatattcacgagttttaaaagaaggcttgccttttcctgatttaattttaatcgatggtggtaaaggtcaagtcgatgttgccaaagatgtgttagccaatcaactaggagtcgatattcctgtagctggattagccaagaacgacaagcacaaaacgagtgaacttttatttggtccaaacttagaagttgtaccattggaaagaaactcacaagaatttttcttgttgcaacgaatccaagatgaagtccatcgtttcgccatcacattccatcgtcaattacgtagtaaaaatagttttgcttccaaattagataacattgaaggcttgggaccgaaacgcaaaaaaaatcttttaaaagaatttaaatcgcttaaaaatattacggcagccagtgttgaagaattaagaaaagctgggttacctgaaactgtcgcaaagaatgtgtatcgtcatttgcatcaagaaacaacctctgagatagaaaaataa

SEQ ID NO: 791 - DNA, 207 bp, Enterococcus faecalis
aagagaggacgtctgatcatgaaaatactaacacccgtttatcaaataaaatttaaaaaagtaccaaatcaattactgattgatgagcgtttaatgaatgaattgggtagatggctgaatcgtacaggtcgaatttgggcctgtcaatcatcaaaatcggcaaaggaatttaaaactacattttatgaaagtacaagctgtccttaa

SEQ ID NO: 792 - DNA, 858 bp, Enterococcus faecalis
  misc_feature (849)..(849): Nucleotide 849 is "n" wherein "n" = any nucleotide.
gtccatccccgtggtcaggctcttttattttttgctgatgaggccggctctcccggaacagatatgactttctttgacttcccaggcttacctaaaggaaccaaaggaaccaatacaatttctcgtacttcctttcgtgtaaaagatgatgctactttggattactgggtatcacgctttaatgaatatgcaattgatcatggagaaattcaagaacgttttggtaaaaagtatttagaatttgaagactttgacaatcaacgttaccaacttatttctgatgaaaagaaccaatgtgttgcagccggcacgccttggaaaaaatctaacgtccctagtgaacatgctttaatcggcttaggaccagcctttgtaactgtcgaaaattacgaacatctgcaactagttttaactgaagttttagggttcaaattgattgatgctgaaggtagttttcatttatttgaagttggcgaaggtgggaatggtgccagcatcatcgtagagcatcgggaagatttgccagcggctcaagaaggctacggcaatgtccatcacttagccttgcgcgttgccgatgaggaagcactacgtttctggattgaaaaaattaatcgtttggaatttcctaattctggctttgtggaacgtttttactttaaatctgaatatttcttggcagcaacacatgttttatttgaactggcaaccgatggtcctggatttttagaggatgaaacctatgaacacgctggcgaaaaattatcattaccgccatttttagaaccaaaacgggcagggattgaaaaatttgtgcgtcctttcgatacttcagatgcgaatgttcanagaaattag

SEQ ID NO: 793 - DNA, 630 bp, Enterococcus faecalis
gaggctcctatgattcattacaatagtaacaagttatctgcaaaaacagcgtataaatttttatcaggaagtattattcctcggccaatcgcttgggttacaacacaagatacagctacaggtgtcgtcaacgctgctccctttagtttctttaatgcggcggcagctgaaattcctttagcaacgttgtccattttacgaccagacgaagagcctaaagatacggcacgaaacatcttggctactaaagaacttgtcatccatttcgttaacgaagaacgtcttactcaaatgaatcagacttcggcgtctttagcagcagagatcagtgaaattgacacatttggtattgaaaccattgccagccagactgttgctgttccagcaatcaaagccgcgccgattcggatggaagctcgcttacatcaatatgtacctattgctaaccatgaaggtcaaattattacggatttattcattgtagaaattaccgatttctattttgattcagccgttttcgatgaagaacatcagtacattttacctgaaaaactccaaccgattgctcgtttagcaggcaatgattatacaacattgggcgaaatccgtgaagttcgccgcccaacgtaa

SEQ ID NO: 794 - DNA, 765 bp, Enterococcus faecalis
tcccctaccccgggctggacacctttatggattgctgcgtatcctatcgatggtgtgtcaccatatccattgtatgcttatttcccaagcatggatggtattggtatttggcaattcacatccgcttatattgcaggtggtttagatggtaacgtaaatttaacaggaattacggatagtggttatacagataccaataaaccagaaacggatacgccagcaacagatgcaggcgaagaaattgaaaaaatacctaattctgatgttaaagttggcgataccgtcaaagtgaaatttaatgtagatgcttgggcaactggggaagctattccgcaatgggtaaaaggaaacagctacaaagtgcaagaagtaactggaagcagagtattgcttgaaggtatcttgtcatggattagcaaaggtgatattgaattattgccagacgcaacagtcgtccctgataagcaaccagaagcgactcatgtggtacaatacggagaaacattatcaagtattgcttatcaatatggaacagactatcaaacgttggcggcattaaatggattggctaatccaaatcttatttatcctggtcaagttttgaaagtcaatggatcggcaacaagtaatgtctacacggttaaatacggcgataatttatctagtattgcagcaaaacttggcactacttatcaagctttagctgcattaaacggattagcaaatcctaacttgatttatccaggtcaaacattgaattattaa

SEQ ID NO: 795 - DNA, 192 bp, Enterococcus faecalis
atcagggaaccgatggaaataatcgaacgagctcctgcgaaaattaatcttgggttagatgttctgcataaacgtgtggatggctatcatgaagttgaatctatttttgcaagtgtagatttagccgatcatttaacttttgaaaatctagaagaagacatcattcgtattgaaacggacagctctttttta

SEQ ID NO: 796 - DNA, 360 bp, Enterococcus faecalis
aaattcgacaaaacagccggtttgtcgagcaaaagtagttgcaaacagacttctagtatgataaacttgaaattttttaaaaaaagtgatataatgtttctcgaggtgaatgcaatgccaacaacgttatcgtcaattaagaaagatttggaaggccgtatcggcagtgaaattatgttagttgctcagactggaagaaagcgccaaacagaacgtaaaggaatcttaacggagacttatccatctgtttttgttgttgacttggatccagacgagaactcatttgaacgtgtatcttatagctattcagatgttttaacacgcaccgttgaaatcgaattcatcggtcaagccgtataa

SEQ ID NO: 797 - DNA, 603 bp, Enterococcus faecalis
atcattcgatacgtttatcgaaaaggagggctttttatgttagaacagattcaacaagcattagcaggagaccaagaacaatttcaagccttatatgggcaatatcagccagtgatttataagtgcatgaaaaaatactatttaaaagattatgatactgaggactggcttcaagaagggcgaattgtcttctttcggacgttagaacgatttgattcagaaaaacaagcatcattaggaaagttttttaaacgaaattttgaaaatcacgtacatagcttaattcgccatcaatgcgcctataagcggcgaacagataccttgtctatttctctggaacaacgattagaaagcgctggtgaagagttagtggactatttagggacagcggctaccgacccattaggtcaattaatgattcaagaaaaattggcagcttttccgacacgtctttcctcgttggaacaacaaattttaaacgcatacttaaaaggctacacgttagaagaaattgctaaagtacgtgggggaactttttcagctgtccgaagtgcctatgatcgtgccaaagcaaaaatgaaatatacattagaaaatgaataa

SEQ ID NO: 798 - DNA, 540 bp, Enterococcus faecalis
ggcgattgtatgaaaaaacaattgttaatcgttgatggctataatatgattggtgcttggccagaattggtccagttgaaaaagcaagagcgtttagaggatgcgcgtgaactgcttcttagtcgtctgtccaattacgccaaatatgaagggttggaaatcattgtggtctttgatgcccaattagtcccaggtattcagcaaacgtacaaaaagtaccttttgaccgtggttttcaccaaagaagatgaaacagcagatagttatattgaacgtctagctggtgaaaaaaatgatcgtttaacgcaagtaacagtcgcaacgagtgatttggctgaacaatgggtggtcttttcacaaggtgcattgcggacttcggccaatgaactttacaaagctgtccagaaaacagaaaagacgattgccattcatgcaacggatatccatttccagcaatttcgtcgaaattctccatggaacgtggagcagttatcaaaactttctgagaagctagaagaattgtctcaaaaaaaagattaa

SEQ ID NO: 799 - DNA, 1296 bp, Enterococcus faecalis
ctgaaagtgatgaataagattgttttgggtgcgaagttagaattatcccgtcgttatttttgggaatattgcaaattaacggcatctgacttttataagcaagacagagagtacttaaaagagttatgtgatgacttgcaagaattcatttatgatagcgataatgacgttctagttatcaacgaaccgccgagacacgggaaatcgagaactgctggtaaattcgtagaatggttgttagggaatgacactcgaaaaaaaataatgacgggatcatataacgaaacgttatctacaacattttctaaaagcgtaaggaatactattcaagaaataaaagctgataaaaacagagttgtattttcagatgtattccctggtgtagagataaagtctggtgatggagccatgaacttatggagtttgactggcggatataacaattatctagcaacgtcaccaactggcacagctacagggtttggtgcagacattattatcattgatgatttaattaaaaatgctgaagaagcaaataacgctatggtattagagaaacactgggagtggtttgttaatacgatgctatctcgtttagaaacaggcggcaaaatcatcatcattatgaccagatggaattctaatgatttagcaggtaaagcattaaaagaattgccgcaatcaggctataaagtaaaacatattagcatgaaagcatataacgaagaaacagacaccatgctttgtgagtctgtcctttctaaagaagaatatttccgtaaaaagaaaacgatgggtgcagatattgcttctgctaactatcaacaagaaccgattgatttaaaaggtcgtttgtaccaaaaattttcaacatatgaaacacgctctaattacattaaaatatggaattataccgatacagcagacactggtgctgataatctttgttcaattgtttttggtgagacagaagatcataaagcagaagtattggatgttctatttacaaaagaaccaatggaaaaaacggaaacagcacacgctgaacaaattaaaaataaccaagtaaaccatgtccgcattgagtctaactctggtgggcgtggtttttctcgtaattcagaaagaattgttaaagaacgaggatatcgtggtgcttattacgagccgtttcatcaatcggcaaataaacaatcacgtattctttctaattcggcacttgtagaaaataatgtgtatttcccatcagattggaaaataagatggccagaattttatgaagctatgacgacctac

SEQ ID NO: 800 - DNA, 483 bp, Enterococcus faecalis
aattatactggaggtgaggtcatggcaaagtacacagagtggatttctgaagaaggattaataaaaataggtggatgggctaaagacggcctcaccgatgaacagatagcacaaaatattggaataagtcgttctacgttaaatgaatggaaaaaacgatttccggacattaaggacaccataaaaagaggtaaagaagttgtagaccgccaagtggaaaatgcattgtttaaaagtgcggtgggttacgaatacactgaaattactaaagagttaactgactcaggcatgaaagtaactaaacgagtaacaaaacaagtggcccctaacccaacatctgctattttctggttgaaaaataaaaaaccagatgagtggagagataagaaagaaactcaagtttctggtgaaatgtctgttaacaatccttttgctggtttgtctgaaaaagaattaagaaagttagctgaaagtgatgaataa

SEQ ID NO: 801 - DNA, 225 bp, Enterococcus faecalis
attcataacgttgattttaataacaaatttatgaacggagatgtcgatatgtcaagagcttttgaagatgaacaagataaacaagctagaatggaagcagcaacgaagtattataatggtgaacataaatgtgataactgtggacatttattttacccaaatgaaaatgatcctgaacaatttgtatgcgataagtgtattgaacatgcaatgaaccgagattga

SEQ ID NO: 802 - DNA, 831 bp, Enterococcus faecalis
aactatcgaggtgcaaaaatgttagaagctttattttgggatcacaacggggattttcagtcggcaactgcagctgctgcagttgctcttataggagctataatttcagctgtattttcttggttaagctataaaaattctgtgaagactgccgaaagacaatatataatggaacaaaagaaaattgatgccaatttaaaagcaaaggcaaggatagaatggataattggcgtaagagataaaacatcagaacttgtttctttgctgctttcgttacaaaaggaaaaaactgttttctatgagcaatggttggaaattgaaaaggtatctgagctattaaaattatattttaattcaaaaatgaataaaaaagttaattcagaaatatacattgaacaaaataaaataattatttctgagactgctacatctatagttttaaaagaaaataacaatattaataaacacgcatatataaaaaaatacattgagtgtttagttgaattgtataaagatgacaactataaaaatatttcaaataaaataagattttatcatgattcaataaataaattgtatgaagataattttgaatattggatgtcacatgagcaatcagaattagagaaaattaagaacacaccaccagaaaaattagaaggtgaagattatgattatgtggctgcagagaagaatattgagcattatcaaagaaaaataaaagatatagaagttagtttaacaaactatcataaagctattgatttctttacaacagttatatccttatatttaaaaatagaatgggataaagccaaagaaggccagtaa

SEQ ID NO: 803 - DNA, 207 bp, Enterococcus faecalis
aaagttattggtaggtttcgttacaacatgaatatcccacatccgaagcattcaattgtttcaatgcgtgttgtaatgtctgtgcagataaaagagaatgcatctatttttgaaatgacgagagaagccacgccaaaggaaattgatgattgtaagcttgtttattgtgggcatgttttctttgatgaagcagacatcccaaaataa

SEQ ID NO: 804 - DNA, 219 bp, Enterococcus faecalis
ggagatgagaaaatgaaaaaggtagtttcaattttgttgatggttgttgcaggtttcacattaactgcatgtaatggttctaaattagataaaacaggtgaagaatttaaaaaagcaataattgcagagaattctgatttagataataaagattataaagaatcagattttagctttctaacttataaggataaatataaaaagcctaaccgccggtat

SEQ ID NO: 805 - DNA, 540 bp, Enterococcus faecalis
aaaatgaaaaagttaagtttagtagttttattattaggtgctggattagtatttactgcatgtggcgggaatactaaaggtcatgaaacggtggtttcgtcagcaactgcctctgtggatatgaaaccagttgatgatatgacttctacgaaaggaagtgaagtaactgaaaaaagtagtactaaacctatgcagattaaagataaactagcagaagaaaaagtatctgatacttaccagttggtagaggactttggaaatgcttatgctaatttttctagtatcaatgatcgtaacgaaaaattaaagaaattaatgactgctgaatgtgtaaagaaaaatggtattgatgtgaaaactggcgcaaaattggaaagtaaaggtgaagtaagcgcaatatatcaaaatgataaaaaggaatacgcagtcttacttgattgtgaacaaaacggaacaaaaacaagagtacttttactggcaaaagtgcaaggaaataaggtagtggaaatgacctataattcagtgaaacaagagtattaa

SEQ ID NO: 806 - DNA, 249 bp, Enterococcus faecalis
tttaagctaaggaggaagttaaaaatgtttttaaataagagaagtggattaaccaatcgtcagataaaagaagtttgttcgagatttaactgtaaaaaaaatgaatttgcagttcaaaagtatcaagatggttttttagtagctgtgaataataaagagtatcgtgttaaattttctgaggggattttttcaaagattgtgtatgttaaagaagtacaacgcatttcaaagaaagtaggtagaaaatga

SEQ ID NO: 807 - DNA, 297 bp, Enterococcus faecalis
atggtaagttgtaaatcagaagttgtttcattaaatattatcaatagctattttttaggaatgagggagataaattttcctgtctatcaaaagcaatttaaacaaatagatttagaattatttataagtttagctgattttatgggaaatttaacagagctagaaaaaaataattatatacaattggtcttagaggatttaaaaaaatttttgatgtctattgaaagtaaaaattattctcgaacggttcagagaatgcttttagatatgaaaacagagatagccaagataatttaa

SEQ ID NO: 808 - DNA, 1068 bp, Enterococcus faecalis
aatgattatcagccttcttttttattgaaaggagagatcatgaagaaattaggcaaggttttaattgttagttgttttatttttattcttccttttttattatttttaggtgtattttcttctagtgaaagcggagattcttcccagtttcagcctgctacaccacaggaaaaagtagcattagaagtttctaactacgtgacgtcacacggtggaacgttgcagtttgcttccgcttggattggcaatatggaacatgaaagtggattaaatcctgctagaattcaaagtgatttggcttttaatccttctattgcttataacgctagtttaggcggttatggaattgggttaggacaatgggattcaggacgaagagttaatttattaaattttgcaaaaagtcaaaaaaaggaatggaaatcagtagctttacaaatggattttgcgtggaataaggatggttctgatagtgacttacttaaaagaatgtctaaatcaaaagatgtgaatacacttgcggtagatattttgaagttgtgggaacgagctggaacaaaagatgatcctgtagaacaagtaaaaagaaagactagtgctaacaattggtataaacgactttctacaggttccatgggtggaggttcagccaatattggtggtggaaaaattgatgttttggaaaaagtaatgggacaaactattaatggtggtcaatgttatggcttatctgctttttttgttgaaaaacaaggaggttttcaaatgatgggtacagggcatatgttcgcaagtgagattggtaatgattacaattggccgtcaataggttggaaagtgataaagaatccaaattattcagatattaaagcaggagatgtcattaattttggtcaaggtggtgtggctactagtatttatgggcatactggtgttgttgcaggcgtaaaaggtaaaggaaaatttacaacatacgagcaaaatgcggaacaaggtcaaattgttgctaagtattctcgaacttggggattagatttcccacatgtaacgagtttagtaagaaaatag

SEQ ID NO: 809 - DNA, 696 bp, Enterococcus faecalis
gcattgaacttagccaaagaccattttattgacgataatgggcaatttgctggtgttaaaacaggattgaattcattattgaatcgttctactcaagaagaacaacaaccatttaaagacgatatgttgcccgaagaagaaattgcggaagtagaagagccaaccaatgttgataatgaggaactagaagaaatagaagataaagctttaactgatgaagtggataattttgaagattcaacagatgatgaaatggataattctttagaagaatttgatgttcctgtattagatgaaaatgtatctgattttgatactgatacttctttagctgatgaaaataatattgaattagagccaattattgaaaatgaacttgatagtttagattcaagtgtagaatcaagtgaaaatgatagagaagagccaattcaagaacttgatgagcaagaaatagcggacaatttgaatgttagggttgataatttcgatgagttggcatttgctcgtgaagaacgtgcattttttgatggtggagaggatagcgagttaatcacaaacaataatgattcattaaataacgtttattcattttaccaaacagaagaaaactttaataatttagaacaaacagaggaacaattttttggtagtgtgaatacggaagaatataattttgatgttgtagagggctga

SEQ ID NO: 810 - DNA, 207 bp, Enterococcus faecalis
gacaattgtccaatattaacattcttgtctgagggtcaagttcaacaaccttcttttgaatcaaaaatgaatgaaaaaacaaaagaaacggttgagcgtacaggtgaaattggtgttggagcagtaaaagcacgaataggtgcttccactggaaatttagcgttggctgctgatggtgctagtcatttaatgccaaaacatgactag

SEQ ID NO: 811 - DNA, 222 bp, Enterococcus faecalis
caatggtcttatgttattcaaggggattcaagcccaataaaaaaggatggaaggacgtaccaattccaacttaaaaacgaggaatgttctgtattaaaaattattgtaacaaaggatccttcaaagtttatcgttgtaattatggaagccagaaaagtatattttatcgtcgaatatgatcaaagaaaaagttttcccatcatgggacgccatttattttaa

SEQ ID NO: 812 - DNA, 477 bp, Enterococcus faecalis
tctatgatctcagtttgtattgcgacatataatggagaaaaatatctcgcggaacaattagatagtattcttttacaagtcagtgaagaagatgaactaattatttcagatgatggttatactgatcatacgttggaaattttgagaacgtatgcagcgaattatccccaaattcaattgttacaaggtccagggcaaggagtgattgctaattttgcatttgcgcttacgcatacgaaaggcgaagtgatatttttagcagatcaagatgacgtttggttgccaaataaagtaacaacagtgacagaatattttgaaacgcaccctgacatccaagtggttattagtgacttgaaaattgttgatgcggatttacaagttaccaatccctcttattttaagtttcgaaaagtcaaaccaagggttttggcgaaatgcgataaaaagtggctatattggggcaggtatggcctttag

SEQ ID NO: 813 - DNA, 363 bp, Enterococcus faecalis
aaattgttgatgcggatttacaagttaccaatccctcttattttaagtttcgaaaagtcaaaccaagggttttggcgaaatgcgataaaaagtggctatattggggcaggtatggcctttagtcaagagatgaaagacgtcattttacccattccgccagaagttcctatgcatgatatgtggattggcttattagctgcacggaaaaagcaaacgggtctcattaaagaaccattagtgctttaccgaagacatggagcgaatgtcagccctattattaccaaaacaagtttccaacaaaaattaaattggcgtgtgaatttattaaaagctttacatcagcgtttaaaggaacaacgctaa

SEQ ID NO: 814 - DNA, 825 bp, Enterococcus faecalis
aagtatttaaggagattgttcatgaaaggaattattttagcaggcggaagcgggacacgcttatatccgttaacaaaagcaacatcaaaacaattaatgccaatttacgacaaaccaatgatttattacccaatgtcaacgttaatgttggcgggaattaatgaaattttgattatctctacaccagaagatacaccacgttttgaaagcttattcggcgatggccatgatttaggcattcatatcgaatacgcggtacaagaaagcccagatggtttggcgcaagcatttattattggtgaagaatttattggtgatgacagtgtctgcttagttttaggggacaatatttattatggtggcggcttatcaaaaatgttgcaacgagcggcttctaaagaatcaggggcaacagtctttggttaccatgtaaatgatccagagcgtttcggtgtggtagaatttgatgaagagatgcgggcgctttctattgaagaaaaaccagcacaaccgaagtcaaattacgcagtgacaggtttgtatttttacgacaatgaagtggttgaaattgcaaaagggatcaaaccgtcagaacgtggggaattagaaataacagacgttaataaagtctaccttgaaaaaaataaactttctgttgaggtaatgggccgtggctttgcttggttagatacaggcacacacgaatccttattagaagcgtcaacatttattgaaacaattgaaaaacgtcaaaatttaaaagtcgcttgtttggaagaaattgcttatcgaatgggctatattacaaaagaacaattggtataa

SEQ ID NO: 815 - DNA, 552 bp, Enterococcus faecalis
gagcgaagaaacgtgaaagttattgatacaaaattacaagatgtcaaaattatcgaaatggatgttttcggtgatcatcgtggcttttttacagaaagttattccaaagctaaatttgcagaacatggattagactttgattttgtccaagataatcattcattatcaacagaagcaggtgtcttgcgtggattgcattttcaaaaaggcgaagctgcgcaaacaaaactaattcgcgttgtaacaggtgcggtattagatgtgattgttgatattcgtaaagggagtccaacctatggtcaatgggaaggctacattttatcagaacataatcaccgtcagcttttagtaccaaaaggttttgcccatggttttgtcactttgacaccgaacgtgaactttatgtacaagtgtgacaattactacaatgcggcagcagacggcggtattgcttttaacgatccagcgttagctattgattggccaattgcgccagaaaaaagcgattacgtcagaaaaggatcaaaaacatccaaccttaaaagaatttga

SEQ ID NO: 816 - DNA, 531 bp, Enterococcus faecalis
gaaaaaagtaggagagtttcaattatgaaaaaaatcatcgtaacaggtggagctggttttatcggctcaaattttgttcattatgttgtaaagaatcatccagaagttcatgtaactgtattagataaattaacgtatgcaggaaatgaaaaaaatcttgaaggtctaccaagtgatcgcgtggaattagtcgtaggagatatcgctgatgctgaattagttaatcgtttagtcgctgaaacagatgcggttgttcactatgctgctgaatcgcataacgacaactcattaaacgacccattcccatttgtacaaaccaatctgattgggacgtacacattgatcgaagcttgccgtaaaaacaatgttcgttaccaccatgtatcgactgatgaagtttatggcgatttacctttaagagaagatttaccaggacatggaaaaaggcgaaaggggaaaaatgcactgccgaaacgccttacaatccttcaagtccttattcttcaacaaaagcaggatctgacttgttag

SEQ ID NO: 817 - DNA, 288 bp, Enterococcus faecalis
  misc_feature (154)..(267): Nucleotides 154 & 267 are "n" wherein "n" = any nucleotide.
agtttatggcgatttacctttaagagaagatttaccaggacatggaaaaaggcgaaaggggaaaaatgcactgccgaaacgccttacaatccttcaagtccttattcttcaacaaaagcaggatctgacttgttagtcaaagcgtgggttcgtnctttcaacttacaagcaacaatttcaaatggttcaaataactatgggccatatcaacatattgaagaaattattcctcgtcaaattaccaatgtcttaagtgggatgacacanaaactttatggtgctgggtaa

SEQ ID NO: 818 - DNA, 381 bp, Enterococcus faecalis
agacgtcaggtacttaatggacaagcgtttgtgggagagcgtaaacctggacgaatcgtgacgattttaggagacactcgcaaaaccaaaaatagtgtaactttagcacgacgagcggatgttttagtccatgaaagtacgtttaataaacacgaagcaaaaatggcaaaagcctacttccactcaaccagtcaacaagcagctgaagttgcaaaagaagcgcaagtaaaacaacttattttaacgcatattagtgcccgttatttaaccaaagaggcctatcagcttcaagaagaagcccaagaaattttccccaatacaaaaatcgtaaaagatatggatatcattgagattccatttgccaatgaaggaggagcttag

SEQ ID NO: 819 - DNA, 789 bp, Enterococcus faecalis
atggatttaacaaataaagtcgttgtcgtaactggaggttcagctggtttaggtgaacaaatttgttatgaagcagctaaacaaggggcggtcgtcgttgtctgcgcccgcagaattaatttgattggtaaagttcgcgagcagtgtgctgttttaagcggacgaaaagcattttcttatcaattagatattgccgatccagaaagtgttgaacgtgtggttgaagctatttcagcagaagttggtcctatagatgttttagtcaacaatgctggttttggcttgtttgaaaattttgttgaaattgacttggctgttgcacgccaaatgtttgatgtcaacgttctaggaatgatgacgtttactcaaaaagtagctattaaaatgattgaagctgggcaaggacatattatcaacgttgcttcaatggctgggaagatggctacagctaaatcaaccgtttattctgcaacgaaatttgctgtgttaggtttttcaaatgctttacgtttagaattgaaaccgttgggtgtagcagtaacgactgtcaatccaggaccaatccaaacagaattctttgataaagcggacccgacaggcacatatctagctgcggtggataaaattgttttggaccctacgaaattagcgaaagaagtggttgggagtatggggacttctcgacgtgagattaatcgtccatttgtcatggaagcggcagcccgcttttatacattgtttccacatttaggagatttcatagcgggaaatattttaaataaaaaataa

SEQ ID NO: 820 - DNA, 495 bp, Enterococcus faecalis
ataaaaaataaaggagtcgatcaagtcatgaaaaatcaatggcgtgttattttgggccttgtgttggtcttaattgttgttatttttgctgttttaaataatcaagctgttccagtaaactttggttttactaaaattagtggaccgttaatcttaattattttaggttctgcaattattggcgcactagttggattactaacctccacaaccaccatttggaaccaacgtaaggaattaaaagctgtacaaaaagagttggatatttataaaaatgatatggataaattagtcaaagaagaaacggaaaaagttcaacgttcttttgataatcaattggctgatttgcaagccaaacaagcggcagcaccacaagtctcagaaccagtggtcaacgaacaaacgtcaaacacagaagtagacgtaacgcctgtgtcaggtagtcgtattgatcgttatgtgaaacctcgtgtgaatgaagaggaacaaaaataa

SEQ ID NO: 821 - DNA, 1191 bp, Enterococcus faecalis
tttttggaaaaattttgctataattacttggttaggagtgacgtcgtgaaaaaatcaaactatcaatggcagttacagacaaagacagaattacctgtagaatttatagaacaattaaaaaaagaagaaattaatccattaattggccaacttttatggcaccgcaatatccggacagaagaagcattacgtaagtttctacatccgactatcgaagatatttatgatccgttcttaatgcatgatatggagaaagcggtagcccgcatccagcaagccgtcgaagcgggtgaacaaatccttgtctatggggattatgatgcagatggcatcactagtaccacggttatgaaagaagcaatcgaattagtcggtggcatggttcagtactttctaccgaatcgttttgttcatggctatgggcctaataaagacgtatttgctgaacaaattgaacaaggagtccaattaattgtaaccgttgataatggtgtagccggacatgaagcaattaactacgctatggcacaaggagtagatgtaatcgttactgaccatcatgaattgcctgaacaattaccagaagcctatgcgattgtccaccctagacatccacaaggtgactatccttttggagatttagctggtgttggcgtggctttcaaagtcgctactgcgttacttggtgaattgccaattgagttattagatttggtagcaattgggacgattgctgacttggtttcattaaccgatgaaaatagaacgtttgtcaaaatgggccttcaaatgattcaaactggtgatcgaattggtttagacgttttattacaagaagcgggtgtgaaaaaggaagctgtttcagaagaatcaattggctttaccattggacctcgtttaaacgcattaggtcgattaggggaagccgcaccaggtgttgaattgatgactacatttgatgaagaacaagcgctggaaatcgctaaatatattgatcaacaaaacaatgaacgaaaagacattgtaacgacgattgccaaagaagccctggatttaatcgacccgaatgcgccggtccatattttagcgaaacaaggctggcatgaaggcgtcttagggattgtcgcgggccgcattatgcaagaaacggggaaaccaaccattatctttaacaatgagctgtatcagtag

SEQ ID NO: 822 - DNA, 195 bp, Enterococcus faecalis
cttcgaatacatgaaaagccagcatccgggcccaggttggagcacccatttcgcatcatcaagcgacagttcggcttcgtgaaagccagatacaaggggttgctgaaaaacgataaccaactggcgatgttattcacgctggccaacctgtttcgggcggaccaaatgatacgtcagtgggagagatctcactaa

SEQ ID NO: 823 - DNA, 201 bp, Enterococcus faecalis
aataggaggacaaattatatgtccatgtttttagatcaagtgacgattgatgtcaaagctggtaaaggcggcgacggaatggttgctttccgtagagaaaaatatgtaccagacgggggtcccgctggtggtgatggcggtcgcggtggcgacgttgttttagggaaggtgcgaataagcggggaaattcttctcggctga

SEQ ID NO: 824 - DNA, 1074 bp, Enterococcus faecalis
agaaaatcactttttcagcaagggtccaaagaaacacaaacatttaaaggaggaatttttgttatgacagtcaaagtaggaattaacggttttggaagaattggtcgtttagcctttcgccgaataaaagaagtttctgatgatattgaagttgtggctatcaatgatttgactagcccaacaatgttggctcacttattacaatttgactctacgcatggcacctatcctggcaccgtgacagccactgaaaatggcattgtggttgacggcgaagaaacccgtgtctacgcagaaccagatgcaagtaaaatcccttgggttaaagaaaacggagtagacattgtccttgaatgtacaggtttttatacctctgaagaaaaagcacaagctcatttagatgcaggtgtgaaacgtgtggttatctctgctcctgcaggcgcaatgaaaacaatcgtttacaacgtcaatgatgatacacttgatgccaacgataaaatcatttctgctggttcatgtacgacaaactgtctagcaccgatggcttacttcttaaataatgaattcggtattgaagttggtaccatgacaactgtccatgcctacacatcaacacaaatgctattagatggccctgttcgtggcggaaatcttcgtgcggcacgctctgctgcagacaatactattccccattcaactggtgctgctaaagcaattggcttagttattccagaacttaatggaaaattacaaggccatgcccaacgtgttcccgttgtggatggatccttaacagaattagttagcattttaaaaacaaaagtaacagctgatcaagtaaatgaagcaatgaaaaaacacaccattgataacccttctttcggttatgatgatcgtgaaattgtttctggagacataatcggcacgacagaaggttcgatttttgacccaacgcaaacagaagtaacgacagctggcgatttccaattagtgaaaactgtggcttggtatgacaatgaatatggttttacttgccaaatgattcgcttattggaaaaattcgctaatttataa

SEQ ID NO: 825 - DNA, 552 bp, Enterococcus faecalis
gaatatcttgcaaattacagttatttcttttataattattttaatttgattgataaattaagtttcttaatttgtaatcattctaaacaaggagctgtaataatggattcgactgctgctttaaaaaagacaaaaaaacaattacatgaatcaggctttaaattaacaccacaacgggaagcaaccgtacttgtattattggaaaatgaaaaagatcatttatcagcagaagaaatttacttcttggtaaaacaaaaaagtccggaaattggtctagcaacagtctatcgaacgctagaaattttaacagacttaaaagtcgttgataaagtgagctttaacgatggtttagctcgctatgatttaagaaaagaaggcgccaaacactttcaccaccatttgttatgcttagaatgtggcacaattgaggaagtggaagaagacttgcttggtgaagtagagcaaattgttgaaagtcggtatcattttttagtcaaagatcatcgcttaacttttcatggtatttgtcaaagttgtcaaagtaaacattaa

SEQ ID NO: 826 - DNA, 882 bp, Enterococcus faecalis
atgagagaattactagcaacaacatttaccggcattgtggtcgatgaaaatgaacaattttattttgttcaaaaaaatggcatcacattccgtttaaaaaaagaagaaggtacgcatgctataggggaggctgtagaagggtttggttatttaaatcaaaaacaagagccagcactgacaactacaattcctactgtgcgcattggtagctatggctttggtactgtcacaggaacgagacgtgatttaggtgtctttgtagacgttggcttaccagataaagatgtcgttatttcgttggatgaattaccaactatgcgggaactttggcctaaaaaagaagaccgagtaatggttactttaaaagtggacagtaaagaccgcatttggggcgaattagcagatgaaaaagtctttaaagcaatggcaaaacgtgggaatgctgaaatgcaaaaccaaaacttaaccgggtatgtgtatagtctgcaacctgctggtacgtatattttaactgatgatctatacattggatttatccatccttctgaacgattccaggaaccacgtttaggtgaaacagtagtagggcgtgtgattggcgtgcggccggacggcgtattgaatctttcattaaaaccaagaagtcatgaagtaatcagcgatgatgcgttaatgattctaactttcttagaaagagcaaacgatcaccaaattcctttcaccgataaatcaagccctgatgaaattaaacaaacctttggcattagtaaagctcaatttaaacgcgccttaggccatttaatgaaacaaaaattaattaaacaagaagatggtaaaacaattctaattggctcgttggaacaatcaaaagaaaaaaattaa

SEQ ID NO: 827 - DNA, 654 bp, Enterococcus faecalis
agacgctgcaaaacggttgaggtcagttataaagatggaaaaactaccaatcagctgaatcgagacacgtatcaagctgctaaggcagaagtagataaagtaacaagtgataagctgaaaaaagaactggtcaaacaagtcacgacagctgaccaagcgttaaccaaggttgaagaagaacagaaaagaattgcagaagaacaagctgccgcagagcaagcaaaacaagcagaagaacaagcgaaacaagctgctgccgcaaaaaaagaggacgctaagaaggaagaaacagcaaaaacagaagcgaatggctacacggcgccgaatagtgacggggtttacactagtccgctttatgcgccagatgctgccgatatcgctgatagtagcaatccagcgtggacatgggcaccaggtgtgaaagaaaaagtcttagacacagtgattgctcgtggctatgtggttcctggcggatattctttagaacctgccaaaattgtgaatggcgaaggttactacaatctttatgcaacaaacaatcaatcaaaattattagaaggcactacagagaaaaatgttcacatgtatttagttacaatcaatgctaaaacaggttggttcaaagggaacgcttctcgtaatgcagggcaataa

SEQ ID NO: 828 - DNA, 873 bp, Enterococcus faecalis
caatttattatagttaagaccattcaagttgtggtcatggaggatttatcatggggccaaactgaagatttaaacgcatctgaaaacatcactttcattgaaggtagcgtgactgatcaacaattaatggaaaaagtattacaagagtatcagttcgataacatttttcacttagccgcgattgctagtgtagcagactcagtagcacgtccagtggaaacacaccaagtgaattttgagagtgtgttacaattactggaattaattcggaaataccagaaagatttaaaacgtttggtgtttgcttcttctgcagcggtttacggcgatgagccaactttaccaaaacaggaagaatcagtaattcgtccgttaacgccttatgctgtggataaatttgcttctgaaaaatatgtgttaaactattgtcatttatatgatgttccaacaagcgctgttcgcttctttaacgtttatgggccaaaccaaaaccctaattcgccttattctggcgttatttcgattgtgatggactcttacaaacgcttattagccaatcaagaagtgacattcaatatctttggcgatggaaaacaatctcgtgattttgtctttgttgaggacgtggttcaagcattgaatcttgtcgctcattctgaccaatcacttggggaagtgtataatgtcgggactgggaaagcaaccgatttaaatgagttaatttgttctttaaatgatattatgaaagtcactttgccagttgaatacaaagaagcgcgagctggggacatcaaagattccttagcggatatatctaaattacgtgccattggttatgaaccgaaatatagtattcaatctggttctggataa

SEQ ID NO: 829 - DNA, 1452 bp, Enterococcus faecalis
aatataaaattagaaagtgagcataatgctatgaattcaaaagcaaaaatggtggctaaaaacctttattatactgtggctgcaaattttgcaacgttgggtatttcggttctcttaaatttatttgtccctaagttgttaggcgttacagaatacagttattggcaactttatgttttttattcttcatatgttggatttctccacttaggctggattgatggtatctatttaaaaattgggggagaagaatacgaaaatttagataaaagaaatctcggttctcaattctggtatttagcgatttttgaatgttgtatttctgcttttgtcattctttgggcttactttttcatgccgaaagaatatcaagggattattttgatattgacggccattgtttcagtaattacaattgcaaaaacgtttattctgtatgtttttcagtcaacaaatcgtattaaggaatatgctcaattatccagaaatgatcgctatttatatgtcctgttcattgcaatttactttgcattaggaggacgagatttttattggctaatcattatggatatactttctaaactgattattacggtttggggaatgtttagagttaaagacatgttgcgtgtgaacatgatgagtttgaaggaagttactcctgaaatagttgataatattaacataggtagtaaactaatgctcagtagtatagcaagtatgctaataatgggaaccattcgcttttttgttcaacagcgttggacaatcgaaacctttggtaaattgtcctttactttaagtttatcaaatatgtttttaacttttattaatgctgttggaattgtaatgtttccgttgttaagacggacaaataaagagcgattgccgtctttatttgtcacattaagaggtgtttttgttccgttgacgtatgcaattctgctgttatatgtacccgtcaaatttgttttaggtatgtggttacccgaatatagcgagagtttgaaatttatgggaattctatttcctatagttatttatgaaggccggatgtctttactaattaacacgtatttaaaaacgttgagaaaagaaaaaacaattttatttgttaacgtattgacacttgccttgtcgttaatcttatcgttgtttgtgattttcgttgttgggaacttgaatttaactgttggattgatattagtaagtttagcatttcgttgtaatttagcggaaatttttctatgcaaagatatgaatattaaaataggaaatagcactgcattggaaacgttggttacattattgtttatctttagtaatctttggtttggcggtagtatttatagtttcatttcttatgcaattgtgtatattatctatttcttattcattcataagagctttgtaaataacgcaaagaatttaaaatatttagtaaaaggttga

SEQ ID NO: 830 - DNA, 288 bp, Enterococcus faecalis
ataactataggaaatagaattcccataaatttcaaactctcgctatattcgggtaaccacatacctaaaacaaatttgacgggtacatataacagcagaattgcatacgtcaacggaacaaaaacacctcttaatgtgacaaataaagacggcaatcgctctttatttgtccgtcttaacaacggaaacattacaattccaacagcattaataaaagttaaaaacatatttgataaacttaaagtaaaggacaatttaccaaaggtttcgattgtccaacgctgttga

SEQ ID NO: 831 - DNA, 327 bp, Enterococcus faecalis
tggcgtaaacatggacaaagttcctttaaacaagaaattgatttaactgacaaacaaaatcactttgaggaaagattgaatactttacgccggagattacagcgtacagaggctgcagagaattatttagataatcaaccacatgttgaagaatttgaatataaagacaaagttctttcaaatttgattaaagagttgaatatgcgagtttctttattagaaagaaaaaaaataatcccgattctatgtgccttttttaagtatcatcacaagttttattttagcacagatatctaccatatcatgaaatataaaattagaaagtga

SEQ ID NO: 832 - DNA, 1719 bp, Enterococcus faecalis
ccctgtggtgaagactcgactgaagagcaagcgacttttgcagaaagtaaagggcaattagcactgtctgggcgttcgtcacgtgcaataacccgcactaagaatatcatgcaggaagcacacttagctggttctaaacaaaaacgaaagattgttgaaggtcaattatcacttgacgatttagaccaaaaaattgatgatggtgtggatattattgactggaaagcagtgattgttgttagtggtagcacgaaaaaacaaatgcgtgcaagaaaaaaatatttaatcaatcgttttgatagtttagatattccacttattaaagcaacgtttgataatccttatttatttcaatcaaccttatttggtaattttttgcgaatgcagacttctcgttggcaacacacgtcaacgattgaatcgtttgccgagttgaatttctttacttcacttcatgcaggtacgaagttaggcttttaccttggacgagtggatacaactttggaagaaaaagaagatagaaaatctattatttctagttcaaaaaatctaatttttatgaacatgctattagcaaataaagaaggggttgatggaaagaaaacaaacaacccacattgggcgcttacaggtgatactgggaatggaaaatcagtgacggctaaaaccttatttatgcaaatggcacttttaaaagacagagtgttatacattgatccaaaaaaagaaatgcgaaagcaatttatgtacacaattaatgaccctgaatatcaaaagaaatatcctttagatgttgattttgtgaagtcctttaatttcgtcactttagatgttcgtgatacgaaaaaccatggcgtgcttgacccgattgttttatttgatgaaacagaagcgattgcaacaactaaagcaatgttaaccaatatatacgaaggaacatggaatttaaagcaaaaaacagaaattaatgaagcgattgcgaaagttgttttagaacggaaagaaggcaaaaaggttggattttggcatgtaattgagcgattagtggaaagtgaaatttctgacgtgaaagatatgggtagatttattttgtcgactgttaaaggttcagttttagaattagctttttctcatggtgatgttgagggtctatcattcgataagaaagtaacaattttagaaattgaggacttagacttaccaactgataaaaatgaaaatttagatgaaaataaacgtctttctgttacattgatgtttgctttaggaacattttgttcgaagtttggttcaagaaatccaaaagaagaaacagtgacgttctttgatgaatcttggatttttcaatcttcgccagaaggtaaagcgattttaaaatcaatgaaacgtattggacgttcgtttaataatttcttagtattgattacacaatcaacaaatgatttggatgatagtgaagatggtactggttttggtacagtgatttgttttgatgaagttcaaaatcgagaaggtgttttgaaatatctcaatttaccagtgaacgaaattaacatgaaatgggtctcaaatatggttcaaggtcagtgtttaatgaaagatatgtttggtcagactaatcgaattgttgttcatgttatttttgaagaatggttggaactgttcaaaaccgttgatgatacagaagcttctaaaatggagaaccgctttgttgcatag

SEQ ID NO: 833 - DNA, 1182 bp, Enterococcus faecalis
gaaggaagtgagaatatgcagtatctaattgacagttatagtgcgtatacggttgatggtggtttgttggataaaggatggcaagtagtgaattggttctttgtagatataccattctttatcttacgaatgtttgtttctttttttcttttttgtgagaacgtcttaaaccaatctagtttctttgaaggaaaacaagaaacagtattgaatatgtcaaaaaatgttctaagtggcattggtggcaagggatttagaggtggttctttactagcattagcgattcttattagtgcatattatctgctttatcatttcttttccagtcgtagaagcttttcaaaagtattccttcattatttagcagttgttattttgtttggtttttggtttggctctgtatcaacgtcaacaggcacaacaagtggctcaatgttcttgattcaatcaactaacgcaattgctaaaggagtacaaagtacgtttactacaagtgccaatttaggaacagaaggttctaaagatggagaagtataccaaagtcctatttttgatgccacagtaaaacaaacatttaattttgtaaatagtggttcacttgatgggaaaatggaaaatggtaaaaagttagatgaaggtaaactactagaaaagcctaaattgtctaaaaaagaaaaagcaaagtttgaggatgaaagaagtacctatataaaaaataatgagaaagataatccatacttctcacaggacggagcaaaaacaatggaaaaagcttttggcgttggtgtgggtttagtcaatttagcagttttagcagtgcctgtcacgtatattaatattatgctaaatgtaattcaaatcattgttgatttactcattcttgtttttccgattattgcgttggtgtctttcttccctcggtgtcaaatgatgatgtttaaattttttaaatcattaattggcattttatttttacctgtagttttcggtatatttttgtctgtgttattttggatcaataagttaattgaccaagcgtttttaggattgatggataaagtaagtagtagtttattaatggtgatgtctggtggtgttttttcttttatgggcacattcaattgttacctgcatctaggtgaaaattattttgtatcggaaaatttggaaaagcagatataa

SEQ ID NO: 834 - DNA, 270 bp, Enterococcus faecalis
ttgtttgatttatattttaaattatcaataaaagaaaagctaggaaaaaagcattcaaacgaaaacccagttaatacagatacaggcgttgtgattgtcgcagttgaagatagtaaaccgattattcaattagcagacggaacaacaaagaaagttgaagctaaagaaattggagcagacgttcaaaaagacggaacagtaacggttaaaggttcagacggaagaatgaaagttttaccaaatacaggagagagccaaaatactgcattt

SEQ ID NO: 835 - DNA, 744 bp, Enterococcus faecalis
tgtaaaattgagaaaaaagacagagaggacagagtaatgaatcattttaaaggcaaacaattcaaaaaagacgtcattattgtcgctgttggttactacctgcgttacaatctaagctatcgtgaagttcaggaattgttatatgatcgtggaataaatgtttgtcatactacgatttatcgttgggtgcaagagtacagcaaagtcctctatgatctttggaagaagaaaaatagacaatccttctattcatggaaaatggacgaaacctatatcaaaattaagggacgttggcattatctttatcgtgcaattgatgcggacggcttaaccttagatatctggttacgaaagaaacgggatacgcaagcaattgtgaccgataaagcaccttctcttggctccgcctttagaaagttacagagtgtgggtttatatactaagacagagcaccgaactgtgaagtatcttaacaatttaatagaacaagaccatcgacctattaaacgacggaataaattttatcaaagtctccgtacagcctcttccacgattaagggcatggagaccattcgaggaatatataaaaagaaccgaagaaatggaacgctcttcggattttcggtgtctactgaaatcaaggttaatgggaataccagcctaagatatttggagttcagagagggcgcgtttgattttcaaactttgcaacagaacccttcactttatcgacaaacgctataa

SEQ ID NO: 836 - DNA, 219 bp, Enterococcus faecalis
aatttattccgtcgtttaataggtcgatggtcttgttctattaaattgttaagatacttcacagttcggtgctctgtcttagtatataaacccacactctgtaactttctaaaggcggagccaagagaaggtgctttatcggtcacaattgcttgcgtatcccgtttctttcgtaaccagatatctaaggttaagccgtccgcatcaattgcacgataa

SEQ ID NO: 837 - DNA, 201 bp, Enterococcus faecalis
atcgaaatgaaaaaagtatgtgctattttaatgatttctgcgtcagttttaggaatggtgcccagtaatgtaccaatttttacagcagaaataaattatgcgcatgaaaatgaattacaaatgaatccgtttgttatagcgtttgtcgataaagtgaagggttctgttgcaaagtttgaaaatcaaacgcgccctctctga

SEQ ID NO: 838 - DNA, 987 bp, Enterococcus faecalis
gaggaattgattatgtgtacagcaattacttatgtatcaaaagatcattactttggaaggaattttgattatgaaatttcttataatgaggtggttactattacgccgagaaattataagttttcatttcgagaagttggaaatttagatcatcattttgcaataattggaattgctgctgggattgctgattatccgctttattatgatgcaataaatgaaaaaggattaggaatggctggattaaacttttcaggctatgcagattataaaaaaattgaagaaggaaaagaaaatgtttctccatttgagtttattccttgggtattgggccaatgctctactgtagatgaagcaaaaaaattattgaagaatcttaatttagtaaatattaattttagtgatgaacttccgttatcccctctccattggctgttggctgataaagagcaatctattgtggttgaaagcacgaaagaaggcttacgtgtatttgataatcctgtaggcgtattaacaaataacccaacatttgattaccaattatttaatttaaacaattatcgtgtactttcaactagaactccaaaaaataatttttcagatcaaatagagttagatatttatagtagaggaatgggtggtattgggttgccaggagatttatcatcagtatctagatttgtaaaagcaacttttactaagttaaattctgtatcaagaagttcagaatatgaaagtattagccaattttttcatattttaagttctgtcgaacaacaaaaaggattgtgtgatgttggtgatgaaaaatatgagtatacgatttattcttcatgttgtaacctggaaaagggaatttattactatcgtacgtatgacaatagtcaaattactgctgtggatatgaataaggaaaatttagagaaggatagcttaattgtttatccaatggtggaaacacaacaaattaactatgctaattaa

SEQ ID NO: 839 - DNA, 426 bp, Enterococcus faecalis
gatgtgattattgtagccgtgggctactatcttcgttataaccttagctatcgtgaagttcaagaaatcttatatgatcgtggcattaacgtttctcatacgacgatttatcgttgggtgcaagaatatggcaaactactctatcaaatttggaaaaagaaaaataaacaatccttttattcatggaaaatggatgaaacgtacatcaaaattaaaggaaaatggcattatttgtatcgagccatcgatgcagatggtttaaccttggatatttggttacgtaaaaaacgggacacacaagcagcctatgtttttcttaaggggttagtgaagcagtttgatgaaccgaaggttgtagtcacagataaagccccttctattacagggcctttaagaaatgacttcttaaccggcatttggcccaat

SEQ ID NO: 840 - DNA, 246 bp, Enterococcus faecalis
ccgtgggctactatcttcgttataaccttagctatcgtgaagttcaagaaatcttatatgatcgtggcattaacgtttctcatacgacgatttatcgttgggtgcaagaatatggcaaactactctatcaaatttggaaaaagaaaaataaacaatccttttattcatggaaaatggatgaaacgtacatcaaaattaaaggaaaatggcattatttgtatcgagccatcgatgcagatggtttaa

SEQ ID NO: 841 - DNA, 642 bp, Enterococcus faecalis
aggagaatagatatgggaaaatttcaagtaattgatcatccgctaattcaacacaaactaacaatgattcgcgaaaagaactgtgggacaaaggttttccgcgaagttgtcaacgaaattgctatgttaatggcttatgaagtatcacgggatatgcctttagaggatgttgtcatcgaaacaccgatgggtaaatcaacacaaaaaacactttcagggaaaaaagtagcaatcattcctattttacgtgccggcattggcatggttgatgggattttagaattaattccagcagcgaaagttggacacgttggactttatcgtgatgaagaaacattgcaaccgcatgaatacttcgtgaaattacctgaagacattgcaagtcgtcaattatttgttgttgacccaatgctagcaacaggtggttccgcaattatggccatcgattcattaaaagaacgtggtgctagcaacattaaatttgtatgtctagtggccgttccagaaggtgtgaaagctttacaagaagcgcacccagatgtagatatttatacagcagctttagatgagcgcttaaacgaagacggctatatcgttcctggtttaggggatgctggtgaccgtttattcggaacaaaataa

SEQ ID NO: 842 - DNA, 240 bp, Enterococcus faecalis
caacttcgcggaaaacctttgtcccacagttcttttcgcgaatcattgttagtttgtgttgaattagcggatgatcaattacttgaaattttcccatatctattctccttcattattttattctttcttattgtaaaacaaaagagccgaggacacaagttgaattccttaaatcctaagctccgactcttatttgtacagagaatcgcgcttcagctatccctgatgttaattatataa

SEQ ID NO: 843 - DNA, 315 bp, Enterococcus faecalis
caatttttgttatatactgttgtcataaggcaatggaggtggataattatgaaaacattattaaataaacaagcaatggaaacccttatgaaatctaaaaacgatgatgtttattcgttggcaaaacgtatgaatgttgctccgtctactatatatcgtattttaaatggagataggggtgttggtagtgatttaattgccaaacttttaagggcttttgatttatctgaaaaagattttgataagctttttatttttagcgaggtgttgccaaatgtcaatggagggtcgaaatcatgccagaaaaaaacatag

SEQ ID NO: 844 - DNA, 312 bp, Enterococcus faecalis
ctcatgaattttggggaaaaattaaaatatttacgtgaatcaaaaggacttggagttaaccagcttgctttgaaatcaggagttaacgcttctaatatatctagattagagaaagggataagaaaagatccaacttttgatacagtaaaaaagttagcgagagcattaggagtatcggtttcttattttgacgatgaggaaaaagaaataaataccgttgctgctcacatagatgatgacgtcacggaagatgaaatgaacgagatactctcttttatcgattacatcaaaaaacgcgatcataataattaa

SEQ ID NO: 845 - DNA, 480 bp, Enterococcus faecalis
aaagtaggtgtttttatggttacttcagaagaactgatggctcgattttcggatttaacgtataagtttgaaccaagtatgcctgaaaagcaaaaaggactgtatattaacaatgtagtttatttaaatcctcaacaacatcctagagaattaattagtactgttgcagaagaaattggccatcacctcacctcggttggtgatataatagatcaagatacaaatgaaaagagaaaacaagaacaaaaagctcgtgatattggagcaacaatggtagtcacacctcaagaattgattgattgctatcatgaacgttttacatatgtttgggaatgcgcagatttcctaggcattacaaaacaagccttggaatgtgctttagctacttattccaaacagtttcctgaaggactcatatacggggattacaaattgttttttaaacctaacggtacattgggtatcgttgaatggttttaa

SEQ ID NO: 846 - DNA, 597 bp, Enterococcus faecalis
aggagtctatttatgcaaaagagtgttttgtctttattgggaatttctttgttgttactaacagcttgtggtggttctaagctaaccgtagaaaatttagatagcttaaaaaaaggtatgtcagaaaatgaagtatctgagatacttggctatccagataaagtggaagaaaatatcgtaaaagactggatatataacacggataaaaaatatgagaatgtagttataagcttttatgataataaagtctcatctatagatgttccatattctatatcgcctaagggtaagaatccaattacgccagaaaaatatttaaactcatcatcggaacctgaggatgcccaaacaaaaacatcaagtgataagaattcaaatataaatgatttgactactgatccttctattgatcagaaaattattctaagagctttggctcaacagcaatttgactcacaatatccttataaaggaagtaaaattcattctgtgttgggaatactaaaagattggaccaaacaagatgaccattggtttttcagtgccgaatcaactatactaaacatttatggagcaaaagcaagtaaaacagtataa

SEQ ID NO: 847 - DNA, 303 bp, Enterococcus faecalis
attacgaaaggattgaatataatgatgacaccatatgaattacgagaaaaattgaaaagagatgttccagaagtaacaatttatccaatattgacaaacccatattatagtgaagaagaatatcaagatgtgttgaaagatcaattaaaactaaaaaaagatattgaaactgataatatggtgaccctccccttgttttcttgggaagaaaaagaattaaaaatggatcagttctatgaaaaaggttggtacaaacctaaactttatactcttccaaaatccatgttcaggagtgaagattaa

SEQ ID NO: 848 - DNA, 1233 bp, Enterococcus faecalis
agattaatggcttctattaaatcttataaattgaaaaatggtcaagaacgttgggaatacttcgtttcaaatgggcgtaacaatggtactggcagacaacaaaaaatacacaagagaggttttagaagtcataaggaagctttgaaagctgcaaaaataattgaagggcaaattgcatctgaagaattcgttaaagaaaatccacaaaaaatgactatttcaaaatttatgaatatttggataaacgaatacaaaaataacgttaaggaaggatcacgaattgtctatcgagatgctatccgtatgtatattgatccatatataggaaattatcaattaaataaatataaacctgcagatcaccaaaaatttattaatagcttatttacgaataaagaattaggaaaaaataaaaacgggcttagttataacacagtaaaaattgtaaatgccgctttgtccaatgctttcaaaaaagcacaaaaattaggttatgtaaaaagtaatcctacttacttagtagagtttccattagataaagtaaaagaaaaaactaataaagaaaagaaactagaattctacactttagagcaggaaaatctatttcttgacaccgctagaaattttgacgattttatgtggtatgtattttttttaatcattttcgacttaggcttgcggaaaggcgaagtaatggccttacgatggtttaactttgattttagagataatattctcacatttgacaagcagcgtttgtatagaaaagagcaacctggtcaagtaattttagatgatgttaaaactgatgctgggaagagaagtttaaaaatgacaaacagagtgagaaactccgtcttagaactctatagtattaattatgatcttacaagtaatgtattacccatgactaactcaaaccaagattttttatttatcaatcatagaggaaaaaacgttggcttgcctattcgtcaacgatccgttgacacagcttggcaccgtatcattcaaaaagcaaacttaccaaaaatcagaattcatgacggtcgccatactaatgctgctcgtttacgacaagcaggagttccacttgaggacattaaagacatgcttggtcataagaatgttaaaacgactgagatatatgcacatgtctctcctgaagtgaaagaacgagctgtaaataaacttgaattatatcaaatgcaacacaaaaaatcaggtaactaa

SEQ ID NO: 849 - DNA, 477 bp, Enterococcus faecalis
atcagaaggaaaagatggcaaagtattttcccagcagccgcagacttttcaactgacttacattccatgggtcaatatgttcaagaaggtatgcgtaacttatttgaaacagtggttaaaattgaaaatccacgccatagcatttcaattccagaacaaaatgaagacttagatggcctaggctatttacaaggaaaagaaattgatttcgtcaatacaaaagcgttcgaaggtacgttgcttgctcacacagatggtggtgtgccaaacatgatcgttaaagtgccaacaatggatgcttattcattaggttatgttatgtactttttcgaaattgcagtgggcatctcaggttacttaaatggggttaatccatttgaccaaccaggtgttgaagcttacaaacgcaacatgttcgctttattaggtaaaccaggttttgaagaattagcaaaagatttaaatgcacgcctatag

SEQ ID NO: 850 - DNA, 333 bp, Enterococcus faecalis
  misc_feature (53)..(53): Nucleotide 53 is "n" wherein "n" = any nucleotide.
ggaatacggcgcaacgagggacttaaaagaaaaaccaagccttttcattatgntgcgttacgtaacattttatatcgcaaaggcaaaacaactgaaatgttatttaactatgagcctggcatgcactatttttctgaatggttgaaacaattatacggtgaatcagaaggaaaagatggcaaagtattttcccagcagccgcagacttttcaactgacttacattccatgggtcaatatgttcaagaaggtatgcgtaacttatttgaaacagtggttaaaattgaaaatccacgccatagcatttcaattccagaacaaaatgaagacttag

SEQ ID NO: 851 - DNA, 2913 bp, Enterococcus faecalis
agacgatgtgagaaaaggtttgttgaaaccttagcaattcagacagaagatgttatttttccagaacaaccgcaactgtttgtagcaatgggtgcagcactttattcagaagatgcagccgaatgtacattggaagaattaattcagcgcttagtgaacagccaggctactgatttacagccgagcgacacgttaccaccgttatttaacagcgcagaagatttggcagattttcgagaaagacatgcgcaagcccaagcaacggagaaacctttatctcaacatactggcgtgacctttttagggattgatgcaggctccacaacgacaaaagtcacattgattgatgaagatggtcatttgttgttttctttttatggtaataaccaagggcaacctttagaaaccaccatgacagtactgaaatcactttatcaacaactgcctgaagaagtttttatcggaaaagcggctgttacaggatatggagaacagctaataaaaaatgcgttaaaagtcgatattggtgaagttgaaacgatggcccattacaaagcagccaaccattttcagccaggtgtggattttattttggatatcggaggacaagatatgaaagcgatgaccattaaaaatggcgtgctttcctcgatacaattaaatgaagcttgttcttctgggtgcggttcctttatcgaaacctttgcgcaatctttaaaatataatgtgaaggattttgctttggcggctttagaatcgcaagcgcctgttgatttaggttctcggtgtactgtttttatgaactcaaaagtgaaacaggttcaaaaagaaggggcctccgtcggcgatatttctgctggactatcttattcagtcatcaaaaatgccatttataaagtcattaaggttcgccgacctgaagagttgggagaaaagattgtctgccagggaggaacattttacaatgaagctgtcttgagagcttttgaaaaaattagcggtcgtgaagtggttcgtccttctattgctggtttgatgggggcctatggagcagcgctgattgctttggacgcttatgaaattggggaagaaaccacgcttctttctttagaagagttagcggcatttacctctgaaaaggaatttactcattgcggcttgtgtgaaaacaattgtcaattaacggtcacagtgttttcagatgggcgccaatttattacgggaaatcgctgtgaacgtggtgcacgaattaaaattaaacgagaagaacgcaaagtaaatttggttgattataagtaccgcaagttatttaagtaccgacctttgcgggaaaataaagcgtttcgtgggcgcttgggtatccctagagtcctaaacatgtatgaaaattatcctttgtggcatacattttttactgacttaggctttcgggtcgaattatcgccacgttctaataagcaaatctatgaacaaggccttgaaacgattcccagtgatacggtttgttacccagcgaaaatggcgcatggacatattcaagcattaattgatgcgcaagtgccaattatcttttatcctggtgttgtttttgaacagcaagaaacagtggaagcagataatcattttaattgtccaattgtgcaaagctacccagatgttattcgaaataatgtggatgccatcagagagggccaagtggattatcgaaatccctatcttaatttagcgaatgaagctgcagttgccaaagttttagctgaaaattttgctgatttagggatttccttagaagaaattcaaacagcgctgcatcatggttatcaagaattagcagcttttaaaaaagaaattcaagaaaaaggcgaagaaacgttagccatgttaactgaaaaaggccagagagggattgtcttatcggggcgaccgtatcacttggatccagagattaatcacggcattgccgaagtcattacacaggaaggattccatgtcttgacagaagacagtatctcgcatcttggagacgtgcagaatttacgtgtggtgaatcaatgggtctatcattctcgcttatatgcggcggctaaagtagtggctaagacgaaaaatttagaacttgtccaactgaattcctttggttgcggcttagatgctgtgacaaccgatcaagtagaagaaatcatggatcggtctggcaaaatttatacagtcctcaaaatcgatgaaggtgcgaatttgggcgcaattcgtattcggttgcgctccttgaaagcggctgtcaatgagcgggagaagcaacagtttgttccgcatatgcaaatggaagagccagagaaaattgtgtttacaaaacaaatgaaaaaaacacataccttactgttaccaatgcttagcccgattcatcaatctggattagtcgatgtagcattacaagcttctggctatcatgttgtctgtttgcctgcgcaggataaagaagccgtgaatgtcgggttaaaatatgtcaataatgatgcgtgttacccagcaattatttctatcggacaactagtcgaagctttggaaagtggtcaatatgatttggataatgtcagtgtcttaatgacgcaaacagggggcggttgtcgcgcaacgaattacattcccttattacgaaaagccttaaatgatgctggtttttctcaagttcctgtagtttcagtttcgatgggcaataaaggggtcgaatccaatccaggatttaaatttacgttgccaatgatcaaacgcttagtggttgcctttttatatggtgacttattcgaacgagtagtttatcgaacaagaccttatgaaacagaaaaaggaatggtggatcaactgcaccaagattggctaaaaagagtggaagcttatgtccgggtcctgccctga

SEQ ID NO: 852 - DNA, 2889 bp, Enterococcus faecalis
aataaatttactgctccgctgatgctgtatgcaaaagatccaaacatacaatggccaatttatcgtgcaacaggagctaacttaacagatatttcaatcaccgttttaggtactggacttttgttagaagataatcaacgcctagtacaagtacaagaagctgttccgtccgttttaaaaagtgtttcctctggtgatggcttatatcctgatggttccttgattcaacatggttattttccgtacaacggcagttacgggaatgagttgctaaaagggtttggacgaattcagactattttacaaggttccgactgggagatgaatgaccctaacattagtaatttatttaatgttgtggataaaggttacttacaattgatggtaaatggaaaaatgccatcgatggtttctggtagaagtatttccagagcgccagaaacgaatccttttactacagagtttgaatcgggtaaagaaacaatagctaatttaaccttaattgcaaaatttgcaccagaaaatttaagaaatgacatttatacatctatccaaacgtggcttcaacaaagtgggtcatactatcatttctttaaaaaaccaagagattttgaagcgttaattgacttgaaaaatgtagtgaatagtgcgtcacctgcccaagcgacaccaatgcaatctttaaatgtatatggttcgatggatcgagtcctacagaaaaataacgaatatgcggtggggatcagtatgtattcacaacgtgtcggaaactatgaatttgggaatacggaaaataaaaaaggctggcatacagcagacggcatgctttatttatacaatcaagactttgctcagtttgatgaaggatactgggcaacgatcgatccatatcgattaccaggaacgacagttgacacaagagaattggcaaatggtgcttatacagggaaacgcagtccccagtcatgggtaggtggctcaaataatggacaggttgcctctataggaatgtttttagataaaagtaatgaaggaatgaacttagttgctaaaaaatcttggttcttattagatggtcaaatcattaatttgggaagtggcattactggtacgacagatgcttcgattgaaacaatcctcgataatcggatgattcatccacaggaagtgaagcttaaccaaggttcagacaaagataattcttggattagtttaagcgcagcgaatccattgaataacattggctatgtttttcctaattcaatgaatacgcttgatgttcaaatagaagaacgctctggtcgctacggagatattaacgaatactttgttaatgataaaacctatacaaatacatttgctaaaattagtaaaaattatggcaagactgttgaaaatggtacttacgaatatttaacagtggttgggaaaacgaatgaagaaatcgcagctctttctaaaaacaaaggctatactgttctagaaaatacagcaaacttacaagccattgaagcaggtaattatgtcatgatgaatacatggaataatgaccaagaaattgcaggactgtatgcgtatgatccaatgtcggttatttcagaaaaaattgataacggtgtttatcgcttaactcttgcgaatcctttacaaaataatgcatccgtttctattgaatttgataagggcattcttgaagtagtcgcagcggacccagaaatttctgttgaccaaaatattatcactttaaatagtgcggggttaaatggcagctcgcgttcaatcattgttaaaacaactcctgaagtaacgaaagaagcgttagaaaaattaattcaggaacaaaaagaacaccaagaaaaagactacaccgcaagcagctggaaagtctacagcgaagcattgaaacaagcacaaactgtggcagatcaaacaacagcaacgcaagcagaagtagaccaaacagaaacagagttacgttcggcagtgaagcaattggtaaaagtgccaactaaagaagtagataaaaccaacttgttgaaaatcatcaaagaaaacgagaaacaccaagaaaaagactacaccgcaagcagctggaaagtctacagcgaagcattgaaacaagcacaaactgtggcagatcaaacaacagcgacacaagcagaagtagaccaagcagaagcaaaactacgttcggcggtgaagcaattggtaaaagtgccaactaaagaagtagataaaaccaacttgttgaaaatcatcaaagaaaacgagaaacaccaagaaaaagactacaccgcaagcagctggaaagtctacagcgaagcattgaaacaagcacaaactgtggcagatcaaacaacagcaacgcaagcagaagtagaccaagcagaaacagagttacgttcggcagtgaagcaattggtaaaagtgccaactaaagaagtagataaaaccaacttgttgaaaatcatcaaagaaaacgagaaacaccaagaaaaagactacaccgcaagcagttggaaagtctacagtgaagcattgaagcaagcgcaaactgtggcagatcaaacaacagcaacgcaagcagaagtagaccaagcagaagcaaaactacgttcggcagtgaagcgattaacattgaaaaatagtggggaaaataaaaaggagcaaaaaaatggggggaataatggacacttaaatactagtacaggagttgatcaaactggtacgaaacaagttaagccatcaagccaaggtggtttcagaaaagctagccaatttttaccgagcacaggagaaaagaaatcgatcgcgcttgtgattattggtcttctagttatcgccagtgggtgtcttttagtttttcgtaaaagtaaatcgaagaagtaa

SEQ ID NO: 853 - DNA, 183 bp, Enterococcus faecalis
atccctcgtttctttccgactaatagctttattatagcggagtttttgaatttaagaaagaagcttgttaaaaaggaattgggttttccttacaaaagctggggaagtttgctggtttttttagtaattaaagcgcaagggtacgcaagaaagacaatgattagtataatagataagaactaa

SEQ ID NO: 854 - DNA, 1737 bp, Enterococcus faecalis
tcggaaagaaacgagggatttattatgtcatttgatggcgtatttactcatagcatggttcatgagttgacagaaacactcgtaagtggccggatttcaaaaatccatcaaccttatgaaaacgaagtcgttttagtcattcgtgcgaaaggtaaaaaccataaattattattatcagcacatcctagttatgcgcgcatacaactatctacaattacctatagcaatccggaaacacctcctaattttgtgatgatgttacgaaaatttctagacggtgccattttagaaacgattcaacaaatagaaaatgatcgcgtgattcacttcaccttttcaaaaagagatgaactaggtgacttacaaaatattgttttgattgttgaattaatgggacgtcacagtactatcgttttagttaaccaatcttctggaaaaatcttagatgcgataaaacacattggaatgagccaaaatagttatcgttcgttgcttcctggagcaacttatattgaaccgccaaaaccaatgggacttaatccgctcacggcctcaaaagaagaagtctttgcgcttctttctacagctcctgaattaaacggacgctatttacaacaacatttccaaggtctaggcaaagatacagcagacgaattaagtgcccgtttacttgcacaaccaaatgaaaaaatggccatctggacggaattttggtcctcagtcactgaagctgttgtaccgacattaacagttactgaaaaaaaagaatattttacgcccattccttatcaatcattagttggtgaacaaacaacgtatgcgacactcagtgaattactagatgccttttattctggtaaagcagagaaagaccgtgtcaaacaacaaggcggcgaactaattcgcaaaattgaaaatgaactaaaaagaaatcaaaagaaacttaaaaaattacagcaaaccttagccgatacagaaaacgctgaaaattaccgtcgcgacggagaactattaacaaccttcatggcacaagtcccaaaaggagccaccgatgtggaattaccaaattattatgaagaaaatgcaccgttgcgtatctcgctaaatcctgcactttcacctaatcaaaatgcacaaaaatattttcaaaaataccaaaaattgaaaaatgctgtccgagttgttaaaacacaaattcagcaaacacaacaagaaatttcttatttagagtcagttgtggcacaacttgaaattgcgacaccaatggacattgaagtgattcgtgaagaactgattgaacaaggctatttaaaacgtaaaaaaaataaaaaacaaaaacagccgaaaaaaagccaacccgatcttttttatgccacagatggcacacctattctcgttggaaaaaacaatttgcaaaatgatcaattgactttacgaaccgctaaaaaaactgattattggctccatgccaaagatattcctggatctcatgtaattattcgtgacgcacatcctagcgaagaaacccttactgaagccgcacttctagcagcttatttttcaaaatatcgactttcttcacaagtgcctgttgactatgtccaagtaaaacatgtgcataaacccaatggagcaaaaccaggttatgtgatttatgaaaaccaacgaacgttatatgtgacgccaacagaagaatcgatcaaaaaaatccagcaaaataaggcttctgcttcctaa

SEQ ID NO: 855 - DNA, 486 bp, Enterococcus faecalis
tcccaaggcgcaatgagtcttgttaaggagctttctatcaataatggaaaactttatcaataccctgtagatgctattaaaacactgcgaactagttgtgaagattttacgtcaaaaatagaaacaagtaatacttatgaactggaagtgacttttccggctaatcagaaatcagaattacttctttttgctgatgataaagggaatggactcagcttaatagttgatactaaagaaggaaaagttattttagatcggagtaaagcaggaattcaatatgcaattgattttggtatgactcgtgaatgcttaatagatactgaagaaacaattgctaatatttttgtagataattcaatcattgagatttttattaataaaggagagaaagtatttaccagtcgtgtatttcctgagaaggaccaaaatgggattcaaataaaatcagggaaacctattggaaaatactttgaattggaatattaa

SEQ ID NO: 856 - DNA, 1008 bp, Enterococcus faecalis
aatcagggaaacctattggaaaatactttgaattggaatattaatatggtagcaaaattaacagatgtagctgaattagctggagttagtccgacaactgtatctcgtgtcattaataacaaaggctatttgtcagaaaaaactaaaaaaaacgttcatgaagctatgaaaattttaggatacaaaccaaataatttagcacgaggcttacaaggaaaatcacctcaacttataggtctcattttccctaatattagtaacatattctatgcggaactcattgaataccttgaaatagaattatttaatcaaggatataaaacaattatttgtaatagcgaaaatgatcctggaaaagaacgtgaatatcttgaaatgcttgaagcaaatcaagtcgacggtattatttcttctagtcataatcttgggattgctgactatgagcgtgttcaagcaccaattattgcttttgatagaaatttagcaccaaatgttcctatcatcgcatcagataattttgaaggtggtaaattggcagcaagcgttttacggaaaaatggttgtcaaaatattattatgattactggaaatgataatacagattctcctacaggtttacgtgctttaggattttctttccaaattccagaaggaaaagtctttaaagttcctaatagtttgtctacaattcgtcgagagatggaaattaaatcgattatttcaactaataaaccagatggcatttttatttcagatgatttaactgctattcttactatgaaaattgtaaaaaaactcaacttaaatattccagaagatgtgaaaattattggttacgatggaacatcatttattgaacaatttttttcacaattgaccacaattaaacaacctattgatgaacttgcaaaactaattgttgatgttttgttgaaaaagattaagggagaaaagataaataaggattatattttacctgtatcattactttctggtgggagcatttaa

SEQ ID NO: 857 - DNA, 366 bp, Enterococcus faecalis
aaaatggtaaaagttcctcatcaaggtgatattttattgttgaatacggctcctagatcaggacatgaacaaacaggtaagagaccgtatattgttttaagtcatgatattattgcagattacagcaatgttgttattgtagctcctatatcaagtacaaaaagaaactatcctttatatgtttctattaatccttcttacggaatgaaaacatcaggtaaagtattattagatcaattaaccaccatcgattatgaggctagacaatgcgtgtttttagaaacagcacacgaaaaattaatcgatgaattattgctaaaagttagaaccgtatttcaaaaagtaaataaaacaaataaattttaa

SEQ ID NO: 858 - DNA, 276 bp, Enterococcus faecalis
gaggtgaataaaatggtaatgttatcaataaaaaaatggggcaatagtaacggtcttagacttcctaaatctgtgatggaatatctccaaattcatacagaagataaagtgaaaataacacaggaggaatcgaatggtaaaaaacgattaattattgaagctgtggattctgataatgatttaacaattgaacaattgtttgaaaattataaagaagagaaggtgcatgtaactattcaagatttaggaaatgcggtaggaaatgaaaaatggtaa

SEQ ID NO: 859 - DNA, 885 bp, Enterococcus faecalis
gttaggagagtgaaacagatggaagagacaaacacatttgatatgcgtggctacgtaggaattgcgagcttattagttatcctaattgcgggaattggtttatttatttatggagcgagtcataccaatggtgttcttgttgttttaggtattattttgttagttggggctattttatttttaagttccttaaccattgttagtcccaaccaggcgaaagctattttattttttggtcgctacttaggtacgattaaagaaaatgggttgtttattaccattccatttacgcaaaaaatgaacatttctttgaaagtgcgaaatttcaatagttctctattaaaagtcaatgactctgacgggaatccaatcgaaatctctgcggtcatcgtttttcgggtagtcgatacagctaaggcgttatttaatgtcgattattatcaagactttgtggaaattcaaagtgaaacggcaatccggcatgtagcaacacaatatccttatgacactttttcagataatgatgtaactctgcgaggaaataccgaacaaatttccgaggagttaaccaaagaattgcaagaacgcttagcagtggctggtgtagaggttatcgaaacacggttgaatcatttagcttatgcaactgaaatagctagctccatgttgcaaagacagcaagcaaaagcaatcttagcggctcgacaaacaattgttgaaggtgcggtaagcatgacacaaatggccttagaacagattgaagaagggcaagaaattaattttaccgatgaacgaaaagtacaacttattaataatttactagtctcaatcattactgataagggcacacaaccagttattaatacaggcgacgtttcttcttaa

SEQ ID NO: 860 - DNA, 876 bp, Enterococcus faecalis
atgcgctatttaagcaaggacattttagaggaagtcatcactcaacgcccctctgactcttataaaagtaattttgggcgtgttgtattaatcggaggaaaccgacaatatggcggagccatcatcatgagtaccgaagcgtgtatcaatagtggcgctggtctcaccactgtgattactgatgttaaaaatcacgggcctttacatgcaagatgcccagaagcgatggtcgtgggctttgaagaaacagtccttctgacgaacgtcgtagagcaagcggatgttattttaattggtccaggtttaggcttagatgctactgcacaacaaatattaaagatggtactcgcccaacatcaaaaacaacaatggttaattatcgatggctcagcaattaccctgtttagccaaggcaatttttcccttacctatcctgaaaaagttgttttcacacctcatcaaatggaatggcaacgtttgagtcacttacctatcgagcaacaaacactggcaaataaccagcgccaacaagcaaaattaggcagtacgattgttttaaaaagtcatcgcaccacaattttccacgcaggagaaccttttcaaaatacaggtggcaaccctgggatggctactggcggaactggggataccttggctggcatcattgctggttttttagctcagtttaagccgacaattgaaaccattgctggcgccgtctacttacacagtctcattggagatgatttggccaaaactgactatgttgttttaccaacgaagattagtcaagccttgccgacatatatgaaaaaatatgcccagccccacactgcacctgattctgaactattagaacagaagcgttcgagataa

SEQ ID NO: 861 - DNA, 546 bp, Enterococcus faecalis
tggtttataacaaatgaaaaagcgcaaagttattggaaaaaagcacaagcagaattaggagaaaaggttaacgttgaattgatggtaacagatgatggttcttacaaaaaaattggtgaaagtttgcaaggctcgctacaagaattgtttcctggtttgacaatagagctaaccgcattgccgactgaagctgcattgaactttgggcgagaaagtgactatgatttattcttaatttactggacaccagactatcaagaccctatttctaccctgatgactttatacaagggcaatgatcgcaattatcagaaccctgtctatgacaaattattagatgaagcagccacaacctatgccttagagccagaaaaaagatgggcgacactgattgcagctgaaaaagaagtgattgaaacgactgctggcatgattccacttagccaaaatgaacaaacagtcctgcaaaatgataaagtcaaaggcttgaattttcatacctttggcgctccattaacgttaaaaaatgtttataaggaaaaataa

SEQ ID NO: 862 - DNA, 216 bp, Enterococcus faecalis
atcaaaaacggaaagggcaagcaacgccggcttgcaaacgacaacctgcgtaaagcattggctttaggaatagataaagaaaatctagtcaataatattattgcagatggttctaaagcgctacatggtgcgattactgaaggctttgtggcgaatcccacaacgggtctcgattttcgtcaagaagcaggtaatttaatggtttataacaaatga

SEQ ID NO: 863 - DNA, 189 bp, Enterococcus faecalis
acatctaccgcattgaatctttttgaagatggacaattagatgtggctacactaagtggtgaactggcgcaactgaataaaaataatacgttgtatcattcgtatccaacagcgacaatgaactatttgcgcttaaatcaaaaacggaaagggcaagcaacgccggcttgcaaacgacaacctgcgtaa

SEQ ID NO: 864 - DNA, 252 bp, Enterococcus faecalis
cgctcaaagagaccaaaaccgtactttacgtccttgttagcttttccgacatttttcccgcaaaatcaaaaagtagtcgaacaatttggtgcggactatggaactgctagtgataaagtcgtctataatggtccgttcgtggtaaaagattggcagcaaacaaagatggactggcaactagcaaaaaataatcgctattgggatcaccagaacgtgcgctcagacattatcaattatacagttatcaaataa

SEQ ID NO: 865 - DNA, 657 bp, Enterococcus faecalis
gagcataaaaaaatgaagagttataggagaaagaagatgaaaaagtatttaaaaatcacaatggtttgtattttattggtaggatttttagctgggtgtaccaataaaaatgaaaataaaaagaaacagaaaaataccaaagaagccgttcaactgatgtcaccctcggaattaacaacgctcaacacctctgtattattggattttccagatgctattgtccaaactgcagcgtttgaagggttatatagtttagatgaacaagaccaattggtaccagccgtagcaaaagcattgccgatgatttcagaagatggaaaaacctacacgatttctttgagaaaagaagcggtttggagtaacgatgatcctgtcacagcacatgattttgaatatgcttggaaaaaaatgattgatcctaaaaacggctttgtttatagcttcctcatcgttgaaacaattcaaaatggtgcaaaaatctcagcggggaaattagcacccaatgaactatgtgtcacagctgtggatgattatacattaaaggtgacgctcaaagagaccaaaaccgtactttacgtccttgttagcttttccgacatttttcccgcaaaatcaaaaagtagtcgaacaatttggtgcggactatggaactgctag

SEQ ID NO: 866 - DNA, 801 bp, Enterococcus faecalis
  misc_feature (100)..(100): Nucleotide 100 is "n" wherein "n" = any nucleotide.
ttaactatgaactcaaaaattaattcagccaatctgatgatttatttcggcatacattgttctgttttaatgtattattccgccttagtttgtgcaccgntaaccattataccaactttcacaattgtaattgattatacggttgcgatggccgtcacttattgttatttaattctttcgtttgttgaagtaggctttctcttttactacctattttcaatgcgcaaaaaacaagatcaattcgttctacaggctggcgattatcgctatggggatgatgatcaatattggcggtatgggatttatatcaatccaaaggaccccaacatcatgtttcctgatcgcattggtatgaatttatttattaacctaggacggcctcctgggaaaattattctagccgctactggtattttaacgattgcggtgctgttctttgccacagtgccgatgtttataaatgatttttctagtcatgcctctcaagcaactattgaaaataaacaaattgagttatcttccccattagcaaaaacaaggtcaattccttttaaccaaatcattgctgtttctttgattgatgacttacctcaagaacgcatccgcacaatgggtgctgcgacagatagttacttaacaggagaatttaaagtcgctggaaaacctgcttatttactaatttatacaaaaagtcatccgattctgaaaatagaaacgcggaagaaagtttattattatactgcgcgtgatggtcaagaaacgactaagatttatcaggaaatcaaagccaaacttccataa

SEQ ID NO: 867 - DNA, 213 bp, Enterococcus faecalis
agtgaaatggaaaaaacagtaaaaattgatgggatgaaatgtgatggctgtgttcaagcggtcactgaaaaatttagtggaattgacggcgtaacgaatgttgcggttcacttggcagatcaaacagccgttgtgacagcagatcgtgaagtaagccaagatgaactgaataccacgttggcagatacaaaattcaaggttgtcagcgaataa

SEQ ID NO: 868 - DNA, 753 bp, Enterococcus faecalis
cagtcaacgaacgagtcttacttttgggtcaatataaaagtaatgaaagaagacgcaatcgagttatcaacgtttgttcaacaagcggatcgcttggcagaagaagggaaaaccccaatgtttccggcaaaagatggttcgtttgcgggtatcattgcggtagcagatactgtgaaggatagcagtcaaacagccattgcacgtttgcataaaatggggatcgaagccgtaatgattacgggagacaacaagcgtactgcagaggcgattgcgaaacaagtaggtatcgatcgtgtcttaagtgaagttttaccagaagataaagcgttagaagtgaaaaaactacaagcagaaggcaaaaaagttgcgatggtgggtgacgggattaatgatgcaccagcacttgcccaagcagatgtggggattgctattggttcaggcacagatgttgcaatggaatcggccgacattgtgctaatgcgtagtgatttaatggatgtgcctacagcagttgaattaagtaaagcgaccatcaaaaacatcaaagaaaatcttttctgggcatttgcctataatacattaggtattccagtggctatgggtgtgttacacttatttggtggacctttgttaagtccgatgattgcagcagcagctatgagttttagttcagtctctgtcttactaaacgccttacgattgaaaggatttaaaccttcgacggtgaaaagaactagtggaagtcaaaaataa

SEQ ID NO: 869 - DNA, 276 bp, Enterococcus faecalis
cgtgaagcaattgtgggagcggataaagaacgtcaattgccattagcagaaggaagcgattgttcagcgattccaggtcacggcatccgtgtgacagtcaacgaacgagtcttacttttgggtcaatataaaagtaatgaaagaagacgcaatcgagttatcaacgtttgttcaacaagcggatcgcttggcagaagaagggaaaaccccaatgtttccggcaaaagatggttcgtttgcgggtatcattgcggtagcagatactgtgaaggatag

SEQ ID NO: 870 - DNA, 1095 bp, Enterococcus faecalis
gcttaccattgcccggattttttgaatccaatgacacatgcgatgacctttgcaatggttcaattgattttgactttacccgttctatatgtcggcagagaatttttcacagttggttttaaagcattgtttaaagggcatccgaatatgttttctttggtggctttaggaaccagcgctgcttttgtgtatagtttatatggcacagtcatgatatttttaggagacacaagttttacaatggctctttattatgaatcagcgggtgttattttaaccttaattacattaggaaaatatttcgaagctgtttcaaaagggaaaacctcagatgcgataaaaaaattaatgggtttagcgccgaaaactgctcatattttacgtgatggcgtagaaattgaagtgccagttgatgctgttcagttggatgacattgtgattgttcgcccaggagataaaatccctgttgatggagtgattgtttcaggcagtagttctgtggatgaagccatgttaacgggcgaaagtttgcctgttgaaaagaaagtcggtgatgcagtaattggtgctagcatcaataaaaatggcagctttcaattcaaggcgacaaaagtgggaaaagagacggcccttgcccaaatcattcaattagtggaagatgcgcagggttcaaaagcgccgattgcacaattagctgataaaatttcgggtgtttttgtcccaatcgtcattggtttggctgttctttctggcttggcttggttctttttaggacaagagtcatggattttcgctttgacaattactatttctgtgttagtgattgcttgtccttgtgcgctcggcttggcaacgccgactgcgattatggtggggacaggtaagggcgctgaaaatggcgttttaattaaaagtggggatgctttagaaaccactcacaaaattcaaacaatcgtgtttgataaaacagggactattacagaaggcaaaccggtggttacagatattttagttgctgattcagcactttcagaagctgagttactaacattagcagcttctgcagaacaaggatcagaacatcctttagcgtga

SEQ ID NO: 871 - DNA, 690 bp, Enterococcus faecalis
aaaggagtgaaaaaaatggaaagtaaaacgtttgatattgaagggatgagctgtgcttcctgtgcccaaacgattgaaaaggctacggcgaagttacctgggatggcaaaggcaagtgtcaatttagctacggaaaaattaagtgtcacgtatgatcagacggaagtcacagaagaagaaattaaggaagctgtgtcagatgctggctacaaggcgattagcccagcccagcaacgaacgtttgcgattgaaggaatgagttgtgcttcctgtgcccaaacgattgaaaaagctgtgaaccaattatctggtgttcaacaagcgattgttaatttagccacggaaaaactggtggttagttatgacgaccatcaagtaacgagtgctgaaattatcaaagcagttacggatgcaggttatcaagcgacagaagaagtcgctgcaggtgcaacagcggaccaagatcgtgaaaagaaacaaaaacatattgctgagatgtggcaacgtttttggatctcagcggtgtttacagtgccccttctttatattgcgctgggaactatggtaggcttaccattgcccggattttttgaatccaatgacacatgcgatgacctttgcaatggttcaattgattttgactttacccgttctatatgtcggcagagaatttttcacagttggttttaa

SEQ ID NO: 872 - DNA, 483 bp, Enterococcus faecalis
cttgaactcttttttattgatgaaaggaggaatttaacgagtatggcaaaagataaattagcgacaattacagatgcagagtgggaagtcatgcgggttatttggacccaaggcaagaccacgagtcgtgaagtgcatacacttttaaatgagaagaaagaatggaaatcaacgaccgtcaagacgttactaagtcgtttaacagataaagggttagttggaacggagaaggcaggcaataaatatatttattatccgctagtagaagaacgtcagagcgttgaaacggtggcagatgaacttttagccaaagtgtgcagccgtaaagttggttccgtggtggaaacaattttaacagagagtcagttgagttatgacgatttggatcgattagaggaactattaaaagagaagcgcaagacggcggttgaatccgtcccttgcaactgtattcctggtcaatgccaatgtcatttaatttaa

SEQ ID NO: 873 - DNA, 861 bp, Enterococcus faecalis
ttggttcagctgttggtttattcttggaaagaagcttttttcgttgggttagttttagcagcaacgtcggtcagcatttcagtagaagtattaagagagttgaatgttttaagtagtaaagaaggtgcaacgattcttggggcttccgtcgttgacgatatcgtggtcgtgattattttaagtgtcgctgtcggcatgattggtgcaagtacaggcggcaatacagaagtcagctttattgttaagttaattgaacaaggcttattctttattgggattttctttttggtccgctttattgctccctatttactacgtttaagtcaaaaaatgaacattgggtcgtctgttattatcatgtcattgattatctgtttgggcatggcttatttggctgatttagttggtttaagttctgtcgtaggtgctttttttgcagggattgctgtgggacaaacggatgcaaaaacagaaattgatttcaatattgaagctattggctatgccgtgtttattcccgtcttctttgccagcattggcttatcagtgacatttaacacgttaggaaaggatttaccttttattttggtaatgacgattatggcgattttaacgaaattactgggcggcgcctggggagcgaaaatggttggtttctccaatacaagttctttaatggtcggtgctgggatggtttcgcgtggggaaatggcattaatcattgcgcaaattggctaccaatctaaattactttcagaagcgtattatacgagcatgattgtggtaattatcttaacgaccttagttgcaccgttcttattgaaatactttgttaaaaaacaagaatctgcgttgcaataa

SEQ ID NO: 874 - DNA, 1236 bp, Enterococcus faecalis
cgaaggaagaaaaggtggggtaacatgggcgaattttttagtcaacgtttgtcacggcatttcaaaaaaatgtccaagtacttgcgctatattttaaatgatcattttgttttagtctgtatgtttttattaggcggattaggtctgtactattcccagttgttaaaagaattacctcgtgattttgtttggggcagaccgttaattctattgggctggctgctactcattcaagttggtaagttggctactctgacagaagagccagacaaggtgtttttattaccaaaagaaaaacaattcgctgcttatctgaaacgagcgctgcgctactctttacttttaccgattgtagtcagctttctaggaagtggcctattgatgccgttgattgtagtcacaacaggttggtcgtttcaaaccttctttttatttttggtcatgctagtttgtatgatttatacacatcttagtttacaaagctatgggctgtatcatcggtcgtcaaccacttaccgtagttggtggtttgtttggttgatcagtagtctcttgattatgacgggagctatttactggacgccttgggttggtgtgattggtggcatcattctggccgtttgtttatcgagtatttggcaaaataagatgaaacagagtttcttggattgggaaaaaatgatccaaaaagaacaaaacagaatgcatagaatttataaattcattcagctgtttacagatattcctgaagtgagtagtacagtgaaacgccgtaaatacttagatcctctcctcggagtagtcaaaaacacatctgagaacacgtatgcttacttattcattcggagctttttacgaggtagcgaatatagcggcttattgtttcgtttgattttggttggtggcgtgctactcttctttttacaagaattctggattgcgttggtagttgctttattgtttgtctatttaatcgggttccagttgattcccatgtacacgcaatttgattatatggtgatgacacagctatatccaatttcaatagaaaaaaaacaagcagcgattcgccggttaattagcggcgcattatctgttgcggccattatttttggtgggattgtctgccttcgtttaggcagtttgcaaaatagcttgatcattctgggtgccttaattgtagaagttgtgattttcactaaaatgtatgttccaatgcgcttgaataagttataa

SEQ ID NO: 875 - DNA, 951 bp, Enterococcus faecalis
aaaattcctcttttctctaggttctttcctttactttaccacaagttgatttctctgtggatgaaaaagtacgtgagttcgctaaaaagttcgtttcatttcgtgtataataagagaaagaaaaaaatccatttaattaagggagtaatttttgaattcttggttcgcttagggtttaataatggtagagagaaaaggttggaggcaaaagaaatgagcttaacaattgaacatttaacaggaggttacggccatattcctgtcttaaaagatattaattttgacgtcaagtctggtgaaatggttggtttaattggcttgaatggtgcggggaaaagtaccaccatcaaaaatattattgggttacttacgccgcaaaaaggcaaaattatgattgacggggaaacattgcaacaagcccctgaagaatatcgtaaaaaaatcgggtatattccggaaacaccttctttatatgaagaattaacattgaaagagcatatcgaagtaacggccttggcttatgatattccattagaagaagcgttcaaacgagcagaaccattactaaaaacgttccgtttagacaataaattggaatggtttcctgctaatttttcaaaaggcatgaaacaaaaagtcatggtactttgtgcattcttaattgaaccgagtttatatattattgatgaaccttttctaggcttagatcctttagcaattcatgctttattagaattaatggatacgatgcgtaagcaaggggcagcgattttaatgtccacgcatattttagcaacagctgaaaaatattgtgatcgttttgtggtgctacacgaagggaaattacgggcaaacggtacaatggctgaattacgtgcagaatttaatttaccagagtcttctttagatgatatttatcttgccttgacgaaggaagaaaaggtggggtaa

SEQ ID NO: 876 - DNA, 444 bp, Enterococcus faecalis
agaaaagaggaatttttcatgaatgattgtattttttgtaaaattatcaacggcgaaatcccaagttataaagtctatgaagacgagaaagtctacgcgtttttagacattacacaagtgaccaaagggcataccttaatgattccaaaacaacatgttgctgatatttttgaatataatgacgttttagcaagcgacgtctttgctcgtattcctaaagtagcacgagcattagaaaaagcttttccagaaatggaaggattaaacattttaaataacaataaggaagtggcttatcaatccgttttccattcccacgttcatttgattccccgttattcaaaagaagatgatttctctattcattttggcaaccatcaagaggactattccgccgaagcgatgcaagaaattgctgagaccattgcaaagcaggtgaactaa

SEQ ID NO: 877 - DNA, 213 bp, Enterococcus faecalis
atgaaaaaatttattaaaggtctcttttttggcgcagctgctggtaccattggcggcttgttggctgctccaagaagcgggaaagaaacacgccaacatttaatcaatgagctagaggactatcgttcactgaaaaatcaagtcacgaatgactgggatcaggtgcaacgaaatttggcagttgtcgaaagaaaacgttccactggcaactga

SEQ ID NO: 878 - DNA, 213 bp, Enterococcus faecalis
aaaatcaagtcacgaatgactgggatcaggtgcaacgaaatttggcagttgtcgaaagaaaacgttccactggcaactgaattttcaaaagacctgcaacaagaaatcactgatttcaaattccaagcggaacctcggattgctcaaattaaagaacaaattgctaaaatcacggctgaattacctgacacacaaaccaacaagcaaaagtaa

SEQ ID NO: 879 - DNA, 1107 bp, Enterococcus faecalis
gactctttctttttcaaaatgaggtatggtatagttataacagaaataaaactaaaaaaaacaggagtgcataagagaatgaagaaaaaactaatcttagctgcagcgggcgcaatggccgtttttagtttagcagcgtgttcaagcggttcaaaagatatcgcaacaatgaaaggttcaacaattactgttgatgatttttataaccaaattaaagaacaaagcactagccaacaagcgtttagccaaatggttatttataaagtctttgaagaaaaatatggcgacaaagtaactgacaaagatattcaaaaaaactttgacgaagccaaagaacaagtagaagcacaaggcggaaagttctctgatgcattaaaacaagctggtttaactgaaaaaacattcaagaaacagttaaaacaaagagcagcctatgatgcaggtctaaaagcccacttaaaaattacagatgaagacttaaaaacagcttgggcaagtttccatccagaagtagaagcacaaattatccaagttgcttcagaagatgatgccaaagctgtcaagaaagaaatcactgacggcggcgatttcacaaaaattgctaaagaaaaatcaacagatactgctacgaaaaaagatggcggtaaaattaaatttgattcacaagcaacaactgttcctgccgaagttaaagaagctgccttcaaattaaaagatggcgaagtgtcagaaccaattgctgcaacaaatatgcaaacctaccaaacaacctactatgtagtgaaaatgacgaaaaacaaagcaaaaggcaatgacatgaaaccttatgaaaaagagatcaagaaaattgctgaagaaacaaaattagccgatcaaacatttgtttcgaaagtcattagtgacgaattaaaagcggccaatgtgaaaattaaagatgatgccttcaagaacgctttagcaggctacatgcaaactgaatcttcaagcgcttcttcagagaaaaaagaatcaaaatcaagtgattctaaaacaagcgataccaaaacaagcgactctgaaaaagcaacagattcttcaagcaaaacaacagaatcttcttctaaataa

SEQ ID NO: 880 - DNA, 219 bp, Enterococcus faecalis
ataaccgcagtttctatgttccaaaagataaataaaaaaagggagtggtcaatcgaccactctcttttttatgcttatttagaagaagattctgttgttttgcttgaagaatctgttgctttttcagagtcgcttgttttggtatcgcttgttttagaatcacttgattttgattcttttttctctgaagaagcgcttgaagattcagtttgcatgtag

SEQ ID NO: 881 - DNA, 231 bp, Enterococcus faecalis
gaagatgttgtcgttcttcggcacatggtcttagcccaccatggattgttagaatatggctcacctgtgcgaccaagaattatggaagcggaaatcttacatcaaattgataccatggatgcgtccattcaaatgatgctaggggcaattcgtcaaacacagcctggggagtatacggaacgaatctttggtttagataaccgcagtttctatgttccaaaagataaataa

SEQ ID NO: 882 - DNA, 276 bp, Enterococcus faecalis
cactatttagaaagaaacagagaatcttcttttactgattttgaactaatgattgaactaagaaatgaaatactccgattaaaattacaggatgatttatcaatgacgaaatttcgaaaactagttcaatcaccaaagttaccatcagttgatacaataatgaaaagaacaaataaaaattgggaagatttgatgacagaaatagggtttgactatcgaaaaatcaaaatcaataagcagagaaataacttatctaaaaagaagaaaactaaatag

SEQ ID NO: 883 - DNA, 2730 bp, Enterococcus faecalis
  misc_feature (2700)..(2700): Nucleotide 2700 is "n" wherein "n" = any nucleotide.
acgtcttttttattacctaaaaacgaaaggggattttattttatgataaagccgatatttaaaaaatggcgattgtttgcggctttagctttattaggtcaaacaattgtaggggcgattgatcctatgattgtctttgctgatgaaattgctcatccacaaacagtgacggttgaattagatttagcgcatcaatatgttgttgaaggaactttcagtgacggtcgtccaatgtcagaagtcactgttccacattatgctgtgtacaacggcgtgaaacaagatgttttctgtattgagccaggagtcccaattgacaatgagttcacgccgggttatgagaaaaatccattgcctgatatgccagagaaagcgaaactagtttccgttctatggaaaaaagccggtacagatgtagatactcatattgtggcacagaagatgatctggcaagaagttaatgggtatacccttcactcaatcaaacgattgaatggtagtgccgtaaatatcgcagccattgaggcaaaaatcaatcaagccattgccgattatcagaagaaaccaagcttccataatagtacggctaaaatagtattagggcaatcgactactatgacggatacgaataatctgaatttgtcagagtttgatgaagtggtggaaaataccgcaaacattgattatcgtgtgaatggcaatcagttgataatcaccccacatgccagttcaaaagaaagtggtgtgctgacgcttaagaaatctgctggcaccggaacacctgtcgcctataaaaaggttggccaacaaaccctgatggctggggcgattgataaaccgaacacttacacggtcaaaattgatgtagaaaccgagggttctttaaaaatcaaaaaagttgataaagaatcaggtgctattgtaccaggaacggttttccatttagactttggaaaaactttacctgcaaaagacgtgactactgacaaagaaggcattgctacattggatgggattcctcatggtacaaaggtaaccattaccgaaaaatcggtgccggcgccttatacgattgataccatacccatgactgctacgattaaagcaggcgaaaccatttttatgacttcaaaaaatacgcgggaaaaaggtcaaatcattctggataaaaccgggattgaaacaggaagtgatctttggaacgacaattactctttagctggaaacacgtttgctattcgcaaggacagtcctactggtgaaattgttcaagaaatgaccacggatgaaaaaggtcatgcagaaacaccaaaagagattgctaatgcattggaattgggaacttactacgtgaccgaaaccaaagcatctaatggcttcgtgaatacctttaaagcagtaaaagtcgaattgaagtatgccaatcaaaccgtggcccttgtgaccagcaatatcaaagggcaaaaccaagaaattactggggaaacaactctgataaaagaagacaaggatactggagataaaacacaaggcagggcagtctttgaggggactgaatataccttgtttactgctaaggatggaaaagcggttaaatggagtgaagcttttaaaccagaattggtaaagggaacgaaagcttctgatgaaacagtgactctggctttagatgaaaagaatcaagctgccgttaaacacttagccatcaacgagtactactggcaagaaaccaaagcacctgaaggatataccttggatgaaacgaagtatcctgtttctatcaaaaaggtagatgataacgaaaaaaatgccgtgattacccgagatgttacggcaaaagaacagattattcgttttgggtttgatttcttcaaatttgccggatcagccgctggcactgccgaaactgggtttaatgacttaacctttaaagtgtcgccattagaagggaccaatgagatcacaggtgctgaagatgaagcaatcacagcttataatgagcaattaggctttgatggctacggaaagtttgaaaatcttccttatggggattatttacttgaagaagtagaagcgccagaaggatttcaaaaaattacgccattagaaatccgttctacttttaaggaaaacaaagaagactttgtgaagagtgagtatgtctttaccattaccgaacaaggccaaaagcaaccaattaaaacggtgaccgttccttacgaaaagctgacgaacaaagcattttctgttagtttgaaccgtttgatgctctatgatttgcctgaggaagaagatagtttgacttctcttgcaacttggaaggacggaaataaaaaattgaatacccttgattttaccgagctagttgataaattgagatataacttgcatgaaatcaaagaagactggtatgtcgtagctcaagccattgatgtggaagccacaaaagctgcccaagaaaaagacgaaaaagccaaaccagtggtaattgccgaaacaacgaccactttggcgaacaaagagaaaacaggtacttggaaaattcggcataaattaacgaccgaacaagttttggataaaactatcgtcttgtttaactatgtgtatgaaaacaaggaagcttttgaagcaggcgatgagccagtatcgaaggatgctatcttgaataatcaagcccaaactgttaattgtacggtggancgtcatgtttccatccaaacaaaagcccac

SEQ ID NO: 884 - DNA, 348 bp, Enterococcus faecalis
aattttggtaaactaagaaaaaacgagaaacgagggccatgcatgttcatttcatttaacatgtttattctattaattgttgcaacgatcttaatgatttttctgattatctatttgacagtcactggaaatgataaaaataataaaaagaaacaaaagaaagaaacaaaaagaactacgccaactttaaacaaaaaaacaactgttcccccttctcagaagccaaacgttgtgactgatgttgcaaaaaagagcgagccagaaaagcaagccgtacaacgaacacagcaatcaaccactagagaggacgagacttctcaatttacacgaagccaacgtcataaatga

SEQ ID NO: 885 - DNA, 627 bp, Enterococcus faecalis
aaaacgacgacgttattttgcgtgaaagtgagtatattttcgacatgcgtggtggatttactttttccaaatgtagggcaagcaatggtagaggttttggaacgttatggctgtgaaacggttttaccaacaagccaaacgtgttgtggtcagccaacgtataatagtggctatgtgacagagagcacgacaacgcttaagaatcaaattgatagttttgacggtgccgattatgtggtgggacctgcggggtcttgtgtcggcatgatgaaagaataccacaaatttttagcagatgatcctatttatggaccaaaagcacaacgtttagctgagcgaacttacgagtttagtcagtttctttatcgtgtcttaggggtcaaagatgttggcgcaacgttacatgggaaagccacttatcatcgttcttgtcatatgacgcgaattttaaatgaacgagaatcaccctttgttttgttggatcatgtgaaaggattagaaatgattcctttaggacatcttgaaaattgttgcggatttggcggaacgttttcagtgaaaatgccagctatttctgaacaaatggtgacggaaaaaatgaacgatgtgattgatacaggcgcataa

SEQ ID NO: 886 - DNA, 1485 bp, Enterococcus faecalis
gggggaacaactgtgggattatcaacgagcaataagccgttaagtgaacgaattgaagaaagtaaaaaagatgtgtttatgcaaaaggctgtcgctaaagcacaagatgcccaatgggagaaacgagaaggtgcgcgggaagctttaggcaattggccacaatggcgtgaactgggagaacaaattcgccaacataccattcagtatctgcctgactatttagaagagttcagtgataacgttgccaaacgaggtggcaaagtcttttttgctcaaaccgccgaagaggccaatgaatatgtgaaacaagtggttctagaaaaaaaggcgaaaaaaattgtgaaatctaaatcaatggtgacgaccgaagtcgatattgatccaatgttattgggattagacgatgtcagtgtgatggaaacagacttggcggaattcattttacaaatggatgactgggatgagccgtcacatattgttttcccaagtattcataaaaatcgcgaacagattcgtcaggtttttgcgaaaaaattagggtatcaaggagataatgacccggtaaatttggcacgctgtgcacgagaagtgatgcgcaaattctttttggaagcggagattggcattacaggttgtaatttcgctattgcggatagcggcttaattaacttaaatacaaatgaaggaaatgctgatttgaccatcagtattcctaagacacaaatcgtgttaatggggatggaaagaatcgtaccaacaatgcgtgaagcagaggttttagataaccttttagccagaagtgccgttggtcaaaatttaacaacgtatgtgacgtttgccgggcaaaaaaatgcggatgaatccgatggtccagaagaatttcacgtggtcattttggataacggacgttcaaaagcgttaggaacagcctttcagccagtcttacagtgtattcgttgtgggtcttgtctgaatgtttgtccggtctatcgccatattggagggcacggttatggctctatttatccaggaccaattggtgctgtgctttctccaattttaggtggatataaacagtttggggaattgccttatgcatctagtctttgtggggcatgtacggaaacgtgtcctgtgaaaattccattgcacgaattattaattgaacatcgtaaagtgatgaccgatgatctgaaaatgaaacatggatttgaagatttccaaatgcgtatggtaggtaaagccactggttcaccagcaatgtttaaagcagccatgaaagtcgatcatgctgcagcgggcattttaagtaaaccaaaagacattactgttgaaaacatgtacaatcatggaggctaccttgataaaggaccagggttagtaaaaggttggaccgatgttcgtgatttgccaagaccaccaaaatcttcagaaaacttcagaagttggttcaaaaaacatcaagaaggtgaaaaaaatgactaa

SEQ ID NO: 887 - DNA, 438 bp, Enterococcus faecalis
aaggttggaccgatgttcgtgatttgccaagaccaccaaaatcttcagaaaacttcagaagttggttcaaaaaacatcaagaaggtgaaaaaaatgactaacgaagcgattcaaaatcgagaaccttttttacaaaatctacgagaaaaattagacgtagaaaaacagcctgtttcggcccatccatttgagccagttaatcatttaccagaagaacagttggcagataaaacaccagcagagctattaacgattgtgaaagaacgtgtggaaacgattcacacgaacttagtggaaaccacacaagaaaatttactgacgacgattcagcaaattgttgctgagtttggtggggacaatcttttattgccaacagatgcacgttttgaagcctatggattagctgatttagctcagtcattagagttgttattgtga

SEQ ID NO: 888 - DNA, 666 bp, Enterococcus faecalis
ggagtgacaattttggaaaaacgccaagaagttcaagaattaacccttgaagaagtaatgggcgatcgttttggaagatattccaaatacatcattcaagaacgggccctaccagatattcgagatgggctaaaaccagtacaacgccgcattctcttttcaatgaataaagacggcaatacctttgataaaggctttcgtaaatcagcaaaatctgtcggaaacattatggggaattatcatccccatggcgacatcagtatttatgaagcgatggtgcgtctaagtcaagactggaaattacgggaagtactaattgaaatgcacggaaacaacggaagtatggatggcgacccaccagcggcgatgcgttatacagaagctcgtttatcacagttaagtggtgagttgttaaaagatatcgacaaaaataccgtcgatttcgtctggaattttgacgatacagaaaaagaacccactgttttaccagccaaatatcctaatttattggtaaacggctcaacggggatttcagcaggctatgcaacagaaattcctacgcataatttagcggaaatcattgatggaactgtgtatttaattgatcatcctaatgcaagtttagagaaattaatggatacattgccggtcttcaccacgagttgt

SEQ ID NO: 889 - DNA, 432 bp, Enterococcus faecalis
  misc_feature (89)..(89): Nucleotide 89 is "n" wherein "n" = any nucleotide.
agtctcttaaaggaactggaaaaaaatcagtcaattgagtatgcttggaccgatggtgaattggcagaagtgattgataaagttggtanaggctatatgctccaacgctataaaggtctgggggaaaggaatgcagaacaactttgggaaacaacgatggatcctgaaactagaaccttaattcgtgttcggattgatgatgcagctcaagcagaacgccgtgtgaccacattaatgggcgacaaagtcgaacttcgtcgaaaatggattgaacaacatgttcaatttacgttggaagaagatggcagtattttagatcgttcagaagaagacacttctgcaccaacaggagaaagtcttttagatgcggaaaaaacaaaagaagcagaacaaaccgatgacactgaaatcagtttgtttgacatagagtag

SEQ ID NO: 890 - DNA, 435 bp, Enterococcus faecalis
caaataaataaaagagtcagtaatctcattgaaatgattggtttaactggttttgaaaaagcttatcctagagagttatctggtggaatgaaacagcgtgtaggctttgctcgtgctttagccatcgaacctagcttattgctcttagacgaacctttttcagctttagatatcattacagccagccaattatctaacgatttattagaaatttggctaaacaatcaaattgcgactaaatcaattgtgatgatcacgcatgatgttcaacaagcagttcaactttctgatcgggttgtattaatggatgcaaatcctggtcgtattgccaaaatttactcaatcgatatccccagaaatcaacgttcgccaaaaacaaccattgatattgtagaacaaataacagaagaaatggttcgtcgcattcatttgtaa

SEQ ID NO: 891 - DNA, 276 bp, Enterococcus faecalis
gagaggagtgaaagtatgactactatgttagcaatcattggaactgttgcaatcatcacagttcaagttattgaatataatatgacagaaattcatattcctactgcaggaacatttaatgacgatgatgcagaacccccacattcttctgtaacccttgtatttattcgcactatacttatcactctctcacttaactttccatctcatttttttgagatggtttttttatgtattcgagaaaataataaacaaaaaagactgttaaatcaatga

SEQ ID NO: 892 - DNA, 306 bp, Enterococcus faecalis
gtccagcgcgtctgccaattccgccacgccggcaagatattttggaaggcggtaaccggatttgaaccggtgatgaaggttttgcagacctctgccttaccacttggctataccgccatattccatttttgttacaaaaaaactggggtagctggattcgaaccaacgcatgacggagtcaaagtccgttgccttaccgcttggctataccccaataaaattacaaagggcgaccgatgggaatcgaacccacgaatgccagagccacaatctggtgtgttaaccacttcaccacgatcgccgtaa

SEQ ID NO: 893 - DNA, 249 bp, Enterococcus faecalis
acactgtatcaagggttcgaatcccttactctccgtttcatatttacaaactggcccgttggtcaagcggttaagacaccgccctttcacggcggtaacacgggttcgagtcccgtacgggtcatttattttaatagtaacattcctttttggaggtttagttcagctgggagagcacctgccttacaagcagggggtcagcggttcgatcccgttaacctccattactcggttggttccgtggtgtag

SEQ ID NO: 894 - DNA, 597 bp, Enterococcus faecalis
gccaatccggcggttaaggtcacgttgatttccgtcgtacttgctttaattgtcggcgttatttttgggctattcagcgtttcaccaatcaaagcattacgtgtactttcaaccatttatgttgatttaattcgtggaattcctttaatggtcttagcgttcttcatctatttcggattacctggtgtgcttggctttaatatcccggtcttcattgctgggattatcacattaactttaaatgccagtgcctatatttctgaaattgtgcgcggcggaatcaaagctgttccagttggccaaatggaagcttcaaaaagtttaggtctttcctataatcggacaatgcaaaaaattattttaccacaagcgattcgcattatgattccttcattcattaaccaatttgttatttcattgaaagatacaactatcctttcagcaattggcttaatcgaactactacaaacaggaaaaattattgttgctcggacattacaaagtacaatggtttacttcgttattgcgttaatctacttaattttaattactagcttaactaaattagcgaaaaaccttgaaaagaaggtgaactaa

SEQ ID NO: 895 - DNA, 744 bp, Enterococcus faecalis
actaatatgactgaaaaaatcttagttgaacatttagtaaaaaaatatggtgacaacacggtcttaaacgacattaatgtttctattaacgaaggcgacgtagtctgcgtcatcggtccttctggttctggtaaaagtacttttttacgttgcttgaatcaattagaagaagcttctagcggagacattattattgatggtgcgaacttgacagataaaaatacggacatcaaccaagtccgtcaacatatcggcatggttttccaacatttcaatttgtttccacatttatctattttagaaaatattgttttagcaccaaccgatttaggtcgcttatcaaaagacgaagcggagaaaaaagcgttagaacttttagaacgtgttgggttggcagataaaaaagatgcctatccagattctttatctggtggtcaaaaacaacgtgtcgcaattgcacgtgcgttagcgatgaatcctgatattatgcttttcgatgagccaacatcagcccttgatccagaaatggttggcgatgttcttggtgtaatgaaagatttagcaaaacaaggaatgacaatggtcatcgttactcacgaaatgggctttgcaaaagaagtggctaatcgagtaatgttcattgatggcggtaacttcctagaagatggttcgccagagcaagtctttgaaaatcctcaaaaccctcgaacaaaagatttcttagataaagtattaaatatttaa

SEQ ID NO: 896 - DNA, 405 bp, Enterococcus faecalis
agaaaggaaatctctgggttaacgacagcagtaatgatgtggaatgttactattattggtttagtcattgggatgggctttttaaccattgcgtttatcaatctcgtggcaactttgctagtattagctctggcccattttaaacgaaagactcctttaaaacgattgcagcttatcgtaaaaatgaaggaacctatgattaaagaaagccgactgcatgaacaacttcaagcttctttagaaaaaggggagcgcttagtagaattgactttggaatccgaacaagaggcagtgacagcaaagatttcttatgtaggcaaagaagatttctggcattccaacttgcaccatctcttaaaagaaaaagggcacgttcaatctgtctctgtcacggaaacaatttaa

SEQ ID NO: 897 - DNA, 360 bp, Enterococcus faecalis
tacaaaataagtcaaatagtcacttgcaagaaaggagagaaagcgatgaattctttagaaatgattgaactttctctcaccgacgttgtcattcggatggctctagccgtggtttttggagctttgattgggttagaaagaagtattaaaagaaaacgcttcggtatcagtactaatgccattttatgtttggcctcctgtaccatttccattttacagattcaatcggtggatattttagtccatgtggtgaaacaaaatagcgccatggcgtccattatttctatggatatcacacgatatggcgcccaagtgattagtggtgtaggttttctcggttgcggggattatcgtttttag

SEQ ID NO: 898 - DNA, 378 bp, Enterococcus faecalis
  misc_feature (124)..(124): Nucleotide 124 is "n" wherein "n" = any nucleotide.
aaaacagcgattgttggtcccttaaaacgcgaagtaagaatgacagggatggttggtgatggcattaatgatgcaccggctttagtgaatgctgatatcggagtggcgatgggggatggtacanacattgctatcgatgttgcagacgtggtagtgatgaaaaatgatctttctaaattaggctatgctcaccgtgtctcaaaacgcttgaataaaattgtgcagcaaaatattattttttcaatgttagtggtagcaacgttaattgtcttgaactttttaggtattgcgaatatcgcatttagcgtacttattcatgaaggaagtaccttagtggtcatttttaatggcttgcgtttattagttaatacaaaataa

SEQ ID NO: 899 - DNA, 345 bp, Enterococcus faecalis
gcacttgctacatatctcatgaaggcaatgacgccggataatttttcagttatcatgcaagaaattatttcattctttatgttatttgagtttattatgatgattcttcgctatattcaagaaggacaccatattccgattcgttatttgattttaatttgtttaaccgcaattttacgtcaattaatggttgcgcatggcgatggcttgcagactttattgttatctttatcaattcttttactagtggttgtgctatttattctcgggttaaatggcagcaaattttatacgctaggaaaagcgaaagtagaagaagatcacgagcaagattttcatcattaa

SEQ ID NO: 900 - DNA, 1008 bp, Enterococcus faecalis
cttttcgactcttgccatcattggttcgaccttctttcttttttctcatttttcattatagcaaatttacttcagaaaagcatgaatcaccaaaaaacttcatcgagaaagtttactgaaaattttacctttccttattttttgcttaacacttttgtagtaaactactttagcgacttcaaggaggaaattatgaacgtttatttatttctggcactatttttcattattatcggcattttaagctatagtttttttattgaacctaaatgcttagtcatacacaaaaatcaaattaaagtaacagaatcagggaaaaccttacggattgttcaactctctgatattcatttaaaaaagaattattctgtgaaggccttaaaacagattgttgaaaaaacaaatacattacaaccagacatagtcgtttttacaggagacttatttgatgattatgcccgtttcggtatcgaaattcaagatgaagtgagtcaacttttccgtaaaattaacgccccttatggcaaattcgctatttatggcaaccacgagtatagcggcttagataccaatttttacgaaacaatcttagaagctgccgactttaccgtactaaaaaacacgggcaaattactgcctgtctcacaccgtatctccttgtacgtcgctggtttagaagattcgttatatggacaaaccgacttagctgcagctttagtcaaccgccctactggaacgcccactctgctactaacccatgagccagatgtcgcagactcagcagtcaacaaaaacattgacctcattttagcaggacatagtcacggcggacagattcgcttgccttttttcacttacaaaaatcagcttgctaaaaaatatacacatgggctttatcatttagaagatgaaacgccgctaattgttcacccaggaatcggaaccactaaaatcagcgcacgctttggtgtcttaccaacaattgaactgattgagttaactatttaa

SEQ ID NO: 901 - DNA, 1089 bp, Enterococcus faecalis
gaaaaaagaaagaaggtcgaaccaatgatggcaagagtcgaaaagctacgggagttaatgaaagaaaataatttacaaggatttttagtgacaagtccgtataatttacgttatttaaccaattttactgggacaacaggcttggcaatgattacattagataaagctttttttgtaacggattttcgttatacggaacaagctgcggaacaagcaactggttttactatcgttaaaaacacaggacatatttttgacgaagtagcagatttagctgaacgtttgcaattagataatttagcttttgaagaaacgcaagttagtttcgctgattatagcttattggaagaaattttaccatgtgaattagttcctgtaatgggtttgattgaagaattaagagaagtgaaagatgaagaagaagtatcgattattgaaaaagcgtgtgccatcgcggatcaaggatttgcctttgtcttagagatgattaaacctggaatgacagagattgaagtggctaatcaattagatttcttcatgcgttcaaaaggagccagtggtgtttcttttgagacaattgtggccagcggtctacgttcagcgatgccacatggcgttgctagccataaagtcatcgaaaaaggtgagttaatcactttagatttcggttgttattatgaaggctatgtttctgatatgacacggacattcgctattggtagtattcagccaaaactaaaagaaatttatgacattgttttagaagcacaattaaaagtgttagcagaagctaaacctgggttgacgggcattcaattagatgcgattgcacgggatcatattgcttcctatggctatggcgatgcgtttggtcacagcactggtcatggcattgggttagaaattcatgaaggaccaaatgtttcattccgagcagataaacagtttgtaccagggaatgtgattacggacgaacctggaatttatttgccaggaattggtggcgtgcgtattgaggacgatttattaattactgctgaaggtaatcgtgtattaacacatgcgccaaaagaattaatcattttataa

SEQ ID NO: 902 - DNA, 345 bp, Enterococcus faecalis
tcattttataaaggttgggagaacatggatatccaagagtatcagcggtttattagtgcgttttataaaaaacgtaactggtatcaatatgatccgtttattcgttccaactttttaacagaagaagtcggcgaagtttgtcgggccattcggacaattgaaattggccgtgatcgatcggatgaaacagttttggcggatgaagagaatctggaaaatttaacggaagagttaggcgatgtgttggataatttatttattttagccgataaatatgacatctctttagaaatgattatgcaaaagcatcggacgaaactaatggaacgttatcctgaagaataa

SEQ ID NO: 903 - DNA, 1689 bp, Enterococcus faecalis
tcccaattccgtggggaagagccactttcaaaaatgccaatcgctgttcaaaatgataaaaaagcaattgatggcggtacattagatgtcgctgtagttatggatacacaattccaaggacttttccagcaagaattttatcaagacaactatgatgcacaatacatgcttccaacggtacagccattatttaacaatgatgcagactttaagattgtcgatgggggtcctgcggatctgaaattagatgaagatgccaatacagcaaccattaaattacgtgacaatttgaaatggtctgacggtaaagatgtgacagccgatgacgtgattttctcttatgaagtcattggtcataaagactatacagggattcgttatgatgataactttacgaatattgttggcatggaagactaccatgatggtaaatcgccaaccatttctggcatagaaaaagtcaatgataaagaagttaaaatcacttataaagaagtgcacccaggaatgcaacaattaagtggcggtgtttggggctcagttttaccaaaacatgcctttgaaggaattgctgttaaagacatggaatcaagcgatgcagttcgtaaaaaccctgtgactattggaccatactacatgagtaatattgtgacaggtgaatctgttgaatacctaccaaatgagcattactacggtggtaaacctaaattagataaattagtgttcaaatctgttccttctgcgagcattgtagaagcgatgaaagcgaaacaatacgatattgcattatcaatgccaacagatacgtatccaacatacaaagatactgaagggtatcaaatcttaggacgtcccgaacaagcctacacgtatattggctttaaaatgggtacgtttgacaaagaaacaaatacagtgaaatacaatccaaaagctaaaatggcagataaaagcttacgtcaagccatgggctatgcaattgacaatgatgcagtcggccaaaaattctacaacggcttacgaacaggggcaacaacgttaatcccaccagtcttcaagagcttgcatgatagcgaagcgaaaggctatacgcttgatttagacaaagcgaaaaaattattagacgatgctggttataaagacgtagacggcgatggcattcgcgaagacaaagaaggcaaaccactagaaatcaagtttgcttcaatgtcaggcggcgaaactgcacaaccacttgctgattactatgtccaacaatggaaagaaattggcttaaacgtaacgtatacaacaggacgcttaattgatttccaagcattctatgataaattgaaaaatgatgacccagaagtagatatctatcaaggcgcgtggggcacaggttcagatccttcaccaaccggcttatatggtccaaactcagcctttaactatacacgttttgagtcagaagaaaatactaaattacttgatgcgattgattcaaaagcatcatttgatgaagaaaaacgtaaaaaagccttctacgattggcaagagtatgccattgatgaagcgtttgtaatcccaacgctttacagaaatgaagtcttgcctgtcaacgaccgtgtagttgactttacttgggcagttgatacgaaagataatccatgggcaacggtgggtgtcacagcagactcacggaaataa

SEQ ID NO: 904 - DNA, 222 bp, Enterococcus faecalis
atggatatgccactttatatggagaattatttgcttgcattgcaatcaaaatattcacaagaaataactgtaaaatgggtttgggcagttgtaatattactttcagtgattggctgtattggttatgcagtttactgtagttgggtaggtggaacatttgctgggagtattaaaattggtgttcccgacttggtacacgttaccttcaattgtaaacgttga

SEQ ID NO: 905 - DNA, 786 bp, Enterococcus faecalis
acgttgatatttaaggaggaaggagcctctattttatggaggcttcttgttaagaaacttatgataagaattgaaaatttaacaaaaaaatttgataggaaagttttagataatataactatctcattgcctaaaaaccgagttagtgtgattgtaggtataaatggaagtgggaaaactactttattagattgtattgtaggattgaaagatgcaacgtctggaaaggtatttattgagagctattctaatgattctgaaaagtttaaagaatgtatattctatataccatcggaattttatctacctaattatatgacgggtaaagagtacttaaactttgttttatcaagatatcgctgtagtgatatagaacggatagatgattttttagaactatttgatttaaaatttgctggaactaatttaatagaatcgtactcatttggtatgaagaaaaaaatacaaatagttgcagcagcactagctaacactgattatatattaggtgatgaaatatttaatggacttgactttgagacaacattgcttacgttagagctgtttgaaaatttatctagagaagtagggatagtgattatttctcataataaattaattattgaaaggttttcagagaatattttattgatgtccaatggcaatttaactccatttttaggggcgtcagagaatttagaaaaagaagtgataagtacggagaaaattcatgaaaaaattaaatacatcaaaggatatcatcctattaatcgagttatttattga

SEQ ID NO: 906 - DNA, 513 bp, Enterococcus faecalis
gtacggagaaaattcatgaaaaaattaaatacatcaaaggatatcatcctattaatcgagttatttattgataatgctttacgaggtttgctcaagcactctattttgtcaaaaaagagtactcgcatcgtaataggtgtgtgtgtattttttatctattttgcatactttttttttaatatgagtgaactagctagaattgtaccagattcagaaaaaattagtcatattttgatagaacaaggtcgaaaaataactttttatagttattttagtaatacatttgttttaggtataatagcatatattttagttgataatactgttgcattagataaaaactccttattttttgtgaaaacattgccttttagaaagaaagacatcagcttatcttttatgctattcaaatttgtaattatgatattgctttatgaattagttatgatcatttctacgccagctattaaacttgtgacgactgttcgtcttcacccacgggaaatggcctat

SEQ ID NO: 907 - DNA, 888 bp, Enterococcus faecalis
gaggacaacgcaatgactgtacagattggaaatgaatttctaatcgcaacatttgctgaagaaggagcagaattagtaagtttacaatcaaaagaaaccggcattgaatatatttggcaaggaaatcctgaattttgggcccgccatgcgcccgtactttttccgattgtcggtcgtctaaaagaagatacgtatatgtaccaaaatcaagcgtatcatttaactcaacatggttttgctcgtgatcaagtatttgatgtgattgaaaaaggtggagaagaagtttctttttcactaaaatcaacaaaagaaaccaagaagaagtatccttttgattttgaactagtgattacttatacattagaacatcaagaattgactgtaaactaccaagtagaatacacagggaaagaagagatgtattttgggattggtggtcatccagcctttaatgtacctttagaatcttcactaacgtttgaagattattatctaagtttttcacctaaaaaatcacggacacaaattcccttagcaggcccgtttattgatttagcgaataaaacgctagcccaaacgaataccagctttgacttaacgcatcaattatttgaaaatgatgcaatgatttttgaaacaaaaggtcaaacagcaattacgattgccacagacgaaagtgaccatcaagtcactttgagttatccagaaatgccttttgtggggatttggtcaccgacaccgaaagaagcgccttttgtctgtatcgaaccttggtgcgggattgctgatgctgttgacgcaactggccaacttgctgaaaaatttggcatcaataagttaccagctaacgaactatttaaaacacagtatatgattagtgtaaaataa

SEQ ID NO: 908 - DNA, 828 bp, Enterococcus faecalis
agatttaagtcgttacatcttataaaaaaggctggaggagaaaagatggctacattattagaaaaaacacgtcaagtgaacgagcttttgcaaaaaaacaatctgtttgacgtacaagcagaacttccgtacaacaaaatggcaatgattttaggggatattttagaaagtaatgcgtatattattagcagttcaggggatttgttggggtatactgaaaaattagatgttaataatgcccgtatcaaaaatatgtttaaagagaaaaaatttcctcaaggatacaccgaggccgtggatatgctcaaagtaaccgaagccaatattccaatagatagtgatttaactgcatttccttttgaatcacgagagctgtatccgtttggtttaaccactattgtgcctttgtacggtgctggcaaacgcttgggtacgattattttagcgcgtgttgaaaaatcctttaacgaggatgatttagtgttagctgaatatagtgcgaccgttgtcggcatgcaaattttgtatcatcaatccagaacaattgaagcagaagttcgcagtgcgactgccgtgcaaatggccatcaacactctttcctatagtgaattaaaagccgtccatgccatttttgaagccttagatggcgaagaaggtcgtttaactgcttcaagtattgcagatgaaataggcattactcgttccgtaattgtgaatgccttaagaaaattagaatcagctggaattattgaatcacgttctcttggtatgaaagggacttatttaaaagtattaaatcaacaatttattaaagagttggaaaaataa

SEQ ID NO: 909 - DNA, 183 bp, Enterococcus faecalis
caccgtgatacagataatattggggcgcgtcgtttacacacaattttagagcgtttattagaagatttattatatgaagcaccagatatgcaaatgggtgaaattacgattaccgaagcatatgtcaatgaaaaattgaatgacattgttcaaaatgaagatttaagtcgttacatcttataa

SEQ ID NO: 910 - DNA, 759 bp, Enterococcus faecalis
acatgtttaacatgggtcaacaacccggcagaagcacaagaagaaataacggaagatattcgaacgaatcgccgaacaattttggaacagctggaaaaaggtctattagataatcgtgaagtaacaattgaaattgaagaaccgaagaaaacgatgccagctatgaacaatggcctagaacaaatgggtatcgacttaaatgaaacgttaggcgctctgtcaccaaagaaaaaaatcgaacgtactgtaacggtgaaagaagcacaagaattattagtgaaagaagaatcagcaaaaattgtcaatgacgctgatattcatagtgaagctattcgtttagctgaatcaagcggaattatttttatcgatgagattgataaaatcacctctaaaagtcaacaaaattcgggcgaagtctctcgtgaaggagtacaaagagatattttgccgattgttgaaggctcccaagttaacacgaagtatggtcctttacaaacggatcacattttatttatcgcttcaggtgctttccacttgtcaaaaccaagtgacttgattccagaattacaaggccgcttcccaattcgagttgaattagatgatttaacggcggatgacttcgtaagtatcttaactgagccaaacaatgctttaattaaacaatatgtagcattaattggcacagaaaatgtttcagtcatctttacaaaagaagcaattgaacggttagcacacatcgcttatgatgtaacaccgtga

SEQ ID NO: 911 - DNA, 600 bp, Enterococcus faecalis
gcgaggggaaaatccatgaatgaattaaacaaaacaccaaaagaaatagtcaaagaactagatcaatatattgttggacagcaagctgccaaaaaatcagtggcggtagctttacgtaaccgctatcgtcgcttgcaattagaagaaaatatgcaacaagatattacgcctaaaaacttactaatgattggaccaacaggtgttggtaaaactgagattgctcgtcgtctcgcaaaaattgtcaatgcgccttttgtaaaagttgaagcaaccaaatttacagaagtaggctatgttggtcgggatgtcgaatcaatggtgcgggatttagtagaaaatgcgatccaaattgttgaaaaacaacaatacagtcgcgtgtatgcgcaagcattaaaaaaggccaatcaacgtttagtcaaagtattagtgcctggaattaaaaaagaacaaaaacaggctggcggtaatcaatttgaacaaatgatgaacatgtttaacatgggtcaacaacccggcagaagcacaagaagaaataacggaagatattcgaacgaatcgccgaacaattttggaacagctggaaaaaggtctattagataa

SEQ ID NO: 912 - DNA, 627 bp, Enterococcus faecalis
caaaagaaagtttacaaaaaaattatcgaacgtttcatcctcgtgcataatggaggtaaacgtctaggaggaacaataatggttgaatcacaatttcactctacaacaatttgtgcagttgaaaaagatggaaaatttgcaatggctggtgacggccaagtaacaatgggcgaatctgtcgttatgaaaggtacggccaaaaaagtgcgccgtatttacaatgatgaagtcgttgtcggttttgcaggaagtgtggcagatgcctttacattagaagaaaagtttgaaggaaaattaaatgaatacaacggaaacttaacgagagctgcggttgagttagcccaagagtggcgtacacaacagtctatgcaaaaattagaagctatgctgattgtgatgaataaggaagaaatgctcttagtttcaggaactggggaagtcatcacaccagacgatggtattttagcaattggttcaggcggtaattttgctttgtccgctgcaagagccatgaaaaactttggcgataaagaaatgccagcgaaagagattgctaaaaatgccttaaatattgctgcagatatctgtgtatttacgaatcataatatcattgtagaagaattataa

SEQ ID NO: 913 - DNA, 912 bp, Enterococcus faecalis
  misc_feature (4)..(4): Nucleotide 4 is "n" wherein "n" = any nucleotide.
aganggctatcacatggaagaaaagattggcctgagttatttgctcgttatcttattgtcgaaagaggctattcacaaaaaacaaaaaaagcatatcaagaagatatacaacattttttttcgtttttaaagacttcaggtaatgacaattatttgactgtggaacatttggatgttcgggcttatttgagcgaattatatgatcaggaatatagccgcaattcgattagtcgaaaaattgccagtttgcgttctttttatcaattcttattaaaaaatgaagcaatccaagagaatcctttttcctatgttcatatgaaaaagaaacagttacggttgccccgttttttttatgaaaaagaaatggatgcattatttgagagcgcacaaggggagcaaccgcttgatttgagaaatcaagcattactagaagttctgtatgggactggtattcgggtcagtgaatgtgcgaacttaacggtggacgcagttgactttcaagcttctgttttattggttcacggaaaaggaaataaagaccgttatgtgccttttggttcatttgcacaagacgccttaaaggattacttagagaatggccgcgcgctattaatgacaaaatatcaaaaaaaacatccgtatgtctttgttaatcatcatggtgaacaaatcacgccaacagggattgaatatgtcttaaaccaactaattaaaaaaagttcattaaatgcggaaattcatccccacatgttacgccatacatttgcgacacatttattaaataatggcgccgatatgcggacagttcaagaattattaggacatgctaatttatcaacaactcagatatatgcgcatgtgacaaaagaaagtttacaaaaaaattatcgaacgtttcatcctcgtgcataa

SEQ ID NO: 914 - DNA, 384 bp, Enterococcus faecalis
tttaaaagacaaggagaaataaaaatgaaaaagaaaattttagcaggagcgcttgtcgctctgttttttatgcctacagctatgtttgccgcaaaaggagaccaaggtgtggattgggcgatttatcaaggtgaacaaggtcgctttggctatgcacatgataaattcgctattgcccagattggaggctacaatgctagcggtatttatgaacaatacacatataaaacgcaagtggcaagtgctattgcccaaggtaaacgtgcgcatacctatatttggtatgacacttggggaaacatggacattgcgaaaacaacaatggattactttttgccacgtattcaaacgcctaaaaattccttgttccaccacggatttgat

SEQ ID NO: 915 - DNA, 321 bp, Enterococcus faecalis
agaagatatcaaagaaataaaggaaaatcagaaatggtcttggcggacaattgcgggcataggggtgtcagtagttgtctatttatttacaaaatatttaggaggtgtataagaatgattctaccagataagtactacaaaattatcaaatggggcgtgctaacagtgctacctgcaagttctgttttggttgccacactaggtaaagcttatggatggcagcaaacagatatgactgttttaactattaatgccatagcaacttttttaggagtggtaacaggagtatcagcatataatttaaaagacaaggagaaataa

SEQ ID NO: 916 - DNA, 288 bp, Enterococcus faecalis
gcggtttttatttatagagagaaggaactttatgtgaaggatgaactgattcaagatgttgtagagcgtttagtgcgtattgagacaaagctcgataactacgaagtgttaagagaaaagacagaagatgctaaggaaaaggctgattatgctttctctattgctaaaaataatgaagaagatatcaaagaaataaaggaaaatcagaaatggtcttggcggacaattgcgggcataggggtgtcagtagttgtctatttatttacaaaatatttaggaggtgtataa

SEQ ID NO: 917 - DNA, 816 bp, Enterococcus faecalis
aaattaaattttaggaggaaaagaatgtatacatttaaaaaaggtgatgcagactaccaagtcatgctaaatgaaaattttaaagagataactgattctttcgaagatggtttatttgtcagaaaaaattctaaaatattagatttaaacgatgctatattgccaggcatttattcaatcccagctacaggagttgataataaacctttacctaattctggaagtttattcgtttgtaaagacccaggaggggttagacaattatttcagacagaaagaacaatatttattcgacaattagggggagtaccttcatcttggacggattggaaaaaagtagcttttgaaaaagaacaaccttttgaagcttggtattcaccaggaactaaccatgctggattcaaaaataaggcaagatataatttagggccagaatttagcaacataggccagcgacttgggttgcctatgaaaagtgaaccgttggagtggaatagtgggcgatggcaagcaaaagttcttagagactgcaagctaaatataagcggaactgtaaaataccatgttggtagttcgagaggtgttctctatgcttatactcatatagacaaaggccttgatgaaggcgtaggtgacttaggtattggatcagcagtcggagctgttggcggcttggattatagaaatgtcgcagcttttgatttaaacgttacactaaaaaaaggtgagtatcttgcgtttcgcttagaattagcagcagataagcaacttgattatactcaattatcttctatgcatatcacagaattagtatag

SEQ ID NO: 918 - DNA, 453 bp, Enterococcus faecalis
ggtgtaaatatgacagaattaaatcgtgaaatgattgaaacgcttgttcgacaaattgtcacagaaaaattaatgccgactaaacaagtggatccaagtggaattatgtccatcaaattacccgaaatcgacgtaacagaagacgaccgcttagatacaggcaacccagcggacattgtttacacaaaagatctgttttctttagaagaaagtccgcgccttggttgcggtttaatggtgatgaaagataccaccttcgactggacactagaatacgatgaaattgattatattatttcaggacaattagatatactgattgacggacgtaaaatttctgcaacagccggcgaaattattttaattccgaaaagtagcaaaattcaattttcagtgacgggtgatgcccgctttgtctacgtgacttatccagcagattggcaaagccaataa

SEQ ID NO: 919 - DNA, 756 bp, Enterococcus faecalis
gcaatgatgggaccaacgttagtctttacaattccagtagcgcttggcattatccaaaaagacgaccaacaattcttagcaacaggtgttttgagcgggattattacaattccttttggtttattagcaggtggtttaacagctggcatgccattgtcattgattattcctaacttaattccaattattattgttgccgctttaattattttaggtttatggttagcgccaaagggcatgattaaaggcttccaaatttttggtcaaggcgtagtgattgtcgctatctttggtttagttgtgggggcgattcaactattattaggaattacagtgattcctggcattgcaccagttactgaaggaattgaagtcgttggcgggattgctttaactttagctggcgctttctgtttagtagctgtgattacgaaagtctttaataaaccattgatgaaactaggaaaagttttaggaatgaatgaagtagcggctgcaggaatggttgctacattagctaacaatattcccatgttccaaatgttaaaagacatggataatcgagggaaaattattaatatcgcttttgctgtttcggcttctttcgttttaggtgaccaccttggttttactgcaggcgtagcaaaagaaatgatttttccaatgattgttggcaaattagttggagggattaccgccatttttgtggctatctttatggcaaatcgaatgctaggaaacccgaaacagaagtga

SEQ ID NO: 920 - DNA, 522 bp, Enterococcus faecalis
ggaggacgagacatgagcattaatgaaattattatgtatattatggttcttttcatgattattggaggaatcgataaatgtattggcaacaaactaggtttaggggagcaatttgaggaagggattatggctatgggttctctagcgctttctatggtagggattatcactttagcgcctgtcttagccaatcttttaagtccgattgtcgttcctgtctatgaattactaggggctgatccagcaatgtttgccacaaccttattggccaatgatatgggcggctttgcgttagcgcaacaattagccaatgatccgcaagctggtttatttgcgggggcaatcttaggcaatgatgggaccaacgttagtctttacaattccagtagcgcttggcattatccaaaaagacgaccaacaattcttagcaacaggtgttttgagcgggattattacaattccttttggtttattagcaggtggtttaacagctggcatgccattgtcattgattattcctaa

SEQ ID NO: 921 - DNA, 276 bp, Enterococcus faecalis
ggaggaaaaacgatgcttttaggaaaaatgaatggtagcctttggtcaacaagaaaagatgaaaaattaaatggctggaaatttatgatggttgatattttgaatcaagaggacgaaaagcaaggatttttaattgatgctgacaacgctggagctggtgtcggggacaaagtgttaattagtcaaggcaatgctgcccgtatttcggcagaagatccgaatgtcccaattgatgcaatgattgttggtgtcattgattctacagcggaagaatag

SEQ ID NO: 922 - DNA, 618 bp, Enterococcus faecalis
gtaaaaggaggcaagacaatgaacgtttctgaaatggaaaatttgattcaacagattactgatcaaatttgtcaacaattgctgtcgtcgtcttattcagtggctttagcagaagcaaaagaagcatttcctgaagaaatgtttgttcgttttcctgatgtaaattgggtaaccaaggagcagaagctagcacgaggcttggttgtaaagaggctaacgatttcccaagtaaatgcgattgcgcatttacaggaaacggatgaattagtcaaaaacatcttagcattcttatttgaaggtaagccggtattggttttaaccccaataccttcagtgagtaaaaattcacgattgaagtatcgtttgaaacaaacgattcaggaaaacgtggacatgtgccaacagtttgggctgattatttataatgattcagaaaattacgatgtgtttcaggcggcctgtcaaaaacaaattcgttctatggctgagaccaaacgaacctacattagtgaaaaacaattgataagaatgacagaatcaggtgtttctttaagtaaaaacgcctatttaaccccgttagcgaaagattatgctaggaaacatcaattgctgacgtaa

SEQ ID NO: 923 - DNA, 639 bp, Enterococcus faecalis
gagatgaacaaattggattcaatgaatgaaattgttgaagaagttgttaaacgaattcagcaacaacaacaaaatacttttgaagttgaagcttctggccgacatgttcatttgtctcgtcaagagattgatgcattatttggaccaggatatcaactaacaaaagtgaaagatttatcacaacctggacagttcgtttgtaaagaacgaattacggttgctggacctaaaggactctttcaaaatgtggttattttaggccctgaacgtagcgaatcacaagtcgaagtttctatgacggatacgcgtattttaggaattaatgccccagttagagagagtggcaagacagaagggacacctggcgtcacgctgatgaacggatcagcagttgtgacattaagtcacggcttaattgttgccaaacgtcatattcacatgacacccgaagacgccttgaaaaataaagtaagcaatagccaaattgtgcaagtcaaagtggaaggcacacgtccgttaatctttgatgatgtggttgtgcgaatcagtccgcgatttgcaacgtacatgcacattgactacgatgaagccaacgcttgcggcttaaccaaaggagctcgtggctacattcttaagtaa

SEQ ID NO: 924 - DNA, 606 bp, Enterococcus faecalis
gttcattacttctgtcctaaactttcattgaggaggggtgttatgacagttattacagaagatatgcttcgcatcaaaaggctaaaaaaagaactagaagatggcacggattttgtgtttcctgtaggcagttttctgacgccagccgccaaaagctatctacgcgagcatcggattaatagcagcttctcttcaacaaacccattgctttctgaggttcattcagtgaaggcctcctcacaaaaacaagaacatttatcgaaagaaacaatttatgagattcggcacttaagccatctattgtatttgcctttcttaacgaatgaagcgttatcaacagaaggttggttatatttcgaacaacaacaacagtggttagagaaatttattttagaacagtcgcttgtaatggaaccagtcattttggaatcaaaggtaactattctaactaaccaacagagacaatggcgctattcctcaaaagaaattcaattacaactagataaaattattctccagttaaaaggagaatcacaactgttcggactttttcaagcttgggctacagaattaattagcaccatggctgaaatatcacgaaactag

SEQ ID NO: 925 - DNA, 264 bp, Enterococcus faecalis
gcacgaaaccgtggtttagtaggtgctgttgaaacagccgatgcaatggtgaaagcggcaaacgttactttaattggaaaagaacaagtcggtggcggtttagttacagtaatggttcgcggtgacgttggtgctgtaaaagcagcaacagatgctggtgctgctgcagcagaacgtgttggcgaattattatctgtccatgtaattccacgtccacatacagaagtagacgctattttaccacacgcaacaactgaattataa

SEQ ID NO: 926 - DNA, 1614 bp, Enterococcus faecalis
cgtaagagatttagtataaggagaacatatatggcaaatgataaaattgtgattcatggtgcacgcgcccataacttaaaaaatattgatgtcacgattcctcgtgacaaaatggttgtcgtaactggactatctggttctggcaaaagttcattagcgtttgatacgctttacgcagaagggcaacgacgttatgtagagagtctctctgcttatgcgcgacaatttttgggacagatggataaaccagatgttgacagcatcgatggtttaagtccagctatttcaattgatcaaaagacgacaagtaaaaacccacgctcaacggtggggacggtcacagaaatcaatgattatttacgattgttatttgctcgggtaggtcatccaatttgtcctaacgatcatattgaaattaccagtcagtctgttgaacagatggttgataaagtcttagagctaccagagcgaacaaaaattcaaattttggcccctgttgtggtcaagaaaaaaggccaacataaaaaagtgtttgaaatgatccaacgtgaagggtatgtcagaatgcgggtggatggtgaaacctatgatgttagtgaggcaccagaacttgaaaaaaataaaaaacatgatattgcgattgtgattgaccgtatcgttgtgaaagaaggcattcgctctcgcttgtttgattcgtttgaagcggctttgcgtttagctgaaggttacgcaattgttgatgtgattggtcaagaagaaatgttgtttagtgaacattatgcttgtccttattgtgggttcacagtcggtgaattggaaccgcgcttgttttcatttaatgcaccatttggcgcttgtcccgattgtgatggtttaggtgttaaattagaagtggacaaagacttagtgattccagatcccactaaaaccttgagagaaggggccattgttccgtggaaccctattagttcccaatattatccacaaatgttggagcaagcagccaccagttttgggattgatatggatacgccgtttgaagaattacctgcagaccaacaagaaattattttaaatggttctggcgagaaaaactttcattttcattatgaaaatgactttggtggtgttcgtgatgtggaagtgccatttgaagggattttaaaaaatattaaacgacgttatcatgaaacgaatagcgattttacacgagatcaaatgcggttatacatgacagaattgacttgtcgaagctgtcaagggtatcgtttgaatccgcaagctttagctgtaaaaatcaatggcacgcacattggtgaagtcagtgaattagcaataaaaaatgcggtccaattttttgaaggtgtgtctttatctgaacaagaaacaacgattgctcggccaattttaaaagaagtcgaagatcggttaaccttcttaaaaaatgttgggttagattacttaaccttaagtcgagctgctggtacactttctggcggagaagcacaaagaattcgcttagcaacacaaattggatcaaacttatcaggcgttttttacattttagtgttccatcaagcgtgcgcatcaacgagtatcttaaccaccggttgc

SEQ ID NO: 927 - DNA, 1185 bp, Enterococcus faecalis
ttagaggcacgtttgaaagtgcttcgcagtgaaaataaattattggaagctcaacgtttggaacagcgaaccaactatgatattgagatgatgagagagatgggctatacgtcagggattgagaattactctcgacatatggatggtcgccaagaaggagagccgccatatacgctgttggactttttcccagatgacttcttacttgtaatcgatgagtctcatgtaacaatgccgcaaattagaggaatgtataatggcgaccgagcacggaaacaaatgttagtggactatggtttccggttaccaagtgcacttgataaccgaccgcttcgtttagaagaatttgaacaacatgtaaaccaaattgtttatgtatcggcaacaccaggcccttatgaaatggaacaaacagagactgttgttcaacaaatcattcgaccaacaggtttactagatccagaagtagaaatccgcccaattatgggtcaaattgatgacttggtgggcgaaattcatgaacggatcgaaaaagatcagcgggtgtttgtcacaaccttaacgaagaaaatggccgaagatttaaccgactatttcaaagaattaggcttaaaagttaaatatttgcatagtgatataaaaacactggaaagaacggagattattcgcgatttacgattaggcgaatttgatattctaataggtattaacttattacgtgaaggaatcgatgtgccagaagtttccttaattgcgattctagatgcggataaagaaggcttcttacgtagtgaacgctcgttagtgcaaacgatgggacgggctgcccggaacgctgaaggaaaagtcattatgtatgcagataaaatcaccgattcgatgcaacgagctatggatgaaacggcacgacgtcgggcaatccaagaagcatataatgaagaacatggtattgaaccaaaaacaattattaaagaaattcgtgatttgatttctatttccaaaacagctgataaagatgaaacagtggttcaattggataaatcatataaagatttatcaagacaagaaaaagctgatttattaatgaaacttgaaagagaaatgaaggatgcggccaaagcattagacttcgaaactgcagccacattacgagataccattcttgaattgaaagctgccaaataa

SEQ ID NO: 928 - DNA, 747 bp, Enterococcus faecalis
ccattcctggtgaaagcctggttgatggtgtcaaaggtgggacaagaagctcaaattttacttggagcgaccggaacaggtaaaacatttacaatctctaatgtgattcaagaagtgaacaaaccaacattagtgattgcacataataaaacactagctggacaattatacggggaatttaaagaatttttcccagataatgcggtcgagtattttgtcagttactatgattattatcaaccagaagcatatgtaccctcaagtgatacatatattgaaaaagattccagtattaatgatgaaattgataaactacgccattcagcgacaagttctttattggaacgaaacgatgtcatcgtggtagcatcagtttcttgtatttttggtttaggggatccgcgggaatacagtcaacaagttgtttcattacgtgtgggaatggaaatggatcgtaatgagttactaaaaagcttagtcgatattcaattcgaacgaaatgatattgattttcaacgggggcgttttcgtgtccgcggtgatgtggttgagatattcccagcttcacgggatgagcatgcgctacgtgttgaatttttcggagacgaaattgatcgaattcgtgaagtagatgcgttaactggtgaaattgtcggcgaaacagagcatgtcgctatttttccggcaacacacttcgtgacgaacgaagaacatatggaacacgccatatcgcagatccaagaataa

SEQ ID NO: 929 - DNA, 636 bp, Enterococcus faecalis
ttgcctcccgtggtgaagacctctgagcgagaattagccttgaaatttgatgttagtcgaatgaccttacgccaagccatccagactttagcagacgaagggattttagaacgaaaaattggttcaggaacgtatgtagcacgtaagaaagttcaagaaacaatgacaggtaccactagttttacagaaattaccttgtctcaaaatcgcgttccttctagtcggacggtgtcttattttgtagcgaaacctagttctagtgagatggaaaaattacaactaggtccagaagattcaattttacgaatggaaagaattcgttttgcggatgacattccgatttgttttgaggtggcgagcattccttattcattggtctcgcaatatggcaaatctgaaatcacgaactctttttataaaacacttgaagccaaatctggccacaaaattggccattctaaccaaacaatctctgctgttcaagcatcggaacagatcgcagaatatttagagattaaacgaggcgatgcgattctgcgtgtgcgccaagtatcctattttgaaaacggactaccttttgaatatgttcgtacgcagtatgcaggaagtcgatttgagttttatttagagaagtag

SEQ ID NO: 930 - DNA, 642 bp, Enterococcus faecalis
gagtactcttcaaaaagctgtcatatagcgattggaataaccaaagatggcgaccgtgaaattatcggcttcatgattcaaagtggcgaaagcgaagagacctggacaacattttttgaatacctaaaagaacgcggtttacaaggtacggaactcgttatttctgatgcgcacaaaggattagtctctgccattagaaaatccttcaccaacgtaagttggcaaagatgccaagttcacttcctaagaaatatctttaccaccattcctaaaaaaaattcaaaatctttcagagaagctgttaaaggaatttttaagttcacagatattaacttagcgcgtgaggctaaaaatcgattgattcatgattatatcgatcaaccaaaatattcaaaagcttgcgcatcattggatgatggattcgaagacgcctttcaatataccgtacaaggaaattcccacaatcgactaaagagtaccaatctaattgaacgactgaatcaagaagtacgcagaagagaaaagattattcgcatcttccccaatcaaacatcagccaatcgcttaattggagccgttcttatggacctacatgatgaatggatttattcttcaagaaaatacatcaattttgataagtag

SEQ ID NO: 931 - DNA, 363 bp, Enterococcus faecalis
ggtaatcatttcacggtcgttggaaaggtggaagcatttgccaattgttttggcgtccattacccaggggaatcagttttaaggttgaacgttggttgttttagcaagggcattgttttattgatggtggggaatattccgtctttaggggttgtgattcccaatctcgtgtctttacgttatggcgatcatatgaaaaataccttgtggttaactgggatttgcgggagtttgttcttgttaatctgtgatattttagcacgagtattgattgccccctatgaaattcctgtcagcgtggttgtcggaacattagggagcattttgttcattttattattactaagggggcgcaaacaatga

SEQ ID NO: 932 - DNA, 453 bp, Enterococcus faecalis
aattcctgtcagcgtggttgtcggaacattagggagcattttgttcattttattattactaagggggcgcaaacaatgaaacggcctttaaaaaaatggctttcattacttttgcttttagctgccgtagtaattgtgagcctttgttatttaacttataacacgtatggcaattggtcctttgctttggcgttacgaggcaaaaagttattggcttttatttttgttggaatcgctgcggctttttcaactattagttttcaaacagtcacgcaaaatcatttcctaacgccaaacattttagggatggattccttgtatgtctttgtgcagacggtgttattttttcttttaggaggcgcacaagcgttaggtcaagtaagtcttggctcgtttttgatgaacgtctttttaatggtgtttttaagtactagtttatcgtattttctataa

SEQ ID NO: 933 - DNA, 588 bp, Enterococcus faecalis
cgcaaaaatcaatccaatttatttttattattgatgattggcatgattttaggtacttttttcagtagtattagtacgtttttacaagtgattatggatcctaacgaatacgacttactccaaggaaagttgtttgccagttttggtaacgtcaatagtcagtatctcattttcgttggtgtggcggtactcataatttgtgggatactttggcgggaaagttaccgtttagacgttttacatttagggaaccatcaagcacagaatttggggattgctgtgagtcagtttcaattagtgttgttgtgtttgatcagtagtctggtcggcttatcaacagcattagtgggaccgattacatttttaggttttatcgtggccaatatgagttatcaattcatgaaaacctatcgccaccgagaactgtttgtggcagggagtttaatagcagtctttttactggtgtttggtcaattgatggttgaacaggtctttcatttgaataccccgctcagtgtggtgattcaatttgttgggggcgtttattttatatggaaaattattgcagaaaggaagcaacgcacatga

SEQ ID NO: 934 - DNA, 366 bp, Enterococcus faecalis
acaggtctttcatttgaataccccgctcagtgtggtgattcaatttgttgggggcgtttattttatatggaaaattattgcagaaaggaagcaacgcacatgatccagatgagtgatgtatcaaaaaaatatggcgataaatttgtcgtttcagacattgatttacctatttctgaaggcaaattgacggcctttattggaccaaatggcgctgggaaaagcacgctgctagccatgatgagtcgcttaattcccaaagataccgggggaagtttatctggacaagcaagaagtaaaaacctggaagcaatcggctttttcacaaaaaattgcccttttagaacaagccaacggtgtacaacttaa

SEQ ID NO: 935 - DNA, 186 bp, Enterococcus faecalis
ttcccaaagataccgggggaagtttatctggacaagcaagaagtaaaaacctggaagcaatcggctttttcacaaaaaattgcccttttagaacaagccaacggtgtacaacttaaattaactgtgcgagaactggtcaattttgggtcgttttccttattccaaaggtcgcttaaaaagcgctga

SEQ ID NO: 936 - DNA, 486 bp, Enterococcus faecalis
ctgtgcgagaactggtcaattttgggtcgttttccttattccaaaggtcgcttaaaaagcgctgaccacgaaaaagtaacagaagcactggaacaattgggcttaactgaaatggcggaagaatacattgataccctttctgggggccaattacaacgggcgtatattgccatgattttagcccaagataccgattatattttattggatgagcccttaaataacctcgacatgaattatgcggttcaaatgatgcagattcttaaacgcttagtggatgaactaggaaaaacgattctgattgttctacatgatattaattttgccgcaagctatgcagatgaaattgtcgccatgaaaggcggaaagctctatgcgcatggcgcaacagaagaagttattcaaacaagtattttaaatgatctttatgaaatgaatatccggatttgtgaaattgaaggaaaacgcttttgtctttatcactaa

SEQ ID NO: 937 - DNA, 984 bp, Enterococcus faecalis
cgtttttggaggaaaagaatgaaaaagaaatttttagcaatgatggcagtttcaatgatgggactgttaatgttaagtgcttgtcaaacaaataaaaaaacagcagattctgcaacaacagaaacaacagctaaaacggaagtcacagtcaaagacaccaatggtcaattaaccgttcccaaaaatcctaagaaagtcgttgtttttgataatggttccttggatacaatggatgcactaggtgtcggtgaccgcgtggtaggtgcgccaactaaaaatatccctgcgtatttgaaaaaataccaaaaagttgaatcagcaggcggcattaaagaaccagatttagaaaaaatcaatcaactaaaaccagacttaattattatttctggtcgtcaacaagattatcaagaacaattaaaagccattgcgccaaccatttacttagctgtagatgccaaaaatccttgggcatcaacgaaacaaaatatcgaaacgttaggcactatttttgataaagaagaggtagctaaagaaaaaataactggcttagaaaaagaaattgctgacgtgaaaaaacaagcagaagctagcgcgaataatgcgcttgttgtgttagttaacgaaggacaactttccgcttacggaaaaggctctcgtttcggtttaattcatgatacatttggcttcaaagcagcagacgataagattgaagcttccactcatgggcaaagtgtttcttacgaatatgttttagaaaaaaatcctgggattctctttgtggtagatcgcaccaaagcaattggtggcgacgattcaaaagataacgtcgctgcaaacgaattgattcaaaaaaccgatgctggtaaaaatgataaagtcattatgcttcaaccagatgtttggtatctaagcggtggtggattagaatcaatgcatttgatgatagaagatgttaaaaaaggattagagtataaaaaagcctag

SEQ ID NO: 938 - DNA, 834 bp, Enterococcus faecalis
  misc_feature (430)..(814): Nucleotides 430, 723, 784, 785, 796 & 814 are "n" wherein "n" = any nucleotide. 1               5
gggggcaacaacatgaaattggggaaaaaagtagtaggtttgattgcaacagggtttcttttagccgcatgtggcggaaccaaagaagcggcagagaaagtagattcgggaaatttagcagctgaacaaaaaatcagtattagttcacctgcaccaatctcaacattggatacaacacaaacaacagataaaaatacctttacaatggcacaacatttatttgaaggcctttatcggtttgatgatgatagtgccacggtgccagctctagctaaagatgtcaagattagtgacgatgggcgcaagtaccactttaccttgcgggaggggattaagtggagcaacggcgagccaatcacggcccaagattttgtttattcttggaaaaaactggtgacaccagcgacgattggaccgaatgcctatttantagacagtgttaaaaatagttttgaaatacgcaacggtgaaaagtcagtcgatgaattagggatttcagccccgaatgacaaagaattcattgttgaattaaaacaggcccaaccttcctttttagcagtcgtttcgattgcttggttagcgccacaaaatcaaaaatttgtcgaagcgcaaggcaaagattacgccttggatagtgaacatttactttatagcgggccatttacgctagccaattgggatgcgacttcagatacttggacattgaaaaaaaatccagaatantatgatgcggatcaagtgaaactggaagaagttgcggggatcccaatcaaaggagccttannttgggagaccnttattacaaggactgatnttcaactattccgccgggag

SEQ ID NO: 939 - DNA, 846 bp, Enterococcus faecalis
cctgggggtttttttatttttgggaggaaaaatattggaggaacccatattcattatcggtttgatgaacaaatggcactttttgaagaaagaggcatgcagatgacttcaaaagatgtagaaaaattaaaagttataggatattatcgaattaagcagtttgctgcgcctttagctaataagaaaattgttaatgaaaatactgtatatgattacaaaggaatatatttttccgatgttttgaaaagatactatcaagataaaaatttaagaattcatttgttacatgcaatagagaaaattgaggttgcgttgaaaacatgggttgcttttattttaggagaacaatacggcgcttttggatatcttaatttttcaaaatggtgtgataaaaatagatactcaaaatttgaaatagaaaagcgacaatttttctttaaaaaagatttactaagagctacatctagatcgtgcaccgaggatataaaattaaaaaagaataaagaaaaagataattttccaagtatttggttagctgtggaagttcttacttttggtgaacttgttagattagtagaaattatgtctactagaaataaacgaaaactttcaaaaatgtttagatgtacggatattgaattattatcatggctaaaatgtataaattttgttaggaatgcatgtgcacacaatgctaatgtaatagaccttcagttagagacgaagcccgtttgcaggagtgattggaaagattatttgtataacgttaataagagtaataatgggaacccttttaataagttagcgatagtaatttttatcatcaaaactttagttacaccatag

SEQ ID NO: 940 - DNA, 204 bp, Enterococcus faecalis
agcgccgattgccgtataaaaaaggagagagaagctatgttagcagccatttgggcccaagatgaacaaggagtgattggtaaagaaggcaaattgccttggcatttacccaacgacttgaaattttgcaaggaaaaaacaattcataatacattggttttaggaccttgcactttccaaacgtattgggatgtcgtccgttaa

SEQ ID NO: 941 - DNA, 978 bp, Enterococcus faecalis
atacgcggattaagagacggagggaataagatggaagaagcatacttagcgctaggaaaaaagattttagaagaaggtcattttaaagaagaccgtacaggaactgggacgtatagtttatttggctatcaaatgcgttttgatttggccaaaggatttcccttactaacaaccaaacgagtaccgtttggcttgattaaaagtgagttattgtggtttttaaaaggcgacacgaatattcgctatttgttagagcgaaataatcatatttgggatgaatgggcgttcgaacgttacgtaaaaagcgcagattatcaaggaccagacatgacggattttgggcatcgtgtcttacaagatccagcgtttgcagaacaatacaaagaagaacatcaaaaattctgtgatgccattttaaatgatgcagagtttgcagaaaaatatggtgaattagggaatatttatggtgcacaatggcgtcactgggaaaccaaagatggtagctttatcgatcaattagctaatgtgattgaaatgattaaaaccaatcctgattctcgccgtttaattgtttccgcttggaatccagaagatgtgccttcaatggcgttgccgccttgtcacactatgtttcaattttatgtaaatgaaggaaaattaagctgtcaactttatcagcgcagtgccgatgtttttttaggtgttccttttaacattgcaagctatgctttattgacacatctgattgcgcatgaaacaggtttagaagtgggggagtttgtacacacgctaggagatgcccacttatatcaaaatcatgtggaacaaatgcaagaacaattatcacgagaagttcgttctttcccaacgctcgttttgaatccagacaaggcttctgtttttgattttgatatggaagatattaaagtagaaggctatgacccacatccaacgattaaagcgccgattgccgtataa

SEQ ID NO: 942 - DNA, 792 bp, Enterococcus faecalis
  misc_feature (63)..(63): Nucleotide 63 is "n" wherein "n" = any nucleotide.
ttagctgaacgcattcttttagagagtggtatatatagtatcggtgaaacgttccgaattggntattatacccagcaaaacgaagaaatggatcctaatcaacggatgattgcttatttgcaagaagcagcagaagaagtgaaacgcagtgatggaagcagcgttggggtcgctgaaatgttagagcgctttttatttcctcgttttatgcatggcacactgattggcaaactgtctggtggagaaaaacgccggttatatctcttaaaattattaattagtcagcctaacgtgttattattggatgagccaaccaatgatttggacattgatacgttgaccattttagaagattatatccaaacgtttaaaggagcggtaattgcggtttctcatgaccgttatttcttggataaaacaatggataaattgttagtttttcaaggaaatggtcagatcctatcattttatggcacgatgagtgaatatttggcgaaccaaaaagaacaagaaaaggtcaaagaaaaaccgctcaataaaccagtaaaagaagcatcgacagaaaagaaagaaaaaacaaagctgacttatatggaacaaaaagagtgggcaacaattgaagaagacatcacacaattagaaacgaaattagaaacattaactgaagaaatgaatcatcagggtgatgattttgttcgtttacaagaattgcaagaagcagtaacagcaacggaacaattgttagaagaaaaaatgaatcgttgggaatacttgagtgaatacgcggattaa

SEQ ID NO: 943 - DNA, 207 bp, Enterococcus faecalis
  misc_feature (130)..(130): Nucleotide 130 is "n" wherein "n" = any nucleotide.
ttcttgagccagaggagacctttgaaccaccccttttttaaaaataaaaatttgttttttttaaaaaaaaaaggtggcggccccacttctcccccattttttggattccggggggggagagatatcactntatctcctctcggggggggggttaaattttatgggggggtttttttttctatccaaaaaacacttttccccccataa

SEQ ID NO: 944 - DNA, 303 bp, Enterococcus faecalis
aaaataaagatgattaagtataagtggtcgggacaaacgtataactttcggctgattgccgaagaaattacttctgtcccgccatttatctgcaggtttaagccgtggaagggaagttattttgactttcctttcatggcttttttaagaaaggagcatgctatgtttaaaaaattaatgattcaacttgctttagtgattggtttaagtttaacgaatcccaataacggttgcggcttacccctccaagcggaatccatccacttttctttttttttccgggtctcgcgagccaagaaataa

SEQ ID NO: 945 - DNA, 321 bp, Enterococcus faecalis
tttaggagtctttttatggaacgttatctcaacacaataacaatgcttttaagcattttcggtgggattgtcgtacgtttattaggcggattagatcaattgttggatgtcttcctctttttaattattgtcgatttcatcacaggttggattaaggcaatcgccacaaaagaattgtccagtcggattggtatgctcggaattgcgaaaaaagtgacgatgttatttgtggttgccgtagcggttcgtgttgaaaaagttgtggggaacaatttgccaattcgggaaatggttctgattttttacattgcgaacgaatga

SEQ ID NO: 946 - DNA, 1791 bp, Enterococcus faecalis
aaactagaggagtgtgacgaaatgtcagtagaacatattgaagaattagataccctgaatcaaggtcgccttaaaatcaatgcaatcttggatcagtcgaatgcatcagctgagaaagtagatgcttaccaagtccagttaacgaatggaatttctgaagcgaaaaacatagcagatgaagctggcaaagaagccgtacaaattgccaccgatgcaggcaatcaagcaaatgaaacagccaaccaagcgatgaacaatgccaaaacagcaatcatgattgcaggaaatgcagtttcaacggcaaataataataaacaagaatttgatactttacgaaatgatttcgatcaattagtagcagaagcgggtgatagtaatccagaaattgtccaagcacgtacagatacacaaggcatcaaacaagctaccttagcgaatcgtcttcaaattgatttgaatgaccgtatgacaaaagcagacggtatttctttattggctaagccaactactgtcaaaatgaagttagactttaacggtaaaacggccggcaatacagccaccaatgcaaacagttattccactgattttacggcaaaaattcttaagaagccaacagaagtttgggaggaagtttcccaagcggactacaataaaatggccagccgtgatgatgagggcgtgaaaacaggttccacccaaagcggtgtgattccgcaacaattagcggccttcaatctcgttgaagccgctaaaaaattaattccacaaatgtttgaaacagtcacaactgacgaggcggtggcatttattcgccagaacgttcaattttttacgattaatcaacgtgtgaaagccgctgcgcccaataatcaaacgattaaaatcgctacgtatttaccaactacggataattgggtaactcaaatccaagaatcagcaaaagagtttggcgatttttcaattcaaatcaatgatcagaattttatcacagatgaaggtttcatttatttaatgagctatacagattcatcgaatggggtaacgccagctagcttagaagttgattacgtggggcttcatattggtctgtctgttgatgcccaagcggttttagcgaagagtggttttgttcaagcagagcaactcaatacccatatggaaaatcaagataacccgcaccaagtaaccgctgaacaagtggggctaggcaatgtagaaaattatggcttcgcatcagacagcgaagcagtcgcgggaactttaacgagtaaatatatgcacccgaaaaacgttgcggaagcgattaaaggtcaagctgtgacacaaacaggtgatcaagagattgctggggtgaagaattttgtaactatgccaaccgtcaatggtgtgcctttggaatcctctagaatggccatttatgaagctagtggagttggtgaagtcgaggcaaaatatcaggcggcctttaataaggataatatgaaatttgtattaattagggtaggaaatcgtgtcgatgcatttgtaagatgtaatttgagtgatccaacgaaattgaataataatttggttaaagtgtttactgttccaacaggatatacattatcgacgaagattacaaagggaatatggaatttggcgttaactgctatgcaatatacattccctcaaccgaattgtgctggtttatatgagatgggaaatcaaggaattctttttggtgctaaccgtgctggaaatatttacctacaaggaagttggtacacggacgatccgtttccaacaaaataa

SEQ ID NO: 947 - DNA, 888 bp, Enterococcus faecalis
tcccgtggtgaacagccgatgcaattatttggccaagcaatcatgggcttaaacccctttaatattgagaaaattcatgaagtgatggataaaatatctgctttcgctccagcggcaaaagcagcaatcgatattgcttgttatgatttgatgggtcagaaagctcaactgcctctttatcaattgttaggcggctatgataaccaagtaataacggatattacactacgtattgatgaaccaaatgtgatggcacaaaaagccgtcgaaaaagtcaaactaggttttgatacattaaaaattaaagtcggaacaggaattgaagctgatatcgcaagagtaaaagcgattcgtgaagcagttggctttgatatcaagctccgcttagatgcgaatcaggcttggacgcccaaagatgcagttaaagcgattcaagcattagcagattatcaaattgaattagtggaacagccagttaaaagacgcgatttagaaggtctaaaatacgttacttcacaagttaatacgacaattatggctgatgaaagctgttttgatgctcaagatgcgttggaattagttaaaaaaggcacagtcgatgttatcaatataaaattaatgaagtgtggcggcattcatgaagcgctgaaaattaatcagatttgtgaaacagcaggcatcgaatgcatgattggttgtatggcggaagaaacaaccattggcatcacggctgctgcccatttagctgctgctcaaaagaatatcacacgagcagatttagatgcgacattcggtttagaaactgcgcccgtaactgggggcgtatccttagaagcaaaaccattattggaattaggagaagcagctggattaggcatttctcattaa

SEQ ID NO: 948 - DNA, 1323 bp, Enterococcus faecalis
atgaagtatgatttaaagtatcttagtgttcctttgcctgaggaaattcaaagggtgaaagaatttggcgattttgcaagtgcggatattgccattgatttttggttgacaaaagaacttccgcaggcattaaaagaacgtttgataattgaaaaagatgtcattaaaatgatgcgtatgaatgagtatcctcatagctttgcaaaagctgatcaaatgatgagagatacttttcaggattatcaaacagaggaattaattcgtttaaaagaaacgggattagtggactgggtttatattgatggtgaaccgtatttccaacttcgatttttggccaatttaattaaaacaaatgcggcatatgttgcacgtttgcgggaagcagaaagcaatcaattagaaattctccgcaaaaaagaactaaaagagaacatcgaacaaatgcaaaaaaacggtggtagaaaagtgagaacaacaattaaagccaccattcaggtgaaaaaagaatttgagcgtccaggtgagcgtgttcgtgtccatttgccgctgcccaaagcgtgtcaacaacaatcagaaattgaaatcctagctacgtcacctgaagcaacctatattgcggcagaagatgcgcctcaacgaacactgtgttttgaaacaatcttaaaagaaaatcaaacgtttacagttgaatattgttatgttaatcggatggtttaccaacagttagaagaaaataacgtagacaaaatgcaaccaagctttgatttagaggaacagttaccgcatattcgattcacgccttatttaagaaatttagcagatgagattgtgggcgatgaaagtaatcccttaaaaaaggcacgcttgatttatgactttgtgacgacaaagattcattattctttcatgcgtgaatattttacaatttccaatatttcagactatgctgcaactaatttaaaaagtgactgcggcgtgcaaacgattttgtttatcacgctttgtcggattgcaaggaatacacccaaatggccatcgggattatatgtttctacacattatacaggctgtcatgattgggctcaattttatataaaaccgtacggctggctctttgcggaattgttcttaggcggaagtgcttacgaaaacgggataaacaccgtggaatcagtattcggcacatttaagtttttaagaatgttcgcaaatagtgagatcaaggcagattttaacccgccaaaaatgcaattgcgtgcagacccaattgaaaaccagcggggaggatttgagtacgaaaatgagggcttgccatacgcatga

SEQ ID NO: 949 - DNA, 1674 bp, Enterococcus faecalis
ttgacacatagggggaatagtatgaaaaagttaaaaatgatggggattatgttatttgttagtacggtcttggtaggttgtggcacaacagcagaaacaaaaatagacgagaaagcaactgagaaaaccagtgtctcgaaaaaagttttaaatttaatggagaactcggaaatcggttcaatggattctatttttacacaagatgaagccagtattaacgcacagtccaatgtctttgaagggttatatcaattggatgaaaaagatcaactaatacctgctgctgctaaagagatgccagaaatttctgaggatggcaaacgatataccattaaactaagagaagatggcaagtggtccaatggtgatgctgtaacagccaatgatttcgtttttgcttggcgtaaattagcgaatcccaaaaaccaagccaattactttttcttgttagaaggaacgattctgaacggaacagctattacaaaagaggaaaaagcaccagaggaattgggtgtcaaagcgcttgatgattatactttggaggttactttagaaaagcctgtaccatattttacgtcgttattggcattttctccatttttcccacaaaacgaagcattcgtgaaagaaaaaggacaagcctatggcacttctagtgaaatgattgtatctaatggtccgtttttaatgaaaaattgggatcagtcagcgatgtcgtgggattttgtgcgtaatccctactattacgataaagaaaaagtaaaatcagaaacgattcattttgaagttcttaaagaaaccaataccgtttataatttgtacgaatcaggtgaattagatgtggctgtcttaacaggagattttgctaaacaaaatcgagacaacccagactatgaagcaatcgaacggtcaaaagtctattccttacgtttaaaccaaaaaagaaacgaaaaaccatccatttttgcaaatgagaatgtccgcaaagctttagcttatgctttggataaaaaaagtttagtcgataatattttagcagatggctcaaaagaaatttatgggtacattccagaaaaatttgtatataacccagaaacgaatgaagattttcgtcaagaagcaggcgctcttgtcaaaacagacgccaaaaaagccaaagagtatttagataaagcaaaagcagagctaaacggagatgtagccattgaacttctttcaagagatggtgatagtgaccgaaaagttgctgaatttatccaaggccagttacaagaaacgttgcctggtctcactattaatgtcaaaacagttcctttaaataatgcaattgaattaatgagaaaaggggattatgaattgtctgttggcatgtggggacccgattatcaggatccaatgactttcttagaaagctcagttagtggtaaccgtatgaactattctagcccaacgtttgatcaactaattgaagaagcaacaactaaatacgcaaatgagcctgaaactcgttggcaaacattaattaaagctgaaaaagtattggtggaagaagatgccgctttaattcctttataccaagaggcccgtagtcagcttgtacgaccaggtgtcaaaggtattcagtatcataacttcggtgcaacgagcacatataagtatgcctataaagaataa

SEQ ID NO: 950 - DNA, 2196 bp, Enterococcus faecalis
ttaatggcagaagcttataacgaagaagtagtagcgctacttcaaaaagaattgacaacgtatcgttcaaaacaaataacaacggttttaactttattaaatgaaggaaatacagttccttttattgcccgttaccggaaagaaatgactggaagtttagatgaagtccaaatccgtgaaatagaagaacgttatcattatttacaaaacttgaaaaagcggaaagaagaagttctccgtttaattgaagagcaaggaaaactaacaaaagaactcaaaacagatattcaaaaagcagtaaaaatgcaacaagtggaagatttgtatcgaccatataaacaaaaacgtcggaccaaagcgactatcgcgaaagaaaaagggttggaaccattagcagattggttgctctctttacctgaaaacgcggatatcttagccaaagcggctacttttattaatgaagaaaaagaagttgcaaccgccgagatagccttgcaaggtgctcatgaaattttagcagaacgtattagcgatgaaccaaaataccgaatatggttacgtgattatatggttaagcatgcgcaatacgttagcgtagttaaggatgaagaaaaagacgaaaagcggacctatgaaatgtattacgattttgcagaaccagttagcaaaatggtgccgcaccgtgtcttagcaacgaatcgtggtgaaaaagaagacattttaaaggtttcccttgtcgctgatgaaacaaaaattaatgattatttccaacgtcaactaatcggcaagcaagcaacaagtttagctgctccatacattgaggctgcttatttagatagctataaacgattcattggaccagcgattgaacgggagattcgcaatgaattaacagaaaaagctgatgaacaagcgattgcaattttcggtgaaaatttacgtaatttattattacagtcaccacttaaaggaaaagttgttctaggatttgacccggcttatcggacaggctgtaaattagcagttgtcgatgaaactggtaaagttttagcaattcaagtgatttatccacataaaccagcgactgctgcgaaacgtgaagccgctggtccagcctttaaaaagatcattgaagactatcaagtggacatggtagctattggaaacggaacggcaagtcgtgaatctgaattgtttgtggcagagcaattaaaagcggtgaagcgtgacgtcttttacgtgattgttaatgaagcaggggcttccgtttactctgcgagtgaagtggctcgtaaagagtttcctgatttacaagtcgaagaacgaagtgcggtcagcattgcacgtcgtttgcaagatccgttggcagaattagtaaaaattgatcccaaagcagtcggggtcggtcaatatcagcatgacgtatcgcaaaaacgtcttgccgagcaattggattttgttgtagaaactgcggtaaaccaagttggtgttgatgtgaatacagcgagtgctcaacttttacaacatatttctggcttaaataaaacaacggcgcaaaacttagtcacttatcgtgatgaaaatggtgtctttacagcacgaaatcaagtcaaaaaagtacctcgtttaggaccaaaagcatttgaacaagcaattggctttttacgaattcctaatggcaaaaatgtgttagataacactggcattcacccagaaagttatccagtagcacaagcaattttagaaaaagcagagattgcttctaaagaattagggacagcagaagctatcgaaaaattgaaacagttaccagtgaatcaattagctactgagttagaagtaggttcagaaacactcacggatattattgctagtttaatccaaccaggtcgtgatatgcgcgatgagatgtcagcaccacttttacgtaaagacgtgttgacgatggaagatttgaaaccaggaatggaaatgcaagggactgttcgaaacgtaattgactttggtgcgtttgtcgatattggtgtgaagcaagatggcttagtccacatttctaagttaagtactaaatttgttaagcacccaacggatgttgttgcggtgggggatgtagtcacagtttgggtagaagatgttgacttgaaaaaggggcgtattagtttaaccatgttgcctcgggctgatagaaaagagtaa

SEQ ID NO: 951 - DNA, 747 bp, Enterococcus faecalis
gagggcttatttatgaaaccatatgtttatgtaatcagtgatattcatggacaagcagatttgtttgatgccttactcacagactatgacccagtcgagcatcagctagttttaattggtgatttaaacgaccgtggttcggattctaaagcctgttttctcaaaggaaaagaacttgtcgagcaacacggcgctgtttatttacgaggcaatcatgaagaatattttttgcagtttcttcaaaatccagaggactggtttgcaggatatgttcgcaatggtggcaaggaaacaattgaaagcctcttgcatccaggagctactgcagaatactcaccaacagaaatggccttaatgatccgtagtcgctatccagagttaattgattttttaacaaaacgaccactttattttgaatggcagcattacttatttgtgcatgctggggttgatttaacgatggaagattggcggcaaacagcacctaaggattttttgtggattcgcgaaccctttcatcaagggaaaaataatacaggcaagaccattgtttttggtcataccattactccgatgttacatggtgatatgcagaccacggacctttggcaaagtgatggaaaaattgggatagatggtggtgctatttttggtggctctgtgcatggtgtgatttttaatgaaaaaggcattgtccaagatatcgaatatcaaaaacgcacccctgcgtggcaaccagaattttga

SEQ ID NO: 952 - DNA, 249 bp, Enterococcus faecalis
aagatgcgtttggcggtaagaagaaaaaataaaccaaacgagtcagagacaaaagcagttagctccaagtgttcatcactctcgaaggctaaattgcaacgagtaattgtaggtgctgcttttgttcaactgattattttaagatttagagagtgggacataagtcgttttgacttatgtcctattttcgttttttatttccaaacattttacgagaatattttaaaatttagcgtatacttaatataa

SEQ ID NO: 953 - DNA, 735 bp, Enterococcus faecalis
  misc_feature (5)..(19): Nucleotides 5 & 19 are "n" wherein "n" = any nucleotide.
ggacnatggtacaatcganaagatacgtgtgcaacctgtggcggtaatggcgccaaaccaggcacacacccagaaacttgtcataaatgtcatggctctggaacaatcaatgttgaacgtcaaacgccattaggtcgtatgatgagtcgtcaaacttgtgatgtgtgtcatggcacagggaaagaaatcaaagaaccatgtccaacttgtcatggcacaggtcatgagaaaaaagcacatactgtcaaagtaaatgtgcctgctggagtagaagatggtcaacaaatgcgcttagctaaccaaggagaagcgggtaccaatggtggaccttatggtgatttatatgtagtctttcgtgttgaagatagtgatattttcgatcgagatggcgcagaaatctactatgatttaccagtaagtttcgtccaagcggctctaggggacgaagtaactgtcccaactgttcatggtgacgtgaaattaaaaattccggctggaacacaaactggcacaaacttccgcttaagaggcaaaggtgcgccacgtttacgtggtgggggcaatggtgatcaacacgtgaaagtgaaattaataacaccaaaaaatcttaatgaagaacaaaaggatgccctacgagcttttgcaaaagctggcggacaaaatgtaactgaacaacaagaagaaggcttctttgataaaatgaaagatgcgtttggcggtaagaagaaaaaataa

SEQ ID NO: 954 - DNA, 906 bp, Enterococcus faecalis
ttcatacgcttaaggtatactgaaagcgaaacaaagtaccacagagaggtgaacccattgaatctaatcgaatgtttagaacaaaaagaacgctatacatataacgaagggctaattattgattttattttatctcatactgaacgagtcctgcatatgtcgatttatgaactagcagaagccaccaactcttcaacttccacgattgttcgtttgtgtaaaaaaacagagactagcggtttcaaagaatttaaaatccgcttgtcccgcgacttagaaattcactaccaagcaatccggaatgttgatgcgaatatgccttttttagcgcaagattctgatttactaattgccaagaaaattgcgcagttaacgactgaaactgttcaatccacccaacagttattaaccgaggccatgttaaataaaagcattgatttacttttaaccgctgaaaatattttagcagtgggtgtcagtaactcctacattcgcttaacggattttcaaacaaagttattacgcattcagctatttatccatttaatcccttatcaagctgaacaattttatttagccatcaatgccaccaaaaatgacgtagccatcctcgtctcttacagtggtaacactgcagaaatcgtaaatgaagcacggatttttgcagaaggaggcaccccgattattgccattacttcagacttgaacagccaattagctaaatacgccacagtgattttgcccattcctaacgttgaacatgcagatttcaaagtctcaaccttttcctctcaactagccatcgaatatattctcaatgtcctttattcctgtatttttagtcgcaatttcgataagaattacacatcacaaaaaaatacacctacttcgatacttaaattttaa

SEQ ID NO: 955 - DNA, 360 bp, Enterococcus faecalis
tcagtactgtttttcacaatcgggaagacaggattcgaacctgcgaccccttggtcccaaaccaagtgctctaccaagctgagctacttcccgggctatgaagttaaagtaataaaaaaagactatcgaattaaaaagaaactcacgtgcacctttttaaaacttagtcaatcactcaactatgcacccaaagggagtcgaacccctaaccttttgattcgtagtcaaacactctatccagttgagctatgggtgctaaatataaaacaatgccgaggaccggaatcgaaccggtacggtgatcactcaccgcaggattttaagtcctgtgcgtctgccagttccgccaccccggcgtaa

SEQ ID NO: 956 - DNA, 246 bp, Enterococcus faecalis
  misc_feature (63)..(106): Nucleotides 63, 83 & 106 are "n" wherein "n" = any nucleotide.
agaggaattaattgtaaaaatgaaacgaaaaagtccaaaatcatttatatatgtaagcgcatnacttgtttttttgagtggtnttgtgggtgtttagtttatcgtnaattcgaaattgtagaagctacaacaatagtgatgactaacctgttaaatgaaaaataccttcctttaggcggggcgattgatgattggaaaaatgtttctaaaatatgtgtccccattgttccctataaaaatagccca

SEQ ID NO: 957 - DNA, 1080 bp, Enterococcus faecalis
acgaaatttctcgtcaaggagacgtttcaagtaatattcttcttgcccctgatatttaaagaaggaaagttgcctgctgattttcaaaaaaatcaaaaggatcgctcgttctatgcaagtgatattggtcatattgaaggatacattcgacaaatcgtcacaaaggcaaaagcaaaagggtttacgccacaagatatccaagttttagcgccaatgtatcgtggcgcagccggcattgatgccttgaataagatgatgcaagaaatcttcaatccaaatgatggtaagaaaaaagaagtcaaatggaatgacaccgtctatcggatcggggacaaagttttgcaactagtcaatacgccagaattaaatgtgttcaatggagatatgggagaaatcgtcggaattactttagccaaagactcagaggacaaagtggacgagttggttttacagtttgataataatgaagtaacgtataaaagaaatgaatggaataaaattacgctatcgtattgttgttcgattcataaagcgcaaggtagtgaattccgcatggtgttactgccaatggttcatcagtatagccgaatgctgcaacgaaatttgctgtatacagcagtgacacgtagtaaagaattattaattctactaggtgaggtttctgcttttgaaacatgtgtcaaaaacgaatcggctagtcgcatgacgatgctaaaagaacgaatcgtgaacgcagaacaaatgaccttaacgactagaactcagttagaagcctatgaagaaggtttaacggcagaccatccatttactgaaacggaaacaaaagctgtcttttatgaaactgaacagcaatcaacgaaagccgatcagatcaaagaaacagacgagcaattagttgacacaacggtacaagaggtttcactatttgctgatgaaggggaagagtcaacctcaccagctgaaccacagaaagaagaacaattacctgaaaatcctgtattgtcaattcaagaaattcaagaaaataaaattaatccaatgattggtatggctggaaccactccatatcagtttatgtga

SEQ ID NO: 958 - DNA, 1620 bp, Enterococcus faecalis
agaaaaagcacaataagcacacaacacaaaggagggcttgtagtggtaacactttttggtgaggacgaagaaaaagcctttattgttggaactgtacaagcaatcttttttgaaaatcccagtaatttttataaagtcgttcttgtaaatgtgaccgatacaaatacagattatttagaaaaagaaattgtagtaactggaagttttggccaagttcaagaagaggaaccctatcgtttctttggtcattttgtggaccatcctcgttatggcagacagtttcaggtggatagttatcagcaagaaagaccgacttcggctagtggggtggttaactatttatcaagtgacaaatttcctggcattggtaaacgaaccgctgaaaaaattgttgaagtattaggggaaagtgcgattgaccgaattattgatgatcctagtgttttggaagaagttactgttttaaatgaaaaaaaacgtcaagtaatcgtcgaaacaattcgcttgaatcacgggatggagcaagtgattgtgggactaaatcgatacggctttggtagtcagttagctttttcaatttatcaaacctatcaagaagaaaccctttctgtgattcaagaaaatccctatcagttagttgaagatattgagggagtcggatttaaacgagcggacaatattgctgaacaaatcggcattcaggcggattctgctgttcgaattcgagcggcgattttacatgaagtgtttgaacactctattcgttcaggcaatacgtatgttcaagcagatgttttgttagaagaagcgattcggaccttggaagcaagtcgcccagtggaaatctcacctgatcaagtggccaatgaaatcattacgttagtcgaacatggaaaaatccaacaagaagagactaaactttttgagaacagtctctatttttctgaatggggcattggtacttcgattcaacgtttactttctcgtaaaaaagaaattcattatgaggaagaagaagtccaaaaaaatatccgaatgattgagaaacgtttaaatattcagtatggcgactcgcaacaagcagcgattgaagaagcgattaaatcgccgttatttattttaactggagggcccggaacagggaaaacaactgttatcaatgggattgtctcgttgtttgcggaactaaatggcctttcattagatctcaaagactatacgcaggagatgtttccaatcttgctagcggcgccaactgggcgagcagcgaaacgtatgaacgaaacgacaggtttacctgcaagtaccatccaccgtttgttaggcttgacaggtcgtgaaaaaaatccgagtttaaccgccaaagaattagaaggtggtttgctaattgtagatgaaatgtccatggtggatacttggttagccaatacgttattaaaagctattccgacaaacatgcaagtgatttttgttggtgataaggatcagctaccgtctgtcggtccaggtcaagtcttacatgacttattgcaaattaacgaaattcccaaatgtgagctaaacgaaatttctcgtcaaggagacgtttcaagtaatattcttcttgcccctgatatttaa

SEQ ID NO: 959 - DNA, 2331 bp, Enterococcus faecalis
  misc_feature (14)..(14): Nucleotide 14 is "n" wherein "n" = any nucleotide.
ataaagtcgacctngaaaaaagggttaagtacagaagaagttgccaagcagaaagagttaggccttcaaaataattatgaggaaaatgtagcaaaatctacaaaagatattatttttgataacgtcatgacgttattcaactttttaaactttgcaatcgctgtttgtttactatttgtcggagcgtattccaatctggctttcttagcgattattattgtgaacatgtcaatcgggattttccaagaaattcatgcccgtaatttagttcaaaaattatctattgtggcaaaagaaaatgttcatgttgttcgaaatggcgtacaacaagaaattgatacaaaagaactagttatggaagatattgttattatctctgcaggggaacaagttccttctgatatggaagttattgacggtaaagtcgaagcgaatgaagcgttgttaacaggtgaatcagatttaattgaaaaggaaatcggcgataccttgctttctggaagtttcattgttagcggacaagcctatgcccgtgttatccacgttggtgccgaaaactatgctgtgaaaatcacccaagaagctaaagtgcataaaccaattcaatcagagttagtcaattcgattcgtaaagtctctaaatttacaagttgggtgattattcctctagggattattttatttgttgaagctttttggctaagagatgctggcattaaaacatctgttgttgcttcttcagctgctttgttagggatgttaccaaaaggattagtactattaattagtattgcgctgacaacaggtgtcattaagttagccaaaaaacgtattctagtacaagatatgtactcaattgaaacattggcccatgtggacactttgtgtttagataaaactggaacgattacagaaggtaaaatgaaagtgcaaaaggcgattatcttgcatgacaaatatgaagaactcttcccgcagattatcggaagctacctatctgaaagtacagataataatattacaatgcaagcaattcgtgatcattatgaagtatccaatcgatttggcgcaaaagaagtcttggctttttcttctgaacgaaaatggggagctattgaatttccagaaattgggacagtttatttaggggctcctgagcgtttggtagacgatagtcggttgccagaagctgtttttacagcacaagagaatgggtatcgcgtcttgatgttagctattgcggagcaacaaccgttaaacgaaaccaaaatgccttatttagagccattagcaattctagaaattgatgatccaattcgccaaaatgccaaagaaacactggcttatctaaaagaagaaggaatcgacttaaaagtaatttctggtgataatccggtgactgtttcaaatattgctcgtcgtgctgggctacccggttatgagtcttatattgatttgtcgaccaaaacgacagaagcagaagtgcgtgaagcagttcagcaatacacagtgttcggacgtgtatcgcctcagcaaaaacgaaccattgtgcgtgagttgaaagacacagagcatgtggtggcgatgaccggcgatggcgttaacgatgttttagcgttacgagaagcggattgtagtatcgccatggcagagggagatggcgctactcggcaaatttctaatctagttttgctagattctgattttacaacgttaccagatgtcttgtttgaaggacgacgtgtggtaaataatgtaacccgagtttccagcgttttcttcattaaaacgatttattcgtttattctctcaatcatttgtgccttaacggccattgcgttcccgttcattccgattcaagtgaccttgattgatttagcaattgaaggatatccagccttcttcttatctttcgaaggggacaaacgaaaagttgtcgggaagtttttaccaacagctttgaaaaatgcgtctgttaatgcgcttttagttgtagcgaatatcattgctgtttatctgattggacaaaatcaaggattttcttctttagacaccacgacgttaatgtattatttattagttggaattagctgtatggctgttgttcgagcatgtctgcctttaaatccactacgcattttcttggttttcagtaccattattggtatttatgtagcagctatgttattccacaacattttagaaattggtttcttaacttcgcaaacaatgggtctcttctttattatgatggccattaatattgtggtgcgtgtaacaattggtttcgtacaaatgaaacgtgctggaaaaacaattaaagatttataa

SEQ ID NO: 960 - DNA, 1812 bp, Enterococcus faecalis
gaggtgaggacaatggcacaacgcattcctcaggaagtcattgaggaagttcgtcaccgaacgaatatagtagatattattgggcagtatgtccagttaaaaaaatccggtaaaaattatatgggtttatgtccgtttcacgaagaacgttccccttcattttcagtagcagaagacaaacaaatttttcactgttttggctgcgggaaaggtggaactgtttttaatttcttgcaagaaattgaaggcattagttttccagaatccgtgaaacgtgttgcagatttggaacatttatctgtggactttgattggtcagagccgcgtgaagtagcggataccccagaaaaccaacaaagacggagtttgttacaactgcatagtaaagccgcagaactttaccatcatattttagtgaatactaaaattggcgaacccgcattaaactatttattagagcgggggttaacacaagaactaattgagacctttcaaattggatttgcgccgcaaaaacgtgatttcttaagtcaagtttttaaaaacgaacaactggatgaaacgctttttgagccttctgggctgtttgtccaaagagataacggtacgtttttggatcgtttctatcaacgaatcatgtttccaattaatgatccccaaggcaatgtcatcgccttttctggtcgcttgttaaaaacagctgattttccaggggatgagatgcctaaatacttgaatagtcctgaaacaacactttttaataagcgagaaacgctgtttaactttgatagagccagaaaagaaattcgtaaagaaaatacggtcttgctttttgaaggattcatggatgttatcgctgcttggcaatcaggcgtaaaaagtggggtggcttcaatggggactagcttgaccaatgaacaaattcggcgtttggaacgggtcgctaaggaagtagttatttgttacgatggcgataatgccggtgttcaagccacaaaccgtgcgattcaattattgcaagaaaacagtcattttgacttgagtattgtcagcatccctgaaaagctggatcctgatgaatatgtgcggaaatatggcgcagaagcttttcaaaatttagccaatcatggccgagaaacagtttttagttttaaaatgaattatcatcggttaactagaaacatgaataacgaaaaagaacaattggattatgtgaacgaattgttacgggagttaaccaatgttcaatctcccttggaacgtgatcgttatttaaaccaaattgctcaggaatttcaactttctgttcatagtttggaagagcaattcaatcaattgaagcaagagcaacgttcagtccaacggcaagaaaggcaacaattttatcaagatgaaatgatgccaccaccaatggaagaacctgtttttgaagagaatcacgtccagaacaagttaccgttaacccaagttcaaaaagcagaacgttctttattatttcgtttaatgaatgaacaaggagtacggcaaaccattcaacaattgccagatttttcattcgctcatgatgaataccaagaattatatttcttgctagaaagttatgcgacactgcatcaaagtttcgacattgccgattttattaatttcttgcaagataatcaaaccaaacaattagcaattgaaattgcgtatcagaatttatcggaagaaagctctgagcgagaagttgccgatttattacatgtaattgccttatcaagtattgcagaggcaattgagcagaaacagattctacatttgaccacggcttga

SEQ ID NO: 961 - DNA, 1017 bp, Enterococcus faecalis
cttgccccgcattggccccgtgggcgaagtagtaaatcgcaaattaggaaaacgtttccggaaatgtttttcctaaatgtgaatggaggaagaaaaatggatacaaagaaaagaccgatcattattgatacggacccaggaattgatgatgctgtagctttagcgattgcactgaatcatcctaacctagaagttcgcttaataacgacggttgcagggaatgtagatgtagaaaaaacaacaaataatgccttgaaacttgtcgatttttttgggaaaaaggttcctgtagccaaggggtgtaattgtccgttacttattcaattagaagattctgctgagattcatggggagactggtatggatggctttgagtttccgcaacctatctctacgtgtttagatattcatgcagtggaagctatgcgaaaagaaattctgtctagtgatgttcctttgaccattgttccaattgctgcattaacgaatattgctttgttactgaccctctatccagaagtcaaagaaaatattgcagaaatcgtcatgatgggtggctcattagcaaggggaaatacaaatacaagtgccgaatttaatacgtatgtcgatccacacgctgcacaaattgttttccaatcaggtgtcccgctaacaatggtaggattagatgttacaagtcaagctgtgttaacgaatcatgaagtaacagccatcagagcgcttggtagagttggggaaatgttttatggtcttttccgtcattatagaggcggcagtctaactacaggtttgaaaatgcatgatgtctgtgcgattgcctatttaacttcaccagaattatttgagacaactgaaacgttcattgaagttgctttggaaggtccagctgcgggagctactgttgcggatttaaaaatgaagtatcataaaaacacgaatgccgttgcctgtatagatgtaaatgttgaagcttttcaaaaatgggttgtcgaaaaaatgaaagcggttaattaa

SEQ ID NO: 962 - DNA, 1386 bp, Enterococcus faecalis
aggaggataagtatgattgaaagtttattggtattggtcgttttagttgttgtagcctatttgattgtaaaaaattatcatcccgcactcagcttaattattggtgcgcttgttctacttgcatgtgcatggatgttagggcatcccatttatcctgcaggagaaggaaccggttttggattatttgatattttcttgaagtttaaagatacaattattgcacaagtgagttcagcaggaattgtaattatgattctttttggttattcaggctatatgaatgcaatcggggccaatcagatggctgtcaactttttggtgaaaccattaatgaagattaaacgtaaatcgttatttgtccctgtggtctttttaattggaaatttaatgtcactagtagttcctagtgcatcaagtttagcgattattttaatgtctatattatatccgatgctagccagcatggggatttcatcattaactgctgcaggtgtgattgcaatgacggcaactatcatgccaacacctttaggcgcggataacgtaatcgccgcaaatacccttggttatgatgtgttaaattatgttgtatggaatgccaaaatttcgctgccatcgttattaatcattgcggttgcacagtacttctggcaaaaatactgcgataaaaaagaaggtgaggctgcctatgtctcattaaatgaagaaggcttaagcaaacaaaaagaatttgatgttcctaaattttatgcaatattgccaatattaccgctattattaattgttggagtgggaatcgcaggaatgtttattaaaggaataacgatggatatttttgttcttacatttatttctttcttcatcgctgtattggttgagacgcttcgcttgaaatcttttaaaaaggttcaagatacagctgtcgagatgtttaaaggaatggggcaagggtttagtcaagttgtgatgcttgtcgtatgcggttcattattcacgtctgcgattcaaacgttaggaattattgatagtattatggcatctgtcgaagcatcaagttcagcaggaattgtcacgaccttaattttcagcggtgcaacgaccctttttggaattttaagcggtggtggtctggcaatgttttatgcggttatcgaactaatccctgggattgctgaaaaagctgggattgatggcatcttaatttccttgccaatgcagatgattgcgaatttaactagaacgatttctcctgtagcagcagttgtcatgattgtcgcatcaacagtaggagttagtcccatcagaattttaaaacggacgagtgtaccgaccatcattggcattattagtgtgattgtcttgtcgattctattgttaccttattaa

SEQ ID NO: 963 - DNA, 492 bp, Enterococcus faecalis
acaatgaaaattagagtggctgatgagaaagagttaccgatgattcttcaatttttaacagaagtaaaggcatatatggatgttgtgggcattacacagtggacaaaggactatccttctcaaggagatatccaagaagacattacaaaaaaacgattatatttgctagtgcacgaagaaatgattttttcaatggcaacgttctgtatggagcaggaacaagactttgtttggttaaagcgctttgcaacttcgcctaattatattgccaagggttatggcagtttattgttccatgaattggagaaacgggcagtctgggaaggaagacgtaaaatgtatgctcaaactaatcatacaaaccatagaatgattcgatttttcgaaagtaaagggttcacaaaaattcatgaatctttacaaatgaatcgcttagactttggctctttttatttatacgttaaagaattggagaaccaatccatcgtttaa

SEQ ID NO: 964 - DNA, 1098 bp, Enterococcus faecalis
caacatgatataaaggcagtttcaataaaaagggaatgtgttgaaaaccaatgggaggaattgggaagtaaggaaccaatttttagtaggtaccataaattggaagagcccagccaaggcattgataaaattgcattagatacgacacaaggtcgtttaacagaagcgacacttttgttagaagaaacgagtcctacctatcttgctctgagtcaaaagggcgaactttttagcgtcactagtgttgacggtgaaggtggcactgccgcttatcaaccagaaatggaccattttaacttattgaataaagtaactgaggaaggtgcgccgccatgttatgtagctgttgacgaaaaccgacaacttgtctatgcagcaaattatcaccaaggtatcgttcacgtgtatcgtatcttaaaagatggttctttggaagatgctgacaaagtgattcatacagagccaactggtcctcatgaaaaccaaaacaatgcccatgttcattacacagatttgacgcctgatcaacgcttagtcgtctgtgatctaggaaccgatcgtgtgtatacgtataatgttagcttagatggaaagctttctgaaatcgctcaattcgtgactgagccagggactggtccacgtcatttagtgttccacccaacaaaatcattggcttatttatttggtgaattagatagcactgtttcagttctttcatatgatgaaacagatggttctttcactgaattacaaaaagtttctactttacctgctgattatgatgcgtttaatggtggtgctgcgattcgtatttcttctgatggccgtttcctttatgcttcaaaccgtggccataactcaattgctgtctatgctgtttcagaaaatggcgaagcgattgaacgaattcaattaatttcaacagaaggcgatattccgagagattttgatttagatccttctgaagatttcatcgttgtcgctaatcaagactctgataacttaacactttatcgtcggaaccaagaaacaggcttattagaaatgattcaaaaagatgttgctgttcccgaatgtgtttgtgttttatttgtataa

SEQ ID NO: 965 - DNA, 468 bp, Enterococcus faecalis
acaggagtgaaggaaatgaaagtcatttttttacaagacgttaaaggaaaaggaaaaaaaggggacgtaaaagaagtgccaactggttacgcccaaaactttttaattaaaaatggttatgcgaaagaagccaataaagggagcatgagtgcgttagcgggtcaaaagaaagcccaagaaaaacatgaagcagaagttttagcacaagcaaaagaaatgcaagcctttttagaagatgaaaagactgttgtagaaatcaaggcaaaagctggagaagacagccgtttatttggctcaattccttcaaaacaaattgcagaagccttaaacaaacaatacaatgtaaaattggataaacgcaaaatcgaattagccaacccaattcgttctgtaggttacactaacgtaccagtcaaactacatcatgaagttacagcgaaaattaagcttcatgtcgtagcggaataa

SEQ ID NO: 966 - DNA, 2046 bp, Enterococcus faecalis
atcaccagagcaatatgctcgttggaacaagtcgcctcaaaggtctgcagaaagattggaggcaaaaaaatgcaaaagaagagaattcaaaaaaacggtttcttaattgttgtgggtcttctcttagtagaatttctcctctatttcttactaacaaataaatggctgctattggcggtaattatcgcattagatatctttctcttagtggttattcggctgttgattagagatgtagaaattacgaacgtagaaaagattcaagaagcaagttccattgctgaacaatcgttggattatgttgtaaatgaagtacctgtgggaattattacgtataacggggaaacacgcgcggtagaatggcttaatccttatgctgcttctatttttaataaagacaatcagctaacgttaaccgctagccaagttacgtcttatttagaattagcagaacgaaaccaagatatttttacgattgacgaaaatacctatcgctttagcgtcaataaagaacaacatacaattacttttgaagatatcactaaagaaagtaatttgtatcaagaaaaagtcgaaatgcaaacggctattggcattgtgtctgtcgataattatgatgatgtcaccgatacaatggatgagaaagaaatttcttatttgaatagtttcattacgacgatggtttctgattggatggaccaatacaaagttttttataagcgaatcaacgcagaacgttattttttcattgcccaatgggaagatattcaaaaaatgatggacgaaaaattttctattttggatacgatccgtaaggaatcagctaaccatgaagtagccattacgttaagtatggggattgcttatgggggcccaaccttagatcaaaccgggaccacggctcaaacaaacctagatacagctttagttcgtggtggtgatcaagtggttgtaaaagaagccaaagatgaagcgaagccgttattttttggtggaaaaacggcagtaacgacgaaacgttcccaagtacgttctcgcgcaatgagcatggcaattaagggaattattgcggaatctgctgacatctatattatgggccatcgttatccagatatggatgcgttaggttcagcatttggtgttgctcgtttagcctcgtttaataatcgaaaagcgtggattgttttagatgaaaatgaaatcattcccgatgtcaaaagagtgttagaggcgattaaagagtacccagaattagaagagcgcattattagtcctaaagaggccatgaagcgcaagaaagaaagtagcttattagttatggtagattaccataaaccgtctctatcgatctcacaagagctctatgagcgttttgataaagtagtaatcattgatcaccatcgacgaggagacgaatttccagcaaaacccttgctttcttatattgaatcttctgcctcttctgcttcagaattagtcacagaattgatcgaatatcaaagtaatagcgcaaataaactgcaggcctttgaagcaaccatgatgttggcgggaattgtggttgatacgaaaagtttcaatacacgaacgacggcgcgaacatttgatgtggctagttatttacgaacttgtggagcagactcatctttagtacaatatctattaagttctgatcttacaagctatctggaaatgaacaatttaatctctaaaagcgaatatgtcacaaaagataccgtcgttgttgcagggagtgaagacaaagaatatgatagtgtcacagctgccaaaacagcggacacattactttctatggcagggattaatgcagcatttgtcattaccaagcggacggatcaacagattggcattagtgctcggagtaatggttcaattaatgtccaaattattatggaaaatttaggtggtggcggtcactttactaatgcggcagtacaattatcaaacgtaacagtagcagaagtaaaagagcaactacttgatgtaattcgtcaaaatattaatgaaatgtatgaacaggagtga

SEQ ID NO: 967 - DNA, 252 bp, Enterococcus faecalis
gagggaacaagaatggcacaacaaagaagaggcggacgtaaacgtcggaaagtcgactatatcgcagcaaaccacatcgaatacatcgactataaagatactgaattgttaaaacgattcatttcagaacgtggcaaaattttaccacgtcgtgttacaggtactggcgctaaaaaccaacgtaaattaacgattgctattaaacgcgcacgtatcatgggattattaccattcgttagtgacgaacaataa

SEQ ID NO: 968 - DNA, 567 bp, Enterococcus faecalis
atgattaataacgttgtattagtcggaagattgacaaaagatcctgacttacgttacaccgctagtggttcagctgttgcgacctttacacttgctgtaaaccgtaactttacgaatcaaaatggtgatcgtgaagcagactttatcaactgtgtgatttggcgtaaacccgcagaaacaatggctaattatgcccgtaaaggtacattattaggtgttgtcggaagaattcaaactcgtaactacgagaaccaacaaggtcaacgtgtctacgtaactgaagtggtttgtgaaaacttccaattgttagaatctcgttctgcttcagaacaaagaggaactggcggcggtagctttaataacaacgaaaatggttatcaatcacaaaatcgtagctttggtaataacaatgccagttctggatttaataacaacaacaatagtttcaatccatcatcttctcagtcgcaaaacaataacggtatgcctgatttcgataaagattctgatccatttggtggctcaggttcatctatcgacatttcagatgatgatttaccattctaa

SEQ ID NO: 969 - DNA, 309 bp, Enterococcus faecalis
aaatcgagcagtcaagatacgaagtacgaaatcatgtacattattcgtccgaacattgatgaagaagcaaaaactgctttagtagaacgtttcgacacaatcttaaaagataacggagcagaagttatcgaatctaaagattgggaaaaacgccgcttagcatatgaaatgaacggattccgtgaaggcatctatcatatcgttaatgttacttctccatcaacagctggcgcaatcaacgagtttgatcgtttagcaaaaatcaatgacgatattatccgtcatatgatcgtgaaggtagaagcataa

SEQ ID NO: 970 - DNA, 1650 bp, Enterococcus faecalis
  misc_feature (217)..(217): Nucleotide 217 is "n" wherein "n" = any nucleotide.
cctaacgatgccttcacgattcaaaacaacaatttttatttaagcagtcaagagttacttaaatcagaaagtctgaaaaatgatcgtttttataattttctattgaaagaatatgcggatttgaaaaaattaactctttcgacagaggatgcgctagcaatcatgcaaaacaaagtcgagcaactttatgatatggatatttttgctcaagaaccgntagccatagaggccattgacgaaacattgcagccaaaaattcaagaagccattgtcttttttgaacaattaatccaagaaaaattgacagaggatttccagaatattttaattgtccacctttattctgctgttttttattctgcacaaatgaatgaaacattttattcagataccaaaaatatttattctggcaaagtcacccagtatcaagctgctaagaccatggtggactttctacaaacattgtttgggatttcttttgctgatacggaaatcctctttttcgatctatttattcgtaaagtcacagctaaaaaaagagcgcactcagatgaagaaaactgtggcgttatcgtcgttgcacatggtgccgcgacggccagtagcatggttgagtacaccaaccttctgttttcaacaacggtcatgcgtgcagttgatatgccgattaatcaatcagtggaagaaacattagaaaaagtccgtacaattgtaaagcaaaatcagtataaaaaaattattttaatggtggacatcggttccctggtttactttggtaatgctatcagtcaaaagtttcaaagggaagtgctgctaattagcaatatcaatctattaacattgctagaagtggcccgagaagtcatttatgaatcgacggcgtttgagtatctattaccagtcttaaaagaaaaaaatcatcgcgccttgatttgcagtaaaggtcgcttcaacgaggcaaaagttctcattatttcctgtctaactggcatggggactgctattaaaattgaacagttgttactaaaaacttttcccaatgaattactaacgaatgtacgcatcattactttagagaaaagagaagtggaagacattgatcgcttgcattcttttgttcggaaagaagagaaaatcgttggtatcattggcaccgtaaagacagaagtgccagatattccgtttatttctttacaagatttactatcgaagcggggcattcagctagttttcgaattattaggccatcatttagaagaaaaacaaaaccaagagttactaaaaaaagtttcagctaaatatattcaaggattatcaatcgaagctattacagacttactaacggttttgaatccgacaaccatttcaatcgaattagctaagatttattcagacatttgcttgcaaactaaaataaaaagtgacgaaaagattttacttcgttttatcattcattgtgcttgtatgttagaacggcaattgttgaatccagaatatgacccgacagcttatgaagtgtcatatcgagagttgccagaagctgtatctgtcataaaaatggcgtttcgaccgcttgaagtgtcctataatctgttgattccacctttggaagtgcgctatatttatgaattgctctttgaaaaggcttaa

SEQ ID NO: 971 - DNA, 417 bp, Enterococcus faecalis
caaaggagtttgtttatggaaaatgaaccaattttacttttaacacacaatggttggggcttggaattagtcaaaagcgtccagatgattgttggagaagtcacaaatgtacatgaagttgcattacaagcagaggattcactgggggattatttagaacgagtcacagaaaaaattgaccaattaacgtggcacaaccagttgctaattttaacagatgttaaaggcggcacacctagtaacgttgcattacgtttatcaaaagattatgacctcctgattgtgtcaggattatgcacatcgttattattagaatccgtcatgaaacaaagtggtcctggatttcgtttagaagatgcagagatgattcaacaagcagcagtagacagttgtcaaattttagaaattccaaaataa

SEQ ID NO: 972 - DNA, 528 bp, Enterococcus faecalis
aaattccaaaataagaaagtacaggtgaacagaatgtcaaaaatcgtattaacaagagtcgatagccgtttaatccatggacaagtagtgactaaatggttacaacaatcaggtgcaaatgaaattttggtagtgagtgatgaactagagcaagatgaatttttacaaagtatttatttaatggcggcgcctccaggggtttctgtagtaattaaagggattgaaagtgccaaagaatattgggaatcgcaagaaaaggaagagaaaaaggtgttatttttagtgccagatttaacgaccttaaaagcgatggtggaccaagaaattattaaagaggagattcaagttggtggcttaggtggcggaccaaatcggaaaaatgttttaaaaaatatcaatttatctgaagaagatgttgcaattttgactgaacttttaacgaagggcatccatgttttcttccaagcgattcccgaagaaaatcccctaccaattcaaaaattaattgaaaaatatcaatcactataa

SEQ ID NO: 973 - DNA, 792 bp, Enterococcus faecalis
aaaatatcaatcactataatcagagaaaaaggagagaatcatatgggcgttttaggtgtttcaattattatgggactttattattggtttgcacgtttgcgttttgggtacacattttcaggcatgctgtctcagccattaggcgcagcgttggtggctggtttagcaacaggaaaacttagtgaagcaatggttgtgggggcggggattcaacttgtttatctcggagtcacctccacaccgggcggcaatgtgcctagtgatccggctttagcttcagcaatcgcgattccgattgctttaggtgtgggaatgaatgccgaagcggctgttgcactagctgttccttttggtgtgttaggcgtctttatggatcaattacggcgcaccatcaatgcgacgtgggtgcatatggctgataaatatgcggaagagttaaattatggggggatttaccgagctgcgtttgtttatccagctttagcgggatttttaattcgctttccggtggtttttgcggcgaacttttttggtcaatctgtggtgaataaagtcttagaagttatcccagcatggttgatgcacggctttgaagtaatgggtggtattttaccagcgttaggcttcgccttaacaattatggtaattggcaagaaaaatttgattccttattttttaattggttttgttgcagtagtatattttggcgcagaagttatggccgtcgctattttaggaatctgtattgcctttttagttagaaacaaggcattgagtgaggaggcagcataa

SEQ ID NO: 974 - DNA, 684 bp, Enterococcus faecalis
ggaggcagcataatggaacaaatgacacaagcaaatgaacaacaattggaacagaaaaaaattactaaaaaagaattatccaaagccttttggatttatcaactaggctgtgaattatcaaattcttatgaacgtctccaaagtttagttttttgtgcatcgatgattcctgcaattaaaaaactttacgcagacgatgaagaacaacaaagagaagctctgaaacgtcatttgaatttttttaatactgaaggaacagtaggggcttccattcaagggattgcaattgctatggaagaagaaaaatccaatggcgcagcgatctctgatacggcgatcacatcgattaaaactgggctgatgggtccactggctgggattggcgattcgattatttgggcagcattaatgccgttaatcatttccatttttattccaatggctaaaggaggtaacgtgattggaagtatcggtccgttggttctgtacacagccattacattatacatcagttggacgttagtgaataagtcctatacattagggcgtaattcaatcttaagtttgttaaaagacggcaaaattaagcaagtcatttattcagcaaatgttttaggaatgatgatgatgggcgctttaagtgcgagttatgttaaaattgctagcccgatgacgtgtaaagtt

SEQ ID NO: 975 - DNA, 330 bp, Enterococcus faecalis
tgcggaaatgaaacgccgctacagttatcaaggaaaatatactgtcatttcaggaaaggaagttttcaattaatgctacaaacagccctacattttagtcaccaacttttaaaagaagtggtggaacctggcgacttcgtcattgatgcaacaatgggaaatggtcatgatacagcattcttagcagagctggttggcccttctggtgaagttttcgcctttgatatccaaaaagaagcgttgatcaatacagaacaaaagttaacagaacttaatttactcccacaaagtacgttatttccattaggacgtcgttcaccacgggatggg

SEQ ID NO: 976 - DNA, 369 bp, Enterococcus faecalis
ggggaaacacctgccatgatgcgggaacatgtgcggcgaactattcaggattcagatatccaagggattaaactgcacttacttcatttaatgacaaataccaaaatgatgcgggattataatgaaggacgcttacaattgatgagcaaagaagcctatgtttcagtgatttgtgatcagttagaaatgattccacccgaaattgttattcatcgcttgacaggcgatgctccctttgaaacaattatcggaccgatgtggagcttgaaaaaatgggaagttctcaatgcgattgatgcggaaatgaaacgccgctacagttatcaaggaaaatatactgtcatttcaggaaaggaagttttcaattaa

SEQ ID NO: 977 - DNA, 1206 bp, Enterococcus faecalis
gcgatgaccactcatgaaaaagtgattctagtaggagttgaaacggaaaaaaattatcagacattttctgcatcaatggaagaactggcgaatttaacggaaaccgctaatggagaagtggtgtttgttttaacgcaaaaacgaccacaagtcgatcgacaaaccgtaatcggtaaggggaaattggaagaattaattcaattaacagatgcttatgaagcggatcttgtgatttttaatcatgagctcacaccgcgtcaaaatcaactgttatctgaagcgttagctgtacgagtaattgatcgtgtacaattaattttggatatctttgctttgcgtgcgcgctccaaagaaggaaagttacaagttgaattagcacaattggattatttattgcctcgcttggctggccaaggaaaacagttgtcccgacttggaggaggtattgggacacgcgggcctggtgaaacgaaattagagtcggaccgccgccacattcggaataaaatcttaggcatccgtcgtgagttaaaagaagtcactgctcatcgtgaacgaagccgccagaaaagacaaaattcagaactatttcaaattggcttgattggttataccaatgctggcaaatcaattattctcaacatgttgacaacagcaggaacttattcagaggatcaattgtttgcaacgttagatcctttaaccaaaaaatggcaattgcctcaaggcatggaagttacgctgaccgatacggttggcttcattcaagatttaccaacacagctgattgaagcctttcagtcgacattggaagaaagtcggacgatggatttactgctccatgtggtggatgcaagtgcgccagatcgtttacaacatgaacgcacagttcaaacattgatgaaagaattagcgttggaaaatattccgtgcttgacggtttataataaaagagatcaagtggacagtaaagaatttgtcccaaccttatttcccaatgtattgatctcaactaaaatttctgaagataaagaacgactggttcaagctatccgtgcccaaatgatggaattactcgagccttatcaattagaaattagcccaactgacggacaactattaagtgaacttcgccggatgacactaatgatttcagaagaatatgctgaaaatgaaaatcgtagtcttcaccacgaggttcggaac

SEQ ID NO: 978 - DNA, 936 bp, Enterococcus faecalis
ttggagaaagtattagttattgttggacccactgcggtgggggaaaacagcattaagtattgcttttgccaaaaaattttaatggtgaaattaataagcggtgactccatgcaagtttatccgctcgttagactttggccccgcttaaagtcaacgggaacagaaaaagaagggtttcctcattatttaattgattgccaggaagtcagcgaaacatattctgccgctgattttcagaaagaggttcgtcaaaaaatcaaagaaattactgaaaaagggaaactaccaattatcgttggaggaacaggtttgtatattcaatcactcctttatgattttcaactaggaagtcgtgagatagatgactcgcctgaaattagagaaacgtacaatttatttgcggaagaaaaagggaatcaagccttatggctgttattacaacaaaaggatcctctagcggctaacagcatccattttaataatcgcaaaaaagtgattcgtgcgttagaggtctttgataaaaccggttatagtattttgaccccgaaggaaaaaccagctcgtctctatgattattatttgttaggtttggaaacagatcgcgctttattgtatgagcgtattaatcagcgggtggatcaaatgatgacagaagggctgttggaagaagcaaaacagatgtttcagcaaccacatgcacaagcagctcaaggtattggctataaagaatttttcccgtatttttctggtgaacaatcattagagatggcggttgaaacagtcaaacagcaatcgcggcgatatgccaaacgtcaattgacttggtttagaaatcgaatggctgcgcattggtggaatttggttcagcagccaacagatttgcccaagttggaaaaagaagtagcggaatggctacaacagaaggagagtgagtag

SEQ ID NO: 979 - DNA, 642 bp, Enterococcus faecalis
aacttccaccaatttaaaaatggttatttaatcgttatgcatgatgaaacagtggatcgtacgacagatggtcatggtgaaatccaacagttaacattaaacgaattaaaacaactagatgctggaagctggtttcagaaaaatccttctgttcaatgtgttccaacattggaagatgttttaaattgtcttgtagaagaacaattcaatggttttttgaatattgaacttaaaaccgatattatccattatgaaggaattgagaaaaaaatcgtccaacaaatgaagcaaaaaaactggccgtttcgttatttatattccagtttttattttccaagtttagttaaattaaaaaaagctgatcctaagacagaaattgcctttatttatgaatctgcagaggatttaagtcaagcgggaccggcattcgcgcttgtcgatagtttacatccaaaaatgtcttgggtgttggctcatgaaaaagaacttatcacaattggcaaaccgctgcggccgtggactgttaatcggatggaagaaatggaaaattgttttcagctaaaattggcgggtgttcatactgattttcctgaggaagcaaaatttgctcgtcaaaattggctagaagaaggagaaacctaa

SEQ ID NO: 980 - DNA, 1701 bp, Enterococcus faecalis
taccgttataaaacgaaaagttggatgacgatacttatagatgaatacaatcaatacatgacatggacaggacgttcagtggtccatgtaattgcaagaatatttttattgttaccaaaagggatttttaatgtttttaatgctttggcatacacaatagtaacatatttagtttatagacttactttacaaaagcaagataaaaagtataattcatttaaatttattattattcaagtgctattttggttgtttaccccagcctttggagaagtgtttttgtgggagacaggctcagctaattatctttggggaagtttaattattctttcgttcctttatgtgtatcatagagaaatcattgaagaacacgtctttacgaaaacaaaattaatgatttttttgatgtttgctttaggaattttggctggttggtgtaatgaaaatacctctggaggagctttgcttatcgttttagggtatcttggctggcagttttatacaaaacgaaaactttctttatggatgtttacgggtgttgctggtaatactataggtttagcgttaatggctttagcaccaggaaataagattcgcgctacttattttgctaggagtacttggtctttaccaagaaaattaatgacaggaattattacaatatttgagcaaatgaaagaacacttatcattatttttattgatactgatcttgttgcttgttttatatgcttatattagtcaagataaaaaaagagtatacctaagtgttgtatattttatttctggaatggctactatgctagttttagccatctctccagcagcattagattacggacgttcatattatggagccgtattattcttgattatcgctttttctatgtcactgccaaattataaagtaaatatcaggttttctccaatttacagtgttttgtatgtgattttggtatgtacattcttcatgaacgtaatggttggtgtaagtgatgtattcttgtcaaaattagatttgacaaaacaatatagttatttagttgagcaagagaaaaaaggaaatatcaatcctgtgtttccagatatatcatatagtaatacaacaaaatattcagcttattctaatcatttatcgcatgtaaaaactaattcagatgcacaagttaatcgttctgttgcaaaatattacggcttggagtctgtgcgaagtgtttcagaaaaagattgggacaatatatatagaaatggtaacccagagttgatgaatatttttaatcttaatgattatttacaaaaattaattgatacgcaatatactattttattaagtggttatggtaatcaagtctatctttcacaagcggaagagtcgcttttaaaagacttaggggtagacgtaaaattcgaaggtaacaatgcgtggactttaagtgcagtgatttcaaaagataataaaacatttgaaacaaatgcagaattatcgagactaactggtaaaattgaagctttaaattatgatgtattctcaagttatactaattatgaaaatcaaacatttgcttctgtaaaaataaatgatacagaaatgtctagaaataaaaaaggtttgaactttgtgattattgatagtaatactaacaaagttattgattcggtaaattttgatattacagaaaaaaatgctccaggaatgcgttag

SEQ ID NO: 981 - DNA, 1032 bp, Enterococcus faecalis
tatctaatgaaaaaaacaacagggattctcttatccattgctgtcttagcgatgctaattggtggatctggcgccgtctattattacaagcaagcggaaaaatcagtcacaccgctaaaagaaagttatacactaaaaaataaacaagcaggcgaagaacttcacttatccttaaaaggcaaaggaccttataccatttataaaactgatagtaacaaaatggggttacgatcaccgaataatgccttttattcaaaagctgaaggcaccttagatgtcaaagaagaaaaaaataaaataacagcaaccatcaataccactcgtacacaaaaccaatccgaattgtcattctttaatattggtatttttagtgacttcacaccgaacgtgagtgtccagattcctaataatgtgaaaaagttagtgattgatggctcaacccattcaccagtttcattgaatgcttttaacgtagacgaattaacaactaatctaccaaattcttatgttagtctatcgggtgttaaagccaaaaaaatgacgcttaactcttcagatggtatctacctttcagcggatacttccgctaaaacagcaacagttgaaaccactgacggcgatataacgttggattcagcctatttcgatgaaatcaaaaatacgactacttctggtgatattcgagtgcaaaatgctcgtggaaacatccaagcaacaacgacagatggcgatattagcgtctatgatttcaaaggagaagctaacttttcaagtgaaaatggtgatttttctttagacatgcctgctgtgcctaaaaaattaactgtcgctcttgtccatggagatatttatgtaaattctggagaaattttgcgtaacatttcaatcaaaggggaatcaaaattaggcgatgttcaacttttaaacaaagagcgaacatcttataagaatggtcgtgcggatacagagtttaacctttctagcgaattcggagatattaccgttgatactcctgatgatgataatcaataa

SEQ ID NO: 982 - DNA, 690 bp, Enterococcus faecalis
gaaatgaatcgtgtagaaagagggagcggaatgaataaagaacattttattattgagctgaaaatttatttaaaagcattaaatccaaaagatcaagctattattcttgcgaaatacaaggcgttatttgatgctcgtgttgcggaaggcgaaacagaagaacaagtggcaaaatcattggggaaaccacgggttatcgcagaagaaattttgaaagaacaaggcattgaattgacggaacgaaaaattgaaaataatggctggcaagaaattccagcggctacacctgcttatgatcatccctatgaagaagaatctgaattttactatgataatgattctccatactatcaacgaccacagcatcggccactaacccgatttttccaagtgcttggtattttctgtttaaattttttcttcatgttttgggttattttagggattgccttaatgtacgtcggttgtggcattgccggagctgcaactttattttcaccaatttatggtatttatagtgttattacccaagcaaatgccgcttcctttttccaattatctatgagtctctttttatttggtgcatcaatcattggttggttactgtttctaccaattttaaaattttcagcacatgtctttaagcgttatttccaatggaacattgctgttttacgaggtgatatctaa

SEQ ID NO: 983 - DNA, 1434 bp, Enterococcus faecalis
gtcaataagatggaccaatggtggaaaaatgctgtcggttatcaaatttatcctcggagttttaaagatagcaacggggatggcattggtgatttgcagggaattattgagaaattaccgtatttaaaagaactaggggtcgattttttatggttaaatccgatttacacttcgccaaacgttgacaatggttatgatattgcggattatcaagggattcagccagagtttggtacgatggaagattttcaagaacttttggaccaagcgcatcaattaggtttgaagattattcttgatttagtggtcaatcataccagtgatcaacatccgtggtttgttgaagcgaaaaaaagtttagataatccgtatcgtgagtattatttatgggccgatgcgacaccagatcgtatgccgaatgaatggcaaagcttttttggtggctcgacttggacgtatgacgaaggtacaaagcaagcatattttcatgtgtttgcaaaagagcaacctgatttgaactggaaaaatcctaaagttcgtgaagagatttatgcgatgattcgctggtggttagatttgggaattgatggtttccgattggatgcgattagtcatatccaaaaagaaccttgggattttaaaattaccacgaatccgtgggctccatttatgaatgtaaaaggcattgaagactatatgctggatttgaaagttatttttgctgagtatgacatcatgacagtgggggaagctagtggcgtttcaagtaaaaaagcggtggaatggaccaatgatgcgggctatctgaatatgatttttgaattagagcacaatgttcgagaaggaaagccaggagaagaacggttaaatattttaggctataaaaaagtaatggctcgctggcaaaagcatttagggacagaaggctggaatgcattatatgtagaaaatcatgataatcccagaatcaattcaattttaggcaatgaaacctctcattctgctaaggcgattggaacaatcgccttgctcttgcgaggaacaccgtttatttatcaaggacaggaaatcggcatggttaattatccgtttcaacagattgacgagttagatgctaaagattctcataaccattatcgtttgcttatagaaagtggctacgatgcgaaacaagcattaaaagaagtggcgcattggacgcgggaccattcgcgtacgcctatgcagtggacgagtcaagaggcaagttcattcacctcggggcatccgtggttagcaattcatcccaatttcaaagaaataaatgtggctgaccaagaaacggatgcgcaatccgtattgaattattataaaaagttaattgcgttgcggaaagacaatccggtctttacagatggacagttccaactattagcgcctaatcatcagctttaa

SEQ ID NO: 984 - DNA, 1203 bp, Enterococcus faecalis
aatctgcccttttcgggttcggcgtggacgtttgatgaagcgagtgggcaatactatttgcatttgtttagtaaaaaacaaccagatttaaattggggaaaccaacaaatgcgtcagtcggtttacgagatgatgaatttttggattgataaaggaattggcggtttccgtttagatgtaattgacttagtgggtaaaattccaggagaagagatcaccgcgaatgggcctcatttacatcgttatttacaagaaatgaacgccgcgacatttggcggcaaagagctgttaactgtaggtgaaacatggggggccacacctgagattgcaaaaatgtactctagtccagagcgtcatgaattatctatgatttttcagtttgaacatatgagcttggatcaacaaccaggtaaagaaaaatgggaccttcagccaatggaagttgccaagttgaaacaggtttttgcaaaatggcaaacagaattaggaaatgatggctggaattctttattttggaataaccatgatttaccgagaatgatttcacgttggggaaatgatcaggaatattggttggaaagtagtaagttattcgctattttactgcacatgatgaaaggcacaccttatatttatcaaggggaagaaattggtatgaccaatacgccgattacagatattcgtgaagcgcgggacatcgaaacgattaacatgtaccatgagtatctagaaaaaggatattctaaagaagaaattttgctgaaaattaatactaaaggtcgtgataatgcacgccggcctatgcagtggaccgctgaaaaaaatgcgggctttacgactggtacaccttggattgatgttaatcccaattatcaaacgattaacgtcgctgctgctttggcagataaaaattcactattctatacgtaccaagaaatgattcgtttgagaaaagaacatcctttaatcgtttggggcaactttgaattgctggaaacagtggaggaagtgatcagtttttatcgtacctatggtgaggaacgctggcttgttgtaacgaacttttctgacaaagttcagccattttctgcagacgtttctgtagaacaagtaatgattgaaaatatgccgacagatgtcactgctttagcagactattcgttagcgccttggcaagcatttgttgtgaaagtgagtcaataa

SEQ ID NO: 985 - DNA, 204 bp, Enterococcus faecalis
gggaatcgaaaaagcgaaaagattgaaattattatggacttagtggttaaccatacgtcagatgaacatcgttggtttattgaagcgaaaaaaagcaaggagaacccctaccgagactattatgtatgggctgatcctgcttcagatggcggtgcgcctaaccgattgaaatctgcccttttcgggttcggcgtggacgtttga

SEQ ID NO: 986 - DNA, 306 bp, Enterococcus faecalis
agaagaatggaaaaacattggtggcaagaagtcgtggtttatcagatttatcctcgcagttttaaggatagcaatggagatggcattggagatttaccaggaattattgaaaaattggattatttggaaacgttaggcattggggctatttggttatcaccagtttatcaatcacccaatgatgacaatggttatgacatttctgattatgaagcgattatgacagagtttgggacgatggcggatatggatcgtctaattgagggaatcgaaaaagcgaaaagattgaaattattatggacttag

SEQ ID NO: 987 - DNA, 1461 bp, Enterococcus faecalis
aagcctagctttaaaagaaaatatttagagatggcgaataattattttcggatgccgtattttcatgaaatcgatcgttttaaagcacctgaatgggtaaaagaaacggtttggtatcaaatatttccagagcgttttgcaaatggtgatctcgccaatgatcctgaagggacgttgccgtggggatctaaaagaccagatcgacaagatttttttggtggggatttgcaaggggtgctagatcatcttgattacattgaagatttaggtgttaacggcttatatttttgcccaatttttgaagcgttttctaatcacaaatatgatacgattgattatttaaaaattgacccagcttttggtgatggtgctacctttaagcgtttagtcgaagagtgtcatcgacggggcatcaagattatgttggacgccgtttttaaccatatgggggacacttcgcctcaatggcaagatgtgttaaaaaatggccaggactcaatttatgccgattggttccacgtaaatgagtttccagctagctatgaagaaagtgctgattttgaagaagcaagcaacattacctatgatacttttgcattcactccgcatatgcctaaattaaatacagcaaatccagaagtgcaagcctatcttttagaaattgctcgttattggattgaggaatatgatattgacgcctggcgtttacatgtggcaaacgaagtggatcatgcgttctggaaaaaattccggcaaacatgtgatgacgcaaaagaagatttttatattttaggagaaatttggcactcgtcgcaaagctggctccaaggagacgaatttcatgcagtgatgaattatgcatacacagatgcgattatgggctactttgtcaagcaagaactgtccttggaaaagatgctttctgaaatgaacaaccagttaatgctctatcgacaacaaacgaatcaaatgcagtttaatgttttagattcccacgatacaccacgcttattgcatgaaacgaaagaggataaagagctgatgcgccaagtattagcgtttacgtatattcaaccaggtgtcccttgtctttactatggtgatgaaattggtatgacaggtgatatggatcctgattgtcgtcgttgtatggtttgggaggaaaatcagcaagatttggatttgaaggaatttgtaaaatcattgattgcccttcgcaaaaagtatgcggctgttttttctggtggaacaatcgattggacaggaacttcttttgaaacggggttgattagactcgcttgtcgtttggaggaacagacgatttatgggatttttaatactggccaagagacacaatttgtcgatagaactgatcgagaagttttgctaagttcttctatcgaaattgcttcagaacagataatggttttaccaaaaggttttcttttatatcaagcataa

SEQ ID NO: 988 - DNA, 1155 bp, Enterococcus faecalis
aaattaaaaacgattatgcgagaagaatttgagaaaattgatgcagttgaaatgttaatgcctgcgttattacccgcagaactttggaaagaatcaggccgttatgaaacttatggacctaacttgtatcgcttaaaagatcgcaatgaccgtgactatatcttaggcccaacgcatgaagaaaccttcacagaattaattcgtgatgaaattaattcttacaaacgattacctttgaatttataccaaattcaaacaaaatatcgtgatgaaaaacgctcacgttctggcttattaagaggccgtgaatttatcatgaaagatggctattctttccatgccgatgaagctagtttagatcaatcataccgtgattacgaaaaagcttactcacgcatttttgaacgctgtggactagaattccgtgccattattggggacggtggtgccatgggtggtaaagattctaaagaatttatggcgatttctgaaattggggaagatactatttgttattcaacagaaagtgattatgctgccaatttagaaatggcaacaagtctttatacgccgaaaaaatcacatgaaacacaattagatttagaaaaaattgcaacaccagaagtgggtacaattgccgaagtggcaaacttctttgaagttgagccacaacgaattattaaatcagtactatttattgccgatgaagagccagtaatggtcttggttcgtggcgatcatgatgtcaatgatgtcaaattgaaaaacttcttaggcgctgatttcttagatgaagcaacagaagaagatgctcgccgtgtcttaggagcgggctttggttcaattggtccagtcaatgtttccgaagatgttaaaatttatgcagatttagctgttcaagatttagccaacgccattgttggagctaacgaagatggctatcatttgacaaatgtaaatccagatcgtgatttccaaccaattagttacgaagatttacgctttgttcaagaaggcgatccttctcctgatggcaatggtgtcttagcctttactaaaggaatcgaaattggtcatatctttaaattaggaacgcgttatagtgatgctatgggcgcaacagttttagatgaacacggtcgtgaaaaatcaatg

SEQ ID NO: 989 - DNA, 879 bp, Enterococcus faecalis
aaggaggaagaagaaaccctttataaaattgaccaggatgccaggattattgaaagtgatggaaccgaggtgcggattgcgccacttgacgttcaatttcaatcagcgaaattatcgccacgcattttgacgaactttgcgggacccatgaataactttatcttagggtttattctgtttacgttagcggtctttctacaaggaggcgtcactgatttaaacacgaatcaaattggacaagtgattcctaatggcccagccgcagaagctgggttgaaagaaaacgataaagtcttatcgattaataatcaaaaaatcaaaaaatacgaagattttacaaccattgtgcagaagaaccccgaaaagccgttaacgttcgtagttgagcgtaacggcaaagaagagcaactaacagtgacaccagaaaaacaaaaagtggaaaaacaaacgattggtaaagtcggcgtttatccttatatgaaaaccgatttaccgtcaaaattgatgggcggtattcaggatactttgaatagtacgacacagatttttaaagcactcggctcactattcacaggctttagtttaaacaaactaggtgggccagtcatgatgtttaaattatcggaagaagcatccaatgctggagtaagtacagttgtattcttaatggccatgttgtcaatgaacttagggattattaatttgttgccgatcccagctttagatggcgggaaaattgtcttaaacattattgaaggtgtacgtggaaaaccaattagtcctgaaaaagaaggcatcattacgttaattggctttgggtttgtcatggtgttaatggtgttagttacttggaacgatattcaacgctttttcttttaa

SEQ ID NO: 990 - DNA, 447 bp, Enterococcus faecalis
acgtcagtgaatgaaggaagaaggacatctatgaaaacaattatcacattcattattgtcttcggtattcttgtcctcgtacatgaatttggccacttttattttgcaaaacgagcgggtattttagttcgtgagtttgcaatcggaatgggaccaaagatttttgcgcatcgtggaaaagatggcaccacttatacgattcgcttattgccaattggtggctatgtgcgaatggctgggatgggcgaagacatgacagaaatcacaccaggtatgcctctatctgttgagttaaatgccgtgggtaatgtggttaaaattaatacaagtaaaaaagtacaattacctcatagtattccgatggaagtcattgattttgatcttgaaaaagaattattcatcaagggcttatgtcaattgaaaggaggaagaagaaaccctttataa

SEQ ID NO: 991 - DNA, 210 bp, Enterococcus faecalis
accataaacttttccgacagtttgtcgtattttatcaacacgctgattgacatgtgctaccatgaaagtattaatagtaattttagggggaatgaatcaatgtatggagaattacatggtaaagtagccgttgtcactggtgcagctacgggtttaggattatttattactctgcgttatatcttagaagggcatgaatgtggttgctga

SEQ ID NO: 992 - DNA, 693 bp, Enterococcus faecalis
aagggcatgaatgtggttgctgactatgtcggtgagctgcctaaagaatttgaagatgtccaagccaagcacgcagatcgcgtaaaattcgtgaaagctgatgtctctaatgaaggagatattaaggcgttagctgaaaccgctttaaaagagtttggtcatgttgacatttgggtaaataacgccggtgtggaggcttcttttccgacaattgatatgccattaaaagaatggcaacgcgtcattgatgtcaatttaaacggtgtctttttgggttctagagaggcactccgaatatttagagatcaaaaaatcaaaggttcaatcattaatatgtcctccgtacaccaaagaattccttggccaacgttcgcccactatgcggcaagtaaaggcgcaaccgaaatgttcacgaaaacaatcgctttggaatatgcggaatatggtattcgtgccaactgtattgcgcctggagcgattaacacacctattaatgctgaaaaattttccgatcccgaacagttaaaacaaacaacaagcatggttcctatgggtattattggtaaaccaaatcaagtagctgctgcggccgcttggttagcttctgatgaatcctcatacgtaaccggaacaacactctttgtagatggcgggatgtctctatatccttcgttccaacacggagctggttaa

SEQ ID NO: 993 - DNA, 339 bp, Enterococcus faecalis
aaagtagtctgcaacaaaattctctatgaatttttgttgcagactttgtactatcacacacaaaatctattcaggaggcttaccatgaaactagtcaaaaatgttcttttaattttaattggtttagttattatcgggattggcgcatccactttaagagtggcaggtttaggagttgatcctttcactgctatgaatatcggactttcttcgatgtttggtatgcaattaggcatttttcaaattattgtcaatgcgtttattttattctatgtctatttaaaaaacaagaacgccattggtctaggtactaaattagccatcttcaccactatgtcg

SEQ ID NO: 994 - DNA, 951 bp, Enterococcus faecalis
  misc_feature (26)..(26): Nucleotide 26 is "n" wherein "n" = any nucleotide.
attggcatgcaatctatgggacgtanaaatttatcagaaacgatgggaattacagagcgagtcttgcgtacagaaacagatgttttaaagcaactcaacctgattgaaccttcaaaaagcgggatgacattaacagaacgcggtttggaagtctaccaaggcttagaattagtcatgaatcaattgcttggcatgcaccaaatcgaaaaagaaatgacacagtactttggcattcaacgttgtatcgttgttgcaggagatagtgatatccaaaagaaagttctttcggactttggagatgtcttaaccaatacgctgaatttactcttaccaaatggtgagaatacaattgcggttatgggtgggacaacaatggccatggtggccgaaaatatgggatcactagaaactgaaaaacgtcataatttgtttgttccagccagaggagggattggtgaagcagtttctgtccaagccaattcaattagtgctgtaatggccaacaaaacgggtggtaactaccgggcgttatatgtcccagaacaattgagtcgtgaaacgtataatagtttattacaagaaccctcgattcaagaagttcttacgttaattagtcatgccaactgtgtggtgcacagtattggtcgagcgttgcacatggcggcacgccgaaaaatgtctgatgacgaaatggttatgctcaaacaaaaaaatgccgtggcagaatcgtttggttatttctttgatgaagaaggaaaagtggtctataaaattccacgaattggccttcaattaaaaaacttacaagaaattccctatgtcgtcgcaattgcgggcggcaaaacgaaagccaaagccattcgcgcatatatgaaaaatgcaccaaaacaaacgtggctcatcacagatgaagctgccgcaaacgagattttaaaaggggtaaccctttaa

SEQ ID NO: 995 - DNA, 1041 bp, Enterococcus faecalis
aataaaaaatttttgattttcataaggaggaaatctttaatgacagttaaagtaggtattaatggatttggacgtatcggacgcttagctttccgtcgtatccaagatgtagaaggaatcgaagtagttgcaatcaacgacttaacagatgctaaaatgttagcacacttgttaaaatatgacacaactcaaggccgtttcaacggtacagttgaagttcacgaaggttcattcaacgttaacggcaaagaaatcaaagttttagctaaccgtaaccctgaagaattaccatggggcgaattaggcgtagacatcgttttagaatgtactggtttctttacttctaaagaagctgctgaaaaacatttaactgctggtgcaaaacgtgtagttatttcagctcctggtggtaacgatgtaccaacaatcgtttacaacacaaaccatgaaacattaactggagaagaaactgtaatttcaggcgcttcttgtactacaaactgcttagctccaatggctaaagctttacatgacaactttggtgttgttgaaggtttaatgacaactatccacgcttacacaggtgaccaaatgacattagacggaccacatcctaaaggcgacttccgtcgtgcgcgcgctgctgctgcaaacatcgtacctaactcaactggtgctgctaaagcaatcggcttagtaatcccagaattgaacggtaaattagatggcgctgctcaacgtgttcctgtagcaactggttcattaactgaattagttactgtattagacaaagaagttactgttgatgaagtaaatgcagtaatggaaaaagctgctaacgaatcttatggttataacacagacgaaatcgtttcttctgatatcgtaggtatgacttacggttcattattcgatgcaactcaaacaaaagtgatgacagttggcgacaaacaattagttaaaactgttgcttggtatgacaacgaaatgtcatacactgctcaattagttcgtactttagaatacttcgctaacttataa

SEQ ID NO: 996 - DNA, 1281 bp, Enterococcus faecalis
aataataagcggggaagcaacgcgcttctccgctttctttttttaaaaaagagaaatcctaaaattgacaatacaggaggtctactcatggctaaaaagaaaattaaagatgtacatttaaaagacaaaaaagtccttgtccgggttgactttaacgttccgttaaaagatggcgtgatcacaaacgataatcgtatcgtagcggctttaccaacaatcaaatacgtgattgaaaatggcggaaaagcaattcttctctctcatttagcttgtgtaaaaacagtagaagacaaagctggcaaatcattaaaaccagtggctgaacgtttaagcgaattagtaggtcaaccagttacttttgttccagaaacacgtggtaaagaattagaagacgctgttaacaatatgaaagttggcgacgttttagtatttgaaaacactcgttttgaagatgttgacggcaaaaaagaaagcggcaatgacgctgaattgggtaaatactgggcttctttaggcgatgtatttgtcaatgatgcttttggtactgcacaccgtgcacatgcctcaaacgttggaattgcttcaactggtatcccaacagttgctggtttcttaatggaaaaagaaattaaattcatcggcgaagctgttgaaaatccaaaacgtccattcgtagcaatcttgggtggcgcaaaagtttctgacaaaatcgctgtcattgaaaacctaattgaaaaagccgataaaattttaatcggtggcggtatggcttacacattcatgaaagcacaaggctatagtgttggtttatctttacttgaagaagataaagtggacttagcgaaaagcttaatggaaaaagctggcgacaaattagttttaccggttgatacagttgtctctaaagagttcagcaatgacgctcctttccacacggttccttcaactgaaatcccagatgatgaagaaggcttggatattggtgaaaaaacaattgaattattcgctaacgaattacaaggtgcgaaaacagttgtttggaatggaccaatgggcgtatttgaaatgagtaactttgccaaaggaacaattggtgtttgtgaagcgattgctaatttagaagacgcaacaacaatcatcggtggcggggactctgctgctgcagcaattcaattaggctacgaaaacaaattctctcacatctcaacaggtggcggagcaagtttagaattattagaaggcaaaactttaccaggtttagcttctattaacgataaataa

SEQ ID NO: 997 - DNA, 375 bp, Enterococcus faecalis
attgctgcagcagcagagtccccgccaccgatgattgttgttgcgtcttctaaattagcaatcgcttcacaaacaccaattgttcctttggcaaagttactcatttcaaatacgcccattggtccattccaaacaactgttttcgcaccttgtaattcgttagcgaataattcaattgttttttcaccaatatccaagccttcttcatcatctgggatttcagttgaaggaaccgtgtggaaaggagcgtcattgctgaactctttagagacaactgtatcaaccggtaaaactaatttgtcgccagctttttccattaagcttttcgctaagtccactttatcttcttcaagtaaagataaaccaacactatag

SEQ ID NO: 998 - DNA, 795 bp, Enterococcus faecalis
aagacaatatttttaaaaaaagaaaaggatgtgcttttcatgcgcaaaccaattatcgctggtaactggaaaatgaacaaaactttaagcgaagcacaaagctttgcagaagcagtaaaaaatgctgttccatcaaacgacgttgttgacgctgtgattggatctccagcattattcttagctcctttagcttggaacctaaaagattctgaagtgaaattagctgcacaaaactgctactgggaaaacgctggtgccttcactggtgaaaactcaccagctgcaattgcagatttaggtgtagactatgtgattatcggacactctgaacgtcgcgaatatttccacgaaacagatgaagatatcaataaaaaagccaaagcaatctttgcaaatggtatgacaccaatcttctgttgtggtgaaactttagaaacgtatgaagctggtaaaacagcggaatggatcgaaggtcaaatcactaaaggcttagttggtttatcaaacgaacaagttgcttcaatggttatcgcttacgaaccaatttgggcaatcggaactggtaaatctgcagatgctaatattgcagatgaaatctgtggtgttgttcgttcaacagttgaaaaattatacggcaaagaagtttctgaagctgttcgtattcaatacggtggttctgttaaaccagaaaacatcgctgaatatatggcaaaagaaaacgttgacggtgctttagtcggcggcgcaagcttagaagcagattcattcctagctttattagatgctgtaaaataa

SEQ ID NO: 999 - DNA, 1086 bp, Enterococcus faecalis
agggtgaaagcaatgacatggggatttagatggtacggatcggcaggcgatgccattccgttaaaacatattcgacagattccaggaattactggtgttgtcggtaccttgttaaataaactaccaggtgatgtttggacagtagccgaaattcatgcacttaaacaatcggtggaacaagaaggattagcacttttaggaattgaaagtgtcgctattcatgatgccattaaagcgggaacggatcaacgagaccactatattgataattatcgccaaacgttacgtaacttgggaaaatgtggaatttccttagtgtgctacagtttcaaacctatttttggttgggctaaaacggacttggcgtatgagaatgaagatggtagcttatcgttgttatttgatcaagctgtggtagagaacatgcagccagaagacatgtatcaattaattcacagtcagtcaaaaggattccggttaccaggttgggaagaggagcgtttgcaacaatttcaagaattgaaagccatgtatgccggcgtaacggaagaagatttggtcgaaaatttgcgctactttttagaacgtgtgattcctgtctgtgaagaagaaaatatcaaaatggggattcaccccgatgatccaccttgggaaatttttggtttgccaagaatcactaaaaatttagcggatttaaaacggatcctttccttggtggactcaccagcaaatgggattacattttgtacaggttccctcggtgcggacccgacgaatgatttgcctactatgattcgtgaaataggtcacagaattaattttgttcatttccgcaatgtgaagtatttaggtgagcatcgttttgaagaaacggcgcatcctagtgtcgctggttcgttagatatggcggaattaatgcaagcactggtagacgtagggtatgaaggcgttattcgtcctgaccatgggcgggcaatttgggatgaaaaagcgatgcctggttatggtttatatgatcgagcaatggggttgacctatattcaaggactgtacgaagcaaccaaagccaaacaaaataggaagtga

SEQ ID NO: 1000 - DNA, 696 bp, Enterococcus faecalis
cctatattcaaggactgtacgaagcaaccaaagccaaacaaaataggaagtgacagaatggaaacaaaagttgaaaaaaatcaactgtatcaacaattagcgacatgtaaacttttaccactatatactgcaacagatttacggtatttgccacaagtagaatcagtcttagtagtaaacgaattaccgtttattgaagtcacttttcggagtcagctggccttgcctgccatcaaacaacttgctgcttcagggaatttaatagtaggcgcaggaactgttagaaccttgaaagaagcccaagagccagtagcgaacggtgcacagttctttgattccccagcgattgttccagaactcattgatttttgtctggcaaatgacgtgcctatttttccagtaacagctacccctgcggagattcatcgagcgctggcgtatggcttacgagtggttaaatttttcccagccgatatttacggcgggttaaaagccattaaaagtttaagcggtccgttttatgatgttcaatttttaccaactggtgggattgatgaaacaaactttatagagtatgtggaagccaaagaagtattagcagtgggcggctcctttattttatcggaaaagatgcttcaagaagatgaagcttcggcacgccagcatgttcaatctttactcacgaaaatcaaataa

SEQ ID NO: 1001 - DNA, 486 bp, Enterococcus faecalis
aaaggagagcaaaggatgttaaaaaatgtagaagtgttctggcaaaactttttagataaacatgaattagatatgttgatgcccgatgtgtggatgtttggtgatggctcttctgagatgggtaatcgtttgggtcaattggttgtttctggtcgtaagacagcgacatgctcttctttagatatttataagatggaagaagaacaactccctaaagctggtcaatacgacataattttagatggtcagtctcaaccgctggctattattcgaacaaccaaagttgaaattatgcccatgaacaaggtctcagaatcttttgcgcaagcggaaggtgaaggagatttgacgttggattattggtatgaagagcatgcgcggttctttaaagaagaactggccccctatcagttacaattttatcccgatatgctgttagtttgccaaagttttgaagtagtggatctttatacagaaaaagaatag

SEQ ID NO: 1002 - DNA, 234 bp, Enterococcus faecalis
caaggagtgaatgttatgaaagaagaattttcatatgaaattttagaagaagtcgctgtgttatctgagaatgctcgtggctggcgtaaagaattgaatttaattagttggaatggtcgtccaccaaaatttgatttgcgtgagtgggcccctgatcacgaaaaaatgggtaaaggcatcaccttaactaacgaagaatttgctgaattaagcaaaacaattaaatccatgtaa

SEQ ID NO: 1003 - DNA, 720 bp, Enterococcus faecalis
gcaaaacaattaaatccatgtaaaaggagcaccctgtcaatgaaaagtatgactggatttggaaaaaagaccattcaaaatgaaaattatcaattggatatcgaagtcaaaagtgtcaaccagcggtttttagatattcaattgcgtatgcccaaggaactgaatgcctatgaactggtgattcggcaagtaatcaaacgcacgttaaaacgtgggcgtgtggaagtctatgtaaatctccaaaaaatcggcaacaatcaaaaagaagtgcgcgtgcagtgggacttaattgatcaattattaacttcggtagatcaacatttaaaggaaaaatatccggaagcaacgtttgatgcaggggacacggtcaaccatttattaaagcaaaatgattttgtcgaaatagtggaagcagaaattgttgatcagacatttgaaccatttcttgttcaagcatttgaagcagccatcgctagtcttgaccaaagccgtgtgcaagaaggaacgcaaattaaacaagtcctgcttgactatgtagcagtgttgacccaatcaattcaagaactgcaagcgtttgtgggcgtttttgaacaagaataccgtcaacgttttgaagcgaaattaaacgaatggttaggtagccaagtggatgaaacacgcttattaacagaactggccattatatggcaaaaaggtgctaaccacggggaagttggggca

SEQ ID NO: 1004 - DNA, 738 bp, Enterococcus faecalis
gaagaacgatcaaagggagtgacgaagatgaaacaatcaaaaaataaacaagttgttattggtgaaccaacgaaaaaaaacatttatcttcaagatatagaacaggaaacgcaagcttttattctccaaaacaatccacaattgacagctgaatcgatgattacattggcggagttacttaattatcgtttggattacatgaaacaattggtcgcaaatgattctgaaaaaatccaacaactgaatgaattggtggttcaacatatcaaagaagataagctgatttccaataatatgaatgaaaagatggaaaagaaattaacctttggccaacgagcagcggataccattgctaaatttggcggtagctgggtgtttattggcttcttttgcttcgtgttgattgcttggatcgtgattaactctaccactttattgggacaaccatttgacaaatatccttatattttgctaaatctcgccttatcttgtttagcagctatccaagcaccgattattatgatgagtcaaaacagacaagaagcccgtgacagagaacaagcgaataatgattataaaattaacttaaaagcagaagtagaaattaatttattacatgagaaaatggattatattatcaataatcaactagaaaatttggtgaaaatccaaaatattcaaattgaacttttaggtgaattgcaagaacaactcgccgcgacttctgaaaaggagtag

SEQ ID NO: 1005 - DNA, 1206 bp, Enterococcus faecalis
aacatgatcgagttggaagaagcacgagagaaaatgacccaacatatgaagagtcaatgtgaaacagaagaagtggcgctgcttgattccttgggacggattagcggagaaaccatttttgcagagacagcgattcctcattttcctcgtgccgggatggatgggtatgccgttcgtgcagtagaaacacgaggtgcgactgctgaaagcccaagttgtttaaaagtcgtcggttctttagtggcaggggattccatgttttattgtaatcagacgaataactgtgcgattaaaataacaacaggtgcttttattccaaccgattttgatgctgtagtgccacaagaatggacggattttgggcaagaccatgttaaaatttttcgctctgtcactgcgggccaaaactatgcggaaattggagaagatattgcttttcagcaaaaaattttagcaaaacatcaacagattaatagtcgcatgattggtttgttggcaatgcaagggattgataaagttgttgttttgaagcgcatgaaggtggggattttagcgaccggtagtgagttagtttctttggaagaaccactgtcagttgggaaaatttataatagtaatctctacatgttagcagcttttgtcaaagcgagtggtaatgaagtaatccacctagaccattgttcagatgaccctgaagaattagcgaagaggctgattgagatttcaccaaaacttgatgtattaattacttgtggtggtgtttcggtaggtgaaaaggacaatttacctttagcaattaaacgtatcggaggaacagagttgtttcattttgtaaatatgaaacctggaaccccagttatgggaagtcaatttcaagaaacactcattttaagcgtttcaggcaatccgtttgcggcaatggttaatttacatcttttttactggacattattagctactttttttaattgtgtcgagttaaatctcaaggaacgaacagtaattttagcgcatgaattaacccctagtagactacgtcgattttaccgagcgaaagaaatagatggcacagtaaatttagtgacaaaaagtcatctttcatccaatttatcaaatactttagaaacaaattgcctgctagaacaaccagctggtgtactactcaaaaaaggcgcgcttgtaaaagtctattattggcaaacttga

SEQ ID NO: 1006 - DNA, 342 bp, Enterococcus faecalis
tgtcgacaggcggaatgctttacccattacaatacccgagcaatgacaggacgaacggaagggattaaccaaatagcgaatcactcttatattgagataaatgcagtcgatgcacaagctctgggaatccaagaagggaacaaagttgaagttcattctcgacgtggcaaaatcgaaacatatgcggctgtcggaaatcgagtatttccgcaagaagtctttatgacattccactttccagatgggaatgttaacgaaatcaccaatgctgtatttgatgatatcgccacaattcctgaatataaagtttgtgccgttgcgattaaaccagtgaataaataa

SEQ ID NO: 1007 - DNA, 537 bp, Enterococcus faecalis
ataaagacggagtgtgactacataatggtagaaagtgcgaaaaaattcttgcggaaagtcccgattcccatttgcggactaattttagggatggtttctttggggaatttactttattccttgggatatgcaacaattgggaccatttattgtgtacttggcagtctcttaatgattttagttattttaaaaattatttttacaatgaaacatgcattaagcaccttagatgatccaattattgcttcggtatcaccaacatttacaatggctttaatggttatctgtgttttcttagatcggatatttaccaatgctgcttggattaacgtgttgtggattggcgcagtgattttacattttattttaatgatttattttgtagcggtgcatatttttccaacaaaaatcgaactggaacatatttatccaagctggtttattacgtttgtcggcattggcgttattcctaatacttctcaattgtttatcaatgagttgggaaaaattgttttttgggtatcgttgttcttttat

SEQ ID NO: 1008 - DNA, 846 bp, Enterococcus faecalis
atagaaagaggcgattttatgttcgaatggatcaaaacatttattgctgtgtatgaaaccaaaaattttagtacggcggccaaacaattgtatatttctcagccaactgtttctttgcaaatcaagaaattagagcaacacttttcgatcaagctgttctatcgtaatggaaaacaatcggttattcctaccaaagaagctgattttttatatccaaaaatgctctcgattattgaaagcttaactacttcttttgcgcaagctgcagaaaaagagaattttaaagaagactgcattatagcctcttcaaatacagttgctatttatttactgccagatattatggagagtttggttaccgcttttccactcatcaacttttcgattcaactgatgaattcaaacgaagtcgtggatatggttcaaaataatcatgcccacattggactaattgaaaaacccattgaaaccaaaaatctacacaaagaaattgtttatgaagatcaactagttctagcaggagatgccgcttcaaaattttggctcttaagagaaaagaactctggcttacgttttttcaatgagctttatctcaacgaacacagcatcaacttaccaattatcgaattaaacaacaacgaagtcctgttacaattgctaaaaaataacattgggcaatcaattgtttctcgattatctatttccgatgagatcccttggcaaccaattgatcagtcctttgcttctcgaaaaattttcattgtccagaccgatcaccatgccaatacttccttctctgaagtttataaccgaatcgttgaaaaaattcgtgaacgacaaacctaa

SEQ ID NO: 1009 - DNA, 216 bp, Enterococcus faecalis
aggaaactgatgaataaaaaacaggaaaacgatttagcgaaagctaagtcgttctcctgttttttaggtttgtcgttcacgaattttttcaacgattcggttataaacttcagagaaggaagtattggcatggtgatcggtctggacaatgaaaatttttcgagaagcaaaggactgatcaattggttgccaagggatctcatcggaaatagataa

SEQ ID NO: 1010 - DNA, 426 bp, Enterococcus faecalis
gaaagaaggattaagatgaaacaggtgaaaataacaactacctcagacttgattaatggcggctgcaatgcctgtccgaatgtgaagtgtacgaattatcttgttcatgtagaagatgaaacaattgcgttagaaacgctaaccgttgcagatttagtaactttattagcactcaaagaagggtttcgtcaaaaattagttatggaaatgttcgaagaatatacggtgtttgaaagggaaactcatcaagttgtatttaaggaagaggaaacgagaattctttttcaatcaaaaaaacagaccattcaaagcactcttttgtgtaaagagccacaacaagtgttccaagaaacccagcaaattttacaccaactatttgagttagaaccttttgaatttgaattggtagaggaaactgatgaataa

SEQ ID NO: 1011 - DNA, 372 bp, Enterococcus faecalis
ggaggcaaaatgacaacgacaacagtgtattatgcaagcaataatgaaaaacagccgaaccgttttcaactagttatcggtagctgtagctatgaacttccaaaaatagaaatctacgaaatcctggaatgtgtcgcttcagcatatggctatcaaaaagaaccattcattgaagaacaaacagaatgttttgttaaaggcaaccgttgtatacatgtttcccaacaagcgacgacgttgacttttgttgtgaatgatctgcgtttagtaatggaaaaacaatgccggaatcacgaagaagtctttcaagaagtaaatcatattttattgaatatttttgaggagaccccttgtgtttttctcgaaaagtag

SEQ ID NO: 1012 - DNA, 957 bp, Enterococcus faecalis
acgatgaaagtatttaacaaaaaagtcgcaattattggtactggttttgttggcacaagtattgcctattccatgatcaaccaagggattgcgaatgaattaatcttagttgatattgacaaagccaaatctgaaggcgaaacaattgacttattagatggtgtgtcttggggtcaagaaaatgtaaacgtctgggctggcgactatcaaaactgccaaaatgccgatatcgtcgtgattacagctggcgctaatcaaaaacctgggcaaagtcgtctagatttggtttcaatcaatgcagaaattatgaaaacaattgttaacaatatcatgaaatctggttttgatggaattttagtgattgcctcaaatcctgtcgatgtactgacttatgtggcctggcaagcttctggtttacctgtttcaacaataattggaactggtacaactttggacacaactcgtttccgcaaagaactgtctcaacgtttagcgattgatccacgcaatgttcacggctatattattggcgaacacggggattctgaagtggctgtctggtctcataccatgattggtaccaaacctattttagaaattgtggatacgacagagcgcttaactagtgacgatttaccaatcatttctgataaagtgaaaaatacagcttatgaaattatcgatcgcaaacaagcgacctattatgggattggtatgagtactgcacgcattgttaaagccattttaaataatgaacaagctattttacctgtctcagcttacttagatgggcaatatgggcaacaagatgtatttacagggattcctgcagtcgttggcaatcaaggtgtgactgacattattgaattgaatctgaatgccgctgaaaaagaactcttccaaaaatcagtgacacaattaaaacaagtgatggcatcgttacaaccgaacgcttag

SEQ ID NO: 1013 - DNA, 210 bp, Enterococcus faecalis
ttcccctttatcgttctttttggtaccatgaaagaagaacttcaactaaagcagaaattaggaggacaaaaaatggtaatccaaggagatacgttagaaaatagcgcacgtcgtttattgcaagaacgtggcgtaacaatgaatgatttagctgaacttgtgctatttttacacaaagataatagccacaatttgtctaccacggggaag

SEQ ID NO: 1014 - DNA, 453 bp, Enterococcus faecalis
tttcgattgtcactgcctacattctataccgttatttttttaaaagaggtcaaattacatgatttatttgtatcagttatacaaagtaattatgttcatcttcttaacctatttatttacaagtttatttctcagttttcgaacaagaaaaaaacaagaagagaagtcgaagtagcagaagaatttttctgctactttcttgtaccgtgtgtaaacgaggagaaagtcatcggagaaacattaaaaaaactggttgctttaccaattaagaaaaaaataattgcgattgatgatggatcaacggaccaaaccaaagcaatgatggacagtattgctggtccaatccaagttctgtctcgtcaatttcccaatgcgcaacaaggcaaaggggccgctttgaaccacgctttccaaattgtattaacagatgcagaaaaaggacactattcttgg

SEQ ID NO: 1015 - DNA, 2718 bp, Enterococcus faecalis
caggcaagtatagtagtgacagtattcattgaaaatacagcgcaaaaaggctccatcaatattgttcaacaagacaaagaaagcaaacaacgtttaacaggcgcagaatttcagtggaaggatacagtgacaggaaaaacaggaacagtgacagttggaaccgacggaacggtcacaattcccaatttagcagttaatcgtacgtatgaacttacagaaacaaaagcacccacaggttatgtactagacaaaaccgtgcataaagtcactttaacaactgcacaggcaaataaagtagtgacagtaatcattgaaaatacagcgcaaaaaggctccatcaaaattgttaaacaagacaaagacagtaaaaaacgtttaacaggcgcagaatttcagtggaaagatacagtgacaggaaaaacaggaatagtgacagttggaaccgatggaaccatcacaattcccaacttatcagtcaatcgtacgtatgaaatcacagaaacgaaagcaccagtggggtatgtattagataaaactgtgcataaagtcactctaacaactgcacaagctaataaagtagtgacagtaatcattgaaaatacagcgcaaaaaggtagtctagcaataatcaaagtagacaaagattcaagaaaacgtctagcaggtgcggagtttaaatggcgtgatacggtgacaggaaaagaaggaacagtcgtagctgacaaaaatggtcaagcactgataacagatttgccagtcaatcgtgtatacgaaattacggaaattaaagcatcaaatggctatatcttaaataacaagacttaccgagttatcttaacgactaattttgcagataaaattggttattataccattgaaaatacagcgcaagaaggtagtctagcaataatcaaagtagacaaagattcaagaaaacgtctagcaggtgcagagttcaaatggcgtgatacggtgacaggaaaagaaggaacagttgtagctgacaaaaacggacaagccctgataacgaatttgccagtcaatcgtgtatacgaaattacagaaattaaagcaccaaacggctatatcttaaataacaagacttaccgagttatcttaacgactaattttgctgataaaattggttattataccattgaaaatacagcgcaaaaaggtagtctagcaataatcaaagtagacaaagattcaagaaaacgtctagcaggtgcagagttcaaatggcgtgatacggtgacaggaaaagaaggaacagttgtagctgacaaaaacggacaagccctgataacgaatttgccagtcaatcgtgtatacgaaattacagaaattaaagcaccaaacggctatatcttaaataacaagacttaccgagttaccctaacgactaattttgctgacaagattggttattataccattgaaaatgttgcgctacgtggcaatttaaaattaattaaacaagatggttactcaaaacaacgtttagcaggcgcacaatttagatggcgtgacacagtgaatgggaatacaggcgtagtaactgctaatgctaatggtgaagcaactttgtataatttttccgtcaaccggatttatgaaattacagaaataaaagcaccaaatggttatatacttgacagaacggtgcataaaattcttttacctgcgaattatgctggcaaaacctacacgttcaccaaaaataatcaagctcaaaaaggcgccatcaaaattgttaagcaagatggatatacgaaacaacgtttagcaggcgcacaatttaaattccgagatacaaccaataattatactgcaacgtttacagcgaataggaacggtgaagtactgattactggattagccggtgatcgtatctatgaggtcacagaaataaaagcaccgaatggctatatcatagatagacgtgttcataaagtagatttacgtggacaaggtggtaaaacctatacattagtcttaaataatcaagcacaaaaaggtgccatcaaaattgttaagcaagatacggatacaagaaaacgtttagcaggagcgaaattcagatttcgcgatactaccaataactatacggcaacatttacagcaaatggaaatggtgaagtactgattccaggattatcgtcggatcgtatttatgaaatcaccgagatacaagcgccaactgggtatgcgttggatagtagggtccatcggattgatttacgaggtcaaggcacaaaaacgtatacgttagtgttaaacaataaagcaaactatggtgctatcagaattattaaacaagatgttgaaacaaaagcacgtttagcgggcgctgtttttgaatggaaagatacaactaatggctatacacaaagagtaacaacaggttgggatggtacagtcactattagtgggctatctgtcaaccgggtatatgaaattagagaagttcaagcgccggctggttattcacgaaatactacgccaacacgcgtcagtctgacgcaaaatcatgcgggtcaaacaattgcaattgttcgagaaaaccgaaaaataccggtttataatccgccaccaccaacatattggccaggatatattccgccagttacgtactataatccacctgtgtactataatcctccaaagtattattatagggggtgtgtgatggtcatcgtggtggtgtgttggtaa

SEQ ID NO: 1016 - DNA, 324 bp, Enterococcus faecalis
gaagaagtaaggagaatatttatgccagttaataaaaatggtttacctttttatctcgatagaaaattagatgtaatacgctttggagttgatccggataatcatgtgaaagaacaacaactttttaaatatccggttaaaacggataagccaaataaaaaagaacgtttcattgaaaaagaaagtgaatctttaattcaattaggatataaaattgtagttgatacagttactggtgttaattatttagagagccctagaggaggaattacacctttgcttgatgaaattgggaaagtttgcatcgataaaattagtaagtaa

SEQ ID NO: 1017 - DNA, 249 bp, Enterococcus faecalis
ttgtgttctttcaataatttaaaaaaggtggagagtttaatgaattttgggtatttgaactttggaacaaaagacgctgttttagtgatcgcaatatttattatcttaattttaacggtactgtttcgttggtcagctttagaatttgtcttttcttcaggtgcagtaggaattgctttttttgctggaaatatgaaacaagacaaaaggatagcagatagggaaaacaaaaaaagtgagaagaagtaa

SEQ ID NO: 1018 - DNA, 228 bp, Enterococcus faecalis
caaatggtagttcgaaaaacatatgatcattgggggatcgaaatcagcacatggaacaaaagtaatatagttacttttattgattgtgactgcgggcaattagctaaaagagaactaggaaagtataatcagtttaaatgtgatagctgcaataaagaatacaaattgtatcaaggcaactatatcccaatggatgaaaaaataaatgaagtagctcaaaacgattga

SEQ ID NO: 1019 - DNA, 372 bp, Enterococcus faecalis
aaaagaaaacaggaatttctttatctacactcaaacgaatcaagaaacaagcaaaggaagaacagttacttagtgagaaataattcaggagtggttaacatagagaatagagaaaagattattcagttgttgaaaaatcctttagtaacaggttatgggattgagataatgtcaaacgggcgactttattcagcaaacttccaaagatataagaatcgagtaaagaaagaagagaacccgttgattatttttgagagcatgacagaaaaagttgagcaggtatttttagaattagctgaagaagtcatacgaacgaaccctaaaacaaaacaagaattcaaggaaatgattaaagaatatagttataagtag

SEQ ID NO: 1020 - DNA, 534 bp, Enterococcus faecalis
gaagaagcttggagcaggaaaaaatttcatagtgagaaatatactggtacaaacataagaaggaagaaaagaattaggaagagcttgctttcaattgtaaaagctggcgataaatttttagtgacaaaaattgatcggttggccagaagtatcgtcgatttaaattcaatcatttctgcattaaatcataaaggggtgactatttcttttttagatgatcacttaacgtttgaacctgataagaaggactctatgcaaacgttaatgatgaatatgctgggtagctttgcacaatttgaaagagatttaatcgtgacgcgaacccaagaaggaaaacagtggcacagagcaaataataagaactatagagaaggtcgcccgaaaagagttctgaatgataaatacaaacatgcactcgagttaatggaaacaaacagtatgcgggaagtagaaaagaaaacaggaatttctttatctacactcaaacgaatcaagaaacaagcaaaggaagaacagttacttagtgagaaataa

SEQ ID NO: 1021 - DNA, 564 bp, Enterococcus faecalis
ttttttttcccaacgatgcaaaaaaatattcgagctgctcaagttgaatcgttagtcgcaggacccatcaaatcagagaaagtcagtgtcttagattacaaaacagcagacaagaaaatccaagaaacaggagccatgtcagtcatgtttgctaaaccatctggcaagcaatacgatcaaatggtgaagctgtttaattcagataaaatgaatgaatttcatcgttcgctgtatatctatccgttaatttataatgctggcaaagcacaagagcaatacaatgttagcggcgatgagattacgcttgttttctttgaaaacggcaaagaaaagacacggacggttgtcgaaaaatctatggatttaaaaacacaattaataccagaattaaatcgattaccaatggctggcgttttgaaagaccagcaaaaagcggcgcaagaagctgaaaaagaagcagcaaagaccgcggaaacacagacgacgaccagcacgactggcgttgctcaatctactgaaacgacgacagaaagcactgatacagtaccagaaactggtgaataa

SEQ ID NO: 1022 - DNA, 807 bp, Enterococcus faecalis
tggagcaatgtgacaatgattgatttaaaaaagaattaccaaattatggggattgtcaacaagacccccgattttttttctgatggcggtagatacacaacggtcgacgtggcatatcaacatgcgcttaatttactagaagcgggggccgatattttagacattggcggccaatccacacgtcctggctacgaagaagtttctccacaagttgaggcagaccgagtattaccattaataaaaaaaatacgtgagacttctctagcgccgatttctgtggacacctactatcccgaagtagcggaagccgcgatccaagctggcgccacaatgattaatgacatcaaaggattagacactccggggatggcagaagtcctcgcacaatatcctgaagtccaagttgtgattatgcattctagaaaacgccaatcgctttctttaaaagaagagttgcaccaattttatacagaaaaaattgaacaatgccaaaaatatgggctttccttagaaaaaatttgtttcgatccagggattggctttcataaaactgtcgcagaaaaccttcaactgttaaaagatcctaacgcctttcgctaccaagattatccgttactatacggcgtttctcgcaaacgaaccattggcgctttaacgaacgaaccagaaccagccaaccgtgattttggctcagccgctgcttccttgtatgcagcacaacaaggcgtagaaattttacgtgttcataatgtccaaggcttaaaacaaacatttgatgtctggcgagcattgtcggagaaggagtaa

SEQ ID NO: 1023 - DNA, 597 bp, Enterococcus faecalis
aaaatggaaatcattgttggcacgaataaccaaggtaagttaaaagaaatgcaatcaggacttaaggaccccgctattcgacttgtctcttatcgaaagtatacaaccagtcaagaacaacctgcagaaactggcactacgtatgctgaaaatgcttatctaaaagctcgctttttccaacaattaattggccgcccagtgttaggtgatgatggcggcttaacgttaactgcttttcctgatttattaggtattcatacaagccgctttttccattcagccaatccggaagaacagaaccgcgaactgttgcacttatttgaagggcaacagtcgacccgagagttaaccttatcagccacgttggtctatgtactcaatgacgacaaactgttgcaaacggaagccactttgactggtgaattagttgaaccgcgcggtacaggcggttatggctttgatccgattatttatttaccagaccgaggcaaaaccttagcggagttgtccacgagtgaacgaatgaagataattcctagaatacgggctttacgaaagatgattcagcagataatggagcaatgtgacaatgattga

SEQ ID NO: 1024 - DNA, 582 bp, Enterococcus faecalis
  misc_feature (33)..(33): Nucleotide 33 is "n" wherein "n" = any nucleotide.
gcgaaaagggaatgggtagagatggagcagganaaacaagcgcaaattgagcaggcagttaccacaatcttagaagcagtgggggaagatactcaacgggcaggactcattgatacacccaaacgcgtagctaaaatgtatgcagaagtttttagtggattaaccgaacctgaatttgacgattataaattatttgatagcttaaatgaaggcgaaatggttctagtaaaagatattgccttttattcaatgtgtgaacaccatttattgccattttatggaaaagtacatgtcgcttatctgccagaaggtggcaaagtattgggactaagcaagttaccaagattagtagaacattgtgccaaacgtcccacagttcaagaagatttaacagtgacaattgcccgcaaactccaagaaaatattcccgtcaaaggcattgcagtagccattgaagcggaacatatgtgtatgacgatgcgcggcgtgaaaacaccacaaagtagcaccaaaacatttcaatttaccggactatttaaagaacaagagtggaaaaatcaatttttaatggagatacgttag

SEQ ID NO: 1025 - DNA, 519 bp, Enterococcus faecalis
  misc_feature (502)..(502): Nucleotide 502 is "n" wherein "n" = any nucleotide.
atgattggctatgtagcattaggtagtaacgtcggcgatccatacgcaaatttagtgaaagcccgcaattatttaaacgaagacccgcagattcaggtcgtggcttcttcaaaactttatgaaacggatccttacggctatacagaccaagatgattttttgaacgccgtattgaagattgatactagctataccgctgaagagttattggctgttacccaagggattgagcaagcaatgaaacgtaaaaaattaattcactggggtccgcggattattgatattgatattttattattaggggggcagtcagtcacgttgccccacttacaagttcctcatcaagaattaacaaaacggtcatttgttttgattcccttaagtgatgtttacgcagaggaacaactattgggcgcgccaatagctacgtggattcagcgcagtggcaatcaagaagaagtgcgagtaagcgaaaagggaatgggtagagatggagcagganaaacaagcgcaaattga

SEQ ID NO: 1026 - DNA, 366 bp, Enterococcus faecalis
aggatggataaaattagaatcaacaacttgaaatttttcacaaaaaatggtgttttggcagaagaaaaacgtctaggacagcaagtagaaatcgaccttgaaatgcagttgtcgttagctgaggcagggcgaacagatgatgtcactcaaactgtcaattatgccgaagtgaatgaattgattgcccaacgagtaaacaatcactcgtacgatttaatcgaaggtttagcgagtgctattttagatgatatttccgcagattatcaagaacaattgaacaaaattatcattaaaattagaaaatatagtgtgccgatgcccgggctttttgacaatattgaaattgaaatggagcgagaagtatag

SEQ ID NO: 1027 - DNA, 261 bp, Enterococcus faecalis
agaccaagtgaaaatctatcgtctctagctttacacccaatgtattttgctttaggagaataccgtcaaaaatgcgacatgaaattaatgtgtgtcggcaaagaagaaaaaattgtcggtttgcatggcatcggcatcggtgttgacgaaatgctacaaggctttgcagtcgctattaaaatgggcgcgaccaaagctgattttgataatactgttgcgattcatccaacaggctcagaagaatttgtaacaatgcgataa

SEQ ID NO: 1028 - DNA, 1062 bp, Enterococcus faecalis
tccgcgccaggaatgcacggagctaacgtccttttaattgagggcaacgaaattggtgggacctgtgtcaacgttggttgtgtgcctaaaaaagtcatgtggcaagccagcagcatgatggaaatgatggaaagagatacagcaggctacgggtttgatgttgaaatcaaaaattttagctttaaacaattagttgaaaatcgtgaaaaatatattgacttcttacatggtgcgtataatcgtggtttagacagtaacaacattgaacgtatccatggttacgctacgtttactggggagcaaacaattgaagtcaatgggacagaatatacggcgccgcacattttaatcgcgacaggtggtcgtccgaaaaaactaggtattccaggagaagaatatgccttagattcaaacggcttctttgcgttagaagaaatgccaaaacgtgtggtctttgtcggtgcgggttacatcgcagccgaattagcaggaaccttacatggcttaggcgcagaaacacattgggccttccgtcatgaacgaccattacgaagctttgatgacatgctttctgaaaaagtcgtagaacgctatcaagaaatgggcatgcaaattcatccgaatgcaacaccagctaaaattgaaaaaacggcgcagaatgagtacgttattacatttgaaaatggtgaatcaatcacgacagatgccgtgattttcgggacaggccgtcagccgaacacggatcaattaggcttagaaaatacgaaagtagcccttgatgaaaaaggctacgtcaaagtagataaattccaaaataccacgcaaaatggcatctacgcagtcggcgatgtcattggtaaaatcgacttaacgccagtcgcgattgccgctggtcggcgcctgtctgaacgcttatttaacggacaaaccgatttatatctggattataacttggtgccaacggtggtctttacccatccaccagttgcgacaattggcttgacggaaaaagcagcgcttgaagaatatggtgaagaccaagtgaaaatctatcgtctctag

SEQ ID NO: 1029 - DNA, 468 bp, Enterococcus faecalis
gtgtatttttatcacaaaatttaccacagatttgcggtattatttacatatcttagattattaaaaatgacaaaacagctatttaatgcgtattgtatgatttttttgttccttaaattgttatggaatttcagatggggagtggcaaatatacgaagaaaattaactatttatagcggttttattttattagagagtctcgttagttttagtattgtatgtgtgatagcagggatattctccctgactattacacaattaattcagcaaaattatcaacgggagcaagaattaacgcgcactcgtctaggatacgaagcaattttatttttagagcagacgggtgatttacgtttcaaagagcggatatatcaaggagaaacttaccgattttctttgatggagaacgatggaagaaggatactaaaagtcacagattcaagaggagcgattttgattggtcaataa

SEQ ID NO: 1030 - DNA, 435 bp, Enterococcus faecalis
ttggtcaataaaaaatatgcgggttttacgatgttagagtgtttagtagcactagtcgttttaagttgtatgtgtcaattgtttcagttgatgattcaacaaagttttatcggaaatcaatatttgaaaaacaatgattcgaaatcctggcatatttttttaattcaattagaaaaagaatgtcaaaagctcgttttccaaacaggctctgctcaagagatttctttcctcgactcagaaacaaacaagactatttcaattcaaatcaaagaagataaaattattaagcgagtcaatggtaaaggctatcaaccgctgttaattggtatcaaaaatggacagtttaaaaatgaaggacaatcgtttactttggaagttacttttacttctggaaaaacatttgatagtttttttccgataaagggagaattttaa

SEQ ID NO: 1031 - DNA, 1056 bp, Enterococcus faecalis
  misc_feature (57)..(57): Nucleotide 57 is "n" wherein "n" = any nucleotide.
aacaggtatggaagttgttacatcttgaatagaatagacgtgctaatttgttcccanaaggaaattgaagaggctttcgagccaatggaacaagcaatccagttattgcaacagtcattggatacttcttttttagatgcgtatattgaaaatggtgaaaatattttagatgattttcaagtacgagtacttgacggagtacctaatccagagacagtgaaacaattagaaacgctgtatcatacgattaaaaaaattgatttagctcctgaagatgtgcgacgcttgtcccaattacttttgctaaaaggaacgagaaaagagcagcttcaagcaaatcatcaattgacgccagacggtattggctttttgtttgtttatttagtagaacaattaacaaataaatcagagccattaaaaattttagatcctgcttcaggaatgggaaatttactgttaacggttctgctgaaccttgaaacagctggttacaaagtttctggttatggtgtggatatcgatgaaacacttttggcagtatcttctgtgaacaatgcttggtcacaagccaatattcagttgttccatcaagacggattgcaagatttgttattggatccagttgatttagcattaagtgacttgccgattggctattatccaaatgatgagcgagcaaagggatttgctgctgctgcggaggaaggccatagttatgcgcatcatttattaatggaacaagccatgaaatacgtgaagccagcagggtttggcttattcttaatcccgaccaatattttagagactgagcaaagtgaattctttaaaaattggttgacaaaaaatgtctatttacaaggaatgatacagttacctgatgaattgtttaagtcagaacaatcacgtaaaagtatcttgcttgttcaaaacaagggtgcagatgctgagcaagtgaaggaagttttgttagcaaaacttgcctctttgaaagatatcaataaagtaacggagttctttaaacaatttgaagcttggaaagcttcaaatttaaaataa

SEQ ID NO: 1032 - DNA, 834 bp, Enterococcus faecalis
aatagtaacgaagaggagaaaattatgtctaaaacaattgcaattaatgcaggtagttcaagtttaaaatggcaattataccaaatgccaaatgaagaagtgatcgctaaaggaatcgttgaacgtattggcttaaaagattctatcttcacaattaaatatggtgaaggacaaaaatatgaagtaattgttgatattgataaccatgaagtggcagtaaaaatgttactagaccaattaatcgacttaaacattttaggttcttatgatgaaattactggtgttggtcaccgtgtagttgctggtggagaagaatttaaagattctgttgttattacagacgaagtattagaaaaaattgaagctttatctgaattagcacctttacacaacccagcgaatgcgatggggattaaagcatttaaacatatcttaccagaaatcattagcgtggcagtctttgatacgtcgttccacacaacaatgccagaacacaactatttatatagtgtaccgcgtgaatactatgaaaaatttgctgcacgtaaatatggggcacatggaacaagtcatcgttatgtctctcaacgtgctgcagaaatgttaggtcgtccaattgaagacttgaaaattatcacttgtcacttaggaaatggtgcttcaatcactgcagttgatggtggtaaatcagtcgatacatcaatgggcttcactcctcttgctggcgttacaatggggactcgttcaggggatgttgatgcgtcactattaccttatttaatgacaaaacttggcttgactgatgtgcaagacatggttgatattttaaactaa

SEQ ID NO: 1033 - DNA, 774 bp, Enterococcus faecalis
atagccacgtttaatgaaacattgtacaagaaagtcagaggaaacgatattgggatgattttccaagatccgttatctgcactgaatccgctcatgcgaattgaagaccaaattaaagaaagtctcacgtatcataccaaaatgaccgcacaacaaaaacaagcacgggccattgaactgttagatcaagtggggattcccaacccagagcgtgtcgggaaacagtatcctcatgaattgtctggcggcatgcgccaacgggtgattattgccattgcaatcgcgtgtaaaccaccgattttaattgcagatgaaccaacaacggccttagacgttaccattcaggcacaaattctcgatttgttaaaagatttacaagaagaaacagggagcggcattattttaattacccatgacttaggtgtagttgcggaaatggctgatcgtgtagcggttatgtatgcgggtcagtttgtagaagtagccactgctgaagaattgtttagtcatccgaaacatccatatacacgttccttacttcagtccattccccaagagaattcagatgaagaagaacttcatgtgattgaagggattgttccttcgttaaccaaattacctagaaaaggttgtcggtttgccccacgaattccttggattgatgcatcggaacatgaagaaaatccaacattacatgaagttgcaccgaatcattatgttcgttgtacatgttataaacattttcattttagagacggggaaggggaagcgtaa

SEQ ID NO: 1034 - DNA, 966 bp, Enterococcus faecalis
agacggggaaggggaagcgtaatgacagaaattattcaaattaaagatttaaaagttcattatccaattcgcagcggcttcttcaatcgaatcactgatcatgttttggcggttgatggtgtggatttcatgattgaacaaggtaaaacgtatgggttagttggtgaatcgggttctggaaaatcaacgacaggaaaagcaattattggtttagaaaaaattacaaatggtgaaattatttatcaaggacaagatgtaaccaagccgcgaagtcgaaaagcgattggatacaacaaagatgtccaaatgattttccaagattcgatgtcaagtttaaaccctaaaaaacgagtactatatattatcgccgaaccaattcgaaattttgaacggttaagtgaccaagaagaaaagaaaaaagtcaaaagtttgttggatattgtggggatgccagaagatgcgttgtacaaatatcctcatgaattttctggtggacaacgccaacgtttaggcgtcgcccgagcggtggctaccagccccaaattaattattgcagatgaacctgtttcagcactggacttatctgtgcaagcacaggtattgaattttatgaaaaacattcaacaggaatatgggttaagttacttatttatttcccatgatttgggcgtagttaaacatatgtgtgacaacattgccattatgtacaaaggccgttttgttgaaatcggtacacgccaagatatttacactaatccacaacacatttataccaaacgcttactttcagcaattcctaaaattgacgtagcgaaccgagaagctcacaaagaagaacgaagaagagttgagcaagagtatcgggaaaatcataaagactattatgatgaaaatgggcgggtttataacttacatgcgattagtccaacccaccaagtagcgttaaaaaatggaggtgctgaataa

SEQ ID NO: 1035 - DNA, 966 bp, Enterococcus faecalis
ataatgtggaaaacaattttacgccgtttgttattgatgattccgcaagtgattattttaagtgtcttgattttcctgttggctaaaatgatgcctggtgatccgtttacaggattgattaatccgaaccaagacccgaaagtgattgaagccatgcgcgaagctgccgggttaaatgatccttggtacgaacaatatttccgttggattggcaatgccttacatggagattttgggcatagttttatctttaaattacctgtgtccacgctcattgctggtcgggtggggaatacgattgcattggccgctgtgtcagttataatcacgtatttaatcgccattcctttcggtttaattgctggccgttaccaaaattcatggtttgacaaaatggtggttatctacaacttcttcagttttgccgtgccattattcatctttgccttgattatgctctttatttttgggtatcgcttagactggttcccaacgagtggaaccgtgactgttggtttggctgagggaacgtggccgtattatttagataaactgaagcatttaattttaccaggggtcactcaagcgttgctagggacagcggtcactattcaatatttgcgcagtgaagtgattgatgttaaaaacatggactttgttcgtactgctcgttcaaaaggagtgccaacgaataaaatttttaatcgacacatttttagaaatgcagcattaccaattgcctctcaattaggttatgaaattactgctttgattgccggatcagtcgttattgaaaagatttttgctttcccaggaattggaaaattatttattgatagtatcattcaacgtgactattccgttattaccgctctcgtgttgattttgggattggcaacccttatcggaaccttaatttctgatattgtaatgagtattgttgatccaagaattcgaattcagtag

SEQ ID NO: 1036 - DNA, 951 bp, Enterococcus faecalis
aaaaaacacgaagaaagggtgataaaaatggaattgacagaagaaaaaagagaagaagtcttacaagaaagtattccaccaatgggctttcggatgattgcgcgagaattcgtcaaagaaaaaatggcgatgttttctttaatccttttggtcattatcttattagccgtttttatcggttcgttagtgttagaccaaagtgccgttatgcatgtaagtattttagataaatatgcggaaccaggtaccgttacaatgaatggcaccaagttcattttaggtgccgatgaagggggtcgtgatgttttaggacagttgattatcggggctaggaactcgattttaatcggttttgccattacgattattacgtctattatcggggtcggtttagggattatttccggttattatggaggcatgattgataacattttgatgcgtatcgtggattttattatgattttgccaattatgttaattattattgtgttcgtttccgtgattcctaaatatagtatctggtcctttatttggattatgtgtgcgttttattgggttggaaaagcgcggttgttccgcagtaaaacgttatctgaagggcgccgagattacgttagtgcctctaagacaatgggaacaagcgattttaaaattatgtttcgagaaattatgccgaatttaagttcattaattattacgaacttaacgattaatttcgcggccaatatcgggatcgaaacaacgttaactttcttaggcttcgggttaccacaaagtgtcccaagtttaggaaccttaattggctacgccagcagtggggatgtattagtcaataaacaatgggtttggttacctgcatcaattctaattttagtcttgatgttaagtataaactatgttggacaagcatttaagcgctcagcagatgcacgacaacgattaggctaa

SEQ ID NO: 1037 - DNA, 951 bp, Enterococcus faecalis
ggcaaattatctatcaatgctcgaggtcaaggcgcttttacacttaatgaatggatagaacagtggttagtcatcgtaaagaaggaagtaaaactttctactttcgctagttatagttacaagttaagcaactatgtcttaaaaacaatgggagactctgcattaaatgaaatagatgatttgagattgaataaattagtagaggacttgatcgcacaaggattgagtaaaagtacgatttgtgtcatattcggtatcctttcaagagccttgaatcatgcagtaaaagcaaagcatttgaaaagcaatccctgttcaactatttcgcttcctaaaccaaagcgtcgacatattcgtgcactagatattgaagagcaaaagaaattggagaatgttgcctataaaaatcctcagcaacaaggattatcagttattgtcgctttacataccggcttacgtataggagaattagctgcgctcagatgggaggacatcaactttaagaaggatactattcatgtaaagcatacttttcaaagagtatctgtaagctcgttcggagaatctactcaactttactacgattgtacaaaaacgataaattctgagcgaataattcctatgagtaatacagtaaaaaatgcattgaagtgtcaaaaagaacacagccaaggaaaatttgttttttctcgtaataataagccttgtgagcctcgcttacttacgtattacttccacaaattacgcgataaagtccaattggacaaagtacacttccatcaattacgacacacttttgcgacacgttgcttagagagtacttcagatattgtttctgtaagtgccctgttgggccattcgtccacacaaatgactttagatatttatgctgattcgttactggaacaacgtattaaagcaattaaacgtatggaaagaactatcgcttaa

SEQ ID NO: 1038 - DNA, 690 bp, Enterococcus faecalis
aacaaagaggagagaaaagagatgaaaaaaaatttagtagtaggtttcgtatcaagtgtcgctttagtaggaattgctatcgcaggagggggtaatgttcaagcaactgttactgatagtgcaagtactgatataggaattggattttcaggacatggaccaggaacgacaccgggaccgttggatattcaatgggctccaataggattagattttagtaattcgaacatggtaaatactacagccgtacaagcatttcctgaaaccactggaaccaataaatatgttgttgtaagtgagaaacgttccaatgagccaactagagaatggagtttgactgcgcaattatcagacttgacgaatgcgggagggtcagaaacacttactggggctggactaaagtttgatgctgctgtaaaaggatacactggaacgaatacaccagaaagcccaggatcaattgttgataaaggagcacgtacggcaaccgttaatgcttcttcacaatcagtgactgctggagctgctgcagtgcctgttatgaaagatgctggaactggcggcgctagcttcttaggatcaacagctatggagatgtcaaatgttaaactagaagttcctgcgaatgcagcgaagattaatcaacaatacagtgggacattgacttggtcattgaatgatacgatctaa

SEQ ID NO: 1039 - DNA, 1050 bp, Enterococcus faecalis
gtgaaacaacgagaaaaattttttatggggtttatagcgtttttactattatctattttctttccttcagttgttcaagcagagaatacttcaacagaagaaaaaatggggtttacagtaggaagtattattccagataatcaagtggatacgactaaaacttatttttatttagcgatgaaaccaaatcagaaacagagtattcaggtaaaactcaaaagtttacaagatacaccactgacgatacaagttggcattcataccgcagttagtagttctgtaggtgcgattgattatacaaatgttcaccctaagttcgatgccagtatgaaagacccaatcagtgagttagtaaaaataaaagatggcgttaaggaaattcccctcaaggggaaagaagagaaaacgataacatttgagatcacgacacctgaatcggctttctccggagtaaagctgggctctctgcgctttgttcgaaagaatagtacggaagtgaaacaaaagaaatctggcttaactcctcaatatgcgcgcgtgattgcgattatgcttacggaggatgaagaaccctttaatcagggagcgatgcttcatttaaagaaagccagcttacaattagcgaatggtcaaaaagtgattgcagcacgtattcaaaacgatcaaccaaaggttcttcaagaactaacgattcaaggggagatacgtctaaaaggggaaaagaaaattttatataaacataagatggagaaattctctgtagcaccaaattcgaatttcgattttaacattcctattggattgaatacgtttaaaccaggaacttatcactttactggaaaagcaacaggtgatggtcgaacttggaaatgggaaaaagaatttaaagtaggagaagcgcaagcgaaaaaagtgaatcaatcggcagcgtatcaagtagtgatcccacaatgggtaccatgggtagcattatctttgacagtagcacttgctggattgattgcttacttagttcgtcgtggagagaagtggaaaaacgaagggaagtga

SEQ ID NO: 1040 - DNA, 372 bp, Enterococcus faecalis
ttcgtcgtggagagaagtggaaaaacgaagggaagtgacataatgagaagaagaaatcttcagtttttattattgttggttctattaatttatattcctcaaacaacttatgcagaaaatagggagaccacagaagtcggaatcgggtttacaaaaacttcagacataccatcaaaaaaaaatccagttgtgaatgtattgccgcaaacaaccattcaatcgctatcaatcgttcgtagcagaacgcaaataaaaagattacctaaaactggtgacaatcgaataacttggctaagctggtttggcatattgtttttaataagtagtttttggctgtttctatttagacaattatgtagaaaaggagaataa

SEQ ID NO: 1041 - DNA, 189 bp, Enterococcus faecalis
acacaaaaacaatctaaaggatttactcatagttattctccttttctacataattgtctaaatagaaacagccaaaaactacttattaaaaacaatatgccaaaccagcttagccaagttattcgattgtcaccagttttaggtaatctttttatttgcgttctgctacgaacgattgatagcgattga

SEQ ID NO: 1042 - DNA, 195 bp, Enterococcus faecalis
tccgtatttgcatctatagaggaatctgtgcccgaaagtaaacttgaagatgatgttgattcaacttttttggatgaagtagtttttgccgataccatcacacccattattccttgtgaaaggactaaacctaaacacaaaaacaatctaaaggatttactcatagttattctccttttctacataattgtctaa

SEQ ID NO: 1043 - DNA, 582 bp, Enterococcus faecalis
aaaaggagaataactatgagtaaatcctttagattgtttttgtgtttaggtttagtcctttcacaaggaataatgggtgtgatggtatcggcaaaaactacttcatccaaaaaagttgaatcaacatcatcttcaagtttactttcgggcacagattcctctatagatgcaaatacggatcaatcacaaggaacaaaaaactcaatggaattaacaacaacgagcacattaaattcaactttatctacaaagactactcctactcaagaaaacgaatcggcaaaactggacaaaaaaaataaagaattagatcctaaaacaaccaatttaattgaaggaacagatatcgatgctaggttcgcaacacttttaaggactgattctactgtacaaagccaaggaaataactggtcaggctttgggaaagataaggatcaattgactattgcagatatgtcaagtttaacaaaaattactgtcactaataaaaatttagatagcttgaaaggtatcaagtatgcagaacaattaactgatttaagctgtcaatttaataatttgaccaatctggattttagtcag

SEQ ID NO: 1044 - DNA, 771 bp, Enterococcus faecalis
cccgtggttaacgccttggttgggggcatgacctccaaagatattttaatgggttcttttggaaaagaagcggatccttcttcccatggtcgtcaaatgccgaatcattatggttcaaaagagcataatattgtttccttctcttcaacagtaagtacacaaatgccattagcgacaggtgttggttatgcagcgcaacttcaaaaagctgattttgttgcattaaccaccactggggaaggctctgccaatcaaggagaagtccaagaagctatgaactttgcaggcgtaaaaaaattaccagttatttttgttgttgaaaataatgaatatgcgatttctgtcccaattgaagaacagtatgccaataaacgaatggccgatcgcgcgaaagcttatggctttgaaggtgtaaccgttgatggtagtgattttactgaagtctatctagcatttaaagaagcagtaaaagcggctcgcgggaaaaaaggaccaaaattgattgaattaatggtttcgcgcttgacgtctcattccgctgacgatgatcaatctgtttatcgttcaaaagaagaaattgaagaaatgaaaaagaacgatgcagtgaagctttttgaaaaacaattattagaagagggctatttaacagacgaagacattgccaaaattgatgaagaaattcgtgcagaaatcaatcaagcaacggatgaagcagaagcaatgccagatcctgtaccgacatcaattttagaagaagtgtatgcaaaataa

SEQ ID NO: 1045 - DNA, 1008 bp, Enterococcus faecalis
gagaagaggagaagaaatataatggctgagatgacttatttagaagcaattaacttaggaatttctgaagaaatggctcgtgatgaaaaagtagttatttttggagaagatgtcggcggcgacaaaggcggcgtgttcggtgtaacaaagggcttggctgctaaatacggtgacgagcgttgttttaatacaccgttaacagaaggcttaattggtggtttagctgtcggcttaggtttaatgggctatcgcgcaattggtgaatttcaatttgcggattacattttgcctgcaaccaatcaattgttatcagaggctcggacaatgcgctatagaacaaaaggcgattggactgcgccaatcgtttatcggaccccttatggcggcggtgttcgtggtgggctgtatcattctcagtctacagaaaaagtcttttgtggacaaccaggattgagagtggtgaccccttctaatccttatgatgcaaaagggatgattaaagcagcgattcgttccgatgatccagtcattttttacgaacataagcgtttatatcgtttactaaaagatgaagtgcctgcagatgattatatcgtaccaattgacaaagccaatgtcgttagaacgggtagtgatttaaccgtgattagttacggcatgaccttgcaattagctttagctgcggcggaaaaactagccgctgaaggaattgatgccgaaatcgtcgatgttcgctcattatatcctttagatcgcgaaacattagtggctgcagctaagaaaacagggaaggtcttactcgtaacagaagacaataaagaaggcagcgtgatgagtgaaattgcggcaatgatttcagaagatgctctctttgatttagatgcaccgattcaacgacttgcaggacctgattgtccaagcatgccttatgcattacctttagaaagagaatttttaatcaatgaagagcaagtattagcagcaatgaaagaattagcagaattttaa

SEQ ID NO: 1046 - DNA, 264 bp, Enterococcus faecalis
atggccacaaaagaaatcaaaatgcctcatctaggcgaaagtgtcacagaggcagccattgtccaatggttagttaaaccaggagattcagtgaaacgctatgatcccttaatggaagtcgtttctgataaagtcaccacggaagtcccatcagattttgatggtgtagtaaaagaatttctgatttctctagatacagatgtgcccatcggaacagcggtgatgactttggagacgaagaaaccccggaagacaccgaagtag

SEQ ID NO: 1047 - DNA, 1137 bp, Enterococcus faecalis
tggtgtagtaaaagaatttctgatttctctagatacagatgtgcccatcggaacagcggtgatgactttggagacgaagaaaccccggaagacaccgaagtagctactttagcaccagtgaaagaagcaagtgcggaacaagcgcaagaacatgaaacggctgaaacaacaagcattgcgacgttccatcaaaaaaataatgttcgttattccccagcagtccttaaaattgcccaagaaaaaaagattgatttaacacaagttacagggacaggtcgtgatggtcgaattactagaaaagatgttacaaactttacaccaacacaggcaagaacacctgagaaaacagtgagtccaggaactagcccttcaatttcagaggagccagttgcttcgcaaaatgaaagcgccgcaacagctagtccaactgaaacaagcacagataaaattgtctctgcagatcctgtacgtaaagcaattgctaaaaaaatggtccaaagcgtcaacgaaatccctcacgcttggttaatggtggaagcggatgtgaccaacttagtccaacttagaaattcattaaaagatgaatttaaacaacaagagggcctatctctaagcttcttcccattttttgccaaagcagtcattcaagcgttaaagaaaaatccaaaaatcaatacatcttgggatgatggctcaattatttatcataaagatgttaatttatccatagctgtaacgacagacgagcatctttatgtgccagtgattcaacaagcggataactattcgattgcagggctagccaaagaaatcaatcgcttggcacaagaagtccgacaaggaacgctagcaagcaaagaaatgcaaggagggacctttactcttaataatactggaacactaggttccgtccaatcgatgggaattattaaccatccacaagctgcgatattacaagtagagtcaattaataaacgccttgtgccaaccgcagatggaggctttaaagtggcagatatggttaatttatgtctttctattgatcatcgaattttagatggacaacaagcaggtaagttcttgcgagatgttaaagataatttagcgaaatataatgcggatacggatatatattaa

SEQ ID NO: 1048 - DNA, 489 bp, Enterococcus faecalis
tcaataggagtgttgaaaatgcccactgataaactggatgctcaattaaccccaagaatattttttaacaaagtgttagctggaacagcttccggcaccattatcgccttaattcccaatgctgtattaggagccattttaaaatattttgcagaatacaagattatcgaaatgattattcatgcggcgcaaattttccaactagccacccctttaattattggtggactgattgcttttcaatttggcttaacgccacagaaaatgatgattgctggcggtgcagcatttgctggctctggcgtgattaaatttaattcacaagtgaaaggctttattggtgcaggcactggtgacatcattaatattatgattaccgcttctgttgcagtcttacttttattagtcatcgataaaaaattcggttcagtggaaatcattgctttaccgatcgttgttggagtacgtgcaggtttgtttggcatgtag

SEQ ID NO: 1049 - DNA, 825 bp, Enterococcus faecalis
ttttttatgaactacacaaatagtcgaacgtttaatcctgaaattttatatgcctttgatccttggaacgaagagacccacccttataattgtcatcatcatgaatttctggaaatatctattcttttagaaggtgaatctgaatatattgttcaagggcaacagtaccatgccactgctggtacagtgtttctttttaatccgcgaacggaacatggtgagcaacaaaaagcaggaacttactcacatcaactacacattggcatttcaaatctctatttagaaggcttagcgcgaaacgtatttccaaataaatcagctttattagatttaagtcatttacatggtgcttttttagaaaaagcttggcaaattgttcatgaattaaaccatcaagaagttgaatcagcgttacaaattaaagctttagttattgaactattggtctatattttaagaagcttagcagttgatcaagaaaataaaattgaaactcggctatcgaaaacggaaaaaagaaaacgaaatttagtcaatcatacgatttattatctggaaacgcaccatgacgaagaaattactttggaacagttagctgaaatgctatatgtgaccccgacttatttgtcgaaaacctttaaagcggccacaggcgttgggccaatcaattatttaattcaaatccgcttaaaccatgcgaaagaattgctgaaaaatgattccctaagtgtcaaagaagtggcaaaaacggttggttacgaagatgcctatcatttcagtaaattattcaaaaaatattatggaaaatctccttcacaattttaa

SEQ ID NO: 1050 - DNA, 183 bp, Enterococcus faecalis
aatttcaggattaaacgttcgactatttgtgtagttcataaaaaatcactcctacttgtatccgctttctatactatattgtacatcaaaatatacaagaatgcccatttcttttcctataaaaaaacagtaatcttatacacgtccataaaaacaagagagagtaggggagaaaatgaatag

SEQ ID NO: 1051 - DNA, 1773 bp, Enterococcus faecalis
  misc_feature (1217)..(1217): Nucleotide 1217 is "n" wherein "n" = any nucleotide.
aaacaagagagagtaggggagaaaatgaatagttttgaatggatttggcaatatgctaaaaaaaataagaataagttactgctagctgttatttttgtcgttattaacgctattttaattgttattattccattgttatctggcagaattgtagaccaagtaatcaatcaggggaaaactgaagagcttgtcccaattcttgggattatgattggagtgaccgttattcggacagttgttcgttatagttatcaagtcttgtttgaatcggttggacaatctgcgttatttgacttaagaaaagatatgtatgtcaaacttcaagaattagattttgatttctttaatcatacacgtgttggcgacattatggcgcgaatgacaggggatacagacgctatccgccattttgtttcttgggtcacttataacctcttagaatgtattttatggttcatcgcagccgtgattgtgatggggacgatcaattggcaattgatgctagcattaattttaattacacctttgatttttctgttaacacaaaaaatgtcgaaggaatcgcatccggtattttttgagatccgggaaagtttttctcggctaaattcgatggtcgaagaaaatattggtggaaatcgggtggttaaagctttttctcaagaaccttatgaaattgaaaagtttaacaagcacaatgaagactataaaaaatggaatatggcttctgcagatgtctcaaaaaaatatttaccgtggttagacggttttgcaggtagtttaaatgttattgccttagttcttggtggcctctttgtaattcaaggtcggatgacaattggtgatttagtggcctttaacggttttctctggatgttgaacatgccgatgcgaatgagtggctggttgatcaatgatgtgcaacgctttacggcatcgtccattaaaattcgtcagttattagcaacgaaaccgaagattcccattgctcgggaaaaagaagcagaaccaatccaaggctatgtgacgtttgatcacgtgtcctttcatttttcagatgatccagaaacccccattttatcggatgtttcattttcagcaaaacctggtgaaacaattggtattttaggggaaactggttcaggcaaaaccactttagttaacttaatcgctcggttctatgatccaacaaaaggcactgtttatattgatggaanagatgctaaaagctattctgttcgtaaattgcaaaaaaatttctccatggttatgcaagatgtctttcttttttccaatacaatagaagataacattgcttttggtaacacattggctaacttggaacaagtgcaaatgatggctgaaattgctgatgctcatagctttatttccagaatgcccgaaggttatgcaacaattgttggtgaacgcggcgttggcctatctggtggccaaaaacagcggatttcactggcccgtgccttaaccaaagatccagctattttaattatagatgacacaacttccgctgttgatatggaaacagaatcaaaaattcaaaaagaactaggtcgtttgacggaaaagaaaacgacatttattattgcccaccgaatttcttctgtgagagaggccaatttaattttgatgatggaaaaaggccgtgtggtggaaagcggtacgcatagcgaattagtcgaacaaaaaggcaaatattttgacgtatatcaaaaacaattaggtctgacaaaggaaggtgagtcgcgtggctag

SEQ ID NO: 1052 - DNA, 1728 bp, Enterococcus faecalis
caaaggaaggtgagtcgcgtggctagaaatacgtttgatgtagatgagactttagaaaaagaatttaattggtcccactataaacgattaggcgcctatattaagccttacaaaaaagctgtttttaaaacattatttgtcatcatattagctaatctggcaagtatgttaggcccttactttactaaaattgcgattgaccaagtaattccacaaaagaatctctcgttactcttgatactaggggctattttcctattttccttggtgattattggttggtgtatgcgttatcggatatatgccatcacagaaattggacaagatattttaaaagatatgcgtttttcaatttttgagcatctacaaaaattaccattttcttactttgacagtcggccgcatggaaaaatcttaattcgggtggtcaattacatcaatacgttaagtgatttattaagtaacggattgatcaatttaatttctgatttatttaatgtgattatcaccttaatcttcatgttatttattgatgtgaaattaaccttatacagtttgctgctattgcctgtgttgttcgtgatggttctatttatccaagggaaacaacggaaagcttaccaagagcttagcaataaacaatcaaacttaaatgcctatattcatgaaagtatttcaggaattaaaattacacaatcttttgcacgagaagatgaaaatttccagatttttaacgaggtaagcgaagaatatcgtcaatcctttatgaaagctgtgcgtgtccagtatttattatggccagcagtgcaaaatatatccgtcattacgacttgttttatctatttcgtaggaatccgtcaattaggtgtgtccgttaccactgggacgctaattgcttttatcggttatatcaataacttttggaatccagtcatcaatattggtaacttctacaattctctgattactgcaactgcctatttggaaaggatttttgaaacgatggatgttgttccagaaattcaagatgcgccgcacgctattgagttgccgccaattaaaggaaccgtcgactttcagcatgtttatttccgttatgaagaaggaaaaaatattttgaccgatgttagttttcatattgagccaggacaaacaatcgccttggttgggccaacaggtgcgggtaaaacaacaatcatcaatttgttaagtcgtttttatgatgtgaatgaaggggccgttaaaattgatggttatgatgttcgcgatgtgacactccgttcgttaagaaaacaaatgggggtaatgcttcaagatacgtttattttttcaggaacgattattgaaaacattcggtacggaaatttagcagccacagaggaagaagtcatccaagccgcaaaaattgttcgtgcgcacgactttatcaaggatttaaaagatggctatgaaacagttgtggaagagcggggtagtacactctcggcaggacaacgccaattaatttcatttgctcgtgctttactggcagatcccaaaattttaattttagacgaagcaacctccagtattgatacaaaaacagaagaattgttacaagaaaggataccacaacttctgaaaagaccgacatcgtttattattgctcctcgactttcctaccatcaaaatagcgataaaaatttctatattgatggtggtccgtatggtggaaaaaaggatccctga

SEQ ID NO: 1053 - DNA, 876 bp, Enterococcus faecalis
aatgcaaacgattacttattgctgtttttaactaaaacattaaaaactattggaggggtcaaaatggttcaacgattaattagtgcaaatgcatcagaaatcaaacggatgtcaaaagaagagctgtttcagagtattaaagcgagcgaagggcgcgtaatattatcggaaaatgtggtagttcatccatccgtagcaggtgatatcacttgtgcggaaatgtcaaaagcatatggcgcagacatgattttattgaatgttttcgatgttaatcaacccattgtagtagccgcttatgaagggcaatatactgcggaaacatgtgtccctaatgatgaggttgttcatcgtttgaaagaactagtcggtttaccgattggcatgaatgtcgaacctgttgatgaaaatttagacttagcttcaacgagagtttcgattgaaccaggtagaaaagcatcagcagctactttcaaaaaagccaatgaactgggtttggattttatcttattgacaggtaatccaggaactggcgtgaccaacgacttgattgctaagaacgtggccttagccaaaaaacattttgacggcatcattattgccggaaaaatgcacagttcaggcgtagatgaaccagtggtcagtttaaaatcagctgaacaatttattgaagcgggcgctgatattgtcttagtcccagcagtcggcacggtttggggcattgatgatcaacaagtcaaagaagttgtggattttgcacattcaaaaggaaaattagttatgagtgccattggaacttcacaagaaagtgctcaacctgaagttatccaagcaatcggcattagaaataaaattttagccgcacgatattcaacataa

SEQ ID NO: 1054 - DNA, 912 bp, Enterococcus faecalis
atgtcttttgcctcggatgtcaaaaaagagttaactggtttagaagtccatcgagaacacgcgaaagcagaattagcagcattaattcggatgaacggctcgcttagcttagttaatcaacagtttgtcttgaatgtacaaacggaaaatgctgcaattgctcgtcgaatgtattcattgctgaaagatcattaccatgcacaagcagaattattagttcgtaaaaaaatgaaactaaagaaaaataatgtttacattgtgcgtctaaaacaagatacacaaaaaattctagctgatttggatattatggatggggtcgtttttaatggcaatgtgtcaaatgaaatcatgggtaacgcgcaaaaaatgcgttcctatttacgcggggcctttatggcttctggctcagttaataatccggaaacaagtcgctatcatttaaaaattttttcaatttatgaagaacacaataatgatatttgtaagatgttgaattactatgacttaaacgctcgaacattgggacgccgaaatgggtatatttgttatttaaaaggtgctgaaaaaattgccgactttttaacattaattggtgccacgaactctatgttgaaatttgaagatgtccggattgtccgtgatatgcggaattcagtaaatcgtttagtgaattgcgaaacagcgaatttaaataaaaccattgatgcggcttcaaaacaaattgaaaatattcaatttattgaaagtacagtagggctgacgtcattaccggagaaacttcaggaaatcgcagaattacggttagagtatccggaagttagtctcaaagaactaggggaaatgattccttcaggagctatttctaagtcaggtattaatcatcgtattcgaaaaattaatgaatttgcataa

SEQ ID NO: 1055 - DNA, 939 bp, Enterococcus faecalis
tccatccccgtggcggtcactttaaaaaatcaaagtgttgatattactgccgtcgtaacggtcgctgatgatggcggtagtagtggcgagcttcgttcctctattaataacatgacacctccgggagatttaagaaatgttttagtggcattgtcagatatgccacaattatatgaagatatttttcaatatcgttttgataaatcagatagtcattttgccaatcatgcaatcggtaatttaatcattgctgctgtctcagaaatgagaggaagtacgtatgaagcgattcaattgctttcaaaaatgatgcatgttgatggacggatttatccatcatcagaacggccattaacgttacatgctgtatttaaagatggctcagtggcggtgggagaatcaaaaattgcactggatcgcaagacgattgaccatgtgtttgtaacaaatacacacggagaagagcagccaagagctgcgcgtaaagtcgtcaaagcaattgaagaagcagacatggtcgtgttagggccagggagtctttttacaagtattttgcctaatttagttattacagaaattggtgaagccatcaaacaaacggcagccgaagtagtctatatttgtaacatcatgacccaaaaaggggaaacggaacattttacggatgcagatcatgttcgtgtcttaaacgagcatctacaagcgcagtttgttgatacggtgctggttaacacagaaaaagtaccagaaaattatatggatcctgaaatttatgatgaatatttagttcaagtaaagcatgattttcaaggattacgtgaagaaggttgccgagtcatttcgacagactttttagaattaagagatggcggagtttttcatgatggggaaaaagttgttgaagaacttttccgtatcgtatttggaacgaaatattaa

SEQ ID NO: 1056 - DNA, 1005 bp, Enterococcus faecalis
cagaagttgagaaaatgtagcgaacaactttctttcattgaaagattaggctacaatgagagcagcaaagggaggaatcttatgtttggtttattgaaatacgcaaaaaattatcgaaaacaaattatcctcggtccagtcttcaaatttttagaagcttgtttcgagttagtcttgcccttattcatggctcacttagtcgatgtcggtattcgtcaaaacgaccgacagactgtcatagaaatggccctctggatgcttgttatgtcgttagttggtttattttttgtcatgatttgtcaatactatgcttcagtcgcttcgcaaggttttgggacggagctaagaaatcaattaatgaagaaaattaatcagctttcacacaaagaattgaatagttttggtacagataccctcatcacccggatcacaaacgatatcaaccagcttcaattagctttagcgatgtttattcggttggtcattcggacaccttttttaagtatcggttctgtggtgatggctttttacattgacgtgcagatgggctttcttttcctattacttttaccaatttttagccttattctctttattatcattaaagtgactgtgcctttatatcaaaaagtccaagaatatttggatcggttaaaccgtcaaatcagtcaaaacttaagcggtgtccgtgtgatccgtgcgtttgctaaaaaggaaacagagcaacgacatgttgataaagcttcagatgatttaggcgatatttacattcgtgtatcgaatgtctctgctttattaacgcctttaaccactttgattatgaatgttggaattttatttttactttattttagtggcttaaaagtttcttttggttccttacaacaaggggaagttttagcattgatcaattatatgaatcaaatgatgctcgctttaattgttgcttctaatctcgtggtaatttttacgcgagctgccgcttccggcaaaccgtgtcaatga

SEQ ID NO: 1057 - DNA, 846 bp, Enterococcus faecalis
tttttacgcgagctgccgcttccggcaaaccgtgtcaatgaggttttaactgtagaaagccagttaacagatacaccagaatcagcaaaaacatctccacaatttggtgatattacctttgaccatgtagattttcgctatgaaccagaggccggtttggctttggaaaatatcaattttacgattcctaaaggctcaattctcggcatcacaggacctaccggcagcgggaaaagtaccttaacccaactcattcccagattttatgatgtgagtgcaggaaacctttttattaatggtgtaaatgtgcgcgattggccgctctttactttacgccaacaagttgcaagtgttccacaaactgccgtcttatttacagggactattcgagaaaacttacaatggggcaaaccaaatgcaactgatgaagactgttgggaagcattagctatcgcccaatgtaaagaatttgttgaacaattagaccaagggttagacacgcctgttaacgaaggcggaaaaaacttttctggtggacaaagacaacggttgaccattgcccgtgccttgattaggaaaccgcatttacttattttagatgattccttgagtgccctcgactatcaaacagatttgaatctgcgtcgtgctttacaaaaagaacgagcagagacaaccgttattttaatttcacaacgcgtgagttcgattgcaacggcgaatcaaattttagtcctagatagtggaaaagtcgctggccttggcacccacgaagaattacttacttcttctaaagagtatcaagaaatcgttgcgtcacaggaggaggatacccatgcaaactaa

SEQ ID NO: 1058 - DNA, 1863 bp, Enterococcus faecalis
atagtggaaaagtcgctggccttggcacccacgaagaattacttacttcttctaaagagtatcaagaaatcgttgcgtcacaggaggaggatacccatgcaaactaaaaaaattcattttggtgccttctcacgttttaagccgtatttactacgctatccaaaagaaattattggcgccttaatcctaggaattctcagtggtttttcgactgtcctcatgacttattatataggtaaatccgttgatacaatggtgggtaaaggacaagtcaatgctgcgcaactcatcaaaattttaggtttattagcagggattttactcgtaaccgttctaagtcaatggttgattcaacgtctcggtaatcgcgtgtcttatttatcgaccacacagctgagaaaagatgcctttgcccatttaaatcaattaccgttaagttattatgaccaaacgtcacacggaaatatcgtcagtcgctttaccaacgatattgacaatatttcaatggcttgctcggctgtcttcaaccaattattttctggcatggccaccgtcgttgttgctttgctctttatgattcggctaagtcccctgctcacattagtggttcttatcagtacgccgattatttttattgtaaactggcttgttgcaaaagcttcacaaaaaaactttgctgcacaacaaacgattgttggtgaaatttccggtttcgtttcagaaatggttggcaaccaaaaaattgttaaagcctttcaacaagaacaagctacgcaagaaacatttgaagcattgaatcaaacgttgtatgaaaaaggacagaaggctcagttttcttcctccttaaccaacccactttctcgatttatcgaccatttatcttatttatcgattggattagtcggtggcttgttagttttaagtggcaatcctttagtcacagttggtgttatttccagtttcaccatttactctagtcaattttctaaaccttttattgaactctcaggaatcaccaaccaaatccaagccgccttagctggattggaacgtacctttgatatgatggatcaaccagttgaacgtcctgatgcctcgaacgcaattgttttgaaagaagcgcgaggccgtgttgaatttaaagacgttgatttttcttacacgccgacgcgacctttaatcgaaaactttaatttaattgctgaaccaggagaaacaattgccattgttgggcgaactggtgcgggtaaatcaacattagtgaatttgttaatgcgcttttacgaggtcgaccgtggccaaattacggttgatactcacgacattactcaaattactcgggacagcttgcgaaaaagttttggtatggttctccaagatacttggctattcgatagctccattcgggaaaatttaacgtacggaaatcctgaagcctctgacgaagaaattatagaagccatgaaaaaagcccatatttttgatttcgtcatgcgtttacctcaaggactagataccgagattggttcccaaggcgttaaaatttctgaaggacaacgacaattaatgactattgcacgcacgatgattagtaatccgccgatgcttattttagatgaagcgaccagttcagttgatacattgaccgagcaaaaaattcaggatgcttttttacaaatgatgactggccggaccagttttgttattgcccatcgcttagcaacaatcaaaagtgctgaaaaaattctagttatggataatggtcaagtggttgaaattggcacccatgacgaattattgcaaaaagaacagggttattatcgtgacctttacgaagcacagtttaatcaaaaagcacaataa

SEQ ID NO: 1059 - DNA, 537 bp, Enterococcus faecalis
caaatgaaaaaatttggcacaaaatccattgcgttaatgggcgtactcattgcggtggtcgttgtcttttcacgcttttttgcgtatgaaacaacgtttttaaaaatcagtttcacgtttatcccagaatcattgattgggatgattttcggacctttttgggctggaatcggcacggcggtggctgatgtggtaggaatgttgctttttccaaaggcaggctattttcctgggtttactttaaatgcctttttggctggtgctatttatggttatttctattataagaaagaaatgacatggcaacgagtgattttggcgacattgttggtcaccgttttaattaatatcattttaactcctttgtggttaagtttaatgtatggcgtcaatctagcaaattttgcttggtgggtaccacgcttaattaaaacagttattttctttcctattcaagtaattgccacttattatttaggcaataaaattccctttaaacgtttatttggaaagccattatctgaattagatcaataa

SEQ ID NO: 1060 - DNA, 186 bp, Enterococcus faecalis
  misc_feature (186)..(186): Nucleotide 186 is "n" wherein "n" = any nucleotide.
aataacagagtaggagacaaagcgttaagtgctaaaaggatgggatgttgccttttggacgaagaacataaacagtgtgttgctacaaagcaaaggttcttactttgcttatcatcagaacaacacgttcagctttttaatgttcgcggttttgttttcgcattcgctgcatggttcgtcttgtan

SEQ ID NO: 1061 - DNA, 363 bp, Enterococcus faecalis
agactcaaacttattttagaaaaacatgaattgtatgcaacgggaacgacaggcatgaaagtgatggaagcaactggcttacccgtgcattgctttaaatcggggccattaggtggggatcaacagattggcgcaatgatatcagaagacaacattgatttagttatttttttaagagatcctctttccgcgcaaccgcatgaaccagacgtgacggctttgattcgtctaagtgatgtctatgaaattcctttagcgaccaatattggcagtgctgaaattcttttgagaggtgtcgaggcggggtttgcggacttccgtgaggttatccatgaaggggatcgtcgaccgttagctttttag

SEQ ID NO: 1062 - DNA, 546 bp, Enterococcus faecalis
gtggagaacatgtaccgcagtccgtatgaagcgtacccgtatctatcttctaaaccagaagatttacgatgtgattttgaattaatgactgatgaattggcctcgatgacaggtcttctacgaggatacgtgcaacaattagacgtccctgaacagcctgcactaacagaagaactagccaaaatttgcgagttaatctaccatgtcaatccaacgacccgaacaaaattaacagtcacagaggacgaaatagcctggcttttggaacgtgtcaatgctatgaatgaactgacatacgaagaaaatcgtccttttgttttaccgatgggcacaatctgttcctcttatgcacacattttaagagccaaagccaaagatattgttcgtttactttatcgcatggactatggtggtaaaaaaattgatccgcagctgtatgatgtagtcaacttactctcaggttactttttcatgttagccttgtacctaaatcagctcgaaaatggtgaagaagttccctttgtttctcgcaactattctatttaa

SEQ ID NO: 1063 - DNA, 849 bp, Enterococcus faecalis
cagttgaggatttgtgttgcgcggaatacatttatcaaaaaatacaaggagagaattaaaatgagttatccctattatattgtcgatgctttcgcggaggaagtttttaaaggcaatcccgccgctgtttatgttttggaaaaatggttgccagaagcggtgatgcaaaacattgcgattgaaaataatttgtcagagactgcttttacggtcaaggagggacaaagttacgccctgcgctggtttacgccggaacgagaaatcgatctctgtggacatgctacattagcgacggcttttgtgttgtttaactattattccgttgcggaagaaacactccattttactagtcaaagtggaccgctcgcagtgaccaaaaaagaggaatactattatctagattttccttatatcctaccggaaaggattccaattttgccagagtatgaagccgctttaggcacgaaaatttatgaagcttatttgggtcgcgatttattttttgtcttaaaagacgaagagacagtggcaaaaatcacaccagatttttctgcattaaaagcattggatttaggagtaggagtcattgtaacggcatcaggagactcggtggattttgtttcacgaacttttttcccgaaactaagaattaacgaagacccagtttgtggttctgcgcacgccaatttaattccttattggggaaaacggctcaatcaaacgaccctttcggcctatcaagtgtccccaagaggcggctttttaacttgtgaagtgaaagaaaatcgagtcattattggtggtactgctaaactatttgcaaaaggagaagcgtacttacctgtataa

SEQ ID NO: 1064 - DNA, 1041 bp, Enterococcus faecalis
aattgtattccatacaattatagcattgagtgtattgtttgtctggtttatgatagcgcaaagggaggaattcagatggacattatttcttatgagagggttattcaacaattgtcgttttccgaagcaattcaagtgatgaaacgttgctttgcagagttgcaaaaaggaaaaatttcgcaaagtgagcgccatgtagaggttttaccagatgggaaaaatcaaaatctttttgcattaatgcctgcttacttaggaaaaaatcgcttttttggggcaaaaatcattacagcttttccagaaaatccacaaaaaaatttggcctcgcatcttggtcaaattttattgtttgatagttctactggaagaccagtcgcgatgatggacgccaatgcgattacgtggcttcgcacggcagctgtttctgctttggcaaccgattatttagcagctccaaaggcaaaaagtatcgctttgattggtgcaggtcaacaagcttcatctcatctcgcagcgctacaaagcgttcgggcgattgaaaaggtttttatatatgaccgcacagcagaacgtgcacgaaaactaatcgctaagcaacagcacaattaccccgaatgtacctttattggttgttcttctgtccaagaagccgtccaggaagcggaaattatctgtacactaacttccagtcaggacgcatttttagaagaaaaagacgttttgccgaatgcccatatcaatgcaattggtacattcacgccgacttccagagaattaacaagcgaccttgttaaaaacagtcaagtgtttgtagatgagtatgcggctgcattaaaagaaagcggggatcttttaattccgatttcagaaggtgccttttcagctgaaaaaattgtaggttctctcggcgaattagtcactggcaaagttaaactaaaggcggagcagaaaggccgcacgatttttgatgcggttggcttagcagttgaggatttgtgttgcgcggaatacatttatcaaaaaatacaaggagagaattaa

SEQ ID NO: 1065 - DNA, 1191 bp, Enterococcus faecalis
  misc_feature (1187)..(1187): Nucleotide 1187 is "n" wherein "n" = any nucleotide.
ttgtatggaatacaattttatagaaaggaagttcccctcatgccgattaattcctatgagaactatgtgttgtcatggcgccctgttaaagaacgtttaacaagaccttattaccaatcattggttcaacaattagaagcggatatcttatctggtgcgcttcaaaaaaatgtgaaattgccttcgcaaagagaattagctgattacttggatctgaatttcacgacgattggtcaagcctataaacacgctatggaaaaaggcttactttataccaacatcggtagcggcactttcgtttctcccaacgcgtttcactcaattacaatctctaccaaccaagtagcggaccatctaattgatttagggctggttagttcctttgatatgtgtaatcagcggattttaccttttattgaatccgttagtaaaaatgcggcccttaacagtttgctaaattatcgcgatcctttaggtacgcactttcaacgagcaaccgctgccgaatggcttcagacacaaggcgttcggaccaatgccgaagaagttgccattgtatctggtgtccagaatggactggccgtgacgttagccgccgctttttctccaggtcagcggattgccgtagatcgatacacgtattcaaattttattgaactcgcccagctttatcatttagaaatcgtcccgattggctatgattccgaggggatggacccagagcatttactgcaagaatgcaaaaagaaaaaaatacatggtattttcttaatgcccgcatgtaataacccgattggtttccaaatgtctagcgcccgccgaatgactttagctgaaatcattcagcaagaacacttatgggtaattgaagatgacattcattcttttttaacaacttatgcacagcaagcagttttaccaacgtttcaagaactcttacctcaacaaacgatttacttagcggggatgacaaaatttgtctgtacaggcttacgcattgcgtaccttgttttccctccgcttgttcgccaagaaatagagcgtgcgatttttaacattaacgttaaaacttctggctttgatgctgaaattgtcacccaagtcttacgctcaccagttgcaaaagaattagtgatagaaaaattggattttacaatacaaggcccagacctatttgtctccatttngtga

SEQ ID NO: 1066 - DNA, 1338 bp, Enterococcus faecalis
tgtaaagtgaatgatgggagagaaaaagagatgaagcatgtaacaaaattggggattacaattataacaggagttttggcattattatttgaatttattttacatcagccgaattgggcgtatggcattattttaataacaggttctgtaatggcgttaatgatgttctgggaaatgattcaaaccttacgtgaaggaaaatatggtgtcgatattttagcgattaccgctatcgttgcaaccttagctgtgggagaatactgggccagtttgatgattttaattatgttgactggtggtgattcattagaagactatgccgctggaaaagctaaccaagagctgaagtcattattggataactcgccacaaaaagctcatcgcttgaatggcgaaaatttagaagatgtttctgttgaggaaatcaatgttggcgatgaattagtagtaaaaccaggggaactagttccagttgatggcttggtaaaaaccgggacatcaacagtcgatgattcttcattaacaggagaatcaaacccaattgaaaaaattcctggggatgaattaatgtcggtttccgtgaatggtgacggctcttggaaaatggttgctgaaaaaactgtagcagacagtcaatatcaaacaattgtgaacttagtgaaagaatctgcggcgcgtccagctcattttgtacgtttagcagatcgctatgcggtaccttttacactagttgcctacctaattgcaggtgttgcttggtttgtttcaaaaagtccgacacgttttgcggaagtcttagttgttgcttcgccgtgtcctttaattctatctgccccaattgctttagtggcagggatgggtcgttcaagtcgtcatggggtcgttattaaatcgggaacgatggtcgaaaaattagcttctgcaaaaacgattgcgtttgataaaacaggcacgattacgcaaggacaactttctgttgatcaagtccaaccaatcaatgctggaataactgctgctgaattagtgggattggcagcaagcgtggaacaagaatcaagtcatattttagctagatcaattgttgcttatgccagaaagcaagatgtcccattaaaaaatattacagatctagcggaagtttctggtgctggcgtgaaggcatttgtggatggtgctgagatacgggtaggtaaaaagaattttgtgacacaagagtctcaagaaactgaaaaaattgataaaacgactattcatatttcacgtaatggcacatatttaggccgaattacttttacagacactgtacgcccagaagcaacagcctcttcaccaagattt

SEQ ID NO: 1067 - DNA, 840 bp, Enterococcus faecalis
ggaggcctagaaatgacaacacttcaagaaaaaatcattcaagagttaggtgtgttaccgacaattgatccaaaagaagaagttcgtaaaagtattgattttctgaaagcttatttaactaaacatccttttttaaaaacctttgtcttgggaattagtggcggacaagattcaacattagctgggcgcttagcacaattagcgatgactgaaatgcgcgaagaaacaggagatatgtcgtatcaatttattgcgattcgccttccttacggtgagcaagcagatgaagctgatgcacaagccgcgctagcctttatccagccagatgtttctttacgagtggatattaaaccagcagtggatgcaatggttggttcgctagaaaacgctggcgttcaaattagcgattttaataaagggaacatgaaagcacgtcaacgtatgattacacaatatgcagtagctggcgaaaatgctggcgcagtaattggcacagaccacgcagccgaaaatgtgacagctttcttcaccaaatatggcgatggcggagcggatattttaccgttatttcgtttaaataagcgccaaggaaaagctttgctgaaagaacttggggcaccagaagccttgtatctaaaaataccaacagctgatctagaagatgacaaaccgttagttgcagatgaagttgccttaggtgtcacgtatgatgccattgatgactatttggaaggcaaaaaagtctcggaaacagatcaacaaacaattgaaaactggtataaaaaaggacaacacaaacggcatttacccattacaatttttgatgatttttggaaataa

SEQ ID NO: 1068 - DNA, 309 bp, Enterococcus faecalis
aaatttatatgttccatcccgttcatacctttattaataagtatgtccgtgattttgaagcacggccagtactcccaagatattttcgttgaaggaaaacgtgtgtacgaattaccaactttagatgaaattaaacaatatgcaaaagaaaatttagattcactttgggaagaatacaagcgggacttgaatccgcagaaatatccagtggacctttcaacagattgttggaaccacaaaatgaatttattggaaaaagtgcgtaaagacgttaaacatttaacggaaacggtgaataaggaggcctag

SEQ ID NO: 1069 - DNA, 1275 bp, Enterococcus faecalis
aaaacgatggactatacatatgcagatgatagtttgacattgcatacagatatgtatcaaatcaatatgatgcaaacatactgggaattagggagagcagatttacatgctgtttttgaatgttactttagagagatgccctttaatcatggctacgcaatttttgcaggtttagaacgtttagtcaattatctcgaaaatttaacgttcacagaatctgatattgcatatctccgagaagttgaagaatatccagaagatttcttgacgtatttagcaaattttgaatttaaatgtactgtacgctctgctttagaaggggatttggtttttaataacgaaccgttaattcaaattgaaggtcctttggcacaatgtcaattggtagaaactgccttgctaaatatggtgaatttccaaacattaattgcgacaaaagcggctcgaattaaatccgtgataggcgatgatcctttattggaatttggaacacgccgggcacaagaattagatgctgccatttggggcacaagagccgcctatattggtggggcggacgcgacaagtaatgttcgtgctggtaaaatttttggtattccggttagtgggactcacgcccattcattggttcagtcgtatggaaatgattatgaagcattcatggcgtatgccaaaacacatcgggattgtgttttccttgttgatacgtatgatactttgaaagcgggagtgccaagcgcaattcgagtagctcgagaaatgggggataaaattaatttcctaggtgtgcggattgatagtggcgatatggcttatatttctaaacgagttcgtgaacaactggacgaagcaggctttactgaagcaaaaatttatgcatcgaatgatttagatgaaaatacgattttgaatctaaaaatgcaaaaatcaaaaattgatgtatggggcgtgggtaccaagctgattaccgcctatgatcaaccggctttaggagcggtgtttaaattagtttcaattgaaggtgaagatggtcaaatgaaagataccattaaactatctagcaatgctgaaaaagtgacaacaccaggaaaaaaacaagtctggcgcattacacgtaaatctgataaaaagtcagaaggggactatgtgacactttggaacgaagatcctcgccaagaagtagaaatttatatgttccatcccgttcatacctttattaataagtatgtccgtgattttgaagcacggccagtactcccaagatattttcgttga

SEQ ID NO: 1070 - DNA, 381 bp, Enterococcus faecalis
accttgggtgaagaatttggcggtggtgcaacgacggtcgtcaacttagttgtgttttttgtttgtcaaaacgtgttagggctggattacaagataagtaacgcaattagttggtttttatctgttctatttgcctttttcacgaataaatattgggtattcgcaagtaagcatgaaagcatagctggtttttttaaagaaatgggcttattttattggtaccgaattttatcttttgtggctgatatgggtttaatgattctcctaattgatggcattcatttttcatcgttttgggcgaaaatgattacacaagttgtagtagtgattttaaattatttcttcagtaaatttttcatttttaaagaaaaagaggtctaa

SEQ ID NO: 1071 - DNA, 759 bp, Enterococcus faecalis
tcccccgaatcccgtggcgtgaagagactgataaacaaaaacgcattaaggaaatttgacatttttaatagttcgattgaagttccctatatcgaaaaggcaagtgcagatgtattaaaagttgaagaaattacttatgaaaatattctaaaagacataaattttgatgtcaaagttggagatgttattggtttggtagggaaaaacggtgtggggaaaacaaccttactaagaatactcatgaagattattcgccctaccaaaggaaagataatcgaaaataaaaaaaatttgtcatcgccgtttttagtaatgcaagaaatggattaccaatttttcacagaatcagtgaggagcgagttagcccttgggaatgaaatagttagtaaagatcagcaagaaaaaattttaaaaaaaatggaactttataaaatgaaagatcaattaccgtttgatttatccggtggagaaaaacaaagattattggtttctatagcttcattgtcaaaaactaatttatttctatttgatgaacctacaagtgggttggattatatcaatatggaaaggattgctgaccttattaaagacttaaaagaaaggggtgcagtagttatagccactcatgatccggaatttctttataaaacatgcaatagaattatttatttaaaaaatggtggaataaaaaaagatataaaacttagagtagaagattcaactttgatagaacagatttttaatgacataacgaattag

SEQ ID NO: 1072 - DNA, 183 bp, Enterococcus faecalis
aaatattccttttttgggaggagtagttttaaaattaatattaaaccaaattgtggtttccaggattattatccccaaatatccgttggggattatgttggtgaacaaaaccgcccccacccaatagtattatttcatttatggaaaaaaagtaaatttagtagggaaaataactgtagttaa

SEQ ID NO: 1073 - DNA, 195 bp, Enterococcus faecalis
aaaattccatttcaattcttctctaaaaaaggtaagatggacacaacaaatgtttcagtttccatgcccatttactttaaggttcagcgttatctactaagtatgaagaatgtcaaagaaaggttaggtactcccaatgaaaatcaactatttaggcacgggtgcagcagaacggattccaggaattttttgtaa

SEQ ID NO: 1074 - DNA, 840 bp, Enterococcus faecalis
gtactcccaatgaaaatcaactatttaggcacgggtgcagcagaacggattccaggaattttttgtaattgtaaattatgtaagtacgctcgagagaaaaaaggacgagaaattcgtacacaaactcaattaattattgatgatgtcctgctgattgattttccaggggattcttatttacacctgttgcagtacgacttgtgttttgcagactttgactctttactaatctctcattggcattccgatcatttttacggcgaggatttggcttatcgaatgtctggttatgcattagatattcccaatcgtttaactgtttatggaaatgaagcagttaagacgttttatcagcgcgcctttgatttagaaggtcgtcaagacgatacccgattacattatcaggttattcagccctacaaatgttttactattgcgaactatacgatttatccccttcctgcacaacatggaaatttcagtgaagattgttttattttcgttatagacgatggtaaagatgcttttttatccacccatgatacaggttactttacgtcagaaatgtttgaatatcttgaaaagagccacttacttcttagtattgtttctttagattgtactagtcaaacaaacgaaactggcaatagtcatatgaattgggaagaaaatttaaaattaattgcagaattaaaagaaagaaaactcgtcacagataaaacgatttacgttgccaaccatttttctcacaatggcggcttgtcttatgcggagatggcggctttatctcaaaagcatgaaatcattacgagttatgatggtttagaaatactaacttaa

SEQ ID NO: 1075 - DNA, 204 bp, Enterococcus faecalis
ctgcttcatttccataaacagttaaacgattgggaatatctaatgcataaccagacattcgataagccaaatcctcgccgtaaaaatgatcggaatgccaatgagagattagtaaagagtcaaagtctgcaaaacacaagtcgtactgcaacaggtgtaaataagaatcccctggaaaatcaatcagcaggacatcatcaataa

SEQ ID NO: 1076 - DNA, 885 bp, Enterococcus faecalis
ataaaaatggataaggagtggcataatcttatgaaaaagttctccatacgaaaaattagtgctggttttttgtttctgattttagtaactttgatcgccggttttagcttgtctgcaaatgcagaagagtatatcgttcctgccgaaagtcattcacgacaaaaaagatcgttactggaccctgaggacagaagacaagaagtggcagatacaaccgaagcgccttttgcgtcaatcggaagaatcatttcccctgccagtaaaccaggctatatttctttaggaacaggctttgttgttggaaccaatacaattgtcaccaataatcatgtggctgaaagttttaagaatgccaaagtattaaatccgaatgccaaagatgatgcttggttttatccaggtcgagatggcagtgcgacaccatttggcaaattcaaagtgattgatgtagctttttccccgaatgcggatattgcggtagtgactgtcggcaaacaaaacgatcgtccagatggcccagagttgggagaaattttaacgccatttgttttgaaaaagtttgaatcttcagatacccatgtcacaatatcaggctatccaggtgagaaaaaccacacacaatggtctcatgaaaatgatttgtttacatctaactttacagacttagaaaatccattactattttatgatatcgatacaaccggcggtcaatctggttcaccaatctataatgatcaggttgaagtagttggtgttcattccaatggcggcattaagcaaacaggaaatcatggtcaaagactaaatgaagtgaattataactttattgttaatcgagtgaatgaagaagaaaataaacgtttatccgctgtgccagcagcgtaa

SEQ ID NO: 1077 - DNA, 1560 bp, Enterococcus faecalis
aaggaaactggggaaggagttaattgtttgatgaagggaaataaaattttatacattttaggtacaggcatctttgttggaagttcatgtctattttcttcactttttgtagccgcagaagaacaagtttattcagaaagtgaagtttcaacagttttatcgaagttggaaaaggaggcaatttctgaggcagctgctgaacaatatacggttgtagatcgaaaagaagatgcgtgggggatgaagcatcttaagttagaaaagcaaacggaaggcgttactgttgattcagataatgtgattattcatttagatagaaatggtgcagtaacaagtgttacaggaaatccagttgatcaagtagtgaaaattcaatcggttgatgcaatcggtgaagaaggagttaaaaaaattattgcttctgataatccggaaactaaagatcttgtctttttagctattgacaaacgtgtaaataatgaggggcaattattttataaagtcagagtaacttcttcgccaactggtgaccccgtatcattggtttataaagtgaacgctacagatggaacaattatggaaaaacaagatttaacggaacatgtcggtagtgaagtaacgttaaaaaactcttttcaagtagcgtttaatgtgccagttgaaaaaagcaatacgggaattgctttacacggaacggataacacaggggtttaccatgcagtagttgatggcaaaaataattattctattattcaagcaccatcactagtagcattaaatcagaatgctgttgacgcctatacgcatggaaaatttgtgaaaacatattatgaagatcatttccaacgacacagtattgatgatcgagagatgcccatctgttcagttgttgatgaacaacatccagatgcttatgacaatgctttttgggatggaaaagcaatgcgttatggtgaaacaagtacaccaacaggaaaaacgtatgcttcctctttagatgtagttggtcatgaaatgacacatggtgtaacggaacatactgccggtttagaatatttaggacaatcaggtgcgttgaatgaatcttattctgatttgatgggttatattatttcgggtgcatctaatccagaaattggtgcggatactcagagtgttgaccgaaaaacaggtattcgaaatttacaaacgccaagtaaacacggacaaccagaaaccatggctcaatacgacgatcgagcacggtataaaggaacgccttattatgatcaaggcggtgttcattataatagtggaattattaatcggattggttacaccattatccagaacttaggcattgaaaaagcacagactattttctacagctcgttagtaaattacttaacacctaaagcacaattcagtgatgctcgtgatgcgatgcttgctgctgcaaaagttcaatatggcgatgaagcagcttcagtggtatcagcagcctttaactctgctggaatcggagctaaagaggacattcaggtaaaccaaccaagtgaatctgttctggtcaatgaatga

SEQ ID NO: 1078 - DNA, 954 bp, Enterococcus faecalis
caactcgtggtgaagactgccaatggtgtttttttaagattaaatcgtgtgttagaaaatagccgaattttttttggttgtttacttttattgttgattctgttgttactttttgtgtttttgatttcgccagaaatttcacctgactttatgcgaggatttgtcacggtaaatagttctaaattggagttattaataagtgtaggtttatttttaattctgattggcttagtcattgaagcttatttggaagaacaacgtatcaacactcaattattgaataatttaacgatttatactgaaaaaatagaatccattaacgaagagctagcgatgtttcgtcatgattataaaaatttattgtatagtttacaaattgctatttcatacgaagatattctggaaatcaaaagaatttatgaagaaacgattgcaccaaccaaaaaaattattgataatgaagaatttgaacttatgaagttaaatcgtttgaaaaatatggaacttaaggcactcataagtatgaaaattaataccgcaaagcaagcaaaactaaaagtgattgttgatgtgccagaagtatttattcttgatacatcaatcgacttagtggttgtgattcgtttgttggctattctattagataacgcgattgaaaacagtgcaaaatcagaattgaaaatgttcgctatctcaattttcaataaaaatgaaacacaagagtttgtgataacaaatagtgtccaagccgaatttgattttaaggttatgaagaaaaccaaatttagttctaaaagtaatccagaagagcacggttggggactgttatatgtcaaagaaattgttgatttttcagatcaatttgatttgcaaacgtccttcaatgaaggagcggtcactcaacatttaattattgaaaaaaatcataacagtaaaaaagttgttaacgaatga

SEQ ID NO: 1079 - DNA, 291 bp, Enterococcus faecalis
ggtatggataaaatgaaagctattactttttttgatttagatggaactttgttagatggaacatcgcaaataactcctgagattaccgcagcagtggcggccttgaaagacaatcaaattttacctttaattgcgacaggacggaccttgtgtgagattcagccaattatgaaagccagtggcattgattctgcgattgtaatgaacgggcaatttattcattatgaaggaaaaacgatttattcagacgaatttacaacagtggatgagtgcaatgtccaccacgaattg

SEQ ID NO: 1080 - DNA, 732 bp, Enterococcus faecalis
ggagtgaatgaaatgaatatattaatgattgaagacaatgaatccgtctcagaaatgatgcaaatgtttttcttaaatgaagggtgggaagctacctttaaagatgatggtaaagaaggattggcgacttttcttgcttcgccagaaaaatgggacatgattaccttagacttaaacttacctattatggatgggattgctgtttgtcctgaaattcgccaagtttcagccaatgttcccattattatgttgaccgctcgtgattctgaaagtgaccaagtaattggccttgaaatgggtgcggatgattatgtgacaaaaccatttagtccattaactttgattgcacggatgaaagctctacatcgtcgtgccgaggtggcagaggctgcgcatgatacgtctgagaatacagatgaaacatttgacgtgattacggatcattttaaaatgaatacgaaaacacgagaaacatatttagataatcaattaattgaaggcttaacacctaaagaatttgatttgctatacactttagcaaaaaaaccacgccaagtcttttcacgcgaacaactactagaattggtttgggactatcaatactttggcgatgaacggacagttgatgcccatatcaaaaaattacgacaaaaaattgaaaaagtgggtcctcaagtcatccaaacggtttggggcgtagggtataaattcgacgattcaggtgttgcttaa

SEQ ID NO: 1081 - DNA, 1494 bp, Enterococcus faecalis
attcgacgattcaggtgttgcttaatgaagtatttgtatcaacaattacttgcttttataggtgtgatcgctctgattattctcattgtcggaacgtctttcacacaattgaccaagcgcacaatgcaagaaaataactatgaacagctgtatggttatgcagaatcggctttagaaacacgtgacttttttattaatgtcgcaggcgtttcagatcgagatgttttatcctattcatttcagttgactgagcgcgtactccagaagcaagatgtgcaatttgtgtttattaacaaggaccgcgaagtgcagtacccaccagttgatagcacaaaaaaattagacttttccttaatcgataaaaattgggatcaaatcatgaaaggcaatcgtgtttatgcaacagaaaacattgatatttacggggcccgaaatacttcgtcctatgtaatgttaccggtgtatgcatcaaatcagtcttctgataaaaaagtgattattggttcactagttattacacaacctgccaaaaacgttgaccgaagtgttcagtccgtgacacaaaacttgattaaaggctttattttttctggtgtgattgccttgttactaagctatctatttgcgactttccaagtgaaacgaataaatcggatgcgtaaagccaccaaagaaattactagtggaaattttgatattcaattaccggttcatgacaaagatgaatttgatgacctagcagaagattttaataaaatggccgcgtctttaaaagaatcacaagaagaaatcaatcggcaagaagagcgccgtcgtcaatttatggcggatgcctctcatgaaatgcggacgcctttaacaactattaatggcttgttagagggattgcagtataatgctattcctgaaaatcaaaaagagaatgcgattaaactgatgcaaaatgagaccgctcgcttgattcgcttagtcaatgaaaatcttgattatgaaaaaattcggaccaaccagattcaaattgttgtgaagaagttcaacggaacagaagctttagaaaatattgtgactcaactaacggccaaagctgaagccgccggtaatcaattgtatttagacaccaccgaaccaattgatgtgtatgccgattatgatcgtttcgttcaagtggttgtcaatattgttcaaaatgcgatccaatttactgaaaatggcgaaattcatattgctttagaaaaaggctatttagaaaccattgtccgtatttctgatacaggaatcggcatgacggaagagcaaattctgaatatctgggatcgttattacaaagtagatccatcccgtaaaaatacgaaatatggagaatcaggattaggcttaccaatcgttcaacaattggtccgtttgcataaaggaaaaattaatgttgagagtgaacttggtaaaggcaccacgtttattatttcatttcctgatgttgaaattactgaaaactaa

SEQ ID NO: 1082 - DNA, 213 bp, Enterococcus faecalis
gcttaccaatcgttcaacaattggtccgtttgcataaaggaaaaattaatgttgagagtgaacttggtaaaggcaccacgtttattatttcatttcctgatgttgaaattactgaaaactaaagaaaacgtctggtcacaatcagtgccagacgttttctttagtttaataacgcatgtagagacagggggtgcacatagggactatcaataa

SEQ ID NO: 1083 - DNA, 573 bp, Enterococcus faecalis
gaaataagggagggattttctatgaatgtcacaccatcattcaaaaaaataaccgaaaaaaaatcctcattcgacgcgttagctttgcgagaagtttatggaatcatttattctgctccagaacaagaactcgcattggccgattttttccaaacaaaccaattaaccattactaggctttcttctagtgaaacctttttgccctacttgccattagaagaaaatttatttatcgctagtacgatcaaagaacgggatcgaaaagtagttctagccgaagctttccaggtgttccaattagaacctgccttacttggtcgttcctttacttcttttacgacttttgaaaaaattaaaatgcgcataatacaacttttgctttcaaaaacaagtacgttagtgattgatgacatcttttcttcattaacgattggacaacgtcaagaaattttacctcaattaaaaatagcagttcaaaaaagaaacaagcgcttgctatttctgacaaaagatccacaaattattgatagtccctatgtgcaccccctgtctctacatgcgttattaaactaa

SEQ ID NO: 1084 - DNA, 657 bp, Enterococcus faecalis
aaaaatcacgttaatcaccgcatcttcttcttcctgttctctttcttattgactgggctgtttaacttaattgattttgaaaaagagtttttacgaacgatgccagactttgtcgatattgaaaaacaaactagttaccattaccaactgatccaatactattggcacctctatctaggtagtgtcattttctttggtgttacttttcttctgttgatgtatgtgacattacgcataaaaaaggaagaaatacatacatggtatcacatgcacttttcaaatatgtatgtcaccaaacagctcttactagagttatgtttaccggctctattaggaattttcagttttttacttttcactttaatgtttcaagaaacgtataatactgttctttgggctgctcgtgatgctattttacagtggtctcatttggaaactccagcatttttagctaaaagtaccgaccaggatgtcacgattacaaatatccagcatttagggattcaaacgatccaagcgttttcttttgattttaaaagtatgcagtcactttatacaatccgtaattgctttgttaactgcttaatcttgcttggcattcctcttgtttgcgggactcctttcacgttgatttatttacgtacacataagaaataa

SEQ ID NO: 1085 - DNA, 492 bp, Enterococcus faecalis
tgtaagaaattatttttaagtaaggagatttgtgctatggctagagaaatgacaggacttaaattttatttcagaaatggtgaaacttggacgattgatcgtcgttttattggtgatttatggatcaaacatattacaacaagttttggccgtatccatggtagtgaatttgttgaaattcatccatgtgaagggttcaaaattgaaattttccaagaaggagatcatgttcaaacccacgatattaacttaggtggcttagaattagggatgttctctcgtgctttaaaatatgaagatatcgaacgtatggaaattctttacaaaaatggcacaccagatttagtttatttcccttacaaagataaaacagatgagggcttggataacatctatcaatctacaaaagtcagcgaaaaaactaaaaacttatacattgttatcgacccaacacaaacagttgatgatgtatacgctgaagaattaaaataa

SEQ ID NO: 1086 - DNA, 432 bp, Enterococcus faecalis
acaagaagttctgctttcgtttgccaaaaaacaacgttcaaaaggagagaaagcataatgccaacagaaatgtttacaaaagaattcttggtgaaagaatcacaaacggctaaaatgctcggttctggtgacttagaagttttaggaacccctgctttagctgccatgattgaacaaacagccaaagaagctgtgaaggaccaattatcagttggggaaacaactgtcggaacggtgttagaattgcgccacttatttccatccgcggtaggggcgacaatcgttgttacgatgaccagcattgaacagactgcacacaaaatacgctatgaatttgttgcttatgaaggagaacgacaaattgccaaaggttctcaccaacgtgcagtagttgagattgattcttttttaaaaagaataacaaaagattaa

SEQ ID NO: 1087 - DNA, 1308 bp, Enterococcus faecalis
tcggcgttcattcatgacaggagtagcgttagcttgtcggcaagtggtacagagaacagaactactttacggattggaacagatgctatgaaattgacaactattccaaacgaatttaaagaagccgctcccgttattcgtgaaatcaatgcacagggctttgaagcgtattttgtcgggggcagcgtccgtgatgctttattaaataaaccaatccatgatgtcgatattgcgacaagtgcctatccagaagaaattaagcaaatttttaaacgaaccgttgatgtgggcatcgaacatggcacagtccttgtattgatggaagaccaacagtatgaagtaacaacctttcgtaccgagtcaacttatcaagactttcgccgaccagatgaagtcacctttgttcgctccttgaaagaagatttaaaacggcgagattttacgattaatgccttggcgctcgacagcacaggtgaaatcattgatttatttgatggtatcgaagatttaactaatcaaaccattcgtgcagtcggtaatccccatgagcggtttcatgaagatgctctgcgaatgatgcggggcttacgctttgctagccaattagattttaaaattgaagaaaaaaccttagccgctatcgctgaatttcatcctttattggaaaaaatttcagtagaacgcattacaattgaatttgtaaaaatgcttttaggggttaatcgacaaggtggcttagctccgtttattgaaacagaatgctatcaatactgtccaaaattacgagaacaaggggctggactttttcgtttaatggacttgcctgctcgtcaaattgaaacagaagcagaagcgtggacgttacttatccaatcgttgaatttaccagaagcagaaattcgctccttcttaaaggcttggaaactttcaaatcaattaatccaaaacgtttcacaattagtacgcggtttgcgttttcgcttgagtaacgactggcagccaatgatgctttatgaattaggcgaagaatcagcagtacttgttgaaaggcttttatattattaccaacaagagagtcaagtacaagtaacaaaagagttagttaaggcattacccatccatcaaagacatgaattggccataacaggaaaagaccttttagccgtcttagaagaaacaccaggcaaatggttaggggaactgattgctgaaatcgagcaacacgttgttgaaggtagcttagagaataaacaagaagttctgctttcgtttgccaaaaaacaacgttcaaaaggagagaaagcataa

SEQ ID NO: 1088 - DNA, 858 bp, Enterococcus faecalis
ccgaagtttttgaagaaaatatggccaaatttaacaagcgggatcgctatcgctttgaaagaaaggatgggaaaacacatgattaaaataattgtcgctgggtttaaaggacggatgggcagtactgctacacaaatggtcttagaaaccgcagactttgaattagtaggtgtgtatgatcctcatgaagcacaagaaactgtttctttcaatgatgaaacagcaattcccgtttttcagcgcttagaagaagtcctagctgtcaaaccagatgtttggattgattttacggttcctgaagccgcctatccaaatacgcgttttgcgttggaacacggtatggcgcctgttgttgggacgacaggctttacggaggaacaaatcaacgaattgacaaacctatctcgagaaaaagccatcggcggcttgattgcgccaaattttgcaattggggcagttttaatgatgcaatttgcccaaaaagcggcgcagtattttccagatgtggaaatcattgaattacatcatgataacaaattggatgcaccgagcggaacggctataaaaactgcagaaatgattcaagaagttcggccagcaaaaaaacaagggaatccgcaagaggtagaatcaataccaggggcacgcggggctgatttcgagggtctgcgaatccatagtgtccgcttacctggtttagtggcacaccaacaagtccaatttggcagtgtaggtgaagggctcactattcggcatgattcttatgatcggcgttcattcatgacaggagtagcgttagcttgtcggcaagtggtacagagaacagaactactttacggattggaacagatgctatga

SEQ ID NO: 1089 - DNA, 372 bp, Enterococcus faecalis
agtaagaaaggttggggtaaaatgtcagaatcagaacaacgtagtttgcaatcgatgcaaacagaagttgatgattatattcaacagtttaaaacaggctatttttcaccattaggacaaatggctcgtttgacggaagaggtcggagaattagcccgtgaagtcaatcattattatggtgaaaaacagaaaaaagcagacgaaaaaccaaagacagtatcagaggaacttggagatgtcttttttgtattgattagcatggcaaattctttagagattgatttaaccgaagtttttgaagaaaatatggccaaatttaacaagcgggatcgctatcgctttgaaagaaaggatgggaaaacacatgattaa

SEQ ID NO: 1090 - DNA, 885 bp, Enterococcus faecalis
gtggaagaacaaagattttattttaaagatgtgttatttattgtattaggaagctgtatctatgcctttggtttggttactttcaatattgccaatgacctggccgaaggtggtgtcacggggattactttgattttaagagccttatttcattttaacccagcatatacgacattattaatcaatattccgctcttattaattggtgggaaaattttaggcaaacgttccctctattatacgctaattggtaccgtgtcgttatcggtatttttgtggttttggcaaaaatttcctgttgaaattaatttagatcatgatttattgattgctgctctcttagctggtttggccgcaggattcggtagtggccttgtttaccgcgtaggcggaaccactggtgggaccgacgtcattgcccgcattttcgaaaaatactttgggattagcatgggccgctcgttgttactttttgatgttgcagtcttactcctctcgttgacctatattgatgtcaaacgaatgatgtatactttaattgtgtcctttgttttcagtcgtgttgttgattctgtactcgatggagcctatgctgcgaaaggaattttaattgtttccaatcattccgaagaaatcggtcaaagtttaatggcttctttagaacgtggggtaacatatttaaatggtgaaggtgcttattcacaagtggaaaaacgggttctctacacggtagtcagccctcgagaaataatggaagtcaaacggattgctaatgaaatagatgaaaaagcctttgtgtccatcattaacgtacatgaagcaattggcgaaggctttacttatgcaaaacccagcaaacaacggcgctttaaattaaaacaataa

SEQ ID NO: 1091 - DNA, 255 bp, Enterococcus faecalis
  misc_feature (7)..(7): Nucleotide 7 is "n" wherein "n" = any nucleotide.
aggtcanaatgtgtatttccagaggcttggcaaacgagccagtatttatctgtgttagaagataatccgtttgcgccatggaatgaacaagtggatcaggaagttgccagagcgattgatcaatattttaagcaagaagaacaaacgcagcgaatggcattacttaaagctcaaattgatgatgctttagaaacaggcaacaaagaagcgtttttagaattatccgatgaattaaatcgtttgaaacaacaataa

SEQ ID NO: 1092 - DNA, 729 bp, Enterococcus faecalis
agcgattcgcaatacgaaacaaaagtaggaggaaagactatgtggaaaattggagacgttgaaatccccaaccgtgttgtcgtagctccgatggcgggtattagtaacgccgcttttcgtgtgactgtaaaagaatttggcgcaggattagtcgtttgtgaaatgattagtgacaaaggaattaaattaagaaacaaaaaaaccttagaaatgctatatattgatgagcgggaatatcctttaagtgtacaaatttttggtggagataaagaaacattagtggaagctgctaagtttgtggaagaaaatacgcaagcggcgattattgatattaacatgggctgccctgtcaataaaataattaaagctgaagctggtgcgaaatggttgctggatccgaataaagtgcatgagatggttcacgcagtctcttcggcagtttctttgccggtcactgtaaaaatgcgaacaggctgggatgaagatcatctatatgctgtagacaacgctttggctgccgaacaagcaggggcttcggcaattgctatgcatggtcggacacgtgtccaaatgtatgaagggacagccaactgggacgttttaaaggaagtgaaaaagcatttaaccattccttttatgggaaatgacgatgtcaaaacgcttgaagatgctaaacgcatgttagaatatgttggagcggatggtgtgatgattggtcgagctgcttag

SEQ ID NO: 1093 - DNA, 945 bp, Enterococcus faecalis
tattatctgactaatggacaaaaaagcaccaagagaagaggaaaaagaatggaagattatttagtaaaagccctttgttataaaggttcaatacgagcatatgccatcagtgccactgaaactgttagcgaagcgcaaagaagacatgatacatggagttcttctactgcagcgttaggacgcacattgattggagcccttttactaggagcgactttaaaaggtgacgataaattaactgtaaaagtacaaggaaatggcccagctggcgctattattgtcgatagtaatggccgcggagaaacaaaaggctacattaaaaatccacatgtcagcttaaagttgaatgcaacaggtaaaattgatgtacgtggtgctgtcggtaacgaaggaattttcacagtcattaaagatttaggattaaaagaaaccttttgtggacaaacacctattgtttctggtgaaatcggtgaagactttacatattttatggcggtctctgaacaagttccttcagctatcggtttaggtgtattggtggacacggatgaatctgtgaaagcagccggtggttttatgattcaagtaatgccaggtgccgatgaaagtaccattgattttattgaacagcgtctagcggaagtgccaccaatttcacaattactagaaaatggagaaacacctgaacaagtcttgtatcgcttattgggagaagacgaagtagaaattttagaaaaaatgcctgtacaatttaaatgtgactgttccaaagaaaaatttgcgaccgctttgattgctgttgggatcgatgaattaaatgcgatgattgatgaagatcatggagcagaagcagtttgtcaattctgtaacaataaatatcactatagtgaagaagaattaattgaacttcgcgatgaagcgattcgcaatacgaaacaaaagtag

SEQ ID NO: 1094 - DNA, 2070 bp, Enterococcus faecalis
ggaaatgacaacgaacaatcgccagacatcgattactcaaccttccaacaacaattggaagacggaaaagtcaaagacatgaccattcaaccaactaatggggtttaccggattgaaggtcagtataaagaaaaacaagaagtgaaagacacaggtggtctgtcattgtggggctcaacgcaagcgtcgtcaaaaggcttcacaacaaccgttttacctagtgatacaaccttagctggcattcaagatgcggcacaaaataacaaggtgaagctagttgtcaaagaacaatcaacaagtggtgcttggttgtcactgttgtttagtttcttaccattagtgattattttcttcttcttctacatgatgatgagccaacaaggcggtggcggtggcggcggtggccgtgtgatgaacttcggtaaatcaaaagccaaagaagccgataaaaaagctaaccgtgtccgcttctcagatgtagctggtgcggaagaagaaaaacaagaattagttgaagtagtggaattcttaaaagatccacgtcgtttcgctgaattaggcgcacggattcctgcgggcgtactattagagggacctccagggactggtaaaacgttacttgctaaagccgtagcaggtgaagcaggtgtgccattttactcaatctcaggttcagatttcgttgaaatgtttgtcggggtcggtgctagccgtgtccgggatttatttgaaacagcgaagaaaaacgcgcctgcaattatctttatcgatgaaatcgatgcagttggtcgtcaacgtggtgctggtatgggtggcggacacgacgaacgtgaacaaacccttaaccaattattagttgagatggatggttttgatggcaatgaaggagttatcgtaattgctgcaacgaaccgttcagacgtgttagacccagcgttgttacgtccaggtcgttttgaccgccaaatcttggtaggacgtccagatgtcaaaggtcgtgaagcgattttacgtgttcatgcgaaaaacaaaccgttagctgatgacgttgatttgaaagttgttgcacaacaaacaccaggttttgctggtgctgatttagaaaatgtcttaaacgaagcagccttagttgccgctcgtcgtaacaagaaaaaaattgatgcttctgatgtggatgaagccgaagaccgcgtaattgctggtccagctaaaaaagatcgcgtgattaataaaaaagaacgcgaaatggtggcttaccatgaagcaggacacacaattgttggtttagtcttaagccgtgctcgtgttgtccacaaagtaacaattatccctcgtggtcgcgcaggcggttatatgattgctttaccaaaagaagatcaattcttaatgactaaagaagatatgtttgaacaaatcgttggcttacttggtggacgtacagcagaagaaattatctttggcgttcaatcaacaggggcttcaaatgactttgaacaagcaacagggattgctcgtagcatggtaactgaatatggaatgagcgacaaattaggacctgttcaatatgaaggaaaccatcaagtctttgtcggtcgtgattatggtcaaacaaaagcttactcagaacaagtggcgtttgaaatcgatcaggaagttcgtcgtatcttaatggatgctcatacgaaagcgcatgaaattatcgaagcgcaccgtgaacaacataaactaatcgctgaaaaactattagaatatgaaacattagatgcaaaagcaatcaaatcattatttgaaacaggtaaaatgcctgaaagtgctgacagcgactatcctagtgaaaaagaagcgcaaacattcgaagaagcaaaacgtgctttagaagaaaaagaagcgcaaaaacaagttgaagaaaaacaagactttgaagaagcgaaaaaagaattacatgatgaagcagaagaagtcaaagtagaaagcgaacaaacagaaaaagaagtccaatctgaagagaaaaaagattcagattccaattctgaatatgatcgcaataactacgaagatcgttataaataa

SEQ ID NO: 1095 - DNA, 1200 bp, Enterococcus faecalis
gttaatgtaggccagtttttgaacagaaggaggaatgttggtatgaaacagaaaaagtggttaatcggacttgttgcactgggcttggttttagcagcatgtggaagtggcggttcgaaaacgacctcaaacgaaccagctacacagaaaattaacgtcgcatctggtggtgaactctcgacattagacagcgctcattatacagatgtctatagttccgatatgattggtcaagtagttgaaggcttgtatcgacaagataaaaacggagatcctgagctagctatggcgaaagcagagccacaagttagtgaagacgggttagtctatacattcaagttacgagaagcaaaatggacaaacggggatccagttaaagcaggggattttgtagttgcgtttagaaacgtggtcgatccagcatacggttcaagtagcagtaatcaaatggatatttttaaaaatgggcgtgcggtgcgggaaggacaagccacgatggaagaatttggtgtcaaagcaatcgatgaccagacactaaaactaacattggaaaatccaattccttatttagcccaagtcttggttgggacaccttttatgcctaaaaatgaagcctttgccaaagaaaaaggtactgcctatgggacttctgcagataattttgttggcaatgggccgtttgtaatttcaggttgggatggcaattccgaaacttggaaattgaagaagaatgatcattattgggataaagaacacgtaaaattgaatgaaattgatgttcaagtagtgaaagaaattggcacaggagccaatctttttgataatggcgacttatattacactgttttagcagatacttatgcacttcagtataaagagtcaaaacaagcgcattttgtacctaaagccatggtgggttatttaagccccaatcatcgccgtgaaattaccggcaacgaacatgttcgaaaagcttttttacaagcgattgacaaagaaacttttgcaaaagaaattttaggagatggctcgacagctttaaatggttttgtaccagctaattttgcaaaaaatccagatacaggtgaagatttccgcaaagaaaatggtgatttattgccatataatattaaagaagcccaagctaactggaacaaagcgaaagaaaattgggcaaatataaaattgaattggaactaa

SEQ ID NO: 1096 - DNA, 525 bp, Enterococcus faecalis
ctggaacaaagcgaaagaaaattgggcaaatataaaattgaattggaactaatctcaccggactcagcgattgccaagaaaaccattgaatttgttcaagggcaattgcaacaaaatttaccaggtttaacaatcaaattaaaatcattgcctttgcaaaatcgtttggatttacaaacagcaggtaattacgatttagcctttggaacatggacgcctgattatgctgaccccattaattttttagaattttatgactcgaaaagtggcttaaatacttctggttataacgattcggcgtatgatgcgggtctccaaaaagttagaaaagattacgccaatgaacctgaaaaacgctggaatgaattactaagtttagaaaaaacattaattgaaaaagatgctggtgttttacccttattccaaggagccattggttacttgaaatcagatcgcttacaaggcttgcaagtattttcttttggtcgcacagtatcctatcgtttagcttatgtagaagaataa

SEQ ID NO: 1097 - DNA, 258 bp, Enterococcus faecalis
gtttttcaaatgtttagctttctatgggcattaattgtcggaggaattattggcgcaattgctggcgcaattttaggaaaagacgtgccaggtggcattattggaaatattatcgtgggctttttaggaagttgggtagcatcactcttgttgccttctttaggaccagtcatcggcgggtttccaattatctcagcgttgctaggagcgattatctgtatcgctatttactcttttattgtaaaccgtaaggcgtaa

SEQ ID NO: 1098 - DNA, 264 bp, Enterococcus faecalis
acagcaccactggacccaaaattcacgccaggtttttctgatgttaaaatagccgtttttaaaggtgtcatgattgtttcaaaagcttccaaatatgcttctctggtcaaaaaaagattactttttaacgattccatgcttttcgcccccattagtttaattcaaagaataacaagggcacttatttttttcaactatcgtttaatgaataaaacggcgtattatgagagcagaatttcactcaccttgaacttaacatattaa

SEQ ID NO: 1099 - DNA, 1212 bp, Enterococcus faecalis
  misc_feature (1206)..(1206): Nucleotide 1206 is "n" wherein "n" = any nucleotide.
attaaactaatgggggcgaaaagcatggaatcgttaaaaagtaatctttttttgaccagagaagcatatttggaagcttttgaaacaatcatgacacctttaaaaacggctattttaacatcagaaaaacctggcgtgaattttgggtccagtggtgctgtctatgatcagcaacatgctgaaatggaagcgctcattcgaccattatggggaattggaccgtattgggttacttgtaaagatgatgttttaagagatgcttatgtggaaaaattaatcgcaggaactgatccgtcatccccagattattggggcgttattgttgattatgatcaatatattgtggaagcagcagcattatctttaactttattgcttcataagacatatttttggtcctgtttttctgagaaacagcaagaaaatatcatggtttggttaaataaagcacttggttgtaaaattcctaaaaataattggacgtttttcaaagtgctcattcgtctggcactcgagggatgtggacaagtgattaaccaagcggaactagaggaagaattggcgttgattgaatgcatgtatttaggtgatggttggtatatggatggtaaaactacgcaaagagattattatatttcgtttgcttttcattattatagtttgatttatgtcaaatttatgcgagaaagagatcctattcgtgcgaaacgttttacagaacgagccgttatgttcgcgcaggactatctgtactattttgatgaggagggcgaagcgttaccttacggacgtagtcaaacgtatcgatttgctcaaggagcatttttcgcagctttgatatttgcagaagtagaggctttaccttggggacaaataaaaacgctgttagcaaaacatttacactgttggatgcaacaggctattttcacttatgatggtcggttgtccattggctatcattacgaaaatttagtaatggcagaaggttataacgcaccaggctctccgtattgggcttttaaaacatttttgttgctcgcagtggatcaagaccatccgttttggcgtgctgaaccgctggcgataaaacgagaagaaaagcgtttgatagaaaagggaaacatgttattaatccatcctaaaatgaaaacgcatgtcctcggctatcctgcaggactatggcttgaaaatcactattcaccacgncggatt

SEQ ID NO: 1100 - DNA, 477 bp, Enterococcus faecalis
ataactatgactattccttatccagaaaagtatatgaagcctgaacttggtattgggaaattagctaattatcaaggtgtacaagcagatagtcttgtcgttggtgtcggtggcttaggtttcggtgtcggcgttcaagtaacagaagacgttgctaccacatataaagatgggcaattttatggtatttcatatgctaaaaattatgtagaagaaatcccttacggagatgtggaaaaagttggtaagtataaagaacacgaaatggtaccgatcttacgtaaaggggctatttgggtgaaagttgacgaagatgttttagcaggtgaaaatgcaaaagctttatcaactggaaattttggaaaagcaactattagttctgatccagctacgacaccatcagataccgtgattggtacatttaaaacaacagcatcagctggtaatttagcagttttacaaattaacttaccttaa

SEQ ID NO: 1101 - DNA, 882 bp, Enterococcus faecalis
atgggaaatgatgtaacagcaactttagaagcacgtgacctacaagaaattgataaggtcatttatcaagcaccacaggaggaacttgtggcgcgaaccatgtttaatgttaaaacagatatcaatccaggagcggaaacatacgcatataatgttatgactagaagtggcgctgcaaaaattatcgcaaatggtgcagatgatcttcctttagttgacattgatatgaaacgttatcaatcaccaatttttacaattgctgctggtattcgttatagtcgacaagaaattcgtcaagctcaaatgatgggaacttcaattgatgcaacaaaagcagaagtggcacgacgtactattgctgaaaaagaaaatagctttatttttgtgggagatcctaaagtaaaccataaaggtgttgcgaatgctgaaggtattcaagttattaattcacctaagaagtggaaagaaatgactagtgaagagattgttgaacaattacgtacatctcgagctaaaattactattattccaggatttaaaggatctagtctaaaattaatggttgctccagaacaatatgaagaattgaatcgtcgttatggtgaatatgatgcccgatcaattatgaaagttgttcaggaaaatggctggttttcatctattgagcaagtttatgatttaaaaggtgtaggtactgataattctgattcatttattatcatggatacaaaaccatcaacttgtgaaattttacttccagaagacatcgtgcgtttagaggttgaatggtcttttccaaattggaaagtaccatttgtagaacgttgtggtggtgcgttaattagaacgccatatgcaattgttcgtgtggatggtatttaa

SEQ ID NO: 1102 - DNA, 447 bp, Enterococcus faecalis
ttagaacgccatatgcaattgttcgtgtggatggtatttaaaaataaggaggtaaagattatgttagtacacaataaaggttcatatattagacatattggaaatgttcgattaattccaggtgtaaatgatttagataattcagatgctgaagaatttattaaaggtatggaattaccattaaataaatcgttggaaagattaggagaaattgagattttggaccatataacaaaaggaaaatcaaaaaaagcagttggttttactgaattgagtgccaataaagcagtagaatccattgctgatacgttcgatttagaattgttggaaaaatggttggaagaagagcaagcaaacaaaaatcgcacaactgtagtcaaagcaatcgaaaatcaaattgatgatattaaaaaccctgatgaagacagcgtagttaatccagaatag

SEQ ID NO: 1103 - DNA, 363 bp, Enterococcus faecalis
tccagaataggaagtggtactatgccaaaaagcacagttgaaaatgttaggttaacagctgcagaactagtaggggttaacaatgattctattaagttgtttattgatgatgcttggctagaagtagatgcattgccatttaaagaagaggttaaggagaaagcgtgtcgctatctcgcttgccatctagccgttttgaacaaccaaaatactaaatccgagcaagtaggctcgctaaaaaaagagtattcgggttttcactcaacttttaccgaccttaaaagaaccgtttatggtcaagagtatttacgtctttacaacgaatacgcaaaaaaaggttcattgagtttggttgtgatttga

SEQ ID NO: 1104 - DNA, 684 bp, Enterococcus faecalis
aagaaccgtttatggtcaagagtatttacgtctttacaacgaatacgcaaaaaaaggttcattgagtttggttgtgatttgatgaaagttactgagaataacaggattattaagctgattgatgaactaaatcagcttaataaatattctttgcagataggaatatttggggaagatgattcttttattgcgatgttggcccaagttcatgaatttggtgtgactattcgtcccaaaggtcgttttcttgttataccacttatgaaaaagtatagaggtaaaagcccacgtcaatttgatttgttttttatgcaaactaaagaaaatcacaagtttttagtaagaaataaaggtaaagatcagttagaattcgcatacatgttagcggagcaaataactattccagaacgttcctttattagatctacatttgacgagcaagcaaaggcttggtcggattacgccttaaaccttgtgaaaaaacttattgctggaaaaatgacagcagaagaattgacaaataaagttggtgctcgtatgcaaagggatattcaacgaattatcagaaatttatctgatccgccaaattctccaataacagtcaataataagaagtcaagtaatccattaattgacacaggaaaattaagacagtcagtgacttataaggtggtgaaagggtaa

SEQ ID NO: 1105 - DNA, 375 bp, Enterococcus faecalis
ggtggtgaaagggtaatgcaaagaatgaacttttctagtcttatagaaacttttgcggttgactttcagttagtgttaccttcagttgaaggtgctggtaaatacattcacggcgaatggtttcctactaacgaagaacccaaaaccgtttctggggcgattatcccatacgacaatcggacgatttatcaaagtggtggaacactcacatctagcgacaggcaacttgcttacgttggatcgattcctttaggttctaaaattattgacatgggaaaagagtacaaagtagaaagcgaagagccatatgcggaacactatgcagatgtgaacctttacagattaaaggcggtgaccaataatgccgcaaattaa

SEQ ID NO: 1106 - DNA, 483 bp, Enterococcus faecalis
ccaataatgccgcaaattaatggggcttttagttatgagcttttagctgatgagctaatagcaattgttaagaaatcaactggacttcaacttattgaaagtagcacagctggtccacagccagataaaccgtttttttcttatgaggtcatctcgccatatattccagtgactatagatgtcactgataatgaagtatttgaattagtagtgtctattaaatgtcatacagattctagtattcaggcacttaatttgtcagagcagttaagaaagcatttaaacggtttttctgtaaaagtagaccttcaaaactctaaaatagccttagtttcaacaacacaatctcaaaaacgagataatttcattagtattgattatgaacgtctggctggctttgatgctcgttttagagtacaagacagctacgttgacaatgctgtgattatagaaaatatagacatacaggaggaaaacaaatga

SEQ ID NO: 1107 - DNA, 1083 bp, Enterococcus faecalis
caatgctgtgattatagaaaatatagacatacaggaggaaaacaaatgattgaaaaaattacagatgttaatgtaaaaattgacataatgcatccacaacccattgttggattaggaaatccagcaatttttgttcaaggatctactcaaaactataaagaatatacaagtttagaaacattagcaaaagattttgctacaacaactactgtttataaaaaagcagaaataatttggaaacaggaaaataaaccacaaactattgcagtagtaacttttgtagcagatacccctactagtccagaacagccagatagcttaattgctggaagtggaattatcgccgcagctacaagttacttttataatgattggcattttgcattattagccaactttgttgaggcagatgctttggcactatcaaatttaattgaagaaaacgaatttaagtttttagtaattcagacagctacagttgacgaattaacagtttttacagggaacaatctaactatcggcttggttcatccgttagaagaatttttagatgctgcattaattggtaatactgcaagcttaacagtcggaagtgttacttggaaattccgacataatttagtagggattacacctaacacattaactacctctcaactacaagcgattgagaaagctaatgctattgcttatgtatcaaaagcgggaatcccccaaacatcagaaggaaaaacaatgagtggcgaatttatcgatgccctgcatggggatcactgggttaaatcaaacattgaaacgaatgttcagcgcttgttatcaacgacagataaattaacttttgattctaatgggattgctttattggatacaactgttgcaaatgttttggaaactgcatttaataacggaattgtagatattgtagatgaaactggtgttggaaattatagtgtgactgctttgggacgtcaagatttaaatccagatgatattgcagcacgaaactataaaggattatcatttaaatacaaacgttctggagcaattcacactgttgatgttactggaacaattgaagtctaa

SEQ ID NO: 1108 - DNA, 318 bp, Enterococcus faecalis
ctaatgcaaagcatgacaacttatgatgccaaagaagtatctactattattgacaatgtcgtccaattcggctttcaagatggcgatatggtatctttttcaaaagataattcgtatattgaagtaccaacagatgcccaaagacaatctagtgctgcgaacaacaacgataatttagggacttctacaattaacttgtctcaaaattcaccatgttacagacagctgatggctttagctaatggtcgtaaagaatttgcaatttctgtgacacatgcaactgacaaagcatgggcatcacaagcctatattgaataa

SEQ ID NO: 1109 - DNA, 369 bp, Enterococcus faecalis
gaggaatttatcatgacgaaaaaagatgaagtaaaagaattagaagtgaaaaataacattccagaagcagaaaaaaaaccatttaataagttcggaaaacaagaaaaacatactgttgaagatgtggaatatacatttcaattccctggaacacgtgcagctcaagcgattttagataactcaaaaggaccgtcaaatactttttctgacgttgcttaccactctcaacttatggactcagttattgttacaccaaaattgaactgggactattgggatgaacacgaaggatatcgtgaggttatggcattagccgacaatttgttcgtcgaatgcttaactagccatggaccttcacacacgggatgg

SEQ ID NO: 1110 - DNA, 1554 bp, Enterococcus faecalis
  misc_feature (1429)..(1500): Nucleotides 1429 and 1500 are "n" wherein "n" = any nucleotide.
agacttgcccaatatctttttcgctatatttggcggatgcatatttgggggagtgcggctcgtttggaaaaagagctacggactcaattatttcatcatttcacaaaaatggatagcatcttttatcagaaatatcggacaggtgacttgatggcgcatgcaaccaatgatttaaatgccatccaaaatgttgctggagctgggattttaacgtttgccgactctgtgattacgggaggaacaacgattatcgcaatggttctatttgtcgattggcgcttaacattaattgctttattaccgctgcctttattagccgtcacttcacgagttctaggttctaagttgcatgatgcctttcgagattcacaagctgctttttcagcgattaatgataaaacacaagaaagtattactggaattaaagtcattaaaacatttgggcaagaaaaagaagatcttgctgattttacagagaaaattgatgatgctatcgtcaaaaataaacgaacgaactttttagatgcactatttgatccgtttattacgctgattattggtgtttcttatgttttgacaattattattggtggtcgtttcatcatggaaggaacgattagtttaggtcagttggtctctttcattgcctatattgggatgctagtttggccaatgtttgcgattgggcgcttatttaatgtgttagaacgtgggaatgctagttacgatcgtgtgaacgaattattacatgaaaaaacgcatattatcgaacgaaaagatgccatcaaaacaatggcgcaagggacaatttcaatgaagattgattctttttcttatccaaaagaagagacggtggcgttggaaaatatccaattttcgttgcaagaaggagaaaccttggggattgttggcaaaacaggcgctggtaaaaccactattttgaaattgttgatgcgtgaatatgaccaataccaaggaacgatttcctttggaaaacataacattaaaaattacacattagatgcattgatgggtgcaatggggtacgtgccacaggaccattttctcttttccatgacggtacgagataacattcgttttgctaaaccacacttggaacaagcagcagttgaacaagcggcagcattagcatttattaaccaagaaattaaagcattccctgaaggctatgacacaatggttggggaacgtggcgtttcgctttctggaggacaaaaacaacggatttctattgcacgggccttgattgttgaaccagaattgttaattttagacgatgccttatctgcagtcgatgcgaatactgaagaggcgattttatcaaatctaaaagaaacgcgccaagaaaaaaccactattattacagcgcatcgtttaagtagtgtcatgcatgccaaagaaatcttantgttggatgaagggaaaattattgaacgggggacgcatccacagttactggctcacaaaggttggtatcancggatgtgggaaaaacagcaattaaaaacgaaaattgaagggagtgagagttaa

SEQ ID NO: 1111 - DNA, 1791 bp, Enterococcus faecalis
gagttaatggaagaaaagtatcaatccgaatggtccctagaaataccgatgaaagaacaattaacgattgttcagcgtttgtttcgttttgccaaaccgtttcgacgcatgttttacacagctattctctttgcatttggcttatcaattatcaatattcttttgcctagagtcattcaagtttttatggataattatttaacgcctaaaactgctacaatgcaagtgattctaacttttgctgctatttatttctttggtgtcattgtcaaaagtattgtttggtttttccaatggtatttgtattcgatggcttctttaaaaacgtatcaatatatacgagtgaaattatttgaaaaattacacactttaggtatgcgttattttgatcaaacaccagcgggttcgacggtgtctcgtgttacaaatgacacagaaacattgtttgaattctggtatgtattcctaatggtgattacaggaatttttgccgtaatctcgtcattttttgcaatgtttcaactcagtccagaaatctcattttattgtctaattttcttgccgattttattagttgtgatttggtattaccaaaaatttagttcaaaattatatcgcagtatgcgggaaaaattaagtcaattaaacaccaaactaaatgaatacatctctggtatgcaaatcattcaacaatttcgccaagaaaagcgtttggaaaaagaatttgaggaaaccaatgatgattatttaaaaacacgagtagcaatgattcgtatgaattcgttattattaagtcccatcattaatttgttgtatacgttggcgattgcattggccttaactatgtttggcatcgatgctttacattcacctgttgaagcggggatgatttatgcttttgtaacgtatgtccaagctttttttaatccgatgacgcaaatgatggacttcctaagtatctttacagatgggattgtcgcaggtagccgtattttaaaaattatggatacggaagaattaacgccgcaacaatcagtaggtgcgaatggggaaattattcgcgggaaaattgaatttcgcaatgttactttttcttatgacggcaaaaacgaagtattgaaaaatattagctttgtcgcaaatcccggggaaaccgtcgctttagtcggtcatacaggaagtggtaaaagttcaattattaatgtactcatgcgtttctatgaattttatgaagggcagattttaattgatgatcgtgacattcgtgattttcccatgacagaattacgggaaaagatgggcttagtattacaggacgctttcatgttttatggagatattgctggaaatatccgtttactgaatcccaatattacagatgagcaaattaaacaggctgcggaatttgttcaggcagataaatttattcacacgttacccaatacctatcatgcgaaagtcattgaacgaggagcgagttattctagcgggcaacgtcaattaatttcgtttgcacgaacgattgtgactgatcccaaaattttagttttagatgaagcaaccgctaatattgatacagaaacagaaggattgattcaagaaggattagccaaaatgcgtcaagggagaacgacaattgcgattgcgcatcgcctttcgacgattcgtgacgcaaacttgattttagttttagacaaagggcagattgtagaacgaggaacgcacgaaacgttactggcagaaggtggcctttatgcggatatgtatcagttacaaagtacggaagtttaa

SEQ ID NO: 1112 - DNA, 813 bp, Enterococcus faecalis
aaatggtatgatatgaagagagaaaaacaaactaggaagttaggtggaactgtgaagccagttatagtcaaaaatgtgcgaataggtgaagggaatcccaaaattgtggtgcccattgttgctccaacagccgaggatattttggccgaagcaacggcgagccaaacactagattgtgatttggtggaatggcgtttagactattatgaaaatgtcgctgatttttccgatgtatgtaatctttcacaacaagtaatggaacggttggggcaaaaaccgttattgttaacttttcgtacacaaaaagaaggcggcgaaatggctttttccgaggaaaattattttgcattgtatcatgaattagtaaaaaagggtgcgttggatttattggatattgaattatttgcgaatccgctggcggcagatacgttaattcacgaagctaaaaaggcggggattaaaattgttctctgtaatcacgactttcagaaaacaccgtcgcaagaggagattgtcgcgcggttacgccaaatgcaaatgcgtcaggcagatatttgtaaaatagctgtgatgccacaagatgcgacagatgtacttacgttactttcagcaaccaatgaaatgtacacccattatgcatccgttccaatcgttactatgtcaatgggacagttagggatgattagtcgcgtaacaggtcaactgttcggatcggcactaacttttggctccgcccagcaagcgtctgcaccaggccaactatccgtacaagtattaagaaattatttaaagacattcgaacaaaacaagtga

SEQ ID NO: 1113 - DNA, 639 bp, Enterococcus faecalis
tcgcgtaacaggtcaactgttcggatcggcactaacttttggctccgcccagcaagcgtctgcaccaggccaactatccgtacaagtattaagaaattatttaaagacattcgaacaaaacaagtgattcagaaggtgaaaaaagtggcaaagaaaaaaacacaacaaaaaacgaatgcgatgcgcatggtggaacaacataaagtaccatataaagaatatgaattcgcttggagtgaagatcatttaagtgcagaaagtgtcgctgaaagtttaggtattgaaaaaggacgaatttttaaaaccttggttacagtaggtaataaaacaggtccagtcgtggctgtcattcctggtaatcaagaattagatttgaaaaaattagcgaaagctagtggcaacaaaaaggtagaaatgcttcacttaaaagatttagaagcaaccacaggctatattcgtgggggctgttcaccaattgggatgaaaaaacaatttcccacctatttggctgaagaagctcaacaatattctgcaattattgtttctgcaggcaaacgtggcatgcaaattgaattagcgcctgaagcaatcctttcgctaaccaatgggcaatttgcggaaataacgacaaaagaataa

SEQ ID NO: 1114 - DNA, 243 bp, Enterococcus faecalis
atggattcagagtttgcttttaatatcagtgttcttgccagtggcagtacaggcaattccctttttattgaaaccaaccaaaaagaagtattagtagatgcgggtttaagtggcaaaaaaatcacttcactgttagcagaagtcaatcgcaaaccagaagatttagatgcgattttagttacacatgaacatcgggatcacattcacggcgttggcgtgttagcgcgaaaatctaagttagaa

SEQ ID NO: 1115 - DNA, 915 bp, Enterococcus faecalis
caacaattggtacactgcaacggacttggtaaaacaattaccaagcttggaggtgggctaatggattttaaacgaattgagtggattttcttcttagcatttttaggattaaatatctttttatttggaatttatcgggaaggtcaacaagaggagagcaacgtctcttcttccagccaaacagaatcgattgaaagtcggttggaaaaagataacatctcgtataaagggacactttcttcagaacgattggaaggttattatttaagtggcgaacaaaccaatttttctgctgctttaaaaatccaacgtgaaaagaataaaaattttttgagaaatgggctgcaaattgcggataatactttaacgagtgtacctagtaaaaactattttattgatcctaagaaaattgataaagatttaagtacctttttaaatgaaaaaaatgctttattattcggagacgaatatcaatacttaccagaattttctcatttaaaagagccgacggcagaaattgtggctgcacaattgtataaaggaattcgttttagagacgacacggcaaaattaagtattttagcagatacgtcaggtgaattatggaaaattagtaaatattcgcaaacgcacattgaaaatattgaagagttacgagacaaaacggatttatattccaatcgtgatgcgatagacacgctctatatgaataaccggattcctagtaattccaaaataacattcattaaattggcctattcaagaatttataaaattcgtgagaaaaatgtatacgttccagtctggtttgtaggaatttctactggtgaagattcagttgaaattgaacaggtgaatgccgtaagtaataccatcatcacaaataatactgtgccaaaggtggaaaaacattaa

SEQ ID NO: 1116 - DNA, 1326 bp, Enterococcus faecalis
agaggattggtgggaatgatgaaattatcagaatggattacaagaattggcttgattttgatggtcattttaagtatatatttttcagtcaatatctggctgaattctgccaaaaaaataccagaaatgaagtcgggaagccaagtcacaacagctgtcaatgaaaaagccattggcgatgtctatttacctttgcaattgattcgaataactgatggaaaagcgatgcaaagtaatcgtgaaacattaattagtaatgttcaaaatgatattaaaatggctacgtttggtaaattgacacaagttgtgacaaaaaatgcagagcaacttaagcgctacaaccaaatggaacaaggcattgaacttctttatcaaggtccctttttaatctcggactatgcttcgatttataatctatccattaattttactaactttaatgagttgacggaccagtattttacgaaaattcaattggattttaacgaaaataagatacgttttttagattatgatcaagccaacgtctatgaagcgcccatgactgtcaataaggcgcgcttaatgggaattatcaataaagagggattacaatatcaagacgtttccgaaaatacgctaaccaaacaagggcaatgttatttaaccaatgatatgaagttgaaaaagtacagttatatcttagcttcgcaaccagttactcgttttaggaatgcttttttcaatgaaacggaagatatccaaaccaatgaagacagtcaagacttaacctacacgagtaaagaagaacgattgtttgcagaagaaaaactgggaaaaattgattttaaagggaccttgccagaagagaataaacgggactcaatctataatcaaagcttttcttatgtaaaacgtttaggaaccaatatggggaatttgcgttactttgatcgaacgaaagatagtgtcaattatcggacttttgtggaaggtttcccagtgttcagtaatgatttaaaaggccaagtggatattcgcatcacgaacaacgatggtgctgcaccaagcgtaaccattaacacaagtgtgaatacgatccaagtgccgattccttcagaagaagaagtgacgctggaaagcacggaaaaattgattaagcgtttagaaacggctggtgctaaaaaggaaaaaattcaatcggctgttatcggttatacgtggcagacaattgaagaagtcaaacaagtcgttgatttaagtccggaatggtatgtcctttataacaacaattggtacactgcaacggacttggtaaaacaattaccaagcttggaggtgggctaa

SEQ ID NO: 1117 - DNA, 1857 bp, Enterococcus faecalis
  misc_feature (22)..(22): Nucleotide 22 is "n" wherein "n" = any nucleotide.
gaaatcctgaacaggagtaatncaggtatgaagaaaaaagttcactttcttcaatctgatcatttgaagattgctttatcatttattctgctgttactgattgcgattcaaatcattggtggctatgtcattcgtgaattggaagccactacaatttccgattttaaaaaaaatatggattcccaagttgtccaattgtcagacatgttaagtacgcagatgagcaacaaagatctcgtacgtagtgacgttgatgcaaatttaaaaaaagcgttatctgatttttcaaatgcagatatttctgaagcgagaattgtcgatgataaagggattattcgggcaaccaatgatttaaatcaacaaaatattattgggaaaaagaatgattatcgtgatttaaatgactttacgagtaaaaaatatcaagctttagataatgataaacgcgtgtatgtgaatgtccagccgattcaatcgcctactggagaaacagtgattggcgtcctttatgtgaaaagtaatttagaaaataaataccaagaaattaccaacacagcaagtatctttttcactgcttctattattgccgcagcaatctcgattattgtgactttactgattgcacgatcaatcacgaagccgattggtgaaatgcgcgagcaagccattcgaatcgctcgtggtgattacgctggaaaagtagaagtccatggaaaagatgaattaggccaattagcagaaacatttaatcaattatcagaacggattgaagaagcacaagaaacaatggaagcagaaagaaatcgtttagatagtgtcttaacgcatatgacagatggtgtcattgcgacggatcgccgcggaaaggtgattacgattaatgaaatggccctttcattattaaatgtaaaaaatgaaaatgtgattgggacctcgttattagagttgttagatattgaagaagattacacattgcggaagctgttagaagagccagatgaactgctgattgatcgctcaacgtctgatcgtgaagaagaccaaatgattatccgggtagactttacaatgattcgtcgggaatcaggatttattactggcttagtttgcgtacttcatgacgtcacagaacaggaaaaaaacgaacgggaaagacgggaatttgtttccaatgtttctcatgagttgcgaacgcctttaacaagtatgcgtagttatatagaggctttgagtgaaggagcttgggaaaaccctgagattgcgccgaatttcttaaaagtcacgttagaagaaaccgaccggatgattcgtatgattaatgatttgttaaatttatctcggatggactctgggaatacacatcttcaattagagtatgtgaattttaacgaattgattaattttgtcttggatcgctttgatatgatgattgaaaatgagcaaaaaaattacaaaatttgccgtgaatttactaaacgcgatttatgggtagaattagatacagacaaagtaattcaggttttagacaacattttgaacaatgcgattaagtattcgccagatggcggcgtcattacctgccgactagttgaaacacataataatgtcgtctttagtatctcggaccaaggtttgggcatccctaaaaaagatctcgggaaagtcttcgagcgtttttatcgtgtggataaagcacgtgcgcgagcacaaggtgggactggtttaggtttagcaatttctaaagaagtaattcgggcccataacgggagtatttgggtggaaagtacagaaggtgaaggatcgactttctatatttcactaccatatgaaccttatgaagaggattggtgggaatga

SEQ ID NO: 1118 - DNA, 276 bp, Enterococcus faecalis
cccattctcctgatgcaaacatgttctcaaacgggggaaaatattggattacccccggggaattgggtaatttataatttgccaaacatatcgaacaagggaggagtggggaactttatacaaccgtttgggttaagattatttggggatttgcgaccaatgaacgtaaccgtaagtcgtttaagagaaaaatttgaagatagtccaagtcatccaacgtatttattaactcgtcgtggggttggttattatttaagaaatcctgaacaggagtaa

SEQ ID NO: 1119 - DNA, 1590 bp, Enterococcus faecalis
tggcgttggtgggcacttactagtattatttgggagcccatgaatgaaaacagtaaacaatacgcgaaatttatagaagaattaacgattccttactatttcgtcaatcactcaactaacgaattaccttctctagcggggctttatgaagaagctagttatgttttaacccaagaattattacagaataaccataaaaaaattagttatttcgtcactaacccaaaatataaagaagcaattattgcaggctataaaaaagccttgtttgatgtcaatttaccctttagtaaagaaaatattttaactactatccctgctgatttcagtaatcagcttatcacagatgggattacgggtatccttactgatgactatacccaggctgtttttttggaacagcttttaaagcagagcggtttgcgaacccccgataattactctttactcgcaattaagcgaaaaattgatcgttcatttttacctgatcatatttcttccgtcttattagatacagagacgtttggtagcaagttagccttattattgcttaacaaacgcaaagaaaaaacagccttgattaatgaggctgaaaaattggtgctagatcacaaaaatacattaggcatgtctagtgttaatccacatagcaaaatgattgtagtgggtagtttaaacgttgataattatctgtattcaacaaatttaccacataacggcaaaacaaattttttgtctagctatgctaaattccccggcggaaaaggattaaatcaagctgttggcttaaccaaactgggccatcaggccaccttaattggttgtttaggctcagacacagatgcgaattacttatataaagaattagaaaaataccacgttacgacagatggtatcacacgtattcaagatactgagactggtcaagcttatatttatgttgagacaagcggcgactccatgatttcaatcttacctggtgcaaacacagcgcttacgcctaaaaaaatcgcacagcaaaaacacctatttatggatgccagtttttgtctcattcaaacagaaattcctttgtctgctgtagagaaagcttgtgaaatcgcccaacattcaggggtaccgattattttaaaaccagctgctattcatcatattccagtgaatatactagaaaaggttgattttttcattcccaatgaagatgaattattggaacttcaaccagatactggtacattagaagagaaagcggcgtacttcttagaaatgggcgtaaaaaatgtcattgttactttaggaaaaaaaggcgtgttattaaaaacaccccaagtgtgccactatttccctgcaacagaaaatatagctgtggatagcactggtgccagtgacagctttatcagcgcgctcgcctcctatctttcgaaaggttatccgactgaagcagccattcaaatagcaattcaggctgcaggattttcagtttctaaagaaggggtgattgattctttagttgatcacgtcactttggaaaattatttgataaaaaaagaacccgctctttttgctcatcgtaacacctgtatcgactga

SEQ ID NO: 1120 - DNA, 1515 bp, Enterococcus faecalis
ctaaggagtgagtctcatcaaaacacaagatgccataaaaacatttttactttcaaagaaaacacaaaaaaattggctgtctttttatacttagcaaaacaaacaaaccttgatttatctagtgttgcccgaaaattcgctctttctactaaaaatttatcaatttatcttcgtgaaattcaagaagacttagcaacccttcctgaaaataccttagagattcagatccatcacggaaaaatttcattacatacgacttccaatgattttctttcccactattttttattatttaattattactgtgtccattctactgacttcattctttttcaagcaattatcaaaaaagaaaacaattctgtctggaaagtgagtcaagaaactaattttagctcatcttacatttacaaacggttaaataacattaataaactatttggtttgtatggaatttccgtccatttttccccctccgcgagtaaagtgattacaggttctgaatttcaagtcctatatgcttttcttgatgtctactggaccatctttttaaataccttagccttaccacgttatacctctacttattttgaagatatactgacgcagcatattaaaccagaaattcttgaacgcttggaacacgcttctctactaaaattaaatttacttttacacatcgcaaaatatcgctttccatatacttgtgaagatgatctccaaaaagaatttgaagaacatccttatttaaggcttttctcagactcaaaacaaactattttttgttcccaatcaaatttttcagaagatcaacagcgggttgtagatatcattgcacccattgccattgataattttgattcagcaaaacgagccaaagatttactggctgctctaaatgaaatttcttgcccagaatatttctacgttgattctttattaaccaatttttgcgaagtttttcaaattccaaaaatgcgtgaatttgatcgtcattacttcttacttattttatttaaaaatattatctataaccaattatttatttcacagcaaccaaataccgcaattctagattttttagtcaataaaaatagtacttatcaaaaagatttacagaaaaaaatctatgctttttatcaaaacttttcagcgcattccccttatcagttaagatttaaggatcaggagaacccaatttggacatgtgaattgttgttacgaatttataagcactatagtccccgcaaaaaaattaaaattggtgttgcatattctcgcgatttttacattgctagctttattatgatgaaaatcaagcaagcatttagtgaggatattatttttgaacgaaccgatttttctggttgtgatattgtgattactgactatcccttatttgatttaccaaaagaaatagaccgaatttacattttagaagaagaattaacccgagaagattgggaactaattttcagtaaaataagtatcgccatttttgatttgcaatattaa

SEQ ID NO: 1121 - DNA, 195 bp, Enterococcus faecalis
attgtctttgaaggtaacatagaaaagaacagtaatatacaagcgacctacaaactattttctgtcagactaaaactggcagaagtggtttgtaagtcgcttgttttcattatggctggtgagacaggttggcgcttgatgtttgttttaatattgcaaatcaaaaatggcgatacttattttactgaaaattag

SEQ ID NO: 1122 - DNA, 327 bp, Enterococcus faecalis
atacgcggccattcgctggtgaagagtgtctacagtctttctgattatttggatacaagtaaagagtttatcaaagcatacccaattgataaaattgctgatgtacaaaccggctatattttaaaacggaatcaaggatatacagacatctcaaaatattatctctttaaagatgggacaggatttgaattagaagtctctgttgaccaattggaaaaggtcaaagatcccaaagactattcttcttttgtaaaaacatacgcaaaagaagtcacttttatagaaaaaagttttaaatttgagtctactgatgaggaatctcgatag

SEQ ID NO: 1123 - DNA, 576 bp, Enterococcus faecalis
aagcaaatggttcaagcattaccaagtaatattgggattcaacaagtcactttgaaagtggctgatttagataaaatggtaaacttttatacgaaaacaattggcttaaaacttttaaaacaaggagagggacgtgcttggctagcgccacaaggcaccaacgatgcaattcttgtcttaaaagaactaacagctggggaagaaaatcagggtaccactggcttgtaccatattgctttcctgctaccaacccgcaaagatttaggcaatatgttgctgtggcttttgcaggaaaatgtgcaaattggcgcagcagatcatggctatagtgaagccctttacttaagtgatccagaaaataatggcatcgaaatttattgggataaaccagaagaagtctgggatattcgtccaaatggtgaaattatcggtgtgacagaagaattagacggtgatagtttagctgcagaagctgacggtcactggctaggaatttccgaaggttctaaaattgggcacattcatttgaaagtggccgatttagatgccactgaaacgttctataaaaacttaggg

SEQ ID NO: 1124 - DNA, 645 bp, Enterococcus faecalis
acaaaattaaatgaatttactgaggaaattcgaaaggatgaacatattatgtcaaaatttactgaaatgatgaaaaaccgtcgttcaatctatgctttaggagaaaacttaccaatttcaaaagaagaagtaactgctttagtaaaagaagttgttagagaaagtccaacagcttttaactctcaaacacaacgtgttgtgttcttattcggcgatgctcacaaaaaattatgggcaatgactgaagacgccttaaaaccattaactccagcagaagcatttccaaacacacaagctaaattacaaggttttgcagctggtgcgggcacaattttattctttgaagatacagatatcgtgaaaaacttacaagatagcttcccattatatgcggataacttccctgtttggtctgaacaagcaactggtttaacacaagcgaacgtttggactgccttagcgcaagaaaatatcggcgcaaacctacaacactacaatccagttattgacgaagcggttgctgcagaatggtcaattcctgcaaactggaatttacgtgcacaaatggtcattggttccattgaagcgccagctggcgaaaaagaatacatggaagatagtgctcgttttaaagaattcaactaa

SEQ ID NO: 1125 - DNA, 945 bp, Enterococcus faecalis
ggtgaaagtatgacaacaattcgagaaattgcgcgcctttcaggatcttcagttacgactgtttcgcgtgtgattaatcatcatccttatgtttctgaagaaaaacgactgaaaatccaagcaattatcgatgagttgggctataagcccaatatattagcgagaaatcttagctttgggaaaagtaatacattaggtgtcatggttccttatacgaatcaaccttattttgatgctattttaagtgggattatccaccaagcatttcaacaagggatgatggtcagtttattaccaacggattatgataaagaagttgaaaaaagttacttggaaaaaatggccacgggtgcgtttgatggcatgattgttttgtcaaaggcaaatcctttaagtgtgtttgctccatataaagagcaagttgttttttgtgaaaaaatagaagaccctagttatgctagtatctatatcgatcgtttaaccgtttatcggcgggttttccaagcattgaaacaacaaggatgtagtgaagtggcaattacgattaaccgtgcaccagaaaaaagtacaagcgcacgctatttagttgacgcatatcaggaaatttatggagcgattcctgaaaatcggttatttaaggactgtttaacctatgaagatgggtgtgaagtaggacgtcactgtgggcaagatccaacgctccaagcggttgtgaccaacggtgatgaaattgccgcagggattcaagccgttattgaaagaccagtctttttagtgggacaggaacaaactttattaagtgaaattttaaatttttcaacaatctgtcatccattaatggaattaggggaaaaagccacacatttatttcaagaaaaacggccgaaaacgattcaattgacttctacatttattaatcgacaaccagatttttctttttcttag

SEQ ID NO: 1126 - DNA, 252 bp, Enterococcus faecalis
aaggcgcgcaatttctcgaattgttgtcatactttcacctcattactttacaaaattgagttaaataaggcacaatccctgtcccgtaatcaacaaaacgataaaaggtctcctgccaagcaaaagaaatttcctgaatatcctcctgctgtgtcaagtgccactccgttatctgatggtacggaatttcttgatgccaaatcttatagtattttttgggactatttaactgcagacttttggccgtcgtag

SEQ ID NO: 1127 - DNA, 195 bp, Enterococcus faecalis
ctgcagacttttggccgtcgtagtcaccgagacaaaatagtaatccataccaagtctatcgcttatctccactataacattcattttcatgccctccaatattttgatacacctagcttaccttatgaaacgcgtaccagagcaagaggaaaaataaaaaaagtgagaccatgttatactagatgtatcatataa

SEQ ID NO: 1128 - DNA, 345 bp, Enterococcus faecalis
aagcaaaggatgagtgcaatggaaactgttacagtagcaacaaaaagcgacttactaacaaatttgaacaagcaaacagatgaaatcattatctcgggggcacttgcacaagaaatttaccacttaaaaaaacaacaattaaccgaaacggaagaaatgggctttttagtgggcagccaaggtgctggctcatttttaacctatttaatcgagaagttatcctatataaattcggcgctatcgccagaagaacaaaaaattgaacatgcgattttgcgtttgtatgttattaaaaaattaactccagaaactactttattacgtctaaaacagttagattattaa

SEQ ID NO: 1129 - DNA, 552 bp, Enterococcus faecalis
tataattacctttattcaagttcccaccattgtcattatcgattaaccaatggtatattagaagtaacagataagtcattttatttgaaaaagtgtttgggaaatgtttggggaggaatgtttatgtgtcaaccgcaggaaaaaaagaaagaaatttctgttgctaagttacgttatcgttttgaagtaccaatgattatcattggttttgttttattgtttttcgcattggggttagttgccttattgatattgagtgatttgccgattcctgactggttattaattgtcttaattgcaccaattgcgccagtcattgctttttttaccattcgttatatgtacatggatactgcttctaacggagtggaaattacagaaaatcagttaccagaaatttattccttgtatattgatttggcaaaagaaatgggctttggcactaaaaaaattaaggatgccacgtctttatttaatcaacgggaatggtgtcttaaacgcttttgcggcaaaatgctctttacacagacgctatgttgtcattcacagtga

SEQ ID NO: 1130 - DNA, 678 bp, Enterococcus faecalis
ttgcaccaattgcgccagtcattgctttttttaccattcgttatatgtacatggatactgcttctaacggagtggaaattacagaaaatcagttaccagaaatttattccttgtatattgatttggcaaaagaaatgggctttggcactaaaaaaattaaggatgccacgtctttatttaatcaacgggaatggtgtcttaaacgcttttgcggcaaaatgctctttacacagacgctatgttgtcattcacagtgatttgttggatatcgcgtacaatacaggcgatttttcgctgattcgctttattttggcacacgagctaggacaccataaatgtgggcacactaatttatggcgactaatgttatccattattttgaaaccagttgcgttagataaaagttttacaagaacgcaagaatataccgctgatcgcgcaggtttatactacgccgaagaaggtgctttaagtatgatttatttattttcaggaaaatacatgggcagtcgtgtggatttagaagaatactttcacagtattgatttacatgatgataccatctggcttaaattgagtaacttcttatccgatcatcctgttggcttccgtcgaatgcaaacattgaaaaaagccaaagatactggcaattgggacgttcatgggaaatttttctag

SEQ ID NO: 1131 - DNA, 810 bp, Enterococcus faecalis
ttaccttatcccgtggctggtcacattaaaccaattattgaaccgttacataaaatgggcgcaacgggggccgagattagcggtcgcaatgatttattaattgatgggaaaaaattttctggcaatgccatgtatacaaaaaaggggaagatgtatactcatggtaccttgatgtatgatgttgatttggcagaagttcaacgtgttttaactgtttctaagaaaaaaattgaatcaaaagggacaaaatctgttcggggacgcgtaaccaatttacggccgtacttagacgaaaaatatcaacaattaaccattgaggaatttcgcaatcgtttactgatggagctctttgatgtcgaatctctaactgaaattgcggagaaagaatatgtcctaaccaaagcagatcaacaggaaattaggaaattggtcgctgaagtgtatggcaatgaagcttggatttttggtgaagcgcctaaatttacgatcaaaaaagaagaaaagtttaaaggcggcatcgtggatgcacgtttgactgttgaaaaaggtaaaataattgagttaacgatttatggtgattattttgccaaaaaagaaacaacggaaatcgttgcagctttattaggtgtggactatcagtattcatcaatttggcaagcattagcagcgtttaactttgaaaactactttgtaaatatcaccaaagcaacaatttgttcatttattggtggattaataaacgtgctgggacaaaagttaaagaatcttttgtcccagcacgtttatttaatgatggttggctcttgctag

SEQ ID NO: 1132 - DNA, 546 bp, Enterococcus faecalis
gttgcgatccgtggcaatgcactttgggcaaaccacgcaatcggcaaaagagaagaaagactcacggtaatgactactttttatccgatgtacgacttcacaaaacaagtcgttggtgatgagggagaggttgagctgttgattccagctggaacggaaccacacgattatgaaccaagcgcaaaagacttagcgaaaattactgatgcggatgtctttgtttataatagtaaagagctagaaacttgggttccgaatgttattgaaaacttggacacgaaaaaagtttcaatcgtggaagccagtcaatccattcaattgatgcaaggaacagaagaggaagaatctggcgaagaaggtcatgaaggccataaccattcccacgaactggatccgcatgtctggttagatcccgtgttagcgcaaaaagaagtaacagcgattcgggatgcgcttatcaaaaaatatcctgagaaaaaagccgtatttgaaaaaaataccgttgcttatttggaaaaattgactgcgttagataaggaataccaa

SEQ ID NO: 1133 - DNA, 198 bp, Enterococcus faecalis
aaagatgcatatcagttaaggagttttttcatggggaaaatcagtattgctattgacggaccagtttcgtcaggcaaaagtacagttgcaaaaattttagcaaaacaattgaattatgtgtattgtgacacgggtgccatgtaccgagcgattacgtatctggccttgcaaaatcaaatcggtcttcaccacgggaag

SEQ ID NO: 1134 - DNA, 189 bp, Enterococcus faecalis
gcagaaatttccgaaagatgttttgcgtctttcgagggatttcggcttattgatttttcgttagagattcgtcatcagtctaaatccaagttcttttgttctgattttaatataaaagaagaagcgcatttaaaaagatgcatatcagttaaggagttttttcatggggaaaatcagtattgctattga

SEQ ID NO: 1135 - DNA, 618 bp, Enterococcus faecalis
aaggaccaaaagaaaaaccaggttcgtgagccatgggaacaatcaatttatgaacctgatcaaaatggtggtgtttctcgtttagcaaaacgccaacagcaacgaggaaattcattatttctaactgttttagttattttgctattattaattattgccattccaattgggacttttttatggatgatgcaagacaagaaaccgaacgaaagtgctagcaaaaatagccagccatcttcttcattagtccaatcatcatcaaaagagaagaaaaaagaaagtacgtcaaaatcagtggaaagctcagaaccagcaagcagccaaccagctgaaaatacaacaccttcaagttcagatgctgctgcacagcaacaacaggaccaacaagcacaacaacagcaacagcaacaacaagagcagcaacaacaacaagaagctcaaaatcaacaacagcaacaagcgcagaaccaacaacctgtttatgataccgttcaaagtggcgaaggggcacgtcaagttgccgaacgtaacggaatgacattagaacaaattttagcgttaaatcctgggattgatacatctgtgttttatccaggacaaccattacgtattaaataa

SEQ ID NO: 1136 - DNA, 1017 bp, Enterococcus faecalis
ggacatttaattgaacaattagaacaacactatcacggaatgataatagtactttatacaaaaaattgtcaatcatacgcagcatccttaaatcaaaaaggcataaagacgatactttttgataagaaaactttgttgattacaacggcgatttcatacttgaagtcagcgccgttaatttttgtagataattattttccagaattggcaattttaaaaaaaaagcaagtagttatccaattatggcatgctaatggggctttaaaacagtttggctggggtgcttatcacacgaaacatagaagtagcaaggatcaaatcaggtttcaaaaagtttacgataaaatgaattattttatcgttaattcactaaaaatggaagcaatttttagaaacaattatcgtctcgagaatgctcaattttgtcattttggttcgccgcgtcttgcttatcttgaaaaattagaggtaggagaaacaaatcagaataataaagttttatatgcaccaacttaccgaaagggaatgaatgaaatgatgcttgtgataaatcaagcaataaaggctttttctgctatgccaaattttcatttttatatgaaattacatccatcaatccagttagatgccattgaactaccgagaaatgtttctatttgggaaaagcatatttttgaaagctttagtgaaataggctacttgattactgattattcgagtgtggtctttgaatacatgcatgttaaagagcaaccgaacattttatttttttgtccagatttagaaaaatacgcattaaatcctggaattgagcctgatttttttgaatatttaccaggaccgttagttgaaaatgaaaaacagttgattgtggcattgtcaaatttttcaataaatagttataaagataatattactagaattaacgaagaatggaatcaatatcagtcaaaagagaccattaataaaatagtagagttggtagagagaatcttggggggattttgtgaaaagtaa

SEQ ID NO: 1137 - DNA, 768 bp, Enterococcus faecalis
  misc_feature (311)..(311): Nucleotide 311 is "n" wherein "n" = any nucleotide.
agagaatcttggggggattttgtgaaaagtaaggtacgcactgaatatattgggggattaccagttgacgtattaacacatcaagaaattatggatgacttagaaagttatctcaaagctaaagagaaaatgattgtaactagcgttaatccgcagatttcattgttagcatttgaacatccagaagttaagttatatttgaaaagagcaactcatcggattgcagatgggataggtgtggtcaaggcatcgaagctaatgggtgggtctattcgtgaaagagttacaggaattgatgtcatggataattntttagagtatgcaaatcaacataaggaacgaatcttcttgtatggtgcaaagcaagaagtagttgaagcagcagctaaaaatattcaacgacaatatccagggattgttattagcggtattttacatggctatacgaagaaaaaacagcaagaaattgtggaacaaattaacaaagctgaaccaaggtttgtctttgtagcattaggttcaccgaaacaagagatttttttggaacaaacaattgatcacctgacagctaatgtatttttagacgtaggcggtacttttgacgtattagctggatcagtaaaaagagcgccagaattttatataaatcacaatttggaatggttatatcgttgtttgacaatgaagagatacgatcggttaatgcaaattcctaaatatatttatttgactattaagtatcggaacaacaagtctagggggcagtaa

SEQ ID NO: 1138 - DNA, 594 bp, Enterococcus faecalis
atgattattttgtttatttgggaaaatgacttagacacaactttttatatcgtgaaaatagagaaagatgagaagttcattttacgagtaccacctattcacaaactaagtaaatttgttcaaaataatcaatggaatagtttgatagaagaattaagaaaattgtcttcatatgaagtaactgagtacataattataaaaaaagcaatgcttttttcgtatctttttgaagacgataaagaaattgttatttcaaatcaaagtgagcggcatctaatagatcaaaatggcaaagaatggtttttaccaaaaggaaaagttgctgtaaatcaagaggtgctttcagaatatcttcgttttagtcattcagatgctgaacgttcatttgagcatcaggaacacatttttcgtttaacgaaaattaaattattaaaagataaaaatccgttaaaattgcaaaagcagttaaagcaattaaaaaaagctacaacaacgtctttctctataaaatctctgagtaagttattactaatttatactgctacagaaaataaaaaatttgatcgaaaaaccatcaaagtcaatcaagagtag

SEQ ID NO: 1139 - DNA, 432 bp, Enterococcus faecalis
cgaagaaatatcaaagtacaaatggaggtttttatgaaaaaaatacttacttacggcacatttgacctcctacactatggtcatattaatttgttgaaaaaagcgaaacaacaaggggactacctgattgttggactttcaacagatgcttttaatttagaaaaaaagaaacaaagttatttttcatatgaaaaacgtaaacaattattagaggcaattcgttatgttgatttagttattcctgaaactagttggaaacaaaaagtttccgatattgctgaatttaaaattgatactttagtcatgggcgatgattggcaaggggcttttgattttctagaagttgaaacaaccgcaaaggttctttatttgccacgaacgccagaagtatcaaccacacagataaaaaaagaattatattatagtgaataa

SEQ ID NO: 1140 - DNA, 186 bp, Enterococcus faecalis
acagaaaacaccgactttttttctactcatttcttcaagatctcctttataaagctgaatgtacctactagtctaacaaatcagcgaaacaatgctgatcaatctttgacttttgggaaggataatcttgaaaaaagtctccttgaaaaataccaaggagactttttattattcactataatataa

SEQ ID NO: 1141 - DNA, 1107 bp, Enterococcus faecalis
actagtaggtacattcagctttataaaggagatcttgaagaaatgagtagaaaaaaagtcggtgttttctgtctatttctgtttttcacattttttattattgttccaaaagtagaagctacagaagaaatgaagactaaatttacagtaacgcctgttttaccagaaaatcaagtgtcaggaacatctagttattatgatttaattctggcaccaaagcaatcttccactattgtcttagacataaaaaataagacagacgaaaaattgtccatcgtattgactctagcaaatgcatcaacaaatgataatggtttgattgtgtacaatgattttgataaaccacttgattcatcgttaaaggttccgctgacagacttggttactttagaaaatgaggaagtgagtgtgccgcctcatcaaacagtatcagcaaagatgaaggtgaagggacttgatcagcctatcaaaggagttgttttgggcggggtttatgcgcatctcaaagatgaaaaaacagaggaagagaaccaaacaacgggattaaccagtcgctacgggtttaatgttgcgattgccatgaggagtgctgcgaatgttcctttaacagaggtgaaccaactgaaattagcgaaagtaacacctacaattgctttaggagccaaatcgctaaaggcggtcattcaaaatccatatgctgctatttttccagaagttcgtttagaaggtcaagtgataaaaaaaggatcctctaaaaaaattgcacaacggacactaaaaaatgttcgctttgccccaaatagttccatgaattttcatcttgatttgggtaaacaaccgctagatgctgggacttatatatttacaggacgtgctattttacaacaagatgaacaacagtcttggccttttcaacaagaatttacgattaacactcgtgaagcaaaaaaattgaatcaagaagctacggtcaaatgggtcctacccacatggtggttaccgactttctacacgttgttagtaatcacaattggggcaatttatagtgtcatttggcgcaataattatcaaaaaacaagcgaaaaggagagtgagaataatggctag

SEQ ID NO: 1142 - DNA, 312 bp, Enterococcus faecalis
  misc_feature (286)..(287): Nucleotides 286 & 287 are "n" wherein "n" = any nucleotide.
tcacaattggggcaatttatagtgtcatttggcgcaataattatcaaaaaacaagcgaaaaggagagtgagaataatggctagttggttttggttgtctggcggtttagcggtcatttgttttatgtttttcctcttttctttggtgactagtatgagttttattcagcatgcaaaagagcccagaagtattctaaaagaaacgcttttaagttggttaatgcttttacttagtggtggctggattgcaatcggactattgttatatttttcgctaaagaatcttnntacaaaacgagcattcattggttag

SEQ ID NO: 1143 - DNA, 309 bp, Enterococcus faecalis
cacaaaaaattactagcttcaggaggtctctttgacttagaccagttagaagaagacattgccgaggcggaaaatcggatgggagaacctggtttttgggacaacacagaaacggctcaaaagctaattaatgaaaccaatagtttgaaagaaaaatatcaacaatttcatcagctctctgaggaaattgacgaattaacggtgatgtttgaattacaacaagaagaatatgatgcagagattcaagaagaattggaagaaagaattcatctcttgcaagaacgtttaacaacgtatgcgctatcctta

SEQ ID NO: 1144 - DNA, 1494 bp, Enterococcus faecalis
aacaaagacatggcgaggattacgttccaaaactacttccggatgtacaaaaaactagccgggatgactggtactgctaaaacagaagaagaagaattccgtgaaatttacaatattcaagtcattcaaatcccaaccaatcgtccaattatccgtgacgatcgtccagatttactttatccaaccttagaaagtaaatttaatgcagtggtggaagatattaaagaacgttaccacaaagggcaaccagtgttggtggggactgttgcggtagaaacgtcagaattactttctgataaattaaacgcagctaaaattcctcatgaagtattaaatgcgaaaaatcactttaaagaagccgaaatcattatgaatgccggtcaaaaaggcgcagttacaattgcaacaaatatggctggtcgtggaacggatattaaacttggtttaggtgtacttgaactaggtggtctagcagttatcgggacagaacgtcatgagtcacgtcgtattgataatcagttgcgtggacgtgcaggacgtcaaggggatccaggggtttcacaattttatttatctttagaagatgacttaatgaaacgctttggttcagaacgaattaaaacattcttagaacgaatgaatgtgcaagaagaagatgcagttattcaaagtaaaatgtttactcgccaagtagagtctgctcaaaaacgtgtggaaggaaataactatgacacacgtaaaaatgtcttacaatacgatgacgtgatgcgcgagcaacgtgaagttatttatgcgcaacgacaagaagtaattatggaagaaaatgacttgtctgatgtattgatgggcatggtaaaacggacgattggccgagtggtggatagccatacacaattagaaaaagaagaatggaatttagatgggattgtcgattttgcagcctcaacacttgtccatgaagatacgatttctaaaaaagatttagaaaataaatcagctgaagaaatcaaagactacttagtggcacgtgcgcaagaagtatttgaagaaaaatctcaacaattgaatggccaagaacaattgctagaatttgaaaaagtagtcatcttgcgtgttgtcgatactaaatggacagatcacattgatgcaatggatcaattacgccaatctgtcgggttacgtgcgtacggtcaaaacaacccattagtagaatatcaaacagaaggttattctatgtataacaatatggtgggttcaatcgaatatgaagtaacacgtttattcatgaaatcggaaattcgccaaaatgtccaacgtgagcaagtagctcaaggacaagcggaacatccagaaacagaacaagatgcagctgcacaaagcaacacaagtgcgaagcgtcaacctgtgcgtgtagataaaaaagtgggccgtaatgatttatgcccatgcggaagtggcaaaaaattcaaaaattgtcatggaagaaacgcttaa

SEQ ID NO: 1145 - DNA, 1122 bp, Enterococcus faecalis
ttgaaaggaacacagataccaatggcaaattttttgaaaaaaatgatcgaaaacgataaaaaagaattaagacgattagaaaaaatcgccgataaaattgatgcacatgcaagtgcaatggaacaactaagcgatgaacaattacgtgaaaaaacagatgaatttaaagcccgttatcaaaaaggggaaaccttagacgaactattaccagaagcgtttgcggttgtccgtgaagctgctaaacgagtactaggtttattcccgtaccgtgtccaattaatgggtgggattgtgcttcatgacgggaacattcctgaaatgagaacaggtgaagggaaaaccttgactgccacaatgcctgtatacttgaatgcactatctggcgaaggagtacacgttgttacagttaatgaatacttagcaacccgtgactctaacgaaatgggagaattatataatttcttaggcttaagcgttggcttaaacattaactctaaatcttctgatgaaaaacgtgaagcgtataactgtgatatcacttatagtacaaataacgaattaggatttgactatttgcgtgataacatggttgtttatcgcagccaaatggttcaacgtccattaaactatgcaattgtcgatgaagtggattcaatcttaattgatgaagcaagaaccccattaattatttctggacaagctgaaaaatcgacagcactttatacgcgtgccgataattttgtcaaacgcttaaaagaagatgaagattacaaaattgatattcagtctaaaacaattggtttaacagaagcaggtattgaaaaagctgaacaaacttttggattggataacctttacgatattgaaaatacagcattaacgcaccatttagatcaagcgttacgggcaaactatatcatgttactagacattgattacgtggttcaagacaataaagtcttaattgttgaccaatttactggtcgtatcatggatggtcgtcgttattcggacggcttgcatcaagcgattgaagcaaaagaaggtgtcgaaattgaagatgaaacaaagacatggcgaggattacgttccaaaactacttccggatgtacaaaaaactag

SEQ ID NO: 1146 - DNA, 231 bp, Enterococcus faecalis
cttcccccccattgcctgtgtgaaaagccgattgaaggaattgctaccctaggtgctttacaacatcaatttattccgccaaccattaatgtggaaaatcaagatgaagcaattacggtgaacgttgttttaaacgaaagcaaagagcataaatttgattatgctttaagtaactcgctaggctttggtggccacaatgcagttatttgcttaaaacgctgggaggattaa

SEQ ID NO: 1147 - DNA, 507 bp, Enterococcus faecalis
aacgctgggaggattaacatgcagttagaagaagtaaaagcactattaacacaatttgatcaatcaactttaaccgaatttgatttacgagaaggctcgtttgaattatatatgaataaaaatacagtttctgggcgaagtgccgtagaaccagtggcgcaaccacaagaaacaccagtagccgctagtggtgtgtcagtgcctgttgaaacagtttctgtcgttgaagaaacgccaactaatacaccgacagccaatgaaaagacagaagaaattacgtcacctattgtaggaatcgtttatttacaaccagcaccagataaagagaactttgtcaaagtaggagacactgttaaaacgggtgacgttgtgtgtatcgttgaagcgatgaaattaatgaatgaaattacggcgacagttgacggtgtgattactgaaatattagtcaacaatgaagatgtggttgaatttggtcagccgctattccgagttgctaaaggagaataa

SEQ ID NO: 1148 - DNA, 429 bp, Enterococcus faecalis
aacatgaaattaacaattacagaaattcaagaaattttaccacatcgctatccctttttattattagatagtgttgaagaagtcattcccggggaacgcgttgtagcgaaaaagaatgtaacggttaatgagcaagtttttcaaggtcattttcctgggaatcctgttttgccaggagttttaattattgaatcgttggctcaagcaggcgccgtggcattactttcaatgcctgaattcaaagggaaaacggcatactttggtggattagataaagcaaaatttagacaaaaggtaacaccaggcgacacattaattttagaggttgaacttttaaaagtccgcgcttctgctggaatgggtaaaggtgtggcaaaagttaatggaaaaaaagttgccgaggctgaattaacctttatgattggatag

SEQ ID NO: 1149 - DNA, 1374 bp, Enterococcus faecalis
aaaatgttttcgaaagtattaatcgcaaaccgcggagaaatcgctgttcgtattattcgtgcctgtcgcgaattaggcgttcaaacagttgctgtttactctgaagcggatcaagaagcgttacacacacagttagcatatgaagccatttgtattggaccggcgaaagcaactgattcttatttaaatgttcaagctgttttaagtgcagcgattgttaccaatgctgaagcgattcatccagggtttggtttcttatctgaaaatagtcaatttgcttcaatgtgcgaagaatgtaacattacttttatcggtcctaaagcagaaacgattgatgcaatgggcaataaaataaacgcacgtcaactgatgcaaaaagccaaggtacctgttattcctgggagtgatggcgtcattgattctgtcgaagaagcgttgacgattgctgaagaaattggttacccagtgatgttaaaggcagctgctggtggtggcggaaaaggaatccgaaaagttctttcaaaagaagagttaccgaaacactttacttcagcgcagcaagaagccaaagccgcatttggtaatgatgatatgtatttagaaaaaattatttatccagcacgtcatatcgaagtgcaaattttaggtgatcaatatgggcatgtgattcacttaggggaacgtgattgctcactacaaagaaataatcaaaaagtgttagaagaatcaccatcgattgctatttctgaagaaaagcgtcagatgttaggcgaaacggccgttcgagcggcacaagctgtgcattatgaaaatgccggaaccattgaatttttgatggatccagctggcgacttttatttcatggaaatgaatacccgcatccaagtcgaacatccagttacggaaatggtaacagggattgatttagtcaaagcacaattagaaattgcttcaggtgaacctttaggctatacccaagaggatgttatcatgagtgggcatgcgattgagtgccgaattaacgctgaaaatcctgcctttaattttgctccttcaccaggtaaaattcaaaatctcttgttgcctagtggtggaatgggcttgcgtgtagacagcgctatgtattcagggtattcaattccgccttattatgattcaatgattgcaaaagtcatcgtacatggtgaaaatcgttttgatgccttgatgaaaatgcaaagggctttaaatgaaattgtaacagaaggtattattacgaatgccgaattccaattagatttaattacacatgacaatgttttgacaggtgactatgacacaagctttttacaagaaacatttctaccaaattgggagccagaaagcaatcattaa

SEQ ID NO: 1150 - DNA, 885 bp, Enterococcus faecalis
aatacgaggagtaagcaaatggcattatttaaaaagaaaaattacattcgcattaatccaaatcgtgctcatgcaaatgatgcatcaaagaagccttctgttccagataatatgtgggcaaaatgcccttcttgtaagcgaacactgtatacaaaagaaatgggtgcagaaaaaatctgtccgcattgtggctatagttttcggattggtgcatgggaacgattagcgataaccgttgatgaaaaaagtttccacaattgggacagtgaattagtgacaaaagatccactaaattttcctggttatcttgaaaaaattgaaaaaatgcaagaaaaaactgggctagatgaagctgtcttaacgggagaagcaacaattgaaggacaagctgttgcaattggaatcatggacgctaattttatcatgggcagtatgggaacgattgttggtgaaaaaatcacacgcttgtttgagcgggcgacagaaaagcatttaccagtagtgattttcactgcatctggtggtgcccgtatgcaagaaggaattttttcattgatgcaaatggcgaaaatttcggccgctttgcaacggcataacaaagcaggcttgctgtatcttacggtattgactgatccaacgactggcggtgttaccgcaagttttgcgatggatggcgatattattttggcagagcctcagagtttaatcggttttgctggccgccgtgtaattgaacaaacgattcgtcaagagttgccagatgattttcaaaaggccgagtttcttttagaacatggttttgtagatcagattgtgccaagaaatcttttgcgtcaacgattgagcgacttgttacgtttacattctttggaagggtggcgctaa

SEQ ID NO: 1151 - DNA, 831 bp, Enterococcus faecalis
gcgacttgttacgtttacattctttggaagggtggcgctaacatggaaaagaaaacagccaatgatgttgttaccttggcaagagcccaagatcgtttgacaactttagaatatatagaagcaatttttgaggactttttagaatttcatggggatcgttactttgccgatgatttagctgtagtcggtggtgttgctactttgcaagggaaaccagttacagtggtaggtatccaaaaaggtcgaaatctaccagaaaatattgaacgtaattttggttcacctaatcctgaagggtatcgcaaagcgttacgtttaatgaaacaagcggaaaaatttaatcgcccagtcattacctttgtgaacactgctggtgcctattgtgggattggtgccgaagagcggggagaaggggaagccattgcgcaaaacctgttagagatgtctgatttgaaagtgccaatcatttcagtcatcattggtgagggcggtagtggcggtgctttagctttagcagtcgcagatgaagtttggatgttggaacacacgatttatgcggttctttcgccagaaggtttcgcctctattttgtggaaagatggcagtcgtgcgaaagaagcagcagaattgatgaaaatcacagcgacagagctgaaggaattagctattgtagataaagtaattccagaagttatgaacggtcagcctctggaacaagcaaaaattaatcgcatgttacaaaaagcgttcatttcaaaattaactgaattagctaaattagatacggaaacgttactagaaaaaagataccaacgttttcgcaaatattag

SEQ ID NO: 1152 - DNA, 315 bp, Enterococcus faecalis
gcgaaaactttttatttggagggatttattgtgttaaaaccattaggcgatcgcgtcgtaattagagtcgcgaaagaagaagaaaaaactgttggaggaattgttcttgcatccgttgcaaaagaaaaaccacaaacaggtgaagttatcgcagtaggtgaaggtcgtgtgcttgaaaatggcacaaaagttccgatggaagtaaaaattggtgacacagtaatgtttgaaaaatattcaggaacagaagtgaaatacgaaggcgtagaatacttaattgtatcagccaaagacattattgccactgttgaataa

SEQ ID NO: 1153 - DNA, 549 bp, Enterococcus faecalis
tcttccaattcaatttccttagcaattgttactccatcgttagtaatcaatggtgaaccaaatgatttttctaaaacaacgttacgacctttagggcctaatgtcactttcactgtatctgctaatacatctactccgcgtagcattgctgcacgtgcatcttctgcaaatttaatctcttttgccatgatttcttcacctcataatttttttcttctattatattattctgtaaaagttgtttattattcaacagtggcaataatgtctttggctgatacaattaagtattctacgccttcgtatttcacttctgttcctgaatatttttcaaacattactgtgtcaccaatttttacttccatcggaacttttgtgccattttcaagcacacgaccttcacctactgcgataacttcacctgtttgtggtttttcttttgcaacggatgcaagaacaattcctccaacagttttttcttcttctttcgcgactctaattacgacgcgatcgcctaatggttttaacacaataaatccctccaaataa

SEQ ID NO: 1154 - DNA, 1638 bp, Enterococcus faecalis
ggtgaagaaatcatggcaaaagagattaaatttgcagaagatgcacgtgcagcaatgctacgcggagtagatgtattagcagatacagtgaaagtgacattaggccctaaaggtcgtaacgttgttttagaaaaatcatttggttcaccattgattactaacgatggagtaacaattgctaaggaaattgaattggaagatcattttgaaaacatgggcgcaaaattagtttcagaagttgcttctaaaacgaatgatattgctggtgacggaacaacaacagcgactgttttgacacaagccattgttcgtgaaggcttaaaaaacgtaactgctggagccaacccattaggtattcgtcgtgggattgaattagcaacaaaaacagcagtagaagaattacacaatatttcatctgtagttgattcaaaagaagcgattgcacaagtcgctgctgtttcatcaggttctgaaaaagtcggccaattaattgccgatgcaatggaaaaagttggtaacgacggcgtaattaccattgaagaatcaaaagggattgaaacagaattagatgtggttgaaggaatgcaattcgaccgcggttatttatctcaatacatggttactgacaacgataaaatggaagctgttttagaaaatccatatatcttaattaccgacaaaaaaatctcaaatattcaagatatcttacctttattagaacaaattctacaacaaagccgtccactattgattattgcggatgatgttgatggggaagctctaccaacattagtattgaacaaaatccgtggtacatttaatgttgtcgcagtaaaagcgccaggatttggtgaccgccgcaaagcgatgcttgaagatattgctattttaacaggtggtacagtaatcactgacgacttagggttagagttaaaagacacaactattgaaaacttaggaaatgctagcaaagtagttgtcgacaaagataacacaacaattgtcgaaggtgctggttcaaaagaagccattgatgcccgcgttcatttaattaaaaaccaaatcggcgaaacaacgtctgattttgatcgtgaaaaattacaagaacgtttagctaaattagctggtggggttgctgtcgttaaagtcggtgctgcaactgaaacagaattaaaagaattaaaattacgaattgaagatgcattaaacgcaacacgtgccgctgtaaaaaaaggcatggtttctggtggtggtaccgcactggtcaatgtaattggtaaagtcgctgcgctagaagctgaaggcgatgtggcaacagggatcaaaattgtcgttcgtgcattaaaagaaccaatccgtcaaatcgctgaaaatgctggttatgaaggatcagtgattgttgacaaactaaaaaatgttgacttaggtatcggatacaatgcagctaacggtgaatgggtaaacatggttgaaaccggtattgttgaaccatcaaaagtaactcgttctgccttacaaaatgcagcttctgtgtcagctttattattaacaactgaagcatttgttgcagacaaaccagaaccagttgcaccagctcctatgatggatccatcaatgggcatgggcggtatgatgtaa

SEQ ID NO: 1155 - DNA, 399 bp, Enterococcus faecalis
ccgcggtcgaattgcattccttcaaccacatctaattctgtttcaatcccttttgattcttcaatggtaattacgccgtcgttaccaactttttccattgcatcggcaattaattggccgactttttcagaacctgatgaaacagcagcgacttgtgcaatcgcttcttttgaatcaactacagatgaaatattgtgtaattcttctactgctgtttttgttgctaattcaatcccacgacgaatacctaatgggttggctccagcagttacgttttttaagccttcacgaacaatggcttgtgtcaaaacagtcgctgttgttgttccgtcaccagcaatatcattcgttttagaagcaacttctgaaactaattttgcgcccatgttttcaaaatga

SEQ ID NO: 1156 - DNA, 549 bp, Enterococcus faecalis
gtaaatacttgttgtgagttattaatgacgattcgcaagcagtcagatttaccgatttggttattttctcggacagaagtaattagtaaagtcaatcgaattatttatttacaattaggtgcagatggcgtttttgattattcttatgatcgtcaagaatgcatgttaagcatgagtaatttattgcaacgtgtaaaaagacgtttttatcctaaattagctattgcaaacgaggaacaaacagttactaagaatctttctgagagattgtatttaattgcgccaaatttgagtgtttgcttgggaagtggagaagaaattcttttaacaaaattggaatttttcacaatagagtatttatacaaacacgcaggacaaacaattacatatgaagaactctacaaaaatgtctggaaagatactgcgaatgaacgaaaatatcgtgtcgctaatgtgattttccatttgcgcaaaaaaattgaacaagatgtgaacaaaccacaatatatcaaaacaattcgttcaaaaggctatatgttaacggtgtaa

SEQ ID NO: 1157 - DNA, 801 bp, Enterococcus faecalis
acaagatgtgaacaaaccacaatatatcaaaacaattcgttcaaaaggctatatgttaacggtgtaaaaggtacgaaggaggagaaaaagatgtggcaatttttgactaaaaacaatgaagatgaggagtatgagaagatgccagattttgaaaatgaacaatcgatgaaagcacaaccaacggtaacagaagaagcaatctttgatgacgaggtcgtttatgcaaaagagcaatccgcaaaagtaaaacaggtccagcaacaagtgccgactgaactgtcagaagagtcattttcttttgttgaaaaactagaagaagaaaatcaactatatcagcaatccattaaaaagctaacggagcaattattaatgcaaaccaatgaagtggaagcattacaaaaacaagtagtcgaaaaagatgttcaacttaaacatgttaaagaaacattaagtgataaagaaacaactatcacttctttacagaaacaattgtctgaagaaaagatgcaacagagacagaccagtgaagagaatttagacacagccgttacgctttctcaaaaagaaattggcgaagtgttattagaagccaaacgtcaagcaaaagaaacaattagtcaagccaaccaacaagttgcaacagttcatgaagaaatggaacaacgtttagcaactttaacacgcatgaagcaagtggcaagagagtaccaagcttattgtgaacaaatgcagacaatcaagaatgaatcaacaggaacgtaccaacagatagagcagttattagcagaaataaagaggtaa

SEQ ID NO: 1158 - DNA, 1560 bp, Enterococcus faecalis
aggagaaatgcgatgaaaaaaagaaaggcaagatatttgaagttggtatgtattggaattttagggatttatgcgggcgccagttactacaattcggaaccattaatcgctcaagaagagaccgaaacgagggacgaaagtcgacagctatcgctggaagaaaaaagagcggaccaagccaatcaagaccaaggaacccttacttcttcaacgctgaacgaaacaataataagttcgtctgaacaacaagaaagttcaacacaaaatgacagcagtgaccatcaggaaaataatgtggaaccattagaatctgaaaatagtttaccgccacaagaaaagacaattgctagtactaaaccaaccgaatcgttacaaaatgagcaaccagtatctgaagagcgtaaagcgctcactgagaagtcacctcataatcaggaaccacaaaattctacattaactgaaaagaccaaagagccgttggtacattcagaggtagacaatagtcaagaaaaggaaaagcaagcaggaattcaacaacaagccgaggcaaattttgttgtccaagagaatgcttctacttctgagtttattagaaaaatcggtgaagaagcacgagttattggtcagcgacatgatctatacgcttctgtaatgatagctcaagctattttagagagtggctcgggcaatagtgcgttagcggcggcgccaaattataatttgtttggcattaaaggagcttaccatggtcaaagtgtcagctttcccacacaagaagatgatggtaaagggaagatgaccaccattcatgccgattttcgtcagtacccatcctataaagagtcattaacagactatagtaaattaatcatcaatgggctggcgggtaatccaacgttttatcacggcgttttgaaagcaaacacgacgaattatcagcaggcaacaaaatttttaacaggtcgttatgcaacggatacatattacgataaaaaattaaacgcgttgattgaaacctatcaattaactgaatacgatcaagaaaagaagaaaccagtagtgactaatttggcagaagaaaagaaaccttcgtttgataaggaagcagtcaaagaacagctaaaaaaagaagcagtcgtctatgaagtaagcaaaggagattctctcgccaccattagtcagacgtttggtgtgtcagcaacagccatcttaaaacaaaattcaaagactcaagaaatgttttatattggccaaaagatcacgattcctcaacatacagcggcgacttctctagaaccgaaagaacaagcgttacttcaatcactaataatcagtaaatcggtgactaatgctttgaagacagcagagcaatcaaatggtaaagcgaatgactcaaaaacagcgtctactgagtattatgaagtaaaaagaggagagacactcgcaaagattgctaaaaaaacgggctattccttaaccgccctcaagcaggcaaatgacttaacgtattctgtattaaccgaaggacaaacgatagcacttcctaagctaaaggactaa

SEQ ID NO: 1159 - DNA, 198 bp, Enterococcus faecalis
  misc_feature (10)..(186): Nucleotides 10-26, 29, 31, 34, 38, 122, 142 & 186 are "n" wherein "n" = any nucleotide. 1               5
gaaaaagagnnnnnnnnnnnnnnnnnggngnggngggngggggggggggtggggggggggggggggggtggtggtttttttggggggggttggtttgggggtggtgggtgtgtgggtgtgtngtggttggtgttttgggttnggttgtttgtgtggttggggtgttgtgtgggttttggtggtttngtttgggtgggc

SEQ ID NO: 1160 - DNA, 480 bp, Enterococcus faecalis
atgggagaaaaagtgtatccaatgactcttgaaggaaaagaaaaattagaacaagagctagaagaattaaaaacaattaaacgtaaagaaatcgtagagcgtattaaaatcgctcgtagctttggggatctttcagagaactcagagtatgaatcagctaaagatgaacaagctttcgttgaaggacgtattacaacgttagaaaatatgattcgttttgcagaaatcatcgataatgatggcgtggaccaagacgaagtttccatcggtaaaacagttactttccaagaattgcctgatggagaagaagaggaatacacaatcgtaggaagtgccgaagccgatccattttctggtaaaatttctaacgattcaccgattgcgcaagccttaattggtaaacaattaggcgaccaagtgattattgcaacacctggtggcgacatgacagttaaaattacaaaagttgaagcaaactaa

SEQ ID NO: 1161 - DNA, 756 bp, Enterococcus faecalis
atgacagagggaggaggcaaatctatgaataacccttggcgcttttttatcgtcgcagaagcattactttttattctggcgttatggcaaattgtacataatcctggattagctgttttattaacaattggcgttttacttgtggcctacgtttccaggaaagcatctaaaacacattttaacaactttcaattcgtcctcggcgttgtttttattgtcattggtgcaatgaatagcacggctgtttggtttatgttgatttttggcgtactctttatcggcttaaaaggctttgagatttcaggcgtggatatagctgagcgagcaccttggcgaaaaaaacaaatgattatggtggagacggcggcaaaagaacctaaaaatggcaaacggtttaaacgccgctggtttgccaacgaacgcattggtaacaatatctatgaatgggacgatatcaatattgatttaatctctggggacaccattattgatttaggtaatacgctactaccgaaagaagacaatattattattattcgtaaaggttttggccgcacgcgaattctagtgccgttaggtgtagctattttgttagaacattcaactttttacggaacggtacgttttgaagaagaaaaatatcaattgaaaaacgaatcattaaaaatttacagcaatgattatgataccaatcttcgtcgtttgaaaattatgacgaacactttagtaggagatgttgaggtgatccgtgtatga

SEQ ID NO: 1162 - DNA, 1116 bp, Enterococcus faecalis
ggtgatccgtgtatgaccgatcggatttcaagacgcatgatttcattatatgcgtcccttagcacctttattgttatcttaattacattgttttcatattttcattcgattaaacaaaaccggtggttattagagcttcttcagagaaaagtcttttatttaccactaattgtgcacattgttctcatatccttactaataggcttattgacctttttactgatttcattggttcaaaaagggcaatatggacggattgaagaaaaacttcggttattggccaacggtaattatgaaagtccagtcttaaacaaaccaacgaccagtgaaaatcaagaccattatctaaccgaagtcgaacaagatatttggtcgattaaaaataaattattagagatgtctaaagaattgcaattattaaacagtcgaccgcaattaatggatgggcaaacaaaagaagaaattttagagaacgagcggcatcgtttggcgcgggagttgcatgattcagtcagtcaacaactttttgcagccatgatgatgttgtctgcattaaatgaacaagcacaacgaacagaaaccccggaaccatatcgtaaacaactagccatggtggcagaaatcattaatgcctcccaatcggaaatgcgcgcgctactattgcacttgcgtcctatcagtctagaaggaaaaagtttgcgtaaaggtattgaacaattactgaaagaactacaaacaaaaattaaaattgaattgatttgggatgttgaagatgttcatttaaatagcagcattgaggatcatcttttccgaattgtgcaggagttactttcaaataccttaagacatgccaaagcaaaggaattagaggtatacttacaccaagtcgataaaaacgtgttattgcgtattgttgatgatggtgtcggctttgatatgaaggaacaaagtaataaagccggtagttatggcttaaataatattcgagaacgtgttgtcggcatgggcggtacagttaaaattattagttttaaagggcagggaaccagcgttgaaattaaagttcctgtcataaaggaggaaactgcaagtgatcaaagtaatgttagtggatga

SEQ ID NO: 1163 - DNA, 648 bp, Enterococcus faecalis
aggaggaaactgcaagtgatcaaagtaatgttagtggatgaccatgaaatggtccgtttaggcgtttcatcatatttatctattcaagaggatatagaagtcgtaggcgaagcagaaaacggtaagattggctatgaaaaagcattggaactacgtccagatgttattttgatggatttggtaatggaagaaatggacggcattgattcaacaaaagcgatcttgaaagattggccagaagccaagattattattgtgacgagttttattgatgatgaaaaagtgtatccggcgattgaagctggtgcagcgggctacctattaaagacatcaacagcacatgagattgctgatgcaattcgggcgacttatcgcggagagcgtgtgttggaacctgaagtgacgcataagatgatggaacggttaacaaaaaaacaagagccggtgttgcacgaagatttgacaaaccgggaacacgaaattttaatgttgattgcacaaggtaaaagtaatcaggaaatagctgatgaactctttatcactttgaaaacagttaaaacacatgtttcaaacattttagcaaaactagatgtggatgatcggacccaagcggcgatttatgcttttcaacatggtttagccaaataa

SEQ ID NO: 1164 - DNA, 726 bp, Enterococcus faecalis
gaatttatttatggatttgttatactaattttaacgaacagacaggagcggtcagaagaaatgaaacaaaattttgcaattattggtttaggacgttttggcggcagcatatgccaaactttggtggaagctggtcaagaagttttggccattgacagcagtgaagaccgtgtcaatgaatatatgaatattgcaacgcatgcagtggtggctaacgcccaagatgaaatgacgttgcgttctttagggattcggaattttgatcacgtagtggtggcaattggtgaagatattcaagcgagtattttaggaacactaatggttaaagagatgggggttcccaatgtcttggccaaagcagtcaatgaatatcatgcccgtgtcttagataaaattggggcagacatggtcgttcacccagagcgggatatgggcattcgaattgctcacaaacttgtttcacgcaatattttagattatattgaattatctagcgaattttcattagctgaggttcgggtcaccaatcctaaattttacaataaaaccttagcagaattaaatttccgtcagcgatttggtttaactgtggtagcgattcgccgctcgaaaacagaagtaattgcttcgccagatgcttctgaaattgttcgagaaaacgacaatttattagttatcggtgataccgcagacgtggatttattagatgaaaaaatgaatggctaa

SEQ ID NO: 1165 - DNA, 384 bp, Enterococcus faecalis
gcactttattctctaaaagcactgcgctgtgctacaataaatggcgacagagatgtgaaggaggaacaaagaatgaaattagaagtgacaccgaaagcccaacaatggtttaaagaagaaaccggggttcagcctgagacaggcattcgttttttcggaaaaatttacggaaaaacacctgttcatgatggtttttccattgcgatgtctgtagaagcgccagatgagccaatgattaaagagaacctagatgggattacctattttattgaagaaacagatgattggttctttaaagggtatgatttgattgttgattatgatgaaaagaatgatgaaccgcgttatcaatttgaagcaaaccaagaagatttaacaaaataa

SEQ ID NO: 1166 - DNA, 768 bp, Enterococcus faecalis
  misc_feature (657)..(754): Nucleotides 657 & 754 are "n" wherein "n" = any nucleotide.
ctgaagtgtggaggaaataaaatgttatcaattgttgtcccttgttataatgaggaagcagcgattccgctgttttttgaagaagtagaaaaaattagccagaaactgtctcattcagtagaatatatatttgtgaatgatggctcaaaagacaatacgttagctgttttaagacagctttatcgcgaacatccagagaaggtccgttatctttctttttcacgaaattttgggaaagaagcgggcttatacgctggtttaaaagaagcaacaggtgacttagtgacagtcatggacgttgatttacaagacccgcctgagttattacctcaaatgattgagatgattgaaaccagtacagatttagattgtgttggcacacgacgcataacaagagacggcgaaccgcccattcgtagcttttttgcacggatgttctataaactcattaatcgaattgctgagacggaaatggtggatggtgcccgtgactttcgtgtcatgacccggcaaatggtcgatgcgattttagagttatctgagtataatcgtttctcaaaagggatttttagttgggtcggctttaaaacaaaatatattgaatttaaaaatcgagaacgaattgctggagaaacctcttggtctttctggagtctnataagttattcaattgacgggattgtcaatttttcagaaacaccattgaatattgcttcatacgttggcgccttttcgtgtattggttctgcactancaatgttagtgatt

SEQ ID NO: 1167 - DNA, 216 bp, Enterococcus faecalis
aaatactatgttctaagagggagggggtactttttgaacaatgaagacttagtcttaaaaatgatactggatgaatctggcttttcacaaggattaaattcagcagtaaaaaagttacaaggctttgatgttgaagttgatagaacaggacaaaaaggcggccgatctcttgggcgcatatggactatttggcaggtgtccttcaacacgggattg

SEQ ID NO: 1168 - DNA, 219 bp, Enterococcus faecalis
acagaaaaaaaagtaacggaacttttatatcatcctcattttaagtacacgccacaatatcgagaagcagaactaaaaagttcgcttcttgagaatgggtggactttaaatgagatcgaaaacacagatttaaacgagcttttgaaaatttatgcatttaaagatgctgtagacgaatttgaaaatatcaaatatcttgatgaaaatactatgttctaa

SEQ ID NO: 1169 - DNA, 417 bp, Enterococcus faecalis
caacagcagattaaaaataacagtttaggacgaccttgtcgtcctattttatatggaggaattaaaatggcaagtaaatttcaacaaaaaattaaattaatgattaaagatggaagcaaatatactacaaaacaattcacgtcggcagaatttttaccaggttcagtcatggatacaggtaccgatttacaaatcaggttagaagaagcaaccaaaaccaatgatatggaagcaattcgtcctattttaagagaatgctatgactttattgctgacgttatttttgaaaaacagtttactggacaagaatatattgacggtatggatgctcgtgaattattgaaaattacagctcaattgttaggttctgttacttctggttatgatgcaatttattctgaacagaaaaaaaagtaa

SEQ ID NO: 1170 - DNA, 855 bp, Enterococcus faecalis
aaaatagatggcaaaaaagaaaaatgtaagtgtcatttgtgtagagcacccaacgtggttcccaaagacagaggaaacggcgtttttccagtttacggagcgccaattacaatcggtactgctgtaagtatcaaaccagatgttacaacagaaacaacgcctgactatggcgatagtgtagttcaagatcagtatgttgcatttggtggtgcagaagttactttagaaacaaacggctaccaaaatgaagttttagctgaaattacagggggaaaaaaattaaagggtggcgtattgcggtctgcggatgatattgcatcagatggcgcatttgcttatcgtcgccgaaaatcgaacggtaaatatcgctatacgattttctataaaggaaaatttgctttaacatctgatgaaacatctacattagaaggaagttcagtatcttatacccatccagaatggacggggtctttcgttgatgttccagggttgggttatatgtattccgtggatgaagacgatgaaggtgttgacttagagatgattaaaaactggtttactgaggtaatggatccacgtaaagaaaatactactgctgttactggtgtaactttagaccaaacagagttaaatttaaaagttggccaaacagcaaccttaacaccgacaattacaccagataacgcctcaaataaaaaatatcagttccgttcagaaagtgaggctattggaactgtaacaccaattcaagggaaggttactgctgtaggagaagggacaacggaaatcgtagtcacaacagaagatggtaactttaccgcaaaatgtacattaaatgtaacaacagcagattaa

SEQ ID NO: 1171 - DNA, 387 bp, Enterococcus faecalis
gaaaggatagatatgtacgataaaattttaaaaatgcttactgacacaataaaacagttctcggatgcacctatctatcttgataatgtgatgcaatcgtcagaaccgttttatttcgttttgagcgtagaagaaagcatgactgataatgtaggtcaaaacgttcaaaataaagcataccatgttgatattgcactggttgatagtaagaaagatacacaattagtaaaaagcctaacagaaagctgtggggctttttttaatgtgttgaatttggacggaaacgaattgtttccagaagattatcaaacgtttaaaacagacggaattcaacatatcaattttaatgttgcgttccctcaattaattgaatggagtgaaaaatag

SEQ ID NO: 1172 - DNA, 420 bp, Enterococcus faecalis
tgctatcaggaagttcaattgatgagtaaaagcgatcttagaatgaaatcaaatgctgataaagttattgcaaatttaaagaaaatgacacccattgctgaaaaagaaggtgctgcaatggtgaatgattcgttagctaaaatttatcagttaattgtacctatgacaccaattaaatcgggtgatttaagacgaggttatcgaatcattaaagctagaaagctgtctagtggtcgtatcgtgggagcattgattaataatgaaaaatattttagatatgtaaacgatggccaccgaacaaaaaatggcggatttgttaaaggcagatttatgttgcaaaaatctaataaattagctaatgcaacatatattccgaaacgatttaaacaaatggcgattatcattgttaagaaaggatag

SEQ ID NO: 1173 - DNA, 390 bp, Enterococcus faecalis
cggggtgtttttctattgaatgaagcagaagttttagcagctacttattttgatacctgtgttattgagcgaataagtgatattgaaaatgtggaaagcggaattactgaacaagtttattttccaattcatgatggcaagttaccctgtgctttctctcaaggaagtatgggaaacttacctgtaatagaaaacaaagaagcgtttaagtttaatatctcttatgaagaacaaaaactttttttagaacctaatataaaagttaaaaaaggagatagaataactattactcaaggtacaggtcaaaaacatgtgttattttcaaaaaaacctttttattatccaagccatatagaagtagtgctatcaggaagttcaattgatgagtaa

SEQ ID NO: 1174 - DNA, 351 bp, Enterococcus faecalis
tgctttatggttgatgaaaaaaaagaagaaatcgttgagaaaattcaattgatgctacctaacgcttctgaagataggattttgtctgttttaaaccttgttatctttgaaatcaattcttacaatacttgtaaaattgatattgcttgggacgagtttgaaccacttataattgaggttatctataaagctttaaaaaacgaaatagataagtctgtagctagtgtaaaacgtggtgatacatcaattagttatgtagttgaatcaaaagacatacaatcactcatgaagaactatagcagtgccattaaacgtattttaggctgtgatagcggggtgtttttctattga

SEQ ID NO: 1175 - DNA, 201 bp, Enterococcus faecalis
caaaggaggaaattaaaaatggcaacagcaaaaaaagaagtaacttatcgtgtacttgacaagaaaaactttgtgggctttatgcatcctaaaacaaaaaaatttatcacagcaaacgaaaataatgaatttatagtttcagaagacgataaagaagctattgaaatattagaacgtgctgcagatacttttaaagtttag

SEQ ID NO: 1176 - DNA, 417 bp, Enterococcus faecalis
gtacggccgggtcatggcaagaaaagaattgatgccttatttaaaacaatgttccaaaaaggatacatgggcgaaaaattatgtttagtagcacctgatatgcaagaattaatgattgatcagttggatgaaaaatcaacaaaaattgtgcaatttggcgataaacttacttttggattgcaacttggaaatattgtctcaaattacggttcaggaattgcgttaattgaacctaatttacctaatggaacaatcgcagctattgatactaattatgtaaaattacgtccattacgtgaatggcgtgcggaagaattagcaaaaacaacagattcaagacggattggattagttggtgagtattcaattgaatacaaagcttctaattctggagcaatcttgaatttgaaagcctaa

SEQ ID NO: 1177 - DNA, 1368 bp, Enterococcus faecalis
cccccatggtgggcaagtgcacgtttggaacacacgtacaacgaaactgcgcgctttgcctttgcgcttcatttacaaagtacgattgaacgtgtcaaagaaggtcacgtgattgtccatcctgatttaaataatgtccgtaaaaatatgaaaaaagaatttcaagtagccttagatttatcttctattattgaagaagagaacaacatagagattcctttcgatgaaattggctttattagtatgtttttatctattaatgtcggtaaagaagaaagaactccagaaaataatgttggtgtgttcgtcttaatgcatggggattctactgcctcaagtatgttgaaaaccgcccaagaacttttaggaacgtcaatcggaacagcgatgaatatgccgttaacgatggaagttcaaacaatgtatgaacaattacgaaaccaagtaattacgcaaaaagaatcgttaaataatgggattttattactgacggatatgggttcattaaattcgtttggaaatatgttgtttgaagaaacaggtatccgaacaaaggcgattacaatgacgagcacaatgattgtcttagaagctattcgaatggcaagcgtgggacgaagtttagaggacatttaccaaaatattcaactttcttttgaaagcgttgtgagagaacaatttcgttctagtctgcaaaaacgtcaaaacgtaaaaaaagcagtaatcgtgacgtgctttactggagaaggggttgccgcaaaactataccaacgaatcttaccagttattgatgaaacaaaagtggaactgattcaaatgcaatttattgaacgagaaacatttaaaaaacatatcgacaacttgatggaagaatatgaaattaaggccattgcgggaactgtggatgttgaatatcaaaatattcccttcttttccgtctatgatatttttgatgatgaaaaattaaatgtactgaaacggattgctagtgatgaagtggcgattgatacaattgttcattcactaagtggcgtcattacttctgtggactccttacaaaaattaattctcatgttacaaaaaacagttcatcaaatacaaacagacatgcatattattgttgaaccaggggtggatgccggaatcatgattcatttggcttttctggtagatgctttaattaaaggagaagaaacaagaaattttccaaacttagcggaatatgttaaaacacatcgtttagaaatcgatgtcgtacgcacgaattttatgttaattgaacgggcgtatcgtgtgacgattccagaagcggaagttgcgcatgttacccaaatgtttttagaaaatgaaattaaaagtaaacaataa

SEQ ID NO: 1178 - DNA, 333 bp, Enterococcus faecalis
ggggatgaagaaaaaatggcaaaaaaaacaattatgttagtttgttccgcaggaatgagcacgagtttattagtaacaaaaatgcaaaaagcagcagaagatcgtggcatggaagcagacatctttgcagtatcggcttctgaagcagatacaaacttggaaaataaagaggtgaatgttttacttttaggtccacaagttcgtttcatgaaagggcaatttgaacaaaaattacaaccaaaagggattcctttagatgtaattaacatggcagattatggcatgatgaatggcgaaaaagttttagatcaagcaatctcattaatgggataa

SEQ ID NO: 1179 - DNA, 1449 bp, Enterococcus faecalis
  misc_feature (1391)..(1409): Nucleotides 1391 & 1409 are "n" wherein "n" = any nucleotide.
atggatacaggaggaataaaaatgaacggattaatggcatggatggaaaaatatatcttaccaactgccgcaaaaattggtgcacagaaacatctggtggcactaagggatgcttttattggtacattacctgcgacaatggctggatcagtcgccgtaatgattaacgcaattattcgagatcttccccaagagtttgtctcaacttatgcggcaagtttggaagcagacaaaggtatttttgcagtattgaatgtcatcattgggattaatggttttgtttggaatggtacattggctatcgctggtttgattttcgctttttcttggggctataacttagcgaaagcatacaatgtgaatgagctagctggtgggattgtcagtttagctaccttaatttcaggtgttgcttttgcaccaaataacacagctgaattagctgtaaaagtgccagaaaagattgccaacgcaattaatggggcagaaattggtgcgtcaattgctaataatcaattgactgtcaatccatggggttggttaaatctcaaccatctaaatggtaacgctttctttacggtgatgattatgggcgctttatcaaccattattttttgtaaattaatgcaagcggatttaacaataaaaatgcctgattctgtaccaccagcagtttcaaaagcgtttgcggcaattttaccagcaacaatcgcattgtatgtcgtagcaattattaactttacggtgtcaaaactttcaggcggtcaattattaattgacttaattcaaaaatatatcgcggaaccgttccttgggttatcacaaggactaggcgctgtgttaatcgtaacggtttttgttcaaattttctggttctttggtattcatgggccaaacgttttggcaccagttcttgaaggaatttggggacaagcacaattaatcaatattgatattttccaaaaaggttatgaaggaaaaacaggaacagctgcggttttagccgctattgacgacggtaaagcctacatgtgggtccgtggttcgtttgatgcttttgcttggtttggtggttcaggcggtacaatcgtcctaattattgcaatcttgttattctccaaacgagcagattatttaacagttggtaaattatcattagggcctgggatctttaatatcaatgaaccgattatgtttggtttaccagttgttctgaatccaattatgtttattccatttgtaattgcgccattagttgctactacaattggctgggttgcaacgtatcttgggctagtcgccccagtttctcaacaagtcgcatgggtgacaccgccgttgctattatcttttcttagcgacaggttgcgactggcgcgcaccaatcgtancgttggtatgttatgtantcactttcttgaattggacaccgtttgttatcgctgctaa

SEQ ID NO: 1180 - DNA, 408 bp, Enterococcus faecalis
ggcgtcgggccaaatcgtgttgaagaggcaatgtcgaaaattgaaaaaggcggggtagaaggggctgttaaaatgtcaaaaaaaacaattatgttagtttgctccgcaggaatgagtactagtttacttgttacaaaaatgcaaaaagcagcatttaatcaaggcttagatgcccatatatttgcggcttctgcatcggaagcagaaacaaatttagaaaataatccagtcgatgtgttattgttaggtccacaagttcgttatatgaagagtgattttgaaaagcgtctatcaccaaaaggtatcccaacagatgtcattagcatgtctgattacggcttaatgaacggggaaaaagtgctggaacaagccttgggtttgttagcacaagcagataaaaaagagtaa

SEQ ID NO: 1181 - DNA, 735 bp, Enterococcus faecalis
aaaggagcaagctttatcatggaaaatatttttttaaaaagactagaattcaaagcttttgaagaagattctgttttttcaaaaattgaagggctgaataaatttaattcactaaattttaaaaaacctattacttttttttcaggtgaaaatggaactggaaaatccactttattagaagcaatcgcagtcaactggggatttaatcctgaaggcggtagtattaattttaatttctctacaaaagatactcacttggatttacataattatttaactgttggaaaaagtgtaaagcgtgctacggatggtttctttttaagagctgaaagtttctacaatgttgctacatatgcagaaaatatagacttagatttttctgaatacggcgataaatccctacatcatcaatcacacggcgaaagttttttgaatctggtgaaccatcggtttagaggaaatggtctgtacctgttagatgaacctgaagcggctctctcacctcaacgccaactagccttaatgatatctataaaaaaactaattgatgaggggtctcagtttattattgtctctcattcacctatattacttgcaatgcctgactcacaaattatttcttttgataaagatagtcctttagaaatcacgtatgaagaaagtatgccttatgaaataacctcattatttttaaacaataaaaacagaattctctctcatttatttgctgaataa

SEQ ID NO: 1182 - DNA, 255 bp, Enterococcus faecalis
gtatcttttgtagagaaattaaaattaatactaccgccttcaggattaaatccccagttgactgcgattgcttctaataaagtggattttccagttccattttcacctgaaaaaaaagtaataggttttttaaaatttagtgaattaaatttattcagcccttcaatttttgaaaaaacagaatcttcttcaaaagctttgaattctagtctttttaaaaaaatattttccatgataaagcttgctcctttctag

SEQ ID NO: 1183 - DNA, 1350 bp, Enterococcus faecalis
agaaatgcgtattttataattgaggtggttaacatggaagatttgcatggacgtaaaataattattgaagaaacagaacgttcaatacagacaaaactggtttatttaccaacaatgttagagcgttcccccctaacaattcaatgtcagcggtgcggggaagtcgtatccaaaaaagaaaacagactggcgacaaatgtatactactgtcatgcgtgcattcaattaggccgtgtgacttcttgtcaaaaattttgtcatttaccagaaaggcccaatagcccaagaactgtcttttttgagtggtctggacaattaacaaagggacagcaagcgatctcggttgaactttgtgagacagcaaaagcaagagagaatcgcttagtgtgggcagttacaggtgcaggcaaaacagaaatgttatttgctgttttacaccaaaccttacaagaaggggggcggattgcgctggcttcgccgcgtgtcgatgtttgcttagaactgtttcccagaatccaagcggtttttcctcatgaagcaattgctttactccacggaaacagtcaagaatcgtatcgttatacgaaactagtgatttgcaccacccatcaattattgaaattccatcaagcgtttgatttacttatcgttgatgaagtcgactcttttccttttgttaataacgaacatctttattatggagtgcgtaacgcacgaaaaaaaagaagtagtttggtgtacttaacagcaacgcctacgaaagaattgcggaagcttttacagcaaaagaagttagcagccagtattttgccagcaagatatcatcgtaggccattacctgtgccacgccgattttgggttcagtcgtggcaacgtctttctagcaaaaatattaaaatcattgcacatcatttgaaacgtttattggtgcgtaattcagttttactattttgcccaagcatttcattaattcaccaattgcatgcattaatagctgagcgattttccgacaaagaagttgtcgccgtttatggtagtgatgagcttcgcctggaaaaagttcaagcaatgcgtcagcagaaaacggatattttgatcactacaaccattttagaacgtggtgtgacttttgatgcagtctcagttattgtttatggtgccaatcatcgagtcttcacttcttcaacacttgtccaaattgcgggccgagtcgatcgaagacaagaattcaattacggcgaagttttatttttacatgatggggaaacaagagacatgaaagaggcaattcggcaaataaagcaaatgaatcgcttggctagtaaacgagggatgttagatggattgtaa

SEQ ID NO: 1184 - DNA, 687 bp, Enterococcus faecalis
atggattgtaaaaattgcgcaagccccattcgtttggagataacattaaaaatgctcttacgttttaacaaatggatgagcccttcactttgccagcactgccaagcaaagttccagaaactgccaatgacaggcacttgttttggctgtagtcgcgtcagccaagagcgctattgttttgattgtcaaaggtggcagctgctttatccagagtattcttttcataatgcagcgttgtttcattatgatgaaggaatgcaagagtggatggaacgctataaatttcaaggagactatcgcttaagaatgtgttttaacgaggaaatcaacttttactttcagcaacagtctgcggactatattattccggtgcccttatccgaaaaacgaatgcaagaacgaggcttcaaccaagtaattggcttactagaagcggctgatgttccgtacagcccttttttaattagaaaagaggaaaatgttccgcaatctaagaaaactagaaaggaaaggatgcagttgcaacaaccatttgccatccaaaaagaaaaccaaaaaaaattaaaaaaatgttctgttattttggtggatgacatctataccactggacgaactcttttccacgcagctgctgttatcaatgactgttatcctaaaagtttgaatacgtttactctcgcgcgataa

SEQ ID NO: 1185 - DNA, 570 bp, Enterococcus faecalis
atgaaaggggtaattgttatgtttagatataatgtacgtggagaaaatatcgaggtaaccgaagcgattcgagactatgttgagaaaaaagtcggtaaattagaaagatatttcagcgattcacctgaagcaacggttcacgtgaatttgaaagtgtacactgaaaaaacagccaaagtcgaggttactattcctcttccttatctagttttacgagctgaagaaacgtcacctgatttatacgcaagtattgatttggttgtcgataaattagaacgacaaattcgtaaatttaaaacaaaaatcaacagaaaatctcgtgaaacaggacgtaacaatacaaaagccgctgtcttcttagttggtgaagaaacagaagaaacaccttcagaattagacatcgttcgtacaaaacgtctatcattaaaaccgatggacagtgaagaagctgttttacaaatgaacatgttaggacacaacttcttcatttttgaagatgctgaaacaaatggaacaagcattgtttaccgtcgtaaagatggcaaatatggcttgattgaaacagactaa

SEQ ID NO: 1186 - DNA, 876 bp, Enterococcus faecalis
cggggaggcaggagcctaatggaaaaattatacgacaaatcgttaacagagttacatgatttattggtctcaaaagaaatcactgcagttgatttaaccgaagaaacattaaatcgtattcaagatacagaagaacaactaggttcttttatcacagttagtgaagaaaaagcaatggcattagccaaagcgattgacttaaaaggcatcactgaaagtaatccattagctgggattcctattgggattaaagacaacattgtcacaaaagatattttaacaacagctggctcaaaaatgttacacaattttgacccaatttatgatgcgaccgtgatggataaagtctatcaagcagatatgattcctgtcggaaaattgaacatggatgaatttgccatgggcggaagtacggaaacgtcttacttcaagaaaacaaaaaatgcttgggatcaaaccaaagttcctggcggttcttctggtggttcagcttctgctgtcgcagccggacaagtcccagtttctttagggagcgatacaggaggtagtatccgccaaccagccgcattcaacggtattgtgggcttgaaaccaacttatggacgtgtgtctcgttttggtttgattgcttttgcttcaagtttagaccaaattggtccattgacacgaaatgttaaagacaatgccttagctttaaatgcaattagtggttatgacgaaaaagacggcacttctgcaggcgtttctgttcctgattttacggcagatttaactggcgacatcaaaggcatgaaaattgctttaccaaaagaatacttaggtgaaggggtacaacctgatcttcgtgaagctgtattaaaagcgccagaaggctcg

SEQ ID NO: 1187 - DNA, 327 bp, Enterococcus faecalis
atgatagaaagaagggtatctatggcaattacagaagaacaagtcaaacatgtcgctaaattatcaaaattatctttctccgaagaagaattagcggactttaccaatcaactagataaaattattgatatggtggaattactagaagaagtagatacaaccggggttccttttacttcaaatgtgaatgaatcaatcaatgtcatgcgtgaagacgtagcgacaccaggaatggaccgtaaagaattaatgcggaatgttccggaatcagagaatggttacattaaagtgcctgcaattatggataacggggaggcaggagcctaa

SEQ ID NO: 1188 - DNA, 198 bp, Enterococcus faecalis
cgcagtacactcgcgaagaacccaaaagaaaaatttgaaattcttggtggaaaagttacagggagtgtttcgaaaaaaactgacattgtggttgctggcgaagatgcaggcagtaaattaaccaaagctgaaagcttaggcgtgaccgtttggaatgaacaagaaatggtcgatgcgttagatgcaagtcatttttaa

SEQ ID NO: 1189 - DNA, 1914 bp, Enterococcus faecalis
aaagacgataggagcattacgcttatgaggaggagttctacgatggaacaacaaccattaacattaacggcggcgacaactcgtgcgcaagaattaagaaaacaactcaatcaatattcccatgaatattatgtcaaagatcaaccatccgtagaagattatgtttacgatcgtttgtataaagagttagtcgatattgaaacggagtttcctgatttaatcacgccagattcgccgacacaacgtgtaggtggcaaagttttatctggttttgaaaaagctccgcatgacattccaatgtatagtttaaatgatgggtttagcaaggaagacatttttgcttttgatgaacgtgttcgtaaggcgattggtaaacccgttgcttactgttgtgagttaaaaattgatgggttagcaatttcattacgttatgaaaacggggtgtttgtacgcggagcaacacgaggcgatggaacggttggtgaaaacattacagagaacttacgaacggttcgctctgtaccgatgcgtttaacggagcccatttcagtggaagttcgtggcgagtgctacatgcctaaacaatcctttgtcgcattgaatgaagaacgtgaagaaaatggccaagatatttttgccaatcctcggaatgcagcggcgggaagcttgcgccaactagatacaaaaattgtggctaaacggaacttaaatacgtttttatacacagttgctgactttggaccaatgaaagcgaagacgcagtttgaggcattagaagagctttctgcaattggttttagaaccaatcccgaacggcaattatgtcagtcaattgatgaagtttgggcctacattgaagaataccatgaaaagcggagcactttgccatacgaaatcgatggaattgtgattaaagtgaacgaatttgcgttgcaagatgaattaggtttcactgtcaaagcacctcgctgggcgattgcctacaaatttccaccagaagaagcagaaacagtagtggaagatattgaatggacaattgggcgcacgggggtggtcactcctactgcggtcatggctcctgtacgagtcgcgggaaccacggttagtcgggcaagtttgcataatgcagattttattcaaatgaaagatatccgtttaaatgatcatgttattatttacaaagccggcgatattatcccagaagtagcgcaagtgctagttgaaaaacgtgcagccgatagtcagccttatgaaatgccgacacattgtccaatttgtcatagtgagttggtgcatttagatgaggaagtggcgttacgttgtattaatccaaaatgccctgcgcaaattaaagaagggctgaatcactttgtctcacgaaacgcaatgaacattgatggcttggggccacgagtgttagcacaaatgtatgacaaaggattagtgaaagacgtagcggatctgtatttcttaacagaagaacaattaatgactttggataaaatcaaagaaaaatcagcaaacaacatttatactgccattcaagggagtaaagaaaactctgtcgaacgtttgatttttggcttagggattcgccatgtgggggcgaaagcggcgaaaattttagcggagcattttggtgatttaccaaccttaagtcgtgcaaccgcggaagaaattgtggctttggattcaattggcgaaacaatcgcagacagcgttgtgacgtattttgaaaatgaggaagttcatgaattaatggctgaactggaaaaagcccaagtgaacttgacatataaaggtctccggacagaacaattagcagaagtggagtcacctttcaaagacaaaacagttgttttaacaggaaaattagcgcagtacactcgcgaagaacccaaaagaaaaatttga

SEQ ID NO: 1190 - DNA, 1719 bp, Enterococcus faecalis
gatagatcgactagaacaaggggtgatgtgtttgagaagaaaaaaagaatgcaagaaaatgaaccaatagcagtgactgctaacgcagaacgctattatccagaagataaacaaggcttgacggccgcacaagttgaagaaagacagcgaaaaggcttagtcaatgccgccgtcgatacagagtttatcacaacgaaacagattgttattaataacgtatttacgtatttcaacttaatttttgtggtactaggtgtgttattaatgctggtacaatcttataaaaatatgacctttttgccagtagtaatcattaatacggtcattggaatttaccaagaaattaagtcgaagaaagtattagatagcttaaatattctaaatgctacaaaagtaaccgttgtgagggatggccaagaacaagaaatttcgccagatgaactggttttggacgatgtggtgctctttaaatcgggtgaacagatttctggggatgcaattgtcttatctggtgaagtccgtgtgaatgaatccttgttaaccggggaatctgatgagattaccaaagtagcagatagccaacttttgtcaggtagctttattgtgtcaggttcttgttatgcaagaattgataaaattggcgctgaggcctatgttcatcaattaacgcttgaagcgaaatcaattaaaaaaggggaacaatcagagatggtcggttccattaaccgtttggtgaaatgggtagggattatgattattccaatcggctgtgttctatttttccaaagttatttcatcaaccatcaagggcttcatgacagcattgtctccatggaagctgccttgattgggatgattccggaagggttgtaccttttaacaaccgttgcattagctgccagcacaatgcgcttagcgaagcgcggcgttttattgcacaacatgaaaagtatcgaatccttagcacgtgtcgatgtgttatgtgtagataaaacaggaacaattactgaaaacacgatggaagtccaagagttggttcctgtggtgagtatcgaaaatgatggtacagacttaaccaatgtcgaaaaattaattggcgatttttgccgaacaatgtcagctgacaacgatacgatgaaagcgatgaaagaattttttgttactaataatcagagggaagccgttagttatacctcgttttcgtctgtcgaaaaatttagtagcgtgactttcccggaagcgacgtatattcttggggcgccagagatgattttgagagacaattatgaaatgtatcaatctgaagtggaacattatacaagtcaaggctatcgcttattggtgttcggaaagtatttaggagaatttcaggaaacgttggcagcagaggttcaacctctaggctacattcttctttggaatccgattcgtaaagaagccaaagcaacttttgaatatttcgctgaacaaaatgtggctattaaggtcatttctggcgataatcctttaacagtatccaatgtagcacaagcggcaggcattattggtgctgaaaattatgtggacgcgcgaacattaactacaatggaagcccagacagaagctttagaaaaatacaccgtttttggtcgtgtcccgcccagaacaaaagaaacaatttgtattattgttgaaaaaattagatcatacagtggcgatgacaggggatggagtcaatga

SEQ ID NO: 1191 - DNA, 837 bp, Enterococcus faecalis
aaaaatacaccgtttttggtcgtgtcccgcccagaacaaaagaaacaatttgtattattgttgaaaaaattagatcatacagtggcgatgacaggggatggagtcaatgatattttagccatgaaagaagcagattgtagtattgccatggcttcaggaaatcaagctacagcacaagcctcgcaagttgtgttgttggattctgatttttcaacgatgccggaggttgtctttgaaggccgccaagtagttaataacattgaacgctcttcaagtttattccttgtaaaaaatattttctccttgctgatgtctgtctttgctatgatttttgccgtgacatatcctttacaaccgacacaagtcacattgattagtttatttacaattgggattccttcgacatttctagctttggaaccaaatcatcgtcgcattgaagggaaatttcttttcaatgtgttatcaaaagcaattcctggtgggttaacggatatgttagtagtcggtgccttactaatttgtggtgatattcttgcacttcaaaaaacggacatttcaacgactgcaacattgttgctagtttcagtcggctttatggttctttataaaattagttcaccaatgaatcgttaccgcaagcgcgtaatgattggctgtttaatcggaatggttattacaagtatttccatgaaaaacttgttctcgttaacttcggtatcgccaacagccttgttacttttagccattcttttctttgcagcagactcaactttccaacatttatcaaccatttctgaaaaagttcaattatggttttataagaaaagacattag

SEQ ID NO: 1192 - DNA, 1107 bp, Enterococcus faecalis
ataaaaatgaaaaaaagaagttttgtctattggggaatgtttttcattcttttgtcgacgctgataacgccttttctgaaacttgaaacaggatatgcgcaaacggaaccaactagtaccagtgaaaccaatcaaatttctgctacgccaaatgtagtgccgcgtaaacaagtgggcaacattgtgacagcgattcaactaacggacaaagagggaaacccacttgggaccattaatcaatatacagacatctacctccgaattgagttcaacttaccggataataccgttaatagtggggatacgagtgtgattactttacccgaagagctacgtctcgagaaaaatatgacctttaatgtagtagatgatacaggtactgtggttgcaatcgcacagaccgatgtagcaaataaaacggtcacgttaacgtatacagattacgtagaaaaccatgccaatattagtgggtctttatattttacaagtttgattgatttcgaaaatgtcgaaaatgaatccaagattcctatttacgtcacggttgaaggggaaaaaatatttgctggcgatcttgattaccaaggtgaaggcgatgatgttaacgaaaaatttagcaagtattcgtggtttatcgaagacgatccaaccgaaatttacaatgtactacggattaatccaacagggcaaacgtatactgatttagaagtggaagatgtgctaaaaacagaaagtttaagttatatgaaagacactatgaaaattgaacgaggacaatggacactggatggaaatgctatttggcaattcacgccagaggaagatataactgatcagttggctgtccagtatggtcctgatgaccgtaatttttcggtgcattttggcaatattgggactaacgaatatcgtatcacctataaaaccaaaatcgatcatcttcccgaaaaaggtgaaaccttcacaaattatgcaaagttaacagaaaatcaaacggtggtggaagaagtcgaagtgagtcgtgtctcacaaacaggtggtggagaagctaatgtgaacaatatgttgttgaaattcataaagaagatgaagcaggccagcgtttag

SEQ ID NO: 1193 - DNA, 489 bp, Enterococcus faecalis
tgtgaacaatatgttgttgaaattcataaagaagatgaagcaggccagcgtttagcaggtgcagaatttgaactcattcgaaactcaaccaatcaaacagtggctaaaatcacaacagatcaaaacggaacagcgattgttaaaggcttgttaaaagataactatactttagtagaaaccaaagcacctaccggttaccaactttcgcaaaacaagattccaataacacctgaagactttggtaaaaacttagttgcactgaaaactgttgtgaatcataagatttcatatcaaccagtcgctgcttcatttttagctggaaaagttcttttaggaaaaccactgaaggatgctgaatttcaatttgaattattagatgagaaaggcacagtactagaaacggttagtaacgatactttagggaaaattcaattttcaccattaacctttgaaactcctggaaactatcaatacaccattcgggaataa

SEQ ID NO: 1194 - DNA, 324 bp, Enterococcus faecalis
gatacgcacaaccttcgagttcaattaaccgtcgaggcgcttttaggaaatcttgtagcaattactcagtatgatggaggtcaagtatttactaatcactatacgccagaaaaacctttagaaagtaccacaccaccaacgagtgggacaacagatagtaccacgaattcaaccacagaaagtacttcaataaccattgaaaaacaggcgattcgtaataaggaattgccaaaaacaggagaaacaaaaggaaacgcgtttcttttcttaggtagccttcttttgattcaaggattatttatctattttaaaacgaaaaaataa

SEQ ID NO: 1195 - DNA, 564 bp, Enterococcus faecalis
ttgggagtgagcggatttctgctcactctttttgatggaaaagtcatcaggacacggttcgttacatcaatctcgaaggaggcgaaaattttgagtagtgctgtggaaactgtaacaaagttagtcacaccaatcttagaagaacaaaattttgaacttgtggaagtagagtttgttaaggaaggaaaaaattggtttttacgagtatttatcgataaagaaggtggcattgatattgaggaatgtgcctttgtcagcgaaaaattaagtgaaaaactagatgcaatggatccagatccaattccgcaagcgtactttctggaagtttcttctccgggagcagaacgtccgttaaagaaagaaagcgattatgaacaagcggtaggtaagtacattcatatttctctttatcaagcagttgatggagaaaaacagattgagggtaccttagtccatcttgattcagaacaattaacattaagtgtaaaaattaaaaccagagtgaaggaaatgacttttgaacgtaaaaatatcgcaaaagctcgtttagccattcaattttaa

SEQ ID NO: 1196 - DNA, 921 bp, Enterococcus faecalis
cgaatccataggaagaaaagaaaaaccatgagcaaagaaatgttaaatgcattcgacgtattagaagctgaaaaagggattcctaaagatacggtgattgaagcgttacaagcagctttagtttctgcatataaaagacattatggacaagcaagcaacgtcgaagttgaatttgaaccaaaaaaaggcaatattcatgtgtatgctgtcaaagaagtaacagaagaagtatttgattcacaattggaagtttcattaaaagatgccgttgcattaaatggtgcatatgaaatcggcgacaaaattcgttttgaagttacgccaaaagactttggccgcattgctgcccaaacagcaaagcaagtaattttacaacgtgtccgtgaagcagaaagaacaattatttataatgaatttagcgaatatgaaaatgacatcatgcaaggaattgttgaacgtcaagatcgtcgttatatttatgtaaacttaggtaaaatcgaagcagtcttatcaaaacaagatcaaatgccaaatgaattttaccaaccgcatgatcggattaaagtttacgtatcacgtgttgaaaacacatcaaaaggcccacaagtttttgtaagccgtagtcatccagatttactaaaacgtctttttgaacaagaaattccagaagtttatgatggaattgttgaaatcgtaagcgtcgctcgtgaagctggcgatcgttcaaaagtagccgttcgttcaacagatcctaatattgacccagtgggtacctgtgttggtccaaaaggccaacgtgtccaagcgattgtgaatgaattaaaaggcgaaaatatggatattgtggaatggaacgaagatccagctatttatattagtaaggccttggaatccagctcaagtattagatgttatttttga

SEQ ID NO: 1197 - DNA, 750 bp, Enterococcus faecalis
acgaagatgttcaagaaaaagaaagcccagacgtcatttcgagaggtctttaaaaaaggcgacttcgctacaaaactatcttttttagttatgggtgctgcaaacttcgccaacaagcagtggttaaagggaatcatctttttaacagctgaaattggctttatctattggttaatccgtaatggtttccacgcattaatgatgctaggaacactagggacccaacagcaaggattagtatatgatgattctttagggattgaagttctaaaagaaggcgataattcaatgctcttattattattcggaattgcagcaattttagtctgtttatcgctaatcattttatatgtaatcaatttaaaaagcgcccgtcacctatatgaattaaagacagccggcaaaaaaattccaacaactatggatgatttacgtagcttgttaaacgaacgtttccatgcaactttaatgacgatccccttactaggcgttcttttctttaccatcttgccgttgttgtatatgatttcaattgcctttaccaactacgaccataaccatctgccaccgaaaaacctttttacttgggttggattggcaaatctaggtaatgtaatcacaggcgatatggcttcaacgttctttccagtacttggctggaccttgatttgggctgttttcgcaaccgcaacttgtttcttttttggaatcattttaaccttgcttatcaataacaaaaggcttaaaata

SEQ ID NO: 1198 - DNA, 207 bp, Enterococcus faecalis
tatattttaagccttttgttattgataagcaaggttaaaatgattccaaaaaagaaacaagttgcggttgcgaaaacagcccaaatcaaggtccagccaagtactggaaagaacgttgaagccatatcgcctgtgattacattacctagatttgccaatccaacccaagtaaaaaggtttttcggtggcagatggttatggtcgtag

SEQ ID NO: 1199 - DNA, 588 bp, Enterococcus faecalis
tgcctaaaaacagagggaaagagggattttatgggatttccagaaaattttttatggggcggcgcaacagctgctaaccaatatgaaggtggctacctttcaggaggcaaaggtctgagtacattagatgcaattactggtggtagtcaaacagaaccgcgacggattacgtatttaactaaagaaggccaaaaagcttcgtgtacgcgcgatcaagcattacccgaaggagcgattggctatatcgatgaagaattatactaccctagtcatgtagcgacggacttttaccatcattacgaagaagatatcgccttatttgcagaaatgggtttcaaatgttttcggctgtctatcgcctggagccggatttgcccaaatggaacaaaagagattaatgaagaaggcttagccttttatgataaagtttttgatgctttgctgcgccatggaattgagcccgttgtgacgattaaccattttgatattccgatgtatttggccgatgaatatgatggttggaaaaatcgtgaagtgattgatttctttgtttttcttattgcgacagccttcttcaccacgaagaat

SEQ ID NO: 1200 - DNA, 1476 bp, Enterococcus faecalis
tttgctgaccgctttaatataaaaagatgtggaggaagagaatttatggcatttagaaaagactttttatggggtggcgcaacagcagccaatcaatgtgaaggtggctataacgaaggcggacgtggtttggcaaacgtcgatttagcgccaactggtccagatcgttttccagtaatcactggtgaaaagaaaatgtttaactttgatgaggaacatttctatcctgcacaagaggcgattgatatgtatcatcgctataaagaagatatcgccttgtttggtgaaatgggttttaaaacataccgtttatccattgcttggagtcgaatttttccaatgggagatgaaacagagccgaatgaagaaggcttgaagttctatgaagacttattcaaagaatgtcataaatatgggattgagccactagtaacgattacacactttgactgcccaatgcacttagtggaagaatatggcgcttggcgtagtcgtaagttagtaggtttctatgaaaatctttgccgtgtaattttcaaccgatataaaggattagtcaaatattggttaacatttaacgaaattaatatgattttacatgcaccatttatgggagcaggtctatactttgaagaaggcgaaaacaaagaacaagtgaaataccaagcggcccatcatgaactactagcaagtgcaattgcgacaaaaattgctcatgaggtagatcctgaaaaccaagtaggttgtatgttagcggctggttccaactacgcttatacttgtaaaccagaagatgttttcgctgctcgacaagcagatcgtgaaaattatttctttattgatgtccaatcacgtggggaataccctgcgtatgctttaaaagaaatggcccgtaaaggtattcaaattgaaatggaagaaggcgacgaagaacttttaaaagaacatacggtggacttcatttcgttctcttattattcttctcgtgtcacatcaacagatccagaaattaatgaacaaacagctggtaacatctttgcctctgtgaaaaatccttatttaaaagccagtgaatggggttggcaaattgatccgcttggtttgagaattacgatgaatgacttatatgatcgttatcaaaaaccactattcattgttgaaaatggcttaggagcggtagacacaccagacgaaaatggtgatgtagtcgatgattatcgtatcgattatttggcggcgcatattcaagcgatgaaagatgctgttgaacaagatggtgtcgacttgttaggctatacgacttggggctgtattgatttagtatcagctggaacaggtgaaatgaaaaaacgctatggctttatctatgtggatcgcgataacgaaggaaatggtacgttaaaacgaagcaagaagaaatcgtttgattggtacaaaaaagtaatcgcaacaaatggtgaagatttaagtaattaa

SEQ ID NO: 1201 - DNA, 2013 bp, Enterococcus faecalis
cgattcacattgcacgaattgtacaaacaacggaacaataaacgcaccactttggatagtgacattcagttggctaaaccttcaaatgaaaataaatttttggaggaaaaaaagatgggaaaatatcatgaactagcagaaaaaattgtaaaaaatgtcggtgggcaagagaatattaatagtttgacacattgtatcacacgtcttcgcttcaaattaaaagatgagagtcaagcgaatgatgatgtcttaaaaaatatggacggtgtggtaactgttatgaaaagcggtggacaataccaagtcgttattgggaaccatgttccagccgtttacgaagaagtagttagtattgcaggcttgtcaggagaacgtgaagaagaagcttccagtgggaatttatttgatcgcttaatagatattttaagtggttgtttccaaccctttttaggggcgttagcagcggctgggatggtcaaagggttaaatgccttattggttttcttaaagctctatacggctacgtcagggacttataccatgttaaatgggattggcgatgcaattttctactttatgccagttattttaggttatacagcagctaaaaaattccggttgcatccaatggtagggatcgtgattggcgcagctttatgttacccaacgattcaaggaagtgcattacaaacggcctttgaaacaacagcgggtgccggagccgcagcaccgtataatttattcggtttacctgcctataatacatttatggggattccttgggtcggtgcgaactatacaagtagtgtcgtaccaatcatcttcattattgcttttgcggcacaagttcaaaaagtgtttaaacgtattattccagaagttgttcaaacgttcttagtaccgtttttcgtcttgttgattgccttaccaattggtttcttagtaattgggccaatcgttagcatgctaacagatttattaagcgctggctttacagcattaatgagtttctcaccagctttgtatggtttgattcttggtttcttctggcaagtcttagttatttttggtttacattggagcgttgtgccattagctattatgcaagtgacacaagaaggttcaagccaagtattaacgggatcatttgcagctagttttgcgcaaacagcggttgttttagcgatgttcttcaaattgaaagataaaaagttaaaagctttgtgtccgccagcaattatctctggtatttttggtgtaacagagccagcaatttatggaatcactttaccaaaaaaatggccatttatttattcaatgattggtggcgctgtcggtggtttatatttgatgatcaacaatgtgacagcttatacaatgggtggtttaggaatttttggtgtgctaaactttatcaatggtgatgatgcaagtgggatgatccagtcctttattgcaattgccattgcagcggtcgttggttttggtctaacattcttcttctggaaagacaatacagttgaggaagaagaagtgattattgataaaacaacgattaaaaaagaaaatattacaagtccagtcaaaggacgagtgttatctttaaaaaatgcagaggatcctgcttttgcaaatggagcattaggaaatggggtcgtgattgaaccaacggaaggtaaagtggttgcaccctttgatggaacgattgtcacactattcccaacaaaacatgcattaggtttgatttcagataacggcacagaattattgattcatattgggattgatacagttcaattagaaggcgaaggctttgaagcttttgtaaaacaaggtgaccgcgtgaaaaaaggtcaaacattagtaacctttgatttagaaggaattaaaaaagctgggtttagtacacaaattccaatcgttgtgacgaatacagcggattatttagatattttggaagtcggcagtaatgaagtttcaacaagtgatgatttgctgaccgctttaatataa

SEQ ID NO: 1202 - DNA, 477 bp, Enterococcus faecalis
  misc_feature (115)..(117): Nucleotides 115-117 are "n" wherein "n" = any nucleotide.
cgtttttttcctgaagaatacgaagtaggagtaaatgctttaaaaatggtacaaaagcgcgtaggaatggaattgtcaacggatgaagcgcgtttttcccccgccccgcccgccnnnccccttttcctttttttttcccgtgaaagaaaaaaaaacagggtttttttcaaaacccccttgttcgccaaaaaaaaaatcaccgcccccccctcccgggggggggtgtgggaaaaaaaaaatcctcttttttcatcacccccaaaatattttgtttggcggttacaccaacgtgaagttgtcgaaaatgatgatgaagaactgtatgcggtaatcaaaaagaaatatctcaacgcctatcgttgcgtggaaaagatcagcttgtatttaaatgagaactatgactatcaagtttcaaatgaagaacgcttgtacctaacgattcacattgcacgaattgtacaaacaacggaacaataa

SEQ ID NO: 1203 - DNA, 600 bp, Enterococcus faecalis
gtgcgatactttgtggggcaactggcgtatattaaacaaaatggaaaatggtcgataggagtgacgaccgtgcaaaaatttttggattggttagagcgcgtattgacccctttggcaaaagtgataggagaaaataagtatttagtagcgattcgtgatggcttccttttatcaacgcccttgttgattgttggttcggtcttcttattaattgctaattttcctttgccacaatgggatacttggatgtctcatttgcttggtaaagactgggcgacaatgatgtctgttccagctagtgctagttttgatgtaatgactattctggccgttgtcggtattgcctatagtttaggaaaacaattcaatgtggatgcaatgcaagcaggaattatcgcattggtttcattttttattgtaacgccttatcaaacattatttacaccggaaaatagttcaaaggtttatgaagttactattttacctttaaaatggatgggttccagtggcttgtttttacgaatgattgtcgcattaattgcgactcgtttatttgtggccattgttcgtaaagggtggacaataaaaatgccagaatga

SEQ ID NO: 1204 - DNA, 234 bp, Enterococcus faecalis
ggagttaaagcagccagccaattgagtaaaaacatgagagtaacaactaaaaaactcggaatcagggcctcaaaagacttaaccactgttggtggcactcattctggcatttttattgtccaccctttacgaacaatggccacaaataaacgagtcgcaattaatgcgacaatcattcgtaaaaacaagccactggaacccatccattttaaaggtaaaatagtaacttcataa

SEQ ID NO: 1205 - DNA, 825 bp, Enterococcus faecalis
gtgccaccaacagtggttaagtcttttgaggccctgattccgagttttttagttgttactctcatgtttttactcaattggctggctgctttaactccttatggtaatttacaagatgttatttttgaatttctacaaacacccttattgagtcttggtaataccttaggtgcaatgagcattgcttatttatttttacacttcttttggttctttggcattaacagaggtagtgtggttggcgcagtctttaatcctgttttgcgggcattgtctgttgaaaatttacaagcatttaaagacggtcatgaaattcccaacatcatcactggaccatttcaaaatatgtgtggaacatttggtggcgccggttccacactctcattaatcattgtgatggtcttattctgtaaaagtcaacgaattaaaaagctttcgcaactttcactaattcctggtgtttttgggattaacgaaccaatcatttttgggttaccaattgttttaaatccaatccttttaattccatttgtcttagtacccgcaattaatattattattgcctattttgctatggattggggcttagttccattgacgaatggtattcaattgccgtggacgaccccgccaattatctcacgatttttagtcagcggttggcaaggatcaattctgcaagctctcttattggtactaggaatgttcatttattatccttttattcgagttatggatgaccaatatttacgtgaagaatggaaaccacaagaagaagagagtgaagaaattgattttgattcctttgacttcgatgatttataa

SEQ ID NO: 1206 - DNA, 543 bp, Enterococcus faecalis
tttataaataaggaggaaataggcatgaaaaaaatccttttaatcttaaaccacagtttatcaggatttggcagtgatgaacaagctcagctgaaaccaagtggtaaaaaagctcccttaggtccaggggtaacattgctaccatttttacagaagcaaggtgcggaaattgttgcgacactttattgtggtgaccaatattatttggaaaacgaggaagaggtagcaaagaaatttattggctttgcaaaaaagtttcatgccgatgcggttctttgcggaccagccatgcattatcctaattttggagaaatggctgctcgtctagcttgtaagtttaatgctgcaggcattcctgcaattgcagcgatggcagaagaaaatccagcagttagtcactattatcagcaagtaccgattgtgaagatgcccaaaaagggcggcattggtttaaataattcgtttaaacaaatggcgcaattggtcgtggcaaaagcaaatggaaaagaaaccaaacagttagaagaaacaagttgtttttaa

SEQ ID NO: 1207 - DNA, 2484 bp, Enterococcus faecalis
agagaaatccagaatgaacgcatgattgtgttcgttttggattttttgcttttgtttagcgaatgtatgttctataatagggaggcagataggtgggattacgtgaaatcaacgagaaaaattgcggtgcgtcaagtggtcgaatttattttaaggcggggaagtatcgattctcgccatgtgagtgaacatacaccacaagaaggtagtcgccttcatcgaatgttgcaaaaggaagcggggagcctttatcaaaaggaagtatctttaaaaattgaggtgcctttaaatggccataattattgtgtagaaggtcgtgcagacggcatttttgtgaaagaaactgggcaagtggtcattgatgaaattaaaacatccgaaccagcgtttgaagaattgccgccagaaaaggtcgaattgttttggtatcaagcgatgtgttatggtcacatgtattgccaacaagaacaactttctgaaataacgcttcaactcacttattatcagaccaccacaaaacaaatcacacgacaagaacgccattttacagaagctgcattagcggagttttttactgatttgatgaagcgctatgaacagtgggtaatttttaaagaagagtggcgtattttgagaaataaatcattaaaaaatcttagttttccttacggggagtatcgcaaagggcaacgagaattggcggtagccgtctataaaacaattcttagtaaacagcggctcttcgtggaagcaccaactggaacaggcaagacaatgtccactctttttccagcaatgaaagcaattggtgaagaagaaggtgaacggattttttatttaacagctaagaccatcacgcggcaagtggctgaagatgccgtcaaagcgctgtccgaaaaacaagcgcaaactaagagtattacgttaacagcaaaagataaaatttgttttttaactgaacgaaattgtacaccagaacattgcccgtttgctgatggctattatgatcgtttaaatgagggactgtgggatttattgcaacatgaaaatcatttaacgagagaggttattgaacggtatgcacaaaagcaccaattgtgtccattcgagttgtcgctagatgcaagtctttggtgtgatttaattattggcgattacaattatctatttgatccaacggtttatttacggcgcttctttgaagaaccccaaagtgcagaagagaatatttttttagtggatgaaacccataatttggttaatcgttcacgggagatgtattcggccgctatttctaggaatgcggttttgcaaattcaaaaaagattgcaaaaagaatctgttcaattgaaaagagcttgtcaaaaagtcttaactacgtttgatgatattgaagcaatctgtgaagaaaaagacacggatttttttgcccaacgcgcgccaattgattcattagttaaacagatacatcgattaacagaagtaattgcagaatggttgccagaaaatcaacacattgaggaattggcgtcgattctcagtttttattttgattgtttaagttatcttcgaatcagcgagtattacgacaacggcttttatacgtctatttctttgcgaaactatgactgcgttgtgaaacaattttgtgtcgatccggcttatttattgtcacaacgattagataaagggaaagcgagtatcttattttcggcaagtttaacacctctgaattattatcaagaagtgcttggtggaggtgaagaaagcctacgttatcggattccgtatccttttccggaagaaaatcaattgttgatgattggtagtcatcttcaaacaacctataaaaaccgtgaaaaaagttatccacagattagtgaacttttagggaagttaagtgaaacaaaaacaggtaattatttaattttctttccttcctacgcctatatggatgatgtctatcaagtatttagccaacgttacccgcaagtaaaaactcaaattcagggaacggacttaaacgaaaaagagcgagaagcatttttagctgaatttaaagagaatcctcaagaaactttcatcggtttttgtgttttaggtggtatattttcagaaggaattgacttgaaaggtacccgattgattggtacgataattgttagtgtcgggctaccacaaatgaacccagagcaagaactgattcgcactttttatcaagaagagcgagggcaagggtttcaatttgcgtatcaaattcctggcatgaataaagtcttgcaagcggctggacgtgtcattcgagatgcgcaagataaaggctttgtgttgttattagacgaacgatttgaattaccaagtgtccagcgtttctttccgccgcattggttggcgcatcgaaaggcaaacaccaatgaacaactcattcaacaagtgaaacaattttggttaaaaaataaagaaaacaaaggaggaaacaaatga

SEQ ID NO: 1208 - DNA, 1002 bp, Enterococcus faecalis
agaaaacaaaggaggaaacaaatgaagaccattttagtccttcatacaggtgggaccatttccatgtcgaaagtagcaggaggaagtgttgccccgaatgaaaaaaatccgttgatggaacaagaagcattattttctggcaaggttcatttagttgttgaagatatttttaatattccctcaccacacatgaccttagaacggatgtttcaattaaaagaacggattcaaaaagcttattctgaaccaattgatggcgtggttattacgcatggaacagatacattagaagaaactgcttattttttagatataaccttagagaaaaaaatccccattgttttaacaggagcaatgcggtcaagtaacgaaatcggtagtgatggcttgtataatttcatcagtgctatttggactgcttgttcagacgaatcgtacgataaaggtgttttagtcgtgatgaatgatgaaattcatacggcgcgttatgtgacaaaaacacatacaacgaacgtagcgacgtttcggacgccaacttttggaccaataggaaccattgcgaaagaacgtgctttttttgcgaaagaggtcttaccgcaagaagtttgcgatgtttcttctgtgaaaggaaatgttcacgtagtgaaggcctatgcggggatgggtgaacggatgtttgaattattaaacaccccagaaacggatgggttagtaattgaagcgctaggcgcgggtaatttaccgccagaaacgctcccagcattacaaaaaatgctagacaacgggattccagtcgttttagtttctcgttgttccaatggcattgctgaagatatctatgattatgctggtggtggcgttggcttgaaaaaaatgggggtcgtttttgcccgtggtttaaacggaccgaaagcgcggattcgtttaattgttggtttaaacagcgaaaaaaatcctgcagagttaaaagaatttttggaacatagtcttcaccacgggtag

SEQ ID NO: 1209 - DNA, 609 bp, Enterococcus faecalis
atacaaggaggttctacatatatggatataaaagtacaaaaaacagaagatttgataccttatgaaaaaaatcccagacataatgaagatgctatcactgcagttgctaaaagtatcgaaaagtttggatttaaagttcctattgtggtagatgcttctaatgtcattgtaaatgggcatacaagattaaaagctgctaagtatttggggctaaaagaagtacctacaattattgctgatgacttgactccagagcaaatcaaagcttttcgtttagctgataataaggtcggagaaattgctacatgggatgaagaattattaaatgcggagttagatgaattagcagatttagattttgatatgacagagtttggttttgacctaccagatattgaaggtgaagaagtcgaggtaattgaagatgaattcgaagaagaactccctgcagaacctatttccaaattaggtgatatttatcaattaggaaggcaccgtttaatgtgcggggacagtacaaattctttagaagtagaaaaattaatgggcaataaaaaagccgatcttttgattactgatcctccatacaatgtagcgtacgaaggttaa

SEQ ID NO: 1210 - DNA, 201 bp, Enterococcus faecalis
tatctaagtgcatataaaggaagtaggcagatgctgaatataggttcaaatcctatctggtccattgtgaattttagtgattcacaaaataaaaaatgtatgtcaataaatgtttcgtttagtcaagcaagcttatactgctctataagtttgcttcatgtatctatggcgaagtggcaacgctctagtctgcaaaactag

SEQ ID NO: 1211 - DNA, 429 bp, Enterococcus faecalis
aaaatgcagctatttcctgatattgatgacaaaaaaacaaaacagaatgcacgaaaccttttaaaaaaatacagacggctgcaaagaattgcaggagcacctcaatttaatataacttcgccgataattaaagaagtgcctattcagcacacaaatacacatcgatctcaacagcattttattagaaagattgatgcggaaaaagaaaaattaaaaatagataatgcattggcccgattgtcattgataaatagacaactattgtattatacttactgcagtattgaaaagaaaactaatgtttggattgcttctgaactaggttattctgttagcaacgtggaaacgttaaagtgtgtcgcacttcttgaatttgctgaagcatatgaatctggtctgcttcaatgctataaaagtgcgattgactga

SEQ ID NO: 1212 - DNA, 201 bp, Enterococcus faecalis
atggaaaaatcaaaaagtttgattatatggctagcgactggtggaacaatgaagtttgaagatgttaggaattttgaaacagttacaaataatctggactgggatgttttgaaatttaattacctaggtgtctcaactggtgtaaggcggaatgcagtatttgaaatagttaaattaatgggctgggcattggaggagtaa

SEQ ID NO: 1213 - DNA, 393 bp, Enterococcus faecalis
agttgtttggctacgaagtcgagaaagcagccgctttatgcagtgaaaggacttactgattattttaggtatgataataaagtaattcttttcaatgacaaacaagaggtgttagaaattgctaataaaattggagaatgttgtggaattgaagaatttaattacattaacgatttaaattttatattaatcagcgatcttcggaatgatgaacaaacggacgaaaaagagccgctttattatgtaaagttgccagaaattggctatatgagatttggattttgcatacctattacagaaaatatagaagaagcaaaaaaatatactgaacaagaaatcaaagcaattgatgaacgttactggccgtttgctgtgaaagtggagggcgaataa

SEQ ID NO: 1214 - DNA, 396 bp, Enterococcus faecalis
cggcggcttgatttaggaggaacagcgatgaatgtacaagaattgattgaagagttagaatgcttagaagttgctacagatagtcttgattttttgaaaggagctaactttgctactgaaagagcaattaatttggcaaaacaactaaacgaaccagaaaagccaaccgtcaaacaatttgtagccgattggttcgaagataattttgaagagttagattgggaactgggtggtgttttaataaatgcttttaatacgaatagaaatgagagaagtgattttcaagattggcttgtcgataccacgaactatccaattgaaacattgataagaatgaagttgtttggctacgaagtcgagaaagcagccgctttatgcagtgaaaggacttactga

SEQ ID NO: 1215 - DNA, 279 bp, Enterococcus faecalis
atgaaattttacgaaattaaagacccttattatgcattaatcgctgctaacgatgaaaaacaatgtttaaaactttacaaggatattgtttgcaaagtagaagacgaaaaagaatttttcgatgatatgaaaacaattgataaatacgaagcgttcaaaatgcttgctaaaagtcgtattgaagatggtggagagttgggcgcagaagaagctttcaatcagttagaaaatcttgaagaaaacggcgaagtattattgattgacggcggcttgatttag

SEQ ID NO: 1216 - DNA, 231 bp, Enterococcus faecalis
ggaggaaaacgaaaaatgacattagcacaactaattgaattggttgagtacggcacagatatagaagtagtaaaatggttagacaaaaataaatacttagatgtaattactgttgatgaaaacacattatttgagaataatgctgatttcaattgtttagtatcaagtatttcgccctgggatgcttggacaattcatgttgagttgtctttagataaggaggaaaaataa

SEQ ID NO: 1217 - DNA, 387 bp, Enterococcus faecalis
agaaaaagcgaaaaaaattctggctattttagaggaggaacaacaatgaaaaactatgatccaaacatccgatggggcattcatacggtcaaggtaagtttccaacaatgggactataaaggatatgtaacttttgtaaaaagtggtaactgcaaaggtttaaacgtattggatattgacgcagacgatttatatgacatgaaatttaaagaaaatccaatcaattttgtatggtttggtacagacgatgatggcgaagactggttcacaatgattttaaaaaataacgaagatgaactgtcagttgaagatgaatgggactgtttgaaagattatatcgtaggtgttgaaattattgattttgttgaggaggaaaacgaaaaatga

SEQ ID NO: 1218 - DNA, 267 bp, Enterococcus faecalis
atggcttatgaaaaattacgcttggtaacagcgtcagtaagtggagatatttatcttagtaaaacaaaagacggcttgatggacgtaaactctcgtcgagtaattacagatgaggctattcaagcagtaacagattggttttatgtaaacaaaaggaagacagtccaatttaaaggcattgatggaaaagagcatagcttattttatacatctgataaagaaaaagcgaaaaaaattctggctattttagaggaggaacaacaatga

SEQ ID NO: 1219 - DNA, 378 bp, Enterococcus faecalis
cccagaattattggaggtggcggaatgagtaaattgaatcaattaattggttttcttgaagaacaattaacagtaagcgaaccaacacctgattatactaggcataatcaggaaattataacatatattgaatatctaaaatcaatgaagcaaccgcagctcaacgaaaatcagcagattgtgctggattggttgaaagatcgatttaatgaaactgaaattaaagcatcttgtacaggttacctttggaaattacatcaaagttatatcgatgatgaagctgatgaagcaggtatagcttatgaagaactaagttatgaagaagaagccgaaatggtacgagtatttgcagaatggtttgaacaggagagaaaataa

SEQ ID NO: 1220 - DNA, 255 bp, Enterococcus faecalis
aaaacaagaacggcctttgaaatttttgagagtgatctagtaaaagtaatcgatggagaaagcgaagaagatagttatatcagtgtagtcaaaaattatagtaatgaaggttacccagctttcgatatcgaatatcctccaaattaccattatgacagaaatgttttatcggcgatcatgtgtaatggatttgaaactatcgaagttaccggaaatgtatatgataacccagaattattggaggtggcggaatga

SEQ ID NO: 1221 - DNA, 888 bp, Enterococcus faecalis
ttggaaagtaggcgcgaaaagatgacgaaaaaatttgttttggctccagattcatttaaagaaagtatgagtgcaaaagaagcctgtctggcaatggaaaaagggattttagctgtatttaaagatgcagacattcaacatgtcccgatggcagacggcggggaaggaacggtggattccttagtggatgcaacaggaggtacaagagtaccagtgcgcgtggcaggaccgcttcctgatcaaatcgttgaaacctattacggcttattaggtgaccaagaaacggtggtcattgaaatggcgaaagccaacggaattgaattggttaaagcagcagaacgcaatcccttgatcacttctacttatggtacaggagagatgattcaacatgcgctcaatcatggggcaaaaaaaatcattatcggcattggtggtagcgtgacaaatgatgggggtgcaggtatgattcaggcacttggtgcgcgtttgttagacaaggaagggcaagaattgacacgtggcggtggtgcattagataaactggcgcagatcgatttaacacagtttgatcaacgcatttttgctaccgaagttctagtagcaagtgatgtgaataacccactaacagggccaacaggggcgtctcatgtctttggtccgcaaaaaggtgcgacagaagaaatggtggctcaattagataaaaacttagcccattatgcagcgatcatcaaaaaagagatcggcattgatgttgagatgatgccaggcgcaggagctgctggtggtttgggtgcagggttactagcattcacaaaagctcagttacgcccaggaattgatattgtcgtagaagtgaatcaattagggcatcttcaccacgaatgggac

SEQ ID NO: 1222 - DNA, 1293 bp, Enterococcus faecalis
atgccagatattacaatatcttgggttgctgcaattttaggattagttgtagcgatagtattaattttgaaaatatttaatcctgtgtattccttgttttttggtgcaattgttggttgtcttattggaggcgcttccctgtcagatacagtcgctgttctattaaacggaacacaaagtattatgggaaccgcaatccgtgtcttagcagccggcatgttggcgggtgtgatgatggaatctggtgcggcagaatcaattgccaacgccattgtacaaaagcttggcgagaaaaaagctattttatctttggcattatccacaatggtaattacagcagtgggcgtattcattcctgttgcagtgttgattgttgccccgattgctctatctgttgggaaaagtacgggtatcagtaagttatcattattgattgccttatcaggtggcggcaaagcgggcaatattatttcgcctaatccaaatactattgcagcggcgaatggctttgatttacctctaagtgacgttatgattgctggctttattccagccgtatttggcttaattacagctgttgttcttgcaaatatcatgagaaacaaaggatcaatggtcaaagaaacagatcttgtagaggaacaaacaaaagaattattacctttgaaaaaggcgttgatcgcgccagtgttagcgattgtcttattattacttaatccgattggcgccgttttaaatatttctttcatcaaaagtttgaatattgatgctctgtatattttgccgttcgcctcagttgttgggacaattgcgattgggcaaacaaaacaactggccttttatgcatcttctggcttgaagagagtaaccgataccgttttaattttaattggtgcaggtgcaattgctggattaatttctgtttctgatttatcaacacaaattgtccacttaatttctgttatgggaatttctggaaccttcttggcaccgatttctggtattttaatgggcttagcagttggttcaacatccacagcggttattttagcgacaggttcttttggaccagcgattttagatatgggcacatcttcactttcagcagcagtcatggtgcatactggtgcaactgtgattgatagtgttcctcaaggcaattatttccatattacggcacaaagtatgaatatgacgattaaagaaagaattcgagtgattccttatgaaatgtgtgtccgtggggtaatgacgattgttgcaaccattttatatggctttattttaaactag

SEQ ID NO: 1223 - DNA, 654 bp, Enterococcus faecalis
tcagtagccgggcttattttaatcctgctggtaggttaccgtttgtatctagaatatcaaacagatattcaattatttttgaatcctaaagccagtaagacacaattattagagcgaattcgttcacatggtttttcagcagcgctattgttggtttttttgaccgcgatcatgtgtgcagtaccagggattccgacctcagtaattggtgtgattgcaggattgagttttggtcccttcagcggcacactcattaacgttttagggaatagtatgggaaatttggttgcaatctttttgatgcatcatataaaatttttagataaaaaaacggagaccaatcattgggtccagtccattcgacggatgaagcatccaaaaattgggattatggtgggctacatgattccaattattccttcttctgtgattaattttgctgcagatactatgcagttgccattaaaaaatttaatagccgctatattcattggtgtaattccttcctcaatactttacgcatgtggaggcgaagcgctatttcatggatataataaaacggcagtattgttaattgtgagtgttcttttgttcgttggattggtggtcattattgagaaagatagaaaaagatttcaaaaaactgttctttaa

SEQ ID NO: 1224 - DNA, 237 bp, Enterococcus faecalis
tgcatcaaaaagattgcaaccaaatttcccatactattccctaaaacgttaatgagtgtgccgctgaagggaccaaaactcaatcctgcaatcacaccaattactgaggtcggaatccctggtactgcacacatgatcgcggtcaaaaaaaccaacaatagcgctgctgaaaaaccatgtgaacgaattcgctctaataattgtgtcttactggctttaggattcaaaaataattga

SEQ ID NO: 1225 - DNA, 1080 bp, Enterococcus faecalis
aatgaaaaaattacagtcactttttattggaattatcgctattattgtcatcttgttttttggcgtgcgccaattggagaaagcaagtggcatggcggcgcggagcagcataccttgaccatttacaattggggggactatatagatccggccttgattaaaaaatttgaaaaagaaacaggctataaagtcaattacgaaacctttgattctaatgaaaatatgtatacaaaaattcagccaggtggcacagcctatgatattgccattccttctgaatatatgattcaaataatgatgaaagcgaagatgcttttaccacttgatcacagcaaattaaaaggtttagaaaacattgatgcacgctttttagatcaatcctttgatcccaaaaataagttttccgttccgtacttctggggcacgttggggattatttataatgataaatttattgacggccgtcagatccaacattgggatgatttatggcgcccggaattaaaaaataatgtcatgctgattgatggcgctcgcgaagtgttaggattatctttgaacagtttaggctattcgttaaacagtaaaaacgaccaacaattacgtcaggctaccgataagttaaaccgattaacgaacaatgtcaaagcaattgttgccgatgaaatcaaaatgtacatggctaatgaagaaagtgcagttgctgtaactttctctggtgaagctgctgaaatgctagaaaacaatgaacatctacattatgtgattcccagtgaaggctctaatctctggtttgataacattgtgatgcctaagacagccaaaaataaagagggtgcctatgcatttatgaactttatgttacgaccagaaaatgcggcacaaaatgcagaatatattggttattccacaccaaataaagaagctaaaaaactattaccaaaagaagttgccgaagataaacaattttatccagatgatgaaactatcaaacatttagaagtttaccaagacttaggtcaagaatacttaggaatttataacgatctgttcttggagtttaagatgtatcggaaataa

SEQ ID NO: 1226 - DNA, 693 bp, Enterococcus faecalis
ttatcggacgttttcgaagacacacgcttgttaaccattgttctgaatacgtttttgctagctttcttatcggctttaatagcaaccatcattggaacatttggtgcgatggggatttattatacaaaacgtcgtaaaaaccggaacacgttgcttagctttaataacattttactcgtttcaccagatgttattattggagccagtttcttaattttcttcacggcagtagggtttatcagtttaggttttacaagtgtattattgtcgcatattgcctttagtattccaattgttgttttaatggttttaccaaaactacaagagatgaacgattctatggtagatgcggcacgggatttaggggccaataatgttcaagtgattaaaaatattattttgccttttttagcgcctggaattattgctggctactttatggcctttacttattcgttggacgattttgccgtaacattctttgtgacaggcaatggtttttcaacattatctgttgaaatttattcacgagcacgtcagggaattagtttagaaatcaatgccttaagtgcgttagtattcctattctcaatgattctagttgtcggttattactttatcagtaaagacaatacgccaaaacgtttaaagaaaatgcgtcgggaacaaagtgaggtggccaagttaaaatga

SEQ ID NO: 1227 - DNA, 291 bp, Enterococcus faecalis
  misc_feature (70)..(71): Nucleotides 70 & 71 are "n" wherein "n" = any nucleotide.
tatttcccacccacgccgggggggggcatcaaaacaacggtgggtttgacccccctccacccaaaaaaanncccaggcggcggacgggaagaagaagaaagggcttggcaaataatgcaaaagaaaaagtttaaatggtcttatgtgtatttattcgttgtcttggcgctactgtacgcaccattcttttatttgattttttattcgtttaacgacacgcaaacgatgaatcagtttactggttttacgttagataattatcggacgttttcgaagacacacgcttgttaa

SEQ ID NO: 1228 - DNA, 546 bp, Enterococcus faecalis
acagccggatactatttaagtatgaccatgaattcagtgtggtatgcttttctgattaccatttttacgttattggtaagttatcctacggcttattttttgacaaagctcaagcataaacagttgtggttaatgcttgttattttaccaacgtgggtgaatttattattaaaagcttatgcctttattgggattttcagtattcatgggagtatcaatcagtttatgagttttatgggtttgggtacgcaccagattctgtttacagatttcagttttttatttgtcgcaacgtatattgaaattccatttatgattatgccgatttttaatgccttagaagagatgaatccttcattgattagtgctagtcgggacttaggagctagcagtgcggagacgttccgccgtgtcatttttcctctctccctaaacggtgtgaaaagtggcgttcaagctgtctttattccttcgctctcgctctttatgttaacgcgtttaattggcggcaatcgggtgattacggggggcccggggaagaaataa

SEQ ID NO: 1229 - DNA, 201 bp, Enterococcus faecalis
caaaaacagagaggtaaagctatgaacgattttcaatttatttcagctaatgaaacctatagaaatttgtattaccaattaccttttacatccgaattttataaaaatatgtctaatgatactaaaaaaacttacgcaatgctcccagaacgacgtgaatattcctttcaaaataatcggattgatcgggaagggcattaa

SEQ ID NO: 1230 - DNA, 357 bp, Enterococcus faecalis
atgagtaataatagaggaaaatcagccgcggaacgacttttgggtgcaggaaaagaagacaccaatccaactaaagcaactacttctaatgaaaaagaattaaaaactacacatgaacacattgttatgaataaaaaaaacatagaaaaattgattaaacaacaaggtaacagcaaaagaaatgctgatagtattcggatcaatccaatccttgcaaatgctttaaaatactggacttcaattggtgaaccagaaaaaagtaaacctgatgttatcgaagaaacgcttttgaaatctattcctgaagagtatttaattaaaggatatgaaatggcaaaaaaacaaaataaaatttga

SEQ ID NO: 1231 - DNA, 807 bp, Enterococcus faecalis
catcacaaggaggacattattatggcacgaataatttcagttgcaaaccaaaaaggcggtgtttcaaagacaacgactagcattaaccttggagcggcattgcattttacttttaacaaaagcgtatttgtaattgacatggacccccccgagggaaatgccactgataattttggattagacattgatggcacgaatgttccaacaatatatgaagtattaaaagatgaggcttcgattactgaagctattctaaattacaaaggaatcgatgtaattcctgctgatattgctctttcttcagcagaacgtgaatttacacaagttggaagtgaacatagacttaaaagagttcttcaaccaattgaagaaaactatgattatattattattgattgcccaccaagtttaggtatattaacagtaaatgcgttcactgtctctgatgaaattattattcctgtagaagccgcatatttttcactaaaaggattagttaaattgaacgaaacaatcgagactgttaaagaatacacaaatgagagattaatcatacgaggtgttcttttcacaaaatataatgaaagatttaacatttcaaaagaaatgaataaaacagcaaatcaaatttctgatgccctcaacgtaaacatatttgatacttacattagacgaactatcactgttgatgaagctcaagcagcaggttccgacttgattagctttaataagacttcgaccgctgaagacgattatatccagtttacaaaagaatttttagagaaggtaggagatttgaatgagtaa

SEQ ID NO: 1232 - DNA, 195 bp, Enterococcus faecalis
tcaaactataataatattgtattattacaatatcacgttgctacaatttcactatatcgcgaagtaacaatactatgcaattgtaatatcgtaatattaataaatcacaatagtatgactccacgattgaacaatattgtaatattaataaattatgatattgcaatattgcaatattccgatattgtgatataa

SEQ ID NO: 1233 - DNA, 321 bp, Enterococcus faecalis
cctaagaaaggaaacttacccaccatgcctagaaaaacctttgtatatccacaccctatcaacgcatacattatcaagcaactagggattactgtagaagaattttgtgaattacatgctttctctcaaggaactgtttcttcttggattactcgtaacaaaaaaattgaaacacttcctatctcatttatttattctctttctttgtcggccagccagactatggatcaggtatattcagaccttctaaaactgcaagacgattatttgctgcacttagaacgccacagacgaactaaaaaaattatagacgaagaatga

SEQ ID NO: 1234 - DNA, 213 bp, Enterococcus faecalis
atgagtattttagcgattgggggtttcgtaatgaaggcatatgattataatggtaccattattcctctaggagacagcgtccgccaagtggcttatgtagaatgcagctgtggctgtctagcaagcagagttacgagtgactcaaacaagtataaatgttcctggtgtaaacgagtttacacgcttagaaaagatcatataacagctagataa

SEQ ID NO: 1235 - DNA, 456 bp, Enterococcus faecalis
agcgctgatacatgcttcttcactgatggaaggcgccacagcaatttcacgagcaagccttgttggtggccatgcaggtggaactgttggcttaggtacaaccaaatgaagcaaaatagaaaagaattttcttcttatttttctcgctcaatcaaacaaaataagccattatatttattacttatgtcttcagaaaccaatccttttcctagaccagttataggaacttttcgaggatatgcggaagaaaacaaaataataattggtgaagattcctatagtatagaagaaattgacttcgtgtgtatgtatcgtcattctagtagaataaaacaagaagaaagagtaaattcaaacccttttcaaggtttggtctcccctactttgtcaaaaaaagagcagaaaaagttagatgagtattttagcgattgggggtttcgtaatgaaggcatatga

SEQ ID NO: 1236 - DNA, 1320 bp, Enterococcus faecalis
agtttcgattatacgaaagaacccagtcgtgatgtgctttgtatcgacgtaaaaagtttttatgctagcgtggaatgcgtagaacgtggacttgatccattgaagacaatgcttgtggtcatgagcaattctgaaaattcgggtggcttggtactcgctgcttcccctatggcaaaaaaagtattaggcatttccaatgttacaaggaaaaatgaagttccggaccacccgaacttaattattgtatctccacgcatgaaattatacatgaagaaaaatcaagaaattaacaatttatataaacgctttgtttctgatgaagatcattctgtattcagtgtcgatgaatcgtttcttgatgtgactgcttcgctgacctattttaagtgtgacaccgcctataaactggccaagattattcaacgtgtgatttataaccatatgggattgtatgtgacaatcggaattggggaaaatccgttgctggccaagttagcattggataatgaagcaaagaatgcaccaggatttgtagctgaatggcgctatgaagatgtgccaaaaaaagtttggccaatctcccctcttacagaattttgtgggataggaaatcgcatggctactcgcttaaaaaagctaggtattcggtccatttatgacctagcgcacattgaaccttacatgttaaaagaacgttttggtatcatggggctacagctgtacgcgcactcatggggcgtagatcgtagttttttagggcaaaaagcgggacggccaatagaaaaatcatttggcaatagtcaggttttacccaaagattatgcaaataaagaacaaataaaattggttttgaaggaattgtcggaccaggttgctagtcgcttacgcatggcatcgtgtcagacaacctgtgtctctttgtttgttggctactcaaaaggtcagacagacaaatacggccaaaacggctggcgtaaacaaatgaaagtagaaccaagtaataatacaaaagtcttgactgaacatgtactgcgtctttttgaagagaattacgcaccaggggtcgacgtacgaaatttaggggtatcctatggccgtcttgtatggaacaaaaatttacagctggatttattttctgttccggaggagcaaattcatgaaacggatatgtattttcttattgataaaattcgtcagaaatttgggtttaaagcgctgatacatgcttcttcactgatggaaggcgccacagcaatttcacgagcaagccttgttggtggccatgcaggtggaactgttggcttaggtacaaccaaatga

SEQ ID NO: 1237 - DNA, 780 bp, Enterococcus faecalis
ttgacttgtggtgaggccacggtcctttacctgaggaaacaaaggcctggaggcacacgtcatattttgacacaagttatggaagagattgaagatattttcttaggcatgggttatcaagtagtggaaggatacgaagtagaatccgatcattataatttcgaacgcatgaatctaccaaaagatcatccggcacgcgacatgcaagatacgttttatatttcagatgagatgttaattcgtacgcatacttcaccagttcaagctcgaacaatggaaaaacacgatttttcaaaaggtgcattacgaatgatttctcctgggaaagtattccgtcgtgatacagatgatgcgacacatagtcaccaattccatcagattgaaggccttgttgtcgataaaaatgtcacaatgggtgatttaaaagggacgttagaagtcatgatgaaaaaaatgtttggtgaagatcgtaaaattcgtttacgtcctagctatttcccttttacagaaccttcagtcgaagtagatgttagctgttttaaatgtggcggcgcaggttgtaacgtctgcaaacatacaggttggattgaaattttaggtgcggggatggttcatccagatgtgttacaaatgtcagggattgatccaacagagtactcaggctttgcctttggcttaggaccagatcgcgttgctatgttacgttacggtgtaaatgatatccgtaatttttatcaaaatgatttacgtttcttaaatcaattcaaggtaaaggagtag

SEQ ID NO: 1238 - DNA, 2427 bp, Enterococcus faecalis
aaaatgttagtttcttataaatggttaaatgaatatgttaatctttcaaacgttactccgcaagaattagcggacaaaatgtctgtgacaggtatcgaagttgagggcgttgctgtacctgaagaaggattaaagaaaattgttgtcggcgaagtaaaagaatgtgttcctcatccaaactctgaccacttatcaatttgccaagtagacatcggtgaagaagaattgtcacaaattgtttgtggagcaccaaatgtaaaagccggaattaaagtcatcgtagcattacctggttcaagaattgcaggaaatcaaaaaattaaaaaaggtaaaatgcgtggcgaagtctctaacggaatgatttgttcgttagaagagctaggatattcagataatgtcgtaccaaaagcctatgctgaagggatttattatttacctcaagaagcagtgaatgggacacctgttttcccttatttagacatggatgatgcgattattgaattatcaattacaccaaaccgtgcagatgcactaagtatgagaggggtagcctatgaagttggcgcaatttatcgtcaaacacctcagtttaatgatcccgaactcaaagaagatgcttcagataacgtggaaaattacgtaacagtgactgttgaagattcacaagatgcgccagcgtatcaaattcgtgttattaaagatgtgacgattgcagaaagtcctcagtggttgcaaaaccgattgatgaatgaaggaatccgtccgattaacaatgtggtggacgtgacaaattatattttattattatttggtcaaccattgcatgcatttgattaccaaaaattagatagcaaagaaatcttggttcgtcgagcaacagcaacagaagaactaattacattagatggtgaaacacgtcaattaacagaagaaaatatcgtcattacgaatggaaaaacgcctgtcggcttagccggagtaatgggtggggctaattctgaaatcagtcaagaaacaacaactgtggctttagaagcggcattgttcaatccattgtctattcgcaaaacgtctaaacaattcaatttacggagtgaatcttcaagtagatttgaaaaaggcatcaaccaagcgacagttgggctagcttgtgatgtggcagccgcgatgattgcagagttagccaacggaacagtggtctcaggcactgcagttggttctgaagtggccgttaaagaagcgcaggtagctgtgactttagagcgaatcaaccaatatttaggcactgcattagatgaagcaacggtgaatgaaatttttgaagcactcggttttgcttatgaagtaaatcaaggcgcatatgaaattacgattccaccaagacgttgggatattgcgattgaagcagatattattgaagaaccggcgcgcatttatggatttgatcatttaccttcaacattgccaagtggagaaacagttgctggaagtctaaccaaagcacaacatgttacgcgccaattaaagagcttactggaaggtcatggtacgagtgaagccatcagctatgcgttgacaacagaagaaaaatcccgtcaatttatgatgaaagaaagtcaaacaacacgtttgcaatggccaatgagtgaagagcgttctgtgttacgtatgaacttaatttctggtttattagatgatgtcgcatacaatgtggcacgtaaaaataataatatcgccttctacgaagtaggacgcgttttctaccaaacagaagatccaacaaaaaatttacctacagaagaaaatcacttagcacttgctttaactggtaatacaatggttaaagattggcaaacaaaagcaacagccgttgatttttatacagtaaaaggcttagtggaaagtattgtagctgttttaggattaacagaaaaaatcagttatcaagcgacaacggcgattccagaaatgcatccaggccggacagcatggatttatttagaaggtgaagtggttggttttgtcggacaagttcacccaacgacagcgaaagcgtacgatattccagaaacatatgttgctgaattaaacttgcaacaattagtagccatagaagcaggcggggttacttatgaagcagtttctaaattcccagcagtttctcgagacattgctttattagtcgatgaaacagttaccaatcaagaactagttaaaactatttcagataacgcaggtaaatatttgaaagagattcatttatttgatgtatatcaaggtgaaaaactaggcgctggcaaaaaatcaatggcgtatagtttaactttcgttaatgcagaagcgacattagtggatgaagaaattaaccgttcaatggaaaaagttgaaaaagcgctaattgaaaaacatcaagtagaagtaagataa

SEQ ID NO: 1239 - DNA, 684 bp, Enterococcus faecalis
cagataggaggaaaacagatgcctttttcagaagaaatgcgtcaattactgacagcaaataattttcaatttctatttaacggcttaaaattgacgctctatatttccttcgtctcaattattttgagtacgatttttggcaccattctagccgttttgcgaaatcaaacccatggaccactgaagttacttgccagtatttatgtagaagtggtgcgtaatattccaaacttattgtggatttatgttatttttttgattttcaaaatcaaatccacacctgctggaattgtgagttttactgtgtttaccaccgctgctttagcggaaattattcgtggtggtttaaatggggtcgacaaaggccaaattgaagcggcacgttctcaatgtttttcaaattggcaaattctttatcatattgttttgcctcaagccattcgcaatgtcttaccagcaattgtttctcagtttgttactgtcatcaaggatacaagtttcttgtattccgtgattgctttgcaagaactctttggcaaatcttatatcttaatggggcgctacgcacaaacaggacaagtattcactatttacggaatcgtcgccctaatttatttcattattaactttagtatctcacaattttcacgttggctttcacgaaattgggcgaaaagttattaa

SEQ ID NO: 1240 - DNA, 759 bp, Enterococcus faecalis
tcattcctaagacttgaagaatcaaaaattttaggagggatttttatgtttttgttagccaatatttcctggcttgaagaagggccatttgccttatatcgttgggaggctttatttcaagattggcgaatttttggtcaggcatttctctatactattctgctttctttaggagcgatcttagttgcctttgctttaggcattttctttggcagtttatcagcgaccaaaagtaaacttttacacgcaattagtcgtgtctatgtagaattttttcaaaacacacctttgttgattcaatttatcgtagtctattatggctttcctctgctaagcccgctgctttcattttctattactacgattgccattctgtgtgtaggcctctatcatggcgcctacatttctgaaatggttcgctcaagaatcggagctgtcccaacagggcaatttgaagcggcttactcccaaggattaacgtacggtcaaacgatgcggtatgtgattttaccacaagcatggcggattatgttaccgcctttaaccaatcaagtagtgaacctaattaaaaatacgtcaacagttgccattatttctggcgctgacgtaatgtttgctgccaatagttggtcgtctgtcaacttgaactatattcccgcctttgcgcttgctggtttcttatatttcattctttgcttcccattagcgaatttggctagaaaaatggaagaaaaaaataagaaagcatatagcagatag

SEQ ID NO: 1241 - DNA, 831 bp, Enterococcus faecalis
acaatgaaaaaacaaaataaatggctagctggactctccttacttgtattagcaggcatcattgttggctgtggtagcggcaacaatgactcaacttccaaaagtgcttcatcaaacaaaacggtcacagtagaacaattaaaaaaagcagggaaaattaaagtaggtgtcaaagaagacattcctaattttggctatatgaatcctgatacaaacaaaaatgaaggaatggaaccagatattgcacgcttgattgcgaaagaaattaccggcagcgaagagaatgtggaatttgtgggcgtgacagcgaaaacgcgcggtccccttttagacaatggtgaactagatatggtaattgctacatttacaattactgatgaacgtaaaaagacttataattttacaactccttattatacagatgagattggtttccttgtgcgcaaagaggataacttctccagcatgaaagatttagacggaaaaacaatcggcgttgcacaatctgctacgacaaaagaaaacttagagaaaaaagcgcaagaggaaggaatcaaatttacttatcaagaattaggttcctatccagaattaaaaacagcgttaacttctaaacgaattgatgcattttcagtggataaatcaatcctatctggctatgtggatggcaagacagaaattttaaaagatggtttttcgccacaagaatatggaattaccacaaagaaagcaaatactgaattaaatgattatctaaatggtttaattgaaaaatgggaaaaagacggcacactagaaaaaatttatcaagactggggcttaaaaaattaa

SEQ ID NO: 1242 - DNA, 237 bp, Enterococcus faecalis
gcacttgatccagaaatgattcaagaagttttagatgtaatggtcgatctttccaaacaaaatattaccatggtttgtgtcacacatgagatgggctttgctcgtcaagtggctgaccgtgtaatcttcatggaccaaggacagattattgaacaaggaacgcctgaacatttctttacaagcactgaaaaccctcgtgcaaaagaatttctaagtaaaattattcataacgggtaa

SEQ ID NO: 1243 - DNA, 294 bp, Enterococcus faecalis
atccaaaaagaaaggaagtgccttatggctaaaaaatcaaaaattgctaaagcaaaaaaacaacaagcaatgattgcaaaatatgcgcctattcgccaagccttaaaagaagctggcgattatgaaggtcttagcaaattgccaaaagatgctcatccaagtcgcttaaaactccgcgatcaaacagatgggcgcccacgtggctacatgcgtaaatttggcatgtctcggattcgtttccgtgaattggctcaccaaggcttgattcctggcgtcaaaaaagcaagctggtaa

SEQ ID NO: 1244 - DNA, 210 bp, Enterococcus faecalis
cctcgcagccccctttatcttttatacgcaattaaaaaaatcaaattggaggacggtactatgcgccaaaccattacgttagcttgcgctgaaactggcgagcgcctttacttaacaagtaaaaacaaacgaaatacaccagaaaaattacagctgaaaaaatattcaccaaaactacggcgccgcgcacttttcactgaagtcaaataa

SEQ ID NO: 1245 - DNA, 990 bp, Enterococcus faecalis
caggaggaaaacttgatgggcattccaatcaccattgtttctggctttttaggcgcaggaaaaacaaccttaattaaccatgcgcttgcgcaatcaccgtttcctaaagaagaaattattattattgaaaatgaatttggtcaaacaggcgttgaccacgcattacttttacaaaccacggaacgaattattcaattaaataacggttgcatgtgctgcagcttacgaagagatcttcttgcctctttatcagcaatcttagaagtgtatcaagaagaacaacaacccattgcccaagtcattttagaaacaacgggcattgctgatccgcaaccaatcattcaaacaattttaacgaccccgcacatcaaaaatcatttctatatagacagtctcttaacggtcgttgatgggcatcattggcaacaacagcttcaagaagccgaagccatcaaacaactggccttagcagatcgcctctttttttctgtcaaggaaccagcagacagcactcagctaccaacgttccaagaaacccttcgtaccattaatccttttgctgatattttatcctttcaagccaacgagcctcttttggctagtgacttttttcaattaaataagtttacggcaacacttacagaacacgaaatgactcattccccgcatgagcacgcccacgagcatcatcaccatacctttcactccctcacgctaacggcgtcctcagccatcaacgaacctcttttcactcgttggcttgattggttaatgtatacgcatcaggaaaagttataccgtttcaaagggattctcgccttacaggagcatgacttggccattgccatgcaaggcgtcaaccagcaagcggcctttcaaatgacgaatcaaccccctcaagaaacgacaattgttctgattggcaaagaattagagacaaaaaaaattcaagaaacctttcaaaccctcaacaaaatagctactccgtaa

SEQ ID NO: 1246 - DNA, 1548 bp, Enterococcus faecalis
aggagcacacctatgaaaaaatttactcttcccctgttagccgccttatcgctaatccttttcggcgcttgcggcaaaacaaacacctctgataaaaccgctgacggtaaagaaaaactatccattgtcacgactttttatcctatgtacgatttcactaaaaatattgtaggcgatgaaggagacgtcaaattgttaatccctgctggttctgaaccacacgattatgaaccatccgccaaagatatggctaccatccatgatgcggatgttttcgtttaccacaatgaaaatatggaatcttgggtaccaaaagctgctaaaggttggaaaaaaggagccccgaacgtcattaaaggtaccgaaaacatggtcttacttcccggcagtgacgaagacggacacgaccatgaccacgaacatggcgaagaaggccaccaccatgaattagacccgcatacttgggtttcgcctcatcgtgccatccaagaagtcacaaacatcaaagaacaattagtcaaactttaccctaaaaaagccaaaacatttgaaacaaacgcagaaaaatacttaacaaaattaacagccttagacaaagagttccaaacagctttgaaagacgctaagcaaaaaagttttgttacccaacatgctgcatttggttatcttgccttagattacggcttaaaacaagtgccaatagctggtttaacacctgaacaagagccaaccgcagggcgcttggcagagttgaaaaaatatgtcacagacaaccaaattcgctatatttattttgaaaaaaatgccaacgataaaattgctaaaacgttagctgacgaagcgaatgttcaattggaagtcctaaacccgctagaaagtttgacacaaaaacaaatggacaatggcgaagattatctttctgtaatgaaagaaaacttaactgctttgaaaaaaacaacagatacagccgggaaagaggttcagccagaaacctctgaaaaaacagaaaaaaccgtggctaacggatatttcaaagacagtgaggtggctgagagaacactgacagattacgctggaaattggcaatccgtctatcctttattaaaagatggcacattagaccaagtcttcgattacaaagcgaaactgaaaaaagataaaacaccagccgaatacaaaacctactatgatgccggctatcaaaccgatgtcgaccacatcaacatcactgattccaccattgaatttctggtcaatggcaaaccacaaaaattcacctataaagcagccggttataaaattttaaactatgcaaaaggcaaccgtggcgtccgtttcctttttgaaacagacgatgccaatgctgggcggtttaaatacgtccaatttagcgaccacaacatcgcaccaacgaaagccgctcatttccacatcttcttcggcggcgatagccaagaaagtctgttcaatgaaatggacaactggccaacgtattatccaagcgacttaagcaaacaagaaattgcccaagaaatgattgcgcattaa

SEQ ID NO: 1247 - DNA, 927 bp, Enterococcus faecalis
caccggttggaagaattcacggagtggtctttcgtcaggtcgggaaggaagttggggcaccagatgtgttttttacagaatttattaattcggcatagttattgtcatcctgaaggaaaagatagtgtacgcgggcgcctcgtttttacagaagatgaacagccgatggtggcacatatttggggggataaaccggaatttttccgtgaaatgagtatcggcgtagcggagatgggctttcaagggttagacataaatatgggctgtcctgtgcctaacgtggctgagcgtggaaaaggcagcgggctaattttgcgcccagaagtcgcggctgaattgattgacgctgccaaagcaggtggcttacctgttagtgtcaaaacacgcattgggtttactgaaatggcggaaatggaggcgtggatcacgcatttattagagcaagacattgcgaatctatccattcatttgcgaacacgaaaagagatgagcaaagtggatgcccattgggaggtcattccgcaaattatggctattcgggaccgtgtcgcaccgcaaacgacaattacgattaatggggatattcccgatcgtcaaaagggcctagaattagcagaacaatatggtgtagatggcatcatgattggtcgggggatttttaaaaatccttatgcctttgaaaaagaacccaaaacacatacgccacaagaattgctgggcttgctacgtttacaattggatttgcaagacaaatatgcggaattggtgcctcgctccatcgttgggctgcatcgcttctttaaaatttatgtcaaaggctttccaggtgccagtgatttaagagcacaattaatgaatacaaaatcaacggatgaagtgcgccagttgttagcgacgtttgaaacagaacatggtgtgcttgactaa

SEQ ID NO: 1248 - DNA, 189 bp, Enterococcus faecalis
tcgtggaaaataaggaaaaattccggaaccggattatatgaaggtgaccaagaatttttgggcaaaattgccaaagccttttttgttttagcaccggttggaagaattcacggagtggtctttcgtcaggtcgggaaggaagttggggcaccagatgtgttttttacagaatttattaattcggcatag

SEQ ID NO: 1249 - DNA, 858 bp, Enterococcus faecalis
cctagcagcgggtggcttagcagtcattttacgagctattgtttattaataacttttagaaaggatgatttatctatgaacgcaaatgtgtatcaacatttccgcaaagatgaacatccttttattgacactgtcggggattggctagagcaagtggagatgcaatacgcgccttatttgacagactttcttgatcctagacaggcgtatattttggaaacgttgattcgacaaaacagtgatttatcgtttactttttatggtggttatgagcaagcagaacgaaaacgctgcttgatttatccagcgtattacataccagaagagacagattttggtgttgtattatttgaaattatttatccatctaaatttgcgacattatctcatgggaaaattttaggcaccttgatgaatgttggggttcgtagggaagcctttggagatattatttccgatggtgataagtggcaggtttttatagcacaagaagtagctggcttcgttgttaaccaagtcgacaaaattggtaaaattactgttcgcttagaagaacgggattatacacaaattttgataccgaaggatggttggcaggaagagcgaacgactatgagctctttgcggctggatagtgtgatttccgccgtatttaatatttcaaggcagcgatcaaaacaattgatcgaatctggtaaagtaaaagtcaattggacagaaacgacacgaccagattttgctttagacttattagatattgtttcgatacggggatttgggcgccttcaaattcaagaattagaaggaaaaaccaagaaagaaaaatttcgtgtcctcttaggggtattgagaaaataa

SEQ ID NO: 1250 - DNA, 279 bp, Enterococcus faecalis
ggaggtgttattatcgcaacactgattactctattatacaaaggcgttcaaatctattcaggattactagtgatttacgcgctactttcatggtttccaggagcatatgattctgctttcgggcgtttgctctctagaatttgtgaaccatacttaagtttgtttgaccgtttgaatttaaggattggaatggttggatttaacgtaatggtagggattattgtccttaacctagcagcgggtggcttagcagtcattttacgagctattgtttattaa

SEQ ID NO: 1251 - DNA, 735 bp, Enterococcus faecalis
gtaacgatttcccaatcgcagttgaagaaggtgcaacttttatacgaatcggaacagcgttattcagagatgcgtaaaggagaggaatttatgtcaatttttaacaaggatgcgttatcgagcttttttggcttatctggcgaagaagatgattattatgataactacgaagaatatgaagagcgcaaagcagttaatgaaccaccgcgtcgtgcagctcggcctaaaccacaacgccctgttcaacaacaggaaagttacagtcagccagcttatacacaacaaagtgagcctgtagttgaaaaaccttctgcacgctatcgttctgctgaagcgcatcaagaaagagacacacaacaagctgcttacacagagaaaaaagtggtttctatgcgtagttctaatcaatcagcgactacgaatacaagacgagcacaagaaagcaccgccaatgcaaaaacacataaaattactattattgaaccacgtgtgtattcagaagcaatgagcattgcgaaacatttatttgctgaagaagctgtgctagttaattttacattagtagaagaagaccaagcacgacgcatcgttgatttcttaactggtactgtgtatgctttagacggagatattcagcgcgttggcaatgaaatcttcttatgcacaccagcgaatatggaaattgatagtgcgacagcacaatctttagccaacaaacaattctttgatttctaa

SEQ ID NO: 1252 - DNA, 726 bp, Enterococcus faecalis
gtacgccaccatttttccgcagaaaacgataaggagcatcgattagaaatgatagctgaaaacttaacaaatattaataatcaacttcagctagcatgcaaaagctcacagcgctctgttgctgatgtgacaatgattggcgtcactaaatcagtaggaattgaggaagcagcagagcttgttcagcttggtgtccagaatttagctgaaaaccgagtagataagttactagaaaagaaagctggattggaaaaatttaatgatattcagtggcatttaattggtaatttacaacgtaggaaggtaaaattaattattaatgagatagattattttcatgcattagatagtctgagtctagccaaagaaattcaaaaaagagcaacgaaagttattcgttgttttgttgaagtgaatataactggggaagaaagcaagcacggctttcgtaaagaagacgtcttacctttcattcaagaacttgctgatttggacaaaattcaaatcgtcggtctaatgactatggcaccttttggggcaagtgaagaagtattacatgcaacatttagagaattaaaagagctgcaaatgaccgtaaatgagaaacatttatcttttgctccttgtacagaacttagcatgggaatgagtaacgatttcccaatcgcagttgaagaaggtgcaacttttatacgaatcggaacagcgttattcagagatgcgtaa

SEQ ID NO: 1253 - DNA, 1308 bp, Enterococcus faecalis
aaaagtgacaggcaaaatcaaagacttcttctcgaacattttcgactaatcacacaaacaggaggatacgatatcatggaattttcattagacaataacattaacaacggtgcagtcattaaagttatcggtgtaggtggcggcggcggaaacgctgtaaaccgtatgatcgaagaaaacgttaaaggcgtggaatttatcacagccaatacagacgttcaagcattaaaacattcaaaagcagaaacagtgattcaattaggccctaaatacactcgtggtttaggtgccggttcacaacctgaagttggccaaaaagctgcagaagaaagtgaacaagtgatttcagaatcattacaaggcgcggatatgattttcattactgctggtatgggtggcggaactggtacaggtgctgcgccagtagttgcaaaaatcgctaaagaattaggcgctttaacagttggtgtagtaactcgtccatttagttttgaaggtccaaaacgtggtcgttttgctgctgaaggaattgccttattaaaagaaaacgttgatacactattaattatctcaaataaccgcttattagaagtcgttgacaagaaaacgccaatgcttgaagcatttagagaagctgataatgtattacgtcaaggtgttcaagggatttcagatttaatcactgcaccaggttacgtaaacttggactttgctgacgtgaaaacagtgatggaaaaccaaggaacagctttaatgggaattggtgtagcgagcggcgaagaacgtgtaattgaagcaacgaaaaaagctatttcttcaccattgttagaaacatcaatcgatggtgcggaacaagtcttattaaacattactggtggcttagatatgaccttgtttgaagcgcaagatgcttcagatatcgttacaaatgctgcttcaggtgatgtgaacatcatcctaggtacatcaattaacgaagatttaggcgacgaaattcgtgtaacagtaatcgctacaggtattgatgaatcaaaaaaggatagaaaaccgcaccgtcaaacaagacaagcggttcaaccaatgcaacaaacaactcaatctgtggaaatggatcaaccaaaatcacaagaagaagcaagtgcttttggcgattgggatattcgcagagaacaaaatacacgtccaaaagttgatgaatcttcattagaacaagtagacaaaaaagaatttgacacattccaccgtgaagaaccaaatcacaatgatgacgaattaagtacgccaccatttttccgcagaaaacgataa

SEQ ID NO: 1254 - DNA, 198 bp, Enterococcus faecalis
tcgctacaggtattgatgaatcaaaaaaggatagaaaaccgcaccgtcaaacaagacaagcggttcaaccaatgcaacaaacaactcaatctgtggaaatggatcaaccaaaatcacaagaagaagcaagtgcttttggcgattgggatattcgcagagaacaaaatacacgtccaaaagttgatgaatcttcattag

SEQ ID NO: 1255 - DNA, 1356 bp, Enterococcus faecalis
atattggaattaataggaggaggaattccgttcatggcaaaaacaggaatgtatgtaggcctcgatattggtacaacttctgtcaaagtagttgtcgctgaatatattgaaggtcaaatgaacatcatcggcgttggaaatgcaaaatcagacggtttgaatcgagggattgtcgtcgatattgatcaaacagttcaagcaatccaacgggccgttcgacaagccgaagaaaaagccggcattcaaattaaaagcgtaaatgttggattaccagcgaatttattagaagtagaaagctgtcaaggaatgatagctgttagcagtgaatcaaaagaaattacagatgaggatgtgcgcaacgtcgcatctgcagctttggttcgttcaactcctcctgaacgtcaaattgttgcaatcttaccgcaagactttaccgtcgacggctttgaaggcatcaaagacccacgtggaatgcttggcgttcgcatggagatgtttggcgttgtctatactggaccaaaaacaatcatccataacatccgtaaatgtgttgaaaaagctggcttaggaattaacgaattagtgattacaccgcttgctttaacggaaacaattttaacagatggcgaaaaagactttggaacaattgtcattgatatgggtggcggtcaaacaacgacatctgttatccacgacaaacaattgaaatttactcatgttaaccaagaaggcggcgagttcatcacgaaagatatctcaatcgtattgaatacttcttttaacaacgccgaagccttaaaaattaattatggggatgcttatccagaaagaacttcagcaaacgaagagtttcctgttgatgttatcggtaagtcagagcctgtaagagtggacgaacgttacctttcagaaattattgaagcgcgtgtggaacaaattttgagaaaatcaaaagaagttctggatgaaattgatgcgtttgaattacctggaggcgttgtgttaactggtggcgccgctagtatgccaggtattgtcgatttggcgcaagagatttttgaagccaacgtaaaactatacgtaccaaatcacatgggcttacgtaacccagtctttgctaatgtcattagcattgtggaatattcagcgcaactaaacgatatttatcacattgccaaatatgcaatccctggtgaaaaatcgaaaccagcacaatcagtcgctgtccaacaagaagttcgctatgacacatatgctgaacagcctcaagaagaatacgaagaattcaacgaacgtgagtctggtgaaaaagtgacaggcaaaatcaaagacttcttctcgaacattttcgactaa

SEQ ID NO: 1256 - DNA, 219 bp, Enterococcus faecalis
cggagcaaatggacaaacctggaatcgttgatatggaagtcggcattttttcttatccgtatgaaaaaggaaagtgaagaaacgggtagtgaagtttcggaagattcagcggttgaaaatcaagaagttgtggacccaaatgcaggcgtagcaacggatgaagcgaataacggtacgccgacaaatggagaaaatcaagaagtgcaacaagcagaataa

SEQ ID NO: 1257 - DNA, 954 bp, Enterococcus faecalis
attattttgaaaagaacaggaattctcttagtgaatttaggaacaccaaaagattcttccaagacggaagtaaggaagtatttaaaaacttttttatcagatagaagagtaataaaaatacatcctataatttggaaaccgattttgaacggtattatcttgaatatacgtccaaaaaaatcagcaaaactctatcaaaaaatttgtactgaaaatggatttcctcttttggaatatactgagaaacaaatggaaaatttgaaaaatatatgtccagaagtggaagttacaatcggaatgtcatatagtgaaccgagtatagaaactgctctagatacattattatcaaaagagattgaagaactcaatgtcataccaatgtatccgcaatactctgggacaacggtaggatcggtgtttgattccgttatgaattattttataaaaagtgataggatagtggatattaaatttattcgatcattttacaataatccacagtatatagattacttttcaaaaaaaataaatgaagctttgaatgaaagtccaatagatgctatcgttttttcataccacggaattcctatgtcttatgtaaaagatggggataactacccgaaggaatgtactaaaacaacaaaattaataatggataaattaggagatattcgttattatcaaacctatcaatcgaaatttgggccatctgaatggttaaaaccagcaactgatgataccttgaaaaaattaccatcaaaaggtattaaaaatatattaattgttgcaccaggttttgttgtagactgtctagaaacaatagaagaattggaacacgaaaacagaaactattttttagaaaatggcggggaagtctacaaatatgttcatccatttaatggagatattgaatttacaaaactagtaaaggacaattgtctcaccacgggtaag

SEQ ID NO: 1258 - DNA, 249 bp, Enterococcus faecalis
atgttgaaagcgaaaggagatcatcatatgggatttggaaaatggaaagaaattataccatcagataaaagtaaacagtttgaagaaggacagaaagtatcatttatttacagaaaagaaattagaagtggtataatagctgttttattaattaattcagcagtaattaatattatagacagttctaagccaaaaaacaaaaaagaaaaaacagtaattagttatgagaaactattatcgatgtattaa

SEQ ID NO: 1259 - DNA, 279 bp, Enterococcus faecalis
gactataattctccttttgcttatcaaacattttttgcaacaaatcgcatacagggtatgcacaaggaggaaacatatatgaacaacggtacagtaaagtggtttaactcagacaaaggttttggatttattacaggtgaagatggcaatgacgtatttgctcatttttcagcaattcaagcggatggttttaagtcattagaagaaggacaagcagtaacttttgatattgaagaaggacagcgcggtatgcaagctgttaatatttttaaagcataa

SEQ ID NO: 1260 - DNA, 1020 bp, Enterococcus faecalis
  misc_feature (19)..(19): Nucleotide 19 is "n" wherein "n" = any nucleotide.
atcccccgatccgtggccnatacgcatacgtatgtatggtggcaaaacgtccttacctacgaaaatgcaaagcaagtattagattactttttacctaaagttcaaacaccaaagggatcaattgtcgccttagatgcggaagacggcgttcaatcgacggatgtaacgctatgggcgttagactatatcaaagaggctggatatacaccgatgctttacggatacaaagggtatcttacttcatcttatgatttatcacgaattgcaaagaagtatcaattatggatggcagaatatccagattatgaagtgacaccttatccaaattacaattattttccttcatttgaaaatatcggtatttttcagttcacgtcaacctacgttgcaggagggctagatggtaacgttgatttaacaggtattactgataatggttatacaaagaataaccaaccagcaacaaacacaccagctattgaggaaggtaaagaagtagaaaatacgccaagttccgatgttaaagtgggcgacactgttaaagtgaaatttagtgttgatgcttgggcaactggcgaagctattccgcaatgggtaaaaggaaacagctataaagtacaagaagtaactgagagcagagtattgcttgaaggtatcttgtcatggatcagcaaaggcaatattgaattattgccagatgcggcaactgttcctgataaacaaccagaagcgactcatgtggtacaatacggcgaaacattatcaagcattgcttatcaatacggaacaaactatcaaagattggctgcattaaatggattgacaaatccaaatcttatttaccctggccaaattttgaaagtaaatggatcagtagtaagcaacatttacacagttcaatacggtgataatttatcaagtattgcagctaagcttggtacgacttatcaaaccttagctgcattaaacggattagcaaatcctaacttgatttattctggtcaaacattgagctattga

SEQ ID NO: 1261 - DNA, 1122 bp, Enterococcus faecalis
catggtaaaactacattaacagctgcaattgctactgtattatcaaaacacggtggcggggaagcacaaagctacgattctatcgataacgctccagaagaaaaagaacgtggaatcacaatcaacacttctcatatcgaatatgaaactgaaactcgtcactatgcacacgttgactgcccaggacatgcggactacgttaaaaacatgatcactggtgctgctcaaatggacggagctatcttagtagtttctgctgctgatggtcctatgcctcaaacacgtgaacatatcttattatcacgtaacgttggtgtaccatacatcgttgtattcttaaacaaaatggatatggttgatgacgaagaattattagaattagtagaaatggaagttcgtgacttattatcagaatacgatttcccaggcgatgatgttccagttatcgcaggttctgctttgaaagctttagaaggcgacgagtcttatgaagaaaaaatcttagaattaatggctgcagttgacgaatatatcccaactccagaacgtgatactgacaaaccattcatgatgccagtcgaagacgtattctcaatcactggacgtggtactgttgctacaggccgtgttgaacgtggtgaagttcgcgttggtgacgaagttgaaatcgttggtattaaagacgaaacatctaaaacaactgttacaggtgttgaaatgttccgtaaattattagactacgctgaagcaggcgacaacatcggtgctttattacgtggtgtagcacgtgaagatatcgaacgtggacaagtattagctaaaccagctacaatcactccacacacaaaattcaaagctgaagtatacgtattatcaaaagaagaaggcggacgtcacactccattcttcactaactaccgtcctcaattctacttccgtacaacagacgttactggtgttgtagaattgccagaaggtactgaaatggtaatgcctggtgataacgttgctatggacgttgaattaattcacccaatcgctatcgaagacggaactcgtttctctattcgtgaaggcggacgtactgtaggttcaggcgttgttactgaaatcgttaaataa

SEQ ID NO: 1262 - DNA, 678 bp, Enterococcus faecalis
aaaataagccaattggctgttttagcagacttgtttcttcagtatacttggagaaaaaggttaggtgatttaatggaaaaagtattgacgattgcaggctccgattcaactggaggggcagggattcaagcagatttaaaaacatttgaagagtatggagtttttggattttcaagtttaacctcgattgtgacgatggatcctacgacaggttggtcacatgaagtaactgaattgccagaaacgctcttagaaaaacaattgatttcggtttttgcaggcggtccagtagcggctttgaaaacagggatgatgggtaatgaacaaaatattaaaatggctagtaagtacattaaacaagagaaaattcaaaaagtcgtgattgacccagtcattgcttgtaagggaacggcacaaattctgcaacccaaaagtgtggaaggcctaaaaaacgatttactgccattagcattagtggccacgcctaatttaattgaagcgggcatcttatctggtttaggcgaaatttcttccgtggcggagatggaagaagcggcaaaacgaattgtacaaatgggagccaagcatgtcgtggttaaagggggacatcgcttagctggtgaaaaagcactggacttgttttacgagtggtcacaccgcgcatcttttggaaaatga

SEQ ID NO: 1263 - DNA, 282 bp, Enterococcus faecalis
ctggtgaaaaagcactggacttgttttacgagtggtcacaccgcgcatcttttggaaaatgaattatatcctactgattataatcatggtgcaggttgtactttttcagcggcaatcacagctggcttggcgaaaggttattcggtgttaaaagcagtaactttagcaaaaaaatttgtaacagcggcgattaaacacggtattcaagttaatccttatgtggggcacgtatggcatggcgcttacactcatgcggaacaacggatgcgtaagaaagcataa

SEQ ID NO: 1264 - DNA, 1326 bp, Enterococcus faecalis
aatagaactgtaattgcaaaaaaagaagcggaacatagaaggggtgataacttttctgtgcttcagtttagaacggactgtggtgtttgttttgacgaactaccggaaagcgacttctttttgttttggcttcaaatggtatttaatggagggaatgcaatgttagaaaaagaaacgtacagtcaactgtttaaatggtctttttcaaaaaagacacaagtcacatactgggatggtaccgtcaaagagtatgggcaagggtcgggggatccggtttttaaaattgtattcaatgaaaaaattcctgtgaaggatttactgaataacgcttcgttaactttaggggaagcctacatggatcgcaaaattgaaatcgaaggcgatatccaagcgctgatttatgatgtgtataaccaaaaggatagctttttacacaatgctaaatttattaaatggcttcctaaagaaagtcattcaaaaaaacgttcgcaagaggatattcacagccattacgatctaggaaatgatttttacaaaaaatggcttgaccaaacaatgacgtattcatgtgcttattttaaaacgcctgaagatacattagaacaagcgcaagtgaataaagttcatcatattttagataaattgtttatcaaagagggcgacactttactggatattggctgcggctggggcacgttaattttaactgcggtgaaagaatatggagccaaagcaactgggattacattaagtgaagagcaatttcatcatattcgccatattatagaaaaagaagatttacaagatcgaatgactgtcaaattgatggattatcgtgatttaaaaggagagtcttttgaccatattacgagtgttgggatgtttgaacatgtcggtgcggaaaatttacatgaatattttgatgtcgttcagcggaatttagcgcctaaaggtacggcgttgattcatgggatcagtcgccaacaaggtggggctaaaaatgcttggattaatcgttatattttccctggtggctatattcctggtgtcactgagctagtcggccatatgacagaaaacgacttgcaagtgattgacttggaaagtttgcgcagagattatcaattgacgttggaacattggacaaaaaacttccataatatagaagcagaaattgttgacgaaaaaggcgagcgcttctatcgaatgtgggacttatatttgcaagcatgtgcagcctcattccaagcaagcaatattgatgttattcaatatttattggttcatccagataacaatgatattccaatgcgccggattggttaa

SEQ ID NO: 1265 - DNA, 888 bp, Enterococcus faecalis
ctttttaatgaaattaattttttaagaagttggacgcaaattgggattcacaataatgataaacaaagtaaatatcaagcagcgcatcatctatttgtagcaagtgcgaaagcagttgaattaggacattccatcaatccagatttccaaattggtatgatggtggcttatattccaagttatcctttgtcatgcaaacctgaggacgtgatagcagctgttcaatttaaccgagagcaagaattttatatggatgtccaggctaagggctattatccagcgcataagctcaaagaatttgagcgtgaaggaatgacaattcaaatggagtcagatgatttagcgattattcaaaaaggaacagttgattatatcgggtttagttattatatgtcgactgtttcgactgcttatcccgaagaagtaaaatatgtcggaggcaaccaaatgcctgcggttaaaaatccttatttgcaagaatctgaatggggctgggctgtcgatcctttagggttaagaatttcattgtgtcagttgtcagatcgttacaatatgccattgtttgtggttgaaaacgggtttggcgcggtggatacattgcaagaggatggctcgattgtcgacgattaccgcattgattattttaaacaacatattgaagccatgagaaccgcaatagaagaagacggggttaacttaattggttatacgccatggggttgtattgacttagtttcagcagggactggcgaaatgaaaaaacgttacggctttatctatgtagacatggatgaccaaggtcagggaaccttgaaacgaactaagaaaaaatcatttaattggtacaaacaagttatcgctagtagtctcttccccacggattgggta

SEQ ID NO: 1266 - DNA, 1035 bp, Enterococcus faecalis
gtccatccccgtgggcaggcatttttggaagctgttgttgcggtgacggcaagctatctgtttcccgttaagattgtcttggaggcggcgcaggaagcgcaagcagccccaacgcaacttagtgatgttttaagcaatgtgttaacaagcgttgtccaaaatccgattcaagcgatgattgaaggcaattatttatctgttttattttggtcctcattaatcggtattgggttacgccaaagttcggtcgctaccaaggatgtgattgccaatctttcaacagggattaccacggtcgttcaaatgattatcggcattgcgccaattggaattctaggtttggtgtttcattcggtggcaacaacaggcattgcagggttagccaagtatggtcagttactattattgttaattggtacgatggccgtggttgctttagtcgtttatccagcgattgttttttggaatattcggcaaaatccgtatccgttagtcttttttgtattaaaggaaagtgcgattcccgcattctttacacgcagttctgcggccaatattcccattaatatggaattggcgaaagcaatggatttaaatgaagaatcttatgcggtctctattccgctaggcgcaacgattaatatgggcggcgcagccattacgattactattatgacattggcggcagtccacacattaggcatgtccgtaccaatctatttagcattattgttgagcatcatcgctgctgtttctgcttgtggggcttcaggaattgctggtggttccttgttgttaattccgcttgcatgtagtttgtttggcatttccaatgacattgccatgcaagtcgtcggcgttggctttatcgtcggcgtagtccaagattccattgaaacagcgttgaactcttctagtgacttgttgtttaccacctcagttgagttagcagaccgacgtaaaaatggtgaaattattgatgttaaagcgttaattggcaaaagtcaattggtggtcgaacaagaaaatatttaa

SEQ ID NO: 1267 - DNA, 288 bp, Enterococcus faecalis
cttttgccaattaacgctttaacatcaataatttcaccatttttacgtcggtctgctaactcaactgaggtggtaaacaacaagtcactagaagagttcaacgctgtttcaatggaatcttggactacgccgacgataaagccaacgccgacgacttgcatggcaatgtcattggaaatgccaaacaaactacatgcaagcggaattaacaacaaggaaccaccagcaattcctgaagccccacaagcagaaacagcagcgatgatgctcaacaataatgctaaatag

SEQ ID NO: 1268 - DNA, 2565 bp, Enterococcus faecalis
  misc_feature (631)..(631): Nucleotide 631 is "n" wherein "n" = any nucleotide.
gaggtacacgaaatgaaatggtatcaactttcctcaacaaaagtaatcgagcagactaagacgaagcaaacgggtctttctagcgaagaacgtcagcaacgtttacaaacgaatggtccaaataaaattgaagaaaaacaacaactgaaaacgtggcaaaagctagccaaacattttacagatttactaatggtggtcttactcgctgccgcaattctaaaatttgccacaggcgaagtggtcgaaggaagtatcatttttctagtggtgcttgtcaatggctttgtcggttattggcaagagcgtaaagcagaagaatcattagacggattaaaacagatgatgggccaagaggcagtcgttctaattgatggacaaaaaacaaccgtttcttctgaaacattggttctgggagatgtagtcacgttacaagctggcgatgtagttccagcagatttgcgcttatttgatgttcataatctgatgattgaagaatcaattttgacaggcgaatcagaagccgtggagaaaattaccggttccttgaatgaggaattgccaacaggcgatcaaaagaatttggctttttcaggaactcttgtccaagcgggctcagccttgggcgttgtantagaaacaggagattccactgaagttggaaaaattaatcacgcgttgcagtcagtagatcaaaaaacaacgccgctcgtgcggaaaatgcaccaattaaacaagcaaattttccaagggattatggtcttgatcgtgtttctgattttctttaccacttttcgtcatggcatggaatggagcctcttattttttgcgatgattgcattaattgtagcaatgattccagaaggcttacctgctgtgttacggatgattttatcgatgggtgttcatgagatggctagagaaaatgcgattattaaaggcatgccttccgttgaaacattaggctcaatgacagttatctgttcagataaaacaggaacgctaactaaaaatgaaatgacggtaatggatgtagtgactgaagaaatgaccattgtcaaagagattatggccaactgtcaagaattgaaattacaagaccaacaaaaaatcgccgacttgcaggggaatcctaccgagttatctttgctacaatatgttgatcaggatcaactgtctttacgccctgtagaaaagaaaattccgtttagttcaagttataaatacatggccactcgccatccgcaagcagaaggttcaattatttatgtcaaaggtgcgccagaagtattgttacaactttctacgttatctgataatcaaaaaggtgcttggcaagcacaagctgcgcaattagcgcaaaaaggacaacgggtattaggtttcgcttataagacagttacgtcacaacaggaactgacacatgaaacattgtcaggattgacgtttgctggactggcaggcatcatcgatccgccaaaagaaagtgccattcaagccgtcaaagaatctcaagaagcaggtatttccgtcaaaatgattaccggagaccataaagatacagcgcaagccattggcgagcaagttggtttaaagcatacgaaaaaagtccttgaaggattagaaattgatgctatgtcagatgaagaattagctcagcacgttcaaaaagtcgatgtatttgcacgaacgacgccagaacataaattacgaattgtcacggctttacaaaacaatggtgaaattgtcgggatgaccggcgatggcgtgaacgatgcgccagcactaaagaaagctgatgtcggaattgccatgggaattaaaggaagtgaagtaaccaaacaagccgcagatatggttttggcagatgataatttccatacgattgctaaagccgtgaaagaaggacgccgcatttttgataacttgaaaaagacgattaccttcttcttgccaacctctttagcacaaggtttaattgttgtctgggcgcttttaatgaatcatcctctaccgctgacacctgtccagatattatgggtaaacatggtaactacgattactttgtcttatgcattaggttttgaaaaagcgagtgctgataccatgaaacgaccaccaagagatgtcaatgaaggcattttaacaaagtacagtatttttagaatcgtctatgtgtcggtactcattatggtaccaggttacctcatggcgttacaatttgagggccaagccttacagcaaacgttcctcttacaaagtatcgtcttagcgcaagcagcgtatatgatcaactgtcgtaagttggttgatccgtcgttaagcacaggctttttccaaaataaagtgttgtttgcttcattaggaatcctctttttactacaagcgctagtagtttactggccagtagcgcagcaattaattggcacaacttctttaaatggccttcaattagcaatgattttcgtccatgttgtgagtctgtttttccttgttgaaggggaaaaatatataaccaaacgattcatgacgaaagaaagccaaaaaactagcgaatgtcctcgctag

SEQ ID NO: 1269 - DNA, 360 bp, Enterococcus faecalis
ttatctcgtaacaccacgattgaagaaccgacttattttcttagtttggcttctttgttagaaaaacaagccatttattccattcaggcgcaaacgatgactgcctatttcctctttcaaggggaacctgcttggaaagcttttttacaacaagaattagctgcttatttaggtactcgtgtgaaattacaagctattgaatatgtggaactaagccagttgacgttaaatgaagccgacataatcatttccaattttcccttggatcatcttgatcttcctgtcttttatctctctttaattccaacaaaaaatgaactccgccgactagcagagctcactcttcattcttatttttaa

SEQ ID NO: 1270 - DNA, 543 bp, Enterococcus faecalis
gggagcttaattatgaaaaaagagatcattgtttatactatttccgattcacttggagaaacatcacaaaaattgttagctgcagcaagcgcacaatatccagatatttcttttcttaatcgatacaatttttcttttgtcacaacagaagaagaattattagagattttaaaagatgccttaaaagataaagccttagttgtcagtacattagtcagtaaacaactaatcacagcggcgaaagaatttagtgaacgaacagggttgttatatttagatttaatggcgccattttttgaattaattcaagcgaaagccggagtagatcctattgaagagcctggacgacgccaccaactagatcgtgcctattttgataaaatctcagcgattgaatttgctgtaaaatatgatgatggcaaaaatcctcaagggtttcttgattctgatatattgttgttaggcgtttcgcggacctcaaagacgccagtcagtatgtatttagcgaatcaaggctaccgcgtttctaacttaccattaatt

SEQ ID NO: 1271 - DNA, 750 bp, Enterococcus faecalis
tggacggaaataagtttgtcaatagaaaaagtttcttgtcaatatgttgaaaaaacaataaatatgtgtataattgtaagcgaatgcacaatttgtttaagaggaattgaggaggaaatgatgaaattaagtaaacgacaagagcaaattatcgctgttgtaaaagagcatcagccagttagtggtgaacgcatttcggacatactagccgtttcacgtgcgacattgcgttctgatttgtcttttttaacactttcaggaattttaaaagcaagtccgaaagttggttatacttacgaaagtgataatatggaggcttttttcttttttgatgtttttcaaacaaaagttcaggagatcatgagtccaccattgatggttgcccaagacacctcaattcgagatgcgattaccaacttgtttatgtatgatgtcggttctctttatgtcatggatgaagcaaaagaattattaggggttttgtcacgaaaagatttattacgggcctctttaaatacaaatattgatggcacacctgttgctgtttgtatgacaagagtgccacatgtgaaaacctgcacaccagaatttactattcttgaagctgctgacactttgcaaaaatacgaagtggattctttgccagtcgttgaaaaagaaaatcctaaaaaagttattggaaaaattacgaaaacgaaaattttaacctatattacgcaacaagcgaaagaagccgcacaaaacagataa

SEQ ID NO: 1272 - DNA, 2733 bp, Enterococcus faecalis
caagaaactttttctattgacaaacttatttccgtccattatgatgtttattgcacatataagacacatattaaacggaggtcacgcatgaaaaagtttatttattcttttaacgaaacacacaatgaaggtaaagagactcttggtggtaaaggggcaaacttggcagaaatgacacgcttaggtttgccgattccacaaggattcacgattacaacccgttgctgtatggactatttggcagatgctactttctttgaagaacacttacaatcagaaattttgaaagcggttaaaaatctagaaactgaaacaggcaaatcttttaccgcggacaatgagattctcttagtttccgttcgcagcggtgctgccttctcgatgcctggtatgatggatactattttaaatttaggtttaaatgatcaacgtgtgaaaaaatttgcgaccttaacctctcctggttttgcttttgactgttatcgccgacttattcaaatgtttggagacgtcgtctatcacattcccaaagaattatttgaccaacaaaaagagcgcttggaacaagagctcaacaaaaaaattaccgcttttcaagaagaagatcattttgccttgattgtccgctaccaagaagtttttgaacaacatcaggtggtcttcccgcaagaccctgtcgcacaactttttgaagcaatcaaagctgtttttgattcatggaataatcaacgtgcggtggtttatcgaaacttacatcatattgcacatgatttaggtacagctgtcaacattcaagaaatggttttcggcaatcgtggactagacagtggcactggcgttgttttcactagaaatccggtcacaggggaaaatcaactgtttggagagtttcttttgaacgcgcaaggagaagatgtagtggctggtattcggacgccagaacccattcgtcgtttacgtttgactatgccaaaagtttatcaagattttcgccattacgcagaacttttagaatatcattatcgtgacatgcaagatattgaatttaccattgaaaatgaaaaattatatattttacaaacaagaaacgggaaacgaaccgccgcagctacggttaaaattgctttagacttagccaaagaaaatcgcattactaaacaagaagcactgttacgtgtgacacctgatacgattgatcaattaattcatcccgtgtttgatcaagagaaacgacaacacatggaacgtttagctatgggacttcctgctagtcctggtgcagcaagtggccaaattgtttttacagcagaaaaagccaaagaactgaccaatctaggaaagaaagtcattcttgttcgtcaagaaacttcaccagaagatattgaaggcatggttgtaagcgaagcaattgtgaccagtcgtggcggaatgacttctcatgccgctgtggtcgcacgaggaatgggaacttgctgtgtgactggttgtgaaagtttaaccgtcaatgaagaaaccaaacaactacactgcgggccacaggtcatcttagaaggaacaatcatttccgtcgatggctcaacgggggaaatttatcttggcgaaattcctacaatttctgctgataataacgatgaccttcaagagctcttgtcttgggcagatgcgtacgctgatttaactgttcgtgccaatgcagaaactacacaagatttagagactgctatccgttttggcgcagcggggattggtttagcgcgaacagagcatatgtttttcggtgaagagcgtgtcttggaaatgcgtcgcctgattttagcagagtctgaaaaggaagcaacctatgcgttggaacaacttcttcattttcaacaggaagacttttatcaaatgctgaaagtagttcaagacaagcccatggtggtccgcttgttaaatccgccgatgcatgagtttttacctcatgaaaagaatgatattcaattattggcgaagcaactacaacggttcccggtgaccatcgccaaacaaattgaacggttacaagaaaccaatccaatgttgggtcatcgtggttgtcgcttaggtgtgacccaaccacaaatatacaaaatgcaagttacagccttatttactagtgccattcgattagtcaaagaaggaattactgtttatccagaagtgatgattcctctaatcgccgaaaaagaagaacttctctatctcaaacgcattttaaaagaaacgattgacggtctctttgaagaacataaaatgactcctttcccttacgaaattgggacaatgattgaactacctagagcttgtctgattgcggatcagttagcagaagaagcagactttttcagctttgggacaaatgatttaacacaaatgacctatggtttttctcgtgatgatatcggtaaattcattaatacgtatcgggaaaagaaaatcattacccaagatccgtttcaatcattagatcaaacaggtgttggtcaattgattcaattagctgtagagaaagcgcgtcgcactaaaccaaacatgagtattggcgtatgtggagaagtcggtggtgatccgcaatccatcacatttttccaaacacttggcctaaactacatctcttgctcaccttatcgggtacctattgcgaaactcgcagctgcccaagccaaaattttaaccgaaccggctgtgactgaagaacaaatggtccttctttaa

SEQ ID NO: 1273 - DNA, 345 bp, Enterococcus faecalis
gggggaagacagatggcgattactataaatatttattatagtgggacaaatggaggtgcaagagaatttgccaaagaaatgattgccagcggaattgtagaggcgattcgtgcagaaaaagggaatagtcgctatgaatacttttttccaatggacgatgaagaaacagttctgctgattgatagttggacagatcaggaagcattagacaaacaccacgcttctccaatgatgacccgtattacggaacttagagaaaaatatgatttgcatatgaaagtagaaagatatgtatcagatgttacagaccccttgacaaaagatgccgcgtttattagaaaataa

SEQ ID NO: 1274 - DNA, 216 bp, Enterococcus faecalis
accagcgacctaccgcttaggaggcggttgctctatcctactgagctacgagaacaatctgttttaattttagaagtcttcactacatctgtcaatagacaaaaagaaagtatcccgcataaacaattatgcgagatactttctttcagtgaaacacgtcgttcgtttatctattattttttttgccgccgatcaagaatcatttttcctaaataa

SEQ ID NO: 1275 - DNA, 1218 bp, Enterococcus faecalis
tacaatgtgcgaggaggaaagaaaatgacaactaaaagagtcaaaaaaatgggcaaagaagaaatgaaagagatgtttgatcttgttatctatgcttttaatcaggaacccacggcggaacgccaagaacgttttgaaaaattgttgtcacatacgcaaagctatggcttcctaattgatgagcaattaacaagtcaagtgatggcgacaccttttcaagtgaatttccatggtgtccgctatcccatggctggaattggctatgtggcttcttatccagaatatcgtggtgaaggcggcatctctgctattatgaaagaaatgttggctgatttagcgaaacaaaaggttgccctttcttacttagcaccgttttcatatccattttatcgtcaatatggctatgaacaaacatttgaacaagcagagtatacaattaaaacggaagattggccacgtgttaaacgagttccaggtaccattaaacgagtttcttgggctgacggtaaagaggtcattaaagacgtataccttgaaaatcaaagagcgcactctggtggtgtgatccgtgaaacttggtggctggattatacgctgaatcgtgcaagtaaaccaaataatcaagcgatttattattcgtcagaagggaaagcagaaggctatgtgatttatcggatagctgctggcacctttgaaatcgtagaatggaactatttaactaatacagcttttaaagctttagctgggtttattggctcacatagtggttccgttcaatcgttccattggattaatggttttgctggaaaagatttaaatgatttaatgccaacgccagcagcttctgtaaaaattttaccttacatgatggcacgaatcgttgagttacaaacatttctggaaaagtatccatttcaatcaggagaaaaagaaacgtattctttagagattgaagattcctatgggccatggaatgaaggcatttggacaatcacaattgacgaacaaggaaaagcaacagtgactaaaggtgctgcggaaaaagaagggactgctgctttgaaagcagatatccaaacgtggacgcaactattcttgggctatcgttcagcagagacgttatctttttatgaacgcttgcaaggagacgcaacgatagctcaacgtttaggccaacgtttagtcaaaggcatgccaattttagaagattatttttaa

SEQ ID NO: 1276 - DNA, 222 bp, Enterococcus faecalis
gaagatttccgccaaaatattggaaagggggccacaagggattcagaaagttataatgttcaaggatatcatatgtggacgtgtatggataactggtcttggctcaatgcctataaaaatcgttatggcttcatcgctgtggatttagatgatgatgcgaaacggaccattaagaaaagcggtcgttggttcaaagaaatgacagcaaataacggcttttag

SEQ ID NO: 1277 - DNA, 687 bp, Enterococcus faecalis
aaggcagaacacggggtgttccatgttgatgggattctatacgatttaggtgtttcttcaccacaattagatgaagcagaacgtggttttagctatcatcaagacgcgcccttagatatgcgcatggatcaagacgcacccttgacggctcgcgaagtggtgaatacgtatagctatagtgagttagtaaaaattttctttcgttatggggaagagaaattttcgaaacagattgctagagaaattgaacgtgttcgtgaaaagcaaccaattgaaacaacaggtgaactcgttgagattattaagacggcgattccagctccagcaagacgcaaaggtggacatcctgcaaaacgaattttccaagcaattcgcattgccgttaatgatgaattaggggcagttgaagagtcgctagaacaagcaattgatttgctagcgaaaaatggcagaatcagtgtgattacgttccattcgttagaagatcgtattgttaaaacaatgtttaaagaatacagtacggtacaagatttgccaccaggcattccagtggtaccagaagaatttcaaccagaattaaaagtaattaccagaaaaccaattttaccaagtgacagtgagttatctgagaataatcgttcacgaagtgcgaagttacgcattgccgaaaaaataaaatctagatag

SEQ ID NO: 1278 - DNA, 435 bp, Enterococcus faecalis
aatctagatagagagaggggtagacacatggctgaattgaagaaagtaaatgatttccattatgaagcaccagaaatggatcagccaactgtggcaacagagcaagacagaaaaatgcaagaggaaacactacctgtccccactctattacccaaaaagaaactaaaaaatgtctctttactagaaaaattaatcggtgttgtattagtttgtgcaacgattggtattgcaattgcgacaattcaagtaagaacgacaattgtccaaaccatgaacgatattacagaaacacaagcagtcattaaagaaaaggaagataacgctttgaaattggaacaagaaagaagcgaactttctaaatcagatcgaatcaaagatgtcgctaaaaagcaaggactagaaaataacggcgacaatgttaggactgttaaataa

SEQ ID NO: 1279 - DNA, 2232 bp, Enterococcus faecalis
ataatgagtaaaagacataaatttaaacaattcatgaaaaagaaaaacttaaatccgatgaacaatcgtaaaaaagtaggcatcattttattcgctacgagtattggattgttctttttatttgcctttagaacgacatacattgtggcaacaggcaaagtagccggtgtatcactaaaggaaaaaacagcttctctatatgaaggaagccaagtggtaaaagctaagcgaggatcaattttagatcgatatggtaatccaattgcagaagatgctacttcctattcgttatatgtcgtattatcaaaaaaatatacgggacaaaataatgaaaagctatatgcggagaaaaaagacttcgatgatattgctgaaattttagcgaaatataccaaactagacaaaaaaacagcattgaaatacttgaataatgggatccatgaagatgggtcaacacaatatcaagtggaatttggtacgggtggtcaaaacattaccttggaaacacgccaaaaaattgaagcagatttgaaaaagaaaaaaatttcaggtgtttatttcaatgaacatccagccagattatatcccaatggtcagtttgcttctcactttattggctatacaaaagcagccaatccagatgatgataaagaaggcttagtaggcgcaatgggactagaacagacctataatgatattttaagtggaaccgatggccgtgtgtattttgaaaaagatatttatggcaatgccttaccaggaactgtggcggaagagaaaaaagcagtggatggtcaagatatttacacgacgctagatagtcgcttgcaaaataccttagaagatttaatgacgcaagttaatgaaaaatatgaaccagtttctatgactgccatgttaatggaagcaaaaacaggcgaaattgttgccatgtctcaacggccaacatttaatcctgaaacgaaacaagggttagacgataatggcacgtggcagaacctattagttgaaagtccttatgaaccaggctcaacaatcaaattatttacaacagctgcttctatggaacaaggacagtttaatcctaatgaattattcaatcgtgttggtggaattcaggttggggatgtaactgtgaatgaccatgactacactcggttgaacggcaaagaatatttgaattatcgtcaagccatttcttggtctagtaatattggtatggtaaaactagaacaaaaaatgggtgatgaaaaatggatggaatatttgaaaaaatttggttttggtacgagcacgcattcaggtttaagtggtgaatctgctggtaaattgccaggaacaaactttgtagatagagcaatgtcggcatttggtcaagcaattacggttactaatttccaaatgatgaaaggtttctcagctattgcaaatgacggttcaatgttgcaacctcattacatcagcaaaattgttgacaaaaatacaggaaaagaaacgattacggaaccacaaatcgtaggaaccccaatcaaagcgcaaacagctcaacagattcgtacgtacatgattgataccgttgaagacccaacttatgggattgcgtatgatatttataaagtaccaggctatcatgttgctgccaaaacaggaactgcccagatttcagatggtaaagggtacgttgatggagcaagtcaagtcttgtcttctgtagtggaaatggtcccagcggataatcctgaatatgttttgtatattacacttagacaagcaaaatcaggttcgccttcagaagcaatggcggcaattgcaaatccattaatgaaattagcgttagacattaaagagacagatccggaaacaacgaaagtagcttctgataaagtcacagttgctgattataaaaatatgacaccagcggaagcgttggccaatgccaaagtgaacggggtggatcctgtgattatcggtgatggtgaaaaaatcaagaaacaatcaacgccgtctggtcaaacattaatgcctaatcaaaaattgattttgatcacaaatggaacgaactatatgcctgatttaaccggctggtcgaagagcgatgttaccaagtttggtgatctattaggtttgactgtcgagtttaaaggtgaaggctatgtgacgaaacaaagtatcgctgctgaaactgaaattacggagaaaaaattaaccgtgactttagaaggcacagaataa

SEQ ID NO: 1280 - DNA, 984 bp, Enterococcus faecalis
aatattaggagagataacatggagtggacacagatttttattcccatagtggtgagttttgccattacagtgagcgtaatgccactattcattggctattttcaaatgaaaaaacaagggcaggttactcgtgaagatggcccgacttggcatagcgtgaaaacaggtacccctacaatggggggagtcgttttccttgtagccagcttgattacttcattagcaatggggttgttcttccaccaatttacgccgtctctactaattattctatttattttagtattatacggtttgttaggttatttagatgatttcattaaagtctttaaaaaacggaacatgggcttgaattctcgtcaaaaattaattggtcaaatttttggtgggttggttttctactttgtttatcgaagtgaaggcttttcagacaccttagatttgtttggagtagcagaagttccgttaggtattttttatggtgtgtttattattttctggttagtcggtttttctaatgccgtgaatttgacagatgggattgatggcttagttgctggtttaggaacaatttcatttggtacttatgcaattattgcctggaaacaacaacaatttgatgttgtgattatctgcctaagtgtgattggtgggctgattggctttttcccttataacagaaaaccagcaaaaattttcatgggtgatgttggttcattagcattaggtggattgttagcagcaatttcaattattttgcatcaagaatggacgctacttttaattggacttgtctacgtttgtgaaacagcaagtgttattttacaagttgcttcatttaaattatttggtcgacggatttttaaaatgtcaccaattcatcaccattttgaaatgtgtggttggtctgaatggaaaattgattttgtcttttggtctgtcggtttaatctgttcaggaatcacattatggattcttttctaa

SEQ ID NO: 1281 - DNA, 468 bp, Enterococcus faecalis
  misc_feature (442)..(442): Nucleotide 442 is "n" wherein "n" = any nucleotide.
tctgttcaggaatcacattatggattcttttctaatctatcaaaggggaaattgacaatgaaaaaaataacaacctatcaaaacaaaaaagtgttggttttaggactagctaaaagtggtgtcagcgcagcgaaactcttacatgagttaggtgcgctcgttaccgttaatgacgcaaaacaatttgatcaaaaccctgacgcccaagatttattaaccttgggtattcgtgttgttacaggggggcatccaattgaattgttggatgaagaatttgaactaatcgttaaaaatcctggtattccttatacaaatccacttgtggcagaagcactaactcggaaaattcctatcataactgaggtggaattagcaggtcaaattgcggactgtccaattgtcgggcattacggggcccccatgggtaaaacaacccaccacncaccaatgattgggttaacggcttaa

SEQ ID NO: 1282 - DNA, 954 bp, Enterococcus faecalis
actagagaaggtgttttttcgcaagaatctacgcggaacacaggactcgttgaagaattgaatcaaagaaacaatgtgttaaagaagggatttgaacagattatgaccattcaatggtttcccggccatatggccaaagcaagaagagaagtttctgaaaaaatcaaatatgtcgatattgtatttgaactagttgatgcgcggttaccgctttcttcccgtaacccaatgatggaccaaattgtccaacaaaaaccacgattagtccttttaaataaaggggacttagcagataacgaccaaaataaaaaatggcaacattactttcaaaagaaagggtaccaaaccctagttatcaatgcccaacaaaataaaggaatcaataaaattgtgccagcagccaaggaagcgttaaaagaaaaattggctcgtgaacaggcgaaaggcttgaaaccgcgtgcgattcgcgccatgtgtattgggatccccaatgttggtaagtcaaccttaatgaatcgtttagtcggaaaaaaaattgcgcaaactgggaacaagccaggtgtgacaaaaggacaacaatggttacgctctggttcccaattggaattactggatacaccagggattctctggccaaaatttgaagatgaagaaattggaaaaaaattagctttaactggcgctataaaagatcaattattgcatctagatgatttggcgatttatggattagaattttttgcacgtttttatccgcaacgtttgacggaacgatatggtttaacagaggaagagctatttttacctgccccagaacagttgatgttaattagccaaaaacgtggttttagagatgattataatcgagccagcgaaatgattattttagaaattcgcagtggaaaattaggtacgtatactttggaccgctgggaagtactaggagaggactaa

SEQ ID NO: 1283 - DNA, 1038 bp, Enterococcus faecalis
catatgttttgcctttttattgctataaaagtaagagatagagattttcttagcagatttttacctaaaaataaaaaattgaacggaggaaaagaaatgaagattattatcgcaggtgctggcgctatgggcagtcgctttggactaatgttacatcaagcaggaaatgatgttatttttgtcgatggttggccagaacatattgaagcaataagaaaaaacgggttagttgctgattttaatggcgaagtggtgaccgctaaaattcctatctatcctcagacagaagtagcaagcatcgattttacagcagacttagttatcctatttacaaaagcaatgcaactggcaggaatgcttgaagcattagaacatttccttaataaaaatacgaaagttttatgcttgttaaatggaattgggcacgaagatattatcaaaaaatacgtgccttacgaaaatattttattaggaaacacaatgtggaccgctgggttagaaggaccgggcaaagtaaaattatttggtaatggttcgattgatttacaaaatttaggggcgcaaagtgaacaagcagcagaagcagtcattaaggtattaaataacgctggcttaaatgctcgttattctgagaatattttatcatccatttataagaaggcctgtgtgaatggaacaatgaatggtttatgtactttgttggattgtaatatggcagactttggcgaaacagagcaagcagatcaaattgttcaacaaatagttaatgaatttttagcagtcgctgaagcggaacaagttacgttagataaacaagcagttcttcaacaaatccgctcgtgttataatcgagaaacaattggtttgcaccatccatcgatgtatcaggacttaataaccaatcatcgtttaaccgaaattgattatatcaatggagcaattgttcgcaaagggaaagtctatgggattgctacaccgtactgtcagtttttaacagagttaattcattgtaaagaaaatttacttcatgctaaataa

SEQ ID NO: 1284 - DNA, 909 bp, Enterococcus faecalis
aaagaaagggagtttctgatgaatattcagcttttaaagtacttcattgaaattgttaatacccgcagtttatcggcggccgctcgcaatttatttgtcacccaaccaacactttctttagcattgaaaaaaatggaatctgagttaggcacagcgttgtttgatcattctgatcaaccgtttcaattgaccgatactggtgtttatttatatgaacatggccaagaagttgtttttcaattcgatcaattggtaacagatattcgtgaaatgaaccagaaaccagttaaaaagcaattgcgtttagggttaactactttatttgctgtacaatttatgaaagaaatttcacgatttttaacaacccatccacatgtgaatttaatattacagcaagacggctcgccaaaattacaaacgatgttagcaaataaagaaattgatatgggactaatttctttcccaaataccttacctgaaattattcatattgaacctttagaaacgactaccaaaggctaccatgtttatgtcgtagttccagaatcaaatcctctctcccaatatgaaaaattaacttttaaagatttgaaagatcaacgattttcatcgttaagtgataattttatgattggtcgcctactactagatcggactcggagcttcggttatgagccgaatatcattttgcataacgatgatttacaagtacttctttatagtttgcaaaaaaataattcgatttgtttgctgccgattgaatattatgaagtgggaaaaagtcagggactgaaatggattcctttaaaagataagtttgactatttccccatcggcattgctttgcgccgcgattttagtctgacagaagatgttagagattttatccaaatcattaaagaaaattaa

SEQ ID NO: 1285 - DNA, 420 bp, Enterococcus faecalis
aatggcttgtctgcaggtgctgctgcaatgggaattgcagccacaactgttgttcttgtgattaattcttggaatgtcaaccaatcgggagtgacactggctgtctctttgggcggcatgaaaatgatgatgcctaacttatttaaatacccaattattttaattccttgtttatttacagcaactatttcagcaattcctgtggttctattcaacatttcaggaaccccacaatcggctggatttggcttggttggactcgtgggaccacttgcttcattggatgcgggcttagggatcttacccttactcttttcttggtttgttgttccaattgtcgcgggtttattctcaaaattcttatttgaaaaagtgttgaaaatttatgatagtaaaatcgtctttgcttatcaaggctag

SEQ ID NO: 1286 - DNA, 390 bp, Enterococcus faecalis
attttcaacactttttcaaataagaattttgagaataaacccgcgacaattggaacaacaaaccaagaaaagagtaagggtaagatccctaagcccgcatccaatgaagcaagtggtcccacgagtccaaccaagccaaatccagccgattgtggggttcctgaaatgttgaatagaaccacaggaattgctgaaatagttgctgtaaataaacaaggaattaaaataattgggtatttaaataagttaggcatcatcattttcatgccgcccaaagagacagccagtgtcactcccgattggttgacattccaagaattaatcacaagaacaacagttgtggctgcaattcccattgcagcagcacctgcagacaagccattctactga

SEQ ID NO: 1287 - DNA, 1155 bp, Enterococcus faecalis
aaacaggccgttcaagatcttttgggaaagccagttaataagcgaagttggttgggagaatctcctatggagattgcaaaaaaaagagttatagctttttttgaaattttagaaaagctagatgttgaatatttttgttttcatgacattgatattgctccagaaggtaactctttaaaagaattcttttctaatattgatgaaattacagatttaataaaagaaaagatggatgaaactggtattaaactattgtggaatactgcaaatatgttttcaaatcctcgttatgtcaacggcgcagcatctacaaataatgcaaacgtatacgctatcgcagctgctcaggtaaaaaaaggtttagatatttcaaaaaaattaggtggagaaaattatgttttttggggtggacgtgaaggatatgaaacattactaaatactgatatgaagtttgaacaagataatattgcgcgtctattcaaaatggctatattttacggtgaaaaaattggacacaagccacaatttttgattgaaccaaaacccaaagagccttcaaaacatcaatacgatttcgatgctgcaactactatggcatttattttaaaatacgggttagaaaaggattttaagctaaatctagaggctaaccatgcaactttagctggacatacatttgaacatgaacttaatgtagctcgaaactatggtgccttgggttcaattgatgctaatcaaggtgatgttctgcttggctgggatacagatgaatttcctactaatgtatatgatgttacattagctatgtatgaaatactagaaaatgggggtattgaacctgggggaataaactttgattctaaagttagacgttcatcttttgaaatggaagatttattacttgctcacattgctggaatggatacatttgcgagaggattaaagagtgcgatgaaattaaaagaggatcgtttctttgaggatctaaaagaacagcgttattcatcgtttaaaaaaggtattggagcaaaaattatttctggaaaagaaaatttagaaagtttaactaattatgccctaaaaaatgatgaaccaataatagaatcaagtcatatagaatatgtaaaaaatattttaaatgattatctgtattaa

SEQ ID NO: 1288 - DNA, 1506 bp, Enterococcus faecalis
aaggatttaataattatgagttatgttttaggtatagatttaggtacaagttcattaaaaggattattggtatctgaaataggggatgtcattgctacgtcttcatcagattatccattgttttcttcaagaccaggatatagtgaacaaaatccacacgattggattaaagcaattgaaaatgtaattaatgatttattgagtgaatttcccgaaatgaaaaaagaattgaaagggattagtatatctggacaaatgcatagtttagtattattagacaaggataatgaaataattcgtcctgctattttatggaatgatgtacgtacaacgaaacaatgtgaggatattatgaattgtatggggagagaagtacaggaaatcactaaaaatattgctttagaaggctttactttgccaaaaattttatgggttcaagaaaatgaagaaaagaattggactaaaacgaggcatataatgttacctaaggattatttggtacattggctaactggttgttattctacggattattcagatgcagctggtacgttaatgctagatgttaaaaagcgcatttggtccaagacaattcttgataagtttaatattcctaaggagtatttgccaacattatttgagtcttcagctaaagttggtaatatgagaagttcgttgattaataaatttggactagaaacaaaagtggaaatttttgcaggtggagctgataatgcttgtgcggctattggagctgggatagttaattctgaagtagcaatgctgtcaattggtactagtggcgtctttttgtcaatggaagacgatgctgagaacgaatatcaagataatctccacttatttaattcagctctgcctaattcttattactccatgggagtaacgttggcagcaggtaattctttaaaatggtttagagatacatttgctaaagatgcagaattttctgatttgttagcgaatattgatgaagtaatagtaggaagtgagggattgatttttactccctatataagaggagaaagaactccgtatcaagatagtcaaattcgggggagttttattggtatcgatagtcgacatagtctaaaacattttacacgatcagttattgaaggaataactttttcattaaaagaatctaaagtaatcatggaacaaagaaaaaatttgaaaataaaaaaaattatttctgtaggtggaggaacgaaaaatcaacaatggcttcagatacaggctgatatttttggccttcctatcactacattggaaacggaacagggtcctagtctgggagctgcaatattagcagttattggttgtggtatgtgtgcaaacattgatagttgtattaaaatgtttgtgaaatataaaaaagtatatcaaccaattgaaaaaaatgtgttgttatataataaattctttcaagtatatagtaaagtttattctactactaaagagatttgttatcaattacaagagtaa

SEQ ID NO: 1289 - DNA, 495 bp, Enterococcus faecalis
cgacaaaaacatacccaggaggacttttacatgacccaagtacattttacactgaaaagcgaagagattcaaagcattattgaatattctgtaaaggatgacgtttctaaaaatattttaacaacggtatttaatcaactaatggaaaatcaacgaacagaatatattcaagcaaaagaatatgaacgaacagaaaaccgacaaagtcaacgaaatggctattatgagcgcagctttacgacacgtgtaggcacgctagaattaaaagtacccagaacacgtgatggccatttttcacccacagtgtttgaacgttatcaacgaaacgaaaaagccctcatggcttcaatgttggaaatgtatgtatcaggcgtttcaactcgtaaagtatcaaaaattgtggaagaactttgtggtaaatccgtctctaagtccttcgtttctagcttaacagaacagctagaacctatagttgaccgggctgttcacatcgga

SEQ ID NO: 1290 - DNA, 195 bp, Enterococcus faecalis
  misc_feature (176)..(176): Nucleotide 176 is "n" wherein "n" = any nucleotide.
tgtaaattgtttgttaacaattggaaaaacaatccagttggggtttggaaaatttttggttcaaaattgaacaattttcatttattaaaagttcattttaacttaatgcttttttattttatacaacatttaaatatgcaaagaatgaatagggaggaaaaggaaaagtggaacanacaacacagacgcaattag

SEQ ID NO: 1291 - DNA, 864 bp, Enterococcus faecalis
  misc_feature (24)..(24): Nucleotide 24 is "n" wherein "n" = any nucleotide.
ggaggaaaaggaaaagtggaacanacaacacagacgcaattagtagaaattcaacaagtcgttttacgcatgtcaaaatattttgtggctttttgtgaagaacataatctaacctgttatttttgtggaggcggttgtatcggagcaatccgcagtcaaggttttattccatgggatgatgacttagatttctttatgccaagaccagattatgaaaaattgaaagtgctttggcctaaatatgcagatacagaatgttatccattgttagttgcttcaaaaacttataatgatcataattcatttatgacaattagggatgcacagacaacgtttattaaaacctatcaagatggattagcgattcctcatggtattcctatcgatatttttcctttagatggtgcgccaaaaggaaattttcaaaggaagaaacaaaaaatttgggcattaatttatgctttattctgttcacaagtggtaccagaaaaacatggtggcattttagcaacggggagtcgggtattattgaatatctttccatcgaaaaaggttcgctatcatatttggcgctttgctgaaaaaagaatgactaagtattccttcggctccactccttatgttacagaattatgtgtcggaccacgctacatgggtaatatttatcatttggaagattttaaatctgctatttttgttccatttgaagatacaaaaatgccaataccagtgggctacaagcgctacttaacagaggtttttggggattatatgcaattgccaccagaggaagatcgccaaccccatcatgaagcgctaattgttgatactaaaaaatcgtacacagaatatcttaaaaaataa

SEQ ID NO: 1292 - DNA, 2700 bp, Enterococcus faecalis
atatataaggagagtttcatgaaaaaaatcatttcaggtatgttaatttgtactgtattattaaatagttttagtgtgattgcatcaggagaagagcttgtaaaaacagaaacaacgggggagactggcttggtcactcaagctacgtcagaaacaacgactaattcaacggaggatacatcttctgttacagaagaaaatacctctgaaagagatagttctacttcaagcacaaaagaagagtctcttgattcttcaacaaatagtacaacggaagaacattcttctgtttcagaaacaaacacaacagatagtaaaacagaagcatcacaaagctctgaagtagaaaaaaagaccattgaccaagatgaagcggattatcaagaagcagcacgtgaaggaacgaaccataaaaaaggaacatatgctatgaaaaacggcctttcttctagggtagcgcgagcaacagttgcgaacgtctatgcgaatgatcctaatttgcctggcaagaattttattgacgtttctagttggaatggagacatttcagtagctgaatatcaaaaaattaaaagctatggtgtaacaggtgtttcggttaaattgacagaaggaacttggtatgttaatccatatgctgcgggccaaattagaaatgccaaagctgcgggcttaaaagtttcagcatatcactatagtatgtatgtctctgctgcgacagcacaagatgaagcaagatattttgctcaggcggcggctaactctggcttagataaaaataccataatgtttaatgatgcggaagatccaacgcttacaaacaatgggcgaaacgcccatgctaattctgttgcgtttaaccagcaattaaaggcattagggtataaaaatgatgcgttgtatgttggcaaatggtggttaacaaatggctatatcgacacctccgccttcggaagagacagagtatgggtagcgcaatatccatatactccagatagttccatgcagtggaataatgaccatggtgcttggcaatggtcttcgcaaatgtatttccctggtttagctaattatgaagggcgtccgtttgatatttccatgacctatagtaattttttaaatatgggtaatagtagtgggcctgacttaagtaagtattacacaactaatccaggtcgagtgatcatgaaaaatgacgatactttttaccaagatgtagcgtttagaactcctggttggcgagttaaaaaaaatacactagttaccattaaggggattgaatatagttcagcaggaattcctcgattggtcacagaccaaggttatttaacagcaaataaagattatgtattagcggcacaaagcaatattgatttgtattttacgacaaatcctaaaaaagttcgtttgaaaagcgatgattatttctatgctgatccagaatttaagcaaaggttgtctaaggtttcgaagggaacaatagtagaagttgaagatttagcttatactcaaagcggtatatttcgattgaaaacagcgaaaggatatttgactgcaaataaaaatatagttgaacaatataaaggattagaagatacttactacacatctaatcctggacaagtaattactagaaatgaagatacctattacaaagatgtagaattcaagacaaaagcaaataaagtatctgcaggcagtgttttaaaagtaactgctattgagaaaacaaaatcaggaattcctagattgaagatggcaaatgggtattatttcacggctaacaagaactatgtagtagctactggatcttggattgctaactatcatacggttaatccagggcaaattattatgaaaaatagtgataatttttatggggattcagacttcttatataaaggagcagctgtttccaagggaagtttagttcctgttgtgggaatcgagtaccgtgaaaatcaagttcctcgtttgattacccaaaatggttatttaacggctaataaaagttatgcacaaaaagttgtgccaaacatcaaagattatctatatgattatccagagtatgtagttatgaaaacaaatgattattattatcaagatgtaaatttcagtaaaaaaggtgagtttgtttctaaagatacattaatcaaagttttaagtgttgattataccgaaaacggattacctagattaaagactgccaaaggttatataactgctaacaaatcatatgttacaaaattggtatcaaattcagataattactttactgaaaatccgcaccaaattattatgcgagtgtcagataaactatatactgatgtagagtttcgtaatggtagcagaaccttatcatctgggactgttgttccagttaagggcattgagtattcctctaaaggtgttcctcgcttgaagacagaaggaggatatcttactgcaaataaaaactatgtgacagctgctggaaataccaataacaattactttatcactaatccaaaaaaagttaagctcttaattgatgattgtttctacaataatactgagtttactaaaaaaggacaggctgttaagaagaatacgattgttgaagttgaagcaatcgaatatacaaacaatggtataccaaggttaaagacgaaacaagggtatttaactgctaataagtggtatgtagcaaaagtgggttaa

SEQ ID NO: 1293 - DNA, 258 bp, Enterococcus faecalis
catctttgttggacttatttttatacgagttcgacaaaggtgtttttttatagagaaaaagattttattggtcaaaaattttcgctatttataaaggggctaaaagtgttgttaaaattgatgaaaagcataacaatcatctttttattcaatcaatatctaaataaaaaaagaaatacgataaagcctaagactattaaaatatataaaataaaacaccgccaatatttacaggggagcgtcaataattttgtgtaa

SEQ ID NO: 1294 - DNA, 363 bp, Enterococcus faecalis
tttaaggctgtttatcgagctaactcaaaagaagaagcgaataccttcttatccggcatgattgagaaatggaagaaaaactatcctaaagtgacgcagtcactcatagaaaaccaagacttattaactttttatgattttccacctagcattcgtagaaccatttactcaaccaatctaatcgagtctttcaataagcaaattaaaagatacagccgtagaaaagagcagtttcaaaatgaagaatcactagaacgctttctagtcagcatttttgatacatacaatcaaaaatttctaaacagaagccataaaggttttcaacaggtaaccgatacattagtttcaatgtttactgagtaa

SEQ ID NO: 1295 - DNA, 543 bp, Enterococcus faecalis
ttagaggctgaagcagtggttcgtgtgacttctttagatattcatgcgcacaaaattaagctaattaatgaaaatgcgcaacgcatccatgtggcggatgtcgtccaagcagaaaggcttgatgcgcgacaagtggccgaagaattccccgcagaaacctttgatcggattttagttgatgcaccatgttcaggcttagggctaatgcgccgtaaaccagacattaaataccataaaacggccaatgattttcaaaatttacctaaaattcagttagaaatcttagaaagtgttgccccaacactaaaacaatggggtataatggtctatagcacttgtactattacgccagaagaaaatcaggaagtggtggcagcctttttagccaaacaccctgaatttgaaaaaattgaaattgttgcaaatgaaaatgtccaagcagtagtaaaagagcaagaactggttctgtatccccatcaatacatgacagatggcttctttatttgctgtatgcggaaagttagttcaaatgaggtgaaataa

SEQ ID NO: 1296 - DNA, 756 bp, Enterococcus faecalis
aataatttggaaatcaacgttcaatcagatgtcggtcgcaaaagaaatacgaaccaagattatgccaacgtttttgagaaccaacaacacataacctttgctgttttagcagatggcatgggtggtcaccaagcaggtgatgtcgctagccaaatggcagtcaataatttaggtgagagttggtccaatgcgtctgtcgactcagctgaaaaatctgcacagtggttaattcaagcaattcaaaaggaaaatgaaaaaatttatgaacgcggacaatcgaaaccagagtatttaggaatggggacaacagtggttggtgccattcttttaccggattcatttgtcttagcaaatgtgggggacagtcgtgcttatttagttcgtgaccaacacatgttacaattaacagaagatcattctttagtgaatgaactagtaaaatcaggggagattactcgtgagatggctgcaaatcatccacgaaaaaatgtcctaacacgttctttgggaatgcctggcactgttgaagtcgatgtaaccaatcatgaatggctgcctaatgactatttactgttatgttcggacggcttaaccaatatggttcctgagacaaaaattttagaaattttagagacgtcagatcctttaaaatccaaattaagccaactcgttgctcaagcaaatgaagcgggtggtttagataacattaccgtgttagtgatacactttgacgaacagaaggaggaaaaccaatga

SEQ ID NO: 1297 - DNA, 2178 bp, Enterococcus faecalis
cgaacagaaggaggaaaaccaatgatagaaatcggcaagaagctgaatggtcgatatcacattattggcagcatcggaagcggcggcatggccaacgtctatttagcacacgatttaattttagaccgagacgttgcagtaaaagtcttgcgctttgacttccaaaacgatcaagccgccatccgacgttttcagcgtgaagcactagccgcaactgagctggttcacccgaatatcgtcagtgtgtacgatgtaggcgaagaagatggactacaatatttagtcatggaatatgtgaaaggaatggacttaaaacgttacatccaaacgcatttcccaattccttattccacagttgtagacattacgcaacaaattttatctgctgtcgcaatggcacatgaacatagaattattcaccgagatttaaaaccgcaaaacattctgattgacgaacacggcacagtcaaaattactgactttgggattgcgattgccttgtcagaaacgtcaattacgcaaacgaacacaatgttaggttcggtgcattacttatcgccagaacaagcgcgcggaagcatggcgaccaaccaatcagatatttacgctgtgggaattattctctatgaaatgctaacagggaatgtaccttttgatggtgaatcagccgtaacgattgccttaaaacattttcaagaagaaattccctctgtcaaaatgtttgatccagggattcctcaatcattggaaaatgtggttcgtcatgcaaccgcaaaagacccaagcgatcgctacaaaacagcgaatgagatggcagaagacttatacacgtccttgtcagccagtcgtttaaacgaacctgcgtgggaaccaacggctttattaggagaaacgaaagtattaactccgattcccgaagacatcgctgaaccggaagagacaacgcctgtcgaagtcccagaagatatcgcagatgacattttagctgaacaaccgccgaagaaaaaccgtaaaaaattgtggattggcttagcaattgcggcattaatttctttagcaataggtggcttagcctttgcaatgtcgggcggtaaagacgttgaagttcctgatgttacaaatgaaacgaaagcggacgcttcacaagcgctaaaaagtgccgggctgaaagtcgatagtgaaaccaaaaaaattcccgacgataagattgaagaaggcaaggtggtcaaaacagaccccgaagcaaaatcatctgtgaaaaaaggccgatctgttactttatacatcagctctggaacagaaaaaattgagatggccgattatacaaaggaatcgtatgaatctgctgtcgaagccttgaaaaaactagggttttcagaagaccaaattacaacgaaaaaagaatacagtgattctgtgtctacggatagcattattaaacaaaaaccagctgcaggtaaaaaagttgatccgaaaaaagacaacgtcactttaacggtcagtcaaggaccagaaacggttactttgcctagttacgccggttattcttacgaaaatgcagtaaatgcactggcacaattaggcatttctgactctcaaattacgcgtgtcgaccaagcaagcgatacggtagaaccaggtttagtcattacgcaagaccccgcaccaggtggcaccgtgacacctaaaaatggccaagtgacgttatatgtaagtaaaggtagcgacaaagtgacactttctgattatagcggaatttcttacgataatgcggtaagtcgcttaattgctttaggtatcccagaatctcaaattaaacgagtggacgaagaaagcgacaaagttgaaaaagataccgtgattagtcaagaaccagcttctggtaccgctgttgatccgaaaaatgacacgattactttacatgtcagcaaaggcagtgactcagtaactgttcctgatatttcaggttattcgccaaaagctgcagaagacagcatcaataacgctggccttaaaatcaatgaacaaggattatctggctctggcgatggccaagtcgttgaacgaactagcccatccgctggcagcaaagtcaaaaaaggcgactctgttacagtttattattcaaaagcaaatgattcaaaaagcaccactagtgaaagtagtacgagtaattaa

SEQ ID NO: 1298 - DNA, 900 bp, Enterococcus faecalis
ttaggagtggtttatctgaaaggtcaaatcagaaaagcgttaagcggtttttattatgtatacgcagatggagaaacatatcaaacaagagcgcgagggaattttcgtaatcgaaaaattacgccactcgtgggagatgaagtactttttgaaagcgataatttaacagatggttatgtgttggaaattttaccaagacgaaatgaattagtgcgcccgcctgttgcaaatgtggatctaggtgtggttgtcatgagtatggtttcgccaaatttttcgtttaatttgttggatcgtttcttagtcagcttagagtataaggatatagaaccagttatttatttaacgaaagttgatctattagatgagccgcaacgtcaacaagtcactgaaattaaacagatttatgaagcgttaggttatgcggtaatcgcttcggaagacgtagaagccaccaaagaattagaacgctttttcccagaacggttgactgtttttatgggacaatcaggcgctggaaaatcaacattgttgaatcaaatttcaccagaattacaactagcaactgcggaaatttcccaatctttaggacggggcaaacatacgacccgtcacgtggaattgattccgttatacgacggtttggtcgctgatacaccaggatttagtgccatcgatttcttggagatggaagcagtggaattaccaaagcaatttcctgaatttgttgccgcggcctctcactgtaagtttcgtgaatgtatgcaccacaaagaacctggttgtgaagtgaaacgtcaagtggaagcgggaaccattgcgacgagtcgttacgaaaattatttacagtttttaatggaaatcgagaatcgacgacctgtttataagaaaaaatcatag

SEQ ID NO: 1299 - DNA, 690 bp, Enterococcus faecalis
gaaaaaatcatagcaaatataaagggagcgagccaaatgaaactagcaccatccattttaagtgccgattttgccaatttagaaagagatatccgtttagtagaagaattaggagcagattatattcatgttgatgtcatggacggtcaatttgtgcccaacattaccttaggaccgaatatcgtttcagcgattcgtccagtgacaaaactaccattggatgttcatttgatgattgtacaacctgaaaattatatcaatgcttttgcggaagccggtgcggatattattaccgtccatcaagaagcaacaccccatattcatcgtgccttacaaatgattaaaaatgcgggtgtgaaagctggcgtaaccatcaatcctgggacaccactttcgatgatcgaaaatgtattagatttagcagaccaagtcttggtaatgactgtcaatccaggctttggcggacaatcatttattgaaaactcactagaaaaaattgctcaattaaaagaatggaaagaaacaaaaggatacacctatgaaattgaagtcgatggcgggattgttcctgaaactgccgcacgctgcaaagaagccggtgcggaagtgttcgttgcaggctcctacatttataatgctgaaaatcctcaagaacgaatcgatgcactgagagcagtgctagacaaatga

SEQ ID NO: 1300 - DNA, 528 bp, Enterococcus faecalis
tttgaatacctaaaagaacgcggtttacaaggtacggaactcgttatttctgatgcgcacaaaggattattctctgccattagaaaatccttcaccaacgtaagttggcaaagatgccaagttcacttcctaagaaatatctttaccaccattcctaaaaaaaattcaaaatctttcagagaagctgttaaaggaatttttaagttcacagatattaacttagcgcgtgaggctaaaaatcgattgattcatgattatatcgatcaaccaaaatattcaaaagcttgcgcatcattggatgatggattcgaagacgcctttcaatataccgtacaaggaaattcccacaatcgactaaagagtaccaatctaattgaacgactgaatcaagaagtacgcagaagagaaaagattattcgcatcttccccaatcaaacatcagccaatcgcttaattggagccgttcttatggacctacatgatgaatggatttattcttcaagaaaatacatcaattttgataagtag

SEQ ID NO: 1301 - DNA, 453 bp, Enterococcus faecalis
gtagaaatggtaaaaacattgtatagcattttacacaggagtctggacttgactgagtttatggaagaagttttaattgatgataatatggtttttgatattgataatttaaaaggatttcttaatgataccagttcatttgggtttatagctaaagaaaataataaaattataggatttgcatattgctatacacttttaagacctgatggaaaaacaatgttttatttacactcaataggaatgttacctaactatcaagacaaaggttatggttcaaaattattatcttttattaaggaatattctaaagagattggttgttctgaaatgtttttaataactgataaaggtaatcctagagcttgccatgtatatgaaaaattaggtggtaaaaatgattataaagatgaaatagtatatgtatatgattatgaaaaaggtgataaataa

SEQ ID NO: 1302 - DNA, 1440 bp, Enterococcus faecalis
atgaatatagttgaaaatgaaatatgtataagaactttaatagatgatgattttcctttgatgttaaaatggttaactgatgaaagagtattagaattttatggtggtagagataaaaaatatacattagaatcattaaaaaaacattatacagagccttgggaagatgaagtttttagagtaattattgaatataacaatgttcctattggatatggacaaatatataaaatgtatgatgagttatatactgattatcattatccaaaaactgatgagatagtctatggtatggatcaatttataggagagccaaattattggagtaaaggaattggtacaagatatattaaattgatttttgaatttttgaaaaaagaaagaaatgctaatgcagttattttagaccctcataaaaataatccaagagcaataagggcataccaaaaatctggttttagaattattgaagatttgccagaacatgaattacacgagggcaaaaaagaagattgttatttaatggaatatagatatgatgataatgccacaaatgttaaggcaatgaaatatttaattgagcattactttgataatttcaaagtagatagtattgaaataatcggtagtggttatgatagtgtggcatatttagttaataatgaatacatttttaaaacaaaatttagtactaataagaaaaaaggttatgcaaaagaaaaagcaatatataattttttaaatacaaatttagaaactaatgtaaaaattcctaatattgaatattcgtatattagtgatgaattatctatactaggttataaagaaattaaaggaacttttttaacaccagaaatttattctactatgtcagaagaagaacaaaatttgttaaaacgagatattgccagttttttaagacaaatgcacggtttagattatacagatattagtgaatgtactattgataataaacaaaatgtattagaagagtatatattgttgcgtgaaactatttataatgatttaactgatatagaaaaagattatatagaaagttttatggaaagactaaatgcaacaacagtttttgagggtaaaaagtgtttatgccataatgattttagttgtaatcatctattgttagatggcaataatagattaactggaataattgattttggagattctggaattatagatgaatattgtgattttatatacttacttgaagatagtgaagaagaaataggaacaaattttggagaagatatattaagaatgtatggaaatatagatattgagaaagcaaaagaatatcaagatatagttgaagaatattatcctattgaaactattgtttatggaattaaaaatattaaacaggaatttatcgaaaatggtagaaaagaaatttataaaaggacttataaagattga

SEQ ID NO: 1303 - DNA, 456 bp, Enterococcus faecalis
tctctgccattagaaatcttcaccaacgtaagttggcaaagatgccaagttcacttcctaagaaatatctttaccaccattcctaaaaaaaattcaaaatctttcagagaagctgttaaaggaatttttaagttcacagatattaacttagcgcgtgaggctaaaaatcgattgattcatgattatatcgatcaaccaaaatattcaaaagcttgcgcatcattggatgatggattcgaagacgcctttcaatataccgtacaaggaaattcccacaatcgactaaagagtaccaatctaattgaacgactgaatcaagaagtacgcagaagagaaaagattattcgcatcttccccaatcaaacatcagccaatcgcttaattggagccgttcttatggacctacatgatgaatggatttattcttcaagaaaatacatcaattttgataagtag

SEQ ID NO: 1304 - DNA, 207 bp, Enterococcus faecalis
aattatcgctttatgattcaaagtgcgaaagcgaagagacctgaccacatttttgaataccttaaaagaacgcgtttacaaagtacggaactcgttatttctgatgcgcacaaaggattagtctctgccattagaaatcttcaccaacgtaagttggcaaagatgccaagttcacttcctaagaaatatctttaccaccattcctaa

SEQ ID NO: 1305 - DNA, 1281 bp, Enterococcus faecalis
gaaaaccgactcttggtagggatggaatgggatgaatcacctgctcatccgggagaatatggtccatatcgtcaatcagaacgtaaagaaatttaccaaccattgattgatcaattattaagtagcaatcgtgcgtataagtgttattgtacgccagaagaattagaagcagaacgtgaagcacaacaagctcgtggggaaatgcctcactacgcaggcacttgtgcgaatttaacaccttctgaacaagcagccaaagaagcggctggtctagaaccagtgattcgtttccgtgtgccacgtaatacagaatacaaatttgatgacatcgtgaaaggtgaaattacttttgagtcagataacattggtggcgattttgtcatccaaaaacgcgatgggatgccaacgtataactttgccgttgcagtagatgatcacttaatgaaaatttctcatgttttacgtggcgatgatcacattgcgaacacaccaaaacaattaatgatttacgaagcgtttgaatggacaccacctgtctttggccatatgaccttaatcattaattcagaaactggcaaaaaattgagcaaacgtgatgaaacaattttacaatttattgaacaataccgtgaattaggttacttaccagaagccatgttcaactttattgctttactaggatggtctcctgttggcgaagaagaaatcttctcacaagaagacttgattaaattgtttgatgaacaacgcttaagcaagtcaccagcggcctttgatgcgaaaaaattagaatggattaacaatcaatacatgaaacaaatggacttaagtgaactaacagatatgtgtattccttatttagtcgctgacggtcgtgttgaagaaaatccatctcctgaaaaaatcgaatggttaaaacaattagttagcttgtatcaaccacaaatgagttatgcagctgaaattgtggaactatcaaacttgttctttaatgaacatccagttttagatgatgctgcgaaagaattcttgcaaggagaaacagtgccaactgtgttacatgcgtttaaagaacaattagaagccttggacgttttcgatgtcccaagtattaaagcagcgattaaagccgtccaaaaagaaaccggcgttaaaggcaaaaacttgtttatgccaattcgaattgctgtttctggacaaatgcatggccctgaattaggcgaaaccatcgaattattaggcaaagaaaaagcattagatcatttaaataaagtgttataa

SEQ ID NO: 1306 - DNA, 555 bp, Enterococcus faecalis
aaaggagttcaccatatgagttggttgaaacgtagcgtcgcagctgttaaaagaaacgatcctgcagcgcggaccacactagaagttcttttaacgtatcctggcttgcacgccctgttttggcatcgcttgtctcatttcttatataggcatcagttgtttttgttggcgaagattcatgcacaattttggcgtttcataacgggcgtagaaattcatcccggagccacaattggagcgggagtttttatcgatcacggcatgggcattgtgattggggaaaccgcggaaatagaagaagatgttgttttgtttcacggagtgacgttaggtgggaccggtcgtgatacgggtaaacgccatccaacagtgaaaaaaggagcgatgatttcggcacgagctcaaattttagggccagtggtgattggtgaacgttcaaaaattggtgcgggtgctgttgttatttcagacatcccagcagatgccacagctgtgggtgttcctgcgaaagtcgttcgtctaaatggaagaaaggtggaaaaagggcatgattaa

SEQ ID NO: 1307 - DNA, 1437 bp, Enterococcus faecalis
atggaagaaaggtggaaaaagggcatgattaaaatttataatacattgaccagagaaaaagaagtatttacgccaattgaggcgcgtaaagttcggatgtatgtctgcggaccaaccgtgtataactatatccatatcggtaatgcgcgcagtgcgatcgcctttgatacgattcgtcgttattttgaatatcgtgggtatgaagtgaattatgtctcgaactttacagatgtcgatgataaaattatcaaggcagctaaagaattgaaaattactgcgccggaagtggcggagcgttttatcaaagcctttgaagaagacacgcaagcattgaatgtccaaccagcaacgttacatcctcgggtgatggaccacatgcctgatatcttagctttcatcgaagttttaattgaaaaaggttttgcttatgaggtcgcaggtgatgtgtattatcgcacccgtaaattccctaattatggtaaattaagccatcaatcgattgatgaattagaagtgggggcaagtcaacgaactggcgttgaacaacaattaaaagaagacccattggattttgctctttggaaaagtgccaaagaagatgaaatttcttgggattctccttgggggaaaggacgtcccggctggcatattgaatgctctgtcatggcgacaaaacacttgggagagacgattgatattcacggtggtggacaagatttagaatttccacatcatgagaatgaaattgcacagagcgaagccaaaacaggccatacctttgccaattactggatgcataacggctatgtcacaattggtgaagacgatgaaaaaatgagtaaatccctaggtaacttcattactgttcatgaaatgattcaaaaagtggatccgcaaattttacgtttctttatgtccaccacccagtaccgtcgcccgattcgttatagcgaaagcactctaaaagaggcagcagccaattatcaaaaattgaaaaatgcgtttgaaaatttacgttttagacaagcagatgcggtcgcaagtttgccagaggatgaacactatttggctcaattaaacgaattagaacaacgttttattacggaaatggacgatgatttcaatgcagctaacgggattacggtcgtttatgaattagcgaagatgatgaatcagtacagtgaacaagcgacagtttcggaaccagttctagtggcgatggataagcttttcagtggctggttagctatttttggtttattctttaaaaacgaagaattagtggatgcacaagtcgatgcgttaattgaagaacggaaccaagcacggaaagaccgtgattttgcccgaagtgatgaaatccgcgatttattaaaagaacaaggcattgttttagaagatactccgcaaggaacgagatggagaagaagtgaatga

SEQ ID NO: 1308 - DNA, 399 bp, Enterococcus faecalis
atgagagattacaaacaattaaacggtttagctttggcctatgttggcgatgcgatttatgaaatttacattcgtgattatttagtttccttgggacaaacgaaaccgaatgttttgcatcgcatggcgacacattacgtgtcagcaaaagcccaagcaagcttaatgcaagcgatgttagcgggagaaatgctaacggaggaagaagaagtgatgtacaaacgcggtcggaatgctaaaagtcacacctttgccaaaaatgctgatgtgacgacctatcgggtagcgaccggtttcgaatccttgatgggttatttacatttaacacaacaaaaagaacgtttagaagaattaattaactggtgtatcaagaaagtaggtgaaaccaatgaaaaatga

SEQ ID NO: 1309 - DNA, 363 bp, Enterococcus faecalis
gtgaaaccaatgaaaaatgaaaaatctcgtccttttaaaaaaggtaagaaacgttcagataagcgttcaaaagaacggaacccacgaccagcgacagcaggtgctgatggaacctcagaagagctagcagataactttgtctttggtttccatgccactgttgaggcgttgcagcaaggacgcgggaataaattgtttttacaagaagatgctcgtggcgagaaaattgagcaattaaaacaagcagcgaaagaacaagctgttccagttaaatgggtgcctaaagcaaaattagatacgatgagtgatcaccgcgtgcatcaaggcatggttttagcaatcacggcgtatcaatatttaact

SEQ ID NO: 1310 - DNA, 1581 bp, Enterococcus faecalis
aggttaaaattgcagccaccaggtttgttcctagggttaaaaggtttattttttaaagaaatttttttacaattattcggagcaagtgtagccaatattcctggaagctttcaacaaatgttgtctgtcattacagataccgtctttgcttttttgccagctttgatgttttggtctacctttaaagcatttaatgcgacgcatgtaatcgggattgttattggtttaatgatggtatcacccattttaccagacgcttatgcagttgcaacaccagattctggcgtgaaagctattatggcttttggttttatcccagttgtcggtgcacaagggtccgttttaagtgcaattgctgctggtataattggcgcaaagattgaactttttttccgaaaaaagatgccgaatattcttgatcaaatttttacaccctttatgactatgttaattacttttttaatcatgattctcggaattggcccaattttgcataccgttgagttaggcatggtagatgttgtccaatggttgattgggttgcccttaggattaggtggtttcgtgattggtgcctcatatcctttaatggttttgattggtattcatcatacactaactatggtagaaacatcattattagcaaatacaggatttaatgcattgattacaatatgtgccatgtatgggtttgccaacgttggcagttgtttagcctttgcgaaaaaagcgcaagatagcaaagtgaagtcgacagccattggttctatgttgtctcaattatttggagttagtgagcctgtgttatttggattacttattcgttggaacttaaaaccgctgctatgtgtcttgtttacatcaggtttaggcggagcaattttagctatttttcatattcaatcaaattcttatggcttagccgttattccttctttcttaatgtatatctatagtgcacatcaattagtgatctatttattagtcgcacttttatctgtcggtgtatgttatgcattaaccagtctatttgcaattccgcaagaagttttgatttcagataaagtaatcgaagaggaagaacgcgaagtctttgaaatgcaacacaataccttagatgaacaacttttttctccggtaactggttacgccatgaatcttactgctgttaatgacccagtattttcaagcgagatgatgggcaaaggtttagcaatcatgccaacagcgaacaaggtttacgcgcctgcagatggtttattaaacttggttgcagaaactgggcacgcttatggtatccaaacggacgcaggagctgaagtattaattcatataggaattgatactgtcacattgggacaggaggtctttcagacacaagtaacccaaggtcatcgtgttaaaaaaggagatcttttaggaacgttcgatcgaaaagccattaaagaagctgggcttgactcaactgtcatggttatcattacaaatacttcaagttatttaagcgtaaagccaatgatgtcagatcataatgaaattacgccggaacaaatcattttaaatctaaatacacctaactaa

SEQ ID NO: 1311 - DNA, 711 bp, Enterococcus faecalis
cattttttaatgaatttacataataatacaagtggaggtctgttcgtgaaggtagcaggagacaaaataaaacaagcgagaaaacttaaaaaaatcacacaatcagagctggctaacggcatctgtacgcaagcaacaattagtaatattgaaaaccgtaatctatgtgacagtttagatattttctcatctatttgcctccgattagatttagaagtagaagaatgcatgatgatttctgaagaaaagaaaattgaaaatctactaaacaaagtcgaggatttatctttacggttatttcacttagaggcctacaatttattacaagaagtgcctgaaggtcttatcttatctaataatgaactaacgactaaattgttatattataagggaattacttgtttattaggaaaaaaagataaagcagaggccttgttttacctataccggggcgcggaaattgaccgtaaagtcaatatttacaacattttaagcctgaatgcgctaggtacgctatacgaactggaaaaagatatgagaaaagcgcaagtgtattacgaaaaatcattacaagaattggaacaatttaaattagaatgttccttggagcgttgtagaatttattataattctgctaaattctactcggaaatgaaagactacccaaaaaagtgtcattttaagcgaaaaagggattcagatttgtcgtga

SEQ ID NO: 1312 - DNA, 966 bp, Enterococcus faecalis
gaggatttaaaaatgaaaagagtaatatggtttagacgtgatttacgattacaggataataaagcattagcacacgcgttacaaaattctgcagctgatgaattgattttattattccaaatgaatcctcaacaatttattcaagaaagtgctaatcataacgctttttttgcaagcttagcctcgttcaaagaacgaatcgatcaagaggcacatttacaaatcatggtcggcgaaccattagatttattttcacgtttgaaacgcaaattacccgattggcaggccatttattttaatgaagatacttgtggctttggggcaaagcgggaccagcaagctatgcgcttttttgaagaaaataatattcagtctttctcttttcaagatgcctatttgcatggctctgaagaaattaagaagaacgatggcagcaagtaccaagtgtttacgccctattacaataaatggaaagaggcgcctaaagaaacaccgattcctgtttcctatacagctgaaaaaatttttagtgcgtgtctttttccagaagaggaagcagcttatcgtgaacagattgcgaggattcctttaacacactatagtgtcggcgaagaaacagccagaaggcgcttaaatacttttattgatcaaaaacttcaatcctatgaaaataagcgtgattttccttatcaggatcaaacgagtcatctgtctacttttttaagaacgggagaactttcgattcgcaccatttggcaagagcttgcatctgtgccttctagcttaagtaaagaaaccttcaaaaaagaattagcttggcgcgacttttacaatatgatctatagtgcgtttccacaacaaaaagaggaagctattcaagaaaaatttcgttatattcaatggacaaatgacccagaaatgtttgtcaagtggcaaaaaggggagacgggggtaccctataattga

SEQ ID NO: 1313 - DNA, 609 bp, Enterococcus faecalis
tctatagtgcgtttccacaacaaaaagaggaagctattcaagaaaaatttcgttatattcaatggacaaatgacccagaaatgtttgtcaagtggcaaaaaggggagacgggggtaccctataattgatgccgcaatgcgacaactgaatcaaactggttggatgcacaatcgcttaagaatgattactgcctcttttttagttaaaaatttacacatcgattggcgttggggtgaaaaatactttcaaaaaatgttgattgactatgatgctgccaataatatcggtggctggcaatgggctgcttcaacaggaacggacgctgtcccttattttcggatttttaatccaattatccagtcaaaaaaatttgataatgacggccagttcatcaaaaaatatgttccagaacttaagcaagtgccacaaaagtatattcatcaaccaaatctaatgaacgaagccttacaaacgcaatatcatgtacatttaggagaaaattatccaaaacccattgtcgattatgcatcaagtaaaaaacaaacattgtttctatatgaagcgagcaaagaaattcatcaagaaatgaacaatccaaggtttcaataa

SEQ ID NO: 1314 - DNA, 618 bp, Enterococcus faecalis
agaaacattttgatttaccaagacggtttctcaagaagatatccgctgattgaagttggcacgatgactttaaatagaaatccagagaattattttgcagaggttgaacaagtaaccttttcaccagggaatttcgttcctggtattgaagcttctccggataaattattgcaaggacgtttgttcgcttatggggacgcacatcgtcttcgcgtgggcgctaatagtcaccaattgccaatcaaccaagcaaaagcgcctgtaaattactaccaaaaagacggcaatatgcgttttaacaatggcaatagcgaaattaattatgaaccaaatagttatactgaaacaccaaaagaagatcctacagcgaaaattagttcctttgaagttgaaggaaatgttggtaattatagctataatcaagatcactttacacaagcaaacgctttgtataatttgctgccaagcgaagaaaaagaaaacttaattaacaatatagcggcatctttaggtcaagtgaaaaatcaagaaatcatcgcgcgtcaaattgatttgttcactagagtaaatccagaatatggagcacgtgtcgcacaagccatcaagcaacaagcataa

SEQ ID NO: 1315 - DNA, 579 bp, Enterococcus faecalis
agcctattatgtcgccctcaaggtctagctccatctgtaaaaagttatcagaatatctatccgaatatgtacacattggccgaaacgtttgatttggagaatctttctttagttcaggctgggccttttgaaaatttagatgaaggatttgatgtctacgccactcaagcctttaatgcgccagatggtcgtgcacttgcggtcagttggattgggttgccagaaatcacttacccaagtgatgtggagggttgggcaaatggcttaagtctggttaaagaactcacaattcacaacgggaaactatttcaatatccagtttctgaaacagaaatgcttcgtcaatccgctactactttatcaaatggctgccatttcttatctactgcttcttttgaattagaagtggatattcccaaaaatgagattgcttttattcggcttttagcgaacgaaacgggttcaaaaggacttttaattacaattgatacgattcatggtaaaataacccttgatcgaacatttgctggccaatcttttgctgaaaagtatggcacaattcgtgaaactaaaattagg

SEQ ID NO: 1316 - DNA, 900 bp, Enterococcus faecalis
aatctttctttagaagtagtatacggagatgaagaaagcttaaatagaacaattaaaactggtgaaatttcccggccaggtttagaattaactgggtattttaattattattcccatgaccgtttacaattatttgggagcaaagaaattacctttgcggaacgaatgatgcctgaagagcgtttattagtgatgcgccgtttatgtgcgaaagatactccagcctttatagtatccagaggactagaaatccccgaagaattaattacagcagcaaaagaaaatggcgtttctgtattacgttcaccgatttcaacttcccgtttactaggggaactatccagttatttagatggccgtttagctgttcggacaagtgtccacggagttttagttgatgtttatggacttggtgttttgattcaaggagatagcggtattggtaaaagtgaaacagctttagagcttattaaacgtggacatcggctaatcgcagacgatcgcgtcgatgtttatcagcaagatgaattaaccgtggttggagaaccaccaaaaattttgcagcatttaattgaaattcgtggtatcggaattattgacgtcatgaacctgtttggagctagtgcggtccgtggctttatgcaagttcaattggtcgtttatttagaggcatgggaaaaagacaagaaatatgatcgtcttggtagtgacgatgcaatggttgaaatagctaacgttgatgtccctcagattcgtattcctgttaagaccggccgaaatgtggccattatcattgaagtagcagcaatgaacttccgcgcgaaaacaatgggctatgatgcaacaaaaacgttcgaagagcgcttaacccgtttgattgaagaaaattcaggagaatag

SEQ ID NO: 1317 - DNA, 870 bp, Enterococcus faecalis
  misc_feature (846)..(852): Nucleotides 846 & 852 are "n" wherein "n" = any nucleotide.
agaaaattcaggagaatagaaggagaagatgtgatgatgttagcccaagtaaattcaattgcatttcgccttttcggtattcccgtctattggtatgcaattattattgtttcagggattgctttagctgtttggctaagtagtcgtgaagccgttcgtgttggtttaaaagaagatgatgtctctgactttatgctctggggattacctgcagcaattgttggcgcgcgcttgtattacgtcgcttttcaatggcaagattatgtagacaatccgattgaaattttctttactcgaaatggtggcttagcgatttatggtggtcttattggtgggggactggcgctgtttttctttacgcgtcatcgtttcatttctacatggacttttttagatattgccgcaccaagtgtgattttagcgcaagcaattggtcgctggggcaactttatgaatcatgaagcctatgggccagcgaccaccagacaatttttagaaaatctccatttaccaacgtttatcattgataacatgaatatcaacggaacatatcatcaaccaacatttttatatgaatctgtctggaatgttttaggctttatcgttttagtgttattacgcaaaaagccacactttttaaaagaaggcgaagtctttttaggttatataatatggtattctttcggccgtttcttcatcgaaggcttacggatggacagtttgtatgcgtttagtaacattcgtgtctcacaattgttgtctttagtgatgttcgtggcagcaattgttattgtgatcgttcgcagaagaaatcccaatttgaaattttacaatcgggagaaacgngagatnaaaataacaacttcttaa

SEQ ID NO: 1318 - DNA, 999 bp, Enterococcus faecalis
gtcccaggctcctgggggacagctttagttcaagtattagccgaaaatggacacgaggtctgtatttggggaaataaaccagagcaaatcgatgaaataaatacaaaacacaccaacaaacattatttaccagaattaatcttacctacttcaattcaggcaaccactgatttagccactgctttagtagatgttgatgcggtactgtttgtggtaccaactaaagccattcgttcagtagcacaagaagtggcccaacatttaaaaacaaaaccaattattattcatgcaagtaaagggctcgaacaaggtacacataagcggatttcagaagtgatagcggaagagattccagcagaaaaacggcaagggattgtggttttatctggtccaagccatgcagaagaagtcgctgttcatgacattacaaccattacagcagcaagcgaaaatttagcagacgctgtgtatgtgcaagagttgtttatgaatgattactttagaatttatacgaatgatgatgtgattggtgtagaaacaggggcggccttaaaaaatattattgctttgggcgccggagcgattcatggcttaggctttggtgataatgccaaagcggcaattatgactcgtggtttagcagaaattagtcgtttaggggttgcgatgggagcaaacccattaacatttattggtttaagtggtgttggggatttaattgttacttgtacaagtgtccattctcgaaattggcgtgcgggtaatttattaggaaaaggccataagttagatgaagtcttagaaaacatgggcatgattgtggaaggtgtttcaacaactaaagcagcctatgaattggcacaacaactagaagtcgaaatgccaatcacagaaacaatctacaatgtcttgtacaatgacgaagatgtacaacaagcagcaaaagaaatcatgttgcgcgatggcaaaaccgaaaacgaatttacacttgatttttag

SEQ ID NO: 1319 - DNA, 885 bp, Enterococcus faecalis
tttttaggaggaaaaaagatgaaagttaaaaaggcagttattccagcagctgggttaggaacacgtttcttgccggctaccaaagcgatggcaaaagaaatgttaccgattgttgataaaccaacgattcaatttattgtagaagaagcactagcttcaggaatcgaagatattttaattgtgacaggcaaagccaaacgtccgattgaagatcattttgattcaaatgttgaattagaaaataacttaaaagaaaaaaataaaaccgatttattgaaattagtcgaagaaacaacggatgttaatttacattttattcgtcaatcccatccgaaaggcttaggacacgctgttttacaagcgaaagcatttgttggcaatgaaccttttgtcgtgatgttaggcgacgatttaatggaagataaagtgccattaacgaaacaattaatggatgattacgaacaaacacatgcttcgacaattgcggtaatgaaagtaccccatgaagatacttcaaaatatggtattatcaacccagaaaaagaaatcgaaaaaggactatacaatgtcgagaattttgttgaaaaaccaaaacccgaggaagcaccaagtgatttagcgattatcggccgttatttattaacccctgaaatttttgatgtacttgaaaatcaaaaaccaggcgctggtaacgaaattcagttaacagatgcgattgacactttaaataaaacacaacgcgtttttgctcgtgagtttaaaggagaacgttacgaccttggcgataaatttgggtttatgaaaacaagcattgaatatggtttgactcatccagatgtatcagataatttacgagaatacataattactgtacgtgctcaatga

SEQ ID NO: 1320 - DNA, 195 bp, Enterococcus faecalis
ccccctttatgcgctaaagaactagggcatgaagaattttatccgtataaagtgttcatcgtaacctttatgaggtggtgcaggaatataagttggtgtcatcctaagattattagttatatttcagacgggaattatgatatgtccagtggggacactgctgccttaattgcaccggtaacatatgttgtttaa

SEQ ID NO: 1321 - DNA, 753 bp, Enterococcus faecalis
tataaaccccgtcgtcaaaaatctatgcaaaaaaagttagtttggcgtgattatctatacgttggttcaatgttattcggtttgtttttcggtgctggaaatttaattttccctgtacatatgggacaagaagcgggggcttccgtctttttagcaaacttgggcttcttagccactggaattggcttaccttttcttggtgtcattgctatgggtgtttctaaaagttcaggtgtttttgacttagcttctcggattaatcgtcgttatgctcttatttttaccttactattatatttaacgattggtcctttctttgctttaccaaggttagcaactacttcttttgagattggtcttgcaccatttgttccgaaagacttgcaatggctggttcttgctggtttttccgcattatttttcttagctgtttggctcttctctagaaagccaagtaaaatcttagattatgtgggtaaatttttaaatccgttatttttagcattgctaggaattttgattgttttagcctttgtaaaaccattaggtcatgtggccagtgccgctgttggtgaaaattatatttcaagtcctttctttaaaggatttacagaaggttataatacgctggatgctttagcttcattagcttttgggattgttgtcgtttccactttacgaaatatgggcgtcgaaaaaacaggagatatcgctaaaggaatgattaatcatgtgctatcagtgttgtattga

SEQ ID NO: 1322 - DNA, 201 bp, Enterococcus faecalis
tctaagattttacttggctttctagagaagagccaaacagctaagaaaaataatgcggaaaaaccagcaagaaccagccattgcaagtctttcggaacaaatggtgcaagaccaatctcaaaagaagtagttgctaaccttggtaaagcaaagaaaggaccaatcgttaaatataatagtaaggtaaaaataagagcataa

SEQ ID NO: 1323 - DNA, 651 bp, Enterococcus faecalis
tcatgtgctatcagtgttgtattgatcgggattatctataccttacttgcttatatgggaacaatgagtatcggggcttttccaatcagtgaaaacggcgggattgccttagcccaaattgccaattactatttaggcctaccagggagtattttactggcttttatcgtagttcttgcttgtttaaaaaccggtatcggcttaagcacagccttttctgagacttttgaagaaatgtttccgaaagtttcctatcaaaaattcttggcaattgttgttattttaccagctatttttgcaaatgtcggcttaaccaacatcattcaatttgccgttccagtcttgatgttcctttatccattggcgattactttaatgcttttggtaatcatcagtcctattttcaaacatcgacgggaagtctatcaagcaacgacctatatcacattgattgctgctgttttagatgcattaaatagcgcgcctgcctttatcaaagatacggcgtttgtaacaacgcttttagaaaaagccggccaatacttaccattgttcactattggtatgggctgggtcgttccagcaacggttgcttttctaattagttgggtttgggtcatgatttctaaaaaagatcctattcttgattaa

SEQ ID NO: 1324 - DNA, 348 bp, Enterococcus faecalis
attgaagttaccaacaagtactggaggaaattgcccatgttagttacaacaaccgagagaattagcggtcaagaatatgaaattattggagaagttttcgggttaaccacacgttctaaaaatatgtttaaagatttaggtgctggactaaaaagcgtagttggcggtgaaatcaaaggttacactgatatgcaacgagaagcacgcgaccaagcaatcgaacgtttaaaagcagaagcctctaaattaggtgcagatgccgttgtgatgatgcgttttgattctggcacaattggcacagacatgcaatctgtcgtggcttacggaacagctgttaaatacatctaa

SEQ ID NO: 1325 - DNA, 759 bp, Enterococcus faecalis
agaaaaattatgccccgctataaagcaatcattgcctatgatggcactcattttcatggctttcaaaagcaacctaatgagcgtaccgttcaagaagaaatagaaaaaacgttagcacgcatgaataatggacgctccgtgacggtttttggttcaggacgaacagatgcaggtgttcatgcaatgggccaagtgattcactttgattatccgcaggaacgtccgttggaaaaaatgcgctttgcgttagatacacaaacacccgaagacattgctgtgcgcagcgtggaacgtgtttcagaagactttcatgcacgttatcatgtgatcgaaaaaacctatcaatttaaagtggatattggcaaaccgcgaagtccatttcgacgtttttatgctagttattttccgtatcccattgatctcgaaaaaatccaacaagctttgcctgatttattaggcacccatgattttacctctttctgtgcctcaggaagttcggtagaagataaagtccgaaccattcatgaagccagtgttcatgtcaatgaaacgggggatgaattaacattcacttttcggggcgatggtttcttgtacaaaatgattcggattttagttggtacgctattgaaaatcggcaatgggcggctggaaccaaccgcgattccagcaattatcgcagccaaagatcgaaatttagcaggtccgactgctcatccagaaggattgtatttagcagaagtgaaatatgaaaactaa

SEQ ID NO: 1326 - DNA, 804 bp, Enterococcus faecalis
ggcaaaatgatgaataaattgatttttgggcgttatattccaggcgattcttttatccatcgtttagatccgcgtgcaaaattattagctagtttttattttattggaattatctttttagcaaataattggcagagttatgttttaatagcagcctttactgcttttgctatttcattatcaaaaatcagcgcccgcttctttatccgcggtgttcggccattattatggctaattctgtttactgtggctcttcaaaccttgtttacacaagggggggaagtgtactttcagtggggaattatttccataacccagtttggtgtgacgaatgggctatttattttctgtcgttttgttttaattattttcatgtcaacgttattaactttaacgacggcaccattagagttatcagatgcgattgaatatttgctacgcccacttcatgtagtgaaatttccagttcatgaagtttcattgatgttatcaattgccttacgttttgtcccaacattaatggatgaaacggaaaagattatgaatgctcaacgtgcccgtggtgttgattttggtgaaggaaacttacttcaaaaaatgaaagctattgttccacttttgattccgcttttcgtaagtagttttaatcgtgcggaagacttagcgactgccatggaagcaagaggttatcaaggtggtgaaggacggacaaaataccgcattcttcattggcacctacgagatacaatagtaatgtttggctttgtcttgttaaccattggcttatttgtattaagaacttag

SEQ ID NO: 1327 - DNA, 951 bp, Enterococcus faecalis
aaaattaaaagtagctttgaaagagcgtggcgttgttgtgccaacgaattatttaacagaagaagggatggtggattggttatggacatccgttttaaacaagtagattttacttaccaacccaatactccttttgagcaacgggcattattcgatattaatttaacgattcaagacggctcttatacagcgattgtcggacatactggcagtggcaaatcaacgctattacaacatttaaatgctttggtgaaaccaactaaaggccaagtgacaattggagagcgtgtaattacgccagaaactgataataagaatttaaaaccaattcgtaaaaaagttgggatcgtttttcaatttccagaagcacaattgtttgaagaaacagtggagcgagacatcgctttcggaccgaaaaactttggtgtttcagacgaaggagcgaaaaaattagctaagaaaatgcttgatttactcggcttagatgaaaaatacttacaacattctccgtttgagttatcaggtggtcaaatgcgccgtgtcgcaattgctggtgtgctagcgatggaaccagaagtcttagtattagacgaaccgactgctggtttggatcctaagggtcgtaaagaaatgatggagatgtttagtcgtctgcataaggaacataatatgaccatcgttttagtgacacatttgatggatgacgtggctaattacgcagatcacgtgattgttttagaaaaaggacaaatcgtccgagcgggagcaccacaagaagtgtttcaagagacacaatggctgaaagaaaaacaattaggcgtgccaactgcagccgaatttgctgaaaaattagtggcaaaaggcttttcttttgagcaattaccattaacggccgatcaattagccgatcagcttctgaaaaaaatgcaggaagcaggtgaggcaaaatga

SEQ ID NO: 1328 - DNA, 819 bp, Enterococcus faecalis
ataatatccaatttaattatcaaccagaaaaatgcttctcccgctttaaaagatgtgtctttttccattcaacaaggcgaatgggtcgctattattggccataatggttctggtaaatcaacgttagccaaaacgatcaatgggctgttactgccagctgctgggactatcaaagttggcggcaaagaattaaatgaagcaaacgtctgggatatccggcgtatggtaggaatggtttttcagaatccagataaccaatttgtcggttcaacagtcgaagacgatgtggcttttggtttagaaaatcaaggtattccgcgtgatgaaatggtcgaacgtgttcacgatgcattagaacgggttcgtatgttagattttgccaagcgagaacctgctcggctatctggcggccaaaaacaacgagtagctatcgctggtgtggttgctttgcgaccagatattattattttagacgaagcgacaagtatgttagatccagaaggtcgtgcagaagtaattgctaccattcaaaagattaaagaagaaagtaatttaacagttatttctattacccacgatattgatgaagcggctaatgcgaatcgtattttagtgatgcgccaaggacaattgacaaacgaaggaacaccagaaaagattttttctgcaggagaagcgcttgttgaaatgggcttggatttaccgtttcctgaaaaattaaaagtagctttgaaagagcgtggcgttgttgtgccaacgaattatttaacagaagaagggatggtggattggttatggacatccgttttaaacaagtag

SEQ ID NO: 1329 - DNA, 183 bp, Enterococcus faecalis
  misc_feature (1)..(1): Nucleotide 1 is "n" wherein "n" = any nucleotide.
naaaacgctacttttttggtagtgttagaaagaataaatagattgagggagtatgcgatgcaaccaatcattgaactaaataatatccaatttaattatcaaccagaaaaatgcttctcccgctttaaaagatgtgtctttttccattcaacaaggcgaatgggtcgctattattggccataa

SEQ ID NO: 1330 - DNA, 468 bp, Enterococcus faecalis
cggatggatgtggggacccgttttaatgtgattgctgagaatgcacgtttagaaggaacggttcgttgctttagtgtagcaacgcgtaatcgagtagaacaggcgctacaacgctatgcggaacaaacagccgctatttacggtgggacggcttcgttagattatcaatatgggacgttgccagtgattaatgatgagcaggatgccttgtttgcccaaacactaattaaggaaaattttggtgaagcggccttaagacaagaagagccgacaactggtggcgaagacttcagttattatactgaacatgcttctggttgttttgccttagtgggaagtggtaatccagagaaagatacggagtgggcacatcaccatggtcgttttaatattgatgaagatgcgatggcaatgggtgctgagttatatgcccaatatgcgtttgaatatttgaagacacatttttaa

SEQ ID NO: 1331 - DNA, 780 bp, Enterococcus faecalis
ccttggggaaaggaggtaccaactgtggagtccttaaaaaagtgttttgatttacaaggaaaggagattgtgtcgattgttggtagcggtgggaaaacaagcttaatgtgggcgctagcaaaaacatatcgaaaggaagctgttctggttagtacaactacaaaaattgggtttccccaacgtcaattgtatgattatttttatacaaaccattttgaaaaaataacgccgaatatctgcggaatcactttagcaggaaccgctatcaacaaccaaacaaaactaacgatgcctgcaatgacctcgtttcaaacattgtttcagcacttcacgaaagtttttttagaagcggatgggtccaaacaacgacctttgaaaggctggtcctcttatgaacccgtgatattaaaagaaacaaccaccacaattggtgtgcttccgatttctgtgattggtcaaaagatagatgaaacgaccattcatcggttgccgctttttttggaattaaccgatgcgcaactacaagaaccaatcacagaaacattgttagctcaactgattgatcatccaaaaggattgtttaaagagagccaaggccaacgaattttatgtttaaatcaaacccatacgcgaagagagttcgttcaagcgatgaatgtctgtcttcaattacccaaaagctgttttgaaaaattagacaagattattgcttgcaatatggaattagagaaaggacttattttatgggagaaatcagtcaaaacatccaagaaaaattag

SEQ ID NO: 1332 - DNA, 294 bp, Enterococcus faecalis
agtaattacgctttaacaaaaaaagaaggtgaaaagatggagtatttgctaacctttccgaatacacattatgctgttcaggcggaacaagtactgttggcaagaaaggtggctgttcgcgtctttactttgcccccatcattgacggatggctgtgggatcggtttactcattaatgaagcggaaataactcacagtgtatgttttttagaagaagcaaaagtacgcgtagcctctattttttctgtgaaaaatgaccttggggaaaggaggtaccaactgtggagtccttaa

SEQ ID NO: 1333 - DNA, 603 bp, Enterococcus faecalis
agagaagggccaaatatgaaattagtagatgcattggggaaaccttgcccaatacctgtgattgaaacaaaaaaagctttggcggagttaggtttagctggaggcactatcgaggtattagtcgataacgaagtagccattgaaaatttaaaaaaattagctactaaaaaacaggccactttgactgcgaagcagatagaagccacggttttctctgtcaaaattacggtacctgaagaagcgactcaacaaacaagtcagtcagcaacagatttagtaattacgattggctccgatcaattaggtactggagacgagcagctaggacgactattaatgaaaagttatcttcaatcattatcagaagcagaaactgttcctacacagctattattctttaatcgaggggcgtttttaacgaatcaagcagcgaataccttagctgatttgcaacaattagcggagaagggaaccacgattcaaacgtgtggggcctgtttagatttttatcatttaacagacaccttagctatcggctctattactaatatgtacgaaattgttgaaacaatgaatcaagcggctaaagtaattacgctttaa

SEQ ID NO: 1334 - DNA, 1038 bp, Enterococcus faecalis
gaaggagcggacagcatggattttttatcacaatgtacatcaggtggctgtggggcaaaaattgaatcccgtgtactgaaccaattgttgcaacacttacccgaaacaccggcaaatgagcggctactcgtcggatttgaacatgccgacgacgccgctgtttaccaaataacgtctgaaaaagctttgatttcaacggtagattttttttcaccaatggtcaatgatccgttatcatttggaaaaattgcggtcgctaatgctttaagtgatgtctatgccatgggcggaacagtcctttatgcgctaaatcttgtttgttttccacaaaagatgtcaaaagaatggttggaacaaatgctcttgggtggcagcttaaaattaaaggaagcgggtgctttactggcgggaggccattcgatttatgaccatgaacccaagtatggtctagcggtaaccggagaagttcatccagaaaatttgtggcataataatacgccacaggtgggggatgtcttgattttaactaaagcattaggtgtaggaattattcaagcggctgttcgggggcaattggcgaagcagacggaacaaaaaatcgcacaagattcgatggaacgtttaaataaatatgccgctgcgaatgctcgatcctacgcagtacatgcttgtactgacgtgactgggtttggtctattaattcatgcaaaagaaatggctgataatcaggtaacattactgattgatacagaagcattaccaaccattacaggagcgttggcctacgccgcagaatgtttagtcactgcagctgggcaaagaaaccgccaaacaatcggaacgacaatcgattattcaaaaatttctatggaaatgcaagaacttttgtttgatccacaaacttctggcggactgttaattagtgtcgctgctgacgaagcggcagcctgtttagcagctattcaaaaagaggaccctgttgccaaaattattggcgaggttctgccaaaagaacaacaagcagtagtacttttatag

SEQ ID NO: 1335 - DNA, 765 bp, Enterococcus faecalis
gaagtagaaggaattcagcgagcttggcgaacgaatacaaaagccttggtgatgacacacgcatccaatgtcttaggcaccattttacccattgaagaatgttttcaatgggctcaacagaaaggattactaactattttggatgcggctcaaacggcgggatttttaccaataaaaatgacccagatggccattgatgtgttagcctttactggacataaaagcttatatggattagcaggtattggtgggttagcttttagtgagcgaggggctgaagcggtcaaaccactgatggcgggcggcactggtagccattctaattcctttgatcaaccctcttttttaccagataaatttgaagctggtacgttaaacagtttaggtattctaagcttaaatagttctattaaagagttgaataaaattggtttagcagcgattcaaaagcatgaacgaaccttaatgcagaattttttaaatggtttatcagggttacctgtcacaattttaggaaccaaggacgtggcacaaactgtccctgttgtttctatcacactgtggaatcaggaagaaacaatagtggcacagcaactagcagaacaatatggcattatgacgcgcgcaggtttgcattgtgcaccattagcccatcaaacagctgggactttagcaactggcaccttacgttttagctttggttggcagacaacgcctgaagaaattacttggacaattcacgctttacaagaactactaatttga

SEQ ID NO: 1336 - DNA, 642 bp, Enterococcus faecalis
tttttctgtgctacgttaataaggaggggtgatggaatggaacaatctttttttcgagaattactacattatcaacgtccaaaggataatccttttcgactagtgtttgctggcttggttatgttcagcattctttttttgggctatatcaatcatcaattattgatttcaagctttggctcgttaggtatttttacttttttatattatcagccgctaccattaaaacagttaatgactcgtttatctgtggtcggtagttacctttttttaggaaatttgttaggcatgttatcgacccatattgcatggcttattcccattgttgttgcactggttggttttggtggccgctttttctttgaagtctacgatatttcaaaaccaggggccttctttggtgtgatggtgacagcgatgggtgccagtacgagcattccgctagcaaaaattccgttcatgagtggctgtatgttattaggcattggcttttccattttgtttgcactagtgttgcattttacagagaaggaaatcagtgtcccgctagctaagcgatcattacgggaacgaatttatcagcatccagaagcgccattagataccatatattatagctttgtatttgcctcaccaagggat

SEQ ID NO: 1337 - DNA, 2508 bp, Enterococcus faecalis
ggaggaataactatggatgaactatttacagaaagtgcgaaagccgtactggcgattgcccaagaagaagcgaagtattttcgtcaccaatccgtcggttctgaacatttattattagcactcgttttagaaccaaatgggattgccggaaaaacattacgacaattgaatactgacacagaagacatccgtgaagaaattgagcatttaagtggctatggcaccatgcaaagtccaatgggaaataacaacttatacttaccttattcaccaagagccaaacaaatctttgcctatgctggagatgaagcgaagcgcttaggggctcaaaagattggtaccgagcatttattattaggcttgttaagagacgaagaaattttagcgtctagaattttagtgaatttaggattaagcttatccaaaatgcgtcaattattattgaaaaaaatgggcgtttccgaacccaatggcgcacaacgtcgtcggaatggtcaaaataaaaatgcgccacaagggacgccaacattggattctttagcaagagatttaaccaagttagcacgagaacaaagcttggatccagtagttggtcgcggtaccgaagtccgtcgtttgattcaaattttgagtcgccgtaccaaaaacaatcctgtcttagtcggtgaaccaggtgttgggaaaacagcgatagcagaagggttagcccagaaaattgtcaaccgagaagtccctgaagatatgcaaggcaaacgtttaatgatgctagacatgggtgccttggttgctggaaccaaatatcgaggtgagttcgaagatcgcttgaaaaaagttgtcgatgaaatctatcaagatggacaagtcattttatttattgacgaattgcataccttgatcggtgctggcggtgcagaaggggcgattgatgcttcaaatattttaaaacctgctttagcacgtggcgagttgcaaacaattggtgcgacaactctggatgaataccaaaaatatattgaaaaagatgccgctttggaacgtcgttttgcccgtattcaagtagcagaaccaaccccagaagaagcagaagaaattctaaaaggcttgcgttcccgctatgaaaaacatcatggcgtagaaattacagatgaagctctacatgcagcggttcaattatcgattcgctatttaaatgaccgccaattaccagataaagcaattgatttaatggacgaatctgcagcaaaagttcgtttagataaggcagatcaaccttcagaaattaatgaattgcgtaccgaaatttctcaattaattacggaaaaagaagaggccattcaaaaccaatcatttgaaagtgctgctcggattcgtcaaaaagaaaaacaagtgatggaaaaactagaagaattgattgcagtgaaagaaaaaagtctgtctggttacagtacacaagtaacagaagaagacgtggctggggttgtttcacaatggacaggcgttcctttgcagcagctagagaagaaagaaagcgaacgattgatggaattagaaaccattttacatcaacgggtcgttggccaaaatgaagcagttgaagctgtttcacgcgctatccgtcgtgcgcgtagtggcttgaaagacccagcaagaccgattggttccttcatgttcttaggaccaacaggggttgggaaaacagaacttgccaaagccttagccgaagcgatgtttggcagcgaagaagctttgattcgcgtggacatgtctgagtttatggaaaaatacagtactagccgtttaatcggttctcctccaggttatgtcggctacgaagaaggcggtcaactaactgaaaaaattcgtcaacgtccttattccgttattttgctagatgaagtagaaaaagcccatccagatgtctttaatattttattacaagtcttagatgatggccatttaacggatgccaaaggacgaaaagtcgattttcgtaacacgattttaatcatgacctccaatttaggggcaacagcgattcgtgaagaaaaacatgttggcttcaatgtgaaagacatttctaaaaatcatgaattaatgcaaaaacgaatcatggaagaattgaaaaaagccttccgtccagaattcttaaaccgaattgatgaaacggttgtattccattccttgaaacaagaggaaattcatgaaatcgtaaaaattatgagtcaatctgtcgtgaaacggatggctgaacaagaggttaaagtggaaatcacaccagctgcaattgaagttattggtaaagtcgggtttgatccagaatatggcgcacgtccaattcgtcgggccttgcaaaaagaagtggaagatcgtttaagtgaagcccttctttctggtcaaattcagttaggggataaagtaactttaggcgctagcaaaggcaaaattacgttaaatgtgcgggcaccaaaagcaccaaagacagaagcgaaagaattacaaactgtatag

SEQ ID NO: 1338 - DNA, 495 bp, Enterococcus faecalis
tcccggagagaagagggatggaagattatgagtaatcaaaatagttcagatttaatcgaggcttatttaaaaaagattttagaagaaagtaataaaattgaaatccgtcgggcggaaatggctaatttatttaattgcgttctttcacaaattaactatgtaattaatacacgttttaccatccaacgaggctacgcagttgaaagtaaacgtggtggaggcggctatattcgcattgtcaaagtacaaatttcagataacgatcaattactaaaacaaatggatcaattgattggcgcaaccttaacagaaaaagatgcgctaacatttattcaaacattgtatgaagaagaagtgattacgaaaaaggaaggcaatttaatgctagctgctttaagtaaaagcacattgaatggtctggggaatcacgaagattttctaagagctcaaataatgcgttcatttttagagcgcttgagctatgaggaggaataa

SEQ ID NO: 1339 - DNA, 183 bp, Enterococcus faecalis
tcttccatccctcttctctccgggattaatattgaccaggattatatcgaactttgcctattaaataaagaagaacgctttgactttaataaaaaaatgcaaaacaggaggagcaacctcagtcaaactgacttaagttcccctcctaaaaatgaaaatatgttattgaatcacagaggctga

SEQ ID NO: 1340 - DNA, 885 bp, Enterococcus faecalis
  misc_feature (28)..(31): Nucleotides 28 & 31 are "n" wherein "n" = any nucleotide.
agttcggagctcgtggtctttgtcaatntanagagaagtgcttcgtcctgcatatatatagaatttggcgtatccttgaccaaagtagacgttgcagaaacagaagaactttttcaatttgttcaggaaaacaccaaagtcatttactttgaaagtccgtcctcacaaaagtttgaactgctagatttagaaaaaataactgcgttagcacaaaaaattggcgcatacactgtcattgataacacgtgggcgtcaccgttatttcagcatcctttatgccataatgtggacctggtgattcattcttgttccaaatatattggtggtcattcggatattgtagcgggggctgtcattggcaaagcagcgcttgtagatcaaatttttgaacatggtcatcaagcattaggcgcagtcaatagtcccttcaattcttggttagcgttacgaggtattcgtaccatgcccgttcggttggcgcatcagtctcaagccatccaaacggtgctgttggctttgcaaaaggatccgcgaattagtcgcttatatcatccttttgtaggaaatcaacaacaacaagcgttagcagaaaaatatttgacaggttatggctcattgtttgcgattgatttaaaagataccgattttgaacgtttgaaaacatttgtgaacgcattgacgctggtcacaattggggtcagttggggtggctttgaaagtttggccttgcctgtattcaaaggcaataacttggcggctgttcagaaaagaggcttgtcgccagcgcacattcgcatgtacgttggtttggaagagccaacatctattatcgaagatattcaacaagccttggatcaagcctatggcgaagaatcgcttttgtga

SEQ ID NO: 1341 - DNA, 1113 bp, Enterococcus faecalis
aggcagttattgttagatgaaatggaggtaatgagagtgaaaattggtttttttactgatacgtatttcccgcaagtgagtggggtagcgacttctattaagaccttaaaagatgaattagaaaagcacggccatgaagtgtatatttttacgacaaccgatcctaacgcgactgattttgaagaagatgtcatacgaatgcctagtgtgccattcgtatcttttaaagatcgccgagtagtggttcgcggcatgtggtacgcctatttaattgccaaagaattggaattagatttaattcatacacatactgaatttggtgcgggtattttagggaaaatggttgggaaaaaaatgaaaattcctgtcatccatacgtatcatacgatgtatgaagattacttacattatattgctaaaggaaaagttgtccgtccatcacatgttaaattcttttcaagagtgtttacaaatcatacgacaggtgttgtttgtcccagtgaacgtgtaattgaaaaattacgggattatggagtaaccgcaccaatgagaattattccaacagggatcgaaattgataagtttttacgtcccgatattactgaggaaatgatcgctggaatgcgtcaacaactaggtattgaagagcaacagattatgttgttatcgttaagtcgaatttcttatgaaaaaaatattcaagcaattattcaagggttaccacaagttattgaaaaattaccacaaactcgtttagtaatagttggaaatggtccctatctagaggatttaaaagaattagcagaagaactagaagtcagtgaatacgttcaatttacgggtgaagtgccaaatgaagaagtcgccatttattataaagctgctgactattttgtcagcgcctcaacgtcggaaacacaaggcttaacttatacagaagcgatggccgctggcgttcaatgtgttgcagaagggaacgcctatttaaataatttatttgatcatgaaagcttaggcaaaacttttaagacagacagtgattttgccacaacattgattgactatatacaagcaaatattaaaatggaccaaactcttttagatgaaaaatga

SEQ ID NO: 1342 - DNA, 1026 bp, Enterococcus faecalis
agcagaaaaggaggagcgggtttgaaaatattgttatattttgaaggtgagaaaatcttagccaaatcaggtattggtcgagcattagatcaccagaaacgagcgctctctgaagttggaatagaatatacattagatgctgattgcagtgactatgatatattgcatattaatacatatggcgtaaatagccatcgtatggtcagaaaagcacgcaaactaggaaaaaaagttatttatcatgcccattcgacagaagaagattttcgtaattcctttattgggtctaatcaactggcaccattagtaaaaaaatatcttatcagtttgtattccaaagcggatcatttaattacaccaacaccgtattctaaaacattgctagaaggatatggcattaaagtgcctatttcggcgatctcaaatggtattgatttatcacgcttttatccttcagaagaaaaggaacaaaaattccgagaatattttaaaatagatgaagagaaaaaagtaattatttgtgtgggattattttttgaacgtaaaggaatcactgattttattgaagttgcgcgacagttaccagagtatcaatttatttggtttggtgatacaccaatgtattctatcccaaaaaatattcgacaattagttaaagaagatcatccagaaaatgttattttcccaggttatattaaaggagatgtcatcgaaggggcctatgcggcagcgaatctcttctttttcccttcgcgtgaagaaacggaaggaattgttgtcttagaagcattagctagtcagcaacaagttttagtgcgtgatattccagtttatcaaggctggctagtagctaatgaaaattgttatatgggtcattctattgaagaatttaaaaaatatattgaaggcttattagaagggaaaatacctagcactagagaagcaggctatcaagtagcagagcaaagaagtatcaagcaaattggttacgagttaaaagaagtctacgaaacagtcttatcttaa

SEQ ID NO: 1343 - DNA, 213 bp, Enterococcus faecalis
cgcatgactgttaatcatgatgtcgtaggttcgagtcctactgccggagttgagcaaaagcaaaaaccaacttggtttttgctttttttgttttattcactattttttgataagcttgaagaagggactttaaaaacatttataagattaaaaggatcctaccgaagaatgaatacatcaaattttagctatggtataatgtgtttattatag

SEQ ID NO: 1344 - DNA, 249 bp, Enterococcus faecalis
ttccgggggttccgcatggaagggccattcgttcaagggataaaagttaccctggggataacaggcttatctcccccaagagtccacatcgacggggaggtttggcacctcgatgtcggctcgtcgcatcctggggctgtagtcggtcccaagggttgggctgttcgcccattaaagcggcacgcgagctgggttcagaacgtcgtgagacagttcggtccctatccgtcgcgggcgttggaaatttga

SEQ ID NO: 1345 - DNA, 213 bp, Enterococcus faecalis
  misc_feature (153)..(153): Nucleotide 153 is "n" wherein "n" = any nucleotide.
ataactaattccacctttttggcccattttaaacttgcccctggttcaaaacactataactctgtaacctttaatttgtcaacaatggttttaataaaaaggttggattttccagtacctgaattgggcgctttctttggaggaaaatttccnccaataattgttgttccaacttgcattttattccccggaaccccaaaaaagcggaatccc

SEQ ID NO: 1346 - DNA, 249 bp, Enterococcus faecalis
accaggggcaagtttaaaatgggccaaaaaggtggaattagttattcaagggtcattcaagaaccagttggattaggaaggcagatatggaacaaatcaaacagggtttcagatgttggtgggattcatcaagaagacacgccagaagatggggttaagttgttgccaaaatcagtaaattgcgtgttattgaagatgacgaaaggaaaaatgaatcgcattattcaagagattggaggatcaatttga

SEQ ID NO: 1347 - DNA, 315 bp, Enterococcus faecalis
  misc_feature (104)..(104): Nucleotide 104 is "n" wherein "n" = any nucleotide.
gttgttgccaaaatcagtaaattgcgtgttattgaagatgacgaaaggaaaaatgaatcgcattattcaagagattggaggatcaatttgagtatttttcaatntaccttttatgcaaaaactaaaaaaggcattgttcccagttttattgaagcggctcgtccagatgtggcgattcctttgtatgaattatttaatcaacaattagaagcagaaggaatagcggtagccacaggagaatttggcgcggatatgcaagtgtcgttgaccaatgatggtccagtgaccattgtgattgatacacgagaaaaataa

SEQ ID NO: 1348 - DNA, 306 bp, Enterococcus faecalis
ataatattaaaaatctacgaaggaacgagtaagtttcatctgtctgcgaagagagagttgccgtggctgagagcaacttcaacagtgaaagtgaaagacattctggagatggacggaagaaaagccgtcccgttacgagcgttaatcgttgaggaaagagtaaaatctttcaaaactaggtggtaccgtgtaaaagagacttttacgcccttgtatgttcaacatacaagggcttttttcatttttagaaaaaagaaaatggcgcacacatttttgtggaatgatagaaggagagaaagacaatga

SEQ ID NO: 1349 - DNA, 1317 bp, Enterococcus faecalis
aaggagagaaagacaatgagttatcaaaaaccaaaaggaacaaacgatattttgccaggaacttctgaaaaatggcaatttgtggaagaaacagctcgtttgatttttaaagattatcaataccaagaaatcagaaccccgatttttgaacattatgaagtaatatctcgcagtgttggcgataccacagatattgtttcaaaagaaatgtatgatttttatgataaaggagaccgtcacgtgacgctacgtcctgaggggacagcgccaattgttcgggccttcgttgaaaataaattatatggtccggaatatacgaaaccatataaaacctattacatggggccgatgttccgctatgaacgcccacaagctggtcgtttgcgtcaattccatcaaattggtgtggaagcatttggtagtgaaaacccagcattggatgttgaaatcatggctatggctttggacttcttcaaacaattaggcatccaacaaatcaaattagttattaattccttgggggataaagaaacacgtgctacgtaccgtcaagcattaatcgattatttagagccccatatggcagaattaagcgaggattcacaacgtcgcttacacgaaaacccattgcgggtgttagacagcaaagataaaaaagacaaggtgattgtcgcagaagcgccctccattttggattatttaaatgaaccatctaaagcacattttgaagcagtaactgatatgttagatttactagaaattccttatgaaattgatagtaatatggttcgtggcctggattattatacacacacaatttttgaaattatgagtgaagcgcctaaaatgggtgcgcaatcaactatttgtgcaggaggccgatacaatggtttagttgaagaattaggcggcccagacacaccaggttttggttttggtatgggcattgagcgagtgttgttaacaatggaagctgaagaagttgtgattccagcgttatctgaattagacgcatatgtggttgggattggttcagacaccaacgtcgcagctttgcaacttgttcaaagcattcgtaactttggtttctcagctgatcgtgattacatgaatcgcaaaccaaaagcgcaatttaaaacggccgataaattacaagcaaaattagttttaacaatcggtgaaaatgaattgaatgaaggcattgtcaacgtaaaatcaatggcaacacgcgaagaaaaagccttcccgttaagtgctattcatgattcatttgatgaagtgtatgacgaaatgatgacaaaaatgattgaagaataa

SEQ ID NO: 1350 - DNA, 1773 bp, Enterococcus faecalis
gaaatggaaaaacgcacaacctattgcggcaatgtatctgccgaatttattgaaaaagaagttgtattaaaaggatgggttcaaaaacgtcgtgacttaggaggcgttatctttattgatttacgtgaccgtgaaggaatcgtccaagtggtctttaacccagaaaagtcaaaagaagcatgggaaattgctgataaatgtcgtagtgaatacgtcatcgaagttaaaggtcaagtcgtttatcgtgataaagaagcgattaatcccaaaatgaaaactggcgagtttgaagtgatggcgactgacattacgattttaaatactgcgaaaacaacgccatttaccattgaagatgacaataacgttaatgacgaattgcgcatgaaatatcgttatttagatttacgtcgtccatcaatgacaaacaacattaaattacgtcaccaagtaacgaaaacaatccgtcactatttagataatcatgactttttagacattgaaactccttatttaggcaaatcaacaccagaaggcgctcgcgattatttggttccttctcgtgtccatgccggtcatttttatgctttaccacaatcaccacaactctttaaacaattattaatgggggcaggcttcgatcgctattaccaaatcgttcgttgtttccgtgatgaagatttacgaggcgaccgtcagccagaatttacacaaatcgatattgaaacgacctttttaacaccagaagaaattcaaacatatacagaaaatatgttggctgaagtgatgaaagagacaaaaggaattgagatttctgttccgtttccacgaatgagctatgacgaagcaatggcacgctatggtagcgataaacccgacactcgttttgctatggaattaattgatgttgcagaggtagtgaaagacgtagacttcaaagttttccaagcagcgttggaaaatggtggacatgtgaaggctttgaatgcaaaaggcgccgcagataagtattctcgtaaagatatggataacttaggtaagtatgtgagtcaatttggcgcaaaaggcttagcttggttaaaagttgaagaagatggcttaaaaggaccgattgctaaattcttaacagaagttagtgatgaattaattgctgctaccaatgcagaagtcggtgatattttaatgtttggtgccgataaacctgaaatcgtagccgctgctttaggtgcggtacgtacacgtttaggtaaagaattaggtttaattgatgaatcgaaattcaatttcttgtggattgtggattggccgttgtttgaatatgatgaagaagctggtcgctatgtttctgctcatcatccatttacacaaccaaaagcagaggatgtggaccgcttagcaacagacccagcctctgtgtatgctgaagcttacgatgttgtcttaaacggctacgaattaggcggcggctcattacggatccatacacgagaattacaagaaaaaatgtttgaaacgttaggttttacaaaagaagaagcacaagaccaatttggtttcttgctagacgcattagattacggcttcccgccacatggagggattgctttagggctagaccgcttagcaatgctattggctggggaagaaaatattcgtgaagtgattgccttccctaaaaacggcaaagcaattgacccaatgaacaacgcaccaagtttagtttctccattacaattgtttgaattaaacattgatgtaacagccattgacgaataa

SEQ ID NO: 1351 - DNA, 513 bp, Enterococcus faecalis
gtgtataaaggagcgaaacaaatgacaaaaataattttaacaattggcggttccgatcctttttcaggtggcgggattcaaacagatttaaaaacgtttgaaaatcatcaagtctttggcttatcaactttaacttgccttgctacagcccccaagaatcattttcagattcatgaccttgagacttctttggtgaaagagcaactcgcttccatacctgccgggagtttagacggcatcaagattggcttgattcacagtgaagaaagtatgttacaaattgtaacctttttgaaaaagcacgcaggtctgccggtggtgttggatcctgtcttggcttttaaagaaacgacttcagtttatgaaaaaagatacatgcagttattgattgaaaaactttttccattcgcaacgattataacgcctaatttaaaagaagcagaattactcattggcagaaaattaacaaccgtcgaagaagtccaacaagcggcggaagagttaaatctttag

SEQ ID NO: 1352 - DNA, 408 bp, Enterococcus faecalis
tttaaaagaagcagaattactcattggcagaaaattaacaaccgtcgaagaagtccaacaagcggcggaagagttaaatctttaggagcgacaacggtggtgattaaaggtgttaatcgttggcttggtcaagaagcatgtgactttttttatgatggacaacaacatattcaattggtcaaagaaaaagtaatggcccacaccattgatggcgctggttgttcctttgcctctgcaattggtgcgaatttagttaaaggatatccgttaattgaagcagttgatttagcaaaaacatacgttcatgaagccattgtttctggggtccagctaaatgcagcttttggaagtgtgtggcatgaaggattactagcaggaggtgtggcggataatgacaagaaaaattag

SEQ ID NO: 1353 - DNA, 525 bp, Enterococcus faecalis
caggaggtgtggcggataatgacaagaaaaattagtctatatgcagtaattaccgctttaacagtggctgtgtcaatggtctttattatccccgtcccagcaacaaatggctttgttacattggcggatgcagggatttacattgctagtttactttttggtccgatcggtggcttgacagtcggagctttaagcggtggcttaattgatttattgtcaggctatccacaatggttggttttttcgttattgattcatggcggacaaggttggttagcagggcacttctttaataaaaataaaaagatgcaaacgctaggattacttttagccagtctcctcatgattagcgggtatgctttagcgactagctggctttacggcgtgggtgcggggattgcctcattaccagggaatatcattcaatccttatttggggtgattgtagcattgcctcttagtcaaacattaaaacgtgtgttaccaaaaaatggtcgtttagaagaaagaaggatgaacaaatga

SEQ ID NO: 1354 - DNA, 1686 bp, Enterococcus faecalis
tcgcaagcgcttatttacgatcgatgctggcttagtctactctttcaagggaaaaagaaagggattctcatgcaaacatcgaataaaaaatttccactttatgccctaacaacgcttggttttactttcctcactttgttagtggcggctagtccaaattggtttcaacaaatggacgaagctatctatcacatcaaatggcaattaaatgccccacttttaacagcggtcaatctgttagcaaaaactgccacgattggaccaatgctgctattcttcttatcattgatggtgtaccttttacgcaaaaaagaaaaaattctagccttttgggctgtcagtaacctattagctgtcggctttttagggagcgtttttaaacacgtggtgggtcgggctcgaccaaacctaggcgctttagctgaccggagctctgctagctttcccagcggacattcattattagcaatggcgctagtctgtacgattttgatcattttgacctatcttcatgtcgaaaaaaccaaaggcatcaaaattttcttactcacttatttagttttgattgtgttaggtcgcttaatcttacgcgttcattatcctagtgatgtcattgctgggatgctcctaagttatagctggatcaacttttcatttcaaattgtccaacgttatttgccggcacctgaaccagaggaagcagaagtatcgacacaacgccggcgccgccattttcgtaaaagaaaaagtttattcgtggtcttcagtttaacccttttatttttaggtacactttctgtttcggcttacggcgtcagcatgtatcgcaatttgcaaaaaacggcgaacaccatgtataaaccaagaaaatcttcaacgaagagtcccgatttagccaaaggggaaccggttagtttcttaattatggggattgcgaatgactcaaaacgcaaaaccgattaccgctccaacgccttaatggtggttacagtgaataatcaattacaaaaaactaccatcactagcatcccgcgtgactactatgtggaaatggctggcaccaatggcgaatacaataaaatcaatgcggcccacgttttcggtggtgccgatatgcaaattaaaacggttgaaaatgtcttgcacatcccaatcaatcattacttttcaattgatatggatgctatgaaggaccttggcgatgcggtgggcggcgtcactgttgacaatgcctttgcttttgacgctgaagggattcattatccgaaaggcaaacagcatttaggtggctgggaagctttacaatacgcgcgcatgcgttacgaagaccccgaaggcgactatggtcgtcaacgccgccaacgagaagttttaatcgaattaaccaacaagctactttcttttaacagcttgctaaaatatcaagaaattctggacgtaatcggcgaacatggcgaaaccgacttatcctttgaccaaatgatggcaatgctaaaaaaatacacccccgcactaaaaacgattgaaaccgatcaattaaaaggctacgattacactggcgatggcgtgacagggattgaaggtatttcttatcaacttgtggaagagagtgaacgccaacgtgtcgaaaatgccatcaaagaacaaatgaacctctctacaaaagacactgaacaatcgcaataa

SEQ ID NO: 1355 - DNA, 1317 bp, Enterococcus faecalis
aaaaacgaggaggtgaacagcatgctagttaattttacagtcaaaaatcttctatcttttaaagaggaacaaacactttccctacaaacaggtgcgtatttacgaaagtatgtcaataatcgtttcgaagtgaaacctaaaaattacccagaaaaactaaggttactgaagagtgccattgtttttgggggaaatggttcaggaaaatcaaatttagtgagtgggttaaatgcattaaaaacattagttttaagagaacaagcttcgattaatgatgctttattatatgaaccttttgcgttagaccctctcactaaacaaagcccatctgttatgaccattgaatttattaatgacagtgtcttgtatcgctattcgttagctaacacagcgcgcgaagtagttaaggaatctttagagatttatgacaaaacgcaggatgattttgtttattattttaaaagagacggtgcggaatcttccgtttttccagaaaaatatcaagaataccaaacacaaattaagtctaattcgttagttatccatacgttggaatcaaaaaatgatcagcacgctacgaatgtcgttcgttggtttgccaatcagttagttatttttgatgggtctttacggaatattgaacggctgagcaatgaaaaagacaaagagaaattcttgaactttttgaaacttgcggatatgaacatggttgacctggttcctgtgaaagacaaagaggaagattactcgaaacaagaaaaattagccgctgttttagaacgaattatccaagaaaaagacccgaccattgaaattggtcgagtcaagaaaagtctgtattcgctgtactctgtttataaccaatatgatgaaatgaatcaagtggtcggacaagaacgtattcattatgatttggaatcttctgggacgaaaaaattaattggcttagcgctaaatattttatttaatccagaagaaaaagtttttgtttttgatgaatttgatgatgcatttcatcaagagttgtcaggaacattgttagaagcgttcaatgccatggagacgaatacacaatttatcttgacctcccatgaacttcatttgatggataatcaattgagaaaggatcaaatttacttcacagataagaattatcgtggcgccagcgaattatacgctttgtatgactttgaagcagacccaaaaaaaggtcgcggagatatcacatattatcgccgttatttaaatggtctgttcggtggtgttcctcatattgatcgaagtgaaatcgttcaggcagtgaaggtaaaggagtag

SEQ ID NO: 1356 - DNA, 672 bp, Enterococcus faecalis
aatcgttcaggcagtgaaggtaaaggagtagaagttggtatgccaaaaataaaaagggtaaaaaaaggaaagaaattaaaaccaaatgtcatgattttttgcgaaggagaaacagaagaagcttaccttagattgattaaacgaaaatattctgcagtcaatattaaaagtaaactcaaagtaaaaacatgtagacgtcaaggagaggcgttggtcgaatacgccgtttcctgtattcggagtatgggaaaagcggagcgggataattatgatttgttttatgttatgtatgacaaggacgaacaaaccacagaatcgattgaaaacgcggtaagatgtgcacaacgacatcgtcctgaaatcaagacaattttttcaaatgaatgctttgaactctggttactacttcactttgaggaagtcaatcgatacatgactagagaaaatttatatgggagattagagaaagttctgcatttaaaagacagttatcgaaattttaaaggcgcagaagtatgtaagtatcttgaagaaaaagtagctattgcttttcagaatacgaataaaaactggttgtctcctttagaagaaatgaaaatcaatgaaaatccctatacgaatttccccaaagaattgtgcgaaatgttagcacaaaaagaagttgatttttaa

SEQ ID NO: 1357 - DNA, 744 bp, Enterococcus faecalis
acagccccgacaaaatctgaatctaccgtgaccgatgctaagcgggcgattttagaccagacgcccgacaatactttgattgttgctgacatgcaagaaatgcctcggggcaggttcggccggccgtttttcgctacgccaggtaaagggatttacatgagcatggtgcttcaaccgaaccaaaattttgaagaaatcgctcaatatactgtgattatggccgtagcggtcgctcgagcaatggatgctctggcaggcgttcacacagaaattaaatgggtcaacgatctttatttaaatggcaaaaaagtttgcgggattttgtctgaagccatgagcaatgtggaaacagggcagatttctaatgttatcatcggcatggggattaatttttcaattacagaaaccgaattccctgaggacattcggcagaaagtgacttcccttttcccagatggtgaaccgacggcgacgcgaaatgaattagtcgccaacatttggaatcatttttaccaaattttagacgaacgttcaacgaaagactttttagaagaataccggcaacgctcctttgtgattggcaaagacgtcgcttttacccaaaacgggcaagacttccgcggcgttgcgacaaccattaatggaaatggggaattgattgtccagttgcctgatggcacggccaaaacattgtcttctggagaaattagtttggaccagattggtgaatggcgtcgaggataa

SEQ ID NO: 1358 - DNA, 822 bp, Enterococcus faecalis
agatacttactaccaggttaccgtgatgtacctcaattagtacaacatggtttaccattaagagaagctttcttatggtctcgtggtcacgtagcagggaactactacgcggaagatttaaatgcattaccaccacaaattatcattggtgctcaatacatccaagcagctggtgttgctttaggattgaaaaaacgtggaaaagaaaatgttgtcttcacttatactggtgacggcggttcttcacaaggggacttctatgaagcaattaactttgctggtgcttaccaagcaaacggtgtcttcattatccaaaacaatggttttgcgatttctacacctcgtgaaaaacaaacagcggctaaaactttagctcaaaaagctgttgcagcaggaattcctggtattcaagttgatggtatggatccattagcagtttacgcaattgcaaaagaagcacgcgattggtcagctgcaggaaacggtccagttttaattgaaacattaacttatcgttatggtccacatactttatctggagacgatccaacacgttaccgttcaaaagaaatggatgacgaatgggtacaaaaagatccattgactcgtttccgtaaatatctaacagataaaggcttatggtctgaagcaaaagaagaagaaattattgaaaaaacaaaagaagaaatcaaagtagcgattgcagaagcggataaagcgccaaaacaaaaagtttctgatttcttgaaaaatatgtttgaagttcaacctcaaacaattaaagaacaaattgcattttatgaagcgaaggagtcgaaataa

SEQ ID NO: 1359 - DNA, 999 bp, Enterococcus faecalis
agcgaaggagtcgaaataaaaatggcacaaaaaactatgatccaagcaattacagatgccttagctcttgaattagagaaagacgaaaatgtcttaatcttcggtgaagacgttggtaacaacggtggggttttccgtgcaactgaaggtttacaagaaaaatttggtgaagaccgcgtcttcgatacacctttagctgaatctggtatcggtggattggctttcggtcttgccttgcaaggttaccgtccagttcctgaaatccaattctttggtttcgtttttgaagtatttgacgaaatcgttggtcaaatggctcgtacgcgttaccgtatgggtggaactcgtaatatgccaattactgttcgtgccccatttggtggtggtgttcatacaccagaacttcactcagataacttagaaggattaatcgcacaatcaccaggtgttcgtgttgttattccatcaaacccttacgatgcaaaaggactattaatttcatctattcgtagcaacgatccagttgtttacttagagcacatgaaattataccgttcattccgtgaggaagtgccagacgaagcttatgaagtgcctttagataaagcggctgtaactcgtgaaggaacagacgtatcaatcatcacttacggtgctatggttcgtgaagcgattaaagcagctgatagcttagcgaaagacaatatttcagcagaaatcattgacttacgtacagtggctcctttagatgtggaaacaattattaactctgttgaaaaaactggccgtgtggttgtcgttcaagaagcacaaaaacaagctggcgttggcgctatggttgtttctgaaatttctgaacgtgccgtattatcattagaagcaccaatcggacgtgtatctgctccagatacaatcttcccattcggacaagcagaaaatatctggttaccaaatgcgaaagatatcgaagcaaaagctagagaaatcgtcgaattttaa

SEQ ID NO: 1360 - DNA, 1623 bp, Enterococcus faecalis
aaaatggcttatcagtttaaattaccggatatcggtgaagggattgccgaaggcgaaatcgttaaatggtttgtaaaacctggcgatacaatcaacgaagacgatacgttattagaagtacaaaatgacaaatcagtggaagaaattccatcaccagtaacaggtactgtaaaaaatatcgttgtaccagaaggaacagttgcaaacgttggtgacgtgttaatcgaaatcgacgcacctggtcacgaagataacgatgcagcaccagcagctcctgcacaagaacaaacaccagcacaacctgctgctgtaccaacaaccgaagcagctggcggatttttccaattcaaattaccagacatcggtgaaggaattgccgaaggcgaaatcgttaaatggttcgttaaagcgggcgacacaattaatgaagatgattcattattagaagtacaaaatgacaaatcagtagaagaaattccatcaccagtaacaggtactgtaaaaaatatcgttgtaccagaaggaacagttgccaatgtgggtgacgtgttagttgaaattgacgcacctggtcataattcagcagcaccgtcagtcgcagcaccagctactgacgctcctaaagcggaagcatcagctccagccgcttcaacaggcgtagttgcagccgctgatccaaacaaacgcgttttagcaatgccatctgttcgtcagtatgcgcgtgaaaaagacgttgatattacacaagtaactgcaactggtaaaggtggccgtgtcattaaagcggatattgatgcctttgtctctggtggttctcaagcagccccagctactgaagctgccgcaacagaagcagcacctaaagcggaagcagctgcacctaaagcagcgccaaaagcctttacttctgatttaggcgaaatggaaacacgtgaaaaaatgacaccaacacgtaaagcaattgctaaagcaatggttaacagcaaacacactgctcctcacgtaacattacatgatgaagtagaagtttctaaattatgggatcaccgtaagaaatttaaagatgttgctgctgcaaatggtacaaaattaacattcttaccatacgttgtaaaagcattgacttcaactgttcaaaaattcccaatcttgaatgcatcaatcgatgacgcagcacaagaaattgtttacaaaaattactttaacattggtatcgctactgatacagatcatggcttatatgtaccaaatgttaaaaatgctaatacgaagagcatgtttgctatcgctgatgaaatcaacgaaaaagcagcattggctatcgaaggtaaattaactgcacaagatatgcgtgatggtacaatcacaattagtaacattggttcagtcggtggcggctggtttacaccagtaatcaactaccctgaagttgctattttaggcgttggtacaattgcacaagaaccagttgttaatgcagacggcgaaatcgttgtgggacgcatgatgaaattatcattaagctttgaccaccgtatcgttgacggcgcaactgctcaaaaagcaatgaacaacattaaacgcttattagctgatccagaattactattaatggaaggatga

SEQ ID NO: 1361 - DNA, 1185 bp, Enterococcus faecalis
caaatggtagtaggagatttcgccattgaactagatacagtcgtaatcggagctggtcctggaggatacgttgccgcaattcgtgccgcagaaatgggtcaaaaagttgcgattatcgaacgtgaatacatcggaggcgtttgtttaaacgttggatgtattccttcaaaagctttaattgctgctggacatcattaccaagaagcacaagattcttcaacttttggtgtaacagctaaaggagtcgaattagactttgcaaaaacacaagactggaaagataacacagttgtaaaatcattaacaggcggcgttggcatgttattgaaaaaacacaaagtagaaattattgaaggcgaagcattcttcgttgacgaaaatacattgcgtgttattcacccagactcagcacaaacttactcattcaataatgctattgtagcaacaggttctcgtccaattgaaatcccaggattcaaatttggcggacgcgtgttagattctacaggcggtttaaacttaaaagaagttcctaaaaaattcgttattatcggtggcggtgtcatcggtgctgaattaggtggcgcttatgctaacttaggttcagaagtaacaattttagaaggtagcccatcaattttaccaacttatgaaaaagatatggttaaagttgtcacagaccacttcaagaagaaaaacgtaacaatcgtgacttctgcaatggctaaagaagctgttgacaatggcgatagcgtcactgttaaatatgaagttaacggaaaagaagaaagtgttgaagcagattacgtaatggtcactgttggacgtcgtccaaacacagacgacttaggcttagaacaagcgggcgttgaaattggcgaacgtggtttaatcccagttgacaaccaaggacgtactaacgtgaaaaacatcttcgcaatcggcgacatcgtaccaggtgctgcgttagcgcataaagcaagctacgaagcaaaaattgctgctgaagcaatttctggtaagaaagttgcagttgattacaaagcaatgccagctgttgcctttactgatccagaattggcaagcgttggtatgactgttgcagaagcaaaagaagcgggaatcgaagcaaaaggttacaaattcccatttgctggtaacggccgtgcaatcctctttagataa

SEQ ID NO: 1362 - DNA, 315 bp, Enterococcus faecalis
ctgttgcagaagcaaaagaagcgggaatcgaagcaaaaggttacaaattcccatttgctggtaacggccgtgcaatcctctttagataaaactgaaggattcatgcgtttagttacaactgtagaagacaatgtcatcatcggtgcacaaattgccggtgtcggtgcaagtgacatgatttctgaattagctttagctattgaatctggcatgaatgcagaagacattgctttaacaatccacccacacccatcattgggcgaaattactatggatacagctgaattggctttaggtttaccaattcatatttaa

SEQ ID NO: 1363 - DNA, 1407 bp, Enterococcus faecalis
gtgaaaaagtgtaaaaattgtcgtcacgtgaatcgtgatacggagtccttttgtgaagaatgcggcgctccgctaatgaatgaatcaatgcatcaagaggaaaaccaagcacaaccatcaatgaataaagggaacgaatctactcctctcagatcaaaaagaagctggatctgggcgtttctttttgtgttcatcgttcttggagcgggtagctattttctcgggacgcattatttttctaaggaacaacaaatttcttattttattgaagcgattgagaatggtgatgcccaagaattaagtaaaaaaatgaggacgaacgagtctgaatttcaagtgaatccgcaaagcattaagcctttaatcacttattatcaaaaaaatccaactgagctaaaaaaattagaaaaagcgctattaaaggataaaaagttacatggtttaactattcgtgaaacaagtcaaacagcatttttctttcaccgttatcaattcattttaacgcctgtttctgttcagttaacgacgaatcagcgcggtgtgacgctggcaatgaacgggcgggaagtgggcacttccgactcaaccacttatcaaaaggaattgggccccttagcgccaggacaatatacttttacagccacagtgaaagatagcaccggcgaacctgttatcacagaagagtaccgtttattagaagaggaaaattatatttctagtattcctttagattttaaacgaatgaattttgttgtggaaagcaatctgccagacgcagatatttatattaatgatcggaaagttggtacgctaacgaatggaagcaaaacgattggccctttgttctggtccaaagggatgacgattcaacttaaaaagacgattaatggagaagaaattcaaacatcaaaagaaacgattggtgaaaatgattttgtcgaagcgctctccgataatccaacgctacaattgaattttccgttagctagcgactatgatgcccgcaaagcgctagaaaccttttatcaagcatttgccaaacaagtgaaaagtcatacggatagtacagaatttgctaaaaaatatctcgttggtggggaaaataatcctcaatttccttcttttatagaagcacttgaacgattacgtgaaaagaaatcgaccgatggttcaccagattttgaagtgaccattaatacgctacaattggatggtaaagaaaattaccatgtcaattattatttagaagccaaaaattctaaagcaaaagaaaatggtcttcgttatgaatggatcaatggcctaaatgatcaaattcatttagtcaaagaaccgttaaaagaaggacaattacagtttgtttcgatagatgaacaaacacttgcttggctcgaaaagatactctaa

SEQ ID NO: 1364 - DNA, 234 bp, Enterococcus faecalis
gatgtgtcactgtttatgcaatcacgtttagttcctgaaaaatgtattgcttgtggactttgtcaagtttatgcgcctaatatatttgattatgatgatcatgggattgtcctttttaaagacgagccgcatgctcgacaacaatttattccagaaaacgaacgcgagaatgtgttaaaagcgtaccgcaaatgtcccacgcgtgcaatagaaataagcaaaaatgagtgctaa

SEQ ID NO: 1365 - DNA, 1047 bp, Enterococcus faecalis
aagaggtttactatggaagcaacttttattttagcgttattatctcatggatacaaggtacgtgcatcaactttgtatcatcttttaaaaggcaaacggactagctctgttttgatttatggttttttatatgattgtttacggttcattggctggtggccaacgatttccgaacaagcctattttcaatttcttgaaaaactttcgaaggcgaaacaaattcagtatcacgaagagacaaatgagattcaactaacaaaagaagggcaactatttttaaaggagcaccatttttcgttgctggattatcctgcaattgatctttatcgttttggcagaagtgatcgagaaagttggcaactcattcaatttgccgtgcaagtgacttcatatttatcatttgaggaaaaacagtatattccacttttatcaacaccgattccgcaactatatttgaaacgatggttacaacaagacaagaaagagcagcgcgttcaatcaatcaaagaagaactgttgcgagggtttgagttactacctgaagcagaaagcgactatttggttgcgcaactttctggttatcagcaaactggcaaagttcctcagcaattaacaagccataagacagctcttgaacagcgtttgtggcacacgcaagcggttcatcatttactgcagttgataatgtacggaggaaattatcctgctttacaaacgcttgtatggccgtatctagaaaaaaatctaaaccaaagtatgcaagaaacccaacgattgttaacggaaggtaagacacttcaagaaattgctgagcagcgaaaaataaaaccgagtaccattcacgaccatctattagagttggctattcaagggcagctgcaggcgtctgtttaccttgaaaaggaggcaatgctccaaaacttggctcaaacagaacaagatccgcggctgtgggtgtatcgggattggcgagcgcaagaagcgacgctttcttatttagattttcggttatatcaaatccaacaaatttggcaagaaaaggagtga

SEQ ID NO: 1366 - DNA, 204 bp, Enterococcus faecalis
aaaggaggcaatgctccaaaacttggctcaaacagaacaagatccgcggctgtgggtgtatcgggattggcgagcgcaagaagcgacgctttcttatttagattttcggttatatcaaatccaacaaatttggcaagaaaaggagtgagtgttgttgacattagaacaagaattattcactcaatttggttacgcagcgtttaa

SEQ ID NO: 1367 - DNA, 990 bp, Enterococcus faecalis
gtgttgttgacattagaacaagaattattcactcaatttggttacgcagcgtttaagcctggtcaaaaagaagtgattacaaacttacttgacggtatgaatacattggctgttttgccaacagggactggaaaatcattgtgttatcaatttgtgggccagaagttagagggactaacggtaattgtttctcccttactttcgttaatggaagatcagatgcgtcaattacaaagacaaggaattaaaggtgcggttgccttaaacagtacgttacagtattcagaaaagcgttatattttagcgaaaatgttccaatacgattatctgtttttaagcccagaaatgcttttgcagcaagaagtacttagtgtgttacaacgccaaaaaattgcattatttgtggtggatgaagcccattgtgtttatcagtggggcgtcgattttcgccctgaatatagtaaattagatctggtccaaaaacagctagactttcctttgaccttggcgttaactgccacagcgacacccgttgtacagcacgcaattataaaacaattattttctcatggcagctatcaagaagttctttcttcagtgaatcgaaaaaatattggcttgttcgtgaaggaaacgtcagaaaaagaagaagtgttactagattacttatctaaaacggctggtaaaatcattatctattgcgccacgcgcaacaaaacagaacaaatcagtcaacttattcaggcaaaaaccagttttaaggtagcctattatcatgggggcttggaggctagtgaacgtagtcgcttgcaagaacaatttattgataatcaaatcgatattctttgtgcaacgaatgcttttgggatgggaatcgacaaacctgatgttcgtggagtgattcattttgatttgcctgatagcttagaaaattaccggccagaactcgggcgagttggaattgagactgtgcccaccacaaatctcaac

SEQ ID NO: 1368 - DNA, 279 bp, Enterococcus faecalis
ggacttagtatgattcgaatcggtcaaggttttgatgttcatcaattagttccgcaacgacctttaattattggtggggttactcttccttatgaaaaaggtctgttaggtcactcagatgccgatgttttaacacatgcaattattgatgcaatccttggtgccgctggtctgggtgatattgggcaactgtttcccgaaaccgatccgcagttcaaaaatgcgaattctgtaaacttgtccaaaaaagtaaaagagacagttgattcaccaacggga

SEQ ID NO: 1369 - DNA, 1167 bp, Enterococcus faecalis
ataaacgaggaggatggctatatgcaaaaacgaatcatcacgttgctgatgatcattgctggtgcaagtttaggaatttctcttttcccaatggcttgggaaatggctaagcaaggcaataacagttggttaaacaataactttacgaacggattaatcggtgcaattattttctttattttatctttagggttagcaaagtatattgtttccgctgtcaaaaaaatcgaagcagctttaaatgaaatgagtttaacctatttattatttggaagtattggtgccatcattggtttaacaattggtgtcattatttccattccaatgtacaacttacaaattcctgtcgtgaatagtttactgccaattctagttatgattattctgggttacttaggtttccgaatgggaacaacacggattgaggagtggaaaaaagtttttacacctcgccaaaagaaagcaaatacggaagacaccgaaggacaaatgttggaacgtaaagtggaagacaacttccataaatacaaaattttagacaccagtgtcatcattgatggcagaatctacgatatcgctaaaacaggctttttagaaggtgttttgctcatccctaactttgttttatatgaattacaatacattgctgattctggagacagtttaaaacgggtgagaggtcgtcgtggtttagatattttaaatgctttacaaaaagaagaaggtatctccgttgagatgtatgacggagatttcgaggatatctctgaagtagacagtaaattaatcaaattagcaaaattattagatggcgtggttgtgaccaatgactacaacttaaataaagtctctgaatttcaaaatgtgcctgttttaaacattaatgctttagctaatgctgtgaaaccagtggtgattccaggtgaaacgatgaatgtgatggttgtaaaagccggaacagagcgtcaacaaggggtcgcttacttagatgatggcacaatggttgtggtagaagatggccagcattacatgaatgagcaaatcgaagtggtcgtcacaagtgctttacaaaccgcagctgggcgtatgatttttgccaaaccggcgcacgcgggtcgcgggattaatgatcgcaaggataaccatcctaaaaacgataaaaattaa

SEQ ID NO: 1370 - DNA, 1230 bp, Enterococcus faecalis
aataaacaacagataaggagattctacatggcaaaaaaagcaaaagttcaatttgaatgtcaaagctgtgggtatgtgtctccaaaatatctcggccgctgtcctaattgcggacaatggaattcgatggtggaagaggttattcaagatacttctgatcgtcgtgctagagtaagtttgactggtaaaaagacacaaccacaacggctatctgaagtcatacctaaaaaagagcctcgtgtaaaaactgaattagtggagctgaatcgggttttaggtggtggcgttgttccaggttcgttagttttaatcggtggcgatcccggaataggtaagtcaacattgctcttacaagtatcgcaacaattagcagccacaggtggtacggttttatatgtttctggtgaagaaagtgctgagcaaattaaattacgagcggagcgtctaggcaccgtcaacgagacattttacttatacgcagaaacagatatgcacgaaatatcacgagccattgaaaaattagaaccagactatgtcattattgactcgattcaaacaatgacgcagccagatgttaccagcgttgctggtagtgtcagtcaagtccgagaaacaactgccgaattattgaaactggcaaaaacgaatgggattgccatttttattgtcggacacgtaacgaaggaagggtctatcgcagggccacggatgttggaacatatggtagacacggttctttattttgaaggagataagcatcacacctttagaatcttacgggctgtcaaaaatcggtttggctcaacgaatgagattggtatttttgaaatgcagacacatggattggttgaagttatgaatccttctcaggtctttttagaagaacgtttagaaggagccaccggatcttcaattgtggtagcaatggaaggttcacgccctattttggtggaaatccaagcgttagttaccccaacgatgtttggcaatgccaagcgaacgaccaccgggttggactttaatcgcgtttctttaatcatggcggttttagaaaaacgggcaggccttttgttacaaaaccaggatgcgtatctaaaagcggctggtggagtcaaaattaatgaaccagctattgatttagcgttagcaatcagtattgcttctagctataaagaaaaaggaacctcatcttcggaatgtttcattggtgagatggttttaactgggtga

SEQ ID NO: 1371 - DNA, 492 bp, Enterococcus faecalis
gggagaatgaatatgaaacaacgtggttttgagattatttctaagtatcaagaagagggcttgagtgtcccacaacgagcaacaaaaggtgccgcggggtatgattttcaagcagccgaaacggtcgttgtaccaagtctttggaagttacaacaagctggagaaaatcccaaaccaattttagttaaaacaggaattaaggcgtatatgcctgattctgaatatttagaattggtaagtcgttcttcgaacccgctaaaacgattcctacttttagcgaatggtgtcggagtcattgacagtgattattataataacgagaataacgaaggacatatcatgttccaatttttaaactttggatatgaagatgttgtcattgaaaaaggtgaacgaattggccaagggatttttaagccgtttttattagcggatgatgaccaagtcgaggcagaaagaacgggcggttttggttcgtctggacaaaaataa

SEQ ID NO: 1372 - DNA, 852 bp, Enterococcus faecalis
gtgtcaaattttactgtaaaaagaaacgaggcacttatgagaaacaaactccaacaggccaaacgaattgtgatcaaagtcggaaccagttctctgatttatcccaatggcaatattaacttaaaagcaattgatcaattagcctttactttgagtgatttaagcaaccaaggcaaagaaattattttagtttcttctggcgcaattggtgtcggactgaataaattaaatctatctgtacgcccaacgacaattcccgaacaacaggcagtcgctgcagtcggccaagcagaattaatgaacatttataatcagcggttttcaacctatagccaacaaatggcacaagttttattaactcgtgatgttattgaatatcctgaaagtcgcaataatgttaccaatacttttgaacaactgttaaaaatgaatattattcctatcgtcaatgaaaatgatactgtcgcaattgaagaattggatcacttaaccaagttcggggataacgatcaattgtctgccattgtctgccaaattgttcaagctgacttgttagttatgttatcagatattgatggtttcttttcagacaaccctactgtcaacaaagaagccacgttattttctgaaatcaatgaaattaatgaagacttgttccaattagccggtggtaagggaagccgctttggcactggtgggatgtctagtaaattaaaagctgctgaacgtgtgttagctaatcaacaggcgatgattttagcaaacggaaagcagccaaaaatcatttttgaaattttagaaggaaaagatatcggtacgttatttattaaaggagggcatgaaagtgactga

SEQ ID NO: 1373 - DNA, 480 bp, Enterococcus faecalis
aaggaaaagatatcggtacgttatttattaaaggagggcatgaaagtgactgatttaaagcaactagggcaacaagctaaagaagcctcttatacgctaggcttgatggatactcgtcaaaaaaatactttgttaaacaaaatggccgcagccattgaagccaatgcaccccgcattttacaagcaaatgcattagatttagagcaagccgctacccacggaatttctgaaacaatgcaagaccgcttacgtttaacagaagaacggatcacagcgatggctgagggcatacgccaagtcgctactttacccgatccaattggggaagtagataaaatgtggcgcaatgaagcgggactgttaattgggcaacaacgcgtgcctttaggtgttattggaatcatttatgaatcgcggccaaacgtgacaacagatgccgctagcctttatttgtcattcgaccacggggattggcccatc

SEQ ID NO: 1374 - DNA, 198 bp, Enterococcus faecalis
acgtgccttacttttagcagcagagtaccacgtacgctatgcattaaattatttatcagaataacagggatagggagccgacaaaatgatggtttgtgggctcctttcgttataaaccaacgtggcttgctttcttgtcatactatggtagaatacaagcataagaaaggtgattcacatgttttttgttttaactga

SEQ ID NO: 1375 - DNA, 327 bp, Enterococcus faecalis
acagaaatggatgatttttctgtttatgcggcagcgaatccattaattaatgaagaacaagcaaccaaccgtgcacagcaggtagccagtgaaattgttggttttgaaaatgttgtgaccgatcatcctaaaagtttaggggcggatgattttgctgattacttagcggtaattcctggtatctatggacgggtcggttcacgaaaccgtgaaaatcctgctactcattttggacaccatcatgaacaatttgatattgatgaacgtgccttacttttagcagcagagtaccacgtacgctatgcattaaattatttatcagaataa

SEQ ID NO: 1376 - DNA, 1089 bp, Enterococcus faecalis
cttttcttaaaagaaatgaggcaaaaaatgaacaataaagaaatgaaagcaagacaagagaaaattcgtaatttctcgatcattgcccacattgaccatgggaagtcaactttagccgaccggattttggaaaaaacaaatacagttagcagtcgagaaatgcaagatcaattacttgattcaatggatttagagagagaacgcggcattactatcaaattaaacgcaattgaattaaactatacagccaaagatggtgaaatctatactttccatttgattgacacaccagggcacgtcgatttcacctacgaagtttctcgtagcttggcagcttgtgaaggggctgttctagttgttgatgcggcgcaaggaattgaagcgcaaacgctagcaaatgtctatttggcattggataatgacttagaaattttacctgttattaataaaattgatttacccgccgctgatccagagcgtgttcggacagagattgaagacgtaattggaattgatgcatcggaagctgttttagcaagtgcaaaagcagggattgggattgaagatattttagaacaagtggtggagtatgtaccagctccatcaggcgatattgaggctcctttaaaggctttgatttttgactctatttacgatagttatcggggggtcgttttaaacatccgtgtaattgacggtgtcgttcgtcctggggataaaatccaaatgatgagtaacggtaaaacgtttgatgtaacagaagtcggcgttttttcaccgaaaccgattgctcgtgattatttaatggttggtgatgtgggctatatcaccgctagcattaaaacggttcaagatacacgggtcggggatacagtgactttggccgacaatccagcagcagaagcactaccaggttaccgcaaaatgaatccaatggtttattgtggtttatatccaattgatacgtcgcgctacaacgatttacgggaagcattagaaaaattacaattaaatgatgcggcgttacaatttgaaccggaaacatcgcaagctttagggcccgtttccgttgtgtatactgacaattag

SEQ ID NO: 1377 - DNA, 1326 bp, Enterococcus faecalis
agaagatttaaagcacttcccttttattcttttggtttcgaaaggctaacagagtttcgaaaaatttggtatactaaaaacagtaaatttattggagatggaaaaatggatgaacaagaatttcgaaagcaactgaccttaaagcctgttgaggaagaacacattgatcaatttaatgaacttctttcctatgtttttcaagtgactgaagcagatattgaagaaagtggttttgaaaacaaacgcgcatttatcaaatcaaaacaaccgattttagaactttcaaaagtatttggctggtttcacgaaaatcaattaatttcacaaattgctatctatccatgcgaagtcaatatccatggcgctttatataaaatgggcggcgttactggtgtcggtacctatcctgaatatgccaaccacggtttaatgaaagacttgattcaaacggcattagaagaaatgcgccaagataaacagtggatttcttatcttttcccttacaacatcccttattaccgacgtaaaggttgggaaattatgtccgacaagttatcttttaaaattcgggatacgcaattaccaaaaaccgttcctgttccaggaatgattgaacggttagctgtcgatcacccagatgtctttgatgtctatgcgcgattcgctcgtcaaaatcacggcgcactcattcgtagtgccttcaactgggaagaatattggcgtttcgaaaacgaggaagaacggactgctgctgtctattatggtgccaatcaagaacctttaggagtacttttctattgggtggccgatgaggtatttcatattaaggaaatgttttacttgaaccaagaagcccgaaatggcttgtggaattttattactgcgcatttttcgatggtttattgggtcaagggcgatatctataaaaacgaaccattagcctttcttttagaagacagccaaattaaagaaagcattgagccctattatatggcgcgaattgttgatgtcaaagcctttttagaaaactttccttttgaaagtacagctaagcccttccattttgtcgttaaagatcctgtcgctgagtggaataatggtatttttggcttaatttgggatgaaaatgatcaagtgaccattacggatgaacctctaggcaccgccgttcacttagatattcaaacactaacttgtttagtcatgaattaccgacgcccttcgtacttacatcgaattgaacgtattgatacagataaagaaactttaaattctttggaacggatttttcctgaccaagaagcttatttcagtgattatttctaa

SEQ ID NO: 1378 - DNA, 513 bp, Enterococcus faecalis
ttatttctaaacccttggattggagacagacaaatgacaaaaatttattttgcaggacctttattttcgcaagctgacttacgttataatgcctatttagtcgaacaaattcgacaattggataaaacaatcgatctttatttaccacaagaaaatgcggcgattaacgacaaatctgcttatgccgatagcaaaatgattgccttagcagatacagaaaacgtccttgctagcgacttattggttgctttattagacggaccaaccattgatgcgggcgtagcttcagaaattggtgttgcttatgccaaaggaatcccggtggttgccctttacacagacagccgccaacaaggtgctgataatcaccaaaagcttgatgctttgaacgaaatcgctgaaaatcaattccattatttaaacctttacacagttggtttgattaaattgaatggtcgggttgtttcttcagaagaggatttgttggaagaaattaagcaacgattgtcataa

SEQ ID NO: 1379 - DNA, 336 bp, Enterococcus faecalis
ttcttaaacagaattgatgataccattttatttacaccattaagcttggataatgtgaaaggaatcattggtaaaatgaccgcacaacttgctcatcgtttagagcaacaagaaattgtgttggaaatcactgatgaagctaaaacatggattgctgaaaatgggtatgagccagcttatggagctcgtccgttaaaacgtttcattactcgcgaagtcgaaacaccattagcaaaagaaattgtttctggacgagtaatgccaaaaacaaaagtcacgattagtctattagacaatcaattagtttttgaaaatgaaccgatagaagaagtgtaa

SEQ ID NO: 1380 - DNA, 267 bp, Enterococcus faecalis
ccttcgtggttaagagggcacatggtcatattagacgaaattgaaaaagcgcacccagatgtctttaatatcttattacaagttttagatgatggtcgtttgacagattctaaaggtcgggtcgttgattttaaaaatacagttttaattatgacaagtaacatcggctctcagcttttattggaaggtgtgacacctgaaggaacaattccagaagaagttgaaaatcaagtcatgaatattctaaaaggacactttaaaccatag

SEQ ID NO: 1381 - DNA, 309 bp, Enterococcus faecalis
aaggagcgatttcacttgattctattgttaaaagaagtagattttcgacaaacaaaagcgaatgctagaaatgtgttgaagagttttagacgtttagagcgaatagctggtcgctctttgatagatttaaaatcaccaattattacagatatgcctaaaagccaaagtcacgggaataaagcagaagatgcgctagtacaattagtagatgcagaagcagaaagagacgcaattgtatctgcgcttatggcattgagcctaactagcagacaaattttacatgccagtattcgaccacaagtggcggga

SEQ ID NO: 1382 - DNA, 270 bp, Enterococcus faecalis
ctgacttatgtggtagaaacaactgttttccgccagttgttctttaggtgtgagttagcactttccccaaataaagtgctattaaaaagccgattaaaaatcgacaatagatctcttgcagagacgtgtactactattaactgtttaccagaagttaatgtagaaaaggaggaaatttatttcataaataaaatccccaagaaagttaaagtgattataccattgaaaaatagatttgaaaatactttctatgccaaaaatatttattag

SEQ ID NO: 1383 - DNA, 246 bp, Enterococcus faecalis
aaacgatggtcaaattgctgtaatggtttgtcaaaagttgtacagtatgcgaccacgaacagaactagaaattacaagtttggaggaacaagtgtagtgggtaaaacgggtaaacagatcaaagagaattattcggttagaaagcgagtaaagaagatgcttaaatttaaagaatttaatattcaattattcgacgttcacatttatataaaaaggctaagtagttttaaaaccaacaaaaaatag

SEQ ID NO: 1384 - DNA, 276 bp, Enterococcus faecalis
ttgaaaaaggggctatttttgcgcatattacgttttacatcgctacccctaaaatatctattaagttctaaaaagaaacgcttagaagtgaaattagagcggaaatattgggataagaaacctgacttggataattatttcaaagcagtcactgatgctgccgaaggtattttatataaaaacgatggtcaaattgctgtaatggtttgtcaaaagttgtacagtatgcgaccacgaacagaactagaaattacaagtttggaggaacaagtgtag

SEQ ID NO: 1385 - DNA, 231 bp, Enterococcus faecalis
gcaaataaaagaatacttggaggggaaatgatgcgaattatcctgccaattgaacgaaaactgcaaagtcgcccgaggtttgcaagacgtgggaattatgtccaaacctatgaagatagcgctatgggtgcctataaacaaaaggcaaaaccagaattgattgaaaaaggggctatttttgcgcatattacgttttacatcgctacccctaaaatatctattaagttctaa

SEQ ID NO: 1386 - DNA, 861 bp, Enterococcus faecalis
ctagtgaatgaacatagaggatattacgccattatcccagcgattgttcgctatgataaccacttaaatgggaatgcaaaattattgtatggagagctaacggcattagcaaatgaaaaaggctattgttgggcaacgaatcaatattttgcaaatctgtataacgttagcaagcgaacaattatttcatggctgaaacagttagaagaaagaaactatataaaaatacaaattttttataagccaaacagcaaaatggtagatcggagacatatctatatcttaccgtatccaactgatacagaattttacacccctagtgaagaaaatttcatcacctatggaaaaaatcatcaggagggggatgaagaaaatttcactacccctagtgaagaaaacttcacagagaataatacattaattaataatacaaagaataatacaaagaatatatatagtgttgaacaaagttcaaccatgtctgaattatttgaaaaggtttggaaaacatatccgaagaaaaccaataagaaaaaagccaaagagcaattcttaaagaaaattaagtcagatgaagacttcgaacggtttaaaacaggatacaaagcttatcttaagtatatcaaattaaacgactggtatcatccacaagaattgttccgctggatacgtgatgaacgttttaacgatgaatacgacttgtctgaaacggcaacgcaagtaagatattcaaataatccagttagacaagagaagttgccagattgggtaaatgaaccaaaaaaagaagaggagaaactatcaccagaaaagcaagctgaacttgataggcaaataaaagaatacttggaggggaaatga

SEQ ID NO: 1387 - DNA, 219 bp, Enterococcus faecalis
atatcggaggttaacagtttggtagaggaattacttgaaaaatacaggcaattaacatcgagtcaaaaactattttttgaactattagcatttgtctatatcggttcaagaaatggtaaaggaatagctattgaagcacaaacaataaaaaaagtcgttaacggagaaattaagcataaatatgtttatacggtcgttgttgatgaggaggataactag

SEQ ID NO: 1388 - DNA, 438 bp, Enterococcus faecalis
cgaaccaaatggatagaggaagttttaaagtattactacgaagctaaaagtggcgtgtattttgaacatagtaaggctacacgacatgaagcaacagaatggattagttttttaatcgaattcattttgaaaaatgatgtaccactagaaaagagataccaatacttgctagaaaataacaaatggttttattactgccttaaataccgtaagtgttgtatttgtgggaaacatgccgatgtttgtcatatcgaggtagtcggtatggggcgaaatcgtcaaaagattaatcatgaaacatttactttttacgctggttgtcgtcaacatcatcaagaagaacatcagataggtactaagaactttttaaacaagtatcaaattaaaccagtaaaactaaacgttgaagaacgtaagaagttgaatatcggaggttaa

SEQ ID NO: 1389 - DNA, 219 bp, Enterococcus faecalis
atgattggaaaaatcataaaacacaaaggaaataaattggcgattgagtttgaggatgagatcaactcgaatttcctcaaactcctagctaacaacgatgacaatttagtaaaagttgaactattagataatcgacaaatgtctcaaaaacagaatgcactttctcacgttttaatagctgatatagctcgttggagttatgacgaaccaaatggatag

SEQ ID NO: 1390 - DNA, 735 bp, Enterococcus faecalis
atgactgaagcaaccaaaacagatttttctaagttgaatgtttatcaaaaattagcgtatgtgagacaaaaagcaccatatattcaaaaaagtaaacgtggccagcagtacagctatgtggggtcaagcgatgtactatccgcattaaatacagtcataaatcaagttggattaattttgaagccagaaattgttgctcatcaagttcgggaatcacaagatgaggtatggaaagcggataaagtaaagaaagagcctgtagccaaaaaacgtacaacgtattttacagagctagagttaatgatgacatggattaatattcataatccttctgagattgttgcttgttcatggtatagccaaggagtagatattgaaggagaaaagggggtaggaaaagcactaacgtatgcggaaaaatattttttattgaaattttttaatattgcaacagatgatgacgatcctgataaataccaaaaagaacagctaaaaaatactacaattactgaacggcaaattgatatgttgaacgcatcaattagtagagtagccgagctggcagggcaagaatttgaagctgtgaaatcgttagctataaatgattctgatttgaatcctaaaaaagcatttgaagaatatagtgcttatgattatggtgttatttctaaattgcttgcgaagtggataaatttttatgaatctaggcagaaggttcaagaagataagaagtga

SEQ ID NO: 1391 - DNA, 318 bp, Enterococcus faecalis
atgaatcgtagagaagcaaatgcactagacagatatttaacagagccgactgaaaaaccacataaggaaacctatgaagatgatccagtggatactactgattattttggaaatgaaattgctgatgaagacggtgtgtttgagataacttttgcaatgaaatgtctttatacaggacaaccagtactcacttgtaaaaaaattgctacacaagatacaatcgttgatttgatagaagaattaggcgaagaaaacgtgtatttaattgaatatgtgagttcaggaaaaagatataaggagggcttattgaatgactga

SEQ ID NO: 1392 - DNA, 639 bp, Enterococcus faecalis
acgaaacgaggtttctgtaaaaagaaacctcgttttccctttttagaaaaaggaaagtgtgctacaatgaagcgactaaattgtagaaggaaagggattcgtgtgcgaattttagcaatagatacatctaaccaaacattgagtattgctgtgtgtgaaaatcaaaaaattctgggaagttatacagcaacggttaaaagaaatcatagcttaacattaatgccggcaattgactatttgatgagccaattgaacttggcgccaacggcaattgatcgttttgtcgtagcagaaggacctggatcatacactggcttacgtttaggcgtgacgactgccaaaacattggcctatactttaaagaaagagctagtaggcatttccagtctacaaacgttagctgccaattgtgttggacaaactggtttaattgtgcctctttttgatgcgcgtcgtaaaaacgtctatgctggtgcttatcggtttgtcaatggcgtgtggcaaaatgagttaccggaccaacatatttccctgcgggagttattagaacaactaaaaaatgaaccaaatcttttttttgttggtgaagatgttgaaaaattcactgaagaaatagctcaaagtcctcaacacgggaag

SEQ ID NO: 1393 - DNA, 195 bp, Enterococcus faecalis
ttttcacacacagcaatactcaatgtttggttagatgtatctattgctaaaattcgcacacgaatccctttccttctacaatttagtcgcttcattgtagcacactttcctttttctaaaaagggaaaacgaggtttctttttacagaaacctcgtttcgttcattttctctttttatttaatggttgcttctaa

SEQ ID NO: 1394 - DNA, 2043 bp, Enterococcus faecalis
atggaacgaagcaatcgtaataaaaaatcttcaaaaaaaccacttattcttggtgtttctgccttggttctaatcgctgctgccggtggcgggtattatgcttatagtcaatggcaagccaaacaagaattagccgaagcgaagaaaacagctactacatttttaaacgtattgtcaaaacaggaatttgataagttaccgtccgttgttcaagaagctagcttaaagaaaaatggctatgatactaaatctgttgttgaaaaataccaagcaatttattcagggattcaagcagaaggagtcaaagctagtgatgttcaagtcaaaaaggcgaaagacaatcaatacacatttacctataaattatcgatgagcacgcctttaggcgaaatgaaagatttgtcttatcaatcaagtatcgccaaaaaaggcgatacctaccaaatcgcttggaagccatctttaatttttccagatatgtcaggaaatgataaaatttcgattcaagtagataatgccaaacgtggagaaattgtcgatcgtaatggtagtgggctagcaattaacaaagtgtttgacgaggtgggcgtagtgcctggcaaactcggttctggcgcagaaaaaacagccaatatcaaagcttttagtgataaattcggcgtttctgttgatgaaatcaatcaaaagttaagccaaggatgggtccaagcagactcctttgtaccaatcacagtcgcttctgaaccagtgacagaattaccaacaggggctgcgacaaaagatacagagtcacgttattatccgctgggggaagcagctgcgcaattaatcgggtatacgggcaccattactgcagaagatattgaaaaaaatccagagttaagtagtacgggcgtaattggtaaaactggcttagaacgagcgtttgataaagaattaagagggcaagatggtggctcactagttattttagatgacaaagagaatgtcaaaaaagctttacaaaccaaagagaaaaaagatggtcaaacgattaaattaacgattgacagtggcgtacaacaacaagcttttgctatatttgacaaacgccctggtagtgcggtcattaccgatcctcaaaaaggcgatttattagcaacggttagttcaccttcgtatgatcctaataaaatggccaatggcatttctcaaaaagaatatgatgcttacaataacaacaaagatttaccattcacagcacgttttgcgacaggctatgcaccaggctctacctttaaaacaattaccggtgccattggtttagatgcagggacattgaagccagatgaagagctagaaattaatggtttgaaatggcaaaaagataaatcttggggcggctattttgcgacacgtgtaaaagaagcaagtccagtcaatctgcgtaccgctttagttaattcagataatatttattttgcccaacaaacattacggatgggagaagacaaatttagagcgggtcttaataaattcattttcggtgaggaactagatttaccaattgccatgacgcctgctcaaatttcaaatgaagataaatttaattctgaaattcttttagcagatacgggctacggtcaaggtcaattgttaatttcgccaatccagcaagctaccatgtatagtgttttccaaaataatggaacattagtctatccaaaactagttttagacaaagaaacgaagaaaaaagacaatgtaatcagcgccaacgcagcgaatacaattgccacagatcttttaggtagtgtggaagatccttcaggttatgtttataatatgtacaatccgaacttctcattggctgctaaaacaggaacagctgaaataaaagataaacaagatacagatggcaaagaaaacagtttccttctaacgttagatcgtagtaacaataaattcttaacaatgattatggttgaaaattcaggagaaaatggttctgcaacagatatcagtaaaccattaattgattacttagaagcaaccattaaataa

SEQ ID NO: 1395 - DNA, 1332 bp, Enterococcus faecalis
tcaattttttccatttcatcaggctttcgttggatttctctgcattcattgtgtggtatactagctttaacaattagttttttattaggaggaatgaacatgggacttattaaagcagcaacaagttcagttggcggtggcttggccgatcaatggctaaaggttattgaacctgataatatgggggacacaaccgtcatgacaaaaggtgtttttgtacgtaaagatgataaacgtggttctaatcgtaaaggaacggacgatgttttaacagatggttctgttgtacatgtctatcccaacatgatgatgcttcttgtcgatggtggcaaaatcatcgattacactgctgaagaaggctattatacagtcaaaaatgattctgcgccttcaatgtttaacggttctttaaaagatgcgattgcagagaccttcagtcgtttcaaatttggtggcgtaactccacaaaaacaacaagttttttatattaatttgcaagaaattaaaggcattaaatttggaacacctgcgccattaaactattttgataatttttataatgccgaacttttcttacgtgcacacggaaattactcaattaaaattacagatcctttgctattttatactaatgcgattcctaaaaaccaaacgcaagtagatattaatgatattaatgaacaatatttggcagagttcattacagcattgcaagcagcaatcaatcaaatgtctgctgatgggcaacgtatttcttatgttccctcaaaaagtgttgaattaagcaaatatatgcaaactgcgcttgatgaggattggcgcaccaatcgcggcatggaaattgtttctgtagcagttgcgagcatttcttatacagatgattcaacaaaattaatcaacatgcgaaatgaaggtgctatgctcagcgatccaggtgttcgcgaaggctatgttcaaggttccttggctcgtggtatggaggctgctggtaaaaatgaaggtggcgctatgagcggctttatgggcgttggtatgggcatgaatgcgaatggcaactactttgcgcaagcgtctcaaacaaaccaacaacaaatgcaagaaaaacaaaaccagcaaaacgcacaaggggctacagacacttggacttgcccacaatgtgggactgaaaacactgggaagttttgttcaaactgtggtacaccaaaaccaacaaacgagaaaccaaaattagaaatgaaatgtagtgaatgtagcgaaattgttgacttaagtaatggtattcctaagttctgtccacattgtggtaaaccattccaaggggttcctttataa

SEQ ID NO: 1396 - DNA, 1101 bp, Enterococcus faecalis
agaaaagggtcaggcacaagtctaccctttttctttgaatcagattcctgttatttactcactctattagaaaggacggttgcaatggaaacaacatttacccataaatgccccaactgtggcggcccgctcttatttaatcccaaagatcaaaaatttcattgtgaatattgtttaaatatttacacggaagaagaagtgactcgttatgagcaacagcaacatgaggcgcatttagagaatccctcaacaacgactgccgaggaaaatttgactttcacagcggaagaagaatcctccgctacgcaacaaacagagaccactgagaatgaaacaactgcagatgtaggcacaatggaaatttttaattgtccaagctgtggcgctcaaattgtcaccgatgcaacaacggctgccacatactgttattattgccataatccagttgtcttggctggtcgattaagtggcgaatttttaccagaaaatgtcttaccctttacaattgaaaaagacgaagcgattgaaaaatttctcgcttggactaagaaaaaatggttcattccccgagattttttcagcaaaaatcaaatcgataaattaactggggtttacttcccctattgggtcgttgatgcagaagtcgacggacaactgcaagctactggcacaagtattcgcatttggcgcgtaggtgatattgaatacaccgaaacaaaacgtttcaatgtgggacgttcaggaaaattatcgtttaaagaattagttaaaaatgccttgtcaaaaaacgtccaacaaaaaatggtggaaggcgttcaaccatttttaattgatcaagcggtgcctttcaaaagccaatacctagcaggtttccaagcagaaaaacgcgatattgaatatgaagcaatcaaaaaacacgtccaacaagaattacaagattattcggaatcattgttacgggattctgcttctggttatactacgttgacaaatgttcgcacggatatttctctaaaccaagaaaataatcactatatgcttttgccaatttggttagtcacctatcgcagtcaggaacatacaatgtccaccaagggggac

SEQ ID NO: 1397 - DNA, 687 bp, Enterococcus faecalis
  misc_feature (128)..(128): Nucleotide 128 is "n" wherein "n" = any nucleotide.
gtgccgacaaatttgatgtcgctcaatttaacgtggatctttgcttatacaatggatggtgggccagtaggcgaattacaatttgaaacgtttaatgcggcgcaagcagaaattacaattcaaggganaaacgttcatccaggaacagccaaaaatacaatgattaatgcgttacaattaggaattgatttccataatgccttacctgctgacgaagttccagaaaaaacagcaggtgaagaaggcttttatcatttagcagcgtttgctggaacgccagaagaagctacaatgacgtatattattcgcgatcacaatcgcgagatttttgaagcacgtaaagctaaaattaaagaaattcagcaaacattgaatgcaccatttgatgaagaacgaatcaaagttgatttatttgatcaatactataatatgcgagaagtgattgaaaaagatatgtccattgtcgaaattgctaaacaagcaatggaagaattgtcaattcaaccaattattgaacctgttcgcggtggaacggatggctcaaaaatttcttatttagggattcccacaccaaatatctttgctggtggcgaaaatatgcatggccgttttgaatttgtttcattacaagccatggaaaaagcgaccaatgtgattattaaaattgctgaattaaatgcaaaataa

SEQ ID NO: 1398 - DNA, 651 bp, Enterococcus faecalis
agattaaaggagtgttcttttatgtatgaaaatctattacctcgttttttacggtatgtgaaaacagaaacacgctcggatgcaactagcacaacgacaccatcaacacaaacacaagtagcctttgcacaaaccttaaaaaaagaattagaagaattagggatgagcgatgttatttataacgaaacaaatggttttgtgattgctacgttacctagtaacgtggagaaagacgttcgttcaatcggctttattgcccatatggataccgctgattttaatgcagtgaatgtttctccgcaaattgttgagaactatgacggagaatcaacgattcctttagataaagaaggcaaattcactttaaacacgaaagactttcctaacttaaaaaattatcgtggtgaaacacttattacaaccgatggtaccactttattaggagctgatgataaatcaggtattgcggaaataatgacagccatggaatatttaattaatcacccagaaattaaacatggcaccattcgtgtggctttcggtcctgacgaagaaattggtgtaggtgccgacaaatttgatgtcgctcaatttaacgtggatctttgcttatacaatggatggtgggccagtaggcgaattacaatttga

SEQ ID NO: 1399 - DNA, 1137 bp, Enterococcus faecalis
ttgaggaggtactggccaatggctgtgaacggtaagacattgattcgacgcttcaatgactattgtcccgaatggttagcagaaacgggagatcctgtgggcttgcacattggtacattagataaaccaattgaaaatgtgatggttaccttagatgttcgtcctgaggtcgttgcagaagcaattgagaagcaggttgatttaattattgcgaaacacccacctattttccgcccagttaagcgattaaccacagataattttcaagaaaaaatgtacgctgatttattaaaacacgatattgctgtttatgcagcgcatactaacatggatattattgacaatgggctaaatgattggttttgtgaattattgggaattaaacagaccacctttttaactaaaacacatactgttccttataaaaaattagccgtttttgtgccaattgatgaagctccgcaaatgagagaagctttaggtctagctggcgccgggtctcaaggtgattattctaaaacaagttactctttaattggaacaggacgttttacaccaacacaaggagcaaatccaacgattggcgaaattggtcaagaaagtgtcgtccaagaagcaaaaatcgaagtgattttccctgaaactaagcaagaacaagttcttgcagctatgttacaggcgcatccttatgaagaaccggcgtatgatgtttataccattgaaaatcaatcaaaagaatttggtttaggtcgggttggagtattagacaagcctgtgagattctcttattttgtacagcaagtcaaggaagctttccaattggatggcttgcgggtcattgcaaaagatgatactaaaatgattcaacgggtagccatttgtggtggaagtggtgaaaaattctatcatgatgcattacgtaaacaagccgatgtctatattactggtgatgtgtattatcatacggcacatgacatgattgctgaagatttaccagttatcgatcctggtcattacattgaagcgctttgtaagccaaaacttgtggaattaatgaatcaatggaaacaagaaaatgagtgggctgtatccatttttgaatcagaagcgaataccaacccatttcgttttaaataa

SEQ ID NO: 1400 - DNA, 786 bp, Enterococcus faecalis
attgcacgaatgtgtaagttttcatcttcaattgacaatggtataataagcaacggaggaatcaaaaatatgaatgaaaatcaattatcaaaacgtctcgcaacggttggtgatttaatccctagaggaagtcgcttagcagacattggttcagaccatgcttatttaccagttgctttaatgttagaaaataaactgtcttttgctgtggctggggaagtggtggaaggcccctatcaatctgccaaaacccaagtcagtaaatccaatttgacggataaaattatcgtacgtttagcgaacgggctagatgcaattgaacctgaagatcaaatagacgtcattagtatttgtggaatgggcggcacattaatccgagatattttagaagctggacgcaaaaaaaatcgtttaacagggaaggaacgccttgttttacaaccgaatattggtgaaccaactttacgccgctggttaatggcaaatgactacagtattattgatgaaacaatcgtggaagaaaaccgtaaattgtatgaaattatcgtagccgaaaaaacagagcaatccgtttcttatacggaccaagaattactatttgggccagttttaattaaaaaacaaggaccggtttttactaaaaaatggcaacgagaattaaaacagcgcaaaactgttcttgcacaactagcaaaagcaagtggagaacatattgaaaagcaagcgaaactacagcaagaccaacaattaattgaggaggtactggccaatggctgtgaacggtaa

SEQ ID NO: 1401 - DNA, 1020 bp, Enterococcus faecalis
gttttggcgccattagcagaaggtcaaatttatcaattgcaagtggacgaacggatgcggacacgtattttgaaaaatcatacggcaacccatttattgcatcgtgctttaaaagatgtgttaggggagcatgccaaccaagcaggctcattagttgcaccaggacatctacgttttgactttactcattttgggcaagttacatcagaagaactagcgcggatggaagccatcgttaacgaaaaaatctgggaagctattcctgttgtcacaattgaaacagatattgatacagcgaaaaacatgggcgcaatggcgttatttggcgaaaaatatggcaaagaagtccgtgtagttaatattggggattactctatcgaattatgtggtggaacacacgttgctaatacagaagatatcgggattttcaaaattgtttctgaatctggaattggtgcaggagtacgccgtattgaagcagtgacgagtaaagaagcgtatcaacttttacaagaagaagaacgtcaattgaaagagattgctacattagttaaatcacctcaattaaaagaagtggttacgaaaacagagcaattgcaacaacaattacgtgatctacaaaaagaaaacgaacaattggcaggcaaattagcgaaccaacaagctggtgacatttttaaagatgtcaaagacatcaatggtgttcgttatattgccgctcaagtcaatgttaaagacatgaatcaattacgccaattggctgaccaatggaaacaaaaagaattgtctgatgtactagttctagcaactgcacaagatgaaaaagtaagcttgttagcggctatgacaaaagacatgaacggaaaaggcttaaaagccggtgacttaatcaaagcaattgcgccaaaagttggcggtggcggcggtggtcgtcctgatatggctcaagctggtgggaaaaatccagcagggattgcggatgccttagcagaagttgaaaactggttggcaaatgcctaa

SEQ ID NO: 1402 - DNA, 1530 bp, Enterococcus faecalis
  misc_feature (45)..(1289): Nucleotides 45 and 1289 are "n" wherein "n" = any nucleotide.
tgcctccccgtggtgaagacttatggattaactctggtgttgcanaccttgaaaaaatattttgatggctctgttgtgccagaaaatccaagaattacgaatgctcaaaaatctattcgtacaaatgatattgagaatgttgggaaaacggctcgtcatcatacaatgtttgaaatgttagggaacttctcaattggagattattttaaaaatgaagcgattcactgggcttgggaatttttaactggtgctgaatggcttgcttttgacccagaaaaattatatgtgactgtttatccgaaagatacagaagcaaaacgcatttggcgtgatgaagttggtttatctgaagatcatattattgatgtagaagataacttctgggatatcggtgctggtccaagtggtccggatacggaaatcttttatgatcgcggcgaagaatttttagatattccagaagatgatccagaaaattatcctggtggcgaaaatgaacgctatttagaaatttggaacttagtgttctctgaatttaatcatacaccagaagatacgtacgaaccattaccacataaaaacattgatacgggcatgggcttggaacgtgttgtatctatcattcaagatgcaccaacaaattttgaaactgatttatttatgccaatcattcatgcggtagaaactttaggaactaacgtgaaatatggagatgcaccacaaacggatgtttcctttaaagtgattgctgaccatattcgtgctttatcctttgcaattggtgatggtgcgcttccttcaaatgaaggtcgtggctatgtgttacgtcgtttattacgtcgtgcggtaatgcacgggaaaaaattaggcattaatgaagcctttttatacaaattagtgcctgttgttggcgaaatcatggtaagctactatccagaagtattacaacaaaaagacttcatcgaaaaagtggttcggacagaggaagaacgtttccatgaaaccatcaatgaaggtttaagcatgttaaatgaggttattaaagaagttaaagatgcaaaaggcgatacattagatggaaaaattatcttcaaactttatgatacttttggcttccccgtagaattaacggaagaagttgcagaagatgaaggcttgaaagtcgaccatgctgggtttgaaacagaaatggaagcacagcgtgaacgtgctcgttctgcccgcagtaaagaaacttcaatgggtgttcaatctgctttattaacagatattaaagtaaaaagtaaatntgttggctatacagaattaacacatgatagtgaattatttgttattattcaaggtgacgcactagtaaatgaagcatctgcaggaacagccgaattaatttttgctgaaacaccattttatgctgaaatgggtggacaaattgctgaccgcggctatgtaaaaaataccgcaggggaagtcgttgccaacgtggtggatgtgaaaaaagcaccaaacggtcaatttttacacaaagtataa

SEQ ID NO: 1403 - DNA, 1479 bp, Enterococcus faecalis
attgtcgtttggaaactgaagcaagttcgattattgcttcagttttcgctttccataaaaggaggttttcatatgaaatcaacgaaacccactgtttcgttcgctgaaagtttaggcattttgattgccttgttagcgattctcgggtacttaattattggtcaaaaattaacccctcacataccgattctttttgtattcatgttgttgttgctttatggcaaatggaaaggattttcttgggatgagatccacgagggcattgtggaagggatcaaaccagggatcattccgattattattttcttgctgataggtgtcttagttgctacttggatcttatctgggacgattccaacaattatggtctatggttttaaaattatctcagtgaagttcttcttaccaaccgtttttgtggtctgtgcactagttggtgtgacggtagggagctcctttacgactgtttcaactatggggattgcctttctaggtattggacatattcttggattcgacaatgcgatgacagctggtgcagttgtttcaggtgcctttttagggaacaacatttcaccgttatctgatacaacaaacttagctgctggaattggtggcgtgaacctttttgaacatatactaaacatgatgtacactgttattccggcgtttattatttcgattgtcggctatatcttcttggggcatcaatctggttcagcggatttacaatcggttgatgcaatggtccaaacgttacatcaaggattctggatttcaccgattacattgttgccagtagcggttttattcttattcgcctggaaaaaggtaccggctattccaacgttactagtcggctctacagtggcggtcatcttagcttttataaatgatcatcacctaagtttagcgaaagtttctaccatattaatgagtggttatgtggcagatacaggggatcaaagtattgatacacttttatctcgtggtgggattgaaagcatgttaggttctgctgcgttgattattttggcattaggtttgggcggcttgttgattaagtttaacatcgtggctactttaattgataaaattaaaggctatgtgaataatccagccaaattaatcgctttaactgccttaagttctgtgggaattaacttactagttggcgaacaatatttgtcaattattttaccaggggaaacatttaaatcctcatttactcgtttaggtattgataaaaaatatttaactcgtactttggcagatgctggggcggcagtcaactcgttaattccttggggagttagtggtaccttcattatgggaacgttaaaagttggtgcactagaatacttaccatatgcctttttcccattgctttgtcccattatcaccgtcattttggggatattcttaaaaaaacaacaaggggaaaacaaaaaagcaccagggactaacgttgaattgtga

SEQ ID NO: 1404 - DNA, 1521 bp, Enterococcus faecalis
ccaattctttgtctgggtaagaggcagtcgaatgactgttttactcagcgtataacagtcattcatgctccttatccaaaatcttataaggagtgtacaaaattggataaacaacaagttaaaaaaattgaattaggtacttttatcggtttagggatggcattgtgtgcaactgtacgtagtatcccaacacttgctgctgttggttggacattaatttcttacacaattttcgcggtcttattctttgctggtccaatcgcattgatatctggtgaattatctacgatgcttcctcaagaaggtggctctcaactttgggttaaaactgccttaggtagcaaatggggttttgttgtcgcttggttactatgggtgcaaatgttcccaggaatggtaatggttgcttctacattaggccctttgctaggtaatacatttggtaatgttcatttaggtgaaaatcattggttcgtattaggttgtatcttagtgatttactggattattacaatcttgaacttgaaatttgacatggcgaaagttggcggaaatattggtgtttggctaggtgtttacatcccagtattagttatgtttgttttaggtcttctttcaatgattaaagtaggcttaacacctggcggctatttaggtgccttctcttggtcaaaagttttaccaaacttagaaaatatggacacatttaaatatctagcagggattgcatttatctttgttgggattgaaatgtcttctgtttatattcctcgtttgaaagatgcaacaaaaaattatacaaaaggcgttttcatttcattaattggtttagttttattaaacgttattaatgcaatgtttgttgctaatattgttccaaatggcaaaatggaattgtctaacattacacaaccaattttgctttattgtgacgttttaggtttaccaacaattattggtaatatctttagtttcatggtcttcttaggtgtgttattacaattatctgcttgggttactggaccatcaaaaacaattattcaagttgctcgtgatggcttattgccaccaaaatttggtttccatcgcgaaaataaatatggcgtttctcgtaacgttgtgttaacacaatctgtggttatctcattattcgctttactttatggggtaatggatgatgtcaacgctgtattcttaactttaacaaatgcaacaacaattatttatagtattgtgtatgtattgattgcgatttccctaattaaattacgtaaatctcaaccagatacactacgtccttaccgaattggtaaaaaaggtaatggcttagcttatttagtggcagcaatgttaatttttagtgttatcattgttattttcgccacattaggtacaacaaccgtgactgatgcagtcttagttgcattaatcactattgttatgtttgtgattccgttaatcattaatcgctttaaaaaagcaagttgggcaacggaagtaaaagaagatttaggtgaataa

SEQ ID NO: 1405 - DNA, 1827 bp, Enterococcus faecalis
ctaaatggactattcattggggacaaagccgaaaacggacaattatataaagacttgttgatcgacttagtagatgaacatttaggatggcgtcaaaactacatgccacaagacatgccagttatctcttctcaagaacgcacatctgaaagctacgaaaaaactgtcaaccatatgaaagatgtattgaatgaaatctcttctcgcatgcgtacacattcagttccatggcatacagcaggtagatattggggacatatgaactcagaaacattaatgccttctctattagcttacaactttgcaatgctatggaacgggaacaacgttgcctatgaatcttctccagcaacttctcaaatggaagaagaagtaggacatgaatttgctcacttaatgagctacaaaaatggttggggacacatcgttgctgatggttctttagctaacttagaaggcttatggtatgcccgtaacattaaatcattaccatttgctatgaaagaagtaaaaccagaattagttgctggcaaatcagattgggaactattgaacatgccaacaaaagaaattatggacttattagaatcagctgaagatgaaattgatgaaatcaaagctcattcagctcgttcaggtaaacatttacaagcaatcggtaaatggttagttccacaaactaaacactattcttggttaaaagctgctgatattatcggtatcggtttagatcaagttatcccagtaccagttgaccataactaccgtatggatatcaacgaattagaaaaaatcgttcgtggcttagcagaagaacaaattccagtgctaggtgttgtcggtgtagttggttctactgaagaaggtgccgttgactcaatcgataaaattattgctttacgcgatgaattaatgaaagacggtatttactattatgtacacgttgatgctgcttatggtggttatggacgtgccatcttcttagacgaagacaacaacttcatcccttacgaagatttacaagatgttcacgaagaatacggtgtcttcaaagagaaaaaagaacacatttcaagagaagtgtatgatgcatataaagcaatcgaattagcagaatcagtaacaattgaccctcataaaatgggttatatcccttattcagctggtggtatcgttatccaagatatccgtatgcgcgacgttatttcttacttcgcaacttacgtatttgaaaaaggtgccgatattcctgcgttactaggtgcttatatccttgaaggttcaaaagctggtgcaacagctgcttctgtatgggctgcacatcacgttttacctttaaacgttgcaggttatggtaaattaattggtgcttcaattgaaggatcacatcatttctataacttcttgaatgatttaacattcaaagttggcgacaaagaaatcgaagtccacacattaactcatccagacttcaacatggttgactatgtgtttaaagaaaaaggcaacgatgatttagtagcaatgaacaaattaaaccatgatgtatatgactatgcatcatacgttaaaggaaatatttacaacaacgaattcattacttcacatactgactttgctattccagattatggcaacagcccattaaaatttgtaaacagcttaggatttagtgacgaagaatggaaccgtgcaggtaaagtaactgtgttacgtgctgctgtaatgactccatacatgaacgataaagaagaatttgatgtttacgctcctaagattcaagctgctttacaagaaaaattagaacaaatttacgacgtaaaataa

SEQ ID NO: 1406 - DNA, 228 bp, Enterococcus faecalis
gcggttatcagtaaaaagttgtcgcccattaataaaatgggcgacaacttttttgttaaagcattcctagccaaacaaataagttgttattttgctagtaaatctgttattttagacaaaagacaaggagggctattcagtggaatatgtaacaacattagaagaattagaagaaaaaattacagacaatcgtctacaagccgtctttttgacagcaaaaaattgtaa

SEQ ID NO: 1407 - DNA, 342 bp, Enterococcus faecalis
acaaaagacaaggagggctattcagtggaatatgtaacaacattagaagaattagaagaaaaaattacagacaatcgtctacaagccgtctttttgacagcaaaaaattgtaatgtttgtacagttgataaaccgattgtcgaaaaaattgcaacaaaatatgaatttcctacatacattgcagaagctgataaaagtccagaaataattggacaattaaatgctttttctgcaccgaccattatcttatactatgaaggaaaagaaattcatcgccaagctaaaattattaactttcaagaaattgaaaagagagttcgacaagtacaagaaaatagttaa

SEQ ID NO: 1408 - DNA, 981 bp, Enterococcus faecalis
aaggggtttccaatcgtgacatttgtttttatttataacatcttgttgattattttatattcgtttacttcaacctttaccttaaatctttacttgaaaaataaacaaccgatttttttattgcttctctttttaatggttatttttatttgtgacaatgtgattgtttatatgactgagttcattaattcgtttgcaaccgaatataatcagacctttatgaccgcaccttttttaaagaccatcatttttatttgttgtaattttgcctatctggctattatcaatactattagtggtcgtccttttaaaaattatcaatttgtctggttatttttaattggtttatggatgctagctattccattttcacaaaattccgccttaaaagtttggttgtactatttacccaatcagctatttttaatttaccttggatgctatgcgctctatcaactacgaatagatcctttatcagcccttgcgaaaaaatatcttcgttttattggttggctaagcattggtttcggtgtggcgattcttttggaagataccttcgttatttttaacattgaccaatattctgatattgtctttaaaattaacaaccgaaacgtttctgaagatatttatacaatcattctctccatcgccattatctacttctgtaatcgtgattttcctctgtcggttcttgaaaaagacgctgctaaattggaagaaaatcaatcagatgaacccgtacttttggcgcctttttgtgatgcctatcaattaacgcagcgagaacgagaagtgctttcgttacttttagagtgcaaaacaaatcaagatatagccaacgaactattcctatcaatcgggacagtaaaaacacatatccacaatattttcgttaaattagaagtaaacaaaagagcagaagtttttgtcagttatcaacttttttctcaacaacaaactgaacatttagcgagataa

SEQ ID NO: 1409 - DNA, 264 bp, Enterococcus faecalis
gaggaacacatcatgaaaagagattacgttacaacagaaacatatacgaaagaagaaatgcactacttagtcgatttatcattaaaaattaaagaagcgattaaaaatgggtattatccgcaactgttaaaaaacaaatctttaggaatgattttccaacaatcttcaactcgaacacgagtatcttttgaaactgcaatggaacaattatgcggacatggcgaatatttagcacctggtcaaattcaatttagggggacatga

SEQ ID NO: 1410 - DNA, 801 bp, Enterococcus faecalis
cacctggtcaaattcaatttagggggacatgaaacgattgaagataccagccgtgtattgtcacgtttagtagatattttgatggctcgtgtggaacgtcaccatagtattgttgatttagctaattgtgctaccatcccagtcattaacggtatgtctgatcacaatcatccaacccaagaattaggtgatttgtgtaccatggttgagcatttaccagaaggcaaaaaattagaagattgtaaagttgtctttgtcggagatgcgacacaagtttgtttttctttaggattaatcacaacaaaaatgggcatgaattttgttcacttcggtccagaaggcttccaattaaatgaagagcatcaagcgaaattagcaaaaaattgtgaagtttcaggcggtagctttttggtcacagatgatgcaagttctgttgaaggcgctgatttcttgtacacggatgtttggtatggcttgtacgaagcggaattatctgaagaagaacgtatgaaggttttctatccaaaatatcaagtgaatcaagaaatgatggatcgggcaggtgccaattgtaaattcatgcactgtttaccagcaacacgtggggaagaagtaactgatgaagtaattgacggtaaaaattctatttgtttcgatgaagcagaaaaccgtttaacatctattcgtggcttattagtatatcttatgaatgattatgaagcaaaaaatccttatgatttaatcaagcaagcagaagcgaaaaaagaactagaagttttcttagacactcaaagcatttaa

SEQ ID NO: 1411 - DNA, 1413 bp, Enterococcus faecalis
atcagtggacagtttataaagagaggaagagtcttcatggaggggaaaaagaaatttagtttaacgagtgccattttatcagtgatctgtgtggttttcgttgctgaagcagcggcgcctgttgctgcaattggtaattctcagtttttttggtggattttcttattaattgcattcctattgccatatgggttaatttcatcagaattaggaacaacttatattggtgaagggggcatctatgattgggtgaccaaagcatatggtcatcgttggggtgccagagtttcttggtattattggattaattatccattgtggctagcttcattagccgttatgacgccagaactattaacgacaattacaggtattaagttttcaacaccgatgatgattattgttgaattaatttttacttggattgtggtttggattagtttttatccagtcagcgacagtatctggattctaaatggagctgccgtaatcaagatggttttagctgtcttaattggtgggctaggattgtatgtagccttgacgaaaggtgttgccaatgaatttaccttgaaatcaatgctgccaacgtttgacttaaggagtttatcttttatttctgtaatcatttttaatttgttagggtttgaagtcatctgtacgtttgcagatgatatggaaaatcctaagaagcaaattccacaagctattgtagcagcggggttagtcattgcggccatttatattttttcagcctttggaattggggtagcgattcccaccgatcaaattagtaccggcagtggtatgatggatagctttaaactattgacaggctcgacagaaggttggttcattatgttgatggctttcctattccttcttacgttgttcggaaacatgatttcttggtcattaggagtcaataatacagcttgttatgctgctgaaaatggtgacatgcctaaattttttgaaaaacgtagtaagaaaaatgacatgccaattggggttgctttgatgaatggcattgtggcatcggtggtcattgtattagcaccaattttacctaatcaagatttattctgggcctttttctccttgaatgtcgtcctattcttgttatcgtatatcccagttttcccagctttttataagcttagaaaaattgatcccgatacaccacgtccgtttaaagttaacggaaaaccaggatttttaaaagttttagtggttttgccaatgattatgattattatttcactgattttcacagcagtgcctttagattttagtcccgcagcattaaatgaaaaattaccaatcacaattggggcaatcatttttattctgtttggtgaagtaattatttacgtgaaaaaaattaagaagggaacgaaagaaaatggctaa

SEQ ID NO: 1412 - DNA, 783 bp, Enterococcus faecalis
aaaaaattaagaagggaacgaaagaaaatggctaaacgaattgtaggaagtacccctaaacaagatggctttagaatgccaggagaatttgaaccacaagagaaagtttggatgatttggccagaaagaccggataattggcgtgatggtggtaaacctgtccaagaagcttttactaatgtggccaaagcaattagtcaatttacaccgatgaatgtggtggtttctcaacaacaatttcaaaattgccgtcgccaattgccgccagaaattacggtttacgaaatgtcaaacaatgatgcctgggttcgtgattgtggaccatcatttgtcattaacgaccatggagaaatccgtggtgtggattggacattcaatgcttgggggggattagtagatggtttatatttcccttgggaccaagacgatttggttgcacaaaaaatttgtgaaattgagcatgtagattcttatcgtacagatgattttgttttagaaggcggttcattccacgtagatggacaaggaacagtcttgactacagaaatgtgcttattaagtgaaggtcgaaatccacaactttcaaaagaagcaatcgaacaaaaattatgcgactatttaaatgttgaaaaagttctttggctaggtgatggaattgacccagaagaaaccaatggtcatgtggatgatgtagcttgttttattgcacctggtgaagtggcttgtatttacactgaagatcaaaatagcccattttatgaagcggcacaagatgcgtatccc

SEQ ID NO: 1413 - DNA, 1125 bp, Enterococcus faecalis
ttaaatcgtaaaggagcaaataacatgaaatatcaatttccagaaaatttttggtggggttctgcagccagcggtcctcaaacagaaggcgtttttgaaggtgatggtaaaggtcaaaatatttgggatttttggtatcaagaagcgccagaaaaattttttcaacaagtcggtccagataagacctcacaattttataaaaaataccaagaagatattcagttaatgaaagaaacgggacataactcttttcgaacatccattcaatggagccgtttaattccagatcctacaacagggaaagtcaatcaaacagcagttgatttttataatcaagtcattgatgatttattagaacacgggattgagccctttatgaacttgtatcattttgatatgccgatggtacttcaagaaaaaggcggttgggaaagccgtgaagtagttgatttgtatgttgactttgccaaaacctgttttgaattgtttggcgatcgcgtgaaaaaatggtttacgcacaatgaaccaattgtaccagttgaaggtggttatctctatggctggcattatcctgataaagtgaatctaaaagaagggattcaagtactctatcatgaagctttagctagtgccaaagcgattgccgtctatcactctatgaacttatcaggtgaaattggcattattttaaacttaacgccgacttatcctcgtgatgagcacaacgaagccgatgtaaatgcggctaaatttgtcgatggtttctttaaccgttcgtttttagacccggctgttaaaggtcattttccagaagatatggttgcttgggcgaaagcaaatgacttattgccagaaacaacgccagaagatttagcaataattgctgaaaatactgtggacttattaggagtaaactactatcaaccacgtcgtgccaaagcaaaagaaacacctgttgaaacacgaccagaaggcttacttccagaagatttttatgatgtctacgatatgcctggcaaaaaaatgaatccttaccgtggctgggaaatctacgaaaaaggtatttatgatacattaatgaatttaaaagaaaattatggcaacattcgtcttcaccgaccgggt

SEQ ID NO: 1414 - DNA, 1293 bp, Enterococcus faecalis
ttaggaggaataacaatggacggatttgttcaatggatggagaaacactttatgccgaaagcgtcagttatcgcagcgcaacggcacttggtagcaattcgtgacgcgtttgtcgtaacgatgccattaatgattttaggggctttggcggtattaattaataatattccaattccaggatatgaggactttttaaacaaaattttcccaatgatgtataacgatgcaccaatttggaaaagctttggtggtaacatttggaacggtacattcgcaatctttgccgttttagtagcctttttagtagcacacaatttagttaaatcttatggaaaagacggcattgcagccggtacagtttctgtagcttcattcttcgcagttggcggcttagaaggcatgggcgcaactggattatttattgctttgattattgcacttatttcaggagaactattccaacgtttatctggcaatcctaaattagttatcaaaatgcctgatggtgtaccaccagcagtagcaaaatcatttgcggcattattaccagcaatgattacaatcagtttatttagtttaattacatcaattctatttgctttaggaattgacaatatcgttatttcattctatgaagcagttcaacaaccatttatgggacttgcaaacagctacccatcagcattattgttagctttcattacaccattcttatggttctttggtttacatggtgccaacatggttgacccattaatgcaaacaatcaacgtaccagcgattgatgcgaacattaaagctttagaagcaggtaaagcaattccttatattgtaaacaaacctttctttgattcatttgtaaacttaggtggaacaggggcaacattaggtctgttaattgctatctttatcgtaggtcgtcgtaacaaaccatacaaagtcattacaaacttaagtttagcaccaggactatttaatattaatgaaccagtcatgttcggtttaccaattgttttaaacccaattatgtttatcccattcattttagtcccaatggttcttgtaactgttgcgtatgtggcgacagcaactggtttagtaccagctgcaacctttatgccaccttgggtaacaccaccaattattggcggatttttagcaacgaagagtatcgccggcggagttttagcagctgttaacttattgatttctattttgatctacatgcctttcgtaaaagtagcaacagatcaatacttgaaacaagaagcagccgcagaagcagccgagtaa

SEQ ID NO: 1415 - DNA, 360 bp, Enterococcus faecalis
tgggatcatcaaactagagcagaaaatggggtagaggtaatggacggacaacagaacttagaagcaatcatgggtttaatcatgtatggcggaaatgctaaaagcgatgcaatggaagcgattgccgcagcaaaatcgggggattttgaattagcagacaaaaaaattgcagatgcagaagaatcacttgtacatgcacatcattcgcaaacaggaatgttaacagaagaagcaaaaggcaataacatgcaagtaacattgttaacagtgcacagtcaagatcatttaatgactgcgattgcatttacagatttagcaaaagaaattatcgatctttatcgccgtattgataacgagtaa

SEQ ID NO: 1416 - DNA, 333 bp, Enterococcus faecalis
aggaaaatggcaaaaaaaacaattatgttagtttgttccgcaggaatgagcacaagtttattagtaacaaaaatgcaaaaagcagcagaagatcgtggtatggaagcagacatctttgcagtatcggcttctgaagcagatacaaacttggaaaataaagaggtgaatgttttattattaggcccacaagttcgtttcatgaaagggcaatttgaacaaaaattacaaccaaaagggattcctttagatgtaattaacatggcggactatggcatgatgaatggcgaaaaagttttagatcaagcaatttcattaatgggatcatcaaactag

SEQ ID NO: 1417 - DNA, 423 bp, Enterococcus faecalis
ggtgaaacggtaatggaaattacgaaaacattaactatttcagcagatgaattttacacgcaattaatgaattctgttatttttgatatccgtaagcaaacaggcaaaactcttacaagaaagcagttacgtaagtttgaatatatcaaagaatatagtaaaaatagtcgcgcgaaaatagttattgaagaagctgtagaaaataagacctatcaatttcgaacatccacaactaaaaatgatttctcggtgcggtatgagctacagccaattgatgaaaaaagctgtgaactgcgttatacagaaacaatggtttcttatggggcgttacaaaaactgaatgatgcagtattaggtatctttttaagttattttaaaaagaaacagttttataaaatgcttaaaatgatggaaactgcttaa

SEQ ID NO: 1418 - DNA, 219 bp, Enterococcus faecalis
tctaaaaagataggatggatgaaaatgattagaaatggattatttttatgtagtattggcttcttgattgttttgtattcgttgaatcccagctccttaaactatgatttattaagtctgacaacggggatttttctcattggacttggtggttacctgttttttaaaggaaaaaaagttgctgaagaagaggcgacaaaggatgaggtgaaacggtaa

SEQ ID NO: 1419 - DNA, 1332 bp, Enterococcus faecalis
aatgattcaggacaaaaaaattatgaacgaggtgttcgaatgtcatcagtagtagttgttggaacgcaatggggcgatgaaggtaaaggaaaaattacagactttctaagtgaaaacgcagaagtgatcgctcgttaccaaggcggagataacgccggacataccattaaattcgacggcgtaacgtataaattacatttaattccttcagggattttctataaagaaaaaattagtgtaattggtaacggcgtagttgtgaatccaaaatctttagtaaaagaattagcttatttaaaagaaaataatgttgccactgataatttacgtatttcagatcgtgcccatgtcatcttgccgtatcatattaaattggatcaattgcaagaagatgcgaaaggtgaaaacaagattgggacaacgattaaaggaattggcccagcctacatggataaagcagcacgggtgggaatccgtatcgctgatttattggataaagaaatttttgcggaacgtttgcaaattaacttagaagaaaaaaatcgtcaattcgttaaaatgtttgatagcgaagccattgaatttgatgatatttttgaagaatactatgaatacggacaacaaattaaacaatatgttacagatacttcggttattttaaacgatgcattagatgctggaaaacgggttttatttgaaggggcacaaggtgtcatgttggatatcgatcaaggaacctatccatttgttacttcctctaatccagtagctggtggcgtaactatcggtagtggcgttggtccatcaaaaattaataaagtggttggtgtctgcaaagcgtacacttcacgtgtcggtgacggcccattcccaacagaattatttgatgaaacaggagaaaccattcgtcgtgtcggtaaagaatacggaacaacaacaggacgtccgcgtcgtgtcggttggtttgattcagtagtcatgcgtcattcaaaacgtgtatcagggattacaaacttgtcattaaactcgattgacgtgttaagtggtttagaaacggtgaaaatttgtacagcttatgaacttgatggtgaattaatttatcattatccagcaagcttgaaagaattaagccgctgtaaaccagtttatgaagaattaccaggttggtctgaagatatcactggttgcaaaactttagccgatttaccagctaatgctcgtaactatgtgcatcggatttcagaattagttggtgtgcgcatttcaacattctctgtaggtccagaccgtaaccaaacgaacgttttagaaagcgtttgggcacaaatttaa

SEQ ID NO: 1420 - DNA, 885 bp, Enterococcus faecalis
agggggcaattgtccgtgaattatcaattagtgacagattcttgttgtgacttgccgtatacatacttaaaagaaaaccaagtaccttttattagcatgaatattcaaattgacgggaaagaatatcgcgatgatttaggtgaaacgtttgattatcagaacttcttaacggctattaaaaatggaagtatgcccactacctctcaagttaatgtaggacgctacaatgaatttttccgtccttttgtggagcaagggttaccggtgatttatttagctttttcatctgggttaagtggctcttatcaaagtgcgttgcaatcagtagagatgtcaaaagaagagtatgataatgtagaaattcatattattgacacaaaagcaactagcttagttcaagggatgttagtccgagaagccattcgattacaaacagatgttcattcattaggagaagttgttgcctatcttgaagagcaaaaaatgaaacttcactcgtgggtaacggtagatgatttaaaacatttagaacgtggcggacggatttctaaaacagcggctgcacttggtggcttaatgaacattaaaccaattattcgcgtggatgcggcaggcaaactagcatccgttggtaaaactcgtggacgaaacaagtccttgcaaaagattgcgcaagaaacgattcaaggcattgtagagccaatgaaacaaacactattgattgcatatgcgggaacgaaagatgacgcggaaaaagtcaaagaattaattgaaaaagaaatagaggttaatgagatactgatttatcctttaggacccaccattactagtcataccggaataggttgtattgctgtgttttcttttggtgaaaaaagaaaataa

SEQ ID NO: 1421 - DNA, 219 bp, Enterococcus faecalis
cgaaccgaattattgctgtttctgataaaggggtcattgatcgggcagaaacaacctatgatgaattcttggaaaacccagaaattcaaaaacaaatggacgttttattcagttcagattattaaaaaaatagagaagtcattaaaaaatgacttctctattttttattttcttttttcaccaaaagaaaacacagcaatacaacctattccggtatga

SEQ ID NO: 1422 - DNA, 1647 bp, Enterococcus faecalis
aagcgaggaaaacaattgattactgttaatgatgtaagtttacaatttccagatcgtaaactttttgaagaagtgaatattaaatttactcctggcaactgttacggcttaatcggcgcaaacggtgcaggaaaatcaacgtttcttaaaattttatcaggtgagattcaaccgacaactggcgtggtttcaatgggtcctaatgagcgactagcaacgctgaaacaaaatcactttgactacgaagactacactgttttagaaactgtaattatgggacataaacgtctttacgaagtaatgaaagaaaaagatgctatctatatgaaagaagatttttcagatgaagatgggattcgtgccgcagaactagaaggcgaatttgctgaacttgacggttgggaagcagaacctgaagcagctgttttactccaagggctaaacattccagaagaattacatgatcaaaaaatgagcgaattaacagctggtcaaaaagtcaaagtattattagctcaatctctttttggtaaaccagatgtcttactattagacgagccgacaaatggtttagacacccgctcaatcaattggttagaagaatttttaatcaactttgaaaataccgttatcgtggtttcccatgaccgtcatttcctaaacaaagtctgcactcacatggcagatttagactttagtaaaatcaaactttacgttggtaactatgatttctggttggaatcaagccaactagcgacaaaattgcaagcacaatctaatgccaaaaaagaagaacaaatcaaagaattacaagactttatcgctcgttttagcgccaatgcctcaaaatcaaaacaagcaacgtctcgtaaaaaaatgttagataaaattaccttagatgacattcaaccttcctctcgtcgttatccattcgttggttttacaccagaacgtgaaatcggcaatgacttattacaagttgaaaatgtctctgtaacgattgatggcaaaaaaatcttagataatatctcgttcaacttaacaaaagatgataaagtggcattcatcgctgactcagatattacaacgactacgttattcaaagtgattatgggcgaaattactcccgatacaggttctgttcgttggggcgttacaactagccaagcttatttaccaaaagacaacagcaaagactttgaagagccattaaccattttagattggttacgtcaatttgctggtaaagaagaagatgacaatacgttcttacgtagtttcttaggtcggatgttattctctggtgaagaggtactaaaaccagtcaatgttctttccggaggcgaaaaagtgcgtgtcatgctttcaaaattaatgctttccaaagccaatgtcttagttttagatgatccaacgaaccacttagacttagaatcaatcactgcattaaatgatgggttgatggctttcactggttcaattctttttgcttcacatgaccaccaatttatccaaacattagcgaaccgaattattgctgtttctgataaaggggtcattgatcgggcagaaacaacctatgatgaattcttggaaaacccagaaattcaaaaacaaatggacgttttattcagttcagattattaa

SEQ ID NO: 1423 - DNA, 645 bp, Enterococcus faecalis
ttagtgtatcgattaaaggagccatcaaaaatgaagcggattgaaaaaatctatcaatatgttaaagagcaaacgaagaatttaacgccaatgaccttaacaagtgatgcgggagtcacgacacaagaaatttcagaacgtttaaacattcagcggaccaatgctagtaaagatttgaatcaactggttcgtgaagggcgcttgaaaaaattatctggtcgaccagtaaaatatgtcgcgcaggtggcgtttcagcatcgaccattaaccaagccagttaaaagttatcgggaaaaatcaatggatcactccacaaaaacttttatcgaaccattggttgaaccagtagtcacgacaagtaaaaccccagaagttgaagatattttcaaaaaaattatcggttcagctggaagcatgaaaacgccggtggaacaagccaaagcagcgattttatatccgccaaaaggcttgaattgtttaattactggaccaacaggttctgggaaaacttattttgctcatgccatgtttcaatttgcgaagctgaaccaaattgtggccaaagaaaaagaatttgtggtgtttaactgtgcagactatgcgcataatccagaacttttgatgtcgcatttattgggtatgtaa

SEQ ID NO: 1424 - DNA, 1950 bp, Enterococcus faecalis
agagagatgcgaaacaaacaaagcctagtctttttggcaagtagtttattcttactaatccttgcgcctattactagcgaagcgattagtaatccttcgacaaatatcaacgaagtcaatcgggaaatagtggaggaatcggccaatgatcaggcaactagcgctccttctcactcggaaacattagagcaagaaccttccctagaaacgacaacaacaaccgataatcatccagcagaaacagaccaatcaacggctactttagaacctagcgaacaacaaaaggatgacggtaccagtgcaacggaatcggtgatagttgaaccacagccgcgcatgttggctgcgccatacgctacttcattgccggatgatcctaacatcattccaatcgacaaggtgtttcaagagccaattggaaatgcaacaagtattttagaaggtgggaagttattacaattaaacccagctgttaaatcacaaaaaggcgctatttggtcaaaaaaaccaatcagtttattgtcggattttacctttaaaagttatttgtatttaggaaacgagtatgcaaatgctggtgatggtatgacctttaccttaacgaatgatcctagaatgtccacaacgcctcaagaagtcattggttcacctgggatgggaatcggtgcatactccacgaaagctggtcaaccttatgttagaaatgccttatcgattgagtttgatacctataaaaatactggtagttccaaccgaatggaccgagaaatttcacaagataagggaaatggacatttagcttttgtcactccgaaagctaataacaacaactatacaggggagcattcaggcgtcactgttgcgccaacctatctatctaatggaacctggcgcatgttgactgttcattggaatgccgcaaccaaagcattaacatatgatttagaaggtgtgggcacgaatacgtatgtagtttcagatttaaatgcacaatttggcgcaacaacggtttattggggctttacatcatccacaggtggcaaataccaagagaatgctttagcaatgacacaaattcctaccaacgttacgtcacaagcagcccttagcgtgaatggtcaggaatttagctcagctgttgaagcagtgaaaaatgatcaggtgagactacggaatacattgaatattgacaatgactttatcgaagatcgtcaaccgcaagtaagcattgacttacctgatgaattagcatatgaagaaaattcattaacgattgatggtaaaaaggtagcagccaaagatctgacacaaacagggaatcacttaacaattgctttaaatgactacctagttttaaagaaggacatgatgattgaattaaaaacaacccttcaagataatacgcccgaaaaagttttaactatgaactttgactattatgaagaaggaaccttactgcaaaagtcaaataatgtaacgattactattcctaaaccaacagaaaaaacagtaaccgttttttataaagacgcagaaggtaaagatattgctccacctaaaagtgtaacagggaaaattggtgcaccctatcaagaaaaacccctagatatttctggctatgtttttacaaaagactcgggcaatgcggaaggaacaatgacagaggaaacaaaagatatttatttttactatcgtttaggggaactatattttaaagaggcaccaaaacagattacttttggtacggaaaagatacgtaatcaaccactaattaaacttgggcatcccaccgaaggactcaaagtcgtggatgaacgtaacgcaaataattggcgcctgcaactaaagcaaacgcaaccgttaacaaatgattcaattgtaatgccagatgttttttctttcgtttcaactgctggacggtgtccgattactaatgattcagcaagcgcc

SEQ ID NO: 1425 - DNA, 792 bp, Enterococcus faecalis
aggagaaaagcaatgaaaaaacaattcacaggaatcgttctatgcagtacatttgcagttgctggttggtccttacaagcgaaggcagaggagccaaaagagtatcgttcgaatggtttagtagaatttattccgaacgtagatccgacagagccggttgatccagaaaatcccgatccagaaaagccagtcaaaccaattgatccgacagacccagaaggtcccaatcctggtacccaaggaccgctgtctattgattatgcttcaagttttgactttgggaaaaatcgtatttcgaataaagaccaagtatattttgcaagagcacagcaatatcaagaaaatcaaaaagaaacaccaaattttgtgcaaatttctgataatagaggaaccaatagtggttggtctttaacggttacgcaaaaggagcaatttaaagcaacaaaggcgactttaaatagtcagttgacaggtgcgcaaatttctttagctaacccgaccgttaatagtaatgcgcaaaatgttgtgaaaccagaggcaacaaataagattgcccttgttccaggaaccgcatcgctagtggcagctgcgaagcaaggaaccggtgcaggaacctgggctacttattggggcaaagtagaagttgttgcagaacgcgatgaaaccaatacggtacacaatgttaatgttacaaaagatgttgcgctatcagtaccagggtcaacccctaaagatgccgtgaaatatcaaacaaaattattgtggacgttgacggatgtaccaggaatttaa

SEQ ID NO: 1426 - DNA, 759 bp, Enterococcus faecalis
aatgaaacgagagaaggagtttatttaatgaaaaaaactgttttacttacatcggcaaccatacttttaggcgtagggtttcaagcaataaacgcatcagcagcagaaacttttccgaaagaatacaatacagaaggcacaattacttttgaagcaggtgataatgaaatcacaccgcctgttgatccagaaaatcccgatcctactgatccagtagacccaattgatcctccagggccaggaacgggtggtgccttatcaattgattatgggtcaaaatttaaatttggtacacaaaagatttctacggcagatcaaacgtattatgctgcgccagatgaaatgaaagatggttcaaaaaaaccaacctatgtacaagtaactgataaaagaggaacgttagcaggatggaaactaacgctttcccaacctgaacaatttaaaacagctactggagaagaactagtcggcgctcaattgacgtttacaaaggcagaagctgcctcaatggtggatgaaaaatataaacctactgaagtcagtagtactatttccttaacacctggtgtaaataataatctagcgatgaacgctaaaaaagaaacaggtgttgggacttgggtttatcgctttggttcaaatgaagcaacaaataaagaagctgtccaactattcgttcccggaaaatctgtaaagcttgcacaacaatattcaacgaagttagtttgggcattagaagatactcccgctaataattaa

SEQ ID NO: 1427 - DNA, 390 bp, Enterococcus faecalis
tgtttattggctgggccagtcaatgttgaaaatggggaaggaggaattcagatgaaaatcataaaaaggtttagtttggtatgtttagggctattgatcattgggttgcaaacaaaaagcgttatggctgaagaaaataattatgaatcaaatggtcaagcgagcttctatggtacctacgtttatgagaatgaaaaagagtcaaatgacgtagcgtatacccaacaatcagaagaacagggaagaaacaatttagctgcttctggacaagcagttttacctaaaacaggcgagtctgaaaatccgctgtattccttgataggagttagtttgttggggatagtcatttatttaattaataaaatgaaacgagagaaggagtttatttaa

SEQ ID NO: 1428 - DNA, 573 bp, Enterococcus faecalis
ttagtggcgttgaacttagaagaagacgttgatccattagaaacgacggggaaatatttggaacctgcagaatttaaagaagccttattagacgaagacactgttgtaatcgatgctcgtaacgattatgaatatgatttaggtcatttccgtggtgccgtgcgcccagatatccgtagcttccgtgaattaccacaatggattcgcgagaacaaagaaaaatttatggataaaaaaattgttacctattgtactggcgggattcgctgtgaaaaattttctggctggttattaaaagaaggatttgaagatgttgctcaattgcatggtggtatcgccaactatggaaaaaatccagaaacacgtggcgaactttgggacggcaaaatgtatgtctttgatgaccgaatcagtgtcgaaattaatcatgttgataaaaaagttattgggaaagactggtttgatgggacaccttgcgaacgctacattaactgtgcaaacccagaatgtaatcgtcaaatcttaacttcagaagaaaatgaacataaacatttaggtggctgctcattataa

SEQ ID NO: 1429 - DNA, 612 bp, Enterococcus faecalis
aatccttcgcttggggcgattttgatgatacaagcgtatctattaatctctgatgaattaaatcagggcgttgcagcgggcaccccttggaaaaaaggacctgttccaacagaatttgcgatttatggcttaggacctgtcgaaatagctatttcctattttcatgaattcaaagaagtctttgaagaaattctaggctttcacgtagtggcacaagaaggcaatcgctatttactagaagttggacaaggtggcaatggtgcccaagtcgttttggtagacgatgatactagctcacaagcgcaacaaggatatggtgaagtacatcacgttgcattccgcctagcggatcgtaaatcacttgggacttggcaagcgctctttgatcatttaggcttacaaaactctggctatgtcgatcgttattattttgaatcattgtatgttcgcattgggcatattttagtcgaattagccaccgatgaaccaggatttatgggggatgaaccttacgaaacattaggagaaaagttatctcttgcgccatttttagaaaaccgtcgtgaatatattgagagtgtgatcaagcctttcaatacaaaacgagcctaa

SEQ ID NO: 1430 - DNA, 615 bp, Enterococcus faecalis
ggaggaaaaaacatgcattcaatttttaaaaaaggacatcctgaagcacctgtctttgtgctacttcacggtacaggtggtgatgaaacatctctcctaccaattgcccaagaactaaataaacaagctactgtgctaagtattcgtggtgatgtttcagaaaatggaatgaatcgttattttaagcgcctagcggaaggtcattatgacttagaagatctagaaaaacgcggcgaggcgcttcataagtttattcaacaagccgctaacgagcatcaattttcattggataaaattatttttattggctattcaaatggggccaatatcgctattcaattattgcttactcatcccgacagctaccatcaagctgtcctctatcatcccatgtttcctgttgaattgaccaatcaaccagacttgaccgacacttctgttttattatctctaggagagcatgacccgattgtcccacttcctgagagtatgcgtgtgattcaactatttcagaatcatggagcaaccgtacaagaggtttggacacaaagtcatcaattaacttatcaagaaattaaggaaacacaaacttggttggcacatctgtcctcttaa

SEQ ID NO: 1431 - DNA, 972 bp, Enterococcus faecalis
aaaatgaaacaaatgagaggaagttggtttatgaaagctgttgtgattaatcagtacggaagtaaagaggtacttgaagaagcagaagtaacactgccagaattatcggaacatcaagtgttggtaaaagaatacgcgacatcaattaatccgattgattggaaattgcgtccaggatatttaaaacagatgtttgattggtcctttccgattattcttggttgggatgtcgctggtgtgattacagaggtggggagtcaagtaaccgattggcaagttggcgataaagttttttctcgtcctgaaactactcgttttggtacctatgcagaagtaacgattgtggatgatcatttattagcaaaaatccctgaaacaattagctttgaagaagcggctgccgttccgttggctggtttaaccgcttggcaagcattgtttgatcatggtcaccttaaagaaggagaaattgttttaattcatgcgggtgcaggtggggtcggtacttatgcgattcaactagcaaaagaagcgggcgcacatgtcatcacgaccgctagcgcaaaaaatcataccttactgaaaaaaattggtgcagatgaagtgattgattatcatacaacgaattttgcagaggtattaactgatgttgatttagtctttgatacaatgggtggtgaggttcaaaaaaatagttttgccgtcttaaaaccaaacaccggtcgtcttgtttcaattgtgggaattgaagataaacaattggcagccgaaaaaaatatttctgctgaaagtatttggcttcaaccaaatggagaacaattacaaaaaattgctgatttgatggcagctggaaaagttaaatcaattattggtgaagttttccctttttctagacaagggatttatgatgcacatgcactcagtgaaacgcaccatgcagttggtaaaatagttgttcaaatggcagaataa

SEQ ID NO: 1432 - DNA, 1284 bp, Enterococcus faecalis
atgaaatttagagatattttaaaatcagctagtaccaatttaatgcgtaataaaggtcgaaccgtattgaccattattgcaatctttattggagcatttaccatagctttaactacaggagtcaatattggtgtaaatgattatattgacaaacaagtcggcagtgtcggtggtgcaaatcagttatttattcagccaaaaatggagatgaatgttggtaacggaacagaaccaagtaaatataatccagagaaaaaaaccagtacgattcaacaacaaagtatgcttgctgaaaaagatattgagaagattaaaaaaatctcggatgttacatcagtggaaccaatgaaatccgttgctatcgattatataaaaggagcagataagcataaatatgtattttcagcaacttctgcgctagatgagatgaccattgatttagcggctggccgtaaagtttcgcaaacgagccaggacttcgaaattaatttgtcaccagaatatgtaaaagcgctcggctatacatctagtaaagctgccgtgggggaaacagttcaattaggtatctcaagttccttgaaaggacaagagcaagttattgaagcaaaaattgttggcgttagaaatgccagtgtcattcaaaatgggctctcgctgatgaataaagcattgattgataaagttgtctcaatcaatcaagcagatcttccagaacatttaaaaaatcaatacgcgatgattattgctgaagttaaaaaagacagcacgccagagcagattaaggacatcaaaaaagatttagacaaagctggctatttagcgactactgtcgaagatgaaattggcatgattcgtaatataatcaatgcaatcactggtgtcttaaccatgtttggtgcaattgccttgttagctgcaagctttggcattattaacacgctgtatatgtctgtccaagaaagaacgcgagaaattggtttaatgaaagccatgggtcttagcaatgggaaagtctttacaatttttagtgttgaggcggctttaattggcttttttggctcaatattaggcattttaggagctgttggggttggaaatttagttaatcgtttggcaacggattcttttttaaaggctttaacaggatttaaattaattcaattttcattgccatcttcactaacgattatcttagttattatgtttattgcttttttagcaggaactttaccagctcgaagagcagcaaaattagatccaattgaatctttacgttatgaataa

SEQ ID NO: 1433 - DNA, 711 bp, Enterococcus faecalis
acgacaaagaatgaaaaatggaggggtaacatggcggtaattgaagcaaaaaatatcaaaaaaagttatggaaagaacgaaacaaaatttgacgcgttaaaaggtgttgatttaaaagttgaaaaaggtgaatctgtggccataattggtaaaagtggctctgggaaatcaacatttatgcacattttggcattgttagatcaaccaacttcaggagatatttatttaaatggtaaaaatgttactagtattagaaagaaagtgctgaataaaacgagaaatgaagaatttggttttgtttttcaacaattctttatgaatgccaaggatacagttttaaataatgttcttttaccattaaaaattggtgggatttccggtagcaagaggaaaaagatggctttagatgcgttaaaagcagtcggtttggaagataaagttcaaaataaagcgaataatttatctggtggccaaaaacaacgggtatgtatagcgcgtgctttagttaataatccgcaaattatttttgcagatgaacctacagggaatttagattctgccactgggaagaaaattgaagaattgttatttgatttaaataaaaataaaggaattaccttaattattgtgacacatgatccagacttagcagcacgttgtgatcggcaagttcatgttcgagacggcttgattgtaggaggagatgagtaa

SEQ ID NO: 1434 - DNA, 756 bp, Enterococcus faecalis
ccaatagaaagaaggaaaagtaaaatgaaatttaaaacagctttgcggtatcgtgttatttatcaagtccgttccttagcaatttattttggcttttatgctttgttcggcattctttttcctcttattgggttgctcttttctaacgacgtgaacactgtcagctctgatgcagtaattccttgtctggtttttatggggatactatcatttttggggatgaacacagattttaaactgtttattcaaaacgggctttcccgctggacaatttttttggtgaattttgtaagtaatgctattttatctttggttggatccttggctgtacttgtactgattaaagtatttagcggcaatttcatttctcattttcaattatcaatgaaattaattgatgtctatgcacaaggaaactttttcatgtcgtggttgctcttttttatcttactaatgcttagtggctcacttggcttgttagcaggtgtctttaatgatcggatagatggcgtaaaaaaactcattgttttattgctgttattaatgattcctattttactgggcacgattgcacaattagggggggcaccaatgcgcctgagaatgctccacatcttgcaaacaatggttggttatcaatccactggttttactgtcctaccacttcttctgacaatcagttgctttgttggtattaatcttggcttggcctatttattgaataaacatcgtgaaattaaacgcgtaaatgcataa

SEQ ID NO: 1435 - DNA, 858 bp, Enterococcus faecalis
cgcatgagtttgcgggtggaatcagtaagtaaaaaatatcatcaaaaacaagcactagataatatttcaattacttttgaaaaagaaacgatttatgggctcttaggcagaaacggggctggtaaaagtacgttattaaatatcataaataatcgaagttttgccacttcaggttccgttaaattggcgggagaaacagtgaccgataatgaggctgctttgactcatatttacttaatgagtgaagataatttgtttcctcctcagttaaaaattaaagatatttttaaaacgactgaaggtttttatggatcctttgactggtctttagccgaacaaatgttaagcgattttgatttagatggtaaaaagacattcaaaaaattatcaactggttatcggagtattgctaaactaatagtggcgctatccgtcccctgtgagtatatttttttagatgagccagtcttaggtttagacgccaatcatcgggaattattttatacttatttaattgagacataccaagaacgtccccgtacgtttgtgatttctacccatttgattgaagaaattgcgaatttattagaagatattatcatcattgatcaaggaaaattgattcgcgcagaatctattgaaacaattttgaaaaacggtcgcattgtttctgggccgaaagaacaagtagagcgctatactcagtcattggaaatcttaggcatggacactttaggtggagcagttacggcttacgtgtacggcgacttgccgactgaaaaagcagaggttcaaattgcgccgctaaatttacaaacatattttgtacaattaaccaatagaaagaaggaaaagtaa

SEQ ID NO: 1436 - DNA, 390 bp, Enterococcus faecalis
ccgtttaagcgaggtgtaaaaatggaatttaatttttcgggggaaaagcctttatttcagcaagtagccgatcagattgccgaaggaatttttaatggcgcttacttagaaggcgaacaaattccctcaaccacagaaatatcaaaaagttatcaaatcaatccagccaccgttttaaaaggaatgaatttattagtagaacgacagttgattgaaaagaaacgggggattggcatgtttgttttaccaggcgctcaagagagagtaagaagtgcacggaaagaagaatttttaaataaagaagtcttagaagttgtcgcagaagctaaaaaattagggattacagctgaacaattaaaacaactaattgaaagagggtatgacgcatga

SEQ ID NO: 1437 - DNA, 786 bp, Enterococcus faecalis
cgtttttttccaaaaaatctcacaaaaaagatgagagaaaaagttgctattcagttgattcttttttatgctgactttattacgagagaaaaggatacccatatgttagaaagttatattacagtcaaacaagatggtttcagcgagattgaaatcaagaaatcgcggtttatctgttctgtaaagcgcgtaacatcagaagaagaagcaaaagcctttatcgccgcaataaaaaaagaacattggaaagccaatcataattgtagtgcttttgtgatcggcgaaaaaaatgacattcagcggagcagcgatgacggcgaacctagtggcactgctggtgttccaatgctggaagtcttaaagaaaaaagagttaatcaacgtagtggctgttgtcactcgttattttggcggaataaaattaggcactggtggtttaatccgagcatatagtcatgctctttcccacactttagatgaaattggtttagtcattggcaaattgcaacaagagctattgattacgatcgcctatcctttattaggaaaagcccaagcctttttggaacatagtccctacacgcttaaagaaactatttacacagagtctattcagttaatttgtttagtagatgaacaagcaacagaaacatttatagctgaaatgacggatctacttaacggtcagttgacaattgaaaaaggcgcaacgagctatcacgaactaccatttaacgaaaaaggagcacaagcaaatgacatttggagaaggatccgcacagattgg

SEQ ID NO: 1438 - DNA, 1308 bp, Enterococcus faecalis
aagatggcacaaaaagaaatgcaacgaatgatgcaaggtgccgttgtgttaaccattgcttccttcattgcaaaagtgttgagtgcgttttatcgcgttccttttcagaactttgtaggggatgaaggattttacgtgtatcagcaagtttatccaatctatgggattgcgatgacattagcattgtcaggcttaccgcaatttatttccaaaattgttgctgaacaaccagatattcggagtcaaaaacaagtgttgcgccaactatatccctatgtgttatggttagcgattgcttgttgggccttctttttctttggtagtcaagaaattgctattagtatgggggatgctgcactccaaccattaatggaagttgtttcctttacctttttactcgttccaattctttctttctatcgtgggaattttcaaggtcatttgttgatggtgcctagtggtatttcacaggtgatggaacagtttgtgcgtgtcggggttattctagtagctgcgttgtcctatcattactttggtggctccatttaccaaacggggacggtggccatgagtggtgcgttggctggcggtatcttagcggtacttgtcttatggtactacaatcgaaaaattcttagtggaagtacggaatacttgcatcaatggaagattatgcctcaaaccacaggactatttaaacgtttaatgattgagggtggtttggtctctttatatagtgcttttctgattctatttcaattaattgattcctttaaagtaaaaaatgccctcatgcttttcgggctctctgatttagctgcgaaagtggacaaaggggtctatgatagaggacaaccactagttcaattaggattggtaattgctttagctttaagctcgacctttttaccaggtttgacaaaatattttatgaaaaaagaccgtcaacaatttttacaagttgcaaaaatctttttgcgccttaccacaaccttggcatcggcggcttcgattggtctaatgatgttattgccgtacatgaactttacgctttttaaagattataaaggcaacgatgttttaggggtgtatgttttatccatcgcttttatcgccattattcaggcctaccaaagtattgaacaaagtcgcaatcgttttaaaggtcctttagtggcagctggtgtgggcttattagtgaagttactgacaacgggctttttcaccattcgttggggaacattaggtgctagttggtctatatttcttgggttaccagcgacgttattcgttttagtaccggccagt

SEQ ID NO: 1439 - DNA, 3579 bp, Enterococcus faecalis
atcaatttaatggaaaatagcagaaaggagggcccttgtttgaatattatcgaacgaattagccaaacagaaattgctaaatcatggcgcagtcaactaatgacaacaggaacgcgccaactaattactgggttatcaggctctgctaaaacattactgatggcaggcgctttacaaaagacgcatcaaaaaattgttattgcggtcccaaacctatactatgccaatcaattagtagatgattttttaaatattttaccttcagaacaagttcatctatttccagtagatgaagtgttatccgccgaaatggccttttcttcaccagaagcgcgcgcagatcgagtgagtgcgttaaatttcctgatgacagcgaatgcaggaatcgtggtcgtaccagtagctggactacgaaaatatttgccaacgaaagaaacgtggcaaaatgcgcaactttattgggaaatcgggacagaagtagaacctgagatcctcgcgcaacgcttagtgttaatgggctatgaacgccaagcaatggtcggaaagcctggcgaatttagtattcgcggaagcattgttgatgtctatccgctaaatgccgaataccctgttcgggtggaactgtttgatgttgaaattgactcaatccgttattttgaagcagatacccaacgttcattagaaaatcttgaagaagtaacgatttcaccaatgactgatttagtattctcaaaggcagatatgaatcatggcatgacgaggttacaagatgctctagaaaaacgtttagcgacagctaaagatcaaacggagaccgattttttagaagaatattttggtcagttgctgtcttcttgggaacaagggattcctacagaaaatgctcactattatacagattttctgtaccaacaaaaaactacgctgttagattatttaccagaaaatagtttgctttttgtggatgattattctcgtatgatggaaacggagcgagaaatcgctagagaggaagcggaatggcaaaccctgaaaattgaagaaatgcgcgtgttttctgaacaaacttttggcgtagactttcatgatcaattgcgaaaaactgcacgaaatacgaccttcttttcactttttcaaaaaggaatggggaatcttcgtttccaagaagtccataatttccaatatcgttcaatgcaacaattcttcggtcaaatgccgttgctaaaagcggaagtggaccgttggcaaaagcaaaaccaaacggtcgttgtttttgttcctacgaaagaacggattcaaaaagtcgaagagctatttcaggactttgacatacctagcgtagtaagcaattgggatcagttgttagatgggcatgtccaaattgtccaaggggcattacaaacagggtttgaattgcctaaaaacaagctcgtggcgattacggaaaaagaaatttttcatacaacgaccaaaaaacgggcacgtcgtcaaacaatctctaatgcggaacgtttgaaaagttatagcgacttaaaaacgggcgattatgtcgttcatgcgaatcacgggattggtaaatatattggtatggaaaccttagaagttgatggggtccatcaagattacatgactatcttgtaccaaaatgatgacaagttatttattccagtaacacaattgaacttgattcaaaagttcgttgcttccgagtctaaaacgccgaaaattaacaagctaggcggcagtgaatggacgaaaactaaacgaaaagttgcttcgaaaattgaagatatcgcggatgatttaatcttactttatgcgacaagagagtcggaaaaaggctatgcttttccgccagatgatgcgtatcaaaaagaatttgaagaggcttttccgtattctgaaacagatgatcaattacgtagtgccgccgaaattaaacacgacatggaaaaatctcgaccaatggatcgtttgttagttggcgatgtagggtttggtaaaacagaagtggctttacgagcggctttcaaagctgttagcaacaataaacaggttgcctttttagtgccaacaactattttagcgcaacaacattatgaaacgattcaagagcggtttgagggctttcctgtagaaattggtttattaagtcgtttccgcacgaaaaaacagcaaaatgaaacaattgaaaaaattaaacatggccaagtagatattgtgattggtacccatcgtttattgtcgcaagatattaattttagtgatttaggcttgttgattattgatgaggaacaacggtttggagtgaaacataaagaacgactaaaacaattgcgttcacaagtggatgtcttgacgttaacagcaacgccaatcccaaggacccttcatatgtcgatgttaggtgtccgtgatttatccgtcatcgaaaccccaccagagaatcgttatccgatccaaacgtatgtcatggaaaataatcctggggcgattcgggaagcgattgagcgagaaatggcccgagatggtcaagtcttttatttatacaatcgagtagatacgattgaacgaaaagttgaagagttacaagcactagttccagatgcacgaattgcgtatgcacatgggcaaatgacagaagtacaactggagaatactttgtttgattttattgaaggacaatatgatatattagtcactacaacaattattgaaacaggagtagatattcctaatgctaataccttgtttgtagaaaatgcggactacatgggcttatctacgttgtatcaattacgtggtcgtgtggggcgtagcaatcgagtggcctatgcttattttatgtacgaacagcaaaaaatcctaaacgaagttagtgagaaacgtttagaagcaattaaagactttacggaattaggttctgggttcaaaattgcgatgcgtgacctttccattcgaggggccgggaaccttcttggtgcccaacaacacggcttcattgattcggttgggtttgatatgtactcgcagatgttatctgaggcagttgctcgtaaacaaggaaaaaatatccaagaccaaaaaacgtctgttgaaattgatttgggcattgatgcttatattccaggaacgtacattacagacgaacgacaaaaaattgaaatttataaacggattcgtcaattagaaaatatggatatgtacgaagaattagaagcggacttgttagaccgctttggagagtatcctgacgaagtggcgcatttattaaccactggccgtatcaaaatggatggcgaccgtgccttgttagaaagtattcgtaaacgcgatcaaaaagtcaagtttgtgttaagtaaaattggcacaaaaacatactctgtggagcagttgtttgaagcgttatcggcaaccagcttaaaagcggatctagcagttgagaaagaacaaatgactatttccttgaagttgccgaaagattgtaaagaagctgtttggattcaagaaattgctgcttttacaaccgcattgcgacaagaaaaatacaaacattcgcaaggaacggattccctttaa

SEQ ID NO: 1440 - DNA, 570 bp, Enterococcus faecalis
aagatgaaagtactcgtaggactgggaaatcccggtagtaaatacaaagaaacaaaacacaacattggctttattacgctagatgaaattgcgtatcggcaaaatgtttcgtttaataatagtaattttgaagcagatattgcagagttttttatagggactgagaaagtattgttagtgaaaccattaacatttatgaatgaatcaggtcgctctgttggtccgttgttgacctactttggggtagatgaggaagatttgattgttatttatgatgacttagacttagagatcggtaaaattcgtttacggcaaaaaggtagtgctggcggccacaatgggataaaaagtctgattgcccatttaggaacaaatgtctttcctagaattaaaattggcattggtcggccctcaaaaaatgatacagttatccaccatgtactaagtacttttcccaaagaaacacacgaagagatgttacttgctgtaaaaaaagcagccgatgccgctttatatgcatgcgaaggacatacgtttgttgaaacaatgaatcaatttaatggaaaatag

SEQ ID NO: 1441 - DNA, 1137 bp, Enterococcus faecalis
ccaaacgcttggaacttcaagcgatcttctttttggaaggagaaacggaaaatgattaaaaaagactatgcacaaattaaagaaacattgtatacagaaacactggaaaatggtttaaaggtttacctattaccgaaaaatgatttccaaaaaacgtatggcttgtttacgaccgattatggttccattgacaatacgttcgtgccaattggtcaagaggaaatgattgaagtgcctgacggaatcgcccactttttagaacataaaatgtttgaaaaagaagatggcgatgtcttccaaaaatttgggcaacaaggggcttcagcgaatgcctttaccagttttacgaaaacgagttatttgttttcaacgacggatcaagtgacacaaaatctagaaacgttgcttgattttgtgcaatcgccgtatttcacgaaggaaacggtcgaaaaagaaaaaggcatcatcggacaagaaattcaaatgtatttagatgatcctaactggcgcttgttctttgggattttaggcaatctttatccgaagcatccattgcatattgatattgccggcacagtggcaagtattgcggagattaccgcagaagatttgtatacatgttacaatacgttttatcatccaagtaatatgaccttattcgtggtagggaaaatggaccctgaagcgttaatggccttcattcgtgaaaaccaagcggcgaaagagtttcctgccgcccaacctattcgtcggcattttcctgaagaaacagctgctgacattgtcaaagagagcgccattgaaatgacagtcacacgggcaaaagtgcttgttggtttgaaaggcttagatgaagtgccaacaacgggtcgtgacttaatgaaatatcaagtcaccgtgaacttgttgttacaattattgtttggtaatacctctcaaaactatttggctctttatgatgaaggcttgttagatgatagttttagttatgactttaatttagatcgcagtttccattttgcggatattggcggcgatagtgagcaaccagaattcttagcagaacgaattgaagctattttattatctgccacaacaagtccagaattcagccagttttcaccacaaaggttaaca

SEQ ID NO: 1442 - DNA, 1284 bp, Enterococcus faecalis
aggagcgatgcggcaatgtctgttcaattagttaaaggcgtgaatttacacgtcattcctacagaaacatataaagcgggcgtttttctagtccgctttaacacacgattaaatcatgaaactattacaaaaagaacgctgttgtccagtttgatggaaaccaacagcttgaattacccgaatcaagtcaagttaagtgagcgtttggcggagctttacggcgccagctttgggattggcgtttccaaaaaaggcaatcaacattggtttaatatttctatgaacattgtcaatgatcattatttacaggatagtcaggttctcgccgaagcggtggactttttgaaggaaattatttttgcccccaatattcaagcgggccaatttgaggcggaaaccttccaacgggaaaaagagaacttgaaagcgtacttggaaagtattgtggaggataagcaaacctatgcctctttggcgcttcaaagtgtctattttaatcaatcggaggatcaaaaaatccctagtttcgggactgttgcggcgttagctgaggaaacagcggcgtcattagcagcgtattatcaaaaaatgctggcggaagatcaagtggatatttttgttttaggtgatgtcaatgaggcggagttagtgccattgttcaagcaattaccgtttacacctcgtgaagaaggcaaagccgcgattttctacaatcaaccaattcgcaacgtgattgaagagcggaccgagcgtgaggtgttagcccaatcgaaattaaacttggcttacaacacagatatttattatggcgatagctattattttgcgttgcaagtgtttaatgggatttttggcggtttcccgcattctaaattatttatgaatgtccgtgaaaaagagcatttagcgtattatgcttctagtagtatcgacaccttccgtggcttcatgacggttcaaacagggatcgatggcaaaaatcggaatcaggtcttgcgtttgatttcgacagaattggaaaatattcgcttaggtaagattagggaattagaaattgaacaaacgaaagcaatgttaaaaaatcagtatatcttagcgttagataatgcaggcgcgtggctggaaaaagaatacttgaacgaattaatgccgcagacgatgctgacggcggaggaatggattgcgcggatcaatgccgtgactattccagaaatccaagaagtagccaaacgcttggaacttcaagcgatcttctttttggaaggagaaacggaaaatgattaa

SEQ ID NO: 1443 - DNA, 546 bp, Enterococcus faecalis
cacagcttcaggtgctttctgaatgataagagtttttcagttcaaattttcaagaagattcggtatactgtttttaaagtgaggagggaaaaaagaatgattaaagaatttaaagagtttatcatgcgcgggagtgtcttagacctagccgttggtgttgtcattggtagtgcgtttacagcgattgtgacacaagtggtggaaggcttgattaccccgttaattagtctgatttttgtcttgacgactgggaaaaagagcgccgacgatgcattgggtgcccttgtctataaagtcgaaggcgttgaattcaatattggtagcgtgattagtgcacttattacatttttaattacggccttcgtcctcttcttgattgtcaaagcggccaacaaaatgaaaaaccgcggcaaaaaagaagaagcggcagaagaagaagtggtaccaacgagcgaagattacttaaaagaaattcgcgacttattagcggcgcaaacaccgcctgctgaaactgtcaaaacagacagcactttcacagagaaataa

SEQ ID NO: 1444 - DNA, 732 bp, Enterococcus faecalis
aggagaagaacacaaatgaaaaagaaaatgatggcaagtttattagttggtagcgcagtggttggcgcaagtttagccccgctttcggcacaggcgactacgacagggaatacgccagtcacagcagcatttgaaggcggcacgttgccagatggcaacggcgatgccaataccgttgatccagacccgagtggctcaaacagtaactttgatttactgtttattcctcgagaatttaattttgggaaattatcaatttcagatgatttaacgaaaccaattcttaaccaaagagaccccgaagccaccaacggccatacagaaatgattggtgtcggtgacgtacgcggcggcaaagaaggctggcatttaacggcccaatctaatggcctaaaattaggcactgaaagcttacaaggcaacattaaagtggcgctgattactcaacttgatttagaatacgaggcaacaagcaatagttatgtagctctgacgacagcagtctctacaccagaagtcagaccacaactggctgctccgcaaaattggacccttgatttaggcggggaagcccaattaatggctaacgcagcagctggtcaaggccaaggattatggcaattttcactgtttaatacagctttaaacatcacaacaccagccaacaatattaaagcaggggcctacacaggcagtatcacgtggaacctcgtcgcaggaccatctgtgtaa

SEQ ID NO: 1445 - DNA, 465 bp, Enterococcus faecalis
ggcgatttagctaatccaattcctagtaaaacagatgaaggacgtgctggaaatgtggaatctgttggtgtaggagatatacgagggagcaaagaaggctggcatgtgactgctcaatcgactggtatgaagctcggcgaggaaagtttggaaggcagtattacaacaggagcaatgtttttgtatccattaatttataatgaggaaactaaaacgtatgattatcaaagtgctgatcttgccgacccagttaccaaaccggaaactgttgatacaacagctttttcaattgctttaggcggagatgcagtgcttcttgcgaatgctacagcaggaaaagggcaaggattatggcaattttcatttagaccatatttaaatattacgacaccagcttacaatatcaaagcaggtgcctacacaggcaatatcacttggaacctagtcgcaggaccatcaatttaa

SEQ ID NO: 1446 - DNA, 567 bp, Enterococcus faecalis
aaggagagattagtattggactatcgaaccaaagaaaagaagttaaagcagctcttaaacttcatttatgatggaattacagttacgtcagacttattggagttatctcaacaagaattcgcatcattactggaaagcgcaacaaaatctggctacatccgaggtgcatccataacaaaaaccaaaatgtaccccataatttggactgatgatgtcgaactaacagaagagggggcagagaaaattcatccttcagaaaaaaatagtcaatcgattcagacgacaaatacctttaattttaactcttcaggtgactatagaggagcgacattcggaaacaataataccgttacaaacaattggaataattctcttgatgaattaaaagaatatattgatgctttaccacctgaagagcaacaagttggcaaagagcttatcaatatcgtagaaactaaagattttaaacctaacgttttagaaagattttctgattttctcgaaaaacatcctaaaattgttactttagcacgtaatgcaattgtttgcgagcgtcctcaccaacgg

SEQ ID NO: 1447 - DNA, 621 bp, Enterococcus faecalis
ataagtttgaaacaagaagagcttaatcttaaattatatgagttgctattgaaaatccaaaatgaatctgacacactaacaaatgctgacatttcagaatcagacgcagatttttatggatatcttatctctaaagaattagtttataatttaaaaatagaacactattacagcggtccaaatatagatgctagccaagcaataatcacagataaaggatatgcatttattaatcaaattggtgaagcagataaacctattaaaatgaatcgtgagaatcgatacaaacaacttcagatatttctcaaacgattagatgaccatgacgctgatttaagaactccaaattatcgtgttcaagaaattgactactacgacttaattaaatatgctattgattcaaatctcgttaagggaattgctattcgatatgctagcaataaaccccatctttttttatctcaatttgcaagggttactacagagggatatgatgtattagatactccctatccaaaaaataatacacccggagcaaccatcagtaatacatacaatatctatggtggagatcaaaagggtgcgagttttggcagtaacaacacaaccaataataattaa

SEQ ID NO: 1448 - DNA, 573 bp, Enterococcus faecalis
aaatctgcgtctgattctgaaatgtcagcatttgttagtgtgtcagattcattttggattttcaatagcaactcatataatttaagattaagctcttcttgtttcaaacttatctaccccctaattaattttaattataacagaatatttaatttaaaaaacaatatatttggagatgagttaatgaaaaaaataaaaagctacaccagtatctgggcagttgaaaaagtcatttacgcaatcaatgactttcagctgccttttcctgtaacttttaaccaaatggcttggtttgttttatccttgctgtttgtcattgtatttgcccatgtgcctccactatctgtgataaaaggggcatttttaaaatactttggcatcccggtggccattacttggtttatgtcgcaaaagacttttgatggcaagaaaccattgggatttttacgatcctttatcagttatcatttacgatttaaggtcacttttgcaggaaaaaaagttaaagaacagaaaaaacgatgggatgaacccattaccttagtgaggagtgtgaactatgtacccgattaa

SEQ ID NO: 1449 - DNA, 210 bp, Enterococcus faecalis
ctgataaaggatcgtaaaaatcccaatggtttcttgccatcaaaagtcttttgcgacataaaccaagtaatggccaccgggatgccaaagtattttaaaaatgccccttttatcacagatagtggaggcacatgggcaaatacaatgacaaacagcaaggataaaacaaaccaagccatttggttaaaagttacaggaaaaggcagctga

SEQ ID NO: 1450 - DNA, 1956 bp, Enterococcus faecalis
actatgtacccgattaagtatatcgaaaataatcttgtttttaatcaagaaggagagtgttttgcttattatgagttaataccttataactattccttcttatctcctgaacaaaaatatcaattgcatgataatttccgccaattgattgcccaaaatcgagaaggtaagattcatgcgctacaaattgcgacagaaagtagtattcgtgccactcaggaacgatctaaaaaggaagttataggtagactcaaagaaatagcattacaacggattgatttacagacagacgcattagtatccatgattggcgatagtcagattgattatcgcttttttattggtttcaaactgattgctacagatgaagaagtgaatttgaaaagtctcaaaaaatccttcttttccggctttcaagagtttatctatgaggtcaatcatcatttgatgggcgattttgtttcattatcaaatgaagaaattcgccgatataccaagcttgaaaaactgatggaaagtaaattagcgcggagattcaaagtcagacgagtgaatcccagtgatcttacttacttgattgaacatatttatggcgaaaaaggtacaccgtttgaagaatacgcctttcagttaccaaagaaaaaattgaaatcagaaactttggtgaaacgctatgacttattacgtcccagtcgttgtttgattgaagagaaacctcgttacttaaggattgaacatgagaatcatgagtcttatgtaacctatttgacaattaataccattgtcggggagatggagtttccttcctcagagcttttctattaccagcaacaacaatttgcttttccgattgatacttcaatgaatgtagaaattgtcaccaataaaaaggcattagctatcgttcgcaacaagaaaaaggaattaaaagatttagacaaccacgcttaccaatctgacaatgaaacgaattccaatgttttggatgctttggattccgttgatgaattggagaccaccttggatcagtcaaaagaatccatgtacaaattgagctatgtggtccgggtgagagcagaatcagtggatgaactaaaacgccgttgtgatgaagtgttcgatttttatgatgataccaatgtgaaactagtccggccctttggcgatacgatggggctacatgaagaattcctaccagctagtaaacggtatatgaatgactatatccagtatgtaacatctgactttttagcaggacttggctttggcgccactcaaatgttaggagagttggaagggatttactttggctacaatgcggatacggggcgtaatgtttacctgaaacccgcattagcctcacaaggagtaaagggctcagtaaccaatgcattagctgcggcttttcttggttctcttggtggcggaaaatcctttagtaacaatctcttggtctactatgctgttctttttggtggccaagctgtgattgtcgatccaaaaggagaacgaggtggttggaaagaaaacttgccagaaattgcggatgaaatcaatattctcaacttgactagtaaaccagaaaatcaaggcttacttgatccttatgtgattatgaagaaaaagaaagattcagaaagtttagcaattgatatcctgacttttttaacaggaatttccagtcgggatggggagaagtttccagtattgcgcaaagccattcggacggttacccaaagtgatcaacgaggattgctgcaagtcattaatgagcttcgaaaggagaactctccagtcgcggaaaatatcgccgatcatatcgagtcctttaccgattatgattttgcccatttgcttttctcagatggttcgattacccaatcaattagtttagataaccagttgaatatcattcacgtaccggatttggttttaccagatgcacaaaccacttct

SEQ ID NO: 1451 - DNA, 393 bp, Enterococcus faecalis
ataggaggttccactatggtcaaacgcggagatatttattttgcagacctttccccagtagtgggctcggaacaaggtggcgtcagacctgtccttgttgtccaaaataacttaggtaatcattttagcccaacgattatcgttgcggcgatcacagccaaaatggcaaagccaaaattgccaacacatatcgggattaattctgatgaaacaggcattgaaaaagattcagtgattcttttagagcagattcgaacaatcgataagggccgcttgaaagaaaaagtttgtcatttgagacttgatattatggaagaagttgatcgtgccttaggcatcagtgttggacttagtagcgattcagccccagcaaaagcaaattcagctacataa

SEQ ID NO: 1452 - DNA, 1212 bp, Enterococcus faecalis
agtgtttgtctcgattacgcacacagaaactatggcgattgcacaaattgttttagaaagggaataatagaagcaacgaagaaagaaggatgtacaatggtcgttggatggcatcgtcctacacggttacatatcgatacgcaagcaattactgaaaatgtccaaaaggaatgtcaacgtttgccagaaggaaccgctttatttgcggttgtaaaagcgaacggctatgggcatggcgccgtagaatccgccaaagcggcgaaaaaaggtggcgcgacaggtttttgtgtcgccttattggatgaagcaattgaattgagagaagcaggtgttcaggaccccattttaattttgagtgtggtagacttagcttatgtgcctttgttgattcaatatgatttgtctgtaacggtagctacacaagaatggttagaagctgctcttcaacaactaacgcctgagagtaacacgccattacgtgttcacttaaaagtcgatactggcatgggacggattggttttttaaccccggaagagactaagcaagcagtgcggtttgttcaatcccacaaagaatttttatgggaagggatttttactcatttttcaacagctgatgaaatcgatacaagctattttgaaaaacaagcagggcgttttaaggctgttctagcagttttagaagagttacctcggtatgtccatgttagcaatagtgcgacagcgttatggcatcctgatgtgccaggaaacatgattcgctatggggtagccatgtatggattgaacccttcaggtaataagctggccccaagctatgcgttaaagccggccttacggttgaccagtgaactcatccatgtaaaacgcttagcggctggtgaagggattggctatggcgaaacctacgtaactgaagctgaagaatggattgggacagtgccaatcggctatgcagatggctggttgcgtcatctccaaggatttacagtgctcgtgaatggtaagcgttgcgaaatcgtcggacgagtgtgtatggatcaatgtatgattcgtttagcagaagaagttcctgtcggctcagtcgttacattagttggaaaagatggcaatgaagaaaatacgttacaaatggtagccgaaaaattagaaaccattcattatgaagttgcatgtactttctcacaaagaatccccagagaatataactag

SEQ ID NO: 1453 - DNA, 261 bp, Enterococcus faecalis
aaatcccagcctattttttctcttgcaactggtttggattctaaccattcatttgctacaacaaaaactgaagcttttcaatctaacttccccgttgaaaacttggataattttggcgtttttctttttctatatcattttgatgccttttttactttttttaagtttttctatttaacgattatctaccaaaaaagagcgagtgttccgttcatagacggaacactcgctcttttgattatttggcgttttcgcgaatga

SEQ ID NO: 1454 - DNA, 1260 bp, Enterococcus faecalis
aagattggcgtccaaaccgttaacgggggggctgatatcggtcgccaaatccgtggactaaaagatcgtccacatatcgttgtaggtacaccaggacgtttactagatcatattaatcgtcgtaccttgaaattagaaactgttgaaacattagttttagacgaagcagatgaaatgttaaacatgggcttcttggaagacattgaaaaaatcatctcacaagtgccagaacaacgtcaaacacttctattttcagcaactatgccgccagcaatcaagaatattggcgtgaaattcatgaaacaaccagaacatgtgaagattaaagccaaagaaatgacggctgatttaattgatcaatattatgtacgttcaaaagactttgaaaaatttgacattatgacacgtttactagacgtgcaaaccccagaattgaccattgtctttggtcggacaaaacgccgtgttgatgaacttgcccgcgggttagaagcgcgtggttacaaagcagaaggcatccatggcgacctatcacaacaaaaacggatgagcgttttacgttcattcaaaaatggtaacttagatatcttagtggcaacagatgtagcagcacgtgggttagatatttcaggtgtcactcatgtctataactacgatattccacaagatccagaaagttatgttcaccgtattggtcggacaggtcgtgctggtaaaggcggtatgtctgtgacgtttgtaacaccaaacgaaatgggttacttacatgtcatcgaaaacctaacgaaaaaacggatgacaccattacgtccaccaaccgaaaaagaagcatttaaaggacaattaagtgcagctgttgaaaccatcgaaagtgatctagaagaaaatggtttagacaaatatctagaatctgctgaagcgttattagaaaaatattcagcgacagacttagctgcgttattattaaaaacagtagcgaaagatccagcagatgcggttcctgtaaaaattaccccagaacgaccattgccttcaaataaaaaaggctttaacaaaaatggccgtggtggtggcggtgggaacaaccgtaatcgcaaccgtggtggcaatggtaaaggtggcagctatcgtggcaacaaaaaccataaagatggcgaccgtaattacaaaaatagcgaccgcaaaaataaagatcaacgtggcggcaaacgtcataacgataaaaaacgtggtttcgtcattcgcgaaaacgccaaataa

SEQ ID NO: 1455 - DNA, 420 bp, Enterococcus faecalis
caactgaaagtgaagacacctgaaactaggaagaaatcgttctttccgaaacaaaatctaggaggatatcatttgaaatttaaagaacttggtttagcgccagaattattatcagcggtagaacgcgcaggcttcgaggaagcaacccctattcaatcagaaacaattccgttagcgttagcaggaaaagatgtaatcggacaagcacaaacaggaacagggaaaaccgctgcttttggcttaccaatgcttaacaaaattgacgcagacaatcgcgttattcaaggattagtcattgcaccaacccgtgagttggctatccaaacacaagaagagttattccgtttaggccgcgataaaagattggcgtccaaaccgttaacgggggggctgatatcggtcgccaaatccgtggactaa

SEQ ID NO: 1456 - DNA, 219 bp, Enterococcus faecalis
aaagaaatccattatagtgtgccaactatttcttctttcctgatttcaccgaaaaattcaccttatggcattagaaaagccaaacgtggtcgttcagcttcacatttattattaaacatagaaatagatctattttatttactacgattcaatttttctcgtcatcttccggcaataggtcattctatcatagaatcccattttcagcaagttttatga

SEQ ID NO: 1457 - DNA, 1452 bp, Enterococcus faecalis
gaagaaaaaatcacacaagactgggacatgacaagactttggcatgtcccagtccctgtgtcagaggagcaaaacataatgaaattaaccttctgggaagtagcgcaagcggttgaagccagtaatgattggcaacaatggcctgattttcctttaacaggcattgaatttgatagtcgtaaaattgtgaaaggaaatctctttgttcctttacaaggtgaaaatgatggtcatcgttttattgagagtgccatggctaatggctgtcaggccgctttttggggacaggatttagtcgatgcgccgcaacaattgcctgttttgcatgttactgatccactggttgctatgcaaaaattagctacctattatttaaataaaatgcaaccgaatgtcatcgctgtgactggcagtaatggaaaaactaccactaaagatttaattgctgctgtgttatctgaaaagtttgtgacttacaaaacgcaaggcaattacaataatcaaattggcttaccctatactattttacacatgcctgatgaaacagaaaaactgattttagaaatgggcatggatcatgctcaggaaatttctttcctttccaatctggctcagccagaagttgctgccatcacaatgattggcgaagcccatgtggaaaatttaggctcacgagcaggcattgcacaagcaaaaatggaaatcgtagatggtttagccaaagacggtagtttatttgtgccaagcgatgaacctttgctagaaccattggtggaaaaagtcacgcaacaagtgattacttttggttttagccaggaaagtcaacttcaaggaatcgtcacaaatgaagccaaagagcaaacctcattcaaaatcagtgatacacaaatgacgtttacgattccagtgccaggaacctataatgtcaccaatgcattaatcgcaattggcattggtcgttatttccaattaacggatagtgagattcaaaaaggcttggctacagcggaactaacaaagaatcggacagaatggctgaaagcagcgaatggtgccgaaattttaagtgatgtgtacaatgccaatccgacagctatgggtcttgttctggacagttttagcaaaatgtccaaagtaggaaaacgaattgctgttttaggagacatgctggaattaggtcctgattctgctgccatgcatcaagcaatggcgcagcatttagccccagatgcgattgaagaagtctttttatatggttctgaaatggcttatttagctgataaattgcaagaaacctatgcaccagctaacattcattcttttaaaaaagaagaaaaaaatgagttgattgaagctgtcaaaaaagtcttacagccagaagacatggtggttttaaagggaagtaacgggatgggacttcgtgaagtcatcgatgcacttttggaaaagtaa

SEQ ID NO: 1458 - DNA, 1509 bp, Enterococcus faecalis
ccaagtcagatttatccaatattaggaggtgggaaaatgtttcaaaacaatttaagtttgaagcggtataaaagattacggacaaaatattttacacaaattaatgaagaagttttcgatcctaatgattttattactgaaatgaagccattttttgatgatagagagcgcaaatacaaagcttatacaagcgaacaaaatgagatcgatagaagacctaaaccaaacacaaagattataaaagtgaataataaacttcatgctggtttatacaatactattgtcgatcaagcagcggaccatttcacaggtattccaattaagtgggattacgatattacagagcagagacgatcaattatgcaacgtgctaaagatttatttttgaataatacattaaaaaataccaaaacaccaaaagagttcgaacggctgacagagttagtgaatgatatgcggtttgccatgcttgattctgacacagctcggtttcaaggagcttgtggtgttgcttttcgtttgttagaacctgttaaaaccaaggaaggttggcaattatgggcgagcaatatcgaaccatggaaagctgaaaaatacgaaaatgcagatatctttattcgtgaaaaatacgacacacatcaaaaaaaattttttgaagaaatgaaagtcattactaaagaaagaatacgcatatatagcagatacattgaatttaatttagtcagtgtatctggaacatttaaattaattgaggaagtagaaaacccgctagaaacgttctacctatcagaatttaaaaacaatacgaatcgttattgcgattttgaagtggcggaagaactttctgatgcatttgatagaagcttatcagaccaacaaaacgaagttgaacagtttaaacttgcttacatggccattagcggctcaatattagatgaagaaaaagcacaaagaatgatggaacaattaggtatccttaacttaccagatccacaagctaaggttgggtatgtaacgaaagatattaataaagatttcaacgagtatcatctaaaccagctaaaaaaaatgttctatacaatcacaaaatcaattgattttaatgatgaggtatttaaatcaaacgcttctggtgaagctcgtaaatggcaaattattgccttagaagcaaaaacaaatacaaaagagcagtatttcagggaaggtttaaaagaagtcgctgaaacgatggcagctttcattaaatttaacgataagcttgatttagatgtgtctaaaattgtgtttacattcagtcgcagtttgccaacagatattggctatcttgctgatgcattgccaaaactttcgccgtttctatctaaacgaacaattattaatcagattccatttgctaaagacccagattatgaaatggacttgatgaatttagaacaaggtcaagattatcctagtggtgactacaaactaggtggtgcggataatgacgaagaagaaagcaacagttag

SEQ ID NO: 1459 - DNA, 1917 bp, Enterococcus faecalis
gtggtgcggataatgacgaagaagaaagcaacagttagtgaacgctactgggaaaaacgtcgtgaattagaagacaaagcacgcttgaaactggaaaagaaaactcttagtgaactagaatctgttttcgaacgtgctttagttaaaattcaaagacagttattggcacaagctgatttacacggtattactcaaagtgagatgctagaagattttagcaaacgagaccaagagaagtaccgtaagtatattgagaagaactatgaaaagttgatggaatcagatgaagtttataaacaattcattgatgaatattttccatcctttgactatgcgaaagttaatcgcttgttacaattacgagcagacattttttctaccattgcaggtgaagcaatagctagtgatgttaacggtaaatttaataacgacttagagaatatcacaaaacgaatctacaattctaattctaatgcgttgatacaattattaggcggttcagcacctggtttaactaagaatgaactagaaaacatcatgaactatccgtggagcggaaaaacattttcatctcgtttatggggcaatatatcaaccctagagcaacgtttgagcaattccattattaattcattggcaagtggtgaaggagttgtggaagctcttagaacgatgaaaaacgatggtgttattagcggtatgtttaagttggaacaaggaaagtttaatcgttcgattgaaaatcttgttagaacggaatattcacattttgcggtagaaggtgtaagaaaatcgctaaaggatataggtgttaagcaaacacaaagctggtcggcagaagatgagcgtgtttgttctatttgtggtggacgtcatggaaaagagattaaagatgattggcatccaccgtatcatggacgttgccgttgtactgaaataccaattattcctgaaattagcgatgacatagataaattgtatgaagagatgtttggtgatttattggatgaattcgcaagtaagcagtggggtattaaattaaatcatccaaaagttagtgcaactaaactcgatttaaaatccgtattagacaaaacaaacatgcaagaagctttaggaaaagaaaattattctaattttttagatcatttagatgggataactgaccaaagggtgctaaacttaataaatgtgatagggcataagttggagtttaaagacatcaaagaagtaagagcctttgcacaaggcaaatcaattcaacttagtcaaaaatcatttgatggggataggggtgttaatccttatcaaacagtttatcatgagataggacatgctttggatcatcttgggcttgaagtattaacaggaaaaaatacgatgccgacaggaaaactgataaaaagaaagctaggaagacgaaccacttttatagaagagcatataacacacgcatcgtcactttctgagtataacattaaagaagcgctagaacgcgatttttggaaatatgtaaacggagatttgccatcctataatgatttaggtaatagacctagaaatgcggataagaaaaaggcctatgatgacttaagggcggaaatttataaaaaaaatacagagaacttacaaaaaactagagaacgattatcaaaaatagttagggaaaatcctaactcagtatccgctatttcagatatgattgaatctataggttctttaggagactatccgttaggttttggtcacggcaagcgctattggcaaacaacaggtagcacagaaacggaattttttgcacatatgacagaagtggttgctaacgataagtcaagagaattaatgaaagagatttttccgacagcagtaagcaaatgggaaaaattagtagatgatattttaaaggcggtgaaataa

SEQ ID NO: 1460 - DNA, 231 bp, Enterococcus faecalis
gtgtttagttgcgaagatggcgcatggtctattattgatgatgcagttaaaaagtatgaacaacatttccatgatgagtttccaatatatgaatatatcgatgtaacaaagagtgatgacttcgatttttctattctaggtgcaaaaaaattagcgaaattcattgatgagcatattaaagaaaataaatcggtccacgtcccgtcagattaccatagcagactttactaa

SEQ ID NO: 1461 - DNA, 336 bp, Enterococcus faecalis
attggaggtgagatcatgaaaggattattcgaagcagtattaaatctagaagttaccaatggtacagaaaaagcctataaaaaagcttttgaacaagaaaacgaacgatacttaaccaaacacactttgagagatggcaacggtaatatcgtcaaagatgagcttaaatcagtttggggtggtaattattgtcacgttgatattttgtattcgttaccaggtaaaaaaagtaaattaactatttcgattgtgtctaggactctgcaaaacgtaaaagatgctgtcactgattatcaaatgttaggtgctgaactggtccataagaattggaagtga

SEQ ID NO: 1462 - DNA, 672 bp, Enterococcus faecalis
agcaatgcggggcgattagtcgaatcgtggggcgaaaggagaaacaaaatgaaaccaaacctattaccaatgaatttacaaatgtttgctgaagaagacggtggtacaaacttcactttcgatgattttaaggcatttgtagaatcaaatgaggaagcacaaaaatttgtacaatcacagtcacaatcagctgcagataaacaattagaagcttggaaacaaaataatcttgaaaaaatcaaggaaacaacaatcaaggagtatgaagaatctaagaaaaataaaactcctgaacaaattaaattagaagaattacaggctgaatttgaagctgaaaaggcattacgtgtgactagtgataataaggcttttgttgcagaaaaaattgctggcttagattgggacggagatttgaaagattctatttctcaatttatgttaaataatcttgttagttcagatactgaatttactaagaaggctgtagaaggctttacagagcttttagaagcaataaatgataagcatgcagaagctattaaaaatgtagaaatgactaaagcttttggtaataaatcgcaacaaaccaacatgggaactggtaatcaaacaaaatcgtttgaaaatccagaggtagcattaggacaaaaattacaagcttttatcgattag

SEQ ID NO: 1463 - DNA, 501 bp, Enterococcus faecalis
gacaaaaattacaagcttttatcgattaggaggaaactacaaatgaaaaaaagttcattaaataatcttgagtatttagatatttcacaggaagttaacgcattacaagttccaaacacaccatttttaagctatttgttaggcgcaggcaaagttgaagctgccaagtcaactgagattaaatggcgagaatatggcatgaataatgatgattcatctgctcaattagaaggcggagaatacgcagatgcggaatctgatcgtacatggtttaacaactatactgaaattttcagaaaatcaacttctgtatctggcacattagatgctattaatgtagatggtgtaggaaatgaattgaatagccaagtagctcttcgtgctacagaaatgaaaattgacttaaatcgtacattgattgttggtgtaaaggctgatgaatctggttctaaaggtcgtcaaatgaacggaattttaaatttgaataactccaccaaataa

SEQ ID NO: 1464 - DNA, 567 bp, Enterococcus faecalis
  misc_feature (61)..(81): Nucleotides 61 & 81 are "n" wherein "n" = any nucleotide.
gcaactcgtggtgaagacctgcgggttattaaaaccaacaagtggcaaaattacggtcgcntaaaaaaaatagtgctggtngaaaaaatcagtattggctacattccacaacaagtcgcttctttcaatgcgggctttcctagcaccgtcattgaattagtacgttcaggtcgctttcccagaaatcgttggttcaaaccgttgacgaaaaaagatcatcttcatgtggaaaaagctttgaaatcagtggacatgtgggaaatgcgccacaaacgaattggcgagctttctggagggcaaaagcaacgaattagtttagcacgagtgtttgcgaccgatccagatttatttattttagatgagccaacaacaggtatggatgaacaatcgcgaaacgaattttatcaattgttgcaacacagtgcgcatgaacatggaaaagctattttgatgattacgcatgatcatgaagatatcaaaacctatgtggatcgtcaaattcgtcttgtccgcaaagaagattcgaaatggcgttgtttccatatgagtgaagaatcgtatacgtaa

SEQ ID NO: 1465 - DNA, 852 bp, Enterococcus faecalis
ggagtgaatcgtatggcagaaatgctttcttatgcatttatgcaaaaggcctttttagcagcactgtttatctcagtgattgccccaatgctcggcgtctttctagttattcgccgacaatctttaatggcagataccctttcacatgtgtcattagccggtgtggcactaggcttcttttttaattggaatcctaatttaatgaccttaattgtcgtgattgtggctgcaatcattctagaatatttacgaatgatttatagcacctattcagaaatttcgattgctattttaatgtcaggcggtttggctttggcgttagttttgatgaatttaacaggaggcaattcagctgctagtattcaatcgtatttatttggttccatcgtcacgattacgtgggatcaagtggttatgttggcaattttattcgtagttttagttctattgtttatgttatttaaacgtccaatgtatgttttaacatttgatgaagatactgctcatgttgatgggctacctattcattggatgtcgatgctttttaatgtaattactggtgtggcgattgctgtgatgattccgatcgcgggagccttgttaatttcagcaattatggtcttaccagctgcaataggtatgcgaattggtaaaggctttaacacggtgattattatcagtgtgtttatgggcttgattggcatgctaacagggttgactagctcgtattatttggaaacaccaccgagtgcaagtattaccctaatttttattggtttattcttattagtcaatatttatcgccgagtggttgtcatggtccaacgaaaacaaaaaatgcaaagaaactaa

SEQ ID NO: 1466 - DNA, 402 bp, Enterococcus faecalis
aaaggagtgacgaatttgaaaattcggagaagtgaacgattaatcgatatgacccaatatcttttagatcatccccatacattggtttctttgacatattttgctgaccgataccaatctgccaagtcttccattagtgaagaattagcaattgttaaaaaaacatttaaagaacgtggaacaggtattttagaaacgattccaggcgctgcaggcggtgtccgctttatccctgaaattccttatgatgaagcggagcagttgattatggatttatgtgatcgtttgtcagaacaagatcgcttattacctgggggctatgtttatctttcagatttacttggggaaccgaatttattaagacaagtgggccggattattgcttctaaatatttaggctaa

SEQ ID NO: 1467 - DNA, 435 bp, Enterococcus faecalis
caaattgatgcggtaatgaccgttgcgactaaaggagtgccaattgcgcaagctgtgtcttattacttaaatgttccgtttgtgattgttcgtcgcgattctaagattactgaaggttcaacggtgagcgtgaactatgtatcagggtcttcagaacgtatcgaaaaaatggaactttcaaaacgcagcttaaaacgcggctcaaaagttttagtcgtggatgacttcatgaaaggcggcggcaccgtcaatggtatgaagagtatgattgaagaatttgaagcagaacttgtgggcattaccgtttttgctgagtcaaaattcaatggccgtcgtgcaatcgatgactatacttcgctattgtacgtggaagatgtggatacacaaacaaaaacgattagcgtagtcccaggaaactatttcacagagaaataa

SEQ ID NO: 1468 - DNA, 1392 bp, Enterococcus faecalis
tttgaggtggcaaacgtggaaaatagatacgcaattattttagcagctggtaaaggaacacgcatgaaatctaaactttataaagtattgcatccagttgctggtaaaccaatggtcgaacatattttagatcaagtagaacaaacagaaccaacagaaatcgtgacaatcgttggacatggggcggaaatgattaaaagccatttaggcgaacgtagtcaatatgccttacaagctgaacaattgggaactgggcatgcagtcatgcaagcacaagagttattaggtggtaaacaaggaacaacattagttattacaggggatacgccgttattaactgcggaaaccttgaaaaatttattcgattaccatcaaggtaagaatgcaagtgcgactattttaacagcgcatgcggaagacccaacaggctatggtcgaattattcgtgatcatgtgggcattgttgaacgaatcgtggaacaaaaagatgccagtgaagaagaagcacgtgttcaagaaattaatacaggaaccttctgttttgataatgaatcattgtttgaagcgttagcgaaaacagatacaaacaatacacaaggggaatactatttaacagatatcattgaaattttgaaaaaagaaggcaaagctgtcgctgcttaccaaatggcagactttgacgaagcaatgggtgtaaatgatcgtgttgctttatccactgctaataaaattatgcatcgtcgtttaaatgaaatgcatatgcgaaatggtgttacatttattgatccagacacaacgtatattgatgaaggcgtggtaattggttcagacacagtcattgaagcgggagtcactatcaaaggaaaaacagtgattggcgaagattgcttgattggcgcacattcagaaatcgttgatagtcacatcggcaatcaagtggttgttaaacagtctgtgattgaagaaagtgtggttcacgagggggccgatgtgggtccgtatgcacatttacgtcctaaagcagatgtgggggcaaacgtacacattggtaacttcgtggaagtaaaaaatgcaacaatcgatgaaggcacaaaagtgggccatttaacatacgttggtgatgcaacattaggcaaagatattaatgtcggttgcggcgttgtttttgttaattatgatggcaaaaataaacaccaaacaatcgtgggtgatcacgcttttattggctctgcaacgaacattgttgcgccagtcacgattggtgatcatgcggtgactgctgctggttcaaccatcacagaagatgtcccttcagaagatttggcgattgcccgggcacgtcaagtgaataaagaaggctatgctaaaaagttaccttatatgaaggattaa

SEQ ID NO: 1469 - DNA, 2091 bp, Enterococcus faecalis
  misc_feature (2062)..(2062): Nucleotide 2062 is "n" wherein "n" = any nucleotide.
aacacaaggaggaaatttgtgaaaaagttgagctttaaaaaagtgaagtggggcatgcattttttaatggctgttgcgttgatagcgccaagtgttactagtacggcatatgcagtagaaacaacgagtcaacaaagttcagaagcagtaacaagtaccaccgattcaagtagaaaacaagaaccagtcattacacaggaaacaacagacatcaaacaagaagcaccaaatcaggctacgagtgacagtgtcaagcagtcacaagaaaccacagcaccaacagagacgacgaatttagaaacgtcaatcgctgaaaaagaagaaacgagcacgccgcaaaaaataacaattttaggtacgtcagatgttcatggtcaattatggaattggtcttatgaagatgataaagaactaccagttggtttgtcccaagtaagtacagtcgttaaccaagtccgggcacaaaacccagcaggcaccgttttaattgataatggcgacaatattcaaggcactattttaacagatgacttgtataataaagcgcctttagtgaatgaaaagacccatccaatgatcaccgccatgaatgtgatgaagtatgatgcaatggttttgggaaatcatgagtttaattttggtttaccgttaatcaaaaaaattcaacaagaagccacttttccaatcttgtctgcgaatacctacaataaggaagatggtcttcgttttgttgaagggactaccacgaaggaacttgattttaatcaagatgggcagccagatttaaaagttgggattatcggcttaacaattccgcacattcctttgtgggatggccctcgtgttacttcgcttaattttttacctttgaaagaagaagcagaaaaagcagttactgagttgaaagctaacgatcaggctgacattattgttgcctcgattcatgcgggacaacaaaatagtgatccggctgccagtgccgaccaagtaattgaaaatgtcgcggggattgatgcgtatattctgggtcatgaccacctttcttttaccaagcaaggagcagcgccgaatggaaaaactgtaccggtagggggaccgaaagatacggggacagaagttgtcaaaattgatctttcagttgctaaaaatgccgataagtgggaagtgcaagaaggtacagcaacgattgtaccaacaacgaatgttccagcagatgaagcagttaaggcagcgacaaaagaataccatgaaaaaacgcgagcgtttattcaggaggagatcggcacagcaacagctgattttttaccaaaacaagaaattaaaggaattcccgaagcacaattacaaccaacagcgatgatttctttaattaataacgttcaaaaagaagtaacgggcgcacaattaagtgcggcagcgctgtttaaatacgacagtaaattacctgcggggaagatttcctatgccacgatttttgatatctacaaatacccgaataccttagtgagtgttcccattaacggtgaaaacttactgaagtatttagaaaaacaaggggcgtactataaccaaacacagccagatgatttgaccattagttttaatccaaacattcgtgtatataactatgacatgatttctggagtggactacaagattgacatttcaaaaccagtgggtgaacgaattgtagatgcgaaaattgacggccaaccgctggatcctgccaaagaatatacgattgctatgaataattatcgttacggcggtttagctagccaagggattcaagtaggggaacctattaaaaattctgatccagaaaccttacgaagaatgattgttgattatattaagaaaaaaggaactcttgatccagaacaagaaatcgaacgaaattggtcaattattgggaacaattttgatgaaaaatggcgtgccaaagcaatcgaattagtgaatgacggcactcttcaaattccgacttctcctgatggacgtacaccaaacgccgccgctattacgaaacaagatgtccgtaatgcggggcttgatttaaatnatgcatataccattatgcacacaaaataa

SEQ ID NO: 1470 - DNA, 777 bp, Enterococcus faecalis
ttagtatacttgaagaaacaaataggaagcaaagcaaacgttttgaggtgttctttcatggaaaatcgaggaattttatttgataaagatggtacgtgtattcgttttgacactctttggcaagcaggtttgcaagcttgttttgaaacactaagtatgttagcccctcatcattcagcagaaataaaaaagatattagctattcaggagcaacgttttttgcaaaaacatttacttgatgaagtcctttatcaggaactttatcaggaattggcgcaatttgaggaattagtcgaacagggaatcagcagtcgatggctggagcaatttttttatgattatttacgaaaaaatctgaaaaagatcgaaccgattggtgatttaaaacagttatttcttgagctgaaacggaagaactataaaattggattagcaacttcagatactttgccagcgactatgttgattatggaatatcttggtttaacagaaatgtttgattttattgcgacaggagatcgttacttaccgaaaccagatgcggacatgctccaagccttttgtcagtcatgtcaattgaaggcgacagaagtaattatggtaggtgattcgctcgtggatgtttttatgggaacgtgtcatggcaaagcaggaattggtgttttaaccggcaactgccagtcaactgattttgaaaagtttgaagtagcctatttccgtgatatccatgaaataccttatcaagaattatgggatgttcaccacggggtaggccta

SEQ ID NO: 1471 - DNA, 261 bp, Enterococcus faecalis
cttaagaaaagtagagaaagtgagtggttaattatggaagaaactgtcttttttaatttaggaaatgcccttgcttcaaaaagagatcaaaaagaattaattaaagaagcccaaattgcgaaagatactcgaaagattccaggaaaactgattatcgttgaagatgaagaaaatggtacccatattttatttgaattagctgatcaaacagaaccgtctgctgaaacaaaagaattcaaagtgaaaaaagtgattgattaa

SEQ ID NO: 1472 - DNA, 669 bp, Enterococcus faecalis
agaaaagagggaacgtttatgaaaaaattttgtttaagttatagctctggtaaagattgtttattggcgatggatcgattggtacaagcaggaaatcagccagttgcgttagtgacaacattaagtgatgaaattaatcgttcttggtttcacggcataccaatctccgtcttagaagcagcagccgaagcgttagatttaccacttgttatatcacataacaatgaaacaaattacacagaaaaagtggttgaggcactgcaggaaaccaaaaaattaggtgcagaaacggtttgttttggcgatatagatattgaacaaaatggtgcttgggatcgccaagttgcgttaagtgctggacttgaaccacaattacctctttggcaggaaaatcgcgaagcacttgtgaaagaattcttggcaaaagggtacacagcaattatcaaaacggtcagcaaagaggcaggcattccaataaaatttttaggagaaccgttaaatgaaacatttatcacgtaccttaaagagcatcaattagatatttgcggagaaaacggggagtaccatacgttggtaattgacggcccgctatttaaaaagaggctcaattattatacttcaggaatttatgaaagtccttatgcttattctttgattattgatgcttaa

SEQ ID NO: 1473 - DNA, 195 bp, Enterococcus faecalis
tctttttttcaaaaaacacagctatcttttgcagttttcttttcctcatgttataaagagatagtaggaagcatttattcacttctttacaaatctatcttaatcttagacagtcggcggaaaacggctgtctatttatctggaaaaattatgaactcgtcagctagtggtcagttgacgagttttatgttataa

SEQ ID NO: 1474 - DNA, 816 bp, Enterococcus faecalis
ataatgcgcgaggtaaaattaattttagctgaacagttttcatacttaggcgttgcacaacgaattgctaaatacagtaataaagcattatatcaaagccacatcttaggaaatttatggcaaattttaagtcctttaattcagttaggtgtctattattttgcttttgggattgcccttggtggtgctcgaaccgtaaaaggaggagtatcctatattgcttggttgatggtaggattaagtacatggatttttttaagtacagtaacaaaacaagcttctagttctgtttatatgcaagttggcatggtctctagaatgaagtttccaataagtattttgccaatggttaaaatattttctgagttaccaagttattttgcattcactacgttagcagcgattgtgtcaatctcgacaggtgaaaagatttctatttattggattcagctaccttactatattgtagcgatgattatctttttatatagttttagtctaattaattcaactattgctgcattaattagggattatcaaattttcttgaattctattatccaagtattaatgtatatgtcaggggtcttttgggatttgagtacaaagaatttaccgtcttggttatcaaaaattcttatgttgaatccttacgcatatattattaatggatttcgagatacatttttctataaaagatggttttttgaagataagccccagcttgttgttttttggctaacaacattagtaatatttatcgtaggagctcatttacatgttaagttcagaagtaaatttgttgattatatgtaa

SEQ ID NO: 1475 - DNA, 1407 bp, Enterococcus faecalis
aagcagtcgctaaagaatttggtgaaatggccaactagtgaacggttagactcggaggaacaaatggaaaaagaactgaaagttagaacaaaattacttaccaaagaatacagtttagcgcaaacacgtattgacaaattgaagacactttttagtgtttttcaaaacaaagttcccacattttgggcgttaaaaggtgttagcctcgacgtatattctggagaaacaattggtattattggtttaaatggttcaggcaaatccactttatcaaatattatttcaggcatcacccctcaaacgtcaggagaacttgaaataaatggtgaagtttcaattatttcgattggtgcaggactaaataataatttaacaggacgagaaaatattcgaatgaaatgtttaatgttgggggaaaagaataaagaaattgatgccaaaatcgatgatattattgaattctcagaattaggcgtttttatcgaccagcctgttaaaacttattctagcggtatgcgtgctaagcttggtttttcaattgcggttcatcaaaatccagatattttagtgatcgatgaagcgttatctgtaggagatcaaaccttctataataaaggcttaaaaaaaatgcttgcatttaaagagcaaggcaaaactatcttttttgtctctcattctattcaacaagtagagcaaatttgtgatcgtgtcgcttggatgcattatggtgacctacgtgcatttggtgaaactaagcatattttaaaggaatatcgtgctttcttgcaccgttataatcatttcactgaaccgcaaaaagaatcgtatcagagagatggcaaggccaaacagagaaatttttctttggaacaacttcaagaaacaattcttgaaaaagccaatcaacaagtaggcagtcgccggacgactaaagaagtcattaaatttactactaaaaataaaattggagataaaatgactcttggtacgaagagcttgttaattttgctactttgtatgattttttatgtaagtcttacctttgtaaagggtatttcattaacaacagctttcattcatccagcggaaacaattcaacgtatatttgttcctgagaaagtagcagggaaggatacaaatgctgtgaaaacgactaaaactaaaccagcttcaacaaaagaatctaggcagcaggaggaagttcagcctagcccaacgaacgtaccagaaaataataatagcgaacaagctgtgtcaacgtatactgtggaagttggagattcagtcagtttgattgctgaaaatcacggactcactatagaacaacttcaaactttgaatccagaaatcattgaggtacctatttatcctggacaagtgttgaaattgaaagaggtgactgaataa

SEQ ID NO: 1476 - DNA, 1020 bp, Enterococcus faecalis
  misc_feature (34)..(34): Nucleotide 34 is "n" wherein "n" = any nucleotide.
tattggtggccattatgtataaacattaagcaanacgggattaatgtccaagattatgttgcccatatttttcatactgacaataaagaagtatgtttttatgtcattcaattgacggaattcaatggagacatcaatcaagtacttgctaattacaaaggggagctctacaacctaccattcaatatgaacacgttctaccaaatgtggggggtaaaaacaccagctgaagcacaagcaaaaatttcagagcagcgggaggcagctggaattaaaggcgctccaaaaaatttagaagaacaagcgattcgtttgataggaacggatatctatgaaaaattaattaaaggctatacagaaaaacagtggggacgtaaggctacggaattaccaagttttattattcgccgtttgccaactcgttttacttttgataataattactttaaccatcgctatcaaggcgtacctgtcgacggttatacagctatgtttgataaattgttagagagtgaattaattgatattcaattgaataaagactttttggcagagaaagaaacttacttatcagagtttccaaaaattgtttatacagggatgattgatgcattctttgattattcttatggcgaattagaatatcgttcagtacgttttgaaaatgaaacagtagattcaaacaatgcacaaggcaatgccgtaattaattacacagatgcggaaactccctatacacggataatggaatggcgacattttgatcaaaaggccgatgaaaacaaaacgattttgacgaaagaatacccacaagattgggatcgttcaaaagaagcctattatcctgttaatgatgagaaaaattcacttttgtttagaaaatacaaagaaaaagcaaacgctcaagaaaaagttatttttggtggacgtttagccaattatcaatactatgatatggaccaagttttcggagcagctttgaaagcagtcgctaaagaatttggtgaaatggccaactag

SEQ ID NO: 1477 - DNA, 837 bp, Enterococcus faecalis
tatagtttatttcgaaaagaagaaagaggtgaaccattcatgtttttaggatttaatgaaatgaagtattcaaaaggacggtacgtccttgtagtcttagtaatggtcttgattgcttggttaatttttattttgtcaggtttagcgaacggtttagctcaaggaaatcgtttagccgtagatcaatggcaagcgaatcaagtggttttatcaaaagaggccaatagtaatttaaatgtatcagtgttagatgaaaacgtgaaagaaacgatttcaggaggcaaaattgcaccgattggtcaacaatctttagccatccgcccagcagatgataaaaaggctgaattaacgaatgttagcttatttgggattgaaaaagaaagttttttaatgccaaaagtgattgaaggaaacgcatttactgataaaaatcaagtgattgcttcagaaacattgaaaaatcaaggatttaaaattggcgacaaattaactgcagggaaatatgatgagcaattagaaattgtcggctttatttctaaaagtagctataacattgtgccagttatttacacttctctggatacttggcggtcaattaaatatggtgacaatccagcaatggccaaaatggttaatggtttcattgttcgcagcaaggacaacacggaagttaaaacgactaataaagacagccaagttctttcaatttcagattttattgaaaaactgccaggatacagcgctcaaaacttgaccttggatggcatgatttatttcttgattgtgattgcagcgttcattatcggtatttttatctttgtgatgactttacagtaa

SEQ ID NO: 1478 - DNA, 615 bp, Enterococcus faecalis
aaagcagcagggggcgagaaaaccatggaaaagccaaataaacgcaaagctgatttagaacgtacacggcaaattattttatctgtcgcttctgaattattcatgacaaaggggttcaaaaatacctccactcgtgaaattgctttaaaagcgaacattacccaaccgaatctctatcaccattttaaaaataaaaaagaactgtatttagctgtgattgaagaattaacgtcccgtgttcaggaagaattagtcccaattgtttctggaaatgcatcagtagaagaaaaactttatcaattaatcaaagttttgttagatgaacatccgaccaatcttttcttaatgttgaacgatatgtttcaagaaatgggccctgattacaatcgtacgctgtatcaaattttcaaaaaaacctatatcaataatattgcggctatttttgaaagtgaacctgaaaccaattgcttacaagatggcatcagtgtacatgatgcaactcggtttattttatataacgttagtgcattattaagtattgaaaaaacttacagcgaaaaacagtggatgacgatgttcaaaaatttattcaatttatcctacatggcgttttga

SEQ ID NO: 1479 - DNA, 1068 bp, Enterococcus faecalis
agcaaaatgaaaaagttcgtgccgctacgtataaaggtcaagtgtattcaggattacttttccccaatgatgcaaggaatgtcattagtcaatacggcgattgttattatctttggtggttggttagcaatcaatggctctgttgatcgtgccgctgcgctaggtttagtcgttatgtttgtccaatattctcaacaatattatcaaccattaatgcaaatttcttcaggttatagcatgattcaattagctgttacaggcgctcgtcgtttaaatgagatgtttgatgaaccagatgaaattcgtcccgaaaatggcgaaaaattagaagagattaacaaagctgtggctttaaatcatgttgtttttggctataatccagaaacgcctgtgttgaaagatgtttctattcatgtggataaaggtgaaatggtcgctttagttggaccgacaggctcaggaaaaacaacgattatgaatttaatgaatcgcttttatgatgtgaatgaaggcgccgtgacgtttgatggtgtggacattcgtgaaatggatttagatagcttgcgttcacatgtaggcattgttttgcaagagtccgttctattttcaggaacaattcgtgagaatattgcttttggtaagccagaggcaacggatgaagaaattgttcaagcagcgaaacaagcgaatatccatgaatttattgtaaatcttgagcaaggctacgatactgagattacggaagagaataaccttttcagtacggggcaaaagcaattagtaagtattgcacgaacgattattaccaatccagaattattaattttggatgaagcaacaagtaatgttgatacagtaacagaagctaaaatccaaaaagcgatggacgaagcaattaaagggcgcaccagttttgtgattgcccatcgtttgaaaacgattctaaatgcggatcggattattgttttacgagacggtgaagtcattgaagaaggcaaccaccatgaactagttgaacaagatggattctatgcggaactttataaaaatcaatttgtttttgaataa

SEQ ID NO: 1480 - DNA, 918 bp, Enterococcus faecalis
agaattagcagctacgaaccccgtgtatcaagaaatttacgaaactcaaaaaggaaaggaggaagcttaatgactgatttaataaaagctagtaaatttttctatcattatttgaaacgttacaaagtttcgttcctctttattttcttagcaattttcgcagcgacttatttacaagtcaaagcgccgcaattcgttggggaagctattcaggaattagcgaaatatgcggttaatgtgatgcaaggaaaagacgataaaagtgcgttcgtttctgtcatttggaaactactcattttttatgtcttaactagtgccgctagtttcatttatagtattctctttacacaagtcgtggggaaatcgacgaaccgcatgcggattggtttgtttaacaaattagaaaaattgacgattcgtttctttgattctcatcaagatggtgaaattttaagtcgttttactagtgacttagacaacatccaaaatagcttaaaccaagcgttgctacaagtattaaccaatattgccttattggttggtgtcttaatcatgatgttccgtcaaaatgtggaactggcatgggccacaattgcttctacgccgattgcgattttaattgcggtctttgtgattagcaaggcgcgcaaatatgtcgatttacagcaagatgaagtgggtaaattaaatggctatatggatgaaaaaattagtgggcaacgtgtgattatcactaatggcttacaagaagaaaccattgacggctttttagagcaaaatgaaaaagttcgtgccgctacgtataaaggtcaagtgtattcaggattacttttccccaatgatgcaaggaatgtcattagtcaatacggcgattgttattatctttggtggttggttagcaatcaatggctctgttga

SEQ ID NO: 1481 - DNA, 1503 bp, Enterococcus faecalis
aacatttttttctgcccaaagttgccccaagtgttcagtgtgaacattcgtgaagcaattttccgcaaaatccaaactttttcatttggcaatatcgaaaatttttcagcaggtaacttagttgttcgtttaacaaatgacgttactcaaattcaaaatgtcattatgattgcgttgcagacactttttagaattccttttttatttatcgggagttttattttagcgatgctaaccttgccacaactatggtgggtgattgttgcacttgtcatcgcagttattttgatttctatgctgtccttttcgcaaatgggcaagcatttcatgattattcaaaacttgattgataagattaatggtattgcaaaagaaaatttgttaggcattcgtgtcgtcaaatcatttgttcaagaaaaaaatcaattgtcacgttttacaaaagtgagtgaagaattaaccacccataacttaatcgtaggtagcttatttgctgtgatgattccagcgtttatgttggtggcgaacttagctgttgtaggctcaattttctttgtgagtaacttagtcaaggacgatccaactttaatcggtggtgtcgcttcctttatgaactatttaatgcaaatcatgatggcgattattatcggcggaatgatgatgatgatgacttctcgtgccgctgtttccattaagcggattaaagaagtgatggaaacagaaccagatgttacctacaaaaaagtcccagaacaagagttaattggtagtgttgagtttgaccacgtatctttccgttatcctggggatgaagaagataccttgaaagacatctctttctctattcagccaggtgaaatgattgggattgtgggcgcaactggcgctggtaaatctacattggcacaattaattccacgtttgtttgatccgacagaaggaaagattgaagttggtggtgtcgatttacgagaagtgaacgaacacagtttacgaaaaacagtttcctttgtgttgcaaaaagcaatcctgttctctggaacgattgcgcaaaatctacgccatggtaaacgtgacgcttctgaagcggacatggaacgggcttcaggcatcgcccaagccaaggaatttattgaaaaattagcagaaggttatgatgcacccgtcgaagaacggagtaataacttttctggtggacaaaaacaacggttatcaattacaagaggtgtgattggtgaacctaaaattttgattttagatgatagcaccagcgcgttggatgctcgttcggagcggttagtccgagaagcgttggataaagagttaaaagagactaccacgatcgttattgcccaaaaaatttcttctgttgtccacgcagatcgtattttagtattggataatggacgtttagtcggggaaggcacgcatgaagaattagcagctacgaaccccgtgtatcaagaaatttacgaaactcaaaaaggaaaggaggaagcttaa

SEQ ID NO: 1482 - DNA, 381 bp, Enterococcus faecalis
aaaaacggaagaattcggccaaaaccagaatcaatcacccctcaggaaaagtcagaaccggaacaacctgcgccaacccctccggaagatcaaaaaactacggttccttctgaagaaaaaaagccttcacccaagaaaaaagacaaacctgtggagaaaccggcaatgtcaaaagaaaaaaagaaacaaacaaaagaaacaacggctcatcccttacaagtgaataaagattttgtctttcctaacggacttggtgcaggcggcgatgaagaatctgaaagctatttagcagcggttgggtactttctttcaggaaatggattgtatgggaaaaaaatggatgtgagagaagtctatgatattgatgatgtttttaaataa

SEQ ID NO: 1483 - DNA, 1470 bp, Enterococcus faecalis
gagaagtctatgatattgatgatgtttttaaataaagtggataaaagaaaaatcgccttatttcagttactggaaaatgcaccgatgttaacagagtcaaaagaaaccgtaatgcaggagttagaattatctgaatttattgtgaacaaaacggtcgctgaattaaatgccgattttattgaatttggtttatcagaggattttcaaattgtgagcgatggtattttcttaactcttaatgaatcaggaacggaaacttccgctaccttgattgattgctatattaaagagtcgttacgttttgctatgtttcaagatttcttttttcagcgttttgattctgtgaatgagtttgcgttagaacactttgttagtcacacattggcttataaggagttcaaggaattaaagaaaatgctggaaaattatcaaattacaattaataaagaatttcacttagtgggaaatgaaaccaatttacgcgaagtaacaacactggtttttttacaattataccaacgtgatttttcattgtacggtaaaaaagttttagagcagattcggaactttgagctatttttttctgagaaggttcatcttaatcagcgtgcgggctatgcacaagctaaatgttttcattttttggcggtttctttagtacgaacgcagcaacagttttatgtagagaaaaaagtagattcgcaagtgttaaaacaattagccggtgacaatcagcagaatgttttcaattggttagagagtcttcaaatcccagaaccacaacgaacaaacgaaggcaattatttactcttatttttaattgctgaagagtggcttcaagtagcttcagcagcactttgccaaagatttgcagaaattcaacaattgaatcgtgacttgttaagctatttaaaaatacaatttcagctttccgaggaagtcctgcaaggttttgaacaaaaagtaacaatcgtacattttaaattgttccattttccaatagaagcaaactatagttatctcaaaatggatataacctactttgcagaaacgtatacagagtatttttctgctagtcgacaatttattcaagaacaaaaaacgaatcccgctgtttgggatgccagacggtttttattttatcggtatctgttgttaatggtggatgcgttaccattgaaaaaagttttggctccgattacattgtgtgtcgacttttcctttggtgaagcctataatcgtatgatacaaaaaaatattgaaaaaattacggaatggaatatcattttcaaagcacatgtagatgaaagtgtacaattaattttatcggatattcattttgtcgattggcctgagattactcaaattatttggctagcgccaccacgtcctgttgattggtcgcattttattaaaacgctgagtgcactaagaccgcactcgggagaagagaaaaagaaatcatcgtag

SEQ ID NO: 1484 - DNA, 540 bp, Enterococcus faecalis
ttcgtctatataagtgtacaggaaaggaggttccagaaatcgatggttttcgatggttggaaaagaaaaaaacaaattcgcgcgttagaaacgcttgtggataccaaatatgaaaaaatgtatcgcattgcctttaactatacacattcgaaagaagatgccttggatgtgattcaagaaagctttgaaaaggcactgaaggccatccaaaaaggacccgatattaaggattttgacgcgtggttctttcgaattctgctttctgtagcgacagattattggcgtaaaaagaaacgagaagctgttcatattgaaaaagatgaacatgttttagcccttttaaataatccccaacgcagttttttagaaattgaagaaattattaatcaattagatagtcccaatcgtgaaattattctattaaaattttttgaaggatttacgctaaaagaaattgccttgatcctggatattaacgaaaatacgattaaaacgaagatgtaccgcagtttgaatgaactccgaagtctattgaattag

SEQ ID NO: 1485 - DNA, 891 bp, Enterococcus faecalis
aagaaaggaagcgaaaaaataatggaagattttgtaaaaagtgttgttaaaaacttttcaaaagaataccgccaacaaccgttgccaacggatctacaagcggaagtcaaagcgcgttttcataaagagaaaaagcggtacacctggcttcgttttagaaaccgctcactgcaaagtagtctagtagtggcttgtggctttgtcttatcagtcaatttgtttccaggctttagtgaagcagcccgaaacattcctgtgttagataaaattgttcaattagtcaccatcaaaacgttgacagcgaaaaaacaggaaagtgaagtaaacatcgatgtccctaaaattcaaacatcccaagaatcttcagtagccgacacgctcaacaaaaaatacttgaaagaagcccaaacagaatttcaacaagtcaaagggcaattgtttgatggttctcgtgtttcagtcactggagattatgaaaaagtcgtggacgaccgtcgcttcctagtggtcaaacgaaccttcacagaaattaaaggcagctctgcgacgacaacgaaatatgacaccatcgacaaacgagccaatgttgtcgtttcactccccttaatttttaaaaatgatttttacattgatgtcattagtagtgaaattaaacaacaaatagcagaccaaatgaagaacgatagcaataaaatatactggtccgaaaaagaggatgcccccagtgatgttcaacccttcaaaaaaattaaaaaggaccaacctttctatatcaatgaaaaacaccaattagtgattgtgtttccccaaggagagattgcgccttactatatgggcactcctgaatttgtgattcctgatcaagtcattgggggaaaaaaaaaaaaatga

SEQ ID NO: 1486 - DNA, 777 bp, Enterococcus faecalis
aactgtcgcgtgttttttgctgacctaaccaagtcagttgcggttttactgagagaagcgtacactagaattaagcataacaagaaagggcgaatggcaatggaaaaatcagaaaaaattagtattttacaagatgtggttaaaattaaatctgtaaatggaaacgaagaagaagtggcaatctatttacaaaatcttttgaagaaatatgagatcccttctgaacttgtttcttatgcaccaaatcgtagtagtttggttgcttatttaggtgaaaaccgagaaaaagtcttagggtttagtggccacatggacgtggtttctgaaggggacgaaagtcaatggactttcccaccatttgcggcccatattgaaggaaataaattgtatggccgtggcgcaacggacatgaaaagcggcttagtcgcaatggttttagcaatgattgaattaaaagaaaagaaagtcccattaaatggagcggttaaatttttaggtacagttggtgaagaagtcggtgagctaggtgctggccaattaactgaaaaaggctatgcggatgatttaagtgccttagtcattggagaaccaaccaattataacttgatgtatgcgcacatgggttcaattaactactccgttgtgtcacacggaaaagaagcccacagttcgatgccagaagaaggcattaacgcgattaataatttgaacgaatttattacagaagcaaaccaacaaatggcggaagtcacagcaaatttgaaaatcctgaattag

SEQ ID NO: 1487 - DNA, 531 bp, Enterococcus faecalis
tttgaacgaatttattacagaagcaaaccaacaaatggcggaagtcacagcaaatttgaaaatcctgaattaggccgaacgattcacaatgtaaccgtcattaaaggtggcacacaagtgaacagtattccaggtcaagcagccttgcaagggaatatccgttcaattccagaattcagcaacgaccaagtcattgcattattacaaaaaattgtcgatgaattgaacaaaaaagaaaaacatcagttagaattaacgattgattacaataaaattcctgtaaaagctgagaaagattctgcgttaattcaagccattcaagcccaatttgatcaaccattaccattagtgacaagcgctgggaccacagacttagctgaatttactaaatcagacaatacatttgattgcgttgtctttggaccaggtgtgaccactactgcacaccaagtcgacgaatatgtcgaaattgataattatttagatatgattgataagtatcaagcgatagcaaaaagttatttaaattaa

SEQ ID NO: 1488 - DNA, 765 bp, Enterococcus faecalis
aaaaaaccaagaacattcattgacttagccgatcaggcccatttaatcattgaacaaacaactaaattaccgaaaaaagaggcagcgattcttttcttgctaatagataaccaactagttgctttaggacttgctgaagaaaaagctacatataaagaagtttcttttgatcactcgattttattgaaaccgacttgggacacagaacttgcctatttagcgcaagctttcctagatgatgcgaaagaaagtggtttaacattggaagcaaccccaacgacagtcaaaattccgaaaagtgcggtagcgacagtgactaactataaagaaacagtcacctttatcttggaacgttttggctactctctgtttaaaaaaccggcgccgaagaaagccagaccagccaaagcacgccacaaatggacaaaagaagttagccaaattcctttttatattgatactcgacaaagcaaagcaactgttttttggcaaaagcgcaatgaaatgcttattaaagctggcgcgacaatgatgcccgaagcccctttaaataaagacgggtctgtcggtttctccgctagatttggtgaaaaacttcgtgatgaacgcaagggccaatttaaagactttgtcacaacggaagatatcgtcttaaaaagcgttaatgaagtcggcttgtttctctattttgctggaacaaacagctggttagagctagttgatgagaacggcaaaaccttaaatgaatggactgtggtggaataa

SEQ ID NO: 1489 - DNA, 618 bp, Enterococcus faecalis
agaagatccgtttatgacaaactgattatcaaccgagcaattttgtcttcaaaatcacaaaaaccagatgaagggattacggttgacttagatacattagcgtttgaattactagagaaaagatatgaattttcaggagaaaaaatctggtatttctctgaaaaagtgattgagacgcaagcggcaccttccatggaagaaaatatcaaagaaattaaaaaggcagtcaaacgcattggaaagaaatttaacgaagatgagtttgaactaatggcttctgtaaaagaagcggtgtatgatagcattgaggaaacggggacgattgacaatgagcagattgctgagcaagtgtttaaagaaaatgtatcagctaaattagcttaccaagaagaagtgaatgaatcgaagtttgtcgacaaaacaccgccagtcagagaatctcgcgaaatttctgaaaagaaatttggcaaacagaagttaaaaatggataacggtattgaattaattgttccgttagatgtttaccgcaatggcgatttaattgaatttgttaataatccagatggcacagtgtccattatgctaaaaaatatcgaaaaaattagtaatcaattataa

SEQ ID NO: 1490 - DNA, 309 bp, Enterococcus faecalis
aaaaaaggcatactattccttgaggtgaggaaaatgaaaacattactaaaaatattaattcccatagtcattttagccggtggtagctggggcgtttataattactattacggtggagaagcctattatacacaaatcacaacatctggtgaaaagaaagatgaaaaaacaaattctggtgaagcaatgaccatttattactatcaacaacctgcgtttaataaaaacggtgaagaaaaaaccgtggaattaaacgaatcccgtgatcaacctttgcgtatgaaagcctatctaaaattgaaaagttaa

SEQ ID NO: 1491 - DNA, 711 bp, Enterococcus faecalis
aggacaatgatgcccttttattttggaatcgatccaacctatatattggtaattatcggaattgcgatttctggtgcggcctccgcatatgttaacagtacctttcgtaaatatgatcaagtacgaagcagtaaacatgttacaggcacgcaggcagcacaatatattttacaaaaagaacaaattaatgatgttggagttcagcaaattgcgggtgatttaaccgacaattataattctggaaacaaaatgttgagcttatccgaagccactgctcaatcgacatcggtcgcggctattggcgtggcggctcatgaatgcggacatgcggtacaagatcatacgaactatgtgcctttacgtcttcgtgcagctattgttccagttgccaacatcggttcaaccatttcctttccactaattttgcttggtgttttatttagttggaatcaaacattaatcaacattggaattttggctttttcattacccttgatttttcaattggtgactttaccggtggagtttaatgcgtctagacgtgcattaagtattctttctgaaggtgggttattaacagaagaagaagtcccaatggccagaaaagttctttttgcagctgcacttacctacgtagcagcggcgctttcgacctttttacaacttttacgtttggttattttatttggtggcaataaccgacgagactaa

SEQ ID NO: 1492 - DNA, 219 bp, Enterococcus faecalis
gataccttcttaataattttttcagaagcgatgactgcaacagagacacttgcaactgcagcaatgcttaaaccgataccaatttttgttgatgctttcatttccttcagctcctctgttattttctactttaatcataacatattattacttttatgcgtaatagaaagacctttactagcacttagtctcgtcggttattgccaccaaataaaataa

SEQ ID NO: 1493 - DNA, 363 bp, Enterococcus faecalis
aaaataacagaggagctgaaggaaatgaaagcatcaacaaaaattggtatcggtttaagcattgctgcagttgcaagtgtctctgttgcagtcatcgcttctgaaaaaattattaagaaggtatctcatgtttccaatcgttataaagttaaaaagtttgtagacgataaatttgatggaaaccaaaaattattatcgattgtcgatgatttatccgatgatgaattagattctgttttaaatgttgtggatcgtgtgaaagatggcggttcaaaattagctgaatatggcgaaaaagttaaagacaatacagattctttaaaagaacgctttttcacatttattgaagatgcaatgaagtaa

SEQ ID NO: 1494 - DNA, 861 bp, Enterococcus faecalis
aaagtaggcgttccaatgaaaattaccgcatatgtcgctagtgcatttagtaaaaaccacgaaggtggcaacaaagcaggcgttgtttttatgacacagcccttaacgagaacccaaaaaatggccatcgccaaagaactaggatttgcagaaactgcttttatttcagactcaaagattgctgatttccgccttgaatattttacaccaaaagaagaagtcgacttatgtggccacgcgacaattggcgctttcaccattatgaagcacttaaataaattattgcaaacagcatatacaatcgaaacgaacagcggtttgctcgcaatcacggctaacggtgaacaactatttatggaacaaactgtcccaactttttatgatacgctcactttagaagaattgagcggctgctttgatttaaacgcagtggcaactgcttttcctatccagattgtgtcaacgggcctaaaagatattttggttcccattaaaaatgcgcaattattacaggatttacaaccaaactttgaaaaaattaagttacttagtcaaaagtatggagttattgggatgcatctttttgctttgtctgaagaaaatatcatttgtaggaattttgcacccctttatgatatcgatgaagaagccgctactggtacatcaaatggtgcgttagcttgttatctgcaccatcaccaaattttacaaaaaaccaattacacctttgcccaaggttataccttaaacgctccttcagaagtcttagtgcgtttgaacactacatcccaaaagacaattgatcaagttctagttggtggcagaggctattatgttgaaacaaaagaattatttttataa

SEQ ID NO: 1495 - DNA, 861 bp, Enterococcus faecalis
ggtgtgtctatgattattgaaaatttatctcagctttatcccaaaggctatttatcaaaaacaattggttccgaagccacctattcaattcctgttgacgaccaatttttcattgtgaataaagctttcttaagtattaaagaacagcatttgttggaagcgcttttcccaatttctgaaaacccaacaattactggtaaccatccttggttcagttacttatttcaacaggcaaaattacctgccgaagggacctttcgtatgttgcaaattcaaacgaatgtcacaaaagaattacaagctgaatggcaatttaatttaacaaagatgtttccagatacagttgattgtttcagtccaagtaataatatgtatattttagttgaagaacagtcaaaaaatacctttcaacaagaagaaattcaagggatctttttaacattagatacagactttgattgcactagtgctgtatttgttggcaatttttattcctctgaagacattctccggcgttgtttccatgaagaacaacgtattttttcagaagaacttaattcctctagtcggacgactgtttttagtttaactgatgttgccctccactattttaccaaggaagccatgagccaaaatgtacttgttgagtattatcgtcgtttattaaataaagacaccgatattcagccaatcatcagcgctttatggaaaaatcaaggcaatatcagctccactgcaaaagatttatttatgcatcgaaatactttacactatcggttggaaaagttttttgaacaaactggcttatctttaaaaaaaatggatgatttaatcttttgttatttgttattaagaaagtag

SEQ ID NO: 1496 - DNA, 522 bp, Enterococcus faecalis
ttgggaaaaaaagaaacaacgttaacacaagaagaaaaagaattttttatgcgagaagccattgcagaagcgaaaaaagcagaaggtttggctgaggtgcctattggagctgtaattgttcggcaaggggaaattattggccgcgggcataatctgagagaagcacggcaagaagcaacggcgcatgcagaaatgtatgcaatccaagaagcgtgtcgcgggatagaaaattggcgtctagaagaaacccaattatttgtaactttagagccttgtccaatgtgtagtggggcgatgcttttggcacgaattccagaagtttattatggcgcaactgatcctaaagcaggcactgctggcacattgatgaatttattagaagatgaacgcttcaatcatgtggcctatgtcgaagcaggcgttttagaagaagagtgtcgcttattgctagttcagttctttaaaaagttacgggcaaagaaaaaagaagagaaacttttaaaaaatcaaaagaaagactag

SEQ ID NO: 1497 - DNA, 396 bp, Enterococcus faecalis
aattggagaattaacatgggattatttgatggattattaggaaatgcaacacaaaataataatgaaacagctgaaaaagaattacgggatgttttaatccctaacgaaaaagtagatatggccttcactttagtaagagatttaattgtctttacagataaacgcttaattttagtcgataaacaaggaattacaggtaaaaaagttgattataaatcgattccctacaaatctatttcacgcttttctgttgaaactagtggacatttcgacctagatgcagaactaaagatatggatttcaagtactgagttaccttcagtaagtcttcaatttagaaaagataaagatattgttgctattcaacaagctttagcagctgctgtattatcttga

SEQ ID NO: 1498 - DNA, 1038 bp, Enterococcus faecalis
aatgcaactcgtggtgacgactgtcatcacttaggcgcggccgaactaattgttcaatggagcgacgaaaccattcaacgtgaatttttagctcatgctgcaactgatcgtattgaaaatgttcctcaatataaaattgatcaaaccgatgattggattgccaaaggcgcaagccgaattagcgtggtttcttctaatcctgatgcattagctggcgtggatgcacaacgtgtagcagctttccaagcggctaatgggaaagcattggtcaatctacgaaaagcaacgcaagccaacaaagtaagttggactgttgtagctgctgctagtgaaggctgggcagctaaagtctttccagaattagcaacaagtgaagaacaagttgatgcactttggaatgaaattttcaaaacaacacgaatttatgaagaaaacccagtcattgcttgggatatccatgataaaaaattacaagaaaaagcggctgaattaaacgaacaacaatttactgctttacactacacagctcctgggacagatttaacgattggtttgcctaaaaaccatttatgggaaggcgctggtagttataacgctcgtggggaagaattcatggctaatatgccaacagaagaagttttcaccgccccagatagtcgccgcgttgatggttatgtttctagtacaaaaccactaagttatgctggcacaatcatttcgggaatgaaatttacatttaaagatggaaaagttgttgacttctcagctgaacaaggcgaacaagcattgaaaaatctcttacctattgatgaacgtgccaaacacttacgagaagttgctttagtaccagacccttcaccaatttcacaatctggtttgattttttataatacattgtttgatgaaaatgcctctaatcatttagcctttggttcggcctatgccttcaacttacaatgtggcacggagatgagcgaagaagaattacctgaagctggtttaaatcgtaccccaacacatgtggactttatggtatga

SEQ ID NO: 1499 - DNA, 351 bp, Enterococcus faecalis
gtggggctacccggcgttggcacttatgggacattggtaaatgaaatgattgaaacaattggggcaaaaaatgttttggcaaatgaaaaaggctggttaccagtgacagaagaagcggccattgctgcaaaaccagaggtcattttaaccaatgttaactatatgaaagatcccgccaaagaaattttagctcgtaaaaactgggaaagcgttccagcagttcaaaacaaagaagttttcgaaatcgataacatgtctagctctttaccaaataaccacattaccaaagcattaaaacaaatggcaaaagctgtttatccagaggaatacaaggatttaaaagatgagtaa

SEQ ID NO: 1500 - DNA, 531 bp, Enterococcus faecalis
  misc_feature (391)..(406): Nucleotides 391 & 406 are "n" wherein "n" = any nucleotide.
aagatgagtaaaaaaacgtgtctcatactgatgctcttgattagtatgagcatgctctttttgggtattaaaattggaagtgttcagatttcgttaacggatttgcttcaaattttagtgaaaaagacggtttcagaagatgggattttagaaggaatcatctggaatgttcggttaccgcgtgtcgtgatggcctatctcgtgggcgcaggcttagcagtaagtggcacggtgatgcaatcgctcttagataatcctttagcttcttcgtatactttgggcgtatcagcgggagcatccttaggtgctgcgttaatcatggtaactggagtaactgcttcgatcttaggggcatttttattgcctttaactggttttatctttggcttancaacggtctttttanttttgttatttaccccaacaatggatagtcaaatgtccaatcaaacagttgttttagtaggaatgattatgaccctgtctgtccgtgccaatttgacgtggattacagcactttccccagattaa

SEQ ID NO: 1501 - DNA, 240 bp, Enterococcus faecalis
  misc_feature (29)..(44): Nucleotides 29 & 44 are "n" wherein "n" = any nucleotide.
ctatccattgttggggtaaataacaaaantaaaaagaccgttgntaagccaaagataaaaccagttaaaggcaataaaaatgcccctaagatcgaagcagttactccagttaccatgattaacgcagcacctaaggatgctcccgctgatacgcccaaagtatacgaagaagctaaaggattatctaagagcgattgcatcaccgtgccacttactgctaagcctgcgcccacgagatag

SEQ ID NO: 1502 - DNA, 204 bp, Enterococcus faecalis
ctccgtttgaagacaacaaggccttctgcaggtggcaatgcttcttcaacaaatagtgcatcaggcaaacgccatacagttaaaagcggtgattcactttggggcttatcaatgcaatacggaatcagcatccaaaaaatcaaacaattaaatggcttaagcggggatacaatttatattggtcaaactttaaaagttggttaa

SEQ ID NO: 1503 - DNA, 2475 bp, Enterococcus faecalis
caatggctgcaggtggcaaattttaagaatgaaaaattttatattactaggaggaataacatgagctacaatcacaaagagattgagaaaaaatggcaaaaatattgggctaagaacaattgtttcaatacattggacgacccaaataaagaaaaattttatgcactagatatgtttccctatccatctggacaaggcttacacgtaggtcacccggaaggctatacagcaaccgatattctttcacgtatgaaacgtgcgcaaggctataatgtgttgcatccaatgggctgggatgcgtttggtttgccagcagagcaatatgcgttagatacaggaaatgacccagctgaatttactaagaaaaatatcgaaacattccgtcgccaaattaattcactaggattcagctatgattggaatcgtgaaattaataccactgatcctgaatattacaaatggacacaatggatatttacaaaattatatgaaaaagggttagcttatgaagcagaagttgcggttaactgggtccctgaattaggaactgttatttcaaatgaagaagtcattgatggaaaaagtgaacgtggcggttatgatgtggttcgccgaccaatgcgtcaatggatgctgaaaattactgcttatgcagatcgcttattagaagatttagagcttgttgattggccagagagtattaaagatatgcaacgaaattggattggacgttctgaaggagccaatgtgacctttaaagtcgctggcacagaagaaagtttcacggtgtttacaacccgtcctgataccttgtttggtgcaacctatactgttctagctcctgaactagaactagtgaaaaaaattacgacacctgaacaaacagcagctgtagaagcatatattgaagaaacctcaaaaaaatctgatttaaatagaacggatttagcaaaagaaaaaacaggtgttttcacaggtgcgtatgctataaatccagtcaatggccaagaaattccaatttggattggcgattatgttttagcaagctatggcacaggcgcaatcatggcggtcccagcacatgatgaacgggattacgaatttgcgaaaacatttggcattgatatcctaccagtaatcgcaggtggcgacattacaacagaagcctatacaggggatggaccgcatatcaattctgatttcttaaatggattaaacaaagcaaaagccatcgctaaaatgaatgagtggctagaagaaaatcacgtagggaaaaaagaagtatcttatcgtttacgtgactggttattctctcgtcaacgctactggggtgaaccaattcctgtgatccattgggaagatggaacaaccacaacggttcctgaatctgagttacctctacgtttaccagtaacatcggatattcgcccaagtggaactggggaatcgccattagcaaacattgatgaatgggtcaatgtcgtcgaccctgaaactggcatgaagggaaaacgtgaaacgaatactatgccacaatgggctggaagctcttggtattacttacgattcattgatcctcataataaaaatgaaattgctgattttgaaaaattaaaacgttggttaccagttgatatctatattggtggtgccgaacatgcggtgctgcatttactttatgctcgtttttggcataaattcttatatgatattggtgtggttcctaccaaagaacctttccaaaaattatacaaccaaggtatgattttaggagaaaacaacgaaaaaatgtctaaatcacgtggcaatgttgtaaatcccgatgatgtggtggctaaatatggtgcggatacgttacgtctttatgaaatgttcatgggcccattagatgcttccattgcttggaatgaaaatggattagaaggaagtcgtaaattcttagatcgcgtttggcgtctgattgttgatgaagaaggcaaaatgcgtgaccgaattaccacaattaatgatggccgtttaacgaaagtttatcatcaaacggttaaaaaagtgacagaagatatggcaaacttgcactttaatacagcgatttctcaattaatggtttttgtgaatgaagccaataaagtggatgccttaccttatgaatatgtggaaggatttgtccaattacttgcgccaatcgcgccacatattggtgaagaactatggcaaattttaggtaacgaggaaagtttaacttatgtcccttggccaacctatgatgaaacggccttagtagaagatgaagtggaagtagttttccaagtgaacggaaaattacgtggcaaacaaaatgtcgctcgtgggttaagcaaagaagaattagaacaaattgcaatgaaccatgaagctgttaaagaatttattgaaggaaaaacagtgcgcaaagtgattgctgttccagataaattagtaaatattgttgcaaattaa

SEQ ID NO: 1504 - DNA, 294 bp, Enterococcus faecalis
cagttgcctaaaaaaaagttaacctttttgatttatcttagtgatagttcattaaaggaggaactgaagttgaaaaaatatcgtattagcttatttcttggcttgattagtcttttattatttatgatctctattttagttggatcaacattatctagcgatggacttttaaaagaacccgcctttttctgtacgccgcttggttacttttttctcttcatcgccttgctttcagtcataacaatcacatgtaaagaacatatgaatcaaaaaggtaaaacaaaacaaccttaa

SEQ ID NO: 1505 - DNA, 456 bp, Enterococcus faecalis
aaggagaaaaaaatgcctactaataaaaaagaaggaatgctttttactacgttaatgtgctttctgatggttttcggaatgagcacctataatttattattgcatggagaattttcattgtacgccttatcaaaaggtttgcttcctggatttatcgttgcttttattttagatgttttcatcgttggtgtcttagctaagaaaatcgctttttctttaccctttaataaagaaaaacggctattacttattctgaccatttcgagtctcatgattatcagcatggtgacttgtatgtctttatttggcttattaatggaaggccagacgttgtcactaagtgcgtatttccaagcttggggcctgaactttattgttgcccttccttatcaattgctgattgtcggtcccttttcacgtatgatcttaaccaattaccaacaacgacaaacttag

SEQ ID NO: 1506 - DNA, 330 bp, Enterococcus faecalis
gtgctcattccgaaaaccatcagaaagcacattaacgtagtaaaaagcattccttcttttttattagtaggcatttttttctcctttcatttattgagagtaatgattgttctaggcagaaaaggacaaattctctcgacttttactagtgtagcaaaaataaaagttcttcataagttagaatttgctaagaatttgattcaaataaaaaggtgtactaagtcagcagtacacctttttattcgttatttagtttatttttgtgttatttgtaacgtcctctccaaaccatttttgagaaattttactaagggtgccatcttttcgtaa

SEQ ID NO: 1507 - DNA, 582 bp, Enterococcus faecalis
ttgggtctatggaaagtaaacagaattacaaaatcacaaccattggatcttatttgggaacgggctacactaacaacgagcgagcgggccgaaaaagttcaattcacacaaccttacatgacgaacgaccaagtacttgtttctttaaaagaaaaaaacattgcaacagcgagcgacatgcaaggcaaaattttaggggttcaaaacggctcttctggctatgatggcttcgaaagtcagcctgacgttttgaaaaaatttgttaaagaccaaacacctattttatatgacggctttaatgaagctttcttagatttaaaatctggtcgaattgacggactcctaatcgatcgcgtttacgccaactactatctttcccacgaagataatttaaaaaactatactatttctcatgtaggctatgacaatgaagattttgctgtgggcgtccgcaaatcagacaatcaattagtccaaaaaatcaatactgcctttgaaacgttacgaaaagatggcacccttagtaaaatttctcaaaaatggtttggagaggacgttacaaataacacaaaaataaactaa

SEQ ID NO: 1508 - DNA, 216 bp, Enterococcus faecalis
  misc_feature (84)..(207): Nucleotides 84-86, 134, 154, 167, 169, 184-185, 199 & 207 are "n" wherein "n" = any nucleotide. 1               5
ttctgtttactttccatagacccaatcatatcggtgtggaagttcaaccggaaatgccataaacgtttaaaaacccgctttggnnntaagttcgaacatcaaagcccagacaattttgtctctgatttatgggngcaaaacccactgggcatcnagaagaggtcganancgccagggaaatggnnaaaagaccccggancctggcgngtgagagga

SEQ ID NO: 1509 - DNA, 1071 bp, Enterococcus faecalis
ttttatgtggcatgtccctattctcttttaaagcaccgcgaagggaaaaaatctttaagtgctttgtctggtgcagcttgtgccacctttctaccagaggcgtttttgcggtatgcagtaggcggcgtttttcatttagattatgtgtcgcaaattggtgaaactatgggtagtctaggtggtttagcagctggagctcttgtgccgcttgctttcgggattagtccagttttttcaattattttaggtctgtcattgattaaagtcagcttgttaccagcctttattaccgcgtatcttttatcttttgttgttgagcagatgcaaaaacgtattccagaagggattgacttattagtcgttattttagtcattccagtcgctgcttcgttagttgctggttttattcaacccgttgtattaggtgtcctagaagttattgggggcacgattttaagtgcagtagatggcaatccatatgtgatgggcgcaattttaggtgctattatcccgattgttggtatgacaccgttaagttcaatggttttaactgccttgattggtttgactggtgtaccaatggctgtcggtgcgttgacttgttacggcagttccattgtcaatgcggcgctatttaaaaagttaaaactaggcacagcttcaaccccgttagctgtggcaattgagccattaacacaagtcgatatcatcagttccaatccaattcctatttacgcaacgaatttattttcaggaatggttagtggcattgtagtgaccttctttggcttaaaagtacctgtgacaggaatggcaacaccgtgggctggtttacttgtgacattaggtaacaatgccattcaaacgactttactagcagtagcgattatcacagtggtcagtctgatgtttggatttttaggtgcgctggtctttaaacgttacagaattgaagcggtggataatacaccagaatttgaaggaacgacggaagtaaccagtgaaaaagaaaaagaagcagtaaaaaccaaaggaggagttacgtatgaacacagctatggccatcaataa

SEQ ID NO: 1510 - DNA, 729 bp, Enterococcus faecalis
aaaccaaaggaggagttacgtatgaacacagctatggccatcaataaacctaaaaaagtgaacaaagtaatgaactacaaaagttgttttgacattatcggtcctattatgattggtccttctagttcgcatacagctggggccttagcgattggcttagcggcaagaaagttattcggcggaacgccagaaaaaattgtgattaaatactatgaatcttttgcagacacgcataaaggacatgggactgattttgcaattattggcggaattcttggactagcagcagatgatgccaacgtaacacaatccattgaacttgcggaagaacaaggaattgagattcaatttttagaaatgagtgaagaaagtccagtgaagcatgctaatacagcatgtgtgacactcagtgatgcaacgcacgaaattcatttaacaggaatttctgtaggtggcggcactatcgaggtgaaatacattgaattagacggtttcaatgtccaactacatggtcctttacctattttgttagtcattaatcaagaagagcaggcgatgcaagcttttaaagatacgttacaaaaaaataatattcaagtgaatgcggtgtctcgttatgtggaagggaatcaaattttattcatctttgacttagattcggcaccaatttcctcggtgaaagaacaactgttttcactagatgacacatcgaaaataatcttattatga

SEQ ID NO: 1511 - DNA, 897 bp, Enterococcus faecalis
catatgtatctttcgattgaagaatttatcgataaagctgaaaaaacaggaaaaaaaatctctgatttaatgattgagcaagaaatggaacgtagccaaaaaagctatgaagaaatttggacacagatgggtcaaaatttggatgtcatggatgctgctgtcaaacgctcgcaagaaggagcaggcgttttttctcctactgggttaacgggcggtgatgcggctcgtttaaaaaaataccgcgcagctggcaaaacgttatcaggtgatttaatgatgtctgcagttcaagccgcactaggtactaatgaagtcaatgcagcaatgggcgttgtttgcgcaacgccaaccgctggtgcaagtggcaccttaccaggggttttaacagcgattaaaaataccttgaatttaacgcgtgatcaacaaattcgtttcttgtttaccagttctttatttggaatggtcacagccaacaatgcgatgattgctggtgctgttggtggatgtcaagccgaagtaggcagtgcttcagcgatggccgccgctgcagctgttgaagcggctggcggaacaccacgccaatcttctgaagcttttgctatggctttagggaatttattaggtttagtttgtgacccagtggctgggttagtcgaaattccttgtgtcaaacgaaatacagtaggtgcaggcaatgcgttaatcgctgcagatatggctttagctggaattgtaaataaaataccagcagatgaagtggtggaagccatgaataaagtcggccgtcaattaccacgagaattgagagaaacgggtttaggtggcttagctggcacagcgactggccaacgaatgaagaatgaaatttttgaaaaagtaaaattcaccattgtttaa

SEQ ID NO: 1512 - DNA, 1323 bp, Enterococcus faecalis
aaaagtaaaattcaccattgtttaaaatttaatcatgaagagggaaataagatgctggatatgaaaaaaattcgccaaaatgtagaagtggtacagaaaaagttaaaaacacgtggtgtggacgaggaagttttattacgctttttggctttagatgaaggacggagagcgttacttgttaaagttgaagaactgaaaaaacaccgtaatcaggtgtcaggagaaattgcacaattaaagcgtgcacaaaaagatgcttcacaacaattgctaaatatgcaagaagttagcgagcaaattaaagttttagatcaagaagttgttcatttgcaagaacaatgcacagccattgcagaacgtttgcctaacttacctcatgagagcgtacctgttggcgcagacgaagccgccaacgtagaagttcggcggtggagtacgccgaaaactttttcatttgaaccaaaaccacattgggaaatcggtgaagccttaggaattttagattttgaaagaggcgcgaaagtatctggtagccgttttctttattacaaaggcttaggggctcgtttagaacgagcggtctataattttatgttagatcaacatgttaatgaacatggttataccgaagtgattcctccttatttggtcaatagcaaagcaatgtttggcaccggtcagtttcctaagttcaaagaagatgttttccaagttgcagaaagtgatttgacgctgatccccacagcggaagtcccgttaactaactactataataatgaaattttagatgcgcaagagttaccgatttattttactgctttaagtccttcttttcgctcggaagcgggtagtgcaggtcgtgatacccgaggattaattcgtttacaccagtttcataaagtagaaatggttaaatttagtgatgcagaacactcctatgaagaattagaaaaaatgaccaacaatgctggagacattttagaaaaattgggcctcccttatcgagtgattactctttcgacaggtgacatgggcttctcggcagcgaaaacctatgatttagaagtttggattccggcacagaaaacgtatcgagaaattagttcttgttcaaactgtgaagacttccaagcacgtcgggcgttgattcgttatcgtgataaaacgggtcatgttcaatatgcccatactcttaatgggtcaggacttgctgttggtcgaacagtggctgccattttggaaaattatcaaaatgaagatggcaccgtaacgattccagaagttctacgtccttatatgggcggtttaacgaaaatagattaa

SEQ ID NO: 1513 - DNA, 978 bp, Enterococcus faecalis
gtttttcttttgaacaccgtcttttttttgtataataatcaaaaagcaaagaaagggtttcttatgactgaacaattcatactcacttcaaacgatcaacaaactcagctcaatgtacgtcattggccctgtccttcacccaaagccgtagttcaattgattcacggcatggcagagcatatccaacgttatgatgaatttgctcgttttttaaatcaattaggatttaccgtaattggtcatgatcatctaggtcatggcgaatctgtacaaccaaacgcaccgatctatggtttttttggagaacaagggcctgaaaatgtcgttacagatattcatcaagtgaaacaatgggctgtgaatcgatatccacaattgccctattttatgatgggtcacagcatggggtctttcgccttgcgcaactatctgcaagactatcctgtgactgtgcaaggagtcattttcatgggcactggaacaagtccgttacctttaaccgcagcattgccttttattaaaaaaatggccgagaaacagccgaaaaaaccagctccgttcattgataagctggcatttggttcttttagcaaaaaatttcctgaagcaagttcctttaattggctttctaaaaatcaagccaatgtggctgactatgaaaatgacccattaatgggcttcgtatttaccaacaatggttttgctacccttttttcgcttgttaaacgagccaatcaaaggaattggtaccaagcgatcccaaaagaattacctattttaatcattagtggcgctgaagacccagttggtgatttcagcaaggggccagcgaaaattcaaaagcaattaaagcatgcaggttttcagcacgtgacgttacgactatttcccacattgcgtcatgaaattttattaaaaacggaaaaagctacagtttttcaagaaattgggcattggttaacggatttaacgaattaa

SEQ ID NO: 1514 - DNA, 492 bp, Enterococcus faecalis
gaactttcgtggtggacactggcaaaatgccaaacgatgattaagcgagtggtcacagaaaatgaaatccatacacaaagtgaattactagcattattggaaaaagaaaatattcacaccacacaagcaactatttctcgtgacattcgtgagctgaatttaaacaaagtagacaatggtcaaggagaagcctattatcgtatcttgaataattctgcccttcgtccaaaatataaaacagatgaagaacgtcttgttgacattattattgaaactggtgtttctttaacacaaatagagttcacaaatcttttaaccgtcttacctggcaacgggcaagccattggggttttaattgatcgcatacgtatccacaaccctcatatcttgggctgcatcgctggggatgataccatcttaattctttcaaaaaataaagaagatgcccttgaagttaacaactatttccagcagtatttgtaccacccataa

SEQ ID NO: 1515 - DNA, 708 bp, Enterococcus faecalis
cggccccaggggaacacattgcgggctgctcatgaaattaataaatggtttcctgaatacaaaaaatttaactttgtgaataaattagaccttggtatatcatcatttggaaaaccgttttttttagacacaaatattttatttttattactcttttttatattattctttctatcttataagaaatgtcagaactattatatacgtatattaaccgcattgccgctttttctaaatttgattacttttttcggaaacacaatgggacaaagttttacttatgtcaatggaaataaaagatcaatgatttggaatagcaacaatctggggaatatctttacaagatttggaactaaactatcaatttatcaccctggaacttgggtagctacttttatagttttgggattattattatgtttaattataggaatttatataagttttgatgataaaaaatctgctgtttttttagtagtgttaatgatgatgggtttttgttcaagattaattatgggtttttctcctactgtttgggcttcaggtatgcgaacgtactatatactttttattgtcgtcgctataatagtgttaaagggaattaacgagatgaagaaaaacatgagcttgcaaaagaaagaactattatcatttagtttaactttattaggtatctgcaccttagtgttaacggtgctgaatagataa

SEQ ID NO: 1516 - DNA, 237 bp, Enterococcus faecalis
agaaaaagaagcgcaagcattagcaaaaattgcgacgttttgaacaaattggatgcaagtttagaagagttgagctcgctagatgaggatacaaaaaaacatagtatgaagaaatggattgttgaaaaaaaagccattcatgagattaaaaaaattgcacacgaagctggtaagtatgacaagtatgatgaaaaagaattagaaaaagaaatggatctgttggaaaagtttatgtaa

SEQ ID NO: 1517 - DNA, 1065 bp, Enterococcus faecalis
gtgactttttatcaattattgcagttagatccatttattttaaaacaaaaaattcatcaagcggacactaaaaaacagcggagatatttttggcgcgccttgttaataagggatattttattagtttcgtttgcgattttatgggtgtcgacgattacttttttctttggaaaagctgtagcgcctttttcaattgtattattttgtttgctgttgagtatccgtttcgtctcatatggctacagggaaaaacaggccttgcttagtttaggaatcgtgttaacaattctaggtgttagtccactaatttcactgatttctgtatcatttttacaatggggtcttcattttatctgcttgctggcattgtttttcttaactggtaaaaaccctaaaatgggtaatccgggcttgtatacgttctcctacttatatttagttggcacggttcactatcaatcgtttcagcaattagaacaaactttctttgtattagtgtttgcctatttacttttagcttttgtttatcatgtgaaacataaaaagttggatcaagagattacttttatacagatggttacagaaaatggtttttttaatcaaagaaatatttggtttggttattacgctttaggcattagcttattactttttataggaacgcaccttcagattgaccgctttatgtgggcaacatttgctagttcgtcattattttctgggtatgagacgtttaaattgtctgaacgagcaaaagaacgaataataggggtcgttattggttctctagtatcggctatcttgttattttatataccaacgaacctacttggtattttaggaggactttgtttaggcttatgcacatcttataaaagtaaaacgatttttaattgtgttggtgctatcatggcagcttctatgatatttgggctagaaacaagtctttacttaagaattttgttaaatatgttagggctagcttacggtttgctttatcattttgtctttgtaaaaactatgtcctattgcaatcgcaaggagtggctgaaattgtctgaataa

SEQ ID NO: 1518 - DNA, 1197 bp, Enterococcus faecalis
aggcggccgctctcgctatctaatccagtttatgccgttttggtacttgttatcagcgagtggttggctgggattgagagagattcgaagatacaaaaaaatagtaaaatagaaaagaggattgagttaaaaatgaaaaaaagtttgctggggttgattgtttttttatccttactgacccttacttcttgcagaaataaagtgaccacaaaagagctgatggcaaacgagtgggccgtaaactccaacgttgatgaagtagtaatgattgtatcattcagcgaagataccgctactttcaaaatcaatacagatgaacacacatcaactgcaaaaaatgagttggaaaaagcaggcgaagaattaggtaaacaaattgcaaataaaatagaatacaaagtcaaataccatctaaaaaacaatcaaattcgttgggaaaatgaaggaaaagaagtagcttacaagataaaaaaagaaaagcaagatctacttttcactcctactaagacaaacaattctgataaccaaacaaaactagttttgaaaccttacacaaagaaaagtattgattcttctactcaaaaagataaaacggaagaaaccagctctaattatcaaaacgtctcatctgaaacaaaccaatctacctcttcatctactactaaagaaccgctaccacaagttagcttagctgattttataggcggttggggtattcctcaaagtgataacttattttttataaatgctgacggaacactcactagcataactcaatcgaatgttcctcttcaaaatgtaagtttttctgtggatgagaatggtaatcaaataatgacgtttcttttgaataatacgccccgaacagtaacgaaaaataatgatggtactttaactgttaatggacaaatatacacttatctaggtaatattacgttggaacaattaattgaaagaaataatcaaactcaacaagtttttgaacaatctgaacagcaaccaccacaaaactctgattctcgtgaacaaatacaaaattctaaatcagaccaacctatatacgatacggtacgaagtggtgaaggtgggcgacagttagccgaaagaaatggtttaaccttagaagaattattagcattaaatccaggcattgaaacttctgttttttatcctggtcagtcattacgaattaaatag

SEQ ID NO: 1519 - DNA, 1605 bp, Enterococcus faecalis
aatctttatgataaaataagaactagtctagctaaaaaaatggaaggagaaaatatggctacttttaaacggattctgaatctagaaaattatatttttactttttttattttatttgtcttttacggcgcaattaactctccctattcgctggtaaaaattctttgggaaaagcctaagcacttgcttgttttacttcctctattaattattctattgttgattatttataaaaacaaaaaatttctttacactaagattcaagcgctctggcacttaataaaaacccatgatcgtgtggttattattggtagtttgatcagtttatttttactacaacttttactcctgacgcagattactgtgccgattggctgggatgtttttgacaactttcatagtattaccactgaaaataaggattattcaaaaatcgtactttctttaaaccccaataacgaatttttctttttcatgatgtattaccttaataaatttttgcgtttcattgatgtaacagggagctggagcaatacttggtttagttggcaagtggttaattgcttgtttattaatagcagtttatttctcttttatcatgcctctaagcgtgtctttaatccattaacggccttcgttgcttacagtttattttttctttctttcggattgtctccatggttactcacgccttatacagatacggccgtcttattgttcatcaacctagtcttttttgcatatagcctttttgaccaagtttcccctcccttcgtaaaatattgtttattactgtttattgggattggcctagcttggtgttttttaatgaaaccttcgtctattatcttttttattgcatttagttgtatcaaagtgctgcaacttcttttagtaaatcggaacaaacagtctatcgtaaaattaaccgtggttgctctctttttactgactggtttcgccagcgcatattatagttttcaattttttgtggaaaaacaaacgattacggaaatcgataaagaacaagccaaaccttggacactttttgtaatgatgggtttgactggaactggcggttacaatgatgcagatacacaagcagtaaatcagttgcctacacaagaagccaaaaaagcttatactataaaaatgattcaagaccgtttaaaaaataaaggattcttcggttatctccgttttctggctcaaaaaaatcgtcataatactgccaatggtgattttgactggggttgggatggcggtgatttaatcccagaaacaccttctaaaaatcgttggcaagaacacttgcggtcactgtattatccgcaaaatcaaaaaagtaactatctacgaatttatatgcattttttctatttactcacattactaggtctattgttcagtatccctctaaaagattcaaaaaataactacgcgattttaaaattagctttcattggagctattctgtatttattgctctttgaaggcggccgctctcgctatctaatccagtttatgccgttttggtacttgttatcagcgagtggttggctgggattgagagagattcgaagatacaaaaaaatagtaaaatag

SEQ ID NO: 1520 - DNA, 594 bp, Enterococcus faecalis
atacaaaggggtgtttttatggttaaaattgaggaaaaaggtaaagtaacatttggacaagcttttaaagattattttcgtggatatgttgattttaaaggtcggaccacacgtgctggttattggtggatgacattggtattaagcattttagcacttattttttatattgccattgtcggcaaagctgtgtcagcaattttagcagctgaatattttgaaacctatgattttgggaacttattaccgttgatgctttttgcacttgttttatggttagctttattattaccaacgtgggcaatgtgtgtccgtcgttatcgtgatgctgggatgacaggttggggcgtgcttgttttatatctactttctattgcctgtagctatacacaagttttctctgttatgtcaacactgaaatatgatgttcaaacagatactgtgataacaggtggcagtcccgtcttcttatttttcactcttgtgattagtctgtttttcttcttactaacagtcttaccgacagataaactaacaacaactagccaaaatagcgtcttacgcttcttcttccgttacaaagaagtgaagtaa

SEQ ID NO: 1521 - DNA, 618 bp, Enterococcus faecalis
atgaaaatcagtattagacatcgctacatagcaaaaattccagcattagaagtgacaacagaagagcaaaaaaacgaagcattacctttaattgtttactatcatggttggcaatcagctaaagaattatctttaacacaagcaagaaaattagcacacgaggggtttcgggtcattttaccagatgccatgaaccatggagaaagaaaaacaggacctatttccacgattccttcgattacattttggagtagcattcaatataatttaattgaatttccagtaattatccatcattttcataaattagggttgattaaagaaaattggattggcgtgggtggtgtatccatgggcggtattactaccagcgctcttatgacccaacatcctgagattcaagctgctgcttgcttaatgggaacaccctatccggcgcgctatattcagcgagtgattcaacgggcgaaagaatttgctatttttgtacctaaagacttgccactgttgctaagttgggtgcatcaatacgatttatcacaaacgccagaaagactacaagaacgaccgatgctgttttggcatggaacggaagactcttccctacgggattgcgac

SEQ ID NO: 1522 - DNA, 549 bp, Enterococcus faecalis
tccatattaaatatttacaagataaacaaagtggtctatggtatcacggttggacttttgagggaaatcatggactatgcggaagcactgtgggcaagaggaaactgctggattacgattgctattccagaaattattgaaatcttagagttgccaaaaggagatagtttacgggaatttttattgagtaccctcaatgcgcaagtggcagctttagcgaaataccaagatgaatctggtttatggcatacattaattaatgattcaaattcgtatttagaatcttctgctacagcgggattcgcttatgggattttaaaagcggttcataaaaaatatatttcttctgaatatgaagaagtggcaaacaaagcaattgctggcttactaaatgagattgatgaaacgggagaagtacaacatgtgtcagttggtacaggaatgggtgataatttagatttttatcgcacaattggaatgacagcgatgccttatggtcaatcattaacaatcctatgtttgactgaattgcttgtttcttattgctag

SEQ ID NO: 1523 - DNA, 705 bp, Enterococcus faecalis
ttgccgatgattattaaacaggaacaattcataccaaaagatacagtagaaacaacgattgacttattaattagaaatttaacaacgattaaagataacacaggtgaatttctgttagattttgatggtttaaaagttgatgacaaaagttggacgatttggaactggccgcaaggcgttgggttgtatggtatatataagaattatcgaaatactaaaagtgaaaaagctttacaagtagttaacgactggtttgaaggtcggatgcaagaaggcgcgccgcctaagaatgtgaatacgatggttccgcttttaacaatggcttatctatatgaagacactaaagactctaaatatataccttacttagagcaatgggcggaatgggtgatggaagaaatgccccgaacgaatgaaggtggcttgcaacatgcgacatatggaccagaaaataaaaatcaattatgggatgatacgttaatgatgactgtcttacctttggcaaaaattggtaagttgttgaatcgactcgattatttggaagaagcaaagcatcaatttttaatccatattaaatatttacaagataaacaaagtggtctatggtatcacggttggacttttgagggaaatcatggactatgcggaagcactgtgggcaagaggaaactgctggattacgattgctattccagaaattattga

SEQ ID NO: 1524 - DNA, 810 bp, Enterococcus faecalis
accaaagaaagaggagaaaacatggaatttaaaatgaatgattttcaattagatggaaaagtagcgttaattacaggtgctgtttatgggattggctttgagattgcgaaatccctagctgaagcaggagcaacaattgtttttaataacttatctcctgaatcagttgaacaaggcttggaaaattatcgggccgcagggattgaagcacgtggttatgtgtgtgatgtcactgatgaagagcaagttcaagcgatggttgctcagattaaagaagaagtcggctctattgatattttagtcaataatgcgggaattattaaacgaattccaatggtggatatgtcagcagaagagttccgtcaagtgattgatgttgacttgaatgcgccatttattatggcaaaagcggttattccagatatgattgaaaagggtcatggcaaaattatcaatatctgttcaatgatgagtgaactaggtcgtgaaacagttagtgcgtacgcggcagcaaaaggcggactaaaaatgttaacgaaaaatattgcttctgaatatggacaatataatattcaatgtaatgggattggacctggctacattgaaacgccacagacggcgccattaagagaaccagggcatccatttaacgaattcatcttgggacgaacacctgctaatcgttggggcacaccagcagacttagctggcccagcagttttcttagcatctaacgcttctgactttgttaacggacatatcttatatgtcgatggtggaattttagcttatattggaaaacaaccataa

SEQ ID NO: 1525 - DNA, 852 bp, Enterococcus faecalis
gagattttagttatgcaaaatatggaaacacgttatacacatagtccggcggatatccgtcactattcaacagaacaattgagagatgaatttttagtagagaaagtttttattccaggtgcaatcagcttaacctacacacataatgatcggatgatttttggtggtgtgacaccgaccacagaagaattagaaattattttggacaaagaattaggagttgattatttcttagaacgtcgtgaactaggagttattaatattgggggaccaggctttattgaaattgatggcgccaaagaaacaatgaaaaaacaagatggctattatattgggaaagaaacaaaacatgttcgtttttcttcagaaaaccctgataatccagcgaaattttacattagttgtgtgccagcacatcataaatatcccaacgtaaaaattagtattgatgaaattaccccaatggaaacgggtgatccattaacattgaaccaacgtaaaatttaccaatacattcatccgaacgtttgtgaaagttgccagttacaaatgggctacaccattttagaaccaggtagcgcttggaatacaatgccttgtcatacacatgaacgtcgtatggaagcgtatgtttattttgatatggaagaagatacgcggattttccacatgatgggtaaaccagacgaaacgaaacatttagtaatgagtaatgaacaagcagctatttcaccaagctggtcaattcattctggggttggtacaagtaattattcctttatttgggccatgtgcggagaaaatattacgtacacagacatggatatggttgcaatggatcaattaaaataa

SEQ ID NO: 1526 - DNA, 1098 bp, Enterococcus faecalis
cgccagcagcaactggggattttgaaaaagttcgtgaggttgcccaagcctatatggaaaaattccaagcaatcaaaggggtgtaggcacatggggaaagtcgtaacattgggagaaatcatgttgcgtttgtctacgcctgtcggaatacgcgtagcacaaacagaaaatttcgctgtacattacggcggtggtgaagcgaatgtagcgatttcgttagcgaactatggccaccaagtgacttttgctagtaaagtgcccgataattcattaggagaagccgccaaaaagcatttaagtcgttatggggtttcaacggaatttgtacgaactggcggaacacgtctaggaacgtattacttggaaactggtacaggagaacgagcagccagtgttgtctatgatcgcgcctattcaagctttgctcaaatcgaagaaatggaatgggacttacatgagctgttttcaggagtagagatctttcatatttcagggattacagcggcgttatcaaaaaattggcaaagtatgacggttgcgttagttaaagcagcgaagcaagcagggtgccaagtaagttttgacattaattatcgagggaaactttggtcccagaaagaagcgagcgtggcattgaaggccattcttccatttgttgatatttgttcagctggggtattagatgctcgttatttactggagattccagaaccagaggaagaacttgaagacgcattaacgtggtactaccgaaaaatgcaagaacgttatcccaacattcaagtattttattcaaccaaacgtcaagttcattcagcgacagataatgaattaatcggaacgctatggtacaaaggtgcgtattatacgtccaaatgtcatcgattacaaccgattgttgaccgtgtcggtgccggtgatgcgtttgctggtggggttttacatggcatattagctgcctatgatccacaaacctgcattgattttgcgacagcggctagtgcgttaaaacatactgtccatggtgattgtaatcaatttagtcaaaaagaagtccttgcttttttggcaacgggctcaggaaaaataaatagatag

SEQ ID NO: 1527 - DNA, 657 bp, Enterococcus faecalis
gggagtctgttgaagcgagtatcaattttacaaaaattagaaaatgctggcgtgattgctgtggttcgcggaaagacaaaagaggaagcgctaaaagctagtcaagccattgtagcaggcggtatgcgggggattgagttaacctttactgttcctcaagcaacagaagtgattcaggaattagttgcgttataccaagagaatcctgacgtagtcattggtgcggggacagttttggatgctacgactgctcgtttagctattgtagcaggggctgaatatattgtgagtccaagcttcgatgaagaaaccgctaaaatttgcaatttatatcaagttccttacttgccaggctgtatgaccatcacagaaatgaaagaagcactgaaaagcggagcagatattattaaactatttccgggaagtgtttatggaccgagtgttatttcagcatttaaagcgccattgcctcagttaaatattatgccaacgggtggtgtcagtttggaaaatatggccgagtggttcgctgcaggtgtgacggccgtcggtgttggtggcaatctgttagcgccagcagcaactggggattttgaaaaagttcgtgaggttgcccaagcctatatggaaaaattccaagcaatcaaaggggtgtag

SEQ ID NO: 1528 - DNA, 294 bp, Enterococcus faecalis
cttttagcgcttcctcttttgtctttccgcgaaccacagcaatcacgccagcattttctaatttttgtaaaattgatactcgcttcaacagactccctcatttcttatttagaaatatatatttattatagagaaattcacaacttcattatacagataaaaaaagaaaatgcaaacgtttttacaaaaataaaaaaagaaagacaaacaaaaatcccaatcgacttttgtttgtctttctatttctactataatttcgcttcaatcgctgcttttgttgccaaaagggcttga

SEQ ID NO: 1529 - DNA, 780 bp, Enterococcus faecalis
tttcttatatggaaaaggagggtttcgatgaaagaaacaaaaccttacggaacagtcttgttaaaagcggctaaaatcatggactgtctaagtttacaacccgatcaaaccttacaggaaattgcaaagaataccgaaatgacggcatcaacggcaatcaaaattttagaaaccttaacattaattggctatgttcaaaaagacacgaacaagacgtaccgcttaggaacaaaattgattcgctatgcgaatcaaagtgtggagcaaatcgatttagctgaaattgcggtaccttatttagaaaaccttcaaaatacggtcgatgaaaccattcatttagggattttaaataataatgaaattctgtatatcaataaattagaaccgaaaaatcaaacgattcgcatgtcctcgaaagtgggaattactcgacctttgtataattcggccatgggtaaagccgttttagcagaattttcggaagaacaagtgcaacaatatttagacacgcagacattaattccctataccgaaaatacgattaccaatcccttgcgtttgaaaaaagaattaaaacaagtgcaacaaacgggggttgcttacgatgatgaagaaattgaacaagatattttctgtagcggagtatctttaatgaaagatggcgaaattgcgggtgcttttagtgtaagcatgccgaaatatcgtttgacagaggaaaataaaacgacgattaatcaagcccttttggcaacaaaagcagcgattgaagcgaaattatag

SEQ ID NO: 1530 - DNA, 198 bp, Enterococcus faecalis
gcggatgacgagcaaatctttagtcaaatgtttcatggtatctcagaagtttgtcccaattacgtagcgattgatttgggcgatttcgatgaagaacaaaaattatatgttgtatttaatgaaaccacagaagtcagtgagtatcttttaattcctaaggatgcagatgtttctgatgagttaaagaaaagaaaataa

SEQ ID NO: 1531 - DNA, 546 bp, Enterococcus faecalis
cttatggaaatgataaaaaccctctatgtcaccggttatcgcagctttgaattggggatatttcaaggaaaagacccgaaaatcacagttattaaaaatgtcttaaaaaaagagttagccagttatattgaaacgggagtagaatggattttgatttctggcaatttaggtgttgaactttggacagctgaagtagttggggaattaaaaacggaatatccagaagttcagctaggtttactttatccgtttaaagactttggcaataattggaatgaacaaaatcgagaactgttaacgaaagcggaaagtttggctgattatatcaactcagtaagtcaccagccctatcaatcgccagcacaattaaaaatgcatacaaaatttcttttggaacattctgggggcagcttacttatttatgacaaagagtaccctggcaaaacggagtattttttaaaggatgcacaacatttttcggaacgagaaccctatgatattcgcttaattacaatggatgatttacaaaactcggtgattgattag

SEQ ID NO: 1532 - DNA, 498 bp, Enterococcus faecalis
gcgatcaatcaaagcaatcaatattatctattgaataagcaagcagtcgttcataagaaaccaactcctgttcaaattgttaaagtagattatcccaaacgaagtgcggctgttattaaggaggcctactttagacaagcttcaacgactgattataacggtgtatatcaaggccgttacatagattttgaagcgaaagaaacgaaaaataccacgtcctttccctttaaaaattttcatcaacatcaaattgatcatatggaacaatgtatagcacaacaagggatttgttttgtgctattatggttttcaagcttaaaacgctgcttcttttttagtggtgaaaatctaataacgcattggaaaaaccaagcagttactggaaaaaaatctatgccgcttgcactcatcgagaaagaaggaattgaattatcttttggaatcgcaccgcgaatcccttatctcgacgcagtggaacaatatattcagacacactag

SEQ ID NO: 1533 - DNA, 198 bp, Enterococcus faecalis
cttgacttcgatgaggtgttggatgcatgtctagcagctcgcgagcctgaatttgcggttggcataaatagcaactcctttgttatactttcaaaactttatgaatctagtgtgtctgaatatattgttccactgcgtcgagataagggattcgcggtgcgattccaaaagataattcaattccttctttctcgatga

SEQ ID NO: 1534 - DNA, 2370 bp, Enterococcus faecalis
agttttgaaagtataacaaaggagttgctatttatgccaaccgcaaattcaggctcgcgagctgctagacatgcatccaacacctcatcgaagtcaagttacaagaaaaagacacaaccgccgaaaaagaaaaaacggcttgttttaaaaatctttcttggcttacttatcgctgggatggtcgcttttttagcaggcgttggtcttttttggttctatgcacgacaagccccaaaattagaagatgacaaactgaatgcgacagtttcatcgaagctttacgatattaataatgaaatttttgaggatttaggcgcagaaaagcgtgaattaattcaaccaaatgatgtgcctcaattattaaaagatgccattgtttctgtcgaagaccgtcgtttctataaacacattggtgtggatccgattcggattatcggttctgccctttcaaatgtcaaaaatggtggattacaaggcggaagtaccttaacccaacaattaattaaattgtcctacttctctacaaaagaatctgaccaaaccttgaaacggaaagcacaagaagcatggatggctgttcgtttagaacgtgaaaaatcaaaagaagaaattttaacttactacattaacaaagtctacatggcgaatggtttttatggaatggaaacagcggctgaaaattattatggtaaacatttatctgaacttgatttaccacaaacggccctactggcaggaatgccacaagcgccaaactcatatgatccctatacaaagccagatactgctaaagaacgccgggatgttgtactttacacaatgtacgacaataaaaaaatctcgaaagccgagtacgaaaaagccaaagctaccccaatcgatgaaggcttagtgccattaaaagccagtgatgacaatcgaaaagtcgtagataattacgtcaaagaagtaatcaatgaagtgaaagcaaaaactggtaaaaatgtttacacagacggactagatatctacacaaacttagatatgaatgcccaaaaacaactttacgatattgtcaacagtgatcaatacgttgcgtttccagatgataaaatgcaagtggcttcaaccgttattgatgttgcctctggacaagtccgagcacaaattggtggtcgtcacattcctgatgatgtgcaattaggaaacaatttagctgttaacacccaacgtgatgttggttcaaccgtgaaaccaatcatggattatggtcccgcaattgagaatttaaattattcgacaggtcgcctcatggtggataaaccaacgaaatatcctggtaccgacattgatgtcttcaactctgatttgacataccaaggcgtcattactatgcgccgtgcgattatgggttctcgtaacacaaccgcggtccagacgtttgatgaagttggtaaagaaaacatcatgcctttcattaaaggactaggaattgactataaaaacttagaagcgtcaaatgccatttcaagtaacacaagcgatgtagatggcgataaatacgggatttcctcattgaagttagcagcagcttatgcggctttcgccaataacgggatttataacaaaccgtattacgtaaacaaagtcgttttcaatgatggaactagcgttgattatcaacctgatggtaaacgtgcgatgaaagactctaccgcctatatgatgacggatatgttaaaagatgttttaaacggcggaacaggatttaacggcgccattccaggcttaatccaagcggccaaaacagggacttctaactatactgatgaagatttagcgcgaatgggcacaacagaaaaaggaattgccccggatagtacctttgttggttatacaacacactatgccgtttctgtttggactggatacaatgatcgaaatacaccaatctatcaagaatactatggaattgcctcggatgtttatcgtgaaataatgagttacttgtctcaaaatgtttcaaacgatgactgggtgcagccagacagtgttgtgcgggtaggtaatgaattatacgtgaaagatgcctatgaggtaccaaatgtacaagttttaccaagtactacctcttcagcaccacagccggaatctagcagtacggtggaatcctcttccacaaaagaagcggaaagttcatcaagttctagttcagaaagtgcgccttcttcctctgaagcgccaccatcaaccgaacaaccggcaagctcttcctcagcagagcaaccggcaacatcagaacaaccacctgaaccttcaagttctagttcacaagaaccgccgcaaccacctgaaagtagttctaaaccagatgaaaataaagcagcataa

SEQ ID NO: 1535 - DNA, 384 bp, Enterococcus faecalis
gcaaaaatggacgaagtgattcagttcacttcgtccatttttaatctaaaaaagtacggggctcatcatgagccccgtactttttatgctgctttattttcatctggtttagaactactttcaggtggttgcggcggttcttgtgaactagaacttgaaggttcaggtggttgttctgatgttgccggttgctctgctgaggaagagcttgccggttgttcggttgatggtggcgcttcagaggaagaaggcgcactttctgaactagaacttgatgaactttccgcttcttttgtggaagaggattccaccgtactgctagattccggctgtggtgctgaagaggtagtacttggtaaaacttgtacatttggtacctcatag

SEQ ID NO: 1536 - DNA, 1674 bp, Enterococcus faecalis
gagtctcaaagttgttttacttctctctacaaaatattatcaaagaaagggtttttaactattatgacaaaatacatctttgttacaggtggcgtggtttcttctatcggaaaagggattgtcgcagcatctttaggacgattattaaaaaatcgtggattaaaagtaacgattcaaaaattcgatccatatattaatgtggatccggggacaatgagtccttaccaacatggagaggtttttgtcacagatgatggtgccgaaacagatttggacttaggtcactatgaacgttttattgatattaacttaaataaatactcaaacgtaaccactgggaaaatttattcagaagtcttacgtaaagaacgtaaaggggaatacttaggtgcaacagtgcaagttattccacacattaccaatgaaatcaaagaaaaaattatgcgtgcagcgaaaatgacggatgccgatgtgattatcacagaagtaggtggtactgtcggcgacatcgaatcattacctttcctagaagcattgcgtcaaatgaaagctgatatgggtagtgacaacgtaatgtacatccatacaaccttgattccttacttaaaagcggctggcgaaatgaaaactaaaccaacacaacatagtgtcaaagaattaagaagtttagggattcaaccaaatattttagtggtccgtacagaattacctgtttctcaaaacactaaaaacaaattagcacaattctgtgatgttaatccagaagcggtaattgaatctcgtgatgttgaaacattgtactccattccattagcacttcaagcacaaaacatggatcaaattgtttgtgatcatttaaaattggacgcaccggctgcagacatgactgagtggcgtgcattagaagaaaaagttcttaacttgaaaaagaaaacaaaaattgcgctggttggtaaatatgttgaattaccagatgcctatatttctgttgtagaagcattaaaacatgctgggtttgattttgattcagatatcgaaattgattgggttgattcacaagaattaactgctgaaaatgtcgctgaaagaattggttcagcagatggtattttggttcctggtggttttggtgatcgtggaattgaaggaaaaattgaagcgattcgttttgctcgcgaaaatgacgtaccattccttggcatttgcttaggtatgcaaatggcctgtgtagaatttggtcgtaacgttgtgggcttagaagatgctggttctgcagaaactaatcctgacgtgacaaataacattattgatttaatggcagatcaagaaaacattgagaatttaggtggcacactacgtttaggtttatatccatgtaaattgaaaaaaggaacgaaaactgcggcagcatacggaaatgaagatgttgtccaagaacgtcaccgtcatcgttatgaatttaacaacaaatatcgtcaattatttgaagaaaatggcttagttttctctggagtttcaccagataatcgtttagttgagattgttgaaattcctgaaaaacaattttttgtggcttgtcaattccacccagaattaatttctcgtccaaatcgcccacaacgcttaatcaaaggatttgttggtgcagctttggcaaataaagaaagtaaataa

SEQ ID NO: 1537 - DNA, 633 bp, Enterococcus faecalis
aaggacgtgtacctcttggaaattaatgtatttgaagggttaaacaaaaaagaattatccatgattgaagtagcacacgctattttagaacaacatgcagatgtaatggatttttctgatttagttaaccaaatccaaaattatcttggcaagtctgatagtgaaattcgtgaccaattagcacaattttatacagatttaaacatcgacggtagctttatctcattgggagacaatcgttggggcttacgttcatggtatccaatcgattcaatcgatgaagaagttacacatggcttggaagaagacgaagaagatgcaccacgtcgtagaaaacgtaaaaaagtaaatgccttcatcactaatccaaacgatgaagatgtaattgactataacgatgacgatccagaagatgctgaattaacaaatgatgatgaagaagacatcttgtacgatgatgaagaagatgaagatgaagaaatcaaagcatacaactctgacttacaagagattggtgcagattcagacgatgatgaagaagacattccgcaaatcgaagaagatttaacgatcattgatgacgatgatgttgaagatgaagacgattttgatgacgaatattctgaagagtaa

SEQ ID NO: 1538 - DNA, 597 bp, Enterococcus faecalis
gaggaaaatgatatgtcaacaaaagatgtaaaagaattagcgattgagcaagcaaaaaaatttggggggaaattagaagtctgccctaaagttccgattgaaacaaaagcagatttaggaattgcctacacaccaggtgttgcggctgtttcttctgccatacatgaaaaaaaagaacgcgcttacgaattaacgacaaagaaaaacaccgtcgccgttattagtgatggttcagcagttttaggtttaggtaacattggtcctgaagcagcgatgcctgtcatggaaggaaaagctgcattgtttaaacgctttgctggtgtggattcgattccccttgttttagatacacaagataccgaagaaattattcaaacggtgaaatttttggctccaacctttggggggattaacttggaagatatcagcgctcctcgttgttttgaaattgaacagcgtttaatcgatgaactagatattcccgttttccatgatgatcaacacgggacagcgattgttgttcctagcggctttgtacaacagcttaaaattaatcaacaagaaaatagaggacattcatgtggtaatcaacggcgg

SEQ ID NO: 1539 - DNA, 1350 bp, Enterococcus faecalis
attaaagttataggaggaaatagcatggaaaagaaattgcccgcaacagctgctaatgaaacagattggcgcaacaaattaaccaaaacgaggattggttcggttacgttacctgtttatcttgtaacagctagcattattcttgttacggctctattagaacaactaccagtcaatatgttaggtggttttgccgtaattttaacaatgggttggttacttggaacaattggtggaaatattcctattttgaaacattttggcggtccagcaattttatctttattagtaccatcaattatggtctttttcaatttactcaaccaaaatgtcttagactcaacagatattttaatgaaacaagcaaactttctctatttctatattgcatgtttggtctgtggaagtatccttggaatgaaccgcaaaattttagtccaaggtttaatgcgcatgattgtcccgatggcattaggaatgattttagcaatgggcgttgggacccttgttggaacactgttaggtctcggttggaaacatagccttttctatatcgtcactcctgttttagctggtggaatcggtgaaggcattcttcctttatcccttggttatagtgccattactggattgccaagtgaacaattagtggggcaattaattcccgcaaccattattggtaatttttttgctattatgtgttctggtttacttagtcgtttaggagaaaaacgccctgaactttctggacaaggtcagttgattaaaattaccaattcagatgatttaagtgatgctttagaagaagacaaagcaccaattgatgtaaaattaatgggcgctggtgttttaattgcgtgtaccttatttattacaggcggtttattgcaacacttaacaggctttcctggtcctgttttgatgattgttgtcgcagcctttttaaaatacttaaacgtagtaccgaaagaaacccaacgcggatcaaaacagctttataaatttatctctggcaattttacgttcccgttaatggtcggcttaggtatgttatatattcctttaaaagatgtcgtaggaatgcttagctggcaatattttgttgtggtaattagtgtcgttttcactgttattgctacaggatttttcgtttcacgcttcatgaatatgaatcccgttgaggctgccattgtctccgcttgccagagtggtatgggtgggactggcgatgtggctattttaagtacagccaatcgaatgaacttaatgccgtttgcacaagttgcgacacgtttaggcggtgccattacagtaataacaatgactgctatttttagaatgcttttttaa

SEQ ID NO: 1540 - DNA, 243 bp, Enterococcus faecalis
acaggtaacgtaaccgaaccaatcctcgttttggttaatttgttgcgccaatctgtttcattagcagctgttgcgggcaatttcttttccatgctatttcctcctataactttaatctatattcatcataatgtaaacgttttctgtagagtagattatttaattaatttaactaaagaaaagttttttaaccaaatcttcctatgctatactttatttgaagagaaaagagggatggaatga

SEQ ID NO: 1541 - DNA, 1569 bp, Enterococcus faecalis
agagaaaagagggatggaatgaagcgtggcgggaaattatggtgtttcttatcagtgatttttattgcaacattaattattatgattactttcttttacggagtaacgacggttcaaacaattaaagaagttcgtaaaaaccaagagcaagcacttttagccgtcggggaacagttggctattgaaccgaatgttattgaagccttaaagaatgatcactattcagatgaattggaagcgtatacggttcgtttaggtgaaatccatcagttggattttatcgtgattatgaatatgcaggggattcgtttaacacatcctgatcgccaaaaaataggtaagcattttgaaggtggcgatgaagtgcgagcattaaaaggggaggaacatttgtctgttagtcaagggagtttaggagaatcattacgaggttttgtcccagtctatgatcaaggaaaacaaattggggttgtggcaatgggcattaaaatgacctcgctttcacaattgattgaacgaacaaaaaatgattacacagtgagtgtccttttaagtgttggttttggctttatattagccatcgtggtttcttattatttaaaaaaacaacttcacgatttagagccaagagaaattgctcgtctattagaagagcgaaacgccatgcttgaggaaacgaaagacgcaatccttgtgattgataccgatcaaaatattttattagcaaatattgaggcgactaaaatgtatcataatataacaaatagtgaagaaaatttactaggaaagaaactttcagcattggttttatctcctgaaaaattagtcgtacattcaaaaacagagcaattctatcgtcaaaatggccaggattatttcgtctcaatcgccccgattaatgtccgtaaaaaaacaattgggcatgttatctttctgaaaaatgcgacagaaacgtttattgtcgcagaacagcttgtcagcacaacaacatatgcttcggcattacaaagtcaatcacacgaatttatgaataagatgcatgtcatttatggcttagtcgatttagaagattatgaggcgctaaaacattatctagccgatttattgaaaccagaaaaggaatttgcacagcgcttagctattttggtcagaaatcctattctagcaggttttttaagtggggaaagaatcaagtttgcagaaattaaaacacaattagctattgaaatttatccagaaattccaccaaataaacgagatgaagatacgcaaaatttgattgctatctaccgttatattcatcgtttcctgatggagcaaacgttgccagaagagatcattgaaaccattgattatcagccaggaagtttgacgacgacttattcgtttgcttatccaaaagaacaactggaacgctttgagcaagagtttttcacttcttatttggcaagattattagagaatgcggaagcgacattgacttgggaaaaccaacaaaacaattggcttgtccttcgcataaatgttcattacgaaggagcagaggaaaatgaacctattgattattga

SEQ ID NO: 1542 - DNA, 720 bp, Enterococcus faecalis
atgttcattacgaaggagcagaggaaaatgaacctattgattattgaagacgatcctatggttgcatatatacatcaaaaatatcttgaaaaattaattcaccaaccgactatttttacggttgcaacaattgctgaaggtctactactaacgaaagaaaaacaaccagcacttgttttattagatgttcatttaaaagatggcaatggcttgacctatctggcaacaattagagatgaaaaaattgatacagaagttatcctgattacggctgccaacgagttggaaaatgttaaacgaagcttacatttaggcgttttagactatttagttaaacccttttcttttgagcgatttcaacaaagtatcgaaaactatcagaaaaaaactgctcaattcacgctggaaacgaaggagctttcgcaaacaaaagtggaccaattatttcattattcacagacaaacgcacgtaaaaatgaacaagctcttcaaaacatgtccttagaaaaaggactaacacaagcaacattacaattattgttaaaaaaaatagacgaatttaccgactattttacgattcaagaattagcagaagcgagtcagctttcacatgtttctgttcgcaaatatgtgttgtttctagaaaaaaataaccttttagaaagtaaaaatagctatttaaaagtggggcgtccctatcaatcgtatcggagaatttag

SEQ ID NO: 1543 - DNA, 1509 bp, Enterococcus faecalis
ataaaaaaagtaattgaaaagtggcgaaatacagaggatactcctttttattctcatttaaagcacttaattgagaatggaaaagaggatattatttgttattttttgagaatatatgatattctttattatgtaagaaataatattatatgggaggaacgagcgatgaaagttattgttttaggatcatcacatggaggttatgaagcggtagaggaattactaaatcttcatcctgatgcagaaattcaatggtatgagaaaggtgattttatctcattcttgtcttgtggcatgcagttgtacctagaaggaaaagtgaaagatgttaattctgttcgctatatgactggcgaaaaaatggagagccgtggtgtaaatgtcttttctaatactgaaattacagcgattcaaccaaaagaacatcaagtgacagtgaaagatttagtgtcaggtgaagaacgtgttgaaaattatgataaattaatcatcagtcccggagctgtcccatttgaattagatattccaggtaaagatttggataatatttacttgatgcgtggtcgtcaatgggccattaaattaaaacaaaaaacagtagatccagaagtcaataatgtggttgtgattggtagtggttatattgggattgaagctgccgaagcatttgcaaaagccggcaaaaaggttactgttattgacattttagatcgtccattaggggtatatctagataaagaatttacagatgttttaacagaagagatggaagctaataatattaccattgcaactggtgaaacagttgaacgttacgaaggcgacggtcgtgtgcaaaaaatcgttacagataaaaatgcgtacgatgctgatttggtcgttgtagcggttggtgtccgtccaaacactgcttggttaaaaggtaccttggaattacatccgaatggcctaatcaagacggatgaatacatgcggacaagtgagccggatgtatttgcagtaggggatgctacgttaattaaatacaatcctgcagacacagaagtaaatattgccttagcaacgaatgctcgtaaacaaggtcgctttgctgtgaaaaacctagaggaaccagttaaacctttccctggtgttcaaggatcttctggcttggccgtctttgattataaatttgcttcaacagggattaacgaagtcatggctcaaaaattaggaaaagaaacaaaagcggtgacagtagtagaagactacttgatggactttaatccagacaaacaaaaagcttggtttaaattagtgtatgatcctgaaacaacacaaattttaggcgctcaattaatgtcgaaagcagatttaactgcaaacattaatgctatttcattagcgattcaagccaaaatgacgattgaagacttagcctatgcggacttcttcttccaaccagcgtttgacaaaccttggaatattattaatacagcggctttagaagcggtgaaacaagaacgttaa

SEQ ID NO: 1544 - DNA, 384 bp, Enterococcus faecalis
  misc_feature (71)..(71): Nucleotide 71 is "n" wherein "n" = any nucleotide.
agaaggaggggtagggatgaggaggaaagggaacaaggagtgtggtattcaagaatgcgttacgaagaccntaatggtgactacggccgccaagaacgtcaaagaaaagtgattgaaggcatcgtccaaaaagtcttaattcttaacagcgtaagcaactatcaagaaattttaacagctgtttctgataatatgaagacagatttaagttttgatgacatgaaaaaaattgccttagattatcgcagtgcctttggtaaagtgaaacaagaccaacttcaaggtactggttttatgcaagatggtgtttcctatcaacgtgtggatgaacaagaattaactcgtgtccaacaagagttgaaaaatcaattgaatacaaaataa

SEQ ID NO: 1545 - DNA, 960 bp, Enterococcus faecalis
acgactactaattctgaaggaggagcaaagaaaatggcagaaaaaattcaattaactaaaaaagatcgtttagctgtagcttggcgttcaacatttatccaaggttcttggaactatgaacgtatgcaaaacggcggctgggcattctcaatgattccagcaatcaaaaaattatataaaacgaaagaagaacgttcagcggcgttaaaacgtcacttagagttctttaatacacacccatacattgcctcaccaattcttggtgtaacattagctttggaagaagaacgtgccaatggcgcaccagttgatgacgtagcgattcaaggggttaaagttgggatgatgggtcctttagccggtgtcggtgacccagttttctggtttactgttcgtccaatgttaggcgctttaggtgcttccttagcaatgggtggtaacatcttaggcccaatcttatttttcgttgcttggaacttaattcgttggtcattcatgtggtatacacaagagtttggttacaaagcaggttctaaaattactgatgacctttcaggtggtttactacaagatattacaaaaggtgcttctattttagggatgttcgtactggccgcattagttcaacgttgggtatcgattaagttcttaccaattgtctcacaagttaagttagacaaaggtgcttatatcgagtgggataaacttcctgctggcggtgaaggaatgcataaagcctttgaacaagtgaaccaaggcttggcgctttcaccaacgaaagttactactttacaagataacttagatcaattgattccaggtctagcaccattactacttacattcttatgtatgtggttattgaagaaaaaagttagcccaatcgttatcattcttggtttagtcgtagtcggcgttgtcgtccatataatgcccgtcttcaccacgagttcgccccca

SEQ ID NO: 1546 - DNA, 849 bp, Enterococcus faecalis
caaacgcgtaactcgtcaaatacaaatcaaaataggaggcttatcatgtctgttatatcaattattttagttttactcgttacctttctagctggtatggaagggattttggatgagttccaattccaccaaccgttagtagcatgtacattaatcggattagttactggtaatttagaagccggaattgttttaggtggtactttacaaatgatcgcgttaggttgggcgaacatcggggctgccgttgcaccggatgccgctttagcatctgttgcctcagcaattattttagttttaggtggccaaggtgttaaaggtgttccttcagcgattgccatcgcagttcctttagcggttgcaggtttgttcttaacaatgatcgttcggacagttgcggttccaatcgttcacatgatggatgcggctgctgaaaaaggcaacattaaacaagttgaaatgttacacattttcgctgtatgtttacaaggtattcgtattgcgattccagcaggtgcgttactattcattcctgctgacactgttcgtaatttcttagaatcaatgccagcttggttaactgatggtatggctatcggtggtggtatggtcgttgccgtaggttatgcattagtaatcaacatgatggcaacaaaagaagtatggccattcttcattatcggtttcgtagtcgcagcgatttctcaattaacattaatcgcattaggtgctttaggtgtcgctttagctcttatttacttgaacttatctaaaatgggcggttcttctaactcaaatggcggaggcaactctggcgacccattaggcgatattttaaacgactactaa

SEQ ID NO: 1547 - DNA, 1158 bp, Enterococcus faecalis
actgtattgataaaggcaagtgctgatgttgaaaaaaatcaagaactattgaaattttttcatttatttttgtcagaatctgatttatctgatttttttcaaaaagtgaaagcgtttagcagtacaaccatgaaaaaaaacatcaattatacaggaggtataaaaatggtaggaattatcctagcaagtcacggtgaatttgctgaagggatcttgcaatctggtgcaatgatctttggcgaacaagaaaatgtaaaagcagttacgttaatgcctagcgaaggtcccgatgatgtaaaagcaaaaatgcaagaagccattgcatcgtttgacaatcaagacgaagtactatttttagttgacctatggggaggaacaccatttaaccaagcgaactcattgttagaagatcataaagacaaatgggcaatcgttgcaggtatgaacttaccaatggttattgaagcatatgcttctcgtttctctatggaatcagcacaagaaattgcgacacacattcttgaaacagcaaaagatggtgtcaaagttaaaccagaagagttacaaccagcagaagcaccaaaagctgctgcgacagaagatgcacagccaaaaggttcgttaccaccaggtacagttgttggcgatggcaaaattaaatttgtgctagcacgtattgattcacgtttattacatggtcaagtagcaacagcttggacaaaagcaacacaaccaaacagaattattgttgtttctgatgccgttgcaaaagatgacttacgtaagaaattaatcgaacaagcagctcctccaggagtaaaagccaatgttattccaatcagtaaaatgattgaagtagcgaaagatccacgttttggcaatacaaaagcattattattatttgaaaatcctgaagacgtcttaaaagtggttgaaggcggcgtagaaatcccagaagtaaacgttggttcaatggctcactctgttggaaaagtcgttgtaagcaaagtattatcaatgggtcaagaagacgttgatacgtttgatgaattaaaagccaaaggcatcaaatttgatgtgcgtaaagtgccaaatgattcaaaagcgaatatggacgaaattttgaaaaaagcaaaaaatgagttagcaaacgcgtaa

SEQ ID NO: 1548 - DNA, 594 bp, Enterococcus faecalis
ggtgtccctttttacctaaaatttttaagtaaaaagacaaaggtcctaacctttaaaaatgaatttaaaggagcattcccgatggtaatggatattcgtttagctcgaattgatgatcgattaattcatggccaagtagcaactgtttgggcaaaattgacgaacattaatcgcattttagtggttagtgattccgttgctcatgacaatttgagaaaagccttgttggttcaagctgctccacctggtgtcgaagtaaatgtcatcactgttcaaaaaatgattgatgtttaccctgatcctcgttttgattcgtttcgagccatgttgttattcactaatcctttggacgtgaaacgagtggtcgaaggcggtgtacaactaacttctgtgaatattggcggaatgagtttcagcacaggcaagcgaatgattacgaatgcagtcgcagtggatgccaacgatttaaaagcatttctgtttttaaatgaacaaggtattgaattggaaattcgaaaagtcgcagcagacagccaagtgaatttgatggatttactgaaaaaagagcgtagcaaagaaaataacgccagctga

SEQ ID NO: 1549 - DNA, 1755 bp, Enterococcus faecalis
gctgaaatcgtggtgggcatgtcttttccagtaaatcgagaagtcttggccgagttatcgaaatatctggaaccgcaattagtggtatcaccaaatgaatctttagtagctattcagtcagatgcctatgaattgccttacaatctatatgagattattggagataaagcggctctcttaaaagcagacggcttggaccaagaactaattaataattttattacaacggatatcaatgttcatttaaaatctttctacaaagattatgggttcacctttgatacagaaaataaattggctgaaattgttgaccaacgaattattgatgtcactaagaaaatttataattttgcagcgaagcggttatcgtattcgtttcaacccaactttatttatgcaatgagtttacacattagttctttcttgaaacgcatccaattaggcaaagatcctaagcatcctttaaatgaaagtattcgaaatatggttttagattatccaacagagtttgaaacagcaaaagaaattaaaaatattattgaaagtagttatcagatggagattcctgaatctgaaagttactatttagctgttttgctcatttctttaagagaaaatcctgaggctggccggattggcattgtcgtggctgcgcacggaaatagtaccgctagcagtatggtacaagtggtttctcaattgttaaatgttgataatttgaaggctgtggatatgccgttagatatgccaccgaaagaagctttgcgtaaaatcgttgaagcagttggtgaagtgaatgaagagaatggcgtactattattggtggatatgggttcattaagtactttttcagaagaaattgtacgccagacaggcattgatgtgcggacagtagacatggtgaccacgccaattgttcttgaagcggcccgcaaaaccgcattaattgatacgcaattggaaacacttcacgagtctttaaaaaactttcatggctatgccgatattcgccaaagtgaaacgaaacaaatcattgaaaattggaaaacaagagcaattattgctatctgcgcttctggagaaggaactgcgcgccgaatgaaagagcttattgaggaagctgtcttgccacaaatagactggcatttagaagtgattcctttgtccattgtaaatatgaaagaagtcttgcctaaaattcaagaagactatgaaattattgcgacaactgggattaccaatcccaaaattggtgttccttatatttccatggaaaatttcttttccggtgaagcagaaaaaattattcagcaattactagcagagcggaaagaagaagtaatgaataagccgttggacgaagcggcagcaaaagaaatttgtctaaaatatatggagcaaagtttcactttcattaatggaaaaaaaatcattgatctgttgtggtcattcgctaaaaatatccaaacccaattagcgatgccagaagagtacacattttacatcaatttgattatgcacacatcgggcatgttggagcgtattttacggaatgatacactgacggtttcagaaaaggaacttggtcgattggttcaagaaccaatttatccagtgattgtgtcctcaattgagactatggaagaagctcttaatatggatgttccagcagaagaagtttattttatcgcacagttagtcaaaaatgctcagtgtatcgaagataaaatcaccgaaattgatacactagattaa

SEQ ID NO: 1550 - DNA, 225 bp, Enterococcus faecalis
atccaatccccgtggccgggtcagttaataaaagctttgaaaggatatgttaaaagtcgtgacattacacaaattttcttagaggtcagagaatcgaatatactagctcaaaaactttatgagaaaacaggttttcggaaagtagctgttcgaaaaaattattataaagaaccgcaagaaaatgcctttgtaatgtgtgcgaaattaaggaaggaagcccaatga

SEQ ID NO: 1551 - DNA, 1101 bp, Enterococcus faecalis
agaaccgcaagaaaatgcctttgtaatgtgtgcgaaattaaggaaggaagcccaatgacaatttttacaaaagaacgtaaattattattagctgtggaaagtagctgtgatgaaacaagtgtggctgtcattgaagatggcgacaaaattctttccaatatcgtagcttcgcaaattaagagccatcaacgttttggcggagtcgttccggaagttgcgagtcgtcatcatgttgaacaagtgacgatctgtattgaagaagcattaacagaagcaaaagtcacaccagaagaactcagtggcgttgctgtgacctatgggcctgggttagtcggtgctttattaataggactttctgcagcaaaagcatttgcttgggcgcaccaattaccacttattccagtcaatcatatggctgggcacatttatgctgcccgttttgtggcaccgctcgaatttccattgatggccttactcgttagtggaggacatacggaattggtctacatgaaagaagatggctctttcgaaattgttggtgaaacacgtgatgatgcagctggtgaagcgtatgataaagtcggacgtgtgttagggttgccttatcctagtggcaaagagattgatgctttggcccatgaaggcacagatacctatcaatttccacgggcgatgctaaaagaggataactatgactttagctttagtggtttgaaaagtgcgtttattaacacggttcataatgcagagcaacgtggtgaagcactgtctacaaaggatttagccgcaagttttcaggcgagtgtggtagaagtattagtgactaaaaccattcgtgcttgtcaagaatatcctgttaagcaattgctaatcgctgggggcgttgctgcgaatcaaggattacgagaagcaatgagacatgcaatcagtgaacaattaccagcagtgacattacttattccgccattaaaactttgtggggataacgcggcgatgattggcgctgccgcctttatcgaagctgaaaagaatcactttgcttcgtataacttaaatgcagaacctggcgttagttttatgacaattagtgaagaaggctag

SEQ ID NO: 1552 - DNA, 1797 bp, Enterococcus faecalis
agtggtaccgcgggtaaattctcgtctctgacaaaacaaattattttgttttgtcagagacgtttttgtttttttaatacttacaaattaatcaggagggttcttatgaacaacaaagaaatcgtagcaaaagcgttacatgatgttttaaatgaagaattaacgatggatcaaatcgaacaattattggaaaatcctaaatctgttgatcatggagatgttgcttttccagccttttcattagctaaaatttatcgtaaagcaccacaacaaattgcagcagaattagcagaaaaaattgatggcacaaattttgaaaaaattgaagtggtgggaccttatttaaacttcttcatgaataaagaagcagtcagtcaagctgtcattggcgaagtagtcaaagaaaaaaataactacggaaacagtacctttggcaataatggcaatgttcctattgatatgtcttcaccaaacattgctaaaccaatttctatggggcacttacgttctacggtaatcgggaattcaattgcctttattttagaaaaaattgggtatcagccaattcggattaaccacttaggtgactggggtacacagtttggtaagttaattgtagcttataaaaaatggggttctgaagaagcagtccgccaacaaccaattaatgaattattgcgcttatatgtgcaatttcatgaagaagcagaagaaaaaccagaattagaagacgaagcacgtgcatggtttaaaaaattagaagaaggagaccaagaagctaatgaattatggaaatggttccgtagcgagtctctaaaagaatttgataaaatctattccatgttagaagttgaatttgattcttataatggcgaagccttttataatgataaaatggatgaaattgttactttattagaagaaaaacatttattaacagaaaatcaaggtgcagaaattgttgatttgacagaatataatttaaatccagcacttattcgtaaatcagatggtgcgacgttatatatcacacgggatttagctgctgcgctttaccgtaaacggacgtatgattttgccaaatcgctttatgtagtcggcaacgaacaaagcaatcacttcaaacaattaaaagcagtcttgaaagaactagggtttgactggtcagatgatatggaacacattccgtttggtttaattactcaaggcggtaaaaaattatccacacgtaaagggaaaatcgttttattagaagaagtattgaatgaagctgttactttagcaggaaatcaaattaacgagaaaaacccagacttagcaaatcgtgaagaagtggcgaaacaagtaggtgtaggtgcagttattttccatgaccttaaaaatgatcgtctaaataatttcgattttgtattagatgaagttgttcgttttgaaggagaaactgggccatatgttcaatatacacatgctcgtgcgatgagtattttacgtaaagcaaactttacaccagacgctacacaacgttatgcactaaatgacaaggatagctgggaagtcgtgaagttgttacaaaaattccctgaaactgtgatgcaagctgctgaaaaatatgaaccatctgttattgcgaaacatagcattcatttagcacaagcgttcaataaatattatgcccatgttcggattttggatgaagatgctcaaaaagaggcacgcttagcgttagtttatgcagtagctactgttctaaaagaagatttacgtttactagggttacatgcaccagaagaaatgtag

SEQ ID NO: 1553 - DNA, 564 bp, Enterococcus faecalis
atagctggggtgctatactcgagtcaagttataaaaggattagaaaaggtggcacccaattatatgacagaaaaatggcgtgaagacgaagaatatctttcttatgtagaagatttattagcaaccgaagaagtccaaaaattagcagaatacacacaacatatgcattcaactcgtttagaacattcaattagtgtttcctatcatagctataaattagcaaagcgttggaacggcaatgctcgtgcaacagctcgtgctggtttattgcatgatttgttttactatgattggcgcacaacaaagtttgacgaaggctctcatgcctatgttcatccacgaattgcagccaaaaatgctgaaaaaattacagagttgtctgatttagaacgagacattattattaaacatatgtggggcgcaactattgcaccaccaaaatacaaagaaagctacattgtaacctttgttgacaaatattgtgctgtcaaagaagcggcgttgccgatgacgacagccatgaaaaccaaatggcgtcagtattttggtcaacagtcaatctaa

SEQ ID NO: 1554 - DNA, 348 bp, Enterococcus faecalis
aatgtttttacggaggtggtttttttgaaagaaaattttttgaagcaaaaaaggatggagaaaaatcttacattagaacaagttggaaattttgttggtgttggaaaaagtaccgtcaggaaatgggaaactggaatgattgaaaatatggggagggataaaattgtcgccttatctaaaattttagatgtatcacctcttgaaatcttaggtattcctgaaacggaagaaacgccatttgttgtcccaaccaatattatgaacatttacaaacagttaacaactgaaaatcaagaagcagtctttcgatacgctcaaaagaaattaacagaacaaaattacttttaa

SEQ ID NO: 1555 - DNA, 372 bp, Enterococcus faecalis
aaaaatcagcattttttaatgatattgacgtttttttcacaaaatgatataattttaagtgtcttattagacactgaaaagggggagagtaaaatggaatcaaatttaattcactcaaaattgaaaatgaaaggaaaaaatgttgagtggttggcaaatgaaatgactgcatacgggcaaccaatatccgcttcaacgatttacaaaaaattaaaaggagaagttgttttcaaagcatcggatattaaattgatttcacaattgttggattttaataatgaagaaattatgactattttttttagtgagctagtgtctaaaaagacacatattactgttgaaaggattgtgatgaatgaaaaaaagtattaa

SEQ ID NO: 1556 - DNA, 1521 bp, Enterococcus faecalis
  misc_feature (1514)..(1514): Nucleotide 1514 is "n" wherein "n" = any nucleotide.
atgaaaaaaagtattaataagttattttcgatttgtttaattatctttactattataggatctaatacaagtattatttcttatgcaatggataatgaaagtggcacacaaatccggtctatagctgttgaatatccgggggaaaaaacggaaattgttgctacaaaagattgggcgacagtttctttgtcattaggaatctctgaattagcaagcggagagacgatgacattaaggatggctagcgaaaaatattcctattcaatgacaccttttgaaattggagacgcacttcaagtgattccaaacgatgatggtacttggacgattaaagccttacaaacgcttacagattactcagcagatttgcaactgaagctacgatataatcaaaatttatcagaagattttgaagatcaagtcgtttttacttttggggattcacaaaaaattgtcaaaattaatatcgggcaatacgtggagaaagttccgccaactgaactggttcgaaaagtcccgttaggatttacctcagagggaagaattgcttgggtcatttattttaactataatcaagcaggtctttcaggttcagaaaaaacaacctttaaatttttagataatgtaggtccaaaccaaacattagctattgacagtattgctgcatatctcaccaagcagcctattttagaaacaaatggtgaaatgattcggaatttggaacatgacgaatatagctatgatgccagtcaatttttccaaaaaaatgcctctgaatctggatttaattatgaagcagagaaatttgaaggaataccaacagccacgggcagttatctttccaataaaaatgcctattatatttatttagaaacgattccaaatgaaaatattccaagtgatgccgtgctatcaaattacacgtatatgcgtatttctagtgagggattcgatgcttgggaagatgatgatattgcctacatcacagcagacgagagtagtgatggaacaggtcgagggggtgtcgttttagaaaaaattgatgcagtaactgctaaagttttagaaggtgctgttttcaaagtcgtgaacacaaaaacacaacaagttgttcaagaaacattaaccaccaatcaagcaggtcaaattcgtttagctggtttggaagctggtcagtatgcattcattgaaacaaaagcaccaactggttacaagttagatgcaacaccagttccatttgaaattaagttagaacaaacacagacgattcgcttgaaaaaagaaaatacgcgtttagaaaaccagttaaaagtagaaaaagtagatgaaaataatgaggtgaaacgtttagcaggtgctgaattttcgttgtatgaccaaaaaaataatctaatagaaaaaggtgtcacgaatgaaaatggcgagctgttattttcaaatttatcacctgatggagaatattatttagttgaaacgaaaggcgctaatggctatgaattaaacgaaactaaacntcctgtt

SEQ ID NO: 1557 - DNA, 264 bp, Enterococcus faecalis
acagtacaaaatgaccgaagggcaggttgtatcatttgcacgaatcactacgactggcgcgaagcgacagagcagatgatgtctgcgattactcgacgcaggatggcctttgtgagtgatgaacagtacaaggtgaccgaagggcaagttgtgtcatttgcacgaaagtgttcctacgattctcgtcacagtcaaatcctgttgagcactacgactgatgcaaagagagagagtagctattatctgcgattactcgatgcttga

SEQ ID NO: 1558 - DNA, 1074 bp, Enterococcus faecalis
agaatgattgaactaaaaaatatcagtgtgacatttcaacaaaaaaaacaagaaattcaggctgtccaagatgtttctttgacaattgataaaggggatatctacggaatcgttggttattccggtgctggaaaaagtacgctagtacgggtaattaatttattgcaacgaccaacagcgggcaccgttattattaacaaagaaaatattttaactttttctaaaaaggaattacgacaacaacgaaaaaagattggaatgatttttcaacattttaatttgatgaaagagcggactatatttagtaatatcgatttttcattaaaatattctgggctaagtaaaagtgaacggcgtcaaaaaatcagccatttattagagctagttggactaagtgaaaaacgggacgcttaccccagtcaactatcaggagggcaaaaacagcgggttgcgattgcccgcgctttagcaaatgatcctgaaattttactttgtgatgaagcgacgagtgcgttagatccaaaaacaacgggacagattttagccttgttaaaaaagttaaatcaagaactgaacttgacgattgtcttaatcacccatgaaatgcaagtggttaaagaaatttgtaataaagtcgcggtgatggaaaatggctgcgttgtcgaatcaaacgatattgtttcgatttttagtcaaccccaacaacctttaaccaaagattttatccggacagcaactcatattgaccaagcattaacaacaattcttgaacatcctaaattagctgatttagataaaaatcaagaattaattgaattttcttatgtgggagatcaaacgaatgagccattaattgcacaattgtatagccaatatcaggtgtatacgaatatcctttacggcaatgtcgaaattgttcaaaatgttcctattggccatttaattgtggtgctttctggtgatgaggcccagcgtcaacaagcccttacttatttagcgaaacaaggcgtgcgaaccaatgttttgaaaacctatcagcaaacgaagcaaaagcagaatttacaggtgatttaa

SEQ ID NO: 1559 - DNA, 699 bp, Enterococcus faecalis
aaaaggagtgaactgagaatgtatcaattatttgagaaatattttccgaatgttgtccaattaaaacaagagtttcttcaaagtacatgggaaacattatacatggttttttggacagcattgattgctggcgtgttaggagtcttgttgggtgtcgtgcttgttagtactggccccagtggtgttttgaaaaatccacccctgtacagtgtcttagaaaaaattattaatgtttgccgctctattcctttcattattatgctcgcactgattcaaccattaacacgaattttggcaggaacgacaattggtacaaccgcagcgttagtcccattagttattggcgtaatcccgttcttcgcgcgccaaattgaaaatgcgttattagaagtggatcctggcgttattgaagcggcagaagccatggggacgagtcccttagggattatttttagggtttatctaattgaagggttaccaagtattattcgtgtttcagcggtgacaattattaatttgattggattaacagccatggcaggagcgattggagccggtggtctgggcaacttagcgattactcgaggatacaatcggtttcaaaccgatgtgacatttatggccacgttaattattttaattatggtatttatcagtcaagccattagtaatcaattaatcaaaaaaacatcacattag

SEQ ID NO: 1560 - DNA, 837 bp, Enterococcus faecalis
caaatgaaaaaatttagtaaattaattggacttattggggtattagcttttacgattgcaggttgtgcatcggggtctgtgaaggatactaagacagaaaccgttaaactaggggttgtaggaacaaaaaatgatgaatgggaatcggtcaaagaccgtttgaaaaagaaaaatattgatttacaattggtagaatttacagactatacgcaaccaaacgcagcattagcagaaaaagaaattgatttaaatgcctttcagcatcaaatctttttagacaattacaataaagagcatggaacgaaattagtatcaattggcaatacagtcaatgcaccattgggaatttacgctaataaattgaaagatatcacgaaaattaaagacggcggagaaattgctattcctaatgacccaacgaatggcgggcgggcgttaattttattacaaactgcaggactgataaaagtagatcctgcgaaacagcaactaccgactgtcagtgatattactgaaaataaacgccaattgaaaataactgaattagatgctacgcaaacagcgcgcgctttacaagatgtcgatgcttcagtgattaatagcggcatggctgtcgatgctgggtatacaccagataaagatgctattttcttagaacctgtaaacgaaaaagcgaaaccttatgtgaacattgtcgtggcccgagaagaagatcaagagaataaactttatcaaaaagttgtagaagaatatcaacaagaagaaacgaaaaaggtcattgcagaaacatcaaaaggcgccaatgttccagcctgggaaacatttggtaaaaaataa

SEQ ID NO: 1561 - DNA, 786 bp, Enterococcus faecalis
aaaataaaggaggcatttataatgagtacaacaacgattcaaacaatccaagaagctattgctacagaaaaggaatggataatccatttaagacgtcattttcatcaatatcctgaagcaagtttaaaagaatatgaaacgattaagcgaattaaagaagaactactagccttagctattccttttgtagaagtaggggaaacgggtgttttagcaaccattgaaggaggtcttggcgctggcaaaacgattttgttacgtgcagatattgatgcgttggaattgccagatgcaacaggtgctgcctatgcttctaaaaatccaggactcaatcatgcttgtggacacgatggtcatgcggcagcattgctaggtgcagctaaagtgctcaaaaaacatcaggataccttttcaggaacgattaaactggccttccagccagctgaagaaattggtgcaggcgctcgacaatttgtggaaggaaattatttagaagcaatcgaccaagtgtttgggattcatttagattccagtgtgccggtcggaaaattagtcggtaccaaaggcgccaccaacgcctcttgtgatatttttaaaattgaagtcagtggtcaaagtagtcacgtcgcccaaccacagaatggccgggatgctgttttagcagcggccagtatcgttgtggaattacaaaaaattgtagctcgcgagattgatcctttagattctgtcgtagtaggaattggcgttttacaagcaggaacacgctataatcttgtaacagtctac

SEQ ID NO: 1562 - DNA, 726 bp, Enterococcus faecalis
tgtattgatgcttgtgacgatattcaaacgttcaaattagttgtgaaaactattgcgcgtaaacatggcttgcatgcaacatttatgccaaaacctttgtttggaattaatggttctggtatgcactgcaatatgtcattatttaatgaagaaggtaatgttttttatgacgagtcaggagagatgggcttaagccaaactgcgtatcatttcttaggtggtttattaaaacatgcccgtgcctatactgcggtatgtaacccaacagtgaactcttataaacgcttggtaccaggttatgaagcacctgtttatgtagcttggagcggcagaaatcgttcaccactcattcgagttcctgaatctcgtggtttatcgactcgtttagaattacgttctgtcgatccttcagcgaatccgtatttaacaatggctgtcttattacaagcaggtttggatggtattcgtaatgaacttacaccaccgccagcagttgatcgtaacatttatgtgatgaatgaggaagaacgtcaacatgcacaaattgaagatttgccatcaaccttacacaatgccatcaaagaattacgtaaagatcaagtaatgattgatgcattaggtcgtcatatttttgccaattttgtagaagcgaaacgaatggaatgggcagccttccgtcaaaccgtttctgaatgggaaagagaacaatatttggagttgtactaa

SEQ ID NO: 1563 - DNA, 3744 bp, Enterococcus faecalis
acaagaatatgcgtgcaactattctattttttagatataaaggatgagaaaaacatgcggaaaatgaaaacaatggatgggaatgcagcagcagcttatatttcctatgcttttacagaattagcagccatttatccaataacaccaagttcaacgatggctgaacttgttgatcagtggtcggccgaaggtaagaaaaatatctttggtcaacctgtgaaagtagtcgaaatgcaatcggaagctggtgctgccggcgtggtccatggctctttaaaaacaggcgcgcttaccacgacctatacggcttcacaagggttacttttaatgattcctaatatgtacaaaatagctggagaactattaccatctgtttttcatgtggcgagccgagctttaactacgaatgctttaaatatttttggtgatcaaggagacgtaatggccgcacgccaaacaggctttgctatgttgtcagaaagcagtgtgcaagaagtgatggatttggcaccagtggctcacttggcttcgattgaagcgagtgttccatttatgaacttttttgatggctttagaacaagtcatgaaattcaaaaagtggcagttcttgactatgaagaattagcacccttagtaaatcaagagaaattagccgaattccatcgtcggagcatgaatccgaatcacccttccgttagtggaatgaaccaaaatccagatattcactttcaacaacgagaaacaataaatccttattatgaaaaattacctggtattgttcaaaaatatatgacagaaattaaccggttacggggaaccaattatgatttagtgacgtattatggcgcagaagatgcagaagaagtgatcgttacaatgggttcagttgcgcaaacaattgaacagactgttgattatttacaacaacaaggaagaaaagttggctttcttaatgtccatctctatcgaccatttccaattgaaacatttctcgaaaaagtacctcaatcagttaaagcaattgctgtcttggatcggacgaaagagcccggtgctggtggtgaaccgttattattggatgtccaaagtgcgatgtatgaagcggacattcgcccaacaattattggtgggcgctatgggttaggttctaaagatgtactgccaaatcaaattgttgcggtttttgatgaattaatgaaagaacgttctgccatgaagaagcgctttacaattgggattgatgatgatttaacttatacttcattagaagttggcaaaccacttgatttgacgaatccgaaaacctatcaagctaaattttggggctttggttctgatgggacagtaggggcgaacaagtcagcgattaagattatcggtgatcatacagacaagtatgctcaaggctttttctattatgattcaaaaaaatcaggcgggttgaccgtttctcatttacgttttggcgagacacccattcgttcaacgtacctcattgaacattctgattttgtggcctgtcatacagccgcttatttgcatacctatgatttagtaaaagggttaaaaaagggcggtactttcctcttaaataccatttggaatgatgaacaactagcacgatttttaccaaatcaattaaaacggtatctagctgaaaatgagattcagttttatacaatcaatgcagtgaaattagctagtgaagtcggactaggtgggcgaattaataccgcgatggaaacagctttcttcaaattagcggaaattatgccttttgagcaagtgttgccaattttaaaagaagaagcactgaaaagttatggtcataagtccatgaaagttgtcgaaaaaaatattcaagcaatcgataagaccgttgaattgttgcatcaggtacctgttccagcagagtggagaacgcttgaagttcaaccgcgaaaacgttcagaaaatgttagtgattttgttcatgaaattgttgaaccgattaatcgtcaagaagggaatgcgttatctgttgcaacactagcgaaaaatgggatgacagatgggcggatgcctttgggaactgcggcagttgaaaaacgtggagttgcattagaagtacctgagtggattagcgatcgatgtactatgtgtaatgagtgtgcctttgtatgtcctcatgcggcgatacgaccattcttagccgatgaagaagaaatgactgaagcgccagaaggattcattgtgcgtgatttacgtggtgccgacggcttgaagtatcgtatccaagtctcagtcaaagattgtactggctgtggtctttgtgttgaagcctgtccagctaaagggaaagctttagtaatgaaaccttatgaagaagaaaaagagcaggctatgaactgggcgtttgctatgacgttacgtcaaaaggaaaacccagcaaaaccgaatactgttttaggttcgcaatttaataaacctttattagagttttctggtgcttgttctggttgcggcgaaacgccttatgttaaattattgacgcaaatgtttggtgaccgaatgctgattgctaatgcaacaggttgctcatcgatttggggtgctgcagcgggtgtgacaccttacactactaatgaacaaggacaaggtccagcttggtcaaattctcttttagaggataatgccgagtttggttacggcatgttgttagcaacgcaagcgcgtcgcgaacgtttagctagtaaaatgaccaaagctttttctgtagccagtgattctttacgtttattgatggaagattggatagcacatctgtccgaaagtgaaggtacgcaacaacgtgcagctaaattacgtgcagctttgcttgaagaaaaaacgaatcaacctttattggaagcaatttatgacgatcaagatctttttgttaaaccaagtcagtggatgattggtggagacggctgggcttacgatattggctacggcggtattgaccacgtgttagctagtggcgcggatgtaaatatgttagttctagataatgaagtctattccaatacaggtggccaaacttccaaagcaactccggcatcagcgattgcgaaatttgctgccagtgggaagtatgcctctaaaaaagatttagggatgatggcaatgacttatgaaaatgtttatgtcgctcaaattgcctcaggtgcaaaccaaatgcagacgattaaagcttttgaagaagcagaaaaattccctggaccatcgattattattgcttatacaccatgtattacacatggtttagcaggtgggatgagtcaaacgttgaaagaagcgaaagacgcggttcattcaggttactggtctttatatcgctataatccattattgcgagaaaaaggcaaagaaccaatgatattggatttcaaaaaaccagatttttcattaatgaaagagtttatgcgccaacaagttcgctttgcgtccttagaatccagtcaaccagatacagcggaattgttatttaataaaacaattaatgatgctaagagacggttctataattatgctcgtttagctggtcaagaagaaaaaattcgagcaaaacttgaaaaacaaagtgaaccagaaataaatacgccagagaacgagaagccacgagtgaaaaaagaacgcgtagttgatccggaagcggaagcaagaagggctgcccgccgcgcagaacgagcagccaagagaaaacaacgtgagcaagattaa

SEQ ID NO: 1564 - DNA, 480 bp, Enterococcus faecalis
ttattcagaagtatattgaggggtgaaattttggaattaaaaaaaacgatttccaacaaaataatgattattttaattgcaattatcgttgcaatctttgcaatgggatggattctacctattggcatcgataaagtaactaggttaagttaccgagaatacttatttagtacatatactgtatttacacaatttggctttctaatgttttcgtttctagtctctttctttattaataaagagtactcaggaaaaacaattttattttatcgtatgatgaataccaatagccttactttttatataaaaaaagttttgacacttacggtagagaccctaggcagtattctagttctgttatttatcgtttcctttatttttatggatttttctgtaattctgcaaatgttttttttattatcgatgatttcaattcagtatattttaattgttgcgttgatcagttttttatcatgctaa

SEQ ID NO: 1565 - DNA, 1281 bp, Enterococcus faecalis
tctacgattattgttgtgccttatttactttacattcaattgagtgatggacacaaccttctaacaattttaccatttgtcttattttatacattgcgtatgacaggcatttttctggttcgaggaattaatttgtctttaactagtctaggtctactaaagatttctctattgttaggcttggcaggctccttaattgggattgccggcgcttattctttcccgctttatagtatttcaggaatgttgttaggacttagtggagcgttgttgccaccaagtaatcaatcaattcgctttttcttaaaagaagaaggtcaaaaaatcagtcatagcaatcttttaacgacagtcttattgaccgctgttttatttggcgctttattttttaaagcgactgagattggactggcgttattggtgtacgcgctctattttctggttgctttagtagcaatcaagagctatcctgtttcattaaacgagctagaagaagaatcagcagaagtttcacgaaaagaattaattctgtttgttatcttttttgtgttattacttttattaagaaatggtcgcttattaacgaatgcggtggaatttgattatgcgattgttggcgcctgctgtttctttgtggtggctgtccttttcgttagtcattatggcaaacgcggtgcgtataaagtatcattagaaatgaatcttgcgaccttgattaacgggattgtggggaactatttatttttatttggttccatttatgttgcaggggtttacggcagagctcatatgggcatctatctctatttaccttatgttttagggatgatttttgcaatgattgcagctagtaaaacgaaacaatggtcaaacaacataccaatgattggtctggcgggaagtttgggaatattacttcttacttcgtggactattttaggcctgtttctcttgagttttttcaaaagcacattgaatagctttttagctaggcgatattatcaagagacagatttgccaaaagatagccgtatccttatcaaatacacaacacaaacaaaagggagtttattccatcaatttattttgatggcgcttatgttagtcactgtagtaggcaaaggtggcacgacacaatttttattagaattgactggcggcaaaggcatttcaatgcaaacaagtcaatttttaactttcattaaaaatagtaactcgctcttagtgttattgtttattgcagtttatttcgtggtcgtttttcgtcaaaagaaacgataa

SEQ ID NO: 1566 - DNA, 3702 bp, Enterococcus faecalis
aaggggattagtatgaagaaaaaaactttttcttttgtgatgttgagtatacttctcgcacaaaatttcgggtttgccgtaaatgcctatgctgtaacaacgacagaagcacaaacagagaccactgatacagcaaaaaaagaggcagagttatcgaactcaacaccatctttacctttagcaacaacgactacttcagaaatgaatcaaccaactgcaacaactgaatcgcaaaccacagaggcgagcacaacagcttccagtgatgctgctacaccatctgaacaacaaacaacggaggacaaggacacctcacttaatgaaaaagccctgccagatgttcaagcgccaattacagatgaactacttgacagtatgagtcttgcgccgattggtggaacagaatacagccaaacagaggttcaccgcgaattaaatacaacaccggtaaccgctacgttccaatttgctgttggaaacacaggttatgcacctggatcagtttatacagttcaattaccagaacatttaggttattcaactgtcagcggagaagtgacaggcattggcgcaacttgggcagtcgatgcggcgaccaaaacattaagtattacgtttaatcaacgagtttcagatacttcctttaaagtagaactaaaaagttatctaacaacagaggcggaaccattaatcaaaattgaaactccaggaaaaaataaaaaaacctactcgtttgatttatatgaacaagtggaaccaattcaatataacgaacgaaccagaacgacggggttagatggcgaaattttttataatttagaccggacgttaactggcaatcaaacattagaattattaacaacagagacgccaggcgctgtctttggaaaacaagataacttggaacctcaagttttcagttacgatgtcgacattaatggtcaaattttaccagaaacgcaaaccttgttaacacctggcaaagattatacattaagcgataattcactcgggcggattgctgtaactgttccaaacatgaatcaacaaaaagcctattccttatcgattaatcggacaatttatttagagagtgcttcggactataactacttatattcgcagcagtatccaacaacaaaaattgggtcaatttctttgaaaagtacgacaggaactaaacaaacaaccgattttactgctaagacgagtcaaacaagtaaagtaattgctgatcgtgaaatgcgtagtatgtcctatatcagttttcaaagcaaagggaaatattatgtaacaatttatggcacgttaacagaaacaaaagtgggtcaacaaatcgtattagagagtacaaacggtcaagaaattaagaatcctaaatttacggcgtatggtcctttatatgaaaatgtaaaattggaagactattttgatattaaaactgaaggtggcaagctcactttaacggccacaaaagatagctatttaagaataaatatttctgatttaacaatggattttgacaagaaggacattaatctatcattaagtacacctgtaattggtcctaataaagccattcaattagtatccgatcaatatattgaaccaattagtgttgttaatcctttgaatgctgaaactgcttggggtaattatgatcaaaatggtgcctattcatcaagaacaactgtctcagttatgggaagcaaagagaaaccgattcaaaatttagaaattaaagtaaagcatcctaattatctttcattacgagctacaaaagaaatttatttttattacaagttaggaacggattatacagtaacgccaacgtcagatggttcagttattaagttcactacgccaataaccaacgaaatccaaattccaattggttttaattatgtgccagatagtttgccaaaagataaaagtatcccagtcgatacgataccgataacaatgagtgctgaaggtttaactccagttgatacgacagtaactactaatagtaagcgtggttctgaacgaacacttcaaagtagtaaaaatcaattccttgtcaatgcacgaaatgattcttttgactcactaagcgtccgtacaaaaattccagctggcgccgatgttctttttgacatttatgatgtttcaaacgatcaggtagattcaatttatccacaatactgggaccgcggtcaatactttgataaaccaatgacgccaaacagccctggatatccaacgattacttttgacgaaaataccaatagttacacgtttgattttggaaaaaccaacaaacgttacattattgagtataaaaacgccaatggctggatcgacgtgccaactctttatataacagggacagcgaaagaaccacaatcgaataataatgaaggctctgcttcggtttctgttcaaaatgaagcgttagacattttgagtgcaacacaagcggcgaatccaacattaaaaaatgtaacaaaaacgacagtaacaacaaaaaatattgataataaaacacatcgtgtgaaaaatccaacgattgaattaacaccaaaaggcacaaccaatgctcaaatcgatttgaattctattaccgtgaaaggcgtgccagaagatgcttattcattagagaagactacaaacggtgcgaaagtcatttttaaagactatacattgacagaaaacattacgattgaatacaatacggtctctgcaaacgctggccaaatctatacagaaacaacaatcgactctgaaacattgaaccagatgtctgctagcaagaaaaaagtcaccactgcgccaatcacattgaaattctcagaaggtgatgcggaaggtattgtttatttagcaactgccacattctacacgcataacgtagaggatgaaaaccaagcaattgcgaaggtttcttttgaactaattgataatgtcacgcatacagcaaccgaatttacaacagatgaaaaaggtcaatactcctttgatgccatcatgacaggtgattatactttgcgagtaacgaatgtaccgcaggaatattccgtggatgaagagtatttgacaggaaaagccattaagctggtcaaaggagacaaccaactaaaaattccattaacgaaaacaattgatcacagtcgtttacaagtcaaagattcaacgatttatgtcggcgattcatggaaaccagaagagaactttgtttcagcaacagataaaacaggtcaagacgttcccttcgaaaaaatcactgtttcaggtcaagttgataacaccaaagcaggcgtttatccaattatttacagtgacgaaggtaaagaagaaacagcctatgtgaccgtcaaacccgaccaatctaagttagaggtcaaagatacaacgatttatgttggtgattcgtggaaaccagaagataatttcgtttcagcgacagacaaaacaggtcaagacgttccgtttgaaaaaattgatgttcagggaacagtgaatgttgataaaataggcgattatgaaattgtctataaaaatggcaaaaaagaagcgaaagcaatcgttcatgtccgtgatgacagtcagttagaggttaaagatacaacgatttatgttggtgattcgtggaaaccagaagataatttcgtttcagcaacagacaaaacaggccaagacgttccgtttgaaaaaaattga

SEQ ID NO: 1567 - DNA, 339 bp, Enterococcus faecalis
aaaaaattgatgttcagggaaacagtgaatgttgataaaataggcgattatgaaattgtctataaaaatggcacaaaagaagcgaaagcaatcgttcatgtcgtggatgatagtcgtttacaagtcaaggatacaacgatttatgtcggcgattcatggaaaccagaagagaatttgtttcagcaacagataccacaggtcacgatgtcccattcgaacaaatcactgtttcaggtcaagttgatactagcaaagcaggcgtttatccaatcatatacagttacgaaggtaaagaagaaacagcccatgtggccgtcaaacccgaccaatctaagttag

SEQ ID NO: 1568 - DNA, 729 bp, Enterococcus faecalis
tcgtttacaagtcaaggatacaacgatttatgtcggcgattcatggaaaccagaagagaatttgtttcagcaacagataccacaggtcacgatgtcccattcgaacaaatcactgtttcaggtcaagttgatactagcaaagcaggcgtttatccaatcatatacagttacgaaggtaaagaagaaacagcccatgtggccgtcaaacccgaccaatctaagttagaggttaaagatacaacgatttatgttggtgattcgtggaaaccagaagataatttcgtttcagcgacagatcgtgatggtcatgctatatcctttgataaggttcaagtaaaaggggaagttgatacaaagaaaacaggagagtaccagatttcctataccactgagccagttaatgaaaccaaaccagctgtgcagtcacgacttttctcaatgttttcaaacgaaacacctcgtcaattaacgacagtagcaactgttcatgtgattgatcgtaatcctacaccgctaccagataaaaatgagaacaaccagactagttcttcaacgaatcaaaccacgataaaaagtagtcagtatgtcacacacattgtgaaacctgacaagcaaggacgttatcccaaaacgggagaacaaactaatggtctatatcgtgtgctaggacttgttgtattacttattgtgattattagtggtatagtcatcaagaagaaacgaaaataa

SEQ ID NO: 1569 - DNA, 540 bp, Enterococcus faecalis
tttggaggaataataaacgagatgaaccagcgaactatttattatggtagtatcggcacagccttatttctttcttcaggaatgttgattgcttcagtgaatagctatgcaaacgaagcgacaacaccaggcaaatacaccgtgacttatgaagtggatggcaaaattgaaacagcaaccattacggtcaaagaaaatcaaacggaacttaaattaaaagacacgtttttaggagttaatcaagcatggtcaccattagacaatgtcgtttttctaaaagataaagatggtcgccctttaaatttagaaaatgtaattatagaaaataatgtaaatactcaaaaagtaagcctttattttgtaaccttccgttacgagtcatacctttctattgcgaaagtgtatgtcaaccctactaattttgctgcagaagggaatatgcttgccgagcttccttatagtcaagcaatgattggcccagaaagatcaattattgcctcgagacaggacaaggaaccacaaacaaccctggagaattaa

SEQ ID NO: 1570 - DNA, 252 bp, Enterococcus faecalis
ttggcccagaaagatcaattattgcctcgagacaggacaaggaaccacaaacaaccctggagaattaaaaacaatatttttgaacaggaacgagtaaataaaaaggtgctgttaaatgatgagttgttgaaaaaaatagatacgatagccccagtggaaattactggaggagcggcaagtgggtcctctcaatttggcaccactttaagcttcctgtcaggctcacttttgtatggaacaaggagagtttaa

SEQ ID NO: 1571 - DNA, 447 bp, Enterococcus faecalis
atggaattcttgttattagatgatcgggaaaatttaaaattagcgattattagaaagttagagcaacaatattcattttctgaacgaaaagatcgtttatgtaagcaattagctatttctccttatttgctagaacggaacataacagaaatcaatgcagatttgcaacgctttggtctgattaatgagatggaaatcagtgaaaaaaataatgaaattttgttatctcaaagccttcgtatttcttcaagtattattgaagaatattatttaaaagactcgttagaatttaatctattaaaaacgattttctttcatcagtttacctcaatcaaaaaatacggtgaaaagcacgggatgagtcgaacggttgtatataaaattgttgaccatatccggaaagaattaggtcaatacggtattaagttatccaaaaatttacaactt

SEQ ID NO: 1572 - DNA, 234 bp, Enterococcus faecalis
aggagtgacacgatgagtcgtgtagatcgttataaacatattcatgaaaaatcgagaccagcagagcataaaaagacctttaatccccgaaaatcaatgggtgaacatagagaagaagaaccagaagaactagctgaaagccttcaagagccagtttacgaagacagctatactgaggacgtcgcagaagtgagaggcgacatcaaacagattcaggtggtggcaacgttctga

SEQ ID NO: 1573 - DNA, 864 bp, Enterococcus faecalis
aggagtagagaaacgatgaaagttggttatttaggtccgattggttcctttacgtacagtgcaacgttggctgcttttcctgaagctacgttgatgccgtacgcatcgattccagcttgcttgaaagcaattgaacagcaagaagtggcatggagcattatcccaatagaaaacacgattgaaggaactgttaacgcatcgatagattatttgtatcatcaagcgcagttacctgtccaagcagagttagttttaccgattcaacaacaattaatggtggcaaaagagaatcaagcgatctggcaacaaagtcagaaaattttatcacatccgcaagcattagctcaatcgcagatgtttttagagaaaaactttccagaagcgattttagaagcaacaccttcaacagcttacgccgccaaatacattgcagaacatccagaattaccttttgcagctattgcaccaaaactttctgcggaaatgtatgatttgaccattgttgaaaaaaatatacaagatttatcggtaaatcaaacccgattttgggttcttggttctgaaaatttagcgatttctttcccgctatctgagaaaaaaataacactggcgattacgatgccaagtaatgttcctggctctttacacaaagtattaagcgtgtttagttggcgagggattaatcttagcaaaatagaatcgcggccgttgaaaacaaagctaggagagtacttctttttaatggacttagtgaaagatcaaccagataaattaattgaagcagccttaacagaactggaactcattggtgcagaaataaaaattttaggggattacccgatctatgttttgtccacactttaa

SEQ ID NO: 1574 - DNA, 513 bp, Enterococcus faecalis
cgaaccatggaaagcattgttttaattggtttcatgggtgcgggtaaaacaactatcggccaaagtttggccaataaactgaagatgcctcatcttgatttagatacagcgttaattgaaaaaataggacgctcaattcctgactatttcgaaaaatatggtgaagcagctttccgagaacaggaaacccaacttttaaaggagctgtcaaaaaatacagccgtcctttcaactgggggcgggattgttgtcggaccagaaaatcgtagcttattaaaatcttttcagcaagtgatttatttacatgcgacaccagaagagctgttaaaaagaatcacagaagatactgaaaaccaacggcccttagctatagaacgttcttcaaaagaaatcattactttgtttgagtctcgtaaaaatttttatgaagaatgtgcgaagatgacaattgatacgaccaatcgctcgccagaagaaattatcaatgaaattctgcaacaattaaaggagtag

SEQ ID NO: 1575 - DNA, 1293 bp, Enterococcus faecalis
gaggtgatgagggtgcaactacgtacaaatgtgaagcatttacaagggactctgatggttcctagcgacaaatcgatttcccatagaagtattatgtttggagcgatttcttctggaaaaacgacgattacaaattttctaagaggcgaagattgtttaagtaccttagcggcgtttcgttctttaggtgtgaacattgaagatgacgggacgacaatcaccgttgaggggcgaggatttgcaggcttaaaaaaggcgaagaatacaattgatgttggaaattcagggacaacaattcgtctgatgctgggcattttagctggctgtccctttgaaacgcgcctagctggtgatgcgtctattgccaaacgaccaatgaatcgtgtaatgcttcctttaaaccaaatgggagcggaatgtcaaggggttcagcaaacggagtttccgccaatttctattcgcgggactcaaaatttgcaaccgattgactacacaatgcctgttgcaagtgctcaagttaaatcggctattttattcgccgctttgcaagccgagggcacttctgtagtggttgagaaagaaaagacacgtgatcatacagaagagatgattcgacaatttggtgggacacttgaagtagacggtaaaaaaattatgttaactggaccgcaacaattaacaggtcaaaatgtggtagttcctggtgatatctcttctgcagctttctttttagttgcgggtttagtagtcccagatagcgagatacttctgaaaaatgttggcttaaatcaaacgcggacaggtattttagatgtgattaaaaacatgggcggttccgtcactattttaaatgaagatgaggccaatcattctggcgatttacttgtaaaaacgagtcaattaacagctacagagattggtggcgctattatcccacgtttaattgatgagttaccgattattgctttgttagctactcaggctactggcacgacaatcattcgagatgcagaagaattgaaagtcaaagaaaccaatcggattgatgcagtagcgaaagaattaacaattttaggcgccgacatcacgcctactgatgatggcttaattatacatggaccaacttctttacatggtggaagagttaccagttatggggatcatcgtatcgggatgatgttacaaattgctgcattacttgtaaaagaaggcactgttgaattagataaggctgaagcagtttcagtttcttatccagcattttttgacgacttagaacgtttaagttgttaa

SEQ ID NO: 1576 - DNA, 1128 bp, Enterococcus faecalis
tggaagaaagtcgcaagtatatggagggaaaaaatgaagaaacgtattttaatcgtaggattagggctaatcgggagttcactggctttgtgtatcaaaaaagggcatccaaacagtgagattatcggtttcgataatcaagcggaggcaactgaatttgctaagaaaacgggtctaattgatgagatagctgaatctttaacaagtggggcaagacgagcagagattatttttctttgttccccagttaaagcaactttagtacaactagaagaattaaaccaattatcactagaaactgctctgatcacagatgtgggtagtaccaaggtggaaattaatcagttagcaacaaagcttaacatgaaaaattttattggtggtcatccaatggctggttcacataaatccggcgtaacagccgctgatgaacgtttgtttgaaaatgcctactatatttttaccgatgaccatggcgaaaaaaacaaacagattcaggagttacaaacgttactaaaaggaacgcatgcgaagtttattacgatgcctgcacaggaacatgatgaaattactggtgctctaagtcacttgccacatattgttgccgcagcgttagtgaacgaaagtcagcaactgaataccacttaccctagagcgcagcagctagcggctggaggattcagagatattactcgaattgcttcctctgatgcaacgatgtggacggatattttattaagcaatcgcttagtattattggacttactagaaaattggcaaaaagagatgactactgtttgccaatggttaacagaaaaaaatgccccagctattcgtaatttttttgataaggccaaagaaacacgtgctcaattgcctattcataaagaaggcgcaatcccagctttctatgatctgtttgttgatgtaccagatcaaccaggaatcattgctgaaattacgcaaattttaggcgaagcggacctttctcttacaaatattaaaattttagaaacgagagaagaaatctatgggattcttcaattgtcttttaaaaatcaaccagactgccaagctgcaaaacaaattttatctaaaaaaacgaactatacgtgttacgaaaaataa

SEQ ID NO: 1577 - DNA, 1188 bp, Enterococcus faecalis
acagagaaggaggaatttaagatgcgctttattacagcaggcgaatcacatggacctgaattaactgctattattgaaggcttaccagccggcttgcctttaagtagcgaagagattaaccgagaattagcaagacgtcaaggcggttacggtcgtgggggacggatgaaaattgaaaaagaccaagtacgtattacttcgggtattcggcatggtaaaacacttggctcaccagtaacgttgattgtcgaaaacaaagactggaaaaattggacctccgtgatgtcagtagagccagttcctgaaaaacaaaagaaaatccgccgcgtcagcaaaccacgtccaggacatgctgatttagtcggtggcatgaaatatcaacatgatgatttacggaatgttttagaacggtcttcggcacgagaaacaacgatgcgtgtggcgattggtgcggttgctaaaaaactcttagctgaactggatatccaagtcgctgggcatgtcgcggtattaggtgggattgaagctacgatccctgaaaatttaacgattcgtgaaattcaagaacgatctgaacaatctgccgttcgcgtattagatccttccgtagaagaaaaaatgaaagaactaattgaccaaaccaagaaaaatggcgatacaattggtggggtagtagaagtacttgtgggtggcgttccagctggcttaggtagctatgtccaatgggatcgtaaactagatgccaaaattgcgcaagcagttgtaagcatcaacgcttttaaaggtgctgagtttggcattggatttgaaatggcacaacgccctggtagtcaagtgatggacgagattgtttgggacgaaagtactggttataccagaacttccaacaatttaggcggttttgaaggaggaatgaccaacggaatgccaatcatcgttcgtggtgtcatgaaacctattccaaccctttataaaccattacaaagcgtgaatattgatacaaaagagccttataaggccagtgttgagcgctctgatagcacggcggtaccggccgctagcgttgtttgtgaagccgttgttgcaacggaagtagcaaaggctatgctcgaaaaatttgatagtgactcatttgaacaaatgaaagaagcagtgaaacgttatcgtctatatactcaaaacttttaa

SEQ ID NO: 1578 - DNA, 1107 bp, Enterococcus faecalis
aagattagtaaagacagaggagtagaggacatgaaattaaccgtaacgttacctacacattcatatgatttaaccatcgaaacaggtgccttagataaaattggcacctgggtacgtagcctgtggcagccacaacgggtagcgattattaccgatgaaacggtgaataaattatatggcgcagctgttgagaaagaattgcaagctgctggttttgaaacatcattgattgctgtagcggcaggtgaacaaagtaagagcctcgaaatagctcaactgctttatgattttttagcggaacagcaattgactcgaagtgatggtctaattgctttaggtggaggcgttgtgggagatctagctggatttgtcgcttcaacctatatgcgcggtattcactttttgcaagtaccaacaaccttactggcacaagtagatagtagcattggaggtaaaacagcggttaatactaaaaaagccaaaaatcttgtcggtacttttgcccaaccagatggggttttaattgatcctaatacacttaaaacattagaacctagacgtgtgcgtgaaggaattgcagaaattgtaaaatcagcagctatcgctgatgttgaattgtggcaccgtttatcctctttggaaaatgaacaagatttagtggcacatgcagaagaaattatcacggcctgttgcaagattaaacgtgatgtcgtcgaagaagatgaattagatttgggcttacgtttgattctgaattttgggcatacgatcggccacgcattagaaaatacagctggttacggggtgattgctcacggtgaaggcgtttctttaggaatgattcaaataactcaagtcgcagaacaacaagggctttccccacttgggactacccaagagttggtcaccatgctagaaaagttccatttaccagtaaccacagatcgttggtcagaagaacgtctctatcaagcaattacacatgataaaaaaacacgtgggggacagattaaaatcattgtcttagaaaaaattggtcaagcgaaaattgtctctttaccaacggaagaaattcgagcatttttaaacagagaaggaggaatttaa

SEQ ID NO: 1579 - DNA, 531 bp, Enterococcus faecalis
atccgtggtgaagtgtcagatcttgtcgccaaatacagtgacattttacaaatcggtgcgcgcaacatgcaaaatttcaagttattacaagcggttggtaaaactggaaaacctattggcttaaaacgcgggattgctggtacgattgatgaatggctaaacgcagctgaatacattgctgcgcaaggaaatttcaatgtgatcttcattgaacgtgggattcgtacgtacgaaaccgctacgcgcaatacacttgatttaagtgcggtgcctttaattaaaaaattaagtcattttccaattattgttgatccgagtcatggtgttggtatctgggatttagtaccgccaatggcccgagcaggtgttgcttcaggtgcggacggcttgattgtagaaattcatccagatccagcgaatgcgtggtcagatgggccacaatccttgaatgaaaaaacttacctacgtatgatgaaagaagttcatatcatcgaaaaagcaatgaaagaaattaatgctttagaagattag

SEQ ID NO: 1580 - DNA, 1092 bp, Enterococcus faecalis
acgaaaggagtcaaaaggatgaatcgagtagttattaccggttacggtgtcacctcgccgattggcaatgaacctgagacttttttagaaagtttgaaaacagggaaaaatggtatcggaccgattagtaaatttgatgttagtgaaacaggtgtcaccttagcagctgaagtgaaagactttccaatggaaaaatattttgttaaaaaagatggcaaacgcatggataagttttcgttatttggcatttatgcggccttagaagcaatggctatgagtggcttggataccagtcaactagatgtggatcggtttggcgttatggtgggttccggaattggtggtttggaaacaattcaaaatcaagtaattcggatgcacgacaaaggacctgaacgtgtggcaccgttatttattccaatggcgattggaaacatggtggcgggaaatattgctttacgtgttggtgccaaaggaatttgtacttcaacagtgacagcttgtgctagtgcaactcattcaattggggaagcgttccgcaatatcaaacatggctactccgatgtcattattgctggtggagcagaagcgcctattacagaaatcggtatttcaggatttgcttccttgaccgctttaacaaaggcgactgatccagaaaaagcctcaattccctttgataaagaacgtagtggatttgtgatgggagaaggagcgggtgtctttattttagaatcattagatcatgctctagaacgaggcgcaactattttaggtgaagtggttggctatggtgctaattgcgatgcctatcatatgacatcaccaacaccagatgggagcggcgcagcgaaagccatggtactagcaatggaagaagcggggatttctccagaaaaaattggctatattaacgcccatggaacaagcacacaagccaatgacaccgcagaatctaaagcaattgaaatggctttaggtgaagccgccaaaaccgcttatgttactactaccaacaattttaccggaaatccccttaggcccccccggttggaattgaaaggaatggctacccctaaatgcctttacaac

SEQ ID NO: 1581 - DNA, 741 bp, Enterococcus faecalis
aaaatggaattaacaggaaaaaacgtatttattactggaagcactcgtgggattggtaaagcagttgcgttagcttttgcgaaagagggcgccaatattgttttaaacggtcggagtgagattacgccagaacaacgacaagaaattgaagcctttggggtaaaatgtattggcctttctggagatatttccgattttgatgcggcaggtgagatgattcaagcaacagttgaccaattaggctcgattgatattctggtgaataacgctgggattacgaatgacaaattattattacgaatgacaaaagaggattttaatgcctgtttagatattaacttggtaggaacttttaacatgacccagcaagcggttaaacgtatgatgaaacaacgaagtggtcggattattaatatggctagcgtttctggtttaatgggaaatgttggtcaagcaaactacgctgcgagtaaagccggtgtcgttggttttactaaatcggtggcacgagaagttgcgccgcgcggtattacctgcaatgcgattgcaccagggtttatccaaacagaaatgacggatgttttatcggaaaaagttaaaacacaaatgaatgcgcaaattcccttacaaacgtttgggcaagtcgaagatgtcgcagctacagcgattttcttagctaaaagtccctatattactgggcaagtcgtgaatgtcgatggcggcttagtcatgcacggataa

SEQ ID NO: 1582 - DNA, 948 bp, Enterococcus faecalis
caaaaaatgaggtgtcgtatgaaaacagcgattttatttagtggacaaggagcccagtatcaagggatgggtgaagaattatatcaccaagaagcgattgttcgggaaactttcgatgaagcaagtcatatcttaggttatgagatggcagaactttgttttactgaaaatgaacgtttaaatgaaacagaatatacgcaacctgctattttaacagtcagtgtcgcattttaccgtcttttgcaacaaaaaggactaacgcctgatgtcgtagcgggtttaagcttaggggaatacagtgctttggttgccagcggggctttgcgcttttcagaagcagtggccttggtccaaaagcgcggtcagtacatgacagaagcagcaccacaaggaactggcaaaatggttgctgttatgaatgctgagcgtgaagtaattgagaaagcctgccaagaagccagtgctttcggaattgtggctccagcaaattataatacaccacaacaaatcgtgattggtggtgaggttgctgctgttgatcaagcgatgacacttctcaaagaagctggtgtgaagcgaatgattccgttaaatgtgagtggccctttccatacggcgctgttacaaccagcatcaaaaaaattggctcaggatttagcaaaattgaactttcaaacgatgcaaattcctgtcattagtaatacgactgccgaaattatgccccaagaggcaattcaagcgttattggaaaagcaagtcatgtctgcggtacgttttgaagacagtatcgaaacgatgaaggctatgaacgtaggaacgatgattgaagttggtccagggaaaacattaactggttttgttaaaaaaattgacaaaacaattgaaatgcaccgtgtggaagatgttgcaacattaacagaaacgttaacagcgcttactgggaggtaa

SEQ ID NO: 1583 - DNA, 999 bp, Enterococcus faecalis
atgaagtgtacttatcttagaactaaaggacgtataaaatcaatgaatcaagagttatgtgagttgcttggaatcaattatcccatttttcaaggcggtatggcttgggtagccgatgcttcattagcaagtgccgtgtcaaacgctggtggattagggattattgctggcggcaatgccccaaaagaagtcgtaaaaaaagaaattaaaaaagttaaagaattaacggagcaaccctttggtgtcaatattatgttactttcaccttttgccgatgaaattgtcgatttggtttgtgaagaacaggttcctgtcgtaacgacaggtgcaggcaatccagccaaatacatggctcgttttaaagaacataacattaaagtaatcccagtagttccttcagttgctttagcaaaaagaatggaaaaaattggtgccgatgctgtcatttttgaaggaatggaagctggtggacatattggcaagttaaccactatgagtggcttaccgcaaatcgttgacgctgtgtcaattcctgtgattgcagcaggtgggattggtgatggtcgtggtatggctgcggcctttatgttaggtgctgaagcagtccagttaggcacacgttttttaattgccaaagaatgcaacgttcatccagattataaacagaaagttttaaaggcacgtgatttagatgcagtaattacctgtcaacattttggccatccagtgcgtactttaaaaaataaattaaccgctcaatataatcaattagaaaagcaagaactccaaaaagaagtgcctgatttagaaatgtttgaaaaaattggtcagggcgctttgcgcaaagctgtcgttgacggggatatggattacggttccgtcatggcgggacaaattgccgggttaataaaaaaagaagaaacagcccaagaaatcattgattcactcatgtctgaatgcaaagcgattgtacataagatgaatcagcgttggggctaa

SEQ ID NO: 1584 - DNA, 981 bp, Enterococcus faecalis
aaagtgaggatccccatgaagaattatgcacgaattagttgtacaagccgttatgttccagagaattgtgtcacgaatcaccaactgagtgaaatgatggatacctctgatgaatggatacattcgcgaacaggcattagtgaacgtcgcatcgttacgcaagaaaatacgtctgatttatgtcatcaagtcgcaaaacagttattggaaaaatctggaaagcaagcaagtgagattgactttattttagttgcaacagtgacaccagatttcaatatgccttctgttgcttgccaagtgcaaggcgcaattggcgccactgaggcctttgcttttgacatcagtgcagcgtgttctggttttgtctatgccttaagcatggcagaaaaactagtcttaagtggtcgttatcaaacaggtctagtaattggtggcgaaacattttccaaaatgttggattggaccgatcgctccacagcggtgcttttcggtgatggggctgccggcgtcttgattgaagcggctgagacaccgcattttctaaatgaaaaattacaagcagatggacaacggtgggcggctttaacgtcaggctacacgatcaacgaaagtcctttttatcaggggcataagcaggcgagtaagacgctacagatggagggacgtagtatttttgattttgcgattaaagatgtttcacaaaatattttatcactcgtgacggacgaaaccgtggattatcttctactacatcaagcaaatgtgcgcattatcgataaaattgcacgtaagacgaagatttcccgcgagaagtttttaacgaatatggataaatatggcaatacctcagctgctagtattcctattttgttggatgaagcagttgaaaatgggaccttaattttaggttcccaacaacgcgtggtgctaacaggatttggcggcggcttaacatggggctcactgctcctaacgctgtaa

SEQ ID NO: 1585 - DNA, 441 bp, Enterococcus faecalis
atggaacctattttagaaacagtcaacgattacttagtcagtgtctttaatgacatcttaacgattgaagaatctgaattgaaaaaatcacaatttaatgatttatccattacggagatgcacacaatcgaagcaattggtatgtacaagaaaaaaacgtcttcagaagtagccaaggaactgtcaattaccgtcggaacacttactgtagcgattaacaacttagttaaaaaaggctatgttgaacgtttgcgtagtgaagatgatcgacgtgtactaaagcttggcttaaccaaaaagggaaaattactttttagagtccatcagcattttcatcgtgaaatggttaaaaacattttgaaaggcatggagcaagaagaagaacaagcgctgttaagagcactaaaaaatcttcatgatttcttgcaagaatacaaataa

SEQ ID NO: 1586 - DNA, 474 bp, Enterococcus faecalis
attttaggcggaatggctaatacgttttttcaacacaaagcagatcgttatgcggaagaaggaaattataaaggggtcgagcgctgcaatgttttaggaatttttccttggacgatttctcgtgtcatcccagtttttattggcctagcttttggtgaacaagttgtaaacgctatcaatgattggattcctatttgggtgatgaatgggttaaaagcagcaggcgctattttaccagcgatggggattgctattttaatgcgttacttgccaattaaaacatactggccttattttattattgggttcgtgttacttgcttatggggcccaattcttctcagttttaggtgtcgcactggttggcttggctttagcagcgatttatgtgatgaatcataacaaaggcggcgcagctacaacaagtggcacggttatttacgaagatgatgaggaggttgagattgatgactaa

SEQ ID NO: 1587 - DNA, 891 bp, Enterococcus faecalis
atcataacaaaggcggcgcagctacaacaagtggcacggttatttacgaagatgatgaggaggttgagattgatgactaacaaattaacaaaaaaggatattaataaagtttacgtccgtaatctttttggctatcagtggggctggaactatgaaaaaatgcaaggacttggttacgcttgggtgatgatgcctgcattaaagcgactatacagtgaagatccagtagctatgaagaaagccttgaagacacatcttggctttatgaatacaacgccagccatgtcgcacttaattgtcggagctgatatggctttggaagaagaagtcggcattgaagatgaaacggccattactggtttgaaaacaggtctaatgggtccgtttgctggtgttggtgataccatttttatcgcgatttatcgtgcgattgttttttcgattgcagcttacatggcgcaagggggccaggttgttgggttactgatcccgttaattgccggagcagtggtcctatgggttcgctataaattcacttggattggttaccatcaagggaaaaaaattgcgacagaatttgcggataaaatgaaattgtttacgcaaggtgcagccattttagggttaacagtggtcggcggtttgattccttcggtaattacttacaaattagatttaacttataaaatgggagatgtaacattatctgttcaagaaatgttggataaaattttacccgcattaattcctttagggattgttcttttatcctattggttactagggaaaaagaaaatgaattcaacacggctaatctttgttttaattttaattggcatggttttaggcaatttacaaccaatgttggcttgggttggcggtttattttaa

SEQ ID NO: 1588 - DNA, 489 bp, Enterococcus faecalis
gagagatttattatgacaattgtacatgcaagagtagatgagcgtttaattcacggacaagttgcaaccgtttggacgaatacggttggcgcacaaagaatcatggtagtaaatgatgccgctgtcaaagatcaattacaaattggtgccttaaaaatggctaagcctgcaggagttaaattatccattttatcaaaacgtaaagcgattgaaaaaattttagcaggcaattatgatgaagaaaaagtctttttaattacgaaagacattgcagatatggcggctttaattgatggcggtgttccgttgcagagcttcaatgtcggcaatatttctcaaaaagaaggcagtcgagcaattaaaaaatctgttgcattaaccgatgaagatattcaaaccgttcgtcgtttaacagataatggggtgactattaccgcacagatgatcccttctgaaccaaacgaagcaattttaactttcataaaatag

SEQ ID NO: 1589 - DNA, 873 bp, Enterococcus faecalis
aatagaaatggagatgagaagatggagccaatccgttcaatcagacaaaaatataaggacttttccaaagtaaataagagaatcgcagactatatactgaaggatccgacccgtcttctctcattaacagcaaacgaaattgctagcaatagcgaaacttctccggcgtcagttacccgtttttctaaacaattagggtttgacagctgggaagagttaaaactatccattgcagcggtacaagctgccagtaacgataaaaaagatattgatccaattgtagcggtggatgattcggtggatactatttgtatgaaagtggaatctttattaaatgctacgattgaggatttattttatacagtggataaacaagccttggaacgagcaatcgcgcatgttaaaaaagcggaaaaaattcatttggttggaattggtgcctcttctttaacgacttataatctttatcacaagtttaaccgcgctggtcgccaagcaatttttaattatgatagtcacatgatgttggagtttttaaattatgcaacggcacaagacattttgatcacggtctcctatagtggtttgacaaaagaagccttaatcgcctgtgaaattgccaaaaatagaggcgcaacggttatttttattaccagtaacgatggagaaaacgtgcgatcattgagcgatgaagttcttttagtccccaataatgagcacctcattcgagttggggctatttcatcgattgcttcgtcaatggcaattggcgatgttctgtatttaggttcaattcaagatgatttagacacagaaattgaacgcaatatgattgaaacgagtcaacttgtcagccgtctaaaagagaagtag

SEQ ID NO: 1590 - DNA, 942 bp, Enterococcus faecalis
aacgagtcaacttgtcagccgtctaaaagagaagtaggggtgtgcaagcaaatgaacttagaaggattaacgacagaagccagaaatgaagcgactaaaaagattgaccaagtgtcaacattagaaatggtaactttaataaatcaagaagaccaaaaggtagcacaagcaattgaaaaggtgcttccgcagattgctgcagcaattgatgcagcggcagaacgatttaaaaaagggggccgtttaatctattgtggtgcaggaacgtctggacgtttaggtgctttggatgcgattgaattaacacccacatatagtgtgtcgccagaacgcgcatttggtattttagctggtggtgaaaaagcaatgtatcaagcaattgaaggcgctgaagactcgaaagaattagctatcgaagatttaacgcaacatcaattgactgcccgagatgtcgtaattgcgattgctgctagtggtcggacaccatatgctgtttccgcaattgaatacggaaaaaaagtgggcgctctaaccatttcagttacctgtaataatcaaagtccgatgaatcaattggcggaaattgggattgcgccaattgtaggaccggaagtcattacagggtcaactagaatgaaagcgggttcagcacagaaaatggtgttaaatatgttttcaacaggaattatggttaaagtagggaatatctatcaaaatttgatggtcaatgtacaaccaacgaacgaaaaattaattcaacgtgccacgaatatcattaaagaagcagcagaaatcgaggaatcgcaagccaaagaatacttggaggcagcacagctagaagtggcaccagccattgtaatggcgaaagcccacgttgattttcaaaaagccaaacaactattagcagaacatgacggacggatttcagaagttttagcatag

SEQ ID NO: 1591 - DNA, 432 bp, Enterococcus faecalis
  misc_feature (423)..(423): Nucleotide 423 is "n" wherein "n" = any nucleotide.
acaatgaatcaaatcgcaattcaagaaacaattcagagactgattaatcagcaagtcgttccgggtgtcgcttgggggacgatcacagaagatagcttatcagaacagtatacgggctttttaggtaatactggtccatttgcaagacaaaagatttcatcagctagcctgtatgatttagcgtccttaacgaaagttattgggacaacaaatcgaatgttacaattaatcgatacaaatcagcttacattttcaaccactgtgggggaaatcctacctgattatcaaggactatcttgttcgattggggagcttctactgcatcagagtggactgccagctgatgttgtcgataagaaaaatgtcacaaaaaaaagcttgcaagaaatccatttaacgcattcgttatctgaacgaaggaanaccacttaa

SEQ ID NO: 1592 - DNA, 2394 bp, Enterococcus faecalis
gttcaattcgtggtggacaagtccttgtccttaatagcctattatcttggtggcttatttacgccgctcgtctttttctttaacaatcaaaacatgcctgatgcgctctatttcctaacgttgttgaaaattgggagtgctggcttgagtttttggttcttggcaaaacaaacctttaagattcctaaatggtcccatgtgactttaagtgtgtcttatgcgctaatgtccttcattgtggcccattcagaattaattatgtggctggatgcctttatttatctgccactcgtaattttaggaattcatcgtttaatggaccaacgaaaaccgacattattgtttgtcagttatttcttgcttttcattacaaattattattttggctttatgattgggttgttttccttcctgtactattttgcacgaacgtttacagactggcaacgatataaatctcgaatcgttgcgtattttactacttctcttttagctggtggagcatccatgattatggtcttacctgctgtcttagatttacgaaccaatggtgaaactctttctgaaattacaacctttaaaacagaagcgactgcctttttagatattattatgaaaaatatgattggcgtttacgatacaaccaaatatgggtccattccttttatttacattgggttgttgcctttgattttttgtctcttctatttcgttacgaaagaagttccattgaaaaacaaactactttttggcagtttgtttgtcctattgagtgctagcttttacatcacgcccttaaatttattctggcacggtatgcatgcgccgaacatgtttcttttccgctatagtttcctcttttcattcttagttattttgcttgcaggttatggttgggataaatttgaaaaggatgatctcggtgtcttaagcggcttgattttgattcttttagcaatttttgctcttgcaatgggcacaaaaggtgctactagttatacgtatgtgactttaacctctttcgtattaacggcaacttttttactattatactttttcgggattgctttttatcaattgaaaaaagcgcctatgcaatacttagtgattttgttattgctgctcgtttctggtgaagcaatcattaacacacgggcgatggtcactggtattttagatgattggaactacgcatcacgcagcttgtattctgagccttatcctgacttaaaaaatctagtcgatcaaacaaaaaaagaaaatgataccttttaccgcttggaaaatttaaatggtgtttcggccaatgacggcattaactatggctacagtggcattagcatgttttcttccgtacggaaccgacattcttcaacatacctaaacgccttaggtttccgctcacgaggcacgaatttaaatattcgttaccaaaataataccttgttaatggatgctttgatgggcattaaatacaagattgctgaaaacaatccaatgaaattcggctttgagcgacaagctgctgctggtaaatatcagctttatcgtaacgaaaatgctttgccgttaggatttttagcagacaaagagatttacaatgtccggcaacctctcaatgataatttaggtagtcaaacaaatttactaaatgctttagccaatactaatgaacggtattttaccttttatcaaccaacgatgacgcttcaaaataacgtgacaattacgcaaaatacagctggcgtaacttttacggagaaacaacataacgtagccaaagagatttcttatacagtcaatgtgcccgccaatacgcaagcttatttgagtttattcccaacggattttgctcaattggaaagttccactgcgacggtcaccgtgaacggctcaagtcagcaatcacaaattggcattactggccaatattataacttaggttactatcccaaagatacaaccgttaacttcaaagtaagtttttatggaaccaaagcagtaagttttgttcagccgcaagtggttggcttaaataccaatgcatttgaaaaagccatttccgccgtgcaagaaaaaggcgttgatttaacaactggcaaacgctctgcttcaggtacctttaccgccgacaaagatcaagtactcgtcactacaattccttatgacaaaggttggcgtgtcaaaattgatggcaaaaaagttaccccaaaagcctttaaagatgcctttctaagcgttcctgtcagcgctggaacccatactattcagttctcttatttaccagaaggattgattcctggcatcgtgttattcgttctatgtactggtggtttcgttgcctacgtaaccttgattcctgctagacgaaaccgtaaaaaagaagacaaataa

SEQ ID NO: 1593 - DNA, 216 bp, Enterococcus faecalis
acgccaatcatatttttcataataatatctaaaaaggcagtcgcttctgttttaaaggttgtaatttcagaaagagtttcaccattggttcgtaaatctaagacagcaggtaagaccataatcatggatgctccaccagctaaaagagaagtagtaaaatacgcaacgattcgagatttatatcgttgccagtctgtaaacgttcgtgcaaaatag

SEQ ID NO: 1594 - DNA, 2481 bp, Enterococcus faecalis
  misc_feature (156)..(156): Nucleotide 156 is "n" wherein "n" = any nucleotide.
acatatcgctcacagcatgacctgggcggatatttttcccccaaggaacaacaaatacgggcgtttaattgggtttgtcttggaggactattaggggttattccgttgctccttaatgactatgtagtcgttaaattattggaaaaagaaggtaanccaccaatgaaacgaatggattggttaacttcggcttgggtcaccaataccattaataacttagcgggttttggcggcgtggttggggcaacgctacggattaatttttacggaaaagatgtaccgcggggcaaggttgtagcaacggtctcaaaagttgctctgttcttgatttcagggttatctattttatcttttgtggcgtttgttgatttattttttattcgaacccaaaatgtttttcgtgaatattgggtttggttattattgggcagcctgattgcgccagcgctctggtttttcacgtatttaaaacggcgaacattgtttaaaacattttttccaaaagcagtgctcctattattcggcgcttcattaggtcaatggctaggtgggatgtttgctttcttgatgataggtcgcttgatgcaggtgccagtttcgatggtttctgtttacccaatgtttgttatcgctacgttgattgggatgttaactatggttcctggtggtatgggaacgtttgatgtcttaatgattttgggcttatcacaattagggattgatcgatcacaagcgatcgtctggttgttgtattatcgtttgttttattatgtgacgccttttatgacaggagttattttgttcttgcaacaagcaggcatgaaagtcaatcaattttttgataatttacctcggttattttcacaaaaagtggcgcattttattttggtggcggcgttatattttgcagggattatgatggttctattgtcgactgtgacgaatttgtcgaatgtcagtcgtttattccaagtgttacttcccttttcttttaattttttagatcaaacattgaatttatttgtaggattcttgttattaggtttagctcgaggcatttctatgaaagtgaaaaaagcttattggcctacaattattttactaggattttgtattgtaaatacggtggcacgaacgacttcgtggcagttgattgctgtttatgctgttattttattggcggttattttggctcgtaaagaattttatcgtgaaaagtttgtttattcatggggcgctttaacggtagatagtattttgtttggctgcttgtttatcggttatgcggttgctggctattacgccgcacgaccagctggtggcaatcaagttatcaatcactttttgttgtttccgtcagatgatgtttggtttaacggattgattggattaagtatttccttgattggtttattctttttgtatcaatatttagccgaaacaactgttactttaggtgagggatttgagaaagcgcggttgacacgctttttggaaaaatttggtggcaacgaaggcagtcaatttttgtatttaaaggattatggtcatttttattaccaagaagaaggcgaagatcaagtactttttgggtttcaaatgaagtttaataaatgctttgtcttggcggatccgattgggcaacgagagaaatggacagcggcgacactggcgtttatggatcaagctgatttgttaggttatcaattagttttttatcgtatttcggaagaatatgttatgaatcttcacgattgcggctttgaatttatgaaagttggggaagaaggcttgattcaatttgatgagccgtcaacagtgaatcaaacagcctggacggaaacagtgactgaaaaaatagcagcggaagcagcggattttcagtttgaattttatcccgaaacgattagtgatgccttatatcaagagttagaacgagtttctgcggactggtcacggaatcaaaaagagcgctactttattggtggacggttggatcccgagtacttgaaatgcagtagcgtgggcttggtgagacagaaacaaacggtcatcggtttcattactggaaaagaaatggaaaaaggcaaaagtatttcgtatgatttgttacgtattcgttcagacgcacctgcttttactagagaatatttgttcactcattttattgaaacctatcaacagcagggctatcaattaattgatattgggatggcgccgttggctaacgtaggggagagcaagtactctttcttaaaagaacgctttgttaatattttttacaagtatagttatcaaatttatgcgtttcaagatacacgcaagcgcaaagaacaatatgtcactagttggcaaccacgttattttgcttatcctaagcggaccagcgtactctttgcttttgtgcaactttccttgttgattacgaaaggaagacatcaaagtgtttcgcttgtggaagaagcaatgactgaaatttaa

SEQ ID NO: 1595 - DNA, 273 bp, Enterococcus faecalis
cctaatgaagcgccgaataataggagcactgcttttggaaaaaatgttttaaacaatgttcgccgttttaaatacgtgaaaaaccagagcgctggcgcaatcaggctgcccaataataaccaaacccaatattcacgaaaaacattttgggttcgaataaaaaataaatcaacaaacgccacaaaagataaaatagataaccctgaaatcaagaacagagcaacttttgagaccgttgctacaaccttgccccgcggtacatcttttccgtaa

SEQ ID NO: 1596 - DNA, 480 bp, Enterococcus faecalis
gaaaagatagcattccgaaaatggttgcagtacaatggaaaaatagaaacaaataaaataacaaaaagtaacaacttgtcatttactgggggaaaagaaatgaaaacaattaaaacaaagcaagcaccacaagcaattgggccatattcacaagcaaaaattgtgaatggtttattgattacttctggtcagattccactggatcctgaaacaggcaaggtggttgggacaacgattaaagaacaaaccaatcaagtactgaaaaatattcaagggattttaacagaagctggtagtgattttgctcatgtagtcaaaacgacatgctatttacaaaatatggcggatttcacggcattcaatgaagtctatgctgagtattttagtgcggaatatcctgcacgcacaacgattgaaatctctaaattaccgatggatgtgttggtggagattgagattatcgcagaagtagtggcgtaa

SEQ ID NO: 1597 - DNA, 1254 bp, Enterococcus faecalis
tcaattagagatgattttaggttagaaaaaagacagaaggtgaagagtgtgtcgtttgataaagcaattgatcgacgaggaacgtattgtacacagtgggattttgtagaagaccgatttggggaagcggacttgcttcccttcactatttccgatacggattttgctgtgccagaggcagttctggcaacattacaggagcgtttgaaccatccagtatttggctatacgaggtggaaccatccgcaattaaaagaagcaattcaaacgtggtaccagacaagattccagacgaagattgaagaacactggattatgtataccccgaccgttatctatggtatttctgctttgattcaattattgactaacgaaggggagggcattattttacaaacacctgcctatgatgcattttttaaagttattcaggaaaataagcggcaagtagtggcgaatgaactgctttatcaagagaagcgctacagcattgattttattgatttagaaaaaaaactagcgcaaccagaaaatcgctgtttgcttttatgttccccgcataatccaacaggacgtgtttgggagcaatgggaattagagcgaatagtttcattgtgccaacagtatgatgtgtttttactttctgatgaaattcatatggatatcgttaataaaggccatgttcatcgaccaattacgcaatttgattataaaaaatctgccattattaccagtggcacgaaaacctttaattttccagggctgatttttgcttacgccttaattccagataacgaattgcgtgacgcttttcagctcaaattaaaaaacgccgatggtttatcatcaacaagtattttgggaatgctagcaaccatgacggcctatcaaaaatgtggtacttgggttgacgagttgaatgattatttagcggagaaccaacgttacgtgaaagattttttacagacatatttgccaaaaattaaagtgacggagctggaagccacttacttaatgtggttggatgtatcagcggcagttccagatgtggcccgcttacaagcggctttagtttctgtggggaaagtcgctattatggacggctcgatttatggcggtaatgggcaacgatttttacggttaaatattggctgttcgcaagcaaaactacacgaaggacttgaaaggatgcgccaaggttttgaagctgttttacaaaaggatggcacagcatcagcgcttaggaataattga

SEQ ID NO: 1598 - DNA, 1572 bp, Enterococcus faecalis
gaaatggcagtaaagaaaaagaaagcgactttctgggagtttttccaaggattaggtaaaacgtttatgttgccagtggctttattagcttttatggggattttgttgggattaggaagttctttttccagtgaatccatgattgaaacgatcccgtttttaggaaagcccgcagtgaaaattattttccaatttatgtccacaattggtggttttgcgtttgcctatttacctgtcatgtttgcaatggccattccgttggggttagttcggaaagaaaaaggaattgctgcgttttcaggtttcgtaggctatacggtgatgaatttagcgattaatttctatttagtgcagacgaatcgcctcgtggatcctgagcagttgcgggaagccggccaaggaatggtttttgggattcaaacgattgaaatgggtgttcttggtggaattatcgctgggcttattgtctataagttgcataatcgattttatacggtgcaactaccagatagttttgccttcttttctggcgcacggtttgtgccaattattacttcattagtaatggcattcgtgggcttagtaattccgttagtttggccacttttcgcgctaatgattatggcgattggccaacttatccaacgttctggtatttttgggccttttctgtttggttcaggggaacgtctactgttaccgtttgggttgcatcatattttggtttccatgattcgttttactgaagcagggggttcagcggtggtggctggcaaagaagtgtttggcgcgttaaatattttctatgcagaattgcaaaataatttaccgatttcaccaagcgcaacagctttcttgtcacaagggaaaatgccgacctttatttttggcttaccagcggcgtcacttgcgatgtatcatactgcagctccggcgaatcgacataagattaaaggcttactcctttcgggtgtaattgctacggctatcactggcattacagaaccaattgaatttttattcttatttattagtccattattatggctgtttcatgtcattatgactggtctaggtttcatggtaatggctttattaggtgttgtgattgggaacactgatggcgggctactggactttgttatttttggcttgttacaaggaacttatacaaaatggtggtgggttctcattgtcggcgctatctgttttgttgtttattatttcgtctttaaaacagtcattgtaccttttgatttaaaaacacctggacgagacaaggtcttagatgagactgaatataccgatcaagaagttcaatataagaaaacgggtggctatgatgcgcctgggattttagcggctttgggtgggcaagagaatattcaagctattgataattgcattacgcgtttacgtttagtgttagcagatgctaataaagtagatgatgacaaattaaagcaattaggggctttaggcgttgtacatttagatgcgcagaatgtacaagtgattatcggaaccaaagtgacaacggtccgtaatcaattagagatgattttaggttag

SEQ ID NO: 1599 - DNA, 732 bp, Enterococcus faecalis
gaggtaatcatgattgagttagtgaatgtgtcgaaagtctatcaagagacacacgcgttaaaaaatattcacttttctgtccaaccaggagaaatcgttgggattgttgggaaaagtggctctggcaagtccacgttgttacgtttgttgaatttaatggaacaaccgagtgaaggggagattcgtattgatggcagaaatgttcaaaccttctctaaaaaagaagttcgccagcagcaacaacaaatggggatggtgtttcagcattacaatttgttagaaaatttgaaaatttatgataatgttgcgttgcctttgaaacttttaaaagagaaacagcctgaaaaaattgagcgtttattaacgtttgttgatatggcccataaggcagaagcgtatcctgctcagctttctggtggggaaaaacagcgtgtctctattgctcgagcgttgagccgtaatccaaaatggttattatgtgacgaggcaacgagttcattagatgaagaaaatacagaaagtgtcgttcgactattacataagacgcatcaggaattccgaccgactattttctttgttagtcacgaattagaaaccgtgaagcgcttatgtaatcgtatcttagtgatggaaaaaggtcagttaattggcgaatttctgaataatcctcagcaatatgaggaagaaccgctttcctatttagaaaaagtggaaaggagtttgcgtccatga

SEQ ID NO: 1600 - DNA, 720 bp, Enterococcus faecalis
ggaagaaccgctttcctatttagaaaaagtggaaaggagtttgcgtccatgactttttcagaaacctttgccgaatattggccatctatgctgattggtttaaaagaaacagggattatgatgtcgatttcgatggctatctgtttgcttgtcggcttacctttaggcttaggactatttttggctaatccgaaagtcaaagggcatcaaccttggctgtactgggttttaaatttcattgtaactgttattcgctcgtttccttatttattatttgtgattgcgttgattccagttactcgttctgttttaggaaaggcgtttggcccaattccttcatctgtgccattgagtattgttgcgatcgcgatttttgctcgcttggttgaacaagtgctgttggatgttccagaagaaatttattttttagctaattcgttaggtacctcgaaagtccaatacatttggcactttttattggtggaagcacgtagcggattagtccttgcttacacaaccacgacagtgagtatggtttcatattccacggtgatgggtgttgttggtggcggcgggattggcgattttgcagttcgtgtcgggtatcaacggtatgaatacggtattatgtatgttgccattgtgattatgattgcactggtcttcattttacaaatgcttgggaacttcattgcccaaaaactagacaaaagaaagtag

SEQ ID NO: 1601 - DNA, 837 bp, Enterococcus faecalis
gaggacaaaagaatgaagaagttttatttagcaacattcgctgttattgcaacagttattttagctgcctgtgggggaaataaacaagcagaccagaaagaagacaaggagattaccgttgccgtgcaattggaatcttcaaaagatatcttggagattgccaagaaagaagctgaaaaaaaagggtacaaaattaacattatggaagtgagcgacaatgttgcctacaacgatgccgtgcaacatgacgaagcggatgctaattttgcgcaacatcaacccttcatggaaatgtttaacaaagagaaaaaagctgatttagtggctgtgcaaccgatttattattttgctggtggtttctattcaaaagaataccaagatgcgaaagatttacctgaaaatgccaaagtggggattcctagcgatccaaccaatgaaggtcgtgctttagcaattttaaatgcaaacggcgtgattaaattaaaagaaggtgtcggctttaacggcacggtggcagatgtcgtggaaaatcctaaaaacatcacttttgaaagcattgatttactgaatttagctaaagcctatgatgaaaaagacatcgctatggtgttctgctacccagcctacttagaacctgctggtttaacaacgaaagatgcgatcttgttagaagataaagaagcaagtaaacattacgcattgcaagttgtgacacgcaaaggcgaaaaagatagcgaaaaaatcgacggttttaaaagaagcgatgaacacttaagagtttgcctgaatacctccagacacatcctaaagggcgccaatattcccgcgttttattga

SEQ ID NO: 1602 - DNA, 1785 bp, Enterococcus faecalis
gaaggaggtgccggtgtggtcgaattatttattttaatgatggaacgggtgggcttaattattttactggcctttcttttagtgaatgtgccttattttaagcgtgttttattaagtcgtgaaaaaatgtcttcaaaagttcagttgattttgatttttggtttatttgctattatttctaattttacaggtatcgaaatcgctaagaatcagattgttcccaataatttactaacctatttaagcagcaatgcttccattgcgaatacgcgtacgttagtaattggcgtttctggattagtgggtggtccgattgtcggcagtgcggttggtttaattgctggctttcatcgggttattcaaggcggggggcatagtttcttttatgtgcctgcttctttaattgttggcttaattgccggttttttagggagccgcatggcaaagcaaactgtttttccgtctgccggcttttctgccattgtcggagcgtgcatggaaatgattcagatgatttttattttctttttcagcggtgatctatcggatggggccacgttggttcgttttattgcgctgccgatgattttgttaaatagcgtaggaacgttcatttttatgtcgattctaacgacgacattgaaacaagaagagcaggccaaagcggttcagacgcacgatgttttggaattagcagcggaaacactgccatattttcgagaaggcctcaataaaaattccagcaaaaaagttgcggagattattaagcattatacaaaagtcagtgcgattagcatgacaaacagtcatcaaattttagctcatgttggcgcaggaagcgatcatcatattccagagctagaagtcattacggagctttctcgggaagtgttacggacgggccgaatgaccatcgcgcatgccaaagaagaagttggttgttcggaccctaattgtccgttgcaagcggcgattgtgattccattattttcccatcagcaaattgttggcaccttaaaaatgtactttacagatccagcgcagttaacgcatgtcgaggagcagttagcagaaggtcttgggacaatcttttcttcacaaattgaattaggtgaagcggaagtacaatcaaaattacttaaagaagctgaaattaaatccttgcaagcgcaagtgaacccgcatttcttctttaatgccatcaatactatttccgcattaatgcggaaagacagtgaaaaagcgcggaaactattgctccaattaagcaaatactttcgaggcaacttgcagggagccgtgcaaactacgatcccagtttcacaagaactagaacaagtaaaagcctatttgtcattagaacaagcacggtttccgaatcgttatcaagtaacatttgacgtggaagaagcggttgcttcagaaaaagtaccgccgtatgcgattcaggtgttagtggaaaataccatcaagcatgcatttggcagccggaaggagaacaatcaagtccgggtagtggtcaaagcaaaacaacacaaattacatgtggatgtgtatgacaatgggcaagggattcctgaagaacgccgcttgctattaggaaagacgacagtgacttcggaaaaaggcaccggcacggcactggaaaacttgtcccgcagaatggcgaacctttatggatcagaaggttgttttttaattgaaaatttagagacaggcgggagccatgttcatttagaaatcccgatggaacaggaggaattagatgcacgtattaatcgttga

SEQ ID NO: 1603 - DNA, 729 bp, Enterococcus faecalis
atgcacgtattaatcgttgatgatgagcccttagcacgagaagaattgagctatcttgtttcccaacatccgcaagtgacgagcgttgcagaagcggattctgtggcggaggcaatggaagagatgatggatcaaaagccagatttgttatttttagatattcatttgaccgatgaaagcgggtttgatttagcggaaaaattaacccatcttaaaaaagcgccctacttggtctttgcaaccgcctatgatcaatatgcgttaaaggcctttcaagtgaatgcaaaagattatattttgaaaccttttgaagaagaaaaaataacacaagtcattgaaaaagcatcgaaagaaatgggtcaagctgtcccagaaaacactgccgaaaaaggaccaaaatctgaagcaatacctattcaacgggaagaccgcatttatcttgtggcgccagaagatatttacctcgtttctgtcgaagaacggcaactgagcatttttgtagatcaacaggtttacaagatgacagggaccttcaacagtatcgaacaaaaattacctgccacgctctttattaaaacgcatcgaagtttcatcttgaatcgaacaaaaattcaagaaattcagccgtggtttaataacacgttgcaagtaattttaaccaacggctcaaaagtacctgttagccgttcatacgtcaaagaatttaaagaaaaacttggcttaagttaa

SEQ ID NO: 1604 - DNA, 447 bp, Enterococcus faecalis
aaaacagacaaaagggagcgaagaagaatggaaaagaaagtatattcatttttacaacaagcagcagtttttgccattattatgttaatcgccaacggcttggcgttcatttccccaataccaatgcctgcttcagtaattggcatggtgttattgttcattggtttatgtacaaaagttgttaaattggagcaagtggaagggctaggtaatagcttatcaacggttattacatttttatttgttccttcagggatttccttagttaattctttagggattatgcaacaatttggcgttcaaattatttttgttattttagtagcaacattagcgttactagcaacaactggttggacgggcgcctttttattgcatatgaaagatgctcgaaaagaaaaagaacccgcagcaacgaagaaagcgaaaggagaggttcgcgcatga

SEQ ID NO: 1605 - DNA, 1035 bp, Enterococcus faecalis
tcagcgcgcttggagaagatcggaatgagattaattgttgatattcaaaaagaattgaaaagtcatactttgcaaattcagtttgaaacaaagactcaaacaacaggaattttaggtgcttctggttgtggcaagagtatgttgttaaaatgtattgcgggtgttgagactgcggataaaggtcagattgttttaaatgatcaagtattattcgatactgaaaaaaagatcaatttgtcgccgcaacaacgaaaaattggtcttttgtttcaacagtatgcgttgtttcctcatttgtcggtagtagaaaatctgacgtgcgtgacaaaagatttacaattggtcactcaattgcttgcatcttttcacttaactaaagtccaacaacaatatcctagtcaactttctggaggacaaagacagcgagtggcttttgcgcgaatgctagcggctcagccggcttacctgttattagatgagccattttccgcattagatgcacccttaaaggaagagctgcaaattgaacttcaacagcgattaagtaatttaaatcaacatgccttaattgtgagtcatagtttagatgaactgtataagttatgtcagagtttagtgataatcacaaaaaaccaaacactttttggtgcaacaaatcaattatttaaccaacctcaaacgattgaagcagctaaactcactggttgtaaaaatatttggcctgtcaaacgcatagatgcgcacagagtccaagtgattggctggcaacaaacactaatggttacacaagaagttcctatttcttgtcattctataggtattcgggcccatgatttcacaacagaaccgcaggcaaccaatcagatcgaagtgcatcacttacaaacattgtcagcaccttttgaacaaagtgcttggtttcaacaccaacaaaccaaaatttggtggaaaggcagcaatagactcaatccgaaagttattactcagttatccattccacctacagcaatgacaaatgactcttcaccacggatt

SEQ ID NO: 1606 - DNA, 693 bp, Enterococcus faecalis
gttaacaaagtaggtgggaaaatggatgttcgaccaattcttttatcttttcagacagcaataatcgccattttatttacttttattttaggaacaggcgttgcgtatattgtttttcgtttgaaaaatcgtaaattaaaaattcttttgaatagtttatttacgttgccattagttttaccgccgactgtttttggtttttttctcttaactatttttggtgttcagcaaccagtgggccagtttttacttgatttttttgccattcaagttgttttttcgtggccagctacggttattgctgccgttgctgtttcatttcctttaatgtatcgttcagccttaacggcgtttgaacaaatggatagtgaattgttggctgtggcccagacactcggattttcggaaagtcgatattttagaaaaattgcgttacctttgtcgatgaacggtctattggccggtggcgtgttagcctttgcccgtgggttaggcgaatttggagcgacgacaatgttagcagggaatattgctggtaaaacaagaacgcttcctttagctatctactctgctgtagcaagtggggattggcgtttagccaatcaatatgttgtaattatgttattactttgcctgattattttattttttacggaattttttagtcagcgcgcttggagaagatcggaatga

SEQ ID NO: 1607 - DNA, 819 bp, Enterococcus faecalis
aagaaaagaggcgttcaaatgtctaaacaaaaaaaggctgtgttcctgcttagtttattcagtttagttgccctaattgctgcatgtacaaatcagccgcaaaaagaaacagtttcaacaaaaaaagaagaaataacccttgcggcagcagctagcttagaatcagtcatggagaagaaaattattccagcctttgaaaaagagcatccagatattcaggtaactggaacctatgatagttctggaaaattacagatgcaaattgaaaaaggcctaaaagccgatgtatttttctcagcttcgacaaaacaaatgaatgcattggttgcagaaaaactaattaataaaaaaagtgtcgttcctttattggaaaaccagctcgttcttattgtgcctaaccaagatcaagcaaagtggcatgatttttctgatttaaaaaaagcccaaatgatagcaattggtgatcctgcaagtgttccagctggtcaatatgccgaagaaggcttaaaagctttaggcgcttggtcttatgtagaaaaacacgcaagctttggcacgaatgtaacagaagtccttgaatgggtagctaatgcaagtgcagaagctggcttagtttatgcgacagatgcagcaaccaattcaaaagtagcgattgttgcggccatgcctgaagctgttttgaaaaagccaattatctatccagttggtaaagttgccgcctctaagaaacaaaaatcagcagatgcttttttaaattttttacagagtcaacaatgcagaaaatattttgaaaatattggctttaagttaacaaagtag

SEQ ID NO: 1608 - DNA, 975 bp, Enterococcus faecalis
accatgaaaacaattcgaacagaagaggcagttggccttccattgagtcatgatattacgcgaattgactatgggaagaccaaggaagtgtgttttaaaaaaggacatatagttgttcaagaagatattccaattcttttatcattagggaaaaaacatctgtttgtttccttggatccagcagaaatacatgaagaagaggcagcgacatttttgtataacctgttaacagatgactcatgtcagccgagtgaagtccatgaaggaaaaattgttgctaaagctagtacgagaggtcttttaaaagtcaatcgagaaaaattaattgctttaaatgaaattgaaggtctcgccttgtcaactaaagttaccaatatagaagttcagaaagatgaaaaagttgcagcctttcgagtgattccactaacaatttctaaaagccaattagaaaaggcacgccagctcagcacgtctgagccactaatctctgtgaaacctttcaaaaaaatacgggtcgggattgtaactactggcagtgaagtttacacaggattggttgaggatgctttttaccctgtgttaaaagccaagttctccgcgtatcctttagttacgattgtcaagcaagaaattgtcgatgatcagccgcaaaaaattactgttgcgatcaaaaagatgttagcacaaggggttgatctgattgtttgtacaggtggtatgagtgtagatcctgatgatttgacaccgttagcaattaagcagacaggtgctgaaatcgtaacccatgggacaccagtcttaccaggctcaatgtttttgctggcttataaaggagagcagacgatcattggcttaccaggtggtgttttattttcagaaaaaacggtttttgatttgttgttaccaagattaatggccaaagaagtgattaaaaaatctgaaattattgacttgagttatggcgggtatttataa

SEQ ID NO: 1609 - DNA, 486 bp, Enterococcus faecalis
acgttgtttaaagttggcattgtaacattaagtgatcgttgctttcaaggacttgctgtcgaccaatcggggcccttgattcgtgaacagttacctgcgctctaccaggtaaccaaacaaaccattttaccagatgaagaaaatcaattagtagagctattgcaagagtggtctaagacctgtgatttgattttaacgacaggcggcacagggttgagtgaacgggatcggaccccagaagctaccttacgtgtagcagagcgaatcattcctgggatcagtgagggcttgcgtcaacttagcttggaaaaaacaccatttgctatgttaagtcgaggcgtttctgttcaaagaggacgcacgctcattgttaatttgcctggtagcccgaaaagtgtaacagaacatttgcattttttgttgcctgttttgccccacgctttggatttaatcacaaataaaaaaatcatacatgatgaggaataa

SEQ ID NO: 1610 - DNA, 498 bp, Enterococcus faecalis
aaaacatcttttcttggaacaacaaggagaacaacgatttatgtcacaaataggagggtaagtatgaaaacaggagaaattattgcaataaatattagcccgcgaagaggcacacagaaaaaggaaattcctgaagtcaacttaattaaaggtttcggattagaaaatgatgcgcacggcggtaattggcatcgacaagtcagtttgttatcttttgaagaaataacggctttcaatgaaaaaggagctcgggttggcaatggtgcttttggggaaaacataatcgtctcagggattgatttacgtcaattacctgttggaacgaaaatgaaaataggcgattccgaattggtggttactcaaattgggaaagagtgccataaacactgtcagatttacgcgcgagtgggcgattgcatcatgcctagagaaggaatctttgcagttgttgtgacagaaggtcatattaaaaaaggagaccagttagacgttgtttaa

SEQ ID NO: 1611 - DNA, 666 bp, Enterococcus faecalis
ctcgtgaggctcaagggattaaaagaggcgggcttggacggcattaatattagcttaaacattttggatccagaagaatttcgtgaaataacaagagttggtcagttaaggaatgatctggcgggcttagaacaagcgattgatgtgggattacctaatatcaaaattaatactgtagctaggaaagagctaagtgaagcaacaattgtagaactggctgaaatcgctaagaaagagactgtgcatcttcgtttcattgaaatgatgccaattggattagggaaggagcatccaggtaagcaacaagaagaagtagaagccattttaaccaaatattatggaacgttacaaccataccaaaaaccattgggcaatggccctgctagttattacgccttaaaagattttaaagggaaaataggttttattagtgcattagggcattgtttttgcgagacgtgcaatcgaatccgaattactgcagacggccatttaaaaacgtgcctgcattctgcagacggctactcgttaaaggaagctttagctatggaacaaacagcagaattgttagggattatcaagagtggcattgcctgtaagcctgaaaaacatcttttcttggaacaacaaggagaacaacgatttatgtcacaaataggagggtaa

SEQ ID NO: 1612 - DNA, 357 bp, Enterococcus faecalis
gtgaacagcatgaaagatgcatttaaccgtgaaattgattatgttcgtttgtctttaacagatcgttgtgacttacgttgcacgtattgcatgccagcaacaggtctttgctttttaaaaaaagagcagcttctaacagatgatgagattatttttttattgaggatattagcgaaagaagacatcaaaaaagttaaattaacaggtggtgaaccgcttgttagaccgaatttactctctttaattaaaaggataaagcaaatctcatgcatcgaaaaagtaaccttaacgactaatggcatgaagttagctcgtgaggctcaagggattaaaagaggcgggcttggacggcattaa

SEQ ID NO: 1613 - DNA, 519 bp, Enterococcus faecalis
ggtggagaaatggttcaaagtaaggaatttacgcacttgaatacacaaggagaagtgcacatggttgatatttcggaaaaaaatgacactgaaagaacagccctcgcttatggagaaattcacatgttggaagcgacagcaaaagcgatccagacccaaatgattaaaaaaggtgaagtattacaggtagcaagagtagctgggattaccgccgcaaaacgaacgtttgaatggattcctttgtgtcatttggttgctttgacaaagtgtgaaattcagtttgattggcgcaatcaaacttgtttagaagtacgttgctttacaaaaacagtgggttcaactggcgttgaaatggaagcgctaacaggtgtgcaggcagcactcttaacaatttatgacatgtgtaaagcaattgatcgaggaatgacaatgacaaacattggtttattacagaaaaatggtggacgtagtggtcatttcattcgttcttcaattaaatcaaaggaaagtgatgagtga

SEQ ID NO: 1614 - DNA, 324 bp, Enterococcus faecalis
cgccacacagttttgcgtgtgaagagccgagaagaggggggagaaagggccccttttgggttagataacgtgttggctttgatgtactctgccaaaacgcttcatttttttgggcaaggcgggtcctcgattgtggcttttgatagtttccataaattcattcggactaactatcggtgcaactacatttttgattaccacatgcagttaagttttgtcacaaaattaaccagtgaagattgcgtgtatattttttcccattcaggcaaaaccaaagaatcaatcaacctagcacgacaagttaaaaaaaccaacgcaaaaatg

SEQ ID NO: 1615 - DNA, 393 bp, Enterococcus faecalis
gattggaggaacgtgttaatgaaaaaccactatttggatcaacggattcggatcaaaaaaccgaatttgagcctcacagaaaagaaaatttccgattactttgttcattctgaatcattattgacacaaatgacgttagaaagtcttgccaacgaaattggcgtctcccaatcttccgtgtatcaatttgtaaaaaagattggctattctgggttccaagaatttaaaattgatatcgccagaaattctaattatcagccgacttttcaaaacgtcaatagcgtgaatggcgccgatgatatttcaccagatgatgatagtattaccattgctaaaaaagtcttacaagccaatatttattccctcagtaacgccacacagttttgcgtgtga

SEQ ID NO: 1616 - DNA, 963 bp, Enterococcus faecalis
tcgtttacattattttttttatcctttatgattgaagtatcaaaagaggcaggtgaaagaaaaatggacattggctttattggacttgggaaaatgggtttgaacatggcattaaatgttcacgaacaaggctggcccattattggctttgatgtaacaaaggaagcaagagcgactgctagagaacaaggtctttccgttgtagattcgttgtcagaattattgaaagcgcttaacaaaaggaaggtgatttttttaagtacccccgctggtcagattaccaatcaattagtggcagaattggtagagcaattagcaccagaggatatcattgtggatagtggcaattcaaattttcatgatagtgttgcgaatgctcagcttgctaaggaaaaaggaatttattttattgattgtggtacttctggtggcatcaaaggagcgcgggaaggagcgtgtttaatggttggcggtgcgcctgaagctgtcaaagtgttaaccccattttttgaagatttagcttgtgaacaagggtatctttatgctgggaaatcaggagctggtcactatttgaaaatggtgcataacgggattgagtacgtcatgatgcaagccatgggcgaaggattcaatttattagaagctgccgaatatgattttgcgttggagaaagtagccgatgtgtggaatcacggctcgattattgaagctcgcttgatgggcttagcgaaagaggtttttgcggaaaatcctacgttagccaatctagaagggaaagtggcagcaaatggcgaagccaaatggatgattgaagaagcattgcgtttggagatgcccgtcccaactacggcgttgtccttatttactcgaaatgaaagtatgctagcaaatcatttttcaaacaaagtggtcgcttctttgcgacaaggatttggcgggcatgaagtcgtaaaaagtcagtaa

SEQ ID NO: 1617 - DNA, 1014 bp, Enterococcus faecalis
aggagtttagtcatgttaaaaaaacaaaaaattgccatagtgaattccagtagttttggtcaaatttttcctgaacacttgacgcgcttagaaaaaataggcaccgtgaagcattttacagtcgacagtgaaattggtggcaaagagttagcggaacgtttacaaggatatacgattattattgctagcgtgacgccatttttcacgaaagaattttttgaacataaagatgaattgttgctgatttctcgccatggtattgggtataacaacatcgatttagacgctgcaaaacagcacgacacaattgtttccatcatcccagctttagtagaacgagatgccgtggcggaaaacaatgtcacaaatttgctagctgttttacgacaaaccgtggctgcagatgccagcgttaaagcggatcaatgggaaaaacgagcgaattttatcggtcggacgttatttaacaaaactgtgggtgtcattggtgttgggaacacaggaagttgtgtcgtggagacgttacgaaacggatttcgctgtgacgtgttagcgtatgatccctataaatccgccacttatctgcaaagttatggagccaaaaaagtagacttagatacgttgctagcttcagcagacatcatttgtttatgtgccaatttaactgaagaaagttatcacatgattggctcggcggaaattgccaagatgaaagacggcgtctatctttccaatagcgcacgaggcgccttgattgatgaagaagccatgatcgccggtttacaatcgggcaaaattgctgggcttgggacagatgttttagaagaggaaccaggtcggaaaaatcatccttatcttgcgtttgaaaatgtagtaatgacgccgcacacctccgcttataccatggaatgcctgcaagcgatgggagaaaaatgcgtgcaagatgtggaagacgtggtgcaaggtattttacctcaacgggcagtgcaagaagtcagtcgttacgttagttaa

SEQ ID NO: 1618 - DNA, 1125 bp, Enterococcus faecalis
ttaagaaggaggaggagcatgttaactgatttaaaagtgaaagttggaccgcaattttatcgttaccacgaaggcgccttagcttcggtgccgtcacttttcaaggaatatcacgcccaacgaattttggtggtgcatggcaccgtatcctttgaaaaagctcagccatttttaccattcttggcagattcagagtatcaattcttctatcacacttacacaggagaatgtagttattttggcgccgaacaaatttcacagcaaataaaggaacaccagattgactttcttctgggagtcggcggcggtaagttagccgatttagtgggctacagcgcccatttaaacaatctgaattttggcttggtccccactttggctagtaactgtgcgccgtggacaccgttagctgtgatgtatcaagaaaatggcgcggccgaaggcaaaacggaacatttctttcgccaagctgcgtttttaatcaccgatcctaagttgcttctggatgcgccccgtgattattttgtcgctggtttagctgatacgttagcgaaatggtatgaatcagagaccattttacgccaagcccatttgcaaggggaaccctttttacaattagcgggagcgaccgccaagctttcgcaagaagcgattatgcgggactcaaaagcagccttagcagcgatggatgagggcaaactcacgcctgaatttgtccatctttcagaaattgttttcgctgtttctggattagtcggcggcttcggcgacaaatacgcccgcaatgcagcagcacacgccatgcatgatgctatgagtaaatttttacccaaaagtcatgactatttacacggcgaaaaagtagcttacggcatcttctatcaattagcattggaaaaaaggtgggccatcatagacgcattaatccctttttatcaagagctaaacttgcccatgtcgttacgacaaatgggcctttacccaaaagaagaagcagtactcgatgcaatggttcaatttattgattcaaaagaaaaggttcatttaattcctattgagatttcggaagaacgtttacgtcaagggattaaagagctagaaaagtatatccaaaaccaaggataa

SEQ ID NO: 1619 - DNA, 813 bp, Enterococcus faecalis
gaaggaggaactatggaaacgttaagtgttttacaaagtttgataatggcgctttgggtggcagcaattatgtccagatggcttggaggaggagcaacgttaacgttacgtttctcgcccttaatgacagggttagtagcaggtttagtgatgggcgatgtcccgaaagcgatgattgtcaccgcagcattacaaatgatttacatgggtgttttttcaccaggtggctctatgccagcagaaccatcaattgcggcagcgattgctgtgccagttgcgttgctagggaatttgaagccggaagcggctattgccgtagcggttcctgtcggtcttttaggaagttatttatatcaattccgtttctttattaacacgtttttagggaagtataccgatcgtgcggtggctgaactaaattctaaaaaaattgcccgctcaattatctggtatccaacgattgcctcatttattttattcgttccattagtcttttttgctctttatttaggggcaccagtcattgccgatattattaaagcattagaaggaaccgttgtgattcacgtgttagaagtagtcggtggtggtttagccgcaattgggattgcgacaactgtttatgtcattggtcgaaaagatttcttggttttctttttccttgcatacttcatgagtatcgtctttaagtcattggaaattaccatggtaacgtatgccatcttttggcgtaattattgcgttaatttttgtgcaagtccaaaaaggcaaacctgtagcagaaagtgctggttccgccagtgccaccactga

SEQ ID NO: 1620 - DNA, 720 bp, Enterococcus faecalis
tacgcaatgatgccacttttaaagaaattatataaagacgatgaacaattaaaagccgcttatatgcgtcaactgctgtttttcaatacgcaattaagttggggcggcgaggtcattactgggctgatggcttccatggaacaagagcgggccaaagaagaacatgaaggccgcgaaatcatgatgcaagatgatttaatgtataacaccaaagctggcttgatgggcgcgttagcggggattggtgatgcgattgactcacgtacggttcaatatatttttattgcgattgcggtgccgtgggcgcaacaaggtagcgcattaggtgcgattttcccatttgtggcgtttgccctttatcaagtactgttaggtgtgttctttgcgagacaatcctttaaaatggggcggaatgccacaggcttaatgcaaagtgcggggattcaaaaagccattgaaatgttatctgttttagggttgttcatgatggggattttagctggtaattatgtcaaagtttcttcaacccttcaatttaaactttctggccgtgagtttgtggttcaagatatccttgatcagattgtcccaggactcttaccgctagctgttgtaatgggcgtgtattggttctatacgaaaaaaggcttgaaagttacgcaagcattattgtggttaacaggtatcttaattgtcttagcaacagtcggtattttataa

SEQ ID NO: 1621 - DNA, 528 bp, Enterococcus faecalis
aaagaaaaggacgtgaatcagatgggcgtagtaaatttagcaagagtagatgaacgattaattcatggacaagtgatggtgaccttgtcccaaaaaagtggcgttaattccattttcgttgtcgatgaagtggtggcaaaggataaatttatgcgtgatttatacaaaagtgcaggcagtcggacaggacaaaaaaccattgtcattacgccggaaaaagctaaattttattgggatgaataccaattcaaagagtacaactgtattttaatcgctaaaaccgtctctgtaatttatgacttagtaaaacacggagtccctatgaaggagttaaacatcggcggtattgcacagaagaatccagaaaaagatttattagtaaccaaatcagtttatttaaacaaagaagatgccgaaaaattaaaagaactacatgaggtgtatggcgtagaagatatttatttccaagcaacgccttctgcaccaaaaactagtttaaaagaggttttaggcaaatttaatttataa

SEQ ID NO: 1622 - DNA, 921 bp, Enterococcus faecalis
atggattacaaaacgtatgacccagatttatggaatgcaattgcaagagaagaagagcgccaagaaaataacttggaactaatcgcatctgagaatgtcgtgtcaaaagcagttatggctgcccaaggaagtattttaacgaataaatacgcagaaggttaccctggcaaacggtactatggtggttgtgaatttatcgatatcgtagaaaatttagctatcgatcgtgccaaagaattatttggtgcaaaattcgcgaatgtacaagcccattcaggttctcaagccaatacagcggcatacctttcattggttgaaccaggtgataccattttggggatggatttatcagctggtggtcacttaacacatggttcgcccgttaactttagtggaaaaacctataattttgtcagttatggagtggatccttcaacagaagtaatcgattacgatgtcgtgcgaattttagcaagagaacatcgtccaaaactaatcgttgcaggcgcaagtgcgtattcacgaacgattgacttcaaacgtttccgtgaaatcgctgatgaagtagatgccaagttaatggttgatatggcgcatattgcaggcttggtagcttcagggttgcacccaaatccagttccgtatgctgatatcgtaacaagtacgacccataaaacattgcgtggtcctcgtggcggtttaattttgacaaatagcgaagaattggcgaaaaaagtaaatagtagtattttcccaggcattcaaggtggcccattggaacatgtgattgccggaaaagccgcagcttttaaagaagcattggatccaagttttgctgaatatagtcagcaagtgattgcaaatgcgcaagcgatgacgaaagttttcaatcaagcgcccgatgttccaccaaggggtagg

SEQ ID NO: 1623 - DNA, 1038 bp, Enterococcus faecalis
aaggagcgatttgcaatggaaacaaaaaaattaaccaaacaagaaatagcccaagcagcagcagccattcaagcaggcgagctagtggcttttccaacagaaactgtttatggcttaggtgccgatgccttaaatgaagcggcagtaaaaaaagtttaccaagtaaaaggccgccccagtgataatccattgattgttcatgtgaacaacgttgagatggtcaaaaaatacgtggcgaccttaccagaagtcgctacaaaattggtgtctgccttttggccgggaccattaactttaatttttaatgtgcctagcgatacattttctaaaacagtaacaggtggtttagagacagtcgcttttcgtatgccagataaccaagcgaccttagctttgattgaacaagccaatgttccgttggtcggaccaagtgcgaacacttctggcaagcctagtccaacatctgcagagcatgtttatcatgatttgcaggggaaaattgctgccatattagatgatggcccaacgcagattggggtggaatcaacggtcttggatttaacggcggaagatggtgtgccagttattttacgaccaggagcaattaccaaagagcagttggaaagcattattccccaagtgaaaatcgatacacatttgattagtgaaactgcagcacccaaagcgccagggatgaaatacaaacactattctcctgatgcggaagtttggattataagcggtcaaacagcagaatggcaagcggcgattcagcaagcaaaagaacaacaggaaaaaatcggcttatttttaagtgatgaacaggcagcacaactagatacagaaaatgcgtttgtttattcttatggtgcagaaacggttgaaaatgccacaaaagaactatttgcagggttaagagcgttagatgagcaaggagctaccacgatttttgcgcaaggatttgcagaaactggtttaggcactgcttacatgaatcgcttgaaaaaatcagccaatcaaaaattttttgaaaaataa

SEQ ID NO: 1624 - DNA, 846 bp, Enterococcus faecalis
aagagatgcaaaatggctaaacgttactttgaagtccttaactgggcttcttcttttttagaggcgcaaggcaaagaaggctacgctattcactatgtttttttagaacgtaaaggttgggataaaacgcagtggctcctgcatatgcaagaagaaatgccccaagaagaagaggaacaattaaaaacggatttagcccaattattgacagattacccagcacaatatttactaggacaagctgaattttatggacattcctttattgttaatgaacatactttgattcctaggccagaaacagaagaattagtcgagcgttgcttaaaagccaatccagatactcctttgacggtcgtggatgtcggaacagggacaggtgccattgcggttagcttgaaactggcacggcccaactggcgagttattgccattgatctttcagaggaagcgttgactgtcgctaaacaaaacgcgcaagcattaggtgctggcatcgaattttatcatgggaatggcttacagccagttgcttctgaaaaaattgatctgcttatttctaatccgccctatattagtgaacaagaatggtatttaatggatgcaagtgtccgaacgtatgaacctaaaaccgctttattcgctgaaaataacggtttggctttataccaacaattaattcatgaaagtcaaacgatgcttaaagcagacggtaaaatttattttgaaatagggtttcaacaaggcgcggccctccaagaattattgagcgccgcctatccacaaaaaacaattaaaattgaaaaagatttatctggcaacgatcgcctcgcgatagccgagtaa

SEQ ID NO: 1625 - DNA, 1095 bp, Enterococcus faecalis
agaacagtaaggagagacactatgtacgatcaattacaatctattgaagatcgctatgaggaattgggcgaattattaagtgacccagcagtcattagtgatacaaaacgtttcatggaattatcgaaggaagaagctaatacacgtgagacggttgaggtttatcgccgatataaacaagttgttgaagggattagcgatgccgaagaacttttaagtgaaaacttagatgcggaaatggccgaaatggcgaaagaagaactttctgatttgaaaaaagaaaaagaagtgttagaagaccgcattaaaattttattattaccaaaagatccaaatgatgataaaaacatcatcatggaaatccgtggtgcagccggtggcgatgaagccgcactttttgctggcgacttatttaatatgtaccaaaaatatgcagaagcacaagggtggaaagcggaagttttagaagcgaacgtcactggaatcggtggatataaagaagtaattatgatgatttcaggagataacgtcttttcaaaattaaaatatgaaagtggcgctcaccgcgtgcaacgagttccttcaacagaatcacaaggacggattcatacatcgacagcaaccgttgtagttatgccggaagcggaagaagtcgaaatcgaattagctgataaagatatccgtgtcgatatttatcatgcaagtggcgctggtggacagcacgtcaataaaaccgcttcggctgttcgattaacccatttaccaacaggaatcgtagtcgcaatgcaagatgaacgttcacagctaaaaaaccgtgaaaaagcaatgaaagttttgcgtgctcgtgtgtatgaccaaattcaacaagaagcacaaagtgaatatgatgctaaccgtaaatcggcggtggggaccggagatcgttcagaacgaatcagaacgtataacttcccgcaaaatcgagtaacggatcatcgtatcggtttaaccatccaaaaactagaccagattcttgctggcaaattagatgaaatcattgatgcattagtcttatatgatcaaacatcgaaattagaagagatgcaaaatggctaa

SEQ ID NO: 1626 - DNA, 603 bp, Enterococcus faecalis
cggaaaggtgtagtgaacatggctcaattatttttcaagtatggcgcaatgaacagtggtaaaaccattgaaatcttaaaagtagcacacaattacgaagaacaagacaaaccagttgttttgatgaccagtggactagatacacgtgatggtgttgggaaagtatccagtcgcatcggattacgcagagatgctattccaatttttgaagaaaccaatgtctttgacttgattaatgatttgtcttacaaacctttttgcgtattagtcgatgaatgtcaatttttaaacaagcatcatgtcattgaatttgcacgaattgttgacgaattagatattccagtaatggcatttgggctaaagaatgattttagaaatgaattatttgaaggctcaaagtatttacttttatatgcagacaaattagaagaattaaaaacgatttgctggttctgtcataaaaaagcaactatgaacttgcactatattgatggcaaccccgtttatgaaggggatcaagtccaaattggtgggaatgaagcctactatcctgtttgtcgcaaacattattttcatccaaaaacagtgaatgaagaacagtaa

SEQ ID NO: 1627 - DNA, 264 bp, Enterococcus faecalis
ttccttacgtatttcactatatttttcagcaaaaaagcactatttttagctagaatggtcgtgcatttttctgaaaaaaacagaatctacgccaaagtcattttagtagggctatttatactccaactaatgatcctgctagtatgcaataaaaaagcccgaaattgtagttatttgactacaatttcagactttttaatgctagttatttttgagcagaggcaaattctgctgattgcgtacctgcttgacgaccataaatga

SEQ ID NO: 1628 - DNA, 597 bp, Enterococcus faecalis
attggtgacgcagttcgtggagaaggcgcaatctcggtttctcaaaaaggagaacgttttgttaatgagttagatacacgcgacaaagtttctgcagcaatcgatgccttaccagaaaaatcagattatttagtctttgaccaaggcgttcgcgaccgtgcaaaagccattgatttctatgatcaaaaaggtttcgtggcaaaaggtgaaacgattgaagaattaactgaaaaaattggcatgcttgccgatacattgaaagcaacgattgatacttggaaccaagatgttaatgccaaagatgacaaacaatttggccggacaactggaatggaagctgacttaagcacagccccttactacgcaattaaaattgcaccagggattcaccacacaatgggtggcgtgaaaatcaacacgaaaacagaagttttacgtgaagatggcacaccaattaaaggtctatatgctgctggtgaattaacaggtggcttacatggtcaaaaccgtatcggaggcaatgcaatcgccgatattatcatttatggtcgtcaagcaggtacgcaatcagcagaatttgcctctgctcaaaaataa

SEQ ID NO: 1629 - DNA, 201 bp, Enterococcus faecalis
caaccaggggtattcggtccccccggaaattcattaacacaataccaaccagaatggaaaaattatgttaaaaaggacccagaagccaccacaggtgacggtatccaaatgattcaacaagttggcgatgcgcttgtgcaatatgaaagaaattcaaattcacccaaatgttcaacaaggcgatgctctctaaattggtga

SEQ ID NO: 1630 - DNA, 1920 bp, Enterococcus faecalis
aacatatatttagaggggaaaaaattcatgagtgaagaaattaaagaaaacattcaagacgtcaatctgaccagcgaaatgaaagaatctttcattgactacgcaatgagtgttatcgtagcccgcgcgttacctgacgttcgtgacggtttaaaacctgttcatcgccgaatcttatatggaatgaacgaattaggggtaacccctgataaaccacacaaaaaatcagcccggattgttggggatgttatgggtaaatatcacccccatggggacagggcgatttacgaatcaatggtgcggatggcacaaccttttagttatcgggctatgttagttgacggccacggaaacttcggttccgtcgatggtgacggcgctgccgctatgcgttataccgaagcacgtatgagtaaaattgctttagaaatgctacgagatattaacaaaaatacagtcgatttccaaggaaactatgatgattcagaacaagaaccagtagttttacctgctcgttttccaaacttactagttaacggaacaacggggattgcggtggggatggcaacaaatattccaccacacaatttaagtgaagtgattgatgcaacaagtttattgatggacaatcctgatgtaacgacgaatgaattgatggaagtgttacctggaccagattttccaacaggcggtttagtgatggggaaatcagggattcgccgagcatatgaaacagggaaaggttcgattactgttcgtgcaaaagttgaattgactgaaatgccgaatggaaaagaacgtattttagtaactgaattgccttatatggtgaataaagccaaattaatcgaacgaatttctgaattacacagagataaacgaattgaaggaattactgatttgcgggatgaatcttctcgtgaaggcatgcggattgtcatcgatgttcgtcgagatgtgagtgcctctgttgtgttaaacaacttgtacaaaatgactgccttacaaacatcttttggttttaacatgttagccatcgaaaaaggcgtaccgaaaattttaagcttgaaacgtattttagaaaactacgtcgagcaccaaaaagaagtcattactcgccggacgatttttgacaaaaacaaagcagaagcacgggcgcatattttagaaggtctacgaattgccttagatcatatcgatgaaatcattgccattatccgtgggtcacaatcagatgacgaagcaaaagcaacgttaattgaacgctttgaattttcagatcgtcaagcgcaagcgattttagatatgcgtttacgccgtttaacaggcttagaacgcgacaaaattgaaaatgaatatcaagagctattgaaattcattgcggacttagaggacattttagcccgcccagaacgcgtcattgaaatcattaaaacagagttaaatgacgttcgcacaaaatttggtgatgcacgacgcacagaattattagtaggtgaagtcctaagtcttgaagatgaagatttaatcgaagaagaagaagtcgtgattacattaaccaataacggctacattaagcggatggcaaactccgaattccgggcgcaacgccgcggcggacgtggtgtccaaggcatgggcgttcatgatgatgatttcgtgaaaaacctagtttcttgttcaacacatgacacgttattattctttacgaacactgggaaagtttaccgagcaaaaggttacgaaatccctgaatacggtagaacagcaaaaggaattccagtgattaacttactgggaattgattctgcagaaaaaattcaagcgattatttctgttgagggcaaagcggaagcaggtaaatacttgttcttcacaaccttaaaaggaaccgtcaaacggacacccgtaacagccttt

SEQ ID NO: 1631 - DNA, 2001 bp, Enterococcus faecalis
accagatattttctatgttcaacaaggcaagatagaaaggaattcagcgacatgacagaagaagaaaaaaacatgagagaacgtgcgcaagaatatgacgctagtcagattcaagttttggagggcttagaagctgtccggaaacgtcctggtatgtacataggttctactagtggcgaagggttacaccacttagtatgggaaatcgttgacaactctatcgacgaagccttagcaggatttgctaaatcaattcaagtaattatcgaaccagacgatagtattactgttatcgatgatggtcgtggaattccagtcgggattcaagccaaaacaggtcgcccagctgtggaaacagtgtttacagtgctacatgccggcgggaaatttggcggtggcggctataaagtatcaggtggcttgcacggtgttggttcctctgttgttaatgctttatcgaccagtttagatgttcgtgtttataaagatggcaaagtgtattaccaagaatatcgtcgtggtgcggttgttgatgacctaaaagttatcgaagaaacggatcgtcacggaaccactgttcactttattccagatcctgaaatttttacagaaacaaccgtttatgattttgataaattagcaacacgggttcgtgaattagcctttttaaatcgaggcttacacatttcaattgaagaccgtcgtgaaggacaagaagataaaaaagagtatcactatgaaggcgggattaagagttatgttgagcatttaaatgccaataaagacgttattttcccagagccaatcttcattgaaggagagcaacaagatattacagtggaagtgtcaatgcagtatacagatggctaccactcaaatattttaagttttgccaacaatattcatacttatgaaggcggaacgcatgaatctggttttaaaacttctttaacacgtgtgattaatgactatgcacgtaaacaaaaattgatgaaagaaaacgatgaaaaattaactggggaagatgttcgtgaaggcttaaccgcagtggtttccatcaaacatcccgatcctcaatttgaaggacaaacgaaaacgaaattagggaactcagaagtacggaccgttacggatcgtctattctcagaatactttacaaaatttttaatggaaaacccaacagtcggcaaacaaattgtcgaaaaaggcatgttggcttcaaaagctcgtttagccgctaaaagagcccgtgaagtcacccgtcgtaaaggcgctttagaaattagcaacttgccagggaagctggctgattgctcaagtaaagatccggaaaaatgcgaattatttatcgtcgaaggagactcggccggcggttcagcaaaacaaggacgtagccgtgaattccaagccattttgccaattcgtgggaaaatcttgaatgttgagaaagccagcatggataaaattttagccaatgaagaaattcgatcattatttacagctatgggaacaggcttcggcgaagatttcgatgtttctaaagcacgctatcacaaactagtaattatgaccgatgccgatgtcgatggtgcgcatattcgaacgttgttattaaccttgttctatcgcttcatgcggccaattgttgaagctggttatgtgtatattgcccaaccaccactatatggtgtgaaacaagggaaaaacatcacctacgttcaaccgggcaaacatgctgaagaagaactagcaaaagtgttagaagaattacctgcttcaccaaaaccaagtgttcaacgttacaaagggttgggtgaaatggatgatcaccaactttgggaaacaacaatggacccagaaaaacgattaatggcgcgagtgagtgtcgatgatgccattgaagctgaccaaatttttgaaatgctaatgggcgatcgtgtggaaccacgtcgtgcgtttatcgaagaaaatgcccattacgtgaaaaacttggatatttaa

SEQ ID NO: 1632 - DNA, 1149 bp, Enterococcus faecalis
aaaacggaaacgagtccgacgatgcggctgaatgagctgacacttcagcattatcgtaattatgaaacagtcagcttagattttccaaaaacgttaaatctttttttaggcgaaaacgcccaaggaaaaaccaacttgttagaaagcatttatgttctagcaatgacacgaagtcatcgaaccagcaatgaaaaagaattaattggctgggaacaagcagcagctaaaattagcggtgtggttgaaaaaaagacaggcaccgtgccgttggaaattttaatttccaacaaaggacgtaaaaccaaggttaatcacattgagcaaaaaaggctcagtgcgtacattgggcaactgaatgttattttatttgccccagaagatttatctttggtgaaaggctcacctcaagtccgccggaaatttattgacatggaactcggacaagtgagtcctatttatctttatgatcttgtccaatatcagtctgttttaaagcaacggaaccaatacctaaaacaactagctgaaaagaaacaaacagatactgtttatctggatattttgacagagcagctagctgaatttggcgggaaagttctatacgctcggttaggttttcttaaaaaattagaacactgggcaaacttactccatcaaaaaattagtcatggacgcgaaacgctcaccattgactacgcatcaagcatcccaattgacaacacggatctttccttagaagcacttcaaaatcaattgctccaacaattaatgaacaatcgtaagcgtgaattgtttaaagcgaatacttttttaggccctcatcgtgacgatttgctgtttattgtcaatggtcaaaatgttcaaacgtatggctcacaaggccaacagcgaacgacagctttaagtattaaattggcagagattgatttgatgcattcagaaacaggagaatatcctgtgttattactagatgatgtcatgagtgaattagataatgaacgtcaaattcacttgttagaaacgattgaaggcaaagttcaaacgttcttaacgacaactagtttagatcacataaaagacaagctaacagttgaaccagatattttctatgttcaacaaggcaagatagaaaggaattcagcgacatga

SEQ ID NO: 1633 - DNA, 264 bp, Enterococcus faecalis
aaaaaagagggatgcacattgaaaaaaacgtttgttttagcaactgagtatataacgcttggtcagtttcttaaagaaatcaacgtcattggtagtggcggccaagccaaatggtatttggcagataatagcgtgtttgttgatggcgagttggaaaatcgtcgcggacggaaactttatgcgggcatgatgattgagatacctgaagaaggtactttttttatggtgaaaaacggaaacgagtccgacgatgcggctgaatga

SEQ ID NO: 1634 - DNA, 546 bp, Enterococcus faecalis
gactttaacattgtaattccaggaaaaagtttaactgaactttctcgttcattaaccaatgaagaagaaatggttgaaatcagcattatggaaaatcaagtgctatttaaaacagaaacaatgtacttctattctcgtttgttagaaggaaattatcctgataccaaccgtttaattccaactagccataacacgcaaattgaattttatgtaccagaattgctttcagcaatcgaacgtgcctctttactttctcatgaaggacgtaacaatattgttcgcctttcaatttcaccagattctgttgttttatatggaaattcacctgaaattggaaaagtcgaagaagctttaaactatgaaaatgtttctggtgaagcgttggatatttctttcaacccagattatatgaaagatgcgttgcgagcgtttggcgatatgaatattaccgtgaaattcctttctccaattcgtccgtttacattggagccaaccgaaacagaactagatttcattcaactaattacaccggttcgtacaaattaa

SEQ ID NO: 1635 - DNA, 426 bp, Enterococcus faecalis
gagaggaaagctccctctgtaacgatgtggagccacggtagcatcgtcgttacatctcgtttcttttggggaattattcgtagattaccagaagatatgttcacaatggaagttctagataacaatctcgttgggggtggctttccccgcgggggagggaaaatattcgtggggggggggggggaaaagagagaaatacccccccccccccccccctgtgggtgggccccccccccccgggaattacccggttctttttttggggagaaaaatatttttggaacccggggtggtggtttcatgcccgaaagtcgtcccattttaactggggttcactttattttagaaaatcaaaaattacttgccgttgcgacagattcacatcgtttaagtcaacgtgtgatcccgacagaacaagcagtataa

SEQ ID NO: 1636 - DNA, 1134 bp, Enterococcus faecalis
attagcaatttattgatgcatctaggtttaggtttttatttgccagtgatgccgtttatcattactgtcatttcatttgcggtcttgttcttagtaatttctttctttattcaattccgcttgccaaaagcgacacttcaagagctattaaaagcaggagaaatgggtaaaggtgaaatcaaaagctctaaagttaaatctttcttagccgtgttacttttaattgtcggttacggaattgctttagttgctaagggacagttagttttaatggtgatgttcccagtaattttcttagttattttagggacaaaattcttatttgaccaattgagtgtttctgtcattgaacgtttaaaacggaaaccaaaaatcttttggaaaaaaaccaatatggtcgttttatcagatttagcattccgcatgaaagataatgcacgttcgttcttcttggtttcggtgatatcaacggttgcttttgctgccattggaacgttatacggcgtgaacgagatgatttttaaaggaataagttctgtaccgtacgaactgacattgtctgattcgaccaacccagaaaatcaagaaatgaaacaatttgcgacaaaaacattccaagaaaaaaatattcagtttgatcagattgattacacaatgtacaaaacaagtgccggtatccaattaatcaagacatctgaatataataaactcgcaaaatttatagatgaaccaactttaacaggtgagaaagtagttaatttatcacaaaaagatgctccttctgctgcatcagtagatgtcaaatctgttcaattggcaaatgatcaagttttaaacattgataaaacagaagaaaccaatgtattaccgacttttggcggtgtggttgttatcccagatagtacctcaacagatggaatcaaagcggaaacagaaacaatttggcagcccaaagcaggaaccaatcgtgaagaattgataaaagcagaaaatattattggtgacaagtatcccatgttagtaggaacagctgcaatgtcggcagccattacgcaatattatacgccattctttttgtcggactgttcatggctatttgtttttttattgacagcgcctcttcacaccgaatat

SEQ ID NO: 1637 - DNA, 435 bp, Enterococcus faecalis
ctgagcgcttttggcttagccttatacataatagaaaggaagaggaagttggaaagtacagggattcaacggttgttttacctttcctggacagtaatcaaactaaatttactgtttgttttatttagtttagctggagggattatttttggtgttggtccagcactccaaatgatgactgatttcattttggaagagggcatgaattatcaagcaatcaccgttaaacgagcatttgaatcatggaaagcacattttaaaagaagtaactgttattttttactttttctcttcactttaggatttgttttttataatatttatttacccgttcaatttaccggaataatgtggttaattattacatttattttattttttgtttccctaatactcgttcttttttacatttatatgctgctcgttcaccacgga

SEQ ID NO: 1638 - DNA, 1470 bp, Enterococcus faecalis
ggaatgaaaaaatggcaaaaaggattagccgtagctggcgcagcagctttagctgtaggactaagcgcgtgcggtaaatcttcaaaagatgcagcgtcaaaaggtgatgatactacaccaacgttattaatgtatcgtgttggggacaaaccagataattatgaccaattaatcgataatgcgaataaaattatcgagaaaaaaattggggcaaaattaaaaatggaatttgttggttggggcgattgggaccaaaaaatgtcaacaatcgttgcttctggtgaaagctatgatatttcattagcacaaaattatgcaacgaatgcacaaaaaggcgcctatgctgatttaactgatttagcacctaaatatgccaaagaagcctatgatcaattgccagataactatattaaaggaaatacgattaatggaaaactgtatgcgttcccaattttaggtaactcttacggtcaacaagttttaacttttaataaagaatatgtcgataaatacaatttagatattagtaaagtcgatggtagttatgaaagtgcaacggaagttctaaaagaattccataaaaaagaaccaaatattgctgcttttgctatcggccaaacattctttgcaacaggtaattatgacttccctattggtaaccaatatccatttgcagtaaaaacaactgatactggctcaccaaaaattattaaccaatatgccgacaaagacatgattaataacttaaaagtcttgcatcaatggtataaagatggcttgattccaacagatgctgctacaagtacaacaccatatgacttaaataccaatacttggtttatgcgtcaagaaacacaaggacctatggattatggtgatacaatcttaacacaagctgctggcaaaccacttgtttctcgtccactaacagaaccattaaaaacaacagctcaagcgcaaatggctaactatgttgttgcaaacacgtctaaaaacaaagaaaaatctgttgaattgttaggtttattaaacagcaatccagaattgttaaacggacttgtttatggtgaagaaggcaaacaatatgaaaaagttggcgatgatcgtgtgaaattgttgaaagattacacaccaacaactcatttgagtgcttggaacacaggaaacaacttaatcatttggccagaagaatctgtcactgaagaaatggttaaagaacgtgataagagcatcgaagaagcaaaagattcaccaattcttggttttacttttgtaaatgataaagtgaaaactgaaatcactaacgttgctacacttatgaaccgttatgcagcaagcttaaatacaggaactgttgatccagaagaaacacttccaaaattaatggatgacctaaacacagctggctgggataaagttcaaatagagatgcaaacacaattagacgaatatatccaatctcaaaaataa

SEQ ID NO: 1639 - DNA, 672 bp, Enterococcus faecalis
ggggtaacagtcttcattaccgtgacaaggacgatagtcaatgcaacaatgacgtcattatatgcctatgtcatttctcgttccaactttccatttaaaaaattctttacattgtttgcgttaattacaatgttattttcaccagggatggttgcgaactatttagtaatgacaaacttattgcaattgaaagatacaatttgggcgttaattttgcctttagctttaggaccatttaatattttagtgatgcgaacgtttttcaagaaaaccgtgcctgacagtattattgaatcggcacgtattgatggcgcaagtgaaatgcgcatttttgtcagcattgtgttaccactagccgttccagggattgccacaattagtttgtttgcggctttgggttattggaacgattggttcaatgcgttactttacattcaaaaagataccttggtaccattacagtatttattgatgaaaattcaaaacaacttagagttcttatcaagaagtacggatatgggtgcagcagcacaagaaggcttaggcgttctaccaagtgaatcggctcgaatggcgattgttgtcttatctacgttaccaattgcgttaacttacccattcttccaaaaatatttcgtgggtggtttaacaatcggcggcgtgaaagaataa

SEQ ID NO: 1640 - DNA, 240 bp, Enterococcus faecalis
cccaaagccgcaaacaaactaattgtggcaatccctggaacggctagtggtaacacaatgctgacaaaaatgcgcatttcacttgcgccatcaatacgtgccgattcaataatactgtcaggcacggttttcttgaaaaacgttcgcatcactaaaatattaaatggtcctaaagctaaaggcaaaattaacgcccaaattgtatctttcaattgcaataagtttgtcattactaaatag

SEQ ID NO: 1641 - DNA, 384 bp, Enterococcus faecalis
accagattcagcactattttaggaggaaggattatgaaaaagaaaaaagtcactagcgttaacgttcgatccttcaacccgacagcgaatttgattttcaatattgtcattgctatttttgctatttcctgtgtggttccgtttttctttgttattatgatttcattgacaagtgaaggatcattatcagcaaacggctaccggttttggccaaaagaattttcattggaggcctatcgttacattttccaaggggcaatgagtcaacgcattattcatgccttagggggtaacagtcttcattaccgtgacaaggacgatagtcaatgcaacaatgacgtcattatatgcctatgtcatttctcgttccaactttccatttaa

SEQ ID NO: 1642 - DNA, 1038 bp, Enterococcus faecalis
aatgacacaaaatctataatttgtttctcaaatcctataatttgttccttaaaaagatattatgaaaacgctattatatttatgaaaggagcgaaacgaatgaagaagaaaaacgggttttttcaaaatgtatggcgttataaggccttaatccttatggcgttaccaggatttatctggtttatatttttcttctatataccagtcttagccaatgtggtcgcatttaaagattttcatatttcaccagatggtttcttagctagtctaagagaaagtccttgggttggttttgaaaactttaaatttttatttgcgtcaaaagatgcttggttaattactagaaacaccattttgtacaatgtcgtctttttagcctttaacttattcttcgcgattgcttttgctattattatgagtgaattaagaaatcgtcgcttggttaaagtttatcacacgatgtcattgctaccatatttcttatcttggatggttattaactattttgtttatgcctttttaagtccagataaagggattttgaatcaatggattactggtaatggcggcacaatgattaactggtatgcagatccacgttggtggccagtaatttttgtcttcctaaatgtttggaagagtctaggctacaacagtattatctactatgcttctgtgatggggattgatccgacatactatgaagcagcgatggtggatggtgccaacaaatggcaacaaataaaaaatgttacgattccacaaattttaccaatgatgtctgttttattaattttaaacatcggcggtatcttcagagcagactttggtttgttctacatcgtaccaagaaactcaggtgcgctttacaacgtgacaagtgtgttagatacctatatttacaatggcttaacggctactggtgatgtaggcatgacggcagctgcagcgttatatcaatctgtcgttggggcatgtttgttattaattgcgaatttagttgttcgtcgaattgaaccagattcagcactattttag

SEQ ID NO: 1643 - DNA, 183 bp, Enterococcus faecalis
aaatttaccgaaatgactgttctttgtgaaaacgtttatctgatattttttttacaactgtttaagaaccttaaaaacaattggctaaacctcactcataaagcgattttgctagcgtgtatttgttttataaaatctgagaacttgatagtttcacaaaggatatcctctaattatttttga

SEQ ID NO: 1644 - DNA, 195 bp, Enterococcus faecalis
ctatttcactactatttttctatttgcctttatgcacacacaatatgttggatttcttgttataaatcaaaaagagttgacgacataggtcattttgacttatgtcgtcaactcttaaattttcagctaattagtcgttctaaaacaatcgattttgtttactcctctttttctttgtttctctttataacatag

SEQ ID NO: 1645 - DNA, 1113 bp, Enterococcus faecalis
  misc_feature (156)..(208): Nucleotides 156 & 208 are "n" wherein "n" = any nucleotide.
cgaagaagcaatgcgggcgagacaattctcaacacagcccaagtagatgacacagttaatccgcccgaagaaacagaggtgccggtggtaccagaagcgaaagaaggcaaattaacagcaacaaaaaccgttaataacgctaaaccaaaactaggngaagcgatcgagtacacaatcagtttccgcaataccatcgaaaacggcgtcntaaacaaagtagttatcacagaccaactaccaaaaggactgacgtatgtcaaagatagcctaacaagtgtcggtgatgaaccaaaaccaaccagcttgacagaagccaatggcacaatcacagcagaatacccaagtatcaccgatatgaaagaacggagtattcgtttcaaagtgatcgttaacgaagaagcgaaagcgggcgaaacaattctcaacaaagccaaagtagatgacacagttaatccgcccgaagaaccagaggtgccggtggtaccagaagcgaaagaaggcaaactagccgcaacaaaaaccgttaataacgccaaaccaaaactaggcgaaactatcgagtacacaattagcttccgcaacaccatcgaaaatggtgtcctaaacaaagtagttatcacagaccaactaccaaaaggactgacgtatgtcaaagatagcctaacaagtgtcggtgatgaaccaaaaccaaccagcttgaaagaagccaacggcacaatcacagcggaatacccaagtatcaccgatacgaaagaacggagtattcgtttcaaagtgatcgttaacgatgaagcgaaagcgggcgaaacaattctcaacaaagccaaagtaggtgatggcatcaatccaccagaagaaccagaagtgcccattacgcctgaagaaccagcgaaaaataaaaaggaaacaaacaaagttgttacagaccagaacaaacctacaaaaaatagtaaaaatgaaattgccataaacaagaaagaaacgtctaaatcatcctatttaccaaaaacaggagaaaaagttcaaaaaatatttgcgtatctgggtgtaggactgatcttaattgtattaattctctatgttataaagagaaacaaagaaaaagaggagtaa

SEQ ID NO: 1646 - DNA, 300 bp, Enterococcus faecalis
cgccaaaccaaaattaggggaagaaatcgagtacacaatcagcttccgcaacaccatcgaaaacggcgtcctaaacaaagtagttatcacagaccaactaccaaaagggtgacgtatgtcaaagatagcctaacaagtgtcggtgatgaaccaaaaccaaccagcttgaaagaaatcaacggcacaatcacagcggaatacccaagtatcaccgatacaaaagagcggagtattcgtttcaaagtgatcgttaacgaagaagcaatgcgggcgagacaattctcaacacagcccaagtag

SEQ ID NO: 1647 - DNA, 2610 bp, Enterococcus faecalis
  misc_feature (27)..(27): Nucleotide 27 is "n" wherein "n" = any nucleotide.
cttccctttacccgtggtcgaggcagnataggcgatagaaatattcaggagacagcactaacgcaggctaccgaaagtcctgagcaacctccattaaaggcgcaacctactggtccgttagtgccaccaacacctggtcgggggtttaatacaccgatttatcaaagcgttcataaaggagaacttttttcaacgggaaataccaacttaaaaattgcgaatgaaaatacggcggctgcacaaacatttttaaacacacgaggagcaagtagtggttatgcaattaacaattttcctttagaatttgcagatgttgacaatgatccaaatacgtataactctagtcgggcttatattgatttaaatggtgcaaaagagattgcttgggcgggcttattttggagtgcatctagatataaaggccctgcttacggaacaaatctttctgatgaagaaattagtgcaccagttcaatttactacaccaaatggaaccgtacagcgtgtttcgccccaaaggtaccatcgtatcgatcaagatgcaacaaacccaggacaacgtttcgggtacaataacactggattttctaattatgcagatgtaacttcaattttacaaggggataaaagtgcgacagggagttatacgttggcagatattcctatgacaagtagtttaaatggtcaatatcaatattataactttagtggttggagtttgtttgttgttacaaaggatcaggcaagtaagtcaagagcttttagtatttactatggagcacgtggtaatgctgctggaaccaataatgaatttactatgagcaactttttaacagcaaaacaaggaaatcttgatccaattgtgacctggtttactgttcaaggagataaatactggactggagacaacgcacaaattaaaaatagcgcaggaacttgggtaaatatttcgaacacgctcaatccagttaacaatgctatgaacgcaactgtgacagataacgatgaacatatggtagacaagtatccagggaaatttgcgccggatcatcctaattttttagatattgatatcgatcgtatggcaattcccgaaggtgttttaaatgctggacaaaaccaaattaattttagaacaacaagtagtggtgacgattattctacgaatgcgattggttttgctgtaaacgcagaaacgcctgaatttgaaattaagaaagaaattgtggaaccaaaagaaacttacaaagttggtgaaacaatcacgtatcgtgtctcactaaaaaatacaaaagctgattctgaagcgataaattcagtctcgaaggatgcactagatggtcgcttaaattatttgccaggctctttaaaaattattagtggaccaaattctggtgaaaaaacggatgcttcaggcgatgatcaagctgaatatgatgaaaccaataaacaaattatagtccgtgtcggcaatggtgcaactgctacacaaggaggtagctacaaagctgatacagctgaaacaatttacgaatttaaagcgcggataaatgaacgagcaaaagcaaatgaattagtgcctaatagcgcaaccgttgaggcagtagatattttaacatctgcaaaagtcaacgaaacttctaatatagtagaagcaaaaattgcggacgaacaagtaactggcaaattaaccgcaacaaaaaccgttaataacgccaaaccaaaactaggggaagaaatcgaatacaccatcagcttccgcaacactatcgaaaacggcatcctaaacaaagtagttatcacagaccaactgccaaaaggactgacatatgtcaaagatagcctaacaagtgttggtgatgaaccaaagccaaccagcttgaaagaaaccaacggcacaatcacagcggaatacccaagtatcaccgatatgaaagaacggagtattcgcttcaaagtgatcgttaacgaagaagccaaagcgggcgaaacaattctcaacaaagccaaagtagatgacacagttaatccaccagaagaaccagaggtgcctgtggtaccagaaacgaacgcaggcaaactagccgcaacaaaaaccgttaataacgctaaaccaaaactaggcgaaactatcgagtacacaattagcttccgcaataccatcgaaaacggcgtcctaaacaaagtagttatcacagaccaactaccaaaaggactgacgtatgtcaaagatagcctaacaagtgtcggtgatgaaccaaaaccaaccagcttgaaagaaatcaacggcacaatcacagcggaatacccaagtatcactgatacaaaagagcggagtattcgtttcaaagtgatcgttaacgaagaagctaaggcaggcgaaacaattctcaacaaagccaaagtagatgacacagttaatccgcccgaagaaccagaggtgcctgtggtaccagaaacgaacgcaggcaaattaaccgcaacaaaaaccgttaataacgccaaaccaaaattaggggaagaaatcgagtacacaatcagcttccgcaacaccatcgaaaacggcgtcctaaacaaagtagttatcacagaccaactaccaaaagggtga

SEQ ID NO: 1648 - DNA, 759 bp, Enterococcus faecalis
gacgaatctttaactgtgtcacaaagggacgaaggagtctttatgctacccgaagaatttagacaactattagccgcaaaaggcattgaattgacagaccaacagatgacacaatttgaccaatatttccatttactagtagaatggaatgaaaaaatgaatttaacagccattacagaagaaaaagaagtttatttgaaacatttctatgattctgtttcgttggcattctttgaagactttgccagtgacaaagccatttgtgatgttggcgcaggcgcaggatttccaagtattcctttgaaaattgtttttccttcattaaatgtcacaattgttgactctttaaataaacgaattactttcctaacagagttggtgaatcaactaggtttggctaatgtttctttgtatcatgatcgtgcagaaacatttggtcaaaaagcagaatttcgtggcgcgtttgattacgttacagcgcgagcagttgcacgattaaatgttttaagtgaactgtgtttacccttagttaaaaaagaaggctattttttagccttaaaagcatcgaaaagtgaagaagaaattaatgaagcaaaacctgcaatcgctacattaggcggtcaatttcaaaaagaagttggttttactttgccgattacggcagacgaacgccacattgtcgtgattcaaaagaaaaaagaaacccctaaaaaatatcccagaaaacctggattaccaaataaacaaccgattaaataa

SEQ ID NO: 1649 - DNA, 777 bp, Enterococcus faecalis
gatggaggcacacacatgacacgaattatttctgtagcgaaccaaaaaggcggcgttggtaaaacaacgaccactgtaaatttaggcgcatgtttagcaaacttaggcaaaaaagtcttactgatcgacattgatgcacaaggaaatgctaccagtggcatgggtgttcctaaaccagatgtcgcacacgatgtgtatgatgtccttgtaaatgaagaaccaatcactagcgtggttcaacataccagccgtgaaaatttagatattgtccctgcaactattcaattagcaggcgctgaaattgaattaacttcaatgatggctcgagaatcgcgcttgaaattagcaattgatgaagtaagagacatgtatgatttcgttttaattgattgcccgccttctctagggcatttaacaatcaatgcttttacagcaagtgattcgattctaattcctgttcaatgtgaatattacgcattagaaggcttgagtcaattgctaaatacgattcgcttggttcaaaaacattttaaccctgaattgaaaattgaaggggtcttgttaaccatgtacgatgctcggaccaatttaggtgccgaagtcgttgaagaagtccgtaaatatttccgtgaaaaagtctatgatacgattattccaagaaatgtccgtttatccgaagcaccaagtcatggtttaccaatcattgactatgatattcgctcaaaaggtgccgaagtgtatcaagcactagcaaaggaagtgttggagaatgaataa

SEQ ID NO: 1650 - DNA, 909 bp, Enterococcus faecalis
caaaggaagtgttggagaatgaataaaggcaaaggtttaggcagaggcatcgatgccttgtttcaagatatcgcaaagctagaagatgtcgacgttaagaacgaacaagtgacagaaattctattaaacgaacttcgtcccaatccttaccaaccgcggaaaacatttgatgaaacctctttacaagaacttgcaaactcgattctacattccggtgtgtttcaaccgattattgttcgtaaatcggcagttaaaggctatgaaattattgcaggtgagcgtcggttccgggcttctaaattagccggcaaagaaaaaattcccgcaattattcgcgaatttgatgaagaatccatgatgcaagttgctgttttggaaaacttacaaagggaagatttaaatccgctagaagaagcagaagcctatgaaatgctaatgaaaaatttaaaattaacacaagcggaagtcgcagaacgtttgggcaaaagtcgcccgtatattgccaattatttacggttgctaactttaccagatgcggtcaaagcaatggttcaaaaacaaagcatgtcaatgggtcaagcacggacgttattaggcttgaagaacaaagaacagctattgccattagctaatcgttgtattaaagacaatttaacggttcgacaattagaacaacttgtcgctgaattaaacgaaacacaaggcaaaaagggcaaaaaagcgaaaaaagccatcaaggaaaaacccatttatattcgagaaagtgaagaccgcttaatggataaatttgggacaaccgtagcgattcaagaaaaagaaggcaaaggaaaaattgaaattgagtacttgtcctcttcggatttggctagaattttagatattttagatattcattttgacgaggaataa

SEQ ID NO: 1651 - DNA, 231 bp, Enterococcus faecalis
tcatggtatttttatataagtaagagaagaaagaaggcttggaacatgtatgatttaggcgatattgtcgaaatgaaaaagccgcatgcttgccaagcaaatcgttggcaaatcattcgcatgggcgctgatatcaaaatcaagtgcacgaattgcgggcatattgtcatgatgccgcgtcgtgattttactaaaaaattaaaaaaagtaatcgagaaaaaagcagactaa

SEQ ID NO: 1652 - DNA, 1140 bp, Enterococcus faecalis
actgagagaaagagtggaaaacaaatggcactaacagctggaattgtcggcttaccaaacgttggtaaatcgaccctatttaacgcaattacaaaagcaggagcagaagctgcaaattatccctttgcaacgattgatccgaacgtcggcatggttgaagtaccagatgcccgtttacaacgcttgacagaactagtaaaaccgaaaaaaacagttcccacaacgtttgaatttacagacatcgccggaattgttaaaggtgccagtaaaggagaagggctaggaaatcagtttttaagtcacattcgtcaagtagatgcaatctgtcacgtggttcgttgttttgatgacgaaaatatcatgcgtgaacaaaatcgggatgcggatttcgttgatcctttagcagacattgatacaattaatttagagctaattttagcagatttagattcaatcaataagcgctatactcgcgtggctaaaatggcgaaagcaaaagataaagaagcggtggaagaattagctgttttagacaaaattaaaccagttttagaagaaggtttatctgctcgtacgattgaatttacgccagaagaagagaaaattgttaaatctcttttcttattaaccacaaagccggtcctttatgtagcaaatgtttcagaagatgaagtggcggatccagacaacaacgagtatgtacaacaagttcgtaattttgcaaccagtgaaaatgcggaagtaatcgtagttagtgcgcgagcagaagaagaaattgctgaattggattctgaagaagacaaggctgaatttttagaagcaatgggcattgaacaatctggcttagatcaattgattcgtgcggcttacgatttgttaggcttagctacctactttacagctggtgaacaagaagttcgtgcatggacgttccgtaagggaatcaaggcacctcaagcagctgggattatccacagtgactttgaacgaggcttcattcgtgcggaaacagtttcttatgaagacctagataaatatggcaatatgcaagctgccaaagaagcgggccgtgttcgtttagaaggaaaagactacgtcgttcaagatggcgatgttatgttgttccgttttaacgtttaa

SEQ ID NO: 1653 - DNA, 762 bp, Enterococcus faecalis
gcccacatatttaaggccattcagccgtttagaaagaggttccctctacatgagggtgaggaggatacaactatggaagcagaagcattacgagcaatcgtggctgagaatcgtcaattagaacagaatttgactaaaagaaatgaacaatacatttttgacttaaaaaaatcattaaaagcggctaatttatctgaagaagagctagcattggctctacacggtattttgccagaattagtagccggtcaaaaaacaggtaaaacagcccgtcagttatttggcactgtttcagaacggacggaagcaattttaaataaaccagcagaagtcaaagaaccagcgggctggatgatttggctcgacaataccttactattacttggtttattaacaatcatgttagcggcgatgtctctattttcaaaaggaaccgcacaacctctcggattaaccacatatatcttaggtgcgatggctgggggttatgttttctatctaatgcacaaatatgtttaccgttttgatcgtcaaggtggcgacaaaagcaaacgtcctggttggttaaaaacgaccgccattctatttggtgggatgttcttgtggattgcagttttcgctggttcagcgatgctaccaccagtgatcaatcccatcttagatccgatgattgctttagtaataggtgcgttagcctttgtagcacgctatttcttcaagaaaaaatacaatattcaaggtagtttcatgacacgtcaataa

SEQ ID NO: 1654 - DNA, 855 bp, Enterococcus faecalis
attcggaataattggattgatcaagatgggcatatatattttatctttacacgaaatgaactgatggatattttagggtgtaaagaaaataaaattgcaaaaataaaaaaagaattaaaagacaaaaatttactttatgaaaaacgtattcctccgaaaaaactccctactggtgaattcaaaaactacccaaacagattgtatttaggtaagttggaagtttcagcaacagatgtttacgccatcagtaatgctagctatacaaatgagtttcccgaaagtgggaaaaaccaaccttcggataaacatgataaaatcggcgtttcttttgaaagtgggaaaaaccaacgtccagaagaatccaataataccagtactttgttcgaaagtgggaaaaaccaacccaatctatatctaactaattctttagatacaatagatacaatagatactgaaaaagaacgattgcaacaacaattattgctcgatcaattttcagaagttcaagagcatacatttcttagcaaaaatagcttagaatttgttgctgccttttctgatactattcaagaagcacatgaaatggttggaacaattattcgtgctaaaactaaagtagaaaaagaatacaatatcgttctaattggtgaagattatcaagaagaaatagacaaatgtttgcgtcgtgtgatgcataaaatcgagacagattctactgtaaaaagtccaaaagggctattctacaagtcgttttataatttatttgttgaatgtgcgttagaaaaagaaaatataaataaagggaataattcgaaaggttctgaaatcaccttgcataattgggttgaaaaataa

SEQ ID NO: 1655 - DNA, 189 bp, Enterococcus faecalis
ctattatatttacaattttatcaaataaacttccccggggatacaacatacagagtgaaatttatccaaacaaatgaatcagttacttatttttcaacccaattatgcaaggtgatttcagaacctttcgaattattccctttatttatattttctttttctaacgcacattcaacaaataaattataa

SEQ ID NO: 1656 - DNA, 1674 bp, Enterococcus faecalis
ttagttagcaaatttaaactacggaggttgataaaaatgaagaagtacaagaagttttgttttttaggtattgggttattacctttggtattagctagttgtgggacaaatactgccacaaaagattcacaagatgcaacagaaaaaaaagtagaacaggtagcgactttgactgcagggacacctgtccaaagtttagacccagcaactgctgtagatcaaacgagtataactttattagccaatgtgatggaggggttgtatcgattagatgaaaaaaatcaaccgcaaccagccattgcagctggtcaaccaaaagtatcgaataatggcaaaacttataccattgtgattagagatggcgctaagtggtctgatggtacacaaataattgctagtgattttgtaacggcatggcaaagagttgtagatcctaaaacagcgtctccaaatgtggaactgttttctgctataaaaaatgccaaagaaattgcttcaggaaaacaagcaaaagatactttagcagtgaaaagtattggtgagaaaacattagaaattgaattagttgaaccaacaccttattttactgatctgttatccttaacggcttactatccagtacagcagaaagcaattaaagagtatgggaaagactatggtacttctaaaaaagcaatcgtaacaaatggggcatttaacttaacaaatttagagggggtaggcacttccgataagtggacgatttctaaaaataaagagtactgggatcaaaaagatgtctctatggataaaattaacttccaagtcgtcaaagaaattaatacaggaataaatttgtataatgatggacaattagatgatgcgcctttagctggggagtatgcaaaacaatacaagaaagataaagaatattcaacaacattaatggccaatacaatgtttttagaaatgaaccaaactggggaaaataaacttttacaaaacaaaaatgcccgaaaagcgattagctatgctattgatcgggaaagtctagttgaaaaattactagataatgggtccgttgcttctgttggcgtagtaccaaaagaaatggcttttaatccagtaaataaaaaagattttgctaatgaaaaattagttgaatttaacaaaaaacaagcagaagagtattgggataaggctaaaaaagaaattgatttatcccaaaatacttctttagatttacttgtaagtgatggagagtttgaacaaaaggcaggagaatttctgcaaggacagttgcaagatagcttagaaggattgaaggttactgtgacgccaattcctgcaaatgtctttatggaacgcctaacaaaaaaggattttactttgagcctaagtggatggcaagctgattatgcagaccctattagctttttagcaaactttgaaacaaatagtccaatgaatcatggtggatattcaaataaaaattttgatgaattgctaaaggattcttcttctaaacgttggcaagaattgaaaaaagctgaaaaattgttgatcaatgatatgggggtcgttccaatttttcaagttggaacagcaaaattagaaaaaagtaaaataaaaaatgttttaatgcattcaataggagcaaaatatgactacaaaaaaatgagaatagagaagtaa

SEQ ID NO: 1657 - DNA, 1173 bp, Enterococcus faecalis
agaagtaatggagggtatatggaattaattcgtcgcgtttttataaaggacaaggaaattattttagttgggactgcacatatttccagtgaaagtgctgaattagttaaaaatataattgaagaagaaaatccagatgtagtttgccttgaatgggatcaaagtcgatatgacaagtacctgaaccctgatgaatggtcggatacagatattgttcaagtaattaaacaaaaaagactaactgttttaatctctagcgttatttacaaattaattcaaaaacatttggctaagattaatgattctgtagctggagctgaattttttgaggctgttagtagtgcaaaaaaagttggtgctaaaatagcgttagtagacagagattcacaagtaacttttaaacgattttggcgcttaatcccattaagaaaaaaagcgttacttccttatgcttttggtagtgttttggaaggtgcggaagaatctgaagaagaaatgttaaaattgttgaattctgagaattttgagcctatttttgaacagctacaagaagcatatccagaactatggaaagttcttttagtagaacgagaccaatatttagctcagaaaatttcagatcaggaagctggtaaaatcgtagttgttattggccaggcacatttacgtggcgtggagaaaaacttaaaaagtaatcaacaaatcaatataaaagaattagaaactttaccgccaaagctttggtcaactaaagttttagagagtatcatacctttgattatcataggtttgttaatttattcctttttcttaggtgtagatgtaggtaaagaccaaataatgagatggggcatttggaacggtggtttatcagcattatttactttattagcgttggctcaccccttaacaattgtcacttccctagtgtttgccccccttgctaccttgctaccaatggtgtctgtaggagtgttttctgctattgtagaggctactttaaggaaaccaaaagtacgtgattttcaaacgatggatgaagatataaaatctttgaaaaagatatataaaaaccgtgttttgagagtgtttttagtgttcgtgttagctagtttgggaggaatgattggtaattttgttggtggcttggaaatgtttaggcaccttatataa

SEQ ID NO: 1658 - DNA, 888 bp, Enterococcus faecalis
ataactggaataatgtccaaatctgtttacataaaagttgaagctgactctcgaccgatttctgtagaagagttaagcaagttctcagaacgtttaggtgtaaatttttttgaaattttaaacagagctggcatgaatacaaaaagcgtaaatgaaacaggaaaagaaaaacttcttatttcaaaaatatttacaaaccctgacttatttgacaaaaattttcaaaggattgagccaaagcgcttaactagtcttcagtactttagtatttatcttggatatatttctattgcacatcattataacattgaagttcctacttttaataaaacaattacttcagatttaaaacatttatatgataaaagaacaacattttttggaattgattatgaaattgtttcaaatcttttaaatgtcttaccgtatgaagaagtgtcaagtttcattaagcctatgtatccaatcgtggattcctttggtaaagattacgatttaactattcagactgttctaaaaaatgctttaacaatatcaattatgaatagaaatctaaaagaagcgcagtattatattaatcaatttgaacacttaaaaacaattaaaaatattagcataaatggatattacgacttagaaataaactatttaaaacaaatatatcaatttttaactgacaaaaatattgattcttatttaaatgcggtaaatattatcaacatctttaaaatcattggaaaagaagatattcacagatctttagttgaggaacttacaaaaatatctgcaaaagaaaaatttacgccccctaaagaagtgaccatgtattatgaaaattacgttgcaatagaaaataatcctattcctgaaataaaagagcagtcatga

SEQ ID NO: 1659 - DNA, 861 bp, Enterococcus faecalis
caaaagatgactattgaaaaattagaatatttttataccattgcaaaatataatagtatttccaaagcagcctctgaactccatgttagtaaatcaaccttaagtgcgtcattaaaagatttggaaagtgaattgggccatttactttttaaccgtaacggtaattctttgacgttaaattcctatggtgataaaatcgtccaatctgtatatatcattttaaacgaggctaagaaaatgaaacttaatttgcatgaaatgattgagaatccagtgatgcgtttaggttttggaaatacgtccttgatgtataaagtgacagaaaatgaggatcaactgaatcgtttttgggaatgttaccatggttcatcgtttgagttattgaataaattggagaatcatgagttggattttgtgattacttctgcagatgtgaatagtccagttttaaagaaagaacaattaattgaactaaaaatgtatctttgtgtttcaagagaaattaaacaagaaattgaggaagaaggcttcagctgtttgaccaactatccatttctatttttgccgcatcacttagatcatttagaagctaccaagagtgtgctagaaatgttgcaattaacaagtccgcttgtttgttgctacgatacgttgatgcttactcgtctcattgaaaaaagtaaaggagtttatgcggtgatctctcttcggaaagaacaactgcaggaaattgattctaaactcttctttttaccgattgaacgaaaacaaaaattttatttataccgaaatgtttccagttcggtttttgtccaacctggtcaaatcaaggcaactttacaaaagttgctagagacttag

SEQ ID NO: 1660 - DNA, 1410 bp, Enterococcus faecalis
ttgctagaaaggactgtttttatgatcgatagaaaaaaagttattttgtatacttgttgcatgagtttgtttgtagtgaccatggatgttacggttgtcaatgtggcgttaccatccattcaaagtgattttcacacgaatctgtctacattacagtgggtaacagatggctacactttaatggtagcatccttattattgttgtctgggtctacagcagatcgaattggccgtaaacgagtccttcaattgggcttagcctgttttggtttagcgtctttcctatgtgggatttcgcaaaccccagggcaattgatcgcgtttcgcatgttgcaagggattggtggttctatgttaaatccggtagcaatgtctattattacacaggtatttaccgaaaagttagaaagagcgaaagcaattggcttgtggggctctgttacagggatttccttaggcatgggcccgattattggtggactgattgtttcttattttagctggcggtatgtcttttttgtaaatgtaccgatcattgctgcggcaatcatccttacacaaaagtttgtacctgagtcaaaagtagagaagacggtgaaaaatgattttgttggtcaagcattgatgattctttttctatttagttctatctattccattatcggactacctagaaaagggcttttcgcgccagatattttaagtactgggataatcggctgcttagccattgttattttctttatttatgaatataacattgacaatccgttaatcaacccgcgtttctttttatctattccatttacatcggcttcttttttagctatttttggctttatcatatataacggctatttatttttaaacacgctatatttgcaagagatgagaggcttcagcccgttggaagctggcttatcaaccattcctttggcttttgttagttttcttgttgcaccgagagccggcgaaatggtagggagaatagggacgaaacgtcctattatgctttgtggtatttcaatgttggctgttagctttttacaattatttgtaactaaaacaacgcctatgattattttatttattatttatatctttttaggcattgggtttgggatgttaaattcaccgattaccattacagcgattgaaggaatgccactttctcagtcaggaactgcagcagccattgcggtgacatgtaagcaaattggcaattctttaggggtggcgctaccaagtcttttaattacaaagcctattactagttcgcttactcgaacaccttttacaaacgtatggcttttatttggatgttgcgccattgcgattatctttttaagttatttatccaattctccgctagcgaaaaagtcattgcgcagagttaggttttatttttaa

SEQ ID NO: 1661 - DNA, 2061 bp, Enterococcus faecalis
atgaaaaaaataaataaccgattaggactctttttattttttgttttactcttttgggcaaaaacgattctggcgtattacctagatttctcattgggtgttaagggcagtctccagcgagaaattttatggttcaatccagttgctactacgctgttattatttggttttagtttgtattttaaaaagcataaaacatttatgcttagcttaactcttttaaatgttttaaatacattaattttatatttgaatattattttttatcgtgaattcactgactttattaccatccaatctgtttttggcttttcaaaagtttcagaaggaatttctggtgatttacttgccttaatgagggtccacgatgtcttttattggctagatactttagtgctgctcgttttggtattttactcttttaaacagcgacggaatcatcaagtctttgtgaccaaacctatcaacagaagattggcgatctcaattagttgtttaagtgtcttgctcttttcggttaacttatttttaagcgaaaccgatcgtcctcaattgcttcaaagaatttttgaccgtaattatattgtaaaatatcttggcttggatgcattcacagccatcgatggtgtcaaaacagccatgtcaaatgaggtaagagcagaagctagttcaaacgaattacctgaaatcatgaaatttaccaagcaaaacaatttaccgcttaatccacagtatgccgggattgccaaaggaaaaaatgtatttgtgattcatttagaaagttttcaacaatttttgattaatatgaaagtccaaggccaagaggttacaccgtttttaaatcagctttatcaaaacaaagcgacaatcagttttgataatttctttcatgaagtagggcaaggaaaaacgagtgatgcggagaacatgttggaaacaggaacattcgggttaccgcaaggctctctttttacacaattaggatcagacaatactttcgaagcggctcccgcagttttaggacaaaaaggctatacaaccgctgttttccatggaaatgtggggagtttttggaatcgagaccatgtgtataaaaacttaggatatcaatacttttttgatcggtcatatttttcaaaagatgacaaaatgctaggttacggtattttagataaacaattgttgcgtgaatcagctagtgagcttgaacatttacagcagccattctatgcgaagtttttaactgtgaccaatcataccccttattatacggatgaccaaaacttcccgtttcctaaattgaacacaggcaattcgattgtggatgattatgttcgaacagcgcactatttggatcaatcgctagaacaatttttccattacttgcaaacaacaagtttatacaatcattctatttttgttatttatggtgaccacttcggtatttcagatgcgaacaacaaggacttatgtaaagctttcaaccgcgatccaaaaacgtggacaaactatgacaatgcgcaattgcaaagagtacctttgatgttttacatgccaggctatacgcaagggaaaatcatgcacgaatatggtggggaaattgacgttttaccgacactgtaccatcttttaggtgtcgatgataaaaattatatccattttggcacggaccttttatctcctcaatataaacaagtggttccttttagaaatggcgattttgtaacgcctcaattttcgtatctaggtggggaaatctacaataatcaagggaaaaaattagaccaagttccagcagatttaaaagcagaagtcacgaaagataacgattgggtgaaaaaatcgttaagtttatctgacaaattaaatcgggaaaaccttttacgtttttataaaccacaaggattccaagaagtgcaaccaaaggactacaactatgatgtagcttttgaaaaaaacaaagtcttagaagtagaaaaacaaaaaaatgcacaatcaactagcttgtttagtcaaaatggcaatcaaacgacagtccaaaattatccgactacgccatag

SEQ ID NO: 1662 - DNA, 636 bp, Enterococcus faecalis
  misc_feature (2)..(20): Nucleotides 2, 16, 18 & 20 are "n" wherein "n" = any nucleotide.
anacaagtcgtgtttnanancgacttggattatcaagagacggcgaccgtggaaattatcggcttcatgattcaaagtggcgaaagcgaaaagacctggacaacattttttgaatacctaaaagaacgcggtttacaaggtacggaactcgttatttctgatgcgcacaaaggattagtctctgccattagaaaatccttcaccaacgtaagttggcaaagatgccaagttcacttcctaagaaatatctttaccaccattcctaaaaaaaattcaaaatctttcagagaagctgttaaaggaatttttaagttcacagatattaacttagcgcgtgaggctaaaaatcgattgattcatgattatatcgatcaaccaaaatattcaaaagcttgcgcatcattggatgatggattcgaagacgcctttcaatataccgtacaaggaaattcccacaatcgactaaagagtaccaatctaattgaacgactgaatcaagaagtacgcagaagagaaaagattattcgcatcttccccaatcaaacatcagccaatcgcttaattggagccgttcttatggacctacatgatgaatggatttattcttcaagaaaatacatcaattttgataagtag

SEQ ID NO: 1663 - DNA, 1005 bp, Enterococcus faecalis
gccctccccgtgctgaggcatttaacgattatcggcggcggtcctgttggattatttgccgctttttatgcgggaattcgtaaagcgaaaacgaaaatcattgatagcctgccgcaattaggtggtcagctaacaatgctgtatcccgaaaaatatatttatgatattcctggattccctgctattaaagccggtgagttaattgccaatttggaaaaacagatgcagccatttcagcacgatgtttgcttggaagaagaggtcacacaccttgcacaggaagcagatggacttttgcgcttagacacaactaaaggcacacattattctaaaacggttatctttgcgattggtaacggcgctttccaacctcgacgtttagctatcgaaaatgttgaagcctttgaaggtgagtcaatccattattatgtgactgacatgaaaaaattcgctggcaaaaaagttgcgattgctggtggcggcgattccgcaattgactgggctttaatgctagaaaacgtcgcagaagaagtatctattatccatcgtcgcccacaatttcgcggccacgaacatagcgtggaacaactggaaaaatctagtgtttctatcagaactccctatatcattagtgatattttaaaggaaaacgaaacgttcacaggcatccaattaacggagacaaaaggtgaccaaacattggatctccctctggatgatttaattatcaattatggcttcacttcttctttaacacacctcaaagaatggggattagacgtttctagaaatgctattaatgttcattccgatatgtcaactaacattcctggtgtatacgctgtaggggatatctgttcctatgagggaaaagtgaaattaatcgctacaggctttggtgaggcacctactgccgtaaataatgctttacattacttacggcccgatgctcgacgtcaaccagttcatagtacaagtttatttgaaaacggcgtacctaaataa

SEQ ID NO: 1664 - DNA, 984 bp, Enterococcus faecalis
  misc_feature (280)..(280): Nucleotide 280 is "n" wherein "n" = any nucleotide.
aaagtgctaggaggaagaaagatgaaccaaccaattatttatttaaatgaagtattcaacgaagaacaactggaacaagtgaaagctgtggcacccaattatctagttaaaacatctaccgatcatttatcatctgctgaagaagaggccatcgaaattatgttaggctggcataaagaaattggtccgcgtttattagcatctgatactagtcacctaaaatggattcagctcatttctgctggtgctgattatatggattttgataaattaagagaanaacgcattctgttgtctaatggtagcggaatccatagtgtgtctatctcacaacatgtgttaggcgttttattagcacatacccgcggactgcaagaaagtatccaacaacaaatgcaacacacatggaatcaaacagccccttcctatcaacaactttctgggcaaaaaatgttaatcgtaggcaccgggcaaatcggacaacaattagctaaatttgctaaaggtttaaatcttcaagtttatggcgtgaatacctctggacatgtgacggaaggcttcattgaatgctattcacagaagaatatgagtaaaattatccatgaaatgtccattgttgtgaacattcttcctttgactgaaacaacaaaacatttatacaatcaggcactttttgaaaaaatggctcctgaaacaattttcgtaaatgttggtcgaggcgcctcagtagcaacgaacgatttgataactgccttaaacaataaaaccattgcttttgctgccttagatgtctttgaagaagaacctcttcccgaagatagccctttatgggagatgcagaatgttttattaacacctcatatttctggcatgacaccgaagttcaaatcaaaattactggcgatttttattccaaacttaaatcaatttgtgacggatcagaccctcgtcaaaaaccaagtttccttaaaaaaaggctattaa

SEQ ID NO: 1665 - DNA, 1593 bp, Enterococcus faecalis
ccttcctgttcttttgggcggaagaaggagagaaacaaaatgcaaataaaaattttagcaacaagtgatatgcatgggtacattatgccaacaagttatagtgaaaaaaagatggatttaccttttggaaccgcaaaagcagcaaccatgctgaaaaagttacgggcgtctgccaaaggaccagtttttcaaattgaaaatggggattttattcaaagttcgccgcttagttactacgtaagaaaagcagaaacacattcagtggctgccatcactaaaatcattaatcaaatgaattatgatgttagcattttaggtaaccatgaatttaattacggtttagattatttaaaggaaacgattgccagttatcaacagccagttttagctgccaatattcttggtaaagatggacaaccttatttcggtcagccgtatgtcatcatagaaaaacaaggggttaaagtagccatccttggcgtgacgactcaatatattcctcattgggaacagccggcaacagtcaaagatttaacgtttaaaagtgtcgttgaaacagcggcggaatacgtgccaaaactgcgggaagaagcggatctagttgttgtcgcttatcatggcggttttgaaaaagatttagaaacaggggaacccacggaattactaacaggagaaaatgaaggctacgatttattggaaaaagttcctgggattgatgccttagtcactggtcaccaacatcgagaaattgctacaaaactgaatggaatacctgtgattcaaccaggttttcgaggagctttcgttggagaaattactttagaaattgaacctatggctaaaggctatcacgttattggaagtgacgcagctattcatcctgttggaaacgaacaaccagatacagaagttttagctttgacaacagcgttacatgacgaggtagaagagtggcttgatcaaccagtgggaaatgtggaaggggatatgacgattcaaaatccgaatgccgtacgcctcaaagaacatccatatatagaatttattaataacgtccaaatggcttcaagcggaacggatatttcagggactgcactttttaacaatgaaggcaaagggtttaataaccaaattacgatgcgcgatatcattaccaactacatttatccaaataccttggctgtattgcgtgtcactggacaagacctccgtgaagcgttagaacaaagcgctacttattttgtgttagaaaaaggccaaccaattttcaacccgaaatatgtcgatccaaaaccacaatactataattatgatatgtatgaaggcattgagtatacgcttgatttaagacaaccgtttggtgaaagagtgacgaaacttaattatcatggcaaagcagtgcaagcagaagatgttttggaaatcgtgacaaatcaataccgagcagtcggtggcggaaactatcaaatgttccaacctgaaaaaattattcgagaaattcaaattgatatgacggaactgattgcagaatatttaaaaaaacatccaatcattcaagcgtcgacaaatgataacttcaaggttatctggtaa

SEQ ID NO: 1666 - DNA, 1344 bp, Enterococcus faecalis
aagaatattgccagaacgtggcgagcaaattgttttataaatttttttaagggagagaaaaaaatgaagttcaaaactctagcaacaacagtgttagcaaccgcagctattttcgcattgggggcttgtggtaacggtaatggggccaaagaatcaaacgatattgtgaaagaagtgaaggaagatacgacaatcactttctggcatgcaatgaatggggttcaagaagaagcgttaacaaaattaacgaaagacttcatgaaagaaaatccaaaaattaaagtggaattacaaaatcaatctgcttaccctgatttacaagccaaaatcaattcgactttaacttcaccaaaagatttaccaacaattacgcaagcgtacccaggctggttatggaatgctgcacaagatgaaatgttagtggacttaaaaccatatatggatgatgacacaatcggctggaaagatgcagagccaattcgtgaagtattgttagacggcgccaaaatcgacggcaaacaatacggcattccatttaataaatcgacagaaatgttattctataatgctgatttgttgaaagaatatggtgttgaagtaccgaaaacattagaggaattaaaagaagcttctaaaacaatttacgaaaaatccaacaaagaagtcgttggtgctggttttgactcgttaaataactattacgcaattggaatgaaaaacaaaggcgttgattttaataaagacttagatttaacaagcaaagattcacaagaagtcgtggactattaccgtgatggtatcgaagcaggttacttccgcacagctggttcagataaatatttatctggcccatttgcaaacaaaaaggtagcaatgtttgtcggtagtattgctggtgctggttttgttcaaaaagatgctgaagctggtggctatgaatacggtgttgcaccacgtcctgaaaaaatcaacttacaacaaggaacagatatttatatgttcgatagtgctacgccagaacaacggacagcggcatttgaattcatgaaattcttagctactcctgattcacaattgtactgggcacaacaaacaggttatatgccaattttagaatctgttttacacagtgatgagtacaaaaattctaagacaaccaaagtacctgcacaacttgaaaacgcagtaaaagatttattcgctatcccagtagaagaaaatgctgattcagcctataatgaaatgcggacaattatggaaagtatttttgcttcatcaaataaagacacgagaaaattattgaaagatgcaacatcacaatttgaacaagcatggaaccaataa

SEQ ID NO: 1667 - DNA, 2112 bp, Enterococcus faecalis
agaaagtggggcaataagccaatgaaaaaagttttaacgattatcgcatttgttttcttaggcattttagccgttattacgttatttccatttgtctatatgattttagctggtttaatgagttactctgaagcgaccagcatgccgccaaccatgtttccgaaacaaccacaatggcaaaactacacagaggtctttcaaaaagcaccctttcttcggtatttcttgaacacagtctttgtttcaggcgttacaacgattgctacggtagtcaccgccgtgttagcttcattcgcattaacgagtttgaagttccgttttaaaaatgtggtcattgctttgatgatttcgttgttaatggttccgtatgaatctattatttttaccaattatcaaacgattgcgcaattaggtttgttaaatacttacagcgccttaattattccatttttaactagtattttttatatttactatttaaacggttatttaaaaggtattcctgatactttttacaaggctgccaaaattgatggcgctagtgatttagaatatatttggcgtattttagtaccaatgtcaaaaccagcgttggtaacagtagggattttaacatttatttctagttggaattctttcttgtggccattgttggtgacgaacgagaaaaaataccgtctattgaataatggactatcggcctttgcgacagagagcggtagtgacgtacatttacaaatggctgctgcaacattaaccgttattccaattttaattatttacttgattttcagaaaagaaattatcagaggagttgcaaaaatggaatcaaaggctaaaacaactgtgacttttcacagtggcattttaacaattggaggaaccgtgattgaagtggcgtataaagatgcccacatcttctttgattttggtacagaatttcgaccagaattagatttgcctgatgatcacattgaaaccttaattaataatcgtttagtgccagaattaaaagacttatatgatccacgtttaggttatgaatatcatggtgcagaagacaaagactatcaacacaccgctgttttcttatctcatgcccatttagatcattcacgcatgattaattatttagacccagctgttccgttgtacaccctaaaagaaacgaaaatgattctaaatagtttaaatcgaaaaggtgattttttgattccatcaccgtttgaagaaaagaattttacccgagaaatgattggtcttaataaaaacgatgtgattaaagttggcgaaatttcagtggaaatcgtgcctgttgatcatgatgcgtacggtgcttcggcattactgattcgcacgcctgaccatttcatcacatacacaggtgatttgcgcttacatggccataatcgtgaagagactttagctttttgtgaaaaagccaaacatactgaattattaatgatggaaggcgtaagcattagcttcccagaacgtgaaccagatccagcccaaatagcggttgtcagtgaagaagatcttgttcagcacttggttcgtttagaactagaaaacccgaatcgacaaattacctttaatggttatccagcaaacgtggaacgttttgctaagattattgaaaagtcaccacgtacagtcgttttagaagcaaatatggctgcgttgttacttgaagtatttggaatagaagttcgttattattatgctgaatctggtaaaataccagaattgaatccagcgttagaaatcccgtatgacacgttactaaaggacaaaacagactatttgtggcaagttgtgaaccagtttgacaacctccaagaaggtagtttatacattcacagtgatgcacaaccgttaggggactttgatccacagtatcgcgtgtttttagatttgttggctaaaaaagacattacttttgtccgcttagcttgttcaggacatgcaattccagaagatctggataaaattattgcattgattgaacctcaagtattggttccaatccatacgttaaaaccagaaaaactggaaaacccgtatggtgaaagaatattgccagaacgtggcgagcaaattgttttataa

SEQ ID NO: 1668 - DNA, 468 bp, Enterococcus faecalis
ctatgctttagccgcattccttctgtcaactggctacataatgttcaaatgagtatgccaacattgattatttttggggtttggacgagtttagcatttaatattattattttgttggctgggttgagaaatattgatgaagaacattttaaaattgcaaaaatgtttggcgcctcagacggcgaaattttccgacgtattacgtttccgcagctagtcccgaccattgcctttttattaacggtcaacttaattggcgcctttaaagtttatacacaagtttatgctttattcggtggccgtgcggggattgccaatagtgccacaaccgcagtgtactatatttatgacaaattccacattgcaggacgtcccggaattgcgatggccgccacagtgattttatttgtgattattttagtggtcactttcttacaaaataaactcttaaagaaagtggggcaataa

SEQ ID NO: 1669 - DNA, 453 bp, Enterococcus faecalis
atggaacagcaagaaaaaaatgaatgggcacaacaagaacaagaaattcaagaaggtttaaaaggcaaaagtttttggtatgctgattggggctttcccattttagtcgggattatgtcagcggcaatttttgcaggaacacatatgtatgtagtttatggtgtgggcgcctttaatgaagtttcaattgttgcgatgctaaaagctggtttagatggtggttcttatggcgctgccgcagcatttggtgcaagtttcctgtttgcacgaattttagaaggttctttagtcgggattttagatttaggtggctcaattttgacggggatcgggattggcgtacctgcaattttcctcagcatgggtattaaagcacctgtagaaaactttggcttagcacttttaacaggtgcgctactaggcttagcagttgatggtcctcaccaccggtag

SEQ ID NO: 1670 - DNA, 795 bp, Enterococcus faecalis
agggaggaagaaggaatggaatttgtaatcattttgctgaagtcattgcttattggtggtttactaggttttgcagctggcgcaggcgctgctcggatgtttcatgcaccacaaacgcaagggttaggggcatttagaacattaggagaaatgaacgcggcacaaggagatccagcatcacacttttcttttggtttaggttttttctttaatgcttgggcttcggccgtcggagcaggggcctttacacaagatgtgacccaccggattgtgcctaactgggctgcagcaattttattggtaaaggataaagatgtcactaaaacgatgcataatcccaaaaaaatggggattgtcggggtctttgtaggaatggcgactgtggctttcttaaatagtacagctgcagcaattccagaatcgctacaagtaacagcggttgcggtgttggtacctgcagcaacgattttaatcaatactgtgatgcctgttttattctggctagcggctttagatgcaggaaaacggacgggtttctggggaacattatttggcggattatctcaattagtcatgggcaatgctgtcccaggagttgtattagggatcttaatcggtaaaggtgtcgatgatttagggtggacccgaatgacactcggcatgcttggtgtcattatcttattatttattttaagtggcttcttccgagggttcgacttagaaatgatcgaaagtttccgcttgtctattcctcaatggttaaataatttacacaatgtcttcaccgttaaatag

SEQ ID NO: 1671 - DNA, 372 bp, Enterococcus faecalis
aaaggagcggtaattatggatgccacaaaacggtcaacacaaaccgtgattgtttctggaaaaggtaataagaagaatgaagcttttgcaagtgcattgaatgatgtttcaaaaaaagtattaaaagaaacaacagaggtcctcatccggattgaaccgaaagaagtaactattcgtcaggcaaaagaacaagtttatacagaaaaatttctgttcttcttctttcctagaaagagagtgatttatcatgtcgaactagctgtagaagtggaaatccaagccattgcagtcgaagaagttgattttttaacggaaacaattaaagaaccgaacgcagtagtagttccgtttctttcaaaaagaggcgtataa

SEQ ID NO: 1672 - DNA, 384 bp, Enterococcus faecalis
acaaaacaattaataggaggaaaagttatgattacagtagttatcgcagatcgtttaggaaaaggacaaaatgttgcaaaaggagtggagcaagccggtggtcgcgcggttgttgttccaggaatgggcgctgatatgcgtttaggagatgtgatgcaacaagaaaaggctgatttaggcatttctttctgtggaagtggtggtgcaggagcgttaacggctgctactaaatacgggtatcccgaaagacatggcatgcgatcaatcgaagaaggggtaacagcaattaacgatgggaaaactgttcttggatttggttttatggatcaggaagaacttggtaaacgagtaactgaagcatttattaagaaacacggagcatag

SEQ ID NO: 1673 - DNA, 357 bp, Enterococcus faecalis
aacaaccaaaggaggaagaggatggaactagcaatggaagcacaggagatcattcgacaaagtgctgaaccagaaaagctacaatcgattatcaaacaaaccagtgcgcgattagcagaagcacaaattgaaccaacggaattacagtggacgattttgattaaccatctcaatgagatgctgaatcgttcaagagaaggaacgacattagctggtgttgatcggacgttatttacggaactaacgccagaaacgttgaaaattgcagaagaaacaacagaagcaattggtcagttatcagaagatgaatggtatgttttagctgttcattttgaagttgctaaacaaaacaattaa

SEQ ID NO: 1674 - DNA, 1926 bp, Enterococcus faecalis
caaggcatgaccgtgttgttgtccaaaagagcgataaatattttattgatgcttttggatttggaagggagtattaccacgcaagaattagctgagagctttactgtcagcgttcgaacaattaagtatgatttagaagatattcgtgcttggtttgaacagcacgatgagacactttattcaaaacgaaataagggaatctggctagatttacctgactctaaacgcttactgttaaaaaatgaaattatcgatgtcgatcgatttgaaacctatcctgatcaaaaaagacgagtcaatgtattgatttttcagttattgtcagtcaaagggtacttaacggcacagcagctagcagatgaattattagtgagtcgaaacacaattgtcagtgatttggaacaggtcgaacggttgctgcaagcatatgatttaaccttaattcgccaagcgcggcaagggtttacaatcagtggtgaagaaagcaatgtacgcttactgatggaatttatcactcaaaaagaacttacagaatacgatatttaccaaattatgaactatgtgacaaagacaaaaggggctgaaaaaatccctaaaattaaatttgggtcagggacattgtttcaaggttgttatcgtagtgcattgaaaaaaatgcgaaatttaattaatccactcgatcaaaatcaatttgattatgccgaaatattatctattacgttgagagtggcaattgccgcagcacgtatgcagatggcacatacaattgggacttaccgagtgttatcacaaaaaacacgctttgaacaacggaacgaagtaccacttttacttttacaagaggtgtttgaacggtatgacttgcctttattagcggatgaatatttttatatttatagtgatttattcggaacccatcaacggcaagatatggttcaattaacaaagcaagtgattgaaagcgtttcaaaagagctgaattatccttttgtaaatgatcgccaattatttacgaacttgtttgcacacctgtccttacgttttacaaagaaacatttatttattaatgaatacaatccgttttctgaagaaatcaaaggaaaacacccagcgttgtttttagctattcaaagtgcctgtaaacaattaattcaacgttctgttttgttagtcaacgattctttctgcgcatatattgcgttgcattttttggcagctcaggaacgacaacagcaggaagctaaagttgttaggattgtgtatgtttgctcgacgggcttaggtgtgaccagtttaattgaacaaaaaattttagaggaagtaccaaacgttgaactcgcaggatttgcttctgttttaaatgcaactgaagtgattcaagcagaaaagcccgatttggtattgagtattttcccaattgaagaaatgacatacccatttattaaagttagtccattgttgacggacacagacttaagtttgattcgggaagaggtcgataaaattttattagggaaacgtcaagggaaaggtaccgctcgctccacgaaatctgatgtaattgaaaaaaatgaacggatacaaagccaagatttattagtaaaagcgtatattatttatgaagagttaaaacgaatgtttcaaacaaagttactgagcgaatatcaagaagcctttttacttcacgttttattaatgacacatcggattacgtttaataaacaatacgaagagattccttgtaatagagaagtatctcatgaaaggcaagaagaaattcggcaaattgaatgtttatttgctaaaaatgagttacctgtcaatcatgctgaaatttcagcattacttaattatttagaacaaccaaaggaggaagaggatggaactagcaatggaagcacaggagatcattcgacaaagtgctga

SEQ ID NO: 1675 - DNA, 252 bp, Enterococcus faecalis
cgaataattaccatcacttgctatccaaactattctgtgttaaagtgtgttttatgcgacgagttgactcaatcagatagcttcggctattccgttttgacggctagtgattgtcaaacacaacgacaccagatagtacggctatcagttaccggatttgtaacgtgtcggacagaatacttttgtggagaaggtttctgtctatttatgcaaataaatagtgtggtatcccttaacagttactactgttaa

SEQ ID NO: 1676 - DNA, 1056 bp, Enterococcus faecalis
agaaatcgttttggggaaacggtttctttttttgttgaaatggtttccaaatattcgtttttctcgtatagtgaaagaggaggcgatcacatggataaaattcgttatggaattatgagtactgcccaaattgtcccaagatttgtagcagggcttcgagaaagcgcgcaagctgaagtgcgcgggattgcatcaaggcgtttagagaatgctcaaaaaatggctaaagaattagcgattccggtggcttatggcagttatgaagagttatgtaaggatgaaacaattgatattatttatattcccacctacaatcaaggacattactcagcagctaagcttgcgttatcacaaggaaaacccgtcctactggaaaaaccatttacattaaatgctgctgaagcagaagaactctttgcaatcgcacaggagcaaggggtttttctaatggaagctcagaagtctgtctttttaccaattacccaaaaagtaaaggcaacgattcaagaagggggattgggagagattttatgggttcagtcagttactgcctatcccaatgtggatcatattccctggttttactcgagagaagcgggtggtggagcgcttcatggctcaggaagttatccattacaatacttacaatacgtattagggaaagagattcaagaggttacgggaaccgcaacgtatcagcaaggggcgacggatagtcaatgtaatttagctttgaaatttgctgaagggacgctgggcaatatttttattaatgttggtttaaagatacctattgaaatgaccatttgtgggacgaaagggcaaatcgttattcctaatttctggaaaacagattgtgcttattatacagatgctcaaggcaacactgtcaaatggtctgaacaattcactagtgaatttacgtatgaaatcaatcatgtgaatcaatgtttacaagacaaaaagttaactagcccagtaatgacgaaagaattaacgatagcaaccgttaaaattgttgaaagtttttatcaagaatggttcgataacgaataa

SEQ ID NO: 1677 - DNA, 342 bp, Enterococcus faecalis
atgataaaaagaggtgaggttttttatgcgaatctctcaccagttgttggttctgaacaaggtgggattcgacctgtcctgattattcaaaataacaaaggtaacttatttagtccaacgttgattgttgcaccgattacccgtaacgtaagcaagcggctgcaaccaacgcaagtccttatcgaaattccccataacgagtgcaggacgccatcacttattttgttagaacaaattcgaacattggataaagaacgaatgctacacaaggtttgtcaactttctcgtgaagagatggaacaggtcaatcaagctttaaaagttagcgttggtatccgttaa

SEQ ID NO: 1678 - DNA, 627 bp, Enterococcus faecalis
ggagataggcagccaattatcattggtgttactggcggatcaggaagcggaaaaaccagtgttagccgtgcgatttttaataattttcccgatcattcaattatgatgttagaacaggattcttattataaagatcagagccatttgagttttgaagaacgtttaaataccaattatgatcatccttttgcgtttgatacagatttattgattcaacatgttgaacaactgttaaattatcaagccattgaaaagccagtttatgactacgttgcgcatacaagaagtacagaaacggtgatacaagaaccgaaagaagtaattattcttgaagggattttaattttagaagatcgccgcttaagggatttaatggatattaaagtgtatgtggatacagatgatgacatccgtattattcgtcgaatcaagcgtgatatggaagaacgtggccgtacgttggattctgtgattgaacaatatttgacagtcgtcaagcccatgtatcaccaatttattgaacctacgaaacgttatgcagatatcattgtgccagaaggtggcgaaaaccacgtcgctattgatttaattaatacaaaagtggatagtattttaacaaaaatgtaa

SEQ ID NO: 1679 - DNA, 705 bp, Enterococcus faecalis
ggcataggttcagcactaggacttgtctgggcgtttttaacgccattagtaactgttttgacgtattggtttgtcttttctgtaggccttcgttctagagctggcgacaatatgccattcattgtctatttagtaacagggatggtaccttggttcttcttttcagattcgttattatcagccacgaatgtgtttcgtgaatatagttatttagttaaaaaagtcgtgtttaatgtacaaattttaccaacatctaaaattttatcgaacttgtacacccacttgtttttcattctaattggttttgtaattactacagctaacggttattacccaagtctgtacagtttgcaattaatttactacttagcttgtttattagtctttttaacagcaattacgtggattactgcttcaacacaaccatttttacctgatattatgcaatttatcaatatcattatgcaaacagttatgtggacattgccaattttatggcaaccaactggaatgattgcgacaatcttaaaaatcaatccattatattatattgttcaaggataccgcgaatcttatttaggcggtgcatggttctgggaacattggcaatatagcttatatttctggggagttactattgttttactattaattggctcaaccgtgtttagacgcttaaaaccacatttttcagatgtactataa

SEQ ID NO: 1680 - DNA, 1230 bp, Enterococcus faecalis
ggagagaacgacatgtcagaatatgcaatcgatatccaacatattaccaaaacatacaacatgtataaaaagccgtccgatcggtttaaagaagcgcttagtccaaccaaaaaatcctaccacgatttgttttatgcgttagacgatgtcacgatgcaaattaaaaaaggcgagatgattggttttgtcggcgaaaatggctctgggaaatcaaccatgttaaaaattattacaggagtactaacaccaacctccgggtccatggtgattaatgggaaaatttcagcgttgcttgaattaggttcaggtttcaaccctgaatattcaggatatgaaaatattttcttaaatggaatggtcttgggtttttcccgagaagagatggaagagcgtgtccaagatgtcattgattttgctgacatcggcgatcatttgtatcaaccagttaaaacgtactctagtggtatgtttgtccgcttggcttttgcggtagccattaacgtggatcccgatattttaattgtcgatgaagcgttggctgtcggggatttagagtttcaattaaaatgtatggaaaaatttacggaaattaaaaattctggtaaaacaattttatttgtttctcacgatgtaaactccattcgtcgtttttgtgacagaactttttggttgcaacacgggaaagtcgttgaatatggagatacgatggacgtgacgaccaactacgaaaactttttgaaaaagaaatcaattaaaacggttgaccgcgaagcgaccatgaaagatgaaaccccaacaccagatattattgaagtggatcatgcggaacttttaaatgcggattatgaaccattagaaatggtaacgcaagatgaaaaagtgattgtaaaaattgaatatactgtcaaaaatgaccaaattaagaagcctgtttgtggggtcgctattcgaacagtggacaatcattatgtctgtggcttaaatacgttgttagatggcgtgcaaattccttggaaaaaaggacggaatgttttttatttagaatatgaaaaaatgtcattattaacaggtgaatattattttgatattgctttctttgaggaacatgcaacagtcccattagtctacaaaacaaaatacgtgacgatgtttattaccggtcgttatgccggagaaggaattgtcatcttagatcataaatggaaggatacgacaaaagatgaagtatga

SEQ ID NO: 1681 - DNA, 3171 bp, Enterococcus faecalis
atcataaatggaaggatacgacaaaagatgaagtatgattttgaaatggaaacagacgagagtaccagtgttgggaaaatcgtagcacaaatcaaagaaaatagtgatgtcttggaatttggtccaggtaatgggcgaatgactagctatttgatggaagaaaaaaagtgccaggtctcaattgttgaattagacaaagaactttatgatcatgtcagtcaattttcaacagatgccttttatggcaatattgatgaaaatgattgggtcgaatactttgctggtaagacgtttgattatatcgtttttgcagatgtgttggaacatttaatgaatcctcaaagcgccttagcaaaagtcaaaccgtttttaaaaccaggcggtcaaatcttaatcactttccctaatttggcgcataattcggtcttaattgatttatttaataatcgtttaacgtggaatgaaactgggctgttggatgctacgcataaatcattctatttacaagaaggatttgaaaaagtttttgcagaagttggtttatacattgccaaagaagattttacatttaatcaagttggctacaacgaaattcctacgacgtatgaagcgttacctgtagaagtgcaagcagcttttaaagcgcgtccctttggcgaagtgtatcagtacttttttgccttgactgctgaaccagtagaacagccagagcgagtgacaccagtaaattcatacaatgaaaaaaacgttcatattttaattaattgcggcgaagaaaaagagactgagttggatcaaccagttgatttacaaaaacctgaaacaaaacagttccaactgaagataccagaagacgtccaactgataaaattattcccaagtttaacgggggcaattgttaaattatccatgacgatagacggcgagacagtcccagtcgcagccacgaatgcttttctggtacaagagaatatctattatttcttagatacgcaagtacctgtaatcgaagtaaccgatgcacaaatggcaggcaaagacctgacagtagacattgattatttctttgaaggcaactattcagaacgtgaaaatacctttattcatgcactgttagatgaaagaaatcaatttttagaagaaatgaataaacagacggagactgcccctatgcctactggaaaatataaacgaatcacgttaactaaatttgataaaatgattaatttaaccatcgatgatattgctcgcgatgtagaaaataacgtttctgttatcagagggtgggcgtatgacaaacaaacaaattatccgctaagattcagcattgcagaagctagtgaatcagtcacttatacggtggaaacagaataccgtcgtgatgttattgatatgtttgaattagaaggcgatcaagattatggttttgtaattacgattaaagatccagaagatttaccagcctacacgttaaacattgacaccaaatcaggccagaaggttcaatacgtggtggagcgtccaaacatggttcaaccaggcacgaaatttgatcgagcatggcgttcgattcagacacgtggtttgatgggctcagtgaagtggtactttaaacgacaagaaaaagcagaagcccctgttgacgtggaggcagttttagcggaaattaaaacgttccaatttcagcctaaaatttctgtcgctgtgcctgtttataatgtcgaagaaaaatggcttgcagcgtgcgtctcttctttacaaaatcagtactatgaaaattgggagttatgtttagcagatgatgcatcgccaagcgaacatattaagccaatgctagaaaaatataaagaactagatcaacgaatcaaagttatttatcgcgaagaaaacggacatatttcagaagcaactaactcagctttgtcgattgctactggcgattttattggtttcatggataacgatgatgaattagcgccacaagcattatatgaagtggtcaaagctttaaatacagacccaacgattgattttctttatactgatgaagataaaattacagaaaatggtcgtcgcttcaacgcgttttacaaatcggactggaatccagaactgattttaaatcataattacattacacactttgttgttgtgaaacgtgatttattagaaaaagtaggcggattgaactcagcatataacggcgctcaagactatgatttcgtattgcgagcaacggaacaagcaacgaaaatcaagcacattcctggtatgatgtatcattggcgtgccattgaatcatcgactgctctaaaccctgaaagcaaaggttacgcctatgtggctggtcaaaaagcggttcaagcggcgacggaacgccgtggcttaaaagcacaagtagagattgccgaattttatggttcctataaaattaactatctttatgatcatgtgccgatggtatcattgattattacgaatgatacagagaatatgagtagctacttacgtcaattattagaaaaaactgcctatacaaattatgaaattctattgcctgcacgcttcgagaatcaaataaatatccaaaatgaccgtcttcgttatgtttcaacagaaactcgtcatggcatgattcaagctgctaagggagaatatgtggctttattaaatgctggattggtaccaacgaaaaatgattggttaaaagagttaatgaacattggtcaacaagagacctctggtttagtgactggccgcgtagttgacgcacgctatcgcgtggaaacagtgggagtatcagttgatacagacaaaggtcgattactttatcctgaaaaaggcacccctggtaaaagcttaggttactattacagaattgctttaccaagaaatattcaagcagcaactgaagactgcttactattcaacaaacaactttacctaaatttagaaggaattaacgaaagcttaggaaaagaatggatgggtgtcgatttatcgttacaatttgctagcgctggtaaacgaaatgtatatgtgtcctatgcaattttgaaagcagacgaaaaaatgcaaaaccatgataaaaaaggatcttataaagaacttgcggaaaaatgggccgcggaagctttagttgatccctaccgaaatccgaaacatctataa

SEQ ID NO: 1682 - DNA, 1602 bp, Enterococcus faecalis
tccctaccgaaatccgaaacatctataaggagaatgcacatgaatgaagacattaaggtgatctttgatagtatctatcgcgacaaaacaacaaataatttaaccattacaggttgggcgttagatacaatcactaaagaaagcccaactttcacaattaataatgaaaaccaagtgtccgcttataacattcagcgcgttttacgtgaagatgttaatcaaatttatcaaacagagcctgcgattgaagctggctttgttgttacacttgaaggaattaaacaaaaaaaagtactcccttttcattttcaatcatcagcacatgttataacggtggattttcccttgaataaaaaatatccagtgattccagggacagaagataaagtaactcgtctttggataaaagccaaaaaaggatttaagtatatggctaaaaatggtatttctcataccattcaacgagcgaaaattgagaaactaagaaatcaagcttcgtatcctaactggttagctagaaatgaagtactagacatagaagcgatgacgcaagaaatcgcaacatttcattatcagcctaaaatttccattgcgatgccagtgtataatgttgaagaaaaatggcttcggttgtgcattgattctattttgaatcaagtctatactaactgggaattatgtatggccgatgacgcctcaacagatcctaatgtcaaaaagattttaacagagtaccagcaattggatgagcgaattcgggtcgtctttcgtgaacaaaatggtcatatttccgaagcaaccaactctgctttagcgattgctaccggagaatttgtcgccttactagacaacgatgatgaattagcgatcaatgctttttatgaagtggttaaagtgctgaatgaaaacccagaactggatttaatttatagtgatgaagataagattgacatggatggaaatcgttctgatccagcctttaaaccagattggtcacctgatttacttttaggaacgaattacatttcgcatttaggcgtgtatcgtcggagtattctagaagaaattggcggctttcgaaaaggttacgaaggttctcaagactacgatttagtcttaagatttactgaaaaaacgacaaaagaacgcatcaaacatattccaaaagttctttactattggcggatgctgccaacctcaacagcagtggatcaaggctccaaaggttatgcttttgaagcggggctaagagccgtgcaagatgcgctcgttcgtcgaggaattaatggtcatgcaacgcatggggcggcgaatggcttatacgatgtttattatgacattgaatctgaaaagttagtctcaattattattccaactaaaaatggctataaagacgtacaacgttgtgtttcatcgattattgaaaaaacaacctaccaaaattacgagattattatggctgacaatggaagtacagatccaaaaatgcacgaattatatgcagaatttgaacaacaattacctggtcgctttttcgttgaatcaatcgatatcccattcaatttctcaactattaacaatcgtgcagcgaaaaaagcgcac

SEQ ID NO: 1683 - DNA, 219 bp, Enterococcus faecalis
tatttgaaagctaaacacgacattcctagtgtaaatggttttgatattgatcctattcagctagcatttgatttaactatgctaaagctctataaatctgattttgaaattccagaacatagtgatgagctttacgagttatacattagtcagctaacccctataagggaagaaattaatgatagaaccagatttgatttatttaattcaaattcatag

SEQ ID NO: 1684 - DNA, 561 bp, Enterococcus faecalis
atgtcaatgtcagtaatattaagaaagtcgttaatcgaagttcttaataagaaaaatgaaaagaagaaagatgtcgcacgtgaaatcagtacatctcaacaatcattgagtgattggacttctcagaataatgttaaaccagtaacaattgaaaatgctctaaggcttagtgatcactttagagattcgactttcacaatggaagttattcatcagttttttggaatgtttaaaacttgcgatggagatgtttatcgaaaagacccttcatcattggaccgattacagaaaattgaatctaatgagagaaaagcattgaagcatgacatagaaagaattattttgaaaaatcctgaatatttatctgaacaagatatttctaaaatagttgcatacgcaaatgaatatttagatgaagtaattgttgaaatcacactacttagtagcttgtgtgatcttgcttcaatcgatattcgttatttaagtgagcaacgctttccatattgggaacaattaggatacatgaggaaggagaatacaaatggcactagaagttattga

SEQ ID NO: 1685 - DNA, 246 bp, Enterococcus faecalis
ggaaggagaatacaaatggcactagaagttattgattttaaatcaaaaaaagatcgaaaagttaattcaaagaaaattccacctttgaaagcaatagaagtagcaaaaagaaaaaatgtttcagctgctactgttacaagatggatgaaacgagaaattgatccattgcctgctaaaagaaatggtggattggtaagaatagaagtcgatgatttagaggaatggtatgaaagaaactttatatag

SEQ ID NO: 1686 - DNA, 195 bp, Enterococcus faecalis
aagaaactttatataggagggtctctagtgaagaataaggaacttgcaattaaaacaatgatgacactttccgtaggaattttattctttgtgtttattttatgtttgattaagtcacaatttttaacagcgattatattagcactttttttaatgtttatcagagtgctatgggtaaataggagtggaaaataa

SEQ ID NO: 1687 - DNA, 216 bp, Enterococcus faecalis
atgaagaaaagaaaaccaaaaagcttatacgaagctagaattttaggatcatttattcttgtctttatattagggttagtaattaaaaatagtgttccagcgagctatccacttttgattattggaccaattgcagttgtttggttcatgaaatacgacgatgcaaaatatttagcttacacaaaaaaagagactcactcgtccacaaacgattaa

SEQ ID NO: 1688 - DNA, 387 bp, Enterococcus faecalis
cttacacaaaaaaagagactcactcgtccacaaacgattaagtcccatacaaaaattatacatgagaattataacacaaaatctggaggaaatgaaatggataatgtgtcaaataaattaaccatgtcaaaacggtttgaagaatggtttaaaaacgcgactgaaaattgcgcagaacgagaattatacgctacagcgttaattgcacgtatggattggttagttgatccaataattagtaaaagttatagatatgatttaacaacagagctgaatcaaaatcatagtagtgcttggtatgatgttgctactgaaatttgtaacaaacgcaaagaaacagttatacgagcaatcttagaagacaatatcgaaattgaaggagattaa

SEQ ID NO: 1689 - DNA, 2148 bp, Enterococcus faecalis
aagacaatatcgaaattgaaggagattaattgtatgaaaaacattagcttggagtcaatccgtattcataattttaaaggtatatcggacctgatgattgaaccaaatggtaaaagtattgatatttttggagacaacgatgcaggcaaaacaactatctatgatgcttttctctggtgcttgttcaacaaagattcaaaagaacgtactaagattcagtggcgtccacttgatgaaaatagcgagccaattcgcggtaaacagacatcagtaactgtcgttttgaatatcaatggtcaggcaaaggagtttgaaaaggtccgaggagacaaagaggttatcaaacgaaattcggaacacaagtcttatgagatgtttacaaaatacctcgtagacggattagagaccacaactaagaaagcatttgaggatgaactagaaaaagtattagatcaagacacatttaagaatctgactagtgtgacttatttttttgagcagttagtggcagatgaacgacgtcaaaagctttttgaatactttggcagcaagacagatgaagagattatcaacgaatcgccatcaattcaccaattaaaagaaattattggtaatgatgacattaaaacagctcgtgagcgtgtgcttcaagaacaaaagcgaatcaacgaaacgctgaaaaatattcctgtaaaaatcgaaggtattcaagcagcattgccagatattgaaaatatcaacaaagagcaactattaaccactcgcaacgagttgacattaaagaaaaattacatcgaaaaccagctcgttactattagaaatggtggtaatatttcagaattaattgcaagtcttaatacaaaacaagaagaattaactgctgctaaattgaagcatgataatgcacagaatgctcgcattaatggcattgagcaaggtaagtcaaaactctttgctgatctcaataaagcccagaagacgtatgcagatgaagaatcaagtcttaatgtaacagaacgtttggtttctataaaagataatgaactgattgcattaaataaaaagcatgaagaattgtacgacaaatatgatgaagtagaagctgaagaatttacaggcggtctagtttataccaaattatcatttaatgaaaatcttttaatttgtcagcactgtaatcgtccatatgatgtcaaggatcaagatgaaatgaaacgacatcatgaggaagaagaacaaaaacgtgcagaagaaattgagtcaacaaataaagaaataaaagcccagtttgaagcggataagcaaatcaagctctctgaaattcgagaaaaaggtattcaaaataacaaagatcgcaaagccctaaaaaaagagatcggcgagttaaaagaacaactattgattaaaacagaagcatataacattgctaaaaaacacttggaagatgtgaaggaaaacttagctgatgtagagcagcagatttcctcattaaaattagacaaaataccatttgaagcaactgaaaaatattcaactataactaaagaaataaaaaaattgcaagagtacattactcaaagtaacgaagctattctagaacaaacttccgctaaaacaagtgagattacagaaatagataaagatatcgcaatgattgatgaaaaattagccttgctaaaagagtatgaaaggcagttattgattattgaagatttcaatgaacaagagcgccaattatctcataagaaaggcgaagtattacaaaaattagtactatttgaaggattctttataacaaaacaaaacatgctgcaagaaattataaatagtcatttctcagttgttaaatggaaattgttcgatttctttgaagatggaggactaaatgaagcagtatgtgagccgatgattgacggggtaccgttcagttctctaaataacggaagcaggatgcaagctggattagacgtatccaacactctaatgaaacaggaaggctatatcgttccaatttttatcgataacgctgaaggtttgactaatcacaatagagactctgttcaagtagacactcaagttattgctatgtatgtaaatgaagatgataaaactttacgaatccaaaatcacaaaacggaggggaaatag

SEQ ID NO: 1690 - DNA, 600 bp, Enterococcus faecalis
  misc_feature (403)..(403): Nucleotide 403 is "n" wherein "n" = any nucleotide.
atgacacatgaacttgcagaaaataagatttacggaaatagattaactaaaattaacgatacctttatgccacaagtagaatcacagctattgagtaatggaataaatatgactgaatatcaaaagcaatgtgtaataagcgctatacaaggaattaatacaatgctaacaaactcaaacttgtcaattaatgatgtagattcaacaaatatgacagaaacattaatgacaattgcagcattacaagtcaatgcttcagctattcctcgtgaagtctattttcagactagaaatgttaataggaaacagtttggtcaatcagataattgggtgaaagtaattgaaatgggtattgaacgagatggaaacgatgctatcctttcaaaatttggacggaacgtanaacatgttcatcgtcattgggaaagtgagaggagaagaccattttttcgtaacgcaggttataaagggattatcagtgacagatccagaatgggggggccaactggtaaaggaaaagtagttagagttgtttatcctattgaaatgtctgacggtacaatcgagttatcacattgcagaacgagaggatgttgttaa

SEQ ID NO: 1691 - DNA, 183 bp, Enterococcus faecalis
  misc_feature (63)..(63): Nucleotide 63 is "n" wherein "n" = any nucleotide.
ttgaaatgggtattgaacgagatggaaacgatgctatcctttcaaaatttggacggaacgtanaacatgttcatcgtcattgggaaagtgagaggagaagaccattttttcgtaacgcaggttataaagggattatcagtgacagatccagaatgggggggccaactggtaaaggaaaagtag

SEQ ID NO: 1692 - DNA, 657 bp, Enterococcus faecalis
ttagagttgtttatcctattgaaatgtctgacggtacaatcgagttatcacattgcagaacgagaggatgttgttaaaaatttaattgctcatataaaccagaaccttatgaatgaaacttttggtatagctaaaaagaaaaaagacgcaagttatcagcaaaagcaggaaattgataataaaaagcaagaaatcatgaacaatttgaaaacaatgtctttagatgacatcttagacagtcaagaatatcaatcatacattagtcccgcatggaaatctccacaaagtagagaatccatgattgttcgtaaaatgagaaacaacattgttaagaaaattcctaaaaacttcgagaatgcttatgtcgctatgcaatatcagtcgcaagacgacgaagtagttaaatcagttagaaaagacgtcacagaacaaacagcacaagaggtattcgattttgatgaagaaccgtccgaagctacacaagaaactatgaaacacaataaagaaactacagcagagacaactatcatcgttccagaagaattagcaaaagagcctgtcactagtcatgagaaagataacgaaccaacacaaacagcatttttcgatgatctaactacaactattacatctgacacagatggacgtggcttttaa

SEQ ID NO: 1693 - DNA, 723 bp, Enterococcus faecalis
cacagatggacgtggcttttaatggttgaaattaatatacaaggatcttcatctgcaggtaataattatttacttgcagatggaaactcttccttaatgttagaagcaggattaaagcctaaagatattatgaaacaaggtattaatttttcaaatattcaagggttacttgtaacacatgaacatggtgaccactcaaagtatatcaatgatattttactcgctggaagatttgatgtgtgggcctcacgaggaactttagaagcattaggtataaatagacggtcacatattttaaaagctaaccagcaacagaaaattggtgattggttagttaaaccttttgccactattcacgatgacaaaaaggcacgggcgagagaaccactgggctttcttattctttcgcctagtggaaagaaaatagtatttgctacagatactaactatttacctaaaacgtttaaagacgtcactcattggctcgttgagtgtaatcatgatatcaagttagtaagacagagcaaactgccaaaaagtgttcaagatcgaattttaagaacgcatatgagcatagatgcctgcaaaaagttttttcagtcaactgatttaacaaaaacagaagaaatatatctcatccatttaagcgacaagaatagtgatccagaaaaatttaaagaagaaatagaaaaaataaccaataaaaaaataattattgcatag

SEQ ID NO: 1694 - DNA, 795 bp, Enterococcus faecalis
aaaaataattattgcatagagagtggaggtgtgacattgaattatttacaacagattcttgcgtttgacgattatttgctttataaacaaaagctttcatcaggtcagattgctttatggcgtgcattaatgtccataaacaacaaagcaggatgggctacatggtttacagcagctaatgcaacattagaatctttgtcaggtttgtcacgctcaggaattaataaaaatagaaacgcgttaaagcaactaggcttgattgattttaaaagtaatggtcgaaaagctacttcttacaaggtatgcgtactttatacgttaaatagtgcgcaagagagtacacaacagagtaacgataaagtgacactaaagagtacaacgcagtcaacgaacagtggcacattaattaaacataaacaaaacataaacacaaataattctttttcaccagaaacagataaaaataaattaaatatatacgctgccgtcgaacaaaattttgggagaccactttcgcctatcgaaatggaaatgattaaacagtggcaaacagaagatggttatccagatgaccttattcaattagcccttaaagaggcagttcttaatcaggcattcagtctaaagtatatggaccgcatattgttaagctgggaacgtaagggaataaagacaaaaaatcaagctataaaaaaaattagtgaatacaatatgcgaaatgatcaagaggagatttctgtcgattcaataccaaaagttacaatgcataactggttaaatccagagggaaattaa

SEQ ID NO: 1695 - DNA, 435 bp, Enterococcus faecalis
gaaagaggtgctgtgatgaaagcgtggagtcagtttgaaaaaatgattgatcaaaccaacgagtggtattgtcgtaacagaaaaggcacagtaacaaaaatacctaatggaactaaaactataagggttggtggaaaacctgtattgattccaactaacaagacacgatgcgattttatcggacatttgaagggtcggccaatcgccttcgattgcaaatctactgaaaataaaaccgcatttccattttatgttggaaataaaccaatgttaaaagatcaccaaaaaaattttttaaaggattttaaattaagcggtggaacagcatttttattaattcaattcaacaaaagtcatcaagtatttttagtggatgttgatgattatttaaatatgcaaaaaaacttaggacgtaagaggataaagtccgtataa

SEQ ID NO: 1696 - DNA, 285 bp, Enterococcus faecalis
cgacaaaaacatacccaggaggacttttacatgacccaagtacattttacactgaaaagcgaagagattcaaagcattattgaatattctgtaaaggatgacgtttctaaaaatattttaacaacggtatttaatcaactaatggaaaatcaacgaacagaatatattcaagcaaaagaatatgaacgaacccaataccgacaaaatcaacgaaatggctattatgagccccgcttttctacacttgtatgccccctagaattaaaaatacccccaaacacctga

SEQ ID NO: 1697 - DNA, 375 bp, Enterococcus faecalis
tttcaacatacttggtgggccactatggctaaatttccaaaaccgcagttaccgagggcccgtcatgaaattcacacgtctcttcaagaagtggtcactgtgtcggcggatttattaaaaacaaatggtcgcctcgcaatggttcatcgtcctgatcgtttcctgtatattttacatgccatggaaaacgccaatattgcgccgaaaaaagctcggtttgtttatccgaagccaggcaaagaagccaatgttttactaattgaaggcattaaacaaggcaaaaaagacggttttcgtgtgttaccacctctttttacatacaatgaaaagaacgaatacgaagcagaaatgaaggctatgctgtatggagaataa

SEQ ID NO: 1698 - DNA, 279 bp, Enterococcus faecalis
aggctatgctgtatggagaataagaaatcccattatttttatgttttactttgccaagatggttccttttacggtggctatacaactgagccagaacgtcgattaaccgaacataatagcggaactggtgcaaaatatacacggttagccaaacgtcgcccagtcataatgattcatacagagaaatttgaaacacgtagcgaggccaccaaagccgaagccgcctttaaaaaattaacgcgtaaacaaaaagaacagtatttaaaaactttccattaa

SEQ ID NO: 1699 - DNA, 711 bp, Enterococcus faecalis
aaaagaggaatcactatgaaaattggaattattggagcaatggatcaagaggtcaaaattctaaaagaaaaattgacagacacgatgtcatgggaacgagcaggcgctttatttgtttctggttcgttaggaagacatgaggtgattgtggttcgttcaggaattggtaaagtggcctcagctgtgaccacgactttattgattcatcaatatggcgtaaatatggtgattaatacaggttctgctggtggtatcggtgaaggactaaaagttggcgatttagtcattgcagacaaattagcttattttgatgttgatgtcactggttttggttatgcctatggacaattgcctggtggtgtgcctttgtattttgaaacaagtgaatacttgcggatggaaattgcgaaagccgctgaaaaaactggtttagctattcgtaaaggattgattgttactggagatacttttgtggatagcgctgagaaaatcgccaaaattaagaaagagtttcctgaagccttagcttgtgaaatggaaggcgcagcaattggccaagccgcttcacagttcaatattccattcttagttgtacgggcaatgagtgatacagcagatggcgaagcaactcaaagctttgacgaattcatcgatgaagctgggaaaaaatcagccgaaatggttattcattttgtcgagaacttagtttaa

SEQ ID NO: 1700 - DNA, 309 bp, Enterococcus faecalis
ggaggacacgcaatgagcaaaggtccgttagtcactcggacagagcttcgcaaacgcagagaagcagaagaaaaagaagcggaacgtcgtcagcaagaagagcagaagctggcggaaaaagcgtataagcgaaaagaaaaagaaatttcgacgttttatcgtaaagaaaagaaaaaacaaaaaccgatcaacaagtcacgagtaggagaatactcgaagcgtcgagaacggagtacttggttaaacaaggcaattattattgtagcgattttattagccgttgtggcatatatcgttttgaatttatag

SEQ ID NO: 1701 - DNA, 291 bp, Enterococcus faecalis
aagaagaaactgggtatcgtgcaggtcagcttaacctacataaattcaatgtatctgtcaccaggatttgctaatgaaaaattggctctctatttggcaacggatttgcagaaagtcgaaaatccgcgtcctcaagatgaagatgaaatcttggaactttacgagctaacaatagctgaagccaaagcagaggtggcaaaaggcacgatttgtgatgccaaaacactttttgctatacaatactgggaattgtatttactgcagagacagtttaaggaggacacgcaatga

SEQ ID NO: 1702 - DNA, 462 bp, Enterococcus faecalis
atttttttctttgaaaagggtttaactagaagaagaaggggtgcgatttttatcattttagggtatgataaacaagaaaggttggtgaaagatatgttaaattatgaggacttcgaagaaaaaacacttcaacgtcgagaaatttttaaaggaaagattattgatgtttttttggatgacgtggctttaccgacaggcggcacagctaaacgcgaattggtttttcattcaggcgcagtagctatgattccgttaaccgcagaaggaaaaatcgtcttagttaaacaatttagaaaacccttggaacaagtaattttagaaattccggcgggaaaaattgatcctggagaagaaaatcaactggaaacgacggctatgcgggaattagaagaagaaactgggtatcgtgcaggtcagcttaacctacataaattcaatgtatctgtcaccaggatttgctaa

SEQ ID NO: 1703 - DNA, 681 bp, Enterococcus faecalis
atgaacaaattaaatacaaaattactgattggctatattcttttaggagccttaatcattgctgtcgctagagaatatggcttcttcgcttttgtgattctggtaggctttttagtattcgttctctatcgaaaaaagaaaaatgccgccgacaaaagcgatcaaatgccttacttaacgaaagataaagaagcccattatcgtgagttggggttatctccacaagaaattgattttttcagaagtacaatgagcacagccaaaaaacaaatcatacaattgcaagaaaacatgaatcgttcaactaaattacgggcgattgacttacgtaatgatactacgaaggtttctaaagctctgtttaaagagttagtgaaagaacctaaaaagttacacttagccaatcactttctctatacacatttaccaaatatcgttgacttaacaagtaaacatttagaaatcgaacaacacgaagtaaaaaacaaacaaacgtatgaaaaattagaagaaagcgcacaaatcattgaccaattgtcaaaattagttaaaaatgattatgaggaaatcgtttccgatgacttagacgatttagatgtcgaaatgtcgatcgctaaaagcagcttgtcgcaaaaagctgcaactgaggaatcacctcaagtaaacgaagaccagcaataa

SEQ ID NO: 1704 - DNA, 1200 bp, Enterococcus faecalis
ggaggaaaaacaatgactgagcaacaacccaaagaaacaacatctgtaaccaatacattggacgatttattaagtaatccattttcatcaatggatgaactaacaccaacgcaacaaaatgaactatctgagttaaaagaacagcaagcagctcctcgtttaattgataaattaccacaagaacgtcaagcccaagcaaaagaattagcttcaaaaattgatgtccaagattcacaagcagtaattacctatggttcaaatgcccaaatcaaactcggcgaattttcgcaagcgatgttaaaccacgttcaagcacaagacattggtcctgttggtgattcactgaccgatctaatgtttcgtttaaatgaagccaatcccaatgaattacgtgctggcgaaggcaactttattcaaaaaatgttaggtaaagtcaaacaatccgtttacgaaattaccgccaaatatcaaaaaattggtgcgcaaattgacaaaattgctgtcaaattaacccatgaaaaagatggtcttttaaaagataatgccatgttagatcaattgtatcaaaaaaataaagattattttgatgccttaaacatctatattgccgctggggaattaaaagcagaagaactacggacgcaaattatccctgaagccatgaaaaaagcggaagaatctggagatcaaatggatgtccaaattgttaatgattataaccaattcctagaccgtttagaaaaaagaacccatgatttacgcttggctcgtcaaattacgattcaacaagccccacaaattcgtttaatccaaaatactaaccaagctttggctgagaaaattcaatcatcggtgaatacggcgattccgttatggaaaaaccaagtagtcatcgccttaaccttactccgccaaaaagatgctgtgactgctcaacgtcaagtctctgaaaccaccaatgacttactgaagaaaaattcagaaatgctaaaaatttctgcaattgaaacagcaaaagaaaacgaacgtggcctagtcgatattgaaacattacaaaaaacacaaaatgatttaattgaaactatccaagaaacattacgtattcaacaagaaggaaaagaaaaacgccaagctgccgaaatcgaacttggccatatggaagaagatttgaaaaataaattattagaattaacacaataa

SEQ ID NO: 1705 - DNA, 867 bp, Enterococcus faecalis
tacaataaaagaaaaccatgtttctttttgaaaggaggagcaattgtgccacaatttgcttctaaagccgaagaaaaaaattattatgaacgccaagctagcttagcagagtttttaacttggtatcatcaacaagaattacctgaatatgaaaaaccctctttaaccgttgatatggttcttctttgttacaacaaggaagctgatcaattaaaagtcttactgattcaacgtaaaggtcacccctttagaaactcatgggcgcttcctggcggttttgttaatcgcaacgaatctactgaagatagtgttttaagagaaacaaaagaggaaactggtgtggtgatttctcaagaaaatattgaacaattacacagctttagtcgcccagatcgagatcctcgtggctgggtcgtgacagtcagctatttagcctttattggtgaagaacctttaattgctggcgacgatgccaaagaagtccattggttcaatcttgaacggcatggtcaacacatcacgttatctcatgaagatgtggaaattactttagacttgaaaacagcggcctctcttggtaaagatacattagccttcgaccatagtgaaattataattaaggcgtttaatcgtgttgttgataaaatggaacatgaaccgcaagtgcttcaagtcttaggaaaagatttcaccattacggaagcccgtaaagtttttgcgaagttcctcggcgttgattatcgcagcattgaccattcaaattttaaaaaagccatgacacaatattttgaagagttaggtgaacgtcccgttggcattggccgcccttcaaaaatttaccaattgaaaacaacaacaggtttctaa

SEQ ID NO: 1706 - DNA, 561 bp, Enterococcus faecalis
aaacaacaacaggtttctaagaggagggaatattttttgactgtttacttaagaaaagcagaaccttctgatttgcctgacatccttgctatcattgaagatggacgccgcaccttacaaaaaagtggcattccccaatggcaaaacggcgatggcccgaatcaagaaattttagcaaaagatatcgaccagcaaacttgctatattttaatggttgaggatgccttggcaggcgttggtgttttatgttcggagattgatcctgcttatgaagcgatttttaatggttcttggcaacctcattctcaaactacgtatacggcaattcattgtgttgctctaaaaagttcctttcaaggtcaaggactggctttggtgcttttgcgctcactggttacagccgctcgtttgcaaggtgctactgatattcgaatcgatacacatccacaaaatctcgctatgcagcacctgattaaaaaagctggctttgtttatcaaggtgacgtgattttagatgttaacgatggcgaacgttatgcttatcagatgatattgaaataa

SEQ ID NO: 1707 - DNA, 510 bp, Enterococcus faecalis
tataaacccaacattccctttataatgaaagtaacaagcaaatttttgttacttagaaggggaagggagcaaggagttatgtttagttatacagataccattttgtcaattatgcaaagaattgaagtatacaacgaaattttcaaagccatctctaaagaagttcaagaatacggttgtaatcaggctgcacatcggagaggccgtgacacttatatgttttgccgaaataatgtgaatcgtttttttacagaagaaatgatgtttcgtaaaaatttagagccgtattatgataaagaagcaacgaaaatcttgctagaaggattagatacgtataaagaaggagtatttttctggttagaggcattaagtgaatcttgccaagtgacagatgaattgaaatatcaattaggaatccgccaaaaagaatcctcttatttattaattaatcaagcttgtaaagaagcctgtgagggcattcaaagcgctcatagtgttcataagatgtaa

SEQ ID NO: 1708 - DNA, 342 bp, Enterococcus faecalis
cttggaccaattatgataaacaacagctttcttttgactggcgcacttttagtaatgaaggggcgcagtatggttgaactatacccagatagtattgaaaatgtccgtcatcaattacgtgtgtctttaaatttagaaaagccagatgaacgagatcaagacggctatgtcttccatacgaacggtgaatttttatatcaaagtgattataccgttcaagatgaagcagctgaggaaaacgaaatgacttccatcaacggcaatacgtatattggtgttcctggtaatacacagaccggcccgttgccatcagttaaaacggaaaatggctttataaaataa

SEQ ID NO: 1709 - DNA, 897 bp, Enterococcus faecalis
tggtggacactttttaagagagaggaagtacagccaatgagtaggaagcgaaaaatcagcttaattagtttagtcatcattttggtttttgtcacagtcggctcagcatactttgctgtagcgggtagctatttaaagaaaacaattgataaaggctatgttcccataaaaaatgattataatgaagcgcaaaataaagatagtcaatcgtttttgattatggggctagacaatacaattgaacggaaattaggcacaactaggactgatgctatgatggtgattaccgtgaataacaagacgaagaaaataacctatttaagtttgccacgggatagttttgttcaaattgatgcgaaaaattaccaagggatgcagcgaattgaagccgcctatacctacgatggaccaacagcttctgttaacacagttgagaaattattgaatattccaatcaatcattacgttgtgtttaactttttatcttttattaagttaattgatgcggttggcggcatagatgtcaatgtcaagcaggcgtttgatggtgtcaccaaagacgggccaggatccattcattttgatgcagggaaacagcatttagatggtacgaaagctttatcttatgcccgtgaaagacatagcgataacgatattatgcgtggattccgacaacaagaaattattcaagcagttgaagacaagttgaaatctggtcaatcaatcatgaaaataatggacattattgattcgttaaatggaaacattcaaactgatgtggattccaatgaattgactcatttagtcaaagaaggtttgacttggaccaattatgataaacaacagctttcttttgactggcgcacttttagtaatgaaggggcgcagtatggttga

SEQ ID NO: 1710 - DNA, 1188 bp, Enterococcus faecalis
aacatgacgaataaagagccttgggaggcgtggagtcccgcaaaagttagttcattccaggaagattttttagcttggtatgaacgagaaaaacgcaatttaccttggcgagcgaatacagatgcatatcgtatttggatttctgaaattatgctacaacaaactcgcgtagatacagtcattgattatttttatcgatttatggaatggtttccgacgattcaagatttagcggaagcgccagatgataagttgttgaaagcttgggaagggttaggttactattcacgagcgcgtaatttaaaagtggcagcgcaacagattgtttcagaatttggtgggaaaatgcctgacacaatcgaagatattcggagtttaaaaggaatcggcccctatacggctggtgcgattggcagtattgcctttaatctccgcgaaccagcaattgacggtaacgtcatgcgggtagtgagccgtttatttgaaattgatgcagatattgcaaaagcgagtagtcgtaaagtatttgaagcggcgatgcttaaaatcatcgatcgtgagcgtccaggggattttaatcaagctttaatggatctaggctcagccgtctgcaccccaacttcccctaagtgtgaaagttgtccgcttcagcaatattgtgcggcctatcaggcagataaaatgaccgcttatccagtcaaatcaaaaaaagttaagccgaaagatgtgtattatgtcggcactattattgaaaataaaaagcaagaatttttattagaacaacgccctgaaaccggtttgttagccaatatgtggctgtttccgattgaagaaattagcaaaaaacaatttcaacaattgcaaaaactggcgcaaccagcagaaacggaaaaacaattaactttagagttagagcctgtaacagagcctttggtcgctgaagaacctgtcaacttttttacggactatgaaacagttgtctggcaaaaacgtaccttaggcgaagtcgttcatattttcagtcatttaaaatggcatatcttagtcttttatggccgaaatacaggcgaattagccacactagagtcgcagcgatgggtggcagcacaacaattttcagactatgtttttccaaaaccacagcaaaaaatggtggaattgttcaaaaaagaacacgaaaaaaaataa

SEQ ID NO: 1711 - DNA, 801 bp, Enterococcus faecalis
  misc_feature (37)..(353): Nucleotides 37, 202 & 353 are "n" wherein "n" = any nucleotide.
gtgacaacattcacacgcattagtaaagataaagtgnatttttatctactttggtattcttcaggcgaaaaactgcgtgtctcggaagatattttatcacggcagcttctgctaaaaggccaagagttatcagatactttaatagaagaaataaaaaaagccgtttcttatgatgtcgggttacaaatggcgatgaattatntaagctatcaattacgttcaaagaaagagatttttacttatttaaaagagaaagaaattgtacctgaagatcgagtaaaaatcgttcaacgtttagaagagctgcggttgttggatgatgcaatttttagtgaaagttacgtacggacagntatgcgaaccagtgataaaggaccacgaaatgtggcacaacaattaaagcaaaaaggtattagtgaagaagatattcagcatggtttgaccttttatacgttagatgaacaacttaatgttgccacagcaactgcagaaaaagccatgaaacgctatcgaactaaaagttttaaagatgcacttcagaaaatgcgtctgcatctgatgcaaaagggctttacaaatgaaatcattgatctagctttggaatctttagcttttgaaaaggacgaagaacaagaacaacaagcgttagacaaggaaggcgaacgtttatggcgtgccaatcagcgatttgatttttctaaaaaagtccaaaaagtcaaacaaagcttattccaaaaagggtttgactatgatttgattcagcaatttattagcgaaaaggaagtagaacatgacgaataa

SEQ ID NO: 1712 - DNA, 210 bp, Enterococcus faecalis
  misc_feature (75)..(75): Nucleotide 75 is "n" wherein "n" = any nucleotide.
aagtggcaggataaaataaatttcaaaaaattctcagtcgggaaccaattccttgcaattttttcagaaagtgantatgatacctacagtagcaaaaaaaggagcggttcaatgtatcaagtaattacaatgtatggcgacaatgaaccttggtggttttttgatgattggcaagaggacattgttcaagaaaaaacctcgataacttga

SEQ ID NO: 1713 - DNA, 309 bp, Enterococcus faecalis
ttggcaagaggacattgttcaagaaaaaacctcgataacttgaccgatgcagagacatattatgtggaagtttggcaaaaactttctcagaattatacatacgtcaacacaaagcctaattatttaacggctttctggaatgatggggaagaacgctggtgtgaagaatgcgatgaagatttacaacaatacttcggtttagcattactagaaaatcatcatgcggttacttttgaaaataaagctgagtttaccacaatatccaatcattttggcaaaacaaaattctgcaaacggaaagttatttga

SEQ ID NO: 1714 - DNA, 2310 bp, Enterococcus faecalis
aaaatcatcatgcggttacttttgaaaataaagctgagtttaccacaatatccaatcattttggcaaaacaaaattctgcaaacggaaagttatttgaaacgcatgagtttaaagaaaaacctcagggaattttctttaaactctttttctattctcggaatttagagaaaatcgaaccaatatttggtataatacgaaaagatagcactcaaaaaggagcgaaactagtggttgcaaaacaattaattattgctgaaaaacctagcgtagcaaaagatttaagccgcgttttaggagcaaatcaaaaaaataagaattattatgaaggacccaacgtgattgtcacatgggctttaggccatctcttaggactaaaaatgccagaagatttaaacaaagaatggcaaacgtggcaaatggaaactttaccgatgattcctaagaatttagggattaagccgttaccgaaaacgggacatcaattaaaagcgattaaacaattagccaatcgtaaagatgtttctgaagccgtgattgccactgatgctggtcgtgaaggtgaattggtggcccgctggattttagaatatgtccgttttaacaaaccagtcaaacgcttatggatttcatctcaaacagacaaagccattaaagacgggtttaagaaaattcgcccagcgaaagactacgataatttgtattactctgccttggcgcgcgcaaaagctgactggttagtggggctaaacgtcacacgggccttgacagtgaaatatcaagataacttatccgcaggtcgtgttcaaacaccaactttagcaatggtacgccaacaagaaaaaacgattgaacaatttaagcctcaaacttattttactatctcgttatctgttgaatcagaaaaagcaaagatgacccaaaaaaatccatacgctttaaaagaacggcaggaagcagaacaattagtcaaagaactctcaaaacaaaagggcttagttaccgatatccaagaaaaagttaaaacagaaaacgcgccgttaccgtatgatttaaccgaaatccagcgtgaagccaaccagcgattccaattttctgcaaagaaaacgttgtctcttgtacaaagtttatacgaaacccataaaattgtttcctatcctcgaactgacagcaaatatctaacgacggatatgaaaggaacgatgaaagagcgccttcaagctattgctgatttttcaccagaagtgaaaggctaccttaaaaatggggctgttgttaaacaacaaaaagttttccaaaatgcaaaagtcacggatcaccatgggttgattccaactgaacaacgtcctcgttatgaaaagctaagtaatgatgaacaaaaaatctatcaaatgattgttcaacgattcttaggtttgtttgctgagccaaatcaaaccaaacaaacaaaagttacagtcgcttttggaaaagaaacatttgtctttcatcaaaataaagtagttgttgctggctggaaaacaacagccgaacagccgctatccactgtccaatggcaaaaaggcatgaccgttgcgccaaactttaccattaacaaagaattaacgtcgccgccaaaaccattaaccgaaggaacgttgttaggaaaaatggagaaacacagtttaggcacaccggcaacgcgagctgaaatcattgaaaaactgattaaatcagaattgatggaacgaaccaatagcggtttaagtgtctctgccaaaggaaagcaactattagacttggtgaatccatcacttgtgacacctgaactaacggaaaaatgggaaaagtcgctcgaagcaatcgcttcgggtcaacaaaagagtcaacttttcttaaaggatattgaagaggatacgaaaaaattagtccgtgaaattaaacaaagcgagaaaaaatatcaagatttttccattacgcaaaaaaaatgtccagattgtggctcaaacttacgggaaaaaaatacgaaagatgggaagatttacgtttgtacaaaccaagaatgttcttatcgtcggcgaaaagatcctaaagtatccaatcaccgttgcccacaatgccataaaaaaatggtcatcatagaaggaaaaaatggtcgttctttcaaatgtaaattctgttcgattactgaaaaaattcccgataaaaaagaacgaaaacaaaaaatgactaaacatgaagaacgtcgtttgatgaaaaaatattcacaaccagacgaaccagaagaaagtgctttagcgcaggccttaaaagccgctatgaatcaagagtag

SEQ ID NO: 1715 - DNA, 924 bp, Enterococcus faecalis
ataatcaagtcatccttgttggtctttagtaaactttcaaatagaaagagagggacacggatgctcgcaaatttaaatcaagcaatggattatattgaagaacatttaacggaagaagtatccttcgatgaattggcgaaaaagacagggatttctgtttaccattttaaacgaactttttcgtttattacggggatgagtctggctgagtatattaaaaagagacctttggcggaagcaaatttagcattacttgctggtgaaaaagtgacagatgtagcttttaaatatggttatcaaagtattgaaggattctcaagagcttttcgcgattggtcaggacaagccccttctgaagtaatgaaaacacaaatccaaaaaacgtttcctaaattctctttctatattgatattaaaggaggacaatcaatggatgttaaattgattgaaaaaccagcgtttcaaatagtcggagttagtcagaaggttcccttgcagtatcaaggggaaaatcaagcaatcatggaattagcacagcgcattacaccacaacaacgagcggaaatgcatacatttgatgacatatatcctcatcaagtagtaaatgcttcttttgactttcaagagggacgaacaacagaaggtggagaaatgacacacatgattggctttgccacttcgcaagaaaatacctatgaagatttggagcaactaagcgtacctgctcatacatgggcggtttttccaaatgaaggtcctttcccacaaactttacaagaaacctgggcaaagatattctctgaatggttgccttcatctggttaccaagtcgttgcagcaccagaaatttcgtttacgcaatatcaaggaccagcagaagctaagtatagtgaaatctggcttgctgttacagctactaaataa

SEQ ID NO: 1716 - DNA, 363 bp, Enterococcus faecalis
gtgatgcgaatacggaatcatggagaaaaaataattctccgaggttttagagtcatgttgtttagaatggtaccaaaacaacaaacccttgttcagcataatgactatagttttagagtcatgttgtttggaatggtaccaaaacaaacttttttgatttggctttttctcccctgttttatagccatgttgttaaaaaacaaactatcacctcaagcaatccgtaattttcatcacaagattagaatttttatcatcaaagacgagctgcttcaattttcgaaaactaatcaagtgataagtcaaaatgttgatagattgagattagttcttcctttttttaggaagggctttttttattga

SEQ ID NO: 1717 - DNA, 1473 bp, Enterococcus faecalis
acaattcaggtaagcttgtttctttgtgtggaggcaaatcagggaggaaataatatgtttgatattgtaacattggcgagaatccaatttgcgatgacaacagttttccactttttcttcgtaccgttttcaataggattagcacttgttgtagcaattatggaaacaatgtacgttgtgaaaaaagaggaacgttatcgtaaaatggccaagttttggggaaatatattcctattaagcttcgctgttggggttgtaaccgggattattcaagaatttcagtttgggatgaactggtctgactattctcgattcgtcggagatatttttggggcaccgttggcggtagaagcgctcttagctttcttcttagagtcaacattcttaggtttgtggatctttacttgggataaaatgaatccaaaagttcacgtaacctttatctggttagtcgtattcggttcaatgatgtctgctttctggattttagttgcgaatagttttatgcaacatccagtaggttatgtcatcaataatggccgtgctgaaatggtggactttgtagctgtcatcagcaatccaaaagtttggtatgaattttcacatgttatcatgggcgcctttacattgggcggcatggcagtagctggtatggctgctttccaattgttgaaaaaacgggatatttcattccacaaagcatctatgcgcattggcttatgggttactttgttcggttcaatcggcgttttattagctggcgacttgcaaatgaaagctctaattgaaggacaaccaatgaaatttgcggcgatggaaggggcctatgaagactctgatgatcctgctgcttggacattgattgcttgggcagatgaacgggaacataaacaagttttttgtatcgatattccgtatatgctaagtattttatcgtataacaaattatcaggttcggttgatggaatggatacagtcaacaagcgtttggtagaaaaatatggggatgataaaaattattatccaccagttaacactttattctggagcttccgtatcatggctggttttggtgccttaatgttattggttgctgccttaggactattctttacaaggaagaaaaaaccatcgctgtacgagaagaaatggatgctttggattgttgctttatgtacgttcgcaccattccttgccaatacaacaggttggttagtcactgaattaggtcgttatccgtggactgtctatggattatttacgattgaacaaagtgtttcaccaaatgtatcggttgcttcattaattacgtcaaatgtcatttatttcttattatttgctggtttaggtagtgtcatggtttacttggttattttagaattacgtaaaggaccagactatgaagcgaaaaaattagcgaaagaaaatgaaccagcgttggatccatttgataagggggtatttggcgaatga

SEQ ID NO: 1718 - DNA, 1029 bp, Enterococcus faecalis
gggggtatttggcgaatgagtacactacaattattatggtttgtccttatcggcgtcttgttctcaggtttcttcttcttagaaggatttgactttggtgttggaatggccgttcaaacgttggcacacaatgacgacgaaaaagatcaagtcgttgcaacaattggacctgtttgggacggaaacgaagtttggctattaacagcgggcggcgcaatgtttgcctctttcccatattggtatgcttcattatttagtggctactatttaattctatttacgattttatttggcttaattattcgcggagtttcctttgaattccgccataacatgccggaaggtaaacgtcgtcggatgtggaactggacactatcaattggtagtttccttgtaccgttcttctttggtattttgtttatcagcttagtccaagggatgcctttagatgcaaacggcaatatgcatgcgcaatttacggattattttaatctgttttcaattgttggtggagtagccttaacattactttgctacttacacggcatgaactatattgctttaaaaacagaaggcccaattcgtgaacgtgctcgaaattatgcagaaatcttatacggcgttttatatatcggtttagttgtttttgcagtgttgatgtacttcaaaacggacttttatgaaaagaactttgcggtcactttaattttaacgttagcaattgtggtcttaacggtcattgctaatgttggggtgtttaaacgcaaagagatgttagcttttctagcgagtggtttaacattagttgtactagttgctctcttgttcagtggcttgttcccacgtgttatgattggtagtgaaggttttgatttgttgattaaagatgcaacaagcacaccatatacactaaaaattatgacgtggatttctttaagcattttaccattcgtgttaccttatactgcttggtcctattatattttcagaaaacgtatttcacagacagccgtaccagaaggggtataa

SEQ ID NO: 1719 - DNA, 789 bp, Enterococcus faecalis
aaaacaagtcctgcggacctggacgaaatggttaatgctgaacatcatcgtggtgttagtggtcacgttgcgacagaagacattaaatttggctattgtacagaaattatggttcgtatcggcgaaggcccaaccgtggacagcgcttttgattatgaaacattcagaaactacttaaatgaactaggcgattctctattagtcgttaacgatgacgaaattatcaaagttcacgtgcacactgagcatccaggtgaagtgatgaactacggccaaaaatttggttcgttagtaaaaataaaagtagacaatatgcgtttacaacatgaaacgttagttgaacgcgatgctcagcaagaagcgttgactgaaaaagttcgcgtaccgtttgctgtgattgctattgcagccggtgaaggcgttcaagaattattccgaagtttaggtgcaagctacattattagtggtggccaaacaatgaacccaagtacggaagatattttaaaagcagtcaaagaagtgaatgcagagcaagtcattattttaccaaacaacaaaaacatctttatggcagctgatcaagcagcagaagttgccgatgtaccagtagcggttgttccatctaaaaccatttctcaaggaatgacagcaatgttagctttcaatgatcaacaatcattagaagaaaacaaagcaagtatgacggaaatgttagacagcgttgtgagtggtcaagtaaccacagctgtgcgtgacacaaccattgatgaagttgaaattaaaaaagat

SEQ ID NO: 1720 - DNA, 630 bp, Enterococcus faecalis
ggtgaagaaaaaatgggaacttcgatgatgacacaattattcggtgaatttttcggaacgatgattttagttttactaggggatggcgtctgtgccgcagttaacttgaagaaaagcaaagcctttgcttctggttgggtcgttattgctttaggttggggcgctgctgttacattagctgtttacatgtctgggtatatgagtccagcgcatttaaatcctgctgtaacagttgcgatggcaattactggaaactttgaatggggcatggttttaccttatatcgtagctcaagtcctaggcggttttattggtggtttagttgtctggttagcttatttaccccattggaacattacagaagacaaaggtgctattttaggaaccttcgccactggtccagctgtccgtaactatccagccaatgttttaacagaaattatcggcacatttgtcttggtttttggtttactagccttttctcaaaacgacttagcggctggcattaacccaatgcttgttgggattttggtcttaggactaggtctatcattaggcggacctacaggttatgcaattaaccctgcacgtgatttaggacctcgtttagcgcaccaaagtcttccttga

SEQ ID NO: 1721 - DNA, 1854 bp, Enterococcus faecalis
gtaaatggaaaaggggaattttctatgactttctcaatagaaacacgccgacaatcaatcgacgctttaaaaacacaacacttagatgtcttaattattggtggtggcattactggcgcaggggttgccctgcaagccagtgccgctaaaatgaagacagggttaattgaaatgcaggatttcgcagagggcacctcttcacgatcaaccaaattagttcatggtggtatccgctatttgaaaacgtttgacgtggaggtggtagcagatacagtgaaagaacgagccgtcgttcaatccattgcgccacacatccctaaagcggatcccatgttattgccgatttatgatgagccaaatgcaacatttaatctattttctgtcaaaatagcaatggatttatatgatcagttagctgatgtaacaggtaccaagtacgccaactatctgttaacaaaagacgaggttttggcacgtgagccacaactaaaaagtgaaggtttacaaggtggcggtgtttatttagattaccgaaataatgatgctcgtttagttattgaaaatattaaacaagcagtagctgacggggcgcatgctgtgagtcgggttcaagcggtgggctttttatacaatgatgaagggaaaattactggcattcaagcaaaggacctactaactgacgaacagtttgagattcacgcagatgttgtgattaatactactggtccttggtcagataaattaagaggcttagacaaaaacgattcatttacaccacaaatgcgtccaaccaaaggggttcatttagttgtcgacaaaagccgtttaaatgttcctcaaccaacgtattttgatacaggtaaacaagatggccgcatggtcttcgttgttccaagagaagaaaaaacatattttgggacgacggatacagattaccatggagactttcaacatccaacagtagaacaaagtgatgtggattacctattggaagtagtcaataatcgttatccagaggtacaattgacaattgatgatattgaagccagctgggctggcttacgacctttaatttctgctaacggtggctcagattataatgggggaaacaatggcaaactttcagataaaagtattgatgaagtcattgatgtcgttgacagataccaaaaaaatcaaacagataaacgagaaattgaagaagtcctaaaccatctggaagacagtttggtggaaaataaagtcaatccttcagctgtctctcgaggcagctcattggaaagatcagcggatggcttgctcactttggctggtgggaaattaacagattatcgtaaaatggcagaaggtgcgatgaaaatgattcaaaccatcttagcagaagaataccagaaagaattcaccttaattgattctaaaaactatccagtttcaggcggaaaattgaaccctgcaacggtagacgaagaattagaagcgttggcaaaacatggcgtgtttaaagggttaagtgaaaaggatgcactatacttagctcatttatatggctccaacgtaccaactgtttttgaaatgattgatgatgccaaagtaattcctggtttaaccttaacagaaactgtctctttaaactatgcgatggaagaagaaatggctttaacacccgtcgactttttattgcgacggaccaaccacttattatttatgcgtgatcgtttggaccaagtgaaagcgggagtcattgaagaaatggcacagcattatcagtggacagcggaagaaagagcacgacacattgaaacattagaaaaagtaattgaagaatcagatttaaaaaatttgaaagtagggtga

SEQ ID NO: 1722 - DNA, 1542 bp, Enterococcus faecalis
agaaaacgatttcaaaaacgtttaggaggaattatcatggcagaagaaaaatacattatggcgattgatcaaggaacgactagttctcgtgcaattatttttgataaaaaaggaaacaaaattggtagttcacaaaaggaatttactcaatattttcctaatgcaggctgggtggaacataatgccaatgaaatttggaattctgttcaatccgttattgcaggttctttaattgagtcaggagtgaaacctacagatattgccggaattgggattacaaaccaacgggaaacaaccgttgtttgggacaaagcaactgggttacccatttataacgcaattgtttggcaatcacgccaaacgacacctattgctgatcaactaaaagaagatggctacagcgaaatgattcatgaaaaaactgggttaatcattgatgcttatttctcagcaacgaaggttcgttggatcttagatcacgtagaaggtgcgcaagaacgtgcagaaaatggagaattgatgtttgggacaattgacacttggctcgtttggaaattaacgggagatactcatgtcactgattattcaaatgcaagtcggacgatgttgtttaatatccatgatttagattgggatcaagaaattttggatcttttaaatatcccacgagtgatgttaccgaaagtcgtttcgaactctgaagtgtatggattaacaaaaaattaccatttttacggaagtgaagttcctatcgctgggatggctggtgaccaacaagccgccttatttggtcaaatggcctttgaacctgggatggttaaaaatacctatggaacaggctcatttattgtcatgaacactggcgaagaacctcaactttctaaaaataatctgcttaccactattggctatggcattaacggcaaagtatattatgccttggaaggaagtatcttcgtggctggttcagcgattcaatggttacgagatggcttaaaaatgttgcaaacggctgctgaatctgaagcagtagccaaagcgtcaacagggcacaatgaagtttatgtggttccggcattcactggtttgggcgcaccatattgggattcacaagcgcgtggggctgtctttggattaacacgcggtaccacgagagaagattttgtcaaagcgacacttcaagcagttgcgtatcaagttcgtgacattattgacacgatgaaagaagatacaggcatagatattcccgtcttaaaagtagacggtggagcagcaaacaatgatttcttgatgcaattccaagcagatattttaaacactgctgttcaaagagcccataacttagaaacaacggccttaggcgcagctttcttggcgggcttagcggttggcttctggaaagacttagaagaaatcaaagcattccaagaagaaggacaacaatttgaaccaattatggcggaagaagaacgagaagatttatatgaaggttggcaacaagcagtagcagctacccaacaattcaaacgtaaaaataagtaa

SEQ ID NO: 1723 - DNA, 1497 bp, Enterococcus faecalis
tgggtgcttcggcttattggagagagaacgatgaaagttgagacattattagaaaagaaagcgatgcgacaattattaacggtacaacaaaccatcttagcaggcggcacctgctcagtctctgatttaacagcatttttagcggtcacaaaagcctcctttgaaaaagacttagaggatttacattattttttgaaaccttttggacaggattgtcagcttacttatgatggccaacagctatcaatcaccttatcggattttttttcgttgaatcatttaattgaagcatttgtaaaagagtctcttaaatttcaacttttagattatttatatcgtaataaagagttttctattgttcaattaacgactaaatttatgattagtgagtcttctttatttcgaaagattaaggaactcaatcaattgttagccgtctttgatttgcaaataaaaaatggacaactacagggagaagaattgcagattcgttacttttactttcagttgtattggtatattactccctatgaaatacaccagaaaaaaacgatgtcgccgttaaataaacggataattgaagggattgagactggcttaggttttacttttaatgaacataatgcgttaaaagttagcctttggttgagtattacgaaaaagcgcctagcggtcacttcaaaaaaatatcaacaattgagaaagaaaatgattgattttaaagaagatccgttatttaagcaagtccgacaattgtttttccgtttttctagtcgctattcattagaattagacgaaggagaaagcatgattcattttgtttttctaatcacaatgtcggtcttaccagaatcagcttttgatgaatattccttaattcggggacgtcgttccgctgtttctttagctgatacgtttatcttggaaaatgtggtcttgtattatcggccccataaatttgaacctactcttgagaaaaccatggcttactatttttcacaaattcatggaaaactgtatttttttaaaggagaattggaagtctttgatcgggcccatatctgggaaaaagaacagcaattatctagtcgggaattagcttctttttcaacaacgttattagaaaaagctttagcttgttttgatgaaacgtatcaaccaggagatagtttgcatgaactttctctggtcaaatatttaagcgtgttggcattaattgaatttaaaatgattggtgaaataaaaattggaattcatttagcaatggatgctctttatcaagcggcgttaacacaagtattaatgcttagtcttaaaaatatgaatggcacgctggtggagaggtatcagcctgaacaaacatatgatttaattgtgaccaattatcagcaaacgagctatcaaggaacaccggaagtctatgttttgtcagaattaagttcgacctatgatgtgcaacaattaaaaaagaaaatacgcaccttgcgggagaaataa

SEQ ID NO: 1724 - DNA, 1323 bp, Enterococcus faecalis
ttattggtgcatcattcgcaggtatttccgcagcaattgcttcaagggaaaaaatatccccaagcagaaatttctttaattgataaacaagcaacagtggggtatttatctggtggcttaagtgcgtattttaatcataccatcaatgaattacacgaagcacgttacataacggaagaggaattacgtcgtcaaaagattcagttgcttttaaatagagaagttgtggcaatggatgttgagaaccaattgattgcttggacacgaaaggaagagcaacagtggtattcttatgataaattgattttagcgacaggcgcgagccagttttccacgcaaattcgtggtagtcaaacagaaaaactactcaaatataaatttttatcaggtgctttagcggctgttccattactggaaaatagccagacagtagccgtcattggtgcaggacccattggaatggaagctattgattttcttgtgaaaatgaagaaaacggtccatgtctttgaaagcttggaaaatctattgcctaaatattttgataaagaaatggtcgcagaagttcaaaaatctttggaaaaacaagcagtaattttccattttgaagaaacggtcctaggaattgaagaaacagcaaatggtattgttcttgaaacaagcgagcaggaaatttcttgtgacagtgggatttttgctttaaacttacatcctcaattagcctatttggataaaaaaattcaacggaatctggatcagacaatcgcggtggatgcttatttacaaacttcagtgccgaatgtttttgccatcggtgattgcatttcagttatgaatgaaccagtcgcggaaactttttatgctccgttagtgaacaatgcggtacgaactggcttagtagtcgccaacaatttagaagaaaaaacacaccgattcattggctctttgcgaacaatgggaacaaaagtgggggactattaccttgctagtacaggtctaaccgaaacggaaggtttattttttccgcaaacacttgcttccataattgttagacagccagcgccgcctctacaacatgggacagaaattttaggcaaattaatctatgataaagtgacgcaacgggtccttggtgcacagctttgttcaaaaaacaattgtttagaaaaaataaatactttagcattaagtatccaaacaggtcagacactgacagacctattacaaaaagattatttttatcaaccttccttaaccaatatttatgatattacaaatttgatgggtgcttcggcttattggagagagaacgatgaaagttga

SEQ ID NO: 1725 - DNA, 3651 bp, Enterococcus faecalis
cggccccccatttataaatccggccgtccatatctatatataggaaacgatattacgacgagtgcggcgaccaccgctaaagtgattcctgacaccgttacggcaagtaatatgaccttttacgccttgcaaggtaaggtcaatcatttagtgattactggaaacagcgcggatccgattagtatggatcaaacggcgccaacgggttctaagacgttaggatttaatcaaaatatctattttggctcaaacatcactttgagaaatctaaactatacaggtacgaatatgtatttaaatggttacagtttgaacctgaatggcggctctagtggaaacggtctgaccgtatacggtggaacggatacaggagatgtttcaggaaacccaactttaacagtaaatagtacaggtacagggacatggaatttctatggcggaaaccaaaatggtggtaatttagctggaaatcctacgattgttattaacaatacacggagcggactaaatacattaagtgggggcgccaatattgggacagtgactgggaatacttcattggttgtcaatgattctggtggcagaattgcttcaatttatgggggcggttatgggaccaacgcaaccaacacagcgaatgttactggtaacgtctcaacaaaggttgcgattacgaatgctgctacaggtttccaattaagtacgtattatggcggtgttcaatacggaaatattggtggaaaagtaacaaacgatatttctggatatggccgttggtatacagcgggtcaacgttttattggtggctcttcccgcggcgatataggaacgaatcgtgcgactgatggaattactacaaatttaaatacacagttgtatagtgcgggtcgtgcagattttgaaggaggcaaccaatattctggaacgatcatcggagatattacgaatgtggttacagcaggaacgaattccgctggtggtattaatgattttaacggcggtgctggtaacaatgtttcgaaatttaacaagagtcaaattggggcctcaaatgaagcaacgtatgatgcttatacaccacaacaaagagcagaattagccaaatcagcagcagcttttaaagtttttggaaatatttcttctaaattagtcagcggttcgtttaataatggtgcaatttactcaactgcagctggccgcggcggttatatcgaaggaaatacaacaattgaagtgggaacagcgaatggtgatgggtccttaggtggcgatggtatggcttattcaggcgcaaaaccgacaagcttagattattcaacgaccgataaaagtcgtgggtatagttcaggttgggatattgttggtggcggcggctatcctgctagtaatgatacttgggatatctatataaaaggagatactaagactgttttaaataataccattgctcgctggacatatggtggctctttttcaggtgtcgttgaaggcaatacttctaacacattgaatggcgggattgctgacacattagaaggaacaggctatcaagcagctcgagtttatggaaacggtcaaacaatcgttaataatggtcaagtcgattggtttctttcaggcggtggctggaatgatgccaaaaatgttgggaatgtcggtgtaacggtttatgaaggagtaattaatgcttcgatgggtgcttcttatggagcaagcggtggccatacaattactggtaattcagacaatcgcatctacggaggaaatttctcaggaactcctcggacaggcgcgaacggtttttcaggtgggattaccaatgcgggctcacttcttggaaatgccaaactcttaattgatttaagaaattacaacggagagtttaagttgcctggtaatacctacattactggtggtcggccctatggtcaaaatacgacactaggaacggatgaatcaaacacaattactttaaatattttcactaaaacaggtgtggaatctctaaatggggccagcatttacggtgatggtggaaccaatgctgcgtataccaagaacggcaagattacaatgaatattcaagcagcgggttctagtattggaaatttatatgcgacacagtattccaatatcagtggcggaaaaatcttacgtgatgttaccgcaaatgttcaaggtgcagttagtattaacggtttatccggtggttcatcaacagataatttcactaatgcaattgtgaatgctagttcaaataaagtggcctttaactttgggactaacgttgacggcaccaataactatcaaacagaaccactaaatgcgacaggcttaggcgttgtcaactttacggaattaaatgtcaccaatggcattaaattaatggctaatggtgggaacatcaaaaatggcgtttctgctactgccgcgaaccacagtacgacttacaatgaattcggatcaattcatctatctaaaaacgctggaattgggatcaccaacacagccaatttaatctcagctagcaaactaacggttcaggatcatgcaacattagaaacaattcctggtacaggtaaagtaaacattgcggattttgaagctgtcgatccaacaaaagatgaacttttatggattaaaccaacgacagatacaactgctttggtggatagcacagggacttggtttggaaatgtcaaagcctatcaggtcttgacgattaatccaacggtcaataatgctacaaaacttacgccaacaacgtttcatgggattgaaaaagcgactggaaaaacatttattggcgataacgatgtgaccaagggcgccaatggctatgggatagcaattcctggctccatcatcgattacgaagtggaaacgcctggaattgtggcaggtgcaggtactatttctcatgatgtaaaagaggtcaaagccggcaatgcgccattaaccttacaagcgtggggcaccgaagtagctggacaaaaagttcaaaaaggacgtttgatgattccgacctcaagtgctttaacaccaaccctaagcttccttcctgacgaagtaacaggttcttggttgcaccaaggaacggttaagtctagtgaagttgggagcgcgatagagcaaattccagagcaaaaagataccaccccgctttcatggaaagcgacgaatatgaactacagttatcaggtgaaagttcaattttcaaataaagtggaactttcggggcaatcggtgattgtcacagaagatgaggcagcacagctaacaactgttgataaggtagtggaaatgctcggcgcaaaaggtcggccgtttttcaagacctcattaaaagagacggatttaccacaaattcaagcgccgttagcagaaaaaactgtatcgcggacacatgatattcaattagaagcagggacgtcaggagataatttgcaaaacaaaacggttcatttagttgttgtgaaaaatgaaagtatccttgccaaagatcgttcgtttgccttgtatgcgacaagtgcgcatttgaaattaaaagaagcaaatggcttaacgaattcagacgagttggttggcacaatggacacaagcaacggtgattttcgcagatggtcgggccaatcaaacaccaagtcttga

SEQ ID NO: 1726 - DNA, 621 bp, Enterococcus faecalis
cgaattcagacgagttggttggcacaatggacacaagcaacggtgattttcgcagatggtcgggccaatcaaacaccaagtcttgatgccgcaaccttccaagccattcagcaagcgaaaccagaagaattagccaaaacggtgccagccaattatcaatttacagaagctggtgaaacgttaaataaaaaagtcaatgtgtctatttcaggtgaattaacgttagaaaaagtacctaaaacaattgattttggcaaacaaaaaatttctgccaagccagaagtttactggccaactctttcagatgatttagtcgttcaagacacacgcgggtcagaaagtacgccttggaaactgaatgttcaggtaactaatcccttaacgaacggcacagatcaattggaagatttgtcattggttacagacaaaggagaatttttactcaataaaggagatacggttgttacagaaaatgaaggctcaggttcaggtagttatacaattaaccaaggttggggtgcggcaaaccaacggggacttaaactatctgtgccagtcgagaaacaaaaagttggcgaattcaaagggacattgtcatggtcattagtcatggcaccataa

SEQ ID NO: 1727 - DNA, 423 bp, Enterococcus faecalis
tcatggcaccataacaaggaggagagaagtgagatgaaaaaataccttttgcttagttgttttttaggtcttttcagcttctgtcattcagacactgcgtttggagaagcagcttatgaaaatagtggtgttgtctccttttatggaacgtatgaatatcccacagaagagtcgacaacagcgactagtaattcttccacaacgaccgaacccaccaagccagctgacggaggcgcttcatccgtcctttcttctggcgtatatggatcgcgacaaggaagattaccagcgacaggtaccaccaatcaagcaccatttatttatttgggaatcagccttatcactataggcatattatttattaaaaggagaagagaagatgaaaaaaacagtattagcagtagtagggattgtaggatttag

SEQ ID NO: 1728 - DNA, 267 bp, Enterococcus faecalis
  misc_feature (233)..(233): Nucleotide 233 is "n" wherein "n" = any nucleotide.
gcatattatttattaaaaggagaagagaagatgaaaaaaacagtattagcagtagtagggattgtaggatttagcggtgtcctagcgacacaacaagcatttgcggaagacattaacgtgaactatacaagtaatggcgccattacatttgaaccagatacagatccaacgaagccagttaacccaaccaatccagatgaaaaagttgaaccagaagatccaactgacccaantggaccgaacccagggagtgccggcctcttataa

SEQ ID NO: 1729 - DNA, 285 bp, Enterococcus faecalis
cttcccgtggtgaagactatgcaaaagaaagaatttcacattgtagcagaaacaggaattcacgcacgtccagctactttattagtacaaactgcaagcaaatttaactcagatattaacttagaatacaaaggtaaatctgttaacttaaaatcaatcatgggcgttatgtctttaggcgttggtcaaggttctgacgtaacaatcactgttgatggtgctgacgaagctgaaggaatggcagcaatcgttgaaacattacaaaaagaaggattggctgaataa

SEQ ID NO: 1730 - DNA, 1731 bp, Enterococcus faecalis
ataatgtctgagatgctaaaagggattgccgcaagtgatggcgttgctgttgctaaagcttacctgctagttcaacctgacttgtctttcaacaaaacttccgtagaagatactgatgcagaagcaactcgcttagacgatgctttagcaaaatctactgaagagttgcaagcaattcgcgacaaagcagctcaaagccttggtgaagcagaagcgcaagttttcgatgctcatttaatggttttatctgacccagaaatggttggtcaaatcaaacaaaatatccaagacaacaaagtcaatgcagaagctgccttgaaagaagttacggatatgtatattggtatgtttgaagcaatggacgacaatgcttacatgcaagagcgtgcagcagatattcgtgacgttgccaaacgtatcttagcacatttattaggtgtgactcttccaaatccttcaatgattaacgaagaagtaatcgtggttgcccatgacttaacacctagtgatactgcacaattagaccgtacgtatgttaaagcctttgtgacagacatcggcggacgtacttctcactcagccatcatggctcgttcgttagaaatccctgcaatcgttggtacaaaagaaattactgacaaagtaaaagcaggcgatattttagcagtgaacggaatcattggggatgttattattgacccaacagatgctgaaaaatctgaatttgaagcagaagcaaaagcttatgcagatcaaaaagcagaatgggataaactaaaaaatgcagaaacagtgacagctgacggcaaacatgttgagttagctgcaaacattggtacaccaaaagatttagaaggcgtacacaaaaacggcggcgaagctgttggtttatatcgtacagaattcttatacatggattcatctgactttccaactgaagaggaccaataccaagcgtataaagcagttcttgaaggaatggaaggaaaaccagttgtggttcgtacaatggatattggtggggacaaagagcttccttacctaacattaccacacgaaatgaacccattcttaggttaccgtgcattacgtattagcttatcagaactaggtgacggcatgttccgtacacaaatgcgtgcattattacgtgcgtctgttcatggtaacttacgtatcatgttcccaatggttgctactttgaaagaatttagagcagcgaaagcaatctttgaagacgaaaaacaaaaattagtcaacgaaggtgttgaagtttcaaacgatatccaagtaggtattatgattgaaattccagcagctgccgtattagctgataaatttgccaaagaagttgacttctttagtgttggaactaacgacttaatccaatacacaatggcggcagaccgtatgaacgaacgcgtttcttacttataccaaccatacaacccatcaatcttacgtttaattaaaaatgtaattgatgcagcacacgctgaaggtaaatgggctggtatgtgtggtgaaatggcgggcgatcaaacagctgttccattactattgggtatgggcttagatgagttctcaatgagtgctacatctatccttaaaacacgtagcttgatgaaacgtctagacacaactaaaatggctgaacttgctgaccgcgcattaaaagaatgcgacacgatggaagaagtcgttgcattagttgaagaatatacaaaataa

SEQ ID NO: 1731 - DNA, 1089 bp, Enterococcus faecalis
aacaacttcatgcaataccttgttataaaaaattgtcaaaaaggagtgcacactatgaatcagcagctttttaaatggctccatgctattagcgtcatcatttttttattttttattggctcttattctgtagaagcaagcgaaatgactttttctgtaaaagccattttacccgacaatcaacgaaccaaagagacaagttattttgatttacgtgtcgctccaaaccaaacacaaaagctacaaatcgaactaacgaatcaaacagccaacgacattaccgtgctagcttcagccaatgcagcgattactaatgataatggcttggcagattattctcatgctgaaacaaaaaaagatccgtctgcaccttttacttttaatgagattgcgcaattgccaaaagaaatccacctacctaaacactcaaccaagactgttgaatgtcagcttactttaccggaaaaaccatttaatgggtacgttttaggaggactctactttgaacaaaagtcagatgaacaacctgctcactcagaaaacggtgtggccatcaataatcgtttttcttatgtagtcggtgtcttacttagtgaaacagatgaacctgttcagccagaattatctttaaatgaagtaaaaaccgatcaagctaacggtcgtaaccgcgtattaatgaatctccaaaacaaacaagcggctatgattaaaaaattacaagtcgatgcctctttgtattatgaaaaagaaaccaaacctcgctacgaaaatcaccaagagtcgttaacaatggctcctaatacaaattttaattatcggattgacttaaaggaacaaccttttgttcctggaaattatactgtaaaaatcaaagcaaacgatggctatcaagactattcgtgggaaaaacacttagtcatccaagaaaaagaagctaaaaaatacaatgctaccgccgtcaacctcccacctgaaaaacacaccaatttcccttggaaactggtgagtagcatcacgctggtttttctattcattttgggaagcacgatttattatttcaagaaaaaaatacgtgaatcgcaacaataa

SEQ ID NO: 1732 - DNA, 741 bp, Enterococcus faecalis
aaaatgaaaaagatcgtgcgcatttcaagcattttgttcgttgctacgcctcttatgcttttaaatagttcaaaagttgaagcagctcaagtcgcttctattcaatccaacgctgatattacgtttgctcttgataatactgtcacgccacctgtcaacccgacgaacccttctcagcctgtgacacctaatcctgctgatcctcatcaacctggtacagccggaccccttagtattgactatgtttcaaatatccattttggatcaaaacaaattcaagccggaacagcgatctattcggcacaactggatcaagtgcaaaatagtactggcgatttaattagcgtgccaaactatgttcaagtaactgacaaacgtggtctaaatcttggctggaaattatcagttaaacagagtgcgcaatttgctacaagtgattcaacacccgctgttttggataatgcatccttgacctttttagcagcaacacccaattcaacacagttactttctttggcgccattaacggtcccagtaaccttggatccaactggtgccgccacttctcctgtggcgactgccgctctttcaacaggaatgggcacttggacattagcttttggtagcggagcgaccgctgctcaaggcattcaattaactgttcctgcgacaacgaaaaaagttgcagctaaacaatataaaacaacgcttacttggattttggatgatacaccactttaa

SEQ ID NO: 1733 - DNA, 282 bp, Enterococcus faecalis
gcagcggtcgctccgctaccaaaagctaatgtccaagtgcccattcctgttgaaagagcggcagtcgccacaggagaagtggcggcaccagttggatccaaggttactgggaccgttaatggcgccaaagaaagtaactgtgttgaattgggtgttgctgctaaaaaggtcaaggatgcattatccaaaacagcgggtgttgaatcacttgtagcaaattgcgcactctgtttaactgataatttccagccaagatttagaccacgtttgtcagttacttga

SEQ ID NO: 1734 - DNA, 933 bp, Enterococcus faecalis
ctcccgcccatacgcctggtgaggactgtcttatcctgtgcctcaacgaacggttacgcaaatcattggaagcggaaaaatgcacaagggctctgggaagctgcaaactctgtcgtaagtggtcaaatcattcgttttacgttaaccacacgtttaaccaatcaaccagcaacgtggatgaatcagcaattacgagcaacggtgcctaaaggactgtcccaactttcagctgctacattaacaaaacaatcagcagcaggtttaagtacgccaatagctgggcttcaacttttaactgatagttccactggtttgccgtattggagttatcataattcgctgccagcagataattttacggaagccaatacacaattcaccttacaatatacagcaacggttacagaagaatggataaaccaatttcttttattttctagcacggttactggcaatgatggtggcggaacgccaattacgccaatcactaaagaacaatctttacctatcaaaaacggtaccctccgttttgtgcagatgccaactacagtttcctttaaaaatttacctttccccagcaaacgaaccatatactcaccatcgaccatcagcgctcctttcctcattgccgatggtcgagttgcaaaaacaccatggcatttgttggtaagagagagtcagcccatgcattcaacttgtacaaataaaacgatccagccagctttcatttatccaaaaaatggcagtgattttcctctctcctctttagcaaccgaagtttatcaacacaccgcaacggacgataacaatgtagaaattccttggaaccaacaaaatggactttttttaagcgttgctcctgaccttaatttaacggtcaaagaatcttacactgccgaattacaatggattctttctgatacacccctctaa

SEQ ID NO: 1735 - DNA, 207 bp, Enterococcus faecalis
cccgcccatacgcctggtgaggactgtcttatcctgtgcctcaacgaacggttacgcaaatcattggaagcggaaaaatgcacaagggctctgggaagctgcaaactctgtcgtaagtggtcaaatcattcgttttacgttaaccacacgtttaaccaatcaaccagcaacgtggatgaatcagcaattacgagcaacggtgcctaa

SEQ ID NO: 1736 - DNA, 1533 bp, Enterococcus faecalis
tattatctgttattttcatatataaaattaagtcgaggaatggacaaaaaaatgtcaaattgggaaacaaaatttgcgaaaaaaggtcttacatttgatgatgtgctattaatccctgcagaaagccatgtcttaccaaatgatgtagacatgagtgtacaattagctaaaaatatcaagttaaatattccattgatgagtgccagtatggatactgttacagatagtaatatggcaattgcgatggctcgtcaaggtggactaggtgtcgtacataaaaatatgactgtcgcccaacaagcagatgaagtacgtaaagtcaaacgttctgaaagcggcgttatcattgatccattctttctaacaccaacaaacttagtagcggatgcagaagaattaatgagtcgttaccgtattagcggtgtgccaattgtagaaacaatggaaaaccgtaaattagtcggaattattacaaaccgtgatatgcgttttgtaacggactaccaaatcaaaatcgaagaagtcatgacaaaagatcatttagtcactgcgccagttggcacatctttaaaagatgcagaaaaaatcttacaaaaacataaaatcgaaaaattaccaatcgttgatgaagcaggtcgcttaagtggcttaattacaattaaagacattgaaaaagtgattgaattcccaaatgctgccaaagatgaacacggtcgtttacttgtggcggcagcagtcggtgtcactagtgatacgttcgaacgtgcggaagcattattagaagcaggtgcggatgcgattgtcatcgatactgcacatggccatagtgccggcgttattcgcaaaattaaagaaattcgtgaaacgttccctgaagcaacattaattgctggtaatgttgccactgctgaagcaaccaaagcattgtatgatgtcggcgttgacgttgtcaaagttggtattggacctggttcaatttgtacaacacgtgtcgttgctggtgttggtgttcctcaattaacagcgatttatgatgctgcttctgtagctagagaatatggtaaagcaattatcgctgatggcggtattaaatattctggtgatatcgtgaaagccttagctgctggtggacatgctgtaatgctaggaagtatgttagcaggtacagatgaatctccaggcgaatttgaaatttatcaaggccgtcgtttcaaaacttaccgtggcatgggctcattaggtgcaatggaaaaaggatcaagtgatcgttacttccaaggaagtgtcaatgaagcaaacaaattagtgccagaaggaatcgaaggacgtgttgcttacaaaggaagcgtttctgatattgtcttccaattaatcggtggcttgaaatcagggatgggttacgtcggtgcagcagacctgaaagcgttgcgtgaagaagcacaatttgttcaaatgagtggtaacggattgaaagaatcacatccacatgacgttcaaatcacaaaagaagcaccaaactattctgttcaataa

SEQ ID NO: 1737 - DNA, 1284 bp, Enterococcus faecalis
ggaggaaaaaatatgttagatgtaaaaatgatgcgtcaaaattttgacgaagtaaaagcaaagctacaaacccgtggcgtgaaagaagaaatcttagtggaatttctgcgtttagatgaaagtcgccgtgatttattagtcaaagtcgaagaaatgaaaaaataccggaatgatgtgtctgctgaaattgctcaattaaaacgaaacaaagaagatgcaacggccaaaatcgcggaaatgaaagaagtcggcggcaatattaaagcattagatgcagaaattaacgctattgacgaagagctacgtgggatcacaactactttaccgaatttgccagatgattctgtgcctgttggtgctggtgaagaagaaaatgtagaagtacgtcgttggagtgaaccaagaacttttgcttttgaaccaaaaccacactgggaagtcgctgaaaacttaggcattctagattttgaacgtggtgccaaagtagctggtagccgttttgtttattacaaaggcttaggtgcacgcttagaacgtgcgttatacaacttcatgttagatttacatgtttatgaacatggctatacagaaatgattacgccttatatcgttaatgacaccgccatgttcgggactggccaatttcctaaatttaaagaagatgtcttccaattacaagatacggatttaacgttaattccaactgcggaagtccctttaaccaattactacaacaatgaaattttagatggcaaggatttaccgatttactttacggccttgagcccttctttccgttctgaagctggtagcgctggtcgtgacacacgaggattaattcgtttacaccaatttaataaagtcgaaatggttaaatttagtgatgcagagcattcttatgaggaattagaaaaaatgacgaataatgccgaagaaattctgcaaaaactgggattaccttaccgtgtcatggctctttcaacaggtgacatgggcttctcagctgcgaaaacttatgacttggaagtttggattcctgctcaagagacgtaccgtgaaatcagttcatgctcaaactgtgaagatttccaagcgcgccgtgcgatgattcgttaccgtgatgaaaatgataaagtccaatatgcgcatacactcaatggttctggtttagccgtaggacggacagtcgctgctattttagaaaactaccaaaacgaagatggctctgtaactgtaccagaagtcctagttccttacatgggtaacctaacagttattaaataa

SEQ ID NO: 1738 - DNA, 183 bp, Enterococcus faecalis
tcaaaagtggacttcctttattattcatctacccttacagcgtaccaacaagaaatcagagagttaattgacatccctgaactttttcggtattctatagaaaagagaaaactaagagaaaaagtatttatggcactgaattccagagagtttgcgggggtgcgagcaaacattcatctataa

SEQ ID NO: 1739 - DNA, 1254 bp, Enterococcus faecalis
gagataagattgaagaagcaactggtggagaaaaagtcattcaaacagtgtggggagttggatataagatcgatgctcgttaaacctaaaaagattgaaaaacaaaaacgaattaccttaacttctaaagaaatcagcgagttattagcagaagcaattgtgacaattgttttattactactattaaatgtctcaattatgttccttttaggacaactacttagtgaaaactcgcccttagctggtgtcatctgggccactaaggatgcggtcgctaaagaattaaatactgatttgttttggagctggaataaatttgtcttacccattttctttttagtagatgcagctgttctctattggcgcttaattcgtcgctaccatcaaatgcaattgcgtcatattatcagtgagttacattacatcgctgatggtaattacaatcaccgcattccgtttgaattaagtggtgatttagcaaaagtcgtgacgagtattaacggtctggtggatagtactgtcgcagccattgaagatgaacggcgaattgaaaaatcaaaagatgaattaattacgaatgtcagtcatgatattcggacaccgttaacttctattattggttatctgggattgattgaagatcgtcaatttcatagccaagaagatttactgaaatatacgcataccgcttacgtcaaagcgaaacaaatgaaattattagttgatgatctttttgaatatacaaaagtccgtcaaccaagtgtaccgattcatacgacgacttttgatatggcacaattaattgaacagcttgctgccgattttgaattggaagcgaaaaagattaatatgcaaatccaagtaaaagccaatccagcttctttaatgatggaaggcgatacggaaaaactagtccgagtctttaacaaccttctttcaaacgctttgaaatatggcaaaggtggccatcatattgtaatggaagtagacaaagtcggcaccgaagcaattattgctgttcgcaatgatggaccagctatccctaaacattctttagatcagttgtttgaccgcttctatcgtgtcgaagaatcccgatcacaagaaacggggggtactggtttaggtctggctattgcacaaagtattgtcgctttacatggtggatatatttatgcgaagtctgatcaaaagtggacttcctttattattcatctacccttacagcgtaccaacaagaaatcagagagttaa

SEQ ID NO: 1740 - DNA, 696 bp, Enterococcus faecalis
acgcttatgaaaattttagttgcagatgatgataaagaaattgtagaactattgagtatttatattcataatgaaggatacgaagtcgtgaaagcttatgatggaaaagaagcgttatccaaattgcacacaacaccagatatcgatttattaatcttggacattatgatgccaatcatggatggaatggaagtagtgaaagaacttcgaaaagaatcgcaaattccaattattatgttaacagcaaaaacaaccgatatggataaaatcaaaggcttagttgctggtgcagacgattatgtcaccaagccttttaatcctttagaagtaatggctcgggtaaagtctattttacgtagaagccaaatgcaattaaccaaagaagaacccgatgaattagaagtcggcccattaatgattaataaggactctcacgaagtcaaaacaatagaaggaaaagaaattcaattaaccgctcttgagtttggtatcctctatctattagctagtcatccaaatcgtgtgtttagtgcggatgaaatttttgagcgtgtgtggcaacaagaaagtattgtttctgctaaaaccgtgatggttcacgtcagtcatttaagagataagattgaagaagcaactggtggagaaaaagtcattcaaacagtgtggggagttggatataagatcgatgctcgttaa

SEQ ID NO: 1741 - DNA, 417 bp, Enterococcus faecalis
gcgaaaaaaactggcatcggtaaatcttcgatcagcgattggctagctggtcgttacgaagcaaaacaagacaaagtttatcgcattgcagatgcattagacattaatgaggcctggttgatgggacaagaagttcccatggaaaaaaatgcctcaactatcgaccgcatttataaaaaattagaaccccaacgacaagccatcgtttatcaatttgccgaacaacaattacacgaacaacaaacgcaagcagaaattctctcattccctcgccgtgacgaaatgacactggctgcccacgctggggatccagaaaagatattttcaaaagaagagatcgagaaaattcacgattacttggatgaaattgatgccaaatatcaacaatcgatttcttctgacaaaaaagaggattaa

SEQ ID NO: 1742 - DNA, 492 bp, Enterococcus faecalis
tggcaggtgaatggtaaagtgaatgattatgaaaaactcgtcagttccattcaaaaggatgtgacggttttagaaattgatttatacaatcaaacaggttgttatgggttgtatcgaaatggcaaaatttatattgaaaaaacattgagtacccgtcaaaagaagaatattttagccgaggaatacgggcattatcaaacatccgttggcactattttaaatcaaaattgtacagaaaatcggaagcaagagttgaaagctcgcaatgtggccttagagcaattagttacattagacgatttaattcgttgctctgaagctggcttaagtaaccattattcttgtgctgaatttttggaaatcgatgttgaaacattaaaaaatgtgattacgtactatcgacaaaagtatggcgccacttatctttataaaggacggatttttgaatttagggattattctgtgatggtattaaatactgggttaacttaa

SEQ ID NO: 1743 - DNA, 252 bp, Enterococcus faecalis
aatagtcatggaggtgcaaagatgaaaagaattgttgttttctataaaaatggagatcgttatttaaaagaaatgggttcaggcaagagttccctgtacttttttcttttcttctttgtactacatagtatgcgggaacatattattcagttcatcggattttggccgtcatttatattcgtccttatacttgtccccaatcttatgcttggcgttggacatattaaccattggtacaaaaaacgctcttga

SEQ ID NO: 1744 - DNA, 366 bp, Enterococcus faecalis
ttggaggaagacactatggcaaattatcgtgaccgtcgtgtaggtcaagaaatcatgcgtgaagtgaatgatatcttgaacaaacgcatcagagatccacgcgtccaaggcatcactattacagatgttcgtgtgaccggtgatttacaacaagcaacgatttattacagcttgttatctgatttagcttccgaacaacaaaaagctcaacaaggcttagacaaagccaaaggactgattcgtaaagaattaggacaacggttaaccttgtataaaacaccagagttgatttttgaaagagacgaatctgtccaatacggaaatcacattgatgagttgattcgtaagttgaatcaaggtgaataa

SEQ ID NO: 1745 - DNA, 2409 bp, Enterococcus faecalis
gaaggtgattgcatgggaaaaaaaagaatttatgaactagcaaaagaaatgaataaagcaagcaaagacgttgtcgataaagcgcatcaattaggtatggatgttaaaaaccatatgggcgcaattagttccgagcaagaaacaaagcttcgtcaagcattcggaggaggaagtaccgtaaatactcaatcaaaagcaacaaacaaccaaaagcaacaaacaacacaaaataaaccagccaataagaaaccaatgaacaataaacctggtgaacaaagaaataaccaaaatcgtccaaacaatcaatcaacgaatggacaacaaagaaacaacaacaaccaaaatcgtcacggccaaagcaacacacaaaaccgtagcaatcaaacaaatacaaacaatcaaaaccgcaatacccaaaacaataacggttctacaacgaatcaaaatcggaccagccaaaataacaatggcgggaacaaccaaaaccgtggcggccaaaaccgtaacaacaattttggtggcggtcaaaatcgtaataaccggaataactttaataaccaaaaccgcaatcgtttcaacaaaaaagggaaaaaaggcaaacatcaacaagaatcagcgaagccagcagtaccagcacgtaaattccgtgaattaccagatgttttagaatatacagaaggtatgaacgtggcggatattgcgaaaaaaatccaccgcgaaccagcggaaatcatcaaaaaattatttatgatgggtgtcatggttaaccaaaaccaagccttagataaagatacaattgaattattagctgtggactatggcatggaaccgcaagaaaaagttcaagttgatattgcggacattgataaattcttcgaaccagaagcagttgttgaagaaaacttaactacacgtccccctgttgtcacaatcatgggacacgtagaccacgggaaaacaacattattagatacattgcgccattctcgtgtgacttcaggtgaagcaggcggtatcacgcagcatattggtgcctatcagttagatattgatggcaaaccaattacgttcttagatacaccaggacatgcggcctttacaagtatgcgcgcgcgtggtgccagcatcactgatattaccatcttagttgttgcagcggacgatggagtaatgccacaaacaatcgaggcgattaaccatgccaaagcggcaaaagtgccgattattgtagcagttaacaaaattgataagcctggtgcaaatcctgatcatgtgaaacaagaattaagtgaacatgaattaattcctgaagaatggggcggagatacgattttcgtcaatatttcagcgaaattcaatcaaaacattgatgagctattggaaaatattttattgattgctgaagtagaagacttaaaagctgatccaacgcaaaaagcaattggaacagtgattgaagcgcgcttagataaaggtaaaggtccggttgcgacattactcgttcaacaaggaactttacatgttggtgatccaatcgttgttggtaatacttacggacgtgttcgtgtgatgaccaatgacatgggccgccgtgataaagaagcaggacccgcaactcctgtagaaattaccggattaaatgatgttcctcaagcgggtgatcgttttgtggtctttgaagatgaaaaaacagcacgtcaagcaggggaagaacgggctaaacgtgcgttgcttgaacaacgttcagcaagtagccgtgtgacattggataacttatttgaaagtctaaaagaaggcgaattaaaagaagttaatatcattgtcaaagcagacgtacaaggatctgccgaagccgtttcagcaagtttacaaaaaattgatgtagaaggcgttcgtgtgaaaattgttcacgcggcagttggggccatcaatgaaagcgacgtaactttagccgcagcaagtaatgcgattattatcggctttaacgttcgcccaacaccacaagcgaaacaacaagcagaacaagaagaagttgatattcgtttacaccgtattatctataaagccctagaagaaatcgaaacagcgatgaaagggttattagatccagaatttgaagaaaaaattacgggtcaaatgacggttcgtgaattgtacaaagtatctaaagttggcacaatcgctggctgttatgttacagaaggctttattcgccgcgatagtggcgtgcgtgtcattcgtgatggtattgttatttatgaaggtaaattagcaagcttgaaacgctttaaagatgacgtgaaagaagtcaaacttggttttgaatgtggcgctatgattgaaaacttcaatgatttacgtgtagatgatgcgattgaaggcttcattatggaagaaatcaaacaataa

SEQ ID NO: 1746 - DNA, 339 bp, Enterococcus faecalis
cacatcaaaaagcccgcaaagagttgtttggcgatggaaaataaaaccaaaattttgaaccttttaggtttagcaatgcgcgccggtaaattagtcacaggcgaggaattaacccttaaagatattcgtgcaaacaaagcgaaatttgtgtttgttgcgcaagatgccagtgagaatactagaaagaaaatcaaggacaaaagttcttattataatgttcctgttagcgaactgttcagtcaattcgagctcagccaagcgattgggcgaccacgaatggttatcggagtaactgatgcaggatttgccaccaaaatcaaggaattactaaaaggttag

SEQ ID NO: 1747 - DNA, 330 bp, Enterococcus faecalis
acaagaataacgtttttggagggtgaaaaaatgaaaaagagaaaaattccaatgcgtaaatcggttgtttcaggcgaaatgaaaccgaaaaaagaattagtcagaattactcgctccaaagaaggcgaggtggccttagatccaactggtaaattacctggacgtggcgcttacgttgatttggatcctgcggaagtccaaaaagcttgggataaaaaaattcttgatcgtgtcttagaaacaaaattaagtgatgaattttatcaagaactattggattatgtaacacatcaaaaagcccgcaaagagttgtttggcgatggaaaataa

SEQ ID NO: 1748 - DNA, 621 bp, Enterococcus faecalis
gtccaatccgtgtgcagaggcttttttattagctcgaaaaaaaggactaaaacatttaaaggagccgaatcagtaatggaaacttttgaaagaaattggtacgtattgcacacctattcaggctatgaaaataaagtaaaagcaaacattgaatcacgtgcacaaagcatggggatgggcgattatatttttcgtgtcgttgtaccagaagaaacagaaaaagaagtcaaaaatggtaaagaaaaagaaatcgttcataaaactttccctggttatgtgttagtggaaatgattatgaccgatgattcttggtatattgttcgtaacacgccaggcgtaactggttttgtaggctcacatggtgctggtaataaacccgctcctttattacaagaagaaattaaccacattttacgttcaattggcatgagcacccgtcaatcagacttagaagtagcgctaggcgatacagtgaaaattatcgaaggtgccttttctggtcttgaaggtgttgtgacagaaatcgatgaagaaaaacaaaaattaaaagtaaacatcgatatgtttggtcgtgaaacaagtacagaattagactttgaacaagtcgataacattgattaa

SEQ ID NO: 1749 - DNA, 186 bp, Enterococcus faecalis
  misc_feature (121)..(156): Nucleotides 121 & 156 are "n" wherein "n" = any nucleotide.
ttgccccaatttggcaagcacttaataatagaacaagacccattagcaaagaaaaataacgatatttttgggcatgtttcattttttatcattcctttcggcgatgaactaaaaaagggcntggaaaagaagtcagttgactgctttcccagaccntacaatctgtatcaatcagctgcacaatag

SEQ ID NO: 1750 - DNA, 711 bp, Enterococcus faecalis
aaaatgaaacatgcccaaaaatatcgttatttttctttgctaatgggtcttgttctattattaagtgcttgccaaattggggcaactaccaaggatgacaaccaagccgccacaaaagaatcaactgttgagttaaaccgcacaacaacaccaacgcttttttttcatggttacgcaggaactaaaaattcgtttggctcgttactgcatcgcttggagaaacaaggtgccacaactcaagaattagtgctactcgttaaacctgatgggaccgtggttaaagagcgaggagctttaagtggcaaagcgacgaatcccagtgttcaagttctatttgaagataataaaaacaatgaatggaatcaaacagaatggataaaaaacacattactctatttacaaaaaaattatcaagtgaacaaagccaatattgtcgggcactctatgggtggtgttagtggtttacgttatttaggaacctatgggcaagatacatcgttacctaaaattgaaaaattcgtcagcattggagcacctttcaatgattttattgatacgagtcaacagcaaaccatcgaaacggaactagaaaacggccccacacaaaaaagtagccgctatttggattatcaagagatgattaatgttgttccaggaaaaactgcccattttattaattggtggtcaattaagtccaacagatttaagtga

SEQ ID NO: 1751 - DNA, 243 bp, Enterococcus faecalis
ttaatgttgttccaggaaaaactgcccattttattaattggtggtcaattaagtccaacagatttaagtgatggaacggtgccgttatctagtgccttagcagtcaacgccttgctaagacagcgaggaactcaagtcactagccagattattaaaggagaaaatgcacaacatagtcaattacatgaaaatcctgaagtagatcaattgctaatcgaatttctatggccgagtaaaaaatag

SEQ ID NO: 1752 - DNA, 744 bp, Enterococcus faecalis
tctgataaaggaggtttgctcatgaacttagattacttaaaagaaacgtatcatttaacgaaaacagaaagtcagattttgtattatttggatcaacaaagtacgaatgcggccgatttgagtattcgggaagttgcaaaacactgcttttcttcgcctagttccatcattcgtttagccaaaaaattaaatttatcaggttataatgaacttatttacaaattaaaagaagcccatttttctcagccaatcccttttgaaacagcaccttcatttgaaacaaccaacgagttttgtcgactgcttgccaaacacaagagtcatttatttgttattttaggtcatgacttttcacgacatttggcggcttacattagtgaagttttcaattttcatggcatccccagcatcacaacagcctatactcattcgataaatagtcaaaataatcagaattttctttttatcatcctttcacattctggtgaagaaaaatacttaaaagaaacagctctgcttgcgaaagagaaaaaacatcctatcatttcttttgttggcgccaaaaattcaactcttggtcgactggcagatctcgttttttcaactgactcttacagcccgttttcaacaagtgtcgctcagccacaaatgttttttggccaaacattaatcacctttgaagccttgatttgtgcttatttaaatcatgaggattccattccaatatctcataaaaataaataa

SEQ ID NO: 1753 - DNA, 1638 bp, Enterococcus faecalis
ggtgtttttatgaaaagggcaacaaagcaaaggctgtctttggcagcaatcatggttctacttctctcgggctgtggaagtgttgggaaagaaaccaaaaagcaagaacaacaggtattacgggtcgggattgattcggaattatcaacggcagacgtgtcgttggcaatggataataccgcagcagatgtaatgagccaagtaggggagggacttttctcctttgacgaaaaaggagaagcgaaaccagcattggcaactgaaaaagtacagccctccaatgatggtttaagctatacttttacgattcgaaaagatgcaaaatggagtaacggcgagccaatcacagcaaatgattttgaatactcttggaagcgcacagtggacccaaaaacagcttccccgcaagcgtattactttgaagggttaaaaaattatcgtgctattgttgacggtagcaaatctaaagaagagttaggggtaacagccattgatgaccataccttggaagtagagctaagctatcctatgagttattttcaacaattattggcggtaccagctttttatcctttaaatgaagcatttgtcgaaaaaacgggcaaaaactatggtacatcagctgagtcaacactttacaatggcgccttcacattagaaggttgggatggcacgaataatacttggtcctatgtgaagaataaaaattattgggatcaagcgaatgtttcgctagataaggtggatgtccaagtagttaaagaagtcaatactgggaaaaatcttttcgaagggaaagaattagatgttgtaaaaatttctggagaaattgttgcacaagaacaaggcaatgcagctttgaaaattcgtgaaattcctggaacgtattatatccaattaaatacgcaaaaagatcttttggcaaataagaatgcacgtcgagcaatagcattatcattgaattctgagcgtttagctaaaaatgttttaaatgatggctcaaaaaaagcacttggcttcgtgccaacaggtttcactaatcaagaaacgcaaaaagattttgcagaggaattaggagatttaaatcctagtgaaccagaaaaagcgaaagagttatggcaaacggctaaaaaagaattaggaattgaaaaagcggagctaacgattttaagttcggatacagaaaatgctaaaaaaatcagtgagtatgttcaaggagctttagcagataatttagaaaatttaacagtcaatgtttcaccagttccttttaataatcgtttagaaaaaagtcgcagcggagatttcgacattgtggttggtggctggacgccagtatatgctgatccaatcgatttcttaaacttactgcaatcaaaaaattccaataattttggtaaatggtctaataagacctttgatcagttgcttcaagaagcaaacgtaacttatgcaaataaatatgaagaacgttggaaaacattacaaaaagcggatcaattggttgcggaagaagcccccctagttcctctttatcaattaacagaagcacgcttagtggccgattctgtccaaaatttagtctatggtccattaggttcaggctattacaaatcagtctctatcggcgacaagtaa

SEQ ID NO: 1754 - DNA, 1158 bp, Enterococcus faecalis
gttcaggctattacaaatcagtctctatcggcgacaagtaaaggttgggaaaaaatgaaaaaaagtcaagctgttcaattaattcaggaactttcaaatgctaatggtgtttcaggctttgaaacagaagtcgttagaatccttcaacacgcaactgcggattttactattcaacggctagattccattaaaaatttatatcttgagaagaaaaataatctaagtgaaggtccagtagtgctttttgatgctcatagtgacgaagtgggttttatgattcaagcaattaaagaaaacggcttgttgcgtttttttccgttaggtggctgggtccctaatacgatttctgcacaaaaagttcggattcgtaaccgggaaggtacctatctgccaggcgtagttactagtcggccccctcattttatgacaccagaggaacgtcagcgaccgttaaccattgctgatttgacgatcgacattggtgctacctcaaaagaagaagtaattgaaacttacaaaatcgatcttggtgcaccggtcattccagatgtgacgtgctgttacaacgaacagacagatctttttttaggaaaagcttttgattgtcgcattggctgtgcttgcttagtggatgtcatggaggagttgaaagaagagacgcttccattcaagttagttgcgacagtaactgcacaagaagaagttggcgaaagaggagcacttattgccgcaaaacaagtcaatcctgatttagctattgttttcgaaggctgcccggctgatgatacggcagaaacgccagagatgattcaatcagcaatgggaaaaggaccgatgttacgttattttgatgtttctatgattacgaatccggaatttcaagagtatgcactagagattgctaaaatacacaaaattcctgttcaagtttctgttcgaagtggtggtggaaccaatggcatggcgattacacaagttcaaggagccccgacgattgttgtaggaattcctgtccgttacgctcacacaccccattgctatgtagattttcaagattaccaagcggcgaaagaattagtcattcaattaatcaaaaatttagatgctgacaaaattcaagcactggttcagccattgtcaaaggagtggaacaaatga

SEQ ID NO: 1755 - DNA, 891 bp, Enterococcus faecalis
caaaattcaagcactggttcagccattgtcaaaggagtggaacaaatgaagatttatgtatcatgcgatattgaaggattagcaggtattgcgacatttgatatggaaaaagaagacaccgttttattccgagaattatatcaccaacatgtggcttggttaattgaagggattcaaaagagtgccaaaaatgaacaaattacagaaattactattgccgattcgcatagccgtggattgaatttagcttatgcgcgcttggcagaaatggatgaacgaatttccttagtgagcggctttcctcgcatggattatatgatgagtggcttggatagtagctatgatgtggtctttttcttaggttatcatgccggtattggtaaacaaaaagggaatatggatcatgggtatagcgctagtgttgcttatgatttaaaaataaacgacttagcgatgaatgaaacgacaattaatgcagcttacgctagcgaattaggtgtccctgttggtttaattatcggtgaatcaggcttagaggaacaactttttcaagaaaaaatgatgcccgaagttccctttgtttccaccaaagaatttctgggacgttatgcaatcaaaaatagacccatgcaacaagttcgggaagctatagtagcaactacaagtcaggtgttaacttcctttgcgttgtctgaattaccccgatatgccttgcaaacacctgcaactgtaaaattgcaatgtgtgacgacagcacaagcagatcgtattgaaatgttaccaatgattaaacgcattgatggtagaactgtttcatttgtaggtgaaacgatgaaagatgtcatgaatggaattgtcgctgtggttggtttaggcggaacaagttattaa

SEQ ID NO: 1756 - DNA, 885 bp, Enterococcus faecalis
aggagtaatacgatgttttattcaattgaagatttggtagctcaagcgaaagattacccttctgtgagcgaattaatgattgcaacagaaatggctcatggcgggtattctcgtgaacgaattattgaaacaatggaaaaaaatctagccgttatgaaacaatccgtcgctgaaggaatcgctggtgttacctcagtaacagggctaactggtggcgatgcaacccgcttaaatgattacatacattcaggcaactttttaagcggtgagaccattttacaagccgtgcgaaatgcgattgctgttaatgaggttaatgcaaaaatgggcttgatttgtgctacaccaaccgcaggcagtgccggagtagtttctggcgtcttgttggcagttattgatcgcttaaagttaacgcatcaacaacaattggattttctatttacagctggggcttttggcttagtgattgccaataatgcctcaatcagtggtgccgaaggtggttgtcaagctgaagtcggttctgctagtgcaatggcaagtgccgctttagttgcggcttctggcggtacgcctgatcaatctgctcaagctgtggccattacgataaaaaatatgatgggcctcatttgtgatcctgttgcgggacttgttgaagtcccttgcgtgaagcgaaacgcattaggttcttctcaagccttcatctcagctgacatggctttagcggggattcgaagtgtcattccgccagatgaagtcatccacgcaatgtaccaagtgggacgccaaatgccacaaattttcaaggaaaccgctgaaggcggtcttgcggtgacaccaactgcacaacgtttaagcaaagaaattctagagaaacaaaaatag

SEQ ID NO: 1757 - DNA, 465 bp, Enterococcus faecalis
ggcggccttttaggcatggaaccagatgatgagcaactatccaattctttggaaattgcctatgaacaaggaatggaagtttgttttattcctaaaagtgaaaaagcagaccaccctaattccgttaaaattgtggtttcttctggcgaccgaaaactatctgtgacaggaatttcaattggtggtggaaacattcaaatttctgaattaaatggcttcaaattgtctttaagtatgggcacgccaacatttatcgttgttcatcaagatgttcctggcatgattgctaaggtgaccaacatcctttcagctagcgatatcaatattagtacaatgaccgttacccgagaatctaaaggggaaaaagcgattatgattattgaagttgatcaagccgaagtcggtgacattgtcatgcaattagctgaaatccctcatatatatagcgttaactattttgactaa

SEQ ID NO: 1758 - DNA, 225 bp, Enterococcus faecalis
atgactttgagtaagaaaagtggtttaactaatcgtcagataaaagaaatctgttcgaaatttaactgtagaaaaaatgaatttgcagttcaaaagtaccaagatagttttttattagctgtgaataataaagagtatcgtgttaaattttctgaggggattttttcaaagattatgtatattaaagaagtgcaacgcatttcaaagaaagtaggtagaaaatga

SEQ ID NO: 1759 - DNA, 1086 bp, Enterococcus faecalis
tgttgtagagggctgatgaaatgtttatcagtcttctttttattgaaaggagagatcatgaagaaattaggcaaggttttaattgttagttgttttatttttattcttccttttttattatttttaggtgtattttcttctagtgaaagcggagattcttcccagtttcagcccgctacaccacaggaaaaagtagcattagaagtttctaactacgtgacgtcacatggcggaacgttgcagtttgcttccgcttggattggcaatatggaacatgaaagtggattaaatcctgctagaattcaaagtgatttatcgtttaattcagcgatagcttttaatccttcgttaggcggttatggaattgggttaggacaatgggattcaggacgaagagttaatttattaaattttgcaaaaagtcaaaaaaaggaatggaaatcagtagctttacaaatggattttgcgtggaataaggatggttctgatagtgacttacttaaaagaatgtctaaatcaaaagatgtgaatacacttgcggtagatattttgaagctgtgggaacgagctggaacaaaagatgatcccgcagaacaagtaaaaagaaaggctagtgctaataattggtataaacgactttctacaggttccatgggcggaggttcagccaatgttggtggaggaaaaattgatgccttggaaaaagtgatggggcaaactattaatggtggtcaatgttatggcttatctgctttttttgttgaaaaacaaggaggtctacaaatgatgggtacggggcatatgtttgcgagtgaaattggtaatgattatccttggagttcaattggttggacagtcataaagaatccaaattattcagatattaaagcaggagatgtcattaattttggtcaaggtggtgtggctactagtatttatgggcatactggtgtagtggcaagtgttgaaggtaaaaacaagtttactacttatgagcaaaacgctgaacaaggtcaaattgttgctaagtattttcggacttggggattagattttccacatgtgaccagcatagtaaggaaatag

SEQ ID NO: 1760 - DNA, 234 bp, Enterococcus faecalis
aactgggaagaatctccgctttcactagaagaaaatacacctaaaaataataaaaaaggaagaataaaaataaaacaactaacaattaaaaccttgcctaatttcttcatgatctctcctttcaataaaaagaagactgataaacatttcatcagccctctacaacatcaaaattatattcttccgtattcacactaccaaaaaattgttcctctgtttgttctaaattattaa

SEQ ID NO: 1761 - DNA, 2061 bp, Enterococcus faecalis
gaaggaagtgagaagatgcagtatctaattgacagttatagtgcgtatacggttgatggtggtttgttggataaaggatggcaagtaatgaattggttctttgtagatataccattctttatcttacgaatgtttgcttcttttttccttttttgtgagaacgtcttaaaccaatctagtttctttgaaggaaaacaagaaacggtattgaatatgtcaaaagatgttttaagtggctttggtggcaagggatttagaggcggttctttacttgcattagcgattcttattagtgcatattatctgctttatcatttcttttccagtcgtagaagcttttcaaaagtattccttcattatttagcagttgttgttttgtttgttttttggtttggctctgtatcaacgtcaacaggcacaacaagtggctcaacgttcttgattcaatcaacaaacgcaattgctaaaggagtacaaagtacatttacttcaagtgctaatttaggaacagaaggatctaaagatggagaagtatatcaaagtccaatttttgatgcaacagtaaaacaaacatttaattttgtgaatagtggttctctagatgggaaaatggagaatggtaagaaattagatgaaagtaaactactagaaaagcctaaattgtctaaggaagagaaagaaaaatttgaaaaaaatagaaaaaaatatatagataaggtagttgatgataatccatacttcgcacaggacggagcaaaaacaatggaaaaagcttttggcgttggtgtgggtgtagtcaatttagcagtcttagcagtgcctgtcacgtatattaatattatgctcaatgtaattcaaatcattgttgatttactcattcttgtttttccgattattgcgttggtgtctttcttccctcggtgtcaaatgatgatgtttaaattttttaaatcattaattggcattttatttttacctgtagttttcggtatatttttgtctgtgttattttggatcaataagttaattgaccaagcgtttttaggattgatggataaagtaagtagtagtttattaatggtgatgtctggtggtgtttttcttttaggcacattaattgttactgcattggtgaaaattattttgtatcggaaaatttggaaaagcagatataaaatattatcattcttttctgatggccaagttcaacaaccttcttttgaatcaaaaatgaatgaaaaaacaaaagaaacggttgagcgtacaggtgaaattggtgttggagcagtaaaagcaggaataggtgcttccactggaaatttagcgttggctgctgatggtgctagtcatttaatgccaaagcatgacaaggcattgaacttagctaaagaccattttattgacgataatgggcaatttgctggtgttaaaacaggattgaattcattgttgaatcgttctactcaagaagaacaacaaccattaaaagatgatttattgccagaagaagaaattgtggaagtagaagagccaaccaatgttgataatgaggaactagaagaaatagaagataaagctttaactgatgaagtggataattttgaagatttaacagatgatgaaatggataattctttagaagaaattgatgttcctgtattagatgaaactgtatctgattctgatacttctttagctgatgaaagtaatattgagttagagccaattattgaaaatgaacttgatagtttagattcaagtgtagaatcaagtgaaaatgatagagaagagccaattcatgaagttgatgagcaagaaatagcggacaatttgaatgttacggtcgataattttgatgagttggcatttgctcgtgaagaacgtgcattttttgatggtggagaggatagcgagttaatcacaaacaataatgattcattaaataacgtgtattcattttaccaaacagaagaaaactttaataatttagaacaaacagaggaacaattttttggtagtgtgaatacggaagaatataattttgatgttgtagagggctga

SEQ ID NO: 1762 - DNA, 2040 bp, Enterococcus faecalis
cagaagattggggaaaaagattatcgagagcaagaattagaagtttaccaaaatctatctgaattgttaattgaacgattaacagaagatgaattgtattattaccaagcgtaccaattcttgaaaaatattcctcatgagcgacaagatgttctttctagtcaaaatttagataatttaatggcaacaaaaattaaaccattatttggcgggggattgcatttgaattgtgattatggcgaaagctatatatcctatcttccaatgggagatgtaggtgtttttcttgatggtaatcattttttagaggtcgttcaaaaaatgcctttcccagtcgaagtgaagattcaagcgacttttgcagaaagtaaagggcaattagcactgtctgggcgttcgtcacgtgcaagaacccgcactaagaatatcatgcaggaagcacacttagctggttctaaacaaaaacgaaagattgttgaaggtcaattatcactagacgatttagaccaaaaaattgatgatgatgtggatattattgactggaaagcagtgattgttgttagtggtagcacgaaaaaacaaatgcgtgcaagaaaaaaatatttaatcaatcgttttgatagtttagatattccacttattaaagcaacgtttgataatccttatttatttcaatccactttgtttggtaattttatccgcatgcagacttctcgttggcaacacacgtcaacgattgaatcgtttgccgagttgaatttctttacttcacttcatgcaggtacgaagttaggcttttaccttggacgagtggatacaactttggaagaaaaagaagatagaaaatctattatttctagttcaaaaaatctaatttttatgaacatgttactagcgaataaacaaaatgttgatggtaagaaaaccaataatccacactgggctttaactggagatactggaaacggaaaatcggttacagctaaaacattgtttatgcaaatggcacttttaaaagacagagtgttatacattgatccaaaaaaagaaatgcgaaagcaatttatgtatacaatcaatgatcctgaatatcaaaagaaatatcctttagatgttgattttgtgaagtcctttaatttcgtcactttagatgttcgtgacacgaaaaatcatggggtactggatccgattgttttgtttgatgaaacagaagcgattgcaacaactaaagcaatgttaaccaatatatacgaaggaacatggaatttaaagcaaaaaacagaaattaatgaagcgattgcgaaagttgttttggaacggaaagaaggcaaaaaggttgggttttggcatgtaattgagcgattagcggaaagtgaaatttctgacgtgaaagatatgggtagatttattttgtcgactgttaaaggttcagttttagaattagctttttctcatggtgatgttgagggtctatcattcgataagaaagtaacaattttagaaattgaggacttagacttaccaactgataaaaatgaaaatttagatgaaaataaacgtctttctgttacattgatgtttgctttaggaacgttttgttcgaagtttggttcaagaaatccaaaagaagaaacagtgacgttctttgatgaatcttggatttttcaatcttcgccagaaggtaaagcgattttaaaatcaatgaaacgtattggtcgttcgtttaataatttcttagtattgattacacaatcaacaaatgatttggatgatagtgaagatggtactggttttggtacagtgatttgttttgatgaagttcaaaatcgagaaggtgttttgaaatatctcaatttaccagtgaacgaaattaacatgaaatgggtctcaaatatggttcaaggtcagtgtttaatgaaagatatgtttggtcagattaatcgaattgttgttcatgtgatttttgaggaatggttggaactgttcaaaaccgttgatgatacagaagcttctaaaatggagaaccggtttgttgcatag

SEQ ID NO: 1763 - DNA, 555 bp, Enterococcus faecalis
aataaaatcaataagaaaggaaaaaatatgcaattagaatatccattaacgaatcatatgaaaggaaatattgttttaacacaagaaaaaacagcgatagcttactatcgtgttcgctctgaaactgtaatgttgactgatgttgaaaagaaattaaaaacgaaaaggaaagtttctcgtgcgttaaatcgtttaaaagctaatgatggatttgaaattaaccttttgccagttaatgccgacattcgaagaaaaatgggtgctatgcgttctttaattgattctaataattatgaagtaggcgtagataaattgatgaaaacggcaatggttttagaacaagaaatgggcatggtttacgaatatacatgggtaattggtgtacctttaatcaagaaagacttggctgttgatttaaaagaaaccgttactaactcaattagtaacgtatcggaaaagtttgtcaaaggcttaggttttgatgtagaactagcagaagattggggaaaaagattatcgagagcaagaattagaagtttaccaaaatctatctga

SEQ ID NO: 1764 - DNA, 252 bp, Enterococcus faecalis
cttttaaataataattggaaagaaggaaagtgtatgaagaaaaaagtttttttagctttaactattttcgcaatggtaacaccttttatttttagttcagaagctagtgccagagaagctgaatttggtagctcttgccctggtggtttttattttaaaaaaggtggttggtctacaggtggaaaaaatatgagcggtggttattgtgttcctttaggaaatatgggaaatatgaataacaaaatttggtaa

SEQ ID NO: 1765 - DNA, 327 bp, Enterococcus faecalis
caaaatttggtaattaaaatgagaaaagaaaatgttatcaaatcctttttatacattttaactcctataatcataggtaccattatttcacttttcaccaacgctcctattttccttatagcgggaattatatatattattttattactgtttttacttcctactttagactttggaattactgattttaacgccaaacaaattaatcctagctatagacctgaaaggaaaataaataaaaatgaaagtattgttactgtgctacttttagtcatcggaataatagtctgtgcagtcatgctttatttaaaatataaaaattcataa

SEQ ID NO: 1766 - DNA, 405 bp, Enterococcus faecalis
gatgtaggtgagtatatgaaatattacgattattcgaggggcttaaaagccccttattcaatgcaagttattaagtcgcctaaaggacaagtggtgtgggtatttgcacaacctgttagcctatcctatctcctaattctattcttagggattgtgttaactggtttgttttggaaagaagtaccattaccacaaattttaggaattaacttaaatttgttaatcatggttttggtgccgaataaagttgctcgttggtattccgaaaaggaattcgaaggaaaaacaggctttggttttttaaaagatggttttgtctatgtgaaaaattatgtgttagatagtagaccaattgtagctttcgaacgagtaaaagaaatagaagagttttcatttaaacgttag

SEQ ID NO: 1767 - DNA, 228 bp, Enterococcus faecalis
ctaatgaatacaggaaatttgagtaattttttaagtacaagttttattacaattatggcggctggtgtaattattttgattctaaaacactggaaaggtgctgaatgggcaaaaattggttcagtaattgtcattgccttaatcttacaggactttgcaacgaatcaaggaaaaaatatttttgcggttgttaaatggttcttaagtttagttggaattaagatgtag

SEQ ID NO: 1768 - DNA, 1116 bp, Enterococcus faecalis
aagacgactagtggcttttacaagaaggtaagaggggagtatgaaaatatgggaaaagaatatcatgttgccgtggtaggagcaacaggtgctgtcgggacaagaatgattgaattgttagcagaaacaagtttgccaattgccagtgtgaggttattggcgtctaagcgttctgctggacaagagattcagtttaaagggcaacctcttatcgtggaagaattagtcccggaatcatttgaaggaatcgatttagcattatttagtgctggtgggagtatttccgaaaagtttgcaccagaagcagttaagcgcggagctgtcgttgttgacaacactagccattttagaatggcaaaagatgttcctttagttgttccggaagtgaacccggaagccttgaaaaatcatcagggaatcatcgcaaatcccaattgttctacgattcaaatgatggtggccttagaaccaattcggcaagcgtttggcttagaacgaatcatcgtttcaacgtatcaagctgtgagtggcgcaggtatccgtgcaattaatgagctaaaagaacaagccgaagattttttagagggaaaacctgtcagcgaatggtcagctgaaattttaccagctggcagtgacgaaaaacattatccaattgcttttaatgcgttgcctcaaattgatgttttttcagaagcagggtatacctacgaagaatggaaaatgatgaatgaaacaaaaaaaatcatgggagacaacaagctaaaagtcgttgccacctgtgtccgtattccggtaatttcaggacattctgaatctgtttatatagaagtgaaacaagcagatgcatcggtctcagccatccaagaattaatggcgcaagctccaggtgtaattttgcaagatgagccaagtgaacaactatatccacaagcgctaaatagcgtcaaccagaaagaaacatttgtcggccgtattcgtcaagacgttgacgtgaagaacggtttccatttatggattgtgtcagacaacctattaaaaggagctgcttggaactcggtccaaattgctgaaacgctacacgaaatgaatttgcttcgtgtacctgaaaacgactag

SEQ ID NO: 1769 - DNA, 906 bp, Enterococcus faecalis
aaggtttgtattgtatactcgggagggaatatgatggatttaacgaatgcaacaattattacggcaatggttacgccgtttcaagaatcgggagaaatagattttgataaactaccgcaattggtagactatttattggccaatcatacagaaggcgttattttagcaggaacaactggtgaatcacccacgttaactcatgaagaagaattacaattattccagcgaattattgaactgatcgatggacgtattccgattatttgtggtgtaggtacgaatgatacacgtgactcagtcgcttttgtgaaagagttagcgacaatcgctggtatcgatgctgttttggcggttgttccttattataataaaccaaatcaagaaggtatgtatcaacattttaaaaccatcgcagaagcaagtgaactgccaattattttgtacaatgttcctggtagaacggctgcatgtctagaagtggaaactactttgcgcttagcacaattggaaaaaattgtggcaattaaagaatgtgcagggttagatgcaattactgagttgattgaaagagcgccaaaagactttctagtgtatactggagaagacgggttggcttttgccaccaaggcacttggcggacaaggggttatttcggtagccagtcatgtcttcggttcgtcaatgtatgagatgtatcaagcgctggagcaggggaacttgccggaagcggctaaaattcaacgacagttattaccaaaaatgaacgcattgttttcagtgccttcgccggcacccgtgaaagcggccttaaatcatttaggtattcctgttggaaatttacgtttacctctagttgcttgtacaccagaagaagagcaaagaattattcgcacgttagagatttaa

SEQ ID NO: 1770 - DNA, 1719 bp, Enterococcus faecalis
agaacgtgtaatcatagagaggtgaaaagagtgagtacaataaaaatcgttccattaggcggcgttcgtgaaaatggaaaaaatatgtacgttgctgaagtggaagatgaaatttttgtactggattgtggattacaatatccagagaacgaacttttaggaattgacgtcgtcattccggattttacgtatttagaagaaaatagtgaacgaattgcaggggtctttttaacacatggccatgctgatgcaattggggccttaccgtatttgctttcaaaaattcaagtgcctgtttttgggacagaattaacgattgaactagcaaaactaagtgtcaacagtcatgcggaaacgaagaaatttaaagatttccatgtgattgacccgcatacagaaattgattttggtcaagcaacggtgagcttctttaaaacaacgcacaccattccagattcgattggcgttagcatcaaaacaaaagaaggcaacattgtttatactggtgattttaaatttgatcaaagtgcgattgagatgtatcaaaccgattatggccgcttggctgaaattgggaaagaaggcgtcttggcgctacttagtgattcatcaaatgctgaaaacccagcccaagttgcatcggaagcccaaatcgctgatgaagtgttcgacacgattcgctattgggaaggacgaatcatcgtggcatgtgtggcaagtaatttgcaacgggtccaacaagtattgaatgcagcggatcgttctggtcgtaaagtcgttttgacaggccaagattttgaacggattattcggacggcgatgaaattggaaaaattacaattgccaagtgaagatctattagtgaaaccaaaagaaatgaaaaaatatgcacccgaacagttattaattttagaaacaggccggatgggagaacctattaagtcacttcaaaaaatggctaataatacacatggtgtcgttcgaattgaagaaggcgatttagtttatattacgacaacgccgacaacggccatggaaacaacggttgccaaaacagaggatattgtctatcgggccggtgctacggtgaagcaaatttccgacaatttacgtgtgtctggtcacgctaatccgaatgacttgcaattgatgctgaacttaatgaaaccaaaatatttcattcctgtccaaggtgaataccgccagttagctgcgcatgcggacttagcacacgaaattggcatgccttataaagatatctttattacaggtcgtggggacattctagagtatacaaaaggtagaatgtcggtagctggcagcacaacggccgaaaatattatgattgacgggattggtgtcggcgatattggtaatatcgttttacgggatcgtcgtattctttccgaagatggtatttttgtggctgttgtgacaattaatcgtcgagaaaaacgaattgtttcaccagctaaaattacttctagaggttttgtttacgttaaaacaagtaaagacctaatgaaagaaagtagcaatattgttacagaaattgttgaaaagcatttagaaagtgacgatttcgaatggagcaaactgaaacaagaaatccgcgaaaacttaagccgttatttatttgaacaaaccaaacgtcgtcctgtgatcttaccagttatcatggaagcgacgcaacgcaagcgtcccaaaaataacgcatag

SEQ ID NO: 1771 - DNA, 1398 bp, Enterococcus faecalis
ataaaggaggcgattttagtggaagagattgtgttgttccataccaatgatcttcattctcactttgaaaattggcccaaaatacggcgtctggttaaagccaaacgttcgctgtaccaaaaagagggcaaaacagtcgtaaccattgatttaggtgacttttcagatcggtgtcatcctttgaccgaagcaacagatggtcgagcaaatgtagctataatgaatacattagcgtatgacctggttacaattggaaataatgaaggaatcggcaattcaaagaaacaattagagcatttatatgatcaggcaacatttgaagtggtcttagctaatttagaagaaccaaaaacccaaacgttaccagatttttgtcaagcatataaaattatgacaactaaagaaggcacaaagttagggtttattggcttaaccgcaccatttcctttaacgtataatcccaatggctggacaatcaaacaagtggaagcagtccttcctcaactgattacagaagttgcgcctcaatgtgatgttctcattttgcttagtcacttggggatagatactgattttatgattgcggcgaattatcctgaaattcaagtgattttaggttcccatacacatcatttatttaaagatggtgaaaaaattaatcatgtgcaactagcagctgctggcaaatatggacagtatattggtgaagtgcatctgtttgtggatgccgacacgaagcaagtcacaagttatgcgaaaaccattgaaacagcaagtttagaagagcaagcaacggatgccaaggaaattgcgggttacttaacggaaggtcatcgactattgcaagcgcagcaaattgcacaaatccctgaaaccttgtcaacggacttacggcaaccgcatgcctttataactgttgccttgaaggcgttaaaagaagcggggcagaccgaagcggctgtgttgaacaacgggttatttttagcagatttaccagaaggaataatcaatgcagaccaattacatgaggccttgcctcatccaatgcatttaatcaaggttaccttgaaagggtcagacatgagccgtttgattcgtgaaatggaaaaaagtcgtcaatttctgcggaaatttccgattcgcgggatgggcttccgcgggaaaatttttggcgaattatgttatgatgggattcgttttgagccaaatagccagaccgttttttggcaagggaaacctattcagccagagcagaagtatacgctgacaacagtggatcactttcaatttgttccgtttttcccaacgattgagttagttggagaagtcgaatttttatttccagacgttttaagaactgtcgtggcgaactatctgcatggtcttcaccacgggatt

SEQ ID NO: 1772 - DNA, 1950 bp, Enterococcus faecalis
cgtatcattaacttacaaggcgcatttgtacaaaaacagtgtgcaaatgcgcaagtaagtaataggagaggatttttacgaatgaaaagaaagaaaatcaagaatcaactacttgttttaacaagtattctcgttcttctgagtttggcagtcgctccagttgttacgttggctgcagaattaccaagtagctcgctacaaacagctctgtcctcggaaacgacaattacttcggaagaaaaagtaaccgaaacaaccgaaacaactgttgctacatcgacaacgtccactagtagttcgtcatctgaatcaagtagttctaccgatacgactaccgaatcaacgagtcagtcaacgacagaaacgacaaccacaaatactagttctgaaacaaaaaaagaacctacagagccaacggtatcatcagaaatcacgcagcctgttgaacaatcgcaactaccacaagttcctgtgaccaagcaagaacccgaagaacctattcaagttcctgaagccaacaataactttgttgaagaaaatcaggctgtatcgttaaatccgtccctcaaagtagatgaaatagcttcttcaaatttaaaaggctacgaacttccactgttgtcgtcttttggcgaaaagaaacgggcagtcgtggtcgctgaagcattaagacacgttgggaaaacaaaaaaagaatttaatttgacggagcaagcattgaccagtagtttccttgcccaaaaaatttaccaacaattatttaaaatagacattggcagtacgccgcaagaacaaatgacatttggtaaagttcgttctatagaggaggcagaacctggtgatctgattttttggcaaacagctgaaggaaaaacgcttcaaaatggtgtttatcttggccaaggaaaatatttaattgccgcagcggaatcggattctaaagagaaaccagaagtaatcgctcagttagagaatatctatactgccaaacaacaaccagactcaaaagaggaaaaacgcttggtagtgactaatccttttaaggagttcatattaacggagtatggcaaagaagttttagcaacatatggtgcgtcatttgaaatgcagaagtcagaacaaaccacagcgtttattaaaaaaattggtgagacagccagagaacttggcgaaaaatacgatgtttttgcatcagtaatgatagctcaggctattttagaaagtggctctggcgaaagtcaactagccaaagaaccttattataatctctttggcgtgaaaggttcgttccaaggaaatagtgttagcttttcaacaaaagaggctgatcagaggggccaactttatacaatttccgctgggtttcgcgattacggtggctataatgactcactgcaagattatgttcaattactccgacaagggattgacggaaatcaagatttttataaaccagcgtggcgttcggaagccaaaaactaccttcaagcaacgcgttttttaacaggtaaatatgcaacagacaagcaatacgataataaattaaattcgttaattgcggtttataacttaacccaatttgatttaccaaaaacagtggacggtttgattatccaatctaaaaataagctgtcggaagcggaacaccaacaaatgcattttccagtctatgatgggatcaattataatcgaactggtagctatcccgtggcccaatgtacgtggtatgtctataatcgtttcaaacagttgggcacttctgtggatgaatttatgggaaatggcagtgacttgggaagaaaaggacgtgcattaggctatcaagttagttcattgcctaaagctggtcgtgcgattagtttccaaccaggagttgctggcgcagataatcaatatggacatgttccttttgttgaagatgtgacatcgtccttcaccaaacggggaaag

SEQ ID NO: 1773 - DNA, 5400 bp, Enterococcus faecalis
  misc_feature (30)..(30): Nucleotide 30 is "n" wherein "n" = any nucleotide.
agaggacacgtgtcattacgtatgcttctnggaaaaaaagcacaaattagtattttaaacgaccatctttttcgctatcatctagatccaactggtaaatttgaagaatatccaacgccaaatgatccaaagcatgttgcgaaaattacggctaaaacaatggccgactatggtacacaagcctttgagcaaacgaacgtcacagattcaggaaaccaatttattctagaaaataatggtttaaaaattatgttcgaaaaagaaagcgctttaatgaaggttctagacaagaaaaagaatcaagttattttagaagaaaccgctccgctatcctttaaaaatgataaagctacacaaacgttaaaacaaagtagtcaagaaaattattttggcggaggaactcaaaatggtcgatttacgcataaaggaacagctatccagattgtcaatacgaacaattgggtagatggcggagtagcatcgcctaacccattttattggtcaactgcagggtatggcgttgttcgaaatacatggaaacctggcaactatgattttggaagtcatgatccacaaaaaaccacaacaacgcacgaaggaacagatttggatgctttttatttctttagtgattcctcagcaggtattttaaaagattactatgaattaactgggaaaccagctttgatgccagaatacgggttctatgaagcgcatttaaacgcgtataatcgggactattgggtgaaagtagcagaaggaaccgcgggagcagttaagtttgaagatggtaatttttacaaagaataccaaccaggcgatctaggaaacttaaatggcacgctagaatctttaaatggagaaaaagagaattatcaattttctgcacgcgcagttattgatcgatataagaaaaacgatatgccgttagggtggttcttgccaaatgacggctacggtgctggctatggccaaacagattcattggacggcgatgtacaaaacttaaaagaatttacagagtatgctcaagccaatggtgttgaagtggggctgtggactcaatctaatctccatccagcggatcctaaaaatcctaaaaaaggagaacgggatattgcgaaagaagttagtgtcgctggtgttaaagctctcaaaactgacgtggcgtgggtcgggtatgggtattcctttggcttaaatggtgtagaagatgccgcgaatgtttttgtaaaagaaacagacggcgcagttcgtccgatgattgtttcattagatggttgggccggaacccaacggcacgctggtatttggacaggcgatcaaacgggtggtcaatgggaatatattcgcttccatatcccaacatatatcgggacttcgttgtctggacaaccaaatgtcggttcagatatggatggaatttttggtggaaaaaataaagagatcaacatacgtgatttccaatggaaaacttttacaccagtgcagctaaatatggacggctggggctccaatccaaaaacgccatttgcttttgatcaagaagccacagatttgaaccgagcgtatctaaaattaaaatcaatgatgatgccttataactacagtattgccaaggaatcagttgatggactaccaatggtacgggccatggctttagaatttcctaatgaaggaacagcatatacaaaagattctcaataccaatatatgtggggaccaaatttactcgttgccccaatttataatggcaatcaagatgaggcaggaaattcaatccgtgatggaatctacttaccagatgaaaaacaagtctgggttgacttatttacaggcgaaaaatatcaaggtggccgtgtcttaaatggagtaaaaacaccgctgtggaaggtgcccgttttcgtcaaagatggcagtattatcccaatgacgaatccaaacaacaatccaaaggaaatccaacgagatcaacgatctttcttgatttatccaaatggcaccacttcttttaatatgtatgaagatgacggaatttcaactagttatgaagctgggcaatcagctacgactaaaataaatagtcaaggccctaaatcaaacgaaaaaggggatctgaccgttactatcgaaccgacaaaaggaagttataaagactttgttgatgaacgaagcaccaggcttgatttgctagcttcagaagcgcccgaaagcgtaacagcaatggtgggggggacagaagtaaccttgaaacaagcagctaataaagaagaatttttagctggcacaaatctatattattttgataaagaattccaagtgaatcagtatctttctgaagcttcaggagaaaaactgaaccaatcagcgttatcagtaaaactagcgaaacaatctgtgaccgccaaagatgttcaaataactgtcaaaggtttcattaataaaggaacggttgacggaggaaatacaacggtcgatgaccagttaactattccggcaaatgtcgcaatcaatgaagaaaaaacaacgccatcttctttgactcttcaatgggatcaagtaactgaggcaacaagctatgaagtagagcgtgacgggactgttttcggaaatattcaaacgaatacagcaacatttgatggattttccttcctaagcgaacatacttttcgagttcgagctgttggaaaaaacggggtctctgaatggagtgaaccgattaaaggaaaaacacaagatgatccctataaagaaacaattaatcaagtcaaagcaacaagtaatttaccagaacaaccaggcgcagaattgaagaaattaacagataaagatttgagtacaggttggcatacgaactggtcaacaggcatcgctaatccaagtgatggaaatttcttgtctttaaaatttgatcttggtgcggagtatcaaatggataaaattgaatacttgccaagagacaatgccggcaacggaaatattttgcagctccagtatcggacgtcgaaagatggagctaattggacagagttttcagaacctattaactggaagcaagatgctttgacaaaaaccattgaaacgaaggaccaagcgtatcgttttgttgaaatgaaggtattaaaatcggtgggtaattttggctctggtcgtgagatgctcttttacaaacaaccaggaacagaaggaatcttacatggagacattactaacgatggaacgattgatgaaaatgatgcaatgagttatcgaaactatacaggcttagaatctgtggacagtgactttaatggctatgttgaaaaaggtgatttaaataaaaatggggtaattgatgcttatgatatcagttatgttttacgacaattagatggtgggattgagatacctgatgtcgaagaaattgcgggcggtttatcccttgctgtggttaatgaaaatggcaaggatacttatcttcctggcgatacattaacctttatacttaaaggtcaagacttaaaaaacattaatgcgttaagcacaaaaatgtcctttgattctagcaaatttgaacttgtcggtcagcctgcaaccacgaataatacacaacaaatggaaaattattctaaatatcggaaacattcaaatgatgtggagaatctatatttagttcttagtaatcaaggaaataaacaattgttaaatggttcaatggacttagttacctttaaagttaaagtaaaagaaacaactcgcgtaaaacgtgcgacaactgttgagcagccattacaatttgatatgagtcaaggcttattagtaggccaaggattccaacaagccacactttcagatttttctgtaacagtgaagcccacagagctagtagataaagagttattacaagcgctaattacgctaaatcaagcacgtgtcgaaaaagaatatacgcctgaaacttgggcaatctttaaaccaatcttagatgaggcagtagctgttctagccaatgaacaagccacacagacagacgtttctgctgccgcggaaaacctagaaaaggctgcaagtcagttggaaaaaatgcctgatgtagcgaataaagctgatttagaaaaagcaattcaagaggggctagcgaagaaaccaagtgatgggcaagaattcaccgaagaaactaaaaaagttctcgaagagtcattagcagcagctcaaaaagtatttgctcaagaaaaagttactcaagaagaaatagaccaagcgactaaaacattgcgtgaagcaattgcacaattaaaagaacaacccgtcgccgttgataaggaaaccttaaaagagcaaatcgctcaagcccgaggaagaaagccggaagaaggataccaatttacaaaagaaacagaaaaacaattgcaagaagcaattcaagcggctgaagcaatcgtagcgaaagaaacggcgacaaaagaagaagtctcagaggctctaaacgcattggaaactgcaatggctcaattaaaagaagtaccccttgtaaataaagaccaattacaagaagtagtcaaacgagcgcagcaagtcactccaagtgaagggcaccaatttactgcctcctcgttacaagagttacaaaaagcgcttttagcagctaaaaacacattgaaaaacccagcagctaatcaaaaaatgattgatgaagcggttgctgaattaactagtgccatcgatgggttacaagaagaagtgttagttacagataaaaaagccttagaggcaatgatagccaaagcaaaagcaatcaaaccatctgccggaaaagaatttaccagcgagtctaaagcgcgcttaactgaagcaattgaccaagcggaagggattttagctgataaaaatgctcggcaagaacaaattgatattgctgaaaaaaatgtaaaaactgctttggatagtttagaggaacaagtccttcaaacggataaaacaaagttgaaagaactgcttcaaaaagcagaaaccttgaaacctaaagcaggaaaacaatttacaaaagcatcgcaagaagctttagctgaagcaattaaacaagcaaaagcacttgttgaggacccaaatgcgacgcaagaagctgtggacaaatgtttaagtattttatcacaagccattgaagcaatggcagaagagccaatcagtagcaactctacaggcaacaatggaaatcatagcacggttagcggtactggtggtgtaaccagccaaggaaagggcacagcaacaggtggaacgacaacgaaaaccaccacttctggtactttgccaaaagcaaatgaagttgtttcgccaatctggtcaatcagtggttttctattgatagtaagtattggtttaggaaaattattcttcaaaaataaaaaagagcaaaattag

SEQ ID NO: 1774 - DNA, 624 bp, Enterococcus faecalis
gttctgggaaaaacgcctgtttcagttgaactaaaaattggagggctgcctggtgatgaatcggttgacgatgccattgatcctgatttagaaaatcctaacactagttttgacttgctctttattccgaaagaatttacttttgaaacccaagcgatttctggtgatttaacggcagttcctatacgaccttctgaaggcaatactcatacaatgagacacttcgggatgggggatgttcgcggagccttaactggttggcatgtcactgctgaaatcccacacatgcgaaacgaagctcattctttactaggcatcattacgtttcaattaacaggcagctatgctcgctatgacaaaacgttaaggcgtttctttatgacaaatacaatgtatggactggatttttcagaagatcctgctgcacccgacttcccgaccaacccaattattatcggtaacggtgcgactttaatgagtaacgctggtgatagaaaaggacaaggaatgtggagcggccgcatgaccgatatttctcttgcaatccaaacccctgtttcacaattatttcctggcgcatatacaggttcgattatctggaatttaatctctggacctgtataa

SEQ ID NO: 1775 - DNA, 1128 bp, Enterococcus faecalis
tatcctttttataataagcaaataacaattggaaaggatggcgtaatggacacactttatagaagttggcaattgtctggttggctctatcatgatatttttgttatcattgtagcaattatttttatagtaattagtggtattttggttatttccttaataagaaggcggagtacaaggagactggttccctatgcgttaattttattggtttatcttgcagtggtacattttgctggtttaatctttttcggaatgtttcgttcagtaacgattgaagagaaaagtgcgacgttttattctgaaaaaacaaaaggcttaacttcaatcgagcgaatgattattccaaatggacgaacgaatggcattagcaccagtaactcattgttccaagtgatttctgttaatagtcagacgggcgaacgaatgtggagtaaacgtttaggttggcgtgattatttaattggtcaaacagatcaatatgtggttttgaataatgctgataacgaggccatttacttactagatacaaaaacagggaaaaaacagttttctgaagcagatttagtgaagaaattccctgaattaaaagactatttaagctctgatttcgttgattatcgttttatggataatcgctatctctatatttatggattaaacaatcgatattatcaattagatttgaaaaattggcagttaaaacaagacccaactttcaaagaagtctttcaaacacaagaagcgcctaaatggacggtagattcaaatgagagtcaaattggtcaagagctgtcatcggaagagcgtacaacagtgcaaggaaaactagaagagcaactaatagcaccagttttattaggcaagaaagatgaagcaaattattatgttctgtcatacaagaaaagacaaagtaatcaagcgatagttggcttatacaattggcagaaaaaaacatacgagtggcaaacaccgttgcttttaactaaagaaaatgtacctattgaagcttttcaagtagaggatgcgttattcattaaagtcccgcgttatttatacaaaattaacctgaataatggtaatcaagagtatcagtttgattaccgttggggccaagtgattcgttaa

SEQ ID NO: 1776 - DNA, 744 bp, Enterococcus faecalis
aacattgttaccagatcaactttattaggagatggaaaaatgagcgaacaatatgtttatcaacatggtacgctaggcggtttaatggaaagtttgatggcaggaacggcagaaattggtacgttactcacgcaaggtgattttggaattgggacattagaaggctcaaatggcgaaattattttattggacggtacattgtatcatgcaaatcaaactggcgaaattactattctagaaggcgaagaattaacgccatatgccgcagttactcgttttcaagaagatggcgcattccctgtatcaacggaaaccgatgaaaatattaaagcacaaattttagaaaaaattagtcctaatttttttgcggcaattaaaattagcggtctttttgcgaagatgcatgtccgtgtggcacctaaacaagaaaaaccgtatccaccatttgtagaagcagcacgcaatcaacctgaatttacagcggagaatattcagggaacagttgtagggttctttacacctaaattatttcatggtgcctctgccgcagggtttcatttgcactttatcagtgaggatcaccaatttggtgggcacattcttgattttggcattaaacaagggactgtttcgtggatggaaacagcagaattgcgacagcattttccagttcatgatgctgattatcggaataaagaaattgatattgcaaaagctttgtccgcaattgaagaagcggaataa

SEQ ID NO: 1777 - DNA, 1683 bp, Enterococcus faecalis
ttagtacagattttaattggaggtataacagtgagtaaaaaaggatcagatatcatagtagaaagtttaatcaatcacgaagtgccctatatttttgggattcccggtgcaaaaattgatggggtttttgatgcattagttgacaaaggtccagaattaattttagctcgacatgaacaaaacgctgcctttatggcacaagggattggtcgtttgacgggagagcctggcttagttattgcaactagtggacctggtgccagcaatttagcaactgggttagtaactgcgactgcagaaggggaccctgttttagcattggctggacaggtgaaacggtccgatttgtcaaaattaactcaccaaagcatgaataatgctgcattatttagtccaataacaaaattcagtacagaaattcaagatccagaaacattatctgaaaatattgccaatgcttaccgtatcgccaaaacagcgaaaaaaggcgcaacattcttatcgatcccacaagatgtcacagatagtccggtgacaggcgaagcaattaagcctttgtcggctccgaaactgggccatgcatcagcaggaacaatcgcagctttagctgaacgaatcaagcaagcgaaattacctgttttacttttaggaatgcgggcctctgcacgaaaagttaccgcagccattcgtgaattggttgctataactggtttgccagtcgtggaaacgttccaaggagcaggcattatttcaaaagaattagaagaacatttctttgggcgtgttggtttatttcgaaaccaacctggggaccgtttgttaaaaagaagtgatttagtgattgcgattggttatgacccaattgaatatgaggcacgtaattggaacgcagaaaaagatgcgcgcgttattgttattgatgaagttcaaatggaaattgatcaatatatgcaaccggaagaagagctaattggtgatatgtctaaaaatattttgaaattatcagaagcatttagtgaaccaatattaacagaagatgcgcaagattatttagaaacgcttcaagaaaaattaacgattaaagaagtaaaaacaagtacaattgaaaatcgattacatccattagaaattgttcaaacgcttcaagaaaaaaccacgaatgaaatgacagttactgttgacgtagggagtcactacatttggatggctcgccactttagaagttatgaaccgcgtcatttattatttagtaacggcatgcaaacattaggtgtcgctttgccttgggcaatctcagctgcactagttcgtccaaatacacaaattatctctgtttctggggacggcggtttcctattttcggcgcaagaattagaaacagcggttcgtttaaagcaaaatatcgtgcatattatttggaatgatggtagttatgatatggttaaattccaagaagaaatgaaatataatcgatcctctggcgtagattttggtccagttgattttgtgaagtatgctgaagcttttggagccaaaggggttcgagttcattcacaagcagaatttgccgcagctttagaagaaggaatgcaaacagaaggcccagtgattattgatgttcctgtggattattcagataatcaagaattaggtaaaacattgttaccagatcaactttattag

SEQ ID NO: 1778 - DNA, 480 bp, Enterococcus faecalis
cctataagaaaaaaatcacaacctgtgataaattattggaggaaaaatatgtcaaaagggaagaaaatttttgccattatctttggaattatcttggttctatttcttgcagttgttggaatgggagcaaaactttattgggatgtttctaaatcaatggataaaacctatgaaacagtagaacgatctaaaaaaagtcaggtcaatttaaacaataaggagcctttttctgttttattattagggattgatacaggcgatgatgggcgtgtcgagcaaggtcgttcggatacaacaattgttgcaacagttaatcctcgtgacaagcaaacaaccttagtcagtcttgctcgcgatacctatgttgatattccaggtcaaggaaaacaagataaattgaatcacgcctatgcttttggtggcgcatctttagcaatggacacagttgaaaactatttaaacagtgtccaccaagggtaa

SEQ ID NO: 1779 - DNA, 534 bp, Enterococcus faecalis
  misc_feature (421)..(421): Nucleotide 421 is "n" wherein "n" = any nucleotide.
gagactaattgtcacgctactgtaaaatgcgcagaaggtgggttagatcctttgaaaacgatgttggtagtgatgagtaatgccgaaaatgcggggggattagttttatcagcatcgccaatggcaaaaaaagttttaggtgtttcaaatgttacgcgtaaaaatcaagtgcccgctcatcctgatttatatgtggttccgccacgaatgaatttgtacatgaaaaaaaatcaagaaatcaataatttatataaaaagtttgtcgcagatgaagatcactctgtgtttagtgtagatgaatcatttcttgatgtaactgcttctttaagttattttcattgtgaaactgcctataaaatggctcggattatccaaagagtcgtttataatcatgtgggtatttatgtgaccgttgggatangggacaatccgttactggctaaattggcgttggacaatggcgccaaacattcgccagattttattgcagaatggcggtatgatcgtgtaccagatactgtctggcagttgcct

SEQ ID NO: 1780 - DNA, 324 bp, Enterococcus faecalis
tgccaacctgtggtgaagaacggcttggtatttagaaatagtgcagaaatggttgaaaatagcccagaagcttacgaaaaattactattagatgcgttgaatggtgatggaacgaacttctctcattgggaagaagtcgctcaatcttggcatatcgtggatgtcattcgaaaagcttgggaccaaacacaaccggattttcccaactacaaagctggatcaatgggacctaaagcagctttcgaactacttgaaaaagacggattcgaatggatctggcaaccagataactggtatcgtgaacgtggaaaattaaacgattga

SEQ ID NO: 1781 - DNA, 462 bp, Enterococcus faecalis
gcgagtttcctgtttatgaagagtttgcaaacccagaaggaattgatggatacctggactgctttcatggacttccgtgataatgtcttaaaagcattggaagaagcaagaaacagcaaattgattggtaaatctttggaagcaaaactaactgtttatccaaaacaacaagttcgtgaaatgttaaaagctttggatgcagatattgcacaattattgatcgtttcaccagactactttgaagttatggcagcagatgaacaagtgccagataacgctatggtatttgatgatgttgctattacagtggaaaaagcagacggggaaacttgcgatcgctgtcgccaagttcgtaaagatgtaggagtagatgaaaaacttcctcatctatgcggtcgttgtgcaaaaatcgttgaagacttctatcctgaagctgtagctgaaggattcgaagaaaagtaa

SEQ ID NO: 1782 - DNA, 381 bp, Enterococcus faecalis
actttcagaaaaaaagatcctttcctgattttgttgtttttaggtttcagttttctttttactttccacaccatgatcaacagctttttggcacagatctttgaaaatatccacggtggcagtaaagaagttggcatcgcattgatgatcgccgctttatgcgaattaccgggaatgatcttttttgaacagcttgtcaaaaaagaaatccagcaaattttggctgtctgttgccagtatttcatttactgtcagaggattcatgatgctactggccagttcgatcctgatgatggaaatgacgcatctcctacaagccttcagtttcgctttgtttattccagcttcggcttatttgttcaatcaatttctggcggatga

SEQ ID NO: 1783 - DNA, 417 bp, Enterococcus faecalis
tcttttttgaacagcttgtcaaaaaagaaatccagcaaattttggctgtctgttgccagtatttcatttactgtcagaggattcatgatgctactggccagttcgatcctgatgatggaaatgacgcatctcctacaagccttcagtttcgctttgtttattccagcttcggcttatttgttcaatcaatttctggcggatgatgatcgtgtatttggacaaacgatgatcatcatcgccacaactcttggtggggtgataggaaatgtcttgggcggcagtctgctgcagcatttcggtgtatgggagatgctgattttcggtactggttttgcggtgctgggtgctttattaactattttgggcattcgaaaaataccgaagttatctgaggatagcggagacattactaaataa

SEQ ID NO: 1784 - DNA, 576 bp, Enterococcus faecalis
ttaggaggctgcaaaatgaaaaaagaggatcgccgcgtcttaaaaacagaaaaagcgttagcagaagcattatcaaaattattagtagataaaaaaattcaagacatcaccatccgtgaactgaccgaaactgctgatcttcaccgttcgacattttatacacattatacggatatctatgatctttatgaaaaactggaaaatagctttttccaagacttggatgaaatcatttcctacgatacgacacatagctacgaggatctatacgctcatttgatcgactatgtctatacgaatacgttcgtatacaagttattcgtcatcaaccacggagatatccaatttcaaaagagattaaataatctgatcgaagaaaattatttaaaaatctggctacaagaagacaaaaaaaccgtgatcacagaagaaatgcgttacttcaccatctaccatatccaagggtgcctctccgttttaaatcattgggtagaaagcaattttgcatactctaagaaaaaaatgctgaccttcttgcgcttattgaacgacaacatagaacctatcatgccttaa

SEQ ID NO: 1785 - DNA, 252 bp, Enterococcus faecalis
gtgatggaattagcctttaagcaactggaaaagaaagactacaaaaaagccattcaattcgcgattaaaggtatgcactttgattggtataccaagaacaaactccttttgaatctttatggaagatacttttggtatctagaattgaatcgcgcgacacaaatcattgctttatatgcggatgatgagctggcaggtgttttattagcagacatcaaaggaaaatcaaaaaagcatcattcatttagttaa

SEQ ID NO: 1786 - DNA, 366 bp, Enterococcus faecalis
aagttatatgttaaactatttgatttcttacaaaatgcatttgtgaaagacagcaaaggcgggtatgacgacaccaatgaagaattgctttcagactatttaaaaaaacattccccagatggagaaattgtctttttagctgccaaccctgatttaaagatcaaggggatcggtagtaaattattaaaagaatttgaacgccgagagcaaggaaaagaagtatttctgttcacggatagcggctgtacgtatcaattttatgaacgacgcggtttcgaacggaaaaaagaaaaagatatcgtcatgaagatccttaataaagaagtagatctccgctgtatgttatatagtaagatcattcagtaa

SEQ ID NO: 1787 - DNA, 393 bp, Enterococcus faecalis
ggggaaaatatgccaaaatataaagaaatagccttggctctaaaagagaggatcgttgagggaaaatatcaggaaggttctaaattacctgagcaagaaagtctggctagagagtttaaaacaagctgtgttactatccgcaaagctatacaactccttattgatgaaggtttgttatatacgagacgtggatctggtacttttatacgaagcaatatcagacaggacaatgagaatgtcactcaagtaaataatgtatttggcacttcatcacaagaaaatacaaatgtgacaagtaaaataatccgttttgatgtccggtttccgacagattatgaaaggcggctttctgcaacctacttccgatccccttcctgcaaatcatgggtataa

SEQ ID NO: 1788 - DNA, 228 bp, Enterococcus faecalis
tccgttttgatgtccggtttccgacagattatgaaaggcggctttctgcaacctacttccgatccccttcctgcaaatcatgggtataaaaaaataggcatattaagcgggctaggaggagaaatattcacatatcattttttcattccgcaagctgcgtcaagttatttggaatttgtagaacagatgagagaggtagaagcagcactacaaactacttttcaataa

SEQ ID NO: 1789 - DNA, 1035 bp, Enterococcus faecalis
atttttagaaagtttatcttttatttctattttagagatgttaaaatgatggttaaactatataggggtgattatttgttagataagtttttggatatgtctttagttcaacgaattagttgcggtatcatagttggtattatagttggtatttttttaccctcatggacgtttatcaccatattggggactgtatttgtcagttgcttaaaagccattgctcctctcttggtattttttctgacggcagcttcgattgcaaaacataaagttgggaatgaaacctatgtcaaacctattttatttttatacttaggtggaacgttcctctctgcgttagttgcagtagtcgttagttcgatttttacgatcccaatcactttgcaagaacaggtctctgaaaaggcgccacaaaatatcggcagtgtcttatctacgatgttgactaacgtgacacaaaacccgatccaagcaatcattgaatcaaattatttaggcgttttgttctgggccgtcttgttagggctggctttgcgtagtcatacggaaacaactaaagaagtcgtggatcaagtttctgtagccttgtcatacgtagtgcagctgatcattgcgtttgcaccgatcggtatcctaggattagtttatcaatcgatctcaacgacagggttgtctggcttagcagaatatcttcaactagttctggtattagtaggaaccatgttatttgtcgctttagttgtttatccgcttctgactttcttatttatcaaagaaaatccctatccattgattttcttttgcttaaaagaaagtgcggttcccgccttctttacacgtagttcagcagccaacattcctatcaatatgatgttagccgaacgattgaaattaacaaaggaatcctatgcgatctcgattacgttggagcgaccatcaatatgggggcgctgctgtaacgattaccgtgatgacattgacgacggtacaaacattagggatcgaagcgtcctttgcttcaaaattgatccttag

SEQ ID NO: 1790 - DNA, 414 bp, Enterococcus faecalis
caaaggaatcctatgcgatctcgattacgttggagcgaccatcaatatgggggcgctgctgtaacgattaccgtgatgacattgacgacggtacaaacattagggatcgaagcgtcctttgcttcaaaattgatccttagtctgttggcagccattgctgcttgtggagcttcaggcgttgcgggaggttcgttgctattgattcctttggcttgcagcttgtttggtatttcgaatgagattgcaatgcaagttgtagggataggatttattatcggtgtgatccaagattcggtagaaacagctttgaactcttctagtgatctgttattcacagcgattggggaattaagcgcgcggaaacgtaacggagaagcaatctccttaaaagattccttaagtgaatcaaactga

SEQ ID NO: 1791 - DNA, 183 bp, Enterococcus faecalis
ttactttacttaacacttatttcgcctctatttcatttattacttatgcacgtctatactataagttactctgccttacttgacaatataaactgggttcacttttttatagtgaaaaaacaaaaagcgtgctctaatgggaatttattcttattttctgtgccaagagcgtttgacccataa

SEQ ID NO: 1792 - DNA, 465 bp, Enterococcus faecalis
gtgttaagtaaagtaatcaaagatgaatatattcaactagatgttcaggcaaataactttgaagaagcaataagaaaagctttgcaacctttcttagaagcagatgtagtaactgaaaaatatgtcgaaacaattttgaagatttacgaagagaccggtccatatatcgttattactgaaaatattgctttacctcatgcaacggtggaaagtggagcaaaagatgtagctattggatttatgcgattgaagaccccagttacttcaggtcatcgcaccaatgatccagttaaatatcttttttcattaagcgccaagaataaccaagcgcatattgaattgctatcagaattggcaaatttattaggaaatccagattttctaaaatttatcaaagtcgtttcatctagagaagaatttaaaaactatattgaaaaagcagaaggagagaataaacatgaatag

SEQ ID NO: 1793 - DNA, 369 bp, Enterococcus faecalis
aatttatcaaagtcgtttcatctagagaagaatttaaaaactatattgaaaaagcagaaggagagaataaacatgaatagtcataaagctttagtagcttgccgtgcaggagtaggatcaagtttgatgctaaagatcaaagtcaatgaagttgttaaagaaaataactttccgttagaagtagaacattcatctttagatggtgtgccaggttttcaaggagatatgatcattactttgcctgatgtagcgaatgaattaatagaaaaaaatttaccacagaagattgttggcattgcgaatattgtggataagaatgaaattaagataaaacttgaagaaacatttattgagttagaaaaacagtag

SEQ ID NO: 1794 - DNA, 264 bp, Enterococcus faecalis
aaaggaaggctgaaaatggattttattattagcttcttaagtacgcccgcagtactattagggcttgtggctatgataggcttattagcacaaaaaaagtctggaacagaagtcttgactggaacctctaagacaattattggctttttgatctttaatgcaggtggcacgatcatgacaggggctttgcagaacttcaatacgttgttccaaaccggatttcttatcaagggagtgcttctcctgaagcagcgacagcattag

SEQ ID NO: 1795 - DNA, 483 bp, Enterococcus faecalis
tgcaggtggcacgatcatgacaggggctttgcagaacttcaatacgttgttccaaaccggatttcttatcaagggagtgcttctcctgaagcagcgacagcattagcgcagacagaatttgcgtttgttacgagtagtacgctgattttgggatttatcatgaacttagtaattgctaggattactcctttcaaaaatatcttttttacgactggtcatagtttgttctttgcgtgtgtgttatctttgattttgaaagcgcataacttctcggatgtagccgcaattatcgttggtggattattacttggcttcttctccgcagcattgcctcaattatgtcagcccttcatgcgtaagattacaggaagtgatgcaactgctattggccattttaatatggttggctatgcactgtctggttatattggcaagctatttagtaaatataaagaccgcacaaccgaagacatcattggctga

SEQ ID NO: 1796 - DNA, 915 bp, Enterococcus faecalis
ggagttatcatgagagacctaactataggcaccccagcaaagttgatttttttatttaccattccattactcgtggggaatattttccaacagttctataatatagtagatatgatcattgttgggcaaacgatcggtaaagaggcattggcagcagtcggcgcgacaggaagtatcacatttttgatcattggttttgctcaaggtttgaccgctggattatctatcatcacggcgcaacgtttcggcgctcaggattttcgcggtgtaaagaaaagttttgctgttgctattataattagtttcacagtaactgctattttgactgttttgagtttagtatttttacgtccgttattattgctgatgcagacaccgccggatattatccaacaagcacaggaatttatctgcgtgatcttaggcggtatgtttgcctcaatggcgttcaatcttctttcaaatatgattcgagcgctaggagatagccgaacacctttgttccttttgattttcgctgtgatcatcaatgtgattttggatttggtgtttattatcaatttccacatggggatcgctggggctgggtatgcgacagttatcgcgcaaatttccgcaagtttgatgtgtgtcatctatatcaaacggaaaatcccgttgctgcaagtctctaaaagtgatttcaaaatagataaagacactattttcactcatttgaatgcgggcttgcctatggctttccaatcatccatcatcgctattggagcggtggtattgcagtctgctctaaatagtttgggaacagatgtcgtatcggctcaagctgccgcgggaaggatcgaccaatttgccactcagccaatgatgtcttcggttgtgcggtctttatatttactaaatagcttgccaatataa

SEQ ID NO: 1797 - DNA, 183 bp, Enterococcus faecalis
aactgttggaaaatattccccacgagtaatggaatggtaaataaaaaaatcaactttgctggggtgcctatagttaggtctctcatgataactcctcaatttttttcagaatatttgcagattacatattatcatagtttaatagaaccacaaatagctgatttatacaaaaaatacagctaa

SEQ ID NO: 1798 - DNA, 690 bp, Enterococcus faecalis
aggaagagaggtggaagacatatggatgtagtactgatgcggcacggggaaagtgaagcaaattttgaaaattattggacgggatggctggatgtttctctgacagcaaaaggacaggaacaggctcgtaaggcaggggaaaaaatcaaaaacgcgcagatcgagtttgacgctgcatttacgtcagtattgaagcgggcatcattgacttgccagatcatcttagaagaaagcgatcagttatggataccgacatttaaaacctggcgtctgaacgagcggcattatggcgctttagtagggaaaaataaggatgaaatggcacgagaattcggggcagatcaagtcaaacgctggcgtcgagattattatgaaatgcctccattagtagaagaaaaccattttgatcgccgttacgcacaattggcagatcaagacattcctcatggagaaaatctgcaaatgacggtccagcgggtcgcgccattatggcaagacgagatcgcgccgctgttgggttcgggtaagaatgttttgattaccggacatggcaacagtctgcgggcactggtgaaatatttggaggatgtaccggaagaccaaatggataccattgatattcccaatgcgcagccgatccactaccgctttgataagaacttgcagatcgtcaataaatcgatcctctaa

SEQ ID NO: 1799 - DNA, 318 bp, Enterococcus faecalis
aactatcataaattatggtatactattgaaagaattggaggaataagaataatgaaagctattttaacggtggtcgggaaggacaaggttgggatcattgccggtgtcagccagaagttggcagaattgaatatcaatattctagatgtatctcaaacgatcatggaagattattttaccatgatgatgatgttgcaaatgcaaccagaggctgatttagaagcgatcaagcaagcattgagtctagttgaaaacacgttgagcgtcaaaatcagcattcaaaatgaagagatcttcaatgcgatgcataaactataa

SEQ ID NO: 1800 - DNA, 939 bp, Enterococcus faecalis
  misc_feature (571)..(835): Nucleotides 571, 634, 676, 749, 775 & 835 are "n" wherein "n" = any nucleotide. 1               5
actataattcggagggaaatgatggaaacaaaacaaattcttgaaacgatccggatggtagaagaagaaaatcttgatatccggacgatcacaatgggtatttcattgttggactgtatcgatgccagcacagaaaagacttgtcaaaatatctataataaaatcaccagcaaagcgaaaaatcttgtaaaagtcggtgacgagatcgccagtgaatttgggatccccatcatcaacaagcggatctcggtaacgccgatcgcaatcgttgcttccgcaagcggcgggcaagactgtgttgcttttgcgcgagttttggacaaagccgcaaaagcggtggggatcaattttatcggcgggtatagcgcattagttgaaaaaggctatcaaggagcggacctgtccttgatccaatcgattccggaagccttggcagaaacagaatttgtctgttcttctgtcaatattggttcgacacgggcagggatcaatatggacgctgtcaaattgatgggtgaaaccatcaaacaaaccgccgaagcttcagatatgggctgtgcgaagttggtantctttgcgaatgcggtggaagacaatcctttcatggcgggagcattccacggggtcggtgaancaaattgcgagatcaatgtcggtgtcagcggaccgggcgtantaaaacgcgctctggaaaaggtcaaaggcgaatctttcgatgtggttgctgaaacagttaaaaagaaggcatntaaaatcacgcggatgggacaattantcggtcaaatcgcttctgagcgattgcacgtaccctttggtattgtggatctgtcattanctcctactccggcagttggtgataatgtcccgtggatcttggaaaaaagggcctgggaaactgtcggcacacaccggtacaacggccgcactggcttttattga

SEQ ID NO: 1801 - DNA, 531 bp, Enterococcus faecalis
cccattctttgtggtgaagaggagactacgtttctaccaaagaatcctttaaactgtgtgccaacagaattacatgaacaaagagggttgattcgaggtgcaacccatgatcctaaggcattcgttttacgggaacatgcagggaatgctggcttgtttagcaatgtctatgatttaacaaaatttgttcgaatgtatttaaatcgaggcagttatcacaatcaccaattcttgaaaaaagagacaattgatttgttactagttaaccaagtgccagctgcagataaaccacgttctctaggctgggattttaaatatgatgtagctacgcaacggccattattattccatacaggctatacaggcacttttttgctaattgatgtgcaacaacaatcagcgcttatctttttatctaatcgagtccatccagaggaccaccggaacacttatatcgaagaaagagatcagttgttggcaacctatttaaaagagaaatcatcagtttcagatgaaatgactagtttttag

SEQ ID NO: 1802 - DNA, 1002 bp, Enterococcus faecalis
gagcgaattcaatttgggaggtcacagtcaatgcaagaaccattatttttacaacctgtttttcaagaaaaaatttggggcggcaatcgtctacacacgctatttggtttcgatttaccgagcgataaaattggtgaagattgggcaatcagtgcacatccacatggcgttagtactgttttaaatggcgaatttaaaggaaaaaaattagatgaattgtgggcagaccatcaagagttattcggccatgcaggtggcgctgtctttccattattaacgaaaattttagatgctgaagatgatttatccgtgcaagttcatcctgatgatgcatatggccaaaaacatgaaggcgagctaggcaaaactgaatgttggtacattattgatgcagaacctggcgctgaaatcatttatggacatcacgcgaaaacaaaagaagaacttgcagaaatgattgaagaaggtcgttgggacaatcttttaagaaaagtaccagtgaaaaaaggcgatttttattatgtaccaagcggcactattcatgccatcggctcgggtattttaattttagaaacgcaacaaagcagtgatactacgtatcgggtttatgattatgatcgaacagatgatcaaggaaagacccgggaattgcatattcaacaatccattgatgtgacaaccgttccggcgaaggatcctgacctctctattcaacaagaaaatcaaggacaatcaagcattgttacttatgtaaaaacagatttctttaatgtctatgagtggcgtgtcagtgggattctaaaagtcaaaaaacaagcaccttatacattagcaacagttattgaaggtgtgggtcgattgattacagaagatgctgcaaaagcagatgtggctacttttgatttgaaaaaaggcgatagctttatctttccgacagatattccgagctggcgttttgaaggtgatctaacgattatagcttcagaacctggcagtcgctaa

SEQ ID NO: 1803 - DNA, 585 bp, Enterococcus faecalis
gatcgaaagagatttcaaaaatttaaggatgggataaccatgaaaaaaataacaccacgaatcattacaattatcgcttttagtgttgctttaaattaccttggcagtaccattgcgttactccttcgtttaccaatttatcttgatagtgcgggaactatttttacaggtgcgttattaggcccactctttggcgcactgacaggtattttaacaagtctactaactggattgacaacggatatcttttctctgtattattcacctgtccaactctgcacaggaattttagcaggtttgctccttcatcagcagttaaaagtaaccaaattaccatttaaaacgttgtggttaacgataccaggaacagtgatttcttccttaataacagtttgtttatttggtggaattacttctgctggctccagcataattgtccaatttttatatggtttaggcttcaatcagttagcaagcgtcctgttggttcaattgataacagattacggggatcgtctgctatcagtcatcatcgtcacagctgttatcgctgccttacctaaacgttcctttataacaaaataa

SEQ ID NO: 1804 - DNA, 1020 bp, Enterococcus faecalis
caagagttatcatttgcagttaatgaaaaaggaggattggaaaaaatgcaaaaagtaattattgattgtgatcctggaattgatgacacgcttgctctcttgtatgcacttgcttcaccagagctagatgtccaagcgattaccgttgtttgtggaaatgtccctgtggagattggcgtggaaaatgtttttaaatgtttggaaaaagttaatcgcttagatattcctgtctaccaaggggctgctagccctttaaaacggccatttgttagtgcacaagatacacatggcatggatggtttaggtgaaacatatttccccagaactagcaaaatccaagcacaagcgctttccgctgctgactatttagcacaaacctttcaacaagctaccgattgctcaatcattgcccttggtcctttaacaaatattgctttgggtttaaaaaaagaacctcttctggggcgaaatcttcaacgttttgtctcaatgggtggtacctttaaaagccacggcaattgctctcctgttgcagaatttaattattggtgtgatcctgatgcagcagcttgggtttttgagaaattaggtgcaaaaatcgagatggtcggcttagatgtcacacgagaaattgtttttacaccaacaattctcaattattgtcaacgactcaaccccaaaatggggaattacctcgctgagattactcaattttattttgattttcattggaaatatgaacgtattttagggtgtgttatcaacgatcccttagcggttgcttattttattgatcctacgctctgccaaggcttttccagttacggacaaattgttcctgacggcattgctatggggcaatcaatgatcgatcaatatcatttccagcagcaaccagctaattgtcatgtcttgactacggttgatagtcaacagtttttcgtgaagtttctatccattcttttaaatgtacaaatagatgagatcgaaagagatttcaaaaatttaaggatgggataa

SEQ ID NO: 1805 - DNA, 270 bp, Enterococcus faecalis
aacgtattatggttttgggaaaagaaaaaaaatcataacggcatgacttttttaggcgaaggggaacgacctttaggaacagtcaaacaaggcaaaggcaataacggtcaagataatggcgaaggcgttgtctataaaaatgtgtttggctcctacttccacggtccaatcttagcacgcaacaaaaatctagggattcggttaattcggaccgctttagagaaaaaatatggtgaaccgatcgctattcctgaaacgctttataaataa

SEQ ID NO: 1806 - DNA, 480 bp, Enterococcus faecalis
atggtgtctaaagaattagtcgtttgtcatttatatggcaacttattaaatacttacggagataacggaaatttattgatgcttaaatatttaaccgaaaaaatgggcgttaccttccgatcagaaattattagtatctacgaaccgtttgatcccgaaaaatatgatttagtctttgttggtggcggtcaagacttcgagcaactgatcatctcagaagacattcagaataaaaaagaagctttgacttcttatattgaaaatgacggcgtcttgttagctatctgtggtggttatcaacttctaggacattactatgtcggcgcacaaggcgaaaaaattaaaggaatcggtgcattagatcattacactttgagccaagacaacaatcgtttcattggtgatattgaaatttataatgaagaatttgatgaaacgtattatggttttgggaaaagaaaaaaaatcataacggcatga

SEQ ID NO: 1807 - DNA, 1398 bp, Enterococcus faecalis
aattaccgaaaaattaaagatatagaaatttggggaacaacaaatggggattcgaagtcatttagcaattgctgcacggaaaaattttcgcaatgggttttacaaacattttttaaaggcggcagtagctacccagggaaattagccctaaaaatcgatcctaaaattttagatacattggcaaaagactatgaaattgtcgtagtcactggaacgaacggcaaaacattgacaactgctttaactgttaacattttacgccaagaatttgatgaggtattaacaaatccaactggtgctaacatggagcaaggaattgtctctacttttttaaatgccaaggcgaaaaaaggacaaaagaaatttgcggtgttagaaattgatgaagcaagtttaagccgtgtcactaaatatattcaaccaaaattatttgtttttacgaatattttccgcgaccaaatggatcgctatggtgaaatttatacgacgtatcgcttaattatggaaggcgccgctgctgctcctgaagcaactattttatgcaatggtgattcgccaatttttaattcaaaagaaactgtaaatcctcgcaaatactatggatttaatcatttaccaccgaaagagcaattggctcattacaatacagatggggttttatgtccaaaatgtaatcatattcttcattataaaatgattacgtatgctaatttaggtgattactattgcccaaattgtggcttcaaacgccctgaattggatgtgcagttaacggaaatggtccggatggataatacatctgctgattttgtgattgatggcgaagaatacggcattgctgttggtgggatgtataatgtttataatgcgctagcggccacagcggtagcagaatattatcaggtggcaccagataaaatccgagcaggcttagcttatgatgaaaaagtttttgggcgtcaagaaaccattaaagttggcgataaagaatgtacgttagttttagtaaaaaatcccgttggtttaaatcaggtcattgatatgatgggcttagccccttactctttctcgctggtttcattattaaatgctaattatgcagatggaattgatgtcagttggatttgggatggtaatcatgaagcctttgctgatatggacattccaaaagtaattgctggcggtgatcgccatgaagatatggccttgcgtttaaaagttgcgggtattcctgaagaaaaattactagaaattgctgatttagagcaagtaatttcagaaattaaaacgttgccgacagatcatgtctatattttggcaacctatactgctgttttgcaattaagaaaatcattaacagcccaagggtatattcaagggggaatgaatggtgtctaa

SEQ ID NO: 1808 - DNA, 183 bp, Enterococcus faecalis
aatctaacctccgtggtggactacatgcgcgaaacaattcacgccattgaacattttacagcaggtggtggtaaaggagcaaaccaagcagttgcagcgaacgttcagggcgcaggacaaccctattttcattcggggggcggccgccgggaaatgatgcgctggactatgagactgatttaa

SEQ ID NO: 1809 - DNA, 810 bp, Enterococcus faecalis
aggagcaaaccaagcagttgcagcgaacgttcagggcgcaggacaaccctattttcattcggggggcggccgccgggaaatgatgcgctggactatgagactgatttaatgagtcaagatgaaattaatttaactggggtcaccactttagagatagacggcccccgccgggccccgcgccggggccgctctcatccccgcgccccccccctttgtgggaaaccccgggggaaaacccttcttttgtggggggggccgtgtcccccctccccccccccctctcctaacccctcaaaattttggccctctcctttttgtggccccccccccggcgaccgccacaaccaacccgccccgggcgagcgcgcggtcggggcgacgtcaaatcccgcacctgcgttagaacaagttcctgaagaattactaaacgtgacagatatgattgtaccaaatgaaacagaaaccgaaattttaacaggcattaaaatcacagatgaagcgagtatgcgtaaagccgcagaagcacttcatcaattagggattgaagcagtaattattacagtaggtagtaaaggcgccttttatgacgtcaatggacgaagtggtattgtgcctgcttttaaagtgaaagcggttgatacaacggctgctggcgatacttttattggcgcattaagtagtatattagaaaaagattttagcaatttggaagaagctattcgttatggaaacaaggcgtcttcgttgactgttcaacgttttggagcccaaccttcgattccttatcaacacgaattggcagacaaataa

SEQ ID NO: 1810 - DNA, 411 bp, Enterococcus faecalis
aaaggagcgagcgacatgaaaaaaacaaaagttattaattcagatatttcccgcgtcatcgcacaaatgggtcattttgataaattaagtattggtgatgcaggcatgccagtgcctcggactacagaaaaaattgatttagcagttaccaatggcgtccctagttttatggaagttttaaacaatgtccttgaggaattggcagttcaacgaatttatttagcagaagaaattaaaacagaaaatcctgacatgttggcagcaattgaaactcgtttaccagaaactcccatcagttttattcctcatacagaaatgaaacaagaattaaacaactgccatgcatttattcggacaggggaaatgactccttacgcaaatattttattagaaagtaacgtagtcttttaa

SEQ ID NO: 1811 - DNA, 909 bp, Enterococcus faecalis
acgaagagaggggaaatagagatgaatgcgactgcattattaatcggtttaggaccgcttctaggttgggggcttttcccaacaatcgcttccaaaattggtggtcgtccagtgaatcaaattctcggtaccagtttaggaacattgatttttgccgctattttttcaatgattaatggtttagctttcccagcgggcatggatttattcttttcaattatatctggtgtcggttgggcctgtgcgcaaatcattacgtttaaatgcttcacgaagattggttcatcacgtgccatgccagtaacgaccgcgttccaacttttaggtgcttctctctggggtgtctttttcttaggaaactggccaggtgcgacagccaaattgttaggcgcatttgccttagtgttaatcatgattggtgccaaaatgacggtctggtcggaaacggagtccgctgatagtgctgggattatgaaaaaagcagttcttctattagccgttggtgaaatcggctattgggcgtactctgcagcacctcaagcaacggcaattgatggcatgcatgcctttttaccacaagcaataggcatggtaattgtcgcagttatttactcagcggttgtcactattaagggtggggaaatatccccatttatagaagccgtttcttacaaacaaattttttcaggctttttcttcgcctttgcagcgttaacttatttaatttcagcgcagccagatatgaacggcttggcaactggctttattctatcccaaacatcagttgtgcttgcaacgttgacaggtatttggttcttaggtcaaaagaaaacagccaaggaaatgaccgtaacgattatcggcttagttttgattttggcagcagctacgatcacagtgatgatttaa

SEQ ID NO: 1812 - DNA, 915 bp, Enterococcus faecalis
gtatgcgttttagttataggagggaaagtaatggaattacgagtgattcactatttcttagcagtggtccaagaaaaaacgattagtggcgcagccaaacaattgcatgtatcacaaccaacattatctaagcaattaaaagaattagaggaagaattaggcgtgacattatttatacgaggaaatcgacaaatacaattaacacctgaaggagaatatttagctaaacaagggcaagatattttaagcttagcgaataaaacagtcaccaacttgtcgcaaaatgaattcattaatggcgaaatcacgattggtggcggcgaaacaaaagctatgtcttttttagcgaatgcactacaacaaataacaagccagcactcagctgatattcaccttcatttatacagtgggaatgcagatgatgtaatagaacggctagacaaaggattattagattttggtttaattattgagcctgcacctaaacaaaaatatagctatttaacattaccagttgtagatacatggggcttaattactgtaaaggaccatcccttagccactaaaaatgttattactgcagccgatttaaaagaagaacctttatttatttctcgacaagcacaagttccgagccaactctctgattggctcgaagcaagtctagatcagttccgaatcgttgggacctacaacttactttacaacgcttcactgatggtagaagctgggctaggtagcgccctaagcattgatggtattctagaaacaaagcaaacaaatttacgttttatcccgctatatcctgctttaacagccaaaattagtttaatttggcgcaaaaatacggttctttccacagctgctgcattatttttagaacaaataaaaaaaagtattcaacgccctgaataa

SEQ ID NO: 1813 - DNA, 642 bp, Enterococcus faecalis
gtattagacagaggagttgtcacgtattacgataaatttagcaaaaggaggcgattaggaatgcttacaaaaaatctccaagaactaattgcaacaggtagcattgataaagatgaaccactatttcaacttattcatcagattcaagaggaaaatagtcgctatttaatagaattaaatcaacaagcctatacacataatgaagtaaggaatcttcttgccacgattatccaagacaaaattgacgaaaccgttacgattttattacctttttatacagattttggacgcaatatacattttggtaaaaatatttttattaatcgggcagctatgtttgttgatttagggggcattataattgaagacaatgttttaattggtccgcgcgttaatctcttaagtgtcaatcatccggaactgccaatgaaacggcgaggcgtattgctagcaccaattaccattaaaaaatttgcgtggttaggcgcgggtgtcactgttttaccaggtattacgattggtgaaaatgctatcgtagcagctaatgcgactgtaactaaagatgtgccagctaacgctattgttgcaggaacaccagctaaaattattcgttggattcaggaagataaggaggaaatataa

SEQ ID NO: 1814 - DNA, 750 bp, Enterococcus faecalis
ggaggaaatataatgaaatcattatcagaaaaagttattgttatcatgggcgcttccagtggcatcggtgaggcaacagcccgtttacttgccagaaaaggagcgaagttagtcattgcagcacgtcgacaagaacgtttaattgctataaaaaaagaacttcctgaagcaacgattctcgtgcaacaagcagatgtaacgaaagaagaggaagttcagcgtgtaatcaagcttacaatggaaaaatatggacgaattgatgttctttttaacaatgcaggagttatgccaacggcgcctcttattgaagcaccaaaaggagaatggcgtcaaatgctagatattaatattatgggtgttttaaatggcattgcggcagttcttccaattatggttgaacaaaaatcagggcagattattgctactgattctgtggcaggacatgtcgtttatccagattcggctgtctactgtggaacaaagtttgctgttcgagcaattatggaaggattgcgacaagaacaaagagagaataacattaaatcaacgattatttcaccaggtgctgtacaaacagaactttatcaaacaatttctaatcgagtagtagctgaaacgttacatctagaacagttaagttggggcttaaaggcggaagacattgcgcaagcagtggtctttgccatagacacgccagatcgtatgtcaatcagtgaaatggttgttcgcccgaccacacaaacgatttaa

SEQ ID NO: 1815 - DNA, 1188 bp, Enterococcus faecalis
catctacatactattggcgtggtggtagataggagaaaaacaatgacacaaattaacaaatatacaaaaaaagacggtacaaccgcctatatgtttaatgcttatgtaggacgtcacccaaaaactggtaaaaacgtttatcgtaagcgacaaggattcaaaacaaaaaaacaagcacagattgcgcttgccaaaattttagaagatatagaagaaaatggactagataataagccctctgttttgacgtttaagcaactttacgagaaatggctagcacagcaacggttaacgattaaaccatcttcaatcgctgtgaataagcgttttgctgaaaaacacatattaccttatctaggtgactgcaaacttgacgaaataaccgttatacagtgtcaggacttagttaataaatggtttaatcaaggacacaagcaatactcgttctatagaaaactcactgctcagattatgcgatatggcgaatctatggaactaatgaatactaacccaatgagaaaaacaatccttcctaagtggaaagaggaagaaacaaaactggagtattacactaaacaagaattgaatcatttttttgattgtctaaaacaatatggtaatttcaaacagttagcattttttaggttgctagcctttacaggttgtcgtaagagtgaagttctagccttgcagtggaaagacctagacataacaaacaagagcgtatatataggcaagaccgtagcacaagacgaattctataatatactcactcaaacgcccaaaacagcttctagcacacgttctatcagcttagacaatgaaacacttcaaattatggctaaatggcgtacaatccaacgtagtgactatttccaaatgggctttaatacatctagtgaagaacaatatattttcacgaacaaccataataaactgctctcaccaaatgtagttaatatatggctcaattgcttaataaaaaaatatgatttacctagtattacaccacatcattttaggcatacacatgcaagtttacttcttcaatcaggagtgcctattaaagaagttgctgaaagattaggacatactagcactgctattactgatcgtatctattctcatgttatgcctgaagaaaaagaaaaaacagcagataagttcgctcaattcgtcggtttttaa

SEQ ID NO: 1816 - DNA, 261 bp, Enterococcus faecalis
gaccagccgattgacagatatgtcaatataattatcaagcaagtcaataatgatttatttattgaagtatctaataactataattctgaagaaatttttacaagaaaacatagaaaaaataaaggtttaggaatgaaaaacattgatgatctcttacaacaattaggtggtattcaacgtcactggacgaaagaacgtagatattttgtaactatagttatatttaatgtatacaaaggaaacaaatgcggtgataactaa

SEQ ID NO: 1817 - DNA, 744 bp, Enterococcus faecalis
aagagtattatgatgaacaaaagagaaaacatgattagtgactcaaaattgaatgtttatagatatgaattagataaaattaaaaatgtttggtttaaagttttcttaattacactggtaatccaaatgttattttttatgtttttctcatttgtgggaatatttgatgaaagtgctgatacgatctcgtcatttcaaggaattatagcattatcgaacactgtttctatgtgcggcatatcaatttatggagctgtattactaaggaaagagcttgtacgattttatgttggcaatcaccggaatagaacgtttctttttccgattgatcgaaaagagcttctcgtaaaaaaaacaagttctttttacgtgataatcttatctagctttggaagtgcgcttcttatttcatttgtgactgaggttttgcttaacttaattttgaagtttcatagttcaaatttattttttgaaatttaccttggtcttattaccatagttacaagttgtagtctactattcgtaattttgatattgtcagaaataatttcaatttggaaacaatcggaaattgcttcaataataacgtcagtggtactaatgctaatatattcgaatttttctgctatgggtcttatgaattttccaactataacgttcctattttcaacgattatgggattgatgcttgtttggttatttttgaaattttctgataaattatgcgacatggaagtatactaa

SEQ ID NO: 1818 - DNA, 795 bp, Enterococcus faecalis
tattattgtagtttgtttttggttcgtgttaactacattactttcacttatttcattgtcaagaagggactgaattgcaaaatgcaaacaataaatataaataatttatataaaaaagtaagtgatacattcaatttaaaggttgatcaattagatttagaagtagggaaaatttatggattagttggtccgaatggtgcaggtaaaacaactttgatgaaatgtctatgtagtttgcttagacctgatagtggaatacttaaaatagacaatcggcaagtagaaatagcagaccctaaaatattattgcaggtgggtactaactttgttaactcagatagtttaaatggatttatgcttgaagatatatacaatgaccatgctttttattacaagttaaaaaatttgttaatgatagagactctattaatggatgttggtctaaatgtaaataaaaaaagaaagtttaatacgatgtctttaggaatgaaacaaaggtttttgctaggtcttgctacagctcacaacccttcattagtattattagatgagccatttaacggtttagatcctgatggtgtagagttatttattgagaatgttaagaccttgtccgaaaatagagtgttgataattagtagtcatatattgagagatatggaaacatttcttgatgacgttatatttatagagaaaggcaatgtacaagaaccaaaatcaatggttgagattcgagaagagtatagagaggggttgaaagagtattatgatgaacaaaagagaaaacatgattag

SEQ ID NO: 1819 - DNA, 759 bp, Enterococcus faecalis
atgaaaatgataaaaaattatagaagaaaatcaatgattaaggaattatttgctttagtagggtggagtttattaagacataaatacttattgcctgtttttacattaactcaagtatttctatcattagcaattgtctacgggttagcacttctaataccagatgtgaataatcagacagctatctatctgtcatctggagcaactactcttgggattattgcggtagggtgcgttcttgctgctcaaatagtaagtacagcaaaacaggagggcattgtggactatcaaaggacattgccagtttctcggttgaacatattaatttccgactttataatttggggaatggcctcactacctggggtgtttatgtcatttttagcggcatatttaagattcgatgtccaaattagattctcaatgaaggccctagctattcttagtctaattcaattatgtatgatctctataggttttgctttggcatattggttaacacctaatgtagtaggattagcaactcagataattatgataggtggacttttattctcgcctattacttatccaacagatagattgccttctgctttagtgaacttttttgaatttttaccatttgttccatcgagtaatttgataagatcactgttttatgaacagaatactgttaatgtttctaatattattgtagtttgtttttggttcgtgttaactacattactttcacttatttcattgtcaagaagggactga

SEQ ID NO: 1820 - DNA, 315 bp, Enterococcus faecalis
atcatggaaaggttccttgaggataagaacttaaaaaaacagtctataaaaataaacgatcgaaattatatgactgttaactttcttaatctaagtgatttgaagagtgtaatagtaccgagtgcaattcagactaacataaacgatgaggaattaatgatagaaatggaattagagaacagtcaagtgttagaagcagttgactgggtcatgaaattagtaatagaaagaaaagttcaaaattataaagtttccccaaaatccttaaatgaaacctatggagagttaatagatgaaaatgataaaaaattatag

SEQ ID NO: 1821 - DNA, 714 bp, Enterococcus faecalis
tttggttatggttccaacctgttatcaatcaatttaattaagtctaaatataggaggtttgctttgaatcaacagttagaattacattcgctaagtaaaaagtacaagaaatcagagagctatgcaaatgataatataaatttgcgctttaataaaggtgaaataactgccatagctggacataacggcgctggtaaaacaacaatgttgaatcagattataggtataacgaaatcaacaaagggctctataacatttaatggtctatcatttgcgagagatagtaaaattgcaagagaatatgtctctatgatgcctcaactacatgctcccttggcaggtataacgatggctcaatctgtcgagtcaataataagaataagaggaggcagtcagaaaatagctgaagaagagtgtattaaaattttaaaagaattaaaaatagatggatggaaagatataccaggacagaaactttcaggcggacttagaaggctcacttcatttgcaatggccgttgtatatccttctccaataatagtccttgacgaacctactaatgatgtggatcctattagacggcaaaaaatatggagatatctgaaaaaattatctaataaggggcatataatcatcgtggtcacacacaatattttagaagttgaaaaatatgctgatagatatattttaatgaatcatggaaaggttccttga

SEQ ID NO: 1822 - DNA, 816 bp, Enterococcus faecalis
aggagatgtctcccaatgggaaatatttcaatattatcaagagaagaaataggccgagactataccgaagctcgtacgttaaaacgtaagctaaacaatggcgattgggtttatgtatcagaggtacttaatgaattagttgaaaataaaattatgataaaaaaagccgatcagagagatgattataagccgctatttgtcgagcctaagaatatcttatttaaaagctcctctttcctgattgatgttaacggtattgttgcgtttacgattagcatatttttattcgtaatcaaggggtctccttttggaagtgcagtaaatgttttgtttacaaatcctttaaaatttcttctaattgctattcttgtctcaatcgtatctacaacttttcatgaatttatgcacattatattttcaaggaattcaaggaaaatcaatttaaacatagttaaagccgttgctacgatacctatgactcatgtatggacgtggagtaggtttggtagaatcacggcgatcacctctggaatgtcgtcggatgcaatattcttgttagtttttttgattatgaataataaaagtgttggagttaattctattgcggcatcaatacttataacaaggatattgtggcaatttatcattatacaaaaaacagatattaacattttgatttcttttgtggttgataatcctttctactttgaagaggtcgcaattatgaaattaatcattattaaagtaataagcataagtgtgctagtaatgataatttggttatggttccaacctgttatcaatcaatttaattaa

SEQ ID NO: 1823 - DNA, 210 bp, Enterococcus faecalis
aaagttgtagatacgattgagacaagaatagcaattagaagaaattttaaaggatttgtaaacaaaacatttactgcacttccaaaaggagaccccttgattacgaataaaaatatgctaatcgtaaacgcaacaataccgttaacatcaatcaggaaagaggagcttttaaataagatattcttaggctcgacaaatagcggcttataa

SEQ ID NO: 1824 - DNA, 1146 bp, Enterococcus faecalis
ggagtgaaaaaaatgaagtataaatatcccagaataaaaccaatctatccattatatcaattaaataaagagagatttagagttggggcccaattaggaatcactattgaatttgatgatgatgaaggtcaattttggacattatctaatttactcgatggagttagatcgtttgatgaagttgtcacagaaatgaagaggaaatatccggaattaacagtaaaagatatcgaagaagggatagattttttaaatgatgaaggtctaatcgaggagacgtttcctggtagaatgattgaagatagatacttagctaatgtgaattactttagtaggtactgtaaagctgatgatgatagatttgaaatacaggaaaagataaataacttgaaaatactattattaggtcttggtggaggaggatcaaatattctaacgttactagcgggtcttggccccaagatgattagaatggtggactatgaccgagttgaagcaagtaatttaggtcgtcaattactatatagagaagcagatattggtgagaagaaaactgtagttgctaaaagagccattaatgaaatgaactcaaatattaacgttgaaactgtagataaaaaaataatagatgtgaatgatgttgttgaattgacagaaggaatagatatcattgtttgcgctattgatgaaccccctttccttatacatagaattgtgaatgaagctattgtaaaagttggtttgccgtgcgtgtttggtgcctcacaggttagccgaggaagagtatacactgtaataccccagaaaacaggatgctttgattgcatgaatttgaacttcagtaaaaatgaccctaaatttgttgaacaatttgtaggttttagaaatattcaatttgctcccccatccatagcttatggtcctggtatctttcaattaacagcatcaattgtagatgagttaataagagtggtaacaagatatgctgagccaaaaagtttgggaacgcaatatgaaattaactatgaggacggaaactcgttcacgcataaaacttggccaaggtttgagagtgaatgtccaacttgtggtaaaggagatgtctcccaatgggaaatatttcaatattatcaagagaagaaatag

SEQ ID NO: 1825 - DNA, 519 bp, Enterococcus faecalis
cgacaaaaacatacccaggaggacttttacatgacccaagtacattttacactgaaaagcgaagagattcaaagcattattgaatattctgtaaaggatgacgtttctaaaaatattttaacaacggtatttaatcaactaatggaaaatcaacgaacagaatatattcaagcaaaagaatatgaacgaacagaaaaccgacaaagtcaacgaaatggctattatgagcgcagctttacgacacgtgtaggcacgctagaattaaaagtacccagaacacgtgatggccatttttcacccacagtgtttgaacgttatcaacgaaacgaaaaagccctcatggcttcaatgttggaaatgtatgtatcaggcgtttcaactcgtaaagtatcaaaaattgtggaagaactttgtggtaaatccgtctctaagtccttcgtttctagcttaacagaacagctagaacctatggttaacgagtggcagaatcgtttattatcagcaaaaaattatccttga

SEQ ID NO: 1826 - DNA, 204 bp, Enterococcus faecalis
gggggaatacttatgggaaattctaagattatcacaaaattgaatgagatacttagcccgattgctgaaaaaatcggaaatcagcgacatcttaaagccatttctagtggaatgatgtttggattaccgtttattgttattggttctttttttctgatttttgcaaatccaccaataaatatcgatcagtccttaaccacggga

SEQ ID NO: 1827 - DNA, 630 bp, Enterococcus faecalis
gagtattataacatgacagaaaaaaaatttattcaagatccttgggcaaagatgactacgcgaaacggtttagctggtgacgaagtcatttctgcattacaaaaatctatccgtagaggaaaagaaaaagacgcttgcgaatttgcttacgagatgtatattacttcaccacagtttgaagaaaagctttggagacgtttgttggcaatcagtgttgaggatatcggtatgggaaatcctatagcagcattgatgatcaataacttgaatatgatgcgtaaggaatttcaatataatgaatcagatcgtgcgatgtttttctttcatgccattcgctacttatgcggatcagagaaagatcgttcctcagatcttttaaaaaatattgtaattaaaagctttgctatgggatatgtccctgaaattccagatatcgctcttgataaacacacgacacgaggtcaggagatgggacgaggatcagagcatttcttacatgaagcaagtaaagttatcccgcaagcaaaagtagagaatgattacaaagaacaatatgaagaaattattaagaaatatgatccgaatcatgtcgtaccaagtacgtttgtttttaatccttggcaagtataa

SEQ ID NO: 1828 - DNA, 789 bp, Enterococcus faecalis
accgtttcgcgtagtcatctttgcccaaggatcttgaataaattttttttctgtcatgttataatactcctaactaaagaatttgaggtggaccttatggatactgaaatgctaatcgataaatatcagttgaatgattcagaagctgctgttttacggtttatggataaaaaccgtgactgcttgaaaagtcttggaattcgagaagtagcaaaggcttcttatgtctcaactactgcaatcatcaatatggcaaaaaaaatcggttattctggttatagtgagctggtctttgcctatggaaacaaacattcatcaattagctttcctgagaatttctcaaacgaagaaaaagatgaatttatccgattattatctcgctatcgagaaaaacggattatggttctaggctcgggtttttcacaaaatattgcaaaccatttttctgaaatgcttaacctttatggatttcgtgcaactgccaacagtcatttagaattcctacgagaaaatgttgaaaaagatgtcctgatttttattgtttccaactctggtgatactcttcggttagcagaacttgttaaattagcaaaaaatcatcatattgatctcattgctttcgttggtgaaaagaaatccaaaattggacaacttgctacactaactataagcacggaaacatataatcctcaggtagtttcagaatatcaaccaaacctgttctttgggactgctttgaatcaattcgaactattattaagtgaagcattgaaatctatttttatttaa

SEQ ID NO: 1829 - DNA, 579 bp, Enterococcus faecalis
ttagaaagcgggtgttattttatgaatgatcttgagcaattggtatcttatttagaaggacacttctcaaatgaacagcaatttagtgaattaacagaaactgcacaaagtgaattcccttttgcgattcacaaaagtcacattttcaacgacagggttttaaatcttcctgaaaattttaaaggtatttttttgcttgaagaaagttattatactttaaatggaaaagaacgattcaaatcagatatctttctctttgaagtaaattcgtcaagtaacgttaaattaagttccataactgttcctaaaaactatgctaataagaaatatgaagaaattgaatctattcctttttctgaaatgaccatttcagaaaaatttgttccgattgtttacaaaaaagagaatgaaacttttattggtcaatctgaaagtaaatttacagagaagaatcatttcatattaaaacaaacgatatctgaaaaaaaattgataatcaaagaagagataatgagaggaaataaacggatattcgtattcgataaacctatcgaatacgtaagagttaaagaaaattaa

SEQ ID NO: 1830 - DNA, 822 bp, Enterococcus faecalis
agaaaaagtaaaaggagcgaagaaagtatgcaaatagaattatcaattattaatcaagaaaatgaagtagttatgtgcagcagtggagtggatgaagcagttttggcaacgaaaaagtatgcttttcaagcaggagataaatttaaagttgtaaccgcagaaaaacaattagtttatgttcaactagacaatgctttaggatcctctttagtgtatttatcaaaaggcgagtgggtctatgaaattcctacgacggaaaaattgcgagaagcctatccaccagcggcttttcttgacgagaagcattacttttttgtcagaaaggcttttgctgaagaacagactagttatcgtaactgggcgctcaatcctcatgatcaaaaagatgtggccaatgtttatccccacgcttatgcaaatgttgaaacacgaaacgatgcgactttttttgctagaaatgcaattgatggaattctggccaacagagatcatggatcgtacccctatcaatcttgggggatcaatcagcaaaaagatgctgaaataacaattgattttggccgagaagttgaactcgataagcttggattggtattacgtgctgattttccccatgatagttattggaaacaagtaaccatagccttttccgatggttcagaagaaatattcactacgagtgatgcgatagcaacgcaatacttcaccttctctccacgaacagtaacgactgctacattgaaacagctgatcaaagcagaagatgaatcaccatttccagcgttaactcaaattgaactatttggatatcagaaattgtag

SEQ ID NO: 1831 - DNA, 231 bp, Enterococcus faecalis
cagatgctaacagaagatagtgcttgtgaatatggtcaattcaatatccagtgcaacggtgtcggtcgtggttatattgcgacaccgcaaacagcgccggtgagagagctgcaagaagacggggaacgtcatccatttgaccaatttatcgtcggtcgtacgccagcagcacggtggggtgatccggtcgatcttgcaggtccatcagtctttcttgcctcacaggcctga

SEQ ID NO: 1832 - DNA, 504 bp, Enterococcus faecalis
atggattttaatatggatatgtttcgcttagatgggaaagtcgcattgattacgggcgcagtttatggaattggctttgaaatcgccaaatcattagcggcagcaggagcaacgatcgttttcaataatttgactcaagaatcagtcgatgaaggatcggcaaattacaaagcagaaggcattgaagcaaaaggctatgtctgtgacgtaacggatgaaaaagcagttcaagcaatggtcaagcaaatcaaagaagaggttggttcaatcgatattttagctaccaatgctggaatcataagacgaattccaatgacagatatgtcagcgacagatttccgacaagtcatcgatgttgatttgaatgcgccgtttattatgtcaaaagcggttattcctgagatgatcgagaaaggcgggggtaaaattactaatatttgctcaatgatgagtgaattaggtcgtgagactcctagtgcgtatgccgcggcaaagggtgcttag

SEQ ID NO: 1833 - DNA, 855 bp, Enterococcus faecalis
aagagggaaataaacatgcagaatatggatacgagatatacgcacagtccaaaagatattagtcattattcaacagaagaattgaggaaagaatttttagttgaaaaagtatttgtacctaatgaagtcagtttgacgtatacccacaatgatcgcatgatctttggcggtgtaacaccgacgactgagtcgttagagattattttgaacaaagaattaggtgtcgattatttcttggaacggcgtgaattaggagtcattaatattggcggtccgggttttattgaaatcgacggtcgaaaagaagcgatgaagaagcaagatggctattatgtcgggaaagaaactcgacaagtgattttctcttcagaagatgcagctgatcctgcgaaattttacattagttctgctccggcgcatcacaagtacccaaatgtaaaaatcagtattgatgagattaagccaatggaaactggggaagcattgacattaaatgaacgtaaaatttatcaatatattcatcccaatatttgtgaaagctgtcagctgcaaatgggctatacgattttagagccgggcagttcttggaataccatgccgtgtcatacgcatgaacgtcgaatggaagcgtatgtttactttgatatggaggaagatacaaaaattttccatatgatgggtgacccagctgagacaaagcatctggtaatggggaatgaacaagccgtgatttcaccgagttggtcgatccattcaggtgtaggaacaagcaactattcatttatctgggcgatgtgtggagagaatatcacttataccgacatggatatggttccaatggatgaactaaaatag

SEQ ID NO: 1834 - DNA, 744 bp, Enterococcus faecalis
gaacttattacatggaaacggggatcggtgaacgtgctggctagtgtaacttatgatcgagcggggtcaagctttgcggaagtaacagagtttccgtggtcttatgaaaagcttttttctgggattgagctatttcatatttcaggcattacagcagctttgtcagtgcaatggtgtcaatggacggttgaattagtgaaagccgcaaagaaatttggtgtgttagtcagctttgatattaattatcgtgggaaactatggagtcaggcagcagctgggaaagcattaaaagaaatcttgccttatgtcgattattgttcagctggagaattggatgcgcgttatttattggagattccagaagaccggatgaattcaggattcgtttattattatcaacaaatgcagcagcagtttcccaatattaaatgcttctattcaacgaaaaggatcgtttcttcggctagcaacaatcagttggtagggactttatggctggagaatacgtattatgagtctgaagttcataaaataaatccaatcgttgatcgagttggcggaggtgatgcttttgcggcggggatcttgcatggattgatctcagattttgacgggcaaagaaccgttgaatttgctacggctgcatcagcattgaagcatactgttcacggggattgtaatcaattttcagaaatagagatcgaacaatttttgacagcaggttctggtcgaatcgttcgttaa

SEQ ID NO: 1835 - DNA, 360 bp, Enterococcus faecalis
atgaccatagcaaaggatatgatggttaacgacggcattcgtgcacgcgagttacgtttgatcggacaagatggtgaacaattaggtgtaaaaaccaaagcagaagcattacaaatcgctgaatctgcaaacttggatttagtacttgtagcgccaggagcgaaaccaccagttgcgcgaattatggattatggaaaattccgtttcgaacaacaaaagaaagagcgtgaagctcgcaagaaacaaaaagtgatcaacgtcaaagaagttcgtttaagtccaacaattgacgtaaatgacttcaatacaaaacttcgtaatgcgcgtaagttcttagaaaaaggagacacagtgaaagtt

SEQ ID NO: 1836 - DNA, 1083 bp, Enterococcus faecalis
ggtggttatgagatgaaggctctgaaagcttataaatacagactttatccaacctcaaaacaagaagagtttattcaaaaaacattttcttgtgttcgcttggtgtataatttaatgttacaagaccggattgatatctacaaagagatgcgaaaaaatcctcaacaaacgtttaaaatgccaacgccagctaaatataagaaacaataccctgtcctcagagaagttgatagtttagccttggcaaatgcacaagtttatttggatcgagcctttaaaaatttttatcgggaaaaagggatgggctttccaaaaaagaaaaagaaagaaacggtgcattcctacactacgaacaatcaacatggcacggtcaaaattttggataatcgttatttgaaagtacctaaattgaaatctttaattaaaatgaaggtacaccgccaaccgctgggggagataaaatctgtaactatttctatgagtgcgagtcacaattattatgtttccattttgtgtgaagcgccgattgaaacgaaaacaaagcaacaaaaaatggtgggaatttgtagcagtagggaaaaatttgcgctgctttcgaatggtgaaagcttcgaaaaaagctattgttcaaagcatttaaagcaaaaactacgtcaagaagaacgaaaattaaacaagcgtaaaatgattgctttggaaaaaggtgtcgatctttcgcaagcaaaaaattatcaaaaacaaaaaataaaagtcgcaaaaattcgcgaaaaaatagccaaccaacgaacggatattttaaacaaaattacaacggaattggtttcaagttacgatgttatttgtattgaaaaagcccatcacagtaatgagcggccgccaaaacatgatcgttctgaactggcttggtctttatttttagctaaattgttgtataaagcacaatggtatggcaaagaactcatttgtattgagtcagaggagatcgaaacagagttgtctttttctgaaagtacagaaaattcagagtatcttagaagccaaaaaatcttagaacgtggcttgtctaaacgagaaaccttataa

SEQ ID NO: 1837 - DNA, 960 bp, Enterococcus faecalis
ttaatggcagaagagaaaaaagtcctattagaagtcactggtttgaaacagtatttcaatgttggtcgtaaagacgaagtaaaagccattgatgacattagttttcatatttatgaaggcgaaacctttggattagttggcgaatcaggaagtggaaaatcaacaactggtcgcagtgtcattcgtttatatgatccaactgctggtgaaattcttttcgatggaaaagacattagcaaaattaaatcaaaagcggacatgcaagcattccgtcgcgatgttcaaatgatcttccaagatccatatgcttcattgaatccaagaatgaaagtcaatgatattattgctgaaggaatcgatgtcaatggattagctaaaacaccaaaagagcgggaagaaaaagtcaatgaacttttaaaaacggtgggattaaatccaagtcacagtacgcgttatcctcatgagttttctggtgggcaacgtcaacggatcgggattgctcgtgctttagcggttaatccacgtttcattatctgtgatgagccaatttcggctttggatgtgtcgattcaagcccaagtagtaaacttattacaagatttacaaaaagaacaaggcttaacttacttgtttatcgcacatgacttatcgatggtaaaacatatcagtgaccgaattggcgtaatgcacagtgggaaattattggaaatgggcacaagtgatgatgtctataatttcggcgttcatccttatacagaaagtttgctttctgcgattccattaccagatccagactatgaacgcacacgtaaacggatcgtttaccagcctgcagcggcagatgggaaagatcgtgagctccgtgaaattctcaatggacactatgtttattgtgctgaagacgaagttgcaatgtaccgtgaaaaaattgaagagaagaaaagaaaagctggtttataa

SEQ ID NO: 1838 - DNA, 1059 bp, Enterococcus faecalis
atgactatggaaaaagtattagaagttaaagacttaagaatctcctttgatacatttgcaggtaaagtcaacgccattcgtggtgtgagttttgatctttataaaggtgaaacgttagccatcgtaggtgaatcagggagtggtaaatctgttacaacccgcagtattatgcgtttgttgagcagtaatgccaatattgataacggggaaattttgtttaaaggacaagatattgttcataaaacagaaaaacaaatgcaagccattcgtggtaaagaaatcgcaatgattttccaagatccgatgacttcattagacccaacgatgccaattggcaaacaagtggcggaatcattaatcaaacataataaagtctcaaaaaaagaaggcttagcgcaagcattagaattactaaaattagtcggcattcctaatgctgaaaaacgtttgaaaaactatccacaccaattttctggtgggcaacgtcaacggattgtcattgcaattgctctaatttgttatcccgaagttctaattgcagatgaaccaactacagcgttggatgtaaccatccaagcacaaattttagagttattaaaagatttacaagaaaaaattagcacttcgattattttcattacccatgatttaggggtagtagcaaacgtggctgaccgtgtcgctgtcatgtacggtggacgtctggttgaagtgggaacagcagaagaaattttctataatccacaacatccatatacttggggacttttagggtcaatgccaacgatggaaggaacagaagacaaactttatgcgattccaggttcacctccagatttattagatccaccaactggagatgccttctatccacggaatgagtttgctttaaaaattgatacagaaaaagaaccaccttattttgaagtatcaccaacccacaaagcagcaacgtggttattagcaccacaagcaccaaaagttacgcctccagcagagattgttcgtcgttgggcaatttatgcagagcgtcaaaaaaatccaggaggtagtaattaa

SEQ ID NO: 1839 - DNA, 1089 bp, Enterococcus faecalis
tccaagaattcgcgtatcaggaggtgcaaaaggctaatggaaacagtcaataaaaataatctaccacaagcgattaaagatattccggcagatgagtttcagcctctaaacacttcaactctaaaagaaagagagcgtattgccacaccgtctttaagtttcttacaagactcatggcgtcgtttgaaaaagaataaagctgcagttatctcaatgagtttcttagcagttattatctttatctctattattaccatttgggtttcaccacataacccaacgaaacaaaatgtttcttacattaacttaccaccacgaattcctggcttggaaagcgtgaatggtttaaatggtaaaacaacagttgctggtcaattagttgataaatatgcacaagcaaacgttccagataacgtaaacttttatctaggaacagatggtttaggtcgtgatgtcctaagtcgtttatttatgggaacacgtatttcattattaattgcgtttatcgcggcaattctagatattacgattggggtaacgtatggactgatttccgggttagtcggcggtcgtgtcgatacagtaatgcaacgtattttagaagttctttctggtattcctaacttagttgttatgatcttgatgctaacagtctttgatccagggattgtttcgattgttttagccatggttattacaaactggatatcaatggccaggattgtgcgagcccagaccatgaaactaaaagaccaagagtttgtcatggcagcagaaacattgggcgaatctcgttggaaaattgctattaaacatattttaccgaatatctcaagtgtcattattgtccaaatgatgttcagtatcccatcggcaattttctttgaagcgttcctaagttttattgggttaggcttacgtccaccaaccgcatctttaggaaccttgttaaacgaaggatacaaaactttccgtttccttccatatttaatgtggattccagcggcaacactttcagttatcatgatttgtttcaacttgttagctgatggtttacgtgacgcatttgatcctaagatgaaagagtaa

SEQ ID NO: 1840 - DNA, 885 bp, Enterococcus faecalis
tggttaatcgcaacgattacgtttttcttaatgcaattattaccaggtacgccttataccaaccaagaaaaacttagtccagaaacaatcgctatgttgaataaacaatctggcttagataaaccagtgattgttcaatacggaatttacttaaagaacctggtaacaggagactttggtatttcattccaatttaaaaaccaacctgttgctaagttattagctggtcgaattgggccatcccttcaactgggaggacaagcgattatctttggtacgttagtcggtattttattggggattatcgcagcgatgcgtcaaaatacttgggtagatacgttggcaacattgttagccattttaggtcgttctattccaaactttgttttcgcggtattattacaatacatttttgcaatgaaattaagaatcttaccaattgctatgtggaatggttttgcctacacaatcttgccaactattgccttggcaatgagtcccatggccgattcggctaggtttattcgaaccgagatggtagaggtcttgcatagtgattatgtcgaattagccaaagcaaaaggcttgagtcgctggcaagttgcattccgccacggattaagaaacagtttaattccattgattaccttattaggacctttagccgttggtttaatgacaggttctttagtagtagaaaatatttttgccatccctgggattggggaacagtttgtaaaatcaattatgacaaacgactatccaacaattatggcagtaactattttgtattcaacaatgttagttgttgtaattctgattgttgacttactttatggtttaattgatccaagaattcgcgtatcaggaggtgcaaaaggctaa

SEQ ID NO: 1841 - DNA, 210 bp, Enterococcus faecalis
gtaaagaaaaatgccgatactggaaataacggctgtaataattggccatttaaaagttttcatgtgttcaccctatctattattgtggtctatctagtcattactttaacgaaaataactgaggaagtcaaaaaaatctcggaggtgtcattattgaatagttttggaaaatattttcttaaacggatctttttcatgattatcacttag

SEQ ID NO: 1842 - DNA, 360 bp, Enterococcus faecalis
ggtgaacacatgaaaacttttaaatggccaattattacagccgttatttccagtatcggcatttttctttacttattaataagtaaagaacatatcactacctcgtcattatcagatactttatttatcgtttcgattttatttttaattatcggcattgctttatggattatatcatggggctttttcgataactttcagcgctcaatgagaaacgcgtttcgttttaaaaagaaaaatgaaccgaaagagtttatcccgctttcagtcattggcgatgcacatcgctctttatggctaataactgggggcatcttactgattctgtctataggctttctactattttacttggtgtaa

SEQ ID NO: 1843 - DNA, 705 bp, Enterococcus faecalis
  misc_feature (657)..(657): Nucleotide 657 is "n" wherein "n" = any nucleotide.
ccagcttttgttagtcaaaaagaagcatcaacacaatatatggaactaaatcaacgtgatgaaaaatcaccatttagaaatgcgaacttacgtaaagcaatttcttactcaatcgaccgtaaagcgttagttgaatcaatcttaggggatggttctatcgagccaaactgtttagtaccagcagatatggcaaaagacccaagtggcggcaaagactttgctaaagaagcaggtagtcaaattgaatatgatacgaaaaaagctaaagaatactgggaaaaagcgaaaaaagaattggggatttcaaccttaacaatggatattctttcttcagatgcagattcttctaagaaaacagttgaatttgttcaagggtcaattcaagatgctttagatggtgtgaaggtaacggttagtccggttccattctctgttcgtttagatcgttcaaacaaaggcgactttgatgcagtaatcggtggttggagtgctgactatgctgatccaagtagtttcttagacttatttgcttcagataactcatataaccgtggacgttataacaatgcagagtttgacaagttcgtgaaagcagcaagtagtgcagatgcgacagatcctgaaaaacgttgggatgatatgttaaatgcagagaanacgattatgggagacatgggtgttggtacattattccaaaaatcataa

SEQ ID NO: 1844 - DNA, 345 bp, Enterococcus faecalis
agaggcaggaggggaaagtgtaagatgaatgaaggccaagaaatggaagagcaatttgcccttcttttagaaacgctaaaaaatcaacaaatgaacgaatttcgtgagctatttttagcgttacacatttatgaacaaggacaattttaccaatcgttagatgaaaaagaccgacaacatttatacaattacctatctccgaaagaactagcggatatgtttgatgttatcgaagaagataatgagaatatgaaagattatttagctgaaatgcgcccaagttatgcagccgatatgttagctgagatgtataccgatactgcggtggatttactaaataattag

SEQ ID NO: 1845 - DNA, 474 bp, Enterococcus faecalis
tattatttgcgaaacacgggttttgctcatgctttaattgaccaagaattacgagaaaaaaaggtgacaaaaatttattatgcccttgttggtggagcgattgagcagttaagcgagcatcaattgattgaaaagccaattgggcgcgacttgtcctctttattaaaacgccaagttatcgaaacaggtcaatttgctagtacagaatattggctcgcaaaaagaggagcccaagcagcagctgtgcgcattcagctccatacaggacgaacacatcaaattcgggtacattttgaagcaattggctgttcattgttaggggatgagatgtatcatggaaagatggatcaaggaattgagcggcaagcgttgcattgcatggaactaatttttactcatccttttaccaaagaaacggttcatctgatttccccactagcggaggatatgaaaagtgtagatgatacgttataa

SEQ ID NO: 1846 - DNA, 228 bp, Enterococcus faecalis
acgatggaatttcaatggacatatgacaaagaaacaacacaacaagtgaaatattttttaaaggaacaaggtgtttcaaaagggttattagcaaaggtgaaatttcagggtggtaaaattcaagtgaatgggaccgttcaaaatgccatctatcctttacaaactggcgatgtcgttaaaatgacgattccagatgaagcggaacatgagacattattaaacagatga

SEQ ID NO: 1847 - DNA, 810 bp, Enterococcus faecalis
aggagtctgcttatgaaagtggcgattgttcataactcggaagaaaaatcgaaacaagtcacaaaacaactgacaacactattagagcaaaaccaaattcaaatagacaatcgtcaacctgaacttgtgatttcagtcggcggagatggtacgcttctttccgcttttcatcgatttaatcatctgttaaacgaagtaagtttcttaggtgtacataccggacacttgggtttctatacagattggcgtgattatgaattaaaagaactagttgagagtttgtgtattcatcgtgaaaaaagtacgagttatccattattagatgtgcggattcggtttagagatgggaaaccagataaacattttttagcattaaatgaatcaacaattaaacgaggaaaccggacgatggtgggcgatgtgtttattaaagatgaactgtttgaacgatttcgtggtgatgggttgtcgatttcgaccccaaccggctctactgcgtataataaaagtattggtggggctgttttgcatcctagcattaatgcgtttcagttaaccgaaatcgcctccttaaacaatcgtgtctttcgaacattggggtcaccgattgtaatcgcacatacggagtggctggagattaaattacaggaaagtgatgattattttgtcacggtggaccaattagatatttatcaagaaaatatcgcttctgtctgctatcgaattgcagacgaacggattcattttgcctcttatcggcacatgcatttttggcatcgagtgaaagatgcctttattggtgaggattaa

SEQ ID NO: 1848 - DNA, 705 bp, Enterococcus faecalis
atgaaattcaaggaaattgagggatctaccatggaacgagagtgggagctgtttttagcgccatatgaacaggcggtcagcgaattaaaagtaaaactacgaggtattcgtaaacaatttcgggagcaagataaacacataccaattgaattcgttacaggacgtgtgaaaccagtagatagtattttgacaaagacggctattcggcatattcctttaaatcggattgaagaagaaatgcaagacattgctggtttgcggattatgtgccaatttgtggaagacatttaccaggtagtcgcacttttaagaaatcgtaaagacttaaaaattgtggaagaacgggactacattgaaaataaaaaagaaagtggctatcgttcgtaccatgtggtagtggaatatcctgtgcaattagtcaccggggaaaagattattttggccgaaatccaaattcggacactctccatgaatttttgggcaacgattgaacattctttgaattataaatatcaaggtgtctttcctgaagaaatgaaagaacgccttcagcgagcggcagaggcagcctatttattagatgaagaaatgtcatctattcgtgaagaaattcaagaagcacaacattacttctctcatggccgtggattgctagaaaacgaatactataagcaaattaaaaacgaaacaccagaaaatcagtaa

SEQ ID NO: 1849 - DNA, 669 bp, Enterococcus faecalis
aaaaatttttcacagagaagaccacttttcttgacggaaacctatataatatgtgaaaattggagtgatttaagaaagagagagaaccccatgagtgagcacttagaaattgaatttaaaacattagttagtccgcaagatttcaaacgattaatcgaccattttgctattcaaaaaacggacttttttacgcaaacaaatcattattttgatacggacgattttcaattaaaagcacaacgaatgggcttaagaattcgcgtattagcagatcgtggtgagttaaccttaaaagttcctgcgccagaaggattattagaaatcaatgaccctttatcgcttgagacggcgaaccactttatcaagaggaatcacctccctactgagggggctgtggcgaagaaattacaagaattaggtattgaaatcgcctcgatccatttaattggttcattaaaaacagcacgtgcagaaaaacaaattcctcaaggactacttgcgttagacgaaagttggtataaccaacagcacgattttgaattagagttagaagttactgaagctgaaagcggcaagcaagcgtttcaaacattaatggctgatttgaacattcccattacgcttgcacctaacaagattcaacgcatgatgcggaccactgccccttag

SEQ ID NO: 1850 - DNA, 660 bp, Enterococcus faecalis
atggttgaaatttatttgttcgtcaatcctttaggcggcgtctgtttagaaattgaaaaagaaattatacaattgtctgttaacgacaagaagaaaatacaattgcgctttattcctttattaaatatgaaaacgatcaatgaatttttgagtcgtcaacatattccgattaatgacattaaacgacggaatcgaatttttgaagatttatactcagccgctcttgactataaagcagcacagttacaaggccgaaaaaaaggccgacaattgttgattggcttacaaaaagcagtagctgaagacggtctagcttactctcctgagttatcagaagaactacttctagcggctggcggggatattgatatgtatcgtaaagaccgacaatccgattttgtcaaagaatctttccaaaccgaccaaaaagttgctcgagaaatggggattaaacaacaccctaccgcagtcgtttacaactatacttgcgagaacgatttcggcattttagtcgaaaattttgaaaacatggatgaaattaaacaactttgtcgtgttcatccacataacgaaccgttgctgaaccaaggtgacgcaacctttgaatttaaacgtcgctccaattatcattttccaaatggacatttacatttattataa

SEQ ID NO: 1851 - DNA, 1815 bp, Enterococcus faecalis
actatgagcgaaattaaacaattaccaacacgtgatgaagttccaactccattgacttgggatttaaccaaaatttttaaagatgatgctgcttttgatgttgcgtataatcagttgatagaagagctaaatcaagcagaatcatttaaaggtaccttaggggatggtgcagaagcttttctagctgcgttagaatacgttttagatgtctatcgaaaagtggaaacattatatgtctattctcatttaaaaaatgatcaagacactacaaatacagcttaccaagctttatatgccagagctagttctttatatgcacaagttagtgaagctgtttcttggtttgacccagaggttttaacattaagtgatgaacaaatctggggatattttgaagagcagccgaaattagctgtttatcgtcactatattcaaaatattttagatgaacgtccccatgttttatcgatggaacaagaagctttactggcgggggctagtgaaatttttggtgcctcaagtaatacattttcaattttaaataatgcagacttagaatttccaactgtgcaaaatgctgaaggcgaaacgattcaactttctcatggcgtttatggtcagttaatggaaagtgtcgatccatctgttcgtgaagcagcatttaaaggtttgtacaaagtatacaaacaatttagaaatacattagcctcaactttaggtgcacatgttaaaacacataattataaagcaaaaattagaaattatgattctgctcgagcagcctctttagcaagtaatcatatccctgaaagtgttcacgaaacattagtagctgtagtaaataaacatttacctttgctacatcgttatgtaaaattaagaaaaaaattattaaacgtagaagaattacacatgtacgacttgtatgcgcctttgctaggtgaagcaccaattcgttacagctatgaagaagcaaaagaaaaagcaattgaggctttaaaaccactaggtgaagactatttatctattgttaaagaagctttttcaagtcgctggattgatgtgattgaaaatcaaggaaaacgaagcggcgcatattcttcaggagcttatgatacagccccatacattttaatgaattggcatgatagtttggatcaactatttacattagtccatgagatgggccatagtgttcatagttactatacaagaaataatcagccgtatgtttatggcgactattcaattttcttagctgagattgcttcaaccacaaatgaaaatattttaacagaatatttattacaaacagaaacagatcctaaagtacgtgcgtatgtcttaaatcactatttagacggctttaagggaaccattttccgtcaaacgcaatttgcggaatttgaacattttattcacacggaagatgctaaaggcacgccattaacaagtgaatatttgagtgagtattatggcgagctcaatgctaaatattatggaccagaagtagttagagacgaagaaatcagttacgaatgggcgagaattccacatttttattacaattactatgtttatcaatatgcaactggcttctcagccgcttcggcattgtctaaacatattttagctggagaagagggagctttagagaattatcttaactacttgaaagcaggaagtagtgacttcccaattgaagtgatgaaaaaagcgggcgtggatatgacacaagccgcgtatatcgaagatgcaatgaaagtttttgaagaacgtttaacggaattagaagctttggttgaaaaattatag

SEQ ID NO: 1852 - DNA, 198 bp, Enterococcus faecalis
gagcggaatattggcttaaaaaagctttttaaaattgtgggaaataacttattgagatggttacaagaatgttatgtgttaattaaagtaaacaataagtacctaataactagtattttcctaagagaagatcctgaaaagctcattcattggctaaaaaaagtgaaaaaacaacatttttttagtcacacgtgttaa

SEQ ID NO: 1853 - DNA, 1722 bp, Enterococcus faecalis
actgattttataaaactagtccttactaatgagaagaaatcgttcttaagtcctatgacaaatgatcaaaaacaaggcataataatgcatgtaaggaaaacactattgagtgaaaaatttgctaaggaggcaatatccatgaaagaaagagaacgcgtattagaattagtgaaaaaaggtattctaacgtcagaagaagcgttaattttattagaaaatatggcaactgaaaaagatgaaaaacaaatcgaaaaagctgctgaaaaagttgatacacaaaatattggaacaacaaataaagaagatcaagtctcagatttaatgaatgcattagaaaaaggcgaatcagaaggacctactgttgattcgtttgaagaaaatacacaggacagtgcagaaaaagatcgtgaaaacttagaaagaattcttgatgagttagcaacaaaagccaatcgtgcttcggctgaattggacgaagtcaacgcagaaattgccggcatcaaagaagaaattaaagaagtcgcagaagaaattggtacattagatacaaaagaagaattagatgcattaacagaagatgaacaagttcaacgaaaagacttgcacgttttaattgcacaattagaagaaaaattagcgactcaaagtactgaaaaaacagcactggaagaagaactaaaaaacattcgcaaagaacaatggaaaggtcaatggaatgatacaaaagaaaaagtttcttgtcaattctctgaagagtggaaagatcaagccacagacacctttaaccaagtcggcggcaaagttgccgaagttggtggtcaagtgggagaattcttgaaaaaaacatttaattctttcagtgataccatgaatgataatgtggaatggaaagacattaaaatgaaagttcctggtgtggcaacaactaagtttgaacatgagtttaactatccaaatccacaagcaagtttaattgatgtcaaggtagcaaatggtaccgtggttttcaaaacttgggatcaagaagatgtgaaagtcgaagcaaaaatcaaattatatggtaaaatggcaggagattcaccaatggaagctttcttagaacgaagtgacattgatgtggatgatgaaacgatttctttccaagtgccaaacaaacgggtgaaagcagatttaacgttctatttaccaaaacgcacttacgatcatgtatctgttaaattattaaacggaaatgtcttagtagaagagttaacagcgaaagatgtttacacaaaatcaacgaatgggacgattacgtttaaaaaaattgatgcaactatgttagaaattgaaggtgtgaatggtgaaattaaagtcctagaaggaacgattttagataacattattgaaacagtcaatggtgatgtgtctatttccgcggcaccagaaagtttaagtgtctctctgattaatggagatatccgcattacagctaaagaaaaaacgcttcgccgtgttgaagcaagctctgcaaatgggaatatcaaattggccttgccaaatgacttaggtgttgaagggcaagtgaaaactaatttaggtagtattaacagccgtttaacagatattgaagttgttcgtgaaaagaaagatcgcggcaatcaacaattacattttagacgtgtactggaagaatcaatggctcaaattaatgcttttacaacaacgggagtattttcctaa

SEQ ID NO: 1854 - DNA, 702 bp, Enterococcus faecalis
atttggttaaaagggggaaaaagaatgttacggacacaatttgaagaagaactattgaatctgcacaatcaattttatgaaatgggtatgatggttagtagtgccgtccataaatccgtgaaggcatatattaatcatgataaaaaattggctcaagaagtgattgatcgcgatattgaaattaatgatatggaagtcaaacttgagaaaaagagttttgaaatgattgcgttacaacaaccagtgacaacagacttacgtatgattattactgttatgaaagctagttcggatttagaaagaatggcggaccatgccgtttcaattgctaaatcaacgattcgcttaaaaggagaaacacgtattcctgaaatcgaaaaagaaatttcagatatgtctgattatgtgaaaaaaatggtggataatgttttaatcgcctatgttaaaacggatcaaaaagatgcacgaatgattgcacaaatggatgatcgtactaatgaatatttcgatagtatttacaaacatgccgtagaagcaatgaaagctaatccagaaacggtcattagcggaactgattatctacatgtggcacaatacttggaaagaattggcgactatgtcacaaatatttgtgagtggattgtttacttggcaactggtaaaattaccgaattgaatagtaatcgtgacgaacaattttaa

SEQ ID NO: 1855 - DNA, 918 bp, Enterococcus faecalis
cacataacatgcaacaagcggcgcggattagtgactatacagctttcttctatatgggtaaagtcattgaatacgaccatacaagaaaaatctttacacgaccaaaaattcaagcaacggaagactacgtttcaggacattttggttaggaggagcaagatgggcaaagaaattatttcatcaaaagatttacatttatattacgggaaaaaagaagcattgaaaggcattgatttaacttttaatcaaggagaattaactgccatgattggtccttctggttgcgggaagtcaacgtatttacgttgcttgaatcgtatgaatgatttaatcccagacgtaactattactggaagtgtcgtctataaaggaaaagatatttatggaccgaaaacagataacgttgaattacgtaaagaaattggcatggttttccaacaacctaatccatttccgttttcagtttatgaaaatgtgatttatggcttgcgcctaaaaggagtcaaagacaagcaagtcttagatgaagcagttgaaaccagtttgaaagctgctgccgtttgggaggatgtcaaagataaacttcacaaaagtgcactttcactttctggtggacaacaacagcgggtttgtatcgctcgtgttttagctgtggaaccggatattattttattagatgaaccaactagcgccttggacccagtttctagtggtaaaattgaaaacatgctgttaacattaaaagagaaatataccatgattatggtgacacataatatgtcacaagcatcacggatctctgataaaacggccttctttttacaaggtgatttaattgaatttaatgacacgaaaaaagtatttttaaatccaaaagaaaaacaaacagaagattacatttctggtaaatttggttaa

SEQ ID NO: 1856 - DNA, 792 bp, Enterococcus faecalis
atgatacccattaatttcaataggatagccaaaagaccccgattgcgttacacacggaagacttacatgtcttttacggggaccaatgaggctatcaaaggtgttgatttgcaatttgaaaagaacaaaataaccgccttaattggaccttctggttgcggtaaatccacgtatttacgttcgctaaatcgtatgaacgatggcattgccaattcacgtgttactggaaaaatcatgtataaagatgtcgatgtcaatacgaaagaagttgacgtctacgaaatgagaaaacgcattggcatggtttttcagcggcccaatccatttagtaaatctatctatgaaaatatcacattcgcattgaaacagcatggtgaaaaggataagaaaaaattagatgaaatcgttgaaacaagtttgaagcaagccgcactttgggatcaagtgaaagataacttaaacaaaagcgccttagctctgtctggtgggcaacaacaacgtttgtgtatcgctcgggcaattgcgatgaaaccagatattttattgttagatgaaccggcaagcgcgttagatccgatttcaacaggaacggttgaagaaacgttagtgaatttaaaagatgattacacgatcatcattgtgacacataacatgcaacaagcggcgcggattagtgactatacagctttcttctatatgggtaaagtcattgaatacgaccatacaagaaaaatctttacacgaccaaaaattcaagcaacggaagactacgtttcaggacattttggttag

SEQ ID NO: 1857 - DNA, 903 bp, Enterococcus faecalis
gagaggagccttaaaataatgaatgcaaaaaaagcagataaaatcgcaacaggtatcttatatgccgtatctggcgtcattgttttaattttggcggccttactgatttacattttagctagaggaattccacatatttcgtgggaatttttaacacaaccatccagagcctatcaagttggtggtgggattggtattcagctgtttaactcactatatttactattgattacaatgattattagtattccaatttcattaggtgctggaatttacttatcggaatatgcgaaaaagaattggttaactgatttaattcgtacctcgattgaaattttaagttcattgccttccgttgttgtcgggctgttcggcttcttgattttcgttgtacaaatcggatatggcttttcaatcttatcaggtgcgttagcattaacattttttaacttaccattattgactagaaatgttgaggaatctttgaaagccattcattatacacagcgtgaagcggggttagccttaggtctttcacgttgggaaacagttaaaaaagttattttgccagaagcattaccaggaattttgacaggtgttattttgagttctggtcggattttcggtgaagccgctgcgttaatttatacagcaggacaaagcgcacctgccttagatttcagtaattggaatccattgagcgtttcaagtccaattagcattttccgtcaagcggaaacgttggctgtgcatatttggaaaattaataccgaaggaacgatgccagatggcgctgcggtctcagcaggtgcctccgctgtgttaattttagtagttttacttttcaatttcggcgctcgttttatcggcaaccgtctttataagagaatgacatcagcttaa

SEQ ID NO: 1858 - DNA, 981 bp, Enterococcus faecalis
tgtaaaaaaggtacactatttttatctgtaaaagttggattgtttgaggaggaaatattcttggaagatgtacagaaaaaattattaacaaaatcgaaaagagccaagatggagcaacgagggaaatttattagtttcctatgtattgccttaattgtagcagtggttgtttcaattttctattttgttgcaagtaaaggacttgctacattctttaaagataagattaatgtgtttgatttcttatttggaacaaactggaacccaagtgatatcggtgcagacggtaaacccatggttggggctttaccgatgattgcgggttcctttattgtaacgtttttgtcagcgattgttgcgacgccatttgcgattggagcggctgtttttatgacagaaatttcacctaaaaaaggagcaaaatttttacaaccagttattgaattacttgtagggattccctctgttgtttatggatttattggtttatctgtcattgttccttttgtccgttcaatctttggcggaactggcttcggtattttagctggtacgtttgtgctatttgtcatgattttaccaacggtcactacgatgaccgtagatgcattaaaagccgtgcctagacattatcgtgaagcgtcgttggcgcttggtgctacgcgttggcaaacgatttataaagttgtcttgcgggcagctgtgcctggtattttaactgcggttgtctttggtatggctcgtgcgtttggtgaagccttagcaatccaaatggtaatcggaaatgcagctgtgatgccaactagtttgacaacaccagcttcgacactaacaagtattttgacaatggggattgggaatacaattatgggaacagttgaaaacaacgttctttggtctttagccttgattctattgttgatgtctttactattcaacattgttatccgaattatcggtaagagaggagccttaaaataa

SEQ ID NO: 1859 - DNA, 921 bp, Enterococcus faecalis
ttttcaagtcctacatataatggtaaaatagaatggattgaaattaattggaggaataatgaatcgatgaaaaaaagattgctattatttattggtttggcaagtatacttactttgacaggatgtgcaaaatggattgatcgtggtgaatccatcacagcggtaggctcatcagctttacaaccattagtagagacagcgagtgaggaatatcaaagccaaaatccgggaagatttattaatgtccaaggtggcggaagcggaacaggtctgagtcaagtccaatctggcgcggtagacattggtaattctgatttatttgcagaagagaaaaagggcatcaaagcggaagacttaattgatcataaagttgctgtcgttgggattacaccaatcgttaacaaaaatgtcggtgtcaaagatatctcaatggaaaatttaaagaaaatctttttaggtgaagtaacaaactggaaagaacttggcgggaaagaccaaaaaattgttattttgaatagagcggccggtagtggtacgcgtgcgacttttgaaaagtgggtcttgggagataaaacagccattcgtgcgcaagaacaagattccagcggcatggttcgttccattgtttctgatacaccaggagcgattagttataccgcattttcatatgttactgatgaagtagctacgttaagtattgatggtgttcagccaacagatgaaaatgtaatgaacaataaatggattatttggtcttatgaacacatgtacactcgtaaaaatccaagtgatttaaccaaagagtttttagactttatgttgtcagatgatatccaagaacgtgtgattggtcaattagggtatattcctgtttcgaaaatggaaattgaacgggattggcaaggaaatgtcattaaataa

SEQ ID NO: 1860 - DNA, 402 bp, Enterococcus faecalis
aatcgctcaaaccgttcgaacttggggcttagcagctgctgcattacttttattcgttgcatgttcttaatttccaacactattcggattacgattttatctcgtcaaaaagaaatccaaattatgcgtcttgtaggagccaaaaacagtttcattcgttggccgttcttcttagaaggtgcttggattgggttgattggcgcaatcgtgccagtcattattatgacgttaggctaccatcaagtttataacatgttcaacccgcagttattgcgttcgaattattcattaattcgtccagaagattttatctggaaagtcaatctattaatgattgcaacaggaatgattattggatcactaggttcagttatttcaatgcgtcgtttcttgaaaatttaa

SEQ ID NO: 1861 - DNA, 630 bp, Enterococcus faecalis
atacgattcgtcaccgtgttattgccattgaaaatggtcgcattatccgtgaccaagtggaaggagaatacggctacgatgattagaacattcttttctcatttatttgaaagtatcaaaagtttaaaacggaacggttggatgactgttgcctcagcaagtgcggttacaattacattagttttagttggtatttttatgggcgttatttttaatgcaacgaaacttgctgatgatatcgaaaaaaacgtgacagtgtctgtctttgtcgatattggtacaaaacaaaatgaaatgaaaacattagaaaaacaacttaaaggattagacaatgttgaagatatttcttattcaaacaaagatcaacaattgaaaaaaatccaagaacaaatgggggatgcctggaatcttttcgaaggcgacagtaacccattatacgacgtgtattatgtccgtgcaaaaacaccagaagacacgaaagatattgcgaaacaagcagctaaattcccaagtgtttttaaagccgattacggtggtgtaaactcagacaaaatctttaaaatcgctcaaaccgttcgaacttggggcttagcagctgctgcattacttttattcgttgcatgttcttaa

SEQ ID NO: 1862 - DNA, 735 bp, Enterococcus faecalis
catgttataatgagtaggattgaagaaaaaagagatggagagaacgccatgattgaaatgacagatgtcctgaagatacattcgaatggcacaacagcgattcggaatatttcagtagagatcgacctcggcgagttcgtctatgtggacggtccctcaggtgcagggatatctacctttattagattaatgtatcgtgaagaaaaagcaacaaaaggtaatttgacacttgcaggtcatgatgtaatgaaaataaaaaataaagaagttccttatctacgtcgtgaaatcgggatcgttttccaagactataaactattaccaaagaaaactgtgtatgagaacgtggcctatgcgatgcaagttatcggacggcgtcctcgcgaaatcaaaaaacgcgtgatggaagttttagatttagtcggtctaaaacataaggtacgtgtttttccaagcgaactttctggtggggaacagcaacgggtatccattgcacgagcaatcgtaaatacaccgaaagttttaattgccgatgaaccaactgggaacttagatccagagaattcatgggaaatcatgaaattgttggaccggattaatgcacaaggaacaacagtcgtgatggcaacgcataatagtacaattgtaaatacgattcgtcaccgtgttattgccattgaaaatggtcgcattatccgtgaccaagtggaaggagaatacggctacgatgattag

SEQ ID NO: 1863 - DNA, 750 bp, Enterococcus faecalis
agtgaccatatgattcataataacggccttaattggaattacaccctggtgcgcggtgttattgaatcacaagattgggggagtatgcttttacgaatgtacacacgttgggcagaaagtcacggtttccaagttgaaacgttggattaccaagctggagatgaagcagggattaaaagtgtcaccttattaatcaaaggttacaatgcttatggttacctaaaatctgaaaaaggtgtccatcgtcttgtgcggatttcgccctttgattccgctaaacgccgtcatacttcgttttgttcagttgatgtaatgcctgaattagacgacacaatagaaattgcgatcaatccagatgacttaaaaattgatacctatcgagcaagtggtgccggtggtcagcatattaataaaacagaatcggctgttcgaatcacacatattccaacaggtaccgttgtcgcaagccaagcacaacgttctcaattaaaaaaccgtgagcaagcaatgagtatgttaaaagccaaattatatcaattggaaatggaaaagaaagcccaagaagcagcaagtttacgtggtgaacaaatggaaattggctggggctcacaaatccgttcttacgtgttccatccgtattcaatggtcaaagaccatcggacaaattacgaaaccggcaatgtacaagctgtgatggatggagaccttgatggtttcattgatgcctacttaaaacagcgcttaagttaa

SEQ ID NO: 1864 - DNA, 279 bp, Enterococcus faecalis
gtgaatatgttctcatttgaagaagtgctttttgaattagataatgctatttctttgaaaacgttgaaaaattgggcaaataaaattgaaaaattaacagatgttcgatttgttcgccaatacgctaaaaataaacagggtagaaactactcgtataaagtttttagtgtagaacaggttgaacagttaaagcaattggttcaattaaggaagcaaaatgtcccgctagatcagccaatgattgaagtgtttaagttgcctcaccgccgggaaggggga

SEQ ID NO: 1865 - DNA, 534 bp, Enterococcus faecalis
aaaggaatagtgattggtatgaacggtaaattgactcttgaagagttttataaaaaaatgtcttcggaaatttatagaaaagtgaaattaaaatacaagaaaaaagatttagatgataggtttagtcaggtattgcataattcgtcttttcgttttatttatagaaaatatcagaatcgtcctgatagtttacttacttatcaggaaagtgaaatggaattggataaaaatttagatggtcttgtcgatgaagtattaaaaggattaacaaatgttcgtcaaattgatttttcggaatatctggaaactgtcaaacgtgcaacatttaaacgctgttctgaaaaaacaacaaagtatttttctagtcaagattttaattctatttttagagaagaatgttttgactttgtgaagagtgcttttaaaagagattcagacggagaaagtgttatttgctgtgatgatttagatattttaatggaaatagtagtgaaggattgtgttgaaaaagttatgcgtgtaattaataagtaa

SEQ ID NO: 1866 - DNA, 297 bp, Enterococcus faecalis
atggaatttaaaaatagtaatcaacttatggaatattgggaaacaaaagtaaaggaatttgaaaaagaacttaatagtggaatttcccaattgtcaaaagaagagagacaagaatcatgtgttgttgaagcaaaaaaatatttagaagaaaaaagaaaatatgcgaataatcttcatgcgttattttatgttgaaggtagttatcagaattctaatgaagtagataggaaatttgatagagaattctatccagcgttttattcgtttttaagtgaaattgatattttagctcattaa

SEQ ID NO: 1867 - DNA, 282 bp, Enterococcus faecalis
ggaaggagatttttattggattctagcgaaataatcaaacgtgttagagaacgagtgtatgttgaagtcaagaaacgatataaaaagcctgatttagatatacgtattcgtgacattctgtatgaacaatcagaaagctatgcaaaattagtgaggttttctaacggaaagcgaataaagaaattagctgaccctgtagagtttgaaaaatttatggaaaataggggggctaaaattgttgatgaagtgattgttggtttaaatgaaaaaggagaagtataa

SEQ ID NO: 1868 - DNA, 1509 bp, Enterococcus faecalis
atgtttaaaaaattatttagatatagaggaaggcgtatccgttattcttcaagaaatttgttggcactctatcgagtgttattttttatgccaatttttgtttgtttaggctattttgtgggctataaatggctttatccattgtatctctcaaatccacctgattggaaaatttatattgtgccagcgttaatcattgtaggtgtttcgataggtgcaattgtgttaattacattgcttgttaaggcttcaattatcaacgctggctatttttctaaagtagaacaacggcaagtgttagctcgtatgattattgacaatggctattatacgaagaaacaagtgaaaagttctgatggtaaaacaagagaaaaaatcaagtttccaaaaatttattataagtctgcaaaaaatagtattttcgtttcatttgaaacagcaggtaataaatttcaggaaaaatttgaaaccattggtggctttttggaaacagcgtttcatgcggacaatttaaataagattgatgaaaaaggctttataacctatgaattagcttctgacgtttacaataagcgtatttggataaaggatatgcaagcggacaaaggaaaggttcaattaatgaaagggttatattggtattttgataaagacccacatttattattaggtggcggaactggtggaggtaaaacctttaccattttatctctaatttatgcgctttgccgtgtgggtgaaatggaaatttgcgatcctaaaaattctgacttgatggcactaggtaagttaccaatgtttgcaggaaaagtgcatacaggaaaaacagatattgttaattgcttgaaaaatgcagttgaattaatgaatgcacgttttgaaatgatgaataatagccctgattacaaaatggggaaaaattatgcgtactatggtttaaagcctaagtttattgttattgatgaatttgcagcatttaaagcagaattagccaatgactattcaacagatggagaagttgatgagtatttaacgcaattgattttaaaagctcgtcagtgcggtatttttctaattgtcgctatgcaaagaccagatggtgaatttattaaaacggctttacgtgataattttatgtttcgaatgagtgttggccgtctatctgaaacaggaatccttatgatttttggtgatgaaaacaaaaataaaaatttcaaatatgtagagaaaatcgatggacaaaaagtatacggtcgtgggtacgttgcacaaggcggttctgtcgcaagggaattttacagtccacaagtaccaacagattttgatttcattgaagaatttatcaaaatttctaaagaattaggttatgaagatgtgtcaaaagaagtgcaagaagaagtatctcaaaaaatagctaagcatgtagataaagaagcccttgcggaaattgatgaagagttagaaaaaggtcaagcaaagttagctaagttaagtgaaaaatttgagtaa

SEQ ID NO: 1869 - DNA, 387 bp, Enterococcus faecalis
aggagaaagttaaagtatttgaaagagaaaaatagagatattcgtgttctcaagggaacattgatttattgtgaagatgtaaaatcggcactcaatcgttgtagcagaagctttgaagttttctctcacgatagagtgttttttcatgcaatcagtatgtcttgcatgcaggtaggagaacttgctaactctttttctgaagggtttaaggaaagaaatagtggtgcggttgattggcgacaattaaggtcaattagaaatatttttgcacatgcgtatagtaatattaataaacggactgtttgggaacttgcaacagtcttttttcctgtttacgaagaattttgtagacaagaattagcacgattacaaaaagaaggtaggtaa

SEQ ID NO: 1870 - DNA, 354 bp, Enterococcus faecalis
acgttagaagaggtgagacaaatggtaatgacaatgaatgaaattaaagagcgtgtgaagccaatagctgaaagatacgaaattcctgtgatatatgtgtttggttcttatgctagagatgaagcgaaggaatcaagcgatattgattttttggttggcactactggtttgccagaaaaatatcggtggtctgtgtatagtgattttttcgatgaattgaaggaagccgttgaacatgagatcgatttagtagagcttgaagcatttgaacaaccaattgattcagaataccagaaagagttttacgatactatgatgaaggagaaagttaaagtatttgaaagagaaaaatag

SEQ ID NO: 1871 - DNA, 345 bp, Enterococcus faecalis
gagggggtgtcttgtaagttaatgagtagtctgtcggaaaaaatggagcataaacaagtaaggtatcgagcgtttttagaaagaagattttattcatacagggggtggcaaagttttaattattaccgtgacttgtacttaaaattatttgatgaaacgagtaatggtcttattcaattcttattactagatgattctttttttgaaagtgaacaagctgttttgaaattgttagatagttttttggatcaattagttcgtgcgtacgatttaaagttccatgaagattttgaaaagaaagtgtattttgaagaatatccattaggaataagtgaggtaaattga

SEQ ID NO: 1872 - DNA, 267 bp, Enterococcus faecalis
aagagattttttattaagaaaggaaaaatgttagtggaaaaaaataatgaaagtactaaattattgcaaagaaaaattaggtatatgtgtgcggttgaaggtgaaatggagttttatgtgttacgtccattatttactgatgatgttaatgttcaagcagtagttatgacatttcaagatgtttatgataattcttttttctatgaaggtagtgcagagggattatatcaaacgattgttcggtggattgaaaagaatatagcttag

SEQ ID NO: 1873 - DNA, 198 bp, Enterococcus faecalis
gttcaaaaagagtgggtaaagttaataaaaaataggagtgattggatgaagcaagggaaacgcccagttagaaaagaaaaagagttgttgaaaagtcgcagattgaatgcgaagaattggttagtggaaagacgtttgaagagtagtgttatttttcttcataaagaaagtggtaatttgaaagagattttttattaa

SEQ ID NO: 1874 - DNA, 228 bp, Enterococcus faecalis
aagatgaatcgattagaggaattaatcaagaacccaacaaaattcaatctatcaaatgaagcgattgattcattaagggaattatttgttacttttgaaacgaatccatttttcccaatgagtcgatatgattatgctcgcagatacttaacacaactatattttgcaggctttattagtagtgatttagttcaaagcattttgagtgagttcaaaaagagtgggtaa

SEQ ID NO: 1875 - DNA, 408 bp, Enterococcus faecalis
ataatgggattaacatttgaaaataatacaattgaaaattttgacgtacaaggcacatttggtacgatgaatttcttagaagtagtggcaattaatgagcgtgatggtgaaggaaatgtcactgacgaagttcgtgaacaacgagtgacggtttattctagcaaattaaatgaccaagtagaaattgcgattgacccagattatgatgtcagtggtatcaactatgatgatgagattgaattgactggaaatgtgactgctcgtggttggcttaatactttcaaaggctttaatgacaatgtacaaactgaacaagcttttaaagtacgttcggcaggtattaaaaaggtaggggctgttaaaccaacgcagacacctcagccaagagaaaaacaagaaaataaataa

SEQ ID NO: 1876 - DNA, 342 bp, Enterococcus faecalis
aagaaggaaattattttggcaaatagaattcaagaaattgcattaagtgataaaaatttaggaagtaaaattaaagctgtttataaaacagaacgtgatatttatgtaaatggggcacctgggcgcggtcgtgtgtttaccgcttcaagcgaaaagcaacgtgattttgaaatttttgtccctcatttacgaaactcacaaatgttgaatggtcgtgaagaagttaaattaattgatccagtagcacgaattaatgtgaaacgaaataacattggtaatagtcgctcaattgatatggtagtttatgcaaaacgtttagaagtagttggaggtaataaataa

SEQ ID NO: 1877 - DNA, 270 bp, Enterococcus faecalis
aaaataaggaggataggaatgaaagaagagttattactttttgttgagaagtttgttgcacgaatgaaacgtcagaaaaaagcattctctattactgatatagaaaaaagctataatttggaacgtaagaagttaggtaagagtgctgttaagttaacaaacatggaacgtttaacaattgaaagtcgattattaaaaaatcagattttacaacgaacctataaaatgacaggctatcataagccttgtcaagttgtgttttttagttag

SEQ ID NO: 1878 - DNA, 201 bp, Enterococcus faecalis
aaaaaggaggtaaaaaacgttatgaaaattaagtttttgacagcaaatgaagttagtgaattaatgaattgttcaaaagctaaagcctacggaattatcaaagaattaaatagcgaattgaaagaacaaggaatgaaaacttcagcaggaagagtgaatgaacaattctttgctaaaaaatttggttttgagcatgagtaa

SEQ ID NO: 1879 - DNA, 390 bp, Enterococcus faecalis
catttagtgatattattgcagaaaagaggtgatattatggctttctccgataaattaaaacagttacgaacgaaaaaaggaatcaagcaaagtgaacttgcagaaattcttcatttaagacaaagttcaattagtgactatgaaaataatcgttctactcctaatccagaaacaataaaaaaaattgctgaatattttaatgtaagcgcaaattacttgctagatataccagataaaaatgacactaaattggatagtactattaaagaaactattgaagaattaaaaaatgaagatactcttctatttatgggaaaaaacggcgatattgacgaagaaactgcacgtcttttaaaaattgcaatgaaaaatgcaataaaccactgttga

SEQ ID NO: 1880 - DNA, 276 bp, Enterococcus faecalis
ggagtgagtccgatacgtagcatctattcaaaaataaaaagcgaagttgaaggtataactaatttttattcatctaatgatccaaaaagaatttcagaattcttaggaattcatgttttaaaatctaacttagctaatgtagaagcttttctacaatactataatcacacttacatcattcacattaatagcaatattactgatgaaacaaaacaagataaaatacttgctcatgagcccgcacattattttttacacaaggcgaccacgggtaat

SEQ ID NO: 1881 - DNA, 1491 bp, Enterococcus faecalis
tctctaagaaataaacctaaaattattgatataaaggatgaacaaatgaaaaaagaagaaatgcaaatgcgtaatacacgtcgtcaaaaatcaggaaaaaataataaaaagaaagtaattattacttctttggttggactagctctggttgctgggggcagttatgtttattttcaaagtcactttttaccaaccacaaaagtaaatggagtttctgtaggctggttaaatgtaaatgctgcagaagaaaaattagcgcaagttaatcaaaccgaagaagttgtggttcaaacggggacaaaagaagaaaaaattcaacttcctaaaaaataccaattggatcaaaaatttttaaaagaccatttacacagtagcaaggtgaagctaccgttaaacgaggcattcaaaaaagaactagaagccaaattagcaactttgagttttccagaggggaaaccaagcaaaaatgcgagtatccgtcgaggcaatggcacttttgaaattgttcccgaagaacaaggcacagtagtggacacacagcgcttaaaccagcagattattgcggatgttgaagcgggaaaaggcaactatcaatataatgccaaagatttttataaagcccctgaaattacaaaagaggatcaaacgttaaaggcaacattgacaacgctcaataacaagttaaataaaacaattacagttgatattaatggtgaaaaagtagcctttgataaaacacaaattcaaaacgtgctgaatgatgatggcacaatcaacaaagaaaaactaactacttgggtgacacaattagaaacaacatatggttctgctaatcaaccagttttatttacagatgttcacggcacgacacgtcgttttaaaaacaacggaagttatggctggtcgattgatggggccaaaacgcaagaactactagtaaacgcgctgaatagccaagaacaaacgaatgcaatcactgctccgttggttggtgataccaaagaaaatagtaaaattgccaataattacattgaaattgatttaaaagatcaaaaaatgtattgtttcattgatggcaaaaaaatagtcaccacagatgtcattactggcagatataacaaaggaaccgcaacagtaccaggattccatacaattttatatcggacaaccgatgtgaatttagaaggtcaaatgcttgatggttctcgatacagtgtgccagtaaaatattggatgccgttattaagtcaagggggcgttgtcacacaaatcgggattcatgactccgaccataaattggataagtatggcgataaagaagcctttaaaaccgatgctggtagtaatggctgtatcaatacgccaggaacagaagtttcaaaaatctttgatgtatcctatgacggaatgccggtaattatttatggacatatctatgatgatgcaccaggtgaatttgataaacctgtagattacggcgaagaagtataa

SEQ ID NO: 1882 - DNA, 195 bp, Enterococcus faecalis
attgggggaacgaagatgccatttgtacatgtagaattaattgaaggccgcacagaagaacagttaactaatatggtcaaagatattacagaagctgtgtcaaaaaacgctggtgcaccaaaagagaatatccatgtgattgtcaatgaattgaaaaaagaccgctatgcacaaggcggcgaatggaaaaaataa

SEQ ID NO: 1883 - DNA, 2049 bp, Enterococcus faecalis
gactttttgttttttaacaaggggaacaggtggctgtttcgtttcattgtgaaaaacaggaacacaatgaaacgcttcaaatcaaaaaaattaaaaggagagaattttattatgtctattcacattacttttccagatggcgctgttaaaccgtttgattctggaattacaacatttgatgttgctaaaagtattagcaacagtttagccaaaaaagctttagctggtaaattcaatggtgttttaatcgatttagatcgtcctatcgtagaagatggttcgcttgaaatcgtgacacctgatcatgaagatgctttaggaattttacgtcattcatcagctcatttaatggataatgccttacgccgtcttttccataacattaaatttggtgtaggtcctgcgattgattctgggttctattatgatacagataatggagaatcccctgtgacagcggaagatttacctgcaattgaagccgaaatgatgaaaattgtgaaggaaaataacccaatcgttcgtaaagaaatctcacgtgcagaagcgttagaattatttgctgatgatccttacaaagttgaattaattacagatttgccagaagatgaaatcatcactgtctatgatcaaggcgattttgttgatttatgtcgtggtgttcacgtcccttcaacaggacggattcaagtctttaaattactttcagtagctggtgcttattggcgcggaaactctgacaatcatatgatgcaacggatttatggcactgccttttttgataaaaaagatttaaaagagtttatcaaaatgcgcgaggaagccaaagaacgtgaccaccgtaaattaggaaaagaattagatttatttatggtttcacaagaagttggttcagggttacctttctggttaccaaaaggcgcaaccattcgtcgtacaattgaacgttatattgtggacaaagaaattagcttaggttaccaacatgtgtatacaccaattatggcagatgtggaattatacaaaacatctggtcactgggatcattaccatgaagatatgttcccaccaatggatatgggtgatggcgaaatgctggtattacgtccaatgaactgtccacaccatatgatggtttataaaaatgacattcatagttaccgcgaattgccaattcgaatcgctgaattagggatgatgcaccgctatgaaaaatctggcgcattatcagggttacaacgtgttcgtgaaatgactttaaacgatggccatacttttgttcgtcctgaccaaattaaagacgaatttaaacgtactttggagttaatggtggcagtctatgctgactttaacattacggattatcgtttccgcttaagctatcgtgatccaaataatacagacaaatattttgatgatgatgcgatgtgggaaaaagcgcaagcgatgttaaaagctgccatggatgaattagaattagattactttgaagcagaaggcgaagctgccttttacggtccgaagttagatgttcaagtaaaaacagctttaggaatggaagaaacattatcaaccatccaattagacttcttattaccagaacgttttgacttaacttatgttggcgaagatggtgaaaatacacatcgcccagttgttatccaccgtggtattgtctcaacaatggaacgatttgtggcttacttaacagaagtttacaaaggcgctttccctacttggttagcaccaattcaagcaactattatcccagtttctgtagaagcgcattctgagtatgcttatgaaatcaaagaacgtttacaagcacaaggcttacgtgttgaagtcgatgatcgtaacgaaaaaatgggctacaaaattcgggcctctcaaacacaaaaagtaccttatcaattagtggtcggggacaaagaaatggaagacgcaacggtgaacgtccgtcgttatggaagcaaagaaacgtctgtcgaagatttatcaattttcattgacagcatggctgctgaagttcacaattacagccgttaa

SEQ ID NO: 1884 - DNA, 2007 bp, Enterococcus faecalis
agttcacaattacagccgttaaaaaaagagaaaaagtcaaaaggacttctgaattcagaagtccttttgacttttttcaacaacaaaataattaaatatttccttagagctgggaataatcctgattttttgactattttttgttacaatgagaatgcgaaactttttagtgaagggactagaggtatgaagaaaaactcatttatagataaaataaaaaaaacagatgccgcagcaaagagtcaacgaggtagaaagccacatattccttttcgattgaacttattattttttgtgatattcactttatttgtttcattaattgtccgtttagggtatttacagattgtagaaggagaagagtttaacaaaaaaatcactgccaattcttcactacaaatcacgacaccatcccctcgaggacaaatttatgattcacaaggaaaagtcttggtttctaacaaagccaatttagcaatcacatacacacgaggaaaaaatattgaaggaaaagatattttaccgattgcgaataaagttaacgaacttattaacgttccagttgatccaaacttaacggatcgtgacaaaaaagattattggttagcgaatcctgaaaatttaaaagcagcccaatcccgtttaaccgatcaagataaagaagatgaaaaaggcaacaaaattacggacgaaggcacattatatgccaaagcagttgaaaaagtcacccctgaagaaattgcgtttgatgaccgaaccttacaagcagtaacgatttttaaacgaatgaatgcagcatcacaaatgaacacggtcttcatcaagaatgaaggggtaacagaaggtgaaattgcgacaattggtgaacacacagcggaaatatctggtgtttcaacagggactgattggacgcgtgattattctcaaagtggcgcattacgtagcctgttgggcaccgtttcaactgaaaaacaaggattgccagccgaagaagtcgatgaatatttgaaaaaaggctatgcacgaaatgaccgtgtcgggactagctatttagaaaaacaatatgaagacgttctacaaggtaaaaaagcaaaatcagaagtcgttttagacaataacggaaagattgtttcacaaaccccaatttccaaaggggaaaaaggctccaacttaaaattaacgattgattcaaatttccaaaacaaagttgatgaaattttacaacgaaactattcacaaatagtcaaaaccattggaccatactcagaaaatgcatatgtcgttgctatgaaccctcaaacaggagctattttagcgatgtccggatttcatcatgatttagcaactggagaagtcacacctaatcctttagcacctattttgaattctgaagttcctggatcagttgtgaaagcaggtactttaacagctggttatgaaacaggcgtcattaaaggcaatgacgttttaacagatgaagctattttactagcaggtagtaatccaaaagcttcttggtggaatgcttctggcggaacaaccatgcaattaactgcggagcaagcgttagaatattcttcgaatgcttatatgatgaaattagtctttaaaatgatgggtgtgaattattatcccaatatgattttcccttatgaagtaggagatgacactgtctttaaagaattaagaaaagcttttgcagaatatggtatgggaacgagaactggaattgatataccaggagaaacaacaggaattcaaaacaaggactttaaggattcgtcatctgcgccacaaggcggtaatcttcttgacctatcttttggacaatatgatacctatagcgccttacaattagcacagtacgtttccactgtcgcaaataatggcatccgcgtgcaaccccatgtggtagaaggaatctatggcaatgatgaaaatggagctttaggaaaaattttaaaagaaattgaaccaaaagttttgaatggaggtgaatatttctga

SEQ ID NO: 1885 - DNA, 186 bp, Enterococcus faecalis
atttgtcctcgaggggatggtgtcgtgatttgtagtgaagaattggcagtgatttttttgttaaactcttctccttctacaatctgtaaataccctaaacggacaattaatgaaacaaataaagtgaatatcacaaaaaataataagttcaatcgaaaaggaatatgtggctttctacctcgttga

SEQ ID NO: 1886 - DNA, 306 bp, Enterococcus faecalis
gatttttttcaacaagttttctataatgtggtaaatggaactattccttttacaactgcacgtggtttaaaatcagacaagttttcgattgctgctaaaacagggaccgccgaaacgcaagcaacagatgctaatggagtaaaccatacaacggttaatagtaacttggtggcttatgcgccggacgaaaatcctgaaattgcaattagcgttgttttaccacacttaaatgatgaagcttccaaaccaaatcaaacgattgccaaagaagttttagaagcgtatatggaaatgtacaaaaaataa

SEQ ID NO: 1887 - DNA, 192 bp, Enterococcus faecalis
gaaatctcttggaaagatcaattattagtaggaggggaaaacatgcgcgtaaacatcactttagagtgtacttcttgtaaagaacgtaactacttaacaaataaaaataaacgtaacaatcctgatcgtttagaaaaacaaaaatattgcccacgtgaaagaaaagttactttacaccgtgaaactaaataa

SEQ ID NO: 1888 - DNA, 681 bp, Enterococcus faecalis
aaattagaaaagaatacaaaaagaaagttctatacaaaagacgaactggaacatttcttaaatacagctgatagcattgccaatcaagccaaagaagaaagtttagttctaaaatactatgccgacttagactgtgctatttttcgcttactttcttttactggtatacgtgttggtgaagctttagcattgaattggaatgatattgatttaaaaaagcaggtagttaatataaataaaactactgctatcagtacaaatggattgactataaacgatcctaaaactcccaattctattcgtaaaatttcttttgataacaagactgcttatatcttaaaaaaatggaaacttagacagcatgaagctttaatgaaaaaaggtggatttaaaacacaactcatttttacaaaaattgatggtaccatgtcccgaagtcaagacatttaccaacgttctaaaagattggcagaaaaagctaacttacattctattggttgtcatggttttcggcatacccacgcaacattattattcgaatcagataacgttaggtctaaaataatccaagaacgtttaggacattcttctttacaaataactatggatacttacactcatgtttctgatgaagttactaaagaagcaacagatgctttcagtagctatgtaaatttttaa

SEQ ID NO: 1889 - DNA, 504 bp, Enterococcus faecalis
gcaatggcaacttttaaacaatatacaaaaaaagggaaaaaatactggaaagtaactgcctatttaggcgtagattatttaactggaaaacaaattaatgtcactatcagaaactgtaatacaaaaaaagaagcacagctcaagcttaatcaaaaaaaattagattttgataatggaaatctagctaacgagcatactcgtttaaccacttttgaagaagtttattatatgtggttggacgaatacaaaaaaacagttagggaatccacattcatagctactgaacgacgtatgaaaaaacacattttacccacattcgggaaaatgcgacttgagcgtttaacagtcaagatcgtgcaaaaatctgttaatgaatggtataaaaagaatgaaatgggaaaagtacttttaagttatgcttctcgtgtttgtgactatgctgttggtttagaaataatagactcaaacccatttaagaaaataactaaacctagttcgctatag

SEQ ID NO: 1890 - DNA, 786 bp, Enterococcus faecalis
aaaagtccgtgctgggaacacggacttaaacctcatttagagagtgagagaacttcattgaaaataaatcaaaaattctataattactctattgttgttttagcattaatctcaatcgcgttagttattcttgatttttcaaatgttattaatattagtaatccaccatttaacgttattgatagtattatcttaatcacatttacaattgattacattgttagattttttatttcaaaaaataaaatcaaattttttaaagaaaatatttttgatctgatcgcgataattccttttgatgctattttttctttctttagaatcgctaggttgtttcgaatagctaaaatagctagactagcaaagctaacaagagcgataggtgtggttggcaaattaacaagaaacactaaatcatttttaaatactaacggatttttaaacgtgatttatttaagctcggttctcattgttatttcagcaatgatttactcatatgcagaaaacgttccatacattgatgcgttttggtgggctttggtaacaacaacaactgtcgggtatggtgatatttctccaactactccattaggaagaattgctgcaatcattttgatgattgtgggaattgggtttgttggcatgttaacttctactattactgaatattttaataaaagtaatgaatctaataacaatgatgaaaaagatgaaaaaatagatatgctaataaaaaaaataaatgatttagaaaaagctattagaaaattagagaataaaaagtaa

SEQ ID NO: 1891 - DNA, 363 bp, Enterococcus faecalis
gtcaaaggttgtgcttatatgaaaagtatcaaagagttggtagaagaatataatgtggagttagtttttactactttgaacaaacgcgcatgtttcgaccctacctacggtatcatatttgtaaatcaaaatttaacaccatcagaacaagaagaagcaatatatcacgaattaaagcatgtaaaagaacatgtggatataatggcattgtataaaattcctgtttttcgttctaagatggaagctgaagcagaacaatatatgtttagaagcttaatcgaaaaatatgaaggacaatacaattactcaaatgttatagctcattacaacttaaaaatgggacaagaagtttatttgaaataa

SEQ ID NO: 1892 - DNA, 750 bp, Enterococcus faecalis
aaaggaaaatcccacatcgagaaattgcggggctttatgatggcatcttcggaaaccattgacgttccgaaaggatttattcggatgctctattgtttagagcaagacggctatgcttatttggatcaacaaaggtgttcgttttcggctggccaagtcatgattgtcaatgaggccacctcggttagctatcaggggcaaggaatgtctatgattatattttattttaaaaagcactattttcttgatacgctcttaaatcagctggcggaagaaccagtcatgtatcgtttttttacagaaattgctagcagtgaatttgaaaacattcctcgatatttcgtttttgccagccagccaaattcggatgttcacgtctattcgctattattactaaaacaaattgtgaaaatggcctattttaataataaagtgaccaaagcggcctttgttttgctagtggtggaactaggtcaactgcctagagaagctttaaagatgcaagataattatttgtcgaatcatcaacgtgtcgaggtgattttagcgtatattgagcaacagattgcgcatgtcactttagcagaagtcgccgctaaatttcattttcatccgaattacttatcgaattttttaaaagaaaaaacaaacaaaacgtttacggaaattgtcttagcctaccgaatccaattggcgaaagaccacttgaagcaaactgatttatcgctgttaaccagcaggtggcctgaa

SEQ ID NO: 1893 - DNA, 1200 bp, Enterococcus faecalis
gaaaggatacttatgaaaaagataacacaagaaaaattattatctagcgagcgattttttggtcaaggaatacttacggaagacttcatcgatcaatctattgataaggtcttaaaaaaagttgaaaaaaatattcaaaaactgggagataaattcccaacaccagcaacaacggacaatacgtatatagctatggataatacagaatggacaaacggtttttggacaggaatattatggctgtgctatgaagtttctggggaaaagcattaccgtgaagttgcagaacaaaatgtcaagagttttatttaccgaattgaaaatgaaattgaagtcgagcatcatgatttgggattcttatacagcttatcctgtgtaagtacgtataagttgactggaaatgaagctgctaagaatgccgcgataagtgcagcagaaaaattattgcagcgctaccaatctaagggagaatttatccaagcttggggagaattgggcaatcaagataactatcgtttgatcgtagactgcttacttaatattccattattattttgggcgtcaacagtgactcaagataaacgttatcgtgaagtagccgttaaacattatcatacgacaatcgataatgcgattagagaagattcatctgcttaccatacgtttttcttcgatgctgaaacgggcgatcctttgtatggaaaaacccgccaaggatattccgatagttcaagctgggcgaggggacaatcgtggttgatttatggtttggcattgttccgctcctactgtccagaggaagagaatacagaaatttttgaggcgattacgaattatttcttgaatcgcttgccgaaagattttgttagttattgggatctgatctttatggatggttccgaacagtcccgagatacttctgcgacagcgattgctgtttgtggtatgagtctaatggacgcgtttttacctgagacgaacagtcataagttggtttacaagtgtgcgcagcattccatgctaagaagcttatctgaaaactatactgaatccaaaacagacggaattacagctttactgaatgagggtgtttattcttggcatagtggtaaaggcgtaaatgaaggtaatatttggggtgattatttctatctagaagctttagtgcgattcaaaaaaaattggaaaatgtactggtaa

SEQ ID NO: 1894 - DNA, 576 bp, Enterococcus faecalis
ttatttctatctagaagctttagtgcgattcaaaaaaaattggaaaatgtactggtaaaaacaggaggaaagaaaatgcaaaaacccaatgtaaaaatggtgcgtgtagatgaacgtctgatacatggacaaggtcaactatggatcaagagtttaggagtgaacttagttatttgtgccaatgataaagcggcagaggatagcttacagcagacgctgatgaaaacggtagtcccgaaagaaacaaatattcgtttttggacgatcgaacgtacggcaaaagttatttggaaagcagcccctagtcaaacaatttttgtagtcgttggaaacttgcatgatgccttagaactatgcaaattgggctttccaatggagcagttaaatattgggaatattcatgctgacgaaggcaaggagaaaatctctcaatttatctatttaggtaaagaagataagcaagctctctgcttgatgcgagataactatggtgtaactttcaacaccaagacttcaccactttcaaatgatggctcacagtacttagatgtattgatggaaaaaatatctaattaa

SEQ ID NO: 1895 - DNA, 840 bp, Enterococcus faecalis
aaggagaaggagaaggagaagcagatggagatttcattagttcaaggtatattgatcggattgatcacagctttttgttattcggggcagctattaggaatttacacaaaccgtgcactggttatgtccttttttgtaggtgttgttttgggtgacattccaacggctttaacatttggtgctttagccgagttggcttatatgggatttggtgttggagcaggcggaaccgtaccacccaatccagttggacccggaatcgttggtacgattatggccattacgcttaaacatcaaggggtaacacctgaatccgcgttagcactatcatttccctttgcagtattgttccaactggtaacaacggcgatctatactatattttctgggaatgttaaatggtcgaagaatgtaattgagcaagggaaatatacacgttttaatctgattgctaattcaacatatatagcttttgccgttgcaggatttatgattggactattagcggccttgagtcgtcctggattgcaggcatttgttgaagcgttaccaaattggctaatcaatggcttttctgttgctggcgggcttattccagcgataggttttgcaatgatcatgtctgtgatgctcgaaaagagtctgacaccttatgtgttactaggctatatttgtgcagcttatttagagctgcctacgatggctgtcgcaatggtaggaactgtctttgcgttgattcaatattatggaaaagataaaacgattgttggagaaaagagcataagagacgaaagccaaaccaccttgatggaagaggaggattttagtaatggaatctag

SEQ ID NO: 1896 - DNA, 837 bp, Enterococcus faecalis
tggaagaggaggattttagtaatggaatctaggacaccaaaattaagccaaaaagactacatgaagacagcactacggtcgtatttgttacagaacgcttttaattatacatcttatcaaggggtaagttatttatacacgatcatgccagcgctgaagaaaatctataaagatgaaccagagaagctgaaagaaacggcgagtgcaaacttagagttttataataccaaccctcaaatgctgccattcattactagtatgcagttggcaatgtatgacaatggacaaagtgtcacggatacgcgcagcatcaaaatggcgctaatgggaccattatcgggaattggagactcaatcgctcaatttgggattgctcctttattctcaacaatctttgccgggttagcaatggatggtttgggttttgcaccgatgggcttttggttttcaatgctaatctcgatgttgattatcaagttattaatgggctatttaggctttaaacttggaacgagtgtcatcgaaacattgagtgataagatcgggaaaatttcttcggctgctaatattgtcggagtaactgttatagcggcattagcaacatcatttgttaaggccaacatcgccataaagtattcgcatcacgtagaatccggtgaaaaacaagtaatcgctattcaggatattttagataagattatgcctaaaatgcttccagtaattttaactatcttagtgttttatttgatcaagaagagaaattggaacacgtataaactattgatcttactatttgctattgggatagcagcgtctgtcctaggaattttagcatag

SEQ ID NO: 1897 - DNA, 1950 bp, Enterococcus faecalis
aaatttgaaagcgggaacacgatgaatcttcaaagaatcgaagactaccaactaaaattttttcaacaagattggctttcagagtacttggagcaacagtcacaatttttgaagccactttttgaacgtacttcttatttgctgaaagatcagattatttacaatgatgcaatggatatggaagcttgctccattccttattctttaaaagagtatgcgtggaatcggtatcctgatgatgatccagaatggctctttatgttgagtcgtcaaagctttcttgtagatctggcacaagcatatgcacttactaaaaaagaacgttacttacagaaatggcacagcttgcttattgattttattaacgatgagggtgagccaaattcgacgaatagggatgtttggcgtccgttagatgttgggattcgagtaacaaactggatgaaaagcttgacgtatattccaatcgctgatttcagactattaggaattgatgatgtgttgaacaacgccttgctgatccatctggactatttggagcggtcctatatcgataaatacaggctcagtaattggggtgtgttggcaattggtggaatggcagctattgatttatttcttccagaactggtgaccagtaaacagagggatctaatatggtctcgtttagctgaacagcttgatctacaattctattcagatggaattcattgggagcagagcccgctgtaccagcacgaagttttgatgacattcgtgtatctattgcagatttctgaatatcttgaagtccagttaccattagatcttcgcatgaaattaaaaacacctattttctctacccattatttggcggataaccaagatatcctaaatccgatcaatgatagtgatcatgtcaactttcattacgtatatgatatctatcgcaaattaggtttcatatttgaaccctccatgactgcgaatatggcaaggctttggacgggggatctttatgaagaaagaatctgggaaacaatgaagccaaaagaactttttcgtggcgaatcaagtgggctgatggcgtacaaagcagaggatatctattttacactttttaacggtctgcatgggagcgcacatggtcatgcttctacaggtggatttacactacaactacaaggggatgacttattttccgatagtggtcgttacagctatgtcaacaaatcagagcgacttcagctaaaagagtgcgcttcgcacaatacgatgtttatcgcagaaaatccccatactttagtttccgatacgtggggttatgacaaattaccgacacccttatttcagcaaataaaagaactttctgtcggtttttttgcagaatgcggctggctggataaggcggatcagaatccaatgatttttgagcgcagcttcatctatttaaagtcgatcaactccgtagttattattgatagctttgcaggacagaaagagactgaaattacgagtacctataatttggcaccgtcgataaattgtcaaaaagaagcgcatcggtttgctttaactacgaacaagcataagtacacactcctttttgctggaggccaaacacagcaatcagtggcaaaaggttcagagatttataaccagctgaatgagcacccacgcttatcaaacaagttttgttacaaaacgggaaaagaaattcaagcaacagtcatttctccgttagaggatatccaaattacgccaataaaagtgagtcaaacaggagaaaatgagcaattctgtcaggctaagggatttcggataatcgccggatcggaaaaatttgatctctttgttatgcgggaagatattgtcaaagggaataaactattagtgagtgaatatggccaatttttttatggtcggcttgttttgattgatcaaaaggaagcaaagattcggattaaataa

SEQ ID NO: 1898 - DNA, 225 bp, Enterococcus faecalis
gtgtttttaatttcatgcgaagatctaatggtaactggacttcaagatattcagaaatctgcaatagatacacgaatgtcatcaaaacttcgtgctggtacagcgggctctgctcccaatgaattccatctgaatagaattgtagatcaagctgttcagctaaacgagaccatattagatccctctgtttactggtcaccagttctggaagaaataaatcaatag

SEQ ID NO: 1899 - DNA, 429 bp, Enterococcus faecalis
aggagcaatgagatgaaattattaattactgggcatagtgaattttcgattgggatgcagagtgctttagcgatgattgctggagaactagaagatgtgatcattattccctttttagccgaggagacggtagatgagtatcgccaaaaagtagcggcagaaattcaaatgtttgatcaagctatttgtttcacagatttgttgggtggtaccccatttaaaacctgtgttgaattctctgaggaaaaagatcaagtttttgttgtgagtggcacaaacttaggaatactattagaaggcttgatgatgcgaaatagcgtcacggattcatttgaaattgctgaaacagtcgtacaggctggaaagagcaatattatgctttttgaaaaaaacaatgaaacagaagaactgccagaagaaggaatttaa

SEQ ID NO: 1900 - DNA, 663 bp, Enterococcus faecalis
gaaaggcgtagacgaatgaaaaaagttgaagtattgaaacgcttagaaaatgcgggagttatcgcagtattgcgagcagattctaaagaggaagctttgaaaattagtcatgcagtagtagagggcggaatgattggattagaattgacttttacagtccctcaagcagatgaagtcattcggtcattagttgaaacatatcatgacgagaaagatatcgtgattggcgcgggcacggtgttagatgctgtgacggctcgcctagctataatggccggagccgaatttattgtaagccctagctttaatcgggagacagctgaaatttgtaacttgtatcaagttccttacttgccaggatgtatgacaattactgagatgcagacagctttgaagagcggagtagatatcgtgaagttatttccgggaagtacctatggtccgagtattatctctgcattccaagcacctttgccgtacttgaatattatgcccacaggcggtgttagtctggataatatggcgtcatggtttgaggcgggtgtgacggcagtgggtgttggcggaaacttattagctcacgctaaaactggtgagtttggtaaagtaacggctttggcaaaacaatatatggccaaatttagagaaataaaggaaaactaa

SEQ ID NO: 1901 - DNA, 1023 bp, Enterococcus faecalis
agaacagctgcattaatccatgatatcggcaatcccccttttggacattttggggaagaagccattcgtatttggtttgaaaaaaatggtcctttgtatgcttgttggtctgatttttcggagcaacaacaaaatgattttcttaactttgaaggaaacgctcaaaccatccgacttttaacaaaactgcatcatgataatgggacttctaaagcaggaatgaaactaacagccacgacattagatacagttatcaaatatacggcatcttcagatcaattaaataagcaacagcttttgtctaaaaaagttggctatttttactcggaaaaacaagtgtttaacgccattaaatttgcgacaggaacacaaaataagcgacacccattagtctttttgttagaagcttcagatgatatcgcctatactttttcagatatcgaagatgcctataattatggtttatacagctatcaagatttaaagcagtttgttgatgcgcaaacaggaacaaaaaaatttttaatgttagaaaaagataaaacagaagaagctaccttacaagaatttttgagaaagacacaaagagctgtttgtcaaagcgtagcgaaaaattttgctaatcattatgacttaattatgagaggtatctatcataatgaaattatcattgaagattgtgatgaagtgaaatgctttcaggcattaaaaaacttttctagagtctatgtttttcaaacaaaaacaattttggatcaagaggtattgggcttcaatatcatcaatcgtttactagatgaatttgttccagtcgtactgaaatatgaaaaagtttccatgaataagtatgaggagcgaatctttaataatatttcggaaagcgcgaaagcgttgtatagaagagaagcaaagaacgctacagaagcagaaaaagactattatcgtttgaaaatggcggtggactttgtatgtaatatgacggatggatatgccaaaaaagtttatgatacattattcacttaa

SEQ ID NO: 1902 - DNA, 2787 bp, Enterococcus faecalis
gcgagaggtgattttatgttaaaaacgcaaattgttgattatttacgcaatcaaacagctttttttgaaccatctttagtcagtgaaattttcacagcaagcaatattgcaacgacattttctatcaaacgaaatacagctagtcactatttaaatcagttaaacgaagaaggaattctagttaagatcaatacacgaccggtttacttttttcataaagaagcgtttcagcaacaaaactatcttttaaaaagaactgtttatcaaagtttccaagaaatgatcgatgaacagcctgtttttgatcgcaaaagtgatttttttcagtcggtcattggttatcgcggtagtttagcccagaccatcgaacaattaaaaatggcagcgctttatcctggcggtggattgcctgtcttaattacaggtgaaagtggtacgggtaaaagttttttagcatccttatattatcagttttgtctttcaaaagaactacttgacgattcagcaccttttgtaacagttaattgtgcgcaatatgccaacaatccagagcttttaactagtcaattatttggacatcttaaaggcgcttttacgggagcagattccgataaaattggggcctttcaaagtgcagaagggggcgttttatttttagatgaagttcatcgtttgagtcctgaagggcaggaaaaattgtttacatttttagatcagggtattatttatcgaatgggtgaaaccaatcggcccattcctgttacgtgtcggttgtgctttgccacaactgaagaaatttctagcacctttttaacgacatttttaagacgaattcctattcaaattaaaatcccaagtcttgctgaacgcactcaagcggaaagaaaacaattaattatgcgagcattttatgaggaacagcaagctattcaaaaagcagttactatcacgccacaagttatccaacttttagaaaaccaccattatgtaggcaatgtaggtgaattaagaaataatataaaaattattactgcacgcagctttgccgccaatcttgataaatgtgttattccaatcactttgcacgatctaccgaaagaatttctggatcaatcaatcaaactagttcctgatgaaaatgaattgcctattcgtttagatgagcaaacaaatctggttagtttgttagaggaaacagagcttgcgcaaagaagaattatccagagttatgaacgaatccttcgtctttatgtctctcaccatcatcatctttccactgctaataacgatatctcgaaagaaattgaacgcttattcgatgatttattatttgaaaagaagcgagagaaaaatcacgaaatgctattgtttattacgcaaaatatccgtcaattattggaaacgattgaatcgtcttatcaaattcggtttaatggcagtttagtctatgcattaagcacctatctgtttcaacgaagatgcattgattggtttccagaacaagaacctacaacagtcattgacgaacttttaacagaagttcaaaccaaattagcaactagttatggctacgctgaacaactgttaactttagtgaaacgttcattagatattgaactatcccagatggatcgaattattgtcaccatttatcttcactattcgggttcagtaaagaaaagtcactatccgaaagcggtgattgttgcccacggatatgccacagcaagtagtattgcgaatgttgcaaatcggctgttaaatgtgccaatttttcaatcgtttgacatgccgttagatgttactcccaaaaaaatttccgaacacttaattcactatatggaacgtcaagaaacgaggaatggtttagtaattctttttgatatgggttcattgaaagaaatttatcagtattttccggcagaagaagaaggtccttttttattaatgaataatgtgacaacaagcttggctctgtctataggagaagccattaaagacgaagtttcttttgaagaattgccccaaaaagcgttaacggttcatccaaatgaatgggaaatcatattacctgaaaataaaacggaacgtgtcattttaacaacgtgtagtaccggaattggcacagccgttaaaattagagatttacttgaaaaaagtttacctgcggaagcacaattaaagattattccttgtgaatataatcaattacgtaatgcagagtcgatcaaagaaagttttccagaatatgagattgtcggcatcatcggtacaaacaacccgtcttcaaatgacctcccgtatatctctttagaagagttgattgcaggaaaaggaattacgacccttttagaatggacaaagagagaattaactaaagatatgctgtcctatgtaaatcatgagttgattcgtaacttttcattagatcgggtcattcaatcagtgacgattttagatacagaaaaaattattcgacaagtagaggtctttttaattcaattagaagagcggtggcaacaaacaattcaaaatgatcgtaaattagcggtatatgtccatgtcagttgtttaattgaacgattaatccggaatgaacctattgaaaattataatggcgctgaacaactaaagcagtgtcaaagaacggtcttgcaagagttaaaagaggcgtttagtgtcattgaaaaagtttatagtgtcaatatacctgaatcggagcttttttatgtctatgatgtgttgtttggaaaaacggagtttaacaacgcagaaagcgatttttaa

SEQ ID NO: 1903 - DNA, 486 bp, Enterococcus faecalis
aaaggagggagtgccacttttttggcactctttttgctatataaagaagtaagtgaggtgaagaaaatggaacgtaaaattattctggcaacacatggtaatttcgctgcagggattcagacatcattagctttaatttgtggtgaaacaaagaatgtggaatgtctttgcgcttatatggaacaaccttatgatttagctaagacggtccaagacattttaaagaacaatcaacaaaatgaattaattgtgattacagacttatttggcggaagcgtgaataacgaattctttaattatgtggggaaacaagcaatgcatttaatttcaggattaaatttagcaacattaattgaaatatatacccaaataaatactgttgattcattagttgatttagtaaaacgtgccgttgaaaacggacaagaaagtctttgttattgtaatgagttatctagtaaagaaattttagaagaagaattttag

SEQ ID NO: 1904 - DNA, 507 bp, Enterococcus faecalis
agaaattttagaagaagaattttaggaggaaatgaaatgattaaattgttaagagtcgatcatcgcttgttacatggtcaagtggctttttcatggacccaaggcttaggagccgattgtattttaatcgcaaatgatgacgtacctaaaaatgatattcgaaaaacaaccattaagctagctaaaccagcaggagtaaaactggtcattaaaacgattgaagatgcgattgccgcactaaaaagtggtgttacagaaaaatacaaactttttattgtagttgaaagtgtggaagatgcttatcgattggctactgcttatccagaaataaaagaaattaacttaggaggaatgaaagtaagggaaaatactcgaaacatttctaaagcaattaatatcacaccggatgaagaaaaaatggttaaagaattggtcgcaaatggttgtgaagttgaaattcgacaagtcccaaatgacaaaaaagtagcagcattaaatgtcttgtag

SEQ ID NO: 1905 - DNA, 807 bp, Enterococcus faecalis
aaaggagaaataaaaatgataggacaagcgattcttttaggttgcatcgcttttattgcgcagtcggaatatgctttaggaacctcgttgctttcaagaccaattgtaaccggtttatttgtcggaattgtattaggtgatgtcaaaacgggcgtaatcatgggcgcgaccttagagttagctttcatcggttctttttcagtgggcgcatcaatcccacctgatgtagtgactggtgggattcttggtacagcgtttgctattactgctggcgcaggaacagaaacagccttagtcttaggcttgccaatcgcaacgttaacgttgattcttaaaaatatttatttgggtttgctcatcccaatcatgagtcaaaaagctgatcagtatgctgaagaaggagcatataaaggggtggagcgcatgcatttacttgcaggctttggcttatcgttcatgctagcgctcattgtaactatttcatttgccgtgggcagcaacaccattaaaggcttacttgatctgatccctgaatttattcaacatggattgtctgttgcaacggggattattccagcgctaggatttgcgatgcttgcacgcttactgattaacaaacaagtggcgccatatttctttttaggttttgtcttaatggcctactttaagttacctgtaacaggagtagcaattttgggtgccattacagcagtaattgttgtgaatatcatgaattatgccaaaggaaagaatgaaacaatacaaacaacaagtggggaggtaattgatgatgacgaagacttctaa

SEQ ID NO: 1906 - DNA, 837 bp, Enterococcus faecalis
ttgatgatgacgaagacttctaaaactaagacagaaaacttaattacaaaaaaagaacttaatcaagtcttttggcgttcatttcaaatggaattttcatggaattatgaacgtcagatgaatatggcttatgtctatgccatgatccctattttaaagaaattatatcctcaaaaagaagagatggcggcagctttaaaacggcatcttgctttctttaatactacgccgcatatcgtgacgtttattttaggaattaatgctgcaatggaagaagaaaatgttctggatgaaaattttgaagttggaacaatcgatagtattaaaacctcgttaatgggacctttagctggtttaggtgattcctttttctggggaaccttacgcttgattgcaacaggtgttggaacttcgttagctttacaagggaatgtgttagggccaattctatttttattcatttttaacgtcccccatgtgattgttcgttatttactgaatcgttggggctataaattaggaactggttttctcaaaaagattccagcaaatggcatgatggaaagtctcacattaggcgcttcaataattggcttgatggtggtaggtgctatgaccgcctccatgattgatttaactatcccgattacaatcagcggaagtgggaaaaatgcagtcacggttcaaaatatctttgacgatatcatgcctaaattattaccgcttgcatcttttggttttgttttttatttattgaaaaaagaagtaaaacctttagcgattttaggtggcatggcaattgtcggaattcttggctcattaattggtctattttag

SEQ ID NO: 1907 - DNA, 405 bp, Enterococcus faecalis
ttggtctattttaggaggcaaaatatgaaaacgatgctggattatataaatgaggagcaagcagctctaactcagattcttaaccaatttcaattaactgatacagacgtttcaaaggtcacgcactgtctaattttagcaactggctcgtcacataacgcttgtcaggcggctaaagtttaccttgaagaagtggcgcctatttatgtggaaatccaagagccgttcaattttgctcattatggcaaagtggatgatcggtttgatctggtcgtagcggtttcgcaaagtggtaaaagtgcttcaacaattgatgccattgcaaaaattaaaaaccaaacgtctgtaaaaacagtggccttgacaagtgatgtcaccagcccgattacgggaggttgtggatga

SEQ ID NO: 1908 - DNA, 255 bp, Enterococcus faecalis
caagtgatgtcaccagcccgattacgggaggttgtggatgaagtcctggatttaaaaataaggcttgaaacagttggttttgtcacaaaagggtatacggcaacacttttaaatttatttctatttggtttgaaactgggctatcaaaagcatcaattaacaaaagtagaggttgaagaagaattagcaaaacttaccaaagcaattcaggaaatcgattcggtgatttataaaaccgaacaattttggcaataa

SEQ ID NO: 1909 - DNA, 483 bp, Enterococcus faecalis
acgaaaaaagaattaacagaggggacacgatttatcgcaattggttatgggcccaatattggtacggcgaaagagtttgagacgaagtttacagaaacagttcgcttaccttcccaaggatttgaagtcgaagcctatatgcatgggccttatcttgaagcggataatacacatcttttgttttttattgaaaatcaaagtcctattcaagcacgtagccaagctttgaaaaattatctagccagttatgttggccaatgttacacaattacaacgcgttcaacgagagcatcaaatacgttagatttagcaagtgatgtcgaagaaaaaattagtcctttattgttagttattccatttcaatacttggcgcatcaagtagctacaagtaaaggaattgatttatctcaacggatttttgatgattttgattgtgtcctaaaaagtaaaatagcaaagaaagagggaaatcagccatgttaa

SEQ ID NO: 1910 - DNA, 771 bp, Enterococcus faecalis
aatagcaaagaaagagggaaatcagccatgttaaaatttaatgaagaacaacaaatcaaagacatacgaggtgccttagccttgcgttcagatgttgaaaaagttgttgatcaagtttggacgaaaggatttgatgcggtttattatttaggaatcggcggtacttatgcttcagccatgcaagcagttacttatgcgaatggaaaaagtaatttaccaatctatgttcaacatgctgctgagtattacacaacaggcaataaacgtttaacagaaaaatcattcgtcatcttgtcttccgttactgggacaacacaagaagtggtgcaagccgttcaagaaatcaaaaaggtcggcgcaacgctatttggttttattgatgcaaaagatagtcttttagcagatttatgtgattatgtggtgacttatccagctccaggaactgagcaaatcaagttctttatggtagctgatcgtttaatgcaaaaaaacaacgaatttacagattacgaaaattattaccaagaattggaagaatatttgcctacaggtttagctgaagccgaaaaaagtgccgatgcgtttggcttagcttttgcggaaaaacatcgtcatgatagcattcactattttattggcgcagggaaccaatggggagcggtttattcttatgcaatgtgctattgggaagagcaaagttggcttcgttcaaaatcaattcatgcagccgagttccttacatgtaacactgtgaccagcccgagtatttca

SEQ ID NO: 1911 - DNA, 435 bp, Enterococcus faecalis
ggacacgttcggcatggattggttgatgttggtttaaaacaagtgttaacttcatcagcaatcccacatgaaatagctgacaaagctagtagtcgatatgtcaatggtcatacgtacttaatgattgaaaccaaaggcgcaattttaacgccagcgaaagttttatcagaagcttcagttcctaaaaaggcattatttagaaatcgtgggagcttattaaataagcagtataatttatttgacaaaccagaagatttaaatgagtattatgatgccaatcaaccgccattcttattactaacttatggcggatcgaatcatcaattacgttttgttcgattagggttaccagatattggagttggtcgttggattgaccaaattgatattacgcaggcaccagttcttttaaaaaatccagaggaagttcgtaag

SEQ ID NO: 1912 - DNA, 210 bp, Enterococcus faecalis
aaaaggcaaaatgttaacatggtatgttgttggggtgttatgaaaaaaggagagaaaataatgagtattttaaaagaacatttaaaaagaaattgtgatgcacgaatggttggtgttttatcgttaagcataagagaagcatatcgctacttaatggagctaacagaaagagaatctatttttcaacgagcagaaatgaaaaaagtttag

SEQ ID NO: 1913 - DNA, 1554 bp, Enterococcus faecalis
atgtataaaatcggtatcgatgtcggcggcacaaatacagatgctgttattttagatcatcaattaaacttgattcattcagtgaaagttccaacaaccgatgatattcaaacagggattgccggtgccttaaataaagtcttggcagaatcagcagtggacccaaccaaagtcacacatgcaatgttgggcacgacccaatgtacgaatgccattgttgaacgaaaaaaattagcaaaagttggggtccttcgtttgggctatccagcaaccgcttcggtcttgccttacacagcttggcccaaggatttagtggccactctttcagaaacatatgctttagcacatggcggctacgaatatgatggacaaccattgactgcactggacgaagaagaattacgtgggattttggcctcttggcgaggagaagtagaggcaatcgcagtaattggcgttttttattctttaaaaaatgaccaagaattgtttgttcaagcacttgcgaaggaagtgttaggggcagatgttcctgtatcttgctcctcaatgattgggtctgtcggtttaattgaacgggaaaatgcgacaattttgaatgctgcgttgcacaaagtaattaaagtgaccagcgaaggctttgaacaagccttagaacaagaaaaaattcatcacgcccaagtgtacttatgtcaaaatgatggtacgttaatgtcgttaacgtatgccaaacagtttcctattttaaccattgcttgtggaccaaccaatagtattcgtggcgcttcatacttagctggcttgaaagatgcggttgttttagatgttggtggcacaacgtccgacattggcgtgttagtggatggctttccaagagaatcttcactggccgttgatgttggcggggtacggaccaattttagaatgccagatatcgtgtcaatcggtgtcggcggcggcagtctattgcgtgaacaaccagatggttctgtgacagttggccccgatagtgtcggctaccgtattacacaagaggcccttgtttttggcggcacacaattaacgaccactgatatcgcggttcgcttaggccatgcccaagtcggtgatcctagcaaagtggctcatttagaccaagcgtttgcggaaaaagtgtaccaaaaaattggcgaattggtcagtgaagcgattgatcgcatgaagaccagttccgcagacgtgacggtcgttttagttggtggtgggagtattatcatccccgaagaattgacaggcgttaaagcgctaattcgcaacaaaaacggagcagtggcgaatgccatcggtgcctctatcgctcagattagcggacaatacgaacaaatttatgtttattcaaaaatccaacgagacgcggcgttgactgatgcccaagaaaaagccgtccaacaagctgaacttgcgggtgcagtccctggcacaatcgagttagtcgaggtggaagaaacaccactcgcctatcatccagaaaatgcaacccgcttacgagtaaaagtggttgggaatatgtattga

SEQ ID NO: 1914 - DNA, 1125 bp, Enterococcus faecalis
aaatggaatgaagaagaggagtgtcggagaatgcgttatttagatgcagaagcaattgagaatatagccacaggagcagcttttttagggacaggaggtggcggtgatccctacattggtaaaatgatggctttgtccgccatcgaagaaaacggacctgtcaaactggtttctccagaagaaattgccgcggaggattttttcctacccgccgcaatgatgggtgccccatctgtcgcaattgaaaaatttcccaaaggcgacgaattcgtccgtgtctttgagaagttaggaaaatatttagaccaagaaacgattgcgggaacctttccaatggaagctgggtgcgtcaattcaatgattccaattgttgttgcagcgaagctaggcattcccttggtggattgcgatggtatgggtcgggcctttccagaattgcctatggtaacgttccatttgaatgggatgtcagcgacccctatggcaattaccgatgaaaaaggaaatattggcattatggaaacgattgataatacttggacagaacgtcttgctcgtgttcaaacggttgaaatgggcgccagtgctttagtgagcatttatcccgcgacaggcaaacaattacaagactatgggattcacaacatcgtgacattatcagaagaaattggcaaagtgattcgaggtacctatgcagatgaacaagaaaaacgccaagcattagtagaagttacggatggctttgaattgttccaaggaaaaattctagatgtggaacgagaagtaaaaggtggcttcaatttgggacgtgtcaaattgagtggcttaaacagtgacgctggttcagaagcagtcgtccattttcaaaatgaaaatttaattgccgagaaagatggtcaggtgattgcgatgacgcctgatttgatttgtatggtagatttagaaactttaacgcctgtgacaacagaaagcttgaaatacggcaaacgtgtccaagtaatgggcttgaaagcgaatgccgcttggcgaacgaaaaaaggtatcgaaacagtgggtcctcggtatttcggctacgaaatggattatcaaccactagaaaacttagtagcaaaggaggacaaataa

SEQ ID NO: 1915 - DNA, 408 bp, Enterococcus faecalis
ttaatgtctttgatattccaaaagaaaaagaaaaaagtcgctgtcggtgcggccggcgcgattggaaccttattagcagttgtggggattttaaattactttacgccgattatgtccgtcctttctgcgatggtgccaccagtggctggtgtaatgattgctgcctattggttgattaacaaaggcgatcgaaccaaatggctgccaacgcctggcgtgaataaattaggtgttttttcatggctaattggtgctgcagtggggggcattccggtgattatgagtttctttcccaatgcccctcaattgcctaaccaaccgctaattggcattgttttatcgtttgttatttattatttcggtgcaaaacgtcaacagacgaacaccgaatcattagaaatggaatga

SEQ ID NO: 1916 - DNA, 1053 bp, Enterococcus faecalis
ggaggaatgagaatgaaattaaaaaacgagcaacaacaatcgtggcttagcttagcatttgtttgggcgggcgcaatgattagcgtgccaggattaattattggaggaacgttagttgcaggcatgcctttatgggaagctttgttaacaggatttattggttacggtattattgttattttaatgattttacaaggaattcaaagttccgacttacaagaaccttctgtcaaagtcgcttctcaagtgtttggcattcaaggttcgcaaaagatcatttctattattctagcgattgcttgcttaggttggtttggtttgcaagccaatgtcagcggcggcgccttcacaaactttttaaaaatttacggcattgatttacctgtgtcgctttcttccttaatctggggaattatcatgcttatttcggctctttatggcataaaaatattgaaaattctgaattattttgcggttcctgtgttagttctggtttgtctttatggcttggtggcttcgttaagaaacaacggttgggcggctgttagtcaatatacccctcaaacagcaggaagctttatgtcaggtctttcaatgactgtcggttcttttgcattaggcgcagtaattgctggagattactctcaatatgtttcttctcgtaaagatgtggtcaaagcggccaccttagggattttaccgacaggcttgttgatgattggcgttggtgcggtcttgaccattgcatcgaacaccgcagatatcacggaagtttttatgaatctcggttttccagttttaggaattattgcgctaattttagcaacttggaccacgaatgccgtgaatgctttttctggcggactggccttgattaatgtctttgatattccaaaagaaaaagaaaaaagtcgctgtcggtgcggccggcgcgattggaaccttattagcagttgtggggattttaaattactttacgccgattatgtccgtcctttctgcgatggtgccaccagtggctggtgtaatgattgctgcctattggttgattaa

SEQ ID NO: 1917 - DNA, 1596 bp, Enterococcus faecalis
gaaaaaataaaccagccaaaaggaggagtaattatgagtgtccgcgtgaataatttattaaaattaccgtctttgcgagaagcaacggtactttctggtaaaaaccaattggacacatcggttgcttctctttcttttttagaagtctcagatatgtctttgttttcggaaaaacttcacaaaacaaatgaataccatgctggcgaaattttgattggttcattttgtgccattcgtcatgatgtggtgaagcaatgcgaaacgattcggcatctccatgaattaggcgaagtaggcctaatcttgtactacgttgggattatcgtaccgaaagttgcagaggaagtgattcaattagcggattctttaggtttcattttaatccaaatgcctaaaaatgatcccacattacgctacaacgaagtcatttatgaagtcatgaaattgttagtcaataaaaataaaatggcttcttttgcaacggacctcttggaaaaagtttcccttttgcctgaacaaaaccgcagtgtggaaatgaccttgaaaatcctatccgattttttaaaagtcaatattgcgttaaccacatataccaatgaaatcatcagcaccatcaattggccgcgaagcacgaaattgcccttaaccaagttactttatcaatcacaagagaaagtagcgctgggagaaacgacctacttcattacctcgcaaaaacttcctcagaaagatggacaaacattgaagctttacttcattcgagaagaagagcagttaacctcttttgagatgaatcaagcggtggaagttgttcagatggctctgaatttatgggggaaaaactatgacgaagtcagtgagtatgccttagtccaagcaatcattaacgatgaaagtgataagatgtaccaattagccaaaaaattaatgattgatatttcttctgtcgaaacgatgtggcttttgcccatttggcaacaaggacaagaaatccacgctattcagcaagatttgaaagatttcctacgttactattaccaaacaacgattgtccagcaaacagaaaattatctgattgttctcttaggtaattatttacacaaacagcctgaagccacgattagtaaagaatacttgcaagccacagactatcaggactatttaggtgaaatcatcctttgtccgaaagttcgtaacacgactgaagtgcgtgtcagctaccaaaccgctaatcaagtcgcgccgtttttaaagcgtgtctatccacaaagaaaagtgttatcaatcgcggaaattcgtacagttcaacaaatgatgacgtgtctccaagcaggagaagaagcaatccaacaacgcttagcagttatccaacctctcttaaaagaatcagagcagttaatgacattaggaacgtttttactagatgcaagtagtgattttaatgaatgcggcgaacgcctatttgttcataaaaatacggtcaaatatcgtatcagtaaaattaatgaagcgctcggctatgatatgactaacgccgccgaagcctatgaagtctatttggcgatgatcttatatcgcttggtcacgaatgaatga

SEQ ID NO: 1918 - DNA, 1275 bp, Enterococcus faecalis
attgattcatttaaggggaagaagaacatgaaagtaatgacagaacgaacattgaagcgtcccgaggtgttggctccagccgggacgctagaaaaactaaaagtcgcaattcgttacggtgccgatgccgtttatatcggagggaatgcctacggtctgcgtagccgcgcaggaaatttcacgccagaagaaatggcggaaggcgtaacctttgcccgcgaacataatgcgaaagtttatgtcgctgccaatatggtcactcatgaaggaaaccaggaaggggcaggagcgtttttcagagaattgcgagacatcggaatttcagctgtgattgtttccgatccagctttaatcgaaatttgtgcgacagaagcaccaggtttacccatccatttatcgacacaagcttcagcaaccaactatgaaacattagaattttggaaaaatgaaggcttagaacgtgtggttttagcgcgcgaagtttcaatggaggaagttgcagcgattcgtgaaaatacggacattgaaattgaagcctttattcatggagcaatgtgtatttcatattcaggacgttgtactttatccaaccatatgtcgatgcgggatgccaatcgtggcggttgctctcaatcttgtcgttggaaatacgagttatttgatatgccttttgggacagaacgtcggagcaaaaccagcgaaggggaagttgaagaagagttttcaatgagcgccgtagatatgtctatgattgaacatattccagaattaattgaaaatggtgtcgatagttttaaaattgaaggccgcatgaaatccattcactatgtttcgacagtcgctaatgtgtataaaaaagccgtcgattcttacatggaagaccctgaaaactatgtctgccaacaagagtggattgatgaattatggaaagtagcacaacgtgaattagcaactggtttttattacaatacaccaagtgaaaatgaacaattattcggcgaacgtcgtaaaattccgcaatataaatttgttggtgaagtgattgcgtacaatgaaaagacgcaagtcgcaacgattcgtcaacggaaccttttcagtgtcggcgatgaaattgaattttatggtcctgggtttacccatttccaccaaaccgttaaagagatgtataatgaagacggtgaagcgatcgatcgggcacctaatcccatgatgttattaacaatggaagtgacgcaacctgttgcagtcggcgatatgattcgtaagaaaaaataa

SEQ ID NO: 1919 - DNA, 948 bp, Enterococcus faecalis
acggtcataaagaaggaggctatatttatgattgaactgattgcaactgcagaatctgttgagcaggctgtagaattactcgcaacaggtgtggatacattatatattggagaagaaacattcgggttacgtttgcccgtatcttttacacgagatgaacaacgcgagattgtgaaacgtgcacatgaaatgggcaaacaagtgctagttgcagtaaatggcattatgcaccctgaaaaaatgaaattagtcccagagtatctgacatttttaaaagaaatcaacgtcgataaaattactttgggtgatccgggtattgtgtttattatgcaacgagatggattagaaattccttacgtttatgatggcgaaaccttggtaacgagctcacgtcaaatcaatttttggagtaaacgaggagccatcggagctgtcctagctcgggaagtaccttttgaagaaatggtcgcaatggaagaaaacttagcagttccagctgaaattcttgtctatggggcgacctgtattcatcaatcgaaacgcccattaattcaaaattactacaattacacaaagaacgacaaaggggttacgaaagaacaaaggctgtttatttctgaacccaaaaaaccagaaacccactattccatttatgaagatagtcatggtacgcatatttttgccaataacgatgtgaacttgatgaatgagttaacaaacttgtatgaccatcactatcgtacatggaagctcgatggcctttacacgccaggtgaaaattttgtcgcgattgctcgcttatttgctgaagcgaaagcagcacttgaagcgggaacttggtcagaagatcaagcagctcatgcaacagctgaaattgaaaaattacatccaacaggtcgtggcttagacaatggtttctttgatttaagtgccgatgcaataaaataa

SEQ ID NO: 1920 - DNA, 2136 bp, Enterococcus faecalis
tctcatgcgattgatacccgacccggaactgccaaccaacatattttttcaaatggaaattgtctaccctatactggcgtgccatttgggatgaacttttacgccccgcaaacaactgaccaaaaaggcagctggtggtttcatccagaaaatcgaacatttcaaggctatcgagtaacgcatcaaccaactcctaggatgggtgatctaagtcatttattaatgacccctgtcagtggttcattgtcggaactttctttaatccatgcccaaagttcttatcgtccagaaaaaagcctttttactcctgtcgaaattaacttaactcaattacgctatcaaataacttctcaattaatcccaagcatgtatggtggtatcttaaccattgattatcaacaaaaagataatcacttactactaactctgcctggacgttatcaagtaaaacaattagatgaccatcaagtggctgtaaaagtcatcaactattctggttgtgaagatccagattttagtttttattttgtgcttcattttgaacagcctttaaccaaatggtttgccccttcttcaggtgaagatggcaaaatccttctttcttttggaaatattgctcaacaagttgttcattttagtagttcatttatttctgaaaaacaagcgcagttaaatttagcgcgagaaatctctttgcgttctactgagatgctgcaacaaggaatcgcagattggcataattatttcgatcgccttaaagtaacgcatgaaaaccctgaacatactaaaacgttttatcatacactgtatcgaacattcctatttccgcaaaccttttatgaattggacgaaaatcagcagccgattcattatgatacgttctcgcaaacggttcgtcctggtgtactatataccaataatggcttttgggatacttataaaacggtctacccattgttctcactaattgctcaagaaaaatacgaagagatgctagaaggctttttaaatagttacaacgaaacaggtttcttgccaaaatggttatctccagatgagcgtggtttaatgcccggcaccttgattgacgctgtcattgctgatgccgccgtgaaaaagattcgtcctgacttgatgcctcagttcctagaagcgatgaaaaaaggcgctacacaacaaagcgaacgagaaaattatggacgtcaaggaactctggattatctaaaatatggctatgttccttcaacctatcatgaatctgtcaatcataccttagattatgcgtacagcgatttctgtatttcgcaagttgcaaaaacattgaatgattcagagaccgcaacgttttatcgtcaacaagccttgaattatcaacaactttttaatcctgaaactggctttatgcaagcaaaggatactgaaggcaatttccgtcctgactttttagatattcgttggggcaaagattacgccgaaggaagtgcttggcaatcaagttttgcggtttatcaagattttgcaggtttgattaagctatatggtagcgagttagctttcgaaaaaaaattaattcagctatgcaatcaagcgcctaactttaacgttgaaggctatggttttgaaattcatgaaatgagtgaaatggcggcaattgattttggtcaattagccatctcaaatcaaccaagtttccattatccgtttctattcagctacatcggcaaaccagagatggctcaaccacttttaaaacaactaatgcaaacatttgatgcttcaccaactggctatccaggtgatgaagacaatggcagcatgtctgcttggtatatttttaatagcttaggcttttatcccgtcacaccaggaactggtgaatatgtaatcgggatgcctttagtccagacggcggaagtaaaactatcaaatggtaaacagttaaccattcagacatcaccaaacaaagtccaacaacaatttattcatgaaattcagttaaaccaagaaaaacatactgcgccttattttactcatcaagaactattaaatggcgggactttagattatcaattagggatcgtcccgaatccacaaaacacagcagaacgaccgttttcattaagtacggaaaaataa

SEQ ID NO: 1921 - DNA, 1542 bp, Enterococcus faecalis
agggaaagaaggagaagggacgacaattcgtctttcgtttgtagcataaggggtgaaaagatgtatcgagtgatgtttgttgatgatgaatatatgattttagaaggcttaaaatggattattccttggcaagagttaggctttgaaattgttaaaacagcgcgtagtgcgcaagaagcattggcttttttagaaacagaatccattgatgttttattaacagatattacgatgccagaaatgagcgggatcgaattaattgagcaagcaaagaaaaaaggacatcaatttattagtttaattttatcaggttatcaagagtttgattacgtcaaaaaaggcatggctttgcaggtccaagattatcttttgaaaccagtcaataaacaagaactattagccaatatccagagaattaaaatagaattggaccaacaaaaaaaatcccatgcccgcgtgcgtctatatctagaaaatggcttgatgcgttggcttaatgatgaaatcagcgaaggggaatacgaagagttaatgcagcaatttgcgactataaaaccaggtgattttaccgttttattggttgaagctgagatgtcatttttagaaacaatcaaggaactatttatgaaaaaaggccaactgttattcattgaaagttggatgagtacgtaccaccaattgttacttatctataaaggggccagacaagaagcgttcttatttattcgtgaaattgaagcgattctagctggtcaaggtcagatttttgtaggggaatctgtcaatgaatgggaaacggtttatgaaagttatgagaaagtaaaacagttgcaagcaattgaaacgttttatcaagaatttctgccaaataatcaaaaagaacaaatgaatcgttcggcagaagattttactttcctagcgtttaaccaagccttgatgattggggatatgcagaccattcaacgggaattagatgctattttcaatcagttaagtcaacaacacgctacgccagaatatgtacgctatgtagtcttcttacttttttcagatatttcccgtcagtatccaactgtgttagaagaaaactatgaaaaaatcgtggaagaaattcgagccagcaacaatcttaatacactgtatgcgttaatgcagcaagtcttggcagaagtgaaaaataaacctaaaataaaaaaatattcagaaagtgttagccaagctgtagaaagaattgaacaaggctatttagaagaattaaacttaaaaacggtggcggatgagcttcatttgaaccctagttatttaggccaaatttttaaaaaagaaaccaagcggagtttttctcaatatttgaatcaagtgcgtaccaagcatgcccagaaattattattgtacacggatgatacaatcaacgaaatttcagaaaaagtaggatttaacaataccaactatttttcaaaaatgtttaaaaaattaaatggaattacgccaaaagaatttcgagagcaataccaatcaaattacgcaggtgtcgaagaataa

SEQ ID NO: 1922 - DNA, 1776 bp, Enterococcus faecalis
tgttggggtgtgcctatgtcacgcgcaaaaatcgccagtttattgatggaaagttggaacaaaatgaagcgaatcttcaaaaaactgtttaaaaaaaaatatttattaaatcgattagtacaaaaatacagtctactgttaacaagtattattttgttaacggtggctgctttgtgcgtttatgttacttatacaattaacttatcaattgattcacaaaaaaataacgccgtttcccaaattgacagctatgtaacgaataaaaataatgcagcgacgaatatgattaatgaattagctggctctgcaagtaaaattgaaaacatgcgaaaatatatggaactttctcctcctgagtattttgactatacttacagtcaatggtcggaagatcgggtcagtacccactttggaaataatttaagtacattatttagcacctttcctgacttagaagaagtgattattcgcttagatgaatttgatcaggttttgttcgccaatcgcacagctacaaatggaaaaaaaatggatatgtcatcaattaaaaaacatggctttcaactaatgcgaattatctccgatccttatacaggacaaccactgggagaattgtacactgtgttttcaagtcaagaattgctaggcaaccaagcagacttattgaaaaaatcaggtattaatgcgtttatctatgatagtgctgggaatcaaattttttctgaaaaagcgcaatttaccaaagaagaagagcggcaactagataaaagaatgcacaccgatagtgacattcaacaggtttttcataatcgctacgatattacggaaatagaaagcagtggccggagtaccattctcttattaacaagccgccgagtcttatttcaacaattgtttatgaattatgcggccattttagggattgggttacttttgattgttattttattagtgggcttaaaccgcctatttaaacgctattctcaacaagtccaattaattttagaagcgacacgagccattggcgatggcaatttaaaagaacgaattgacacgaatcaagttcaggaagagttgaatgatattgcttccgcaattaattttatggtagacagtttagatcaatacattcacgatatttatactttagaaattaagcaacgtgatgcccacatgagagcgttacagtcgcaaattaatcctcattttctttataatacattggaatatattcgcatgtatgccttgagtcggcaacaagaagaactagctgatgttgtctatgctttttcaacgttacttaggaataatattaaccaagaaaaaaccacgaccttggcagaggaaatctcattttgcgaaaagtatgtgtatttgtatcaaatgcgttatcccgatcaatttgcctataagttcgaaatagaagaaacaattgctgatgttgaaattcctaagttcatcattcagccgctcgtcgaaaattattttgtgcatggtattgactatcaacgacaagacaatgctatcaaggtccacgcctaccgagaaggcgaaaaaattattgtggctgttgtggataatggaaaaggaatcaccgccaatcggttagaggaaattcgcgaacgtttaaatcaaacagaaatagacacggaacaatccattgggttaagaaatgttcatgaacgtttacaacgcttttttggggagagttatggtttaaccattgaagggaaagaaggagaagggacgacaattcgtctttcgtttgtagcataa

SEQ ID NO: 1923 - DNA, 312 bp, Enterococcus faecalis
attctatttcccataatactcgttatgttttacatttatatgctactatatgaaggaagctattttatctcaactattgatttaatgaagctttcatttatcagtatctttttaaacctcggtgtattttttaaagtcttattcggtgtaattagtatcgttgctttaacttggaaaatgaaaggactgctactatttgcttcgtttgccttaattatgatgttggggtgtgcctatgtcacgcgcaaaaatcgccagtttattgatggaaagttggaacaaaatgaagcgaatcttcaaaaaactgtttaa

SEQ ID NO: 1924 - DNA, 414 bp, Enterococcus faecalis
gctatcttcaacagaaaaacaattataaaaaaaacgaaagaaaaacaggaaataagaaagggctgtcaagaaaatttcattgacaaagctttcatacccctgtataatagcttttgttgcttaggagtgataattatgaagtggtctttgttagaattaaataaatacaaagaagagccgctagtgttttcagaaacattgcatcttaaagaagagcttcttcaacgagatgataccttgttggatgtaagtccaatcaaagtagaaggcttattagcagtcaataaatcagaatatttacttcattacactattcaggtaactgtaaccgttccttcatcccgttctttagaacctgtagctttgccaatgcaaatcacggtcgaagaagtctacacgacgggaatgggcgag

SEQ ID NO: 1925 - DNA, 345 bp, Enterococcus faecalis
tcggtttctaaattagttcaaggtcaaggtgtcggcgaagaagcaattattgcaaaagccgttgtggcagcaactgctgaagaagcagttgctaaagcgactgaaggagctattttagttacaaaaacaacagataaagaatacatgccagcaattgaaaaagcatcagcattagttgttgaagaaggtggtttaacttctcatgcagctgttgtagcgattgcgcaaaatattccagttatcgtaggtgctgcagatgcaacatcattaattaataatgacgaagtgattactgttgatcctcgtcgtggtattgtttaccgcggagcaacaacagctatctaa

SEQ ID NO: 1926 - DNA, 1476 bp, Enterococcus faecalis
ctaatcttattagctttgtataaacaaatttggaataggagcgttttagtaatgaaaaaaacgaaaatcgtatgtacgattggaccagctagtgaatccgttgatatgctagtaaacttaattaatgcaggtatgaatgtttgccgtttgaacttttcacatggtgactacgaagagcatggtgctcgtattaaaaacattcgtgaagctgtaaaaattacagggaaacgcgtagcgatcttactagatacaaaaggtcctgaaatccgcacaaatgacatggaaaatggcgcaatcacaatgaaaattggtgactcagtacgtatttctatgacagaagttttaggaacaaatgaaaaattctcaatcacttatccagaattaatcaatgatgtaaacgtaggttcacacattcttttagatgatggtttaatcgatttagaagtaactgatatcgaccgtgatgcaaacgaaatcgtaacagttgttaaaaacgaaggcgtcttgaaaaacaaaaaaggcgttaacgtaccaggcgtttctgtaaacttaccagggatcactgaaaaagatgctaacgatatccgtttcggaattggtcaaggaattgactttatcgcagctagcttcgttcgtcgtgcttctgacgttttagaaatcactaaaattttagaagaagaaaacgcaacacacatccaaatcattcctaaaatcgaaaaccaagaaggtatcgataatatcgatgaaatcttaaaagtttctgatggtttaatggttgcttgtggtgacatgggtgttgaaattccaacagaagatgttccagttgtccaaaaagctttaattaaaaaatgtaatgctttaggtaaaccagttatcactgcaacacaaatgttagattcaatgcaacgtaacccacgtccaacacgtgcggaagcaaatgacgtagcaaacgcaatctacgatggaacagatgcagtaatgttatcaggcgaaactgcagcaggggattacccattagaagctgttcaaacaatggctcgtattgcagttcgtacagaagaaacattagttaaccaagattcattcgcatggaaattatataccaaaacagatatgatggaaccattcggacattttgtggccaaaacacaaggtaattggggtatccaaacattcgttgcggcaacagaatcaggccatacagcacgtatgatctctaaataccgtccaaaagcacatatcgttgcaattacgttttcagaacaaaaagcacgtagcttgtcattatcatggggtgtttacgcaacagttgctgacaaaccatcaagcacagatgaaatgtttaatttagcttcaaaagtatcacaagaagaaggttatgcttcagaaggtgatttaatcattatcactgctggtgttccagttggcgaaaaagggacaacacacttaatgaaaattcaaatgatcggtttctaa

SEQ ID NO: 1927 - DNA, 966 bp, Enterococcus faecalis
cgaatgaaacgcattggtattttaaccagcgggggagatgcccctggaatgaacgctgcaattcgtgcagtcgtacgcaaaagtatttttgatggaatcgaagtttacggtattaactatggatttgccggtttagtcgcaggcgacatccgtcgtttagatgttgctgacgttggcgataagattcaacgtggtggaacattcttgtattctgctcgttatcctgaatttgctactgaagaagggcaattaaaaggaatcgaacaattgaaaaaattcggtattgaaggcttagttgttattggtggagacggttcttatcatggcgcaatggctttgacaaaacgtggtttccccgctgttggaattcctggaacgattgataatgatattcctggaacagatttcacaatcggttttgatacagcgattaacactgttttggaatcaattgaccgaattcgtgatacagcgacttctcatgttcgtacattcgttatcgaagtaatgggacgtaacgctggtgatatcgcattgtggtcaggcgtggcaggcggagcagatgaaatcattattcctgaacatgattttgatatgaaaaacgttgccaaacgtattcaagaaggccgcgaccgcgggaaaaaacattgcttaatcattttagcagaaggcgtaatgggcggaaatgaatttgctgataaactttctgaatacggtgatttccatacgcgtgtatcaattttaggacacgtggttcgtgggggctcgccaagtgctcgtgaccgtgtattagcaagtaaatttgggtcatatgctgttgaacttctaaaagaaggcaaaggcggtttatgtatcggtatgttagataaccaagtagttgcagctgatattattgacacgttagaaaacaataaacataaaccagatttatctctttatgagttaaatcatgaaatttctttttaa

SEQ ID NO: 1928 - DNA, 3381 bp, Enterococcus faecalis
gaaaataggagaagaggaaaaaatagcaaggattcaaaaaggagctgtccaatgtcatttccacaattgcataccgttacttcctattcgcttttatctagtacggttaggattcgttcctatgtaaaacaagcgaaagcgttaggttatcaaacattagcgattaccgatatcaatgtcttgcatggggcggttgaattttatgaagcatgccaagaagcgggaattcaaccaattatcggtttaagattagaatataccccagcagaaaaagaagggcattccgagttgcttttatttgctaaaaatttaaaagggtatcagcaattaatgcaactatctagtagcaaaatgacgacagagggtcccttttacttagcggaacatcaatccttattaagtgatttatttgccgtgactttgtcagctaaaggagaagtcgcccaaacattttttgaagatgaacaacaagcggttcacgctttccaacaacttgcttcatattttgatccccagtcgttatttgttgaacattctttttcaatgaatcaacaacgtaatccagcgctcttttctttttaccaaagagaacaattacctggcgtggctttgcaagaggtacgtcatttaacaagggaagaaggctttgccgtaactgttcttgagagcatcaaagaaaataatcaattgaatattacaagccaaacaccggaaatagaaggtctgaattacttgcgtgaagcagagacgacgatggaacaaatgcttcaaatagctggtgcagaagtggtccagaatacgattcagctagctgaaaattgccgagttgacattcctttacatcaaaaattattaccgcattttcctgtgcctgataatcaaacggctggttcttatttacgcacattgtgtttagaaaaattaccagaaagagtgcctcatctaaatgaagtttaccaaaaacgattagaaaaagagttaaccatcattcacaatatgggctttgatgattactttttaatcgtttgggatgtgatggacttctgtcataacaatcaaattgttacaggcgctggccgaggttcagctgcaggctctttagtgtcctatgtgctatcaattacagatgtagatccaatcaaatatgatttgctctttgaacgttttttgaatccggaacgctacacgatgcccgatattgatttagatattcctgataatcggcgggaggaagttttagcttatgtcagtcaaaaatatggtcattatcacatggcgcaaattgccacgtttggtacgatggctgcgaaaatggttttacgggacgttgcacgtgttttcgggttgtcccagagtgaagcgaatcgttggtcggcagctgtccccaacaagctgaaaattacgttagaagaagcataccaagagtcaaaacggatgcaagaattggtcaatttttcaccaaataatcaattgctctataaaacagctgttcagctagaaggattgcctcgccatgtttctacgcacgcagcaggtgtggtaattagtgatgaaaatcttttgaatttggttccgttacaaccaggatcgaatgaaattttattgacccaatttactatgaatgatgttgaaaaaattggtcttctgaaaatggatttcttgggcttaagaaatttatccatcattgatgataccctcacagctgttaaacgcgtctataatcgaaccattcgtttaaatcagattccattagatgacgaaacaacgctggctttatttagaaaaggggaaacaagtggtgttttccagtttgaatctgctggaattcggaatgtattaagaaaattagggccaactagcattgaagatattgctgctgtcaatgccttgtatcgtcctggtccgatgcaaaatattgatgttttcatccgccggaaaaaaggcttggaacaaattagttatccagagcctagtctcgcccccattttggaaaatacgtacggaattattgtttaccaagagcagattatgcaagttgctgcgaaaatggcaggcttctctttagggcaagctgacattttacgtcgggccattagtaaaaagaaaaaagatgtgctagatgaagaacgaaatcattttgttaatggtgcgttacaacaaggctatccccaagaaacagctaaccaagtgtacgattatatagagcgctttgctaattatggctttaaccgctcgcatgcatttgcctattcctttattggttttcaaatggcttacttgaaggttcattatccgagtgctttttatgtcgcattgttgcattctgttcgtcataatccaacaaaaattaaagaatatattggcgaagctagaaaaaacaagcagacgattttgcagccgtcaattaaccaaagtcactacagcttttacctaaatcagcaacagcaaattttatttggttttagttctttaaaaggaatccgccgagacttcattcaaaatattttaaatgaacgccgagaaaatggaccgtacaaaacgttcgatgagtttcttttgcgaattgaccgtaagtggttgaaagttgaaaatatcgaaccattgattgccatcggtgcatttgacgaaattgcgcctaatcgccgtcaattagcggtaggtttagagagtaatatccaaagtattcttctcagcggtggtagtatggatttgttagaaacgttgaagcccaaggaagaagaaattgccgattatccgctagaagagcgactagaacaagaagaacaatatttaggggtctatttatcaggacatccgacagaagagttcaaaaaaacacgcttagccaagcaaacgcaacttgttcatgaacttgttgaaaatcagcccacgaaattattgatttatgtcaaaaacattcggacgattcggaccaaaaagggagaacaaatggcctttgttgatggggatgatacaacaggaagtatttcactaacgttgttcccaaccgtttttcgccagttaagacagagtgtcgagaaagggcaagtttattatgtggaaggaaaagtggaacgcagtacgtacaatcaagaattgcaaatattggttcaacgaatagaaaaagcgcaacaagtagaaacatcaattagtgacgaaacgtgttttatcagaattacaaaagatgtcgaacaaacggacgtttttcagaaaatgaaagaggtactcagtcgtcacgctggacacattccagtgattgtctattttgaaaaaacaggtaagaaaatagtattaaatgaagaaaattgggtcgctcatacaagcgctagtcagcaacaattagcttacgttttaggcgagcaaaacgtcattttcaaatga

SEQ ID NO: 1929 - DNA, 201 bp, Enterococcus faecalis
aaaagaggtgctcatatgcgttatcttgttgtatttttctggaccttcgcattaggccaagtcgttggatatatcggcggtgcattatctggtggttcatacgactttaaaatgacaacgattctatcgttggcaacagccgttattattttattaattgcacactttgcagtaccgaaagaaaccaaacctgttaaataa

SEQ ID NO: 1930 - DNA, 1209 bp, Enterococcus faecalis
agaggcaactgcgaatatggtgaaggcgacgaaacgttaggaatttttggtcatatggacgttgttcctgctggtgatggttgggaaacagatccttatgaaccagtcattaaagatggcaaaatttatgcacgtggtgcaagcgatgataaaggcccaagtatggctgcttattacgcaatgaaaattatcaaagaattaggcttacccgtgtctaaaaaaattcgtttcgtagtaggaagtgacgaagaaagcggctggggcgatatggattactatttccaacatgaagaagcgccagactttggtttctcaccagatgctgagttcccaattatcaatggggaaaaaggaaatgtgactattcgtttaactttccgaggcggtaacggcgctgattataaattagaaagcttcaaatctggcttacgtgaaaacatggttccgggaacagcagatgctgttgtaacggctgcttcagcacacaaagcggcttcactagctgctagctttgaaacattcatcaaacaagaagcaaaaatttcaggtaacgcagaactttcagataaaacagtgactttccatgtagttggtaaaggtgctcacggtgctagcccacaatctggaattaacgcagcgactttcttggcaactttcttaaatgattacagctttgcagaaggcgcatatagctttattaataccattgctgaatttatccatgaagatttttatggtgaaaaattaggcgtggcttttgaagacgaaaaaatgggtaaattgacaatgaacgctgggattgttaactttgatccagaaaaccctgaaaatagcttagtaacattaaacttccgctatccaaaaggaacttcagcagaagaattacaagcaaaagttcaaacaacagtcggtgaaacggtcactgcaacacaaggagatcgcaaccaagaaccgcattatgtaccagttgatgatccattggtggcaacgttactacaagtttacgaagaccatacaggcgaaaaaggccaagaacaaatcattggtggcggtacttatggccgcttattgaaacgtggtgttgcctatggcgcaatgttccctggctacacagacacaatgcaccaagccaacgaatttatggaattagatgacttattccgagcagctgctatttatgcagatgcgatttatcgtttagcgaagtaa

SEQ ID NO: 1931 - DNA, 249 bp, Enterococcus faecalis
ataggagaaaacgcaatgagtgaaacacttattgttaactatttaatcaaaggacgtgtgaagatgaacgtagaagaattagttcaaaaagcaaaagatttaattggagaaggcaacgtggaacatgcgcaacaattcattgaagaacataaagatgaattaggcgaacactatcataaaattacagcgatgttagctgatacaacgaccgatggtttgtttgataaaattaaaggattgtttcaatag

SEQ ID NO: 1932 - DNA, 192 bp, Enterococcus faecalis
ctccaaaaaccaagtaggtacgatgatttcatttgttcatgcttcacggtgaaacattgcaactctcgccgtttaacagtttttgagcgtggagcaaaaatccaaagtgatttttgtcccacgctcttctttttttatttaacttttaaccattgttttggcaacacatacgcaattggattaaaaagataa

SEQ ID NO: 1933 - DNA, 1059 bp, Enterococcus faecalis
acaaaagtgaactgttttctactaaaaggagtgatcgttatggaaaacgacaagcgaatttataaatgggacaacgtgaaactttttttaattttcttagtgatttttgggcatattttagatcgtgaagcttctccttcacgactcatggaaacgatcaacttttggatctattcattccatatgccagcctttatttttgtctctggactctttagtaaacatgccattaaacaacgaaaatatctacgcttactttcctttgtttggctttatctcttagcgaagttgttgattacgcttgctaatttcgcctttgcaaataaaatgaattttgatttactgaacgaaacaggcgttccttggtacttactttccttagcaagtttctacttaattaccatctttcttcagcgcgttcagccgaaaatcatgttgccaatcatcattgttatcggctgcgcctcaggctatttacctgtggaaggtttcttgtctttaggacggactctgggcttcttccctttcttttattgtggctacttaatggatattcaaaagctacaaacctttttagatcatcgcaaagtcaaatgggcagcgataggcgtaattttaagctcctttttatttgtaaatagtcaatggtcattggcaacgaaattttggggcttcttaactggttgggcttcctacgctgaaattagtccggcctttgaatacagtagtttcattcagctgttcttttacgttgctgcagcattggtgtctctttcttggtttgcattattgccgaaacgaaagttacctttaagcgccctcggaaaagataccctctacccttatctcttgcatatgcccttaattattctgttggaaagtggtttgcaattagacacactctttaaagaatggtttactttccgaatcctggcacttttcttcttagccctcttcattttagctattacgaatatgcctgtggtgaaacggggagcggattatctttttaatccaattgcgtatgtgttgccaaaacaatggttaaaagttaaataa

SEQ ID NO: 1934 - DNA, 954 bp, Enterococcus faecalis
atgataaaaattcaaaatgtttcaaaagtatatcaagaaaatgccgttttgtccgatgtgaatttaacaatccaacaaggcgaattttttgtattagtagggccgagtggtagtggaaaaacgacgactttgaaaatgattaatcggctcattgagccaacgacaggtgaagtggctctcaatgaacaagcggtaaccaattatcctttacgtgaattacgactaaaaattggctatgttcttcagcaaattgccttatttcctaacttaaccgtggcggaaaatattgagttgattcctgaaatgaaaaaatggcccaaagagcaacgcagagagcgaaccattgaactattgaaaaaagttcagctggatcctgaggaatatctgcatcgtaagccagcagcgctttcaggaggcgagcaacaacgtatcgggattttacgcgccattgcagccgaaccagaagtgattttaatggatgaaccttttagcgcgctagatccgatttcaagacatcatcttcaacgtttggtgaaagaacttcatcaggaattagcgagtaccattgtttttgtgacccatgatatgaatgaagctttactgttaggagagcgcatctgtattatggacactggcaaaattattcaagtcgatacgccagaagccattcaaaaacatccgaaaaataattttgtcggtcaatttttcaaacaatcttcaccagaactagcgaactattgtggcgctgacttgactgcatttttagaagccgcagatgagacgattgagccagtgccgactgttttcatggaaaccaatttaaaagagattgtccaactcattaatgcgcaagagaaagcaaatttagtagaaaaacaacaagttttagggtgtatcacctcaaaaacgattactcgttttatggaacagctgttggaaagcgagggacagtag

SEQ ID NO: 1935 - DNA, 1518 bp, Enterococcus faecalis
atgcaagcactgattgaaacttttttcgctcgaaaagaagaatatctgcaagcgttaatcgagcatatgcaattgtcctttatctcgttattattcgctgcgttgattgcaattcctttagccatttatttaacaagtcatcgtaagttagcggaaagtctgttacaagtgactgggattttccaaaccatcccttctttagccttgctaggcttactgattccgttaattggtattggtcgaccaccggcaattgttgcgctagtgatttatgccttattcccaattttacaaaacacctatactggtttgacggaaattgatccttcgttagaagaagctgcagaagcatttgggatgagtaaaaaagaaaaactgtttaagtttgagttgcaaatggcgttaccatttattatttctgggattcgaacggctaccgttttaattattggtacggccacgttggcggcgttaattggagcaggtggtttagggaccttcattttattaggaattgatcgaaataatttatcgttgatttttattggagccctttcatcggctgcactagcagtcttatttaattatggaattcattggttggaaaaagcgaatgggcggcgactaatcattggcggtactattttaggccttttgttaggtggttcatttttctggaatcaacaaacttcttcaaaggaaaagcagctgacaattgctggcaaattaggagcggaaccagatattattattaatatgtataaagccttaattgaagaaaatagcgacattcaggtgacgttaaagccaaactttggcaagactacttttttatataatgccttgaaatcagatgaaatcgatctttatccggaatttacaggaacagtgatcgaaacctttttaaaaaatcctcctcagctagacaatcaacctcaagtagtctatgaagcggcacgcgctggcttgaaaaaacaagaaaaccttactttgttgaaaccgatgcgctatgaaaatacgtatgccgtcgcagttaagcgctcatttgcaaaagcgcatcaattaaaaacgattagtgatttacagaaaattagcaatcagttgaaagcaggttttacgttagaatttattgatcggcaagatggttataagggattacaagaaaaatatcatttaaatctgaatgtccaatcgatggaaccggcgttacgctatcaggcgattaataatggtgaggtaaatgtgattgatgcctattcaacggatagtgaattgagacaatacgatttagtaacgttagaagatgatcaagcgctatttccgccttatcaaggagcaccacttattaaaacagcaacgttggaaaaatatccagaattagcagaaatattgaataaattggcaggaaaaattagcgaagaagaaatgagtgaaatgaattatcaagtcaatgtggaagggcaagatcctagcatagtggcgaaagactatttaaaagaaaagaatcttcttaaataa

SEQ ID NO: 1936 - DNA, 222 bp, Enterococcus faecalis
aaagtacctgtatttttactcatttttggatataataaaagatatgaatggagaggagtggtctatatgaaaaaagcagaacgtcaacgtttgattaaacaattaattatgcaacaagaaattgaaacacaagatgaattaatcactcgtttggaagaaattggcgtccgagccactcaagggactgtttcaagagatatccgtgaaaatgagtattgttaa

SEQ ID NO: 1937 - DNA, 312 bp, Enterococcus faecalis
gtattgttaaaacacatggtgcagatggtcgtgtcaaatatgcaatttttttctcaagcacaaggcacaagcagtgaagagaaattacgagaatcagtaaaagattcagttgttcgaatggagcgagtacaatttattgtcatcttgcatacagagatgggaaatgccgatgtggtgagtaactttttagatgaagtagcttttccagaagtggctggtacagtggctggtgcggatacaattattgtgattacacgttcagaagaggatgcggaacactttatcgaacgcatcgaaaatatgattttttaa

SEQ ID NO: 1938 - DNA, 1563 bp, Enterococcus faecalis
aagggagtttttttcttggcagaattgaaagcgctacaaaatggttcggatattcggggaattgctttggatacggaagagcaaactgcaacattaaccgcaacagcagtagccgagattgcggtgggcgtggttcgttggttacaggataaaaaacagctgccacgaaaggcacaacagcgcctgacaattgcaatcggacatgatagtcgtctaacggcggagccgattaagcaagcattagtagatacgtttctttcattaggtattcaggtgattgacgttggtttagctacgacgcctgctatgtttatggctactcaatttccaacgcttcaatgtgatgcagcgattatgattacagctagccatttgccttattactttaatggcttgaagttcttcacagcagaaggtggagcagagaaagaagatattcggtatattttatctcatactgatccgctgacggccaatgaaaatggcacactgatgaagcaagagttactgccaatttatgcggagcatttggtggaaaaaatccgccaaggaattcattcgccagaagagaaacctttacagggctttcgaattatcgttgatgcgggtaatggggctgggggcttctttgcggagcaggttcttcaagttttgggcgctgatacgacgggatcacagtttttagaaccagatgggcattttcctaatcatgtacctaatccagataattctgaagcaatgaaaagtattcaaacggctgttttagctaatcaagcagatttgggcattatctttgatacagatgtagatcgttcggccgtggtggaccaatcaggtgaggtactaaaccgaaataatttaattgctgttttagcggcaattgttttaaaagaagcgcctggtagttatattgtgacaaattcgccaacctcaagtcatttaaaaacatttattgaagaaaaaggcggccaacagattcgttatatttctggttaccgaaatgtcattaataaaatgattgaattgaatcatgggggctttcagacaccgttagccattgaaaccagtggtcatgcagcgtttcaagaaaactacaatctggatgatggtgcatatgtcgtggcgaaaattttaatgttgttaccagaattgaaacaaaacaatcaaacgttaggagatctgattgctacattgaagcaaccggcagaaaccaacgaatttcgcttcaaaattactgcggaggatgttacttgttatgggcaacaagtcttgcgagactttgaattgtttgtagaaaatcaagcagactttgctgtggaccgtgaaaaccaagaaggtgttcggggaaacgtgtctggtcaatatggcagtggttggtttttgctacgcttaagtctgcatgaaccgttgcttgttcttcaggtagagaatgaccaaagcgataaaaatgcgtgtgtcatcgaaaaaattgccacttttttacaaaaatacgaggaaatagatagtcagcaaatagaaaaatactctcggaaattaaagtgtttcttatggaaaatgttttaa

SEQ ID NO: 1939 - DNA, 597 bp, Enterococcus faecalis
  misc_feature (77)..(77): Nucleotide 77 is "n" wherein "n" = any nucleotide.
tcagcaaatagaaaaatactctcggaaattaaagtgtttcttatggaaaatgttttaaaaggaaaacacgttggctnttctcattttagagaaggatatatcgaacatattgcaaaacagcaatgggataatgaattgcttcggcatttgagctgggatgctttacatccgtgggggcttgaagaatggaaagatttcacaattaataaaggagaagatgatcgatttctatttgctattttagaaaatacgacagaggaatttattggttgggtttcgttgtctgatgtacagttgaaaaatagaggggccaatttagggattgctattttacaaaaagagcaacgaggtcaaggatgtggctttgaggcggtgtctttaatttgtaaatttgctttttatgaattgggtttgcacaaaatcagattagctgtcaatagtaacaatcaaaaagcgattcatgtttatgaaaaagtaggcttcaaaaaagaaggaattgatagagaagcgttatttcaagatggccaatggctggatatctacaattacggaattttacaaaaagagtggctacaaatgattaaggctgagagttag

SEQ ID NO: 1940 - DNA, 606 bp, Enterococcus faecalis
agaggaccgttaatgattgtaaataaaccttatggcattaaaacccatccaaatcagccacaggaaacagacaccttgttaaatcatgttgctgcctatttagccgagaaaaatcaggtcccttatgtcgttcatcgattagataaagaaaccagtggtgcgattgtctttgctaaaaatccttttgtcttacctattttaggtcgtttattagaaacaaaacaaatttaccgccaatatcaagcgattgtagctggtcactttagccaaaaagagcagacaatcaatcagccgatcggtcgtgatcgacatgatcgccggaaacgacggattgatcctcaaaaaggggattcagcgattacacatgtccaagtggtccaagctctttctaataatcaaaccgcagttacctgtgttttagaaacaggtcggacgcaccaaattcgggtccatttagctagcgaagggcatccaattattggtgatccgttatacaacccaaaatcgcaggcagctcgtttaatgctccatgcttcacaacttcatttactccatccgtttacaaaaaaacaaatcgttgtgactgcaacacctggcctatggtaa

SEQ ID NO: 1941 - DNA, 2346 bp, Enterococcus faecalis
acttacgacattttaaaaatgtgtcgtaacattcaagcttttgtttgttattctcttgtattttatgctaaagttattcaggcacaaaaaaaagcaggtgattttatgaaacatataaaaaatacatgggaactatttattttagattggaaaagaatttttaaaaacccagtagcaacatttttgattgttgccttaatgattattccatcattatatgcatggtttaacattaaagcactatgggatccgtattcaaatacaggagagttaccaatagcggtctatagtgatgaccaaacagcaacttttcaagataaatcggtcaatattggtgatgaagtcttgaaaaacttgaagaaaaacaagcaattaggttggcgttttgttgattcgaaaaaggaattagacaaaggggtccaatcaggaaaatattttgccgggatttatttacctaaagatttttccaaagatttgctaagttttacttctggtgatatcaataaacctaaaattgaatactcaattaacgaaaaaattaatgcaattgcgccgaaaattacgtcaaaaggcgcttcttccattcagtcacaaatttcggaagaattcattaaaacggcaagtagtacgttaatcaaaacattcaatgatattggctatgatattgataaaaacatggttagcattcaaaaagttaagagcatgattttagatacagatgccaacattggaaccattgatacgtacgcaaaacaagtcacagacttacatggtaagatgcctgagctaaaagaaaaattagcgaaagccaacgatgcgatgaaatatttacctgaagttgatgctttaggagagaagattgttgagctaaatggtaaaatgccaagcatcaaagaacaagctagtgttattttgacgttacaagaaaaaattccagaaattcaaaacgctggccgacaaattgctatgattgatgaagactttgcctctgtggaacaaacaatgagcgaaggaatccaagaagcaaaacaaggattagaaatcattcaacaagttcaaacggcgttaccagatattcgtaaactaggtgatcaagccaatgatttagggaatgtcacattagatggcgccactcaattggaaaaggcgttacctggaattactcaaagtgtggggacgattttaaaagcaattggaacaattagcgctggtgtaaatacagcactagaagatttaaaaaatcatcgtttaccagttgaagaaagagaagcaattaagcaacaactgtctgaaagcctaggaaaacaacatgaaaatatccaacagctgattcaactgtttacgcaaatacaagaagccacaggtaacactgatttacaagacacaataaatagattgaatacgattgatggtattgtagttagattaaaaactgatgttgataacattgatgtgaatgcggtaactgatgcagatttaaatgctattcaagcagaagctcaacaagtagaagcaaccgtcaatagtattaaccctgatgcaattgaaaacacagtaaaaacgattttagacaaattaattgctaccatccaaaacgctcaaggtcaactaaacaaagcgcaacaaattgactttgaaggtttattgagctcaacaagtcaaacggtcactaatgcgatttctttattagaaaaatatcaagccgaaatgccggcaattaaacaagaaattcatgatgcgaatacgatgttgaatggcaatatggaaaccattgtcaatggcattaatcgtggtgctgatttgtataaaaacgatttaccagtcattcaagataaagtcagcaaagcggcagcctttatgcaaaatgactatccaggtatccgaaaagatttaacgaataccttgaaaacagtcaatgagaaaatgccagatgttgaagcggccttggacaaagccaacgagctaattattaatgattggccaaatatcaaaacaggattacacaaagcagcgaatgcaatccgtaaaggtgaaaaagaagttgatttaggcgaaattcttaaattactaaaattagatgccaataaagaaagtgacttctttacacaaccagttgaagtcaaagaacatgctgtttatccgattgctaataatggttcggcaagtacgccattctatacagctttgtgtttatgggttggtgctgtattattctcaagtgttgcgacaacggatgtttatcttgaaggaaaagataaaaaacgcttctctaaacgggaacaattctcagcacggatgtttactttcatattcaggcaggatgcccaacacaattcaagagggttg

SEQ ID NO: 1942 - DNA, 234 bp, Enterococcus faecalis
ggaatgaaagaaggacaagaacaattcttaacgttcatactagatcgaacaaaagaagataaaaaagaaaaaatgcaagcgctacttgcagaaatgtttgaacgccaacaaacaggcaaattagataaaatgtacttgatgacaaaagcaccaaaacttttggcttatttaaaaccagaagccattgatgaagttaaacaagtcgtttcggaattttctaaaaatatgaaataa

SEQ ID NO: 1943 - DNA, 735 bp, Enterococcus faecalis
  misc_feature (697)..(697): Nucleotide 697 is "n" wherein "n" = any nucleotide.
aacatgaacagcgtggtgaactttagagatattggaggatttccaacgcaacaaggcacagttgtcaagacagggtatttttttcggagtggtgaactcgtcaatgttgcacaagcggatcaacagaaactggtagaggactatcaaattaaacgaatctatgattttagaagtgcagcggaaacgcaagaacgaccagatgattcaattcaaggaaccaactatctacatatagatattttggccgatattcaggcgcagactgcttcattagaaggaatgcttaaaacggttggttcacccgatgaagcaatggacatggcttataaagaaatggttctttccaattcggggcgcaaaggttatcaaacattttttgaaaactttttaagttatccacaggaagctattttatttcattgtttcgcaggaaaagatcgaacaggaatcggcgcagccttgatattaagtgctttaggtgtggaacattcttatattttagaagattatttaaagacgaacgagcaaagaaaaaccgctaacgagcaaattattgcgcaatatcaagcaaatggaacgcctctagcagaaattcaacaattagaaacgctgctttatgtgaaaaaagagtacttagcgaccgctttacaggcgattgaaacagaatttggttcggtagagggctatttaaaagagngactcggcttactttatccgccaaaaaagacatgctaa

SEQ ID NO: 1944 - DNA, 1485 bp, Enterococcus faecalis
gtaacgatgctaaaacgagattttttagaaaagccttatgattatatgaatgatattttattgttcctatataataataaaggtcaagcgacacgaaatgaattagtagattttttcaatattagtttaccaacattgaatgagtatctttcttttttagagcaatttttgaaagaagagcaacttcaagaaaacctcaccttaacagtattaggtgacactctatatctaaataaagcgcctaccttttccatgaaagcaatgatcatgttgttcttagataaatctattaagtttcacatggtccagcaactcttccataaaaatgaaataaatggcgggtatttccaacagaattatgccattagctctgctatctattatcgaaaaattgttgaattaaatgacttactcaatgagtttaatttacgtatcaaacgaggaaaacttgtcggcgaagaaaaacaaattcgctttttcttttttaattttttctggtttatctttgaagaaaaaacagatttagaaaaagaactggccaatcaatacctaggattaatcgagatactacaagaaatccccagaattacctttgaccatacagaaattctccaaattaaactttggatgaaaatttcttttcgtcgcatggttttagaacccctgccaacgattagtccacatgatgtccaactcgatcgacctttatttgaagaaattaatttatctatacatacatatatgaaaagaatcgaccgtccatatacaatcaacgaagcctatatgttttatgactttttttgttccatgcataattattctgcgaatgctgctttcgcctttcgtttagcaaaacaacaacgaattgaaaaaacgtatcttaacgaaatgaaccgggtcattttaacgtaccttaaagcacgtggttatttatcccattacgtgctgcctattcggctactttatattgaaaatttacttttccaattacatgcgcaactctattatttttcaggatttattttaccctttgattattggacaattcagtcacttttgaaagtcttacgtcatccttttagcgaaagtgaagtttacgaattagtggagatcgctacaacgaactttgccacaaaagccactgcttctaagtaccaaaatcaatttactgaaattaattatacacttattttgaatcacattgctgaattaaatgaaaaaaaaataacgattggtgtttatcactcactgagcagtgcttatagcgagttggtagcacaaaaaatacaacagagtatcgctggaaaatatccgctgaaaattgagccttacaacgcagaaaaccattatgatttgcttttaatgaataccaataatgaacagctcgttgcccagtatgaccattactatattttttcggatattagtaatcgttacgacctacaatcaattgaaaaaatcattcaattgttattgggcagataa

SEQ ID NO: 1945 - DNA, 594 bp, Enterococcus faecalis
gaagcttttccttttaagaaaacgatggaagaatggataaagcccgttatgcgaacaattcgccacattaagcgcgccttcttgaagcaaaagttgcctgcgacatatcagctaaaaaagcaaaaggctaacacagcaatggaatatttgcttgagcaaacagataaccatcaatcaataagaggaccgaaaagaaaaatgaccgctgaagaaattaaaaaaaagcggcaagcctaccaaaagaaacaacgcgtccaagtcgttaaattttttatgccagctattcttttcgccatttttgtgttcttttttgtgttaaagacatctagctacccaattgctgggcaatccatgaagccgacacttaacgcaggggaacgagtcttattacaacggacgaagcaagtagcaaggtacgatgtgattgcatttaaagcaccgctagctagcaaaggtacgtacgtcaagcgaatcatcggggttcctggtgatcgaatttgggtaaacgagggaaaactttatctttcagaagaacctatagcaagcgataatgatgcactgcctgagaatgccagtcgttttgacttatcataa

SEQ ID NO: 1946 - DNA, 333 bp, Enterococcus faecalis
cacgtcttgaacaagataactattaataaaatggtcagtaaaaagttaacgggagcaaggaaactacattgtcttggggtcctttttttagctgttacattaagtagctccgcagaaagattacaggctgctgctgtctcaaaggaagagcagtcgctaaggcaaccgcttatcaggaaaaacatagtaacagagaagagcgaatatcttgtagaagcaaatcaaagtatttgggagctggcacaagatgcgcagaaaccattgaatcagtttatgaaggaaaaccagttacgtagtagttatataaaaaaaggaacgcaattagttaaatag

SEQ ID NO: 1947 - DNA, 1296 bp, Enterococcus faecalis
atgacaaaaagacgtttaatcagaaaaattaaagatatttcggatgatacgcttgaaaaagaagtcttttttcagccaggattcgaaccagaaaaaataattagcggaatcaaaccagaacaacaggaaaaagaaatggcgacgttaagagaaaggctcacctactatcagaaaaaagaaacagcctttaaaaaacttcaagaagaaaatgagcaattaaagaaccaacaagaaacggaaaaacaagcgttagaagaaaaaaatcaggcattacttgaaacactaaatcaaaaggaacatgaaatttttgaattggaagagcaactggaaacgaacagtgaaaccacgacagaggctaccactcttcaaacaaatctgcaaaatgcagaaaaacaattaaccactgtacataatcaaatggaacgtttagaaagtgaattaacgcagcaagtggcagaattagaaaaagaatcggctgaacagcaacaacatatccagacattacacaaccagttagcagaagaaaaaggaaagttggagaaaaaaggagatattacaggaatggaaaagcaagtagaaacgttaacgacagaattagaagaaagcacaacgactcaacaagcattgcaggaacaaattgaaaaactaactgtacaattacaaaaagtagaagccgaaaaacaaaccttacaagaggctgtccaacaagaagtgattgtgaaacagcgcatggaggagttaaagaatgagcttcaaaatagtttacagcaaaaaaatgaagcagaagtaaaactaggtcgactacaaggtgtcaatgacaaacatcttgctgaaaagcaagtttacgaaggagaattagctgctctaagaaaagaagtagaggccaaagaagacaatttagaacaagttcaaaaagaattgaagacactacaagccgtttcaaaaaatattgaaccgagtagtgagcagttaacagaactgctacgcgcaaaacagcaaattaacgatttattaatgaaaaatcagcaattacaagaagaggctttaaaatcgcaacaagaaattggcgaagtgatggtttctgccaaaaaagaagccaatcggattgttaatgaagcgaaagtagaagcaaaacatctaatcaattctgcagaattagaaatgttaaatattggtaaccgagcgaaaagtatttcgaatgaagtcgaagcatcaaaagtagaagtacttgagatttatcgcgaattagaggaacgcttaactaaactgacacgtcttgaacaagataactattaa

SEQ ID NO: 1948 - DNA, 243 bp, Enterococcus faecalis
ggacccgatttccaaccagatacagtgagtgccttgggtggcggttctgcaatggatgcggcgaaaggaatgtggatgttctatgaacacccaaatacagagttctttggtgcaaaacaaaaattcttaaatatccgcaaacggacatataaaattgccaaaccagaaaaaaacacaatttgtttgtatcccaactacttcaggaactggttcagaagttacaccatttgccgttattactga

SEQ ID NO: 1949 - DNA, 855 bp, Enterococcus faecalis
atatccgcaaacggacatataaaattgccaaaccagaaaaaaacacaatttgtttgtatcccaactacttcaggaactggttcagaagttacaccatttgccgttattactgatagtgaaacacacgtgaaatatccgttagcagactatgcgttaacaccagatgtagcgattgttgatccacagttcgtaatgtctgtgccagcttcagtcactgcagatacaggtatggatgttttaacacatgctattgaatcttatgtttccgtgatggcttcagattacacacgtggtttaagtttacaagcaatcaagttagttttcgatcatttagaaaattcagtgaaacgtccagatatggaatctcgcgaaaaaatgcataatgcatcaaccatggcagggatggcatttgccaatgcattcttaggtatttgtcactctattgctcataaaattggtggggaatatggcattccacatggtcgtacaaatgcgattttattaccacatattattcgttacaatgcgaaagatccatcaaaacacgcaatgttccctaaatatgattacttccgcgccgatactgattatgcagacattgcaaaattcttaggcttaaaaggaaatactaccgcagaactagtagaagctttagcaacagcagtagcagatttaggtaaatcagtcggaattgacatgaacttgaaagcccaaggtgtctcacaagaaacattagacacaacggttgatcgtatggcagaacttgcatatgaagaccaatgtacaactgcaaatccgaaagaaccattaattagtgaactaaaacaaattatcttagatgcttatgtaggataa

SEQ ID NO: 1950 - DNA, 1122 bp, Enterococcus faecalis
ctgcttgggaaaaagacggaattaccccactgccacttcacgtctatacctatggtcaaaaggagtgtaaggagaagcatgaatcgaaaagatgaacatctatcattagctaaagcgttccacaaagaaaaaagtaatgactttgatcgtgtgcgttttgttcaccaatcgtttgctgaatccgctgttaacgaagtggatatttccacttcgtttctttcttttcagcttccccaacctttttatgtcaatgcaatgacaggtggtagtcagcgtgcaaaagaaattaatcagcaattaggcattattgccaaagaaactggccttttagttgcgacaggatctgtctcggcagcgttaaaagatgctagtttagcggatacgtatcaaattatgcgaaaagaaaacccagatggactcatttttgccaatattggtgcaggcttgggtgtggaagaagcaaagcgagcgcttgatttatttcaagcgaatgccttacaaatccatgtaaatgtgccccaagaattggtcatgcctgaaggagatcgtgatttcactaattggctaaccaagattgaagctatcgtacaggccgtagaagtgcctgtcattgtcaaagaggttggctttggcatgagccaagaaaccttagaaaaacttacctctatcggcgttcaagcagcggatgtgagcggccaaggcggaacgagttttacacaaattgaaaatgcccggcggaagaaacgagaactttctttcttagatgattgggggcaatcaacggtcatctctcttctggaatcacaaaattggcaaaagaaactaactattctcggctctggcggtgtgcgtaactctcttgatattgtcaaaggactcgctttaggtgccaaaagcatgggagttgctgggactatcttagcttcccttatgagtaaaaatggtttagaaaataccttagcccttgtacagcaatggcaagaagaagtgaaaatgctttatactcttttaggaaaaaagacgacagaagaattgacgagtaccgcacttgtcctcgatccagttttagttaattggtgtcataaccgtggtatcgacagcactgttttcgcaaaacgttaa

SEQ ID NO: 1951 - DNA, 1113 bp, Enterococcus faecalis
ataagcatgattgaagttactacgccaggaaagttatttattgcaggagaatatgccgttgttgaacctggccaccctgccattatcgttgctgtggatcaattcgtaactgtaactgtcgaagaaacaacagatgaaggcagtattcaatctgcacaatacagctctttacctattcgttggacacgccgaaatggtgagcttgtattagatattcgcgaaaatccttttcattatgttttagcggcgattcatctaactgaaaaatatgcgcaagagcaaaacaaagaattgtcattttatcatttaaaagtgacgagtgaattagatagttcaaatggacgaaaatatggtcttggttcaagcggtgcggtaaccgttggaactgtcaaagccttgaatattttttatgacttaggtttggaaaatgaggaaattttcaaattatcagcattagctcacttagccgttcaaggaaatggttcttgcggagatatcgccgccagctgttacgggggctggattgccttttcaaccttcgatcatgattgggtcaatcaaaaagtagccactgaaacattaactgatttgttagcaatggactggcctgaattaatgatttttccgttaaaagtaccgaaacaactacgtttactaattggttggacaggtagtcctgcgtccacttcagacttagttgatcgagtccatcaatcaaaagaagaaaaacaagcggcttatgagcagttcttaatgaaaagtcggctttgtgtcgaaacaatgattaatggctttaacacaggaaaaatttctgttattcaaaaacaaattactaaaaatcgccaattgctcgccgaattatcttcactgactggtgtggtaatcgaaacagaagccttgaaaaatctttgtgatttggctgaatcttatacaggagctgcgaaatcttctggcgctggcgggggcgattgtgggattgtaattttccgccaaaaatctgggattttaccattaatgactgcttgggaaaaagacggaattaccccactgccacttcacgtctatacctatggtcaaaaggagtgtaaggagaagcatgaatcgaaaagatga

SEQ ID NO: 1952 - DNA, 1080 bp, Enterococcus faecalis
aaagaccgcacaaaccattgcacagactttagaagaaaatggagctgttgctacatggattcaatcattagaggtgaaaaagtaatgctttcaggaaaagcacgagcgcatacaaatattgctctgattaaatattggggaaaagccaatgaagaatacattttaccaatgaatagtagtttatcattaacattagatgccttttacacagaaacaactgtgatatttgatgcccattattcagaagatgtatttattttagatggtatcttgcaaaacgaaaaacaaacaaaaaaagtcaaagaatttttgaaccttgttcgtcaacaagccgattgtacttggtttgcaaaagtggaaagtcaaaattttgtgcctactgcagctggtttggcttcttcagcgagtggtctagctgctttagcaggggcctgtaacgtagccttaggattaaatctttcagcaaaagacttatcacgtttagcgcgacgtggttcaggttctgcttgtcgcagcatttttggtggttttgctcaatggaacaaaggccactctgatgaaacgtcgtttgctgaaaatattccagccaataattgggaaaacgaattggccatgctctttatcttaattaatgatggcgaaaaagatgtttccagccgtgatggaatgaaacgaacagtagaaacttctagcttttatcaaggttggttggacaatgtggaaaaagatttatcccaagttcatgaagcaattaaaacaaaagacttccctcgtttaggagaaatcattgaagccaatgggttaaggatgcatggaacaaccttaggtgctgtccctccatttacttactggtccccaggcagtttacaagcgatggctttagttcgccaagcacgggccaaaggaattccttgttactttacaatggatgcaggtccgaatgtcaaggtcttagtcgaaaagaaaaacttagaagcattaaaaacatttttaagtgaacatttttcaaaagagcagttagtcccagcttttgctggtcccggaattgaattgtttgaaacgaaaggaatggataaataa

SEQ ID NO: 1953 - DNA, 561 bp, Enterococcus faecalis
ccgaatcccgtgggcaacagcagtgagaaaattgctcatggcaggcctagtggtatcgatgccgcagcaacaagcggcgctgatcccttattttttactagaggatttccgcccacacatttctcgatgaatttatctaatgcctacttagtagtagctgatacgggaattaaaggtcaaacacgtgaagccgtgaaagacattgcgcagctagctcaaaataatcccaccgcaatcgctgaaacaatgaaacaattaggttcttttactaaagaagcaaagcaagcgattttacaagatgataaacaaaaattaggtcagctaatgacgttagcgcaagagcaactccagcaattatccgtcagcaacgatatgctggatcgactagtggctctctctttagaacatggcgctctaggagcaaaattaaccggcggcggtcgcggtggctgtatgattgccttaacagataataaaaagaccgcacaaaccattgcacagactttagaagaaaatggagctgttgctacatggattcaatcattagaggtgaaaaagtaa

SEQ ID NO: 1954 - DNA, 1197 bp, Enterococcus faecalis
aggaaccttcaatctgtcaaaaaagctgctaaagatcgcgtggtccctccttgtcctgtctatgaaacatgtggcggctgccaactacaacatttagcctacaaagcacaattagactttaaaaaagatttattaaagcaggcgcttaacaaatttaaaccagccaattatcaaaactatgaactacgaaaaacaattgggatggataatccttggaattatcgaaataaagcccaattccaattacgccaaatcgatggccaagtagaagctggtctctatcaagctgattcacatcaattagtaccgattgataactgtttggtccaacagcctgcgacaaccaaggtgatgaatacattagttgatttattgaatgactttcaattaccaatttatgatgaacgtaaaaatagtggtatctttcgaacattaatggttcgagtgggcatccaaactggcgaagtccaagtagtgttcattacacaatcgcagaaatttccacaaaaagaaaaaatggttcgcgcaattaatgaacaattaccagaagttgtttctattatgcaaaatgtccaaaataaaaaaacctctctagtaatgggtgatgatacccttcacttatggggcaaagaaagcattgaagaacacattaacgacgttgtctttgatttatcgccgcgagcatttttccaattgaatccagaacaaacggaagttttatataatgaaggaatcaaggccttagatttacaaccaaacgaaactgttgttgatgcttattgtggcgtcgggaccattggcttaagtttagcgaaacaagcgcatcaagttcgtggtatggataccattcccgccgcaattgacgatgctagattcaatgcaaaacgacttggtgttacgaacacacattatgctgttggaacagctgaagacttattacctaaatggttcaaagaaggctttaaacctgatgccattgtagttgatcccccacggactggtttggatcgtaaattattaacggcccttttgaaacaaccacctaagaaaatggtgtatatttcttgtaatgtatccacgttagcacgtgatttagttcaattagccaaagtatatcaagtagactatttacaatctgttgatatgtttccacaaaccgctcgttgtgaagttgtcgtaaaattaacgagaaaataa

SEQ ID NO: 1955 - DNA, 429 bp, Enterococcus faecalis
ataaaagctcagaacagtgcacttcggtctcctgttctgagtttttttaatgaaattatcagaaattattgcttttttttcatggaaataagcaaactattttgttatctaataaaaatagttcataatagtaacatagcgaattattcgctagataaagcatttaggaggaattattttatgcatactttatgggttttaatcgttggtgctgttatcggtgctatcgctggcgcgcttacaagcaaaggtcaatcaatgggttggattgcgaatatcgttgccggtttagttggttcatttatcggagaaaaaatcttaggtagctggggtcctcacgtagcaggtatggcaattgtgccatcaattattggggcagtaattttagttgctgtggtttcattcttcttcggacgaaaaaatagctaa

SEQ ID NO: 1956 - DNA, 3162 bp, Enterococcus faecalis
ttgtctttatgggctttgcttggatttgttggaaacgatatgaaacaaaagaaaaaaatgaagttggtaaaggagaaatggattatgaagacttgggaaaattataaagtagatagtattaatcggttgcctggacgagcacacttttcgagctttccttcgaaagaaacagcgttattaaatgaaaataaatatacacaagcatacaaaaatttaaacggatgctggcattttctctttttagaagcgccagaatacagcccagaaaacttttttgcgacggactttgatacaagccaaatggatcaaatcactgttcctggaaattggcaagtccaaggatatggcaaaatgcattactctgatttatggtacaattttcccattaatccgccgtatgtaccaacggaaaacccaacaggtatttacaaacggacatttgctatagatgaaacatttcacgataaaaaaatcattttacgtttttgtggcgtagattcagcttatcatgtttgggtgaacggccatgaagttggctacagtaaaggtgcacgaaatgaagcagaatttgacattacgccttacgctaaaattggtgaaacaaatgatttaacggtgcgagtctatcaatggtcagatggtacgtatttagaggatcaagatatgtggtggttaagtggtatttttcgtgatgttgaattactcggtgtaccagaaaatgggctggaagatttctttattatttccgatttagatgattcgtatcaaaatgggcacttggcaattacgggtaaattttggcaagacaaaggacaacaagttcaattggagttgatggatcagcagggaaaaacggttcttaaagagactgtcgcaggaaatcaaggtacggttgaattttcagcaagtttgccgtctgtcactgcttggtcagctgaaaaaccatacttgtatcaactatttatcactgttttttctgaaggggaagtcgtcgaagttattccgcaaaaagttggtttcagaaatattcatgtatctggtgagactttcttagtcaatggtgtggccattaaactaaaaggaatgaatcgtcatgattataatccgaaaaatggtcgagtggttagtcgtgaagaaattgaaaaagatattcgtttaatgaaacaatttaatattaatgccattcgaaccagtcattatccagcatctgcttatttctatgatttatgcgatgaatatggaatgtatgtgattgatgaaactgatttggaatgtcacggctttgaattaaccggagaatatgattggattagcaacgatccagaatgggaaacggcttatgtttgtcggatggtacggttgattcaacgggataaaaatcatccatcaattatattttggtcgttagggaatgaatctgcgtttggtcataactttattgaaatggcccgtattgcaaaagaaatggatccaacacgtttggttcattatgaaggtgattttgaggcagaggtcacggatgtctattctacaatgtatacgtggttggaacacccaactagagaattactgatgaatacgattattgaaaattcaaaaaaaccgcatattttatgtgaatattgtcatgcgatgggtaatggccctgggaatttaaaagaataccaagagctattttatgctcatgataaattacaaggtggctttatttgggaatggtttgaccatggcattgaatctgtaacagataacggtgaagtttattatcgttatggcggcgatttcggcgatgatccaagtaacaaagatttttgtattgatgggatgttgatgcctgaccgtacgccatctcctagcttgtatgaatacaaaaaagtcattgaacccattacaactagcgctattgacgttctgtcaggtgaattctcattattgagtcggtttgactttgaaaacttggctatctttaagctggtttatacaattactgaagatcaaacagtgattcaatcagggacagtagcagtgccagcaattgctgctagagcagaaggaagactgcacttaccttatcatttagattttcctaaaaaggcaggagccgcctattatttaactctttcatatcaattgaaagaaacgactgcctatgcatctgctggtcatgaattagctaccgcacagtttgaattgccaattgcaacaccagggattgagatcacaccagttggctcgctaatggcaaaggaaattggccctcatttatacattgaaggaccaaacttttcaattaattttgataaagtgaagggcgccttaacgaatgtgacacgagatggtaaaaaattattgcataaagggccgaaatttacattttggcgggcaccaatcagtaatgatatggaaattattgatgaaatgaagaagaaatatttcttacatttagagcatgaaattgtccgttcttttgagtggaaaaaagttgatgattttatccaagtcatcgtaaaaacaattaacggaacgactaacagtgcttggcattatcaatgtacctatcagtatttaattgcaccaaatggcgaaattttcttcgacttaaaaggtagtcctgctggtaaaattgaaaatgcgccagatatgttaccacgtttgggtgtgactctccatttagacaagtctctatcagaagtaaaatatttcggtaaagggccgagagaaaactatgtagattcacaagaagctggtttacttggcgtttatgatgctacagtggcggaaatgttcactaattatgttgttccacaagccaatggtaaccacatggcgactaaatggtccgcattcacggatgatcgcggccaaggggtagtagcaacagcggctgattcatataattttagtgtttcttattttgaagaacaagcgctagatgttgctaagcataccaatgaattacaagaaagtgagtatgttgttttaaatatcgattacaaacaaaacgccctaggtagctactcttgcggccagtggcaattagaaaaataccgaactacgtttgaagaattccaattggcattccgcttaacaccttttaataataaagagattcaagcagcggatgtcgcacatgaacgagtaaaacgaccaacaatttcttaa

SEQ ID NO: 1957 - DNA, 1536 bp, Enterococcus faecalis
gtactaattaatttgataaagagaggatgtagtaaaatggcaacacattcacgggaacgattaggttctgtcgcattgatgctcatgactttttcagcggtttttgcctttcctagcattgttaacaacagtattcagattggcctagcaactattccaggctatttattcggctctattttttactttttaccatttattctaatgattgcagaatttgcttctgctaattctgaaaatgaatcaggtgttcacagttggttggaatctgtgctaggacctaaatgggcatttttaggcgcttggtcgtatttctttgtcaacttgtttttcttctgttcattgctaccgaatacattgatttatggttcatacgcttttttaggtcaaaacgtttttcaaggaaaccatagcactaacataattgcagtgatttctatcctgttattttggttaatgacatgggtttgtattaaaggggtttcgtggatttcgaaagtgactagcttagcgggtggtgctcgtttatttatgggcgtagcttttgtggttttagcctttgtcgtcgtgtttggttttggcaatgagccagcacaagagtttaccacgacgtcaattatgccaacttttaattggacttttttcatgacgatggcgtggattttacaagctgttggcggtggtgaaagtatcggtgtatatattaaggatgttaaaggcggcaataaaacgtttgtccgcacgataattggtgcaacgattgcggtcggtatcatgtatattcttggtgccgttgctgtaggtttggtagtgccaacggacgtcttaaaaggaaatttttcaaatggtatttttgatatttttaaaattttaggtacgtatttccatattcccgcagcaatgatggtgcgcttagtaggaattatcttatttgtcggaagtcttggttctttggctctgtggacggcagcaccagttaaagtatttttctcagaaattcctgatggggtcttcggtaagtggctagtgaaaacgaacgaagagggaaatccaaccaatgctttgttagttcaaggaattattgtgacgattttagttgccattccagcattaggaattggaaatatggatagctttttagaaacgttaattaatatgacagcttctacgtcattagtgcctgtcttgttcttgttaatcgcctatattgggcttcgttggaaaaaagaaacaatgccgagaagtttccgctttggtaatcgaacctttggcttaattgcgggaattttcttattagccatttttatctttgtattctttatgtcaactgtgccggatccaaaattaatcatggaagaaatcaattgcacgttaccgaaaggaaccgctagtccactgggcatgttggcgtataacatcattgggttaattgtctttatgggctttgcttggatttgttggaaacgatatgaaacaaaagaaaaaaatgaagttggtaaaggagaaatggattatgaagacttgggaaaattataa

SEQ ID NO: 1958 - DNA, 843 bp, Enterococcus faecalis
agaggtgatagcatgcaaaatgtttttacaaataatgtcagcatcctgattaatgatcaacctattagccaagaatttcatctttatgaagctggctatgaaaaatgccgtccgacaaaaccaactgagtttgcccccattaattattgggttttgcattattgtagcgatggtgaaggctatttttcaacaccctttatggaaaaacaacacattaccgctggcgatttgtttatgatcccagccaattgtcgcaatatttattatcctaatcggcaaaatccttggacctatcattgggtcggttttgttggagatctttcgtctcagtatttagaaaaaataggcctgactaccgaaaattgtattttaaaaggaactgttgataagaaattagaaagtttatttaaaaatatttaccaagaagcgaagaaacataatcattttggcagcttaagtgaaagctttcaattgttgaattatctagagcatcattccgttacacagcacgaaaatcaaagccaacaattatttaaccaaataaaaatggctattcacgaaaatttttcaaacaatctttcaattagtcaattagcttctgagtataacattgatcgtagctatttatttaagctatttcagcgttatgaacaaacaaatcctagtatttatgtacaaaacttaaaattgcaaaaagcctgttctctattaagaaaaagttccttaaccatcacggaaatcagttttgaaacaggtttttcttcaccttcttatttttcaaaatttttcttccagaaaaaagagatgacacctcgacaatatcgtcaacagtttttgacttaa

SEQ ID NO: 1959 - DNA, 447 bp, Enterococcus faecalis
gtaacgaaaggaatgattaaaatgaaaaaaatgtttttaggactcttttgttttgtttcgattaccacactatcagtttctaatgtatgggcagaagattcggctaatgaagcttctgtggaaaagtcaacagttacttctttaactcaagaaacttcagcaacaacaattaatgcttcaactgattcaacagcacttacagctgaaagcgaggaacttccatcgcttcgtcaaacacttcttaattacgtaggtatgtatggtttaacagaaaccttgataaatcgtttatctgatgacgaactggactacgcaaaaaaagtttcgtttcattttgtaaaccaagacatcagtggaacagcgagaatgattactaaattatatggtgagaaacctatcccggaggactcctactttacagattactcaacattaacgattcgatga

SEQ ID NO: 1960 - DNA, 981 bp, Enterococcus faecalis
attgttgaaaagttgatggcagatattccttataacatcaatattatggatgaacgaggaaaaattattgcgagtggagattctgctcgaattggggagcgccatcgtggtgcagaaagagccatcaatgaacgaaaaaatattgaaatttataaagatacttctttagagaaaaaaggcaccaatgaaccgattattttgaataatcacattttaggtgtcgtaggcatttcaggagaaccagacgaggtgcgcaaatttaccaagcttgtgcgctcgattgttcttttactgacagaagaattaaatacacaacaagaacgcgaaaaaaagaagaaacaaaaaaatcagtttatccagcacttaatgcatgttgattctgcttactcagaagccttaaaacttgaagcgttggaactatataaccttcaattagatgaccagaatcattgtgtactgaccaaggacaagcgcttattatccagttattatcctggacatgaaatatttgaatgggaaaattgttatctggtgattacttctgaaccacctcagataacaaagccagtaacagaataccttgtgataagttcggaaaaagccacgattcaacaaatggtccaagaggcacaaaacacgtatttacttctatcgtttctccaattagaaaaggctaagttttaccaagcagaagattttttcattcaaggaatttttaattttccttttcatattgaattggatttttttgaaaccatccagacgatttatgatgaatactatgaaaccgttatttttttcgccaatcataacttaaacatcaatgaaacctcacaagtattacatatccatcgaaatacattgaattaccgtttgaaacgaattcatgaattgacggggatggatccaaaagtttggcaagatttttggaaattgttctattattttgcctattgctttaaagaacgttttgaaaagtag

SEQ ID NO: 1961 - DNA, 915 bp, Enterococcus faecalis
ggagtggtaccagtgaaaaaagcagttttaattgttaaccccagttctggtggtgaaaaagccaaagaatttgaaacgttagcagaagaaaaattaaagcagttatttgatgaagttgtagtgaaacaaacagaaaaaggcggcgatgcagaacaatttgcccgtgaagctgcggaaagtcacttcgacagtgttttcgtaatggggggagatggaaccgttaatgaaggaattagcgggttggcagaacaagcttaccgcccaaaatttggcttttttcctttaggaacggtgaacgatttagcgcgagccttgaatttaccgatggaccctgaagaagcgattcaacaattagatttagaaaaaaccagtgctttagatgtggggaaaatcaatgacgactactttatgaatgtcgttgcaattgggacgattccagagtcaattaacgacgtggacgttgaacaaaaaacgaagttaggaaaactcgcttattttatttcaggtgccaaacatttagcgaatgctcaaacgtatccttttcatttaagcttggatcaaaaagaacaaaccattgaaagtagtaccgttttagttggcttaacgaattcaatcggtgggtttgaaacattattaccagaggcccaagtggatgatggcaaacttcatttagtttatttaaaagatcaatcattatgggatgcagtaaaagcagtcccagatttgttaaaaggcgtcgaccagtccactgataatttagtttacctaacctttaaagaaggaacaatctccttagaaaaccaagaagaattaaccactaatgtggatggtgatgaaggagctgctttgccaattacgctgaagattttgcctaaacacttgacggtttattgcggtgaagaacaaacaaaatag

SEQ ID NO: 1962 - DNA, 813 bp, Enterococcus faecalis
aaaacagataagttctggcttttcaaatcatctaaaagagaatcaatcaggggctatgctatactttgtttctacatattgatagataaaggagttaatgagatgagaagaaaaaaacataaaaacaaaaagaaacaagaactttttgaagagattgaaaaacaagaattagcagaacaagaaactaagcaattgaatgaagaaatcgaagacccagaatttcgttctttttttcaagatgtcttgaaaaaatttccacaaaaaacgtctacggctataatgaatgctttcgcaacttctaaaggtaaagcagaacaattagtgacgaacagtcaaacacaactcgacaaagtatttgatgaatttttggctggtgtttcacctgacgtgaaaaagaaaagtcatcaaacgattcattttgctgcattgtcagcagcaattattgggttttcgccaattccgttttcggatgcttttttactggtacctgttcaattaactatgatgtcacggctgcataaaatttttggtcagtcttggtctgaaagcttagggaaaagcttaaccaaagaattagtagtggttagtttaggtaagagtgcagtcgggaatattctaaaagtgattcctgttgtcggaactgtgactggtggcatggtcaatgcttcagttgcggtagcaattacggaagcgcttggctgggttaccgtcaaaatgttaaacgatggtgttgatatctttggtgatgtgatgtctttcaaaggacaattttcaacattatttaaagccatccaaaatgctaaaaagaaataa

SEQ ID NO: 1963 - DNA, 1716 bp, Enterococcus faecalis
acgaacatgaataagtatcaattacctgtcgcgtcttgggttgaaagttttactgattggttaacttcaacatttgctggattattcagctttttacaaacaattggtcaaagtgtaatggacaacattactgccttactaacagccgtaccaccacttgtgctgatcgtgctattaacgattgctgctttctttatttctaataaaaaaattggcttaagtttattcacgtttattggcttaatgtttatctataatcaaaacttatggaacgatttaatgagtaccgttacgttagttttactttctagtgttatttccattatcattggtgtgccactagggattttaatggcgaaaagcgaaaaagccaagagtatcattacaccgattttggacttcatgcaaacaatgcctggtttcgtttacttgattccagccgttgcattcttcggaattggtatggttcctggggtcttcgcctctgttatcttcgctttaccaccaaccgtacgctttacgaacttaggaattcgacaagtgccaaatgaacttgttgaagcagctgattcttacggtagtactggctggcaaaaattattcaaattagaattacctttagccaaaaacacgattatggctggtgttaaccaaacaaccatgctagccctatcaatggtagttattgcttcaatgattggtgcgcctggattaggacgtggcgtcctttccgctttacaacgtgcacaagtcgggaacggtttcgtaaatggtgtggctttagttattttagcgattatcattgaccgttttactcaacatttaaataataaaaaagcagctcctaaagcagctggtgccacctctaaaaagaaaaaatacgggattattgcagcggttgttgtaattgtcgctggcttagttggtgcttcaatttttacaacaacaaatgataagcaaatttccctttcttatgtggaatgggataccgaagtagcctccacacatgtggttgccgaagtcttaaaagatatggggtatgatgttaaaacgacccctttagataacgcaatcatgtgggaatctgtagctaaaggtgaaacagatgccatggttggtgcgtggctgccaggaactcacgcagagcaatataaacaatataaagataaattagacgaccttggtgaaaaccttaaaggcgcgaagttaggaattgttgtcccttcttatatggatgttgattctatcgaagatttatctgatcaagctgggaaaaagattactggaattgaacctggggctggtgttgttgcagcagcagagaaaactaaagaagcttatcctaatttgaaagattggtctgttgaaacttcttcatcaggtgccatgactgtcgccttaggacaagcaattaaaaacaacgaagacatcgttattactggctggtctcctcactggatgtttgcaaaatatgatttaaaatatttagctgatccaaaaggcactatgggcggcgaaaaagcgattcacacaatggctcgccaaggcctaaaagaagatcaaccagaagcttacaaagtgttagataatttccattggaccactaaggatatggaatctgtcatgttagaaattaacgaaggcaaagacccacaagaagctgcacgtgattgggttgattcacataaagaccaagtagcagaatggaaaaaataa

SEQ ID NO: 1964 - DNA, 1122 bp, Enterococcus faecalis
  misc_feature (36)..(36): Nucleotide 36 is "n" wherein "n" = any nucleotide.
ggtgcccaccaaaggccaaaccggaaatttttaganaaaacggttgctacagtcggtgtttatgatgtaaatttcgaagttgaagaaggcgaaattttcgttattatggggttatcaggaagtgggaaatcaacattaattcgtttattaaatcgtttgattgaaccaacttcaggaaatatttatattgatggacaagatatttcttctttagataaagaaggattacgtgaagtacgtcgaaataaaatgagcatggttttccaaaactttggtcttttcccccatcgaactatcttagaaaatacggaatatggtttagaaattcgtggtgttcctaaagaagaacgccaagcaaaagctgaaaaagccttagaaaattctagcttaattgcttttaaagaccaattaccaagtcaattatctggtgggatgcaacaacgtgtcggccttgctcgtgccttggctaacgatccagaaattttattaatggacgaagcgttctctgctcttgatccgttaattcgtcgtgaaatgcaagacgaactattagatttacaagaaaatgtcaaaaaaaccattatctttatcacacatgatttgaatgaagctttacgaatcggcgaccggattgctttgatgaaagatggtcaaattatgcaaattgggactggagaagaaattttaaccaacccagccaacgaatatgtgcgaaccttcgtggaagatgtggatcgttcaaaagtcttaactgcccaaaatattatggtacctgctttaactactaacattgaaattgatggcccaactgttgctttaaaacggatgcgtcaagaagaagtgagtatgttacttgccgtggataaaaaacgccaactaaaaggcgttgtacgcgcagaaaaagctttagaagcgcgtaaaaatgggacttctcttgtagaatgtgtggatccagaaattcaaacaatcgacaaagatatgttagtgaatgatattttcccactgatttatgatgcacaaacgcctcttgccgtgactgataacggcaaactattaggcgtggtcatccgtggtagcgtacttgaagcacttgcagaaacagaggtgaacgaacatgaataa

SEQ ID NO: 1965 - DNA, 798 bp, Enterococcus faecalis
ccggactatttggtgaatactgtcttattagccattcgtgttattgtcgattccattaaagattgctatgccgtgttaggggcgattcatacacgttggacaccaatgccaggtcgctttaaagattatattgctatgccaaaagcgaatatgtatcaatctatccatacgacagttattggaccaaaagggaatccagtagaggtccaaattcggacccatgagatgcaccaaatcgccgaatttggggtggcggctcactgggcctataaagaaggcaaagcggaaaaaattgaaacagatgaactgacgaagcaagtcgattggttccatgaaattattgaattacaagatgaaagctatgatgcttctgaatttatgcaaggtgtgaaagaagacatttttagcgacaaagtctatgtctttacgccaagtggagatgtaaccgaactgccaaaaggctccggaccactagattttgcttacagtatccatactgaaattgggaataaaacaaccggtgcgaaggtcaacggcaaaatggtacagttagactatgtcctaaaaaatggggatatgattgaagtcctaacatcaccgaattctttcggacctagtcgcgactggctgaaaatggttaaaacaagtaaagccaaaaataaaatcaaacgtgtctttaaagaacaagaccgtgaagataacattattaaagggcatgatgctgtcattaaatacatgacagaaatcggctttacaccgaaaagaattttaacgaaaaatgaaatggcggaagtgtga

SEQ ID NO: 1966 - DNA, 252 bp, Enterococcus faecalis
cttttttattttgccttgatagtagaaatgaccagctttttactgatgagccatcatatcagcaaactcttgaccagttttcttaggggcgctgtttgcaatatccgtatagatagattacgttacttttctatttatgttgatgagtctattccaaatgataagcaagctatatcagaagcaattgaacgtctgaaagaactaatctatctattcagaagaagggcgagaaggctgtatcacccaagtgcc

SEQ ID NO: 1967 - DNA, 789 bp, Enterococcus faecalis
atcaacgttgaaaataccggccaatttgaacggaccttgattattgtcgatgaaggggccagcgttcactatgttgaaggctgtacggcacccacgtattcaagtaacagcttgcatgcggccatcgtagaaattttcactagaaaagatgcctattgtcgttataccactattcaaaactggtcagataacgtctacaacttagtaaccacacgtgctaaagcttacgaaggtgccactgtcgaatggattgatgggaacctaggagctaaaacaaccatgaaatacccaagcgtttacttagatggcaaaggtgcccgtggcacgatgttatcgattgcctttgctggcgctaaccaaatccaagatactggggccaaaatgattcacaatgcgccgaatacctctagctcaattgtttcaaaatcaattgctaaagacggcggcgaagttaactaccgtggccaagtgacttttggcaaagacagcgcaggttcgatttcccacatcgaatgtgacacgattatcatggacgaaaaatcaaaatcagatacgattccgtttaacgaaattcataacagccaagtgtccttagaacacgaagccaaagtttcaaaaatttctgaagaacaattatattatctaatgagtcgcggcttgtctgaagccgaagcgacagaaatgattgttatgggctttgttgaaccatttacgaaagaattaccgatggaatatgcggttgagttgaatcggttgattagttatgagatggaaggcagtgtaggttaa

SEQ ID NO: 1968 - DNA, 528 bp, Enterococcus faecalis
agaaagggtgacgacgaattgagtacagtacctgaattagaagaatataaatttggctttcacgacgatgtggaaccagtctttagtaccggagacggcctaaccgaagacgtcgttcgcgaaatttctcgcgtgaaaggcgaaccagaatggatgcttgacttccgtttaaaatcgttagaacaattcaataaaatgcccatgcaagaatggggtccagacctgtcagatattgactttagtaaaattaaatattaccaaaaaccgagtgacaaacccgcacgcgattgggatgatgtacctgataaaatcaaagaaacctttgaaaaaattgggattcccgaagctgagcgtgcttatctagctggggcttctgctcaatatgaatcagaagttgtttaccacaacatgaaagtagaatgtggaaaattaggcatcatttttacagatactgactctgctttaaaagtatatcctgacttattccaaggagtatttttcaaaactttttgccacccaacagaataa

SEQ ID NO: 1969 - DNA, 504 bp, Enterococcus faecalis
ttgaagcgattaaagcgacaaaggagtttttccagcatggcactttctaaattagataacttatatcgccaagtcattttggaccattctagccacccacatcaccacggaacgctagatgcgtctagccaaacaattgaactgaataatcctacttgtggagatgtgattgaactggatgtggccattgaagacggtgtgattaaagatatcgcctttcaaggaagtggctgttccatcagtacagccagtgctagtatgatgactgatgcggtcttaggaaaaacaatcgccgaagcaacggccttagcagaggatttctctcaacttgttcaaggaaatgaagtggccgaagatgaaaaattaggcgatgcagcaatgttaagcggcgtagctaaatttccagctcggattaaatgtgcaaccctggcttggaaagccttagagcaggctgttgctaataacggccaaggcgaagccggtcatttacattgtgaaaaataa

SEQ ID NO: 1970 - DNA, 1251 bp, Enterococcus faecalis
agggaagttaaacgcatgatggatgcagcaaccattcgtcaatcgtttcctattttatttcaagaagttaatgatgaaccgctagtttatttagacaatgctgcgacaacccaaaaaccaacggcagtgttagatgttttacgacattattatgaaaccgataatgccaatgttcatcgtggggtgcacacgttagccgaacgagcaacgaaggactatgaagcctcccgcgaaaaggttcgccaatttatccatgccaaagaaacagcagaagttttatttacacgaggaacaacaaccagtttgaattggattgccaaaagttatggtgacttggcagttacagccggggatgaaatcgtcatatcttacatggaacatcattcaaacattattccctggcaacaattagctcaacgtacaggggccattttgaagtatatagacgtcactgaagacggctttttagatatggcaagtgcacgtcaacaaattacagaaaaaacgaaaattgtttcgattgctcatgtttcaaatgtgttaggggtcattaatccaatcgaagaattaacacaattagctcatcaaaatggcgctgtgatggtggtagacggcgcgcaagcagttcctcatatgcctgtggacgttcaagccatcgatgctgatttttatgcatttagtggtcacaaaatgtgtggaccaactggaattggtgtcctttatggcaaacgtcatttattggaacaaatggaacctgtggaatttggtggcgaaatgattgactttgttcatcttcaagaaagtacttggaaagagcttccttggaaatttgaagctggcacacctaatattgccggggcaattgccttaggtgccgccattgattatttaacagaaattggtttagaggccattcatcaacatgaagcagcccttgttcactatgttttgccgaagttgcaagctatcgagggcttgacgatttatggtccacaggatccaaaagaccacacaggtgtgattgcttttaatattgaaggtttacatccacatgatgtggctacggcgttagatatggaaggggtcgctgtcagagcgggtcaccattgcgcgcaaccgttattaaactatttgagcgtgccagcaaccgcacgggcaagtttttatttatacaataccaaagaagacgcagatcgcttagttgaagcgattaaagcgacaaaggagtttttccagcatggcactttctaa

SEQ ID NO: 1971 - DNA, 1287 bp, Enterococcus faecalis
atgaaaaaagtaaatctaatggattatcttgacgaagtcaccgctttttcactagaacatgaagaaccagcttggatgactgaattgcgaacaacggctttaagaaacgctgacgaaagtgagttaccacatattgatcgtgtgaaatttcatcgttggcctttattaaatgttcacatggaaagttatgtgccttctgaaggaaatgtcgcaagttttgatcaaatgaaagacaatcctttaattgttcaacaaggatcttttcatgcttttgagcaattgccagcctcattagcggaacaaggggtaatttttacagacatttttactgctttacaagagcacccagaattagttaaagaatactatatgactaaagctgtattaccagaagaagataagctgacagcagctcatgcagctttcatgaatagtggcgttttcttatacgttcctaaaaacgtagtgattgaagagccaattgaatctttgtttattcaggattcagatagcaaccaacctttctttaaacatgttttaatcgttgcagataatcatagtgaattcagttatttagaacgttttcaatcaactggtcatcacgcagagaaagcttctggaaatatcgttgtggaagtgattgcgaaagatggcgcaaaagttaaatactcagccgtggatcaattagggcaaactgtaacgacttatatgaatcgtcgtggctatattatgcgggatgcctctgttgattgggctctaggcgtcatgaatgatggcgatgttgtggctgattttgattctgatttagttggcgaaggcgctcattcagaagttaaagttgttgcaattagtgcaggtaaacaaacacaaggcatcgacacacgagtgacaaacaaagcgccacattcaattggtcatattttacaacatggagttattcgtgaacgtggtactttaacgtttaacggaattggccacattttaaaaggagcaaaaggagccgacgcacagcaagaaagtcgtgttttaatgctgtctgataaagctcgtggtgatgccaatccaattcttttaattgatgaaaatgaagtgactgccggacacgcagccagcgttggtcgagtagatccagaagaaatgtattatttaatgagccgcggcttgcgtaaagaagaagcggaacgtttggtgattcgtggcttcctaggttctgtcattacagcaattccagttaaagaagtacaaaatgaatttgtagaagtaattgaagggaagttaaacgcatga

SEQ ID NO: 1972 - DNA, 825 bp, Enterococcus faecalis
gctaaaatgagtgagaacggaaaaacgattaaaacaagttggagggaattgtacatgtctgtgttagaaatcaaaaatttacacgtatcaattgaagataaaaagattctaaaaggagtcgatttaacaattaatactggagaaatccatgcaattatgggacctaatggaactggtaaatctactttatcagcagcaattatgggaaatcctaactacgaagtcacagaaggagaaattctatttgacggcgtcaacgttttagatttagaggtagacgagcgtgctcgcttaggtttattcttagcaatgcaatacccaagtgaaattccaggaattaccaatgctgaattcatgcgtgcagcaatcaatgcaaaacgtgacgaagacaacaaaatgtcagttatgcagttcttaaaaaaattagatagcaaaatggaattattaaatatgcctgaagaaatggctgagcgttacttaaacgaaggtttttctggcggcgagaaaaaacgaaatgaaattttacaattattgatgttagagccaacgtttgccattttagatgaaattgattcaggcttagatatcgatgcgttaaaagtagtttctaaaggggttaatgaaatgcgcggcgagaactttggtgcgttaattattacccattatcaacgcttattgaactatatcacgccagatgttgttcatatcatgatggaaggccgcgttgtgaaaaccggtggggctgatttggcaaaacgtttagaaacagaaggctatgctggtatcagccaagaattaggtattgattaccaagaagaagcgtaa

SEQ ID NO: 1973 - DNA, 264 bp, Enterococcus faecalis
tcctccctacacaaagaaaaaaattctggtagaataaaaaaatttattaaagaaagcgttttcttaaataattactttagaatgacttttgcaaagagagcgttgagatacgcctttctcatctatacaaaaaaatccagagcatttgcttctctggattcaataatttttattagtgattggttttatacttctaaaagttcttgttctttttcagcagtaatcgcatcgatatttttgatgctatcgtctgttaatttttga

SEQ ID NO: 1974 - DNA, 561 bp, Enterococcus faecalis
agaatgtctaaagaagttttagcaacagccaaagaaaaaatgacaaaagcggaagaaagcttacgccgtgaattaggtcaaattcgtgctggtcgtgcgaacgcaagtctattagaccgtattcaagtagaatattatggtgcaccaacaccagttaaccaattagcaagtatcaatatcccagaagcacgtgtattaatgattacaccgtttgacaaaaattctatcgctgacattgaaaaagctattcaaatgagtgatatcggcattagcccaaccaatgatggaaatgtcatccgtttagtgattccacaattaacggaagaacgtcggaaagaattagccaaagacgtgaaaaaagaagcggagaactcaaaagttgctgtccgtaacgttcgtcgtgatgcaatggatgagttgaaaaaagctcaaaaaaatggcgacatcactgaagatgaattacgttcatttgaaaaagatgttcaaaaattaacagacgatagcatcaaaaatatcgatgcgattactgctgaaaaagaacaagaacttttagaagtataa

SEQ ID NO: 1975 - DNA, 744 bp, Enterococcus faecalis
agaatcttggagggaattatgatggttaaacctaagtatcaacgtgtcgtattaaagttaagtggagaagcgctagccggagaagacggttttggcattaaaccaccagtcattaaagaaatcgtccaagaaattaaagaggtccatgaattaggtatcgaaatggccatcgtggttggcggcggaaacatttggcgtggacaaattggtgctcaaatgggcatggaacgtgcacaagctgattatatgggcatgttagctactgtgatgaatgccttagcattgcaagatacattagaaaatcttggtgtgcctacacgtgttcaaacatcaattgaaatgcgtcaaattgcagaaccatacattcgtcgtcgtgcagaacgtcatttagaaaaaggccgcgttgttatttttgccggaggaacaggaaatccttacttttcgacagatacaacggctgcgttacgagctgcagaagtagatgcggacgtcatcttaatggcgaagaacaatgttgatggtgtttattctgcggatccacgtgtggatgaaacagcgacaaaatttgaagaactaacacatttagatgttatttctaaagggctgcaagtaatggattcaacagcaagctcattaagtatggataacgatattcctttagttgtctttaacctaaatgaagcaggaaatatccgtcgtgccatccttggtgaaaatatcggaacaactgtaagggggaaataa

SEQ ID NO: 1976 - DNA, 654 bp, Enterococcus faecalis
aaaatgtgcttcttttgcgtatcttattttgaagaatcaattagacaaaaaatgctagaaagtagtgaagtgaagatgtatcaaacgattttatttgatttagatggcacaattacggattctggtagcggcattatgcgttctattttatacgcaacagaacaattaggctggccagctcctagcgaggagacattacgttctttcatagggccgcctttatatgagtcgtttttgcacatggcgccttcagctgaagcagcgcaacaagcagtgggtcattatcgagcgtattatcagagaaaaggtatgtttgaaaatcatgtgtatccagggatcccagaggtactaataaggttaaaggaagcgggagcaaagttatacattgcgacttccaagccagaaaaatttgctaaaaagattattactcattttgatttagatcgttattttacaggcatatatggagcgagtatggacggtcatcgttctaaaaaagcagatgtgattcagtatgcattaaccgaagctcaactagaacccacccaaggaggccattatcatgggttggtgatcgtaatcctgaacttcctgggggctcaacaaaaatgggttaaaatagtaataggtgttttggtatgggatttggggtga

SEQ ID NO: 1977 - DNA, 1170 bp, Enterococcus faecalis
catagaattaggaggaaaatgatgaagaaaattaaagtaatgacggtttttggaacacggccagaagcaatcaaaatggctcccttaatcaaagttttagaagagcaaagtcaaggatttgactctgtagtagtcgtaacagcgcaacatcgccaaatgttggatcaagtgttagaagattttcaaattacaccgaatcatgatttaaatatcatgaaagatgggcaaaccttaacagatattacaagtcgtgttttgaatttattaactgaggttcttgtgacagaacagccggatattgtcttggttcatggcgatacaaccacgtcatttgcggctgcattggctgctttttatcaacagattccagtgggacatgtggaagcaggattgcggacctggcaaaaatattctccgtttccggaagaaatgaatcgtcaactggtagacgtgttaactgatatttattttgccccaaccactcaaagtaaggacaatttaatcaaagaaaatcatccagaagaacatatttatgtgactggcaatacagcaattgacgcgatggcgtacaccgttgatgcccactatcaaaatgatttattggaaaaaatccctacagaccaacgcatcgtgctaattacaatgcatcgtcgtgaaaatttaggcctgccaatggcaaatgtgtttaaagctgttcgtcgacttgtaatggaacatccagaaattgaagtcattttccctatgcacaaaaatcccaaagtccgtgaaatagtagcggaacacttaggtgaattagctcgtgtgcatttaattgaaccattggatgtcaaagattttcaaaattttgcagcgaaaagtgctttaattttaactgattctggcggtgtgcaagaagaagctccttccttaggtgtgccagttttagttttacgagatacaacggaacgtccagaaggcgtagcggcaggaacattgaaattggttggtacagacgaacaagtagtctatcaagaggcgaaaacattattgactgattctgatgcttaccacgcgatggcgcatgcacaaaatccgtatggggatggtcaagctagccgccgaatcgttgaagccattgcctatgaaatgcagaaatcagataaaaaaccagatacgtttacagcaaaataa

SEQ ID NO: 1978 - DNA, 186 bp, Enterococcus faecalis
ttggtgcgggtctctttagtgacagaaggcaaaattatcccgccaaatgttttagcatttggtcgacccgcgaaggttatccgtccgttaacggcagcagaaatagccagtaatcatacgaacgccttacattatattcaacgagcagaagaatttcgccaacaaaaatacccgaaactaacatag

SEQ ID NO: 1979 - DNA, 426 bp, Enterococcus faecalis
cagagtttgaaaaaagaatattttattgctgctagtgcagatgtctatggaaacgtacaactagcaaaggatagtaatatttggtttcagtcggtcttaagaggtgacagtaacacaattaccattggtgaaggtagtaatattcaagatggcacgattattcatgttgatgaagatgccccgacaattgtaggcaagtatgtaacggtgggccatcaatgcatgttacacggttgtaaaatcggtgatggtgctttgattggcatgggttcaaccattctaaataatgctattattggagaaaacagcctgattggtgcgggtctctttagtgacagaaggcaaaattatcccgccaaatgttttagcatttggtcgacccgcgaaggttatccgtccgttaacggcagcagaaatagccagtaa

SEQ ID NO: 1980 - DNA, 1806 bp, Enterococcus faecalis
tattgcggcttctcaattgtcagaggaggaattagcatgaaacacgccttttcttctatgaaacgaatcggtcgctatattaaaccgtaccgagtgacgttttatttagttattttatttacaatattaaccgttgcctttaatgcagcgttgccttatttgactggattaccgacgacagaaattagccgtaatattgcggccggcgaatccattaattttgattatgtaatccaatgtttaatttggattttagttgtgggaacaggttattgtgtggcacaatttttgtcaggctttttaatgacgaatgtcgttcaacaatccatgcgcgatttgcgtcgcgatattgaagaaaaaatcaatcgtttgccagtttcttattttgataagaaccaacaaggaaatattttgtcacgggtgacgaacgatgtggatgctgtcagcaatgcgatgcaacaaagttttatcaatattgtttcagcagtcttaggtattgtgatggcggtagtgatgatgttcttaatcaatccgctgatggcgattttttcagtgattatgattccgttgtctctgattatttccagaacaattgttaaaatctcccagaaatatttccaaggaatgcaaaattctttaggagacttaaatggttatgtccaagaaaatatgactgggttcagtgtcttaaaactatatggtcgggaaaaagaaacccttgaaggctttaaacaagtcaatcatcgtttaaatggttttggtttcaaagcatcctttatctcaggattaatgttgccattggttcagatgaccgcttatgggacctatatcggggtagctgtccttggtagttactatgtggttgctggtgtgatcgtagtggggcaattacaagcgtttattcaatatatttggcaaattagccaaccaatggggaatattacgcagttgtctgcagctttacaaagcgcttcagcttcgaccatgcggatttttgaaatcctagatgaaccagaagaagaacttaacgaacaagatgttcctttgccagaacctattttaggctctgttgaatttgaaaatgtcagctttagttatgacccagaaaaaccgttaattcgtaatttgaactttaaagttgatgcgggccaaatggttgcgattgtgggaccaactggcgctgggaaaacaaccttaatcaacttactgatgcgtttttatgatgtaacagaaggcgccattaaaattgatggcattgacacgaaaaaaatgaaccgtagtgatgtccgatctgtatttggaatggtattgcaagatgcttggttgtataaaggtaccattgcagataacattcgttttgggaagttagatgccacggattatgaagttgtcgatgcagcgaaaacggccaatgtggatcacttcattcggacaatgccagacgggtatgaaatggaaatcaattctgagggagataacgtttcccttggtcaaaaacaattgttgaccattgcccgagcggtaatttctgatccgaaaattttgattttagatgaggcgactagttcagtcgatacacgcttggaagccttaattcaaaaagcaatggatcgtgttatggaaggacgaacgagtttcgttattgcccaccgcctatcaactattcgtgaagctgatttaattcttgttatgaaacaaggagaaatcattgaaaaaggtacgcatcatgagttgctggaacaaggtggcttctatgaaaaactatacaatagtcaatttgctgaagaaggcgactatgaggaataa

SEQ ID NO: 1981 - DNA, 1728 bp, Enterococcus faecalis
ttgaagttaatgtggcgttacacaatgcgttataagaaattacttttcgctgattttatttgtgtgtttggttttattttgattgaattaggcttgccgaccattttagcacgaatgattgacaaaggaattattcctagagatatggactatatttatcagcaagggatttggatggttgtaattacgattagtggcgttgcaatgaatattttgctagggtactttggtgccagaattacaacaaacattgttcgtgatattcgtgatgatttatttgaaaagattcaaactttctcacatagtgaatatgaaagtattggggtttcttccttaattacgcgaactaccaatgatgcataccaaattatgctcttcatgggaaatattttacgtcttggctttatgacgccagtgatgtttattgccagtctttacatggtgatgcgaacgagtccgtcgttaggaatgtacgttttaggtgccttgccttttctgctgctagcagttgtcgggattgctcgtttgtcagaaccgttatctaaaaagcaacaaaagaacttagatggaatcaatgggattttaagagaaaatctttctggattgcgggtaatacgcgcatttgttaatgaaaaatttgaagaatctcgttttaataaagtcaatgaaacttacactaaaagttcaaaaagtctgtttcgtttaatggcagcagcccaaccagggttctttttcttatttaatattgtgatggtcttaatcatttggagcgggactgttcaaatcagccatggggatttagaagttgggaatttaattgcttttattgaatatatttttcatgcgctgttctcgtttatgttatttgccagtgtctttatgatgtatccgcgggctgcggtttcggcttcacggattcaagaagccttagacatggaaccagctattcgtgaagaagaaggcgtaacagaaacagctactaaaggctatctagagtttaaaaatgtaacctttgcctatcctggacatgcggaaagcccagttattcgcaatgtaagttttaaggcgtcacctggtgaaacagtggcctttattgggagcacaggtagtgggaaatcaacattaattcaattgattccacggttttatgatgtatcagaaggtgaaattttaatcgatggagtgaacgtaaaagagtacaaacttagtgcattacgcaataagattggctatattccacaaaaagcgttactttttactggtacaattgctgataaccttcgctacggtaaggaagatgcgacgttagaagaaatggaacgagcaattgacattgctcaagccacagaatttgtttcgcaaaaaccgcaaggctatgatgaacctctttcagaaggtggcacgaacttttctggtggtcaaaaacaacgtttagctatcgcacgggcgattattcgcaatccggaaatttatatatttgatgatagtttttctgcgttagattatcaaacagatgcaaatttacgagcgcgtctgaaaaaagaaacaacagaatctactgttttaattgtggcacaacgtgttggaacaattatgcatgcggaccgcattgttgttttaaacgaaggcgacgtggtcggaattggcacacatcgtgaattacttgagacttgtccaatttactatgatattgcggcttctcaattgtcagaggaggaattagcatga

SEQ ID NO: 1982 - DNA, 387 bp, Enterococcus faecalis
atgaaaaaattattcttcatttttctcggttcctgtacgtttgctttaggcacgttaggaatctttttgccgcttttacccaccactggtttttatttattaacggcctttttttggatgcgtagttcagataaactttataacaaatttttagcttcttcttattatcaaaaatatatccaagaagccttctttgagaaaaaaattactcgtaaaggtaaatggaaactatttatttccatgtttcttttatttgccattccgtgtttaattgtccgaaatacgttgatgactacgactttagcgattgtttatttagctcacgtgattggcttaagttggtattggcgtcctaaaaaaaaggcactcgaacttgatcaagaataa

SEQ ID NO: 1983 - DNA, 213 bp, Enterococcus faecalis
aggagaaatgaatcgatgatttacaaagtatactatcaagaaacaaaaatcagaaacccaaaaagagaagacacaaaatctctttacatggaagccgatagcgatgtaatcgtgcgccaattagttgaagaaaataccccatacaatattgaatacgttcaattattagacgaaaaacatcttgcttacgtcttcaccacgggaaggggggga

SEQ ID NO: 1984 - DNA, 228 bp, Enterococcus faecalis
aagcttgaaagttcaattcatgtttatcgtgctatggctcgtatgacccagcaagatttggccaatcgagtcggtgtctctcgacaaacaattattcaactggaacgaaacaagtacaatccttcattacttcttgcgcatgacatcgcgaacgtctttggcgtaaccattgatgatgtgttcaccttcaaagaaacactgaatgacgatgtagaacaagaagcctga

SEQ ID NO: 1985 - DNA, 1056 bp, Enterococcus faecalis
aaactagtagaaagagtgacggaaatgctaagtacagaagattttgattttgatttaccagaagaattaattgctcaaaccccactaaaagatcgcgctagttcacgattattagttgtaaataaagaaacaggggacatggaggataaacatttccatgatattcttgatgaattactttctggggatgcattagtcatgaataatacacgggtactgccggcccgtttaaatggagaaaaacctgaaacaggcggtcatttggaagttttacttttaacaaatacagaaggcgatacatgggaaaccttgattaaacccgcgaaacgtgcaaaagtcggcacggaaattcaatttggcgatggtcgcctaaaagcggtggttaaagaagagttggaacatggtggtcgaatcattgaatttaaatatgatggtattttcttagaaattttagaatcgttaggagaaatgccattgccgccatatatcaaagaacgtctagatgacccagatcgttatcaaacggtttatgctgaagaaaatggttcagctgcagcaccaacagcgggtttgcattttacaaaagaactattagaagagatcaaagcaaaaggtgttcatctcgtttatttaactttacatgtcggtttaggaacattccgtcccgtgagcgttgataatatagaagaacatcatatgcatagcgaattctatcgtttaactgaagaagcggctaagcaattaaatgaagtacgccaagcaggcggtcggattgttgcggttggaacaacttctattcgtacgttggaaacaattggcacaaaatttaatggtgaaattcaggctgacagtggctggaccgatatttttatcacaccagggtatcaatttaaagtcgtagaggctttttcaacgaacttccatttaccaaaatctacgttagtgatgcttgtgagtgcttttgcaggaaaagacttaacattggctgcttaccaacatgctattgaggaaaaatatcgtttctttagttttggcgatgcaatgtttattaaataa

SEQ ID NO: 1986 - DNA, 207 bp, Enterococcus faecalis
gtaagtatacatagttatttagaggaggaactcaaaatgcatgctcaatttcatcatgtttcactattagcgcgtcatggtcaagaaaaccaatcattctatacaaaattgttaggcttacgttttgtcaaaaataccgtaaatcaagacaacaatcgcatgcctcattatttttatggggattatcaagcaacgccggaagcttag

SEQ ID NO: 1987 - DNA, 681 bp, Enterococcus faecalis
agaaaaaaattatttagccacgattggcttaaaaattccccaaaacacagcctttccttttgggaacaacgtttaacagaaaacaaaattccatttaacaaaaaagaaaagagcctacatttcagtgatccagatgatacgcatattatcctgacagaagttcctgaaaatccattaaaagaaacactcgttgtttctaacgacattccagcagcggttcaaattatcggtttggcctctactgaatttcatgtgccagattctgaaaaaaccttggccttttttgaaacatttcttggttggcaagcagttggcaatacgattattttaagtgagacggaaagcttttctgttcatcaaacaacgtcggataaaacaagccgaatggggcgtggcagtatggatcatattgctttttctgtggctgatgatgaagcattacaagaactacacacgcgcgctttagcacaaggctgggaaattgaaatgtatgtaagtcgtggatattttaaaagtttatacattcgtgaaccaggcgggaatcgggttgaatttgctactttgactcctggttttacattggatgagcctctggaacatttaggggaaacgttggctttaccgccttttttagaaccaaaacggactgcaattgaagccaacctctacaaagacatgtaa

SEQ ID NO: 1988 - DNA, 387 bp, Enterococcus faecalis
gatacattttcaaaatatttagttgaggtgagtaagttgatagaatttcagcatgtatcaaaattttataaaggcggaaaagtcgccgttgatgacattaatttgtctttcgataaaggtgaatttatctgcttcatcggaacaagtggtagtggaaaaacaacatcaatgcggatgcttaaccgcatgaccgacccttcaaaaggaaaaattttaattgatggccaagatattcaaaaaatcaatcctgtagagctacgtcgccaaattggctatgtcattcaaaatatcggcttgatgcctcacatgatcattcgtgaaaatatcgttttattgcctaaattattaaaagtacctgtggaaaaaacgcataagatagctgaataa

SEQ ID NO: 1989 - DNA, 711 bp, Enterococcus faecalis
tggaatgaaccttttggtgctttagatcctatcacccgtgattcattacaagatttagtgaaagatttgcaagaacgtttaggaaaaactattgtctttgttacccatgatatggatgaagcgttgaaattagcaaataaaattgccattatgagcgaaggcaaagtaattcaatttgacacaccagataatatcttacgtcatccagccaatgaatttgtagaagaactcatcggagaagatcgcctattacaagccaaacctgatttcaccactgttgatgaagtcatgttaaattcagctattactatcacgccggaaaaatctttacaagaagcgattaaattgatgcgtgaaaaacgggttgataccttattagttgttgataattcccatgtgcttaaaggctttatcgatgttgaaacattagatcagcaacgtggcaaagcttctagtgtcggtgatatcttgaataaagatgtcttctttgttcaaaaaaccgctcttttacgtgatgctttacaaagaatcttaaaacgcggcttaaaatatgtgccagtcgttgatgaacaaaaacgagtggtgggcatcttaacacgtgcttcccttgttgacattgtttatgatgttatctggggcgatgaaacaacgattagtgaagctgtagaagcaaaacaaagcgagtccgaaactgataaagaggaggcgtaa

SEQ ID NO: 1990 - DNA, 639 bp, Enterococcus faecalis
gcaatgagtagcttctttcaagaatatggatcagaaatgatttcaaaaagtattgaacatatttatatttcattctttgcacttttattaggggtcgctatcgctgtgcccgttggcgtttggttaacacgtttgcccaaagtagccaatattgtcattggtttaacaagtgccttacaaacggttccttcgttggctttattagctttgatgattccaatttttggtgtcggcaaaacacccgctattatcgcgctattcatctattcccttctacctattttaagaaacacgtatatcggaatgaaaaatgtcgatgaaaattaccgagatgttgctaaaggtatgggcatgaccaatttacagtctatttttagtgttgaattacccattgccatgccaacaattatggccggcattcgtttagctgctgtctatgtcattgcttgggctacactggcttcttatattggtgcaggtggtcttggtgatatgattttcagtggattaaataactatcagccagaattaatctttggcgggactattccggtaactattttagcgcttttagcagatgttcttcttggattattagaaaatcgtttaacgccaaaagctttaagggagggcgaataa

SEQ ID NO: 1991 - DNA, 1047 bp, Enterococcus faecalis
ctatcagccagaattaatctttggcgggactattccggtaactattttagcgcttttagcagatgttcttcttggattattagaaaatcgtttaacgccaaaagctttaagggagggcgaataatgatgaaaaagaaactcaagttaagcttactcttcttaagcagtttacttttattggcaggttgttctttacctggtctcgcttcaacttctgatgataacactgttgccattacaggtgggattacttcagaagcgcagattttagggagcattgtagcggatatggtggagcattacacagataaaaaaacaaatgtgattaacaacttagccactactaccatcaatcaccaagcaatgttaaacggagatgcctcaatttctgcagctcgttatactggtactgacgtgactactacgcttggcttaccagcggaaaaagaccctaaaaaagcgttcaatctagttcaatcagaatttgaaaaacgttatcaacaaacttggttcccttcatatggttttgaaaatacttatgtattcttagttacaaaagaaacggctgagaaatacaatttaaaaacagtcagtgatttagggaaagtcgcagacaaattagttgctggtgtcgatactgcgtggatcacacgtgaaggcgacggttatgaaggctttaaaaaggaatacaacttccaatttaaatctattttaccaatgcaaattggcttggtgtacgatgcagtcaacgctggaaaaatggacgtcatcttaggttactcaacagatggccggattggtagttacgatttagtcatgttaaaagatgacaagcgcttcttcccgccttatgatgccgctcctgtggttagtgacaaattattaaaagaaacgccggaaattaaagatgtcttaaatcgcttagatggtaaaatttctaccaaaaaaatgcaagaattgaactatcaagcagataatgatttaattgaacctgctgtcgtagccgaacgtttcttaaaagaaaataactattttgagggggagtaa

SEQ ID NO: 1992 - DNA, 666 bp, Enterococcus faecalis
cagatgaataatatgaatttattccaacaatttatctactatttccaacaaaatggcggctacgtctttcaacaatttttacgtcactttttaatttcgatttatggcgtaatctttgctgcaattgtcgggattcctattgggattatgatttcacgtaaacgtagcttagccaactggattatccgtttagcgaacattatccaaacagtaccagctttggcaatgctttcgattttaatgttgggaatgggcttaggcgtcaacacggtggttgtaacggtcttcctttattctctcctaccaatcatcaagaatacgtacactggcatgattcaagtggatcgcaatattttagatgttggtaaaggaatgggtatgacaaaagtacaacttctttatatggtcgagttacctttatctgtttcagtaatcatggcaggtattcgaaatgcgttagtcgtcgcaatcgggattactgcgattggtgctttcgttggtgctggtggtttaggggatattattattcgtggaaccaatgccacagatggtgcttctatcattttagtcggtgccttaccaacggcctttatggcgattatcacagattgggttctagggattattgaacggcgtttagacccagctagcaaacattccaattaa

SEQ ID NO: 1993 - DNA, 552 bp, Enterococcus faecalis
caaacattccaattaataaaaaatacagagcagatccaacattgtttcttttcaatgggatctgtttttttatctaggagatcaataatgtctaactatactattatcgatttaaaccaacaaccacacttaattccgtcagctgctcaatggtttagccaaaagtggcaaatccccgctgaagcgtatcaagcaagtatgcaggaaatgctaactagcgaaaaccacgtaccacattggtgggtctgcttgaataaacagcaggacatcgttgcaggcgtgggcgtaattgataatgacttccacaatcgtgcagaccttacgccaaacctttgtgcattgtatgtcgaaccaacatttcgtcaccaaggcttagcaggaattcttttaacaacagttggtgattttctagctaattctggatttaaaaagctttatttgctcacagaccatactactttttatgaaagatatgactgggaatttttgacaatggtaaccaccgaagagcagtcttgcgctagaatttatcaaaaacaattacgtcaataa

SEQ ID NO: 1994 - DNA, 1776 bp, Enterococcus faecalis
cgtggtgaagaccataaattaagcagatttgcagcgcttgcgttgttatcttctgatgcactttcatccattgcgtatggtacagaacaaatagtggtggttctggttactttgtcggcggctgcgatttggtattcattgccaattgctgcatttgttattattttacttatttctttaacattgtcgtaccgacaaattattcatgcgtatccgcatggcggcggcgcatacgttgttagtagtgaaaacctcggcagaaatgcaggtttattggctggtggttcgttgttagtcgattatatgctaacagtagccgtttcagtttcagcgggtgcagaggcgattatatcggcgattccagcgttatatggtcatcaagtagcaatttctattgggattgtgatattgattaccttaatgaacttgaggggcctgagagaatcagcttcgttcttaatgttgccagtgtatagttttatcgcaattattaccttactgattgttgttgggctatttaaaattgtgactggcgcacagccattgaatgcgacagctttaccaggagccgtggttccaggaatttctattgccttggttttacgggctttttcatctggttcttcttccttaacaggggtcgaaacaatcagtaatgcaatgccattctttaagaaaccacgagcaaaaaatgctgctgggacgttagcgttaatggcaacgaattttaggttctgcttcttggggattacttttattaactattggtatgggattgtgccaaaagaagaaatgacagttctttcacaaattgggaaagcggtctttggtcaaaatattttatattatttattacagtttgcgacagccttaattttagcggttgccgctaacacaggattctcagcctttccagttttggcttataacttagccaaagataagtttatgccgcatatgtatatggatcgtggcgaccgtttgggctattcaaatggtattttaactttagctgctggttccattgttttattattgattttccaaggttccacagaacgtttaatcccattgtattccattggtgtgtttattccgtttgctttgtctcaatcggggatggttgtaaaatggcgaaaagaaactaaaaattggttgccaaaatcaattgctaatattgtcggcgcctttatctctttcgcgattatcgccattttgtttatttatcgattaggggacatctggccgttctttattattatgccagtgttgatttatgcattttatcgggtcaatactcactataaaaatgtggcggaacagctacgtttagaagatggggcacagttacatgagtttgacgggaatacagttattgttttagtagggaacgtaaccaaggcaaatgtcggcgccttgaattatgcgcgttccattggcgattatgtcgttgccatgcatgtctcaatggatgaaaatgttgagaaggaaaaagaaattcaggaagagtttaaaaaacacttcccggacgttcgtctatcaattgtccattcttcgtatcgttcactgcaaaatcctatcttacgttatgttgatttggtaagtaaaaatgccacgaagcataactacagtacaacggttttagtgccacaatttgtaccaaataaacgttggcaaaatattttgcataaccaaacaagtttacgcttgcggattcgtctagcgtggcgggaaaatatcatcgtggctacctatagttatcacttgaaaaaataa

SEQ ID NO: 1995 - DNA, 543 bp, Enterococcus faecalis
ttaaaagccggtatgacttttgagcaagacggcaaattaattaaagtaatggaagctagccaccacaaaccaggtaaaggtaacacggttatgcgtatgaaattaaaagatgttcgtacgggttcaacaacagatacaacaatgcgcccagatgaaaaagtgaaaaaagcgcacatcgatacaaaaccggttcaatatttatacagccaagatgatatggctattttcatggatttagaaacatatgaacaatatgaagtaccaactgctttaattgaagaagaactaaaatatttattagaaaatatggaagtaaaaattcaattttatggtgaaaaagtcattggtttaactttaccaacaacggtaatcttacgtgttgctgaaacacaaccttcaatcaaaggcgcaacagtaactggttctggtaaacccgctacaatggaaacaggattagttgttaacgttccagattttgttgaagcagacgaattattagaaatcaatactgcggaaggtacgtatttaaaacgtgctaaataa

SEQ ID NO: 1996 - DNA, 840 bp, Enterococcus faecalis
ggcactaaaatttatgcgaaactagaatatttgaatccaggtggcagcgtcaaagatcggcttggtgtgcatcttctcaaagaagcaatgaaaacgggaaagataaatcaagccacaacaattattgaaccgacagcggggaatacagggattggacttggattagctgccagtcaactgggcctcaagacaatctttgttgtgccagaaaaatttagtcaggaaaaacaacagctgatgcaagcgttaggtgctaaaattgtcccttcgccaacagagcaagggattgtcggagcgataactagtgcccaagacttagccaaggaaattcctaatagttacgtgccgttacaatttgaaaatccggataaccctgctgcttactacgaaggattaggacctgaaattgttcaagacttaggcggaaagattactagctttgtcgcaggtttaggcagtggtggaacgtttgcaggtgttggcagatatctcaaagaacaaaatagtaagacgcaattatggggcgtggagccagaaggttcaattttaaatggcggacctgcacacggacatgaaatcgaaggcattggcgtggagttcgtgccgccttttcttaaacagattcctgtggacggcttttataccatttcagacgaagatggttttttctgggtcaaacaattagccaagaaaagcgctttgctggtgggaagctccaggcggcgcagcatttgcgggggcattaagaggggcgcgccgcttacccggccgggcagcacaattgtaactatttttcccgaccgtagtgatcgttatttatcaaaaaatatttattcttag

SEQ ID NO: 1997 - DNA, 1149 bp, Enterococcus faecalis
gaggacacctttatgaaattcaataccaaattaattcatgccggcattagtaaagacacaacaacaggtgcagtgagtgttcctatttatcaaacgtcaacctttgaacaaaatggcgtgggccagccaaaagaatatgaatattctcgttcaggtaatcccacacgtcacgcgttagaaaccttaatcgctgagttagaaggtgggagccatggctttgcgtttagctcaggcttagctggtatccatgcaatcatttctatgtttggacccgaagatcatattttattaggtgacgatgtctatggggggagtttccgtttattggataaagtatttgtagcaaatgggttaagctacacgattgtaaacgccagcgacttatcaacaattgaagccgcaattcagccaaatacaaaagccttgtttttggaaacaccaagtaatccactgttaaaaattacagatattgaagcggcagctaagcttgctaaaaaacatcagttgttaactattgtcgataatacatttgcgacaccttattttcaacggccgttagcgttaggtgctgatattgtggttcacagcgggacaaaatatttagggggccatagtgatgtagtctctggtttagtcgtaacgaatcatccagaaagcgcagaaaagattgcctttttacaaaatgcgattggtgctgttttaggaccacatgatagttggctggtccaacgtagtttaaaaacattaggcgtccggatggcagcgcatgcccaaaatgctcaaaaaatcgcagaatttttagaagcgcatccagcggtagcaacggtgtattatccaggactagcgagtcatcctggtcacgaaattgcgcaaaaacagatgtcgggatttagtggcatgatttcttttgaattagccaaggatgagcaagtcgttcctttcgtagaagcgttggaaatttttactttagcggaaagtttaggtggcgtagaaagtttaattgaagtacctgccattatgactcacgcatctatccccaaagaaaatcgtgaagccgtgggaattaaagatggactcattcgtttatctgtaggaattgaagcagtcgaagatttattggctgatttagaaaagggattacaagcataa

SEQ ID NO: 1998 - DNA, 1371 bp, Enterococcus faecalis
ggaggctgggaccaacgcggtaaaggggtgagcgtggcggatgtaatgactgccggtgcacatggcgtccctcgtaaaattaccgcaggcgttttaccagatgaacactatcctaaccatgaagcgattgatttttaccatcgctatcaagaagatattcaactattcaaagaacttggtttaaattgtttccgaacctctattgcttggacacgaatttttcctaacggagatgaagaaacgcccaatgaagaaggccttcgtttttatgatgcactttttgacgagtgtttgaaaaatggcattgagccagtcgtgacactgtctcactttgaaatgccttatcatttagtcacaaaatatggcggctttcgcaatcgccaggtcattgatttttttgtcaaatttgctgaagtctgtttcactcgttaccagaaaaaagtaaaatattggatgacctttaacgaaattaacaaccaagccaattatgaagaagattttgcaccttttactaactctggtattgcttaccaggaaggagaagaccgcgaagcaattatgtatcaggctgctcattatgaactagtcgctagcgcacgtgcagtgaaaattggccacgctatcaatcccgacttccaaattggctgtatgattgcgatggtgcctatttatccttattcttgtaatcctgaggatatgatgatgagtgttagcgcaatgcaaaaacgttattggtttaccgatgttcatgtccgcggtcattatccaagtgcaattcaatgctatttgaaacgaaaaaacatttcattagatgtcacagaagaagatttaactgatttagctaatggctgtgttgattatattggctttagctattacatgtcgtttgctgtaaaaggtgcagaaaaggcccctacttttgactacaatgaagcaaaagacttggtgcgaaatccttatgtagcaacatctgattggggctggcaaatcgatcctatgggcttacgctatgcaatgaattggttcaatgatcggtatgaattaccactttttattgtcgaaaatggctttggtgctattgatgagttagaaccagacggaacgattaacgacacttaccgaatcgcttatttacgtgaacatattgagatgatgaaagaagccgttgcgtatgacggcattgatttgatgggctacacaccttggggattcatcgatttagtgagcgctagtacaggcgaaatgaagaaacggtatggcttcatttatgtagataaagacaacgatggtcacggaacgttggagcggcgaaagaaaaaatcgtttgcttggtatcaacaagtgattgctacgaatggagaagaattataa

SEQ ID NO: 1999 - DNA, 1380 bp, Enterococcus faecalis
acggatacatttgcatttatattattcttcaaaggagagatttttatgaacgaatggattaacgagaaattattacctccagtactaaaattcgtcaataccaaagcaattactgccttacggaacgggatgctttacacgatgccttttaccattgttggttccgtgtttcttctattagcgaatttcccagttacagctatttctgaatgggttaacgcaagcggtctggctgtttatttcaatcaagcatatggtgcatcttttgcgattatgtcgttatttgcggtcatcggtattgcctactcatatgtaaaaagcgagggatttgaaggcctcccagcgggcatgattgccatggtggttttcattttgtttatgtcatctgaagtcaaagatgcggtttctggcgcagtaattggcaatgtcatcaacaaagattggacagctggcaaagggatgattacagctattattgttggtttgttagtcggcgttgtatatagttggtttttacgtcatgatattcgtatcaaattaccagaagctgtaccagaaaatgtggccaattcctttactgcgttaattcctgccagcgtcattgtaactggtgcaatgctaattttcattcttctagataaagtcttcaatacgacattctttgactttatttacgaagtgctacaatcaccacttcaaggagtcacagattcactaggtggcgcattactattaggttttgtcattcccctcttttggtttttcggtgttcacgggtcaacaatcgttggcggtatcatgggccctattttacaagcaaactctttagaaaataccgaaattttgaaatcaggaaaagacttaacactggctaatggtggccatattgttacacaacaatttttagatcaatttttaacggtcactggtgcgggcatgacaatcgggttagtcgtgttcatggttttctttgccaaatcagctcagtttaagcaattaggtcggctttcaattgggccagctgttttcaatattaacgagccaattgtctttgctacacctatcgtgatgaacccaatcatggctgtgccgttcattatcacaccgattgtttcttctgttgtgacatattttgccttgtacacaggactggttcctctctttactgcggtacaagttccctggactactcctccaatcatttctggacttttagttggtggttggcaagcagcgttgcttcaagtagtggtactgacgatgagtttctttatctatttaccgtttgctaaaaaaatggatgcacttaactacgcagaagaaaccaatcaaccgattactgaagaaacccttgaaaaagtcgaagcacaaaacgtataa

SEQ ID NO: 2000 - DNA, 258 bp, Enterococcus faecalis
agcaacgctgcttgccaaccaccaactaaaagtccagaaatgattggaggagtagtccagggaacttgtaccgcagtaaagagaggaaccagtcctgtgtacaaggcaaaatatgtcacaacagaagaaacaatcggtgtgataatgaacggcacagccatgattgggttcatcacgataggtgtagcaaagacaattggctcgttaatattgaaaacagctggcccaattgaaagccgacctaattgcttaaactga

SEQ ID NO: 2001 - DNA, 774 bp, Enterococcus faecalis
aggaggattactttgtttgatttagacaaggttcagaccttgaatgaattagaaatgctcgtttaccattatgtattggaacacctgcaccaaatccctcaacagaccattcgccaactggctacttcctgtcatgtctccacctcaacgattctacgattttgtaacaaaatgggctatgctggtttttccgaattaaaatatgcagtgaaagaagaagccaaacaaacacaaacgtttgaaaatttttatgatgccacggttcacgtcgatgcttttttaaaaaaattaaaccaagaaacctattacgaaatgcttcgtccagcaatccaaatgattgttcaagcacgtcacgttgcctttactggcattggtactagcggaattttaggtagttatggcagtcgttattttgccaacttaaatatcaattcttacagtattgctgatccctttacgcctatccccaagcgcggatttgaaaatacattagccttgattctgtctgtatctggggaaaccaatgaaatgattaaacaaatgaccgattttaaaacagctggcgccaaagtgctaagcattaccaacaatcaacattcaactattgcccgcttggctgactacaacatctcctattatatgcccgacgaacgttctccatttgcagataagtcagtcaatacaaccactcaaatccctgtcattgctttaattgaactcctagctcatcaagcaagtcaacttttaaaggaactagatgaaacaccttcctag

SEQ ID NO: 2002 - DNA, 597 bp, Enterococcus faecalis
agttttttgagaaaacaagctaaaatagataagaagagaaaaggaggcgttgatgtggcacgggaagtaattttatttattgcagcgagtattgatggtttcattgcggacaaagcgggcggtgttgcttggttagaagagaatattcgtggcgatgaagaagatcgtagttacgatgaaatgtatgaaaaaatagacactgtggtaatggggcggactacttatgatcaagtgacacaagaattgtccccagatgtgtatttttatgaagacaagcattcttatatcattacctctcatccagaaccatcaactgcttcaagaacttttaccaaggaagatcccgtcacattaattcgtcgtctcaaagaagaagacggcgcgggaatttggattgttggaggcccgaaagtggttcaaccgcttttggcagctgatttaattgataccttcattttgacgacaataccactgtttctgggtgagggcattgctctatacgagacaatggctcaatcaatcccagttcgtttaaaacaggtttatcaaaaaaatgagttggtttattcgatttatcaacgtgaaaacaaaaattaa

SEQ ID NO: 2003 - DNA, 567 bp, Enterococcus faecalis
  misc_feature (540)..(540): Nucleotide 540 is "n" wherein "n" = any nucleotide.
ccgtttgtgttgtttttgattgacaaagaaatggtagaggagaaaaaaatgaaacatcagatcaaaagaaggttgtatatttcacctgttcaaacaattgtcttaggcttttttctattaattgttgtaggcacgatcttattaatgatgcctttttctgcacaagctggacaaaaaacgcaatggattgatgcttttttcgtggcaacttccgccgtctgtgttacagggctttcgcctttgaatacggcggaacattggagtcctatcgggcaagttattattatgattttgattgaattaggcggcttaggctttttaaccgttgccacgattttctttagtttgctgcggaaaaaagcgtcactaagtgtacggatgttgtatcaagaagctttaaatgttagtgaagtttccggagtttttcgtttaatgaaatatattatgaagtttgcggccattattcaattacttggagccttcttgttgtcctttcaatttgtgccaacatttggggtggacaaaacggttgttttttantctcttccatgcccgtttcggcatttt

SEQ ID NO: 2004 - DNA, 390 bp, Enterococcus faecalis
  misc_feature (247)..(247): Nucleotide 247 is "n" wherein "n" = any nucleotide.
caagtgtttgcccggacagtgttaaaaaatcctagtaccttaacagaagaatttgttcgctttgcattggtctggatggcgatgttagcttctgcttatgtggttggaaaaaagggacatttagcagtaactttgttaagtgaaaaattacaagggaaacaaaaacgctttttagaatttattgttcaattgttgttcctactttttgcaggagtgattatgatatttggcggttggaatggtgtantaattacgttaggacaaatttcaccatctttggcaattcctatgggttatgtctatttagccgttccagtagcaggtgttttgatgtttatttatagtttgatgaatttgctagagttattcacgcaatcaaaagattcttaa

SEQ ID NO: 2005 - DNA, 1320 bp, Enterococcus faecalis
aagaaaaagaataggagtaaaaatatggctttagaagcaggcattatcttatttgtagtttttgcagtcttattggtagttggtatgccaattggtatgagcattgcggcatcttcaattgcaacattgttattagtaattccttttgaagcagctgcatttacctcagctcaaaaaatggtctctagtttaaatagtttctctctcgtagcaattccgttttttattttttctggtgtgattatgaataatgggggaattgcccaaaagttggtaaatttttctatgttatttgttggtcgtgttcccggcgcgctagcacatactaatgtgttagggaatgcattatttggttcgatttctagctctgcaattgcagcatctactgctattggtggcgtactaattccgcaacaagtaaatgagggctatgatcggaaatttgcaacggctgtaaatattgcctctgctcctacaggaatggttattccaccaagtacagcgtttattatgtattcattggtggctggtggggcctctatttcttctttatttttaggaggttatttggtacgttctttgtgggcgttaggaattatggtggtagcttatgttattgcaaaacgtcataattatcctactgtggcaaaagcaaaaaaaggagaagtcagcaaggttctgcgagaagcggttcccagtgtattgttaattgtcattattattggtggtattttgacggggttatttacagcgattgaagcatcagcaattgctgttgcatactcattattgatttcaatgttttactacaaaacagtgaaaataaacgatttacctaaaatgttaaaagaggctgtcttgatgagtggaaccattatgttcttgttggcaacttcttcaatgatgtcttttgcgatggcttttacagggataccagaagcaatcagtacagctattttaggaatcacagacaataaatacttaattctactattagtaaacgttgtcctattgtttgtgggaatgtttatggatgttggtccagctattttgatttttacgccaatctttttaccaattgttatgaatgttggggtggatccagttcattttggtttatttgcgattatgaacttgtgtgttggttcaattacaccacctgttggaacaggattatatgttggtgctagtgttgggggtgttaaagctgagcaaatgctgaaaccactagttccattttatctggtaatcttagcaattttacttttaatcacatatgtacctgaacttgtcatgtggttaccaaatctaatttcttaa

SEQ ID NO: 2006 - DNA, 882 bp, Enterococcus faecalis
gaggttcttatggattattgggaaaaagccgactactcttggtcagacgattctaagcgacatattttgacacctagcagcaaaagtcgcacacttttttattacatacaggaaattggacagtttaaagcctcgcgcccttattatacggagcgggcacatttaccatcatacttaattaaattcacgctaaatggtactggggaattacgctatcgttatcatacatacagcttacagagaggtgatttattctttattgactgtcgggattatcaatactatcaagcaaccagcgaagatccttgggaaatggactggattcattttgaaggaggaaattctggtgcttttttccaagaatttatgaaaaatggttcaccagttttctccactaatcagcttccagaagataatcctattcatttaatcattcagcaattattacaattacaagatttacaacatgcgcaaactgattaccaatcttccgtcttaattcatcaattactgaacgaattattgttgcaaaagtatcgtcaagactttacctacgaaacgattccatcattggttttggaaatgaaagcttacattgatcaacatttcaaagaaacaatttctttagaagacttggctcaactctttcatttaaataaatatcaattgaacaaagagttctccaaatacattggattaccgccaattaaatatcaaattagtaaaaaaatttcttattcaaaagatttactacgctattctaatcaaacagtgaaagaaattgctgtagatgttggtttagaaaactatgcctactttagtcgattatttaaaaagcgaactggattaactcctagtcaataccgtaaaagtggcttctaa

SEQ ID NO: 2007 - DNA, 240 bp, Enterococcus faecalis
ataggttcgtttttcaacttgttcttttttcactttgttgatagttgtcaatcctttcactatttttattttttgtacgttagactaactttatgtattcatcataaacaaaaaatagcgctttcacctctcacaattttgagatataattgtactatcttggtaattaggaggttcttatggattattgggaaaaagccgactactcttggtcagacgattctaagcgacatattttga

SEQ ID NO: 2008 - DNA, 1536 bp, Enterococcus faecalis
tctaacgtacaaaaaataaaaatagtgaaaggattgacaactatcaacaaagtgaaaaaagaacaagttgaaaaacgaacctatttagcggttgatattggcgcttctagcggtcgcataatgaaaagtcaacgcttagcgaatggtcagataacaatagaagaaattcatcgttttaaaaatggttttcatcaaaaagatgggtatcagcgttgggatatggctagtttagttcatgagttactgcttggtctgcaaaaagttaaacaattaggtatcaaggaatgctttattggaattgatacttggggtgttgactattgtctgctggatcaatctggacaacttttggacgaaccgattgcttatcgagatggacggacagaagcagctgtaacaaatttttcaaaaggctattcattagaaaaattgtaccaacaaacggggattcaagttcagccttttaataccatttttcagttatttgtagaggaaaaggaacgtttggctgcagccagccaattgttgttaatccctgattacttaggttatgtctttactggaaaagcagtcatcgaagcaaccaacgcttccaccacgcaactgttgaatgctggaacgaaacaatgggaaagtgaattactggatttcctaggaattgatgaaacactatttccaacattagtagagccgggcacgattttaggcgacctgcaaacagcggcttttccagactatgatttaccaaatgcaacgttgattacgatagctagtcatgatacagcttcagcaattttaggtacgccaggcattggcgatgactgggcgtacattagcagtggtacttggtctttattaggcattgaaacgactgttacaacaatttctgctgaagctttccaagaaaattacacgaatgaatggggcgcccagaacacaattcgtttcttaaaaaatattatgggtatgtggctaattcaagaagtggcacggcaccaaaactaccaatatagctatgctgaattggccgccttagctgaaaaagaaccagcatttcaacaatttattgatgtaaatgatcctcgttttttaaatccgggaaatatgattactgaattacaagcctattgccgtgaaacacaacaaacagttcctgaaagccctggtgaactcgctcgttgtatttatgataatttagcattgtgttacagcgtagaactagaaaaattagctcaattaacaggaatcgaacggaaaattacaactttacatgttgtcggtggtggttccaataatcgtttattgaaccagctaactgctgatgttgctaatgttacagtgaatgcgggacctggggaagcaattgctttaggtaatcttttgatgcagatgattgcaacaggtgaacttaaagatattccagcagctcgtacttgtatccaaacatcttttcccacggaaatctatcaagcaaatccaattgattcaacaataaaaaatcgctatcaagcatttatgaaaaggagctcattatga

SEQ ID NO: 2009 - DNA, 1335 bp, Enterococcus faecalis
ttcaacaataaaaaatcgctatcaagcatttatgaaaaggagctcattatgacaaccattacacaaaaatatgaagaagcgaaagaaaaatatgccagtattgacgtagataccgaagctgtattggaaaaaatggctgatgtcaaaatttcaatgcatgtgtggcaaggagatgatgtgagaggcttcttaagtgaggatgaactttctggtggtatttcagttacagggaattatccaggcgttgctcgaagtccccagcaactacgtcaagatttagaaaaagcgttttctttaattccaggaaaacacaaattgaatttgcatgctatttatttagacacagaggaaagggtggatttaaacgaactggaaccaaagcattttgaaccatgggtgacttgggcaaaagaaaatggcttaggattggactttaatccaacctttttctcgcatccaatgtaccgcgatggctttactttagctcatccgaatccgcaagttcgagacttttggattgagcatgggaaacgttcacgaagaattgctgaatattttggaagagaattaggacaagtagctgtcaataacttttgggtgccagatggctttaaagataacccagttgatcgtttaacgccgagaaagcggctaatggcttcgctagatgaaattttttcagaggaaattgatccagcttatacagtcgatgcgatggaaagcaagctctttgggattggttcagaagcctatacagttgggtctcatgaattttatatgggctacggtttaacgcggaataaattaatttgtttagatgctggtcattttcatccaacggaagtgatttctaataagttatcttcattatccttatttggcgaaggaatgctattacatgtcagtcgtccagttcgctgggatagtgaccacgttgtcattatggatgatgaattgcaagaaattgccaaggagttagttcgcaatgatttattaggaaaaacacacgtgggcttagatttctttgatgccacaatcaatcgtgttgccgcttgggtgattggcacccgcaatacacaaaaagcgttaatgaaagcgatgcttgagccaacaaacgtcttaaaagaagctgaattgataggagattttaccacacgtttagccttaacggaagagttaaaagactttccatttgccgatatctggaactactactgtcaagaaaatcacgtacctatcggcttagattggttaacggatgttcaagaatacgaaaaagtgattttaccaactcgtcaattgccaacaggtaaagatagttgtcgtttttcataa

SEQ ID NO: 2010 - DNA, 870 bp, Enterococcus faecalis
caaacgagaggaacttctaaaatgaaaaaaatgaacgtgttacaagcaccatttgtggaagaaatggtcaaaacgaccaaaaatttatatcgtttaggttgggatgaacgaaatggcggaaatatttcgtatttattaaaagaggaggagattttaccttttctaaatccaacacaagtgctccgaaagattccaatgaaatttgatgcaacgaaattagcaggaaaatattttatcgtgacaggctcaggaaaatattttaaaaatgtctgtgatgcatcaagcgaaaacttagggatcttacgagttagtgaaaatggccaggaattagaactattgtggggcttagaagatgaagctgtaccaacgagtgaattacctagccattttatgagccatattgctcgtttagctgttgatccagaaaatcgcattgtcatgcataatcatgcgagtcatttattagcaatgagttttactcacgaattagatgaaaaagtctttactagaacattatggcaaatgtgtaccgaatgtttagtagtatttccagacggtgttggtattattccgtggttggttcctggaacgaatgaaattggtgtagcaacggctgaaaaaatgaaagaatctcgtttggttttatggccgcaacatggtatttatggtactggccgtgatatggatgaagtatttggtttaattgaaactgccgaaaaagccgctgaagtgtacacttatgtttgtgcgcaaggaggcgttcgccaaacaatttcagatgcagatttatggcgcttagcagaagcgtttggtgtgacaccgaaagttggctatttggaagagaaagtatcaaaacggagaaagctatga

SEQ ID NO: 2011 - DNA, 375 bp, Enterococcus faecalis
agtgtacacttatgtttgtgcgcaaggaggcgttcgccaaacaatttcagatgcagatttatggcgcttagcagaagcgtttggtgtgacaccgaaagttggctatttggaagagaaagtatcaaaacggagaaagctatgataaaaaaagccttttgtatgcaagtatatcctgatcaacatgccgaatatcaacgacgtcatgagaagttatggccagaaatgcgtcaaatgctgaaagaacatggggcaattaagtatcaaatttttttaaatcctgaaaccagtacactttttggttatttagaaatagaagatgaagctcgctgggagcaaatagcactgacaccaatcaatcaaaaatggggaatatag

SEQ ID NO: 2012 - DNA, 357 bp, Enterococcus faecalis
ggagaagacatggagaatagtaaaaaaaatcaagcagtgcaagtgagcaatagttactggattaaagtcgtagccattttcttcgtaggctggattttaatgtacgcaacacgaactatttttaatccagtgatgggggtcattggagaacaatttggtctaagtaacacacaacttggtttagccaatagtatcttctttctaacctatgctgttgcacagattccttttgggatgattggcgataaaattgggcggaaattagtcattgctgttgggtttatcgttcttgctatttctacttattttagtggattagcgacaacctttgttatgtttttagtcattcgtgcaatt

SEQ ID NO: 2013 - DNA, 843 bp, Enterococcus faecalis
gcattacggttgaataaccaactagtcattagtgactacatttttcctatccaccaatatggcaagatgggaaccattcacagtgtttttgaacgttcatttaatctgaaagtccaggatcaattaatcaatgttgcaaacttccataattatttatcaagctttggtatgtttttgccagatcaattgtttcaagaaatctttccgtatgtacaacaaggtaataaagtcaaaatcacagaaaatcagttgaccttttacagtacagtcggcgtgaaaacgatccaactcacacctgctgaggtcgtttctttaaacattactcatttcaagttagaaaaagaccaattacgcttgttgcgagaccgcttattagcgagaaacttagaacgtagaattggcctgcctttagacgaacgagcgaagcatattttcaaaaaaatgagccaaaaacaaaaagtttggacactatcggaatggcaagaagtaacgaattatctgattggtcggggcaaagggttaaccccgagtggtgatgacattttagtggcgtatcaaacaattctgttcatacttgctgatgaaagagctgcggcgttagccgctactctttcggcagcaaatttatccacaacagatgttagtaaaggctatattgcaagctcggctaaaggatatgtaaattcattgttgtatcagttactcttggatttggagaaccatcgggataatagagttgacgaaaatattgacagaattatacaaatcggacattcctctggtaaagatatgtcatttggaatgttactagctttacaatctgtagagttagatgagaagtga

SEQ ID NO: 2014 - DNA, 3015 bp, Enterococcus faecalis
acaatgttacacacagtaattttgaaaaacaattaccaagactccatcaacttaatgttattgaccaataaaatcaatgcattagatggtgtaaccatgagtcaaatcatgatgggaacagatgccaacaaagacatccttaacaacacgaacttgttaacggatgaggccaatagtgcatctgcaaacgacatgatgattgtggttgacagtgaaaaagaaaacatcatggaagaagttatgccagcgattgatgaattcttagatgatttatcagcaaagggaactagtgaagaagcacaagcagcaacttcttggtcagaagcgtttgatcttttaccagaggcgaatgtagcgctattcagtattcctggtgaatatggtgcgccagaaatggaacgtgccttaaaaaatgatttacacgtgttctctttcacggataatgtgtcaattgaagatgaagtacgtttgaaaaaattagcgcatgaaaaaggcttactaatgatggggcctgactgtggaactggtattatctcaagtattccaatcgcctttacaaatgttgtttctccaggaaacattggcgttgttggtgcttcaggaacagggattcaagaagttacaacgattattgaccgcttaggtggcggagttgttcacgccattggtactggtggtcgtgacctaagcgacaaagtaggcgctatcacagtgaaagatgctattgtggccttagaaaatcacgaaccaaccgatgtgattacagttatttctaaaccacctgcaaaagaagttcgtgatgaagtggttgaattattacaaagcatttcaaaaccagtcgttgcgattttcttaggagaaaaaccaacaagtcacgaaggcaaagtttatctagctcatacattagaagaaacagctaaaattgctgttgatttagcaaatgatgtggccgtgaagaaaaattactttgaagcattagcaaaaccagctgtaccaacattaccagaagataaagttgtaaaaggcttatattcaggtggtacattagcttctgaagcaggtatgttaatttcagaagctttagatcttggcggtttagtgaaagcagaaggttatgtcttgaaatctcacggttatgaagtcattgacttaggcgatgatatgtatacacaaggtcgtccgcacccaatgattgacccagatgttcgtatcgaaaaaattcgtgaatacgcacaggatgaaaaaacggggattatcttattcgatgtggtgttaggctatggtgctcatgaagacatggttggtgcattgttaccagcaattgaagaagcgcgtgccacagccaaagaagcaggacgtgatctttactttgttgcaactgtctgtgggacgacgaaagatccgcaaaattaccaatcgtctgttgatcgtttgaaagaaggcggcgttttagtagcagaaagcaatactaaagctgttcaattagctttattactaaaaggaatcgaaatttcagaagacgataaagaagtggttgcttacaacggaccaactgtcgatgtaccaaaaccaggcgaaaaagtaatggaactattaacaaccaaaccaagaatcattaacgttgggttgcaaagctttacagaatcaatcgttgattacggtggcgaaactgttcaatttaactggcgtccacgtgctaacggcaataaaaaaatgattaaaattttggatgctttggaagattacagtgaacaaatcgaagctgaaaatcacaaagtaacagacaaaattaaaaatgcacaaccattcttagtagatgtggtacctgcgaaatcagtgattccagaattaaatgatgacgcacaaaaaacattacttcatgctggaccaccaatccaatggtctgaaatgactggaccaatgaaaggtgcttgtatcggagctgcattattcgaacgttgggcagacaatgaagaagatgctttgaagatttttgaagctggcgaagtacgtttcattccttgtcaccatgtaaaagcagtaggaccaatgggcggtattacttctggtaatatgccagtctttgttgtggaaaatcgcttagaaggtaacgaagcatactgtatcttgaatgaaggtatcggtaaagtattgcgttttggtgcttattcacaagaagtggttgatcgtttagattggattaaagatgttttaggaccaactattgcgaaagccttgaaactttctgaagaaggcttgaacttaaacgtattgattgcgcgctctattacaatgggtgacgagttccaccaaagaaatattgccgcatctttgaacttcttaaaagaattgtctccattaattatcaaaacagatattccagaagatcaaaaatacgaagtaatcaaattcttagctgacacagatcaattcttcttaaatgtcatgatggcaactggaaaagcaattgttgatggtgcccgtaaagataccaacggaacaattgtcacaacgatgactcgtaacggcgtgaactttggggtccggattgcagaaacaggcgatcaatggcataccgcaccagtaaatacaccaaaaggtctttacttcactggtttcagcgaagaagacggaaatcctgatgtcggggatagtgcaattactgaaacagtaggtgttggagcaatggctatggtagctgcacctggcgtaacacggtttgttggtgcaggtggctttgaagatgcgttagcaacctcaaatgaaatggcaaaaatctgtgaaggaaacaacccaacattctcaattccaacttgggatttccaaggaacttgtttaggaattgatatccgtaaagtggtggaattaggaattacaccaatcatcaatacagggattgcacacaaaaatgccggtgttggtcaaattggtgcagggacagttagagcacctctaggctgttttgaaaaagccctagaagcgtatgctgagaaactaggcattacggttgaataa

SEQ ID NO: 2015 - DNA, 1626 bp, Enterococcus faecalis
tttttatccataagaggaaaaaaggagaaaatgatgaaattaagagagttattatcgataggtgacttaaaaaaaggtaaaattttgacgaaagagattggtttagacaatgaagttgactcggcaatggtcttagaagcgattgacattgagaactggagtagaaagaatcagttaattttgacttctttctacgcattgcatgatctacccgaaaaagagttggaaaattttttcgtaaagatgcgccgaattggcatcagcggcttaattttgaaaacagatcgattcattaaaatgattccagagtggtttatcgaattatgtttcaattatgaaattcctttaattaaaatcacacaagacattagctatgaaaaaattctatttacgatttacgagcctttgttgaattatcagtcgcatgtcttacgtacgtattacgatgtgcgccaacgtttcaccaaattagagcgccactacccaacggttgagacgattatgcaagaattttatgacatcattaaattacccttcgctttaaaaatgttggataaacatctggaaattagcgatggcgacttaccccatgatgcgattgtgctctcaagagaaaaactaaaaaacagtgaattcactaaaaacgattactctcttttaacactttactctcatgccaaccccaaaaaacagttggcactagaagtttctattttcaatagttattccactaattgtttacttctggtttatttacaagatgaaaaggttaaagaaacggatttagtgattatcgaaaatgcgattgatgtcttacaagaaaaattcaataccgaaaatttgttaaaaaaagaacggtatactcgtttgaacaacttagcggatgctattttacaaaatacaccgcaaaatcctgacgagctaaacagtttgcttcgtgaagtgcaaatgcaagagctagattcttaccaagcgattgctttttctaccaaagacaccaatacacaactcatgaaagaacgaattattgccttacttcgtaccctgcgtgtgaaatccatcttctttgatcagctaaattattcggcggtcctttttaacttcaatgaaagtgatggaaaaattacaaagctgcaattaagtcgtttattagctgaacttttagaagaaaacgacacgcttaccgttgccgtcagcagtttaaaatcacgagaagggattaaagagctactgattgaatgtctggacattctgcgctttaatgaaactttttataacggaccaattgtcaccttagccgatattggggtatttaaaaattttatccgcgaagaccaattggaaaatttagacgaattaattcctcgcgcactttatcaattagccgaaaataactacgatttgtttgaaaccttgtacagttttttccaaaataatcgcaactataaacagacctctgaagcgatgttccttcattcaaaaacgattcgttatcgtttaaacaaagtggaacaacttcttgatattgacttagccaatcccttgcaattgttaaattatgaaattgccacatacattataaagatgaggagacgtgcacttgaaaaacaatcaaacactcgctaa

SEQ ID NO: 2016 - DNA, 273 bp, Enterococcus faecalis
ggagacgtgcacttgaaaaacaatcaaacactcgctaatggcgcaacagttactatctaccccactacgactgaaccaacgaactatgtcgtctatttacacggtggcgggatgatttatggaaccaaaagtgatttaccagaagaactgaaggagctgtttacaagcaatggctataccgttttagcactggactatttgttggctccaaatacaaaaatcgatcacatcttaaggacgctaacggaaaccttccaattgttaaacgaatag

SEQ ID NO: 2017 - DNA, 552 bp, Enterococcus faecalis
attattcaaaaccagtcctttggtttgtgcgggcgttccgctggcggttatttaatgttacagttaaccaaacaattacaaacactaaatttgacgccacaatttttgttccatttttacggctatacagatttagaatttattaaagagccacggaaattattaaagcaagccatttccgctaaagaaatagctgctatcgaccaaacgaagcctgtttgggatgatccttttctttctcgctatctgctgtatcattacagtattcagcaagcgctattgccgcacttttacggattaccagaaaacggggactggtctgcttacgcactgtcagacgaaacattaaaaacttttccaccttgtttcagtacagctagcagctcagacgaagaagtgccgttccgctatagcaaaaaaatcggacggaccattcctgagagtacctttaaagcggtttactatttagaacatgattttttaaaacaaaccaaagatccttcggtcatcactttatttgagcaattggatagctggttgaaggaacgataa

SEQ ID NO: 2018 - DNA, 279 bp, Enterococcus faecalis
tatactgtatatacaatatatacgaaaggtgggttactagtggaaatcaaagaaagaaaacttagaaaagttgggaattctgttgttatgacattgtcaaaagagtttctagaaagcattggtgcgactgcgacagacaccgtttatgtagacgaagaaaaattaaaagatattattgttaaaaaaaatatgtcagaacatcaaaaaaaattacaacaaatgatggagaactcaaaacaaaaacataatgagctgtacaaagaattggttactaaatga

SEQ ID NO: 2019 - DNA, 342 bp, Enterococcus faecalis
atgaaaagtatttattatttatcagcggatgatctatttcaaatgaatactttcttgatccaaacgtattctcccgcagaacaaattggcatcaaagatcgtaatgcattagaaatggctagcaaccaaccagcacaattcgtctttgacgttgacctgtacccaacaattgaagaaaaagcagctattttaatgattaacattgcaacaaagcattgtttttacaatgcaaataaacggacagctgtaatggcaaccgacttatttttacaattaaacggttatgatttccaattagatacgcaagaaggcgttgacttattggtttttattgctacttag

SEQ ID NO: 2020 - DNA, 345 bp, Enterococcus faecalis
aagacagtccttttcattcgtcaaaaagagaaaggactgtcttttactatgcaaactattaggtgcctgtttggcaaacgtggtatcattgaacccaataaattgaacagaagaaaaggagtggacagaatgacaaaaccaacagaagaagaattaaaacaaaccttgacggatcttcaatatgccgtcacacaagaaaacgcaacagaacgccctttttcaggagaatatgatgacttttaccaagacggaatctatgtagacattgttagtggcgaaccgttgtttagctccctggacaaatacgatgctggttgcggctggccagtgttcaccacggggtta

SEQ ID NO: 2021 - DNA, 579 bp, Enterococcus faecalis
aaagaaacgaggcgtcatcaatttatgcaaattattttagcatcccaatctcctcgccgtcaggagttattaaagcgtgtggttccaacttttacgattgcaccagccgacatcgatgaaactgttggcaaagacggcttaccagcagaatatgtggcgcaaatggctgcccaaaaagcagcggctatagcagagcaatcccccgaagcactagtcattggctgcgatacaattgtggcattggcgggagagatcctcggcaaacccacttctcgggaagacggttatcgcatgttgcgcctcctaagtggcaaaacacatgacgtgtatacaagtgtgacgttgaaacaaggggaaaaagagcgctccgcgacagttcattcaaccgtgacgttttatccactgacagacacggaaatccatgcttacttagacaccgcagaatatgccgacaaagcaggcgcttatggtatccaaggacaaggagcattactaattgaagcaatcgctggcgattattacgccattatgggcttaccaattgccaaagtagctcgactgttaaaagaattcaactaa

SEQ ID NO: 2022 - DNA, 2160 bp, Enterococcus faecalis
gaaccgaaccggttaggaggtcgtgaaatggggaaaattcaagaactatccgaacaactagccaaccagattgctgctggtgaagttgttgaacgtcccgcttctgtcgtcaaagaattggtggaaaatgcactggatgcaggaagcactcaaattgatatttttattgaagaagctggcttaaaaaccattcaaattattgataatggtgaaggaattgccaaagaagatgtactgaatgccttcaagcgccatgccacaagcaaaattcatacaagagatgatttgttccgaattcgcagcttggggttccgaggcgaagccttaccaagtattgcctcagtttctgaaatgattgtcgaaactgccacagctgaggaagaagaaggcagctatgtgattctaaaagggggcaaggtcgaagaaaaccgaccagcagccctccgtaaaggcacaaaaatgaccgtttctaatttattttataatacgcccgctcgtttgaaatacgtcaaaacgatccaaacggaattggccaatatcggtgacattgtcaatcgtctggcgttaagccaccctaaagttgcttttcgcttagttcatgatggccacaaaatgatgagtacaacaggcaatggtgatttaaaacaaacgattgcggggatttatggcattagcaccgcaaagaaaatgttgaaaattgaaggaaaagaccttgattttactttgacagggtatgtctcattgccagaagtcacacgggccagccgcaactatttatcaacgattatcaatggtcgctatattaaaaatttcgcgttaaataaagcaattgtagccggctatggttcgaaactaatggtggggcgttttccaattgctgtgttagaaattgaaatggatccgctgttagtcgatgtcaatgtccatcctactaagcaagaagttcgtttaagtaaagaaaaagatttaatggcattaattgaacaggcgattcaagaagtgttgagccaagaacagttgattcccaatgcggcagacaatttgcgttttaaaaagaaactaccgccagaacctaaagccgaacaaatggaaattcctttatcgactgaacaacctgcggtaaaacaacgaccgggcagcttaagctataatcccgcaacaggccgcttttatgcggaacatgcgacagacgaaacaccagcctcaagcgcccctgaagctgtcaaccagacagaaagagcagtggacccaatggacgatccatttgcgccgccagtgccagaatcaacgagtgtagcggaagaaacgtcagcttacgaaacctcttcggcagctgctgattccgcaaatcattgggaaacagctagtaatgagcaacaggtaatagccgaagaaacgaaaataactgaagtgcctgattcagaaccttctctgcgttcatcagaggctgctgacgaggttttccaagaagaaatgaaacttcacccagaattcgatgccaatagcgctgcgagtcaaagagaactgaaacaagccctgaacaagttggaagaagaacgaccgacagagcgttttcctgagctagaatacttcggtcaaatgcacggaacttatttattcgcacaaagcaaagatggcctgtttattatcgaccaacacgctgcccaagaacgaattaaatacgagtacttccgtgaaaaaattggcgaagtcagtgatgatttacaagaactattggtaccaatcgttattgattatccaaatagcgatgccttgaaaattaaagagcagaaagaaacccttgcggaagttggcatccatttggaagactttggacaaaatagtttcattgtgcgggcgcacccaacttggtatcctgcaggcgaagaggaaagcattgttcgcgagatgattgacatgttgctaacaactggctcggtcagcgtgaaaaaattccgtgaagcaactgccattatgatgagctgtaagcgatccatcaaagccaatcattacctcaatgagcaacaagcacgcgtgctattaaaagatttagccttgtgcgaaaatccgtttaattgtccgcatggacgtccggtgctgattcattttacgaattcagatatggaacgaatgtttaaacgcattcaagacccccattaa

SEQ ID NO: 2023 - DNA, 2577 bp, Enterococcus faecalis
atgccacaaaagacaaaaaatacacccatgatggaacaatatttatccattaaggcccaatacaaggatgcgtttttattttatcgcttaggtgatttttatgaattattttatgaagatgctatcaatgcagcgcaaatcttagaattgacgttaaccagtcgtaaccgcaatgcggatgatccgattcctatgtgtggcgttccttatcatgccgcgcaaggctatattgatacgttgattgagcaaggctataaagtagcgatttgtgagcaagtggaagatccaaagactaccaagggcatggtcaaacgagaagtggtccagttggtaacgccaggaacggtgatgaatagtaaaggcttggaagccaaagacaataattacttaaccgctgtgctaacagatggtaatcagttcggttttgcctatgtagatttgagtacaggcgaattaaaaacagcagtcttggctgatgaagagggcgttttgaacgaagcttctgcgttgcaaacaaaagaaatggtcctaggttcagggatccctgaatcgttaaaagagaacttaagtttacgtttaaatatcatcttttcgacacaagaaacggtggaagaaaatgccgagtttagttttttaaccaatgaactgattaatccattagaaattgaaattacaggcaaattattatcttatttatccgttacccaaaagcggagcttgtcccatattcagaaagctgtggaatatcagccagatcatttcttgaaaatggatcattattctaaattcaatttagaattgagtcagtcgattcgaacaggacagaaaaaagggactctattgtggctattagatgaaacgaaaacagctatgggcggccgtttattaaaacaatggttggatcgtccgctgattcaggaacgtcaaattaaggcgcgtcaagaaatggtgcaatccttattaaatgcctattttgaacgcttggatttgcaagcagcattgacgaacgtttatgatttagagcggttagcaggacgcgtggcattcggcagtgtgaatgggcgtgatttaattcaattacggacctctttagaacaagtaccaacgattcgacagttaattgtcgggatcaatcaaggggaatgggatgatttgttagtcgacttaaaccctgttgaagatttagtggcattgattgcgacggcgattaatgaagaagcccctttacaaattactgaaggaaaggttattaaagacggctataacgaccaattagatgaataccgtgatgccatgcgcaatggtaagcaatggttagcggagttagaagcgaaagaacgccaagaaacagggattaaaaacttgaagattggctacaatcgggtctttggttatttcattgaaatcactaagtcaaatttagcgaatttagaagaaggaaaatacgagcgtaagcaaacattagctaatgcggagcgctttattacgccagagctaaaagaattagaacgtttaatcttagaagccgaagaaaaatcagttgaactagaatatcaattgttcttggccgtgagagaacaagtgaaaacgaacattgatcggttgcaaacactggctaaaaccattagtgcggttgatgttttacaatcttttgcaacaattagtgaacggtatcaatacgttcgaccaacgttaagaagtaacacgaaaaatttggcgattgtcgaaggacgacacccagtcgtggaaaaagttttagggcatcaagaatacattccaaacagtatccgcatgaacccagaaacagatattctcttgattactggaccaaacatgtcagggaaaagtacctacatgcgtcaattggctttgacggtggtcatggcgcaaattggctgttttgtaccagcggaaagtgctgaaatgccaattttcgatcaaatttttacacggattggggcctctgatgatctaattgcagggcaaagtacctttatggtagaaatgatggaagccaaccaagcactgcggcacgccacgcctaacagcctaattttatttgatgaattaggacgcggcacggcaacctatgatggaatggcgctagcgcaagccatcattgaatatatccatcgtgaagtacaagccaaaacgctattctctacacattatcatgaactaactgttctagatgaaaccttaaaaggcttgaagaatattcacgtgggcgctgtcgaaaaagatggcgaagtggtctttcttcataaaatgatggaaggacctgctgataagagctatgggatacatgttgctaaaatcgctggtttaccaagcccgcttttagaacgagcagccaccattttatccgctttagaagcggaagaaacaacgattccaatttcagttcatcatgaagaagtttcagaagtacatgaagaaaccgagcaactttcattatttaaagaagtttcaacagaagaattaagtgtcattgacacattgaagaaaatgaatctattagaaatgacaccactagatgcgttaaacatgcttcatcaattgcaaaaacgtatctaa

SEQ ID NO: 2024 - DNA, 390 bp, Enterococcus faecalis
aagatgaaggtgaaaaaaatggagccgttgaatttagatgcacaaagtaataaagaattagaaaaattgttacatttaattggacaagatgaagtcattcagcgctaccaagcgattgaagaaaaggtaaagaaaaacaaaaagctgacagaattagtggaagaaattaaagctgcgcaaaaagatgcggttcaatttgctcactatggcaaaccaactgctgaaaaagaagccattcaacgagccgatgcgaaaacaaaagaatttgatgagcacccactcgttgtagcctaccgcgaacaactgatcgaagccaatgacttagtccaacatgtcacggcgctcattcaataccgcgtgaacgaagagctagagaaggaagggaattaa

SEQ ID NO: 2025 - DNA, 840 bp, Enterococcus faecalis
gcatatcaatgccatcggaagcaaaacggattgaaggctaattataatggcgaagaaattactgttaaagtctcaattgttaatcagaatgaggtgcccactggtgagcaatttgatttgattatcttattcacgaaggcaatgcagttggaaaaaatgctgcaggatgttaaaccattaattgctgatcacacagaagttttgtgtcttttaaacggtatcggtcatgaagacgtaatcgaaaaattcgtaccgatggaaaaaatctttatcggcaacaccatgtggactgctggtctagaaggtcccggcaaggctaaattatttggcagcgggtctgttgaattgcaaaatctaggtattggccaagaagaatcagcgaaaaaattggcggaaactttgtccgcgtctggtttaaatgccaaatattccgacaacattcattattcaatttatcgtaaagcttgtgtcaatggtacgatgaatggcttatgcacgattttagacgtcaatatggcggggcttggtgcaaccaaacctgctcatgacatggtagtgactattgttaacgaatttgcagctgttgctgccaaagaaaacgtcaacttagacattcccgaagtaatcgaacatgtagaaacttgttttgacccgactacgattggtatgcatttcccatcgatgcaccaagacttgataaaaaataaccgtttgaccgagattgactacatcaacggagccatttctcgtaaaggtaaaaaatatggagtagtaactccttactgtgatttcttaacgcaactggttcatagtaaagaagaaattctaggagcgaaatag

SEQ ID NO: 2026 - DNA, 1029 bp, Enterococcus faecalis
aaagaggatgagaaaatggaagaaaaattaactccaaaaatatttttaaataaagtattagcgggtaccgcaacggggatcatcgtagggttgattcctaacgcggtattggcagcaattttgaaattatttggtgaaaataccttagcagtaacgatcacacaaatggcagttattttccaactagctactccactattgattggcgctttgattgcggtgcagtttggcttcaaaccaatgcaaatgttagtagttgccggtgcagctttcgttggctccggtgttgtgaaattcaatcctgacacagctacttatatcggtgctggtaccggagacatcatcaataccatgattactgcatcaatcgctgtcggcatgatcttgttgatcggcgaaaaatttgggtccgtggcaattgttgcaacaccaatcgttgttggtatcggcgctggtctaatcggctattatttatatccttacgtaaccaagattactgccgctatcggtgacttaattaatacctttactactttgcaaccaattttgatgtcaatcttgattgcatgttcctttgctttcttgattatctcgccgatctctacagttgccattggtatggcaattcaattgaacggtgtttctgctggtgcagccgctatgggtgttgccgcaacaacagttgtcttggtagttaactcttggaaagtcaacaaaccaggggttactttggccatcgcattgggtgctatgaaaatgatgatgccaaacttgtttaggaaaccaattatcttggtgccatgtctattcaccgctatcatctcagcaattccagtagcgttattctcagtctcagggactcctgcttctgctggtttcggtctggtatggttggtacgtccgttggcttcattggacgccggtttgagtattattctactattaatcacctggtttgttgtaccaatcgtacctgctttcgtaggtcaaatctcatttgaaaaaatcttgaaatcgtatgatcgttaa

SEQ ID NO: 2027 - DNA, 810 bp, Enterococcus faecalis
aggagaccgtcattcacctcttccgaaaaggtattaccatgtcggaaatcgcagactgaagaagtaaatgcatttaaagttagaactctaaatgataagtatgtcgctattttcatggatgctacttatatttctttaaaacggcaaaccgtctccaaagaagcaatctatattgccattggtatacgagaagacggcactaaagaagtactaagttatgcgattgctccgactgaatcgacctacgtttggaatgagttgttacaggacatttactccagaggggttcatgatgtcttactgtttattaccgatggcttaaaaggcatgaaagatacgattcaccagatttatcctaaagctaaataccaacattgctgtgttcacgtttaccgtaatattgctcataaagtacgtgtcaaagatcgaaaagaaatctgtgatgattttaaggctgtttatcaagctagctcaaaggaagaggcaaatacctttttagggagtatgattgagaagtggcagaaaacttatcctaaagtgacgcagtcactgataaaaaatcaagatttattgactttttatgagtttccgcctggtatccgccgaagcatttactcaactaatttaatcgaatctttcaataaacaaatcaagaaatacagccgcagaaaagagcagtttcaaaatgaagaatcactagagcgtttcctagtatccatctttgatacatacaatcaaaaattcttaaatagaagccataaaggcttccaacaagtgacggatacattagcttcaatgtttactgagtaa

SEQ ID NO: 2028 - DNA, 648 bp, Enterococcus faecalis
gatgtgattattgtagccgtgggctactatcttcgttataaccttagctatcgtgaagttcaagaaatcttatatgatcgtggcattaacgtttctcatacgacgatttatcgttgggtgcaagaatatggcaaactactctatcaaatttggaaaaagaaaaataaacaatccttttattcatggaaaatggatgaaacgtacatcaaaattaaaggaaaatggcattatttgtatcgagccatcgatgcagatggtttaaccttggatatttggttacgtaaaaaacgggacacacaagcagcctatgcttttcttaagcggttagtgaagcagtttgatgaaccgaaggttgtagtcacagataaagccccctctattacaagtgcctttaagaaactaaaagaatacggcttttatcaagggacagaacatcgtaccattaaatacctgaataatttgattgaacaagaccatcgtccagtaaagagacgcaataaattctatcgaagtttacgcactgcctctaccacgattaaaggcatggaagccattcgaggattatataagaaaacccgaaaagaaggtactctcttcgggttttcggtctgtactgaaatcaaggtattattgggaatcccagcttaa

SEQ ID NO: 2029 - DNA, 246 bp, Enterococcus faecalis; identical to SEQ ID NO: 840

SEQ ID NO: 2030 - DNA, 450 bp, Enterococcus faecalis
aactttgcaacagaacccgcggtaggttatgtgtcaaaaacagcggtttgccttttctgtgtttaccttttatcttttacatttgtttatgctagtgcgttaagtcaccaaaaggaatcttttgaacgacaaagtatgatattagccggtgatttaaaagatctagtgaaccgtgacacggtgaccgtgcatagtacctctttatttaaggattcgccagtatttgtcaatagttcgaagaattatcctatattaaaagaactggttccaccaaatgaagccctttattggccaaatcagtttttatttagaacgtacactggcttaaatgtgaacatggagatctttgatattaacgcgttgaataaagaagaaagtgacttaatgaaatctaattattaccacgacatttatgtaaaagattcagaagtatttgtccatgttaaataa

SEQ ID NO: 2031 - DNA, 201 bp, Enterococcus faecalis
atgataatcaataacttaaaattaattagagagaaaaaaaaaattagccaaagtgaattagctgctttattagaagttagcagacaaactattaatggtatagaaaaaaataaatataacccttctttacagttagcattaaaaattgcttactacctggatactccactagaagatatttttcaatggcaacctgaataa

SEQ ID NO: 2032 - DNA, 303 bp, Enterococcus faecalis
caaaaaggaggaatcaaaatggctatttttatttggatattggatatcatttctgtagtctactttgtttttaatctgactgattcaaaaaaagatgagcgaattttatatacaatttctttaacatctacttacatgtacttatttattaacttttccatacttatagtaattgctatttttcttttactacctaatgttattactaaaaactatctatttaattttatctactattacttctctctatcaatgatattgcactctctgttactactttttttcaacaagaggacttcataa

SEQ ID NO: 2033 - DNA, 222 bp, Enterococcus faecalis
tggagggtaagaattatggaaaatttaagtgtagttcctagttttgaagaactaagtgttgaggaaatggaagcgattcaaggtagtggagatgttcaggctgagacaacaccggtgtgtgctgttgcggcgacagctgcagcaagtagtgctgcttgtggctgggttggtggcggtatttttactggagtaactgtagttgtgtctttaaaacattgttaa

SEQ ID NO: 2034 - DNA, 198 bp, Enterococcus faecalis
agcacagtgctaaataaggaaaatcaagaaaactattactctaataaattagaacttgttggtccttcttttgaagagttaagtttagaagaaatggaagcgattcaaggtagtggagatgttcaggctgagacaactccagcatgttttaccataggcttaggagtaggtgcattattttcagctaaattttgctaa

SEQ ID NO: 2035 - DNA, 1422 bp, Enterococcus faecalis
aaaaggagtgcttacatggaagataatttaataaatgttttaagcataaatgaaagatgttttttactaaagcaaagtggtaaagagaagtacgacattaaaaatttacaagcttggaaagaaagaaaaagtgttcttaaacaagatgatttagactacttgattaaatataaatatgaatcactggataattttggattaggaataacacctattgaaaactttcctgataaagaagttgcaattcaatacattaaagatcaatcatggtatattttttttgaatccattttagattcttataatgatagtgaagagaaattattagaagtagatgctagttatccttttagatatttcttacagtatgctcgtttatttttacttgatttaaactcagagttaaatatttgtacaaaagaattcattattaatttattagaaactttaacacaagagcttattcacttaacaagtaaaacattagtgctagatttgcatacttttaaaaaaaatgaacctctaaagggaaatgatagtagcaagcgatttatctattatctaaaaaaaagatttaactctaaaaaagatataatagctttttatacatgctatcctgagttgatgcgtattactgttgttagaatgagatattttttagataatactaaacaaatgcttataagagtgactgaagatttacctagcatacaaaattgttttaacatacaatcctcagagcttaactctatatcagaatcacagggagactctcatagtcgcggaaaaactgtttctacactaactttttctgatggaaagaagatagtatacaagccaaagattaatagcgagaataaattaagagatttttttgaatttttaaataaagaattagaggcagatatttatatagttaaaaaagttactagaaatacctatttctatgaagaatatatagataatatagaaataaataacatagaagaagtaaaaaaatattatgaaaggtatggtaaactaatcggaatagctttcttatttaatgttacagacttacactatgagaatataatcgctcatggagaataccctgttatcatagataacgaaactttttttcaacaaaatattcctatagagtttggtaatagcgcaacagtagatgctaaatataaatatttagattctataatggtgacagggctagtaccatatttagcgatgaaagataagtcagattcgaaggatgaagcgcttaaccttagtgcgttaaactttaaagagcaaagcgtaccgttccagaatataaaaattagaaatacatttactgatgaattgggttttgaatatccaacacccctttatgggatactgccaaaaatactccaatttatgaataatggaaaaaaattattttaa

SEQ ID NO: 2036 - DNA, 1188 bp, Enterococcus faecalis
ccgaactccgtggtgaagactttattgggtctctttttcattccctcgtggcggaaaaagaaaaaagaacacgattggttgccgtggatgtttggctggactgtctttatgttcttctcatatgttttatatttagaaatcattcgtggcacagccttctttttaattcccattgctttttttggcttgtttgcgctcttctacttcaaagaaaaaaggcgtttactgaatggaacattatttaatatttttcttgtggttctagcgacttatttagggattactgcgattcgtacaaacaactactttctaatcaccttagcaattattgccctgctggcaatttttatcgctttggctttaagactctatgccttaattattttcctctattggaatgcggtcgttgttatgagaaaagaaagtcggtctctatggaacttgttgacgttgttgctggcaattggcttaacattactattaatttataatttcttttttcaatcgttgttaccaacgtggctctccttacccttaactattgcgccatttattttgacttatttcgcgtttgttttttataattttttaactgtttctacgttgtatcaatttaatcagccaaaatatacacaggattatattgttgtgttaggttcggggttaatcaatggtgagattgtgccgccgttattgcaagcccgtatcaacaaagccattcaattttacaaggctcaaaatcgcgcaacgttaaatccaccaaaaatcgtcatgtctggtggtcaaggccccgatgaattacttcctgaaagtgtcgcgatgaaaatgtatgctttgacacaaggtattcctgatgatgatattttagtagaagctcattcaaaaaacacactagaaaatatgcgtttttccaaagaaacaatgattgaggattttggaaatgctaatttccaagccatttttactacaaacaattatcaccttttccgggcgggtcttttcgctcgaatggctggcttaaaagctgatggcattggtgcaaaaaccgctttttattttttacctaacgcgtttattcgagagttcatcgccattgtagtgatgtacaaacgccgccatattattgtttgcggcctagctgccatcggtatggttatgttattcttaacaggattgattattcagtaa

SEQ ID NO: 2037 - DNA, 1080 bp, Enterococcus faecalis
ttattcagtaaagaaggagtttcccctatgagtttgtatcaaaaatttattcaaaatgaacgtttgcgacgtttttgcgtccttgctttgattatttttgtgctttatttatccagaagtatgattacaacaattcttttaacatttatctttacctatttagctgttcgtttggtccattttgttcaacgctatatgaaaatcccgacgattgtcatcgttctcttaacctatgcattggttgtttttctaatctatttagcgattactaaatatgttcccgttctagttaaccaaacgactcaaatgattaattctgtagttgatttttatcaaagtccacatacagatacaaatcaagtattgcaatttattgatcaatacttggaaaaatctaacttactctctcaactccagaatggtgcttcaatgattttacgctacattcaagatattggcgctgtcggcttatcatttgtcatgtcctttattttaagtttcttctttatgattgagaagaagcaaatggctgatttttctaagttatttttaaaaagtgattttgattggttttttcaggatatctattattttgccaacaagttcgtcaacacatttggtgtcgtaatggaagctcagtttttcattgctgtggtgaatacagtcattactaccttggccttggcgataatcggctttactcagctacctagtttagccattatgatcttcattttgagcttagtcccagttgctggtgtgattatttcctgcattccgctaagtttcatcgcttattcccaaggtggcttgaacgatgtgatttatatcttagctttaattacaatcgtccatttatttgaatcttacgtgctaaatcctaaattcatgtctagtaaaacagagttaccaatcttttatacgtttgtcattttattagttagtgagcgtctttttggtgtatggggacttattgtaggaatccctgttttcactttcttcttagatgtcttaaaagtaaaaccaattcgtggcctgaaacggctacctaatgtgaaaaaaaatagttcagcagaataa

SEQ ID NO: 2038 - DNA, 2412 bp, Enterococcus faecalis
ttgaaaacagtagttattattgatgcattacgaacaccaattggaaaatataaaggcagcttaagtcaagtaagtgccgtagacttaggaacacatgttacaacacaacttttaaaaagacattccactatttctgaagaaattgatcaagtaatctttggaaatgttttacaagctggaaatggccaaaatcccgcacgacaaatagcaataaacagcggtttgtctcatgaaattcccgcaatgacggttaatgaggtctgcggatcaggaatgaaggccgttattttggcgaaacaattgattcaattaggagaagcggaagttttaattgctggcgggattgagaatatgtcccaagcacctaaattacaacgttttaattacgaaacagaaagctacgatgcgcctttttctagtatgatgtatgatggattaacggatgcctttagtggtcaggcaatgggcttaactgctgaaaatgtggccgaaaagtatcatgtaactagagaagagcaagatcaattttctgtacattcacaattaaaagcagctcaagcacaagcagaagggatattcgctgacgaaatagccccattagaagtatcaggaacgcttgtggagaaagatgaagggattcgccctaattcgagcgttgagaagctaggaacgcttaaaacagtttttaaagaagacggtactgtaacagcagggaatgcatcaaccattaatgatggggcttctgctttgattattgcttcacaagaatatgccgaagcacacggtcttccttatttagctattattcgagacagtgtggaagtcggtattgatccagcctatatgggaatttcgccgattaaagccattcaaaaactgttagcgcgcaatcaacttactacggaagaaattgatctgtatgaaatcaacgaagcatttgcagcaacttcaatcgtggtccaaagagaactggctttaccagaggaaaaggtcaacatttatggtggcggtatttcattaggtcatgcgattggtgccacaggtgctcgtttattaacgagtttaagttatcaattaaatcaaaaagaaaagaaatatggagtggcttctttatgtatcggcggtggcttaggactcgctatgctactagagagacctcagcaaaaaaaaaacagccgattttatcaaatgagtcctgaggaacgcctggcttctcttcttaatgaaggccagatttctgctgatacaaaaaaagaatttgaaaatacggctttatcttcgcagattgccaatcatatgattgaaaatcaaatcagtgaaacagaagtgccgatgggcgttggcttacatttaacagtggacgaaactgattatttggtaccaatggcgacagaagagccctcagttattgcggctttgagtaatggtgcaaaaatagcacaaggatttaaaacagtgaatcaacaacgcttaatgcgtggacaaatcgttttttacgatgttgcagatcccgagtcattgattgataaactacaagtaagagaagcggaagtttttcaacaagcagagttaagttatccatctatcgttaaacggggcggcggcttaagagatttgcaatatcgtacttttgatgaatcatttgtatctgtcgactttttagtagatgttaaggatgcaatgggggcaaatatcgttaacgctatgttggaaggtgtggccgagttgttccgtgaatggtttgcggagcaaaagattttattcagtattttaagtaattatgccacggagtcggttgttacgatgaaaacggctattccagtttcacgtttaagtaaggggagcaatggccgggaaattgctgaaaaaattgttttagcttcacgctatgcttcattagatccttatcgggcagtcacgcataacaaaggaatcatgaatggcattgaagctgtagttttagctacaggaaatgatacacgcgctgttagcgcttcttgtcatgcttttgcggtgaaggaaggtcgctaccaaggcttgactagttggacgctggatggcgaacaactaattggtgaaatttcagttccgcttgctttagccacggttggcggtgccacaaaagtcttacctaaatctcaagcagctgctgatttgttagcagtgacggatgcaaaagaactaagtcgagtagtagcggctgttggtttggcacaaaatttagcggcgttacgggccttagtctctgaaggaattcaaaaaggacacatggctctacaagcacgttctttagcgatgacggtcggagctactggtaaagaagttgaggcagtcgctcaacaattaaaacgtcaaaaaacgatgaaccaagaccgagccatggctattttaaatgatttaagaaaacaataa

SEQ ID NO: 2039 - DNA, 1350 bp, Enterococcus faecalis
ctactgttttcaactaaatgcacctccatcttgaaatatatcataaaatcccagaatcacaagtgccaattactgaatgttaacagacttataagatattttttaataatctatgaagttaatacaaaaattccccattttggttcatttcgtgctattttatataatgaatctatttatcgtaaaggagttaaagaaatgacaattgggattgataaaattagtttttttgtgcccccttattatattgatatgacggcactggctgaagccagaaatgtagaccctggaaaatttcatattggtattgggcaagaccaaatggcggtgaacccaatcagccaagatattgtgacatttgcagccaatgccgcagaagcgatcttgaccaaagaagataaagaggccattgatatggtgattgtcgggactgagtccagtatcgatgagtcaaaagcggccgcagttgtcttacatcgtttaatggggattcaacctttcgctcgctctttcgaaatcaaggaagcttgttacggagcaacagcaggcttacagttagctaagaatcacgtagccttacatccagataaaaaagtcttggtcgtagcggcagatattgcaaaatatggcttaaattctggcggtgagcctacacaaggagctggggcggttgcaatgttagttgctagtgaaccgcgcattttggctttaaaagaggataatgtgatgctgacgcaagatatctatgacttttggcgtccaacaggccacccgtatcctatggtcgatggtcctttgtcaaacgaaacctacatccaatcttttgcccaagtctgggatgaacataaaaaacgaaccggtcttgattttgcagattatgatgctttagcgttccatattccttacacaaaaatgggcaaaaaagccttattagcaaaaatctccgaccaaactgaagcagaacaggaacgaattttagcccgttatgaagaaagtatcgtctatagtcgtcgcgtaggaaacttgtatacgggttcactttatctgggactcatttcccttttagaaaatgcaacgactttaaccgcaggcaatcaaattggtttattcagttatggttctggtgctgtcgctgaatttttcactggtgaattagtagctggttatcaaaatcatttacaaaaagaaactcatttagcactgctggataatcggacagaactttctatcgctgaatatgaagccatgtttgcagaaactttagacacagacattgatcaaacgttagaagatgaattaaaatatagtatttctgctattaataataccgttcgttcttatcgaaactaa

SEQ ID NO: 2040 - DNA, 810 bp, Enterococcus faecalis
gtaacaaaaaataacaaagatagacaaatgggggatttaaaaatgaaaaagcatgtgattgtgggatgtttattaatcgttagctcaatgtttgtaagtgcttgtggaaattcatcagacgtgaccacagaaaaaaccagtgtcacaaaacaagtcgaagctacgggacaaagcacatcctcttccgtagaccaaaccaagtatgatgccattattacagaagctaaaaagttaacggcagaggggcaatataaagaatcagaagaaaaattagctacgatccctgttagcgatttagggaaacctcattattcgatcgttaaagaaacggttgagaaactaaataatcaaaatagtgaaggcttaaaaagacaagaagaagtcgcggttgaaaagcaaacgaagtcgagtccggcaccaacgggatcacttaaaccaattccagatgaatttgctaaatgggcaaccacgtatcttttttattatccacgaggagatcaaaagcaagcgggtttaatcattgaagcgaatggagcggtcacgcagacgaatacgaatggcgaaatttacacaggaaaagccgaaataagtggagcttcgggcactattttaagttatgatacgactagttatcgcccgacgacccaaccagctacaaaatcgattactccaaatgttaaaatcactgttacttggaacaatggcggcggtgttgatgtttattatggctacgtttcttattcacaacgtttagctttgacagatggtatcgccgtgacagacggggtcaaagaagtttggctttcataa

SEQ ID NO: 2041 - DNA, 606 bp, Enterococcus faecalis
aagatggaattaacagtaaaagacattcaaacatggttagacaattattcaaaagttattgaagaaaaaaaagactatctaagtgaattagacacgccgattggtgatggggatcacggtaacaacatggctcgtggtatggctgaatacaaaattgcgtttgacaaaaaagtaccaacaacaatcacggagacatttaaagtcctatccatggctttgatttcaaaagttggcggagcttctggtcctttatatggtactgcgtttatgaatatgactaaagcgacaaaagatttggaaaccatcagttcgccagagcaattaaaagaaattgttcagcaaggtctagctgggattcagatgcgtggcaaagctgaaccaggagataaaacgatggttgatgtctgggcacctgttgctgaagtaattggaacggaacaatttaatgaagaaaaaattgaacaatttgctgaagcaacaaaagattgggtggcgaaaaaaggacgtgcctcttatttaggggaacgagcaattggtcatattgatccaggagcagcatctagtgcattattatttgaagaactagtcaaagtaatcaatcaataa

SEQ ID NO: 2042 - DNA, 984 bp, Enterococcus faecalis
atgaaaaaaattattaatgaacctggtaaaattgtcgaagaaatgctccaaggaattgtgaaaagctatggaaaccttgttcatcaagtcgaagattctcgcgtgattgctcgcaacgactcaaacaaacaagttgggttagtatctggtggcggaagtggtcatgagcctgcacatgctgggtttgttggtgatggaatgttaaatgccgcagttttaggtgatgtctttacttcaccaacaccagatcaaattttaacagggatccaagcggcagaccaaggggccggtgttctgttaatcgtaaaaaattatacaggcgatattttgaactttgaaatggccaaagatatggctgatatggaagacattcatgtagaaatggtcgttgtcgatgatgatattgctgtcgaagatagcacctataccgctggaaaacgcggcgttgccgggactgttcttgtccataaaattttaggacatcatgcccgccaaggtgcttctttagaagagctcgtttctttaggagaaaagattgtatcagccacgaaaacaattggagtggctttaaaagcagccactgtgcctgaagttggcaaaccaggttttactttaccagaagatgaaattgaatttggcgtagggattcacggagaaccaggctatcgtcgtgaaaaaatccaaccatcgaaagagttagcgaaagaattagttgaaaaaacattaagtagctatgagcaacaaccacaaacagtaggggtacttgtcaatggcatgggtggcacgccattaatggaacaatttgtatttatgaacgacgtgctaacattgttagaagataaaggtgttcaagtgaccttccataaagtgggtaactatatgacgtctattgacatgcaaggattatctttaacgatgattgacttggcgacaaaagactggcaaacagcgctagaaagcaatgtaacaacaatttcttggtaa

SEQ ID NO: 2043 - DNA, 246 bp, Enterococcus faecalis
tccgccccttaccccggtgggtggacacgatcgttaaacggtattgattcactgttgtctattgtgcagatgccagggggagttcctgtagcaacaactgcgattggctcagcaggtgctaccaatgctgggttattagctgcagaaatactaagtattgatgatttacagttagcagaaagaatccaagcaagacgacaatcattggaaaaagcggttatggaaagtggggaacaacttgaataa

SEQ ID NO: 2044 - DNA, 1188 bp, Enterococcus faecalis
cagaaagaatccaagcaagacgacaatcattggaaaaagcggttatggaaagtggggaacaacttgaataaacctttaaaagtaggagcaactattggcattataggtgggggacagttagggcgaatgctagtcatgagtggtaaaaaaatgggtttccaaatgattgtgttggacccaacgctcaatagtccagctggtcaagtagctgaccgtcaaattgtggcagcctttgatcagatatctgctttaactgaactagcagagttaagcgatgtgatcacctatgaatttgaaaatattgaagtggcctccctagaaaaggccattccactagaaaagttgccacaaggaacagaattgttaaaaattactcaaaatcgattgcttgaaaaaacgtttcttcaatcgattggctgtaagattgccccttttgcggaagtaaaaagccagaaagagctgccacaagcaatagaaaagattggttttccatgtgtcttaaaaactattcaaggtggatacgatggaaaaggacaagtcgtcttaaaatgcgaagaggatttctcccaagcgactaaattattagctaacgccacttgtgaattagaaaagtgggtgcctttcactaaagaactttcaatcatcgttgcagggaataagcatggttaccaaagctttcctgtatctgaaaacattcatcgaaagaatatcttgcatgaatcaattgtgccagcacgaatttctgagaatgtgcaacaaaaagcagcggaattggcgcaatacattgctgaggaattaaatctatctggggttttagctatcgaaatgtttttaacggattcagaagagttgtacgtcaatgaattagcgccacggcctcataactcaggtcattactctattgaagcttgctcatttagtcaatttgatgcgcatattcgagggattagcaattggggcattgggttaccccaattacttcaatcagtggttatggtgaatctcttaggcgaacacttagaaaaaagctaccagttatgcacgtcaaaacccacttggcaagtccattactatggaaaagccgaatcaaaagttggcagaaaaatgggccacgtcaccattacaacaccttgcttatcagaaacgttaaaggaaattgagactgttggtatttggaacgtaacttaa

SEQ ID NO: 2045 - DNA, 657 bp, Enterococcus faecalis
gttagaaagaatagggttcatgaagctaacgagaagagggaaagaatggaaaagaaagcacttgtgtatacaggaaaagcgaagaagttgtatcaaacagaaaatgctgcggttctttttgtggaatatcttgatcaagcaacagctttaaacggtcaaaaaaaagacaaagttcttgggaaaggcgctttaaataatcaaatcactagtctaatttttgaacatttacagcaacagaagattcccaatcattttatcaaaaaagtatctgaacacgaacaattaattcaggtcgtagaaatgattcctttggaagttgtcgtacgtaattatgcggcaggaagtttttcaaagcgtttagcgattgaagagggcactaaattagtgacgcccattattgaattttattacaaagaagatcgtctggatgatccttttattaacgaagaccatattcaatttctaaaagtagccactcctgctgaaattgtggagattaaagcattggctttacaaattaatcaggcgcttagtcaactctttcaacgcttcaatattagtttgatcgattttaaaatcgagattggtctgacgaaggccaatcaattgttactggcagatgaatttctccagacacctgtcgtctatgggatttaa

SEQ ID NO: 2046 - DNA, 276 bp, Enterococcus faecalis
cagctaattgaggaggaagcgcgtatgtattttgtcaaagtctatgttacgtataaagaatcaattttggatccccaaggtgaagcggttaaggaagcagtccatcggcttggttttacagaagtagccgaaatccgtgtcggtaagtattttgaaatgcacgtccagcagacagaagcaattgaagagaaaattgaacaaatttgtgatcaactattagccaatgtaaatatggaatcctatcgttttgaaattttatctttggaggaaatttaa

SEQ ID NO: 2047 - DNA, 675 bp, Enterococcus faecalis
atgaaattggcagtgattgtttttccaggatccaattgtgatgcagacttattgtgggctgtcaaagaggtgatgggcatcgatgcagaatttgtccgacacgatgccacttctttagcaaaatttgatggcgtattgttgcctggtggtttttcttatggcgattacttacgttgtggtgcaattgctcggttttcgccaattatcaatgaagtgattcgctttgctacagaaggcaaaatggtttttggtacttgtaatggctttcaaattttaacagaaattggcttacttcctggcacgttgttaagaaatgattcgcttcgttttatttgtaaaagtgtcccattgaaagtgaatacgcacacaaagtttacaagcgagtatcctgaaaatgtttcgatacatttaccagtagcgcatggcgaagggaattactattgtgatgaaaaaacgttgaaggagctgaaagaaaagaaccaaattgtttttacgtatcaagaaaaggtgaacggtagtcttgcgaatattgctggtatttgtaatgaacagggcaatgttctaggaatgatgcctcatccggaacgagcgatggaagaattgttaggttcaacagatggacgcagcttttttgcttcaatcattaaaaactttggaaaggaattaagccaatga

SEQ ID NO: 2048 - DNA, 1419 bp, Enterococcus faecalis
aaactttggaaaggaattaagccaatgatgaatgaaccaacaccaaaagaaatcaaggaaacacggttgtatgcagaatggggactaacagatgaagaatatcatcagattgagaccattttgcaaagagaacctaattatacagaaactggcttattctccgtgatgtggagtgaacattgctcttacaaaaattccaagcccgttttaaaaaagtttccgacggaagggccacaagtgcttcaaggccctggtgaaggagctgggattgtcgatattggtgacggattagctgttgtttttaaagcagagagccataatcatccttctgcagtagaaccttacgaaggagcagctacaggcgttggtggaattattcgcgatattttcagtatgggggcgcggccgattgctttactggattcgctaagatttggcgaactgacggatgcacgaacacgttatttgtttcaagaagttgtggcggggattagcggttatggaaattgtattggtattccaaccgttggcggcgaaattgcttttgagccatgttatcaaggaaacccacttgttaatgctatgtgtgtgggattgattcgtcatgatgagattcaaaaaggccaagcaaaaggcgtcggaaatagcattctttacgtaggtgcgaaaacaggacgagatggaattcatggtgcgacctttgcttcagaagaatttagtgaaggtgaagaacagcaacgatctgcggtacaagtaggtgatccgtttatggaaaaattattattggaagcttgtcttgatttaatcaaaaatcatcaagatattttaatcggcatccaagatatgggggcgggtggcttggtttcttccagtgctgaaatggcatccaaaaccagttcaggcttgattctagagctagataaagttccgcagagagagacgcagatgagcccctatgaaatgctcttgtctgagtcccaagaacggatgttaatctgtgtggaaaaaggagcagaacagcaagtttgtgaattgtttcaaacgtatgacttagaagcggtagcgattggctccgtaacagatgatggacagtatcgtgtctttcacggtggcaaaatagtcgcagatgtaccagtagatgctttggcagaagaagcccctgtctaccagaaagcctatcaagaaccagagcggatgcgtgcttttaaaaaattagcgcccttcattccagaaattacgaatagtacggaattattaaaacgcctattgcaacagccaacgattgcatcgaaaaaatcagtttacgaaacctatgatagtcaagtacaaacgaatacagtggtgcaaccaggaagtgatgcagctgttttaagagtgcggggcaccaataaagccttagccgatgacgacagattgtaa

SEQ ID NO: 2049 - DNA, 846 bp, Enterococcus faecalis
ccgatgacgacagattgtaatagccgttatttgtatttaaatcctgaaattggtgggcaaattgcggttgcagaagcagcccgtaatattgtagcgagtggagcacaacctttggctatcactgattgcttgaattatggttccccagataaaccagaaagtttttgggaattatggacgtcggcggatggaatcgccgccgcctgccgtcagctaggaacacccgtgatttcagggaacgtctctctttacaatgaaacagatggtcaagccatttatccaacgccaatgattggcatggtgggagtgattgaagatgtttcacaaattaccacacaagcgtttaaacaagttgatgacttaatttatctcatcggtgaaacccacgcagattttaacggctcagaaattcaaaaaatacaactgggtcgaattgaagggcaattacgctcatttgatttaaaagaggaaaaagcaaaccaagaattagttttaaaagcaattcaagtaggcctagttgctagcgcgcatgattgcgctgaaggtggcgttgccgttgctttagccgagtcggcttttgctaacgaactggggttacaggtgacactgccattaaaaaaagaatatctatttgcggagacgcaatcccgttttattctttcagttagtccccagcatcaagaagcatttgaaacacttatcggaagaaaagctcaacatattgggaaagtgactgaaactggtttggtcattcatgcgttagatgatgtgatcaattgctcaacaaaagaagccaaagccttatgggaggatgcgattccatgtcttatgaagcaaaaagcttaa

SEQ ID NO: 2050 - DNA, 1494 bp, Enterococcus faecalis
tgtgatcaattgctcaacaaaagaagccaaagccttatgggaggatgcgattccatgtcttatgaagcaaaaagcttaaatgaagagtgtggtattttcggtatttggggtcatcctgatgcggcacaagtgacctattttggcttacacagcttgcagcatcgaggccaagaaggcgcgggaattgtggcgaacaattctgggaaattagatggccaccgtgatttaggtttattagcagaagtattccaaaagcaagaacaactgaatgcgttagaaggaacggcggctattggtcatgtacgctatgcaaccgctggtacgggtagcgtggataatattcagccatttttatttaaatttaatgatagtcaaattgggttagcacacaatggcaatttgacaaatgccaaacgtttacgaaaacaactagaaagagaaggcgctatttttcattccaattcagacactgaaattttaatgcacttgattcgaaaaagcactgctgcctcgtttctcgataaattaaaagagagtttgaatttggttaagggtggctttgcttatcttttattaacagaaacgatgatgattgctgcactggatcccaacggctttcgccctctctccatcggacaaatgaacaatggggcgtacgttgtggcatccgaaacgtgtgcattagaaacagttggggctcgctttattcaagatgtggcgcctggtgaagtagtcatcatttctgatgaaggcttgaaaatagaggttttcactacggaagtccaaccggcaatttgtgcaatggaatatatttattttgcacgaccagattcaaatattgccggagttaatgtgcatacagctcgtaaaagaatggggaagaacttggcaatcgaaagtccagtcgcagctgatatggtaattggtgtaccgaactcgtcattgtctgcagctagcggctatgcagaagaagcacagataccttacgaactaggtttagtaaaaaatcaatatgtcgctcgaacattcatccagccgacacaagaattaagagaacaaggtgtccgtatgaaactatcggcagttcgtggcgtggtcaaaggaaaaaaagtcattttagtagatgattcgattgttcgcgggaccactattcggcgcattattcatttattaaaagaagcagaagcgcaagaagttcatgtcagaattgcttcaccaccattaaaatatccgtgtttttatggcattgatatacagacgcgggacgaactaattgcggcaaactattcaattgaagaaatcaaagagcagattggcgcagattcgctggcttttttgagtgaagcagggctgattgatgggattcaattaaattatgatgctccttattctgggctgtgtatggcttactttaatggagactatccaacgcctttgtatgattatgaagaacaatatcaagcatccttgaaaaaagaaactaggaggaattga

SEQ ID NO: 2051 - DNA, 1056 bp, Enterococcus faecalis
aaaaagaaactaggaggaattgacatggaaaatgcctattcaaaagctggtgtaaatgttgaggcgggatacgaagtagtagaacgaattcaaaagcatagccaaaaaacacaacggacgggaacgttgggcatgcttggtggttttggtggttgttttgatttaagtagttacaagcttaaagaaccagttttggtatcaggaacggatggcgtaggcacaaagttactcttggcaattgaagaacagaaacacgagacaatcggaattgattgtgtagcaatgtgtgtcaatgatgtcgtcgcacaaggcgccgaaccgttatattttttagattatttagcgttagggaccgttaatccagctaaagttgaagcaattgttgcgggtgttgcggctggctgttgtgaagcgaatgcagccttaattgggggcgaaacagctgaaatgcctgatatgtatgaagcagatgcttatgacggggctggttttgccgtgggtattgctgagaaaagtcaactcttgactccaagtaacgtaaaagaaggcgatttcttgattggtcttccttcaagtggtcttcattctaatggttactctttagtaagaaatattttttttaagaaacattcgtttaaaacaacggacaagcttccagaattggcacccaaaacgttaggggaagaattattaacaccaacaaaaatttatgtgaaggaattattgccattgttaaaagcaggactcgtgcatggggctgcgcatattactggcggcgggtttttagaaaatctaccaagaatgttttcttccgcattagctgcagagattcaattaaatagttggccagtgctaccaatttttaaattgattcaaaaatacggtgaaattccacctgaagaaatgtatgaaattttcaatatgggcttagggatgattttagcggtgagtccagagcatgttgaaaaagttcaggagcttttgccagaagcttttgaaattggtcgtttggtacctaggaaaacgaaagccgttatttttaaggaagccttatga

SEQ ID NO: 2052 - DNA, 582 bp, Enterococcus faecalis
ggaagccttatgaagatagctgtttttgcatctggcaatggtagcaattttgaggcgattgctgcagctttttcccaaaaaaaaatcgcagggcatttgagcttagtcttttgtgaccagcctgaagcctatgtattgacccgtgcccaaaaacgcaagattcccgttgtttgcttttcgccatctgatttttcatctcgtgggcaatatgaggaacaagtattgaaacatttaaaagagcatcagatcgatttaatcgtgttagctggttatttgagaattatcggcaagactttactggaggcttatccaaagagaatcgtcaatattcatccttctctgttacctagttttccaggtcttcacggaattgaagaagcatttcattatggagtgaaaataacaggaatcactatccattatgttgactctggggttgatacaggaccgattattttccaaacaaccaccaagattgataccgaagatacagtggacacattagcagagaaaattcatgctcttgagcacgaatggtacccaaaaataatttcacaaattgtaaaggagacaatgaaatga

SEQ ID NO: 2053 - DNA, 1614 bp, Enterococcus faecalis
gcacgaatggtacccaaaaataatttcacaaattgtaaaggagacaatgaaatgaccaaaagagcattgattagcgtttcagacaaaacaggagtgacaacatttgcagcaggcttagttgcaaatggctttgaaattatctccactgggggaacaaggactgtcttggaagaagcgggggtaccgacacttgctattgacgacatcactggctttccagaaatgttagatggccgtgtcaaaacgttacatccgaatatccatggcggacttttggcaaaaaggggaaaccaagcgcatcaaaaagcactgactgaacaaggcattcactttattgaccttgtagtagtgaatctttatccatttaaagaaacaattttaaaaccagcgatctctgaagcagaagcgattgaaatgattgatattggcggtcctagcatgttacgttcagcggcaaaaaattatcaagacgtaacagcagtggttgatcctagtgattatgaacaggtattaagtgaaattagcagcactggaactagccagttagccactagaaaaagattagcagcaaaagtctttcgtcataccgctgcttatgacgcgcttatcgctgactatttaacgacgcaagtgggtgaaactgaaccagagaaacagacgcttacttatgaacgtaagcaaacattgcgttatggcgaaaatagccatcaacaagccaccttttatcaatccgttgtacctgtatcattatccattgcttccgctcgacaacttcatggcaaagaactgtcatataacaatattcgagatgctgatgcagcactccggattgctagcgagtttacagaacctacggtcgtcgctgttaaacatatgaacccatgtggaattggaacaggaaaaacgattttggcagcctatcgtcaggcatttgaagcagatccagtttcaatttttggtggcattgttgttttgaatggtccagtggaccaagcgactgcggctgaaatgcatcaaatctttttagagataattattgcgcctagttttgaggaagaagctttggcactgttatctcagaaaaagaatcttcgtttgttaacgttagattttcatgctcaagaaaaaaaagcggtggaattagtttctgttatgggcgggttattaattcaagaacaggatacagttgttgaaaatgaccaagcatggcaagttgttacagagcgccaacccacaccagccgaaagagacgcattgaactttgcttggaaagcagtcaagcatgtaaaatcaaacgctattgttttagccaatgaaagccaaacggtggggattggcgctggtcaaatgaatcgaattggttcagtaaaaattgcagttgatcaagcccaagcagctggaaaattacaaggggccgtcttagcaagtgatgcctttttccccatggcagatagcgtggaatatgctgcacaacatggcattcaagcaattattcagccaggcgggagcattaaagaccaagcatcaatcgatctagcgaatcattatggtattgcgatgatttttgactcggagtcgtcatttcaaaatagacattgcctcaccacggggagg

SEQ ID NO: 2054 - DNA, 252 bp, Enterococcus faecalis
tttgcaaaaggaggcccattgatgaaacattcacaacttgtggcgattattaagagactggaagcaatgatcgaagcagcagataatgaagtacaagtacgccgctttgaacgtgaaggcgtagagaaatgtattgtaagttttgataaatcaacagaaacatttgaattaacagaatctgatacgcaccaaagctatcaattcgataacatcgatattgtagcaatggaaatttacgacttaattcaataa

SEQ ID NO: 2055 - DNA, 744 bp, Enterococcus faecalis
acgccaaaagcaattgcggaagcgagtgatatcatttttacaatggttggctctccttcagatgttgaaggcgtgtattttaatgaaacagggatttttcaagcagatcttacaggtaaaatagtagtagatttaaccacaagtacgccgaccttggctgaaaagattgccaaaaaagcagcagaagtgggtgctcatgcgttggatgcgccagtttctggtggtgacttaggtgctaaaaatggtactttaacaattatggttggtggcgatcaagaaagttatgacaccgtcttaccaattttcaaaacatttggtaaaacgtttatgctacacggctcagctggaaaagggcaacatactaagatggcgaatcagttaatgattgcaggcacaatgaccggtttgactgaaatgctcgtttatgcaaatgcgacaggattaactttagaaaaagttctggaaacagtcggtggtggtagtgctgcaaactggtcattaagtaattatggtccgcgtattttaaaagaagattatacgccaggcttttttgttaaacattttatcaaagatttaaagattgcgttagatgaagcaaaaaaacttgaccttccattgccagcgacgcaaaaagcgacagaattatatgaaagccttgcagataaagggtttgaaaatgatggcacacaggccttaattaagctttggtggacagatggcaagcaaccaacgaataaaaattaa

SEQ ID NO: 2056 - DNA, 501 bp, Enterococcus faecalis
ataaaaactacgtgtcttttgtttttttctagttttttcgaaaaaaaagggctctctgattgttgtattagtggaaaggggaaaaaggagcatattatcatgcaacaaaattataatgagaaatctatacaacaccaatttgatgcctactgcaaaaaagtattacgaaacgaaattacgtctattcgaaaacgaaacactaacataaagtataatgaggaaccattgacagattcaactgaaggcaagtactctcaaactcattttgatgaacaagatgtctatttcttgtttggaatggaaatattaatttcagatcaaaagttatcaacagccattgatcatttatcagagataagaagaaaggtcatcctactttattattttgcaggttttaataatactgaaatcggtaaaattctcaacatgagtacaagtggtatctggtatcaacgaaaaaaggcagttgaacaattaaaaacggagtatgacctatggtag

SEQ ID NO: 2057 - DNA, 249 bp, Enterococcus faecalis
cctatggtagacaacaaaaaaaaacggcagtatccattagttccgctatccgttattcaatctgctctagaagaagatccaatttcgatcaagatgatactcaaacattatcatagttatatagttaagttatgtttgacaaatggatttaatgaggcggagcaatttattacctatgtagatgagtatatgctaagacagctagaaattaaattgatagaagctatcttaaaatttaaaattaactaa

SEQ ID NO: 2058 - DNA, 198 bp, Enterococcus faecalis
aatcaacatatggaagtaattcttaatcagctgcttttgtcaaaagcacataggaatttcacctctctccaagtttacggagagccttacggaagtatcattatcccaaattcaaatcatcgctttttattgactataaaaattattttagaatgtttatcgctccttctttacgataagaaatcgtggcacaactaa

SEQ ID NO: 2059 - DNA, 300 bp, Enterococcus faecalis
tactttgttattctaacacctaaaataaaaaagtgcaatacttattatcagaatgtaggagtgaattttatggattttcaagattatgaaaaaatatttgaaagttatccctcgatattgaaaattactgatttaactaaaatgttaaatattggaaaaaataaagcttataatttgctgaaagataaatcaatagaaaatataaaaattggagcaaggtacaaaatacctaaaaaagctgtcattgagtatatattaaaaatacaagatgaaggtaaaaatcatgctataatagaatag

SEQ ID NO: 2060 - DNA, 1218 bp, Enterococcus faecalis
aatagtcaaaatttttgccgatatttcagtttaagaggagagattgaattgaaattaagagcaaacataattgagaaaagaggaacattacaagtaattgtatcttataaagactctaacggaaaaattagacaaaagtggaaagatacaaaattaaaaaagaaaggaaataaaaaacgagcagaaaaaattagagatgaatttttactagaattggaaagtcaattagctatggaatgtgaatgtgctaatccagatttattgttttatgactatttgcttaattatttagaagtatcaaaaaaacaagtagcatttaacacatatgttgggtataagcattatgtccataatcgaatttacaagtttttctatcctaaaaaaattaaactaaataggttaaagccttatcatttacaagatttttaccaatatatgttaaatgatgactgtacagctaatacggtcattcattatcacgcatttatacgcaaagctcttcaagaggctgttattacagaattgataagtacaaatgtagcagataaagtaagaaagccaaaaaagaaacaatttgtttctcaagtttataatcaacacgagatcttgaaattacttgatattttgtcagaagaaaagctctatttggtagttcttttaacagcattttatggattgcgaagaagtgaagttttaggattaaaatggtctgctattgattttttaaacaaaaaaatcatgataaaccatgtaatcatagaaaatccagagaatatgtcccagttaataaagaaagatcaaacaaagaactcttccagctatcgtacgttgcctttggttgaaacgattgaacgagcattagtaaatcaagctaaatggcaacaagataatcgtattcttttaggagaggattatattttaaaagatagtgagtacgtatttactatggaagatggacggttgatgaagcctcaatatgtaacacatcgcttgagtaagttgattaagaaaaatggattgaaaaaaattcgctttcatgacttgcgtcattctaatgcttcaataatgttagatagtggacagaatatgaaatccattcaagaatggctgggacatgcatcgtattcgacaactgctaatttatatacacatttaactgcaggagtaaaagagcgtgcagcagaagcattagaaaacgcatttgggtttaaagaataa

SEQ ID NO: 2061 - DNA, 2166 bp, Enterococcus faecalis
aaaggaggaaagcgaatgactcagcaaattgcactagccggcaaccctaatagcggtaaaacgacaacgttcaatatgttaacaggagccaaccaatatgttggaaactggccaggggtgactgtggaacgcaaagagggggtggcaaagaaagataagacactcattattcaagatttgccagggatttactctctttctccttatacgcctgaagaaattgtggcacgagattatcttttggaggaccaaccttcagtgattttgaatattctcgatgtgaccaatttggaacggaatctttatttaacaacacaattaattgaaactggattaccggttgtttgtgcgttaaatatgatggatttgttggaaaaaaacggccaaacattgaatagtgaaaagttaagttatggcttaggcgtgcctgttgttgagattagtgctttgaagaatcgtgggttggatcatgctttaaaacaaagtaagcagcgagcgaatgccatagagacagaggttatttatccttcttatgataatcgcttagaagcagcacttgctgaaattgttgatattttagggaatactgttcctgaaacgcaacagcgttggtatagtttaaaactttttgaacgagatgttcgaaccaaagagcaattattattgagttcttttcaagaaaaagaaattgaagaagtcattcaaattactgaaaaaatctttcaagatgaaagtgaagcgattatcattaatgaacgctatgcctttattgctcgattaattgctttgtgtgcgacgaaaaaaacagaaatgacatttactcacagtgataagattgaccgagtggtaaccaatcggtggttggcgttgccaatctttgcgtttgtgatgtggttggtctattacttatctattcaaacggttggtacaatggggacagactggttaaatgatgtcttttttggggaatgggttcctcaatttgtgggaaattggttggcgcaatggcaagtagcgccatggatgcaaagtttaattttagatgggatcattgcaggtgttggggcggtgttaggatttttaccacaactggccgtcctgtttttatgtttaggttttttagaagattgtggctatatggcccggattgcctttgtcatggatcgcttgtttcggaaattcggcctatctggtaagtcgtttattccaatgttaattgcgacaggttgtggggtcccaggcgtgatggctagtcgaacgattgaaaacgaacgcgatcggcgaatgactattatggtcacgacttttatgccatgttcagcgaagttgccaattatcgctctgattgcaggtgcattttttcctaaccaaagttgggtctcgccctctgcttatttcttaggggttgcttccattgtgttatcaggaattgctttaaaaaagaccaagcatttttcgggagatccagcaccattcattatggaacttcccgcctatcatttgccacagcttagaagtgtggttcggcatgcctatgaacgatgtcgctcatttgtaaaaaaagcaggtacgattatttttgtttccagtattctcatttggttcatgtcacattattctgtgacgtttcaacccgttccagaaagtcaaagtattctagcatttctaggtaaagggttggcggtgctatttatcccattaggctggggtaattggcaaggggcagttgccacaattacaggattgatagcgaaagaaaatattattggtaccttaggtattttatttggcaatgtgaaagatgtttctgaaaacggggtagaagtctggggcgcactgcaacacacctttacgccagtcgcggcctattcgttcttaacttttaacttattatgtgcaccttgttttgctgcaattggcgcaattcgtcgtgaaatgggagacctcaaatggacattaggagccattggttatcaatgcggtttggcttatatggtcagttttgtgatttatcaattaggccatgtgttagtcgaaaaaggcacactaactctggggacttttttagcgatgggtgttgttttagctggattttatttccttataagaaaaccaaagccagacaaagaaagtgtccaagcaatcacttctttagaaagagggtaa

SEQ ID NO: 2062 - DNA, 474 bp, Enterococcus faecalis
atgattacgttagcgcaggcagaagttgggaaagtctatacagtcgaaagcgtccaagcagatattcagacaaagaaacatctgaacaatttaggtgtcgttgcaggccaagcagttgtccttgtcaattatcagaatcaaaatggtattgttttattacataatagtcgaattgcgctgacagatacgattttacaagcgattcatgtggaggagcgctcggcgaatgagaaagtttgggtctccttggataccttaaaagttggagaacgcgctacaatagtagggatccacggacaaggagcggtgaaacgtcggttgatggacatgggcttaacaaaaggaacagtaatttttattcgcaaagtagctcctttagctgatccaattgaaatcaatgtacgtggctacgaactaacgttacgaaaaagtgaagcggaactaatcttggttgaaaaggaggaaagcgaatga

SEQ ID NO: 2063 - DNA, 1413 bp, Enterococcus faecalis
ttactaacgagatataaggagctggataaaatgatgaagattactgatgaaaaagccgaggatgttaatctctcaacaattaaagtcgtcaaacgagatggtcgtttagtgactttcgatgatcaaaaaatatacgacgctttgatcaaagctgagcaaaaaatacatgaccaagtcactcctttgacacatcaaaaagtccaatcgattgttgctgatgtcaatcgagaaattgccgaacgttttaccaataacgtaaaaatttatgaaattcaaaatattgtggaacatactctgctatccaacaacgaatatgccttagccgaagaatacattcattacagaacccaacgtgattttgagcgtagtaaagcaactgatattaatgtatctatcggcaaattaattaataaagatcagactgtcgtgaacgaaaatgccaacaaagacagtgacgtttttaatacgcaacgtgatctaaccgctgggattgttggaaaatcaattggtttaaagatgttgccttcacacgtggctaatgcccatcaaaaaggcgacattcattaccacgatttagattatcatccatatactcccatgacaaactgctgtttaattgattttaaaggcatgctaaacaatggctttaaaattgggaacgctgatgtcgaatcaccaaaatcaattcaaacggccactgcacaaatttctcaaattattgccaatgtagcttccagtcaatatggtggttgctctgccgatcggattgatgaattattagcgccttttgcggaacgtaattatgaaaaacatttagcagatgcgcaagaatggattgaaggagaagaacgccaaaaagcattcgctcggaagaaaacgaaaaaagatatttttgatgccatgcaaagtcttgagtatgaaattaataccttatttacttccaatggacaaaccccttttacttctctgggatttggtttaggtaccaactggtttgagcgagaaattcaacgggcgattttacaaatccgaattaatggtttagggattgaaaaacgaacagctattttcccaaaactgattttcacaattaagcgcggcgtcaatgcgcaacctactgatccaaactacgatattaaacagctggcactggaatgcgcaacgaaacgcatgtatcctgatgttttaaactatgataaaatcgttgaactaacaggtagttttaaggtaccaatgggctgtcgttcctttttacaaggctggaaagacgaacaaggtgaagaaataaatgttggccgaatgaatttaggcgttgttgacttgaacttaccaagaaatcgctttagaagcgccaagaaatcaaaaaaagtcttggcaattttaaatgaacgtttaccgaatgttaaaaaacct

SEQ ID NO: 2064 - DNA, 789 bp, Enterococcus faecalis
  misc_feature (727)..(729): Nucleotides 727 & 729 are "n" wherein "n" = any nucleotide.
caaaacgttggagcgagaaaaatgaaaaaaattgtagaagtaaaccatgtcagcaagacatatggtcgtttaaataataaaacagaagtattagataatatttcgtttaccgttgatgaaggcgaatttgtggggattatgggtcccagtggtgctgggaaatcgacactgttgaatgtcttatcctcgattattttgccaaccgcaggaatcgtgcgcatcgccggacaagatattttaaaaatgcgagataatcaattaagtgattttcgaagaaacgaaatggggtttatttttcaatcgtttaacctaattgatacgttaaatgtgaaggacaatattctgttgcctttagctgtagaaaaagtttcattagaagaaatggataaacgtttgttacatgtgacttcgattttggggattcaggagcttttatctgcttatccaccagagatatctgtgggacaaaaacaacgggtagcagctgctcgtgctttgattacgaaccctaaaattatttttgcagatgaaccaactggctcgctggattcaaaatcagcaacagaattgttgaaatatttagctgaaattaatctacatgatgatgccacaattttgatggtgacacatgacccgtacacggccagtttttgcaatcgcatcttattcattaaagacgttgcgattttctcagaagttgttcgtcaaggatcacgtaagggatttntnaatcgtgtgaaagatatgcaagcaacgattggtggaggcggccgcgcaaatgatttttaa

SEQ ID NO: 2065 - DNA, 2136 bp, Enterococcus faecalis
  misc_feature (62)..(276): Nucleotides 62, 67, 88, 257 & 276 are "n" wherein "n" = any nucleotide. 1
aagatatgcaagcaacgattggtggaggcggccgcgcaaatgatttttaaactatcattaanaaatntaaaagctcatgtacctaatnatctggtttatcacattagtatgacttttgcagcggtcgttaattattgtttccgtgcgattgctaacaaccagcctcttgtcgcaggtgcaggccgtgatatcgaaattaagcgatctttaggactcggtagtaccttagtcaccattattattttgggctttatgtnggcagcaaatcgttttttnataggaaaacgtagccaagaaattggcttgtatcgattaattggcttgagaaagagccaagtttcactaatttttttagtagaaaatttagttttaggctttgtttcactaattaatggaattattttaggagtgattttcaccaagttgttttcaatgattttagccaaagttatgtttttagaagtccccagtttcttctatatttcttggcgttccgttattgaaaccggtgtagcttttgcatttatgattttgattgtctgcttaagaagtatttggatgatttatcgttatccattgtcgcagcttatgcatcaagaaaaaattggtcaaattaattatagtcgtttaacgaaacggcggcagcttctaggtattttaggaccaatttgtttattagtaggttattttatcgcgtttgattttcgtaatttagcgacaggtattgtgtataaacaattaaatgattcattggatatttcgattccaatgattattacgttgacgccttttatcattttgggtctatgtgtggtgggaacttatttatttttccgttataccatgtattttatcattcgcttatttaatcatagaaaaaaatggtattaccaagatttacgcatgattactttaggcaatgccaaacgctacttatttaaaagtagcaaaacactcactggtttgaccttattaattgcgacagccttgagtgggatcggcgtgatggtttttgtgtatacgattagtatgcacacggtcaacagtgatggccccgtggactttttagtttcacaggaaagctatcctaaattgaagaaagttctcgatgaagcgaaggacaccaaaataaaaaatgaagtgacactttcttataaaattactggaattgaacgcagtttgcgaattggtcaagcgcaagaggaacaagaaacgattgaagcagttaatgttttatccttctccaactaccgcaactatcaaaaaattaatccttatttaaacgatttacatttaaaaaatgaccaaagtgttatctatatggatagctttaccaatattttaagtggtatgtctcgttatgaatcgaaactgcaatttgttgaaggggagaaggcacaactacaacaagtgctgcctaactatctaggcaattttttattgcaatattccttaccaacgattgtcgtttccgatgccctttatcagaaagtgacaaaaaattccattcagtatcagattaacgccgtaaatgttgacacgaaaagccgtgaaaaactttatgaagccgtaaataaacagattgccacagaatggcaagcgccaattttgtataagtatgaaaaaaataaccagcagttgagtggttttgccaaacaaatgcctaacgaagaggtaaagaatacgcaagatgatgtcacagaaacttggcggctaaatatgaatgatcgctacgcctctttacgctatgaacgaaaaattaacggcttgactttatatgtctccatgtttgtggcaattttagcgttgtttattacgggcagtattttgatgttacgacaactgttttcagctgtaagtgagcgtcaagattacgtgactttaaaacggatgggtgtttctagtaaagcgataactaagcaaatttatcgacagaatagtttgattttctttccgccgatggtcattgggattttgcataccacctttgctatttatttgttaagccaatttattaagagtccaggatatttgttagtatatctttcttgtggaatcttaataattgtttatctaattttttatattttaacgtctgccatttatgcgcggatgattcgacacatccatttttaa

SEQ ID NO: 2066 - DNA, 1545 bp, Enterococcus faecalis
cgagttttaaggaggcggctatacatggaaaaagtaattaatatgattcaaacgattgatgaatgggcacgtaaagaaccccaacgtcctgtttatttaaccgaagaaaaagtctctacgtatggagagttaaaagaaaagtcagacaatctagccgcttatttagctgagctgaaaacggacaagtcagcgattgtcgtatacggagaattagattttgaaatgattgtgagttttttaggcgcatcgaaagctggttttagctatatccccattgatgcacatacaccaaaagaacgcattgaactaattctaaacgtagccaaaccaaccgcagtgattgctgtgcatgaatggcctgaattagccaccgaagtgccagtaattacggcggaagaattaacagaaatgatgatgcatgcaccccggcatgcgcctgcgttgatgcctgtcacaggagcaagtaattactatatcattttcacttcagggacaactggcgtaccaaagggtgtgcaaatcagccatgataatttagttagctttacgaattggttgttgcaagattttggtttagaagaaggggcccgctttttagcacaggcaccttattcgtttgatttatcggtgatgtctatttatcccgcattggcgttaggtggctcattaactccgttacccaatgaaatcattaacgattttaaacaattatttacgcgtttgccacaattaacaatcgacgtctgggtttcaacaccgtcctttattgaattgtgtctaatggaaccaagcttcgatggtgaacatctaccagcactgcgcacgtttttattctgcggagaagaattaccaaaaccaacggctgagaaattagccgctcgtttcccaactgcgcatatttataatacgtatgggccgacagaagcgactgtagcgattagtgccattgaaatcactcaagaagttttaaaaagtgtccaacgtttaccaattgggtatgtgaaagaggatacgcaaatttatattatggaaggcatgtcaaaattacctgcaggtgaaattggtgaaatcgtcattgctggaccaagtgtttccaaaggctatctaaataatcctgcgaaaacagctgaagcttttttccaattagatggcgtaccagcttatcgcacaggcgatgctggaaagttagtcgataacctattgcagtatgagggacgcttagattttcaaattaaattgcatggctaccgcattgagttagaagaagtggatcatcacttaacgaatgtttcctacgtgaaacaagcagtcgttgtgccgaaatatcaaggaaataaagtccaacaattaattgcctatgtcgttccgcaagcacatgaattttcaagtgattttcaattaactaaggcaattaaacaagaattagccacgttgacaatggactatatgattccgcaaaaatttgtatatgttgaacaattacctttgacaagtaatggtaaaattgatcggaaagggttgatgaatgaggtgaatgccacatga

SEQ ID NO: 2067 - DNA, 1218 bp, Enterococcus faecalis
ggtgaatgccacatgatgaattttcctcatatgattccctataatgcaccgtattactttgttctgctaattgcggccttgttgccgatgattttaactttagccattaaagggacacgttggccttggtaccaaacactcgtgacactggtctttctatatatcagttttggtggcgaattttggcaacaaggagtcgctctgattgtatatgttatttatcaaacgttactaacgtggggctatgcggcttatcgaaaaaataaaaatgcaggttgggtcttttatctggctgtctttttagctatattaccgcttgtttgggtgaaagtttctcccttcatgacaggcaaaacaaccttacttggctttttagggatttcttatttaacctttaaagcggtccaagtggtcatggatttacgggatggcgtaatgaaagaatatcatccgtttcgttacattcagtttctcttgtttttcccgactatttcttcaggacccatcgatcgttatcggcgctttgaaaaagatttgaaaaacccgccgagtgcggagaaatatttagactttttagaaaaaggaattttttatttatttctaggatttttatataagtttattatcagtcattatcttggtggtgtctttttaccacatgtggaaaaaatggccttggcacaaggtggtttatcctggtggacagtcggctatatgtataattacagtttgtatctattctttgatttcgcaggctatagtttactggccgttggcacaagttatttaatgggctatgatacaccaatgaactttaacaaaccgttcctaagttggaatattaaagaattctggaatcgttggcacatgaccttatctttttggttccgtgattacatttacatgcgcttaatgtttttcttaatgaaaaagaaagtctttaagagtcggattgtgacttctaatattggttactttgcgttgttcttaattatgggcatttggcatggattaacgtggttctacatcgcttatgggctctaccatgcaacactaatttgtgtaacagatgcttggctacgttttaagaaaaaacataaagacaagataccatcaaacaaatttacacatgcatttgcagtctttttaactttccaagcggtttgtgtcagcttcctgattttctcaggatttttagacaaactatggtttaaataa

SEQ ID NO: 2068 - DNA, 231 bp, Enterococcus faecalis
tactgtttcttgaatgttcattataaattgcccctttatatttttatttttatttatttaaaccatagtttgtctaaaaatcctgagaaaatcaggaagctgacacaaaccgcttggaaagttaaaaagactgcaaatgcatgtgtaaatttgtttgatggtatcttgtctttatgttttttcttaaaacgtagccaagcatctgttacacaaattagtgttgcatggtag

SEQ ID NO: 2069 - DNA, 273 bp, Enterococcus faecalis
ataaataaaaataaaaatataaaggggcaatttataatgaacattcaagaaacagtattaaacattttagaagatattacaggaacagacgaagttgtgaacaatcaagacattcaattatttgaagaaggattattggactctttagcgacggttcaattattagtagaaattgaaggacaattaggaatccaagttcctgtatcagactttgaccgtgaagtatggggaacaccaaaacaaatcattcaacaagtggaagctttacaataa

SEQ ID NO: 2070 - DNA, 1326 bp, Enterococcus faecalis
agtatggggaacaccaaaacaaatcattcaacaagtggaagctttacaataatgtctagaaataaacgactaatcagaatcttaggtccagtgctttgttcagcggtcttggttgcagtgttcttttttgcaccgttcagaatcaatttaacttccgaaaaaacgttgaaggaagcatcaacgtcaatggcaccgaacgttttaaaaggcaatgtgattaaaaacaaagcagtggcttctggtaaatatgttcctttttttggctcttctgaattaagtcgatttagtgctttccaccctagtgtgctctctgaaaagtatcaacggaactaccgaccgtttttactaggagaagcgggcacacagtcattaacccaagcaatggtcattcattcgatgggcgatgcgattgccaataagaaagcggtctttattttatctccgcaatggtttgtcaaaaagggtgtacctaatgatagttttggtgcacactattcacaattacaaacctatcaatggttagctaatttaaccgaattaaccagcggtgaccaatatctagcacaacgtttgactaaatttccagttgttcaaaaagacaaagtcttaatggaaaccttggcaaatctgcaggcagggcaacttccccaacgctctcaacgagattattttataatgaatctccgtttcttgaatcgtgaagatgaattgtttagccaaattggcatggttagcagagaaccaattgttgaaaaagatatgaaacaattacctgctacttataattttaatgaattagatcagctagctggaaaaattgcggcaaaagccattaataataataaatttgaaattagtaacggtttttatcgccaacggattaaaccagttttaccgaaattagctcattcacaaaagaaatgggattaccgtttttctccagaatatggtgatttccaagctgcgttagaacagttagcagaaaaaaatgtcgatgttttatttgtaatcccacctgttaacaaacgttggtcggactatacgggcttgtcacaagatatgttgcaacaagtagcacgcaagctgaaatatcaacttcaagagcaagggtttactaacattgctgacttctcaacatgtagtaatgaacgctactttatggcggacacgattcatttaggttggcgtggttggctcgctgttgatcgtcaagtagatgaatttatgaaacaacctgcgtctaaaaagttagcgtatcaaattgatgatcgtttttatcagacagattggcaacaacaaaatccattggtcttacctcaattttaa

SEQ ID NO: 2071 - DNA, 297 bp, Enterococcus faecalis
tacttttcagagagcacactagggtggaaagcactaaatcgacttaattcagaagagccaaaaaaaggaacatatttaccagaagccactgctttgtttttaatcacattgccttttaaaacgttcggtgccattgacgttgatgcttccttcaacgttttttcggaagttaaattgattctgaacggtgcaaaaaagaacactgcaaccaagaccgctgaacaaagcactggacctaagattctgattagtcgtttatttctagacattattgtaaagcttccacttgttgaatga

SEQ ID NO: 2072 - DNA, 1779 bp, Enterococcus faecalis
ccaaacgtatcaagaaattgtacattctcaattgagagaggaggaccttgcatgagtagtcgaccaaaaggcggaccaatgggcggtggaccaggacgcaacattggcgcaaaagggccaaaaccaaaaaatttctggaaaacagtgaaacgtttatttcgatacatgtctaaacgaatgctgtcaattattgctgtcttagtattagcaattgcagccgtcgttttccaaattcaaacaccaaaagtattaggacaggcaacaactgaaatttttaaaggcgtcatgaaaggcgctgctgaaatgaaacaaggcttaaaaataacatcttttccaattgattttgacaaaattggtcaaattttattaattgttattgccatgtaccttatttctgctgtctttaatttcttgcagcaagtaattatgacacgtgtttcacagcgaacagtttatgaattacgtcaagaattagaagcgaaaatgaacaaagttccaatttcctattatgatattcatagtaatggggacattatgtcacgggcaattaacgacatggataatattgcgagtactttacagcaaaacttaacccaattaattaccagtatcgtgacatttgtgggtgtactttggatgatgctgaccattagctggcagttaacactaattgccttagcaacagtgccattaagtttaattgttgtgatggttgtggcgcctcgctcgcaaaaacattttgcggctcaacaaaaaagcttaggattattgaataaccaagtcgaagaaacctacggtggtcacgtagtagtaaaaagtttcaaccacgaagaaagtgatcaagaagtatttgaaaaagaaaatgaaaaattatatcatgctggtcgcaaagcacaatttatttcagcgatcattatgcctttaatgaactttatcaaaaatttaggatacgtgtttgttgcagtccttggtggcgtaaaagtagcgaatggtatgatggatttaggggatgtccaagcatttcttcaatataccaatcaattttcacaaccgattactcaaatcgctaatttaatgaatacaatccaagctacggtggcttcggcagaacgtgtctttgaagtattagatgaagaagaaatggtggatgaaccttctggcataccagtggaaacagatagtccttatcgtgtttcttttgaacatgttgcttttggctattcaccagagaaattattaatgaaagatttcaatttaaatgttaaacctggggaaatggtcgcaatcgtgggcccaacaggtgctgggaaaacaaccctaattaacttattggaacgcttctatgatattagtagcggcagcatcaaatatgatggcgtagatacgcgcgatttatctcgcgaagagttgcgagcacacttttcaatggttcttcaagatacttggttgttcactggaagtatctatgacaatattcattatggtaatgagcaagcgagcgaagaagaagtgatccgtgcggcgaaagcagcccatgtggatgattttgtcagaaaattaccagaaggctatcaaacgattctaaatgaagaagccagcaatatttctcaaggtcaacgacaattaattacaattgctcgagcattcttagcaaatccagacgttttaattttggatgaagccacctcaagtgtggacactcgaacagaaatactgattcaagcagcaatgaatcgtttattggaaaatcgcaccagctttgtagtcgctaatgcatga

SEQ ID NO: 2073 - DNA, 1728 bp, Enterococcus faecalis
ttgattaaactagtcaaacggatgtcattatggtcggtctttgcagcggttgtatttatgatcgtacaaattatcgcagatttatatctgcccacattaacatctaatatcattaatgacggtgtcgctaaaggagatattaactatatttggagtacaggagttgtcatgttaggcttttctttgattagcattgtcgcttctattggaaataccttttttgccaccaaagaatcacaaagtttaggaaaaaaattacggactgatatttatcgaaaagttgaaaatttttctaataatgaatttgataaatttgggacagcttcgctaattacacgaacaaccaatgatgtcaatcagattcaaatggttatgcaaatgtttttacgtttaatgattaacgcacctttaacgttaattggtgcaagttttatggcgtataacaaggacccacaattaacgaaaatttttctatatgttttaccaattatggctgttttagtgggaggtatcatgtttttagcggttccgttatttaaaagcatgcaaaagaaaacagaccgtttaaatttagtttttcgtgaaggactgacaggagttcgtgtgattcgggcctttggcaaagcaaactatgaagaacaacgttttgatgaagccaataaggattatacacaaacggcgattaaagtgaatacgattgtcgctttgatgattcctttaatgacactcattatgagtggtaccaatattgcaatcacctggtttggcggtcattatattgcggaaatgcaactagaggtaggtaacttaattgcctttatgacttatgccatgcaaattctgatgagtttcatgatgttatccatgatttttgtcatggtaccgcgggcgcaagcttctgctgatcggattaatgaggtgctaaatactgattcagaaatcaaagatgtacccaatccagaactactctctctaaaaggcgacaaagcaacattggcgtttgaacatgttaattatcgttaccagcatgctgaaaacttagcactggaagatatagatttttcagcaaaatctggggagacggtcgcgattattggtgggactggttctgggaaaacaacgctggttaatcttttaccacgcttttatgatgttgaatctggcaagattttgctaaatggtaaaaacattaaagatacgtcacagcataatttacgagaaatgattggctttgtaccgcaaaaggctgttttatttacaggaacgattcgtgaaaatatgcaatacggcgccccaaatgcgaccgatgaagaaatttggcaagccttagaaattgcgcaggcgaaggcgtttgtttcagaattggcagaaggtttggatagtcatgtcgaacaaggcggcggtaatttctctggcggacaacgccagcggttggctattgctcgtgctttagtaaaaccagcagatgtctatgtttttgatgattccttttctgcattggatttcaaaacagatgctaatttaagaaaagccttaaaagagcagatgacggatgcaattgtcgttttagtagcccaacgtgtaagtacggttatggaagcatcgacaattttagtattagacgaagggaaattagttggtaaaggaacgcatgaagagttattagcgaataaccaaacgtatcaagaaattgtacattctcaattgagagaggaggaccttgcatga

SEQ ID NO: 2074 - DNA, 708 bp, Enterococcus faecalis
caatgtgtcataaaagggaggaacacaaatatgcctacgaatacgttttttcatttgccagaagaaaagcaacaacgcttattagatgctgcgcaaattgaattttcgcgccattctttacaagaagcgtcaattgcaaatattgttaaattagcgggaattccgcgcggtagcttttatcaatattttgagaacaaagaagatttgtatttttattactttgcgacattaagaaaaaatagtgaacgagatttagagaaacaaattattgcggaaaatggtgatttaatcgaagccatggatgtctatttctccaaaatgattgtcgaagtgctaactggagagaatgcttctttctatcggaatttatttgtcaacatggactatcgtgcttcacgtcgggtgacggataatttagcgactggggaagaggaaaaaaataggaaacagcactgtcataagcatagaggaagaaaaggccatgctgcctatgcagaacatctttatcaaataattgatcattcgaaattaaccattgaaacgccaaaagaattcacatggttcatgcagacggcgatgcatgccgttttctcaacaattgttgatgggtatcgtcaacaaagagaaaatactgcctatgattcaactgaagcagtcaaacaattaaaaatgaaattaagttggttgaaaaatggcgcttataagtag

SEQ ID NO: 2075 - DNA, 594 bp, Enterococcus faecalis
aaacaactgagaggagcgtttctaatgattaagcaattacaacatccattttttgttattatgggtccgagtggttctggcaagaccgcaattacaagtaaggtttttccgaaaaactataaagttatctcgcatactacgaggaaaaaacgattggatgaagtggatggcgtggattactattttgaaacaaaagcaagttttcaagccttgattgaaaccaatcagttagtggagtatgatttttaccatggaaactattacggtgtcggtgtagctgccatcgttgaaacaacgaaagagcatccagcctataatgcgttaacttttccaggctttcaagcggtctttgagcgtttcggcgagtccgtcattccagttttttttgacgtttcaaaagaaaatatttatcaacgtttaaaacaacgagaatctgatcctaaaattattgaagaacgtttaaacctttatgatcaagaaattcttatcaaaaaccaattggaacaatatcctaattatcaacgaatagatgccaatggacctataaaagaggtcgctggcttgttacaagaatgcatcaaacactattattaa

SEQ ID NO: 2076 - DNA, 1470 bp, Enterococcus faecalis
aagacaattggaggaggaacaagtatgacaacaacgacaaaatttccaaaaggatttttatggggcggtgcgaccgcagccaatcaattagaaggggcttacttagccgatggtaaagggttatctgtggcagatgcgatgccgggaggaaaacaacgtttcgctattttaggagatgaagcgtttgattggacgattgacgaaacgaaatatcgctaccctaatcatacaggaattgatcactatgatcgctttaaagaggacattgcgttgtttgctaaaatgggcttcaaatgttatcgcttttcaattgcgtggtcgcgtatttttccacaaggagatgaaacacaaccgaatgaagccggcttgaaattttatgatgcggttatcgatgaatgtttaagctataacattgaaccagtaattacgatttctcattatgaaatgccactgcatttagcgaaagaatacggcgggtggaaaaatcgtcaattagttgacttttatgaacgttttgcggaaactgttttaacacgttaccaccaaaaagttaactattggatgacattcaatgaaattaattcagcttttcatttcccagcgcttagtcaaggattggtaaaaagcaatggagccaatgattatcaaaacattttccaagcatggcataatcaatttgttgcaagtagtaaagctgtaaaaattggccatgaattaaatccagaattacaaattggatgtatgattatttatgccacaacgtatggcattgattcgaatccagtcaatcaagttgctacaatgattgaaaaccaagagtttaattattattgtacagatgttcaagttcgtggtgaatatccagcatacgcagaacgcatgtatcaaaaatatgctgtgaaagacttagttattgaagaaggagatttagaattattaaaagaatacccagtggattacattggctttagttattatatgtcgactgctgtcgatgttactggtactaccaacgatacagcaaatgggaatcttttaggcggcgttaaaaatcccttcttagaagcaagtgaatggggttggcaaattgatcccgaaggcttacgaatcgccctaaatgaattatataatcgttatcaaaaacctttatttattgtggaaaacggcttaggtgcaattgataaagtagacgaaaatttctatgtggcagacgactatcggattgattatttacgtcgtcatattgaagcaatggcagaagcagttgcagacggcgtcgatttaatgggctatacgccgtggggctgtatcgatttagtcagtgcttccacaggtgaaatgagtaaacggtatgggtttatttacgttgatttagacgatgaaggaaatggtactaaaaaccgttatgaaaaaaaatcgtttaattggtacaaacaagttattgaaactaatggacaaaacttagactag

SEQ ID NO: 2077 - DNA, 951 bp, Enterococcus faecalis
ttgttaaatttaacacaaggtggcgatacgatggtaccgatgttattaccagccgttattgcacaaggcggggctgctttagctgtctttttcctaacaaaaaatgtgaaactaaaaggtttggctttgtcttcaagtattacgactatttttggaattactgaaccaactgtatatggcgtgactttaccattgaaaaaaccatttattgcagcttgtattggtggcggtatcggtggtgcatttgtggctatgaatcacgtgaaaaactttacgtttggcttggttagtatgttgagcttgcctggctttattcctgcagagacaaaagatactgcaccgatgattactggtgcaattggtgccggaattgcctttatcattgcgtttgtcttaacgtttgtcttacgttttgaagatcaacctaatccagaaacagcaactgaaaaaacagaaactgataagatggtggcacctgtaaaaacgaatcaagaagacaaaattattttagcaagtccacttcaaggtgaaattttaccgctagaaaaagtacaagaccctgtttttgcttcaggtgctttaggaaaaggtgttgcaattgagccgactgaaggcaaactgtatgcacccgcagatggtgaaatcaccacattatttccgacaggacatgctgttggcttgacgacaacagagggcgttgaattattaatgcatattggcatggatacggtcgaattagatggtaaaggctttgaattatcagtgaaacaaggtgattctgttaaaaaaggagatttgctagttacttttgatattgctgccattaaagaagctggttatccggtagttacaccgattgtggtaacgaatacgaatgattatttagatgttttggatatgaaccaaacagacgtgttacatggtgaagactttttagccattattaaataa

SEQ ID NO: 2078 - DNA, 315 bp, Enterococcus faecalis
ccagcttctttaatggcagcaatatcaaaagtaactagcaaatctccttttttaacagaatcaccttgtttcactgataattcaaagcctttaccatctaattcgaccgtatccatgccaatatgcattaataattcaacgccctctgttgtcgtcaagccaacagcatgtcctgtcggaaataatgtggtgatttcaccatctgcgggtgcatacagtttgccttcagtcggctcaattgcaacaccttttcctaaagcacctgaagcaaaaacagggtcttgtactttttctagcggtaaaatttcaccttga

SEQ ID NO: 2079 - DNA, 555 bp, Enterococcus faecalis
aacccttggttaagaccccgctgtgctagttttattaaccaagaattaactcgcaacggtaatcaacctgtcacggtagccttggatgtgtttccgacaaaatcttttgaagaagtgctgaaaaacgttgattacatgattgaggaacagccaaataaagtggcaaaaaatgcctttcattctttaataccagaacggctgctcactttttatctagagaaactagcaattgaagaagtgcctgccaaacaactaacagaaaagcaacgtctttcctttgtggaactactgaaagactttcagttcactgttacgaaaacattgcctttggaaaaatcttttgtcacaggcggtgggatttccctcaaagaagtgacccctaaaacaatggagagcaaattagtcaatggtttattttttgctggtgaacttttagatattaatggctatactggaggctacaatgttacagctgcatttgtcactggacatgttgctggctcccatgccgcagaaattgcagaatacacctatttaccaattgaagaagtctaa

SEQ ID NO: 2080 - DNA, 1515 bp, Enterococcus faecalis
cgattaggctgtccttttttgcgtacccaagattctttcgtttcagaaatgaaagaagagggcaaaatgaaaaaattaagtattcatctgaaagacgtaagtattcacttttcgggaaaaccaattctagaaattgatgaattatttgtatatgaaaatgaaaaaattgggattattggtaaaaacggcgcaggaaaatcaacactgctcaatttaattatgggtaagattcaatcagataaaggaaaagttcaaagattgaacgactttcattacttggcacaagtagctgaagaaataacgaatgaatcagagaaaactgacaaaaattgtttgctaaatcagaaaaatcaaaaactaagtggtggcgaaaaagtccaaaaacgcttagcaacattattttcagagtatccaaccggggttattttagatgaaccaaccacacatttagataaagaacatcgtcagttgttagtggcagatttaacgtattattatgggaccgttttgtttgttagtcatgatcgctttttcttgaatcaattagcagagaaaatttgggaagtttcggatggacatgtcaaagaatatttagggaactacgatgcgtattgtcgtcaaaaagaattggaacagcaaacacaatataatgtctatcatcagtatcaaaaggaaaagaaaaaattacaggaatcttacgcaaagaaacaagcacaagcgcaaaaatctagtcatgtttcaaaaaaacaaaaacaaaagcaaattaaacctagtcgtttagctggttctaaacaaaaagataccgtacaaaaagcactccaaaaacaagcgaaagcgattaatgccagaattgacagattacccgatgttgcgcaagcaaaacaagagcgaaaaattatttttcctactaataatcagttctctttatacaatccatatccaattagaattgaaaatttaactttcgcttatgagaatcgaacaattcttaaccaagtgaacgttcaaattcctttaaacgaaaaaatagcactttgtggaaaaaatggtgctgggaagagtaccttccttcaacaaattgaagcccgtcacccggccatttacttttctcccaaagtccggttaggaacgtatcatcaattagattatcgattaaaaaatgatgaaccactgttgacttatttattgaagcggacaaattattctgaaaagattgtgcgttcacttttatatcgactaggttttcaacaagaaaatttacagacaaagatattttctctaagtggtggcgaagccataaaaattactttggcgcaattatttatagaaccaaataatatcatcttattggatgaacccaccaattttcttgatttagacacaatccaagcacttgaagaatttataagtgcctatcaaggaacagtaattttcacttcgcatgatgaaacgtttgtggaaaaagtagccacccgcactatttatttagaaaacgggaaaattattgataaataa

SEQ ID NO: 2081 - DNA, 636 bp, Enterococcus faecalis
gatttattcaatttattttgtcaaaaagtcaatccaaattctgatagatgccaacatacaattatacctcctcgtttaattactcccacattaacacctctgctttcttttgtcaattctgaccctaaaatgagagaatcggactttagtaggatacaattttaccgaaactatggcaaaataaagacggaggtgaaaaccatgaagattacattgacacgaaaaacatcagcttggggcgcattacgctattttacattttataaaaatggtgtgcatcaagggaaactttttactaatgtacctattgaaattgaggctgatcctggagatgttttaacgttctatgaaggctggttccaattttatcggcgcattgaagttactgaagataccaaagaaatcacgattatcaattctaaaaaattgcaacatgttttttatacctgtgtcgtcttatttttaattttaacgctattattcctttccgcacagaaactttcgacgtttattattgctgaaattttaatttactctggtattcagtggctgttccggcaacaaacctatcattttactgtcaagaaaaaaacggaatcctttgcttcctattctaaaaaaagtatcgcacactaa

SEQ ID NO: 2082 - DNA, 1422 bp, Enterococcus faecalis
caatttaatcaaggaggaagaagacggatgacaagaggagcattaaaaattgcaacaattggtggcggttctagttatacacctgaattaattgaaggatacattaaaagaaaagatgaactgccaattaaggaaatttggttagtcgatattgaagctggtaaagaaaaattggaaatcgttggggcaatggcgaagcgcatgattaaagctgctggtttagattgggaagttcatttaacattggaccgtgaagcagccttaaaaggggcggattttgtttcaacacagtttcgtgtaggattattagatgctcgcattaaagatgaacggattcctttgtcccatggagtattaggccaagaaacaaatggcgcgggaggaatgtttaaagcatttcgaacaattcctgtcattttagctattattgacgatatgaaacgcctttgcccagatgcttggttagtgaattttactaatccagctggaatggttacggaagctgcaattaaacatggtgattggaaaaaaacagttggcttatgtaatgtgccgattggtcatagaaaacaagcggccgaaatgctgggaattccagaagaagacttattctttaaatttgctggaattaatcatttccattggcaccgcgtttgggacaaagaaggacaagagcgaacacaagaactcattgatttaatttacggacctaagcaagagcaagaaagtcatttgaaaaatatttttgatgcgccgttccattatgaacagttaaaagatttaggaatgttaccatgtggttatcatcgctattattatattgaagatgagatgttgaagcattccatcgaagagtatgaacggggcgaaacaagagcacaagtggttaaagaaacggaaggtcgtctgtttgaattgtataaagatcccaaactagattacaaaccaaaagaattagaagaacggggcggcacacactatagcgatgcagcttgtgaaatgattgcatcaatttataatgataaacgaacggatatggttgtttctactgaaaataatgggacaattactgatttaccgtatgattgtgttgtagaagtatctggacctgtgacagctcatggccatgaaccttacaactggggggcctttccgccagcagcacgaggaattattcaaaatatgaaagctatggaagaaacggttattcgagcagccatcaatggtgattacggcgcagcattgcatgctttcactattaatccattagttcctggcggcgtcatggcgaagaccttgttggacgaattattaattgcccacaaagcgcatttaccgaattttgcagatgcgattaataaaattgaagaaacacaaccagaaacagtcacatatgtggccgaattaatgaaaagtaattaa

SEQ ID NO: 2083 - DNA, 1002 bp, Enterococcus faecalis
aaaatgacgtctatcattgatgtagcaaaagttgccggtgtctcgaaatcgactgtttctcgcttaatttctggaaaaggatatgtgagtgccgatagtcaagaaaaaattctcaaagcaatgaaagaattaaattataccccgaattatgtggcgcggaatttacgagcaggtgccacaaaaaccattggctttttagcccctagctatttaggttccttaggtattttcttgaatcgctttatttcaattgccaaaaaatacaattattccgtaaccttattttttacagatggcgatcagcaaaaagaaattgatgccttgaaccaattaaaatacaaacaattagatggcttgtttttattgacacgaacaaatgaatggtcggtgattgagccttacagcgcgtatggtcctttagcaacctggcatcgtatcgattcacctaatatatactcttcctacattgatcattactctggttattatcgttccttagaatatttacaacaacaaggataccaaaaaattggtcatgtcctcggtaatcccgaaaatttaaacacgcacgcacgaaaacgtgcaatgaaagatttttatgaaaatactcaggcaccttggcaaactgagtggctgattaatgatcagtatactaaccattctggtcgcaaaattgcccattactggcaacaattaaccgacaagccagaagctttggccttttataatgatcacgtagcagctgagtttatttcagaacttgaaaatctaaattatgccgttcctcgcgatgtcgctgtcattggctttgataatagttatgtcagtgagttgatgcatattacgactgttgattatgccattcagtatcaagccgaaaactcatttatttacctatacaaccaattaaatcagacgaatattcctgaaaaaaaattaaccgttcgtctagttgaacgacgaacggtgcctaaaaaagacccggcagatcagtcactttga

SEQ ID NO: 2084 - DNA, 888 bp, Enterococcus faecalis
atgttaaaccgattacgaacaatggcgaatgccaatcgtttaaacctaacagctgagcaagttgccatgttgaatcaacaagcaacatttaaaaaagccaaaattagttttgatgaaaatggcaaaataaaaacaggagaagataacacagggattcaaatggcgttagcaatggggataacaattttgttatttgtcttcatcagcagttattcttcaattattgcccaagagattgcttctgaaaaaggcactagaatcatggaagttattctctctagtacaaaagcgcaaacccatttttatggcaaattaactggggttattctagtagctttaacacaaattttcatttacggagtggcgtttgttctcggctattctcaattgaaaaatcttgattttatgaaaagtctattaagtggtatttcaccacaaagtattttttcatcaacctttatttttacattaggctttttcattattggtattctcgtttttgctgttttggcagcactttgtggttctcttgtttccaaaccagaggatacagcaaaagcagttcagcccatcatgtatattggtttaatcggttatatgatcggcattacgtttgggacgaatgatccacaaaatatcgtggtgaaagtgacttcctttattccgctgatttcgtcatacattatgccagtacgcttggcgaccgaaacggcatcaacaatggaagcaattgtctcattagtgattttggcagtttttggaattattttaacaatcttctctgctcgtttatacaaatcaaacgttcttgtatacagtgaaggcggcatgattcaatctttaaaacagtcaatttctattttaaaaaatgaacaaaagcataaataa

SEQ ID NO: 2085 - DNA, 417 bp, Enterococcus faecalis
atgcaacaaagatggaaaagcagttcgagcggaaactgcgaccaaggaaagggagttaaaacaatgcaatcaccaacagccctgaataagcgaggaaacaaagtcacaattgatggttacacatttgatagccagaaggaagctaacttttatacaaagtttgtcaaaaattgtgggttaccttttgaagttcatccgcgttttagactaaccgaacttacaccaactgcggatggtataggcaaaatttcggcgatagcttattcacctgacttcatcataaaaaacttagatgggagttggagacatgtcattgatattaaaaactcttttggcgtgtatggtattgaccaatccgttaagcttcgttttcgtctatttgcccttcgatatggtcatccagttgtagcgatttga

SEQ ID NO: 2086 - DNA, 300 bp, Enterococcus faecalis
aaacaaatcgatagaaaggggaatcattcaatgccgtatgtagtgaaaatttcagcctatcttggcaaagatggtcgacctgtagccaatttaaaagatgctgtgctatttgagcaaaaagagacagcagctattgcaacaatcgtatctggcggaaccgtttcagaagtaaaggaagccattataataccagaaaaaccaaagaaacatatagggaaatctattaaacggattgataagaaggaaccgaccgaaaaagctaccaaaagtaatcaagcctggatgaaaggggctaaataa

SEQ ID NO: 2087 - DNA, 546 bp, Enterococcus faecalis
acacagaaactaagcttgcttttgaaattgcaaatcgagccaccaactgaaatttttttgaataaaccaattcatatgaatctttcaggcaaaagtggtgttggaaaaagtcatttagctatttcaacggcttgggaagtgttggagaaatcaaactatgataaacgctgcttatttattagctatgcggaactcttagaacaactaaaatttgcgatgaatgatgagcaagccagaaaagagataacaggtagtttgatggcagaaatcaaaagcgcagatttagtagttctggacgatttaggagccgagttgggagttaaacaaattgatgataggaataaaagtactaacttcaataacgacaccttgaatcgcattgtagaagctcggcagaataaagcaactatttttactacgaacttaactggtaaagaaatgagtcaagcttatggggagagaattctttctcgtatcatgagtaattcacaaggttttgtgatgaaaattgaagggacatcagacaaacgagtagcaggcatctaa

SEQ ID NO: 2088 - DNA, 381 bp, Enterococcus faecalis
tcttggattttaggaagtgaaagaatgcagtcagcatcagatggattttcaaaaatgattaaaacgttgctttatatcacgcctgatccatgtccagagtgcggaggaaatctttatgcttggcgtgcaaaaaacaaagatgggtccgataggtgtccgccaacttgcatggaatgtggctataaagcacgcaaaaaagcagaagaccttgaaacagagaaaatgtttaacgatagtttgaaagccagagcgattaattatctgaaatatagttcgctttacaccgacaaaaatttaattaattgtcgttttaaaacttacaaaacagtagacacagaaactaagcttgcttttgaaattgcaaatcgagccaccaactga

SEQ ID NO: 2089 - DNA, 804 bp, Enterococcus faecalis
aaggaggcgagcaggttggccattggaggttggataaaactttataggaccattcaagatcactggatttgggaaaatcctcaataccttaaatggtggcttgatttaatattcatggccaatcaccaagacagaaagattctttttgatggagagttaaaaacggtgaaagtcggagaaagaattacatccgaaaaaaaactttctgaaaggtgggaagtaagccgaaacaccgtcagaaaatttttagatttgcttgttaaagatgacatgattgaattaagcagaagtagacaaaacgggacatggtacaaagtcagtaactacgcagaatatcaaaacttttctgaaataaaaaaacaacgaactgaacaacgaagggaacaacaagctgcacatcaaactgaacaacgaactgaacataaacaagaacctaaagaacctaagaacctaagaaataataataataacaataaaggggcgttcattcgttcaatttgggaaaataacggatttggattgatgtcgtctaaaaccatgaccgattttgattattggatttctgattttgaaaaaatcggagctagtcaaaaagaagctgaacaattaattgttaaagctattgaaattgctattgatgcaaacgcaagaaactataactatatcaatgccatattgaaagattgggaacaaagagggttcaaatctgttgaggaacgagaagcggcaaggaagcaaaagaaaacaaccaaaaaacagaaatcaaacacaggtcattctgattacgatgatcttggattttag

SEQ ID NO: 2090 - DNA, 855 bp, Enterococcus faecalis
tggctggttatgaaaccaatcagaaagagagtgaagctgatgtctcaacgattgaagaagacgattatcctttctgatgaaaattattattcacaagaagcggacctagcttatatgtctgtctctcaatataaaaaatttcttgaatgtgaagctgcagctcttgccaagttaaaaggcgaatggacaccagaaaacgatcctaaagcattgctagttggtaattatgttcattcttactttgaatcaccagaaattcatgaagcatttaaagaagaaaataaaagcaagatgttttcttcaagaaaaccgtttggcctactgaaagatttccaaattgcggagcagatgattgaaagattaaaacaagaagaagcctttttaaatatttatcaaggtgaaaaagaagtgatcgtcacaggtgaaattggtggtgcaatgtggaaagggaaaattgattgtttgaatttagaagaaaagtattttgtagacatcaaaacaaccaaagatatgcatgagaagaaatgggatgaacgtttaaacagaaaagcaaacttcattgaacgcttcggttacgtgttacaaatggctgtttattgcgaactgcttcggcaacaatatgacaaaatttttcttcctctcattgcagccgtttcgaaacaaacacctagtgaagcaaaactaatcactcttagcgaagaaaaaatgatttacgaattagaagaattaaaagaaaacatcgagcatgttgtgcgagtgaaaaacggcgaagaagaaccagttagttgtgggatttgtgaatattgtagaggacacaacaaaattacaaattttaccagtatggacgatttataa

SEQ ID NO: 2091 - DNA, 1056 bp, Enterococcus faecalis
agccaacatgggaatatgacgaagaagaggagaatgacaatgagtaacgatttaacacaaataacacaacgatctttagatgaacaagtcatcggaaatttgaatagattgcaagagcagggattagaaatgccaccaggttatagtccacagaatgcattgaaaagtgctttctttgaactaaccaacaattcaggaggaaaccttcttcagttggcagctaacaatccagaaactaaaacatctatttctaacgccttgcttgatatggtcatccaaggattatcgccagctaaaaaacaatgttatttcatcaaatatggaaataaagttcagcttatgcgctcatatttcggaaccatggctgtattagatcgagtaactggaggggcagatatcacgcctgttgtagtaagagaaggcgatgtatttgaaattgctatggatggtcccgacttagttgttgctaaacatgaaacggccttcgaaaacctagacaacgacattaaggctgcttatgtggttattaagctagcaaatggtaaagaagtaacaaccgtcatgacaaagaaacaaattgataagtcatggagcaaagcaaaaacaaaaaatgttcagaatgattttccagaagaaatggcaaaaagaactgtcatcaatcgagctgctaaatatttaatcaatactagtaacgataatgatttatttgtgcaagccgctaaagacacactcgaaaatgaattcgaacgaaaagatgttacaccagagcgagaagagcaagctgcggtacttgaagaaaaactattttccaacaatataaaagctgttgatcaagaaaacgagaatgaacgaattacacgtgtagctgacgtaccagagcaacccgatattgaacaagccaaaccaattgaaaaagataatttaacgaaagtagctgaccaaattttagaagaaccagttcaagaaactttagatgtgatggctggttatgaaaccaatcagaaagagagtgaagctgatgtctcaacgattgaagaagacgattatcctttctga

SEQ ID NO: 2092 - DNA, 231 bp, Enterococcus faecalis
actgcaatgattgaagtaagaggtttaagtgatgatgtttacgaattaatgttagcgaatgctcaaaataggattattcaatcaattcgaactgcagcagcaaatggtaatacaagttgcgtagtgaatagtaaaggtcttacatcaacgtttttatctcaattagaaacagaaggatttgatcacgttgaacttgaagaaaacaaaacgaaaatattttgggagtggtga

SEQ ID NO: 2093 - DNA, 366 bp, Enterococcus faecalis
agacccacttcgacggccatcaaagtaggtcagttacaaatatcaaattcaaggagagtgtaccacatgaatagaaaaattgaaagaatgattattgaacttgaaaaagaatgtaaggcacagaatgttgaacttcttttatgtgctacaaattttgaaacaggccaaggaagtactgcgttttgtggttcagttatcggtttagctatactcttgcaaaaacttgtaggtgatctaaaagagcaattaagtataagcgaatcttgtgattgtccagaatgtgtagcagaaaaagccgaagatgctgcaaatgaaaaatctatggatgaactactaactgcatttttacgaggtgaactgcaatga

SEQ ID NO: 2094 - DNA, 354 bp, Enterococcus faecalis
gtaaacaagggaagttctacgacaaagaagggtgtcggagatggcttctatcacaaaaaagataaatcttgggcaagcgaaatcaagggaggaaataaatatgaaaaaaatatatcacttaagacgtatggcggcactgttggttgtattcggactaggtctattggtaggtggcaatattggcccattaatccaaaacatatatatagcagcttttatcatttggttgctctactacgatttagcgttggaagatcgagaagaaaaaaaacaaaaataaagacccacttcgacggccatcaaagtaggtcagttacaaatatcaaattcaaggagagtgtaccacatgaatag

SEQ ID NO: 2095 - DNA, 276 bp, Enterococcus faecalis
acaagggaagttctacgacaaagaagggtgtcggagatggcttctatcacaaaaaagataaatcttgggcaagcgaaatcaagggaggaaataaatatgaaaaaaatatatcacttaagacgtatggcggcactgttggttgtattcggactaggtctattggtaggtggcaatattggcccattaatccaaaacatatatatagcagcttttatcatttggttgctctactacgatttagcgttggaagatcgagaagaaaaaaaacaaaaataa

SEQ ID NO: 2096 - DNA, 282 bp, Enterococcus faecalis
gaggtgatagcaatggaagtgattttaactccagaaaatgaagcttctctaagagattttgtacacggaattattgttgatgaaatagaaaaagcacgaagagataccgcagttgataagcgagtcttaaatcaaacagagattgcaaaatatttcaatgtttccacaacaacaataagggaatgggagaagctaggtcttccacatggatcagtaagtaaacaagggaagttctacgacaaagaagggtgtcggagatggcttctatcacaaaaaagataa

SEQ ID NO: 2097 - DNA, 321 bp, Enterococcus faecalis
aatattatgaaattcgaattaaatggatttgacgaattacaacatgagctaaatcaatttgctaaaaatggcgagtctttagatgacgaacattctgtaccattcgataaactattcactaaaaaatttatgattgaaaatactaaattctctaatattgatgagtttattgaaaaatccggatttgatttctctgatatggaatcaatagatgacaataaattagataatttcattagctcaaacacaaacttcgattcgtgggaagatatgaagtctgctgctggatcagaatgggtagctaagaaattaggattttag

SEQ ID NO: 2098 - DNA, 441 bp, Enterococcus faecalis
tataatttccttatcagcaagtggtctgctgaaataactgataaggtggtgaatgatatgaaactgtctcatgattgtattcgtgatattttattatttagcgaaagccttccgtacaatgaaccggcttttggtgataaaatatttaaatcagatctactaaaaaaatatagttcagaggaaattaattatgccgtctccaaattaggtgatgacgatgcacaacttataaaaggatatgttaagtttgcatctaacaaaccttatatgacatgtatctcttcccttacattcgatggtcataaatatttggacaatattcgagatccgaaaatttggaaggaatcaaaaaaaatatcatccaaactagcaagtgtctcaattgacataatgagtgaaatcgcagctaaagttattacaaaaacactgggccttgactaa

SEQ ID NO: 2099 - DNA, 249 bp, Enterococcus faecalis
ttttttagcttacaaattaaaaagaaaggaatggaagaaatgaaaattgacgaagctgtttcaaaagcaatgaaaaaaggaaaatatatttacagggagtctgaaaatgactgttcagctcatgtaaatatacttcctacaaatacctatgattgttgtctattactacaagaaaatagtaattctgttggcaaacggtggaaccctacagcaaatgatttaatggcgagtgactgggaaatacgttag

SEQ ID NO: 2100 - DNA, 258 bp, Enterococcus faecalis
gttttatttgagaacttattagctaataaattagcttacgtgattctattacttacaaatatggttaaatttcaaacatttttactaacttttttggtaaataacgcgttactagaaagagaatgtcttcctatgaaccttttggaacttataataaaactgccaaaagatcaagattgtttattttatccccttgaagaagaagttattattggagaaattattatttatcatgggaataagcaaacacctctttcg

SEQ ID NO: 2101 - DNA, 336 bp, Enterococcus faecalis
aagaaaaggagttatcttatgtttaattttaatgaaaccattgagcgtcgccacacgaattgtgttaaatgggacaccgttgaagcgagttaccacgaaaaagatttactacctttatgggttgctgatatggatttcaaagtacatcagcctattcttgatgccttgtcacaagttattgaacagggcattctaggatatgcagttgcacctaatgaactgtatcaagcaattcaagaatggcaacggcaacaccatcaattgattgttgaacaagaagacattttgtttaatagtggcgtggtaccagtttggccaaaacgttcaaacgtataa

SEQ ID NO: 2102 - DNA, 414 bp, Enterococcus faecalis
gtagaaacggaaaaagaaatttatcgtatgaaaagaggaaatttgatgaagtacaaaattggtatggtactttctggcacaattaccggacttcaaccatatggcgcatttgtttctttagacgaagaaacacaaggactgattcatgtttcggaagtacaagctggctttaccaaaaatatccatggactcttaaccgttggacaaaaagtaaccgttcaagttattgatgttgatgaatattctcaaaagattagcttatctttacgaacccttgaagacaaagttcattcagtgaaccatcgacgcaaaaaatattttacggataagaataaaaaaattggctttgcaaccttagacaaagaacttccagaatggattgatgaagcaatggataagttgcttgaaaaataa

SEQ ID NO: 2103 - DNA, 384 bp, Enterococcus faecalis
aaattaattgaggtggatgtcgtgtctaacaaaaaagtcgctggaacaatcatactgaacttaaacgatggtagtaaaaaatttttgatgcatccaataggtgaagcgattgagtttgcgatggcaaaagtttctgatgagatgacgggtttagctagtatgctacaatggttcaaagaagaggttcaattggacgttacttcaattagcttagtagaattaactaacgcgcatatcaataaagaaaatgttccgctgtttgtcttcgagatggatgaacaagcacttaaaaatgaaatggataaagactatacatgggtagcacctgcagaattaaaaacgatttggtcaaaatatcatattgaaggtgtcccaatgttttaa

SEQ ID NO: 2104 - DNA, 219 bp, Enterococcus faecalis
gagtctgggccgtgtctcagtcccagtgtggccgatcaccctctcaggtcggctatgcatcgtggccttggtgagccgttacctcaccaactagctaatgcaccgcgggtccatccatcagcgacacccgaaagcgcctttcactcttatgccatgcggcataaactgttatgcggtattagcacctgtttccaagtgttatccccctctgatgggtag

SEQ ID NO: 2105 - DNA, 966 bp, Enterococcus faecalis
aagtatagttatgtccatgagaggaaagatataatgcttgatataacattacgaagcctaagtttgttagtttatttatttcttatctcttattttttttctaattggtcaacagctattaaaaatcatagagaattttataatgtcatctggattgttataatcatatcagccatggttacgattatattatccaatgcttacataccgaacatttatttaccgtatcttaacttattactaagtttcattttaacttacactattgctatgctacactcggtcccttatctcgactcggccgtatggacaatgacacttatatcaataaatttaatctgtgaagtattgtcgttacactttacgaaaataattttaaatgcagaattaacatcctatggtagccctacttttttcataacttcaataacaattacaactttgattggggtagcctggatagtcatacttaaattttcaatagttaaagaagcaaagtctgaattatcgacaaacttatcatttattgtgattttattacctattcccatactatcaataatcattttatttgggcttttaataggaaacaacaatgacaaaatttctgagattactattacgattagtgtcatatttttaaacatctgtgtaatttttctttataaaatcactatagaatatcaaaaaaatcaatataatcttactttgagaaaaaaaaatatcgaagtggagtatagaattttaaatgaaataaagagaaacagaactaacgttttaaaattaaaacatgatttgaagaatcaatacttaacaatcctcggacttatcgaaaatgaagaagttaatgaagctatcgattatattaagagtagttttgatattttagaaccaccaacaaaaacttatgctgccgatggagtattaaactacctattgaatgtagacattgtgtctcaccacggg

SEQ ID NO: 2106 - DNA, 267 bp, Enterococcus faecalis
agaaaaattacacagatgtttaaaaatatgacactaatcgtaatagtaatctcagaaattttgtcattgttgtttcctattaaaagcccaaataaaatgattattgatagtatgggaataggtaataaaatcacaataaatgataagtttgtcgataattcagactttgcttctttaactattgaaaatttaagtatgactatccaggctaccccaatcaaagttgtaattgttattgaagttatgaaaaaagtagggctaccatag

SEQ ID NO: 2107 - DNA, 729 bp, Enterococcus faecalis
aatgaaaaaaaggaggttttattgttgaaagttgctatttgtgatgacaatccaacgttaaccgaaaaaataaacacgatgctatttaattataacccaaatatatttgaaacctatacctactacaatcctctcaagttagtcaatcaacttgaccaagaaaattttgacttttttattttagatatagaaatgagtgaaatgagcggaatagacttggcaaaaaaaatccgagaacgtgatattttatcacctatcgtttttttgacgagttacaaagaatacatggaagaagtcttccaagtacaaacttttgattatttattgaaaccgcctacggaagatcggttgcaccaagttttggaaaaactgagacaacagctagaaaaaaaaagaaattactttgtattttctagtaacaaagttacttataaaataccaaccaaagatatcatttatttcgaaaaagataaaagacaagtattgattcatacagttggagaaatctacaaaccctatatgtcaacgaatcagataaacgaacaacttgatacgaattttgtgcaagtccactcttctttcataataaattgcgcttatataaaagagttaggaaaaaatttcctattaatggattctaaagaaaaatgtattgaaataccaataagtaggcgcttcaaagccgccgctcataaaagtatagttatgtccatgagaggaaagatataa

SEQ ID NO: 2108 - DNA, 444 bp, Enterococcus faecalis
aaggagcctgccatgttacagaaatatatagaaattttaacaagagacgaggtcatctttcgtaaaaagccagatggaacagaagtaaattattttctatttccagagtttgaaatacatataaatagcttgccaggaaaaactgtgcaaggttggcataagcatcacgaaatcgaagaagttttacttgtgcagtcgggaaaagtgaaaatagaagagctagaaaatcagcaaattatttcaagaatttgtgcagaaggagaacttattcggatgcataaaagtcttcatcggattagtaatcctgatacgttatctgcatcatttacagtatttcgttttgttccacaagggcaaaatcaacaagaatgcataaaaaatgataaagaagaattctctgatgcggcagtacaacggcttctaaaaatcaatgattcgttgtga

SEQ ID NO: 2109 - DNA, 933 bp, Enterococcus faecalis
aattttgggggaaataaaatgtatgatgtaattatcattggtgccggtcctgctgggatgacggcagcactttatgcatcacggtccaatctttctgtattaatgattgaacgcggtgcgcctggtgggcaaatgaacaacactgctgaggtagagaattacccaggctttgattctattatgggtccagaattggcctataaaatgtatgaaaatgtagaaaaatttggtacggaaaatgcgtatggtattgtgatgggcattgaagaccacggatcctataaagaagtgatttgtgatgacaaatcttatgaagctaaagcggtaattattgcaacaggctgtgaacaccgaaaattgggtgtaaaaggcgaagaagaatttgctggccgtggtgtttcttattgtgctgtttgtgacggtgctttctttaaaaataaacgcttagtagtcgttggcggcggcgattctgcagttgaagaagcaatctatttaacgcaatttgcttctgaagtagtgattgttcaccgtcgtgatgaattgcgtgcgcaaaaaatcattcaagatcgtgcctttgcaaatgaaaagatttcctttgtttgggatacagttgtcgaagaaattgttggcaatgaaatggtcgtgacaggtgtgaaagcacggaatgtcaaaacagatgaagtttctgaaattgaagcaaacggcgtgttcatttacgtggggctagatccattaacagaaccatttaaaaaagctggtattacgaatgaggctggttggattgaaacagaccaagaaatgagaacaaaaattcctggtgtttatgccattggtgatgtccgtgaaaaaacattgcgtcaaatcacgacagcggtcggtgaaggcggtattgctggacaacaagtatttaactatattgaagaattaaaataa

SEQ ID NO: 2110 - DNA, 486 bp, Enterococcus faecalis
aagaaaagatgggagtatcaattcatggtttatacagttgattttaaagaagtagccactattggtttagaaagttcaccagtggcacctgcccttgctggactaagagcgaatgaagctcgctatttttggaataaatacaaacatcgctttacgaccgtccctgcctctgaagctccagaaacattggcctggattgaaaaaattttattagaacgagaattacatttcccttacaagccacttgaaatttcttctttcactttagatggcataaaaatggcctatgtattttatgaaaacggcttagcagttaacgtgatgtacacattagctgaggaaggcaaacgcgccgttgggtttaaactttcagatggtatggcaatccctgcagaatttgaaggaaaattcaaatttgctcgtcaaaaatcaaaattagctggaaccattcgcggctcttattttgtcattaaaggaacctattaa

SEQ ID NO: 2111 - DNA, 531 bp, Enterococcus faecalis
atgcttaataaaaagaaacgaggtaatttcatgttaaaaaaaccatttttactatttttttcacttttaggagctatttttattttagctagttgtggcataggaaaagatgctgtcacagatactaagtacaaagttagtttgcagcaagctgctgaaatctatgaaaaagaagctggcaacagcaaaccattagtaaatgtccaatttgatacagaaccagcaaatgactacagctatatctttactaacgatacagaaacactttacgtgaatcctgaaacaggaaaagtcaccaaaaatactgaagcaaatcaacttggcgaaaacgagacagccttttcagctgctgaagtcaaagaattaggcgctgttaacgacgttttagccaaagcaaaaaaagaagttggaggactttctccacgtattttgacttggaagttaaccaaaaataacaataaacttgtttatacagtagatgttaaaacgactacggcagatgaaaaagttaccttagatgccaataaataa

SEQ ID NO: 2112 - DNA, 213 bp, Enterococcus faecalis
atttcagcagcttgctgcaaactaactttgtacttagtatctgtgacagcatcttttcctatgccacaactagctaaaataaaaatagctcctaaaagtgaaaaaaatagtaaaaatggtttttttaacatgaaattacctcgtttctttttattaagcattcacaatcatttagtatacggtggttttataaaaattacaaacaaaaaataa

SEQ ID NO: 2113 - DNA, 2385 bp, Enterococcus faecalis
cttaaggttgtattgttgataaattggaagaaggatgcgaaaaatatgttagaactcaaagagataaaaaaatattatactgtcggcggaacgaccactaaagctttagatggcgtctctgtcgcttttcgaaaacaagaatttgtagccattctgggtcccagcggctctggtaaaacgacgatgttgaatgtgattggcggattggacaattacgattctggtgacttaatcattaacggcaaatcaacaaaaaattttaaagaagccgactgggatgcttatcggaataactcaattggttttatttttcaaagttacaacttaattagtcatcaagggattttggataatgtcgagcttggtatgacactgagtggtatttcaaaagcagaaagacgccaaaaagccgaagatgcactcatccgtgtcggtttgaaggaccatatccataaaaaaccttcccaattatctggcggtcaaatgcaacgggttgccattgctcgcgctttagctaatgatcccgatattttactttgtgatgaaccaactggtgcattggattcagaaaccagtctgcaaattatggcacttatccaagaactttcgaaagaaaaattagttattatggtgacccacaatcctgaattagctcacgaatacgctgatcgaattattgaattttcagatggccaaattcgtcatgactcgcgtcctcatattgaacatgaaaaaaaagaacctttcgaattgaaacgcaccaaaatgaaattcacgactgcgctgcgtttatcttttaataatatccgcactaaaaaagggcgaacttttttaaccgcctttgcttcaagtatcggaattatcagtattgcgattgtcctttctctttcaacaggattccagaaacaaattgataaaactcagtcggaaacgttagcgcaatttccgattaccatttttaaaatagcgaccgatcaagatccagaaagtttcaataatcaggacaaaaaaggcaccttcccgaaagaaaaagaagtgactgctaaaattagcgatgcggaccgtgcgcaacacacgaatttaattgatcaaaagtttattgactatgtcaatcacattgatcctgaattaagtaataatatcggctatactcgtctagtcaatatgaacttattaagagaaatcaacgggaaagcacaagctgtcaaattttcaaacgatgcacccgacggccaatcaaacgcgatggcttctatgatggctgcccaaactggtgtcggcgtttctgcttttcctaaacaactagaaaatggaaaaaacaatttcttaaaagacaattactcgttgcttgaaggaaattatccagaaaaagaaaccgatgtcgttttaatcgtcgatagtaacaataccaccaatattaatgctttaaaaaatcttggctttgacgtgaaagataatcaaaagattgccttttcagacattgttggcacaaaaatgaaattagccaataataatgcattttacaccaaattaccgacaggcaacttcattcctaaccaagatttgcaagctgtttacgataacccagaaaatactgaattaacaatttcagggattttgcgaattaaagattcttcaacaatgaatctattagcacctggaattgcttatagcgatgcactttcaactaatatgattgccaaaaacaaaacctctgacattgttaaagcgcaagaagccagcaacactaacgttatgactaacgaaacattagatgcttccgcgaaagaaaacctgttgtcttatttaggagcgaacgaaatcccttcaagtattatgatttatccaaacgatttcaaatcaaaagataaaattcttgattatttagatgcttataacaaaggaaaagataaaaaagaccaaatcatctattctgatttagctggaacaatgacccgcttaacaggtggtttaatggatgccatcacctatgtgctgattgcatttgctgggatttcccttgttacaagtatgattatgattgggattatcacctatacttctgtcattgagcggaccaaagaaatcggtatcctgaaagcgttaggagctcgtaaaaaagatattacccgggtgttcgatgccgaaactgctattttaggcgttgcctctggtattcttggtgttgtgattgcctttctcgcaacatttccgatcaatgcagtgctctataacctgactgatttagaaaatgttgccaccttaaatccaattcacgggattattttgattgtaattagcacaatcttaaccatgattggtggccatatccccccccgaatggcagcgaaaaaagatgcggcagttgctttacgtgcagaataa

SEQ ID NO: 2114 - DNA, 510 bp, Enterococcus faecalis
gtgggaaacgagggagaacatatggataaagagaagcattcatcaaatttagatattagtgtctttactgaaattttttcatatatgagccaattgctttttaaagacctagacttggaggatctaaaattaaccaagttagacatgttaattttattaattgtggcaacaaatgaaggaattagtatgacggagttagccaaccaagtaggaacgtcgaaagttcaagtgagtcgctctattgcggggttagaagaacgagcgattgttcaacgtcgccataatcaagaaaatcgccgcgtggttaatgtttatacgacaaaagaaggcgagaagctctttaagcaaaaagaaaatcaagtaaaacagcaactatctgaaacgcttagtgttctttccttagaggattatcaagaggtcaatcaacactttttggcggtcatgaaaattttgtccaattatcaagcgctacgaagaaaaacgtgtaaggaaaacaacgccaaaaaataa

SEQ ID NO: 2115 - DNA, 867 bp, Enterococcus faecalis
cttatggctaaagcaaaaagttaccagaaaaaacaacgcactgcacttaccagcgtttacatcattctaaccattttagcagttttttggatgttccccattgtgtggattatcttaacaagttttcgtggcgaaggcggtgcatttgttccctatatcattcccaaaacattcactttagaaaattataaagtattattaacaaatcagactggcaacttcccctttgtccgttggtttttgaacaccttgttcgtttccatcgcaagctgtctgttatcaactttcattacaatcgcaatggcttatgcgctgtcacggttgcgtttccgcttaagaaaaccatttttaaaagtggcgctcgttttaaatatgttccctggttttatgagtatgattgccgtttactatattttaaaagccttaaatttaactgaaagtttattcgctttaattctggtttactctgcaggctcggcgctaggtttttacatcgccaaaggtttcttcgacaccattccgatggctttagacgaatcggctatgattgacggtgccaacaagtggcaaattttcacaaaaattacgttgccattgtcgaaaccaattattgtctatacttctttaaccgccttcatgggcccttggatggattttattttcgcaaaagttattatgggtgataaagttgaaaattacaccgttgcgattggtctcttttcgatgatgaccaaatcaacagccaattcactattcatggcttttacagcaggatgtgtgctgattgccattccaattactattttatttatattaatgcaacgtttctatgtagaaggcgtgacttctggctctgtcaaaggctag

SEQ ID NO: 2116 - DNA, 510 bp, Enterococcus faecalis
ttcgcccaattccgtggtgaagaggcttgttccttaatcaatacttctaggcctttcttaacagatccgaatttggcaaaattaaccaggattgccgtcaatatgtggattggtattcctgctacgatgttaatctctacagggattatccaaaaccttcctgaagatcaaatcgaagcagctagaattgacggtgccaataaatggcaaatttttaaaagtattacgtttccacaaattctatttgtgatgaccccagcgctgattcaacagtttattggcaacatcaataacttcaatgtcatttatctattaacaggtggtgggccagccaattctaacttctacggtgcaggctcaactgaccttttagttacctggctatacaaattgactgtcgatacaatggattacaatttagcctctgtgattggtattttaatcttcattctctccgcagtcttcagtttaattgcctatacacgtacgaattcatttaaggaggcgtaa

SEQ ID NO: 2117 - DNA, 354 bp, Enterococcus faecalis
aaaatggcttatcaagcactttatcgggtctggcgttcacaacgtttcgatgacgtagtaggacaaaaagcaattactcagacactgaaaaatgcgatagtgcaaaagaaaacatctcatgcctatttatttactggccctcgtggtacaggtaaaaccagtgccgcaaaaattttcgctaaagcgattaactgtaaacatagtcaagatggtgaaccttgtaatgtttgtgaaacctgtgtagccattacggaaggtcgtttaaatgatgtcatggaaattgatgcggcgagtaataatggcgtggaagaaatccgtgatattcgtgatagagcgaactatgcaccgacataa

SEQ ID NO: 2118 - DNA, 1305 bp, Enterococcus faecalis
ctgaggtcaaggatattatcgccaccgcttggcaatggcatcaagctcatccacatggatatcaagaaaagtaataggaggaatgaatcgatgaccacgagtcaaatgattgccgattttaccacacttgctattcaagcaggtggttggatggaattggatcgcttatatcttcagaaccgtttattatcaatgattggtgaacaagaattaggcgaagtagacatacggcctgtggcaacacccgccgctgatttggcggaacaattgtgtcaagttgcgagtgccaaccaacttgtaaaaacagagcaacaaaaagaacagttcatggtgcaattgatggatttgttaacaccgccaccttctgtggttaatgctttttttgcacaacattatgccaaagagccacaagaggctaccgagtatttttaccaactttgtcaaaaaaacggtacggtcattgaacaggaagaacctgttgttttttcaacagtctatggagattttttagcaaataaggtccacagtgaggcgtcaaaagcaacgctctctgcacaaagctatccccgctgtgaatggtgcatggcaacagaaggctaccagggaagtcagcaatttcctgcgactacgaaccatcgagtgattcgaatgaacttagatggcgaaagctgggggttttcctttgtaaaacaggcacaatatcagcaacaaggtgtgattgcgtttgaaaaacatcagtcagcgaaacgttcaattaagacttttcagcaattgttgaaaattgttgaggtctttcctcattattttgctgggattgatgctgactttgaacaaaatgagcatgtctattatcaaacgggtttgcaacaatttccattagccgaagcgagcatttcagaatatgttgagttagctaactatcctttaatcaacgcaggaatggtgaattggccagttgagacatttcgcctagagggaccgaatgcgtcagaagttgcccaagccgcaaatgatatttttgagcaatggcaaatgctaaaactgccaacggatgagatacaaatcgttgcccgacgaaaagaacttttatatgtcatggacttaatttttagtcgacctcaagcaaagccttcgttaacgttagcagaagtccaaggtttaacgacttggaacaaccagaaaacgcaggcacttgaaactgtcgcttcagcgtatcaacagcgattaaaagaagccagtgcgtttgcagaaacaagtgaaggaaaagcggcttttttagcaatggttgcgccagtgattcattaa

SEQ ID NO: 2119 - DNA, 1026 bp, Enterococcus faecalis
aaaaagaaattagggagtaaaaggagcgtatttatgtctattttagtattaggtggcgcaggctacattggctcacatgccgtcgatcaattaatttcaaaaggatatgccgttattgttgttgataatttattaacgggatatcgttcagcagttcatgaacaagcgactttctatgaaggcgatattcgtgataaagcttttttacgtagcgtctttgaaaaggaatcaattgaaggggtgttgcactttgcggccaattctttagtaggagaatccgtggagaaaccgttaatgtatttcaataacaatgttcacggcactcaaattgcgttggaagtcatgcaagaattcggggtgaaacacattgttttttcttccacagcggccacttatggcgaaccaaaagcaatgcctattacagaagaaaccccaacgaatcctaaaaatccgtatggggaaagtaaattaatgatggaaaaaatcatgaaatggtgcgacaacgcttatgaaatgaaatatgttgctttgcgttattttaatgttgcaggagcaaaaaaagatgcctcaattggtgaggatcacacgccagaaacgcatattgtgccaattattttacaagtggcattaggccaacgagcagagctaagtatttttggggatgattatgatacaccagatggcacgtgcattcgagattatgtttacattgaagacttgattgcagcacatattttggctttagaatacttgaaaaatggtggcgaaagtgacgtctttaacctgggtagcaacaacggctattctgttaaagaaatgttagatgctgctcgcgaagtgacaggccaagaaattcctgcaacaatcgccccacgccgagcaggggatcctagtacgttaattgcttctagtgaaaaagccaaacgagttttaggctggcaaccagaagtaactgaggtcaaggatattatcgccaccgcttggcaatggcatcaagctcatccacatggatatcaagaaaagtaa

SEQ ID NO: 2120 - DNA, 1860 bp, Enterococcus faecalis
aaaaatagagtaggtgattggatgaaaattgcaattgtaggtgctggacccagaggcttatcagctgcagaacgagtcattgaatgggctcgtaaaacggaaataaatgttcagctcacgttgtttgatccatacggtccaggtgggaaaatttggcgagcagagcaacctaattatttattaatgaacaccgtgattagtcaagtcactttatttacagatgaatcttttagtggcgaaggaccaattgtcaagggccccactctctatgaatggacccaaacagaagctgcgcagtacattcaacagcaacaaccctataattatcttgagttgttgaaagaatgtcatcgccttggaccgaatgatcactgctcgagggctttttatggcatgtaccaaaaatggttttatacgtatttagccacgcggtgtaacgaacaaacatcgctgacgttttttaaagagccagtaactgctgtgcgggcaggagaggataactattatgtgtatactcaatccattgagtttacggcagacaaagtaattttagctttgggtcaccaagaaaatgaattaacgactgttgaacaagagcttgcggactacgccaaggagcatcgtttgttttattcttctcctaaaaatgcggcggatgctttattggcacttgccaatatacctgcaaaacaacccgttgtgttaaaaggcttaggtttggcattttttgactatttatctgccttgacgattggccgcgggggtgttttttctcgtcaaaatggccgcttacgttatgaaccttctggaagagagcctattattattgctggttctggtcgcggttttccttctcatcctcgagggaataatcaaaaaggctacggggaaacctatcagcctgtttttttaaccgaaacgtatttagctgaatgtcgtaaaaaaggacaggttacaggcgcagagttttttgggtatttaaaaaaagaagtggaatatgtgtattacacttgcttaatcgaagaaaaatatccgcatctttctaaagaggcctttcaacagctgtttattcaaaccaagggagcgccggaaagcctagcccactttgaaaaacaagattggtttgattggcaagcgttagaacatcctgaaacaaagaaaactactcatgaaagttttcgttcgtttttactagagtatttaaaatgggatattcaagaagcagagaaaggtaatcttagcggtcctttgaccactgctttagacagtttaaaagatttaagagatcagattcgctttgttttggatgaaggattattaacgaatgacgagagtcaaaagtggttgtggcattggtttaccccgttgaatacctttttgtcagtgggaccttctgttgaaagaacagaagagctacaggcgttagttgaactgggattagtcacgattctggggccagaaatgcgtgtcgaaatgaaagcgggtcaatttattacttatgctaatttgtttccggaaaatcggtataatagtcactttttaattgaagcgcgcattcccaaagtcaataatgaaaaaagtttgaatcctttaacgaggcagttgttagccgataagctagctacgctccatcaactggcattagccgatggtcaaatagtcaaaacaggtgcactcttgattgtgcctgccacgaatcaagtcatgacaaaagatggacaggtggcgacaggcctttttagttgtggtattccaacagaaggtattcattggttaacagccgctgcagctcgtcctggtgtggatccttggaatatgcgcgatatggatcggattgctgccactatttttaatagttaa

SEQ ID NO: 2121 - DNA, 357 bp, Enterococcus faecalis
aggcagatgattcaaatcaagcgagcatatgaagcaccgacagagcaagatggctaccgtgttttagttgaccgtgtttggccacgaggaaaatccaaggaatctgaaaagttagatgaatggctcaaagaagtggccccaagtacagagctacggaaatggtttaatcatgaagcaaataaatatcccgagtttaaacaaaaataccaagaagaattgaaacatgagccaactgccacagcgtttaagcagttacagacgattgtaaaaaatcagccagtagtcacgctggtctatggggcgaaagatacagtgcataatcaagcggttgtcttaaaagaattattagaaaaatag

SEQ ID NO: 2122 - DNA, 414 bp, Enterococcus faecalis
agagggctttttagaatgagtattttatgggtaatcaatggcattttgctagttattgtactagcgatggtattcaatgaattatatttgaaaattatggtgaaacgttcagcaaaaatgctgacggaagaagaatttaaagaaacaatgcgtaaagcacaagtgattgacgttcgtgagaaagatacatttgatgctgggcatattttaggggcgcgcagcatgccatacagcatgttaaaaacaacaattggttctcttcgtaaggatcaacctgtttatctttatgatcagaagaaagctttaagtatccgagcagctaatctattacgcaaaaatggctatactgatatttatattttaaaaggcggctatgatggctggactgggaaagtgaaaaagagaaatagttaa

SEQ ID NO: 2123 - DNA, 972 bp, Enterococcus faecalis
atggataagaagattattgggattgatttaggtggaacgaccatcaaatttgctattttaacaaccgatggcgttgttcaacaaaaatggagtattgaaacgaatattttagaagatggcaagcatattgtgccatcaattattgaaagtattcgtcaccgtatagatctttataatatgaaaaaagaagattttgtgggaattggtatgggaacaccaggaagtgtcgacattgaaaaaggaactgttgtaggtgcctataatttaaactggacgactgtacagcctgtcaaagaacaaatcgaatctgctttaggaattccgtttgccttagataatgatgccaatgttgccgctttaggtgagcgttggaagggcgcgggggaaaacaatcccgacgtgatttttattactttaggaacaggtgtcggcggaggcattgttgcagcgggaaaattgctccacggtgttgctggctgtgctggtgaagttgggcatgtgacggttgatcctaacggctttgactgtacctgtgggaaacgtggctgtttagaaactgtttctagtgccactggtgtcgttcgtgttgcacgtcatttatcagaagaatttgcaggtgactctgaactgaaacaagcgattgatgatggacaagatgtttcgagtaaagacgtttttgaatttgccgaaaaaggcgatcattttgctttaatggttgtggatcgtgtttgtttctatttaggcttagccacaggaaacttaggtaacacgttaaatccagatagcgtggttatcggtggaggtgtttctgcagcaggagaatttttacgtagtcgtgtcgaaaaatatttccaagaatttaccttcccgcaagttcgaaatagtacaaaaatcaaattagcagagctaggtaatgaggccggcgtcattggtgccgcctcactagcattacaattttcaaaagagaaatag

SEQ ID NO: 2124 - DNA, 258 bp, Enterococcus faecalis
aaaatacggtttacctgtataataaggaagtgttttcgtatggaaacgttatatgatgtacaacaactttttaaacagtttgggatgtatatttatgtcggtgcacggatttatgatattgagttaatgatgattgaattaaaaaaattgtatgaaggtcaattggtagaccgagatacgtatttacaggcccggcatattttgcaaagagagcatcgaatagaagaatctagagggaagcagaaaggaatcgactaa

SEQ ID NO: 2125 - DNA, 798 bp, Enterococcus faecalis
tttttagtgaacaactccatgagcaatggcaaccagaagcgtttgatcagccaatcgaacaattatttatacaataggaggaatggaatgaattatcaaacagaaatgaaattgaaacggctaaaaaatcagccgttcattacgtatgcccttttaggtatttcaatcattgttttccttggattggaattaactggaggatcagaaaatattttaaacttagttaattggggagcaatggttcgtccactggtagctcaaaatcatgaatactggcggtttatcacgccaatgtttcttcacattggatttatgcatattattttgaatatggttactctttattatatcggcgcacaggttgaggcaatttatgggcattggcgctatttgggaatttatttattgagtgggattgctggaaatatcgccagttttgcctttgggacacccaacagtgtctcagcgggtgctagtacagcgctttttggtttgttcggcgcatttgttattttaggacgccattttagagacaatccagcgattatgtatatggtgcaacgctattcaatgtttattgtgattaatttgttatttaacttgtttagtagctctgtagatatgatgggtcatgttggcggtctaattggtggactattagtcgcgacggcttttgctgttccaaatcgtgaagaagcatttaataagcacgagcgaattatggccacgttaatttttatttttcttgtcgtaatttgtctgttattgggttttaaaaaatacggtttacctgtataa

SEQ ID NO: 2126 - DNA, 630 bp, Enterococcus faecalis
agggatttttcaaagagaaaaggggaatcagcttgttttttaagaacactttctataaacttaacagaaaaggggttgaaggtgtacatggagaaaaacaagttgagaaaagtgggcttaactgccctggaatggctaaaacaacatccagaaattaaacaacataaagaatcaagtctctatgaacagttgtttgctagtcagcaatggcaacaagcacaaacgatcggaatgattcggtcgttaccgctagaattatcaacacagccaattttcgaacgggccatgcaagagagcaagcaagtggcggtgccgcgaacatttaaaggaggcaaaatgcacttttatcaagtctttccagagacggtttatgataccagtgcatttggcgtggaagaacctccgttaacagcggcagaaataacagctacagcgattgatttattgattgtgccagggattgttttcaatcgtgctggctatcgaataggcttcggcggtggtttttatgatcgttatttggaacatttttcgggccattcatgtagtttagtttttagtgaacaactccatgagcaatggcaaccagaagcgtttgatcagccaatcgaacaattatttatacaatag

SEQ ID NO: 2127 - DNA, 828 bp, Enterococcus faecalis
  misc_feature (586)..(586): Nucleotide 586 is "n" wherein "n" = any nucleotide.
ggttttgtctataacttccttgttttaccgatgagtaatgcaattacttatcttgtcgataactttaattggaactatggttgggcgattatttttatcaccattattgtacggatcattattttaccgttaggcttacatcaatcgaaaaaaagctttatccaaacggaaaaaatgcaagcaatcaaaccccaagtggatgttgcacaagcaaaaatgaaacaagcaagtacgcgtgaagaacaaatggccgcacaagcagaactacaaaagatttataaagaaaacaatgtgagtatggttggcggaattggttgtttgcctttattaattcaaatgcctattttctcttctctgttctttgctgctcgttatacaaaaggtattgccacggcaagcttcttaggaatgaatttagggcaaccaaatatgattttagtggcattagctggtttagcctatttagctcaaggctatatttcaatgattggtattcctgaagaacaaaagaaaacaatgaaatcaatgctgattgtttcaccattaatgattgttttcatgtcctttagctcacctgcaggcgtancgctttactgggtagttggtggtattttcacatgtattcaatctgccatcacaaatatcctcttacgtccaagaattaaaaaacaagtacaagaagaattgaaaaataacccaccaaaacaagtggttactcctatcaaggatgtgacaccaaaagaaacaaacaaagtaacgcaaaaaacgaaccaaccaaaagcaaacggcaataaaggtcgtaatgctggaaaacaaaaacgtaaataa

SEQ ID NO: 2128 - DNA, 207 bp, Enterococcus faecalis
ggaggaaccgacagtatgctagaaacaacatttgaacaaattttaacacaattatcaaagccagctgttcgtgcgctaacgaatgaaaaaatcgacagtgtggatgaactctacgcacgaggccgaaaagcgttactttcgttgcatggctttggtccaaagtctattcgaactattgaagagatgactgggaaagaattgaagtaa

SEQ ID NO: 2129 - DNA, 2121 bp, Enterococcus faecalis
ataaagaccaacacgtatccaaggaggcagaataacatggcaaaagatttattattagaaattggcttagaagaaatgcccgcacatgttgtcacaccaagccgtatccaacttgaagaaaaagtaatcaaatttttagatgaacatcatttagactatgaaacagtgcaatcctttgccacacctcgtcgtttagccgtgaaagtaactgcgattcctgaaaaacaagcggatgttgaagaagaagtaaaaggtccagcgaaaaaaattgctttagatgctgaaggaaattggtcaaaagctgcacaaggttttgtacgcggccaaggagttacaactgaggacattgttttcaaagaattaaatggtgtcgaatatgtctatgtgacgaagtttaccaaaggccaaagtgccaaagaggtattaacaaaattaaatgacgtgattacaagtctaactttcccggtaacaatgcactgggcaaactatgatttcgaatatattcgtccaattcactggattgtggcactacttgatgatgaagtaattcctttcaaagtgttagacgtgacaacagggcaaacttctcgtggccaccgtttcttgggagacgatgtgacgttccaacatgctaatgaatatgaagcaaaattaaaagaacaatttgtagtggttcaaccgaatgaacggaaacaaatgattgttgatcaagcgaacgctctcgctgcagaaaaaaattggcagttagctttagatgaagaattattggaagaagttacgaatttagtggaatatccaactgcatttgtaggtagttttgatgaaaaatatttatctgttccagatgaagtattagtgacttctatgaaagaacaccaacgttattttgacgttcgtaacgaccaaggcttattaatgccgcattttatcgctgttcgcaatggggataatgttcaccttgaaaacgtgattaaaggaaatgaaaaagtgttaattgctcgtttagaagatgcagaattcttttacaatgaagataaaaaattaacgattgaagcatgtgttgaaaaactaaaaaatgtgactttccatgaaaagattggctcaatttatgaaaaaatgcaacgggttgctttaattgcacaaatcattggtcgaaaagttggcttatctgaggatgaattggaagatttaaaacgtgcctctgaaatttataaatttgacttagtaacaaatatggttggtgaattcccagaattacaaggaattatgggagaaaaatatgccttattacaaggcgaaaaaccagccgtagcaacggcgattcgagaacattatctaccaacttccagtgaaggtgaattgccagaaacagcaatcggggctgttttagccttagccgataagcttgacagcgtcttttcattcttctcagttggtatgattccaacaggttctaacgatccttatgcacttcgtcgtcaaacctatggcgttatccgaattattgaagataaaggctggaccttcccattagttcaattacaaacagaagttgatgaagcagtgaatcaagatgttgagaaatatggcgttttactaaacgaaggacaagcagaagtcgttgaatttgtgaaagctcgcttacgtcaattattaatgacgaaaaatgttcgccatgacattatcgatgcagtggtgtctgctgagcaagccgatttatcgaaattatttgcttcagcgaatattttaaaaagccgttttgaagatcaagattttaaaccatcaatggaagccttaacgcgtgttattaatttagcgaaaaaaggtcaagaacttttaggtgatactgaagaagggattgatccaagtctgtttgaaaataaggcagaaaaagaactgtatcaagcagttaacgatttatctgaagcatttgcgacacgcacgattgcagaaaactatgaagcactagtaaatctacgtccgttaattgatgcgtacttcaatgaaacgatggttatggttgaggatgaaaaagtcaaacaaaaccgattaaaacaattaatgcaaattgctaaaatggcgttatcaattgctagcttagatttattaattgtgaaataa

SEQ ID NO: 2130 - DNA, 972 bp, Enterococcus faecalis
atttacattccagaagcaaagccaatccctatgtctataaaaaatattccaaggaggaaaacaatgaaaaacaagttaaccgtacaagaaatgattttaaccttgcaaaaattttggtcatctaatggctgtatgttaatgcaagcctatgatacagaaaagggagccggtaccatgagtccttacacgtttttacgtgccattggacctgaaccatggaatgctgcctacgtagagccttctcgtcgtccagctgatggacgctatggtgaaaatccgaaccgtctataccaacatcatcaattccaagttgtaatgaagccttctcctgaaaatatccaagaactttatctagaaagtttgaaattattaggaattgatccattagaacatgacattcgttttgtagaagataactgggaaaatccctcaatgggttgtgctggtttaggttgggaagtttggttagatggcatggaaattacccaatttacgtatttccaacaagtcgggggcttacaatgtcatcctgtcacttctgaaattacttacgggttagaacgcttggcatcatatatccaagaagtcgaaagtgtctatgatttagaatggacacaaggcgttaaatatggtgaaatttttgttcaacctgaatatgaacattcaaaatattcctttgaaattagtaaccaagaaatgcttttagaaaactttgacaaatttgaaaaagaagctaaacgctgtattgaagaaagtttagttcatccagcctatgattatattttaaaatgtagccatacattcaatttattagatgctcgcggcgctgtctctgtaacggaacgtgcaggatatttagcccgcattcggaatatggctcgttccgtagcgaaaatttttgtggctgaacgtgaaaaattagggttcccattattaaataaagaccaacacgtatccaaggaggcagaataa

SEQ ID NO: 2131 - DNA, 789 bp, Enterococcus faecalis
atggcattaggggagaccaaaggcattattttatttacgaaggattttaaagagaaggataaactcgtcaaaatttttacagaatcctatggaaaattgatgttttttgtgaaaggtgcgcatcgaaaaaataatcctcttttgccagcgattctgccatttacagaagccgtctacatcggaaactttagagaagaaggcttatcttttctcaatagcagcaaagaagttcaaccttttcgaaacattcaacaagacatatttattaacgcatatggaacatatattttaaacttagtcgatgcagcaattgaagatcagcactatgatccgaacttatttcaatttacccacatggcattatccgctttaaatgagcaaaaagatccggaaatcattacaaatatttttgaaattcaattgttagaacggtttggtgtacgaccagaatggcatcattgtgtggcttgtggcgaaacacaagggaaatttgattattcctcaaaatatagcggtgtgctttgtgaaaaacattggcatttagatgaacagcgctaccatgcagatcctagagcaattcattttattcgcttattttcgcaagtctcctatgaaaaagtccaaaacattcaagtaaaagaagaaactaagaaaagtattcgagaaacgattgatatgttatacgatgaatatgttggtttgcacttaaaaagtaaaaaatttattgatcaaatgaaaacgtgggaaaatacgttaaaaattccgccacgaaagaaggaagaaaaataa

SEQ ID NO: 2132 - DNA, 963 bp, Enterococcus faecalis
ttctatttgtaccaaaaattttacaaatcattcaaatgtggaaataagaggagaaatacaatgacaactgaacataaatctggtttcgtagccattgtcggcagaccaaatgttggaaaatcaacattgttaaatcgaattgtcggccaaaaaattgcaattatgagtgacaaagcacaaacaactcgtaataagattcaaggaatttatacaattcctgaagcacaaattgtttttatcgatactccagggattcacaaacctaaacaccgcttaggcgatttcatggtggaaagtgcctacaatgcgatgcgtgaagtagatgctactttatttatggtaagtgctgatcaaaaacgcgggaaaggtgacgactttattattgaacgattgaaaaataataatagtccagtctacttgattattaataaaattgacaaagtccatccagatgatttattgagtattattgaagactattcgaaacaaatggactttaaagaaattattcccatttctgccactgaaggaaataattttgagcatttgatggatgttctcgttgagcaaatgccagaaggaccacaatatttccctgatgaccaaattacggatcatccagaatattttatcgtttctgaactaattcgtgaaaaggtgttacttttaacaagagatgagattcctcattctgtcgctgttgttgtggactcaatgaaacgggatgaaaacgataaagtccatgtccaagcaaccattattgtggaacgggacagtcaaaaaggtatcattattggcaaaggcggaaaaatgctgaaacaaattggtaccaaggcgcgtcaagatattgaatatttattagatgacaaagtgtatttggagctgtgggtaaaagtccaaaaagactggcgtgacaaaaaaatctatttacaagattttggttatcgcaaagaagaatattaa

SEQ ID NO: 2133 - DNA, 408 bp, Enterococcus faecalis
atgcgtatggccttaaaagatgagcaaacaggaaaaaataaacattttattaattcattagaatttgcctggcaaggaatcaaaacagtttttcgagaagaacgtaatatgcgcaaacatgtagcgtttggtgtcacggccattgtatttggtttcttgttttccttaacacttgctgaatggctgtggttgttattggccgtttttcttgtctggttggcagaaattatcaacacaatttttgaaaatgtcgtagatatgtttacggattttcactttcatccaatcggaaaaaaagttaaagacatggccgcaggagctgttttattaacagccggtttcgcagtgctagtaggactaattctatttgtaccaaaaattttacaaatcattcaaatgtggaaataa

SEQ ID NO: 2134 - DNA, 483 bp, Enterococcus faecalis
ctaatggatattactttcattgatgaaaccgagaaagtaccaacagaagaaatcaaagaaatcgaaaacttgctgcaatttgcagcgggttttctagaaattgccgaagatacggagatgtcggtgacttttacagataacgcaggtatccaaatgattaatcgtgactatcggggcaaagatatgcctacagatgtcatcagttttgctttagaggatgaaggggaagacgaattgccaattatttttgatgatgaagagttggcagagctaccacgtaatctaggtgatttaattatttcaacagagcgagcagcagaacaagcagttgaatatgggcacacattggaacgagaaatgggctttttggcagtacatggctttttacatttgaatgggtacgatcatatggaacctgaagatgaaaaagaaatgtttggtttacagaaagagattttagatgcgtatggccttaaaagatga

SEQ ID NO: 2135 - DNA, 2109 bp, Enterococcus faecalis
cccctagccgtgggcaattgccataaaagagtaaaaatggaaagaaggtcaactggccgagaaaacattcgtgcaaataaaaatatcgagaatacctacgaaacagaacaaagaaaaaaattggcagcagaagctgtcacacccgaatatatttatcaagaagatacggcatctgtccaacataatcgtattgataaattatttaaattgattgattctgcgaatgaaaaagtagacaaagagtacagcaacaagcaagcgaaggccaaaaaggaagaaacgattcctgcgccgaccgtggaagaacgagtagctagcttaaaatcattgtttgaatctttaccgcaagatgaagttacgttttatcaaagttttcctaatgttttttatcaaacaatctttacattaacctctgagcaattggataaggttcgttcagaaagtttgatgttggtggatgacgcgatgcaaaatcacgttcgagaatctgatttggataaaattcgccaagaagctaacggtaaaattcaatacttagatattacgagtaccatgcaacaagtcattcgttacattgttaaccaagggattgtggtaaacgatattgccaatgaaaaacgaacagaagagctacgccaaaaagcgatgaatgctgttcaacccgcaatgatttatcaaggcgaaattattgttcgtgaaggtactcaaattgatgcaaaagcggtcgaaaaacttgagctactaggaatgactagtcaaaatacctctatttttccgatggtggcattagcattagctattttacttcaagttgaagtgttaattttctttacaaaacaagtgactgagccttcgcgacaacgctcgtttattatcttttacacgggtgctatgctaatcagtgttattttaatgaaattcttccagattttccaaacagagcagttgatgtatattcccttgttctatccggcagcctttgcgccgctgattctaaatcattttgtaaatcgtcgttcagggataatcgctgctattttccaagtcgtttttgcgttatttatcttttataattctatcggcacaaactcgttgacggttattctgattatgtacttattctcaggatttctagcaacagttgttaaacggaaacggatgagtgagcaagttttcccagctttaatgtgggtagtggtctttcctgttttcatggcggttgtcttaatgatttatcaagggatgagtttaacagatggtaaaacgtggacagctttaatttgtgcaagtgcaggaacggtactttcatttttagcaacaatgggcttgcatccatatatcgaattattagtgaccgatgatagtatgattgtcttgaatgaattaagtaatccgaaccatccgttgttaaaacaactgttagaagaagcgccaggtacctatcatcatagcatgatggtggctagtttgagcgctaacgctgttgctgagattggcgggcggtcgctattaacacgagttgcttgttattaccatgacattggtaaaattaaacacgccaatttctttgtggaaaacttacctgctggtgcagaaaatccacataactttttattaccagaagatagtaaacaaattatttttggccacgtaattgatggcgccaaaattttagaagagtacaatatgccgcaaatggtgattgacatttgtcgtcaacatcatggcacaacattgatgaaatttttctatgtgaaagcaaaagaacgcaatcctgaaattaaagaatccgacttccgttatcctggaccacgtccacaaacacgagaagcagggattgtgagtattgctgatacttgtgaggctgctgtgcgggcgatggatcatcccaccaacgaaaaaattcaagcctttgtgcataatgtgattcaagacagaatttcagatggccaattagatgaatgtgggttaacgatgaaagagattcgcatcattgaaaaatcattaattaatggattatgcagtaccttccattcacggattaagtatccaaaaatgaaagctgaagcagaagaaatgaaagatgaacaagaaaagagagatgactaa

SEQ ID NO: 2136 - DNA, 1419 bp, Enterococcus faecalis
agggcacggttacatttttgctgtggcgggcacggcgcaaaaagcgatcgatttattcgcaaaaatttttcatctattcaaatcatcgtcgcttattacatattaatgacggttatttcttatttattgttttgcctccctattttcagagaacctgactcgcatgttccttttattgatttatttttcttagcaatcagtacagtcagtgttactggactcaccacagtcgatattaattcggtttttaatgatcgtgggatcgtcttattggaggttcttttccaagttggtggcttagggattatgatgatttcaacggtcttttttattttatcaaaacggcgaatcacattaaagcaacgtcagttaattatgactgacatgaatcagccgcgactgagcggaattgttcgactgatccgcaccacttttttgattttaatttggttccaagtaatcttcggctcgctcttttcgctttatttttatataagtggttattatacgaactggcgagatgcgatattttatggattttatcaagctatttctgcagtgactaattcaggctttgatatttcaggtgattcaattattccttttgctcatgattatctctttttactggcaattatgttcttgatttttatcggcgggattggatttcccgttttactggaaattcatgagtggttacattttaagaaaaagaactttcgtaagaagaaacgaggcttgcctttccgcttctcattgtttagtaaaattgctttgctagcgtttattgttctgtttattggtgggactattttgatttacttattagaaaaagatcacctatttttgacaatgaatgaaagtggccgttgggtaagttcgatgttttattcgatgactacacgaaacgctggcctccaaattaatgatttaggggacttccaaattacaacgttgattattttctctgtgttaatgtttattggttgtagtcctagctctgttggtggtggtgttcgaacaacgactgttgcgattattggcttgtatttgttagcctttttaaaaagtgaagatgatattagcgtctttagccgtaaaatagatgacgatgatgtcaaaaaatcgattgtcgtcttcatgttatctttgattatgtgctttttcgctgtcgtctttttgtcagccactgaaaatctgcccttgatttcaatcattgtggaagtcgcttctgcctttgggacaaccggtctttctttgggtattacagacgatttaacaacagtaggtaaattaatgattgccttattaatgtttattggacgtattggtatgctttataccttaatgatttttgtaccaaaagaaacacgtgacttaggctacgaatacccttcagaaaaaattattattggataa

SEQ ID NO: 2137 - DNA, 3600 bp, Enterococcus faecalis
tcagtatgtcaaaacacaaaaaacaacagtcacaagcaatgtttaggaaagataaaaggtgaaaaaatgaaaaaaacaatggatggaaacaccgcagcggcttatatttcatatgcgtttacagaagttgccgctatttatcctatcacaccaagttcaacaatggctgagttggtagatgaatgggcggaaagtggtttaaaaaatatttatggtcaaaaagttcaagttattgaaatgcaatcagaagctggggcagcgggagtagttcatggttcgttaaaaacaggtgcgttaaccactacttatactgcttcacaaggtttactgttgatgattcccaatatgtataaaatcgcaggagaattgctgccttctgtgttccacgtggcggctcgggcagtaacgacaagtgcgttgagtatttttggtgatcatggcgatgtgatggctacccgccaaacaggtttttgtatgttagcagaatcgagtgttcaagaagtgatggatttgtcggcagttgctcatttagctagcttagaaggtagtttaccttttgtaaacttttttgatggttttagaacgagccatgaactacaaaaaatcgaagtgattgattatgatgacctgaaagaaatggtgaatcaggaagctgtaactcgttttagaatgggaggcatgaatcctaatcatcccactgtttcagggaccgctcaaaatcctgacattcattttcaacaaagagaaacagtcaataaaaattacgaagaaatgccaaaaattgttcaaaaatacatgaaaaaaattaacaatcttcgtggaacaacgtatgatttaaccgattattacggggttgaagatgcaacagaagtcattatttcaatggggtcggcttcgccagtaatcaaacaaacagtcgactatctcaatcaacaaggacgcaaagttggttttatcaatattcatttatatcgtccatttcctaccgaaaaccttcttgaaaaattaccagctacagtagaaaaggttgcggttttagatcgaacaaaagaatcgggagccgaaggggaaccgttattgctagatgttcaaagcgctctctatcaacatgaaaatcgaccaattgtgattggtggacgttatgggttaggctctaaagacgtagcgcctaatcaaattaaagcgatctatgatcatttgttattgccatttaaagaattaaaacaacgttttacggtagggatcgttgatgatgtaacctatcaatcattgccagaagaacctactttagatttaacgccagatactaccttccaagcaaaattttggggctttggttctgacggaactgtgggagcaaacaagcaagcgattaaaattatcggagatcataccgacctttatgcacaagcttactttagttatgattctaaaaaatcaggcggtttaaccgtttcgcatctgcgttttggtaaagagccaattacttccacgtatttaattgaacaagcagatttcatcgcttgtcataatgcttcctatttgcataaatacgacctgttaaaaggtttaaaagatggcggaacgtttttactgaatactatttgcgatcaagaaaagattcatcgtttattaccggctaagttaaaaaaatatattggggagcaccaaatcaaattttatattatcaatgcggttgagttagctcgcaaagtaggcttaggccgtcggatcaatacagtgatgtctactgccttttttgaagtaacagatattttaacgaaagagcaatatttaccgttacttaaagaagaagtgaaaaagacttatggaaaaaaatcaatggaaattgttgaaaaaaattaccaagcgattgatgctacctttgaatcgctgcaagaaattgtagttccagaagattgggcaaccattgttttagagccagaaaatcaagagtcggaagctccagcttttgtgacaaatattttagaaccaatcaatcgtcaagaaggggatcagctgaccgtttcagatttgattgaaaacggaatgaagggcggtgccattcctatgggcactgcggcttatgaaaaacgtggcattgcgttagaagtgcctgagtggcaaatggataagtgtacgatgtgtaatgaatgtgcctttgtttgtccacatgcggctattcgaccgtttttagcggatgaagaagaactgaaagaagcacctgcaggttttgccatgcgcgaaatgcgtggcacagatgggttgatgtatcgtatccaagtttctttagaagactgtacaggttgtggtctttgtgttcaggcatgtcccgtgaaagacaaggcgattttaatgaaaccttatgaaactcagaaagagcaagcgatgaattgggcctttgcgatgactcttaaacaaaaagccaacccagtcaaaaaactttctgttaaaggttcccaatttaaccagccattgatggaattttcaggtgcttgtgaaggctgtggcgaaacaccttatattaagttgttgacgcaattatttggtgatcgaatgatgattgctaacgcaacaggctgttcatcaatttggggtggttcgtcaccggtgacgccttatacaacgaacgaatgtggccaaggaccagcttggagtaattcgctgtttgaagataatgcggaatatggttatggtatgtatattgccaatcgaacgaaacgtcaacatttagctagtctggttgaagaaagtcttgctaaaaacgtcggatcagattcacttcaagccttgttaaatgattggttggaacacatggctgaaggggaaggaacacaacagcgagccaccaaactagcggcagcattaagtgaagaagccgatgaagatccacttttaacaaaaatttacgaacaaaaagatttactagtgaaaacgagtcaatggattgtcggcggcgatggttgggcctatgatatcgggtttagcggcattgatcatgttcttgccagtggggaagatgttaatatttttgttatggataacgaagtgtatgccaatacaggcggacaaacatctaaagctacaccagcttcagccattgccaaattctcagcgggtgggaaacatacctctaaaaaagatttagggatgatggcaatcacttatgggaatgtctatgttgcacaagtggctttaggcgcaaactcaatgcaaacgattaaagcaattgacgaagcggagcggtacccaggcccatcaattatcatcggttataccccatgtattaatcacggggtcaaaggcggaatggttcggacgttagatcaagccaaagaagccgttgaatctggctattggccactttatcgctataatccagagttagttaagaaaggcaaagatccgatggtcattgactacaagaaaacagattttgacaaaatgcgtgatttccttgaaaaacaaacacgttactctgcgttgcatacaattaaacagaatcaagaagtagtcgaacatttacttgataaaactaaagaagatgcaattgaacgctctgaaagttataacaaactagtcacacacatgaaaaaataa

SEQ ID NO: 2138 - DNA, 1437 bp, Enterococcus faecalis
aagagcaggtggagaaaaatggctagaaaaagtcgtataaaaacaccgattgcggaacaagcacctactatcagaaagaataattttgaagaggtttgcttaggctatacattagcagaagggcaagaagaagcgattcgctgtttacaatgtaaaaatgcaccttgtattgctaaatgccccgtgatgattgatattcctggatttattttagctattcgtgaaggaaacatggaacaagcagccgatattttaagtaaatatacgaatttacctgctatttgtggacgcgtttgtccgcaagagaaacaatgtgaacaagtttgtaaattagggaaagccaaaaactttgaaccagtggcaattggcaaattagaacgtttagttgccgattgggcattagaaaatcacaagtttcctaagaaaacagcggaaccaacaaaagggaaaatcgcagtggtcggttctggtccttctgggttaacagttgcgggggatttgtcaaagctaggctacgaagtaattatttttgaagcgcttcatgaagctggtggcgtattaacctatggcatacctgaatttcgattaccgaaaaaaattgttaaacaagaaattgcgagtattgaagccttaggtgtaacaatagaaaccaatgtggtagtaggtaaaacgattacgatggaagaaataatgtcagagtttgatgcctgttatctatcggttggtgcaggggcaccaaattttatgggaatcccaggaactagtttaaatggggtttattcttctagtgaatttttaacacgaatcaatttaatgcatagctatgagtttccagaatatgatacaccgattaaacgtgctaaaaatgttgttgtgattggcggcgggaatgttgcaatggatgccgctcgttcagccaaacgattaggcgctgaaaatgtgaacattgtgtatcgtcgttcgttagaagaattgccagcaagaattgaagaatatcaccattcccttgaagaaggaattaactattattggttaacgaatccaattgcttatttagatgaccaacaaggaaatctagccggtgttgaatgtgtcaaaatggttttaggtgaaccagatgcgtctggaagacgacggccagaaccaattccaaacagcacgtttaccattcctgctgatgcagtaatcgaggcaattggccaaggggcaaatcgagtcttgttatcaacatatccagaaatagaactaaaccaatggggttacattcaagctgatcctaaaacaggagcaacctcaatacctggcgtttttgctgggggcgatatagtcacaggtgctgccaccgttattttagcgatgggcgctgggaaaatcgcagctaatgcaattgatcagtatgtcaaaacacaaaaaacaacagtcacaagcaatgtttag

SEQ ID NO: 2139 - DNA, 297 bp, Enterococcus faecalis
tcgcttgtatgttatttggctggattggcgtggaagcgcacgcttctgaatttaattttgcggtcacaccaacaattcccgaaaatcaagtggataaatccaaaaacctactttgacttaaaaatggcgcctggtgccaaacaaaccgtagaaattcagttacgcaatgatacagatgaagacattaccattgaaaatacggtgaactcagcgacaacaaatttaaatggcgtagtagaatatggccaaaacgggatcaaacctgacaaaaaccttacgtttttacttaaaagatga

SEQ ID NO: 2140 - DNA, 498 bp, Enterococcus faecalis
aatatggccaaaacgggatcaaacctgacaaaaaccttacgtttttacttaaaagatgatgtggaagcaccgaaagaaatcatcttgccgaagcattccccaaagaccttacctttaaccattacgatgcctaaagattcttttgatggcgtgatggctggcggtataacactcaaagagaaaaagaaagaaacaacgacttctgcggatcaatcaaaagggttagctattaataatgaatactcctatgttgtggctattattcttcagcaaaatgagacaaaggttcaaccagatttaaaattactgggggttaaaccaggccaagtcaacgcgcgaaacgtcatcaatgtgtctttacaaaacccacaagccgcctatttaaaccaattacatttaatcaacactgtttcaaaaggaggcgaaacgctttaccaatccgatactgaggatatgcaagtggcgccaaactctaactttagttaccaatttctttaa

SEQ ID NO: 2141 - DNA, 204 bp, Enterococcus faecalis
  misc_feature (23)..(193): Nucleotides 23, 133, 178, 180, 185 & 193 are "n" wherein "n" = any nucleotide. 1               5
ttaccaatttctttaaaaggggnagcgattaacgccaggaaaatatgtcttgaaatcaacgggctatggtgtaaaaaaataaaagggcactatcaagtcaaaggcgcaatggttgaaaaacgggtactgtacnaatgggaaatttacaaaaaaattactatttctgggggacgtcctnangaatnaaatgaanaagaacttccc

SEQ ID NO: 2142 - DNA, 1482 bp, Enterococcus faecalis
agacgagtggaattagtagataaagacttacgttccatccaagaaacaagaaatttaatcagaaaagccaaagaggcacagcaagtattagcaacattttcgcaaaaacaaatcgatgcgattgttcaagcggtttcagaggctacatttaaccaacgagaaaagttagcgaaaatggccaatgaagaaacaggatttggtatctatgaagataaaatcatcaaaaatgctttcgcttcaaaagtagtatatgacgaaatgaaggacaaagctacagttggtgtgatccatgatgatgctgccaaaaaagtcactgaaattgctgtcccagtgggtgtaattgcaggattaattccttctaccaacccgacatcaacagtcatttacaaagcattaatttcattaaaagctgccaacagcattgttttttcaccacatcccaatgcgttgaaatcgattattgaaacagtggaaattatccaaaaagcggctattgctgcaggggcaccagaaggttgtgtctcggtcatcaaaacgccaaccatgcaagcgaccagcgaattaatgaaaaataaagaaacaaatttaattttagctactggtggaaacgcaatggttaaagccgcgtatacttctggaacaccagcaatcggtgttgggcctggtaatggaccagcctacatcgaacgaagcgcaaatgttcctcacgcagtgaaacaattatggattcaaaaactttcgataacgtacaatttggcatcggaacaatcaattattgttgaaactgtcaaccgtgaagcggtcaaagaagagttaattaagcagggagcgtatttcttaagtccagccgaagccgacaaattagctaaatttattttacgaccaaacggtacaatgaacccgcaaatcgtgggacgttccgttcaacatattgcttcattagttggtttatctattccaaaagatcgccgcttaattgttgccgaagaaacacatgtaggcttgaaatatccattttcaagagaaaaattggcaccgattattgctttctatacagttgaaaactgggaagcagcttgcgcgttatcaattgaaattttgaaaggtgaaggtgcgggtcatacaatgggcattcacacagaaaacaaagaagtcattcgtgaatttggcttaagaaaacccgtctctcgtttgcttgttaacacctctggtacacttggcggcattggtgcttcaactaacttagtgccagcattaacacttggctgtggcgcagttggtggcagctcaacttctgataatattggggttgaaaatctgttcaatttacgtcgtgttgcatatggcgtgcgtgatttagaagagattcgtcaagaatttggtcaaacatcaaccacatctgtggctacttcttgcgaaacaaccaatcaagaagaactagtaaatgccgtggtagctcaagttttagctcgcttaaactaa

SEQ ID NO: 2143 - DNA, 519 bp, Enterococcus faecalis
atgaaagcattaggaatggtcgaagtcaaaggatttttaggtgccattagtgtggccgatgcggcattgaaagccgccgacgttactttgttaaaagctgaaattattaatggcggtttaacaactgtggaactgattggtgacgttgccgcggttcaagctgccgttgaagtaggtacggaagtagctaaagaattaaattgtttaattgctcatcatgtgatctcacgggttgatgctcaaacggaagtgattttatcagatccagaacccaagtcagcacctgaaccgatggaacaagtagaagtaattgaagaagagattgaaacaccagatttggaagaacacacaggcacacgccaaaaattagaaacacaacgcgtggttgatttacgcaaacaagcctacaaaatgaacctaagtagtttaaagaaaagtgagattaaatttgccaataaagaagctttaattcaagcaatcatggctgaaatagaaagaagtgaagacgagtggaattag

SEQ ID NO: 2144 - DNA, 681 bp, Enterococcus faecalis
aagaagctgaataaaggaggatttctcatgaaaaatgatcgtctaggcgcaaatgtcctaagtatgaaagtcattcccaatgtcgatccggcattagcaaaagaattatcattgaaaccagaacatcgctcattaggaattgttacttccgattgtgatgatgtcacttatgttgcattagatgaagcaaccaaagccgccgatgttactgtagtttacggtaaaagtatgtatgctggcgcagcaaatgcttcaaccaaattagccggtgaagtgattggcattattgctggtccgagtcctgccgaagtcaatagtggcttgagtgtcattacgcaagtcattgaagaagaagccagcttctatagtgctaacgaagatgacagcattgtttattttgcacatgtagtatcaagaacgggtagctttttatctgaacaagcgaatattcctgaaggtgaagcgattgcttatctgattgcaccaccgctagaagcaatggttggcttagatgcagcaatgaaagctgccgatgttcaaatgggtgtcttttatggcccaccttctgaaacgaactttggcggcgccttattgacaggtagtcaatctgcatgtaaagctgcttgcagtgcgtttgaacaagtcattcaaaatatcgctgacaatccgttgagttattaa

SEQ ID NO: 2145 - DNA, 933 bp, Enterococcus faecalis
ataaacgaggtgagaatacaaatgaacgaaaaagaattaaaagaaatgattgccggaattttaacagaaatggtcgctgacaatcaagcggtttcgactgccactgtgactgctgaagaaaaaccagtcacaacacacgtcactgaaacgacagaaattgaacaaggcctaattcctgacattactgaagtacatttacgtaaacaattactattgaaaaatgccgtagatcctgaagcactattaaaaatgaaagctttctcgccagctcgtttaggcgttggtcgtgcagggacgcgttatatgactagttcaacattacgtttccgagcagaccatgcggcagcacaagatgcagtcttttcagacgtaagcgaagacttggtaaaagaaatgaattttatttctacaaaaacaatctgtaacagtaaagatgaatatttaacacgtccagattatggtcgtcaatttgatgaagaaaatagtgaaatcattcggaaaaatacgacaccaaaagccaaaatccaaatggtcgtaggggatggccttagttcagctgctatcgaagcgaatattaaagaagtcctaccagcaattaaacaaggattaaacatgtacaacttagatttcgacaatgtagtttttgttaaatattgtcgcgtgccagcaatggataaaattggtgaaatcactgacgctgatgttgtttgcttgctagttggcgaacgtcctggtttagtaacagctgaatctatgagtgcctacattgcttacaaaccaactgtcggtatgccagaagcacggcggacagttatttcaaatattcacaaaggtgggacaccggctgttgaagcaggggcctacattgccgaaattattaaaaaaatgttagacaagaaaaaatctggtattgatttaaaagaagctgaataa

SEQ ID NO: 2146 - DNA, 1386 bp, Enterococcus faecalis
ttaaaaaggagcgacacaaagatgattttaaaaaccaaactatttggcaaagtctatcaatttacatccgttaaagaagtcttagccaaagccaatgaagaaaagtctggcgacaagttagctggcgtagctgctaattcagccgaagaacgcgtggcagcaaaagtcgttttatcggaattgtccttaaatgacttgtttaacaatcccgtcgttgattatgacgaagacgaagtgacacgcattattattgaccaagtcaatatgcgaatttttgaaagtattaaacattggacagttgcagaattacgcgaatttatcttatcttcggaaacaaccgattttgatatcaaacgaatttcccgtggactcacttcagaaatgattgctgctgtctgtaaattaatgtccaacatggatctaattgttggcgcaaaaaaaatcaatattgaaaaaaccgccaacacaacaattggccgtcccggaactttttcaaatcgtttacagccaaaccatccaaccgataatgtcgatggcattatggcatcagttatggaaggtctttcttatggcgccggtgatgccttaattggtttgaatcctgttgatgattctacagaaagtgttaaacggatcttaaacaaatttgaagagttccgcagtgaatgggaaattccaacacaaacttgcgtgcttgctcacgtaacgacacaaatggaagccatgcgtcaaggcgcgccaactggcttagtctttcaatccatcgctggttcagaaaaaggaaacactgcatttggtttaaatgcagaaattttagctgaagcacaagatttagcgcttcacagtggtcaagcagctggtcctaatgtgatgtattttgaaacaggtcaaggctcagaactttcttctgaagcgaactttggcgcagaccaagtcacaatggaagcgcgttgttatggcttagccaaaaaatttgatccgtatattgtaaataccgttgtcggctttattggaccagaatatctttacgattcaaaacaagtcatccgcgctggtttagaagatcatttcatgggcaaattaactggaatttcaatgggctgtgatgtctgctacaccaaccatatgaaagctgatcaaaatgatatggaaaacttagcaatgttattagcaacagctggttgtacgtatatcatggggattcctcatggcgatgatgtcatgttaaattatcaaacaactgggttccatgaaactgcgacgattcgtgaaacattaggcttacgtccaattaaagaatttgaagaatggatggaaaaaatgggcttaatggaaaacggaaaattaacaagtcgcgctggcgatgcatctgtatttattaaataa

SEQ ID NO: 2147 - DNA, 1461 bp, Enterococcus faecalis
  misc_feature (1244)..(1244): Nucleotide 1244 is "n" wherein "n" = any nucleotide.
gtgcctttttgtatgcaaaaggaggcgagtcaggcgatgtcgaaggaaacacttttaaccgtaggaattgatttagggacgtctacaacccaattagtcttgtcagaattaactgttgaaaattttgcctctgcgtttacagtaccacgtatcagcatttctgataaaaaagtcatttatcgaagtgacattatctttacacccttacttaaccaatcagaaattgatgcagaacctatcaaagcgtttgtagcggagcaatatcgccaagcaggcattcataaacaagatattcaaatgggtgcggtaattatcacaggtgaaactgctcgaaaaagcaatgccaacaatgtgctacgagcacttagtggctatgcaggtgattttgtcgttgctacggctggtcctgatttagaaagtatcattgccgggaaaggcgctggtgctcaaacttattctgaaacgaaacgcaaaccagtggttaatttagacattggtggtggaacgacaaatttagctgtctttaaagatggcgaagtgattgacacggcttgttttgacattggcggacgcttaattaaattagatcaacaacaaaaaatcacctatatagctccgaagattcaagaaattataaataaaaaagggctaaccttgcaccttggtgaccaagccaccgaacaaaacttactgccaattatttcggaattagttgccgtgttagaaaatagcattggcttggggacacaaagtccgttctaccagttattagtaaccaaccatccactacgaaaaggtgaggaattaccaattgtaacattttctggtggtgtggctgattgcttaaatacgacaagtacgaatctctttaaatatggggacatcggcttacttttagggaaatacttgagaaagtcactgattttttcggaaaaagaagtcttagaaagcgcagaaacaatccgagcgacggtcgtcggagcaggttcacacactggtcaaattagcggaagcacgatcgcttatggtgagcaaattttgccggtaaaaaatatcccaattctaaaattagcgccagaggatgaaacccttactgtgacagaattaggccagcgaatccaagaaaaactcaattggcatcgtattgaagaaacaccccagatagccctagcaattagaggcatgagcaatccaacatttgctgatattcaacgctatggtcaagggattgtggaaggattagntagtttagttgctgaacaaattcccattattgttatggtggatgaagacatggcgaaagctttagggcatgccttaagtgcccatctgccaaaagactatccgtttatctgtcttgattcggtcaaagtagaaaacggtgattatgtagatatcggtttaccagtggcagaaggagccgtccttccagtcattgttaagaccttagtatttaattaa

SEQ ID NO: 2148 - DNA, 1434 bp, Enterococcus faecalis
atgaaacgattagagcaattatgtcaccaatataccaatctttcagaatcagacattaaagaattacaacgtacagcacgttatctttcttcgacgacactctatcaaagtgcagatgtttttattgatgtgtataaggaaatgtcacagcaagcactagtcgtttatcataagccgcctgcgaagacaacttctttatatagtggagatgtcgtcgggatggaagctttattaaaaaatgaacctggtgttctgcgtaccatgcaaactagcttaaatagcattggtttgttagcagtgactcaggaaaatcgtttgattaagcaaaatatctatcccattcgcaatgaacatcgaacgattggtgtcattattgtcgagattgcggcagatgaagagattcaagcggacttacaaaaagaggagctaaataactgccagttagcaaaagtagcgaaatcaactagtcaagtcgacgcattatttattgatcaattggcagaagccgttttgatttttgatgcggcgggtcacttattaattaccaatcacaatgcacaagagctttatcgcaaacttggttatcgggataatatcattggaatgagttatgacaatttgtccatcgattatacaacttttgaatatgtgttgtatcaaatgaaatataaaatgagtaatcaaccaattgaaagcaaaacgacctaccttaattattattttaaggttcggaaagtgtggttggcatcagaagaacaactgattatgattattcaagacaatacagaatttaaagaaaaagaagcggaaattatttccaaatctgttgcgattcgtgaaattcatcatcgtgttaaaaataacttgcaatcggtggtttccttattgcgtattcaagaacggcgaacgcaaagccccgaagcaaagaaagtccttcatgaaagtgtcaatcgaattatggcgattgcagccacccatgaattgctgtcaaaacaagtcaaagatgacgttgctttacggcaaacattggaagcagtgatgtataattttagacatctttttcaaggcgcacaacccattgagatgatgatggatgttgatccagccattatggtttctagcgaacaaatggttaccatttcccttgttgtcaacgaactattacaaaacatttttgatcatgcatttgagccacaaacaagtggcgttgttaaacttagtggaacattagataataaaatgattaccattactgttacagataatggtaaaggctatgatgttcatcaaagtaacgagaccagtttaggtttgatgattgtcaaaagctacgtaaaagataaactaaaaggaaaaattacaattgaatccaataaacagggaactaaaacctgtttctatttcgaacagaacaccagtgatgttgttcattga

SEQ ID NO: 2149 - DNA, 594 bp, Enterococcus faecalis
aaggacaagggcgtgaagaaaatggatggacgaattgtaatagtcgatgatgaacctattacgagactcgatattcgtgatattgtgatagaagcagggtacgaagtagtcggtgaagcagctgatggttttgaagcaattgaagtatgtaaaaaaacacaacctgacctagtattaatggacattcaaatgccaattttagatggtctaaaagcaggtaaaaaaattgttcaagaccaactagccagtagtattgtctttttatctgcatacagtgacgtacaaaatacggacaaggctaaaaaattaggcgcactgggttatttagttaaacctctagacgaaaaatcattaatacctacaattgaaatgagcattgaacgaggcaaacaaacgcagctgttactaagtcaaatcgataaattaagtttaaaattagaagaacgtaaaattatcgaaaaagccaaaggtattcttgtaaaagaaaatcatatatcggaagaagaagcctaccaaatgttgcgtacgttaagtatgaacaaacgcgcacgtatgagtgaaattgcagaattgattgtaatggatgatgaataa

SEQ ID NO: 2150 - DNA, 447 bp, Enterococcus faecalis
  misc_feature (25)..(28): Nucleotides 25 & 28 are "n" wherein "n" = any nucleotide.
aatttaagagcaaagagctccttantanaaagcgaaagtggaacctttacgttttttattgaggattttttatttgctaaattaaaggagcgagtctggttggaagaaaaacaacgaatgattcaagaatatgttcctgggaaacaagtaacgttagcgcacatcattgctagtcctaataaagaaatttatacaaaattaggattgccagaaggcaccagcaatgcactaggtattttgacaatcactccgagcgaagcggcaattatcgctgttgatattgcgactaaaagcggagatatccaaatcggttttattgatcgtttttctggatcggtagtcatttctggtgacgtaagctcagtggaagcagccttacaagcggtgattgaaggtttacaacagattttaaacttttctgtaacttgtaaaattaccagaacatag

SEQ ID NO: 2151 - DNA, 423 bp, Enterococcus faecalis
tccaatcccgtggtgaagagcaacgaagttcgtacatcaattatgcggattaatcgtagttttccaattgaaaaattaatggcagcaattgatgaatacattgaaaaaaccaaccgacgtgttacatttgaatatattatgttgagtcaagtgaacgaccgaccagaacatgctcaacaattagcagatttactacggaataagaaaaaactttcttatgttaatctgattccgtataacccagtgagtgaacacgatcaatatagccgaagctctaaagaagcggttttaaaattttatgatgtactcaaaaagaatggcatcaattgtgttattcgtaaagaacacggaacagatattgatgcggcttgcggacaattacgcagcaaacaaatgaaaaaagaaaaagtcaaaaaccaataa

SEQ ID NO: 2152 - DNA, 189 bp, Enterococcus faecalis
  misc_feature (166)..(176): Nucleotides 166 & 176 are "n" wherein "n" = any nucleotide.
cttttcaaaaaagtggaaattttgttacgcttttttagtttaaatgaaatgagggagtctatggagaaaaagcaacttacaagagagaaaacaacgtgtggtgcgttatccacggtaatgggtaccgtgattggcgctggtgttttccttaaaactgcaaatgttnttgggacacncactgtcagctag

SEQ ID NO: 2153 - DNA, 1260 bp, Enterococcus faecalis
  misc_feature (36)..(46): Nucleotides 36 & 46 are "n" wherein "n" = any nucleotide.
ttggcgctggtgttttccttaaaactgcaaatgttnttgggacacncactgtcagctagtttagctatctttgcttgggtgttaggtggcgccttaaccataagtgcaggattaaccagcgccgaacttgctacagcaatccctgaaacaggtggcgcagtgaagtatattgaatatacatatggtaaattagctggttttcttttagggtgggcacaaagtatcatttattatcctgccaacatttcggcgttatccattatttttagtacacaactaatcaatttgtttcatctatcggcaaatttattgattccaattgccattcttgcgggaaccagtatcacgataattaatttattaggaacaaaaattgcttctttggtccaatcaacgacattggtagtaaaactgattccaattgccttgatttctttagtaggattatttactcccggacaagtagctgtttcactttttcctgttgaaacaacagcgaatactggctttttagttgcttttagtggcgccttagtcgccaccatgtttgcttatgatggctggctgggtgtgggtaacgtggctggtgaaatgaagcgaccagaaagagacttgcctaaagccattatttttggtttgttattgattactttaatttatgccttaattaattttgtgtttctaaaaacattaccaattgagcaaatcgctgggaatttgaatgcagcttcggatgcttctgtggctatttttggaccaattggcggcaaaatcgtaactattgggattttaatctctgtatatggtgcgttaaacggctacacaatgacagggattcggattccttatgccttagccttagataatctgatgccttttagtcgtcagtttcaaaagttgtctaaacgctttgttgttccttacgttgctggaattttccagttagctgtagccattatcatgatgtttttcggaaccttcgatttattgacggatatgttagtttttgttatgtggctgtttaatctattaattttcttagctgtttttattttaagaaaacgagaacctgaattaaaacgaccgtataaagttcctggctatccaattattccaattatcgcaagtctaggtggtatcttcatcttggttacaacgagtattacacagcctattctagcattgattggtatagggattacgcttctaggaattccagtttatttagttaataaacaaaaaacgaagccaaaaacgtaa

SEQ ID NO: 2154 - DNA, 261 bp, Enterococcus faecalis
gcaaacatggtggcgactaaggcgccactaaaagcaactaaaaagccagtattcgctgttgtttcaacaggaaaaagtgaaacagctacttgtccgggagtaaataatcctactaaagaaatcaaggcaattggaatcagttttactaccaatgtcgttgattggaccaaagaagcaatttttgttcctaataaattaattatcgtgatactggttcccgcaagaatggcaattggaatcaataaatttgccgatagatga

SEQ ID NO: 2155 - DNA, 192 bp, Enterococcus faecalis
ttgatgagccaatttttttacattttcagtcattcatttcctcctctcactaataaactacgcatttattttatgatttcagcaaaaaaaagaaccttcaccattaagatgaaggttctttttttgaagtttgcgctgtccatctatcttccccaaaatagtggaactcctagacacttagtattatactaa

SEQ ID NO: 2156 - DNA, 969 bp, Enterococcus faecalis
atgactgaaaatgtaaaaaaattggctcatcaattaattgaatggggcgtccttcatggggcgcaagacgtttattttttacccaatgataccgaaatagccatctcttttcggacagggatgcaacggacactttacacacaagtttccgcagaaataggcgaaaagttaattttccactttaaatttataggcggcatggatgtcggagaaagacgaaaagcacaattaggcgcgacaacttatctaattggcgagacgaagcaacgcttgcgtttatcatctgtgggagattttcagaatcgagagagcttggtaattcgttttttgcaccgatttggtgaacaagctgaacattttttctttccccaccagctgaatgaaattgaagcatcttgtcagaaacgaggactttatttattcagtgggccagttggttctgggaaaacaacaaccatgtatcgtgtggctaaacaaagaagtggcgaacaacaagtgatagcgattgaggatcctgttgaaattgaggaaaagcagtttttacagttgcaaacaaatgaaaaaattcagttaacgtacgaagccttgataaaagtttgcttacgccatcatcctgatattttgattattggtgaaattcgtgatggcgagacggctcaagcagttattcgagccgccttaacgggtcatactatttttgcgacaattcacgcccgtaacttattgggggtgcaacggcgtttgatagaattaggtggcccagagcatgaattggctgaatgcttgcaaggtatcatttatcaacagattttgacaaccacgattaataaggaacaagtagcgggaattctttatgattatttcttctttaaggaagccgttataaagagtagttggcaaaagaatctaagaaaggcgtgggcgtatgggtttattacagaaaaaacgtattttcaagccatcgaataa

SEQ ID NO: 2157 - DNA, 1062 bp, Enterococcus faecalis
gaaaggcgtgggcgtatgggtttattacagaaaaaacgtattttcaagccatcgaataaattaacgaaaaaacaacagcagctttttctgaaactattagcggatttgcttgcaaatggttttaatatacaagaaagtttttccttcatgaaaaaatcaaacgccttacctcagcacagtataacttttttagttgaaggcttttcctcaggcattgccttacaagctttagtcgaagaattaggattttcaacaatggtctcggcacaattgtcgtttgctactgcacacggggatttggtggggacactacaagcgatttccgaacatttttttcaaacggaaaaatatcggcaacagttctataaaataattagttatccgctgctcctgattgtttttttgattctcgtcattgttggtattcggcaatttttattgccccaattaatggaaaatgatgccaatagttattctaaaaatattgggattcttctgattgtttacagtccatacattctggttaccttagtttttgtcctctcatttagtttcttcattttaaaccgttatttgaagcatcagtctgctattcagcgggccttcgtatatctgaaactgccaattatccgtggcctttatcgggaatacgtcagtgctttttttgcactagaatgggggaagttgcttgcacaaggattagaaatgaaagaggtcatcgatttgatgcgccatacaaccaattaccccttaatgaaagaattagctggagcaattagtgaaggactgctagttggtgaaaccttacatagacaattagctgcttatcctttttttacgaaagcattgggtttaatgattcaacaaggggaagtaaaaggaaaattaggcaaggagttgatggtttatagtaatgtctgtttccaaggttttttcaaaaaaattgaacgagtcattactctcgttcaaccacttatttttatcataattgcttgtttaattatcggtgtttatggggcaatgttgctgcctatttatggcaatatggaaggagttttataa

SEQ ID NO: 2158 - DNA, 228 bp, Enterococcus faecalis
tttcttcattttaaaccgttatttgaagcatcagtctgctattcagcgggccttcgtatatctgaaactgccaattatccgtggcctttatcgggaatacgtcagtgctttttttgcactagaatgggggaagttgcttgcacaaggattagaaatgaaagaggtcatcgatttgatgcgccatacaaccaattaccccttaatgaaagaattagctggagcaattag

SEQ ID NO: 2159 - DNA, 390 bp, Enterococcus faecalis
acgagtcattactctcgttcaaccacttatttttatcataattgcttgtttaattatcggtgtttatggggcaatgttgctgcctatttatggcaatatggaaggagttttataatgaaaaagaaacaaaaatacgcagggtttacattattagaaatgttgattgtcttattgattatttccgtattgattttactttttgtccctaacttagcgaaacataaagaaacagttgataaaaaaggcaatgaagcaatcgtaaaaattgtagaatcacaaatcgagctctacacactagaaaaaaataagacgccttccttaaatgaattagtcaacgaaggctacattactaaagagcagttagataaatatacagcagaaaagcaatga

SEQ ID NO: 2160 - DNA, 519 bp, Enterococcus faecalis
atatacagcagaaaagcaatgaacaagtcagcaggattcacattaatggaaacacttgttagtttaacgattgtttgctttatgactatgctcccgacactcgctattcaccgctggcaagaaacgttaaaaattgaacagtttcttgctacggtagaaaaacaacttcgttttgcgcaacagcaagcaattgttttagaggaaacacaagaagtttggttttttgaagaacaacaaagcttttcatttcctgataaattgaacccatttcagtttggggggaatttaatgccacacccccagaaaaaaagaagggggccccccccaaaaaaattattttttttttttttgggagaagccccccgggggggaaaaaaaaaatataggggggggggggggggaaaaaaaaaaaaaaatttttttattggtggggggggggggggggaaaaaggggttaaaatatcaatggttttaaatgtttttaccacaggtttaccacaaatcacaagttctcaataa

SEQ ID NO: 2161 - DNA, 1197 bp, Enterococcus faecalis
gcttattttgttacgcctattttaccacaaagaaaaggacgtgaaaatatggcgaaactaaattggtccaaaaaatacaaatatgttttttcttactcaaataaaaaaggaactttttggggatatcgctatccttattacaactctctaaaacaccgaaaagaagctagcaaacgtggatttgaaagtgaaagagcggcgaataaagcattgctaaaaatccaatatgatttagaaacacaaaatacttccttcgtcgaaaataaacaactcaccatagatgaatggatcaaagtctggataccttacgcccaagacaattggagtgtttcaacaaaacaaaacattgaatccgctgttaaatttcacatatcaccattgattggaaatcaaaagctatcttctttaaataagattacttataaacgagaatttattgacaaattaagacaagaaaacaaatatacagaatcaactattcaaacgtggcataaaattgtaatgaggatgattaacgctgcggtacacaatcaaatcatccctagcaacacgctaacaggctttaaatttgatttaagtaataatgttcgttcgttctctaaaaaggaattacagcgatttgtggcggttttagaaaacgaagatattcaaacgcaagttatatttttaactctgctaaaatctggaatgaggaaaggcgaactgatggggctgcgttggagtgatattgatttaaccgaaaaatatttcgatatcaattctacacgtggtgattacggtgaaaataaacctaaaacaaaaaccagcatacgtaaagtttattttgacaactcgttactcactttaataaaaaaatacaaaaatcatgagaaagaacggcttttcagagaagggataattttaagcgataaggactattttattttaagttctcgaaatttacctatcaaacaatcaagaattacgtatatgtttcgcctgttatgtgaaaaagcagaagttcaaaacataaccgtacacggcctaagacatacccatgcaacgtttttaattgaagcaggagcaaacattaagtacgtttcaactcggttaggacacaagaatattaatataactttggatgtttatagcgatgtgctaaaagaagaagaaaaagaaacagctgatatgatggataaacttattgagaacttgtga

SEQ ID NO: 2162 - DNA, 267 bp, Enterococcus faecalis
ccggagagggtgcgttatttttattgtaacaattcacgtttttttatttcaaattcttgttttgtaataatgccatcatctaacaaggctttaaattttcttatctcgtctgcagaagataatacagtgttatctttattacttgaattagtttttagtatttggtccagttttgcaattaattcgttgtatttatccattaaacctttaccaatcatagaatcagtttttgtttcagttgtgattaacatatattttactgtctga

SEQ ID NO: 2163 - DNA, 657 bp, Enterococcus faecalis
agtttgttgataaaactaacaacaaaaatggaggaatatagtatgtttttatttggaaataaagaagataaaaaggtaaagaaagcagaagaaaagcaaataaaagaatattttaaaaataatcatgatattgtaataggcggtatttattttaatgattcagacaaaaaaatatttatcccaaaaagtatttctgaatcaagaaaacaacaagttatcaactatgatgatttgattagttacacagatatttttgttggtggcaatataaaaaaacatcacggaataactcgtgcagttgttggtggcgttttagctggtcctgttggggctttagttggtgctggaacaggtggaaaagaatttacttccattaagcaattaggagttatgttacatcttcctaataatcagacagtaaaatatatgttaatcacaactgaaacaaaaactgattctatgattggtaaaggtttaatggataaatacaacgaattaattgcaaaactggaccaaatactaaaaactaattcaagtaataaagataacactgtattatcttctgcagacgagataagaaaatttaaagccttgttagatgatggcattattacaaaacaagaatttgaaataaaaaaacgtgaattgttacaataa

SEQ ID NO: 2164 - DNA, 678 bp, Enterococcus faecalis
aatcaagacttaaaaataaatgattggatgacccctatgtatttagactacgatacttattttgaatatcatgaccagacatatattattattgaaaaagttgctaattactatggaattgaactaaaagagttaagatggaaacactacaaagattatatgattgacgtagaaaatgttgacataattccctatagtttcggtgatgtttcaagaaaaatattttcaggaaacataataaaatttcacgataaatgcggaatttcctataatccaacaatggttaaaggaaggcaaaatttctcaatacttcatgaatctgcacattatttttttgatatgaataaggaatgcaagtctcaaagtttttcagatttaattactggaaaaggatacactagcgaagatgaaccaaaagaaataagagctaatatatttgcatcccttgctttaataaacaatgaagcattgaaagaatgtttaaaaaagcaaatgtctttccgtcaaatttgcgaagaatttgaaatgagtgctgcagcactacacgtaaggttatatgattttttaacaaaaatattcttattaaatccatgcttagcaagatcagctattaatcaatatagatataactataattcaacaaaattaatcagttatataaaaatgtgcttgtgctga

SEQ ID NO: 2165 - DNA, 342 bp, Enterococcus faecalis
gtggatttatacgaaaaaataaaattacttgctagcgaaaagaaaatgtcaataagacaattagaagaaacattgggatttggaaacggggtaattaatagatggcgtaagaatactcctggttctgataaattaaaaaaagttgcggactacttcaatatatctgtagattatttacttggacgaactgataatccaaattctaataacttagaagaagatgaaattacaactttcttccgtgtaaatacagaagatttaaccgaatccgaaaaagatcagctcagagaagaattaaaagagtacttagaattcatgaaatcaagacttaaaaataaatga

SEQ ID NO: 2166 - DNA, 249 bp, Enterococcus faecalis
ttttataaattctatctaattaatttacaaaaaatactaaagaaaggagaaactaatatgccagacacaacagcgggcagagcgaaaattcgtgagtactttgatgataagaaaatatcattaacatctgtagccacgtatttcaatattcataagcaagatctaaacgactatctttctggtaaaaatcaaagtaaaaaggctcacgaaacactaacggctattattgaatactacaaaattagatag

SEQ ID NO: 2167 - DNA, 327 bp, Enterococcus faecalis
ataggagtgtttagaatggaaaattttctagatacatcttcaaaaaactttctatacaacattattgaaaaaatcctgagaaaaatgtttgagcaagtcataaatgaagctagtcaaggattaaatgaacgtgctgagtatttagacatcaaacaattatcgtctatgtattcaatgtctgttcctgaagttgaacaaaattttgtaaaagacaaacgtatgcaaatgatcgaaaaaagaaagcctggtactagcaagggaaaaagatactggcctgctaaagaagctataaaaatttgtaatgacatcatgaatcattgggattaa

SEQ ID NO: 2168 - DNA, 759 bp, Enterococcus faecalis
atcattgggattaaaggaaaggacgatacagaaacaatggacaacttagtaattatgaaaaaccaacaagcagtaacaactagtttgcaagtcgcagaaacgtttaataaaaatcatcgtgatgttttagcagcgattgatgatttaaaagagggggttgcggaaaattacgcagggctattttacgaagatagctatattcatccacaaaacaaacaaaaatatagacaaatcattatgaaccgtgacggattcacgctactagcaatgggattcactggtcaaaaagctcttaagtttaaactgaaatacattgaagcttttaaccaaatggaggaactgcttaaaactcaatcaaacttaccgattaataacacagaattgttattagaagctgcgttaaaacatgaacgtggattgactcttgtaaatcaacgtttagataagctagaaacagaaactacaattaatagaagccaacaacgaaagatacaagggctagtttcatcaactgttatcaaagtattaggtggcaaaaaaacattggcttatcaggattcaagtattaagcaatcagcctttagtaattgttataaacaattgaaagcattattcgatgtagcatcttatgtagacattccaaaagttcgatatgaagaggctgtagctctaattcctagatggaagcctaacttagaattacaagcaagaattgatatggctaatgataatggagatatgtttaaagaaataggatag

SEQ ID NO: 2169 - DNA, 204 bp, Enterococcus faecalis
aagcggggtgtcaaaatgttttttgtaataaagaaagcttctaataaaaaatactattttgtaattaaaaccgaagaaaatgaagtaatcgcatcaagcaagacttattactataaatcttctgttttagaaattattgaatccatcaaaagtgatatggatcaaaaagctattattgttgacactacttttaactggggataa

SEQ ID NO: 2170 - DNA, 342 bp, Enterococcus faecalis
tgcgattacttcattttcttcggttttaattacaaaatagtattttttattagaagctttctttattacaaaaaacattttgacaccccgctttcaactgaattatatcaaaaaaattataggagggtaaatatgaaagcaatacgtgaagcacgattgataggcgcattattattgatgattgcgctaggtgtgttattgaaaagccacttttcagttccagtgttggcaacaataagtgtacctctttttatccgttggtttttcaactgggatgaagcggagtatcagcattttcaaaaaagacaaaataaaaagccccaatcgtctgccaacgattag

SEQ ID NO: 2171 - DNA, 354 bp, Enterococcus faecalis
ggagagtataccaaaatgaacgataaaattcaaaaattgattaaaaaactagcaaaagaatgccagaaagaagatgtagctttatctttggcagctatcgatttagaaggagagatggcaatatctcaagttggaaaaggcacgatagtagccattgctgcacatagccaatatacactaacaaaagaaaaactggaacaatcagattgtgattgtccaaaacatcgtttattaaaagagatgtacggtactgaaacagaaactacgactaaaaatacacatacttttgtcacagatgatccaaacgatttgatggatatattatcgaagatttttcgaggtgagtttaaatga

SEQ ID NO: 2172 - DNA, 654 bp, Enterococcus faecalis
  misc_feature (74)..(109): Nucleotides 74 & 109 are "n" wherein "n" = any nucleotide.
gttcatcaaacagccgatgaatatcagcaagaagtagtagtaagtcacgttccgcaagtcaaaaagcacccagntaattttcatattcagtggttcaacgaagaacaantacgagcagccattcagcaattacaattgccagaaagacaagcagaggatttagccgaaaaagcgcaattatctgctgacaaaatcaatcgtggccttgcacggttaagtttcaattatccgtttgaagtggctactcggaccaccagttatcagtctgtttctgaaatcaagcgagtatttgatgaccccgataacaaagaaattggtaaaattgaggttcgggaagacaatactattcaagcgcaaccgttgattgtcaatcgaatgattgaaggagatttaagtaagcctaaatttttagatacggttcaagcgccctcagcagctgaaattgggacagcaacccattatttattacaactaattgatttaagtaagcaaccttcttacgaggaagtgcgagctgttcaagaacgcttagtggaaaataaattgattttaccagcaattgctgaaaaaatgaatctggaacaaatcgtggccttcttggacaccgccctaggaaaactattaattcagaccctcgccactctagaccaatag

SEQ ID NO: 2173 - DNA, 2835 bp, Enterococcus faecalis
acaaagatgaggaaggagcaaccgaagatgagtaaaacaattccactacgtccagccaatgagcaattcaccgacagtcaatggcaagcggtgtttgatggcgatgaaaatatcttagtttctgcttcggctggctcaggaaaaaccaccgttttagtccgccgtgtcattgaaaaagtcaaaagcggcgtcgatatcgatcgtctcttgattgtgacgtacactgaagccgccgcccgtgagatgaaagaacgtatccaagtggctttacaaaaggcaatgaatgaagaacaagatccagaaagaagacggcatttttctcgtcaaattgctcttttgccaacagccaatatcagcacgttacatgccttttgtttaactgttattcgtcgtttttattatttaattgacatagatccagtttttcggatgttaacagatgaaacagaaacattgttattaaaagaagatgtttgggatgcattacgtgaacaattttatgcggaaaatcaagaagcgttttaccaattaacagcgaatttttccaatgaccgtagtgatgacggactcactaacttaattttttctttttatgaatttgccaaagccaatcctgatccagaggcgtggattaatggcttaacacaagcctacgaagtaggggatcagctaggcgaatcaaagttatttcagacgtatttaaaaccgctagccgttgagacgttacaacgaactcttcagcgttacgaagaaatggtgaccttaacagagggcgaagagaaacttcaaaagatttggtatttagctcaaaatgaaaaggaacaaacaaaacaatttttacaatttttagagagaaatgatttagagagcgcctataatttgactgaattgttgagctttgaccgctacccaacggttcgtgccgaagagttgaaaccaaccgcggaacaagccaaacagttacgagaacaaaataaaaaagcgttaaatgatttgaaaaagcaactgtttacactttccccagatgccatgaaacaagtcttgaaagaggccacgcccattgttcaagaaatggctcacgtggggaaacaatttatggaggcctatggcgcagaaaaacggcttaaaaatttagtggattttaacgatttagaacattatacgttagctattttagcgaaaaatcaggcagatggctggcatgcatcagaagcctcggtttactatcgcgaaaaatttgatgaagtgttagtcgatgaataccaggatatcaatcaattacaagaatctattttgtattggttgcgccgtccgcttagcacagaaggaaacctttttatggtaggagatgtgaaacagtctatttattctttccgcttggcagatcctacattgtttattgaaaaatacaatcagtatgggcaaggcaaagagggcaaacgaattattctagctgaaaattttcgttctcgcaaagacgttttagactttacgaatttagtatttagtcaattaatggatgagcgagtgggccaaattgcttacgatgagtcagctgctttggttcatggttttgatcaattttcggaggcggctgattattcaactgaattgctaatttatgaaaaaaaagcaacagaatcagttgaatttccagaattacaatcccctgagttgttgattgaagataagacagaaggggaactttacgttactgctttgaaaattcgtgaattaattgaccaaaatttcttaatttatgataaaaagctgaaaacggatcgaccgattacttatcaagatattgtcttattaacgcctacgaagaaaaataatttaactattttagatgtttttaaatcattagaaattccagttcaagtcaatgatgctcaaaattatttccaagcaacggaaattcgtacaatgattgccttgcttcaattgattgataatccttatcaagacattcctttggcagctgtgttacgttcaccaattgttggattaaaagaaaacgaattagtgcttattcgtttggctaataaggaaaccagttactacgaagcatttttaacgtttaatcaaaagatggaaccaaccatggaggaagcagttgttcaggaaaaaactatacgttttgctgaatcattagaaaaatggcgggaacaggctcgacgcaaccagattagcaacttgctgtggacgatttatcgggaaacggcctatcttgattatgttggcgggttgcctgttggcaaacaacgccaagccaatttatatgcgttggtcgatcgggccgcggcgtatgaaaaaacaaccttccgcggattatttcaatttgttcgcttcatcgaaaaaatgcaagaaaaagacaaagatttagcagaaccagtcgttttaagtgaagagaatgccgtacgcgtcatgacgattcacgctagtaaagggttagaatttccggtggtattcgttttagatatgaccaaagaatttaatgtcagtgatttgaatgaacgctatatctttgaagaaaatttaggggtaggcattcgttatttacaacctgaagaacgagttatgtacgatactttaccatttttggcgattaaacaagtacgattaagaaaattactatccgaagaaatgcggaagttatatgtggcgttgacacgtgcagaacagaaactttttctggtaggctcctataaagaccaagcggcgatgtggaaagagtggctgaaagttggcgatgtagaaacactggtgctaccagctgaaaatcgcttgcaaagtaaaagtagtttaatgaattgggttgggattacattgtaa

SEQ ID NO: 2174 - DNA, 3621 bp, Enterococcus faecalis
aggcagtgcaaaggaaaaggatgtgaaaccatgagtgtgcagtttattagaggaaccgccgtggcagacttagaagcgccacttatacaggcgacaaaacaatggctagaggaagacgcacagcatgaagtattctatttagtcccgaaccatattaagtttgagcaagaaattcaagtcttgcaaaagttacgtcaattacagacaactacgtctgattcaataaccagtacccgtctgcaggtttttagtttttatcgtttggcttggtactatttacaacatacacctttttactcggcagatgttttatctgatgcaggtgctgcgatgatttttcgcaaaattttagtagaagcagaagaagagttacaaatttttagaggtgaaattaacaagcctggctttattcagcaactatttcagctttatcaagaaatgcgcgaaggcaatattgagattgcggagctttatccatttttagaaaaacaaacggagaaccctaaaggacaagatttacaacttaagtttcaagatttaacgttaatttttacgcgattccaattgcaaatgagtcagtatggctatgaatcagcggagattattcaacatttaagcgagtatttacaaacggttgatttgtcgaatgttcaattcgttatttcaggctatcagcagtttactgccagagaattaaagttgattgaagtgctaatggcgcaagcaggttctgtgaaagtagcccttttattggacaaacaatatccgcatgacttacctgatccgcggtcgttattttatgaagcgggacaaacctatcatcagctttatcaactagcaagacagaagcaaatcccgattctttcagattatgtggaaaagaaagaggtattaattacaaatccagatttgcaaggattaaacgattattggattcaatcgcaagaacacctgcctccattaagcacagctgactggaggggcgatggcttatttctgtggcgtgctgaaaacgttaaagaagaattaacacatgttgcaaccgaaattcgccgtttagtggtggaagaagggtatcggtacaaagaaattcaggtgttgactcgtgatttagattgttatgaaaatttattagaaccgatttttgcggaacacgagattcctgtttatgtcgaccgagatatggctatggatcggcatcctttagtcgaatggattgaatctttatttgctattcattcgtacaattatcgttatcgcgatgtgctccgttttttgagaacggaattatttatgccaatgaatcaactcgctacttctgaagaaagcttgactgattggttaaaccaacggaacgcttggcgcagaaaagttgatattaccgaaaatgtagtcctggcatacggctatgaaggttattattggtcacaagaaaaagattgggaatttattcggtatgattttgaagcggaagagcaagaagatgtcgctacgatggaagaagagtcaaatgcgattcgtcaatcgcttcaacggctgttacctagttactttcaagcaatgataagtgccaaaactggtttggaagcagcgaccgtcttctatcactttttactgcaaagtggtgtggcaacacaattaaaaatgtggcgcttacaagctatcgaagcaggtcaactagaaacagctcgtaaccatgaacagacttgggatgcattgatgtcattactagatgaatacgtcactgtttacggagaaagttcgtttgattttacaacgtttcaagaaatatttgttagtggtttggaaggtttgcactatagtaaagtgccgacagcgattgaccaagtacaagttcgcgcaatggatttaactcgacctggcgctgccaaggttacttttgctattgggatgacggaagaaatttttccacaaaagattgaaaataaaacactattgtctgatgaagaacggcagacaatcaatgatactttaacggaaaaccaatatttacgtgggacaaccggacgcaaaattgcgcaagaaccttatgttgcgtatcttgtcttttcttcagcgcgagaacggttatatttaacctatccaagtgttaaagataccgctcaagaagtcaaaccgtctccttattttaaaaatatccaaaaagatttaaacttgcccgtttttgaaaaaaatgaaacaaccattttcgatgatgaaacgaccagtttagcccatattagtacgtatcggacgttaatcggtgaattaacgcgtttgaaaagacaacggaaagaaacacaagaaggactgttgcctttctggttaaatatggaaaaagcgctaatgaaccaatcaattgcgccgctagccaagcaagttttcgaaagtttaacgcatcaaaatattcctgaaaagattgatgaggtcttagcagaacctttatatggtaaagatatttatacgtccgtttctcggatggagagtttttatcgctgtcagtatcaatacttttctcgctatggcttacgtttgaaagaaagagatgtctttgggctttcgccagcagctacaggggaattttttcatgaagcattggatcagttctttaaattattgattatgaatcaacggaacttatctgaattaaccgatcaggaagtcaatttattggcggaggaagtactaaatagtattttaggggatgcgcgtttttctgtattaacgacctctagtcgcatgaactatattcgctatcaattgagtcaaacaattaaaaaagtcagttgggcgctgaaacgtcaaagccaacgaagtggcatgacgactgttcaaacggaagtgttatttggccaaattgccgctaaaaaaggaatttctggtttggaattaccattaaaaaatcaagggaagattcatgttcggggaaaaatcgaccggattgatcaattggttacccccgaatcaacctatttaggtgtgattgattataaatcgagtcaccgtaaatttaatatgacagaagcgtattacggcttagccatgcaaatgctgacgtacttggatgtggctttaatggatgctgtgcaattagttggtcaagaagctaaacctgctggctcactttatctgcatgtacacaatcctacattatcttatgaaggcaaagacgacattgaacaacaaatgcttaaaaaatatcagtttgatggtcttttgatgaaagacccagatttattggatcatttagatacgagtctgcaagctaaacaaagttcgttgctgtttccgattgaagaatccgccaaagaacaaattaaacctggtcgtcgccaagaagataaatttgtgacagaaccagaattaggcgcgttgctttcccataaccgaaataaatttattgaagcggggaatcaaattattggcggcgaagttcaacttaatcccgcttatcaaggcaaggaacggattgcttgtcgctattgtccgtttcgaagtgtctgtgattttgatgtgatgctaaaagaaaataattatcatcgtattgagaatttatccaaagaggaaattatggcgcgcttgttaaacaaagatgaggaaggagcaaccgaagatgagtaa

SEQ ID NO: 2175 - DNA, 570 bp, Enterococcus faecalis
gataataaggtttttggaggaatgagtttgaaatcaaaagaattaattaaaacagtcgtcttttttgcctgtttagctttgggtctgtttttactgagacaatttgtatttacgcctgtcgtagtgagaggtcattcaatggatccaacgttagcagatggtgaacgggtaattacgttaaaaaacacagaaattaatcgtttcgatattattactttcccagcgccagatgaaccagataaaaattatattaaacgtgtgattggtttacctggagatacaattgcgtacaaggatgatacgttgtacatcaatggaaaagaagttgacgaaccctatttagatgaatttaaaaaagccttaacagatggtcaacctttgacaggcgatttttcattaaaagaaaaagtaccagcagatagctactttgttttaggtgataatcgacggaattcaaaagacggtcgtgtcattggttttattcataaaaaagatattttgggtgaagtgaaatttgtgatgtggccattctcacggtttggtccaataccagaagtgtcaaaacaataa

SEQ ID NO: 2176 - DNA, 324 bp, Enterococcus faecalis
agacaggcaaatattgcgattgcctttgctgagtttttactagctgaatcaggaacgattgtggtggagtccaatgcgggacaaggcagagccttacattttttaccgaagcattacatttcaattataccgtttagcaaactcgttccacgttcgactcagccagcagctttttatacagaaaaaatagaaaaaggcgaaaaaatcggctcagcgattcactttatttcagggccttctaattcaggagatattgaaatgcaactggttgtcgggttgcatggtcctttagaagtttgttacgtggttgtgatggatcgctaa

SEQ ID NO: 2177 - DNA, 576 bp, Enterococcus faecalis
aaggaagcgttagtgataacagttgaaaaagtggagcaaacgtttaatgattatgcgccatatcgattttatttgaaaattgttaaaattttatcccaaggattatttaacggtattggttcaatgattggtgctgtgaataaaaaaattaaagaagttgctggtaatattaaagaaaaattcaaaggtgctttaggcattcattcaccttcaagatggatgcgggatatgattggtaaaaatattgtattaggtgttgtagctggtattgaccaagaaaaaggaacgcttgacaaatcagtgaaaaaaatgaccgatttaccaacagagttaccaaatttttctactactggcagatatatcaaccaacaaggagctcaaacagaaagcttagctaaaaataaaggtaatgctacgactaatattggcggtgatactttcaatatcaatatacaagctatgggaaaattaaatgaaaaacaattaatggatatggctaaagacctcgttaagtatattcaaattgttaaaaatagagatagtgatgcaactgggggtgcttttggtggaatttaa

SEQ ID NO: 2178 - DNA, 813 bp, Enterococcus faecalis
tggatatggctaaagacctcgttaagtatattcaaattgttaaaaatagagatagtgatgcaactgggggtgcttttggtggaatttaaaagaggacagttttttcttaatggaaaacatagttctgaattcaatgtatttatgagagaaagacctgaacgactttctgcaggacgtgtggtagagcttagggagcgaatgggtaatgattcaatagccgttgattttgcatattataaaaatgtagaacgtaccattacatgctatgcgaaagcaaatactttacaagaagtttcttttttagaagatgaaatttccttttggctcgatatgggaaactattctgattttattgtctattttgatgagcattatatttatcaggcgattgtaacgagtccaccaaaatttacaggaacaagaaaaagcggggttttaattccttttgaatttactgtaagtatccgaccttttaagaaaaatcgtattggccaatattggataagtaatcctaatcagttaatcaatacagaaaaatatccttcagaacccattattcagattttggggtctggggatatttctttttttatcaataatcaatcatattcattaaaagcaattaacggtgacatcattatagattcagaaaaacaagaagcttatagaaaatcaggtggagcatttgaaatcttggatcataaaacactttttaaagattatccgattttaaaatgtggagagaataattttcgctggactggtaaagtaacagagtttaaggttcagccgaattggaggcgaaaggtttga

SEQ ID NO: 2179 - DNA, 2820 bp, Enterococcus faecalis
ggttcagccgaattggaggcgaaaggtttgattccagttatttttaaacctggagaaaaagatttttcaacaaatggattaggacgtcttgttgatgcgacacgttgcgaaatcactgaagaagcaaacggaaaatatgaactagaaatggactatccagcgattagcagatttagtgattatttcgaaaatggctatcaaattaaagcaaagccaaatgacttagaagaataccacatttttgagatcaaacaaacgtttaaagatacttttactaatagcattgttatttatgcccaatctcgtacttataagctaggaaacagacaagtgaggctagtaacagttgataatcgtaatggtgcagaagcaatgaaattaatcgaacagaacatggacgaaccttgtgatatcaaactatattctgatataaatacagcttctagcactacatttgaagctagaaatgtattgaattgtattgcaggggaacaaggttctctacttcaatactggggcggagaaataaaacgagagccttttaaattatctttgctaaggcgtagaggacgagataacgttggaactgttcgttatggtaaagatttaaaaggattaaccattaaatttgattggcaatcaattgttactaaagttttgccatttgcagagcttcaaagtggagcagacggaacttctcaacggatttatggaaatgcagttaaaagcgaatatatcagtaagtatcctgatgtttacgctcaatacattcagtttactgaagatcaaggagtaaaagatatagctagcttaaataaagtggcaagtaaatacttcactacattatatccaggaagtgataagcctaaagtttctattgaattagaaattgagaaacttacagattcagaagaagcaaaagaatttgctaagatgcgtaactataatttattcgatacattcactgtgtaccacaagctttatgatattgacattcaaacgaaagttacaggaattgtctatgatgctttagcagaaaaaacaataaaaatcactgcgggagatatccaagttgctttttataaacagcaaagtcaagactttcaagaagctataaaaacattgacaaaaaaagagtatatgagtgattttgtagattatattactgatttgattaacggtgttgaaggcggaagtatacgtcagtatcctaaaaatcgacctaacacccattattacttagatacggaatccacggatactgcaaaagatgtgattgcaattaatcacaaaggaattggattctcaagaactggttggaaaggtccatttaaaaatgcatggggaattaatggagtattgaatgcggactttataggagctggcaaaataaaatctaatatttttgaaacatcatttaatagctgtggagatattttacgtatggtaaacggtattttacaagcttggaataataagaaaaaaatcatggaattaactaaaaaagggatggagttttggaatggtaatagtcacgttggcacgatgggaacaaagggaaatccttttccagggttagcagataaaaatggaaatccaatagtttctgatgggaattcattactattagtcgcagataatccccaaaaaattattggtttgtctaaccaatcaggcacaggacatttaattactggtcctacacagttttttgttggaaataattttaacttttttggtccaaatggaagtaaagcaattctgacagttgatcgattgattgtgggcggcaaagaagttatccctggtcaaaatggtggtggtggttctggagctggtacaggtggttatccatcagaagttacaagcgatgcagataaatttgcttgggacttatggagttacctattagctaacggatacagcaaagcagctgctgcaggtatcctcggaaatgtacaaggagaagttggtccaagtatgaacccagataccgaacaaataggcggtccagcttacggatgggttcaatgggacggttcagcatatccattggtaggcgcaccaacttggaatggccgagaatatgtacaacgcttaatcgcagctgcaggtatcaaacaagtctataggacgtcattagcccaagctcaattaattaattggtgtatgttcaatgggcaatggttaggacaagtaagtccattaacagttgatgaatttaaagttgtcagctcgcctaaaacagctgcttatgcgtttgaattaaactttgaacgtccagctgcagcacatccagaaagacaaacctatgcacaagtatggtatgacaaattcaaagatttgaaagcttctactgcaacaggaaaagctggcatagaacatttggagaccttaatgggcaaatggcttggtaatgggcaatgttatgccgttccagccgaatattctggttttatgggcggctgtggtttaggtgcaggaacaatttatggcttttcacatgtaattggtgatacatcatctgctgcagatattggtgaagcatatgattggaatgcggtaggttggcgagtaatccaaaatccaacgtatcaagatttagtggtaggagcaatcgtcaatattagacgaggtggccaatggggaacaggttggacagtagacccaacatatggtcacacgggcgtgatttacggcttaaataacggacgtatccaaaccatagaacagaacgccgagcaagggcaaattgtcgcaaaatatgaccgattatattttgctaattctattcaatcgattgttattccaccaaaataa

SEQ ID NO: 2180 - DNA, 747 bp, Enterococcus faecalis
caggttgcgaagtttttttttgaatcggttattgataataaatatccgattcaacgttcagcaaaaattgtgaatgccaaaaaagggattattcagtatacctttgatgaatattctatgcagtcgttacacagacaagaagcatatttcagtattcataaaggtgataacctgattggtgcaacgcaaaacttttcttattttgtagtgaatgctgcttcgaaaacagaaggtgaaatgggttcttattggcagtccattgaagatttaatcgcggacatgaacgcttttatcaacgaaaataagggtgattttactgattggatgaatgctagaaaagaagagttcgaagcgtggcgagatgcgcaaaaaacagatttcacttcatggttcgaatcaatcaaagatattttaaaaacgattgatcctggcggtacgatgttagccgagctaatggatgcacgtgtagacattcaaggagtgcgccataattcaatttctgaacgtttattggcagatatggaatatttgtatcagaaattagagaaacgcttatatacgttagaatatggcgaaataagtgacttgattattttacaagatgatgctttttcactgaatcatgaaacagaaattgttggaacagttgattatcctgcgatcgatggggcattggttatcgcaacagttgatgatacaaaacagaacgcttatgtgtttgaaaaagtgggtgaaataagtggttaa

SEQ ID NO: 2181 - DNA, 597 bp, Enterococcus faecalis
gtggttaaagcaaaacgaatgatggaaaccgatgaaaatggcgtggaacgtcagttttatcctattacacatgcatccgctgttcgaggattagaaaaaattattgcgggtcaatcaaaagtattatctgttaatggatatactggggcagtaattatcactaaagcagatctaggcttagaaaatgcactgacagaacttccttatgcgacagaagaaacagacggtattatcactgctgaaatgtttcaacggttgtcaaatggcgagggaggcgtgtacattcttccaatcgctaccgcagatgaactgggcggaataaaggttggccaactgttagaaattacagaagacggaacgttgtctgcggtaaagcaaacagatcaaaatttcaccactgaactaaaatcgaaactggaagagttgaaaggttatactgctggagcgaatatttctatttcagaagatggtgttatttcagcaactggtggtggcgatggcggcggagtgaatcaacaatatgttgaccaaaaagttcaagaagccattgacagaatacctgatattacgtttgagagagtaggggaagttgaatga

SEQ ID NO: 2182 - DNA, 288 bp, Enterococcus faecalis
atgacagatattgttaaagtaaaacaaggaggaacacaggtatttcctcaaacacattggaatgctgtggaagggaaaccagaagtattgaaaggtgaaaagggagacccaggtccacaaggtccaaaaggagataaaggagacgttggtccgcaaggtccagcagggcaaaatgcaacaacgacagacgttgcaacctcaataaaaaatggcttgatgtctaaagaagataaaacaaagctagatggattgccagcaattacgtttgaaaaggtaggggaagtgtaa

SEQ ID NO: 2183 - DNA, 510 bp, Enterococcus faecalis
aaaggtaggggaagtgtaatgacaacagatattgttcaattaaaagaaaaaggaaaaccagtctatcttaaaacacatactgccgcaattgatgggcttgaatcttatataaaaaaaatagatgcggacaaagcatatcaaaaaattaccaaaaaagaaccgttgtggacaggtgcatggtatggcggagctgcaggaaatgggcaagtaccttctaagtctctttcacagtgtgagaatggttggattttacaatggcaagaatataccaaagaaggagctttgaacggtgcgtgttatcactttttcttagtgcctaaacagcatgcgcagaatccaggttctgggggagttattttccttttacatggatactatactaatttagtacggaaatatttatatattaaggatactaaaattactggaaacgacttaaatgcctcttctagtgatacggctggttcaggcagtaaaatgtttgcgttaagtgcgatttatgaatactag

SEQ ID NO: 2184 - DNA, 354 bp, Enterococcus faecalis
gtgcgatttatgaatactaggaggaaagagaacatgaaaatttggattgatgatattcaaggttatttagacggatattccacaatggaacaaccgaataaaattgaacttgaagtagaaaaagagccaacagatttttttaattatcgctgggacggaacaagcttaatatacgatcctgataatgtgccagaaccagagccaacgccacctacggaattggaacttttacaaaagcaaaatgcggaattaatgaagcaagtttctcagcagaatcaagttattcaacaaacacaaagaatgactggcgaattgatgaaacaagtcgctgaacttacgaaaggagcggaataa

SEQ ID NO: 2185 - DNA, 192 bp, Enterococcus faecalis
aacaagtcgctgaacttacgaaaggagcggaataagatgaaaacgaatgcttttccaggtttcgataatattaaacagttgtatgattggaattgttatacaaaacaagatttagtagattacgtgaatatgaattgcttaacaaaagaagaatatacaaaaatttgtggagaaccgtttagcgaaagctaa

SEQ ID NO: 2186 - DNA, 240 bp, Enterococcus faecalis
gtagaaagtaggtgcaggatgaacttaacagtagaacaatggttagcagtgattacattcttagggggaattattttcgcattaatgaaattttatcatgtcttttctcaattagaagatagcatgaaagaactaaaggaagctgttgaacgtttaaataaccatgaaatacgcattagccgattggaagagcaaaataaaaccctctttagagggattggaggaaataaaaatgattaa

SEQ ID NO: 2187 - DNA, 312 bp, Enterococcus faecalis
ataaccatgaaatacgcattagccgattggaagagcaaaataaaaccctctttagagggattggaggaaataaaaatgattaattggaaatcaagaataaagaacaaacaattttggctttcgattattccagcagttctattattaattcaagtagtagcagttccttttggatataaatttcaaattgaaatgattaataagcaactgttagatgttgttaatgcattatttgttgtgctaaactatccaggtattgtgacagatcccccaacacctggattatccaattggaaaggaaataattattga

SEQ ID NO: 2188 - DNA, 1137 bp, Enterococcus faecalis
caacatagtggtgattacgtcagttttcgcgtatttggcgttgtgtttgcaacaatcgccgcagtgattgcttcgcaagcgttaatatcaggttcgtatactttagtttctgaagcgattaaattgaagttattaccaagacttaaaattatttatcctgggagcaatatcggtcaaatgtatattccagcggtaaatttaattttgtggttagcttgttcagcaatcgtgctggcttttagaacatcgacacacatggaagctgcgtatggtctatcgattacgattacgatgttaatgacaaccattttattgttgttttatcttttggataaaattccagcttggtctgcgtatctaatttccttgttctttgctgccattgaagttgtctttttcttttcaagtgctgcgaagtttttccatggtggatatgttgctgtgggaatggcagtcttcttgttatgcatcatgattatttgggaacgcggcaacgagattaaggaagcgacggcggaacaagtgtcgttgaaaaaatatgtaccacaacttaaagctttgaaagaagatacatctgtacctatgtatcaaaccaacgtggtctttttaacctccgatcgagtggatggcgaaattaatcgtaatattatttattcgattttggacaaacagccaaaacgagcgaacgtttattggtttgttaatgttcaggtaacagatgaaccctttactcaagagtattctgttgacatgctaggaactgattttattgtgcaagttcagctatatttaggcttccatatttctcaagaagtgaatgtatatttaagacaaattgttcatgacttgatgaaaacaggccgcttgccaaaacagccacaacgttattcattaacgccaggaagagaagttggcgatttccaatttgtattaattcaagaagaattatctaacgtttctgaactgaaaaaatgggatcgacaaattatgcaggcaaaattagctatcaaaaacttaactacctctcctgaaagttggtttggcttggaatacagtgaagtcaaatatgaatccgttcctttaatcattggcccacaacggaaaacgcacttagtcgaacgaaagaatcgttcataa

SEQ ID NO: 2189 - DNA, 777 bp, Enterococcus faecalis
aaaaaaaagagccgaattttgcgtatgtatattttaagaacaccttatcctcatatttattacaaaaggagtgtttcaatgaaaattactacaaagcaagtcggggcacgcatgcgtgaagctcgaaaaaagaagaagtacactttacgttatttagccaataaaattggtttatctagtggaagtacaattagtaactgggaactaggtttgaatttacccaataaacgatacttaaaaaaaatcgctaaagcctgtgacacaacagtagattggctactttatggtgatttcgatcgatttgtgcgccagctattaaaagaaaattttcaaaataaacaactgctaaaaccacctttttttactcagttgatgggacgtttatctgaagaacagctatcctatcacgattccttaaaaattatgattcaagcgcaaaagttacagcagtccttttatgcttttcctttaacagtagaagccccctctcattcccaagagagtatttctatttatgaaccaacaactgcagaagaacagtctgaccaatcttattatcatccgtttattttgtcagaactccatgaattatttacacattctcaaaatccagaattggattattctctgattatcgcttttcttcctttgttaaaagtagatcaattaactgaacctcaaaaagaagtcttactggccatctttaagcggatgaattcctttaaagaccaaacgcttttaaatgaattctttgtggaattacagtatttactctga

SEQ ID NO: 2190 - DNA, 699 bp, Enterococcus faecalis
caattttcatcttgtgctatgcttaagatgaaaatacttaagaagagaagggatcatatgtcagcaaaacataatcatgaacaacaccaggaaaaacagccaacaatgtcccacgataaaatgaatcacatgaatcatgatatggcgcatgaacaaatggctatgtcacaccaacatgaaggaatgaagggaatggatcattcaatgcatatggggaattttaaacaaaaattctggctgtcattgattttagctattccgattattgttctttcaccaatgatgggttttcaattaccttttcaatttacttttccaggttctgattggttggtcttaattttagcaactgtgctatttttttatggtgggcaaccatttttaagtggcgctagaatggaattacagcaaaagagtccagcaatgatgacgttaattgcgatggggatttcggtatcatatttttacagcttatatgcgttttacatgaatcattttacgaatcaggcccacgtgatggactttttctgggaattagccactctgattgttattatgcttttaggccattggattgaaatgaatgctatttctaatgctggtgatgccttgaaaaaaatggctgaactgttgcctgacacagtcaagcgaatgactgaacatggggaagaagaaattcctttgcaagatgtccaataa

SEQ ID NO: 2191 - DNA, 1464 bp, Enterococcus faecalis
ggtgatcgcttgattgttcgttcgggagataaaattccgacagatggtaaaattttgaaaggaagcacaacagtcgacgaatcgatggttacaggggaatcaaaaacagtagaaaaaaacattggtgactccgtgattggtggagctgtcaatggcaacggaatgattgaaatttcggtaactggcacgggtgaaaatagttacctgtcaaaagttatggagatggttaaacaagcgcaatcggaaaaatcaaaactagaatccatttcagaccgtgtagccaagtggttattctatattgccttattcgtaggtgtgttagcatttatcggttggttaatggcgacgaaagatttgtcgctagcatttgaacgaatggttacagtttttattattgcctgtccccatgcgttaggcttagcaattcctttagtgattgctagaagtacctccattgctgctaaaaatggcttacttttaaaaaatcggaatgcattagaacaagccaataaggttgaatatgtgttgctggataaaactggaactttaacagaaggacaatttacagttactggcttagaattaatgagtaagcagtttactagagaagaagcacttaaatatattggggcattggaaaaaaatgcaaatcatccgttggcaattgggatcatgaactatttaaataaacaagccgttcaaccttatgaagcccataatctgcaagctttatcaggcgtaggactggttgctactgttcaaaaccaagaagtcaaaatagtcaatgaaaaagaagttgcacggttacagttaaccttcgatgaaacaattaaaacaaactatcaagagcaaggaaataccttgagctatttaatcatcgctggtcaattagtcgcactgcttgctttaggagataaagtcaaaccagaagctaaaacatttattgcagagttacaagcgcaaggaattacgccagtcatgttaacaggggataatcaaacagccgccagtgcagttgctaattatttaggaatgaaggaatactacgcagagctcttaccagaagataaagaaaaaattgtgcaacaatatcttactgagggacatcaggtcatgatggtaggagacggtattaatgatgcaccaagtttagcccgtgcttcaatcggcattgcgataggcgctggtacagatgtagcgattgattcggcagatgttgtactgacggatagtgatcctaaagatattttaaggttcttagatttagccaaacaaacacgacgtaaaatgatccaaaatctttggtggggagctgggtacaatattgtcgccattcctttagcggctggggttcttgcaccaattgggattgttttaaatccagctgtaggtgctgtcttgatgtcattaagtacaattattgtagcagcaaatgctatgacactgcatatttcaaaaaaataa

SEQ ID NO: 2192 - DNA, 1449 bp, Enterococcus faecalis
caagggagtgaaaggggacgatatatggatttcaaggaattattgtcttttgaacataaaaatatgttggaattgttggatttactgcaacaagagcagacattttctgttttgatggctgcagaaaaactaaaggtgagcgacaaaaccatccattgttacattcaacgttttgaaaaaaagcaggaaacgtttaagatagaagggctttgtaagatttatacaacgaccaaaggaattgtaaaatatcgtgaattatgcgtttgtggcttggctcgatttagacaaaaattttgttattttattcccgaattttatattttacgttgtctaattgaagagcgaatcaattatgcacaattgacccaggtattggaattacaggaatcaactcttcggaagaaattttctaatattcgacgttggctagttaattttgatattattgtacgtcaaaaacattacgatttaactggtaatgaatggcaaattcgacagttaatcctttgtttttatttgtttttccaagaaagctgtctggaagaaaacagagaaatgactcggaaaatcattaccttttttgagttggatttaaatgtagcacaacagaatcatcttagttggctaatttatatttgggagaaacgatatagaggcgggcatgaaatttcagtgccaaatgctaatttatttcaacaaacaagtgcttttttttatttatttcgtgtggaagtgttgagcacttcttttatgtctcttaaagaacaaaaagcgttatttgtgattcttgaagcacattttggtggttgttttggcaagagagcgcgaaagtattttattcatgagcaaatgaaaatagaaagtttatgcttaaaaacagctatttttattatgaaagaaattaggagaaattttacacaacatcattttaattatcaagaaattcatttatgtcgatttttaagtacgcatatgaatagtttattagacggacaagcatggttgccagctcataaacaggaacaaacactcgctgctcgttatcaacaaacctggcacagattacaaaaacttattaggcttttaaaacgcctatatccagtctttacttcagtaaaagaacgggaattgacgagttgctatttttatcacatcctagatttatttaacccgattttatatgaaaaaaaatatattatttgcctattgacggactttcctccagaaaaggaacaagcgttggggcaatctataaaaagctatttcagtgaaaaaaagaatattacaattattcatggaaaaccaacgtatcaacttcaccaagtacacctcttaattgtcaatcatttgtttcagatgaacgtagcgctttcttctaagacagtggtttatttgccagaggaattatctcctgctttttttgaaaaagtcgaagcgaatctatcgtaa

SEQ ID NO: 2193 - DNA, 951 bp, Enterococcus faecalis
aatgaagaagtaagaggaatggatgaggaggatattaaaatgaaacaactgcaatttggtacaagtgacgaaacagtttcttcggttatcttaggatgtatgcgcttaaatggtgctgaaaatcctcaacaggtaattgaaactgcttatgatcatggcattacattttttgatcacgccgacatttatggtggcggcgactgcgaaaccatttttggtaaggccttaaaagaaagtaccattcgtcgtgaagatatttttatacaaacgaaatgtgggattcgtcagggcttttttgacttttcaaaagcacatattttagaagcggtcgaagggagtttacagcgtttaggtgtagattcagtcgatgcattattgttgcatcgtccagatactttagtggaaccagaagaagtagctgaagcttttcatttattagaaaaacaagggaaagttcgctattttggtgtaagtaaccaaacgccaggacaaattgaacttttaaaaacagctgttaaacaaccgttattagccaatcaattacaatttggcatcaagcatactggtatggtagatcaaggcttacaaacaaatatggaaatatcaggaagcattgattatgatcatggtattttagattattcacggttgaaacaaatgactattcaagcatggtcaccgtaccaatatggttattttgaaggtgtctttattggaaatgaaaaattccctgagttaaatcaaaaattaagcgaattggctgaaaaatatcaaacaacgccaactggtttagccagcagctggattctgcgccaccctgctaatatgcaagtcatcgcaggaagtatgaatcttggtagaattgaagaaattgctaaagcagcagacattgtgattagtcgcgaagattggtacgatatttatcgtgcagcgggaaatgttttgccgtaa

SEQ ID NO: 2194 - DNA, 2457 bp, Enterococcus faecalis
tttgctaaagatgaggggaaaaaaatgaccaaaaaaaaattattactcgttgatggaaacagtgtagcctttcgtgcattttttgcgctacataactcattagaacgattcaaaaataagaacggcttgcatacaaatgctatttatgcatttaacaatatgtttgaaaatgtaatgcaaaaagaaatgcctactcatgttttagtcgcttttgatgcagggaaaaccacattcagaacagaattttattcagaatataaagccggacgttcaaaaacaccgggggaatttaaagaacaaatgccgtatattcgtgaacttttagaaggtttaggcgtaaaatattatgaactacctaactatgaagcagatgatattattggtacattagccaacaaagttgataaagatgaatttgatgttgtcgtgttatcaggggaccgagatttgacgcaattagcgacggacactgtcaaagtagatatcactgttaaaggagttagcgatattgaatcatatacgcctgagcatattgctgaaaaatatgatgggttaacgcctaagcaaattattgatatgaaagggttggctggcgacacgtcggataacattccaggtgtaacgaaaatcggtgagaaaaccgcgattaagctgttaaaacaatatggctcagttgaaggggtttatgagaatatcgatgaaatgaaaaaaagcaaaatgaaagaaaacttgattaatgataaagagcaagcctttctttctaaacgtttagcgacaattgaagtcaatgcaccagtcgaagtcaatgtggaagacttggcatatgaagggaaaaacttagaaaaattggttcctttttataaagaaatggactttaaacaatttttagctaagttggacattacagaagaacctgttgaaatggaagatattttatttgaagtagtcgaagatcagttaaccaatgaaatgtttacagacgatatggctctttatgttgagatgatggaagataactatcatacgtcaccgattgtcggccttgcttggggcaacaacaagaagatttataccacgaataatttagctgtttttgaaagtcagccatttattgactggttgatggatgagacacgtaaaaaaaatgtctacgatgcaaaacggacgtacgttgcactaaatcgctatgtaggaaaaatgacagggattgcctttgatgttttattggctgcttatttacttgataccaatgacaataacgctgatattgaaggtgtagcacaacattacggatatgatgcgattcaatctgatgaagccatttatggaaaaggggccaaaaaaggcttgccagaggacgaagaagttttctttgttcatttagcacgtaagattaaagcaattcaatttttcacaagcaaattagatagcgaattaacagaaaaaattcaagctgatttattatataaaatagaattaccactttctcgtattttaggcgatatggaaataactggtatccgtgttgatgccacacgcttaaaagaaatgcaagtagaattttcagaacgcttgaaagaaatcgaagaaaaaatctatgcagaagctggcgaagaatttaatttgaattcacctaaacaattaggcgttattttatttgaaaaaatgggcttacctgtgatcaaaaagacgaaaactggctattcaacagcggtagatgttttagaacaactaaaagaacaagcaccaattgtggccgatattttaacttatcgtcaaattgccaaaattcaatcgacctatgttgatggacttttaaaagtaattcagccagataataaaattcatactcggtatgtacaaacactgacacaaacaggacgattaagctcagtagatcccaatttacaaaacattcctatccgtttagaagaaggccgaaaaattagagaagcgttcgtaccaagagaggataattggttgattttctcttctgattactctcaaattgagttacgtgtgctcgcacatatttctaatgatgagcatttaaaagaagcatttgtggaaggacaagatatccatgccagcactgcaatgcgagttttcggtgttgaaaaagcagaagatgtcacacctaacatgcgtcgtcaagctaaagcggtgaattttggaattgtctatggtatcagtgattatggcttgtctcaaaacttaggcattactagaaagcaagcgctacaatatattgacacctattttgaaaaatatccaggcgtgaaacagtacatggaagagattgtccgcgatgccaaagacaaaggctatgtggaaacattgtatcatcgccgtcgttatttaagtgatattaattcaagaaactttaatctaccttcgtgcgctgaacgtacagcgattaatacaccgattcagggaagtgccgcagaatatttataa

SEQ ID NO: 2195 - DNA, 3177 bp, Enterococcus faecalis
ataaggaaatggagggaattccttttgatcgatgtaaataaattcgaaagtatgcaaatagggcttgcttcaccagaaaagatcagaagttggtcttatggggaagttaaaaaacccgaaacaattaactaccgtacattaaaacccgaacgtgaagggttattctgtgaacgcatttttggtccaaccaaagactgggaatgtgcttgtggtaaatataaacgtatccgttataaaggtattgtctgtgaccgttgtggcgttgaagtcactcgttcaaaagtacgtcgtgaacgtatgggacatattgaattagccgcaccagtttcacatatctggtactttaaaggaattccatctcggatgggtcttgttttagacatgagccctcgtgcattggaagaagtcatttattttgcttcatacgttgtcatcgaaccaggtgacacaacattagagaaaaaacaattgttaacggaacgcgaatatcgtgaaaaacgtgaacaatatggccaagccttcaaagctgctatgggtgccgaagccgtgaaacaattattagataacgtcgatttagatggcgaagttgcgcaattaaaagaagaattaaaaacagcttctggtcaaaaacggacacgtgccatccgtcgtttagacatcttagaagccttccgtgcttctggtaaccaaccaagctggatggtaatggatgttatcccagttattccaccagatttacgtccgatggttcaattggaaggtggtcgttttgcaacaagtgacttaaacgacttataccgccgtgttatcaaccgtaacaaccgtctaaaacgtttattagacttaaatgcgccaagcatcattgttcaaaacgaaaaacggatgttacaagaagcggtcgatgctttaatcgataatggtcgtcgtggccgtccagttactggaccaggtaaccgtccattgaaatctctttctcacatgttgaaagggaaacaaggtcgtttccgtcaaaacttactaggtaaacgtgttgactattctggtcgttccgtaatcgtcgttggtccgttcttaaaaatgtaccaatgtggtttaccaaaagaaatggcgattgaattattcaaaccatttgtaatgcgtgaattagtacaacgtgaaattgcgacaaacattaaaaatgcgaaacgtaaaatcgaacgtggcgaagatgaagtttgggatatcttagaagaagttatccaagaacacccagttttacttaaccgggcacctacgttgcatagattaggaatccaagctttcgaacctgttcttgttgaaggtcgtgcgattcgtcttcacccattagtatgtgaagcctacaatgccgatttcgatggagaccaaatggcggttcacgtgcctctaaatgaagaagcacaagcagaagctcgtatgttaatgcttgctgcccaaaatatcttgaacccgaaagatggtaaaccagttgttacaccatctcaagatatggtcttaggtaactactacctaacaatggaagaagaaggccgtgaaggggaaggcatgatcttccgcgacatgaacgaagctgttttagcatggcaaaatggctacgtgcatttacactcacggattggggttcaaacaacacttttaggtgacaaaccatttactgattggcaaaaagaacgaatcttaatcaccacagttggtaagatcatctttaacgaaatcatgcctgttgagttcccttacttgaacgaaccaacagactataacttaactgttcaaacaccagataaatacttcgtagaagctggtacagacattcctgcacacattaaagagcaagaattagttttaccattcaagaagaaaaatcttggaaatatcattgctgaagtcttcaagagattccacattacggaaacctctaaaatgcttgaccgcatgaaagacttaggttacaaacactcaacttatgctgggatgacagtagggattgccgatatcatggttcttcatgaaaaacaagcaatcattgatgctgcccacaaacaagttgaaacaattactaaacaattccgtcgtggtttaattactgatgacgaacgttatgaacgtgtaatcggcgtttggaacggtgccaaagacgaaatccaacaaaaactgatcgaaagtatggaagctcgtaacccaatcttcatgatgtctgactctggagcccgtggtaacatctccaactttacacagttagctggtatgcgtggtttgatggccgctccgaatggacgaatcatggaattaccaatcatctcaaacttccgtgaaggactttctgtcttagaaatgtttatctcaactcacggggctcgtaaagggatgaccgatacggccttgaagacagccgattcaggttacttaacacgtcgtttagttgacgttgcccaagacgtaatcattcgtgaagacgactgtggcactgaccgtggtcttgaaatcgaagcaattcgtgaaggtaacgaaattatcgaaccattagacgaacgtctattaggtcgttatacacgtaaatcagttgttcatccagaaactggtgcaatcatcattggtgcggatcaattaatcactgaagatcttgccagagaaatcgtggacgctggtattgaaaaagtaaccatccgttctgtctttacatgtaacacaaaacatggtgtatgtaagcactgttacggacgtaaccttgcaactggttctgacgttgaagtcggagaagcagttggtacaatcgccgctcaatcaatcggggaacctggtacacagttaaccatgcgtacgttccataccggcggggttgccggtgacgatatcactcaaggtttacctcgtatccaagaaatctttgaagcacgtaatccgaaagggcaagcagtgattacagaagtaaccggtgaagttatcgatatttctgaagatcctgccacacgtcaaaaagaagtaaccatcaaaggaaaaacagatacacgtacctatactgtcccttacactgcacgtatgaaagttgctgaaggcgacatcatccaccgtggtgcaccgttgacagaaggttcaatcgatccaaaacaattattacaagttcgtgatgttttatctgttgatcttcaccacgggattggg

SEQ ID NO: 2196 - DNA, 195 bp, Enterococcus faecalis
gtcagcaacttgttagcaaatggcaagcatcacttgaaagaaggtctgacgacacttggaacaagtaatggcttgcgcagttgcaacaaagtcgcagttgaatcaactcatcagagtggtagcgacaaattagtctctgtcttcggctgtttcaatttcttgaacaacgtcttgtgcttcttctttcacgactga

SEQ ID NO: 2197 - DNA, 2205 bp, Enterococcus faecalis
ttatcacagttcatggaccagacaaacccattaggtgagttaacccataaacgtcgtctatcagccttagggcctggtggtttgactcctgaccgtgccggttatgaagttcgtgacgttcactactctcactatggtcgtatgtgtccaattgaaacgcctgagggaccaaatatcgggttgatcaatagtttatctagttacgcaaaagtgaataaatttggtttcatcgaaacgccttatcgccgtgttgatcgtgcgacaggccgtgttactgatcaagtagattacttaacagcagacatcgaagaccattatatcgtagcgcaagcgaactcacttttaaatgaagatggcacatttgccaatgatgttgttatggcgcgtctacaaagtgaaaacttagaagttgccgtagacaaagttgactacatggacgtttcaccaaaacaagtagtcgcagtcgcaacagcatgtattcctttcttagaaaacgatgactccaaccgtgccttgatgggtgccaacatgcagcgtcaagcggtgccgttaattcaaccacgctctccgtgggtaggtacagggatggaatataaatcagcccatgactcaggtgctgctttactatgtaaacatgacggtgtcgtagaattcgtcgatgcaaaagaaattcgcgttcgtcgcgacaatggcgcattagacaaatatatggttactaaattccgtcgttcaaattcaggaacaagctacaaccaacgcccaattgttcacttaggtgaaaaagttgaaaaaggcgatactttagcggatggaccttctatggaagaaggcgaaatggctttagggcaaaacgtcttagttgccttcatgacatgggaaggttacaactacgaggatgccattatcatgagccgtcgtttagttaaagacgatgtttacacttctgtgcatattgaagaatatgaatcagaagcacgtgatacaaaattaggacctgaagaaattacccgtgaaattccaaacgttggggaagacgcattgaaagacttagacgaaatggggattatccgcattggtgctgaagttcaagatggcgacttactagttggtaaagtcacacctaaaggggtcacagaattatctgcagaagaacgtttattacacgcaatcttcggggaaaaagcccgcgaagttcgtgacacgtctctccgtgtacctcacggtggcggcggtatcgttcacgatgtgaaaatctttactcgtgaagctggcgatgaattatcaccaggtgtcaacatgttagttcgtgtctatatcgttcaaaaacgtaaaattcacgaaggagataaaatggcgggacgtcacggaaataaaggggttgtttcccgtattatgccggaagaagatatgccattcttacctgacggaacacctgttgatatcatgttgaacccattaggggtaccttctcgtatgaatatcggacaagtacttgaattacacttaggtatggctgctcgccaattaggcattcacgtcgcaacacctgttttcgatggggcaaccgatgaagacgtttgggaaactgttcgtgaagctggtatggctagcgatgctaaaacagttctttacgatggacgtacaggtgaaccatttgataaccgtatttccgttggtgtcatgtatatgattaaattagcccacatggttgatgacaaattgcatgctcgttcaatcggaccttactctcttgttacgcaacaaccgttgggtggtaaagctcaattcggtggacaacgtttcggggaaatggaagtttgggcactggaagcttacggtgctgcttacacattacaagaaatcttaacttacaaatctgatgacgttgtcggacgtgtgaaaacatacgaagccatcgttaaaggtgaaccaattccaaaaccaggtgtgcctgaatcattccgagtattagtgaaagaattacaatcacttggtttagacatgcgtgtcttggacattgaggaagctgagattgagttacgcgatatggacgatgacgatgatgatttaatcaccgttgacgcactaaccaaatttgcggaacaacaatcagcgaaacagctggaaaaagaagcagaatcagtcgtgaaagaagaagcacaagacgttgttcaagaaattgaaacagccgaagacagagactaa

SEQ ID NO: 2198 - DNA, 705 bp, Enterococcus faecalis
aagaaaccgaagaaagtgttcattaaacgaaacacttctccacttcttgcagcattgtctaaagaagggttagccccgaagatgatttggacaaagcggacagcgaatggcgacgtactaacagcccaagaatggctggaaggacgtttattacatgcggacgaaattggcaaacgcaatgacgtgattgacgtgttataccaattgcatcattccaatttgctgaaagacatgttgaaaaaaattggtggcgaagtttgtaccccgctaacaatgttgaaagagtataagcgtcaactacctaaagaattaaaacgaaacagttatttaaaagaagtaatcacttatttatataatcatttaccagaatatccagaaactagttatgtagctgttcacggcgatgtgaatcatcggaattggttagtctcgaataattatctctatttagtagattgggattctgtgatggtcgcggacccagcggtagatttaggaatgattttgagtcattatgtccctcgttccggttggaatcaatggttactatcttatggtttaatcccgaatgaaagtacggttcaacgaatttattggtatggtttatttagctttttacaagagattgttcgtcatcaccaagagggcgaaagaagagcaatgactgcagaaattttacaattaaaacgaatgtttagtatttaa

SEQ ID NO: 2199 - DNA, 663 bp, Enterococcus faecalis
aagaaaggaattttaaatatgcgtgtaagaaatagacccggagcagcggaatatatggcaaaatatccacaatatgtggtagaaggtcctgaaaaatggcaagggaaatggcaagaacgttttggcaataatcatcccatccacattgaaattggttcaggtaaaggtcgttttatttatgaaatggctaaagcacatcctgaaattaattatattggtatcgatatgcaattaagtattttatcgattgcattatataaactagtggccgatccgttacctaatctacagttattgcgagtagacggcgaagcattaacagaatattttgctgaaaatgaagtagatttaatctatttaaatttttcagatccttggccaaagaaaaaacatgaaaaacgtcgtttaacgtataaaaactttttagcgacagatgaaattattttaaaaccaaatggagaaattcattttaaaacggataatcaagggctcttcgaatactcattaagtagcttttctaaatatggcatgattattgaacgtgtgtggctagatttgcataatagcgagtttgaaggcaacattatgacagaatacgaagaaaaattttctagtcgtggtcaacgaatctatcgagtagaagcacgttttgttgcaaaataa

SEQ ID NO: 2200 - DNA, 192 bp, Enterococcus faecalis
aagcacgttttgttgcaaaataaaaacaagcattcctttattttaagtgaaggaatgcttgttttttattatttaagaaagcctaagttgtcgttcttagagcataggcgtccaataaaattctggccagaatggataatggtaaccgtgaacgcacttcataatcggggaaaaaggagccttctgatttga

SEQ ID NO: 2201 - DNA, 768 bp, Enterococcus faecalis
aagaaagaagggctggtcattatggaacaaaaattgagtgagtcagagcaatatctctggcattttatcgaaacacatattttagaaatccctgattattccattgtaaaattaagcgaacgagccaatgtatcaactgcgacgattgtaagaaccatgaaaaagaaaggctatgaaggtttcacatccttcaagcatcacttgaaagataaagaaaaccaaaatataaatttttcagcattagaaaaagtagaccgaggaattcggacagccattttaaagaatgaagaagaagtaactcgcacgattaacatgattgaaattggtaatatcgaagatgcgatccaaaaaatcaaggcttctcgacggattattatctttgctagaggtttttcagaattaattgctcaggaaatgatggttaagtttcaattggctggcaaatactgtgaactgcatacggacccagaaattattaaaaatattagtaaaaagttatcaaaaaaggatgtggctctttttgtttctttaaacggagaaacccaagaattagttgtcgctggtaaaaactgttacgactcagaaattgggactatccttttaactgcaagcaaacactctagtttaatgaaatacattgaaattccgttcgtaggcttcaaatcagaaggctcctttttccccgattatgaagtgcgttcacggttaccattatccattctggccagaattttattggacgcctatgctctaagaacgacaacttag

SEQ ID NO: 2202 - DNA, 981 bp, Enterococcus faecalis
aaacctttacatggcattttgagacataataaagaggagaaaggaggaactacagtgactatttatacatgtacattaaatttagccattgatttatttatcgaaacagaagagctagttccttttgtcgtgaatcgtacgaaggaagatgatattcaagcaaacgggaaaggagtcaatgtttccctaattttaaagatgttagggattgataataccgctttgggagtcaaagctggtttcactgggaactatgtcgaggactatttaaaagaaaaagaaataaccactgattttatcgaagtcgctggtacaacgagaattaatgtgtttacaaaagttacccaagatcaaaaggaatacaaattagtcaataagggaccaaaattatctgaagaacatgtacaacgttttttgaaaaaaatttcagagttacgtaaaggggattatttgtgcgtatcaggaagtttaccacaaggggtttcgccaagtattttgattgaaattagccgaatttgttttgaaaaacaggtgttcttaatcttagacagtagttatgaagaaattttagattgtttgccttatcaaccatttttattgaaaccaaatgaagaagaacttcaagagtggtttcatacagaagtgcagactaaggacgattacattttttacggacaagaattactgaagcggggagccaaaaatattttactttctttaggtagtgaaggggctttatttatgaataatgaaaaggttctttcaggtaattcaccaactggaatggttgtgaatacagcttgttcaggggatgcaatgttaggtacctttttagctggttggcatcaaggactttcattggaaaaaaatttgaaaagaagtattgcagcaggtagttcaacagcatttcgcaaaggattgacagatttttcagatgttcaggagttagagcaacaaataaagattcaagaggaggaataa

SEQ ID NO: 2203 - DNA, 747 bp, Enterococcus faecalis
agattcaagaggaggaataaacagatggctacgtatcaattaatagctgctacaggttgtccgacgggaatagcgcacacgtatatggcacaggaggcattggaacaagctgcgaaacgtaaaggtattacgattaaggttgaaacacatggtcagattggtatagaaaacgagttaacacctgcagaaatccaaggagcggaggcagtcattattgccgccgacaaagacgttcaagcagaacgttttgctgggaaacgaatcattgatgtccctgtcagtgtgggaattaaagaagcagatcgcttaattgaagaagcgctcgcaggcaaaggatcgattgcggccgaaaaccaagcagtggatgaacttgaacaggaaacacagatttcttcaggaaatgttggacatagtatttataaaaacttaatgaatggcgtctctcacatgttgccgtttgtagtagcaggcggcgttttaattgctctttcttttgctatttggggcatttattcatttgatccagaaagtagtcagtataatgctaccgctgctatgttaaaaagtattggtgatgcctcaatgggcatgatggtgccaatcttatctgcgtatatcgcagaggggattgccaaacgacctggtttggttgtgggctttgtcggtggtttgattgctaacactggtggcactggctttttaggaaggatattatctggttttcttgcggggtatttcattctttaa

SEQ ID NO: 2204 - DNA, 696 bp, Enterococcus faecalis
ttacaaagagtatttaaaggcttgcctaaatcattagatggtttaaaagcaattttcctttatccagtcattggcgttgcagttattggtatcactatgtctttactagcagatccgatgaaagctgttaacgaaggaatgatgagctttttagctagtttccaaaactccagtccgttggttttaggaattattgtgggttgtatgtgtgcctttgatatgggaggtccagttaataaagcggcctatgttactgggacggcactcttagctcaaggaaatacttcttttatggcaggagtttctgctgcctgcatagcgccacctttaattacaggctttgctacattattctttggaaaatactttgacacaaatgaacgcaatgcggggctagtgaactttattttaggctccacacatattacagaaggcgctattccgtttgcggcaaaagaccccttgaaggttttaccaattatgatgctcggatcttcaattgcggcagtcctaacgtatatgtttggggtacaagtgccagcacctcatggaggatttcttgttctaccagttgttactcacgctgttcaatgggttttggcaattttagctggttcattggtaggtggcttattgctaggttttgtacaaaaaagtagaatcgccaaacaagagcaatcgttatcaaaaaaatga

SEQ ID NO: 2205 - DNA, 483 bp, Enterococcus faecalis
caggaattaggagtggatggaatggcttttattaaagaaaatcatatttttttaaatcaacagttacaaacgcaagaggatgtttttcactttttagcaaaaaaatcaacagaattggaagttgctcaggacgcacaggaagttttcgataaactgaacgagcgagaacaagaaggaacaacggggatgatgaatggatttgcgatacctcatgcaaaagcagcaacgattcaacaagcggccattatcatcgttaccttggaccaaggtgttgagtggcagagtcttgacaaccaattaacggagtttgtaattgcgctgtttattccagatgccgaagctggcacgacacatttgaaattactctcttctgttgcgcgcctcttattaagagaagaagttacttctggactgaaacaagcaagttcgccagctgaaattgctacgttactaaataatcaattaggagagggaacagaatga

SEQ ID NO: 2206 - DNA, 999 bp, Enterococcus faecalis
tcaattaggagagggaacagaatgaaaaaaattagtgaacaaaaacgtaaacatttagaaaatctggtagatgatcaagggattattggcgcactagccattgatcaacgtggggccttaaaacgcatgatgggaaaatacaaagaggtgactgcgcaagaaatcagtgactttaaagtattagtatctcgttgcttaacaccagagacttcagcaattttgttggatccagaatatggcctagctgctgctgaaaatcgagcacagacttcaggtttgttacttgcgtatgaaaaaacgggctacgatgcttcgacaccaggacggttacccgatagtcttgatgtttggtcggttaagcgtttaaaagaagcgggcgcagacgcgtgtaaatttttgctttactacgatgttgacgaaagtgaagcaatcaatgagcgaaagaaagcttatatagaacggattggttcagagtgtttagccgaagaaattccattctttttagaaattgtctcttatgatgcaaacaattcggatagtgcttcaaaagaatacgctaaagtaaaaccgcacaaagtaattgaagcgatgaaagaattttcaaaggatcgctataatgttgatgttttaaaagtagaagtccctgtgaacatgaattttgtagaaggttttggcactgaaagtctttatagccaagatgaagcacaggcctttttcaacatgcaaagtgaagcaacacaacttccatttattttcttgagtgcaggggttagtgctacgatgtttcaggaaacattgaaatttgcaaaaaaagcaggttcctcgtttaatggagtcttatgtggtcgcgcaacttgggcagacggcgtgcttccatttgttcaacaaggtgctgaagcagccgttgcgtggcttgaaacaactggtaaaacaaatgttgaagaattgaatcaggttttaagagagagcgcagtatcagtctttgaaaaaatacagtaa

SEQ ID NO: 2207 - DNA, 570 bp, Enterococcus faecalis
cattgctttactttatttggggaaagttggggtattatgggaattcctaaagaaggcgagtttgtaaccattcagagttataaacatgacggacatttacatcgaacgtggcgtgatacgatggtactaaaaacgagcgagtattctttaattggtgtgaacgatcacacgttagtaacggaatccgacggacgtcggtgggtgactcgtgaaccagccattgtttattttcacaagaaatattggttcaatataatagcaatgattagagaaaagggggtttcgtattactgcaatctggcttcgccatatgttttagatgacgaagcgttgaagtatattgattatgatttagatatcaaggtttttccagatggtgaaaaacgtttactagacgttgatgaatatgaatttcatagcaaactaatggattatccagaagatattgacttcattttaaaagaaaatgtcaagactttagtggattggattaataacgaaaaaggccccttctcgcccgagtatgtagatatctggtatcaacgttatcaacagctatcaaaaaaatag

SEQ ID NO: 2208 - DNA, 207 bp, Enterococcus faecalis
cgaaaaaggccccttctcgcccgagtatgtagatatctggtatcaacgttatcaacagctatcaaaaaaatagccgatgtaaacagcccacaaaaggagcttggagcattagccaaaatggctaatgctccaagctctaaattttccgatttaattggtgttatagttctttgttcatttcgtagtgttcaatgccagcatccataa

SEQ ID NO: 2209 - DNA, 402 bp, Enterococcus faecalis
  misc_feature (4)..(4): Nucleotide 4 is "n" wherein "n" = any nucleotide.
tctntatttagatgctgtccggcttcgtcaacgcgtattcgtaccggaacaaggggtataccagaagaacaatggaaatcgcatgaatatgaagcacattgtattcactttgttttgtacacgaaccatgtagctgtcgcaacttgtcgcttgcttccactaaaaaatggcgttatgaaattacaacgaatggccgttgaaaaagcttaccgtggcgccgactatggacgagtgattatggaagcggcggaaaattttgccaaagaacaaggctaccacaagattactctaggagcacaagtcaccgctgtaggcttctatgaacgtttaggttatcaaaaaacaggagcaccttttatggatgctggcattgaacactacgaaatgaacaaagaactataa

SEQ ID NO: 2210 - DNA, 240 bp, Enterococcus faecalis
  misc_feature (111)..(111): Nucleotide 111 is "n" wherein "n" = any nucleotide.
gaatacttcattgctagaactttttcatggtataataaaatagaaacagattctgaacttgggggtttttctatgcatgtagctcaaacaaaagataccatgagtgatctntatttagatgctgtccggcttcgtcaacgcgtattcgtaccggaacaaggggtataccagaagaacaatggaaatcgcatgaatatgaagcacattgtattcactttgttttgtacacgaaccatgtag

SEQ ID NO: 2211 - DNA, 456 bp, Enterococcus faecalis
ctgagggggggaaggtgtgataaaataaaacagcaacaattgaataaaaataaaggaggagccgctgtgattaatcgatttaaagaatcgaaattatttttctggtcagttgaattacttgtcgtggccatgctattatttattgcttcgaaaattaatttcttatttgcaccgattgggacattcttttcaacgttgtttgccccagtcttagtagcaggctttttgtattatttactaaatcctgtggtcaatctactaatgaagacgaaaatgaaacgaatttatgccgtcttactggtatttttattactaatcatcgcattagttctgatcttattaacaattatccctaagttggcagatcagctagctagtttagcatcaagtatgccggatttctttaaacaagtggagacctggatttatgagattgcggagttacctattttttaa

SEQ ID NO: 2212 - DNA, 198 bp, Enterococcus faecalis
tttcttatttgcaccgattgggacattcttttcaacgttgtttgccccagtcttagtagcaggctttttgtattatttactaaatcctgtggtcaatctactaatgaagacgaaaatgaaacgaatttatgccgtcttactggtatttttattactaatcatcgcattagttctgatcttattaacaattatccctaa

SEQ ID NO: 2213 - DNA, 669 bp, Enterococcus faecalis
cttagtttcaattgtatcaacggtggcgtcaaccattattgtattggtcattgcgccattattttattttatatgttaaaagatggagataagctagtaccagcgattcaacgctttttacctgagaaaagaaaagatgatattgtggatcttttaggacaattgaaccaaaccttatccagttatattagtggacaagcgattgaatgtttatttgtcggtacatttacgattattgggtattcattgcttggcgttcgttatgcctttttatttggtgtcattgccggctttacgaatttgattccctatctaggaccttatctaggattagcgcctgctgtcttagtgaccatctttaatgaacccgtcaaagcagccttatgttgtttagtggtgctagtggttcaacaattggacggaaatattatttatccaaacgttatcggaaaatctctaaaaatccatccattaacgattattttaattttattggtagcaggaaatttagcaggtttgctaggtattttcctcggtgtcccattttacgcaatctgccggaccattatctactatgttattgatatggtcaaagcgggtcgtagtgaaaaagttaccaatgccgttcttttagggaatgaaacaaatacgaaagaaaataacggttaa

SEQ ID NO: 2214 - DNA, 1086 bp, Enterococcus faecalis
ttgtgtctgtttctaagcctaaccataaaaagaggaagaacgttaaaagagtacgaaagtacagcctcggaattatcaacaattaaggagagagagaacattatgaataatgctgaccctgagagtcagtcgctaattgcgcaacttctattattagtcgtgttgacgtttatcaatgcctttttggcagcggcggaaattgcagtcgtatctgttaacaagaatcgtgtggaacaaaaagcggaagacggcgacgcaaaagctcaaaaattgcttaaggtattgcaagaccccaataactttttatccacaatccaagtagggattactttggttaatatcctatctggtgcttcattagcagagactttatctagtcgtttggcccctgtattacgtggcggcgccgcagctaagagtcttgccagtatcattatcttagctttgttaacgtacgtttctattgtatttggtgaattataccctaaacgaattgctatgaataaatcagaagaagtcgctcaattgacttctggtgcagtccgctttttaggagttatcgcgcgtcccttcgtttggttgctatcggcttcgaccgatttattatccaaaatcacaccaatgactttcgatgatgctgattcgaagatgacacgagatgaaatgcgctacatgcttgaaacagaaggtgttttggaaaacgaagaactagaaatgttacaaggtgtcttttcattagatacaaaagtggcacgagaagtaatggttcctcggacagacgcattcatggttgatatccaagatgatgtccaagaaaacatcaatttaattttaggagaaaattattctcggattcctgtttatagtgaagacaaagataaaattgttggtattttacataccaaaacgttactaaaagctgcacgtaatttaggctttgaaaacattgaattaggcgcgattatccaagaaccattatttgtcccagaaaccatttttattgatgatttactttatgagttaaaacgaacacaaaaccaaatggcgaatttactagatgaatatggggggtgttgtccggtttaa

SEQ ID NO: 2215 - DNA, 252 bp, Enterococcus faecalis
  misc_feature (4)..(129): Nucleotides 4 & 129 are "n" wherein "n" = any nucleotide.
aaanaaatccgttgggtgaatttgacgatgaactctgatgaagtagacaatttatatacacaagtggccgacaatgaatatttggttcaccgacgcatgttaattgacgaatttaatgaagtatttganacagatttacacatgagcgatgttgatacaatggcgggttacttaattacagcatttaggaccattcctgatcaaggggataaaccttcttttgaagtggggcaatataagttaactggctga

SEQ ID NO: 2216 - DNA, 549 bp, Enterococcus faecalis
gagtggatacaaatggagaaaacaaaagtaagtgtaaaggaagaaacaaagaaggaaaatgtacaaggaaaattaacgtatgaagataaagtgattcaaaaaattattggcatttctttagaaaaagtagaaggattgcttacggttgatggtggatttttctcaaatttagctggtaagttagtgaataccgatgatgttacatcaggtgtagtggttgaagtaggagaaaaacaggtagcagtagatttagatattgttgcagaatatggaaaagatatttataaaatttacaatgaaatgaaagaaattattacaaaagaagtaaaaaatatgactgggttagaagttattgaagtaaatgtaaatgttgttgatattaagacagaagaacagcatgaagaagattccgttagtttacaagataaggttggtgaggcaacagaatcagtaagtaattttgccagtgagcaaacagagaaagcaaaagagctagcttctaaaggaagttctaaagcaaaagaattaacggaatctcgtgttaagtaa

SEQ ID NO: 2217 - DNA, 714 bp, Enterococcus faecalis
aggtacattaaagtaaatgaattcttaatgtatagtataacttgtaagcataaaatttttataggagaaaggcttttgctaaaattatattgtggtaaaagtcacatgaaagtggggggagaatcgatgacgaaagggaaaaaaattttgtttagttttatttctttagtttttggaacttttttatttgcagtatttgttcattatcagttcatgtattcattacctatttattttattaagtttgaagagtatccttttatagggaattacattcaactatatttgtactggggtagtgttataggtatggtctttatccttttatttattttagggattgttttaagtccagcagaagtaacatccgtgaaattaaacgatgacaaaggaatattagaaatcaaaaaaagtgctattgtaggaattgttcagtcgcaattagatcagtccaatttattaagggattcaaaagtaaatgtaaaaatgtataagaaaaagataaaagtacgtattacaggaaatacaagtgacaatctagatattataaatcaaacgaatcaattagtaaaaaatattgagttatatcttaaaacttttataggattagatacttcaataaaagcagaagtagttttcaaaaatatatctcgttcaggaaagaataagcaaaaaacaaaaacgagtgatttaaagaaagaggggagaatatga

SEQ ID NO: 2218 - DNA, 312 bp, Enterococcus faecalis
aaaaatggtaaattatttggtggcattccaggaacgattaacgaactgaatctttataaattatcattacacaaaaagaaactagggaaaaaagttgcagttgtaataaataataacacagcaagtgccgctgagagtttacttttagcgttaaagaataatccaaatgtaaaagtttttggtatgccttctgcaggatatacttcggttaatttaggacgtttttttactaatcaaaattccgataattattggtggtttgtatatactgttggctattatgagacaataaagcccataaagggaaaatga

SEQ ID NO: 2219 - DNA, 621 bp, Enterococcus faecalis
aatattgtagtatattacttgttaaggacgatgaacaggatgagtatcaaaaaatatttacttttttatattattagcacatgtgccattatttttgtttctcttacttttttctttttacctctaaaatcgattgattctaggagttatgaagtacttcatacgatatctcaatatggagtaatttctaataaagatgagtggaggaatattttagaattaacaagatacggtagaaaagtaactaatgtggataatttaaatacattagtatatggtgttaacaaacatagttctgtaaaacaaataagtagtgacaaagatatggataatatggaaactcttaagttaccaagtatttcaaagtatgaggatcttacaattattaacattccaagtgtctatagcaatgatgataacttctcaattaaatatgcatcaaagttgacagatttaatcgaatatacttctggtaacattgttttaaatttatcaaataattatggcgggctgaaagaacctatgattattggtgcgagttctttaattcctaatggaatgctctttagcaatattaataataaaaaggaaaagtatcctgtttacttaaaaaaatggtaa

SEQ ID NO: 2220 - DNA, 492 bp, Enterococcus faecalis
tcgttaaaaaagggagatgctaatatggatataacggataaagaaaattttcaaaaacagatggattttttgaagagacataatttttaccaatatgtttatcaatttcgatggctatttgtgtttataccagtacttgttttttttgatcttatttttatcgattttttttggctgataatagtaaaaggcatattattaatgggaatattgatcagtgaatattatgttatgtatcgtttctttaaaccaattgctcttgatgaaaaacaagatttctctagtgttcagctattccttaacctttttatatttaatgctttattcatgtttgttatgctaacaaactttcatcaagtttttgtaggaaaagaatttattatttttggtagtttcatgggtggaatatttacgatttgcttaaaggaacaactaaaagaataccagaagctaatgaatcaatttatagatataaagaaagaagtacattga

SEQ ID NO: 2221 - DNA, 228 bp, Enterococcus faecalis
acagcctaccttatgaatacattgtggcgagcaattatggagaagttgaaacggaagcttgggttaaagagtagaccaaatctttttaaacagttcttcgagtacagtcatggtatgttgaatatgacacaagctagttgcgttatatttctaactaaaaacaagcaggtcagaaactttttaagttttgaactatatattttaataataagaaaatgtatggaataa

SEQ ID NO: 2222 - DNA, 573 bp, Enterococcus faecalis
tttaagaaaatgaataatgaagaacaacaaacaaaacaagaatgtagaactttgaaaaaaggagccgagcatataaaaagacaaagaatgttcgagagtcgaagtaatgagataaaagaaggactgatcgatgaagatacttttgctagacatagattaacgtattctaataatcatttaaaggaaaacctattaaagtcgtgtaagaaaaacatagatactcatattcaaaatttaaaaatttacaagggtaataaagctcatggaatatttttaatagaatacaatgaagaaattgcattatcaatggctgaagtaatctctgtatcagatgtcaatcatggagaaccccaaatttttgatcactatgtttttagtaaagataaagatatgttacaacttcttaatgattacaatgaagaaatagaattctttattgtttctacaaaatttaatggaacggaagtaataaaagtacgcgatattcctaacattatagacagcctaccttatgaatacattgtggcgagcaattatggagaagttgaaacggaagcttgggttaaagagtag

SEQ ID NO: 2223 - DNA, 984 bp, Enterococcus faecalis
atgaaatttatatctccgatgatctttacgttacttctcgtaatctttactcttgtttttgaattaaatttagtgtctactgcatacttttccttgttattgtctatctttgtacatgagttaggtcatttagtttttggattatttaataaagttagaccagagtcattaatatttgggtttataaaactttcgtgggaaaaacagtttaaggttagattaaatacacagtggggattttttggtggattatttagatataagccaactacgtttaataataagaaaattctgaggttgttaaccggaggaccaatatttagtcttttttttacattaactttttttgtaaaaattgaattttttcaatatttttctttatttaatttttcaatattcttgattactgcagttccttttaattttaacgggtttatgaatgatggatacaatatatataaattagttactaaggattatattttcgaaatgtattatattgtatcaaatagcttacttaataaatataatcagtcaactttcttaaatagcaatgaggtatgcaaaataataaaaaaaaataaagaattaccattatatgtgctaaatacattcttactgtatgttatatatgagtatttaatagacaaaaataataggaaattaaaactaatatacccaatacttagtaaagaagacaagatactgaataataaaagttatttacagaatttttatttagctaatttgtatatgatagaatatatcttatctgtagataataaacaaacttttaaaaaaattaatttaaaaattctagactcaattagtagatctagaattaaatatctaaactttaaatgctcaaaaagtgctgatgatgaaataagccaatcaatgacagaatttagcaatatcataaaaaattattcagatcaaacgtcaactatgattatagcagaaaaacaatgggttcaaaattga

SEQ ID NO: 2224 - DNA, 240 bp, Enterococcus faecalis
aaaaattcaatttttacaaaaaaagttaatgtaaaaaaaagactaaatattggtcctccggttaacaacctcagaattttcttattattaaacgtagttggcttatatctaaataatccaccaaaaaatccccactgtgtatttaatctaaccttaaactgtttttcccacgaaagttttataaacccaaatattaatgactctggtctaactttattaaataatccaaaaactaaatga

SEQ ID NO: 2225 - DNA, 1290 bp, Enterococcus faecalis
cgagttatatcgttcactgtattacaaaaaacaacaatttggaggtacaaaatgaaaaaaagaggattgacttatattttaatctcatatatttttttaacattaggaacaacaggttatgcatcagatctctcaaataatatttcattttttattgataattcgcaaacaactgctatagaagaaattgagtctgaattatcttctgaaaaagtagattatatacaggaaataggattagttagttttaaaaacctggatgatagtgataggaagtttataggtaaatattttaatgtttcggaagggaaaaaattaccagattttaaacctgaagaagttaatagttctattttaaacattaatattttaaacaaagattttaagtcttttaattggccatataaaaaaattttatctcatattgatccagtgaaagaacaactagggaaagatataaccatagctctaattgactcggggattgataggcttcatcctaatcttcaagacaataacctaagattaaaaaactatgttaatgatattgagttagatgaatatggtcatggtacacaagttgctggagtaatagacacgattgctccaagagtaaatttaaattcttataaggtgatggatgggacagatggaaactctataaatatgcttaaagctatagttgatgctacaaatgatcaagtagatataataaatgtgagtcttggatcatataaaaatatggaaatagacgacgaaagatttactgtagaagcattcagaaaagctgttaactatgcaagaaaaaataacattctaattgttgcatcagcaggaaatgagtcgcgtgatataagcactggtaatgaaaaacatataccaggaggactagagtctgtaattaccgtcggagctacaaaaaagagtggtgatattgctgactattctaattatgggtctaatgtatctatatatggtcctgcaggaggatatggtgacaattacaaaataacaggacaaattgatgctcgtgaaatgatgatgacttattaccctacatcgctagtttctccactaggcaaagctgctgactttccagatggttatacactttcttttggaacaagtttagcaactccagaagtaagcgcagctttagcagctattatgtcaaagaatgtagataattctaaagattcaaatgaagtattaaatactttatttgaaaatgctgattcttttatagataaaaatagcatgcttaaatacaaagaggtgagaataaaatag

SEQ ID NO: 2226 - DNA, 2163 bp, Enterococcus faecalis
gttataagaggtgtaattatgaaaagattgaagtacgttgcgcaaggagagcatagtgaatgtgctttggcatgtatcactatgctacttaattattatggtaatcaaagtacactagtagaactaagggaaaaatatggggtgcccaaaggaggactaactatcaagaatattcgtactgtctttgacgaatatggatttgatgtatcgacatttaaatcaagtttttcaaattatttagatcttccgactcctgtaataagttattggaataatcaacattttgtggtcatagagaaaataaaaaagaagaaagtattaatcttagatcctgcaagtaataaacgctggattgatatttcagaattcaaaaaaaatttttcaaatatattaatatacgcacataagaaaaagactaaaaaagaaggcaaaaggaaacagttttttttaaagtcatttatttttacaaaattcaaaagatatttctttagtttaataatattatcatttgtttcacaacttttattactcttaattcctattgcaacaaagtattcgatagataatattagatcttttcaagaaattcctacctatgttctgttattaatattaactagttttttttctgttttatatgtagttcaatacttaaaaagctctgtagtagcagaatttcagtatgaatttgattttaaattaatgttttcttatattgataaactttttagtatgccactaatgtattttagtaatagatcaactggagaattagtgtttagagcgaacttaaatatttatattaggcaaatattgtctcaaaaggtaataacaactttaatagatagtctttttttagggatatatttgtttttaatggttaactattctattttactgacaataatagctcttgttctaatctctttaatagcttttttaagtattataaattcgcatacaataaaaagatttgtagataaagaaataatggaacaaggaaacgtccagagaattattacagaagcaattgaaggaattgaaaccattaaatctgctaatgcagaaaagagttttttgttaaattggaaaaacatgtttacgtctcaactattaattacaaaaaataaaaatagatatatagctatttttggaatattaccagaaatcatacaaagtgtaatgccagctctatttttaataataggtattaaattaataatcaacaattctttgtcattaggatcactaattggttttgtttctatagtaacaatggttatgaagccaattctaagtttggtttcctcttataatgactttctactattaaatgtatattttcaaaaattatctgaagttttaacttatgaagaaaaaaatgattttaataataaaaaaggaaatgttggaaaagaagagtttatttatagggttaataatgtttactatactatatctgtttttgaaaaaaatattttaaatggtatttcttttgacataagaaaaggggataaagttgctattgttggtagaagtgggtcagggaaatctactttactaaaactattggctggattgttacaaccttctaatggagaaatattgtatgaaggctatcctttatcaaacaactccaataatagaagaaacattttttatgttaatcaaaatgcgcatatttttaatgaaactatcgaaaaaaatatttctttagagtttaaaccgaattcttctataaatgagaaaaaaagactaaaagaaagtatgagtaaatcaaaaatggatgaggtacttttaggaattcctcagtatgagaaaactatagtatcagaaaatggtagtaatttctctggtggtcaaaggcaaaagattgctttagctagagcgttctattctaatgtgaatacattacttttagatgaacctacatctgcaatggataatatttcagaatttgaagttttttctaatttattagatgagaaaagaacagttattactgttgctcacagaattagtacggtgagaaactttgataaaattatattaatggataatggtgaaatagtatgtattggaaagcatgaagatcttattgaaaatagcgagttatatcgttcactgtattacaaaaaacaacaatttggaggtacaaaatga

SEQ ID NO: 2227 - DNA, 204 bp, Enterococcus faecalis
gaggaaaccaaacttagaattggcttcataaccattgttactatagaaacaaaaccaattagtgatcctaatgacaaagaattgttgattattaatttaatacctattattaaaaatagagctggcattacactttgtatgatttctggtaatattccaaaaatagctatatatctatttttattttttgtaattaatagttga

SEQ ID NO: 2228 - DNA, 468 bp, Enterococcus faecalis
  misc_feature (4)..(4): Nucleotide 4 is "n" wherein "n" = any nucleotide.
gacnaggtccatcgtctatcaaaattcaataggatagataaggcaaattctttacttcataaaattaaagaatcatactttgaagaagaacctaaaaacaatagttggtgtaagggaactgtacgtgaacttttagcgacaattgaattatatgatgataacatttcaaatatagatattaataaaaccatagcatataaaaataaagattgtctgtgccatggaaatgcaggtactttagaagggctaattcaattagctaaaaaagatcctgaaacttatcagtataaaaaaaataaacttattagctatatgctaaatgattttgaaaaaaataatacactaaaggttgccggaagtgagtatttagaatcactaggattctttgtaggaatcagtggtgtgggttatgaattattgagaaacctagattctgaaattccgaatgcattactttttgagttataa

SEQ ID NO: 2229 - DNA, 183 bp, Enterococcus faecalis
atatgcagacgaaataaccttgctaaaagcagtcgaaggacgtcgagaaatttaaaagaaacatcgttggaaaaagaggttgaaatcgaagtaggtcgtttctgtgagaaaatgtcgcagttcaagcttttccgtacttctttttcagtttctttttttcagcggatgcatcactttaaatag

SEQ ID NO: 2230 - DNA, 654 bp, Enterococcus faecalis
ttggagttttcgcacgtgcagggtatttttatcacatttgaaggtccagatggtgctggtaaaaccagtgttttgaaggaagtttctgaaagattagctaaagagtcaaaacgaaaaattgtcactacaagagaaccaggcggcataccgattgccgaaaagattcgaacagttattttagatccaagaaatgacagaatggatgagcgaacagaagctttactttacgcagctgctcgtcgtcaacatttagtggaaaaaatattgccagctttggaagcgggtcatttagtcctatgtgatcgttttgttgacagctcattagcctaccaaggcgctggacgtagaattgggattgcccccattgcttcaattaatgcgtttgcgacagaaggtgtctcaccagattttacaatttatttagacgttgactcagatactggcttacggcggattcaagaaaatcgaacacagcaaattgatcgcttagattcagaaggattagaatttcatcaacgtgttcgtcatgaatatttgaaattagcagaagaaaatccacaacgtatcaaaaagattgatgcacggatgagtttagaacttgtcgtagaagcaacgtatcaggcgattattgaacgttatccagaaaacttttaa

SEQ ID NO: 2231 - DNA, 333 bp, Enterococcus faecalis
accatgaagattattttagccattgtacaagacaaagatagtaaccgattagccaacgaatttattgatgccaatattcgtgctacaaaattatcctcaacaggtgggttcttaaaagcgggaaacagcacatttattattgggattgatgatgaacgtgtcgacgaaacattagctttaattaaagaaacatgtcaatcaagaaaacaatatgtttcaacacctgtgactttagatatcacaatggatggccaaattccttatcctgtggaagttgaagtaggcggcgctacttgcttcgtcttaccagttgaaggattccatcaatattaa

SEQ ID NO: 2232 - DNA, 1002 bp, Enterococcus faecalis
gcggcgctacttgcttcgtcttaccagttgaaggattccatcaatattaagatgaatgaagcacaacagctacagcaaatgcaacctttgctgtacaagcaactccaaaaaagttttgagcatggtcgtcttgcccatgcttatctttttgaaggagatacaggaactggaaaacaagaatttggcttatggatggcgaaacatgtcttttgtacgaatttagtaaatcaacagccttgtaacgaatgccataattgtgtgcggattaatgaaaatgaacatccagatgttttaagaattgcgccagatgggcaaaccatcaaagtgaaccaaatccgtgaattaaaagcggagttttctaaaagtggggtcgagactgctaaaaaagttttcttaattcaagaagcagataaaatgagtaccggcgcagctaatagtctcttaaaatttttagaagaaccagaaggacaaattttagctattttagaaaccacttcgctttctcgaattttaccaacgattcaatcacgatgccaaaccttacattttcaaccattagtcaaaaaaacattaattgatcgcttaatcaaacaggggattggtgaaaagactgcaacccttttagctgaactgacaaatagttttgagaaagcagttgaaatctctcaagatgaatggtttaatgaagctagggaaatcattttgcaatggtttaattatctaaaaagtaatgatttacaggcatttatctacgttcagaagaaaatggtcaaagtatttaaggaaaaagaacaacaagcgcttagctttgacttgctcatggtttattaccgtcaattattggaagaaagtgttgcgacacagcaagccaaaaaagtaacggaagagcaggcggaacggttggcgctaattttgaaagcacgccaaaaatggactgccaatgttagttggcaaaatgtttgtgaacaattagttatccaaatgattcaccctaaatcataa

SEQ ID NO: 2233 - DNA, 855 bp, Enterococcus faecalis
attaggaggaataaaatggtagaagtagtaggagttcgcttccgtgaagccggtcatatctattattttgctcctggaaaatctgagtatatttataatgagaaagtactcgttgaatctcaacagtcaaaacaattagctactgttgctattcctaaaaaaacagtcgattcagacgatttaccagaggacctaaaacccattttaaataaagcaacagccaatgatttagaaaaagaacaaaaaaatttggctgatgcagaagctgccaaaagcattgccaatgaaaaaattcgagctcatgacttaaaaatgaaattagtgcgagtagaatataccttcgatcgtagcaaaatgattttttactttacggcagatgggcgaattgattttcgtgaattagtcaaagacttagcggctattttccggacgcgaattgagttacgtcaaattggtgtccgagatgaagcgaaaatattaggtggcattggcccttgtggcagacaactatgttgctcaacatttctaggagattttatgccagtttcaatcaaaatggctaaagatcaagggttatctttaaatcctgtcaaaatttcgggattatgtggccgcttaatgtgttgtttgaaatacgaaaacgacgaatatgaagccgctaaaaaagaattaccagattatggaaaagaagtaataacaccagatggcaaaggcaaagtcgtcgggttgaatctattaagtcggattgtcaaagttcgtctgcatggtcgtgaaatcgcagcggattatgattacgaagaaatcaaagaagctactgcgaaagttgctgctgaaaaaggtgatcaaaatggataa

SEQ ID NO: 2234 - DNA, 456 bp, Enterococcus faecalis
gtcggattgtcaaagttcgtctgcatggtcgtgaaatcgcagcggattatgattacgaagaaatcaaagaagctactgcgaaagttgctgctgaaaaaggtgatcaaaatggataagcgttcgctctatgatggattaaattcgttggaaactgatttagacagttcagtgacacaattaagagaaattaaagcagcactccatgagttggtagaaaaaaataccacgttggaaatcgaaaaccaacgcttacgagagcatctccaagaactgaataagttagcaggaaatacaactgaaactgaaaaacaagagctatcaaaatcacgtatgaatttggaaaaactttatgaagagggcttccatgtctgcaatattttatatggttcaagacgtgaaaatgatgaagaatgtgccttttgtcttgatgttatttatggggaacgtacgcgttaa

SEQ ID NO: 2235 - DNA, 942 bp, Enterococcus faecalis
cagtcaatcgattgtcaaatcaaacctttatctatttatagaacgaaaaaggaaaatgagggatgcgctatgcaaaaacagaaaagttttgataagcaaacaacaaaaggaaaattgtatcttgtcccaacaccgatcggcaatttagaagatatgagtattcgttgtttaaacatattgaaagaagcaacggtgattgctagtgaggacacaagaaacacacaaaaattgctaaatcattttgagattacaacaccacaaattagtttacacgaacataattacaaagagcgaattcctcaactgattacacgattgctgaatggtgaaacgattgcccaagttagcgatgcaggtatgccttcaattagtgatcctggccatgaattggttacagcatgtcttgaagaagaactggcagtgattgccttgccaggacctacggcaggaatgaccgctttgattgcctcgggtcttttaccacagccatttacgttttatggttttttaccaagaaagaaaaaagaacagaaagacgtgttatcagcattaaaagaagaacggccgacacagattttttatgagtccccctatcggattgctaaaacggtagcaacgtttgctgaagtctatggtcaagaacgccccgctgtgatttgtcgggaattaacgaaacttcatgaagagtatttgcgtggtaccttaggagaactaacagaatatttagcagaaaatacgctaaaaggcgagtgttgtttattagttagcgggtttactggtgagaaagagacaatagcagcaatgccagctatttccctcaaggaacatgtgcaagttttaatggaggaagagggacggagttcaaaagaggcaatcaaagaagtggctaaattgagaaatgtaaaaaaacaagaagtatataaagaatatcattccatttaa

SEQ ID NO: 2236 - DNA, 696 bp, Enterococcus faecalis
agaatatcattccatttaaaaaaggagagaaacatgagtaatttattgcgagcagaaggcgtgtcttatcaagtaaatggtcgtagcattctttctgatattgatttgtcatttgaaacaggcagcaatacaacaattgttggtccttcaggtagcgggaaaagtacatttttaaaaattttatcttcattattaagtcctacagaaggcgaaattttttatcaagaagcgccaattactacaatgccaatcgaaacataccgccaaaaggtttcttattgttttcagcagccaactttatttggtgaaaccgtgtatgataatttgttatttccatttaccgtcagacaagaagcgtttaatcaggaaaaagtcgtggcattactccaacaagtgaaattgcccgctgcttatcttgaaaagaaaatagccgaactctctggtggtgagcgacaacgggttgctttgctacgaaacattatttttgtaccagatgttttattattagacgaagttacaacgggattagatgaagaaagcaaacagattgtcaatcaattgttaaaccaattaaacaaagagcaaggagtcacgctggttcgtgtcacgcatgataccgaagaaattcagcaagcacagcaagtgattcgtattgtagcaggaaaggtggcgccgacagatggatttagcagttaa

SEQ ID NO: 2237 - DNA, 780 bp, Enterococcus faecalis
caggaaaggtggcgccgacagatggatttagcagttaataatttatccttatttttttcagccatgctagtggtggtcgcattaattattagtactaaagaaaaattaggttttaccaaagatattattattagtgtgattcgagcagtcattcaattagtcgcagtcggctatttattaaaatatgtttttcaagtcaataaccttattttaacgctcatcatggttttggtgattgtttccaacgcagcctttaatgcaaaaaaacgcagccagcaattacaaaagggctttttgatttctttcattgcaattggttgtagtacaggaattaccattggtattttgattttttctggttctattaaatttattccttctcaaatcattcctatcagtgggatgattgccagcaattcgatggtggcaattggtttatgctatcgcaatttagatactctttttcaaaaccaacggcaagcggtaatggagaaactagcattaggtgcaactatcaaactcgcctctttaccaatcatccaacaaagtgtgaaaaccgggatggcgccgacgattgattctgccaaaactgtcggaattgttagtttacctgggatgatgtcaggcttaatttttgcgggcgttgatcctgtccatgcgataaaatatcagattatggtgacttttatgttgctatcagcaacaagtattggttcagtgattgcaacttatcttgcctataaaggctactataatcaacaaaaacaattggtcgtttaa

SEQ ID NO: 2238 - DNA, 1269 bp, Enterococcus faecalis
tcaacaaaaacaattggtcgtttaattaaaaagctggaaatctgtgtttataacttcacggattttcagctttttctggttgaaataaagaagtttcaatttgaaaaagaacggacgttcgtatataatggagggaggaggcgaatcaaaatgatgagcgaattacgttttcccttaaaaaaagatacgtcgagaaaaattatacatatagatatggacgcgttttttgcttcagttgaagaacgagatcatccagagttagtaggacatccgttagttattgcgcgccatccaagtgatactgggggcaaaggagtggtgaccacagcgaattatattgctcgacagtacggtattcactcggctatgagtgctcaaaaggcgtatgaactatgtccaagtgccatttttaagccaggtaattatcagaaatatagtgaaatttctcaagaaatccgtgaaatttttcgccgctatacagatgtgattgaaccggtatctattgacgaagcgtatttagatgtaactgaaaataaggtcaacagtaagtcggctattaaaattgcgaaaatgatccaatatgatatttggcatgaattgcagttaacttgctcggcaggtgttagttacaataagtttttagccaagttagcatcagattttcagaaaccaaagggcctgacggttgtcttaccagaagaggccgaagattttttgaaagcattaccgattgaagatttccacggaatcgggaaaaaaacagtgcctaaaatgcatgaactagggatttttactggagcagatttatacaagcaagatgagatgacgttgattcggttattcggtaaaatgggttattcattgtatcgtaaagtccgcggtatccatgatgcgccagttcaagtgactagagatcgtaagtcggtaggcaaggaacatacttacggcacccctttaacgacggaagagcaggttacggctcaattgagacaattagcagcaggggttgagcgtgcattgcaacgagtgcaaaagcatggcaaaacagtagtcctgaaagttcgttatactgactatacgacgattacgaaacgtgtgacattacctgaatatatttctaaaaaagaagaacttttctatcaagcgaatttaatttgggaagatattttaggtttagaacaaggaatccgtttattaggcattactttaacgaatttagatccactagcgtatgaaaacattgttttacctttatgggaaaaaagttag

SEQ ID NO: 2239 - DNA, 612 bp, Enterococcus faecalis
aaagaagttttgctgatgcgtaatccgaaaccacaagaatggaaaaccgaagactacagccaaaaaaagattgccgattacaaagcgttcaactttgttgatggcgaaggtgtacgcaatagtttatatgtgagtggctgtctctttgcttgtgaaggttgttttaacaaagctgtccaaaatttcaattacggtacgccgtttacagaatctttaatgaatcaaattattgaagatttgtcccatgactatgtccaaggtttgactcttttgggtggcgaaccttttctgaatacagatgtttgtcttagtgtggtcaaacgtgtgcgggaaacatttggctcagccaaagatatctggtcttggtctgggtatacctttgaagaactacttttagaaacgcctgataagcttgaactactccattcaattgacattttagttgatgggcgctttgaactggcaaaacgtaatttaaatttacaatttcgtggcagtagtaatcaacggattattgatgtacccaaatcacttgctgctggcaaagctgttatttgggaaaaatgtcatgacgccgaaacgtcttatgaacaaatcaaaaaatcaatttaa

SEQ ID NO: 2240 - DNA, 888 bp, Enterococcus faecalis
agaccgactgaatgcgtaagaagcgcaaggaagtcaagaaaagtctggcaaattttaaatgaacgtttagcgatcgttaaagatgctttggtttatcgggttgaacgtgttaaagaagctaaaccagcgaatgcaccgattttatacatgtatggtgcatttggaaaacgtttagctacacaggatgccgtagatgaactgtttaaaaacaaacgtgccacggtttcacttggctatattggcttgtatgaagtggcttctgccttttacggcggtgcttgggaggacaatcaagaggccaaaaactttacactggatattttaaaagaactgaaaaaaaatgccgacaactggggcaacgaatacggctatcattttagtgtctactctacaccgagcgaaagcttgactgaccgtttttgccgtttagatactgaaaaatttggcatcgtcgaaaatattacagataaagaatattacacaaatagtttccattatgatgtacgcaaaaatccaacgccttttgaaaaacttgattttgaaaaggattatccaaaatactgttctggtggttttatccactactgtgaataccccatgttacagcaaaatcccaaagcacttgaagctgtctgggattacgcttatgacaaagttggctatttaggaaccaatacgccaattgatcattgttatgcctgtggttttgaaggggacttccatccaactgaacgtggctttgaatgtccagaatgtggcaatcatgatcctaagacttgtgatgtcgttaaacggacttgtggttatttaggtaacccgcaagctcgcccaatggtacatggtcgtcacaaagaaatttcctctcgtgtgaaacatttaaaaaattaa

SEQ ID NO: 2241 - DNA, 378 bp, Enterococcus faecalis
ggcacgttttgtctatttgtcagctgctctgagttattagaaaaactaaaaatgtccatgaatgaatcggccaaaagccaagcaaaggctcaagcgtatattactagaatgaaaaaagcagacgttttggttttagatgatttaggtgctgaattaggaattaaaaataaagttagtacggattttaataatgacatcttaaaccgaattttagaagctagacagaataaagcaactatttttactactaatttttctggaaaacaactggtggaggcctatggaacacgcattatttctcgtctaatgaagcacgccaatggctatgttttccaatataaagacacaacagacaaacgaatgaggagtgtgaaataa

SEQ ID NO: 2242 - DNA, 396 bp, Enterococcus faecalis
ttggtgaaagagaaggccgtaaacatgagtaatttaacaaaacgtaaaaaagatttatttgaaatgaaaagcgttgtatttaaagatatttcaaagcaacaaagcgaaaaagcacaaaaaagaaaacgactcttacaactaatgaatcaatatcccgattgggcaagtcaaaaaaataaacttattatgcaggaaattcaagaattaggacaagcaatcggtaattggtcgatggatcaatcaagacccatccaatccatcaaggccgcatcgtttacaaaaagcgagtatctctatttaatttggctcggttattcagatgaagcgattcgtcacggcttagacatgtcgaaagagtgttattttatttatcgattaacacttttaaatgaataa

SEQ ID NO: 2243 - DNA, 411 bp, Enterococcus faecalis
ccaatgcgtacgtcaacatttaattatatcaaagatattttagcagacttttataaaacagaagagtatatccgtcaacgggaagaagaattacggcacccttatcaagaagcagatttaaatgctggtattagaggacaaggacttcactctgtagtgaccgaacgaatggcgattacgatagctatggatcgtcgtctgtggaacttagagagaaatcgagacattatcaaaaattgtttagccgaagcggatgaacaaacgcgcgtgattattgaagaactatatatgaaaaaacggccctctttaacattaattggacttgcccagcaattatttattagtaaaagccaagcctataaattaagaaatcatttctttgaagcggtggcggatgaactagggatgtaa

SEQ ID NO: 2244 - DNA, 432 bp, Enterococcus faecalis
ccaatcctgaattttttgaatggaaaggtggcgctaaaaatgaatgaagcggaacaagagttatatgaagcccttgttgcaatctgccagacgtcaggatttttgttgctagaggaactgccgacagatttaccagatcagccatttgtttacttaggtgatagtaaagaattacctaagccaactaaatcagctattttgggagagattgaattaataatgcatgtttatggtgcgttatctgaacgacaacaaatttctacaattaaaggaacgattttacggcaggcaaccagtaacttaaaacgaacggctcattttaattggggtatcaaacatcaagaagtcaaagcacaaatggtaaaagataccaaacaaatgaaaaaaacaatttggcatgctgtactaccattacacatgcaattttactag

SEQ ID NO: 2245 - DNA, 525 bp, Enterococcus faecalis
gaggaattatcaatgggagaagttatgcaaggaaaagaccgtattttattagttcgtcgcttggatgaagcagcgacaaagaaagcaatgaaacccttatttcaaattgaacatgaatgggaattctcacgtgaatcgagcggtacgcaaacaaaagatggcgtcgcgaatgctgtttctggtttagaagttacgttatcgttaagcggtttagcctctcgagatgatgaaaatttatacatgaaagacgcagtcgaagatggcatcttaatggaattttgggatgttgatttaaaaggtgaaaaaaatgcggaaggtaaatatccagcaatttatgcccaaggttatgtaaattcatggagtttaccagccaatgtagaagaattagtagaaatcgaaacagaagcctctattaatggcaagccacaagatggctttgcaacagtagaagcagatattattgcagaagcacaatatgcgttccaagataccgttccagataaagcaccacaacctggcgaataa

SEQ ID NO: 2246 - DNA, 363 bp, Enterococcus faecalis
aaaatgaatttagagattaacggaaaaacaattgaagtgaaatttacgattggcgcgattcgcgaattagataaacgttaccaaattgaaaatggcgctgccaaattcggcatgggcatcagttcagcaatgatttatttacgccaatacaatccagtaatcttagttgacatcatggaagctttacaaagtgggcaattaaaaataggtaagtcggaaattgaagcatggttaatgacccaagatgtcaaaaaactttcagatgatttgcttaaagaaatgggaaagcaacctcttacaaaaccaatgatcgatcagttcagcaaagaagcgaagaaagcagaagcgcaagcgaccaactaa

SEQ ID NO: 2247 - DNA, 474 bp, Enterococcus faecalis
agaaatgggaaagcaacctcttacaaaaccaatgatcgatcagttcagcaaagaagcgaagaaagcagaagcgcaagcgaccaactaattaaaacgagcgatgacgtgtatcacgacatcgctctttctgcttttcgctacttaggctgtcgttcatttgaagaagtggatcagatgaccatgtctgaatttgaattacgaatgattgcttttaatttagcagaagtagatgaagagcggaaaaggcacgagcttgcctacttaaatgttaaagcgcaagcgacaaacaaaaaaggaaaacccgtttttgaaagctttaaaagtttttatgattatgaaaaacgagttgctgaagttctggcagctaaccagccacaacgaacaaaattaaatgagcggaaaaaaacgcaacttgccactgtggcagagcgtctacgccgctatcgagaagggaggagagtagatggagaatga

SEQ ID NO: 2248 - DNA, 2934 bp, Enterococcus faecalis
atggagaatgacaaagaaaaaacgccgttatcggaggcaaagaaaagccttgcaggcgtccaacaagcattaaaaagtatgagcggtgagtatgccttattaagtggatatttagggaaaattagtgcgggtgtcaatcagtcagccacggtcatgaacacatttaaaaccgtcatgcaacaatctggagaaacagtgaaaaaaacaggagacgaaacagcaaaggcagcagatcaaatgaacacagcgttaacagattctgctgaacaagccggtgaagcagctaaaaaagcggggaaagaaacctctgatggctttactaatgcacaaaataatatgctgagctttgggacggccatgactagtgccgtttccttacctatgctgaacgttttaaaaacagctatgggcgtcggtgctggggtcagtggcgaatttcaaggaatgcaaggactgattatggccagtgcaggagggatttctgattcattgcaaggcgagttgcaaggggcattgactcagatgaatcaatcatttgaagcggcggcacaagtgattcaaagcgtgatggctccaggaatggaaattttggttcaagtggttattacagtcgtcaaaggcattacagctttggttaatttatttatcaaattaccaaaacccgtccaagtttttattgttgccattatgggcattttagccgccattgggcccatgttgattatggtaacgatggctcagctaaaatttcaacagtttagtgctggtttggctcttgtacaaggaaacattgggaagttaggtggtggcttatcaaaactaagtgctagttttagtgccttaggtggaggaccattaattttaattgtagcagccgttttagcagcggtagcagcgtttatttatttctataaaaccaatgaaacatttagaaatagtatcaatagcttagctagtgccattcaaggagctgtttcagcggcgtttggcaaattggtaggattgctacaacagatccagccggcctttcagcaagtaatggcagtttttaaacaattttttgcagtaggcttagagaaaatggcgactattttttcaacaattggtcgtgtgctagcaggcgtttttgccagcggtttgcaattaggtagtaacttattagggcaatttggtggcacctttgacaaagctggtttagcggttggtcttttggtaaaagttctgacaaaggttgcactggctgcattaggaatttctgggccgtttggtctaattatttccttgattgtttcattcgtgacggcctggatgaaaaccggtgatttgagtgcgggtggtattacccaagtctttgataatttaggtaacacgattacatcggttacaacaatgctggcaactaatctaccgaaagttatacaactttttacaacagtcttaaccagtattctcgggaaaataacagaagctattccaagcatcgtaaccgcgttatctagtttaattacgttaattgttggtgcgatcgttgccaatttgccagtcttaattgaagcggcaacacaaattattactacgttgattcaggggattacaacagtcttaccaatgttgatagaagttggtttgagcttattaatgactttagttaatgcgattgtcaccgccttgccaacaattacaactgcagcgattaatatcatcactacattagtgacagcttttgtcacagcgttaccaatgctagttacagcaggtgtttcaattatcacggccttagtcaatgcatttgttactatgttaccgttgattttgactgctggtttacaaattttgatggcattaatcactgggattatgacgattttacctcagttaattcaatcagcgctgacgattattctagcgttagtgacagcgttgataggtgccttaccacagattatcagcgcaggtgtcaaattgttaatggcgttaattcaaggaattatttcgattttaccaaccttagttgcggcagctattaccttaattttgacattggtaaatgccttaattggtgccttgccacaaatcatcagcgcaggcgtcaaattgctaatggctttgatccaagggattatttcaattttaccgcaactggttactgcagcaattacgctaattaccgctttaatgggtgcgttaatcaatgcgttgccacagttgttaagtgctgggattcaactgattcaagccttaattaatggtgtactcagtctattgggtgccttgctgtccgcagcaggaacattaatctcacaaatgatcacgaagattggttcttattttggtcaactgttagcttcgggcggacagttagttgaaaatatcaaaaatggggttaccaatgcagccaatcaggtaaaaaatgccattggttctgtaattgaaggtgcttggcaagcaatccaaggttggttttcaaaattcaccgatgccggtgcgaatattgtcggcatgattgctgatggaattacaggcgcaattggaaaagccaaagaagcaatcgatggagttgtcagtaaaattcgtaactttttaccattttcaccagcaaaagaaggtcccttatctgatttgcataaattgaatttcggcggcacgattgccacggggatttatgcaggcgaaacagccgttagtagagcaatggcttctattttagatttaccgctgttaaatgattttgccttggacttagctggtcgaggaaacttcacggcaacgattgaccatcgtttagaaaatgatgcatacaatcgaccattatttgtgacagtagagtcaacgttagatggaaaagttgtcgcagcaactacggcgccttatttagcaacagagttacaacgacaacaagtgaaacaaaataaccgcttaggaaggagaggataa

SEQ ID NO: 2249 - DNA, 942 bp, Enterococcus faecalis
gaaggagaggataacatgtataaatttgttgataccaatcaagcaactcattcaacgcctcttccttcagaagcgttgaattttaacggccaatttttagaaaaagtcatccctggctatcaaacattatcagtttcaggacgagaattagttccaagcgaaattgaaagctatcaattagggattcgtgatggtaaacgtcacgtttatgcgcgaattccagaacgagaattaacagtcaaatatcgcctttcagctgtgaataatgaagcatttcgagatgcatttaatcatttaaacgttgctttgtttacggaaaaagacgtttctatttggtttaacgatgaaccggaaatgctgtggtttggcagtaagtcttcagtgagtgatgtacccgaaggtgttaaccaagtaacaggcacctttactttattgctttctgatccgtataaatacacacggagtgatgcgactagtgtgatgtggggttcgccaaccattacatttcaagcgaattacttaatggggaatacaggctcaggtgcatttgattttccaattttaattgaaggcggggcttattggggatcaaccatgattacctttcaaaatcgggcttacacgatgggggatttaggcaaagaagttcggccaattgaaatttatcctacggttgaaggattaaaagtcaaaccgaccattattttaacaggaaccggacgtggtgtttggattaaaacacggaacgatacaattaacttaggagactttgatcgttcggaaattattatcgatactgaaaatttttatctgacaaaaaatggtgcaccgatgattcgaccaatgaacgatttttatctatatcccaatgaaccgctgtatattcaagccaaagatagcgacttccgcttgacgattcgctatcctaaccgatttgtgtag

SEQ ID NO: 2250 - DNA, 1038 bp, Enterococcus faecalis
atgttaatggcgctggatttgaaaagaacatatacggcaatcttggataatgcctatcaagtcagttatgaaaaaatagagaacaaaattggcagtttagattttaccatgccactagatgatcctaaaaatgaatttattgcagaaatgcaatgggtggaactgaccgacaatgagaatgaatatattggtttatatcgcgtgatgccaaccacaattaagaaagatgcgaacaataatcaaattcattactctgccacagaagcattatgtaccttaggtgatactgtcctttttggttgtcacgaaattaaaaacaaaacaacgaaagaggccattcaatttttattgaataaacaaaaaacaaagcattgggtcctaaaaaaatgtgatttttcaaggaaattaacctataaatgggaaaatgaaaatgggttagttgagcctttatttagcatcccagccgatttcgaagaggaatatctttggcaatggaatacagaggtctatccttttgaactttcattagtcaaaccgccaacagaaccagttgcgcgaattcaagaaggttacaacatgcaaggatttgaaatagaacgtaatcccaagatgctaatcaatcggatttatccattaggttcaggcgaaggtgttaacaaagtcaatattcgctcggtcaatcaaggggttccgtatttagagaacaaggccgcaattgaccgctatggtttattggagtcaatttgggtggaacagcgtttttctgatcccaaggcattaaaggaaaatgctttgcgaatgttagaagaatggaccaagccacaagtttcttgggtagtgactgcagctgatttaattaaattaacagataaacctttggcaatcgatcgtttgcggttgggcacggttatcatgattaatacgaatgaatttgggagtgtcaaccttcgtattaaaaaagaaagcaaaaaagatgtctttgggtgccccccaagacattcagctagagttgggaaacctgcaagaaacaattcatag

SEQ ID NO: 2251 - DNA, 195 bp, Enterococcus faecalis
taccatgacagctttcattccgaaaccagagaattacgaatcttacgcccaaagggggcaaacaaaccttttaaattccttcaataccgaggagaaacttatcaggaacccggccagtggaacggatttattcttttgaacaaagaactctctattttaaacacccgccatataactttcaaagctacctggtaa

SEQ ID NO: 2252 - DNA, 303 bp, Enterococcus faecalis
aattgtataaaagtagaagtgaggtgtagtaaaatgggttttacagacgaaacagtacgctttgattttgatgataatcgaaaaaaagcaatcagtgaaacgttagaaaccgtatatcgggcattagaagaaaagggatacaatcctattaaccaaatagtagggtatttactttctggggacccggcttacattcctcgttatcaagatgctcgaaacttaattcgtcgtcatgaacgtgatgaaatcatggaagaattaaccaaatattacttagcgaaccacggaatcgatatcaaatga

SEQ ID NO: 2253 - DNA, 477 bp, Enterococcus faecalis
  misc_feature (403)..(403): Nucleotide 403 is "n" wherein "n" = any nucleotide.
aatcatggaagaattaaccaaatattacttagcgaaccacggaatcgatatcaaatgaggatcatggggctagatgtaggttcacggacagtcggtgtggctgttagtgatttattaggttggacagcacaaggcatcgaaattattcgcatcaatgaagaggaagagaacttcggttttgagcgattaggtgaattggtgaaagaatacgaagtcacgaaatttgtcgtaggtttaccgaaaaacatgaataattccatcggtcctagagctgaagcatccatggcatatggtgataagattcaagaattatttcaattacctgttgactatcaagatgaacgattaacaactgtccaagcagagcgtgtcttggtggagcaagcagatgcttcaagagccnggagaaaaaaagtgattgataaactagcggcagtaatgattctacaaaattatttagatgcacatagccgataa

SEQ ID NO: 2254 - DNA, 660 bp, Enterococcus faecalis
attagaaccactggagaaaaatctcatatttctctcgaggaaaggaagttgagcacaatgaacaaaaaaattttaatggggctattaagtgtcgtgaccattccattacttgctgcgtgtcaaggaggagaaacaccttccgcagcgtcaaaaaatagtcaaacggtgactactcaaagtagtgcaaaaactgaaagcaccagtacaacccgttcggtagctcaaacaacatcaaaagaggaagtgaaagaaccgatgaagacctatgaagtgggtgcgcttttagaagcagccaatcaacgagatacgaagaaggtcaaggaaattttacaagatactacttatcaagtggatgaagtcgacacagaaggcaacacaccgctcaatatcgctgttcacaataatgacattgagattgcaaaagcgttgattgatcggggtgccgatattaatctgcaaaacagcattagtgatagtccctatctttatgcgggagcgcaaggacgtacggagattttagcgtatatgttaaaacatgcgaccccagatttaaataagcataaccgttacggtggcaatgcgttaattccggcagctgaaaaaggacatattgacaatgtgaagctcttgttagcagatggacgagaagacagacatgct

SEQ ID NO: 2255 - DNA, 1050 bp, Enterococcus faecalis
tcgtttatgaagaaaaaaatcgttggtacaattacgttgttggctttaagtgcgttattagttggtggagcaggaggggctttgacggcagaagcatacgttcctcaaagcgtagacaatcccaataatttaggggatttacctgagtatttacgttcagttggtattagacaagatgaaggattatcagaaaaagattgggctggaacacgcgtttatgatcgaaatgggaatgacttaacagatgaaaatcaaaacctattacatgcaatcaaatttgatgcaaccactagtttctatgaattttttgataaagagactggagaatcaacaggagatgaaggaaccttctttatgaccgctggtattacagatgtttcccgtcttgtaattatttctgaaaccaaaaattatcaaggtgtatacccacttagaactttataccaagatacttttacgtatagacagatggggaaagataaaaacggaaatgatattgaagttttcgtagaaaacaaagcaacctcaggaccagtttatggtcgtccgcagccataccccaataatcgtcccagaacactagaattcacgaatggacgccgtgccatgacagaacaaacaggccagattgatgtaaatcgacaaggggatgaaattattggtaaaacttcctttgatgggacaccgcaacttctttggaatggcacaaaagtagtggataaagatggcaatgacgtaacttcggccaaccaaaactttatcagcttagcgaaatttgaccaagatagcagcaaatatgaatttttcaatttacaaactggtgaaactcgtggcgactatggctactttaaagtaggaaatcaaaataaattccgtgcccatgtttccattggaaccaatcgctatggcgctgtcttagagttaacagaattgaatgataatcgtttaacgtacacacgaatgggtaaagataacgaaggaaacgatatccaagtctatgtggaacatgaaccataccaaggaacttttaatcctgaatttaccttttaa

SEQ ID NO: 2256 - DNA, 999 bp, Enterococcus faecalis
gataggtttatcaaagaaaaggagcgatgctttatgaaaaagaaagtattaagttcgattactttagtaacattaagtacgttacttatagcaggttatgcaagtccagcatttgcagatcatgcagccaatccaaatagtgctacagcaaatttaggcaaacatcaaaacaatggccaaacaagaggcgacaaggcgactaagattttatctggcacggactggcaaggaacccgtgtttatgatgctgctggtaatgatttaacggcagaaaatgctaattttattggtttagcaaaatatgatggtgaaaccggtttttacgagtttttcgacaaaaatactggggaaacccgtggtgacgaaggaacattttttgtgacaggtgatggcacaaaacgaattttaatttcgcggacacaaaattatcaagccgtagtggatttaaccgaagtgagtaaagacaaatttacttacaagcgtttagggaaagataaactggggaatgatgttgaagtttacgtggaacacatcccttatcatgggaaaaaattagcttttacaaatggacgtgaagcattaaccaatcaaactggcaaaattgtgacaaataaatcaggggataaaattttaggaacaaccttgtggaatggcacaaaagtcgtagataaaaacggtaatgatgtgacagcggccaatcaaaatttcattagtttagcgaaatttgatccaaacacaagtaaatatgaatttttcaatttacaaacaggtgaaacccgcggcgactttgggtacttccaagtggtggacaataacaagattcgggcccatgtatctattggtacgaatcgttacggcgcggcgctagaattaacggaactaaacaatgatcgatttacgtatactcgaatgggtaaagataatgctggtaatgatattcaagtgttcgtggaacatgaaccttaccaaggcacatatcatccagcctttactttctaa

SEQ ID NO: 2257 - DNA, 1011 bp, Enterococcus faecalis
atatatcaaaaagaaaaaaggggattaccaaccatgaaaaagaaaaaagtttttagtgcgcttaccttattaacctttagtacgttgttgattgcaggctgtgctggcggagccaactctgcaacagataaatcaagtgcagctagctcaagcactgcagtctctagttcagcagaagcagctaaagagcaatcaaaaggacaagaattaacagaaattttatccagtactgattggcaaggcacaaaagtttacgacaaaaataataataatttaacagcagaaaatgctaattttattggtttagcaaaatatgatggtgaaacaggtttttatgaatttttcgacaaagaaacaggtgaaacccgtggcgatgaaggcacattctttgtgacagacgatggcgaaaagcgtatcttaatttcggatacacaaaactatcaagcggtggtcgatttaacggaagtgacgaaagataaatttacctataagcgaatgggtaaagataaagacgggaaagatgtagaagtctttgtagaacatatcccttattctgacgagaaattaacctttacgaacggccgtaaagatttagaaacagaaactggcaagattgttaccaatgaacctggggatgacattttaggggccacattatggaatggcacgaaagttttagatgaagacggtaacgatgttactgaagcaaataaaatgtttattagtttagcgaaatttgataataaaacaagtaaatatgaattctttgatttagaaacgggtaaaacacgtggagattttggttacttccaagtaattgataataacaaaatccgtgctcacgtttcaattggtgacaataaatatggagctgcattagaattaacagaattaaatgataaacgttttacgtatacacgaatgggtaaagacaacaatggcaaagaaattaaagtctttgtagaacatgaaccatatgaaggagactttacgccagacttcacgttctaa

SEQ ID NO: 2258 - DNA, 1503 bp, Enterococcus faecalis
aaaccactaggagggacgcttttgaccattaaacgccgcttttttatttcttatattagtgccatcattattactttagcctctgttttagctgttttatccttagcttcttacatcacattaggaactgtccccagtttgccccaagcttaccgaatgatgaataagcaacgaccattgaccgctaacgaagaagaaagttatttggccttagatcaactgctaaaaaaatcaccgaaattactagatacacctttgagtaaagaattaaaggaaacgattcaaacaattgaagcaaaaggattaagtgtgattattcgaaagaatgcacggtttccttattattcggataatttagtagaaaaatctttgtctgtacatattccaaactacgaaatgaataatattatgccaactggcacactggataatgcagggcgtctatatcattatgtcaaatccgattttcattatttagatggttctaacgggagctttattgtcttgaaacgcgaaagcagcctttttgaattcttcacacgctggattatctggatgattttgttaattatccttgtagcaattgcggcagcttggctcattaataagcgcttaaccaaaaccactatcgagccattagaagcattagaaaaagcgactaaaacattgggtaaggatgcccaaaaagaaaatccatttacgccaactagccaccaaaccgtctcaacagaagtcaaacagctccaacttagttttgaacaaatgtggcaagatttagaagaagccaatgcggaacgcgaaaaatatgaagctaatcggaaagaattaattgcaaatatttctcatgacttaaaaacaccaattacttctattattggttatgttgaaggtttgatggatggcgttgccaatactgaagaaaaaaaacagcgctatttaacggtcattcatgaaaaaagtttaggcctcaatgatttaattgaagaattatttttgtattctaaattagacctagaccgtgctgtctttacaatggaaaagaccaatttcactcgttttattgcacatattcttgaagaataccgtttggaacaagaactcgtaatcacttctgtacttcccaccgaagctttatacgttcaaatggatcccacgcagatgaatcgcgtgattaccaatctaattcaaaatagcattaaatttgcggatcccactaaagaacaactagcctttacgatttctttaacgcataatcaaacagacttagttttaaccattacagataacggcattggtatcgataaaaaagaattaccttatttattcgaacgcttctatcgtgtagacaaatctcgaaccccaacagttaaaggaagcggcttgggattaagtattgtcaaacaaattattgactatcatcagggaacaatcactgtcacaagtaaaaaaggagacggcaccaacgtgataattacgctgccgttgttggaggatgaaaaatga

SEQ ID NO: 2259 - DNA, 696 bp, Enterococcus faecalis
aaaatgaaaccacatgtattaattattgaagatgatccaagcattgctgatttgcaaaaagattatttagaaattaacgatatgactgtcacaattgaacatgatggaaaaaaaggattggaagcagctttaaatgagccctttgatttaattattttagatgtgatgctgccaactatggatggttttgaaatctgtcgtgcaattcgaaaaaaaaagcaaacgccgatcatgattgtttcggctaaaaaagaagatattgataaaattcgtgggcttggcttaggtgcggatgattatataatcaagccgtttagtcccaatgaattagtcgctcgagcaaaagcccatatgaaccgttatcaattgttaagcaaagcagaacaaccaccacaattactaaaaatcaatgaaatcgctgtcgacactgccgcccacaaagtgtttgttttagaaaatgaagttatttttacaagcaaagaatacaaattgctggttttcttgatggaacatcctaaccgtgtgtggaataaagaagaactttttgaaagtgtctgggggtttgatgccttagatactgaggtttcgactgtcgttgttcacattaaacggattcgggaaaaattaaaaaaagccaatctttctgactctccaattgaaacgctctggggaagtggctaccgcttcaatcgataa

SEQ ID NO: 2260 - DNA, 1149 bp, Enterococcus faecalis
caaatgatttattttgataatagtgcaactacaccgatttacccccaggctttagatacatatgtaaaaaccagtcagcggattattggcaatccgtctagcctacatgacttaggcagccaagcgaatcggctcttacaacaagcacggaagcagattgcggagctaatcaatgtttcagcaaatgaaatctattttacaagtggcggaactgaaggagataactgggttttaaaaggaacggcaatcgaaaaacgagaatttggtaatcatattattatttctgcagtggaacatccagcagttacagaaacagcggaacaattagtcgaactaggttttgaactttcttatgcgccagtggataaagaaggtcgtgtaaaagtcgaggaactacagaaattaattagaaaagaaacgattttggtttctgttatggcagtgaacaatgaagtgggaacgattcaaccaattaaagaaatcagcgaggttttagcggagtttcctaaaattcattttcatgtagacgcggttcaagcaattgggaaagttaattactcagagtggttaacggatcgggtggattttgcaacgttttctgcacataaatttcatggaccacgaggcattggttttatgtattggaaacaaggaaaacgtttagcgccgcttttaacaggaggcgggcaagaaaacaaccaacgcagtgggacagaaaacgtaccagcaattgtggcaatggccaaagcgttgcgtttgcatttagagaacgaacaacaacggccgcaacatgtggcgacattacggagttatttattaaaggcgctagaagaatttcaaaatgtgactgttttttcacaagataatgaacattttgcgccacacattttatgttttgctttgaaagggatccgcggcgaagtgctagtccatgcattggaagaaaaacagatttatatttcgaccacgagtgcttgttctagccggaaaaaaatggctagcagcaccttatatgccatgcatgtgccaggggaattagcgacttccgctgtgcgcattagtttagatgaaagcaatacaatggcagaaattgaacaatttatgattgttttcaaccaactttatcaaaaattttctcgtgtaaattaa

SEQ ID NO: 2261 - DNA, 1542 bp, Enterococcus faecalis
aaagagaggagaatgcaaatgaaatttacaaaggaattgcctgtttggttagcaccaggtattaaaccacccgaaagcttaactagcgatggttggaaagcttcacaaaaaccaccagctgattattttaattggttctttagcagaacccacggagctttaaaagaattgcaagatagtgctacacatattgaagattttaatgcccataaatcaaatataagtaatcctcatgcggtaacagctactcaggttggtttaggaaatgtactaaatcaaaagcaggcaactaaatctgagtttgatgcgcatgatcaagataacattagacatattacagatgtagaaagaaatagctggaatggaaaagcagaaaaaaatcacacccaaccatggtcaacaattacaggtattccagattcaacaattaccaaaaaagggatcgtgaagctgactgactctgttacgagcacggatatattgacagcagcaactccaaattcagttaaacaagtcaatgataatgctaatgctgcaatggctagtgcttcttctgtaaatgataacctgacgagccataagattgattataaaaaccctcataaagttacttctgcacaagttggttcatatagtaaaacagaaacagataacctattcatcaataaatcagatgctgaaaacggcttattggtaagaaaaagtattgaaataacagacttaaataatgctaaagaacctggcatatactcgattccagctacaggagttgaaaacaagccgctaccaaactctggaagtttgttcgttagtaaagacccaggaggagtcagacaactatttcaaacggaaaggactatcgttattcgtcaatttggtggtattccttcaaagtggacggattggaaagaagtagcatttaaaccgaatgttgtgaatttaactgaacctcaacgtataggcggaactaaagaatttgcggatattccattagtaaatggtacagaaatagctttgaaagaagatatatttttttatcaaaagactgggcttgatgaagtccaagcagactacaaagcttcttttagggaagaaacaaatatgtttcttacacgagaaggaaacagagttgatgcttatttacgagttaatgtggtggatgtcaccaaactaaaaactgcttttgttccgatttttcaaattcctgatggatttaaaattgatcttagcatgagggagagtttctggaatgttccattgacagtaactcaatacacctacccacaaggtaactatggtgcattatatgagatgaacgtgaaaggaatccgattcggaagtgaccgtcttggtaatcattatctatacggaagttggcatactaatgatccaaaaccagatgctaaatttaagtatatgctttatgtgaacttatataatttgtctgagggaagagattttgtttcaggttcatacaaaggagaaatttattatgtagctgttcaaattgatcgacatttaaaaggactaacgcccatattt

SEQ ID NO: 2262 - DNA, 636 bp, Enterococcus faecalis
ttactagtgaccaaaaagcttagagattatttaccagatctattcaatcgcgaaaattcaaatatttcaaaacttcttgaaattattgagtttgaaattaaagacttgactgatttgctgaataaagtagcaaactggcgatcgatagatgaagcacgagggaaaggactagatgaattaggtgctaatgttggacaagcgagaggaaaaacgactgatgaaatatatagagtattgattcgtggaaaggtagctagaaatacaagcgatggatcaatcgacaaaatgttacatgcaattgcgacatctttaaattgtcatcctagtgatatccatattatatcagctaatgagacggtagatgaaaaagaacctgcttgtgtaatcataaaaaaagctcctcttgactacttgaatagttcgggtctaagtattagtcaatttttacaaattgtcgagagtatcagtgctggaggcattagagtagcctacgttaatttggagggaactttttcattttcaagtacgactgatatagagattagtaaagaaggattcgctgatattgatggtaatatcggaggaactttgggaggagtctttattccagaaaatgattataaactgccgctgtag

SEQ ID NO: 2263 - DNA, 234 bp, Enterococcus faecalis
aaagaaataaaagttatagtaaataattacattaacaatctgactatgggtgaagtagtcagatttacttatatttatccattaatttatcaaataccaggcgttgttgtcgctgatgtaaaaattggattatctactgaaactaccgaagtcaaagacattaatctgaatccaaatgagtcagctgaatgtaaaacagagaatgtggtgattactagtgaccaaaaagcttag

SEQ ID NO: 2264 - DNA, 954 bp, Enterococcus faecalis
tacgtgcttgatgaaaatggatttaaaagaaaaacatatgatgaaatactctatgatatgtctgaaaaggcaaaagccttgtttggttcggatgttaatgtttcaggacattctgttctgggtatcattattcgtatcgttgcatggtttttatctatatctcatgaactaactgaaagagtttattatagtggcttcataagtcaagctacaggggtttcattggatcgtttaggtgcgaatagtggtatctatagaaatccagctacagttgcaatggttgagctggagttctcaggaaaacctggttacatcattaatgaaggcgtacgtttttcaacagaaaataaagttatgtttcagatgattgatatagtcaaaattgatgataatggatttgggaaaggccgcgcaatttctttagaagagaatgctagttcaaacgtaccagctaatactattatagtacaagtggaacctactgaagaaatatcatctgttaataaccctgctagggctgagggtggggcagaacgtgaaacagataaagcctatcgcgaccgaattggtatttctgttcgtgggaatcctggaccgccaataaacggaattctaactgctttgctagaagttagtggggtacggaccgctagtgttgttgaaaataaaacaatggaaactgattcgtatggtaatccacccaagtcggtacatgtgcatattttaggtggagtgaaagacgatattgggcacgcaatttttaaaagtgttgccgctgggattgaccctgttggtaatcaggagcttgaattaaaagacttaggaggatttagtcctattgttaaatttgattatgcaaaatctgttcctatttttgtgaatatttctattcaagtagattcaaaatttgaaaacaaacgggacatagaaagaaataaaagttatagtaaataa

SEQ ID NO: 2265 - DNA, 375 bp, Enterococcus faecalis
cgctgttattatgggggtgattgcttaatgagggatttgaaaatagtcaatggagacttatcatttattgactatggaattttactagttgaaggagatttagaacttgcacaaagtgtattcatgatcttatcaatacgactagaagaatttaaattagatacatccgttggtttagaaagtgataatatgtttggaaaaaattacaatgaagattacttgaaacaagatattacagaagcgattttagatcaagaacctagaattaatagtattgaaaatatagaaattgtaagaaacaatagacagttgaatattacagtggagatgctatcaacattaggtgatgaagtggaggtggtaatacgtgcttga

SEQ ID NO: 2266 - DNA, 345 bp, Enterococcus faecalis
ggtggtaacctaatgaaagaaactgacttagctttttttcgatcatttaaaaatagaattttaaaagaaattaatgttatgcaactatgtcgagttgtcactgtaaaaggtgcaagagctgatgttcagccaatggcattaaaatcagatggaggcaaaagagcattaatactaaacgcgttgatcactaagcattgtcagtctgatatctcacagggagcggttgtagtagtagttttttgtgatcgtgacatagataattatagaagttctgctgattattcattatcatctgatagaatgcatagtcaaaatgacgctgttattatgggggtgattgcttaa

SEQ ID NO: 2267 - DNA, 831 bp, Enterococcus faecalis
atgggaaatacgcaatggcaacgattattacaaattgaaatacacgacaagaatgggaagaatcgagttctactaagagctgattcaggcaggttggatcggttagaaattcactttacagcacctttttctgactcacctaatccatctgaagtgagtgtgacaatatacaatttaaataaaaaaagtattgattttattaagaaaggaaatccagtctatatccacgcaggatacgcaggtacttcaaatggagtgattacgtcaggaacgatagcagaagtaaaaccctctgttctaaacggagtagatagagcaacaacatttacttttttagaaggtaaagattactcggaacaaaaagaagtaaatattacttttaataatggaacggatgctcatactattataaatcgagttgctagggaagcaaatattcctttgtcagaaattaagttaaaaaataataaaatatatgggtctggctacacagctgatggccaagcaatgatggttttagaagagatttccaaagcttgtgacacatcactatattttaaaagaggtcaacttgtaattaaaaattttcgagatggaaataaagagagatacagattaagtcctgaaacgggacttattaaccaaccaacaaaagttgaaagtcatgattatactggttggtctgttgagtgtcttttgcaacataaaatcactacaggtacagcagtctatatcgattcaaaaaatgtaaaaggaaatttttatgtaaaaaatggccagcactcctatgatggtagtcgatttgttacaacgtgtgaggtggtaacctaa

SEQ ID NO: 2268 - DNA, 219 bp, Enterococcus faecalis
atgtctttaagagcatatattcctattgataaatattcattacctgaaaaattcgaaatacctttaggtaatacaaattacatttttgaggtggactataatcaaacagaaaaattttttactgtagatctatatgacatagatcatacaccgatagatattagtgagcgtatggtaattgatgaaagactttggcaagacatggtagatactcgttaa

SEQ ID NO: 2269 - DNA, 585 bp, Enterococcus faecalis
tattctaggaacaggagaggttgtttaatgggatacattcagagtggtaaatctaaagttgagattgtaaacgtcagtgagactgtaaccagtgctgctaatgtatctcaatatcctgttgaatcaggagcaccaatcactgacaatatgatgtatacaggcggtccagtcacaattagtggctggattctcgctaaaaatggtaacgctgcagagcaagcttacaatacattagttgcatggcaaaaagatgttcgttggattgtttatcgaggcagatcatattttaaaaatgcagttatacaagatatcagtaaagggtatgacacagtggaaaatggtttcactataacaattacgttacaacccatacgtgtagctaagactatttgggagaagattccacaaccgccagttgcaaaacaaccttcgaaaccaagtaatgcggtatatgtgacagttcagccaggaaatacttattggggttggtggcaacaatatggtacgtctattcagcaattaagagattggaacaagtggccagatagatttatacccataggcgctcgtgcgcgtgtgaaatga

SEQ ID NO: 2270 - DNA, 5190 bp, Enterococcus faecalis
  misc_feature (183)..(213): Nucleotides 183 & 213 are "n" wherein "n" = any nucleotide.
ttcaagaggaggtgtcatctattaatggcagatgcgttacgtatttcagtaatcgaactcgattggaaaatacataatagatcgttagagcgtgccaatgaagaaactgataaaattcttgctaaagctgcacgaatggaaggtacttatcacaattcagcaaaatccatagatggcgccacnacctctttaaaaagaaatagtgaaggtttnaaacctaatacagataaagttgtccagttcggaaatcgagcaaaagattctatgcaaaagacaacaaactctgctagacaaactgaaaaacaagtaaaagatgttggaaatcagtttgataaaagtaaaaattctgcgagtgttttcgctcaatctagtgcaacatctctaaaagtagttggaaaagctgcgaagggtgtacaaacaagtattggccatataggtactgttgcaacaaaggcttcagatgttgcttggaatgcttttacaaagataagaaatggtgcaatgatagctggtgcagcaatcgcaggagcaggcaaaaaggcctttgactatgcatctgatactaatgaagctttaaacaaagtagaagtagcttttggtgataacaataaagttgtagaagattggtcgaagtccacactgactaatattggtttggcacaaggtacagcgttagacttagcagctacatatggagatatgtcaacttcaatgggtattggcacagaagaagctgcaaaaatgtctacttcattagttgacttggcaggagatcttgcttcatttaaaaatataggaattgaccgtgtaaatactgcattaaatggtgtattcactggtgaaactgaggcgttaaaaggtttgggtattgttatgactcaaaccaacttggaacagtttgcgatggccagtggagcgttgcagtcgtcagtagataattctaaggctgcaaagaatgccatggcaagagaaaaagctcaagatcgtttaaataaagccattaaaaaacatggtgaaaattcaattgaagctagagatgcgcagttaaaattaacagaagcagaatctaaaggtgaagaggttcaacaagcaaaattagattctctaagtcaggaagaattagtacgcttacgttataactacgtaatgtctaaaactaagaactcccaaggcgattttgcaagaacaagtgatcaagctgcaaatgccacccgtgtttttacagaatcaataaaagaaacatcggcgaagttagggcaaggtttgttaccaatattcacgccactaattatcaaagcgacagattttgtaaaaaaaggtgaagaaataccagatatgttagaaaatgttggcgcaaaagttgagccaacagcaaaacaggtaatgaaacactttggacaagcaaaagattattttgttgatgaaataattcctacagctaaaaaggtaggcaaagctataggacctggcatttcagaaggtgctaaaaatatgtttaacgtaatggataaagggtttaaatatattattaagccaagcattcgtatactcaaagaatttactgatgaaaaccctgttgctatgaaacaagttggcaaatgggccacgtatggtattggcggtttgctagggtttaagctagtaggaaaaccgctcttgggagtctcaaagggaattttaggtattattggtaaactagaaaagcttgggaacactgctcagagagaagcttttaaaacaagaaaggctttagaagatgttgattctgcagctcaaaaagctagcgcaccaacgcatactactgctagtccaaatatacaggaatccttaccggttggatctgttggcaaaataggaaaaggtactaaactttttagcggagtgagaaggtttgccaaatcggttcctttattgtcttatatttcggcaggtttaactttaactcaaattaataaaaataataagtttgaaaaaattggtgattcgttaggttctatcgttggtggagcattatgcgctaaagcagcaacattagctggcgcaaaattgggtgcagcagcagggacaacatttggtccgttaggtactctaattggtggcgttttaggaacagctgcaggatcaatttttggaagtaaatttggaaagaaactgcaagaaaaatggcccgatatctctaaaaaaattagtgaattatgggaatcatcaaaggataattttttattgggtcctctagttcaaggtattgataaagcagttaaaaaaagcaaatcaggaataaaagaaatcaaagcttcagcaaaggatttattcgaaaagccgtttgataatactactaaatctggtaatggtgtatctaaagctactgctaagcggatgaactcttttatgaaaaactatgagcttcttgttaatcaagacactacaggtaaaattgaaggacgagttcttaccaatgaagaagttactaaacgatataaagctttagaagacatgcagaatcaagttactaaacagctgaataaaaagaaagataaatctaatggcaatcttgataaattagctggtatgggaattcttaatgaaaaggatgtacaaggagccaaggcagctgctgatgaattagcaaaagtacgaacaaatatgttctctgaaaaagttcaagatttcaagaaattagaaaaacaagaatatgatgaatctattactgctacagagtattacacaaatcgtatcaatgaaatcaaagaaaaagcaagattagaaaatcgagaactatcagaaaacgataaaaaagaaattgagtcgttagaaaaaacctcagctgctgcagtacgtgctgttgaagaaaaacatgctgctgctaataagtcgattcatgaagatatgaaaaatcaagctgttgttgcattatcagattcagctaaagagcaaaaaatcattatgggtaatttgaaaaatgcatcaggtgagattagcgcgcaacaggctgctgatgctgtagcagcttcatataaagcaaaagaaggtacaattaaatctgcaaatgaaaaatatgaagaaacaaagcgcattttagatgaagaaagatatgtcaatggtacgattactcaacaacaatatgatgatgcattaaaaaaagcccaagaacaaagagacggtgtagtcaaagaagcagaaaaacaacatgaagatgttgtaacgcaggctaaaaagcaagcggaaggtcatcttgaacaagtggactgggaaactggacaaacattatctaaatgggaagtctttaaaaaggattccaaaaagaaatttaaagaaatttgggacggaacagttgaaggcgctaaaagttttggtaaggcctttggtgaagctatggataaagttgtgtctggagcattagaaacttgggataattttaaaacagcactcgccgataaagtaaatgctgttacaggtggtattaatgtcgtattagatttctttagtattcctaaaataccagaatggaaaccgaatacacctaattctactaaaaacaagcatggtcgctcttttagcacaggatctcgtggtgcatcatacagtggtcaagctctagttggtgaagaaggtgttgaattagcatataacaagagcacttcttcaatgcgtttattaggatcaaatggtccagaagttactaatgtaacatcgggtgaacggattttaaaccattcagatacaaaagctgtattaaatggtggtatggggcaaggaacagttttaccaggtttccataaaggtaaaggaaatgggctttctgattttgttgatagtgctaaggatttcggtgcaaatactgttgataaattaaaagactttggatctaatgcagtagataaagcaaaagaagtaggaacgaaagctatagaaaaaactaaagatatagctgaaacagcaaaagattggctatcagacccgattggaaaagtgactggcttatttaataagcataacacttataaaaagggtaaaaatatccaaggtttgggacatggtgtcatgaacaaactaaaagacaccagtgccgaatgggtgaaaaataaacttgaagctttcaaaggtttttttgattcggaagatggtgtctcttttggctcaggtgcttttgctccacattttggatcaccatttgttcgtacttctgattatggtaagcgaccaggcctctatggggattttcacacgggtattgattatgctgctccaactggaacgcctattccagctcaatatcctggtttggttgattgggttcaatcttcttccattggattaggtgagcacgtaggaattaaagttgctgataatctatgggctatgtatggacatatgagccgcataagagctaagatgggcgataaagttaaagctggtcaaatcgtcggtgatgtaggttcttctggttggtcaactggtcctcatgttcattatgaacttagaaaaggcggaccaaatggccaacacgtaaatcctgatacttatggcggagctgctggtggtgtggcggtaggtgctgcaggatggggtcctcaagttagaaaagctgcaaaacaaatgaatcaacaagtaagtgatgcagaagtaaacggcattttagctcaaatacagagggagtctagtggtaaccaaagtattattcaaagttctgctgtttgggatgtaaatacagctagtggaaacccagctcgaggattgcttcagtacattcctcaaacttttgatgcatataaagtacgtggatatgaaaatataatgaatggtttccatcaactaatggcatttttcaataattctaattggagaacagatttgccgtatggacattctggatggggaccaacaggtcatagattaagggcttatgcaaagggaggccgcccttcaaaaggtgaaacagttttagtaggagagaatggaccagaattgttcgaagcagatacagctggaactgtacatcctcatgaaaaaactaaagcgctctttaatcaaggatctccatctgttaattttagtcctaatattactatcaatgttgggaataattctgataaatctgttgttggtgatattaaagaggctgtaagacaagcattagaagatgagtatgcaaaattacttaatattctaggaacaggagaggttgtttaa

SEQ ID NO: 2271 - DNA, 201 bp, Enterococcus faecalis
gaatattttaagattaggtctttagcacatggagatatctcaggtacatttgaaagaacgctatttaaacaaataaagacctctgaagtacaaattacgatttcaaaaagtattcatgcttatattactaaagagcaaattactgatatcgataccaacgaaacgaaaataaagtatacattaaattcttttactcaataa

SEQ ID NO: 2272 - DNA, 204 bp, Enterococcus faecalis
attcttttactcaataacgtatttaagaccctagcctactataagctacggtcttttatttttatcagaattaaacagtcattaacgaaagtcttgctcccagataagagtgagcattttttatgcactaatcaaagatttccttacaagcattttctcaatgacaagttgatttcgtttattcaagtgaccatagaccgctaa

SEQ ID NO: 2273 - DNA, 261 bp, Enterococcus faecalis
gagggcgatagtatgaaaactaattatgtaggagtagttgataagattagaatgttaagtatgtacccaaaaatgctagttcgattctcattagtaacacaggacgaaactataaactgtatcgtctcgaaaaacgagctggcaaatacgctactaatgttacctgaacgatctgaattagcggtctatggtcacttgaataaacgaaatcaacttgtcattgagaaaatgcttgtaaggaaatctttgattagtgcataa

SEQ ID NO: 2274 - DNA, 186 bp, Enterococcus faecalis
agaaaaatgagaaatacatggttagcagaacaacttcagtcaatcagtgaagaacccaattcttttattatcgaggaaaccatcaaatatattgaacaattagaagatgataatgaaagtcttcaagttgcattggaaggaactatttggagtcctaaaaaatggaacgaaccattggaaaaataa

SEQ ID NO: 2275 - DNA, 465 bp, Enterococcus faecalis
atttatttggagggatctctgatgaatatacgatatatttcaatctctggtaatacacgctcatttgttcaacgtttaacaacttattctgaagagcaacatcagcacaacgaaaaaaatcctacgattactttcaaagaaatttcggaaaattctccgttagaagtagaaacagaaccattttttacctttgtgcctacctatttagatggtggcgatggcatcaacaatggcaataccgaaattttaacagaagtcatgcgagaatatcttgcttttgaaaataattatcgttattgctctggcgtggtgggcagcggcaataaaaactttaaccaccaatactgcctgacagctaaacagtatgcggaacaatttaacttccccttcttagctgattatgaattaagaggtacccaagcggatattgaacgaatttatgctattttaaaggaaaaccaataa

SEQ ID NO: 2276 - DNA, 372 bp, Enterococcus faecalis
tcctttttcttatatgctaaaggtgtaaaaactaaggaggtggagacaatggtacaagaagtactagagcaaatcaaggcagcggaagatgcggtggaagagcatcggcaacaagctaagatgaattgtcgtttatatgaagaacagaagcaagaacgtttagctgaactacgtcaagagagtgaagaagctgttgaaaaagtgctgacggattcactagcaacgcaagaaaagatgttacaacttgaaaaagaacaacttttagatgaaacaaagcgcactgaacaagcgcttcacgaacgttatgaagcgaacaaagaacaagtcattgattcaattattgagagggtgaaagacgtttatggcagttag

SEQ ID NO: 2277 - DNA, 1989 bp, Enterococcus faecalis
aagacgtttatggcagttagtaaaatggaaaaaatgacaataattgccgctgccgaaaaagaagcagcaattctacaagccattcaaggcttgcaaattgtcgaagtaaaacggatttttcattcgcctgaagaagaacaagccttaaagagtcaatattcttttttacaagcagaacagtcaactgaacagctacgtaaatatgaaacgatgctacaacaattgcaagagcttcttttatttttgacacgctcttcaggaaaagggttaaagataaaaagaaaagtctataccttagaagagttggaacaaacctttgatgaagaaacattacaaagctatttgacggaattaaagaatattcaagaatctttgaaacaaattcaaacggatcgtcaaggattagaagctgaagaagaattattaggccgctggcaatatctggatgttctaccgcacaaacagcagttaaaaagtagttatgtcgttcatggttcgataaatctagccaataaagccagtttcttgagcgctttgtctcaatggccaacggtttattttgaagaaatttatcaaagtatgcatcatagttactttacactcgtttacctgaaggaacatcagcagagtgtaaccgagttattaaaccaatatagctttgaaccactccaataccgttatgatgttccgcctaaagaggcatatcaacaagtcaaagaacgatatgaaattttacaaaaagaagaaaaagccttaaagcaacaactggcttcttatcatgatttctatgaaacgttttgcttggctgaagaagtcttattggcggttatccaaagagaacaagcacgtcaacatttgttaaatgcttcatcatttttcatcttgcaaacgtggattccagtcgaagaaaaagccgagattttgacagcgattgaagaaaaagttcctaaggacgaaatagctcttacttttgaaaatcctacgaaggcggaaattgagacggatataccagttaaactagcgaataataaattggtgcagccgtttgaaatgttaacagagatgtatagcttaccaaaatatgaagaagttgatccgacacctgcgatgatgccgttttatctagtcttttttggtatgatggtagcggatattggctatggcttactgatgctactcttgtctattattgctttgaaagcatttgttttaccgagaggcatgaaacgttttgccgactttttcttgattttatcatttccaacaattatttggggcttcatttacggttcgtttttcggtgcagcattaccgccaataatgtttggaatcaaatcaccatttccgattttatcaacgaccgaagatgtaaatacgattcttattttatcggttatttttgggtttatccaattggttgtcggtttaatgattaatgggattcagttatcaaaacaaaagcgctatttagatagtattaacgaaagttacgcttggttagggattttgtttggtttagcattgttagtcgttggtaaattagtggttaaaaatgaaggcttatttacagcaggtgcgattttagctagcctttctgccattgcaattattgtgattccaatgattcaatcgaaggccaaattaaaaggcttagccaaaggactgtatggactatacggtgtgacaggttatgtcggtgatttagttagttatacacgtttgatggcgttaggaattgctgggggaagtattgcttcagcgtttaatatgctcgtagagttcatgccgccagttgcccgttttagcgtgggcatcttgctgttaattgttttacatgcgttaaacatattcttatcgttattaggtgcttatgttcatggcgcacgtttgcaatatgttgagttctttggaaaattttacacaggcggtggccgggcgtttaatccgctaaaaacaaaagaaaagtatgtcaatgttgagaaaaaatag

SEQ ID NO: 2278 - DNA, 501 bp, Enterococcus faecalis
aaaattatttattggaggaaaatagagatgatggattacttaattaataataatggtggaattgtttttgcagtattaggaatggcaatggcgacaatttttgctgggattggatcagccaaaggggttggctttactggggaagcagcagcagctttaacgacggagcagccagaaaaatttggtcaagcgttaattttacagttattaccaggtacacaaggactatatggttttgttattgctttcttaatttatattaacttaggaaacgatatgagtatggttcaaggattgaactattttgtagcagctttaccaattgcttttgcaggattgttctctgggattgcccaaggtcgtgtagccgctgcggggatccaaattttagcgaagaaaccagaacatgcaacaaaaggaattatctatgctgccatggttgaaacttatgccatcttagggttcgtaatttccttcttacttgtattgaacgtcaaataa

SEQ ID NO: 2279 - DNA, 594 bp, Enterococcus faecalis
ggaggcagatggatggatgccattgaaaaaatcatcagtgaaattaagcagcaaggaaagcaagaagtcgaagcctatgtcaccagtgaacaaacgcgcatcgatcaagaattccaagcagcacaacaagaaattttgctgaagcaagaacatgaaatagaaaaacgacaacaacaattattaaaagaatttaaacaacgccaacaacggcaaacactagaaattcgtcaggatgcattaaataaaaaacaagcatatcttaaccaattatttgacgaagtggtcttaaagatgagtgaatggtcagcggaagaatttcaacaattcatgaaagcacaattaggttcacttgaattaacaggaaaagcaaccattcttttaggcgagtattctcaaacgaaagtgacgcaagaatggctgaccgccctttctgatgctactgttcaatgggagctttcagaggaagttgttccaaaagaaagtggctttatcgttgcaaaagacggtttggattataattttctcttttcagcattagttgaagagattcaaaaaacagaaggctttaaagtagcagaaaaacttttcagttaa

SEQ ID NO: 2280 - DNA, 1038 bp, Enterococcus faecalis
cagaaaaacttttcagttaagaagggaggacgtagcatgagaaaaccaacgtatcatcaaattaatccgctgattcgtttaaaagaaacggagctgctttctgagcaacagtttcaacaacttttagaagcggaaacagttgaagacgttaaaaatatgttaaaaagtacggtttatcaaccttatttaaccgaaacttttgaagaaaaatttgactaccattcttctgaagcgctgggaagtctttatcgctggttatatgaaatggctccagaaccagctgtagtaacgttgtatacgatgcgttttaccttccataacttgaaaattttgacgaaagctgagcgaacaggtaaagattttgattatctttatttagaagatggtcgttattctctaaacacagtcaaaagtgccattcatacaaaaaactcttccgaacttgagccagcattattagaagtgattcgtgatgtttttgcctatctggaagagggcggtttaccacaagcaattgatatcctttatgatcgagcatttttacagcaacaacgaaaattggcggatgaattgggctatgaagagttaacgaaggaagtcatcgcttttattgatttaaccaatctatcaacgatggctagagggattgttcaacatcaaaacagcaactttttatcaaccgtactttctagcgctggcagtatcacaaagaaagaactgttgacctatgcggaaaagtcacttgtagaatttacagcatttgtcagaacaacgaattacggacaactattagaaaagattatcaataaagaaaccaatgaattaaatttattggcttttgaaaaactcaaagatgattacctgacctcaatgtatgaaaacggtcgaacggtcgcttttggaccgctcccattactagcctttttgaatgcgaaagaggttgaatggaaaaatctacgtttaattttggtcggaaaacatagtgggttctcaaatgaaaaaattcgagaaaggatgcgaaaagtcaatggggtataa

SEQ ID NO: 2281 - DNA, 375 bp, Enterococcus faecalis
ttttggtcggaaaacatagtgggttctcaaatgaaaaaattcgagaaaggatgcgaaaagtcaatggggtataaaattggtgtcattggagacaaaaattcaatcttaccatttaaactgtttggctttgaggtccatcatgccatttcagaaatgcaagttagagaagccattgaaactatggcgaaaaataagtttggggtcattttcataacggaagaagcctctactttagcagaagaaacgattgaacgatacaaagaacaagtgacaccagcgattattttaatcccaagtcataatggtacaatcggaatcggtttaagtgagattgaaaaaaatgttgaaaaagcaattggacaaaatattttataa

SEQ ID NO: 2282 - DNA, 1827 bp, Enterococcus faecalis
aaaagcaattggacaaaatattttataatgcaaaggagaatgagcgtgcaaattggaaaaattgtcaaagtttcaggtcctttgattttagctgaaaacatgtcagatgctagtatccaagacatttgtcatgtaggagatttaggcgttatcggagagattattgaaatgcgaggcgacgtcgcttcgattcaagtatatgaagaaacaacaggcattggaccaggagaaccagttatttcaacaggagaaccattatctgttgaattagccccaggtttaattgccgaaatgtttgatggtattcaacgaccattggatacatttcaagaagtaacccacagtaactttttaggccgtggcgttaaaattgatgcgttagatcgtgagaaaaaatggacgtttgaaccaactgtggcagttggtgaagaagtgtcggcaggtgacatcgtcggtgtggttcaagaaacaccgattattcaacataaaattatggtgcctttcggcgtttcaggaacgattgccgaaattaaagcaggtgactttgccattgatgaaacagtttactcagtggaaacggctaaaggaacggaaagttttagcatgatgcaaaaatggcccgttcggcggggacgtcccattttagaaaaactaagtcccaaagtaccgatggtgaccggacaacgcgtaattgatacctttttcccaattacgaaaggcggagcggcagcagttccaggaccatttggcgctggaaaaacagtcgttcagcaccaaattgctaagtgggccgatgtcgacttagtcgtttacgttggttgtggggaacgcgggaatgaaatgacagatgttttaaatgaatttccagaattaattgacccaacaactggtgagtctttgatgaatcggacgattttaattgcgaatacgtcaaatatgccggtagcggcacgggaagcctcgatttatacagggattaccattgcagaatatttccgtgatatgggttactcagtcgcaattatggcggattctacttctcgttgggcagaagcgttacgagaaatgagtggtcggttagaagaaatgcctggtgatgaaggctatccagcctatttaggtagtcgcttagctgaatattatgaacgagcaggacaagtcatcgcgttaggaaaagatcatcgtgaaggaagcattacagcgattagtgcggtttcgccatctggtggggacatatcagaacctgtcactcaaaatacgttacgcgttgttaaagtattctggggcttagattcccaattagcacaaaaacgtcattttccttctattaactggttgcaaagttattctctttattccacagaagtagggcaatatttagacttggaattgcaaggaaactgggccgctatggtagctgaagggatgcggattttacaagaggaatctcaattggaagaaattgttcgcttggttgggattgattccttgtcggataaagaccgtttaacgttggaaacagccaaatcattacgggaagactatttgcaacaaaatgcttttgatgacgtggatacgttcacttctcgaacaaaacaagcgaaaatgttgcaattgattctaacttttggtgaagaaggtcaaaaagccttaagtttaggcacttatttctctgagttaatggcgggaacagttgaaatccgcgatcgcattgctcgtagcaagtatttaccagaagaagaattagaaaaattggatcgtttacaagcagaaattaaaacaacgataaaagaaatcattgctgaaggaggaatgacgaatgattaa

SEQ ID NO: 2283 - DNA, 900 bp, Enterococcus faecalis
  misc_feature (873)..(873): Nucleotide 873 is "n" wherein "n" = any nucleotide.
cgaatgattaaagaatatcgtacaatcaatgaagtcgttggtcctctgatgattgttgaaaaagtggcaggcgtaaagtacgaagaattaattgaagtacgcatgcaaaatggcgaaattcgccaagggcaagttttagaaatcaatggagataaagcgatggtccaaatttttgaaggaacgagtaacatcaatattcgtgattcaaaagttcgctttctgggacatcctttagaattaggggtttcgccagatatgatggggcgcgtttttgacggcttaggtcgcttaaaagataatggaccagaattattacctgagaaaaaattagatattaacggcgaagttatcaatccagttgctcgtgattatcccgatgagttcatccaaacagggatttcagcgattgaccatttaaataccttagttcgtggtcaaaaattacctgttttttcagcatctggcttacctcataaagaattagcggcacaaattgccagacaagccaacgtgttaaatagtgaagaagaatttgccgtagtttttgcggccattgggattacctttgaagaagcggaatattttatggaagatttccgtcaaacaggcgcaattgatcgttcagtcttgtttatgaacttagcgaatgatccagccattgaacggattgcaacacctagaatggctttgacagccgctgaatatttagcttatgaaaagggcatgcatgtcttagttatcatgacggatatgacaaattattgcgaagcgttgcgagaaatttcagcagcacgccgtgaagttcccaggacgtcgtggttacccaggttatctttacacgaacttagcattgtgggacggaccggcagctgnataaggacctggcttcaccataggata

SEQ ID NO: 2284 - DNA, 516 bp, Enterococcus faecalis
tttgtgtttagcgccggaatggtcggtgtaatcgtcggtgcgctaatagtcacagcaagtgccgccttacattcatcttacaaagagcgaaaagaagtacgttatcgtgaactagaacatttggttaaagaaattgaatcattgaatttattaaataaaaaagtcaaagaaattttacaaaagcgtgaattatatatagacagatcaattgaatacttatcgatggatgattgtttcatcagcatcgatgattttatttatttggaatcattttctgctcaaaataatttttacttaccgacgtacttaattgaagaatttttcaaaaaaattgcgcatcgtaaagtcattttgacggccagcgaagttgctgaaatgggaggacacacctataaaggcggccgtgttattttagaaaatttttcagacgagattttagcaattattgaagataaaaaacgtaaaatgcagcgtttgtctaacgaaccacttcattattttaaagcgattaaataa

SEQ ID NO: 2285 - DNA, 435 bp, Enterococcus faecalis
agaaaaggctttttggtaggagtgaatacgatgaatgagtggccccatcagttaatgacgcttttaaccccactttttgagctatgtattttaggactgaatgttttttcgattattgttttagtttggggtgtttgtttagcaggaaaagatttcattaaaagtgaacgacaaaatcaaagccgctttaccttaaccaaaatgaatacgttcatcaaaaacttccttggtagctacattctgttaagtttagaaattttaattgctgctgatattattgaatccattgtcaaaccaacttttcaagatattttgaaattggcaaccttggtggtcatccgtacagttatttcttatttcttacataaagaaattgaagacactatgaccgatatggaacaacaagaaaaagaaccagagaccccaaaaaattag

SEQ ID NO: 2286 - DNA, 2913 bp, Enterococcus faecalis
  misc_feature (2193)..(2193): Nucleotide 2193 is "n" wherein "n" = any nucleotide.
cgaaagaaaatagggaggattaaaatgtttaagaaagcaacgaaattattatcgacaatggtgattgtcgctggaacagttgtgggaaatttcagtcccacattggctttagctgaagaagcggttaaagcaggagatacagaaggaatgaccaatacggtgaaagtgaaagacgacagtctggctgattgtaaacggatattggaaggacaagctactttcccagttcaagcgggtgaaacggaaccagtcgatttagtagttgttgaagatgctagtggtagtttttcagataattttccacatgtaagacaagcgattgatgaagtggttcaaggcttatctgatcaagaccgcgtgatgctggcttcatatcgcggcggaaaacaatttatgtttcctgatggaaagacaaaaattaattcagctgattatgatatgaatgtgcgcgtcaatacgcaattgacttatgataaaagccaatttgtctctggttttggagacgttcggacgtatggtggtacgccaaccgccccaggattgaaactcgctttagatacgtacaatcaaacacacggagatttaacgaatcgaaaaacgtatttcctattagtgacagatggggtcgctaatacacgtttagatggttacttgcataagaccaataccaatgattcaatcaatgaatatccagatccaagacatcctcttcaagtctcagtggaatatagtaatgactaccaaggtgcagcagcagaagttttagcgttaaaccaagaaattactaaccaaggctatgaaatgattaatgcgtattgggaaagtgttgaatctttaagttcagtgaattcatactttgataaatataaaacagaagtgggtccttttgtaaaacaagagttgcaacaagggtctagcacaccagaagattttattacaagccaatctattgatgattttacaacccaattaaaacaaattgtcaaagatcgtctggcgcaatcgacaccagcaacagcttcattaacgattgccaatcaatttgatattcaatctgcgaccgctacggacgatgctggaaatgatgtgcctgttcaaattaacggacaaaccatttcagcaactagtacagaaggttacgtaggaaacatcacgattcactacgaagtcaaagaaaatacagcgattgatgcagcaacccttgtaagtagtgggacaatgaatcaaggaacaattgctaaggaatttccagaagcgacgattcctaaaaatgacaatgcgcatgcgtgtgacgtgacgccagaagatccaacgattacaaaagatatcgaaaatcaagaacacttagatttaaccaatcgtgaagatagtttcgattggcatgtcaaaacagcctttggcaacgaaaccagtacttggacccaagccagcatggtggatgacattaataaagtgctagatatcattgatgtgaaagtcaccgacgaaaatggtaaagatgttacagctaacggcacagtaacacaagaaaataacaaagtaacttttgaaatgaacaaacaagcagacagctatgactatttaagtggtcatacgtatacaatgactatcaccactaaaattaaaactgacgcaacggacgaagaattagcgccttacattgaacaaggcgggattcccaaccaagccgacttaaactttggcaatgaaggtgacgtgttacattccaacaaaccaaccgtaacaccaccgccagttgatccaaatattgctaaagacgtagaaggacaagaacatttagatttaaccaaccgcgatcaagaatttaaatggaacgtcaaaacagctttcggtaacgaaacaagcacttggacccaagccagcatggtagatgacattaataaagtgttagacatcactgatgtaaaagtcacagatgaaaatggtaaagatgttacagctaacggcaaagtaacacaagaaaataacaaagtaacttttgaaatgaacaaacaagcagacagctatgactatttaagtggtcatacgtacacaatgaccattactactaaaatcaaagctagcgcaacggacgaagaattagcaccttatattgaacaaggtggcattcccaaccaagccgacttgaactttggcaacgaaggtgacgtgttgcattccaacaaaccaacngtaacaccacttgcaccaacgccagaagatccaacgattacaaaagatatcgaaggccaagaacatttagatttaaccaaccgtgaccaagaatttaaatggaacgtcaaaacagctttcggtaacgaaacaagcacatggacccaagccagcatggtggatgacattaataaagtgttagacatcacagacgtgaaagttactgatgaaaatggcaaagatgttacagataatggcatagtaacacaagaaaataacaaagtaacttttactatgaacaaaaaagatgacagctactcttacttagctggtcatacatacacaatgactattaccactaaaattaaaactgacgcaacggatgaagaattagcgccttatattgaacaaggcgggattcccaaccaagccgacttaaactttggcaacgaaggtgacgtgttgcattccaacaagccaaccgtaacaccgcctgcaccaacgccagaagacccaaaaaaacctgaacctaaacaaccgctaaaaccgaaaaaaccgttgacgcctacaaatcatcaagcaccaacgaacccagtcaattttggaaaatcagcaagtaaaggaattcatttaccaatgactaatacaacagtaaatccactttacatgatcgcaggtttaattgtccttatagtggctattagctttggcataacagaaaataaaaaaagaaaaaattag

SEQ ID NO: 2287 - DNA, 399 bp, Enterococcus faecalis
aaaggaagaaaaaacatgaataaacaaatttcgttcagtctgttaattttgttacttagtttgttggtaggttttacatttattccgcataaaaaggaattaagtttcaatgagtatcaagaaaaaaaacactctggcgaaacattttatgttgttttaaaaaagaaaaactgttcagattgtcaggatttcgagaaactattacaagcacctaaacaggtttactatgtagaattaaccaacaaagagaccatgaaggaatggtcaacatttatccgagaaaataaagttttacatgtgccatatatgtttaaaatagataacggccatctcaagaaaattgatggagaaggagatgcgaatcaattattcgcaaactatcaaaaaataacgaagtaa

SEQ ID NO: 2288 - DNA, 543 bp, Enterococcus faecalis
atttgttttcatttgttttgggaggaggaacgaatgattgaattgattttacttttgtcggtgattcttttaggtttattgattggaaataaaagagttgataagtggctttttcttaaggcattacttttgttttctgttatgctaagtgtgagcatcttaatttcggtagctatgtatttattattaacaatgggcgttgcaaacgtaatagggcagcggttagagtcgttatttcttttagggatagtcgttatcatcagtacgagtcttttgttatattttttattgaatttaacgacaaaaaaaattgttttacccatcgctttaatgaaaataattgaatattatattcaatgggtattgatttatgttactatttatcaagtgatttttgatcagtttattgtttcttcagaagtaaaaaatacgttacaaggaactattgatgagccagtcgaaatcattattgttattttgccatcatttatttcaatttggattgccgttgttttatttaggcttcgtatggaagaactttaa

SEQ ID NO: 2289 - DNA, 1803 bp, Enterococcus faecalis
aatggaggagtttgtatgtctgcttggcaaacatttaaaaatggaacaaggcaattttttaaagacatcttgcagtatttatggttattttttactttaaatgtcttattattattggtgggtggggcttttagttgggctacttccaacgcactaaaaactcaaggtattccttatctttcgtttaataacctgaatttattgttagaaaagccgcttgctctggtgttattaattctcttgttgttactttttttaggtgcagttttttatcagtttacctttttattattagggatttttcaaatacggcaagaccatcgctttcattttaaaggagttaccaaggcatcttttaaggttcttaaaaagcaaggtgcccgttcgtggttattctttttcggttattttgttgtcattgtcccttttggtaacctgattttccaaagtaatctattgacgaaatttgtgattccagattttattgttgaatttttgtcccaacgaattccttacttggtggggttactggcctttgggttattaatctggtatttagctattcgtttcatttacacgcttccattaatgattctggagagaaaaaaagcgggcgaggcagttaaggctagttggtcaatgacaaacaaacgattatggttcattattcgtaatattgcatttgtgacgatcgcggtatttgtttcaacgtatgttatttatgtgttactttatcttctacagttgaagttagataccttgagcgataccattagcttgctaggtgggattttaaatttaaccgttgtccaatttttacagtttgtctctaatgcttggctttcagtattactgattaatttcttatatacacaattaaatgttcaagcagaaacgacgacaaaagttgcctttgacaaagaaacgaaacgtaataaattagtgactatcgggatgggcctaggactattcaccatttttggcggctatataattttcaacgctgtttacttaacagggctattagaatcaaaacctttgattatttcgcatcgaggggtcaccaatagtaatggcgtacaaaataccattcctgctatggaaagaaccattaaatttaaaccagattatattgaaattgatgttcaagaaaccaaagaccatcaatttgttgtgatgcatgatgcaaaccttcaagaactcgccggcgttgatggcacgccgcaagaatttacgttggctgaattaacaaaaatgaccgttaaagaaaatggccaagaagcaccaattgccagttttgatgattatttagcgaaagcaaaccaagccaaacaaaaattactagtagaaattaaaacgtctaaacaagatagtcaaggtgcgctttctaactttattgaaaaatatgaacgtcctctgataaagaataaccatcaggttcaatctctcgactacaatgtgatcaaagcgtttaaaaaagccaaatcaaaagtaaaagttagttttattttgccctataatttcacttttccagaaacacaagctgatttgtatacaatggaagctactacgttgaatgataccttcattttaaaagctgaccaacagaaaaaagcagtttatgcttggacagttaatgactcagaggtattgagtaaaatgctctttatggacgttgctggagtgattaccgatgatttggagttagtcaatgaagaagtcaatgactttgaaaaaaatccgtcgtatgcggatcgtattttgcattatatttttatgctaccaagtgtggcttctcaataa

SEQ ID NO: 2290 - DNA, 426 bp, Enterococcus faecalis
agaagagggttaaacgaaatgaaaaaagaattttcgcgagtacttcttaaaaatcaatctgatgaaattcttattttaaaagatcggccagacacatggaatttccctggcggaaaacaagaacttggtgaatcagcgctggaatgtgcgattcgtgaaatgaaagaagaattagcagtggaaattactgaacttgaagaaatttttactggaccacttgtttttgattcaatcgtttggcaaggacatttttattttgccaaacaagcccaaggaaaagtgaccctgaacgaaccaaataaaattaaaggcgtacaatttattaagcggtttgaggaagtaaatttttcaccaggattagctccgctatttgattatttggcgcgtagtgattatttaaagttaaacaaaactaactggaaatag

SEQ ID NO: 2291 - DNA, 213 bp, Enterococcus faecalis
gaggaaatatatatgaacaacggtacagtaaaatggtttaacgcagacaaaggttttggatttattacaggtgaagatggcaatgatgtatttgcacatttttcagctattcaatcagatggatttaaaactttagacgaaggccaagcagtaacttttgatactgaagaaggtccacgcggcttacaagcaacgaacatcgtaaaagcttaa

SEQ ID NO: 2292 - DNA, 1371 bp, Enterococcus faecalis
ctgatattgacaaaaattacaagagggaggacgaaaataatgaaatttgagcaacgaatgtcccaacaacaaaaacaagtccagaagttggccatgactcaacagcttcaacaatccattcaaattttacaatttaatacggaagaactcgctgcctttgttgaagcgaaagcactagagaatccattgattgatttacaagtagacacgcagtacaccacagattttccgataactagtcgttcttacaccaatcaagacgaagaaaataattatatgaatcaaattccagactatcatttatcattatttgagtctttaattgatcaaattcatttgaattaccgcgatacatacttgcgaacattggtattgtttttagtagaatatatagacgtgaatggttatttaacgatttcgttagaagaagcggcagtgaaaaccgaagcaagcgccattcaaatgctagatgcattaactttgttacaacagctagatccagcaggtgtgggggcacgcaatttacaagaatgtttgatgctacaaacagaacgagacgataccgcgcctaatttagcgtatattttattggaggaagaatttgatgccttagtgagtcgtaaatggggcccgttagctaaaaaattcgggattgaattagcagaaattcaattgatttttgattatatacaaacgttatcgccagcgccagggaatatttttgatgcgaccgaggaattgtatattcgaccagatttaactgtccgaatcaaggaagatcgaatagtggtgatttccaacaaagctggtcgaccgacattaaattttcaagaaaattatttcaaacgaatgcaagagactgacgacaaagaagtccaagaatatattaaggataagaaaaacgaatttgaatggttagagcgcgcagtgaatcagcggggggatacaattttacgtgtagggcaagaaattgtgcgtcgtcaagaagccttctttttagaagcagatcggccattaaaaccaatgactttaaaagaaattgcggatgctttgtctattcatgaatcgacagttagtcgtgcggtcaatggaaaatatctagaaaccacgtttggcgtctttgaattgcgctcattcttctcaacaagtattctttcatcagaagaagatggcgaggatgtctcaacaacgatggttaaaaagcaactacaaaaattaattgatcaagaagtaaaaagtaaaccgttatctgatcaaaaattagtcgagcgattaaaagattcaggcatggaaatatcccggcgaacggtagcaaaatatcgtgaagccctagggattccatcttcatctaaacgaaaacgatatgagtaa

SEQ ID NO: 2293 - DNA, 327 bp, Enterococcus faecalis
aaatgcgaacgtgaaataattattgtaggaatgcaaattggtgtgttaaaatggttacaatttactaagcaaaaaggggtgcattttcctatgcaatttcttgagccaaaaaataagaacgctaagtctgtggattgggaaatatcagagcaagtaagggtgatagttaagcaatacgctgaatatgcagagcgtactgaaagcgaagcagtggatgaattcttattgaacattttagacgataagaagtttattgaatggattgccaacaagcgaagtaataagcggattgttgaaaaaatgggtatcaaagatagagtgggttga

SEQ ID NO: 2294 - DNA, 1956 bp, Enterococcus faecalis
acaatgaccaagcttaaaagattagccacgaaggaagatgaaattgtagatgttaaaattccgatttcaaacgaagaattaaaagatagggctaaacaatatgatttattaactccaaaacgatttgcaacaaggtataacaaaatgttgttcttgccaacgtcttttaaatggaacggttctgaatatcccattcaatataattactgcatcaatccgttttgttgtaattttgggaaagaacagcacaaattcaaagatgtaaaagggaaaccaagtcgatataaaatgactggtagttccaaagataaaggtcataaaggtatgtactgcaatgacaatcctattggcagaggtgtatcgcaaaactgtacagtaacccctttatctaattggtctgttgttgaagaaattaaacgccttatagaaatcaatagcatccaagatgttgagccagattatcaatttcataaagaaggctgctcggaagaagaatcaaccccattcaatgagccgaagcaattttacaaaagggggaaaagtaggggcaaatctcaacgctatcaatgtaaggcgtgtaagaagttcactaatgttctaccaaaaagagaagaaaccactacttatcaccaacaaaagaacaccattcttccaatgttcgctaagatggttgttggaagggtttcagtcagtcgtacttgtgatattttaggaattggagttggaacctactatcataagctggagtggctgtataggcgttgtttggagtttttagaacgatatgagacacaaccccttcaaacaaagaaatttaacgagatgtggcttaatacggacaagatgcactactacctaaataacgtccgtaagaaaggacaaggttcaaagaaatatacggggtttgaagaccttaatatgcaaacgtatatagttgtatctgctgaggtcttatcaagatatgtgttccgttctgatgttgcctatgattggaatatttcaatggatgaattaaatgaagatacaagaaaattcaaagaagaccatctcaatacttttagtcgtaaaaatgataggttagattggtcttattatccacaagaaccatccgctaacgatagcgaaaataggaatgcttatcttcacgaattagggaaaattactaataggagtagatttgtcgatggtttaaatgttgatgctccttatactacaactgctcactattggttaattaaacaaatggttaatgccgacgaatggcgaatgattagtgatgatgacttctctattagaaacgccttttatagagtattcacgaaagaattaaggttgagcgatgcacatcattttatttgccaagttaacaagacgaaaagcagaaaacaatgcttaaaagaattcggacaagcaaaagcagaactgctcgattggggagatatcagaggattcaaaacaaagtttctacggactttggcatctcattatctaactgaattactaacaagtcatcaattccacgaagaggctattagtaaagatggagaaagatatcgcaaatatgccgataaccctatcaaacatccattagccactaaggataaaggattttattcagttgattgtagaacggatttatctgctctggaaccaaacgaaatcgcaaagatgctattaaatgttaatgaccattcgaccaatagctttattcaacagataagacgttatatatcatctcttgaaagaccattaacaacagctcgtggtgataagaagagctatatttacgctaacttcaatccgaagtatgctcaatttgcgattacaattctaagaacttactacaacttttgtcgcccttttaaatcagcggataaaaaggttttgacacctgctcaaagattagggattacagataaacaatttgattggaaagatataatttatttcaaatga

SEQ ID NO: 2295 - DNA, 498 bp, Enterococcus faecalis
atgaaagtttctttgattgctgcgatggataagaatagagtgattggcaaagagaatgacattccttggaggattcccaaggactgggaatatgttaaaaatactacaaagggacatccgataatattaggtaggaagaaccttgaatcaatcggaagagccttacctgacagaagaaatattattctgacgagagataaggggtttacctttaatggttgtgaaattgttcattcaatagaagatgtttttgagttatgtaaaaacgaagaagaaatttttattttcggaggagaacagatttataatttgtttttcccttatgttgagaaaatgtacatcacaaaaatacatcatgaattcgaaggagatactttttttccagaagtgaattatgaggaatggaatgaggtatttgcccaaaaagggataaagaatgataaaaatccgtataactactattttcatgtatatgaaagaaaaaacttattgagttaa

SEQ ID NO: 2296 - DNA, 1029 bp, Enterococcus faecalis
ctataccaagggagagaaccgattgtgatttttgtaccgaatgaaaataatgacccacgagtgaacttagcaattgaaacatatttgttaacagaaatgcctttagatgagcccattcttttattttacattaacgagccgtcaatcattattggccgtaaccaaaatacaattgaagaaattaacaaagaatatgtagatgagcacggcattcatgttgttcgtcgcttaagtggcggcggcgccgtttatcatgatcatggtaatttgaattttagttttattatgccagatgacggcaactctttccgtgattttgcgaaagttacccaaccaattattcaagcattgcacgacttaggcgttgaaggtgccgaattaaaagggcgcaatgacctagtgattaatgatatgaagttttcaggaaatgcgatgtacgctaccaacggccgcatgtttgcacatggaaccttaatgtttgatagtgatattgatgaagttgtaaatacattaaaagtacggaaagataaaatcgaatctaaaggtatcaagtctgttcgttcacgggtaacaaacattaaaccatttttatctgaagataaacaagagatgacaacggaagaattccgccaagaaattcttttgaaaattttcggcgtagattcgatcgaccaagttaaaacgtatgaattaactgatcaagactgggcggctattaacaaaatttcagagcaatactatcgcaattgggattggaattatggtaaatcacctgcatttaacttagaacgtcgccatcgttttccaattggttcaattgaaatgaaaatgaacgtggcggatggtgccattcaagaaattaaaatctttggggacttctttgggcttggtgaaattaaagatgttgaagatattttaaccggcgtgaaatatgataaagcttctttagaagaagccattgatcaaattgacgttaaaaaatactttggcaatatcgaaaaagaagatttgcttgggttaatttattaa

SEQ ID NO: 2297 - DNA, 873 bp, Enterococcus faecalis
atccttcgttatctcgacaaagggttcaggttttttctttggtctttttgtgaaaatttaagcgttttaacctcgtttttccgttattttatggtaacatggaagtatcgtattgaaggaggttgtccacacatgaaattgactgtcttaggctgtttaggtgcttatccatacaaaggagaaggaacgagttcctatttgttagaatctgaaggctttcatttgcttattgatgcaggcagtacgacattagtgcgtttagaaaactatctagatccattgaaattagatgctgtcattctgtcgcattaccatcatgaccatatcgcagatttaggtgttttacaatattatcgtcagctttatccaacgctggaaccgacgcctattttgccaatatatggccatacacaagatcaaatgcatttcaaagaactaacgcttcctaacgtttccgaagggaaagagtattttgaagcagaagagttggcagtaggaccatttttaattactttcatggaaacgattcatcctgtcacttgttacgcgatgcggattgttgaaaaagcgactggcaaagtctttgtctttacaggagactctggttacttagcaagttttgaagactttgcaaaagacgccgatttattcttagcggatacgtacttatttgaaggtaatgaacgacatcatgcacattttacgtcaagagaagcgggtgaaattgccaaagcagcacaagtcaaacaattgatgttgacccatttaccacagcatgggtcattggaacaactacgggaagaagcgcaaaactatgctggaacggaaattccagtgacattagcccaaccagatttaacagttgagatttaa

SEQ ID NO: 2298 - DNA, 792 bp, Enterococcus faecalis
atgaagagtttagtaacaaattcgcaacatcgtgccaatgctcgcagagctcttgatgggcaatgggggatcatggcttggttaactttcttaggagtggttttacagagcttcttaacatcgattgtgcaaaatttattttctggtgaaaatcaagtttttcaaagtagttttgccgcagtattactgcaaatttttgttttattcgcgttaagttatgcgctatattacgcagccttgaaggtgttacgtggtgaaaaggtgcgggtcaatattttaatgagtgtttttcaaggaaaatattatggtccgctatttgtggtcaacctacttcaaaaagtacttgaacgtgtaattggtttgttatttttgttaccaattttatttggggcagggacaaccttgtatttcaaattgatgtttaatacagttacaccagaggaaatccaagcctttttcttaaatgatttttcctttttcctagcatttggcgttgccactatcttgatctttttaattggtttatttgtgagtggcgtttttcaatttgctgtgtggctacgttttgataatccagaactgccaattatgatggcattgaaacaggcgttatatttaatgaaaaatcgtttttggcaatatttatgtttacaattttcttttattggttggtatattgtgggctttttagctattggtatcggtctattatgggtgattccttataactatgtagcgttagctagtttttatcaaactgccttagaagaaaaaggtttagccgaagaataa

SEQ ID NO: 2299 - DNA, 210 bp, Enterococcus faecalis
aaaacgccactcacaaataaaccaattaaaaagatcaagatagtggcaacgccaaatgctaggaaaaaggaaaaatcatttaagaaaaaggcttggatttcctctggtgtaactgtattaaacatcaatttgaaatacaaggttgtccctgccccaaataaaattggtaacaaaaataacaaaccaattacacgttcaagtactttttga

SEQ ID NO: 2300 - DNA, 1110 bp, Enterococcus faecalis
aattggtttttgaggggagttatttttatggatgcaaaagaagaaaaaatgttaattgatttaacaagtgctaaagggattgctgggaatgaagacgaagtacgttcgttatttaaaaagtatgcagcaccgtatgcggataaatttttatatgatggccttggcagtattattgcaaaaaatgttggtgataaagaaggaccaaaagtctacatttctgggcatatggatgaagtcggtttcatggttacccaaatcacagaaaaaggctttttaaaatttcaaaccgttggtggttggtgggggcaagtgatgttggcccaacaagttcagattaaaaccacgactggtaaggtttaccatggtgtcattgggtctaaaccaccgcatgtgttaacagcggaagttcgtaacaaaccctatgagattgcagatatgtttattgatattggtgcaagtaacgatcaacaagttgcagaatgggggattcatccaggggatatggtgacaccatatattgactatcgtcgcatgaatgatacaaaatttttattggcaaaagcgtgggataaccgaattggtacggccgtttcattaaaagttttagaaaatttagcgacagaagggcaccccaatattttatttgcaggcagtgatgtgcaagaagaagtcgggctacgcggtgcgcaaacaagtacgcatcttgtgaatccagacatagcgtttgctttagacacaggaacagctggtgacacaccaggaatgacacctaaagaagccgactctgttttaggtgaaggaccacaaattttgatttatgatgcatcgatgattccgcataaaaaattacgtgattttgttattcaagtggcggaagaaaataacattcccttccaatatacagtgattacagggggaggtacggatgctggtcgcatgcatttaacgcgcaacgggattccatcattagccatcacggtgcctgttagatatctgcattcacatacctcagttattcatgaagatgattatttcaacacagtcaaattagtcacagaagtggtgaaacgtctagataaagaaacagtcgctaaattgactagttattag

SEQ ID NO: 2301 - DNA, 765 bp, Enterococcus faecalis
aagaaaaataagatgagaggggaaaaaatgaagcgattttgggcctttactgctgtttttttaacagttctactcattggatatttagagccagtttttttccctgctgaaaaaccaaccgaaacagctcaaagtgggcgcttatccagcgctcacaccgctgttcctcatgaagaattgccagcttctggctacgcagcatacatagggaaagatgtggaaatctttatccgccagtttggcaatcctaaagaaaaaattaaaacaggtcgtacgtatgaattatggacgttcggtttgacgatgaatgattacttagaagtcaacgttcgagaaaataaagtcatcgcaattaaggcctttaacaatgacaaaatgatagaaccgtttaaaatagatatgaagcttgctgacttgtctgatttaatgacgatttattcgaattttgcatttaattttcatcatgaagcttacgatgtcgagctgatggaagaagatatgaactatcgaccactggttgcttttgataatggcagttttgcggtgttattttttaatcagcggacaggcggtttaatggcagttaattatgtcaataaagaaacgttgctcacggaaatgccgtatcaattaaatgaaggttctcctttgccagttgatataacgcagtcaatgaccttcgatcctgttcaaagtaaccaagcgatttatgtcatgaatctggttaaacagcaagaaagtcaagttgctttttcgagtttctaa

SEQ ID NO: 2302 - DNA, 3492 bp, Enterococcus faecalis
gtactatttatctttagaacagaaccaataaatttgaaggaaattgatggtaggagtgacgttatgaaaaaggtattagttgccaatcgtggcgaaattgcgattcgaatttttagagcttgtacagaattagatatccgtacagtagcgatttatgctgcagaagatgagtattctgttcatcgtttcaaagcagatgaagcgtatttagttggtaaggggaaaaaaccaattgaagcctatttagacattgaaaatattatccaaattgccaaaaaatcgggagcagatgccattcatcctggttatggctttttatcagagaacttacgcttcgccgaacgttgtgaagaagaaggaatcatttttgtcggacctaaaacacatcatttagatatttttggcgataaaattaaagcgaaagaagcagctgtagctgcggggattgcttcgattccaggctcagacgggccagtagcaacggtggaagaggttgtagcttttggtgaaacacatggctttcctatcatgattaaagctgctttaggtggcggcggtcgcgggatgcgcgttgcccacgatgccaaagaagcacgagaaggttacgaaagagcaaaaagtgaagcgaaagcagcctttggttctgacgaggtttatgttgaaaagtatatttctaatcctaaacatatcgaagtacaaattttaggcgatcatcatgggaacgtcttgcatttatttgaacgtgattgttccgttcaacggcgccaccaaaaagtggtagaagtcgcaccatgtgtatcaatgaatgaagaacaacgagcagccatttgttcggctgctgtgcagttaatggcacatgtcggctacgtgaatgcgggaacggttgagtttttagtagaaggggatcagttttattttattgaagtgaatcctcgtgttcaggtagaacatactatcacagaaatgattacagatattgatattgtgatctctcaattacaaattgcgcaagggcttgatttgcataaagatatgcatttgccaaaacaaaacgaattgacattaaaaggcgcggctattcaatgtcggattacgactgaagatcccctgaaccagtttatgccagacacagggaaaatcgatacgtatcgttcaccaggtggttttggtgtgcgtttagatgtagggaatgcttattctggctacgctgtgactccctactttgattctttattggttaaagtctgtacgcatggtttctcttttgaacaggcaatcagtaaaatgcaacgctgcttaaaagaatttcggattcgtggcgtgaaaacaaatattccgtttttacaaaatgttgtgagctatccagcgtttcaatctggcgaagccaaaacaacctttattgataatacacctgaattatttgaatttcctcgtatgcgcgatcgtggcaataaaacgatgaaatacattggagaagtaacggtcaatgggttccctggcattgaaagaacggagaaaaaatattttgaagccccgcgcgtgccgacagatattgaagttccagaaaaagtgattacagctaaaaatattctagacgctcaaggagcaaccgccgtcatcgattgggttaagaatcaagaaagtgtgttaatgacagataccacgttccgtgatgcgcaccaaagtttattagctactcgtgtgagaacacaagattttaaagcaattgctggtctaactgatgcagccctgcctgagctgttttctagtgaaatgtggggtggcgctacgttcgatgttgcctatcgcttcttaaccgaagacccatggcaacgtttaagaaaaattcgtcagttgatgccaaacacacttttacaaatgctgttcagaggatctaatgcggtaggctatcaaaattatcctgataatgttattgaagaatttattaaagaatccgctcgccaaggagtcgatgttttccgaatttttgatagcttaaactggattcctcaaatggaaaaaagtattcaagtcgttcgggataccggaaaaattgcggaagcagcaatttgttatactggggacatcaatgatccagcccgagcaaaatataatgttcaatattaccttgatatggctaaagaattggaaaatttaggtgcacaaatcattgcgattaaagatatggctggcttattgaaaccacaagctgcttatcgtttaattagtgaattaaaggcagccacggatttaccaattcatctccacactcacgacactagtggcaatgggatcatcacatattcagcagctactaaagcgggcgttgatattgttgacgtcgcaatgagtgcgatgagtggcgcaactagccagccaagtatgaacagtctatattatgctttagtcaatggtgaacggacgccaactattaacattgataatgcacagaaaatcaatcattattgggaagatgtgcgcatgtattatcaaccatttgaaaatgggttaaatgccccgcaaacagaagtctatatgcatgaaatgcctggtgggcaatactctaatctacagcagcaagcaaaagcggtaggcttagggcaccgttgggatgaaatcaaaaaaatatatcacacagtgaatttgatgtttggcgatattgtaaaagtgacgccatcttcaaaagtcgtgggagacatggcactcttcatggttcaaaataatctgacagaacaagatgtttatgcgcgtggtgaagaactaagttttcctgaatcagttgtgacttttttccaaggtgatttaggtcaaccagttggtgggttcccgaaagagctgcaacgaattattctaaaaggtcgaccagccttcacagagcggccaggtgacttagcagcacctgttgattttgcgaaagtacaagaagaattagccgaaaaaattgggtatcaacctaaattggaagaagttttaagttatttaatgtatccacaagtatttttagagtatcgtcaaaaatacgaaacctttggagatataaccttattagatacgccaacattctttaatggtattcgtcaaggagagacattggaagttcaaattgaacgaggaaaaacgttaattattcgtttagatgaaattggcgaacctgatattgacggaaaccgtgtcttgttcttcaatttgaatgggcaacgtcgtgaggttttagttaaagatgcctctattaagtctgctgttcaagtaaaacaaaaggcggaaccaactaataaagaacaaatcggcgcaacgatgtctggttctgttctacaagtattggtcaaacgtggcgataaagtagaaaaaggtcagccgttgctgattacagaagccatgaaaatggaaacgactatcgaagcacgttttgcgggcacggtagatcacatttatgttgaagaaggcgaagcaatcagctcaggtgatttgttattagaagtgaaagaaaaataa

SEQ ID NO: 2303 - DNA, 1212 bp, Enterococcus faecalis
gctttgccaaacaaagtaaagaaacggcatttgctagactatagtatttttattccatatttaattttaagtatcgtgggattgattatggtatatagttccacatccgcattacaagtaatgaaaggtttttcacctacctcattcgttattaaccaggttgccttttgggtagtagggttagttgcaatgttttttatttataagatgaaaacatccgtttttcagaatcgaagttttatcatgtttgccattgcggtaattacggttatggttttagccgttcggattcctggtatcgggaaagaaattaacggcgcacgtggttggattgagattggtggattttcgatgcaaccagctgagtatttaaaaattatggttgtctggtatctgtcttatattttagcacggcgacaaaagacaattaatggaggcatggatcaatttaaacaagctgccgggcgcccgttgatgctcgtttttgtattaattgctctagttgcaatccagcctgacttcgggaatgcggccattctaacattaattaccatcgtgatggttttagcaagtgggattaattatatgtatacctacttggtcggtggcttgggcattttaggtagtatcacggctattcagttattaattatgtctaaaggaaaaattttcccagcgcgttatcaatatatttataatcgttttgctgtttttaaaaatccatttttagatgaacggaacttaggacatcagttagctaattcttattatgcaatcagtaatggcggctggtttggcaaaggtatagggaatagtgttcagaaaaaaggctttttaccagaagcacatacggactttatctttgcgattactttagaagagttaggcattatcggcggtctagcgattttaggattgttgatgtttatgattgcgcgaattattttagtcggtgtacgctcgaagaaaccttttaattcactaatgtgtattggaattggtacaatgttattaattcaagtctttattaatgttggtgggattactgggattattccattaacaggaattactttcccgttcttgagtcaaggtgggaatagtttgctgattatttcgattgctgtggcctttgtcctgaatatcagtgcagatgaaacacgtcagaaattagaaaatgagtactatttatctttagaacagaaccaataa

SEQ ID NO: 2304 - DNA, 321 bp, Enterococcus faecalis
ggaggttctgtacaaatggacgaaggaatttcaaagaaatttgccattcaattattagaagacgatgcagaacgcattaaaatgcttattcgtaatcaaaaaaacagtttgtgcatttctcaatgtaaagcatttgaagaagtggtggatacacaaatgtatggtttttcaagacaagtgacctatgcgacccgtttggggattttaactaatgatgaaggacatcgcttactaagtgatttagaacgcgaattgaatcaattatatacagatgtttatgaagaaacacaagaaaaaaacgagattggcaaggagggttaa

SEQ ID NO: 2305 - DNA, 1770 bp, Enterococcus faecalis
atgagtgcattacaagaattattaaaagatacatttggctatgatgattttcggccaggacaagaaacgattattcgtcatgtattgcgacaagaaaatgtcttaggcattatgccaacaggtggaggcaaatcgatttgttatcagttgccagccttacttctggataatttaacattggtgatttcaccattaatttctttaatgaaagatcaagtagacgccctgaatttaatggggattccagctacatatatcaatagtaccatttcctatcaagagatgaatcatcgtattcaattagcggttaacaaagaagtcaagctattgtatgttgcgccagagcgattagaatcttatgattttcaacagatgctgacacatgtaccgattgatttattggcagtagatgaggcacactgtatttcacaatgggggcatgattttcgtccaagctatttgcgtttagcagagattatcgatcaatttcaacagcaaccaactgtgattgcactaacagcaacagcaacgccacaagtagcggaggatattgtcaagcaattaagaattccatcagaaaatgaaatcaaaacaggattcgctcgagaaaatttatcttttcaagtcgtgaaagatcaaaatagagacgtttttcttttggaatatttaaagatgaatactggacaatcaggtattatttatgcaagcacgcggaaggaagttgaacgaatttatcatttattagaaagtaaaaaaattgcagctgggatgtatcatgggggcatgagtgaacagttacgtagtgaaaatcaagaagcattcttgtatgatcaagtgcaagtgatggtagcaacaaatgcctttggtatggggattaataagagtaatgttcgttttgtcattcacgcacaagtaccagggaatattgaatcttattaccaagaagccggccgagctggtcgtgacggtctgcctagtgatgctgtgttaatgtttgctccacaagacttgcaaattcaacaatactttattgaacaatctgaaatgaccattgattataagcagaaagagtacttgaaattacgggaaatgtcacaatatgcgaatgcacaaatgtgtttacaaaaatatattttacgctattttggtgaagaagggacggactgcggtcgctgctcgaattgtctggataatcgagaattagtcgatattacggtcgatgcccaaaaagttttgtcttgtgtaaaacgtatgggagaacgtttcggtaagggcttagttggtaaagtcttgactggctcaaaagatcaaaaaattgatcaatggcattttgatcgtttgccaacatacggactaatgaaaggtcgcacgcaaaaagaagtcacacaactgattgattatttgacagcagaacgttatttaattccttctgatgggcaatttccgttgttatcagtctcgacagaaggtgttcaggtgcttttaggggaacggaaagtcttccgaaaagaagaccaaaaagttcgaaaagtagcagtagatgatgccttgtttgaacgattacgcgaattacgtatggacatggctcaagaggcaggcgtgccgccatatgtagtcttttccgatagtacacttaaagaaatgtgtgaaaaattaccgcaaacaacgattcaattattgcaaataaaaggggtcggccaaaataaattagataaatatggcaccgcctttttagaagtaattaaagaatatcaagagacaaaaaaatga

SEQ ID NO: 2306 - DNA, 816 bp, Enterococcus faecalis
ggggggggttccataccgtgggcaaggcttgttgatccaattggcccagatgcttggactgtatcaggtcgtggcgaattgcatttatcaattttaattgaaaacatgcgtcgtgaaggctatgaattacaagtttctcgtccagaagttattgaacgtgaaattgatggagttaaatgtgaaccatttgaacgtgttcaaattgacacacctgaagaatacatgggtagcgtgattgaatcactaagtttacgtaaaggcgaaatgcaagatatgattaatgccggtaacggacaaatgcgtttaatcttcttagcaccagctcgtggcttaattggttattcaacagaattcttatcaatgactcgtggttatggtattatgaaccacaccttcgatcaatacttaccaatgattcaaggaacgattggtggccgtcatcaaggtgcactagtttcaatcgatactggtaaagcaacgacttactcaatcatgagtattgaagaacgtggtacagttttcgttgaaccaacgacagaagtttacgaaggaatgattgttggggaaaacaaccgcgacaacgatttaactgtgaacatcacaaaagctaaacaaatgactaacgttcgttcggcaacgaaagaccaaacatcagtcattaaaaaaccgaaaaaattaacgttagaagaatcattagaattcttgaatgaagatgaatactgtgaagtaacaccagaaagcatccgtttaagaaaacaaattcttaacaaaaacgaacgcgaaaaagcaagcaagaaaaagaaaaaagctgaataa

SEQ ID NO: 2307 - DNA, 1200 bp, Enterococcus faecalis
cgaaaggagcaacttatggataaagaaagtaccaagtggatccgctttttaggtgggaaaaatttactttacacattaactatcctttgtctaattgctgtaactatctttttattcaacactgtttcatttatctttaaaccaatttttgttatttttagtgccgtcttaggccctgtactttttggtattattctattttatttgcttaatccaatggtgaaacgccttgagaaaaaaattccccgtgtttgggcgattgcgattctctatgtcttaattattgcattactagtgttagctggactgcaacttttcccaattatccaagaccaaacggaagaattaatcaaacaattcccaagtttttggaaaagcacgctccaaacagtacaagaatttatggctaaaacaccttttgcaaaagatttagaatctgctaatgagtcgattaatcagctctggggcaaacttgcaaactcctttaaagactttgcaggggattacctacaaacaggcgcacaaggtctgggaagcgtcttttctgcagtctcttctactttcctaaccttgtttacaggacctatcatcgcctttttccttttaaaagacaaagaaaagttttatcgctttgtaaaaggcatcattcccccagcttttcgtcctgattttgacgaatatagccaaattgccaacattcaaattggcgattatctaaaaggtcaagtcattgcttcgttggttttagggattatgtattggccagcttttctattaattggtttacaatttggtagcattttagctttagctgcgggtattttatgtattattccttatatcgggccatttattgcctttattccaggattgattattgcctttcaggattccacatttatggtagtaaaattcgttatcgtctggtttgccatccaattgattcatggtgattttgttattcctcgtgtgatgggcgataaattaaaagtccatccgattactattttacttgtcttgttagttatgggtgaactgtttggtttaatgggcgttatttttgggattccaatgtattgcctagttaaagtgacagtcatttatttattccgcaaattcaaacaacgctataaccgcttttatggtgacaacggcgagtatgaacacacgaattttactaaagatcaatatttaaaataa

SEQ ID NO: 2308 - DNA, 1143 bp, Enterococcus faecalis
gaaagagtgaggcaaatgagtagtcagattccttttacagttgatcatgtgggaagttttttacgtccggaaacaattaagaaagcacggaaaaaggtccaagcaggtgctttatctcaagcagagctacgtcttattgaagatgaggaaatcaaagcattagtagcaaaacaaaaagctggcggcttacggggaatcacagatggtgaatttcgtcgcggtttttggcatattgatttcttagaaggattaaatggtgtgacaggctatatcccagaaacggggtataaccaaacctttcatggaaaagcagctccggcctataatatccgcgtagtggataaaatatcttttcctacgcaacatccatttttagaggacttttcatttttaaaagaggtggtggaagttggtgatggcacggtagccaaagcaacgatccctagtccgaccatgattttacgtcaagaaattttatctaacgatggcacctcgcgcattcaaacaatttatccagagattggtgctttttataaggatttagcacaaacatataaagacgcaattgcggccttttacgagagaggttgccgttatttgcaatttgatgatacaaattgggcgtttctagcggatcagacaaaacaagaagaattacgagcaaaaggaatacagccagaggaaattgcacaagtgtgcaccacgattattaatgaagccttagctggcaagccagaagatttaacggtaaccacacacatttgccgtgggaaccatgcttcgtcttggttattttcaggtggttatgaaccgatagcaaaagaattatttgctacgaattatgatggtttcttcttggaatatgactcagatcgtgcaggggacttttcaccattaagacattggcaaaataatggcagcaaagtcgttttaggtttagttacttctaagtttcctgaattagaagagactgaacaagtgaaagcacgaattgaagaagcccaacagtttgttcctttagaaaacttaagtattagtccgcaatgcggttttgcttcaacggaagaaggaaatcgtttgacggagaaagaacaatggcgcaaagttcaattacttcaagaaattgctagagaagtatggtaa

SEQ ID NO: 2309 - DNA, 1353 bp, Enterococcus faecalis
caagtgaagaaacgtctatttgcatcagtattactatgttcattaacgctatcagcaattgctaccccaagcatcgctttggcggacaatgttgataaaaaaattgaagaaaaaaatcaagaaatttcatcattaaaagcaaaacaaggggatttagcttcacaagtatcttctttagaagcagaagtatcttcagtatttgatgaaagcatggctttacgtgaacaaaagcaaacactaaaagcaaaatcagaacaattacaacaagaaattacaaacttgaatcaacgtattgaaaaacgtaacgaagcaatcaaaaatcaagcacgtgatgttcaagttaatggacaaagcacaacaatgctagatgcagttttagatgcggactcagttgcagatgcaatcagccgtgttcaagctgtttcaacaatcgtaagtgccaacaacgacttaatgcaacaacaaaaagaagacaaacaagccgttgttgataaaaaagctgaaaacgagaaaaaagtgaaacaacttgaagcaacagaagctgaattagaaacaaaacgtcaagatttactttctaaacaatctgaattaaacgtaatgaaagcttcattagcattagaacaatcatcagctgaaagttctaaagctggcttagaaaaacaaaaagcagctgctgaagcagagcaagcacgcttagctgctgaacaaaaagctgcagctgaaaaagccaaacaagctgctgcaaaaccagctaaagctgaagtgaaagcagaagcaccagttgcctcttcatcaacaacagaagcacaagcaccagcaagctcaagctcagcaactgaatcaagcacgcaacaaacaactgaaacaactacaccaagtacagataatagtgcaacagaaaatactggctcttcttcatcagaacaaccagtacaacctacaacaccaagcgataatggaaataatggtggccaaactggtggtggaacagttacaccaacaccagaaccaacaccagcgccttctgctgatccaacaatcaatgcattgaacgttctacgtcaatcattaggtttacgtccagtagtatgggatgcaggtttggcagcttctgcaactgctcgtgcagcacaagttgaagcaggtggcattccaaatgatcactggtctcgtggagatgaagttatcgcaattatgtgggcgccaggtaactcagtaatcatggcgtggtacaatgaaacaaacatggtaacagcttcaggaagcggtcaccgtgattgggaaattaacccaggtattacgcgtgtcggttttggttactcaggtagcacaatcgtaggacactcagcctaa

SEQ ID NO: 2310 - DNA, 306 bp, Enterococcus faecalis
tttttttcttcaatttttttatcaacattgtccgccaaagcgatgcttggggtagcaattgctgatagcgttaatgaacatagtaatactgatgcaaatagacgtttcttcacttgtcattcctccgaattaatttctaaagtttatttaaaatatattaatcttttcttacgacaaaaacattctaccacacccatatttcaattaagcaatagaaatgttacaaaaacatttcagatcactccttctttctccataataggtaaacttaccttttgtaaggcttttacaccttgttacgactag

SEQ ID NO: 2311 - DNA, 216 bp, Enterococcus faecalis
gtaaacttaccttttgtaaggcttttacaccttgttacgactagttttcacgtgttttcaattgttaaacaattcttcgattttttttcatattttttctttttttattcaaattttgcttcttttttgtcgatatatgctttttttcgtaaaattaatcatttttccttctttttattaaacgtttttgttacaaaattcgttatattttggtaa

SEQ ID NO: 2312 - DNA, 2331 bp, Enterococcus faecalis
gaattgttggattgttctttagaaagaagggacaatatgaagcgaagtaaatggaaagaattgatagtaacgggcatctgccatatattagtattccccatactaatacagacaactgtttttgcagaaacattaccaagtacaaaacaagtaagagaaggaaccaatcattcattaacagcagaaaaagccgaaagtgaacaaccacagacaaaggataaactacatgatgaagaaacactggcattgtcaaaaagtgagttaatcgataatgaggctaatgttacaagtcaaacgattagagaaagaattgagacgcctaacctaacttatcgttatggatttattaatgaagaggggcagccagtaaacgccaatgagatccttctacagtatcatagttggcaaggcaattccccagatggcataaatgtgtgggaaggtgaaagtcaaccagtgacagcatctacagtggctaatttaaaagaagtggtaattccaagtgagaaagtagccgtctattccgacatgtcaacggtgcttgcagcgagtaatcaaacattttttttaccaagatattatacttctttaagcttatacaataagaaaggggaaattgatcccaattatccgctgccaactatttccgacgcatcaggaaaccaatatccaacaacaatttcgcaatttgaattggaaaaaatgtctgcacaacaatatagtcagaaaacaggagtaacgtttaacattagcgagagtcaaaaactaatcgttcctttgtacaaccaagtgaaggttgattcatcgaatcaatctgggctattgaattactttaaattttcagggccggtttattatcatgttaccaatcgcaaagtgacagaacattttgtggatactcaagggaaaccaatccctccaccaccggggtttagacaaggaaagcaaacacttattgagcgtgacccttacacctttaaacagaaagatcttttgccaagtagctatgaaattgactcaaaaacgtatcaatttcaaggatggtataaagggaaaacgaaacctgaaaatttagaaaaaagcgtaacgcccagttatgatattacctatgacgacaatgatgatttaactgttgtctataaggagatacctcaaaaaaattatacatttgaggatgtcaatggtgttgaaattgcaccaccatctgattttattcaggatcaccaacaaccaataactacggatggctttcgctatttagctggaaaaaaactgccacaacaatacagcgttaacggtaaaacttatttatatcaaggttggtatcaagataaaacaaaacaagagagcttagaaaaaacgaagcgacccataaactcccctgtttttaatgaaatgaacgctattacagcagtgtataaggaaataactgcaaaagctgaaatgcaaatagaaggactagtcaaagtcatgccaagtggttatatacaaatttggcagattatgcttacaaatgtgggagaagtaccgttaaaaaaaataaacttaaagccagcaagtggttggtcaccaggtctagctcggccaatccaagtcacgattcgtgttggatctgaaccaaacaaaattgttcctattactgatgaaaattggcgagttggcattactttaaatacggaagtgcctattggtcagacagcaactattatgatgacaacaattgctacaggtgaaccagatcaagtgttacaagcggctgttgaaatgaatggaaatttttctgctgttcacgcagctgatactgtcagaatccaacctaaaaatcaagaaattgtggcaccagatgaggaaggttttatcagcacaccaacttttgattttggcaaagtcgccatttctagcaacacgcagcaacatggtttaaagcaggcagcagattattatgaaaatggtcaggaaaatccatatttacgtttgaaaaaatcacaacccaattgggcactaactgcagaactatccccctttgaaggaagagtggatcaactatcatcaatgacaaagttattgttaggaacaaccaatgtttcaggttttattcagtacaatcaaccaacggaaactaaagttgctcttggcaaaacaaccgctattcaattagttgccaacggtgtagctagccatattgttgccaatggtcagtttgacgaaagtgatgtttatcaatttgatttttcttttgatcaaatcaaattagaaattccagcaaatcaaggtagaaaagatcaaacttatcaagcaatggtgacttggaatttagtgacaggcccataa

SEQ ID NO: 2313 - DNA, 1236 bp, Enterococcus faecalis
ggagtggaaaacatggatttattaattaaacaagttcgtcttcaagacggtgaagcattacaagatgtagctattaaagaaggtaaaatcattgaaatcgccccagttattactggcgatgccaaagaagtcatcgaagcagatggtcgtgttttaatcccaggttttgtagaaagccatttacatttggacaaggcattaatcgctgatcgtaaaccaaataaatcaggtacgttgaaagaagcaattgaagtaaccgcagaattaaaaccaacatttaccgaagaagacatttacgaccgtgccaaacgtgctttagaaatgttaatcgttcatgggaccacggcgttaagaacgcatgcagaatttgacccagcgcaaggttttactggcttcaaaacaattatgcgtttgaaagaagaatacaaagagttaattgacatgcaagtagttgcgtttccgcaagaaggaatttttaaagccccaggaacagaacaaatgatgtatgaagtaatggatatgggcgcagacgttgtcggcggtattccttataatgatgcaccagcgaaagaacatattgatttagtgtttgaaattgctaaaaaatatgataaagatgtagatttacaccaagattttgccgatgaagctgatgatatgagtattgaatatttatgtgaaaaaaccatcgctgaaggctaccaaggccgtgtttcagtgggccacttaacggcattgcatgccttacctgaagcagaattggcgcctattattgcaaaaatggcggaagcaaatattagcgtgatggctttaccagcaacggatttacatttaggggctcgtggtgatcagtacaatgttcgacgtgcggttacgccaatccgtaaattacgcgatggtggcgtgaatgtctgtattgctacgaataatattcgcaatgcttttacaccatatggcacaggggatattgttcaaacagcgatgttagccattcctgttgggcacctaggtggagcggatgacttaaaaacagtgctaccaatggtaacaacaagtcctgctcgtgcgatgggactagaaggatacggtgtcgcagttgggaataaagcagatttagtcttattagacacaaaagtggttgaacatgcgattattgatattccagaacggttatatgttattaaaaacggccgtgttacagtcaagacagacaaaaaagtcgaaatcattcgttaa

SEQ ID NO: 2314 - DNA, 219 bp, Enterococcus faecalis
tgctaccagttgctgtatcgattgaactacccgccgttagcattatgtttcgtaccaatgggtgttggtttaggtattcaaatgactttcgttaatattacaatgcaagctatatcttcaggcttccaaattccaattttggatgttgttaaaggaaacgtgaaatggttaagtattgcctctgtactattattagttatcggtttaatctttggataa

SEQ ID NO: 2315 - DNA, 1329 bp, Enterococcus faecalis
atatggcgggcaaggtgcctttgccaaataatgaggagcgcagagagtattcgctactgcgttgctctcgccttctttctattggaggaaagtaagatgaaaaaatcgtcaaaagtagcacttatttttgcattcttagttagtatttttgtgccagttgcggcctttgctgatgagattggggatgtagttgccccgacaggaatcatggcattagttgtgattattccattgattgttgttttggttctattgtttatgaaagtcgatatgattatcgctggtttaattggtggcgtcttagcgatgctgattggtggtattggactagaagaagcgaataaacagatgttggaagctatcccgatgatgttaggaattaccgttcccatcattaattcagctgttgcgatggcggtctttaaagcaggtagttattcagctgcattaactttagccaaacgaggcacaaaaggaaaagtcgagtatgtttcagcttttattgttatcttattagccgcagccacatatatgtcaggaattggtggcggaagtgcgatggttattgcgccattggcctttgctgcagttggcgttgttcctgaattaattgcagcaatgtctttagctgctgcggtatcatttacaacatcacccgcttcattagaatcaagtattgtttcaaaattaggcgatatcagtgtcggttcatatgtttcaaccatgcgaccttactggttattcttcgtagcattagcgattgtgttagccttttggggaacgaaacatagaaatgttggctttaaagagtcggcagatgatgaatttgataaaaagagcaatggtgaactatttaaaattaccttgccagccattttcttattgtttgctgtaatttttggaccaattgtgaatgatttaattggttttgccttctttacgccacttgtatacatgatttcaacattagtttcaattttcttatgtacagatttctcaatgaacaaatctgtccaagcgatggtagatgggtctacatatattttgactcgtttattccaagtagggattttcttagcctttattaatgttattgcacaaacaggaacgtttgctgtaatcgcaggtgttgctgaaaatgcaccaacctttattgtcatgccagttgccattttaacagggattttaattgggattccagctggggcctacgtaggttctgttttaactttagtgctaccagttgctgtatcgattgaactacccgccgttagcattatgtttcgtaccaatgggtgttggtttaggtattcaaatgactttcgttaa

SEQ ID NO: 2316 - DNA, 792 bp, Enterococcus faecalis
caatttgtttgtaacgagcaattagttgctgcagttgacttagccaaagaatcaggggtagcatatgttggcgtttctcaaacgagtcatagcgggagtttctcgtattatgttaaaaaagcagcggaacaaggcatgttgcttctttcgatgtgtcaatctgatccaatggtggtaccgtttggtggtacaagcaattattttgggacaaatccaatcgcttttgcagcacctagagcaggtcatgaaccagtcgtgtttgatatggctacgacagtacaggcgtgggggaaaattttagatgcacgttcaagagatgttgaaattcccgacacatgggcagtagacgaaaaaggccagccaacgactgatccttatgaagtacgaggtttattgccgatttcaggaccaaaaggatatggactaatgatgatggtcgatgtcttagctggttcgttgttaggcttaccttttggcaaacatgttagctccatgtatgcggatttaacggagaaacggaatctgggtcagatgtttttagtcattgatccaagccgctttacagattctgaacgatttaaagaaaatattaatcaaatggtggaagaacttcattgtgtgcctacagcagaagggtttcaacaagtttactatccaggagaaattggtcagctaaactatcaaaaagccatgtcagaaggcattgaaattccacaaagtatttatgattatttagttagtgagattgtacattacgataaatatggcgggcaaggtgcctttgccaaataa

SEQ ID NO: 2317 - DNA, 741 bp, Enterococcus faecalis
ttggactataccaaaataaaccgtaaggagcgtgtcaaaatgcaaattatccgtgtagcaaatgcagaagaaggcggcaaaaaagcgtttgaattaattaaagaaggtatgaacaatggtgcgaaagttttaggcttagcaacaggtagtacaccagaaacattatataaagaaatgactgcaagtgatgtcgactttacagaaatgacttctgtaaacttagatgaatatgttggtttaggtggcgaagatgagcaaagttaccgttatttcatgaacaaacacttattcgacaaaaaaccatttaaagaaacatttgtaccaaatggtaaagcagaagatttagatgctgcttccgcagaatatgaaaaaattatcgatgcacatccagtagatatccaaatcttaggtattggtcaaaatggacacattggtttcaacgaaccaggcacacctctagatagcttaacacatgtcgttgagttgactgaatcaacaatcaacgcaaacaaacgttattttgacaaagtagaagatgtcccaacacgtgctgtttctatggggattggctcaatcatgaaaggtaaaaaaatgattttaatggcttatggcgaagcaaaagcagaggccattaaaggaatgattgacggaccagtaacaacagacatgccagcaagtgcattacaaaaccatcaagatgttgttgtaatcattgatgatgcagctgcaagtaaattataa

SEQ ID NO: 2318 - DNA, 804 bp, Enterococcus faecalis
attataatcgttgatgaaaaagaacttgaaacaggagaatttccttatgtgtcaagttctttttttgttatactggaagtaatagaagaagaggtgaaaaggatgttacagctaacaattccagaaattattttacggttagtcctagcgatggtgatgggtggcgcaattggttttgaaagacaatataagaatcgcccagcagggatgcgcactcacattttagtttgtatgggcgcggctattattgcgttaattcagtcgcaaattgcaatcaatgcattgaaagatgcgttagctaatccggctttgacgggggtcattcgttcagatcaagcaaggttgatcgcacaagttgtaagtggaatcggctttttaggtgctggaaccatcattgtaacgaaacaaagtgtcaccggattgacgacagcagcgtcactatggaccgttgctggtttagggatcgcggtgggcatgggctactatacgattgccttaacaagttttatcggtgtattatttgccttaaccattgtcaaacgaattattcacgtaccaacaatcaaaaaattagaaattcgctatcaacataaacaagaaaccaaagaatttattaatcagtattttgaagaaaaacatattgaaatttatgatgtgaacttcaatgtttcttgggtggatgatacaaaaatctatacgaatatctatactattgatttgcctaaaggcctaacgtatgccgatgttatcgaagatctatctgtttcaaataatgtaacaaaattacgattgattaatgtgtag

SEQ ID NO: 2319 - DNA, 606 bp, Enterococcus faecalis
ttgtattacgagttagaaagaaaggtgataagtaagatgaataaaaaaaataaatttcttagtattattgttgttgtcattgtgattattggtgcatttgtgatgaaagcttataatcaattgattactttagataataaagtcgaagcagaatggtcacaagtagagaatgtaatgcaaagacgtgctgatttaattcctaatcttgtcagtagtgttcaaggcagtatgactcaagaaaaagaagttttaaaagaaataacggaagcacgtaaagcatacgcaggagcaaaatcttcttctgaaaaagggcaagcaaatgagcaaattgaaaaaggattaggtaattttgttacagtattgaatgaagattacccaaagttagcttcttctgaaaatgtcaaaaccttaatgactcaattagaaggatctgaaaatcgaatttctgttgaacgccgtaactatatacaagccgttgaaacatataaccaacagatttcaaaattccctgataaaataattgcaaaacttttaggatttgagaagaaaactaactatgttgcgacagagcagggaaaagaagtgccgcaagtaaaatttaaataa

SEQ ID NO: 2320 - DNA, 1293 bp, Enterococcus faecalis
ggaaggttggataaaaaagtcgaaaaaattcaagaaaaagttcgtttgttttataaaaagcatcagcggaatacaacgattgttgtggtaattagtttaagtatgattttaatattaggaatggctgcttggtatgaaggaaagggaatctcttatgaagcaaaacaaactgcactgagagagaagcaacatgccttacaaaaaaagagagacgatatcttagcagggaaaatgactgaagcgtcaacccagacaacaataaataacttttctaaacaagaaataactggtgaaaatgaattagtgacaattactggaacgaatgggcagttgaacattaatgatgctaatatctatgtttcagataatgcaggtattgtctcaaatcaacttaaacagaaaatgtttcaattgaatcaacaattgttggaaaatgcgaatggcgcacaatttatgcttattaccgttcctgcgttacctagtggggaatctgttgaatcttacagcaataagattgctaatcaattaggtgtaggggatcgtgaaaaaaataatggtgtggtttttctaatggcaattgaggatcgcgagtctcgcttggaagttggatatggcttagagagtattttaacggatagctatgcggatgatattattaataatgaagaagtaaaagaggcttttagagacgaggattataatacaggtctcaataaaattattgatcaagtatcggctgcaatcaattcaaaaaccgcacaagtggataatgaattaacaaatatacaaacagagttaaacactaacacaacgaaaagaaatgttcttttaatggcaagtattgctgggatgctcatttgtgctgtttatattttacaaattttaagaacaagaaaacttgttaaaaaaatgtatcaagattatttgaattgtttaccaacaaaggctgtcctaaataactcagaacagacaaagaaagtattaaataagatgaaaaagacttctttttattgtttatatcttaatggagcaacgttatttgccacgaaagggaaaataagacgtgccactaagcgtggttctttactaagtatatatccaaatgcaaaaaaacaatcttttgggcgtttattagtaggagatactttatatagttatgatggtagtgttttgacgtatgcttatttaaactcacaatacaatccgtctaatcatagtagttctggtagcggcagtggtggttcattcggtggcggctcattcggcggtggcggcgcctcaggaagttggtaa

SEQ ID NO: 2321 - DNA, 1005 bp, Enterococcus faecalis
tcaaacagactgctgtcccagcatacaggaggaataaccatggcaacgtattatgaagcaattaactggaacgccattgaagacgtcattgataaatccacttgggaaaaattaaccgaacaattttggttagatacacggattccgttatccaatgacttagatgattggcggactctttccgatttagaaaaaactactgtcggctacgttttcggcggtttaactttattagatactgttcaatcagaaagcggcatggatcaactgagaaatgatgtgcggacgcctcatgaagaagccgtcttaaataacatccaattcatggaatctgtccatgccaaaagttattcttctatcttcagtacattaaatacaaaaaaagagattgatgatatttttgagtggacaaataccaacaaacacctgcaatataaagcagaacggattaacgaaatttataaaaacggtactccgttagagaaaaaaattgctagtgtatttttagaaacgtttttattctattctgggttttacactcctctttactatttaggaaacaataaactagcgaacgtcgctgaaattattaaattgattatccgtgatgaatcagtgcacggcacgtatattggctataaattccaattaggatttaatgaattaccagaagatgagcaagataaactaaaagactggatgtataatttactttacgaattgtacgaaaacgaagaacgttatacagaagaattatatgatgacttaggttggaccgaagaagtaaaaacctttttacgttacaacgccaacaaagctttaatgaacttaggtatggatcccttatttgcggatacagccaatgatgtgaacccgattgtaatgaatggtatttcgacaggaactagcaaccatgacttcttctcccaagtaggaaatggctatttactaggaacagttgaagccatgaaagatgatgactatctttacggtttagataaatag

SEQ ID NO: 2322 - DNA, 2169 bp, Enterococcus faecalis
tggaagaaattgagtctaaaagaaattaaagatgtcagctatttcaaactgaataacgagattaaccgtcctgttgatggtcaaatccctttaaataaagataaagaagcactcgcagccttctttaaagaaaatgtagaaccgaatacacgtaaattcagctctgctgaagaaaaaatcaactttttaatgaaagaagattttattgaaactgaattcatcgaaaaatattcaatggactttattgaaaaattatatgctttcttagatgaacaacatttccaattcaagtctttcatggcggcttataaattttattctcaatacgctttaaagaacaacgccggaacagagtatttagaaacatatgaagatcgggttgcctttaatgccttgtattttgcggatggcgatgaagagttggctttaacattggcggatgaaatgatccatcaacggtatcaaccagccacaccttctttcttaaacgctgggcgtaaacgtcgaggtgaattggtttcttgtttcttagttcaagtaacagatgatatgaacagcattgggcgttcaattaattctgcccttcaattatcacgaatcggcggcggcgtaggaattactctttccaacttacgtgaagcgggcgcaccaatcaaaggttatgatggcgcagcaagtggtgttgtccctgttatgaaattatttgaagatagctttagctactctaaccaactaggtcaacgtcaaggtgctggtgtggtttatctaaatgtcttccatccagatattgaaatgttcttatctgctaaaaaagaaaacgctgatgaaaaaatccgtgtaaaaacgttgtctcttggtgttattgttccagataaattttacgaattaacacgtaacaacgaagatatgtatttatttagtccttatagtgtggaacgtgaatatggtgtgccttattcctatgtagatattaccaaagaatatgataacctagtggccaatccaaacatacgtaaacgtaaaattaaagcccgtgacttagaaaatgaaatttctaaattacaacaagaatctggctatccttatatcatcaatattgatacagctaacaaaaacaatccgattgatggcaagattatcatgagtaacttatgttctgaaattcttcaagttcaaacgccttctgttattaatgggaaacaagaatatgaagttttaggaacagatattagttgtaacttaggttcaactaacattgttaatttaatggaaagtcctgactttggaaaatctgtccgcgctatgacgcgtgcgttaacttttgtaacagatgcttctgaaattgatgtcgtgccaactatccaaaatggaaatcgtttaagccatacaatcggactaggcgcaatgggcttacacaccttcttcgctaaaaatcatatggaatacggctctgaagaatcattagactttacagacatttatttcatgttattaaattactggactttaatggaaagtaaccaaattgcgaaagaacgtaaccaagtcttccataattttgaaaaatcagattatgcttctggtgcttacttcgataaatatattgaaggcaactttacaccaaaatttgataaagtgaaagaaattttcaaagacattcagattccaacggctgaagattgggctgcgttacgcgatgctgtgaaaaaagatggtctttatcatcaaaatcgtttagccgtagcgccaaatggttcaatttcatatattaatgatactagtgccagcattcatccaattactcgtatgattgaagaacgtcaagagaagaaaattggtaagatttactatccagcgccttatttagctaatgatacaatcccttactatacttctgcttacgacatggatatgcgcaaagtgattgatgtctacgcaacagcgcaacaacacgttgatcaaggaatgagtttaaccttgtttatgcgttcagaaatccctgaaggcttgtatgaatggaaagaaacaccaaaacaaacaacccgtgacttgaacattttacgtcattatgcgttcaacaaagggattaaatcaatttactatattcgtacatttacagatgatgctgaagaaattggcagcaatcaatgtgagtcttgcgtgatttaa

SEQ ID NO: 2323 - DNA, 396 bp, Enterococcus faecalis
aacaattggctagctaagatgaaacttgtttatttttcagtcaccggtcaaacaaggcgctttattaaaaaattggatttgcctgcttatgaacttgagccagcgaatcctttttttgaaataaatgagccttttattcttgtcattcctacctatgatgcagaaattacagaggtagtgaatgactttcttgattataaaagtaaccaagaactgttagttggtgtagctggtgggggcaaccgtaattttgctgaattatttgtctataccgccaaagatattgcccgcgattatcacgttccgcttctatactcctttgagtttagcggaacagacgaagacgtggagacctttaagaaagtagtggaagaaattgagtctaaaagaaattaa

SEQ ID NO: 2324 - DNA, 267 bp, Enterococcus faecalis
atttatactagtctatgtagaaaaaaagaggaggaactttcaatgaacgtaaaaatcttttcaaaaaataactgtatccaatgtaaaatggcgaaacgtttcctaagtgaaaataacatcgcttttgaagaaatcaatatcgacgcacaaccagatgctatcgactggttaaaagaacaagggttccaaagcgtaccggtaatcacatctgaagcaacaaccgttgttggcttccgtccagaccaattaaaacaattggctagctaa

SEQ ID NO: 2325 - DNA, 333 bp, Enterococcus faecalis
gatatcgacacacgtgtttgttcactgcaaacgaaacgtttcaatcaagaagcggcgaaattagacggtgttcagattatcacgatttccaataacacagttgaagaacaagcaaattggtgtgccgctgagggtgtcgaaatggaaatgcttcatgatactgaagactcatttggtgcagcttatggtttgtatattccagaaatgggccgtttagcacgtgctatttttgtgattgacccagaaggaacgttagtttatgaagaaatcgtctcagaagtttcgtcggaacccgattatcaacaagcgttagaatctgcaaaaaaagtgtaa

SEQ ID NO: 2326 - DNA, 2685 bp, Enterococcus faecalis
ttaccgctccaaatcgcgtattttaagaaagaaggggaaaaaatgtcagaagaaaaaaacttaccaacgaaatatcaaccgacagaaatcgaagctggccgttatcaaaaatggctagatcaagatttatttaaacctagtggcgacaaaaaagcgaagccctattcaattgttattccaccacccaatgttacagggaaactacacttagggcatgcttgggatacaacattacaagatatgattatccgccaaaaaagaatgcaaggctttgatacgttatggctgccaggaatggaccatgccggaattgccacgcaagcaaaagtagaagagaaactagcacaacaaggaatttcacgttacgacttaggtcgtgaaaaatttgttgatcaagtgtgggaatggaaagaagaatatgcttctcacattcgtgaacagtgggcaaaaatgggtctttctttagattacagccgtgaacgttttactttagatgaagggctatctgaggccgttcgtaaagtgtttgtctctctttacgagaaagatttgatttaccgtggtgaatatatcattaactgggatccaaaagcgaaaacagcattgtctgatattgaagtaatccataaagatattgaaggagctttttaccacatgagctatccattatcagatggttctggcgttgttgaaattgcgacaacgcgtcctgaaacaatgttgggagatacggcgattgcggtccatccagaagatgaacggtatcaagaacttattggtaagacagttgtcttgccattagtcgataaagaaattccaattattgcagatgactatgtagatatggaatttggaacaggggttgtaaaaatcacacctgcccatgatccaaatgactttgaagtcggtaatcgtcatgacttacctcgagtaaatgttatgaacgaagacggcacgatgaatgaactggctggaaaatacgaaggaatggatcgttttgctgcacgtaaagcgattgtctctgacttgaaagaactaggtcgcttaattaagatcgaaacaatgaatcacagcgtgggccattcagaacgaacaggcgttgtcgtggaacctcgtttatcgacccaatggtttgtaaaaatgggaccattagctgaaaaagcaatgaaaaatcaagaaacagaagacgctgttgaattttatccaccacgcttcaatcaaacatttttacgttggatggaaaatgtacatgactgggttatttcgcgacaattatggtggggccaccaaattcctgcttggtatcacaaagaaacgggcgagatgtatgttgggatggaagagccagccgacagtgaaaactgggttcaagatagtgacgtcttagatacatggtttagttctgctttatggccattttcaacgatgggttggccgaatgaagcaagcgaagattaccaacgttacttcccaacaagcacattagttactggctatgacatcatcttcttctgggtaagtcgcatgattttccaaagcttagagtttacaggtgaacgtcccttccaaaatgtcttaattcacggcttaattcgtgatgagcaaggacgcaaaatgagtaaatcattggggaacgggattgatccaatggatgtcatcgaaaaatatggcgcagatgcgttacgttggttcttatcaaatggttcagcacctggtcaagatgttcgttttagttatgaaaaaatggatgcttcttggaactttatcaataagatctggaatgcaagtcgtttcgttatcatgaatgtagaaggtatgactgctgcagatattgactttagtggtgaaaagactgtcgctgatcgttggattttaacgcgcttaaacgaaacagtcgcccgtgtgacagaattatttgatcgctttgaattcggtgaagcaggtcgccaattatacaacttcatctgggatgatttctgtgattggtatattgaaatgagtaaagaaattctttacggagacaatgaagcagctaaacaaacaacacggagcatcttggtgtacacattggatcaaatcttacgcttattgcatccaattatgccgtttgtaacagaagaaatttgggaaaaaattccgcatcaaggtgagtcattggttgtggcagagtacccagttgttcatgaagaatttaacgatgaagcagcagctcgaggaatggaagttctgaaagaagttattcgttcggttcggaatattcgagcagaagtgaatacaccactttctaaaccaattaccttgttaattaaaacaaacgatacagaagtagaagaatttttaacagctaatactagctacttggaacgcttctgtaacccagaggaattagtcatcagtcgtgaaatagaagcgccagaattagccatgtccgctgttttaacaggcgcagaactattcctaccattagctgggttgattaatatcgaggaagaaattgctcgcttagaaaaagaattagacaaatggacaaaagaagtcaaacgtgtgcaaggcaaactttcaaatgaacgttttgtgtcaaatgcaccagatgaggtcgtggaagcagaacgtgcaaaagaaaaggactaccttgaaaaacaagaggctgtcaaagaacggattgcccaattacgttcaatctaa

SEQ ID NO: 2327 - DNA, 696 bp, Enterococcus faecalis
tttatctcggcactgccgtcagcggaacgattttactgggaacggctggttatcttgggtttaaaaaataccgtcgaaaacgtcaggaggccactcatgactaatcagaaaaaatttttaaatggactcattcggtggttacccctagttggactggtgcttttcttcggcttaattctatggggatattccagaggaatttttcattctgttgcttccttgcaagcttttattaaacagtttggtaactatgcggttctgtgtttcattcttttacaaatcgtccaagtgattatccctattctacctggaggaatctcttctgttgcaggaatgttgatgtttggcaatttgcaaggacttttgtatagctatcttggattgattattggtgagtttattggctttttactggttcgttactatggacgtagctttgtaaaaataatcctttcacccaataaatacaaaaaatttgaagagattttggacaaaaatgaacacaatgtcaaaaagctcttaatctttactatgttagtccccttcgctccagatgatattgtttgtttagtggcgggaattacagatatttctttaaaagaattcatgaaaattgttcttttattgaaattctggtctgtggctacttacagctatttaatgttgtatttgtttcaattatttggcaaattataa

SEQ ID NO: 2328 - DNA, 2592 bp, Enterococcus faecalis
tttttttataaaggtggacttattttgatgaaaaacaaatcgaagcttttatggttaggaagttttttcttgccgtttttacttctgttgcttgtatggatgacattacaacttgcgccttttggtgacaacaacttattagttagtgatttaggcacacaatacatgcctttcttgagttttttaaaacgctcttttcacgagggaataactacattctactctttttccaatgagattggtgaatcgattgttcctttggcagcctattacttactgagcccttttaatgtgttggctttcttttttccttatgaacaattacctatagcaattttatggattattaccttaaaacttgccttgatgggcactacgatgtttagctatttaaaatacacctatcaaaaagttgatggcaccacgttacttttttcaacgtcctatagtttctgtggctttgtcaccgtctatagccaaaactttatgtggttggatgcactgattctattcccgcttatcttattgggactccaacgtttatgggatcaacgcaaatggggcttatacagtatcaccctatttttagcgattgtgacgaattactatatgggttatatgatttgtctctttgctgttttgtacagtatctattggttctttaaaaagaataccaaagcccatgctattcggcaattttttaaacaaagtccgttattcatcctcgtttcttttttaacaggaaccgcaactagctttttattattacctgcagcagaagggatgctctatacaaaaaaagcagactttgatgtctcgacgttctttttaacgcctaagttcaacacttcattcttctcgcaattaggcttaggttctattaattatgagttgcgtctagaccatttaccaaccgtttttgctggattatttgtgacactcctctgtgttgcctattttcaaacgaaacaaattgcgttaaaagaaagaatagcttcagcaattcttttattcattctttttttaagcttttggttagaagcctttaatactgtctggcacatgtttcaaagcccagctggtttcccttaccgaaatgtctttatttttagctttttattgattgtctttgcctatgaagtttggcttaaaaaagtgaccattccttggaccgcacctattatttttagtctgctgttagtcattggctacggatctttgtattatggtccacaaaagaatctcttaatttcgatcaattatttatggctaagtttactttttatttggttgattttcttttgcttgcgtttagcgcacaaaaaggccttaagaaactatgtagtcgtggctttattcttactggtcagcacagaattaacaacgaatttctggatttcttttaaacacatgccctttggtagccaagcaacatttgcccaagattaccgaaaacacagccaattaatcgatgaaaaaatggcctcagcaccagaactttatcgcatgaaacaagtcattccttccaaagaaacagggttccgtgaaatcaataacggctacaataatcctttactttatggctatgctggcgtttctagctatacttcgactttaactgccactacccaagacacattaagtgcgctaggtttatatcgaaaaaatgatcgccggattgcttatgtggataattcacaactaactaatttacttttaaatgtgaaatatgactttttaccaattgaaaaacctaccagtgaaaaattgctaaaaacagttggttccacgaaaatcatggaaaacgatgaagcgatcggtatgggctttttggcgccaaccgcattaaccaagttaaaattagcaaaaaataatcctttagatgcccaagaagaactcctgcaaacgctcgtgccgacggataaaccttactttaaaacagcttcgttgataaatgaacctcatcataccaacgaaacaattgaagcaacctttaaagtgaatagcactggtgacttgcatctttatattccgaatttaaaatggaaaaaagttacacaattgaaggtaaaccaacaagttatctcgacgccgatttatattgcaaccaatcaactgttcaatttagggcattttgaaaaaggaactaccgtgaccctgtcactaactgctgaacaagtggttgatttaaccaattggcaacttcaaactttagaccaaacagcctttaatcgtgcggttgacaaattacgccaacaagctcttcacgtgaatgcaactaaaaaaggccatttaaatggcgcactgaatgtacctggaaatgacactcagttactgtatacgtccattccttatgaccaagattggcaagtcaaatcgtcgctacaaaaagaacccttaaaaacacaacgcattctaggtggctttttagctgttgaagtcccagctggcaaacagcagttaacctttgcctatcatccaagaatgatttatctcggcactgccgtcagcggaacgattttactgggaacggctggttatcttgggtttaaaaaataccgtcgaaaacgtcaggaggccactcatgactaa

SEQ ID NO: 2329 - DNA, 216 bp, Enterococcus faecalis
tctgctgttagtcattggctacggatctttgtattatggtccacaaaagaatctcttaatttcgatcaattatttatggctaagtttactttttatttggttgattttcttttgcttgcgtttagcgcacaaaaaggccttaagaaactatgtagtcgtggctttattcttactggtcagcacagaattaacaacgaatttctggatttcttttaa

SEQ ID NO: 2330 - DNA, 1362 bp, Enterococcus faecalis
cttagttataatgtagaagaagacaaggagttggacaagatgcaattaacaatagaagaagccattgaatggattcatagccggttaccctttggttcaagacctggtttggatcggattaatgcgttattagaaaaaattgatcatccagaaaacaaagtgccaacgattcatatcgcaggaaccaatggtaaaggctcaaccgtgacatatttacgctgtctattagaagaaatgggcttgaaagtcggaacctttacctctccttatattgaatcatttaatgaaagaattgcgataaatggtcaaccaatttcagacgaacaattgattacctatgtggaaaagtatcaaccaatcattaaagaattagaccagatcactgaagtggctggaattacagaattcgaaacattgacaggaatggccttggactatttcgtgaatgaacaagtggatatcgccgttgttgaagttggcttaggtggattacttgatagcaccaatgtcgtgaagccattattgacgggaattacgacaattgggaaggatcacacagaaattttaggtgaaacaattgctgaaattgcctatcaaaaagcgggtattattaaagaaaaagtcccagtagtaacaggcaacatttgtgctgatgcgctagcagtcattgaaaaagtcgcacaagaaaaacagagtccaatttttcgttttggcaaagagtatcaagtggaatatctacatcctgatacacaatggggggaagtatttaatttctatggagaaatgggcaaactgacaaaaattaaagttcccttgttggggcgtcaccaagtagaaaatgcggcggtagctattcaattatttgacaagtattgccaactacaacatttgccatttaaagaacgagacattactcaagggttggctaaagcgcaatggccagctcgaatggaacgtcttagtgatgaaccgttgattgttttagatggtgcccacaatgatcatgcagtaaaacgcttagttgaaaacttgcgcaaagagtttccacaacacacgattcatattttattttcagctttagcaactaaagatgtggatgagatgattcaggacttaaagcaagtaccgaatgcgcatctttacttaactagcttcgattatcctaaagctattgcacttacagaaatggaaaaatatgaagacgatttaacagaaattgtgtctttatggcaatttggcttaggcgaaattttagaaaaaatgtcgacagatgatttattattagtaacaggttcattatattttgtttctcaagtaagagaattacttttaactataggaggaaatgatgaagaaatttga

SEQ ID NO: 2331 - DNA, 666 bp, Enterococcus faecalis
gaggaaatgatgaagaaatttgatggcgtaatttttgatatggatgggttgctttttgatacggagttgatttactatacatctactcaaaaagtagcagatgcaatggggttaccatatagtaaagaagtctatttagactatgttgggatttccgatgaagaagtacaagagaattaccgacgtatttatgcatcctatggtcatgacacagtggaagaatttatccgccgttcttatgatgataccttgcaagagtttcgatctggtaacgtccctttaaaaccaggggtggtggaattcctcgactttttagatgatcaaaaaattcctcgattagttgcttcaagtaacgtccgtccagcaattgaaatgttattaagccatgctggaattcaggatcgttttgtaggtattgtttcagcagaggatgttaaacgagcaaaaccggacccagaaatatttcaaaaagctcgtcaacttttaggaacagaagccccgaaaaccttgattttcgaagactcatttcatggggtaagtgcggctcatagtgcgggcattccagtgatcatggtacctgatttattgcaaccaactgaagttatccaagagaaaacattacatgtcttggagagtttacatcaagcgccacattatttaaaataa

SEQ ID NO: 2332 - DNA, 192 bp, Enterococcus faecalis
aataataaaaacaacactcctttgcgtagtttattaatgactagcaaaggaggtttttttatgcaagtatcggatctgtttattcgcgagatgccgagtgattgtttaccacgagaacggctcttggcgataggagaaaaagcattatcgaatcaagagttgttggcgactctggctcttcacacacggaat

SEQ ID NO: 2333 - DNA, 453 bp, Enterococcus faecalis
agtcatatgtctgataaaaatacctatgcacgtcgtagccaacgtcacaaacaagaacctgatatctgtgaaaatacaaatcaattgaatgaagctgtaaagtccaaaaccggaaacgaaaacaaacaaccaaaaataccgaagaaaaaatctaattatagcaagtatatattcgcattgtttaccgcacatattctagtaattgtcgctactggcggttatattgtttatacattaaaacagcaagaagtagaagctcaaaccaaatatgaaactgctgcaaaaaatctcatggcttcaatccaagaagagcaagaccaaagtggaatttcaacgaaaatagatactataaatgacggagaaaataagtgccttgtttacagtccagtttatgaaagtactgttcctttcaaaaatgcaaaccagctcgtagacgagcttgctcaaaagtaa

SEQ ID NO: 2334 - DNA, 1113 bp, Enterococcus faecalis
caaaagaagcaacgtgaaaaagaagtgcttacagttgccagaataaaagcaacagcaatatcttctaaaattggtcagtatagaattgaagcagatagttttatctgggatcgcagtaaggaaaattttaaaaagctagacagtatttctgagaaaaccatttatgtttccgaaaaaactggtaaagaaatcacaaataaggatttgattccagatgaaggaagtctcttaggtattcaacaggtgattcagcaatccattcttgatcacgccaaagagcttgaaaaaataattgatgctgtattaacgatagatagaatttcttacgagagtaaaatgacttatacacctgatgaattgaccatcgacctaccaaagaacacaactgaaactactaaagttactctaaaatacagagacattgcgccttttattgatacagatctggtttcgcaagaaagtataaaagatgcgttacctgcattagatgaaaataaaaagtatgtcgctcttacttttgatgatggacccaataatagctcaacacttgatttgttgaatatactaaaaacaaacaacgtgaaggctacttttttcatgttaggacagatggtggatcaaaacccagatgttgcaaaacaagtccacgacgagggtcatgaggtagcatgtcacttgtattctcatccacagttgaatacactttcgacagatgaattacaaagtgaaatgaataaagctaataaagctaataaagcaatttttaaggctacaggcgtcttgcctcgcaatatccgtcctccttatggcgctattgataaaaaaagtgctgaaacaattggcatgccaattattcaatggaatattgattcgctagattggaaaacaagaaatcctgaagcaatcaataatgttgtcaaacagaatgtctttaatggcgcaatcatcttaatccacgatatccatcatgaatcagtcaaagctgtaccaggattgatcactatgttaaaaaatgaaggatacgaatttgtgacgatcgatcaactattgtcaggaaaacaaaaaccattacatcaatattttggtatgaatgatgaacggttagtagactga

SEQ ID NO: 2335 - DNA, 237 bp, Enterococcus faecalis
ttaaagttctatctggaaaaagcaaaagtatttgagacacaacacgcagcctttggatatttagctttggattatggattgatacaagttcctattgctggactaagtcctgaagaagagccatcttctggtcaattcgctgaattaaaagagtatgccaaaaaaataatatcaattatatttgttttgaaaagaatgctaatgatacaaaaactttggccaacgaagctgggataa

SEQ ID NO: 2336 - DNA, 462 bp, Enterococcus faecalis
attaaaagagtatgccaaaaaaataatatcaattatatttgttttgaaaagaatgctaatgatacaaaaactttggccaacgaagctgggataaaattggaagtattgaatcctcttgaaagtcttataaaagaacaaatgaataatggtgaagattatgtttcagtaatggaagacaatctaaaagcgttagagaaaacaactatggttgctggtgaagaggtagttccagaaaaagaagcgaaggatgaaaagacagttgctagtgggtactttaaagatgtcgatgtgaaggatcccgaattgagtgattatacaggtgaatggcaatctgtttatccgttgttaaaagatggaattttggatgaagttttcgattacaaagcaaaactcaataaagacatgacagctgctgagtacaaagattattatactactggctatgagatagttttcctttag

SEQ ID NO: 2337 - DNA, 489 bp, Enterococcus faecalis
gatagttttcctttagttagatttaacctgctctttattatgcatagaaagaggattcctatgaaaaaaactattacaatcctaactgactatcttggtttaggaaaaattgatatgaagataggagacgtaataattattgggattttgattattagctcctttatacctttatttattttttctcttgagaaggggaaccaaggaactactaaatatgctgttgttcgaattaatggcaaggaagtagatcgctttaatttagataaaatcagtcataaatatgtgaagtattatccagctaagggacaatataatattattgagattaaagatggaaagatccgagatagagaagataatagtcctgatcagattgcagttagaactggatggatatcaaatcctggtcagactagtatttgcttaccccataaattagttattagtattgagaaaaaaggaagtcctgattattatatttactaa

SEQ ID NO: 2338 - DNA, 960 bp, Enterococcus faecalis
atgacctacaaacatcttaccatagacgaactgacaatgatagaatcatattatcttcaacataataaaccggttgaaatcgctaaccgaatgggacgtgctatacaaactatttataatgtagtcaataagttcaagcaaggcaagactgctcttgattattggcaccagtataaagaaaataagaaaaaatgtggtagaaaagtcattcaattacctgctcatgaagtagattacattaaagagaaagtcactcttggttggacgcctgacgtcattatcgggcgaaaagaaaggcctgtttcatgcggtatgagaacactttatcgtttattttctaaagggatatttgatattgacacactaccgatgaaaggtaaaagaaaacccaatggccatcaggaaaaacggggaaaacaacaatatcagcgctcaatccatgatcgacctgataattatcctgatttcaattctgagtttggtcaccttggaggtgatacgatcgttggcattcatcataaaagtgccgtcattactttagttgaaagattatctaaagtcattatcacgattaaacccaacggccgtaaggcattagatattgaaaccgcccttaatcaatggttttctcgcttccctaaaaacttctttaaatctattacgtttgactgtggaaaagaattttctaactggaaagccattagtaaccaacacgatattgatatatattttgcggaccctggaacactttctcaacgcccattaaacgagaattctaacgggattctgcgtcataatggactgccgaaatcaatggattttagagaagtgaatcagacatttatttccagtgtcagcaatcaacgtaatcatattccaagaaaatcattgaattacagaacaccaattgagatatttttgagctatgtacaagaagcattttattctaacttaatttga

SEQ ID NO: 2339 - DNA, 420 bp, Enterococcus faecalis
  misc_feature (49)..(49): Nucleotide 49 is "n" wherein "n" = any nucleotide.
ctacccccgcgttgcggcaccttaggacaatttttaccacgattcctanagaaaaattcaaaatctttcagagaagctgttaaaggaatttttaagttcacagatattaacttagcgcgtgaggctaaaaatcgattgattcatgattatatcgatcaaccaaaatattcaaaagcttgcgcatcattggatgatggattcgaagacgcctttcaatataccgtacaaggaaattcccacaatcgactaaagagtaccaatctaattgaacgactgaatcaagaagtacgcagaagagaaaagattattcgcatcttccccaatcaaacatcagccaatcgcttaattggagccgttcttatggacctacatgatgaatggatttattcttcaagaaaatacatcaattttgataagtag

SEQ ID NO: 2340 - DNA, 684 bp, Enterococcus faecalis
ctttcgccaattggcattgttgcaatgatcgatgtagcccaaggggatagtttgtttatccaagcgccttttcacagaaaaaatacactgatcgatacaggggggcggttgtcttttggcaaagaagattggcggcaacggaaaaatagtcgatcaggagcagaatattcagtgattccttttctcaaaagtcaaggagtcaaacgtttagatgaagtgatcatcacacacgcacatgaagaccattttggcgatttattagccattgcgcagaaggttccaatttctgttctttatttccctaaaggagcagctgaagccaatttttcgtttcgccaagtcttgaaacaactccaaaaaagcgggacagactgtcggccaattttagcgcccaagcgaattaatgggcccgtttcttttcaaattttatcaccaaataagagcagtattgggggcaataatgactcgatagtgttttccacacaattaggcggacggcattttttatttactggtgacttggaagccgaaggagaagaacaagtgttggctcgctatccccagttgaaaatcgacatcttgaaagtcggtcatcatggtagtaaaacgtcgtctactaaaagatttatcaaacagcttaatccgcgagaagcattgatttcagctggactgaataatcgttaa

SEQ ID NO: 2341 - DNA, 420 bp, Enterococcus faecalis
  misc_feature (349)..(349): Nucleotide 349 is "n" wherein "n" = any nucleotide.
ataaacaggggagtgtgtgacatgaagaaaataatcacaataattgtgtctttagcaattggtatcggttgtggtttttggtcaggatattacatcagtaaaaaatattcagaaaaccaagagacaactatttccaaaagtactaactcagaacaacctttgattacaaatggagagtatcaagtaacagctaattgggattggaaaacattagttgttaaagataatgtgtggacattggatggcaaacgtatttatgatgtttccactacaaatgataatattgtgattttaaagggaaaaaatttgaaatcacttgtagtttataaaatagaaaaagataacgaanaaatcaacttatattcttacacaaaagaaagcgttgggaaaaaagtattagctactctagtgaaaaaataa

SEQ ID NO: 2342 - DNA, 2484 bp, Enterococcus faecalis
ttaagtaacagagaaagtaggagcggaaaaatgaaaaaagcagcaattatgggctggtggtataaccaaaattatggatcaatcttaacatactatgctctaaacaaatatgtacagaataaagggtacgagacggttatgattgatggaccactaggttataaaaacagaagtaactttcgagcatggatgcctttagcgtataatttttttaagaaaaataatatgccctatactgaacaattaacaaaagaaacgttaccgacattgaacgatttagaaaatctagatacctttattttaggctctgatcaaatgtggaatccctggaatggttgggtagacgacgatgatttcttagattttgtttatcctcgtaataaaacaattgcttattctgtttcattaggaaaagcagatacaagtaaatatgatcctaaatgggttgcaaaccgcaaaaaagatattacacagtttaatcatgtttctatgagagaagatttttctgtacaaattatgaaagatatttttcaagaagaagttattcaggctttggatccaacctatcttgttgaaagaagtgaatatgattctttagctgatcaagctacgtttaaacgacaagaatcaggagattatatggctgtctttttcttggatattaacaaggaaaaagttcgtgtagcactagcgatcgcagaaaaattgggactgaaattagtggtcctgcctaatcctttaaaaggacgtgaactagcgaaaaaaacgtttcctaatacagtagaatatgtttctgaagatacaccagaaaatttcttatctgtttatcgagaagcaaaatatattattactgattcgtttcatggcactgtttttgcgactattttccaaaaaccgttttcaattttttataatgaacaacgtggaattgaccgctttaatagcttgatgaacctgtttgagcttggcgaaactagacgtgtctatgagcaaaacacaaaacaagaaattgaagaaaataaaaatattagtttagcacttgactatcaaaagaccgctggaaagattgctagagaaaaagagatttcagataagtggttaaccgatgcgttgacaagtaaatttagcccagatgaagacgaagtatatgatgaatttagacgatatattatcaataaacctttggatttttatcgagctaaaacaactgttccgatttccgcagcaattgttttatcgccaaatggtacgataaaaaattccaatcctaatgaaagcttttggaagctaacagataaagaattaatttttatgaataatcatcgtgaagtcactacaagatttaatcgtgaaaagtttaagggaaaggaaacgttcagtccttttagaatcgtcggtaaatatgtgaaagatgaaaaaatcgaacatgttatgtatttgcatccgatacaaaaacctaagcctaaaccgaaacaaggcacagaaaaaaaagcattagcaattcccgagaatcttttaacaagaaaacaattaattatgaaaattgtgcaaaatgagagaattcgttcgtggaaacaagatcttttagaagaattaccagatttagagttatttgtaggtcgtgaattaaaagaatatgcttcgaattttgttggtggtccagcagatcttttaatttttccaaaaacgatagaagaagttgctttaattgtaaaatatgctaaaaataatcagattcctttaactgttatcggtaaaggttcaaatattttagtccgtgatggtggtatccgtgggattactttaaatatgactgccttgaattatcgtaaaattacggggaatgttttaacagtttcggcaggtgcaagtttaattgaaacatcttattatctactagaacacttgaaatgcggtttagaatgggcagataatattccaggaaccattggtggcgcagtttatatgaatgctgggacagttaaggatattaatagcatgtttcttgaagctacgattgtagatgaaaatggagaaattaaagttttaaataaagaagatgttcaatttagtcatcgctatagttcatttatggatcatcctgagtggattattctagaaactaaattacagatttcagaaggtaatttagaaaatatggtaaatgacatggtaggaactgtcgaaattagagaaaggatgcacccactaacacatccaaatcatgggtcaacttttacttggggacgggcgcctcgattaattcaacaagctggcttagttggtactagaattggcggagtaaaagtatctgaaaaacatccaggtttctttatcaatgttgaacaagcctctgctcaagactatgaagcattaatttatttaattattgcaaaagtttatgaattttctggatttttattaaaaccagaagtgagaattttaggtgcaaatatgtgggaagcaagtttaacttttaaataa

SEQ ID NO: 2343 - DNA, 864 bp, Enterococcus faecalis
aggagattaaaaatgaacgatttatggaattttttagataatcatcctgaagagaaagaattgataaaggcaaaagcattacaaggttatacagttgatggaattttaaatgatcaacttaattttgttgctctagatactctatctattggtctggaaaaatttggaaatattcattatagtatccaaatcccagaatttaatgaattactaagtaagaagatggtagtactttttgttcctgcggatggagtgggacactctggcgccaaagaaagatattttggattgagacaatggaataccctgtctcaatctgttcgaaaaaataccatcattcttagaatagctgatgttggctttgtgtcaggatcctattacacattatttgagcaagaaattttggatttaattgaagcaaagaaaacagaatttggactgaagcatcaagatataatcttctatggaaactctagaggcggaacgggagcgttattattaggtattacaggtaattacaaaacagttagtgtagatccagtaattgatcgagagccttgggtaaacagcgcggatggtagaatagatcgccagttaatgtttgatttcgtagaaatggatttttcaaaccgaataaaagataagatggaacagtcaaactatgaattagaaaacattacggtgattgcttctgaagcaaataaaaaaatgtatgagaaaatttaccccttatctaatggttttaccttgaaaaaattagaattaatgattgattctgaaaatacaattggtatacacggccttacgataatggaaagtattcatttacaattagcgttaataaataattatttatttgattaa

SEQ ID NO: 2344 - DNA, 2529 bp, Enterococcus faecalis
gtgagggaaatttgttttatggaaaatgtgaaagtgtcagtcattgtacccgtctataacgtagaaacctatttagaagaggcattaatgagtttgaaaaaccaaacattgaaagaaattgaattcttaattattaatgatggctctactgataatagtcaaaaaattattgaagaaattgcacaagatgatccacgttttcgcgttttcaatgttaaaaatgggggaattggaaaagcctttaacttgggtgtttcagaagcaaaaggtgagtatattgctgaatttgaaagtgacgattatgtagcattgcatgcctatgagcgtttatacaatacggctaaaagtcatcatgcagatgttgtccgttgtaattgggttgaattttcttctgaagaagaggttgagcgagatatattatggcaatatcccgataaatacaatcaattgattgacttaaaaacgacggatttaattgtacaagtttatccatggaatgccatttataaaaaaagtatgattgagaaagaaaacgtaacttgggatgaggaaattaaaagttatggggacactggtctattttggaaaatcaattcagcatctcagaatgttatttttattaaagattgtttgtatttttatagacaagacaacccaaattcgacagtaaataatgtggcaacaaaggttcctttcttgtttcaacaatttaaactaattcgttcaaatttaattgaacaaaataaatttgaacgctacaaaggttatttttataaacaaatgttcgaaaaatacttttgggcgattgaaaaattaacccatttacgtgatgagtcggtttatgaagtgattcaaaaggtggcagtagattttagacaagctttagaaacagaccagctgaatgatatcgattttgaatacatcaaacaattttatcaaattgcaaatgatccagcagcttattatgaggactacttgaaaaatctgtataaagttagtgttgtcatgccgattcacaatgcttcaaaatatttaagacaaacattagaaactgtttgtgagcagtctttacgtgagattgaaatcattttagtagagaatggctctacagataataccatggatattattaacgaatttgcagtaaaagatccgagaattacggggatttctattggcaaaagtaatcctggacacgcaagaaatgtgggcatttcgatggcacgaggacggtatttgcaatttctggatgcagatgatcattttgaagcgaatttattacaagacgcttattatcgtgcatatgatagtgcaacagatattctgttatttggcatgaaagaaaagttaccaaatggagaagtgcacgttgttcacaatccattactaactaatggcggacgtatgtctggtgaagaaatttcattggatgaagtaaccccttatttatatgataaattatttttattagaatacatcaaagaaaataacttggtaaacttagaacaatttgttggcgaggatgcttatttcacttatacagcattattaggtaccgaaaaaattgttgcactaaacaaatatttgctgacacgaatcgttagacaagatggcttgatgtctacgtatggaatgaattatcgtgatgagttcaatttacatgacaaaatgttggagtacttaaaacaacatgctccaaatcgaattgaagcatatcggttaaaaattattaatacattaaactggtttatttttgatatgaatcgtgttgatcaagcatttaaagaacgtttctatcaagaattaaaagagaaatacatccaacaattagggctagacttagtgaaaaaagaaaaatattctaatgatccagaacaagtagagcgtatcacacgaatccaaaatattttacaatacaatctagaaatatatcaaaatatttataaagattttgggatgaaaaaaacctttattattccgaatgttcatattcaagagcgtggaggtaaagtaatttttggacaagagaagacccaggggaatgggacggcaattgaaatgttttcaattattattgcagataacgatacaagcaatgccagcggagtgattgatttcgtttatatgggtgacaatacaaaaataattcatgatagtttattagtatctttattaattaaaaaagaaggtactactttaaaatcgattgttttacaagccgagtgggaaaaaggctataccttactacaagaaaatatgtattatactttcgtagacaatgtttttacaatttgggcgggctatactcaaaaatatgcagcatttgattacaatgttcgaattttgacttctcgagaaggggaaacacattttagtgtcgttcgacaaaaccaaggctatatccaagatacaatgacaagtattggtaacgaattaacacctatcaataaaattgaaggaaatgaacctacaacaattaaaaaagctgtatcaaaaagtcttaaaaaagcaaaagggttgttgaaatag

SEQ ID NO: 2345 - DNA, 1485 bp, Enterococcus faecalis
aaagccggagggtgtaggttggaaaaacaaaaagaagtccaaaaagaatatgaagagtatcaatatatgttagatactgaaacgtggaaaaaggagttaagtcaatttaagctgtcctcttcagaaaaaatatcaaaaaatcctaaagtctcaatcattattgctaattacaataatgcaccatatcttaaaaagatgatggattctcttgttcaacaaaccattgggattgagcaattgcaagtgatgtttattgatgattgttccacagatcattcgttaaaagtaatagagccatatcttgaaagatatccgaatattgaaatttatcagctgcttgaaaacactggaggagctcacggcccaagaaacgtagggattgtaaatgcacgtggtgagtatagtgtcttcttagatgcagatgattggtatgatttaaatgcattgaaatatttatcagacctactagatgactctcacgatgattttgctgtttctggtctaatacagagtacggacggccacttaatgttaaaaagtaagccatattatgtggatgggtcatttaaaaatcggtctatccaagaattgccagctgaattttatggttggttaggaccgcaagctatcatgttaagaacttcactgatacacaataataatttacactttgttaatcaacgggtggctgatgatgtgctgttcttttatgaagccatgcgattttcaaaaaccattacacaaggggaaaggttaacgacttatttaaatcgagatgcagataatgaaagtttaagcaaatcaattaatcggacatttatgctttcttggttgcgtgcgttaagttatatcaatcaacagtttccagatgatttgtctaaagaacggatgttagcacgccgtttagaatggctaatttatgacttttgtattcggaggaatactgggtatccattcagtaaaaggcgattacaagattttaaagtacagatggatcagtatttaggtgaattaaattttgatcctagcccgtattttagaagtgatgtgcgccaaatcatttggacatttttacaaactaacgatattgatggtttgtattggtttattcaatgtcagtccattcgttgggtgttagtcaatcgctttggttatgtttcaaaaacagagagaagctattattatcccagattattgaaacgattcccagcagttcgcatgaatgcttatgcagaagcaacgcaacgtgaaggcaatacgctttctttaaatgtgtatacacaccaaaaaattacaggatttgaaataaaagagctgaaaaatccttttgaaacaagacagaggctggcgtttaaaaaaattagtgaaactagttatcaggtagagttgccagaaaaattttcaaataaagaaagtagatttacgatagtttttgataattatttagaaattggggttaaagattttagtaagttttttgcttaa

SEQ ID NO: 2346 - DNA, 1182 bp, Enterococcus faecalis
aggattaattcaatgaaaaaatttttagagaatagtatacatcaagccataaaagcttgttttttctttttaggtaaactgcctaaaaagaagttatttatttttgaaagttttcatggaaaacagtatagtgataatccacgtgcaatttttgagtacataagagataactgtcctgaatatcaatgtatttgggcagtcaaaaaaggatatgagatgccttttgtggaagagaatgttcctttcgtcaaacgattaagttggagatggctatggttgatgccaagagctcagtattgggtttttaacacacggatgccagcctggatgtataagaatcaaacaacaatctatatacagacgtggcatgggacccctctaaagaaactgggcttagatattgaaacagtcaaaatgccagagcatgaaacagagagctataaactagaagtcattcaagaagcaaagcgttgggattatctcatctcacctaatgcatacagtacaagagtgtttcgacaagcctttcattatgaaggggaaatattagaaataggttatccaagaaatgatttgttagtttgtgaaaataaggacaaaatagctttttctgttcgcaatcagctaggtcttgcagctaacaaaaaaattattctctatgcgccaacctggcgcgatgatgagtctatccgaaaaggagcctatcgttttaccaatcatttgccagttgaacaacttttagaaattgattcttctattgtaatacttacacgattacattatttaattgcagaaagttttgatataagtgcatttggttcacgtgtaatcgatgtttcttcttatccagatatcaatcaactttatttaatcgctgacttattaattacagattattcatcggttatgtttgattttgcattaacaaaaaaaccgatgctattttttatgtatgataaggaaaagtatcaaaatagtacaaggggattctattttgacccaacagcaattttgcctgggaaaattgtgacagatacggatagcctagtaacgtctgtaaaaaacgtattgttttctaaaacggaacaggaacaacgtttatatgtgcagttttttcgtgaattttgccttgaaaatcaggatgccactagacagctgatttcagaaattttaaagagataa

SEQ ID NO: 2347 - DNA, 579 bp, Enterococcus faecalis
atttttgccgaaatgcaaacaatttcatttatttactgtcactgtcaagttgttgttaggtgcttcgtaatttcaaaaaatacgtatacgattgaagaagctggctttccagttattgtcagtttatatgtagggatggggttccagaactttattagtgcccgttccgcaggttttgaagtcttgttatttgctttattcattgtctgggcaacggatattggtgcatatctatttggacgccgatttggtcgtcataaattgatgccagatgtttcacccaacaagacaatagaaggtgcacttggtggtattttatcagccgtcgttgtagcagcgttgtttttagttttcacagctaataaagggctatttccttatccaatgccggtgatgctcgtattgacggttctgttttctatagtagggcaattcggtgatttggttgaatcttctatcaaacgtcattatggcgtgaaagactctggtaacatcttgccaggacatggtggtattttagatcgttttgatagtttattatttgttttcccaattatgcacttatgtggattattttaa

SEQ ID NO: 2348 - DNA, 267 bp, Enterococcus faecalis
aaaaatgaaggagtgagggagaagatgacagaacaaatgtggattgagaagttaggattagaagcgcatcctgagggcggttattttaaacaaaccaataaaagtgaacaattgattccgaccaaacgaggcgaacgggcgttgcatacagcgattttatttctattaaatacagaaagtccgtcacattttcatcgtttaaaagcggatgaattatggttttttcacgatggtcagccgttaaccgttcactgtatttttccctga

SEQ ID NO: 2349 - DNA, 1395 bp, Enterococcus faecalis
ccaagatggcgttgccaaagcggtcgaaaaatatattttaacgccgttggaaggaggccaataagaatgggattttttgataaaattaaaaaagctttttccgctgaaaaaaaggaagaagaaaaacaagagattgttgaagaaacagtagacgaaacaccaagtgatgaatcagcgcctgctgaatcaaaagaaaccgcaacagaagaggcgcaaataacgccagaaacgacagcggaagaagtcacagaaacagccgatttaacagataacgctgaaatggaaaaattagttgatgtagaagaagcgttagaagaagagccagaagaaatcctgacagaggaaacacaagaagttgttgtggaagcgcctgaggaagaaagtagcgtcgtgactcctttggcagaaccaacagacacgcaggtttcagaagaaattgaagagtcaaaagaagagcaggtccaagaaaaatatgaaaaaggcttggaaaaaacgcgtaaaacatttggtcaacggttgaacgaattgtttgctaatttccgaagcgtcgatgaagatttctttgaagaattagaagaaacgttaattggtgcagatgtaggctttgatacatccttaaaaattacagaagccttgcgacaagaagtgaaactgcgaaatgtgaaaaaaccagctcaagttcaaaataccatcattgaaaaaatggttgatttgtatgaagaagcaggaattaatgaaaataatgcgattaacttacagccaaatggcttaaccgtgattttatttgtcggtgttaatggagtcggtaaaacaaccagcattggtaaattagcccatcaatacaagttggaaggaaagaaagttttaatggcagctgccgatacgttccgagcgggcgccatcgatcaattagttgtttggggcgaacgggctggcgttgaagttgtacgtgggaatgctggcggcgatccagcagcggtcgttttcgatgcagtggaacgtgccaaagcagaacaggccgatgttttgctagtggatacagcaggtcgtttacaaaataaagtcaacttaatgaaggaattagaaaaaattaaacgagtcattcaacgagaaattccagatgcgcctcacgaagttctcttagtcgtggacgcaactactgggcaaaatgcgatgacacaagccaaacagttcaaagaaacaaccgatgtcactggcttagttttaaccaaactagacggaacagccaaaggtggtattgtcattgctattcggaatgaattacacttgccagtgaaattagttggtctaggtgaaggcattaacgatttagaaccattcaatgccaacgatttcgcaatgggcttatttaaaggcttattaaaagatgtttag

SEQ ID NO: 2350 - DNA, 852 bp, Enterococcus faecalis
ccagaagcaaggaggagcgaacgtttgataaaattagttgctattgatttagatggaacattattaaatagccaaaaagagatttctttacggaataaacaagcactgatggctgcgaaacaagcaggcgtgaaagttgttatctgcacaggtcgacctttggcagccattggtccttacttagaagaattaggtttacaagatgaaggcgattatagcattacttttaacggcgggttggttcaaaaaaatgatacaggggccattattgagaaaacattgatgcccttggaagcgattcatgagctgtaccaattagcaaccacactcaacatgccgtttgatgtcttatccgatgaggtcgtgatgcagttgccttctgcacctaattatccttcaatttatagttctctaaacaaattattaacctttgagtcctacaaattagaagagttaaccccgaatcgaatttataataaagttgttgttgcgattgatgaagcgtatttaaatgaacgcatcaaggaaattccagcctctttttatgagcgctttgaaattattaaaacgcgaaataacttattagaatttatgccaaaagggattacgaaagcctatggtatttccttgttagccaaagatttaggaatccgtgcagaagaaatcatgaccctaggggacgaagaaaacgatttaccgatgatcgaatacgctggcttaggtgtcgccatggcaaatgcgattccattagttaaagaagccgcagatgtcgtcacagacacgaatgaccaagatggcgttgccaaagcggtcgaaaaatatattttaacgccgttggaaggaggccaataa

SEQ ID NO: 2351 - DNA, 3627 bp, Enterococcus faecalis
gcgggcactgaaaagtattcctcagtaaggctggaaggagcaatattcgtgtatttaaaacgaattgaaattacaggatttaaatcatttgcagataaaaccattattgaatttgaagatgatgtgacagcagtggttggtccgaatggaagtgggaaaagtaatatcacggaagccgttcgctgggtattaggtgaacaatctgcgaaaaaccttcgcggtggcaaaatgaacgacattatctttgccggttcggaaggtcgtaagccgctaaatattgcggaagttaccgtgacgttagacaacagcgaccattatttagcattggattatagtgagattagtgtcacccgtcgtttaaaacgaacgggcgaaagtgacttttttattaataaacaagcgtgccgtttaaaagacattcaagatttatttatggattcagggttaggcaaagaatctttttcaattatttcacaagggaaagttgaagcgatttttaatagtaaacctgaagaccgtcgagggatttttgaagaagcagcgggcgttttaaaatacaaacaacgaaagaaaaaggctgaacaaaagctttttgaaaccgaggacaacttaagccgtgtccaagatatcatttacgagttggaagaccaattagttcctctagccgcccaagcagatgcggctaaaaagtatttagctttgaaagaagaacttaccgaaattgatgtcaatttaactgtgaccgaaattcaagaagcaaaagctatttgggaaacgaaaacgcaagaattaacagccattgaagaaaagttagctggcgcaagtaagcaagtccatgacttagaaggcaaattggtacgtttacgcagcaagcgcaatcgtttagatgaacaaattgaaacggaacaacaacaattattacaagtgacagaagcgttgaaacaagcagaaggacaaaaaaatgttttaattgaacgttccaaacacacctcccaaacggcaagcgaatacgaagagacattggcagaaacggccgaaaaaattgttcgttatcgagaagaattgcagacgctggaaacagcaatcgcagaaaaaacggcacaacgtcagacgttaaaagaagcattggctttggcaacgaaagatgtggaaaaatatagtaagtcttctaaagaattaatggaagaattgcgcagtcagtatgtggaagtcatgcaagaacaagccaatacagccaatgacttaaaatatttagaacgacaatatcaacaagaaacagctaaaaatcaacaatcgttagcaaaacacgaagcgctagaagaacagatggttgaagctctcgcaatgaaagagacgctagaaaaagagcaaaaagttgcaaaacaaggcttacaagaacagttggaagaatacactgcgttgaaagcaacgcttgaagctaagcgtgaacgattagcacagcgtcaaaacgatatgtaccaagcgatgaatcaagtgcaacaagcgaaggcacgccaaaaaagtttgcaagaaattcaagaaaattacgctggcttctatcaaggcgtgaaagctgtattgcgtcacaaaaaccaattaactgggattgttggcgcagtggctgagttaattgaagtgcctaaagaatatacgttggcgattgaaacggccctaggtggtgcggcgcaacatattgttgtggaaaatgagaaagatggtcgagcaggcatcaccttcttaaaacaacaacacagtggccgagcaacctttttaccattgactaccattaagccacgctctgtatcggcgatggttcagaatcgtttggctggtgcaccgggcttcgtggggattgccagtgaactagttcgttatccagaacaagtacaaaccgttattcaaaatctcttaggcgtcacgattttagcggcagatttaacgagtgccaaccagttagcaaaattagtcaattaccaatatcgcgttgtctcattggaaggcgatgtgatgaatcctggcggttcgatgactgggggagccaataaacgtggcaaccaaggaagcctattttcacaagcgcaagaacttcaaacaattactgaacaaatgactcaattagaaacacaactgagaagtgtagaacaagaagtccaagcgctctcgcaagaagtgaaaacagccacggaacgtgcagaaatgttgcgctctgctggtgaacaaaatcgcttaaaacaacaagaaattgacaataaattagccaatcaaacagaaacgattactcgtttaacaaaagaaaaacgcttgtttgaatatgaatcacgggaattgcatcaattcttaaccgaatatcaaacgaaaaaagccacattgacagagcaacaagcaaacttaacggcaacgaaagaacgtttagatgctgaaatgaaacaagtggaacaagaagctagccaaatggaaacctttaaagcccaagcgcaagaacgcttgacgacagttcaagcagaacaagcagtagcggcggaacaatgtgcccattttgctcgtcaaaagcaagacaaacaagaacaattggacgaattgttgattcgagaaacggccatccgtcaacagctacaacaattaagtagccattctagcgatcaccagttaaccgaagaaggcttagcggcacaagtcgctcaattagcggagaaacaaacagcgttgcaaacctctttacaaacggcacgtagtcaacgacaagcgttgcaagaagaagtagacgagttagatacaaaattagcggaagaaaacaaacgccaacaacagtatttagcagataaaacacaaatcgaagtcctaaaaaatcgtgcagaaatgcaattagatagctcgttaagttacttacaggaagaatacagcttaacctttgaagctgcctatgaagcgtatttcccaatcgatgatttagcgcaagcgcagcaaacagtgaaacgcctaaaacaagaaattgagcggttaggacctgttaacttaagtgccatcgagcaatttgaacaagtcgatgagcgccatcaatttttagtcagtcaacgagatgatttattaaatgcgaaagaacaattatttgaaaccatggatgaaatggaccaagaagtgaaagaacggtttaaagaagtctttgaagcaattcgtggccagtttaaagtggtatttcctaatatgtttggtggcggacgggcagaactggtgctaaccaacccagaggatctcttgaatacagggattgagattgaggcgcaaccaccagggaaaaaattacaacatttaagcttgttgtctggaggcgaacgggcattaacggcgattgcgttactcttttcaattattcgtgttcgaccagttccgttctgtattttagatgaagtagaagcagctttagatgaagccaacgttgctcgttttggccattatttaagcgaatttgaagatggtacacagtttattgtggtgacgcatcgtaaagggacaatggaagccgcagatgttttatatggcgtgactatgcaagaatctggggtttcaaaaatcgtttcagttcgcttggaagaggtcaaagaaggtggcgcaattgaaaaaagcaattag

SEQ ID NO: 2352 - DNA, 219 bp, Enterococcus faecalis
atgaggttatttatgacatttttagatttatttgccgggattggtggttttcgtttaggtatggaacaagccggccaccactgtatcggcttttgtgaaattgatgattttgccagacggagttataaggcaatttatgatacaagtgaggaggtggaaatgtatgacatcacaagtgtatcagatgagtttattcaatccctcggaccagtggatatc

SEQ ID NO: 2353 - DNA, 864 bp, Enterococcus faecalis
aaatggaaggcggatattgtccgttctgtggggagatgcaagatggagattaatatcaataaaaaagatttaaaaaaggcaagtaggaaatttagacaattagcttctagagttcttaatgctcattacagtgaagttaattctatcattaaaatgtttgttgaatatatagatagcactcctgttatttatgagtatattcaagatgtttttgtagaatatccaaatctagaagatgaaattaagcaagtatctgaaagctatggcagacttattttaactactggaaagacaccagaacaagaggtaagttctgtatatcaaattttaaaatatattagcgagaatctttctactaacactacttttctcggctggggatatacttcctctagagcctatcaagatatggttaaggaatttggaaatcgtgtagtaatgccttttgtagatcaagtaaatgtttacttatctgatattgcaacagatatgggatatgatgaggagagaaaatatatgatacatgtaagtggtggacaagctcaggtaaatatttccaacgataacagcaccataaatgctaaccaaaatgttcaaatcaatcaatctaaagttgatgatttaatttctgatttgaaaagtaatattgaaaaggaattagtggataatgaacctattaaagatgttttgttatctcaattggctctgattgagtcacaacagactgagagtgaacctcaaaaaaatgttttgaagacggcatttgagacaatgcaatctttacttaagactgccccattagcagtaactgctgttgaaagttgtaatagattgtatgaactgatgtcacctttatttaattag

SEQ ID NO: 2354 - DNA, 483 bp, Enterococcus faecalis
gtattcccaaaaggagatgtatctatgacagttgacactacttttaatatttcaatcccatcagattcagatggatttattttcttacaatgcactttgtgtggtgagtattttaagctaacgcttaaggacttggaagatgaatctcaattgcatgtttggtgtcctaagtgtggtctaactccagatagtttgtttactgatgaagtaatagaattagcaatgaaaattgtacataatcatgtatctgatttacttaatgattttggtaagaatttgagtaaatcatcaaagaatggaagcgtaaaattcaaatcagtttcaaaaattaagaaagatcctgttgatccgattatttcaaaactagataacttggaacttcaaatttatgactgctgtcataaagaagcaaaaattagtccaagcttaaaaatggaaggcggatattgtccgttctgtggggagatgcaagatggagattaa

SEQ ID NO: 2355 - DNA, 1401 bp, Enterococcus faecalis
aattgcccgataaatcctattgggcaatttttgattggaggtggaaaccatcagatgtacaaaggacatcgcatacgcgcaagaaatcagcatttaatttatcactttgttcttggctggctacttgctttgttcattggttgtatgagcgtcttttattttcaagagcttagacaatttgagatttctaagctatcattctccactagtgaaattgattggtccacgaaagatttaatctgtttactaggaagtcttgctctttcaggaggtatgatattgctttatattcacttttttcacgatcattggcgcagtttattgcatcgacgaaagctagctcggatgattctagaaaaccattggtatgaagtgaaacaaattcaaagtgaaggttttttcaaagatttgaatggtattcggaccaaagaaagtatcagtaatttccccaaaatttattatcgaatgaaggatggcttactttctattcgcgttcaaatttcactgggaaaatatcaagatcaactattaaagctagaaaagaagttagaaagcggactgtattgtgagttagtagaaaaggaactcaaagactcctatgtggattataccttgctttacgatatgattgccaatcgaattgggatagaagaagcagtggtagaaaatggagctttgcgattgatgaaaaatcaagtatgggcgtatgatttcttgcctcatatgttaatcgcaggtggtacaggtggtgggaagacttactttttactcaccatcatcgaggctttactgaaatctgatgcagaactatttatccttgatcccaaaaatgcggatctagcagatttaggcacaataatgactcacgtatattcccaaaaagaacaaatttccgcttgtgtagaagatttctatgaacgtatgatggttcgtagtaggttgatgaaagaaatgccaaactacaaaacaggagagaattatgcgtatcttggtctttcaccaaattttttagtttttgatgaatatgtggcttatatggagatgttaacgactaaggaaagcgcggtaattttgaataagctcaaacaaatcgtcatgttaggtcggcagtccggtttctttctgattctggcttgtcaaagaccggatgcgaaatatttaggagacggaatacgggatcaattcaacttccgtgtggctttgggtcgtatgagtgaactggggtattctgtgatgtttggtgaggttgataaaattttttttatgaaacaaatcaaggggcgaggctatgtagatacaggtgggggtgttgttagtgagttttacacgcctttagttccgaaggggtatgattttttggaatctaccaaaaccattgtgcaaaataatataaatatctaa

SEQ ID NO: 2356 - DNA, 354 bp, Enterococcus faecalis
gtgaagagtatggagattgatgttgaacatatttttgattgtctagatcgctatggaaaaggagagctaaccgaaaagcaactcactaaaggggtgaccgatgatgagaaaatgtttctgattatgcatcaggggctacttgggggaaataccgatagtgaaaaaaaattcaatgttctggattggttaggggaaaaagaatccttctttatgattgtggaaataaatgaaaacttatgtcgaaaagctgagtctattttagaagaaatcggtgtggagatgccggatgtcattgaaagctttttaaaacaattggttgaaacgaaacagcttcccgtagtagtaaatgactag

SEQ ID NO: 2357 - DNA, 384 bp, Enterococcus faecalis
gaggataaaaatatgagattgacagaaggtattgtagtagattcaggactaacgtttggcaagttgcgtttttctgcattacgccgagaagttcggaaacaaaatgaggatggaacggttagtaatgaggtcaaagaacgaacctataatttgaaatcctcagcacaaggtcgaatgattcaagtcagtattccagcaaatgtgccattacgagagtttgcctacgatacagaagtagagttggtcaatccaatcgtggacacggtcgcaaattatgcttttcgagaaggaactaccgtcaattggtttattaaggcggatgatttagtcttgaaacggcaatcgaatcaaggaaatacccatcaaaatgaaggaaagaaatag

SEQ ID NO: 2358 - DNA, 330 bp, Enterococcus faecalis
aaagaggaaaagaatatggaattgaaatttgtcgtgccggatatggccgaaacctttggaaagttaggttatgctggtgaaggagaaattttaacagaaggatatggccgaaatactgtggtgattggtcgtagctatcatctatattccagtaaacaacgagcagatgatattgaagtggtggtagcagcggaagccggcgaaaaagattttgaccaagatcaaccgctgaaagctgtgaatccccatttagttgccaaagggtatgcgattgaaaaccgcggttttaccgattatgtgttgtatgtcgatgatttagtgaaagcatag

SEQ ID NO: 2359 - DNA, 3291 bp, Enterococcus faecalis
acatttgagacattcagaggtgaatgtctcttttttattactcaaaaacgaaaggggattaattatatgaaaaaaacaacatttaaaaattggccgttatttgcgactttggctctattaagtcaaacaattggcggaacgattggtcctacgattgcttttgccgatgaaattactcaccctcaagaggtaacaattcattatgacgtaagtaaactgtatgaagttgacggaacttttagcgatggcagcacgctctcagaacgtactacgtcattatatgcagaatacaatggtgcaaaacaaacagtattttgtattgaaccaggtgttagtattccaacagaagtgacgcacggttatcagaaaaaccctttgccatcaatgtctgataaagcgaaactagtatcggttctttgggaaaaggctggaacagatattgatacaaatatggttgcacaaaagatgatttgggaagaagtgaacggttataaactccattccataaaaagattaggtggtgcttcagttgatataaaatctattgaaggaaaaattaataaggcaattgaggagtatcaaaaaaaaccaagttttcataataccactgtaaaaacaattttaggtcaatcgacaactttaatagataaaaatgaattaaatttatctgagtttgataaagtcgtccaaaatacggcgaatatagattaccgtgtaattgggaatcaattagtgcttactccaaactctaattccaaatcaggaacattaacattgaaaaaatcagctggtactggaactccagtcgcttataaaaaagcaggacttcaaactgtgatggctggtgcgcttgataagcccaatacctacgctattaaaattgatgtggaaactaagggttctttaaagatcaaaaaaatcgataaagaatcaggtgatattgtaccagaaacggttttccatttagattttgggaaagctttaccttcaaaagatgtgacaacagataaagatgggatttctattttggatggaattccccatggtacaaaggtaactattactgaaaaatcggtgccagatccttatatgattgataccacacccatggctgccaccattaaagcgggcgagaccatttccatgacttcgaaaaatatgcgacaaaaaggtcaaattcttttagagaagactggggtagaaacaggtactgatctttggaatgacaattattctctagctggaaatacatttgccattcgtaaagacagcccagctggtgaaattgtccaagaaataacaacggatgaaaaaggtcgtgcggaaacaccaaaagagcttgctaatgctttggaactgggaacctattacgtgacagaaactaaatctagtaatggtttcgtgaataccttcaaaccaacaaaagtcgagttaaaatatgccaatcaaaccgtggctcttgttaccagtaacgtaaaagggcaaaaccaagaaattactggggaaaccactttgacaaaagaagacaaagataccggtaatgagagtcaagggaaagctgagtttaaaggagctgaatatactctctttactgcaaaagatggtcaagctgttaaatggagtgaagcttttaaaacagaattagtgaagggaacgaaagcttctgatgaaacagtgactttggctttagatgaaaagaaccaagttgccgttaaacacctagcaattaacgagtatttctggcaagaaaccaaagcacctgaaggatatactttggatgaaacgaagtatcctgtatccatcaaaaaagttgataataacgaaaaaaatgccgtaattactcgagatgttacggcaaaagaacaagttattcgctttggctttgatttctttaaatttgctggatcggctgatggcactgccgaaactggatttaacgacttatcttttaaagtgtcgccattggaagggaccaatgaaatcacaggtgctgaagataaagcgaccacagcttgtaacgagcaattaggttttgatggctatggtaagtttgaaaatcttccttatggggattatttacttgaagaaatagaggctccagaaggatttcaaaagattacaccactagaaatccgttctacatttaaggaaaacaaagacgactatgcgaagagtgagtatgtctttaccattaccgaagaaggacaaaaacaaccaattaagatggtgaccgttccttacgagaaactaactaacaacgagttttctgttagtctgaaccgtttgatgctttatgatttgcccgagaaagaagatagtttgacttctcttgcgacttggaaagacggaaataaaaaattgaatacccttgattttaccgagctagttgataaattgagatataacttgcatgaaatcaaagaagactggtatgtcgtagctcaagccattgatgtggaagccacaaaagctgcccaagaaaaagacgaaaaagccaaaccggtggtgattgccgaaacaaccgcaacgttggcgaacaaagagaaaactggaacttggaaaattctgcataaattaaccgctgaacaagttttggataaaagcatcgtcttgttcaattatgtgtatgaaaacaaggtagcctttgaagcaggcaatgagccagtagcgaaggatgctagcttgaacaatcaagcacaaaccgtcaattgtacgattgaacgccatgtttccatccaaacaaaagcccacctagaagatggttcgcaaacttttactcatggtgacgtgatggatatgtttgatgatgtgtcggttacccatgatgtactggatggctcaaaagaagctttcgaaacaattctgtatgctttactaccagatggtacgaacaaagaaatttggaaatctggcaaaattgagcatgaagtgaatgataaagaatttaccaaaaccgtacttgcggaaaaagtagataccggaaagtatccagaaggaactaagtttacttttacggaaatcaattacgaaaaagatggaaacgtgaatggaaaacacaatgaagatttgaaagaaaaatctcaaaccttaacaccaaaagaagtgccaaccataccgagtacgccaaaacaaccggaaacaccagctgttccaagtaattctcaagaatctagtcccacagtgaagacattcccgcaaactggggagaaaaattccaacgttctactgttagttggctttatcttgattttttcgactgctgggtattatttctggaatcgccgcaattaa

SEQ ID NO: 2360 - DNA, 186 bp, Enterococcus faecalis
atttttacgatgagaccgtcaaaaattgagggtctttttttatgttcaaaaagaaaggcgggctttatgaataaatgtaagatggataaatacgaagacggaaaagatattccgaatacggctcgcattattcagtatgcccatataggaaaagtctctttggagtttttgatatatggtatctga

SEQ ID NO: 2361 - DNA, 1833 bp, Enterococcus faecalis
atgatgacgaataattctaatatagaggttgctttagttgttgaagtgaacggaatcaggtgtaaagctatcacttttgatgatatgaaccaagcgacatatattaataatggtgaagtgataaaaaacttaagtgtaaatagttttgtagttattcgtcagaactttattaaaataataggcagaatcaattctgaatcaatttgggatactcaaaataataagcagaactatcagttggataacagattcagtaagaataccataaaaagaattcttgatatccaaattattggatatatttcagaaggctgtttcactactggtacaacatatattccaatgattggaaatatttgttcaataccgacaactgaagagacacaaactatctatgtaaatagcttcgatcattttaatggagatcaaactattaaaatcgggaaaagcttaaatgagcaaattgaggttaacttaccaataagttctttttttgcgtcacatattggtatttttggaaatactggtagtggcaagtcaaatacacttcataaattgtattttgagctatttaaacaatcgttcccattgctaagagagaaaagtagatttgttgtcatagactttaacggtgagtatgtgcatgataactcatttggtgtacctaagagcgaaaaaaatatatatgaattatccactagaaccgtttcaaataagaggttacagattaaaagggatatcttttttagttctgagatcttgtctattcttttttcagcgactcaacaaactcaaaaaccttttttggaacgtgttcttaaagggataaataagtttggttttggtgaagagtcactgcaaagatggataagttctatacttagagagatatttacgacttttcccaatatggatttaaaaaatagatttgtaagtatcctgggtgaattttatgattctagtgaagctttggagccaatcaaacaggcacagatatacagtaaggatgaccctgcaaaatttattgtaaacggtactttttttgatggaaattgggaatctaaacatatgcaggcagttaatcttgaacaagttgaaaatgtgattctaacggaaaaattaaatatattcaaagagtttgaacttagatgtaaattacaattagtcaaagacttactatatcgaaatgtcatatcggatcatatagacccgcttctaaagcgaatcgatagccgtattgaagatttccagaagtatatagagatagtgggacagatcgacaatgtcaaatttcttgagataatttctttacgtgatttgaatcaagaagctaaacaaattgtagcgatgttaacttcaaaaatgtttttcgatgagcagaagacgagtaaagataaggttagtttccatcttattatcgatgaagcacataatattttgtctgatcaatcaagaaacgacaatacgtcatggaaggattatagactttctacttttgaggaaatcattaaagaaggtcggaaatttggttttttccttactttatcaagtcaaagaccagcggatatttcacccacacttctctcacaagttcataatttctttctacacaagctagtgaatgagcgagatcttcaaataattgataattcattatcaactctagatagagtttctaaatcaatgcttccaggtttatcacaaggtatctgtattatcactgggacagctttgtccttaccaatgattgtgaatgttgattttataagtgataaaactttacgtccacaaagtgatactgtggatttagtggaagcttgggtgaatgaataa

SEQ ID NO: 2362 - DNA, 1404 bp, Enterococcus faecalis
attccaattttggagggaactattatgacaatttcaaaggtaaaagctcttagagctgttctttcagagaaaagaacgacattcttatttggagcaggtgcttcggtaccatttttttcaagcttaggaaaaattgaggaatatatgactagcaaagatataactgaagaaggtaaaagactagttatgtttgctttttattatatagcaatcaaagataattcaatattggttgaatatataaaaaaaggtgaatcggaaaaccacttggattctgggtcttctgtgatgaatcaatattctagatttatttttaattgcgtggagttcctaaaactgagaaatagtcgtgtttccccaagaagaactaatatctttactacgaattatgatttgtttcttgaaatagctgtcgaaaaaaatatagaatcaaatcccaaaattttctttaatgacgggacgaatggttatatgaaaagatatctcagcactgaaaattttaataagacaatgttgtatgccggggcctttgataattatgccaacgaattaccaacaattaatttggtgaaatgtcatggatctgtgaattggctgaatgagcaaaactttatcgggagagatagagtgcttgttgataacagccttttggacactattaaaactgctgaaaaagcagaagaagtttggtcagaactccaaaacgatatagttcatgatacaaattttcaacggtcatttaccattgagatattgaaagatgtcatactaggcaaacctgttgatggatttattgatagtcctactgaagtaatcaattattttggtaaaaagtattataatcaattacaaggcataagtgagaaaattagtgaaatacagattgttttacccacaaaaaggaaatttcagtctaccttaattgaagagcagtattttaatatgcttagattcttgtcttacgagcttgagaaggaacaatcggttttaatagcatttggtttttcatttttagatgagcatataacagatattgtccaaagatctttaaataatccaaatttattggtattcattttctgttataaagatggtactaaaggtgaaataataaatcaatttagttttggagccaatgcagttccatccaatattgtgtttataacaccttcagattttattatggaacaagctgaaaacgaagaagagacgcccctaccgttagaaacaaatcagattagatcaaatgatagtactattgtcacttattctgaggaagtatcagtttacgataataaagatgcggttatagattttgaagcttttaacaggattatcgaaggaaatctttctgaaaagtatattgatagtcaatatacggaggtagtagatgatgacgaataa

SEQ ID NO: 2363 - DNA, 945 bp, Enterococcus faecalis
ggaggtgcttttttcatgcaaataaataaagatgagttaatcaaaatgggaaatcatttaaaagaagctaggttatctaagcaattaactcaagaagaactggcaaggttatcaaatatatcacaagctacaatcgtaaaatatgaaaatggattacgcagcatatctaaaaagaacgatagaattttgagtgacgttctcggcgctgaatcatttattaaagatatgattcaaagaaaacaacaagtcttgattgatttagaaaaatatcaaactaaaaatattttttctcgtgaggatttatctaagaagttaggaatcgaaatatctcttctaaataaattcttaaatcaaagtcgaccattatcaaaaaatgcaattgtgaaaatcactcagttattgtctaacgagggtaaagaaattttgatggatataaaacaagaggatggttcgtttaaattacccatcatcgataaaatagcgatgggaaaacgaatccaagagattcggaaaaatcgaggtgagacactggaaaaatttggtaagaactttactcgaccagcgggtaagaatgttgtgaatagatgggaaaagggtacgaatattcctgatatcgaaagattaatgaatgttgcctatcttgggaaagtggccgtcccttatattttgtatggagagacttttagtaagatgttgaagaagggaagtaggattagcaagtttgaaaagttagattccttccgaatggggctaagacttcggaagattcgaagggattatcgcttagaaagagaagactttggaaagtttttttcaccgcctattacaaaatggtcaatggacaaatacgagaacggaaaagatatcccaaatacggatcgtattattcagtatgcctatataggaaaagtctctttgaattttttgatatatggcgttaattag

SEQ ID NO: 2364 - DNA, 237 bp, Enterococcus faecalis
aaatggacgaccaagataacgcgaaatagcttgtttccaacggaaaaccctgttatatcaatctttttgagtggcgaaaaatctgtgatttacccgtttaaaaaagtttcaactgtcatacggttgtcacaacttaacaaaaaaggacaaaaaaggaataatttccttgaggatttttacttgtcagcgtatgatgaaagcatctctcataaggaggtgcttttttcatgcaaataa

SEQ ID NO: 2365 - DNA, 804 bp, Enterococcus faecalis
tttggtttccgttgtggtttcttaggtttgctgcacatggatgttgttcaggaacgtttggaacgagaatttaatttagagttaattacaacagcaccgtctgtaatctatcacgttaataaaactgacggaacaaccgttgttgttgacaacccagctgaatttccagaaccagtaacgattgaatctgtggaagaaccttatgttaaagcgcaaatcatggtgccaaacgattatgtaggagcagtaatggaattatcacaacgtaaacgtggcgaattcattacaatggattacttagacgattatcgtgtaaacgtagtttatgaaattccgttatctgaaatcgtgtttgactttttcgataaattgaaatcaagtacaaaaggctatgcatccttagattacgaaatggctggctatcgtaccagccgcctagtgaaaatggatattctattaaatgctgaaaaagtggatgctttaagctttattgttcaccgagatttcgcatttgagcgtggtaaagcgattgttgagaaactgaaaaaactaattccacgtcaacagtttgaagtcccagttcaagcggcgattggtcaaaaaattgtggctcgttcagatattaaagccttacgcaaaaacgtactggctaaatgctatggtggcgatgtttctcgtaaacgtaaattgttagagaaacaaaaagaagggaagaaacggatgaaacaaattggatccgtggaagttcctcaagaagcctttatggcggttctgaaaatggacgaccaagataacgcgaaatag

SEQ ID NO: 2366 - DNA, 279 bp, Enterococcus faecalis
ctgataaaagtagataaaaaaagagtactccatcccaagggacgaagtactcgtgttaccacccaaattcaaagtagagttgcccctactttctctgaaattgataacggtaattatccggcagttcctactcaagtgttcagaactgcatctaggatagaggatctgtttaatgccagtgtctgtcaaactttcactatcattgactcgctgctaagaataaacattaaacgttctgttctatctattttgattcttcttcaattgtttcttcagtga

SEQ ID NO: 2367 - DNA, 1143 bp, Enterococcus faecalis
atcgataaaatgaaagcgaggcaaatgcatatgaaaatgaaagaaacattgcaattaggaaaaacagcttttccaatgcgtgggaacttgccaaaccgtgaagcagaatggcaaaaagactgggaagaaaaaggcttatatgaacaacgtcaaaaattaaacgaaggaaaaccaacctttgttttacatgatggccctccgtatgcaaacggaaatattcatttaggacattctttgaataaaatcagtaaagatattattattcgttcaaaatcaatgtctggtttccgttctccttatgtgcctggttgggatactcatggtttaccaattgagcaagtgttaaccaataaaggggttaaacgtaaagaaatgactgtcgctgagtatcgcgaaaaatgtaaagagtatgccttatcacaagtcgataaacaacgtaacgattttaaacgtttaggtgtgtcaggcgattgggaacatccatacattacgttagatccagagtatgaagcagcagaaattcgtgtttttggtaagatggcagaaaaaggctatatttataaaggtttaaaaccaatttattggtctccttcaagtgaatcttctttagcagaagcagaaattgaatacaaagatgtaaaatcaccttctatttacgtagcttttaatgtggccgatggtaaaggtcttttagataacgagacagccttcgtcatctggacgacaaccccttggacattaccagccaacttaggtatttcagttaatcctgattttacgtatgttgaagtgaaggcagacggtcgtaaatttgtaattgctaaagatttattaacaacagttaaagaagcgattggttgggaagaagtagaagtcttgcgagaattttctggtgaaaaattagatcgtatgacagctcaacatccattctatgatcgaacatcacttgttatgctaggcgaccacgtgacgctagatgccgggactggcttagttcataccgcaccaggacatggtgaagatgactatatcgttagccgtaaatatgatttacctgttatttctcctgttgacagccgtggggtctttacagatgaaacacctggttttgaaggaatttctatgacaaagcgaatccaatga

SEQ ID NO: 2368 - DNA, 1698 bp, Enterococcus faecalis
aggaatttctatgacaaagcgaatccaatgattactgagttattagaagaaaaaggcgcgttattaaaattagatttctttacgcatagttatccacatgattggcgtaccaaaaaaccagttatctaccgtgcaacgccacaatggtttgcttcaatctctaaattccgtcaagatattttagatgaagttgagaaagttgactggctaattccttggggaaaaacacgtttatataatatgattcgtgaccgtggtgattgggtaatctctcgccaaagagcgtggggtgtatcattaccgatcttctatgctgaaaatggggaagccatcattacgccagaaacaattgaacatgtagcgaatttatttgcagaacatggatcaaatatctggtttatgcgtgaagcaaaagagttactaccagcaggctttacacatccaggttcaccaaatggcgagtttaccaaagaaacagatatcatggacgtttggtttgactcaggttcttcacatgaaggagttttacgagaaagagaagagttaactttcccagcagatatgtatttagaaggttctgaccaatatcgtggttggtttaactcaagtattacaacaagtgtcgctatcaatggagtagcgccttataaatcaattatttctcaagggatggttctcgatggcgaaggccgtaagatgagtaaatcgttaggcaatactatcttacctgaaaaagttatcaatcaaatgggggcagatatcttacgcttgtgggtaagtagtgttgacgcggaagccgatgtgcgtgtctcaatggatatcttaaaccaagtatctgaagtgtaccggaaaatccgtaatactatgcgtttcttgttagcgaatacgagtgattttaatccagctgagcatactgtagcttatgccgatttacgttctgtagataaatacatgacggttcgtttaaatcaagtcattcaagaaatccgtgaaaatggttatgaaaaatataatttcatgcatatttatcggacagttatgaacttcttaactgtagatttatcttctttctatttagactttgcgaaagatgtcgtttatattgaagctgaaaacgattatcaacgtcgttgtatgcagactgttttctatcaaacattggtttcgttaacaaaattattgacaccaattattccacatacagcggaagaaatttggagtttcttacaagaagaagaagagtatgtgcaattagctgaattcccaggttacgaaacgtttactaatgaagaagaattgatggatacatgggcagcctttatggatttccgtgacaatgtcttaaaagcgttggaagaagctcgtcattctaaattaatcggtaaatcgttagaagccaaagtgaccgtttatccaaatgaacaaattcgtcaattaatgacagctgttgatgcagatattgctcaattactaattgtttccgactttgaagtatcaaaagaagtagcacctagtgaagctgttcaatttgaagacatggctattttagttgaaaaagcagaaggcgaaacgtgtgaccgttgtcgttccgttcgtcaagatgtcggctcagatgaaaaattaccaacactttgtggccgttgtgcacacattgttgaagaaaattatccagaagcggttgctgaaggattcgaataa

SEQ ID NO: 2369 - DNA, 1533 bp, Enterococcus faecalis
ggaaaactaatgaatgaaaaagtagcattatttactattttcggggggacaggtgatcttgccaaacgtaaattgtatccttccctgttccgcttatataaaaaaggattattagctgagcgttttgcggtgattggtaccgcacgtcgggaatggacagacgaatactatcgtgaaatcgtccgtgaaaccattcaagacttaaatcccacggccgaagaggcaactgaattttctagtcatttctattaccaatcacataatgtgaatgatacggaacattataataccttaaaagaattatctgatcgcctaaatgaacaataccacttagaaggcaatcatgtttactatttagctatggcccctcaattctttggaaccattgttaatcacttgaaatcacaacatattatttcggaagaaggctttgatcgtctaattatcgaaaagccatttggttctgattatgaatctgcctacgaattaaatgaagaaattcgtgctgcatttcctgaacaagatattttccgaattgaccattacttaggcaaagaaatgatccaaaatatttcagccattcgttttgccaataatatttttgaatcacaatggaacaatcgttacattgataatgtccaaatcaccttcgctgaaagcttaggtgtcgaggatcgtggcggctattatgaccacagtggcgcactaaaagatatggttcaaaatcatattttacaagtcgttgcattgctttctatggagcctcctgttgccttttctgaaaaagaaattcggactgaaaaagtaaaagctttacgtgccatccgcctttattctgaagaagaagcccttcaaaatttcgtgcgtggacaatacggcgaaggtcagctagctgatcaaacatttgcagcctatcgtgatgaaccaaatgtggcagaaacttcatccactgaaacttttgttgctggtaaatttttaattgataatttccgttggtctggcgtccctttctatgttcgcacaggtaaacgattaactgaaaaaggcacacgcattaacatcgtctttaaacaagtacctattaatgtcttcaaagatgatacgtgtgaagaatgcgataaaaccgatttaccaccgaatgttttaactatctatatccaaccaactgaaggattttcattaaccttaaatggaaaagaaatcggtcaagggttcaatacaactccagtgaaacttgatttccgtcaaagtgctgaaatgactgaaaatagtccagaagcatacgaaaaacttctattagactgcctaaatggcgatagtacaaacttctctcattgggacgaagttgcccaatcttggcgcattgttgacattattcgacatgcttgggataaaacagacgtttctttccctaattatgccgctggcacaatgggcccgcaagctgccttcgacttattagaaaaagatggctttacttgggaatggcaaccagataactggtaccgtgaccgcggtcaacttgatcaataa

SEQ ID NO: 2370 - DNA, 675 bp, Enterococcus faecalis
gcccttatgacaccatttcgcgaagactatttaaaattaatttttgaattaggtggcgacgaagttaaagtgaataatacacaaattgtttatggactcgatgtttcggcagcttcggttagtgagatgatttcaaagttagtaaaagaagatttggttgagcattctccttatcaaggggtacaattaactgaaaaaggcttaaaaggagcgagtacgttaattcgcaaacaccgaatctgggaagtctttttagtagagcacttaaattacacttggaatgatgtgcacgaagaggcagaagttttagaacatgttacttcacagacgcttgtgaaccgtttagcggattatttaaatcatccagaattttgtccacacggtggtgttattcccgaagataatcaacccattcatgaggagaaacgccaaacgttaacagactaccctgttggcacaaaaattcggattgcacgtgtcttagacgaaaaagaattactggattatttagtttccattgatttaaatattcaagaagaatatacgattaaagaaattgctgcatatgaaggaccgatcaccatttataatgaaaacaaagaattatccgtcagctttaaagcagcaaacacaatttttgttgagccgttgattagagaaagtgaggaaaactaa

SEQ ID NO: 2371 - DNA, 387 bp, Enterococcus faecalis
aggttaggaggaatttctttgaaaaaacattggactttcttggttggtgcatctttacttactggattagcaggctctatcttctggaaaaaaaataaacagctcccttccccacaggagcttcaacacaactatactgggcattggtggtttgtggacgtgaagaaagccacgcaacacaccttagatatcacctcatctttcaatgttttcattgatggcaaacaaacgcatgccttgcttgttgaattaacccctaaacgcttagttatcttagacaagttaggttaccatttaatcattcaatgtgaaaatggtgtccctgcgacgctttacgatgaagccgacgacgaaacttacacactagaacgggccatttacaattaa

SEQ ID NO: 2372 - DNA, 201 bp, Enterococcus faecalis
aataagcaagttggacattcgggtacttcatacacagacttcctttcttacacactataccataaaaaaacaaggaaaagtatagaccaaaaccaacaattttactatcttgtgtcaatcattaaatatttgtcaattctcagcgatttagtggaatattttagacaagttctatataataaaggtaacgaagacgaataa

SEQ ID NO: 2373 - DNA, 819 bp, Enterococcus faecalis
ttgacacaagatagtaaaattgttggttttggtctatacttttccttgtttttttatggtatagtgtgtaagaaaggaagtctgtgtatgaagtacccgaatgtccaacttgcttattttatcgaacgacccaatcggtttattgcacactgtcgtttaatggaaacgaatgaagaagtaatcacacatgtcaaaaatactggcagagggaaagaagtttttttaccaggtgctgttgtggcgcttagttatcaaccatcgcctaaaagaaaaacagattacgatttgattgcagtaaaaaaaggttctttttggattaatattgatagccaagtaccgaatacattagtcaatgaagcgttaaaaaatggtcaaattgtgcttcctggtttagttggtacgatccaaactgttaaacgtgagcaacgatttgcacattcaaaatttgattttctagtggaaacggatgcggacgaacaagcttttgtcgaagtgaaaggcatgactttagaaaataaaggcatcggtgcttttcctgacgcgccaacacttcgtggcttgaagcatgtcactgaactaatggctgcaactaaagcgggttaccgctgttacattttgtttgtggtccaatttgaagaaattaagcaagcaacgcttcaccaagagatgcaacccgcctttgctgaaaatgtgggtgctgcaattgatcaaggtgtgcaagtccttgcttacaattgccacgtaacaccagcaacgattgaacttaagtcacaggtaacctttgatttattacaggcatttgatgatcctaataaataa

SEQ ID NO: 2374 - DNA, 1026 bp, Enterococcus faecalis
ataaacaaaaaatggaggtttttgattatgatacatttaggcgtaattggtaccaattggattagtcatcaatttgttgcagcagctttagaaacgggtgcgtatgatttaacggctgtttattctcggaaactagcaacggcacaagaatttggttctcgctatggggatgtggaatatgcaattgatttagagacgttttttggtattgcacatatggatacggtttatattgcctcaccaaattcattacattttgaacaagcgaaacaagcaattttagcgaaaaaaaatgtaattgttgaaaaaccagctttttcaacgcctgatgagatggcagaaattattgaattagcgaataaaaatcgtgtgtatttctttgaagcggcccgtaatattcatgagcaaagtttccaaaaaattgctgaattattgccattaaaaaaccaaattttaggtgcgaattttacgtatatgaaatattcttctcgctatgatcaagtattagaaggcaaagagccaaatattttttctcctcatttttctgggggagccttagcggatttaggcgtttatttagtttatgcagccttaggctggtttggcgtaccaaacgaaagccattattttgctagtaaaattgcgacaggtgtcgatggcttaggaacaattattttacgatatgatcagtttgacgtgacgttaaacactgggaaaattagtgattcttttgcgccatccgaaatttactttgaaaacgggaccttgattttagatagtgtcaatgctatttcttcggctgagtaccatgatcgcgcacatgaagaacgtgatgtcttagatattcaagtagccgataatccaatgattgaagaagcccgtgattttgcagcagttttaaattacccaacagataagtattggggcaccaagtatgaagaatgggttgagcttgctcgaaatgtcaataaagtagtcaatgatatacgtcatagtgccggcattatttgtgatgctgataaataa

SEQ ID NO: 2375 - DNA, 1314 bp, Enterococcus faecalis
gaaaggaacaatatgagatttttagaacaacttccagaggcttggcaagaacagtggcaagcttctggctttaacgaaccatcaacaattcaagaaaaaagttttacgccccttcgcgaaggagaaaatgttttaggaatttcgccgacaggaactggaaaaacacttgcttacatgctgcctttactcttaactgttgaaaaaggacagggaaatcaattgttgattattgctccgtctcaagaattagctatgcaaattgctgaagttgctcggacttgggctaagccacttcaattaaaggttcaaacgttaatcggcggggcaaatgtttcacgccagattgacaagttaaaaaaacgtcccgaagtgttaatcggaacaccaggtcgaattttagagttaatgaagaataaaaaagtcaaagctcagttgttaaaaacaatcgtaatggatgaagttgatcaacttttccaagaggaagagctaagtttaaccaagcaaattttgacacacacaccaaccgaataccaacttgttttttattcagcgactgctgatcgtgtcgtgaatcaagcgcaatctttaagccaaaaattacaggtgattgatgtgacggaagaagatacttcagcaggccaagtcgcccactactttattcggttagcaccaagaaaaaaagctgattacttacgtcgtttggcccatacagaagcattcagaagcatggtctttttcaatcaagttgctgatttaggtgcagcagaagaaaaattagtttatgagaatgttccggctattggtctggcttcagatcaaagtaaacagttgcgtaaattggcgatcgatcaatttaaagcagaacgagtgaagttgttattaaccacggatattgcggcacggggcttagatttcactggggtcccttacgtcgtaaacgtagatgttcctttaaccgaagagagctatattcatcgttctggtcgcgttggccggatgggtgcacaaggggcagtgattacgtttatcaacgatggcaccaaaagggattatcaacgtttgatgaaacaattggccattccttatcaggaaatctttttatatgatggtgcacttcatgaacagccaaaagccaaagatgaactagaaaaaaagaacgtagtcaaagatacgtattcagaaaaaaagagtacgaaagaaagaaaaccagaaacagtaaattctgttgtcaaagaaccacaagaaacacgcaaaaagaagaaaaacaaaaagaaaaacacgaaaaacaaaggagctcgtaaagcgaagaaataa

SEQ ID NO: 2376 - DNA, 1470 bp, Enterococcus faecalis
agcgaagaaataacgctttacgagcttcaagcagaacgttgtatcgaggaggattccatgaaatctcggaaggaagaaatcttagcgttacttcaaaaaaatgaaactggcttaacggcaggagcggtagcagaacagttaatgattgatcgcagtaatgccagccgttatttaaatgaattattcaaagaaaagaaaattactagaagtactggacgtcctgttatctattcagtgccaacaatcaatgaaggagaacaagtccatgtagatgagtccacctctgttagttttgacacattagtaggtgccaatgattctttaaaagtgagtattcagcaggctaaggcggctattttatatccaccaagaggtttgcatacgattatttttgggaaaacaggaacagggaaatctctttttgctgaatgtatgtaccgttttgccattgattcaaaaaccttagatgaagatgccccttttgtctcttttaattgtgctgattatgcacaaaacccacaattattatttggtcatatctttggcgtaaaaaaaggtgcctatactggtgcgaatgaagatagtccaggcttaatggcaaaagcagatggcgggattctctttttagatgaaattcatcgcttaccgccagaaggtcaagaaatgctctttacgtttattgataaaggcgtgtaccgtccattaggagaaagtggtcaaacctatgaagcctctgttcaaattattggtgcgacaacggaatcctcagaaaactttttaaccacttttaatcggcggattccgatgtcgattacattaccatctttagatgcacggacgctagatgagcgttatgccatcatttcgttatttattcagcaagaggcaacacgtttgggccaacaaattgatatcgaacgcgaagcagttttggcttttatgttatacgatgcagaaggaaatattggtcaggtgaagcgggacttaaaattagtttgtgctaagtcattcctttattatcggacgcacaatttagaacatttggttatccgtaaacgggatttgtcgttacctgtccaaaaaggattattaaaaattaaagaagtacctgagcgcttggatcaatttgtcgatagtaaaagtaattatttatctttccagccaggcaccaacaaaattgtttggtcacaagatccagctagagacatgcaagtttacaatgaaatcgaagaaaaagtcgctgacttgtccgaagctgacttagaaaatgttgatttagaagaattgatttccaaagatatgaatgcgtattttaaaaattatgtcgaagaattaacccaacattctttacataaggagttattaccagaagctatttgggacttaacgaatcgtctttatgatatcgcagaagagcgtttggaacacccgtactacgaaacttgccgattcgcctctatatccacgata

SEQ ID NO: 2377 - DNA, 1698 bp, Enterococcus faecalis
ccaatttccgtggtgaatatgacaactttaacgatctgtttgcaaatcgcaggaacccttggcgtccctaaattagttggcaagttgattgatgtgggcatcgttagcggtgaccaacaagtaattaaaacgattggcatacaaatgtttcttgtggcattcattggaacaattgccgcaattatttctagctatttgtctgctttagtagctgctaaatttggttttcaagttagaggattgttctttaaaaaatttcaacaattctcgatgaaaaatgttgataaatttggttcaaattctttgctaactagaatgaccaacgatgtagataatgttcaaacaatgattgtgctgttttgccaattaatctttccagcgcctattattagtttatttgccttagtgatgacattttcttattcagtttcactcgcttgggtaacattggcttccatcgtattttacttagtcgttgtttattttttaatgaaaaaaggtacccctttatctttaaaaattcaaccaaaaatggatcgaattactacgactttacgagagttctttactggaattaatatgattcgtgcgttcaataatcaagattttgaagagcagcgaaccaatcaaacatttaaaaattatgctgaacgcatgagtaaagtgaatcaaatctttgcttggattactcccgttgcctttttattaatgggcgttgtgtacgcctctattttgtggtttggcggtaatttagttgcagtaggcaccctacaaattggcaccgttacagctgtgattgaatatacgcttctaactttggcctacttaatgatcgcggctatggtattagttgtcattccacggtccgttgcttccttgaatcgcttgcaagaagttttgtcagaagaaattgaaattagcgatcctcatactgaggcaaccattgcttatcatcctgagaaagccttgatttgcttcgatcacgtcacgtttcaatacacagaaacagctgatcctgttttagaaaatgttagttttgtcattcctaaaggaaaaacaacggcgattgttggtgcaactggcgctggtaaaagtactttagttaagttacttttacgaataaatgaggtcacagccggcacgattagctattctggcacagatatccgctcattatctcagcaaacgattcgccaagtcatcagttatgtgccacaaaaagcctttcttttcagtgggacaatcttatcaaacttattaatgggaaatgccaaagcaactacagaagaaataagaacggcactagaaatttcacaatcttctgaatttatcgattccttaccacaagggattgaaagtttcgtagcacaaggcgggtccaactattctggtggtcaaaaacaaagaatgtgtattgcacgagccttaatcaaaccggcagacgtttatattttcgatgatagcttttccgcattagattacaaaactgatgccgctctacgtgccgctttacatgcacaaatgtcggacaaaactttactcattgttgctcaacggttaagtacaatcatgaacgctgacaacattatcgtcctagatgaaggaaggattgttggtcaaggcacccacgctgatttacttaccactaatagctattaccaagactttgctaaatcgcaaggtatcttacccaagtaa

SEQ ID NO: 2378 - DNA, 1806 bp, Enterococcus faecalis
aagaaagttttcttttcaagccatacaatgaaaaaaacaatgaatcttcaaagctttaaacgtttctggaaaatgattaaacctgagcatccaatcttttatggtctaatgatctgcagtttaattggaaacttattaattgttgccatgacctatattatggcaatcgggattgataacctcttagaagctatcaagcgtgtcgggctcaaaggtatgacacttcctttagttgaagaagcgctcttaggtcccgtcttacttttaattctcttttcaatcattagtagtatcacttcttttattcaggaacgagcaatggcttctttaagcgaacgggttactttaagaattagaaaagaagtgacaaaaaagtttaaaactttaccaatggccttctttgacaatcaccaagtgggcgatatcattagtcgttcaacaactggcttaaaccaattgtcacaagttcttttaacaggcatcaaccaatttttcacttccgtcgtgactatcctttttgcaggaatcatgttgttctatattgatgcaaaattaaccattttagtgttgctcctaattggcggcagtactttcatgacgacaaaaatcgcgaataaaaacaaggtgtttgctgatcaaagtcaagctgaattaggtcaattaaataataagatggaagaatatttagcaggaaatttggtcacaaaaacctttaatcaacagcaaaatgctgaaaaaacaattgatgctgttaatcaacaacattatcgtgcctttaaaaaagcacagtttctaaattttgcgatttatccagctattcgttttattaatcagttggcttttattattagtgctatcttaggcgcaatgctcgttttatctggtggtattacgattggtttcttgcaagcgtatttgcaatatatcaaccaaatttctgagccgatttctaccgcttcttatgtcattaactcaattcaagcagcgatggcttccattgatcggatttttgttatcttagatgaagctgatgaacagccagaagcaactcatttagaaactatttcttctcctaaaggagccattgaatttaaaaatgttcaatttggctacacaccagaaaaaattttaatgaagaatgttgatttttctgttcaaccgaaaaaaacagtggccattgtgggacccaccggcgctggtaaaacaacattagtcaacttattaatgcgtttctatgaaataaatcaaggtgccattacttttgatgggattgatattacgaaactttctcgacaaaatctaagaaatttatttggcatggttttacaaaacacttggctatttgaaggaaccgtagcagataatattgcctatggaaaaaaagatgcttctcgtgaagaaataattgaagcagctaaaattgctcaatgtgatcattttattcggacccttcctcaaggatatgacacaattatttctagcgaaaatggtgcattatcacaagggcaacaacagttattaaccatcgcccgaatcattttagcaaatccgcccgttgttattctcgatgaagcaacttcgagtgtggacacacgaacagaagcccatattcaaaaagcgatggaaactgtcacagaaaatcgaacaagcttcgttatcgctcatcgattatccacaattgaaaatgctgatttaattttagtgatgaaaaatggcgatattattgaaaaaggaacgcatcaggaactattacaagctccgactctttacgccagcttatataatagtcaatttcaaaccacttaa

SEQ ID NO: 2379 - DNA, 1008 bp, Enterococcus faecalis
acaatgaatactatcttaacaggtgatcgtccaactggtaaattgcacctaggacattacgtaggttccttaaaaaaacgagtagaaatgcaagcagaccctacaaatcaattatttgtcatgattgcagatttacaagcattgacagataatgcaagaaatcccgaaaaagtttcagccaatgttttagaagttgctttggactatttagcagttggtttagaccctacgaaaacaacaatttttatccaatcgcaaattccacagttagctgaattaacaatgtactatctaaatttagtgaccacgtcacgtgttcgtcggaatccaacggtcaaagcagaaattgagcaaaaaaaatttggggaaggtgttccgacaggattctttatatatcccgtttcacaagcagctgatattactgcctttcaagcgaatttagtcccggttggggaagaccaaaaaccaatgttggaacaagcgcaagaaattgtgcatagttttaatcagacgtacggtgaagttttagttagaccggaagctgtgttaccaccaaaaggcatgggacgcttgccaggaattgatggcaacggaaaaatgagtaagtctttaggcaatggtatttatctttcagatccagctgaagtggtacagaaaaaagtaatgagtatgtataccgatccaaatcatattcgtatagaggacccaggacaagttgaaggaaatatggtctttacttacttggatgtttttgggaaaaataaagaatatattgaagaattaaaagagcactatcgccatggcggtttaggagatgtgaaaattaaacgttacttaattgatgtcctagaagaagaactcgcaccgattcgtcgacgtcgtgaagagctggctaaaaatccagaagcgattatggaaatgttgcataaaggaagtcttgctgctgaaaaagtggcagcacaaaccttaacagaagtcaaaaaagcaatgggaattcaatatttctaa

SEQ ID NO: 2380 - DNA, 3849 bp, Enterococcus faecalis
acttgttggagaaagacagagaaaagttttttcaaaattatcaaaataaaaacagttaaggagcagaaaatgagaaaaaaagcgtattttaaaagtgtaaccatcttcctttctattttgcttgttttttcccagcttcaattatttagtcttcctgcttatggggaaacagtgagtgatcaaccgttactttttcgttcagtaggtgtcgctcaaagtgggacgacctactatgtggatggggaaggaggaaataatgccaatgatgggcagtcgccagccagtgcttggcgtgattttgaaaaagtgaatcagacggagtttcagccaggcgaccatgttctgctgaatgcgcaaagtacctggaataaccaattgttgcatccaaaagggaatgggacagcggcacaaaagattgtcattgatttttatgatacgaatgacaaaggagaaaccatttttgaaacaacacggcgtccgattattaacggtggtggcacctacagcacagggactttcaaacgtgcaatctcaggggccgtgcagttagtgaaccaagaatattgggatatttcaaatttagaagtgacaaatacaccagagctagataatctcgaaggctataagaaaccaggagatgctcaaagagcggggatattagtactaggatatgaacaaaatcgaacgttcaatagtgtcacgataaggaataactatgttcatgatgttcaaacagaatattatttaaatctaagtgggaatactgcaaccaaacgattaaaagcggtaggtggaattattgttttaggaagttggtttgatgagaatggcaatgtagtaacggcagctaatgatcatcgaacaacgactggatttaatgatattttgattgaaaataatgtgattcaacgagtgggacttgaaggaattcgaacaaaagctgattcagatacctcaagaggcaacactttctacaaaacgttttctaatattacgattcgtaataactatttagaagatattgctggcgacgggattgtcttgtcagaagccaaaagtggcggtgtcgtcgaaggaaatgttgctgtccgaatgtgcaatgccgattatggtacacaaaattacgcgggcgtttgggcaatgtctgtagatgacggactgttccaatataacgaagtatacggaatcaaatatggatttaacgatgctgaagcttatgatgtggacatgcagtcaaacaatgttatttatcaatataactattcacatcataatactggcggctttttattgcttatgtctgatcaaaaaaattcggttattcggtacaatatctcagctaatgacggcggtggtaaccgaagaacaggtaaagacaatccacgcggagctggtggctacaattataaagaacaaagcattttccattattgggtgaaaaatgatggagcggcaatgccaactatccacaataatacgatttatgttggcgacggtatttcaacatcattatttggtgaaggaaatagttctgacaacagtggtacagtagccaatttttacaataatattttatacaaagaaggtaccggacaattaaaattcttatctaattatccaacaaatgggacacaaccaattgaacgtaaaatggtcgataatccagaaaaatatttcaaaaataatgttatttggccaaaagaaattgctacagaaaaaagtggtgcaactgttgaaaaattagtatcaagtggaaacatttttgaaaaaccacaattagaaatcacagataaccctgaaaaagtgaaagagttggcagagcaagaatttacgacattgaaaccaacaaaagataatgtggttgaatttacttctaaagaacgcttacgtcagcgagcacaaatgttccgattaaaagaaaactctccagcgattggtaaaggcttgtcggaagtgaacagtccggccgaagacttctttggaaatagcttgaaaaataaagttttagatattggtgcgcaacaagcatccacaattgaaaaaagtattcgttatcaaaatcaagtgttagaaattagttcggcaacaggtgtgtatcctaatttgccagagcaagttgaattaacgtacgaagaagtcgttaatgaagaagtggttgcgacaggcaaaaaagaatttaagttacaatgggaagcaatccctcaagaaaaaattaatacagcaggcacagttgaagttgcagcaacagttatcggcttaccgatagatgctgtcaaagtaacagccaaggtctcttttgagggtgaacttggtgaaggaaaagacaccgttaaactaaaaacagctcaaactgcctatgttcaaaagagtgatggtaaccgagcatactctgctatagcaggcggtaccgctgccattagttcaggagacgcctataaatatccttatggagtaaactatacgggcaattacgcattaaaattaaaaaatgctagttctgcggggtataatcgccggatttacgttgaaattgatacacaagaattgaagaactatcaatcactaaaaagtgccaatttagaactaaatgtgatgcgttatgatgcgtggaatggtgctggaaatacaaatgatgaacgtttgaaaaatacgcagttccaagtagatgtttatggaacagatactaattggatgagtaacaccattacttggaacaatggtccaaataatttaaatgtaccaaatgaagaatttattgctcgacaatcttttacaaatagctcaattatgaataatcaaaatacaatctctattgatattagtaactatctacggaagctaattcaaagtggtgagaaaattccagccaagttaagtttcttattagcgattacagacagtcgtttgcctggttatgattctgataatgctgggtttgatgctttttcaaaagaaggcgcacaaaaggcctatcaagactttttaacaggcaaattgaccttgccaactggtcaacagctagcagaggatagtttagctcctaaaattgttttatcgaatgttttcgaagtcaaacatgagtcgattgaggtcacgacagaagcgggtcaagcccctaaactaccagaaaaaacaactattttttattcggatggttcacaacgagaagtgactgtcaattggtcagaagttccagcatcttcttatcaaaaagaaggaatattcactgttgtaggacgagcagcaggtgtctcaatgccaattattgccaatgtaaaagtcaccgctaaacatattgttggattcaaggaattgcctgcgctggatcgactaacaggcacctcgcgaggcgaactgaatttgccaactgaagtaattgcaaaattagatgatggtagcgaaacgaaattgaaggttatttcttgggatgacgatgttagtaattattcgccaagtagcccgccaggtacttaccagttccctgctgcagtagaagaaaaaataggaattgcgaatcctgatgaacgaaaaatcttccaagtcgtgcaaactcatgcgattcctgaaagaattcaatttgctacagaaacagccactataaaatcaggcgaaaattatcaaattcaatctaaagtgattggtcaagcgccgcacacagaaacggatgcttggagctcgcaagtaacgtatgagttggttacaccagatgctggcaatacagtaagtgtagatgaaaacggtctgattaggacagaagcaacgactgctgcaggaaattatcaaatcaaagtaacaagcaaagttttgccgatagtgactgcacaattttcaattaaagtcacaaaataa

SEQ ID NO: 2381 - DNA, 1083 bp, Enterococcus faecalis
tttggggaaactattatgtgtacaggcatcaagattatttccaaaacaaatgatattttttatggacgtacgatggattttacgtttgacttttttggcaacgaagatccaattgcaccaaaaatccctactctaattgctcaatttccaaaaggtacagttctaaacagccaactaaatccttggacggcaaaatatgcctttatgggactagcaatgtcaggcacagatcaaccagcgaacgatggtaaaaccgtcagccttgctatcacagatggtatcaatgaagccggcttatctggtgatattcaatatttaatggaatcttcaacagcacctgctgaaagtttagcagatcgtggtttaacacctcatattgcagaagaagtacttgcttatattttgagtaattttgaaagcgttgacgaagtaaaagtagcttttgaaaaaatcggcctgttagatcaaaaattccaacttgattcattgggggaagttcattttaccttacactggaccattaatgataaaaataataatagtatcgttttgcaaccaacagataacggagcgttcgtcatttatgattcgattggcgtagtcacaaacagtccagaatacaattatcatttaaccaatgcacgaaactatatcgggatgcgcaactatgctattaaggaaccttacactttaaaatcaggcgcaacacttgacccaattgaaggtgggacttcttacggactattaggaatcccaggagacttcacttcgccgtcacgcttcattcgtgcgttatactattctgacaatctccaagaatttgatagctctgaagggattatgcaactctatcgcgccttccaaacagtgatgattcctcggggaattggccatttaggtcaaagtaattctctgtctgatttcacacattattggtcaggatatgatgtaactaatttaaccatgtatgtccaaccagaaagtactacctcatttacaaaatacactttggatccagctttaacagaagttactacttttgctgtttctaacgagctactactaacagatttaaatcaataa

SEQ ID NO: 2382 - DNA, 681 bp, Enterococcus faecalis
aagatactaaaaagagggaataaaatgaacctaacccatcaagacttcaacctattcaaccgagaaatcttcacatttaaacaactcaaagagcaacaaacatcagcagaaatcgatgccttaaagcaaacctacaagcaacattgggaaaagtggaaagccttaaacctcgcaatcgcccaaggtttaccagctgaactcggcatcactaagccgaaaattgaaagctggaccaacggctggaatttacgcagtcatttctgggctgcgtatcgcagtgagcaacgtcaagcggaaaatgcttgtttggcgttgttattaaataaaaagcaatttcaagtgtatttgatgtttcaacattacaaaagtgaggagcggacaggctcagtcgtcgcttacaatcaattgcttaatcgtttagaagcttggagtcaaaccatcgactgcgaaggctattatatttggccgcaggaggagcatgaactagtggaccatttgcctttaaaagattatttagcagatgaaaaacaacggaaaattctagaagagcggataggcaatcgctcatttcagatcggtaagttgtggtttgcgacggaaaagcttgaaacgattgaagaaaaaagttgtcaggcgcttcaagaattagcgccgttgtataacgcattatctgaaaaatga

SEQ ID NO: 2383 - DNA, 1236 bp, Enterococcus faecalis
aagaaacaactatcatttggaggaagtatgcgtaacagaaaaatgtggacaattatcgtcagtgggttatttttaagtagtatcatcgcgggaatttcaggagcatttttaatcattgaaggagagctaacgactctgctctgggaggtgttgccagcgcaaatgaaatggccaattctctattattttgtcttgtgtgtgctaggagcgttggtattgagttatctgaagaaacgcttcgggcaaataccacaaacggcgcatgaggctctgacagaattgaaggcgaaacaatcggtcgattattcaggtgtgtttagaaatttattggccgccttggtaattttaattttcggggctggtgtcggtcctgaagccgcattgctgggagcgattatttcgttgtcagtctggcaatctgataagttacggtacctttattttcattatgacgagcaagaacagcaagtattttggacaaaaatccagcgcttgctacatccgcaacagtttgttcagcgctacgatacgatgctcgctcctgtagataaaaagaaactgaaacaagtgatgaacgggttatttattgtgaacgggttggtggtgtttacctttttaatgaaattggtgggacacccatcgtttattacgaagttaggaactggaaaaattgaaatggcttcgttatggctgattttacccgctttattaactgcttttgtgattggtaacgcctatcaatggttgcaagctgctctggctaaactatgccaaccttttgaagaaaagcaaagcatactggtaacctttggtgcagcctgtatttttctctttgttattttaatgccaagattactattttcaggacaatcttttatgcatttagttcctagttttggtagtcaacaagcctggtatatcttggtaatcgctgcgataatgaaactagtatttttacaagtttgtttacagacaggttggataggtggcgatatttttcccgtcgttttttcagctattttaatcgggtttgcggtcgcgcaatttttcccaacaattgactcgctttttgttgtcgcaatttttgctacgagtttaacaacacagattttagggacgattcttgtaccaggcatttttgtagggctctttttcccaatcacgctttggccaattgtagtccttgtgttatttttacaatggctattgaaaaataaaattattaagagtaactag

SEQ ID NO: 2384 - DNA, 189 bp, Enterococcus faecalis
ataacccgttcatcacttgtttcagtttctttttatctacaggagcgagcatcgtatcgtagcgctgaacaaactgttgcggatgtagcaagcgctggatttttgtccaaaatacttgctgttcttgctcgtcataatgaaaataaaggtaccgtaacttatcagattgccagactgacaacgaaataa

SEQ ID NO: 2385 - DNA, 1659 bp, Enterococcus faecalis
atgatgttaaaagtgagtgatttattaacgttagaagaattgcctggcattaccttagtggcaggacataaaaatcaggaccaaccgattttaaaagtcaatattttagaaaatcctgatattttagattggctaacagcaggtgagctgctgttaacgacagggtacatatttaaagatgatcggaaattacagaaaaattttttgaaagaactagccaaacaccattgtgctgccttgggatttaaaacccaacgttattttgaagaagttccaccagacctaatcaaattagcagatgaaatgaacgttcctattttagcaattccttacaattacaccttttcgcaaattgctgacgtgttgaaaagtcgtgtcacgttagaacaatttgacatgaatgcgcaagaaaccgcattgcataataaaatttaccaaatcttagaaacgggaagtagcagttttcatttgctgcaggatctagcagaaaccattcaaaatcctgtcttgttattgaatgaccactttgaaggagttaatttttttgacttgcctaaaaatccaattcgtatttctagcattttagaagatagacaagaaacctcagagttccaaaaacaattgctggaacaaagtcatccattattacgcttttatcaagaaccgattcatttacagttgaaactccagaaccaagtggtgccaattgaaatttatccaattaaaaagaaaaatgttattttatattatttactcgtctggaacaccttggccccattacggccagtcgatgtggctcattttaaaatcacagctcattacttacttttacaattgcaattggaatactcacggaaatttgaagaataccaacaacgaaacgaattattttttaagctgtttgcgcatgaaaagagggaccaagctgttttccaacaatttcaacaatattatcgcttggcaatagataagccctatgcgattttgctaatttcattaaccttaaatgaacgccaaaggcaagaaagaatgtctattttaggtaaccagttaaaccaagttattttaggggacaaacaaaaaattgtttgtattgaaattgacagttcctttgtcttattagttgaaaatccacctgaaaaagaaggcgattatctgaaaatgatgcaacgcctagcacaaagtagcataaatcagttaatgaaagtacaagaagatgtggaacttttcctaacaataggacctaagattcaaggtctgacccagattcatgaatcttatcaacaagcgattgacgttttagcctttcaacgccaattcgttgcagaaaaacctgaaatgaggattgcttcctactcgaattttcattttagacagacattgcaacgttattttttagaagaaggacaagcaaccctcagaaaaaaatatcttcaaccattgcagaaaagtgatcaacagcaacataccgactttgtccatacactgaatgtctattttcaatcaaaacgaaacttgtctcaaacagccaaaaaactctttattcatcgtaatactttattacagcgattggagaaaattgaacagctagtgctgttggactttgataaggaagtggacttgttggcgctggaagtggcgttgtttgtgggaacttaa

SEQ ID NO: 2386 - DNA, 903 bp, Enterococcus faecalis
agtcgtgaaagcgctattaaaaaggaggtcgttggaatgacaaaaattttagcttatgaccaaacgattttatcgaaactccctcatcaaacattgactagtttgcaatgttttacgcacgctattaattatggtcatgtagacacccaagaaattctcttgaccatttcaacgcatcccgaacatatagcacctaacacgattatactcgatgaaaaaaaacttagccatttcgctgatttacctgtccaaattgagcccctgtttatccggttaggccgacgacaattaacactagccgatgcccaaatttggcaaccaacgccactttatttaacacccagtaaaacaaaaatagctatttttttaacgtatattcagcaaactcgtttcaatccttggcaagcgctttttcctgcttcgtcgtcaacctttctttttgattcttatagtcggacccagattcaaaaagaaatgattcattttcaacaggcttgggagcaaaaatcttttaaaatagctcttgattgtttaacgaagattttgggattggggattggtttaacccccactggcgatgattttatcacaggattacttgctagtttttctgcattacagcaacttccctcgaatttccaacagctggctgtgctagccaaggaacgaacgaatgcggtcagttatgcggaaatccatgaagcagtgaacgagcggttttctcagctagttcagcgtgtttttttatcaattgaaagtggaaatacaaacgaaatggctcaagcggtttcagctttagaggaggtgggctcaacttcaggaagcgacatactttgcggcattatttttggtttaaaactattttgtgaggagaataatcatgacaattcaaacagtaattaa

SEQ ID NO: 2387 - DNA, 318 bp, Enterococcus faecalis
aactattttgtgaggagaataatcatgacaattcaaacagtaattaaagagaacgcctattttgattcagttactttaatgaccatttcaacacgagccaatgaactggctggagttaaaactgcaatgattgggatgggaaccgacatgaatcttgaagtgattcggaatgttggtttatatacacccgccttggatcatgttacaacaggtgatttattaattgttttagatcttgatgaccaagcgaactcagaagaaattttacagcaagtcgcacgagttatttacgaagaaaaagaaaaccgcttcttctga

SEQ ID NO: 2388 - DNA, 408 bp, Enterococcus faecalis
  misc_feature (361)..(401): Nucleotides 361, 378, 393 & 401 are "n" wherein "n" = any nucleotide. 1
atcttgatgaccaagcgaactcagaagaaattttacagcaagtcgcacgagttatttacgaagaaaaagaaaaccgcttcttctgaagtaacctataagacgttagattcagcccttcatgaagagcctgatgccaacttagttgtaatttctgtcaatggaaaatttgctgcacgagaagcgcataaagctttagatcagcaaaaacacgtcatgctctttagtgataacgtgacggttgacgaggaattagcgttaaaacaaaaagcacacgaaaaagaactgtttgtgatgggccctgattgtggaacagcgattattaatggcgtcgggttatgttttgctaacgaagtacgttcangagatatggaattgtcngcgcctctggtacangcagccanaaattaa

SEQ ID NO: 2389 - DNA, 942 bp, Enterococcus faecalis
  misc_feature (7)..(7): Nucleotide 7 is "n" wherein "n" = any nucleotide.
tgtccanatccatacatatggttatgggatttcacaataattggtactggtggccgtgatttgtctgctgaaattggtgggctgatgatgcttgacggtctggatactttaatggttgacgaacaaactaaggcaattttgcttatttctaaaccgcctgctccagaagtaacagagaaaattttaaaaaaattagctgtttcaactaaaccagttgttatttattttatcggcagtgaacaaacggaacgaaaaatagacaacgtcacttttgctacttcttctctggatgcagttcaaaaggtgattcaatttagtcaaacacaggaagcggaaaccagcctctatcaaaatccgacaggcgcaacgttaacagccatccaacagcaacaagccccttctcaaaaatttgttcgtgggttgttctgtggtggcactctttgtgatgaacttttatatgctttaacagaagtctctgatgatgtttatagtaatattcataaaatttctgaacggcaattagcaaatcctgaccacagccaagcacatacattgattgatttcggtgatgatcgtttcacagaaggccgcccacatccaatgatcgatccgacttctcggattactcgcattcttcaagaagccaaagatcctgaagtggcggttttagcgttagattttgaattaggttatggttctcacgaaaatcccgttggcgtgttagcggaggcgttaaaggaagccaaagcaatagcgaaagcagatggtcgtgagttagccattattggctatgttttagggaccgaagaagatccacaagatattcatgaacagcggaaaattttagaagatttagaggttctcgttgtcgacagcagtcatcaactttgcgaagccaccaaaacttttgtaaaaggagcgaacgaacatgagcagaaatga

SEQ ID NO: 2390 - DNA, 825 bp, Enterococcus faecalis
aaggagcgaacgaacatgagcagaaatgatctttttaaacagcctttagatacgatcaatgtaggcattgactttattcatgaagatatgaaaaaacaagggattccttcacatcaagtaaattgggcaccgccagccaatggcgacccagagctattaaaattattggatcagttaaaaaatccaacactttatgaaaaaatccaacaagccaacgaagaagcggttacccgcattattcaatcaaaacctattttagtaggatttgataaagcaattaatgtcatgcccgatatgactgaaacgaccattttacatgctgggccacccattacttatgaaaatatgtgcggaccgatgaaaggtgccgttcaaggagcgcttgtttttgaaggattagcaaaagatctagctgatgccgatcgggttgctcgttctggcgcgattacgttttctccttgtcatgaacatgatgccgttggttccatggctggcgtgacttctccgaatatgtacgttcatattatcaaaaatgaaacgtacggcaacacggcttttactaatttaagtgaacaattggcgaaagttttacgatttggtgcaaatgatcaatccgtcgtggatcgcctgatttggatgcgcgatgttttaggtccattacttcatgatgccatgactttttgtccagaaggcattgatttacgcttaatgctttcgcaagccttgcatatgggcgatgagtgccataatcgcaatgtagccggaagtacgttgttagtccaagcattaacaccttacatggttcaaactgattttttctcgtga

SEQ ID NO: 2391 - DNA, 651 bp, Enterococcus faecalis
caccttacatggttcaaactgattttttctcgtgaacaattaaaagaagtatttgaatttcttggcagttctgactatttttctggtccgacttggatgggtgccgctaaatgtgcgttagatgctggtcataatgtggagaatagtacaattgtcaccaccatgtgtcgcaatggggtcgaatttggaattcgtgtcagtgggattggtggaaatcactggtttacggggcctgcccaacgggtgattggtccgatgtttgctggttacacacaagaagatgctggtttggatatgggcgatagtgctattacagaaacgtatggtgttggcggatttgctatggcagctgcaccagcaattgtcccattagttggcggaacagtggcagaagcattgaattattcaaaagaaatgctggaaattactacgaaagaaaatcccaatgtcacgattcctgttttagattttatggggattcctacaggcatcgatgtcttaaaagtcttagaaacagggatgctgcctgtcattaatactgctattgctcataaagaaccagggattggtatgattggcgctggattgactaatccgccagcgaatgtctttaacgaggcattaaaagctttagtagctacaataaactaa

SEQ ID NO: 2392 - DNA, 1224 bp, Enterococcus faecalis
tttcaaaaacttagtaaaatgtcatttttttggagcgatcatatgaaaaataaattgatcaattacgaagccgttttagctcttgttgtaaaaatctttttgggaatgttcctgtattggatcatgaatgactttcgacatgtgtctaacttttttccttacaatgacgtagttaccaaagtgaatcagcagggattttacaaatttatctattttgttatgaacttcacggaaggggaattttacggtggactttttacaacgcttttcttactaatcggcggtctgattgcttggcaactttatcggaaaaattcaaaatggcagggatttgcaattgctggtggttctggtgcttggccttgggtacttgcttctcagctactttccctctttttaactatttatgtttttgattttacacgcttttttacaaaagaagtgttgtggttaccaacgtttattgtggttgtcggcacgccgccagctttaacgctcgtttatggtcctggctggaaaaaattaggaacgatttctctgttgagtgcgcttttcacctttccgtttgccaattggctgaatgcgcaattgatgccccttttaaatgtacctgggacagtttccaacgttaccacaatggcttttgttggctggattgtttcagccatctgtcatcaacttccttggatggttccttctgttgcaccaatcgctcagaagcggcaaaaacaacctaaaattgaaaatacgcaaacctttcaatggtcaatacgacgcacttttgctgacttctccgaagcttggttttatggaaatgagttagttggaggtttggtaattctaggcgttttaacagattggtttgtcaatattaatcatattacaaatggttctggcttggttcctgacattttaatgagacaaatgattgcttcggctgttggtgtttttctttatcgaaaacatttcgctgaaaaaggttggtatccaacgtttatgccactggtcagtattgttcctggtgtgattttaatgacgggtggtggcttttggctttctctggccatcgccgttttagcaggaatcagtgcggctcctgtcggtaactatattgctaaacgattacctccgtttgttcctggtgctgtcggctttgtatcaggaatggctgttgtaaccattttattgtcagccgttttgcatacatttgatatttttgtatag

SEQ ID NO: 2393 - DNA, 282 bp, Enterococcus faecalis
caactgttccaacaaacgaatttgccgaagcaaatctttttccgttatcaacacgttttaacatggagtacatggcaaaacttccttttgcttaagaatacggataaaaaggggattggtcaattaaaaaaagaagcgaatcgtcattcgcttctttttattcactatacaaaaatatcaaatgtatgcaaaacggctgacaataaaatggttacaacagccattcctgatacaaagccgacagcaccaggaacaaacggaggtaatcgtttagcaatatag

SEQ ID NO: 2394 - DNA, 186 bp, Enterococcus faecalis
ccgcgcaaatccaaacgacagagcgaaccgttttttcggatttacagtatattcgcagtcaattacccgccgactggtccattgaaaccgatagcagtggtattcggttacgcaatcaggggaatgcgcaaaccaatgagctttggtcattatttttacctcaatccattagtattcagctattaa

SEQ ID NO: 2395 - DNA, 666 bp, Enterococcus faecalis
aagagctactatttacgaaaggagttagtgacaacttcttttttgagcactagtggtgtttcttatgaaactttgaagcgacatatcaaaaaaatgaatcaggccttacgtgattttcatttaacgattcaactaaccacgatgaccattcagctaatcggggcagaaagcaatattcggattttttatcatcgtttgttggtgccttttactcataataattatttttttgacgattattcgattcatgaggagcattatttccaatttttgaaacaagtttacagtagtgagttgacggtggaaacggaagaaatttttggcgcttgttggttttttattaacacgattcgcaacaaagccaattgccgagtgagtcaattttcttttgactcaaaagatgtcttgtttcaactttatcaaccgtccttggcaaagctttatgcttctgaaggtatctatttgcaaggagaagaaagttttttcgccttcttttgtttcttagaaagctggaattacgataatgtctatggcgaaacgttggcttctgcgctccacactcattacagtcagctgcgaaaatcattacagcagtttgtcactaatttgtccactgaagaagcccggcctgatttaatccaaacaaatttattggataatctgtga

SEQ ID NO: 2396 - DNA, 300 bp, Enterococcus faecalis
ttgagaatttctaggtgggagctggagtttccgccgttttatcgtgtgaaaacgcgaaacaagtacaaggaggtactgtgcgtggcaaaagaagatatgattgaagtcgaaggtacagtcgtcgaaactttgccgaatgcaatgtttaaagtcgaactagaaaatggacaccaagttcttgctactgtttcaggtaaaatccgtatgcactacatccgtatcttacctggtgacaaagtaacagttgaattatcaccgtatgatttaacgcgtggccgtattacttatcgctttaaataa

SEQ ID NO: 2397 - DNA, 723 bp, Enterococcus faecalis
ggttttacctcagcaccattctcacatatggctagcttcataagccggtctttaaaattaggaggagaatatatgaacctcattttaatgggattacctggagcaggtaaaggcacccaagcagaaaaaatcattgatacgtatggcattccacatatttctactggagatatgttccgtgcagcaatgaaaaatgaaactgccttgggcctagaagcgaaatcttatatcgataaaggtgaactggttcctgacgaagtaacaaacggaattgttaaagaacgccttgctgaaccagatacagacaaaggattcctattagatggtttcccacgtacactggatcaagcaaaagcattagatacaatgcttaaagaattaaacaaaaaaattgatgctgtcattgacatccatgtagaagaagatgtattaatcgagcgtttagctggacgattcatctgtcgcacatgtggcgcaacgtatcataaattattcaacccgccaaaagttgaaggcacttgtgatcgctgtggcggacatgaattctaccaaagagaagatgataagcccgaaacggttaaaaatcgtttggcagtcaacattgaaagtagcgcaccaatcttagctttctataaagaacaaggcttgatgcatacaatcgatggcaatcgcgaaatcgatactgttttttctgatgtgaaaaaaatcattgacgaaaactaa

SEQ ID NO: 2398 - DNA, 1299 bp, Enterococcus faecalis
ttgttcaagctattaaagaacgcctttaaagtcaaagacattagatcaaaaatcttatttacagttttaatcttgtttgtatttcgcctaggtgcgcacattactgtgcccggggtgaatgcaaagggattgtctgatttaagtagcttaccctttttgaatatgttgaatatggtgagtggtagtgccatgcaaaacttctctatcttctcgatgggggtttcgccatacattacagcctctattattattcaactattgcaaatggatattgtacctagatttgtagaatggtcaaaacaaggggaagttgggcgtaagaaattaaatcaagcaacaagatatctaacgattgtcttgggtgtggctcagtcaatggggatcactgctggttttaatagcttaagtcaaactgggattgtcaacaatccaaccttaggtacctttgtgatgattgcagttattttaactgctgggacgatgtttgtgacttggatgggtgaacaaattacagaaaaaggaatcggaaatggtgtttcaatgattatctttgccgggattatttcccgtttgccaggagcagtcaaagaaatctatgaagattacttcgtcaatatcgagtcttctcgtatttggcaatctgttattttcattgcaatcttagttattgctattttggtgattgttacagtcgtaacgttcttccaacaagcagaacgtaagattccaatccaatatacaaaacgtgtttctggtgcaccaacaagtagttatttaccgttaaaagtaaatgctgctggggttattccagttatctttgccagctcgttaattgcaacaccaaatgccattttacaagctttctcatcaaaattcgctggtgaaaattggtatgacattatgacaaaaatcttcagttataacacagttccaggggcaatcatctatactgtcctaatcgttgcgtttacgttcttctatgcatttgttcaagtaaaccctgagaaattagcggaaaacttacaaaaacaaggaagctacattccaagcgtgcggccaggtaaaggtacagaagaatatgtatctggcgtgttaatgagattaagtgttgtcggctcaattttcctaggacttgttgctttacttccaatcattgcgcaaatggtttggaacttacctcaatcaatcggtttaggtggaacaagtttactaatcgttatcggggttgcattagaaacaacgaaacaattagaaggattaatgatgaaacgtcaatatgtcggctttatcaataagtaa

SEQ ID NO: 2399 - DNA, 456 bp, Enterococcus faecalis
ggaggtgccaaacctatgaaacttcatgaattaaaacctgctgagggctcacgccaagtacgtaaccgtgttggacgtggtacttcatctggtaatggtaaaacagctggccgtggacaaaaagggcaaaaagcccgttcaggcggtggtgttcgtttaggatttgaagggggtcaaactccattattccgtcgtttaccaaaacgtgggtttacaaacattaatcgtaaagattacgctgttgtaaacttagatactttaaaccgttttgaagatggaacagaagtaactcctgttgtcctaaaagaagcaggaatcgttaaaaacgaaaaagcgggaatcaaagttcttgcagatggtgagttaacgaaaaaattaactgtgaaagcagctaaattctcgaaatcagcacaagaagctatcgaagctgctggtggttcaatcgaggtgatctaa

SEQ ID NO: 2400 - DNA, 219 bp, Enterococcus faecalis
atctgtagaagaaattatcggttaaggaggacaaaaataatggctgaattaaaaattactttaaaacgcagtgttatcggacgtcctcaaaaccaacgtgctacagttaaagcgttaggtttaggtaaagtgaatagtactgttacaaaacctgccaatgaagcaatcaaaggtatggttaacactatttcacatttagtggacgtagaagaagtttaa

SEQ ID NO: 2401 - DNA, 540 bp, Enterococcus faecalis
aaatggactagaattttaggagaaggaggaacaccattcatggtttatattgatccaaaacatttggaattagaagaccgcgttgtagcgatcaaccgtgtaacaaaagttgttaaaggtggacgtcgtttacgtttcgcagctttagttgttgtcggtgacaaaaacggacacgttggtttcggtactggtaaagcacaagaagtacctgaagctatccgtaaagcaatcgaagacgcgaagaaaaacttagttgaagtgcctatggttggttctactatcccgcacgaagtaattggcgtattcggtggcggccgtatccttatgaaacctgcagtagaaggttctggggtagctgctggtggaccagttcgtgccgtattggaattagctggtgtagcagatattacatctaaatcactaggttcaaacacacctattaacgttgttcgcgcaactgttgaaggtctaaaacaattaaaacgtgccgaagaagtggcagcacttcgcggtaaatctgtagaagaaattatcggttaa

SEQ ID NO: 2402 - DNA, 375 bp, Enterococcus faecalis
atcaaagaggtgaaaattgtgattacaaaaccagataaaaacaaaacacgtcaaaagagacatcgtcgtgtacgtaacaaaatctctggtactgctgagtgcccacgcttgaacattttccgttctaacaaaaacatctacgcgcaagtcattgatgacgtagcgggtgtgacgctagcaagtgcctctgccttggataaagaaatttcaggtggaacaaaaacagaaacagctgcagctgttggtaaactagttgctgaacgtgccgctgaaaaaggcatcaaaaaagtagtcttcgaccgtggtggatacctttaccatggccgcgtgcaagctttagctgaagctgctcgtgaaaatggactagaattttag

SEQ ID NO: 2403 - DNA, 537 bp, Enterococcus faecalis
gtgagccgtattggtaataaagttgttgttcttcctgctggtgttgaaatcaagcaagacggaaacaacattacagttaaaggacctaaaggtgaattaacacgcgaattttcttctgatatcaaaatgaacatcgaaggaaacgaagtgacattcattcgtccaaacgattcaaaagaaatgaaaacaatccacggaacaactcgtgcaaacttcaacaacatggttgttggtgtttctgaaggtttccaaaaagcacttgaacttatcggggtcggataccgtgcccaagtacaaggcaacaaattaactttaaacgttggttattctcatcctgtcgaaatgacagcaccagaaggcgtaacatttgaagtacctgcgaacacacaagttatcgttaaaggcatcaacaaagaagttgttggtgaattagctgctaacatccgtggcgttcgtcctccagaaccttataaaggcaaagggattcgctatgttggtgaatttgtacgccgtaaagaaggtaaaactggtaaataa

SEQ ID NO: 2404 - DNA, 426 bp, Enterococcus faecalis
actcgcataaaggaggtaaatagttcaatggtcatgacagatccaattgcagattttctaactcgcattcgtaatgcgaacatggttaaacatgaaactttagaagtacctgcttcaaaaatcaaacgtgatatcgcagaaatcctgaaacgtgaaggatttatccgcgacgtagaatacatcgaagatgacaaacaaggcgtaatccgtgttttcctaaaatatggtaaaaacgaagaacgtgttatcacaaacttaaaacgtatttctaaaccaggtttacgtgcatacgtaaaagctgacgaagtaccaaaagtattaaacggtctaggaattgcaatcatctctacatcagagggtgtaattactgacaaagaagctagagcgaaaaatatcggcggcgaagtaatcgcctacgtatggtaa

SEQ ID NO: 2405 - DNA, 204 bp, Enterococcus faecalis
tataaggaggcgaactacgtggctaaaaaatcaatgattgctaaaaacaaacgtcctgctaaacattcaacacaagcttatactcgttgtgaacgttgtggacgtccacattcagtttatcgtaaatttcatctttgccgtatttgcttccgcgaacttgcctataaaggtcaaattcccggcgtgaagaaagctagctggtaa

SEQ ID NO: 2406 - DNA, 540 bp, Enterococcus faecalis
atgaaccgcctgaaagaaaaatatattaaagaagtaacaccatcattggtggaaaaatttaattacagctcagttatgcaaacacctaaagttgataaaatcgttatcaacatgggtgtgggtgatgcagtatcaaatgctaaaaacttagacaaagctgttgaagaattagcattaatcactggtcaaaaaccacttatcacaaaagctaaaaaatctatcgctggattccgtttacgtgaaggaatgccaatcggtgcgaaagtaacgctacgcggcgaaagaatgtacgaatttttagataaattagtaacagtttctttacctcgtgtacgtgacttccacggtgtcagcaaaaaagctttcgatggtcgtggtaactatactttaggtattaaagaacaattaatcttcccagaagttgattatgatttagtagataaagtacgcggtatggacatcgtaattgttacaacagcgaacactgacgaagagtctcgcgaattgttggcacaattaggtatgccattccaaaaataa

SEQ ID NO: 2407 - DNA, 330 bp, Enterococcus faecalis
aggaggtgcgaaacagtaatgtttgttaaaaaaggcgataaagtaaaagttatcactggtaaagataaaaacaaagaaggcgttgtcttagcagcgtttcctaaacaagataaagttatcgttgaaggtgtcaacgtcgttaaaaaacaccaaaaaccaaaccaagcagccccacaaggtggaatccttgaagtggaagcgccaattcatgtttctaatgtaatggtgattgatccttcaaacggagaagctactaaagttgcgtttaaagaagtcgacggcaaaaaagtccgcgtttctaaaaaaacaggtgaagttttagataaataa

SEQ ID NO: 2408 - DNA, 399 bp, Enterococcus faecalis
agcacaaaatctgaaagggggatacacatcgtgatccaacaagaaagtcgtttaagagtcgctgacaattctggcgcacgtgaaattttaacgatcaaagtcctaggcggatctggtcgtaaaactgctaacatcggtgacgttattgttgctactgtcaaacaagcaacgccaggtggggttgttaaaaaaggtgaagtagttaaagccgttatcgttcgtacaaaatctggcgctcgtcgtgctgacggttcttacatcaaatttgatgaaaatgctgcggtaattatccgtgacgataaaagcccacgcggaacacgtatcttcggaccagttgcacgtgaattacgtgaaaacaacttcatgaagatcgtttctctagcaccagaagtattataa

SEQ ID NO: 2409 - DNA, 294 bp, Enterococcus faecalis
ctaatagtggaaggaggccaaacgcgtatgactgaagaaagaaatcaacgtaaagtttaccaaggtcgcgtggtatcagacaaaatggataaaacaatcacagttgtcgttgaaacaaagaaaaaccaccctatctatggcaaacgtatgaaatattctaaaaaatataaagcgcatgatgaaaacaacacagcgaaagttggagacatcgtaaaaatcatggaaactcgtccattatcagctacaaaacgtttccgtttactagaggtagtcgaagaagcagttattatctaa

SEQ ID NO: 2410 - DNA, 216 bp, Enterococcus faecalis
aacgtgaggaaatgggtggtgaatcgaatgaaggttaaagaaatcagagaattaaccactgccgaaatgctagataaagaaaaacaattaaaagaagaattgttcaacttaagattccaattagcaacaggtcaattagaaaacactgcacgtattaaagaagtacgtcaatcgattgcacgcatcaaaacagtattgcgtgaacaagctaactaa

SEQ ID NO: 2411 - DNA, 453 bp, Enterococcus faecalis
gaaaggagggaaataatcatgttagtacctaaacgtgtaaaacaccgtcgtgaattccgcggaaaaatgcgcggtgaagctaaaggcggaaaagaagtagcatttggtgaatggggtttacaagcaactgaatctcactggattactaaccgtcaaatcgaagcagcccgtattgcaatgactcgttacatgaaacgtggcgggaaagtatggattaaaattttccctcacaagtcttacacaagtaaagctatcggcgtacgtatgggtaaaggtaaaggggcaccagaaggctgggtatcaccagttaaacgtggtaaaatcatgtttgaaatcgcaggcgttcctgaagaagtagctcgtgaagctcttcgtcttgcatctcacaaattgccggtaaaaactaagatcgtaaaacgtgaggaaatgggtggtgaatcgaatgaaggttaa

SEQ ID NO: 2412 - DNA, 672 bp, Enterococcus faecalis
gaggagggacaatcagtgggtcaaaaagtacatccaattggaatgcgtgtaggcatcatccgcgactgggatgcgaaatggtatgctgaaaaagagtatgccgaattcttacacgaagatttaagaatccgtaaatttatcgcaacaaaacttgctgatgctgctgtatctacaattgaaatcgaacgcgctgcaaaccgtgttaacatttcaattcacacagctaaaccaggtatggttatcggtaaaggcggatctgaagtcgaaaacctaagaaaagaattaaacaaattaactggcaaacgagttcacatcaacatcgttgaaatcaaaaaaccagatttagatgcaaaattagtaggcgaaggaattgcacgtcaattagaaaaccgtgttgctttccgtcgtgctcaaaaacaagccatccaacgcgcaatgcgtgctggcgctaaaggaatcaaaactcaagtatcaggtcgtctaaacggtgcggatatcgctcgttcagaaggatactctgaaggaactgtaccacttcacacattacgtgcggacattgattacgcatgggaagaagcggacactacttacggaaaactaggagttaaagtgtggatctatcgtggagaaattcttccaacgaaaaaaaacactgagaaaggagggaaataa

SEQ ID NO: 2413 - DNA, 192 bp, Enterococcus faecalis
aaaagttttaatgttcggcagttgctaacgcacaaaaaaaacttggacttagacgttgaaagcttagtcgtatctgaagcatttgttaacgaaggaccaacaatgaaacgtttccgtcctcgtgcaaaaggttcagcttcaccaatcaacaaacgtactagtcacatcacagtagttgtaacagagaaataa

SEQ ID NO: 2414 - DNA, 312 bp, Enterococcus faecalis
ccatgtgtcgtacattttgagaggaggttcaccatgggtcgtagtttaaaaaaaggacctttcgtcgatgatcatttgatgaaaaaggtcgaagcacaacaaggtgccgaaaagaaaaaagtaattaaaacttggtctcgccgctctacaatttttccatcattcgtaggtttcacaatcgctgtatatgatggacggaaacatgtccctgtttacattcaagaagacatggtaggacataaattaggtgaatttgcaccaactagaacttatcgtggccacgttgctgacgataaaaaaactaaacgctaa

SEQ ID NO: 2415 - DNA, 834 bp, Enterococcus faecalis
ggcgttgcgattaaaaagtacaaagctaccacaaatggccgtcgtaacatgacgagttctgatttcgctgaaatcacaacttcaacaccagaaaaatcattgttacagccattaaaaaacaatgccggtcgtaacaacaacggtcgcattacggttcgtcaccaaggtggcggtcacaaacgtcaataccgtgtgattgacttcaaacgtaataaagataacgtcgcagcggttgttaaaacgatcgagtacgatccaaaccgttctgctaacatcgcgttagttcattacgaagacggggttaaggcatacatcttagcaccaaaaggattagaagtaggcatgcgcctagtatctggtccagaagcagatattaaagtaggtaacgcattaccattggaaaacattccagttggtacagttatccacaacattgaaatgaaacctggtaaaggtggacaattaatccgttcagctggaacaagcgcgcaagtacttggtaaagaaggcaaatacgtattaatccgcttaaactctggcgaagttcgtatgatcttagcaacttgccgtgcaacaatcggttcagttggtaacgaacaacacgaattaatcaacattggtaaagctggccgctctcgttggatgcgtaaacgcccaactgttcgtggtagcgtaatgaaccctaacgatcacccacacggtggtggtgaaggtaaaacaccaattggacgtaaagcgccagtatctccatggggtcaaccagcaattggatacaaaacacgtaataaaaaagctaaatcagacaaacttatcgttcgtcgtcgtactaaataa

SEQ ID NO: 2416 - DNA, 402 bp, Enterococcus faecalis
tcgttagggttcattacgctaccacgaacagttgggcgtttacgcatccaacgagagcggccagctttaccaatgttgattaattcgtgttgttcgttaccaactgaaccgattgttgcacggcaagttgctaagatcatacgaacttcgccagagtttaagcggattaatacgtatttgccttctttaccaagtacttgcgcgcttgttccagctgaacggattaattgtccacctttaccaggtttcatttcaatgttgtggataactgtaccaactggaatgttttccaatggtaatgcgttacctactttaatatctgcttctggaccagatactaggcgcatgcctacttctaatccttttggtgctaagatgtatgccttaaccccgtcttcgtaa

SEQ ID NO: 2417 - DNA, 1491 bp, Enterococcus faecalis
ggtggtttaagacaattaaaggattcgcctatgattcagcttatgtcagctgcaccatttatgtttttaccaattctagttggtatttccgctgctaaacgttttggagcaaaccaatttctaggtgctgcaattggtatgattatgacaactccagaccttggtggagccactgaatattggaatatttttggataccatgttgcacaaacaaactatgcctaccaagtaattccggtattagcttccgtatatcttttgtcaatattggaaaaatattttcataaaaaacttccttcatctattgattttacattcacaccattattatccgtaataattactggattcttaactttcacagttattggtcccacaatgttattactatctaatggaatcacagatgctattgtttggttatataatgcaactgggttcataggaatggggatctttggtggaacatattcactcattgttatgactggtcttcatcagtcatttcctgcaatcgaaacacagttactttcagcatggacaaatggtatcggacatggggattttatctttgtagttgcttccatggcaaatgtagctcaaggtgctgcaacatttgctatttggtttttaactaaaaattctaaaacaaagagtctggcttcttctgctggattatcagcacttcttggtattactgaaccagcattgtttggagtaaacttaaaataccgtttcccgtttttctgtgctctaattggttcaggtattgctgcagcgataacaggtctacttaaagttgttgctgtatcactcggttcagctggatttcttgggttcctttcaatcaacgcaacttctatccccttttacttgctatgtgaattaataagtttttcagttacttttgcaattacttatttctatggtagaacaagatcttccagtatctttgcagcagaagcaattgctgaacaaacatcagttgatacttcagaaataaatacaaatcaaatagcaaatgctgatgaacctacaacagtagaaacgattgttagtcctcttgctggtgaaataactactcttggttcagttaatgacccagtattttcttcagaatctataggaaaagggattgctattaaaccaaatgggaacactatatattctccagtagatggtattgtccaagtcgtatttgaaactgggcacgcttatgacctcaaatcaaatactggtgctgaaatattaattcatgttggtattgacacagtatcattgaatggtaaaggattcactaaaaaagttggtgctaaacaaaaagtaaaaaagggagaggttcttggaacatttgacagcacagtaattacaaattcaggacttgatgatacaacaatggttattgtaacaaactctaaagattattcagaagttattcctataactaaaaatatagttactgaaggtgcagccttattgacaattaaatag

SEQ ID NO: 2418 - DNA, 213 bp, Enterococcus faecalis
agaccagtcataacaatgagtgaatatgttccaccaaagatccccattcctatgaacccagttgcattatataaccaaacaatagcatctgtgattccattagatagtaataacattgtgggaccaataactgtgaaagttaagaatccagtaattattacggataataatggtgtgaatgtaaaatcaatagatgaaggaagttttttatga

SEQ ID NO: 2419 - DNA, 270 bp, Enterococcus faecalis
aaggggatagaagttgcgttgattgaaaggaacccaagaaatccagctgaaccgagtgatacagcaacaactttaagtagacctgttatcgctgcagcaatacctgaaccaattagagcacagaaaaacgggaaacggtattttaagtttactccaaacaatgctggttcagtaataccaagaagtgctgataatccagcagaagaagccagactctttgttttagaatttttagttaaaaaccaaatagcaaatgttgcagcaccttga

SEQ ID NO: 2420 - DNA, 270 bp, Enterococcus faecalis
atgaaatataaagttgtatatatgccacaagcgcagaaacaattaaaaaaaatggatagaaatcaggcaagaataatagtagcttggattagaaaaaacttagaaggaactactgatcctcgtcaacatggaaaaggcttgactggaaatagaagtggtgaatggcgttacagaattggaaattatcgaatattggctaatatttgtgattcagaaattataatacaaatattttcaataggacataggagtactatctacaaaaaataa

SEQ ID NO: 2421 - DNA, 348 bp, Enterococcus faecalis
ttcatgttttattctatatattggagtaatcatcacatttataataacattgtattgacaaaatcccttgtttttaatacaatgttattacaaagtgcgaatggaggtaataagatgtctcaatcaacaattacatttagaattcctgaggatgagaaagaacttgtgttagaatatgcaaaagctcataattcttcattaactgaactttatcgaaaagctgtattagataaaattgaagatgaaattgatttaaaaaccttacggaacgcaatagaaatttccaaagagaaaaaagagattggtatttctcaagaggaaatggagaatttactaaatgaaatataa

SEQ ID NO: 2422 - DNA, 1203 bp, Enterococcus faecalis
cgacaaaaacatacccaggaggacttttacatgacccaagtacattttacactgaaaagcgaagagattcaaagcattattgaatattctgtaaaggatgacgtttctaaaaatattttaacaacggtatttaatcaactaatggaaaatcaacgaacagaatatattcaagcaaaagaatatgaacgaacagaaaaccgacaaagtcaacgaaatggctattatgagcgcagctttacgacacgtgtaggcacgctagaattaaaagtacccagaacacgtgatggccatttttcacccacagtgtttgaacgttatcaacgaaacgaaaaagccctcatggcttcaatgttggaaatgtatgtatcaggcgtttcaactcgtaaagtatcaaaaattgtggaagaactttgtggtaaatccgtctctaagtccttcgtttctagcttaacagaacagctagaacctatggttaacgagtggcagaatcgtttattatcagaaaaaaattatccttacttaatgaccgatgtactctatataaaagtacgagaagaaaatcgagtactctcaaaaagctgtcatatagcgattggaataaccaaagatggcgaccgtgaaattatcggcttcatgattcaaagtggcgaaagcgaagagacctggacaacattttttgaatacctaaaagaacgcggtttacaaggtacggaactcgttatttctgatgcgcacaaaggattagtctctgccattagaaaatccttcaccaacgtaagttggcaaagatgccaagttcacttcctaagaaatatctttaccaccattcctaaaaaaaattcaaaatctttcagagaagctgttaaaggaatttttaagttcacagatattaacttagcgcgtgaggctaaaaatcgattgattcatgattatatcgatcaaccaaaatattcaaaagcttgcgcatcattggatgatggattcgaagacgcctttcaatataccgtacaaggaaattcccacaatcgactaaagagtaccaatctaattgaacgactgaatcaagaagtacgcagaagagaaaagattattcgcatcttccccaatcaaacatcagccaatcgcttaattggagccgttcttatggacctacatgatgaatggatttattcttcaagaaaatacatcaattttgataagtag

SEQ ID NO: 2423 - DNA, 1815 bp, Enterococcus faecalis
gtagaaatggtaaaaacattgtatagcattttacacaggagtctggacttgacttgggatttagtgaatttttgtagctttcaatttttcctaaacgtcgtagcctatattgctaccttaagtatctccctgaccatcggattgaatctactggtacctttttacttaatttatacaaaatcatcgcaattcaaccccaaaggatactttatcaatttaatgacttttaccttttgccaatttctcccaattaaaatgacttttatccaacaatctaaagcatttttagccggattacttctttttttaatcgcagtgaaattctatagctttgtttctcaatattatgcaaaaagaacatctgaaaaaaatgagtttagctttttcgctgatttattgaattcatatggtaacgaacaagaatatcaagctaacttaaacaaattagccaaattgactcaacaattgtatttccaagcatatctttcttctagttctaaaaacaaaattactcctaaaactcgtattgcattcaactatgcctttttatcccaacgtgctctatatttttttacaaatattgataaattggtaaagccagattcaattattgaaaaatggatgacaagaatttctgatttttttgaaaagtccagtcagtttactacgatgtcagttattgaaaaaaatgagttgagaatacaagggaaaatacttataatttctttagaacactccgatgaagtagcactgatacttttaagacacctgcttattcacagtttatttatattacgtttattggataatgatccagaaataagcaataatcattggtcaacgcctctccatcaccagaccaaatatcttttccaacacaaatttagaattgattcatttgaattacgtgttgcactacgtttcagtatcgttctggctttctgtttttctttatgcacattgactcatattactcgtggaacttggttaccgatgaatgctttcttactgcttcaaccaatgaatgaagagactacttatcgcttaaagactcgttttttaggaaccatctttggatgtttgataagtatctacactgtgcagctctttagcaacaacttactccatctaattttggctagcttattagggatctgtgcctttacgataattccaggaactacatttcaagcaactttatcaactattttcgcattgttcctatcatcattagttatgtctaatttaatggccgctggattgcgctttgtttatgttttattagcttgttcattagtttttctcgtcaatcaattcattcttccaacaggcataaaaaatcaatttcgatttaatttacaagaactttttcatattcatcagactagtttaatattccttcaaaattcatttcatcacaagattgattatggcacaatcgctgacttacaaatgaattatcacttactccatggtgaaattaagaattatttcggcaaaagcgataaattgaaacagatatcctacaaagaatttttatctatatcttggcaaatgattactatagttgaacaacttttactacttattgacagtaaaaaaattacagaaaatgatattacagttattgaaaatacaattgactctctatgttacgtattgtctctaatccaaaacttgttagactgcaatttaaaaacattaaaaatacctgaagtactttttaaacgtgatttagcaattgatcctgaaatagcgtatctgctatttcaatactctaaaaaattatcagcaatgtatcgcctcgtactttga

SEQ ID NO: 2424 - DNA, 243 bp, Enterococcus faecalis
tttaccttttcaaaatctatcctttactcttttatctgtagtgctaatataaatgattgtagagatagtttgtatataaggatatttttgttcagcttaaaggagtttttactctatttaatgattactacatacaattatagaagtacaagtgataacaataagtctatacgcataggaaatagtcattcattagcaatgacttcccatttttttgctttttgtaatattaaaacgtattga

SEQ ID NO: 2425 - DNA, 924 bp, Enterococcus faecalis
aaaaggggacagatgatgaagataaaaatagaacgaaataaaaagaagatttcgggaaagaaaaaagaacaagttgtttcaatggggaagcatcgaaaaatggtgcttgtcctttggttattacttcttagtagtttatcctttggaatctacaaaaatttcaccgctattgatcaacatacaactcatgagaaagtggttgtgaaggaaaaaattgtgaatacctcaggtgtagaaaattttactgtagattttgccaaagaatatttctcttggaaaaatgatagagtagcaattgaaaaaagaatacgttctctagggcattatcttacaaaagatgtactagatttaagtcaagatatggttagagcagatataccaacaagttctaaggtgaactcagtgaaaattctaaatgttgagaaaaagtcaaaatggttcgtcgtatcatttttggtggatcaagaaatagtagaggaaaaaaaagctttacaagaaaaaacagcataccgaatttctgtttttgaagatagacttggaaattgtattgtgacttctttgccaacaatgattagtaaacctgttaaagcaaattataaaactaagcagtttacagatgattcgatgattaaagaaaagaacaaagaagaaattgaagaatttttagaggttctatttaaattatatccaacagcttctaaagaagaactaggatattatgtaaaaaaagatgtgttggagccaatttataagaatctaaagtttgttgaaattagcagtatcaattatcagaaaaaaggacaagcaataaagacaaatattttagttaaatatcttgatcctacatctaagattacatcaaaatttcaatacgttttaatattacaaaaagcaaaaaaatgggaagtcattgctaatgaatga

SEQ ID NO: 2426 - DNA, 795 bp, Enterococcus faecalis
caattatttcaggtagagtctgcggtaccgatggaagatgtgatgcaaagttctgaatcagcgggaatcccacctaactcgttaagcaccgaagcttcaatcaagcaagggtgcatttattttgcttccttagtcaatcgagcaaaggatatcggttgtgatcaagagagcatcattcaatcgtataactatggtggtggatatttagactatgttggaaaaaatggaaagaagtacagctttgccttagcggaatctttttcaaaagaaaaatcagatggggaaaaagtgacctattcgaatccaatcgctattaaggagaatggtggttggcgttataactatggaaatatgttttatgtaatgttagtgaaacaatatcttactacaacgaagtttgatgataaaaccgttcaaggaatttttgatgaagcttttaagtatgaagggacggcatatgtgttcggaggttcaagtccagcaacaggttttgattgtagcggattaacgcagtggtgttatgccaaagttggtttgcaacttcccagagtcgcgcaggatcagtatgatgctatgtctcatatcgagttgaaagatgctaagccaggagatttaattttctttcactcaacgtatgatgcaggaacttatgtgacacatgtaggtatctatgctggagacaatcggatgttccatgcaggtgatcccgttggatggactaatcttaccgaaacttattggcagcaacatatcattggtgctggtcggtataaaaatagaaaaggggacagatga

SEQ ID NO: 2427 - DNA, 291 bp, Enterococcus faecalis
tatggcatgacaatcaaaaagttaagtaccgttctattagttcttttaacggttttgtttatgggaattttgatttgtgtcggtctattatttggtgacgatagtgaaggaaaagccagtactggattgtcctctggagggagtaatgtttccttaggagttttaaagcatcgtccacttgtagagaagtatgctaaagattcggatattttagagtatgttccgatttttctaacaattatttcaggtagagtctgcggtaccgatggaagatgtgatgcaaagttctga

SEQ ID NO: 2428 - DNA, 2154 bp, Enterococcus faecalis
tactcgcccaccggttcaagagagaatggagtgaaggagatgaaaaggaaaattttacggattgtaggcattgttttgactagtctatttttcctcatcattcttttgagtttagttggaaaggtagcggaagcgactggattagtcgatgatacagtgaaagctggtaatctctattctcaatattctcttggtaactaccaactagatttttttgtagacaattcttgggactggctaccttggaactggggggatggtttaggaaaaagcgtgatgtatggtctctatgccatcacaaatttcatttggaccgtaagcttgtatttgtcgaatgccacgggttatgtggttcaagaagcttataaattggattttatttcagatacggcagaaagtatcgggaagaatattcaaactctagccgggattaacgaaaatggacttcagccatctggtttttattttggctttttgatgttaatgattttggttttaggcatttacgtagtctatacaggattacttaaacgggagactaccaaagcagtgcgagctgttattaattttgtagcgatttttctactttcgggttcctttatcgcctatgcccctaactacattacgaaaatcaatgactttagttcggatattagtgaatctgcattgagtcttggcactaagattgtcgtaccaaattctgaaagtcacggtaaagatagtgttgacttaattcgtgacagcttattctcaattcaagtccaacagccgtggctcttgttgcaatttgatgattccaatgtagaagaaattggcgaagagcgagttaataaaattctatccgtgagcccggatgaaaataaagggaaggatcgcgaggaggcggttaaagccgaaattgaagacaatgaaaatgcaaatttgagtataacaaagaccatgagccgattagggaccgtggtttttttagtattgtttaatattggaatttccttctttgtctttctattgacaggaataatgctattttcccaaattcttttcattatctttgcgatgtttctcccaattagtttcctgttgtccatgttaccgacctatgaaagtttgggaaagaaagcgattgttcgcttatttaacacgattatgatgcgagcgggagtgacattggtcatcacgacagcatttagtatctctacgatgtttttcaatatttcagcaacctatccgttctttatggtagcatttctacaaattgtaacctttgccgggatttatttcaaattaggcgacattatgagtatgttcaatctccaaagtaacgatagtcagtctatgagtaggcgtgtgatgcgaaaacctcaaatgttaatgaaccgtaaatttcgtcaactcaatcgaaatgttggccgagcgttggcttttgatggcggtgtagcagttgcaggtaaattagcaactgattctacaaaagaaaacagaggttcaaaaagcaaaagattatctaatcgaagaaaccaatcgatacaaagtaatcatgagcaaaatactgatccgaagaaacaagaaaagactactaatagtagaaccactcgattgaatcttatgggtaggaaagctggaaaggcaatggattcaaaatctatcgtgaaggacaaagtaaaacaagcaaaagaccatgtaattgatacgccaacaaatttgaaatataacctgcatagaggaattgaaaaggcgaaaaatgccccaggggaatttaaacgcgggcttgtgcaggagaaaaaagaacgagaagaacaaagaaaagctaatcaccaacaacggcagaaaagaatggatgaaaaacgccaagtgttagggaaccggagaacttcttttttaaaacgtcgaactaatgtttcagctaatacctttccaaattctaaagatcattcttcacttagtcaacgtcaagtagcaaaagatttccataatgtctcggttttacaaaatagacaaaaggattccctacaaaccatttatcctaagattgcaccgaagatgatgagtatcaaaaaaatgaaaaatcaatccactctaacgaaaaatggaaagaagcaatatcaaaagaattctataaaccgggagaaggtaaagacaggtgatatggcatga

SEQ ID NO: 2429 - DNA, 336 bp, Enterococcus faecalis
agattaccagctttcactgtatcatcgactaatccagtcgcttccgctacctttccaactaaactcaaaagaatgatgaggaaaaatagactagtcaaaacaatgcctacaatccgtaaaattttccttttcatctccttcactccattctctcttgaaccggtgggcgagtatcaaaggcatggaagagttcttcaaagaccgggtgaacctgaaccacacctacccgaccatacaaatcctgcatcaagcattggccgttttccaaatctcgtaggcgtttttgattactttcatcttcttgatccaacccaaaaaattccaaagtcttcttga

SEQ ID NO: 2430 - DNA, 249 bp, Enterococcus faecalis
agaataatatcgggattgaaatttgcttttcgtagtaccgatattcatgaaatcaagaagactttggaattttttgggttggatcaagaagatgaaagtaatcaaaaacgcctacgagatttggaaaacggccaatgcttgatgcaggatttgtatggtcgggtaggtgtggttcaggttcacccggtctttgaagaactcttccatgcctttgatactcgcccaccggttcaagagagaatggagtga

SEQ ID NO: 2431 - DNA, 1275 bp, Enterococcus faecalis
ggacttttgaataaatttggttcgcaacgccatatgacagcgattagaaaaggattaattgcaacgatgcctttaacaattgtgggctcattctttacaatttttcaaaatattccaattgaggcatacacaaaattgattgaaccttatcaagcaattttagatattccttcccgctatacgatggggttacttgcactttatgcaacatttgggattgcttcatcattggccaaaagttataagcttgactctttgacgtgcggaattttagcattaatggcctttttagtaacagcggcaccaccaacacgtgtctttgaagatgttgacaacgtcattacagcagggcgctatattaatttagcaaatttaggttcagcttctttatttggtgcgattgtaacagcgctgttatctgttgaaatttatcgcttctttattgaaaaagatattatgattaagatgccagatggcgtaccgcctgaagtgtcaaattcatttattgcgttaattccaggagcagttattcttttattattctgggttattcgccacgtaattggttttgatttgaatggtttcttgagtacgttattaatgccacttaaaggtatccttgctggtaacagtttatttggcggcttactaacagtcttcttaatctgtttcttctgggttttagggattcatggtccagcgattatgggcccagttattcgtcctttctgggatatgtcgattgcagaaaaccttgaagcttttaccaatggcgcaaacgttcatcagttacctaatatttttacagaacagtttttacaatggtttatctggattggtggcgctggaactacgctttctttagttgttttaatgatgttttctaaatcaacgtatctgaaaagtcttggccgtttatcgttcttaccaggcttgtttaatattaatgaaccagttatttttggaacgcctatcgtaatgaatcctattttaggtattccgtttatcgtggcaccgttaattaccacaacgttatcttatttcttaacagtcgctaatataattccgatgatggctgcacgcttagcgtttgcaattccagcaccaattgctgcttggatgagtaccaattggagtttctcggccgcagtattagtgattgttaacttcttaattacaatggctatctactatccatttttcaaagtttatgaaaaacaacaattggataaagaagcagaagaattagcagctgaacaagcagcaaaaaattaa

SEQ ID NO: 2432 - DNA, 1107 bp, Enterococcus faecalis
cggagtgtgagaacgaagatgaaaagagcattaggtgtatcagtttatccagatcatagtgatatcaatcaagataaagcgtatttaaaaaaagccagcgaatgtgggtttactcgaatttttatgagtatgttagaagtgaccgatggcaaagaagcggttcagaaaaaatttaaagaattaattagttatgcgaaaaatttaggatttgaaacaattttagatgtcgttccaagtatctttgatgaattggaaatttcatatgatgatttgacttttttcagcgaattaggagctgatgggattcggttggatacagggtttgatggaaataaagaagccatgttgacgtttaatccattcggcgtggctattgagttgaatatgagtaatgatgtcgcttatcttgataacattttgacgtatgaagcgaatcgacctttcttatatggttgtcataacttttatccacaagcgggaactgcattgccgtatgatttctttgaaaaatgtagcatccgttttaaaaaggaaggtattcggacagctgcttttatttcatcacaggtaggtgaaattggtccttgggatgtgaatgatgggctacctactttagaaatgcataaacagttgccagtcactgttcaagctaaacatttatttgcaacaaatttaattgatgatgttgttattggaaatgcttatgcttccaacgaagaattagaagcattgggtcagttgaatcgttatcaaacagaattgaccattgtttttgaagaagcgacttctgaaattgaaaaagaaatcgtaacaaaaaatcaacattttcgccgtggagatatcactcagcagatgattcgttccacagaagtgcgtaaaaaatataaaaatgaagttaatcccccacatgataatcaagcaatgctacaacctggagatgttgttgtgggaaatgatgcatttggaaaatacaaaaatgaattacaagtcgttttagaaccacatcaagactcacgcaaaaaccgagtagggcgtattatagaagaagaacttgtattattagaattcattaagccttggacaaaatttagatttatagaaaagtag

SEQ ID NO: 2433 - DNA, 1065 bp, Enterococcus faecalis
atttatagaaaagtagggaagaatatggactacgatttacttataaaaaatggacagacagtagatggtatgcctgttgaaattgcaattaaagagaaaaaaatagctgctgttgcagcaactatttcaggttctgcaaaagaaactatccacttagaaccaggtacttatgtatccgcaggctggatagatgatcacgttcattgttttgaaaaaatggctctttattatgattatccagatgaaattggggtcaaaaagggtgttacgacagtgattgatgctgggacaacaggtgctgaaaacattcatgaattttatgacttagcgcagcaagcaaaaacaaatgtttttggattagtcaatatttctaaatggggcatcgttgctcaggacgaactcgcagatttaagtaaagtacaagcgagtttagtcaaaaaagcgattcaagaattaccagattttgttgtagggattaaagcccgtatgagtaggaccgttattggcgataacggcattacgcctttagaattggccaaacagattcagcaagagaaccaagaaattcccttaatggttcacattggatcagcaccgcctcatttagatgaaattttagccttgatggaaaaaggggatgtcctaacccattgttttaatgggaaagaaaatggtatcttagaccaagcaacggataaaataaaagatttcgcttggcaagcgtacaacaaaggagtcgtatttgatattgggcatggtacggatagtttcaattttcacgtagctgaaacagcgttgcgcgagggaatgaaagctgcatcaattagcacagatatctacatccgtaaccgagaaaatggtcctgtttatgatttagccacaacgatggaaaaactccgtgtggtcggctatgattggccagaaattattgaaaaggtaaccaaggctcctgctgagaatttccatttcacgcaaaaaggcacgttggaaataggtaaagatgctgatttaacgattttcacgattcaagcagaagaaaaaacattgactgattctaatggatag

SEQ ID NO: 2434 - DNA, 1155 bp, Enterococcus faecalis
ccaaagagcaaattcgcccaatcaaaacaattattggaggacaaatctatgacaattagttacgaaaaattccacttaaaagaagtcattaatgcttctggcaaaatgaccattctaggtgtctccaaagtttcggaggcagtcctagcagctcaacgattcggcggcgaacatttctttgaaatgagtgaacttagtgtgcaaacaggggcctttttagccaacttgttgaaggtagaagatgcccaaatcgtttcctcggcttcggcggggattgcccaatcggtggctgccttgattggaaaaggcagcttgtaccacgcgtatcatccctatacagaaaaaatcgaacagcgggagattgttttacctaaagggcacaacgtggactacggcacgcctgtagaagtcatggtagcgcaaggtggcggccaagtggtggaagctggctacgccaacatgtgcagtccagaacacgtggaaatgatgatttctgaaaaaacagcggccattctatacatcaaaagccaccataccgtgcaaaaaagtatgctgacggtggccgaagcggccaaagtggcgcaacgccacaaggtgccgctaattgttgacgcggcagcagaagaagatcttttcaaatacactgaagcaggcgctgatttggtgatttacagcggcgccaaagcaattgaagggccaagtgccggtttagtggtcgggaaaaaagaatacattgactgggtgcgcctacaaggcaaaggcattggtcgagcaatgaaaattggcaaagacaatatcttgggctttacgcaagcagtggaagaatacttggcacatggcagtgaatcaggggcttcgatgcaagagcgcttaaaaccgtttgttgaagccatcaacaacttatcagatttaaccgccaaaatcgtccaagatggcgctggccgagacatttatcgcgccagtgtcaaagtggacggcagaaaaaccgctaaggaagtcatccaagcattaaaagcagaaagtccagccatttatacgcgagaatatcaagccaacaatggcatcattgaatttgacattcgttctgtcaatcaagaagaaatgaacaaaatcgtgcaacgattacaagaaattatggacaaaaaggagaaataa

SEQ ID NO: 2435 - DNA, 747 bp, Enterococcus faecalis
gtcatgtcattaaaacctaattatttagaagaacgcatttgtttaaacgtcttagccaattcagtagaaaatgcccaagcctgttatgaagcagcagaagggcatgttgtgttaggcgtcctttcaaaaaactatgaaaccgatgaagcagctattgacgacatgaaaaaataccaagcagcaaccaacaacgctttatctgtcggcttaggggctggcgatcctaatcaaagtcaaatggtggctcgcttatcagaagttctacaaccgcaacacgtgaaccaagtcttcacaggtgtcggcgcttcgcgggccttacttcgtcaagacgaaacagtgattaatggcttggtttcacccacaggcaaagttggctatgtcaacattgcgacaggtccgttaagctctggtgcgccagcggcggaagtgcctatcgaaaccgccatcaaattgttgaaagacatggggggcagttccattaaatatttcccgatgaaaggcttggctcacaaagaagaataccaagcagtagcagcagcttgtgccaagtatgacttttatttagagccaacaggaggcattgatttagaaaactttgaagaaattgttcagattgcggtggatgccggcgttaaaaaaatcattcctcatgtctacagctcaattatcgatcaagaaacaggggacactagaacagaagacgtgaaaacgttactaaccatgatgaaaaacacattgaataagtag

SEQ ID NO: 2436 - DNA, 1020 bp, Enterococcus faecalis
gtggcaaagatgaaaattgctgcgtttggtgaagtcatgcttcgtttcactccgccagagtatctaatgttagaacaaacagagcagttaagaatgaactttgtagggactggcgtaaatctcttagcaaatttggctcattttcaactagaaacagcattgattacgaaattacctgccaatcgtcttggtgaagctggcaaagcagcgctaaggaagttaggaatttcagatcaatgggtaggagaaaagggcgatcatattggtagtttttttgcagaaatgggttatggaatccgccccacacaagtaacttatcaaaatcgccatcagagtgcttttggcatcagcgaggcgaaggactacgattttgaggcctttttagcggaagtagatatggtgcatatttgtggtatttcgttaagtttaactgaaaaaactcgtgatgctgctttgatacttgctcaaaaggcgcatgcctatcaaaagaaagtttgttttgactttaattatcgacctagtttgaatacagcaaatagcgcactctttatgcgtcaacagtacgaacgcattttaccttattgtgatattgtttttggcagtcgacgtgatttggtcgagctattgggtttcattccgcgagaagatttagaaggtgaggcacaagaaactgaactgattcagcgtttcatgtctcaatacaatttggaatggtttgctgggacaacgagaagtcattcccaaaatcaaaactacttaagtgggtatttatatacccaaaatgagtaccaacagagtgaaaaaagaccgcttcttaatcttgatcgaattggtgctggtgatgcttatgcggcggggattttatatggctatagccaaaattggtcgttagaaaaggcagttacctttgccacagtcaatggggtccttgcacatacgattcaaggagatattcctttgacaacggtcaaacaagtgaatcacgttcttgagcatccgaatattgatttaattcgttaa

SEQ ID NO: 2437 - DNA, 189 bp, Enterococcus faecalis
attcatcattttctaaaactgttaaaagatgtgcaacactcatcctgctgcctcctttgcaatctgtttcttttaattataatgaaaaaaagaccagaagaaaagccacacacgacttttcttctggttttcttctttaacgaattaaatcaatattcggatgctcaagaacgtgattcacttgtttga

SEQ ID NO: 2438 - DNA, 1062 bp, Enterococcus faecalis
ttaaaagaaacagattgcaaaggaggcagcaggatgagtgttgcacatcttttaacagttttagaaaatgatgaatttattgaacggattcaaaaacgaccagaagcgttcattggaacgactggcttagtcggcttagagaatttacttgttcagacaattaacggtttattagagtttttcattgaaaagaatcaagggaaaattgctatacagttatcgcgtcaacaaatctcttttcaggtatcttccacacgaccgcttgtttttgaacaaaagcaagtcgatttagaaccaccttttctgtatttatctgttttacaagccttctcaaaacaagtagggatcagtatcgatcaagaaaaacagcgaactatttttatttaccatcaagggcaattgaaaaaacgattattattacctattgaagaaacccaggaacgaattgaagtcttgttttggccagatacgcaaatttttggtacagaatcactttcttatatgcgtgttttacaacaatgtcaacagattgccatgttgaatccaggcttaaagattctcttaacacaagaagaggaacaaaaaaatctttgttattaccctaaaggtttaagtaattatttatttgaaaaagataacccattaactagaaaagctgcaccgattattcaagccaagcaaacagaattggcccttgttcaatttattttgagtaaaaatcatgcgccgcaagtgcaaaaaacatttgttaatgggcattatcccagtcttggtggaacccactatgagggctttcttgatggtgtagtggccgcctttaatcaatttttagaggagcaacattattcattatctgtgacagcagatagttttttagcagaatttgattttgttttagccattacgataccaaagccccgctacactgatgcaacgaaaaccattttaagaaatacagagttatatgaagtggttaaagaagtcgtttttgacgaattacaacactattttcaacgtcatcccaaatggttagagcaaggaagaatcgagggaaatgaatga

SEQ ID NO: 2439 - DNA, 447 bp, Enterococcus faecalis
atgaaaatttttgtcgatggcgatggttcacctgtgaaagagacggttattgaagtcgctgtagagaaagctttggatgtggtgattgttactagtgtagatcattattccttaaaagattatccagaaaatgtctcttttgtgtatgttgataaaggagcggatgctgctgattttaaaattgtgcagttaataaaaaaaggggatcttttaattacacaagattatggcttagcttccttggttttgccaaaaggagtgttggttttacatcaactgggttatcaatatacgaaagaaaatattgatggcttgttagaacaacgctattttagtggccaaattcggcgaaaaggtggccgaacgaaaggacctaaaccttttacagaccaagatagaacaacgtttaaacaagcccttattgagctggtgaaacggagtctttag

SEQ ID NO: 2440 - DNA, 894 bp, Enterococcus faecalis
gaggacaagcatttgaagattattttgttgtatggcggcagaagtgaagagcacgatgtgtctgttttgtctgcatattccgttttaaatgcaatctattataaatattatcaagtacagttagtctttattagtaaagacggtcaatgggtaaaaggccctcttttatctgaacgaccacaaaataaagaagttttacatttaacttgggcacaaacacctgaagaaacaggcgaattttcaggaaaacgaatcagtccttcggaaatttatgaagaagaagcgattgttttccctgttttacatgggccaaatggtgaagatggaacaattcaaggattcatggaaaccattaatatgccttatgtaggcgcgggtgtcttagctagtgctaacgcaatggacaaaatcatgacgaaatatcttttacaaactgttggcattccacaagtaccattcgtgccagttttaagaagtgactggaaaggaaatccaaaagaagtctttgaaaaatgtgaaggttctttaatttatccggtctttgttaaacctgccaatatgggttctagtgtcggaattagcaaagtggaaaatcgtgaagaattgcaagaagcattggaagaagctttccgttatgatgcccgagcaattgttgaacaagggatcgaagcacgtgaaattgaagtagccattttaggaaatgaagatgtccgtacgactttacctggtgaagtggtgaaagatgtcgctttctatgattatgatgcaaaatacatcaattacacgattgaaatgcaaatcccagcgcatgttccagaagaagtagctcatcaagcgcaagaatacgccaaaacagcgtatcttatgataggacttggcccacgggatggcacc

SEQ ID NO: 2441 - DNA, 1170 bp, Enterococcus faecalis
agagaagaagtgggaagaatgattattcaaagtaaaaacgtatggattaacgaacaatttcaaccagctcaagttgaagtgtcagaacaacgaattgttgcaattctaccgtacaatgaaaaagctgtcgacaaagaatacggagaaaagcgcattcttccaggatttattgatattcacgatcatggttggcatggtggggatgccaatcatgccaatcatgaatttatcaaagagtggcaagcttaccttccagaagaagggattacagcttttttgccaacaacgtcaacaacatttccaaaagacttggaacattcatttgaagtgattggttcatttattgaggaagaccaaggaaccaacggagcacaaatcttagggattcatgcggaaggaccaatgatttctgaagaatttcgtggctctcataatccagagttattagtaaaaccatccgttgagacatttaaaaaatggcaagagttagcaaaagggcacataaaattaatgacgttggcaccagaaaatgatgtagagaatgccttgactacatattgtcatgaacatgatgtagtcatttcaattggccatacggctgcaacctatgaacaagcaatggcagctgtcgaagcaggtgcaaaaagttttacccatacgtttaatggaatggaagatatcagtcaccggaaaccaaccgcagtagttgctgctttggatagtgaagaaacgtttgctgaaattattgctgatggggtacatgttgattattcattagtacgtgtgttagccaaactaaaaggcaaggactatttaattgctgtgacagattctatctgggccaaagggtgtcaaccaggcgtttatccaaaaccagaaaaagggatcgaaatggttattgatgaacaaaatgtggtccgtttagccaatggcaagttagctggaagtacgaaccatttaaataatatggttcgcaaccttgttgaaaaagcattacttccagaagtgattgctattaattcagtcacgaaaaatccagctcgtttgttgaatgtgaacgaatctatgggagaaatcaaactagggcttttaggtaattttacaattattgatgagaaatatgaagtgctagaaaccttagtaaatggtgaaacagtttataaaaagtag

SEQ ID NO: 2442 - DNA, 798 bp, Enterococcus faecalis
acgaagtctaataggaggaaaaaaatgttagtacaggcaattttggtaggaatttgggctgggatagcaggggttgataagcttgtcttacagacacatattcatcgtccgattgttacagggctgattgttggtttaatattgggagatgtcaacacagggttaatcactggagcaacgctagagttagtttggattggtgcagtagcaatcggcggtgcacaaccacctaacgtagtaattgggggagttattggaacagcgttagcaattatcacaaaatctgacccacaagtgaccgtaggtttggctgttcctttcgcagttgcagcgcaagcgttaattaccttgttatatacagcgatgtcaccaattatgcataaatttgatgtttatgcaaaaaaagcagatacaaggggcatcgaaagaatgtctagttttttaccaatcgttttattcatttgttatttttttgtagtatttttatgtattttctttggtgctgataaagcctctagtttcatttctattctacccgaatggagtattcatggcttgagcgttgcaggtgggatgatgccagcagtaggtttcgccatgttattaaaaacgatgtgggaaacatcctacgtgccgttctttatttttgggtttgttatggctgcctatttagggttagatacattagcggttgcaggtttagctgtcgcaattgctttatatgaattttacgcacaaagaaataatacagtcactgcatcaaataataatggagggtttgaagaagatggcatctga

SEQ ID NO: 2443 - DNA, 903 bp, Enterococcus faecalis
ctgtcgcaattgctttatatgaattttacgcacaaagaaataatacagtcactgcatcaaataataatggagggtttgaagaagatggcatctgaagaaacatataatgatatgatatccgaaaaagtaataacaaaaaaagagttaaaaaaaataatgttccgttcgtatctgctacaatcttcatttaattatgaaagaatgcaagcaggcggctggacctactcattaattccaggattgaaaaagattcatcgtgataaagaagacttagctctttctttggaaaatcatttacaatttatgaacacgaatccacaattagtgacgttcatgcatggtgtgattattgcaatggaagagtcaaaagaatcaccaaaatccattcaagcgattaaaacagcgttgatgggcccgttaggcggaattggggatgcgctattttatttaaccgttttgccgattgcagcagcgattggttcacaactatcattagaaggcaatatcttaggaccaattgttttcttgttgttatttaatattccgtatatggctgccaaaattgggttaattaatctaggttataaaatgggtgtcaaagcaatttcagttttaagcgaaagtactaaaaaattatctcgttcagcaacaattgtaggaatttccgtggtgggcgcgttgattccgaagagtgtacaattaacgacaacttttgtttttcgcttgaaagacactaagttagaccttcaaacacaattgtttgatacaatcatgcccaatttattacctttagtgtttacgctgttttgttttattatgttgaaaaaaggacgcacgccgattgctttaattatttttactgtgatttttgggttgttaggttctttaatcgggattatataa

SEQ ID NO: 2444 - DNA, 285 bp, Enterococcus faecalis
aagaaattatttatcatccaacaggtgctaaatacgacttcaagtgggcgtataaagaataatcactcgattaaatttagaaaaagatttggaacaatagcgattttggctattgttccaaatcttttttatataatcccgattaaagaacctaacaacccaaaaatcacagtaaaaataattaaagcaatcggcgtgcgtccttttttcaacataataaaacaaaacagcgtaaacactaaaggtaataaattgggcatgattgtatcaaacaattgtgtttga

SEQ ID NO: 2445 - DNA, 1671 bp, Enterococcus faecalis
aaaggagcgtgtcaaatgaagaaatctgttttatttacttcattacttgtattatcaagcttagctttagcggcctgcggcggtggcagtgacgataaaggagctagcaacggcggcagcgacaaccaagtatacacaatggttgaatcccaagaaatgcctagtgccgatccgtcccttgcgacagatgaagtgagttttaccactttaaataatgtctacgaaggaatctatcgtttagataaagacaacaaacccgcgcctgctggtgcagccgaaaaagcgactgtttcagaagacggtttagtttacaaagttaaattacgtgaagaatcaaaatggtctgatggcaaaccagttactgctgcagattacgtttacggttggcaacgaacagtggatcctgccactgcttcagaatatgcctacatgtttgaaccagtaaaaaatgctgaaaaaatttctaaaggggaactacctaaagaagaattgggcattaaagcaatcaatgatcatgaattagaaatcactctagaaacagcaacaccatattttgacgatttattggctttcccttctttcttgccgcaacgtcaagatatcgttgaacgttttggtaaagattatacaaagagtagcgataaagcagtctacaatggtccctttacgctaactgagtttgatggtcccggaacagatactaaatggtctctaactaaaaatgaagaatattgggacaaagagacggtcaagttagataaagtcgctatcaacgtggtgaaagaagccccaactgccttaaatctttatgaaactggtgaagtggatgatacgtatttatctggcgaactggctcaacaaatgcaaaactcgcctgacttggtccaattaaaagccgcttcttctttctatttagaaatgaatcaagcagatgaaaaatcaccattgactaatgcaaacttacgtcgtgctatgtcttatgccatcgatcgcgattcattagctaaaaatattttagctaatggctctcttccttcacaaggcttcgttcctgtggatgtcgcgaaatcaccaaaaacgggtgaagactttgttaaagaagccggcagcgacaaattagtcaaatacgacaagaaaaaagctgtggaatactggaacaaagcgaaacaagaacttggtgtttccaacttaacggttgatttaatggtagacgactctgaaggcgctaaaaaaatgggcgaatatcttcaaggatcactatctgatactttggaaggcttaaaagtaactgtgacgcctgtccctatggctgttcgcttagatcgtaccttaaaaggggatttccaaatcgctgttcgtggttggagtgccgactattcagacccaattaacttcttagatttattagaaagctcaacttctaataaccgtggacgttacagcaatcctgaatacgataaattcattgctgcgtccaaaaccacagatgttaacgatcctgaaaaacgctgggaagatctaatcaacgctgaaaaaacagtaattgctgatatgggtgttgtgccaatttaccaaaaagcagaatcacacttacgtgcaccaaacgtgaaagaaattatttatcatccaacaggtgctaaatacgacttcaagtgggcgtataaagaataa

SEQ ID NO: 2446 - DNA, 444 bp, Enterococcus faecalis
aaaactttttttatttctcagcggccccttctctatggtaaaataagagtgatactgacaaaagtaatagtaagcagaaaccgaccaagggaggtcatacaaatgaacgaagaaaatgagttgacatactttaaaggcggcttagcgctaggcgttggtcttggtttagtaggcggcattgcctcaaccttgttctaccataagaaaaaaacaatctccgctgatctcgtcttagaaaatgtaaaagctgcttttttaaaagaaggaccgattgaaggttcgtggattgagtttgagaaaaagcccttgcggaaattcgccatccactccaaaacgtatactggaggaatttgccgcattgaagacgacggcattgttcaatacgaattcactgcagatgcctacacaggaactatcattgacattcaacgattaaaagattaa

SEQ ID NO: 2447 - DNA, 1128 bp, Enterococcus faecalis
cgcttggttggcgtaatttccaacaaatcaaaagcaataggacatacatctatggaagaaaaaacatttcaacgaatcaaggaattaactgaattacaaggaaccagcggatttgaagacgacattcgcgcgtacatgaaagaacatatcaccccattagtggacgatgtccaatatgatggtttaggtggtatttttgggattaaacgttcaaaagtggaagcagcgccacgcgtaatggtagcagctcacatggacgaagttggcttcatgttaactcaaattaacgataatggtttattccaagtggttcctttaggtggctggaatccctatgttgtttcagcacaacgttttacgttaaaaacaagtaaagggaactatccatgtatttcttcatctattccgccacacttgttgcgtggtacgagtggtcaaaaacaattagaagtctctgatgtgttatttgatgcaggattctcttcaaaagaagaagctgaaagctttggcgttcgtccaggggattccattgttccacaaacagaaacgattaaaacagccaatggcaaaaatattatcagtaaatcatgggataaccgctatggttgtacgttggtattagatgcattggaaacgttacaaaatgaagaattaggccacacattaattgctggagcaaacgtacaagaagaagttggtttacgtggttctaaaccatctgttcataaatttaatccagatatcttctttgcggtggattgttcagcggcagatgatattcacacgaaaaaagggacgtatggtcatttaggtgaaggaacgttattacggattttcgacccaggtttgatcacattgcctcgcttacgtgaatatttattagatacagcagcgacacacaatattccgtatcaatattttgtttctaaaggcggaacggatgctggggcagcgcacacaactaataacggtgtaccaagtacagtcatcggcgtttgtggtcgttacatccatacgcatcaaacaatgtttagtattgcggattatgaagcagcgcgggaaatgttgttacaagcattacgtggcttggataaatcaacagttaatacaattgtttacggaaagtag

SEQ ID NO: 2448 - DNA, 315 bp, Enterococcus faecalis
atgatttatcccaattcattagaagaactagcaacttatgttgaaaaaggtaaaaatgttttcttctttactgctgattggtgcggagactgtcgtttcattaaaccagtcatgcctgaaattgaagaagcatttccagcgtttcaatttatcgaagtcgaccgtgatcagtttattgacgtggctgccgagtggaatatttttggtattccgagttttgtcgtaattgaaaacggtcaagagttaggacgcttagtaaataaagaccgaaaaacaaaagaagaaatcagtgcatttttaactagcttaggctaa

SEQ ID NO: 2449 - DNA, 501 bp, Enterococcus faecalis
tcaaagaagccttttagatcagcctccatcgggaaggtgacgaaaatggaagaacaaatgtataaaaatattcttgtcggcgtagacggtagtgatcaagccaatttagcttatgaacgtgcaattgaggttgctcgtcgaaacggaagccgagtcattgttgcaaatattttagaaaatcaagtgtatacaatgatggggtattcgacgttaaatgatcaattaattgatcaagaaacagccgctgcggaagaattaatggccgattgtaaaaagtatgctgaaagcgttgattttcataatgttgaaacagttaccatgtatggttcacccaaagaagtcatgagtcatgaattacctgaaaaatacaatgttgatttaattatggtgggacaatcaggattaaacgcagtcgaacgtgtggtcatgggaagcgtcagtagctacattattcgtcaagccccttgcgatgtcttaattgttcactctgaagaaaaataa

SEQ ID NO: 2450 - DNA, 618 bp, Enterococcus faecalis
gaacgattgatgaccatttacggagtgagccgagtaaccgttcgtaatgcgattaaactattagttgatgacaatatgttaattaaacggcatggaaaatggacatttgtttcaatgccatcctatgttgaaagcatgacagctggtgggagttttactgagtcaggtttaaaaatgaatcgtaaaccaacaactaagatcatatcaatttgtttgaaaaaagcaacagggcatgttgcagaagcattgggtgttgaaaaagcgacagaagttattgttattgagcgcctccgttcgttagataacatgcctgcaattttcgagattgattattttagaaaagaagatcagtttatgttggacttagaattaacagatacttcattattagatattttacggcaatatagaggagtaattgctagctattttgataatatcattgaaattgccttggccgatgaaaagttggcagaagcattagcgattagtgaagaagaagcgttggtcaaaattaatcaaacagttgtggataatgataatcaaattttatattttaatgagcaatatatccttagcgaatcctacaaagtagccattcgttcatataataaataa

SEQ ID NO: 2451 - DNA, 429 bp, Enterococcus faecalis
ataaaggaggtttatgaaatgagaaggttttacattgcttcacatggtgatttttctaaggggattaaacactcgttagaaatgattgcgggacactctgcagctgccgttcatacatatagtctgtatccaggtgaaagtgcagttgatttttttggagagttaaaaaagaaagccgaacaagcgccagaagatgaatttatcctcatgggtgatttatttggtgcaagtgtggttacagctatgatggggctaactgtacttgaaaatgtaatcgttttctctggcgttaatttgaatttggcactagagcttatgctagcaggttcagaaaaattaacagatgaaaagattcaggtaattattcgaaatgcacgacaaggaattcaacgcgttcatatcgaagagatagaaaatgatgatttctag

SEQ ID NO: 2452 - DNA, 552 bp, Enterococcus faecalis
tttctaggaggggtattaatgaagaaaaaagctgattttttagagctgtttgctgttgaaaaaccaattattggggtgattcatttaaaaggtaaaacagatcaagagattcaagagcgagcaaaaaaagagattcaaatttacagtgaacatggggtagatgcaattttgatggagaactattatggggattatgttcagctagaaaaagcgctccaatatgttacttcattagatttaccgattcctattggtgtaaatgtgttaaatgttgacccattaggttttcatttagccaataaatatcatttacaatttttacagattgattctgtggttggtcatgtgaaaccgcgggatgaagcatccttacaagctttttttgatttatatcgtgcaaaaacaacagcaaaattaattggtggcgtgcgcttcaaatatcaaccaatgttgtctgaaaaatcagtcgaagaagatttgaaaattgcacagcaacgttgtgatgctattgcagtgacagaaaatgcaacgggtgaagagacatcactataa

SEQ ID NO: 2453 - DNA, 210 bp, Enterococcus faecalis
aagattaagttgtttagaaaacaattacctgagtttccattaattgtcgcagcggggttaaatgacaagagtgtgaaagaacaattggcgatttgcgatgcagcaattgtagggagtaacttcaaagatacaagaaaagatacgggagatatttatgctccttatgttgattcgtttatgaaaattgtgaaagaactgagaggtgaataa

SEQ ID NO: 2454 - DNA, 480 bp, Enterococcus faecalis
ataaggatgattaaaatgacaagagtggaccatcggttgattcatggtcaggtcgggtttacttggacaaaatttttagaagcagattgtattttgattgctagtaatacgttggttgaggatccattaagaatgagcgctatgaaaatggcaaaaccttcaggtgttaaattagttatgaaaacgattgatgattcaattaaggcgttaaattctggggtgacagataaatataaactatttattttatgtgaatcagttgctgatatgtatcaattggtcaaagaagtgccaacaattaaggaagttaatttaggtggaatgaaaaatggggaaacgcgcaaacaaatttcaaaagctgttcatttatcagaaactgacattgcacaaattaaagaactaactaatgaaggaatcgaattaaccgttcaattagtccctgacgatcaaaaggttgctataaacaagttattaaattaa

SEQ ID NO: 2455 - DNA, 771 bp, Enterococcus faecalis
atggaagtgacatttatcaaggttctattaatgtttttaattgccttttttgcctacatgcatagctggtttggttcaacgatgtggaaccgtccaattgttgtcgctccgctagtagggttagctttaggagacttagatacgggaattaagcttggcgcaacattagagttggtatttatgggtgcatttcctgttggcgcaagtaatccaccagattttgtttcaggaacgattattgcaacagcttatgtaattatgagtgggcaatcaatttctagtgcggttgttttagctgttccaatcgctacattagtacttttaatcgataatcttcagatgacatttttacttacaggcgctagccatttagctgataaggaagcaaaacgaggcaatattcaaggggtagagcgaattcaactaattgcaggagttggcaataaagttttgttagctctaattgtggcattaggcttttacttaggcgtgccgtttattgaaaaggtattgtcttatgtcccagactttattacgcatggattagatattgcggcaggtattattccagcaattggttttgcgatgttagcaagaatgatggtaacaaaaaagatgattccatttctattattaggctttttattcgctgcttatttaaaaatttcagtagtggggattgctttgtttggcatcgtgattgtcctactatatatgaatatgagtgatggtcaaacaagggaggctgttgtcgatgacaatgaattctaa

SEQ ID NO: 2456 - DNA, 855 bp, Enterococcus faecalis
gtgatggtcaaacaagggaggctgttgtcgatgacaatgaattctaaaaacacaaaatctgtcattactaaaaaagatttttggtctgtattttttcgctctttaacgttagatgcatcatggaattatgagcggatgcaaaatttagcttatgcttatgcaatggctccaattatacgtaggttgtataaaaataatgaagagaagaaagcggccttagaacgacatttagagtttatgtctgtcaccccgcatatctctaccttattattaggaatttctggagcaatggaagaagaaaatgctaaaaatcatgaatttaactcagctagtattaatgcagtgaaaactagtttaatgggaccaatgtctgggattggggattctttcttttgggggaccttaaaagttatcgcaacaggtgtagctatttcattgtctaaacaaggaaatatttttggtccgattgcctttttactgattatcaatattccgcattttgctttacggtatatctgtttggataaagggtttaaattaggtgctaaattttttagtgatgttgaagatagcggcgtaatcgaaaaagttaccacagctgcctctattttagggttaatggttattggtgggatgacggcttctaatgtcgtgtttgagttaactgccaaagttggctctggaaaaatcgccacgccattacaagaatatatcgaccaaatcatgttaggttttttcccggctttattcttcttagttatttactggttattagggaaaaaagtgaaaacaacgacacttttagttggggttattctattatctatttttttggcagcattagggattgcctaa

SEQ ID NO: 2457 - DNA, 261 bp, Enterococcus faecalis
ctttcaaatttaggaggaacagaaatgatttttgcatataacaaagaacacgttggcgatgtcttacttgtcatcgttgcggacgatcaaggggcggaaaaccaagtaaaacgtgtcggcgatgtggcacgtgtaagtttagttgaggcgccagaaacagtggtagcttggaatattttcaatgcttcagcgcttctaggtgacattaatggcaccggccacagtgactttaacaggcgcacaaatcgaaaatgtgcatag

SEQ ID NO: 2458 - DNA, 561 bp, Enterococcus faecalis
atcggtcaacattaccaacatgaaacggaaatagtttacgtggatactgataatcaattattagggaaacaagcgacggaatttttaattgaaaacgcccataaaaatattttatttgtgaccaatacaacgcatgaaagtttgtactatgaacgttactttggccatcaaaaagcaatgatgatgcaaggattaactgttttaccaagcgttgcgttagaaaaacctgaagattacatggcttttgatgacattcttcatcaaaataatgccacggcgttggtggtgattgatgatatctttgctttgcggacgatgcaacttgcgcaaatctatggttatcaagttcctgaaacgttatccattattagttttaacaactcaatcttttcaacattgacacatccttatctaacaagcattgacattgacacgtcagaattaggtcgaatggcgatgaaaaaattatatgaattaatccacgaagaattgacaaatggtgtccgtctcgttattcctcacaaattaattaagcgtgaaacagttattcctattcattaa

SEQ ID NO: 2459 - DNA, 1356 bp, Enterococcus faecalis
taccccccccaagggaagggtgcgattagtattgttcgtttaagtggcgagcaagcagttgctattgcaaacaaagtttatcggtcaggcactaaagatttagctaaagtccccacgcacacgattcattatggtcatattgttgatccgcaaaacgatcaattgattgatgaagtcatgctttctgtgatgcgggcaccgaaaacatttacacgagaagacgtggtagaaattaactgtcatggcggcattgtcgtggtgaaccaattattgcaattactgttacgtgaaggcgcacgaatggccgaacctggggaatttacaaaacgtgcttttctaaatggccgaatggatctttcacaagcagaagcagtgatggacttaatccgtgccaaaacggataaagcgatgaatgttgcattgaaccaattggatggtaacttgtcgacgttaattcgttcattaagacaagaaattttaaatactttagcacaagtagaagttaatatcgattatccagagtatgatgatgtcgaagaattaaccacgaaattacttttagaaaaagccgaatttgtgaaagcgcagattcaacaattattaacgaccgctaaacaaggaaaaattttgcgagaaggcctaagtacagcaattattggccgaccaaatgtcgggaaatccagtttgttaaaccatctgttacgagaagaaaaagctatcgttacagatattgctggaacgacacgtgatgtcattgaagaatacgttaacgttcgcggcgttcctttaaaattaattgatacagcggggattcgcgaaacagaagacattgtggaacgaattggtgtcgaacgtagccgcaaagcgttagcagattcggatttaattttgttagtcttaaatcaaagcgaagaattgacagaggaagatcgtcaactgttggaagcaacgaaaggcttaaaacgcgttattcttttaaataaaatggacttaccgacaaaactggatcctaacgaattacaagaattagtccctgcagaagaaattttatccgtttcggtgttgtcaaacacaggcttagaccagttagaagcgaaaattgctgatcttttctttggcggccaaacaggcgaaaaagatgctacctatatttctaatacacgtcatattgctttgctggatcaagcagcgctttcgttacaagaagtgattaacggcatcgaagcaggtatgccagtcgatttagttcaaattgatatgacccgttgttgggattatttaggggaaatcgtcggcgatagtgtccaagatgaattaattacacagttatttagtcaattttgtttaggaaaataa

SEQ ID NO: 2460 - DNA, 1926 bp, Enterococcus faecalis
gaaaataagacaagagaggaattttttatgaatcaatatcaagcagaatcatatgatgttattgtcgtcggtgctggacatgctggctctgaagcagccttagcagccgcacgaatgggcgttaaaacgttacttttaacgattaatttagatatggttgcttttatgccatgtaacccttctgttggtggacctgccaaaggagtcgttgtccgagaaatcgatgcattaggcggcgaaatgggtaaaaacattgataaaacctacatccaaatgcggatgctaaatactggtaaaggtccagcagtgcgtgcgttgcgcgcgcaagctgacaaacatgcctatgcgacagaaatgaaacataccattgaaaaagaagaaaatttaacccttcgtcaagggattgttgaagaattaatcgtggaagatggcgtttgtcgtggtgttgtaacttcaacaggtgccgcataccgtagtcaagcagtggtgattactgccggtactgccttgcgtggcgaaattattattggtgaattaaaatattcatcaggaccaaacaattcgcaaccttccgttggtttagccaatcatttaaaagaattaggtttagaaatcgatcgctttaaaacaggaacgccgccacgagtaaaatcaagtacgattgattattctgtgacagaggaacaaccaggcgataaagaacccaaccactttagttacagcacgccagatagtgcctacaatcaaaaccaagagccttgttggttaacttatacgaatgaaacaacgcatgaaattattcaaaaaaatctacaccgcgccccaatgtttactgggattgtggaaggtgtgggcgctcggtattgtccatccatcgaggacaaaattgttcgttttgcagacaaaccaagacaccaattgttcttggaaccagaagggttgaataccgaagaagtttacgtccaaggcttatctacttctttaccagaagatgtccaaacagaaatgcttcattctattgaaggattagaaaaagtagaaatgatgcgtacaggttacgccattgaatacgatgtggtagtccctcaccaattacgcccaacattagaaacaaaggtcattgaaaatctttatacagcaggtcaaacgaacggaactagtggctacgaagaagctgcgggtcaaggcttgatggcaggaattaatgctgcattgaaaattcaaggcaaagagcctcttgttttaaaacgtagtgatggctatattggcgtcatgattgacgatttagttacaaaaggcactaacgaaccttatcgcttattaacgtcacgtgcggagtatcgtttgattttacgacatgacaatgcggacttacgtttaacagaaatgggtcatgaaattggcttagtcaaagaagaacaatatgccgcctatctagtcaaaaaagcggctgttgaagcggaaattgcccgcttaggcaaacatcggattaaaccaaccaaagaagtgcaagcatttttggaaactaaaggcgctgctggcttaaaagatggtattttagctagagattttctgaaacgcccagaaatcagttatcaagaagtcgctcaatttattcccgcacctgaagaggcgctcgatccgaaagtaattgaacaagtagaaattcaaatcaagtacgaaggctacattaaaaaagccatggaaaaagttgagaaactaaaacgcatggaagcaaaacgcattccagaaaacattgattaccaagcgattaacggcttggcgacagaagcaaaacaaaaactacaaaaaatccaaccagaaacgattgcccaagcaagccgtatcagcggtgtgaaccccgctgacattagcattttgatggtctacatcgaacaaggaaaaatcgcgaaagtgcaaggataa

SEQ ID NO: 2461 - DNA, 831 bp, Enterococcus faecalis
aagcgcaaacaaatgataggagtggaacaaatgacagattggttaggaattaaaggaaaagtagtgattgttacaggaggctcatctggtattggtcacagcattgttgaaagcttgttagcacaagaggtctatgtcgctaattttgatatttcagcatcagaaacgcaacatgagcatttactctttgtgaaagtcgatgtaacttctcgagcagaagtagaagcaggtgtcgctcaagtggttgaaaaatttggaaccgtagatggcctagtaaacaatgccggcatcaatattccacgtctattggtggataaaaatcatcctcatgggccttatgaattatcggatgaggtattcgacaaaattgtagccatcaatcaaaaagggctctacctaatgagccaagcagtgggccggattcttgtacaaaaacaagcaggtgtcattattaatatgtcttcagaagctggattagaaggctccgaagggcaaagtgcttacgctgcaacgaaagcagcggtcagcagttatacacgttcatgggctaaagagttaggaaaatcaaacgtccgtgtcgtggggattgcgccaggtattatggaagaaacgggcttgcgcactttagcatacgaagaagcattggcttatacacgaaatatttctgttgagcaattgcgagcaggttattcaaaaacaagtacgattccattaggtcgtagcggaaaactccatgaagtcgctgacttagtatgctattatttatcagaccgttcaagctatattacaggcatcaccacaaacgtagctggaggtaaaacaagaggatag

SEQ ID NO: 2462 - DNA, 1863 bp, Enterococcus faecalis
atgacgctagtaaatagatggtaccaagtaataaaattactagttgatcacaaaggaatgagcttacaggaattgcaagagaaattagccgcaagtcctcaaacagttcgtaaaaacattgatacattgaatgatgaattaatcggtatcgcccaaattattcagaaggaaaatctctttcagttagaaatcaataactttgaaggttttgaagaggttttgtctggacggctaaaaagggaatctgattttaattcttcaagcaagcgtgtttcctacattatcaaacgattaatagaagaagatcaatttatttcaacttatgatttatccgaagaactcgccgttagtcgcggcacagttaataaagacattaagcgcatgaaagagctgattgctccttggcaggttgcggttgtaggcacgccaaaccgtggcattcatttagaaggaaaagagtttgatttacgcttacttcatgtgaattacgtccaagaatattttgaagaacagtttcttcatgaaactaccaaacaaatgatacaaaaaataatcaaagaaacaagactagcgaaacaagatagttttcttttacgaagagtggtttcaattgttttgcagcgtgttttagctggaaaactcattacggaactaccaccagaatatgttgattatgttcgtcataacgagcagattgaagaactgatgtatcacttggaaataacctataatgtaacgttaagccaatgggaacgttcctttatcagctttccttttaacatcaacacaaaccatattcgtaattctttattggctgatgaaggactcttagctgactattttcaaaaaatgatgaaaaaaattcatcattcagttgttgttgaatttgatgaggacttcttgttttcagaaatgaaagatcatttaagaaacgtgatgaatcgactcgtttttcatgtggagtgtcacgatttattttacggagaaattgaacgacaatatcctttggcctatgaattagccaagattggcttgcaagaattgggccgtttgttaaatcgttgtgtgccgacggttgaatttgggtatctcgctttgtattttgaactagcattgagagggaactatgaagcgggagccaaaaaagaaatcgctgtaatctgcagtacaggtcatggaacggccttgatcattcagcggcaattggaaaaagttttgggtccagacgtccagattgcccatttttctgaagaagaggcagagagaagagaattgaatcaatattttgctatttttacaaccattcccttaaaaaatattcgaccacaaacaccgatgatccatttaactaatttatttaacgatacttggctcagaaatgagtggcagagagcaaaagaaattcgttccgtggaatctcaaaatattcatatgacctatcaattattagagaatactcaaggttaccgagcgaatatccagaaaatggttgctgatttagaagcagaaaaattagtagatccccaatttatcgaacgaatttttactagagaagatcaacaaacaactatttttgaatcggggattgcctttccccatacaattaatcaagccttaccaacgattattttatcgattggggtttttgaagaatcactggttacaccagaaggtaaagttgatgttattttgctgttgggtattccagaagagctgacggccactgttgaagcagagttactacaactatatgaccgcttgtttacaatcgcaggagacgaacgtttacgtaatgagttacggaagcaacgagatgttttagcggttaaagagtggatgcaaaggaaggggattatcatatga

SEQ ID NO: 2463 - DNA, 516 bp, Enterococcus faecalis
agagtggatgcaaaggaaggggattatcatatgagttttatctacgtattcggggcgctttttttaacagcttacttcgttcagatagctatgggaatgaaacagattaaacactttaatcaaaactaccaagaattgcgacaattagggaaagtcgcgattggtcgacgtgcatggaagttaaaagcaggcacgattatcttgtttgctgtggattcgcaagggaaaatcttagccgctagaaagatgcaaggtgtcaccgttctagctaaatttcatcccttacctcagtacgtgaacgaggatattcattatatggatcattaccatccactcgtacaaaaggaaaataaattaacccaacaagcgatggaaaatgcacgagaaatttacttacgtgttgagcttggcaattatcaagaaacacaaccattaacgccgcttaatggagccaaaattcaatggcaattatggaaaaataaagtacaaacaaaattgaaaggaagtgtcgagtaa

SEQ ID NO: 2464 - DNA, 588 bp, Enterococcus faecalis
agtacaaacaaaattgaaaggaagtgtcgagtaatgtcttatattacaaaatttgcggaaggatttatgcaccttttccaaacaggagcagaaacatttatttcttggatgacaggcatcgtacctgttgttttgatgttaatggtagctatgaatactttaattgcttttctaggagaagaaagagtaaccaaagtagccaaactttctgccaaaaatcctgttacgcggtatttagtgctgccttttttatccgcttttatgttaggcaatccaatgtcctttacgatggcacgatttttaccagaatactataaacctagctattatgctgcacaagcgcaattttgtcataccagtaatggggttttccctcatattaatcctggtgaattgttcgtttggttagggattgcgcaagggattgatacgttaggactaaattcgatggacctagcgattcgctatatgtttgtagggatattaatgaattttattggcggttgggttaccgatttcactaccgcctatgtttgcaaacaacaaggaattacccttagtaaaacagtagagattgctgtggattag

SEQ ID NO: 2465 - DNA, 1029 bp, Enterococcus faecalis
agattgctgtggattagaaaggagcaaggtgagatgacgtacaatagtattaaggtagttaaaggaaatggcggttatggtgggcccttagtgattacaccgacagaagaaaaacataaatttatttacattacaggtggcggcgagaaacccgcaatcgttgataaaatcgtagaattgacaggaatggaagcggtcaatggttttaagacatcgattccagatgatgaaatcgcattagccattattgattgtggaggcactcttcgttgcggaatttatcctaaaaaaggaattcctactattaacgttgttccaactggcaaaagtggtcccttagcacaatacattaatgagacaatttatgtttccgctgtaggcccgaaacagattacattgacatcagaagaagcttctgctgatacagaaaagcccacctcgaaaaaaacagaatttaaatatgatacaagtaaaaaaattactgaacaaaaagcggaacaacaaagttttgttgcaaaaattggtatgggtgcaggaaaagttgtagcgacattcaaccaatcagcccgtgaaggcgtacaaacgatgatcaacacagtgattccgtttatggcatttgtttctttattaattggtgtgattcaaggttcaggaattggtgaattttttgccaatatcatggcgccattggcaggaaacattgtggggttaacaattattggttttatttgttctctgccgtttctttctcctttattaggtcctggagcagtaatcagccaagtaattggtacgttaattggtgtggaaattgggaaaggcaacattccgccacaactagccttaccagcattgtttgctattaatacacaaaacgcgtgcgactttattcccgtgggtttaggcttggaagaagctgaagctgaaaccgttgaagtcggggtcccttctgttttatattctcgtttcttaaatggtgcccctcgagtactagttgcttggttagcaagttttggattgtatagttaa

SEQ ID NO: 2466 - DNA, 381 bp, Enterococcus faecalis
aaaattttttttggaggatgggaaatgtcagtatttacaacaaaggttcagtctattggaccagaagccgaattatttaaagaagaaaaaatggtcatcttatttggaaaagatgcaccagatgctttagcagattattgttataacattgaggttcagccagtcacagaagcgattacggacaagcaaacgttagtgattgatgaacaaacttaccagattaccgctgtaggcgaggtagtattaactaatttagacacattgggtcacattactattaaatttgatggcgcaacaacacctgaattaccaggtacattatacgttgaagaaaaagctattcctgaaataactgttggtacaacaatcactattctataa

SEQ ID NO: 2467 - DNA, 681 bp, Enterococcus faecalis
aagatggaatttatgctagatacaattaatcttgaggctattcgaaagtatcagaaaattttaccactggcaggcgtaacgtctaatcccagtattgttaaacaagcaggaaaaattgacttctttgcgcagatgaaagaaatcaaaaaaacgattggacaagcgagtttgcacgtccaagtggtcggtcaaacgacagaagagatgctagaagatgcccaaaccattgtacaacaattaggccaagaaacattcattaaaatcccagtcaatgaagcaggcttggcagccatcaaacaactaaagcaggcaaattatcggataacagcaaccgctatttatacagaatttcaaggttatctagcgattgcggcaggtgcagattatttagcgccatattataataggatggagaatttaacaattgattctcaaaaggttattgagcatttagctgcagaaattaaacggacgaacgcaaagagtaagatcttagctgctagttttaaaaacgtggcacaaattaatcaagcctgtcaaatgggggcgcaagcggtcactatcgcaccagaactcgtgacacaaggcttggcaatgcccgccattcaaaaagcagtaactgattttcaggaagattgggttgctgtttttggagtagaaacggtaaacgaattagcataa

SEQ ID NO: 2468 - DNA, 204 bp, Enterococcus faecalis
aaagaacgagaagaaaaagcggccatttttcttctcgttctttttttgtttcacatgaaacatctacgattattcacttgcttaaaaattagacaattttctttatttgtcaaagaatttcttaaaaaaaagggttatcttttgggtattttttttggtagcagtatgatgagggtatcaaatgataggaggaaacgagaatga

SEQ ID NO: 2469 - DNA, 873 bp, Enterococcus faecalis
gatacacaaatggaaattatgaagcatttgcctcgaccaagaaaaccaaaaggtgtagatgacaagagtgcctatatcgttggtggtggcctagcaggtttagcaacggctgttttcttaattcgtgacggtcaaatgaagggcgaaaatattcacatttttgaagaactcacgctgtctggcggttctttagatggtaaatttattccccatgatggctttgtcactcgcggcggacgcgaaatggaaaaccatttcgagtgtttgtgggatctatttcgttcggtaccatcattagaagtagaagatgcctctgtcctagatgagttttaccggttagatttagatgatccgaattcttcaaattgccgcattattcataaccgtggcgaacgtgtccccgatgatggacaatttactttatccaaaaaagcacaaaaagaaatcgttgatttatttatgacttctgaagatcaattaattggcaaaaaaattgaagatgttttcggcgaagaattttttgaatccaacttttggatctattggtgttcaatgtttgcttttgaaaaatggcactctgccattgaaatgcgccgttacatcatgcgctttatccaccacatcaaaggtttgcctgactttacagccttgaagtttaccaaatacaatcaatacgaatcgttagtgaaaccattattaagctttttaaccaatcaaggggtagactttcaatatgaaacaacgatcaatgatatccaagtcgacatcaaaggagctactaaagttgctcggcgattattgttgacacaagcgggcaaaaccaaagcaattcctttaactgaaaaagatgacggtgtctcaccaatggggtaa

SEQ ID NO: 2470 - DNA, 252 bp, Enterococcus faecalis
tctaaagagataacgttattagatgtccggacacctagcgaataccgcgcagggcatattccacaagcgattaatgtcccacttaacaaaattcccgcctacaacaaatccgctaacgaagtctatgtgatttgccagtccggcatgcgcagcaaaaatgcggccaaaattttagcgagaaaaaactatcacgtgattaatgttcgtggcgggatgtcccaatggtctggtcaaattaaaggaggaaaataa

SEQ ID NO: 2471 - DNA, 1650 bp, Enterococcus faecalis
atgaaaattgtaattatcggaggcgtggctggtggtatgtcagcagcgacacgtttacgtcgtttaatggaagatgctgaaattgttgtcatggaaaaaggcccttttgtttcatttgcaaactgtggtttgccttactacgtttctggcgaaatcgcagaaagagagcaactgcttgttcaaacacccgaagcgttaaaggcacggtttaatttagatgttcgtcctcaccatgaagtcgtggctattgatccaatagaaaaagtgatcacagtgaaacatgaaacagaaattttaacagaacactatgacaaattaattttatcaccaggggcgaaaccttttgtgccaccaattacaggattggcagaagccaaaaatgttttttcattaagaaatgttcctgatttagatcaaattatgacagccttgacaccagaaacaaaacgagccgtcgtgattggcgcaggcttcattggcttggaaatggcagaaaacttgcaaaaacgcggattagaagtcactctcgtggaaaaagcgcctcatgttttaccgccattagacgaagaaatggccgcttttgtcaaagctgaattaagcaaaaacaatgttcaagtaattacgggacaatctgcggttgcttttgaagaagaagggcaagtgattcgcttagaagacggtcaaacattagcttctgatttaaccattttgtcggtgggggtccaaccagaaaataccttagcagttgaagcaggtgtagcaactggtttacgtggcggtattgttgttgatgaacactatcaaacgaatcaacccgatatttatgcggttggggatgctattgtagtgaaacaacaaatcactcaagaagatgcgctgatttctttagcttctcccgccaatcgccaaggacgtcaagtagcggatgtgattgctgggttagagagaaaaaatcaaggaagcattgggaccgccattgtgcgagtctttgatttaaccgctgcttcaactggtttaagcgaacgggctgctaaagctgctggactaacaacagctgttgtgcatatcagtggaaaagaccatgcggggtattatcctggcgcaacagatcttcagttaaaattagttttccatcctacgacaggggaaatttatggcgcacaaggaattggggcaaagggcgtagataagcggattgatattcttgcgaccgctattaaaggacagttaactatttttgatttgcctgaattagagtttacctatgcgccgccgtttggttcagcgaaagatcctgtgaacatgttaggctatgcagcgatgaaccttgtagaaggattgagtgaaaacgttcaatggtatgagttatccaacgaattagctaatggagctgttttattagatgtccgtaatcccgccgaacgagccaatggtcaatttaaaaatgctgtgtctattcctttaaatgagttaagagaacgtttggaggaattagacaagtcaacggagtacattgttagttgtcacagtggtttgcgtagttatattgcagaacggatgctaaaacaagcaggcatctcagccaaaaatttagatggtgcttttgcgctatatcgaatggtaaaaccggaggaactagaaaatgtataa

SEQ ID NO: 2472 - DNA, 303 bp, Enterococcus faecalis
aaaatgtataacacgattggcatgcctgaattttatcaggaagcaaaacgaaaaaaattaccgattattgatgtacgagaagaaatggaataccaactggggcatgtccctcaggccatcaacttacctttaagtactttaaccgaaaattatcagcaattagataaaaaccaaccctattatctgatttgtcaaatggggtcgcgctccgcacaagcgtgtgcgtttctcagtcaacaagggtatcaagtaaccaatgttctaggtggtacatctggctggttgggtcaattagaacaataa

SEQ ID NO: 2473 - DNA, 1167 bp, Enterococcus faecalis
atgaaaaagtcaggccagaagaagcgaaataaaaaagtgtggttcggtattggtgccgcagtggtcgtcgtcggatttatcggagcaaaaacagttttttcttcaaaagaagttgaacctgaatacacaacgtataccattacagaaatggcctcattaaaattagatggtcaagtgagttttctagatactcgggatattttctttgatccttctttaggaaaaattgccgaaataaatgttgaaaatggtaaagaagtcaagaaagatagtccattgttaacgtacaataactcagacatccaagccacagaaacagaacaagcgaatgctgttaatcggaacaatcttcaagttcaacaagcacaagagaacgttaacttagccactcaaaaatacaatgaagcgttaaacaaagttgctgcagccaagcaaaaattaaacaccgcaaaagaggctgaagagaaagaaacactaaatgcggaaattcagcaattgaatgaagccgttagtgctgcgaatagtgaagtcgcccaagctaaccaagcccttcaattagccaacagtgatgccgtcggagcagcaaacacgcttgaacaaacacgtggcaaagtcaacacagtcgttacagcaccaattgatggccaagtcactgttgatgctagtgccatgagtagtaccgacaaaccagtcattaaaattgcaacacaaaagaaaaatattcaaggaaaagtaaccgagtatgattacgataaattacagacaggggaagaagtaacagtgacgaccgttggttcaggtaaatcagcaccaggcaaaattgtttccattgcgcaaaccccaatagctaaaaatgaaggcaatccagtagtgagttatcaatttacagtagaaggtgattttccttgggcagaaggcttgtctactagtatcgctgtgccacaaaagcaaatgattataccgacagcagcaatccaaaaagaaggccaaaaagaatttgtctatgtttacaaagcgggcaaagcgaaaaaaacaccgattgaaacagaaacaaatttaggtcgtaaagttgtcaaaagtggcttgaattggaaagaccaagtgattgccaatcccaataaagaattaaaagataatcaagatgttcaggtagctgccaatgattaa

SEQ ID NO: 2474 - DNA, 681 bp, Enterococcus faecalis
ctgccaatgattaagctagcccatattcataaatattattattccgaagaagaaacactgcatgtgttagatgatattaacctccaagtagacgctggagaatttttagcgattatgggtccttctggttctgggaaatcgactttgattaatttgctaggctttattgataaaaagtttgaaggaacgtatttatttgaagaccgtgaaattggcgacttttctgataaggaactatcccgaattagaaatgaagcagtcggctttgtctttcagaattttagtttaattgaaacactaacagttgaagaaaacattgaattacctcttttatatagtgggttaaccccaaaagaagccaaagatcgtgtccacgaagttctgacaaaagtcggcttgccagataaaggcaagaagcatccaaaacaactttcgggcggacaacaacaacgtgttgccattgcgcgtgcgattgtcaatcggccaagttttattattgcagatgaaccaactggggctttagatagtaaaacatcggaagaaattttaacgctctttcagcaattaaacaatgaaggtgtcaccattattttagtgacacatgatgaagaaacaattgaatactgcaatcgtttgattaaagttcgtgatggaaagattttagaggaggtgctgacatga

SEQ ID NO: 2475 - DNA, 1236 bp, Enterococcus faecalis
tggaaagattttagaggaggtgctgacatgaaacgttcaattatttggaaaaccgccttccgttccattttgaaaaataagcgacgcagcttgttaacgatgctagggattgtcatcgggatcgcttcggtgattaccatcgtggctatcggtaacggctttaaagaagacatggtcgataaattatctgctgaaaaacaaaaagaaaatgtgaaaaagatttctttttcggcctacaacacttcggatatgtttagtgaccaagcgatgtttaccgacaatgatttaggggtcgtgcgcatggttcctggcgtagaaaaaattgattttgatcaaagagaagttgatggcgcccaaaaaggtacactgaattttcaagcaggaccgaaaaatctttctgtaacctatgaacttgccaacaaaaccaccaaagaattgttggcgggacgccaactgaatgatggagacaatgcaaaactggataaaacagtggtggtggatgaactggttgccaaagaactctaccaagactcgactgcagcagttaatcgaacttttccatataaagagcaactttttaccattgttggcgtgacaaccaataccagcggtgccattggtccaggtaatgatgactcattgctttattttcccaaaaagacctatgaacattatttcggcaagctaaaagatacatctacgttgaaactaacagtagcacctggctatcaaccagatcaagtattgaaagaaacaataaaaactctctctcaacaaggaaccatgaaaaacagtgggacgtatcaagaatataatgttaaagataccatcaaagaaatgggctctttattaaataatttaaccttgtttatttccgcaattgcggctatttcactggtaattgctggggtcggcgttatgaatatgatgtacatttcggtctcagaacggattaaggaaattggtatccgacgtgcattgggcgggacagccagtgatattaaaaagcaattcttaacagaagggattgccttgaccttaatcggcggaattactggttatcttttaggaatgattattgcctacttagcctcaatggcactaccgttttctgttcgaccagatttaatgaccgtttcattagccattgggatttctgtctttatcggggttgtatttagctatttccctgcctcggcagcttcaaaaaaagacttgatcgatattatgaaataa

SEQ ID NO: 2476 - DNA, 765 bp, Enterococcus faecalis
attttaattcgaaaaatttccagtatactaaatatatcaaaacaaaacacgaaaattgagaaaattttgaaccaaaaaagaattaaggaggaatcaagaatgaaaataatggtcatcacaaaaaatattttatcagaaactgcttttcaaaaccgcttacagcatttagatcaccaagttttttgtacgacgtgtctgattggtgaaattaaggaaagtcatttgttttatcgaaaatttgatgccatcattctcagcgaaacgattcctcgcaaagaacaatatttatatctaaaggaattagccagagttaaaacgccgttgtttcttcgctcggaagacattcctacctcggaagaattgagcattagctatcaatatggcattctcaattggttacgattggatgcgactttggatacgttaagagaaaatctccttttggcagaattaaataaacccatccaacgagaagatgaaaagttagatgtagagggaataaagctaacagccgcagaacgtgcactactggctgtcttgtatagtacgccaaaagaacacttaccaatggagcgcctgtgtaaattaatatatgacacagaagaaacagccaataatcgaaaaaaaatgaccaaacagctgacaaaattaaataaaaaaattcaagtagggagctttaaaaaacaaggtatccaaaatacacggtataaaggctacaaactgcatccgcagttgcttccttacattggcgaattatttacttaa

SEQ ID NO: 2477 - DNA, 315 bp, Enterococcus faecalis
tataggaggtgggtctgtatgaaagacggactatattgggtacaacaattaaaagaacagaaagtaagtcgcatagaactcttaaaggatattgagaaaaaagtccaaaagttaaatccaaagatcaatggctttgtaacctttgatagccaagaagcagaagcaacttatcaaaaaaataaacagcaggacacactatttgctggtttgccatttccattgaaaatgttaggccaagaaaaagcggggtggtcagcaacggccggctcgcaactttttaaaaagacttttgcaacaagaatcttcaggggggag

SEQ ID NO: 2478 - DNA, 585 bp, Enterococcus faecalis
gcaaaccttgttaggataagaagtagatgcataaagagaaaggaagttgctgaagtgagtaaaaaagaagagaagcaagaagaattacaagaagaaatggaagctgttgatgctgctggcgtttctgaagtagaagttgaagcaacagagattgaaaatcttaaagcagagctttccgaaatggaagacaagttcttgcgggcaagagccgaaattgctaatatgagcaatcgaaataaaaacgaacgagaattattagttcgttaccgctcacaagatttaggtaaaaagattttaccatctattgataatttagaacgagcaatggctattgaagtatcagatgaacaaggcgaaagcttgaaaaaaggtatttcgatggtgctaggaagtattactgtggctttaaaagaagaaggaattgaagaaatcccagcaatgggtgaaacctttgatccaaatttacatcaagccgttcaaacagtccctgcttctgaagaaaccccagcagataccattgttgaagttctacaaaaagggtacaaattacaagctcgtgtgttaagacgtccaaagtgcccgtaa

SEQ ID NO: 2479 - DNA, 1059 bp, Enterococcus faecalis
agggtggtaatacggttgttaacagaaagacaaccaaatattttgagacttatcatccaaaattacacgaacacgggcttacctgtcggttctaagaaattgatggaggatggcattgcctctagttctgccacaattcgtaatgatatgaaagcattagaggaatacggcttattagctaagacccattcttcttcagggcgaatcccctcaatggctggttatcgttactacgtggatcatcttttacaaccaacacaagtagaagagaacgaacttagaagaatccgtcaatcttttggaaaagaatttcatgagattaatgatattattcgacaatcagctgaaattctatcagaattgacaagttatactgctttttcattaggacctgaagtgaaagaacggaaattaaccggctttcgaatggttcctttgaatgatcggcaagtccttgctattatagtgacagataaaggcaatgttgaaaaccaagtatttgccattcctgccgctgtttctagccaagatcttgaaaaaatgacacaaatcatcaatgataagttggttggacaacctttgttgaccgtttatcatcgtttgcggacggagattccgatgattttacatcgctatttccaaacaccagaaggaatgatgaacttattcgatgagatgttaggacatgcctttgaagaaaaagtctttgtcggtggtcgcatgaatttgttagattttggcatcaaacaagatattgaacaattgaaatctgtctattcctttatgcaaaattctgatgagctgacgcatttattaaatggttctgcaacaacagaaaatccaattgtttttcgtatcggctcagaaattggcaacaatctcttagaagatatgagcatgatcactgctacgtatgaagtatcaggacatggcaaaggaacaattgccctgctaggaccaaccagtatgccgtattcaaaaatattcggtttggtagacacgtttcgacatgagctagcttcacaactaggtgactattaccgttttttaggtaattaa

SEQ ID NO: 2480 - DNA, 1194 bp, Enterococcus faecalis
aacgagctaatgaccaaaacaaaccaactttcaacttcaacgccgatgttcgatcggtcggcctatattcatattccattttgtgagcatatttgttattattgcgattttaacaaggtctttttagaaggacaaccagttgatgaatatattcagagtttattaaaagaaattcaacttacgcaagcattgtatccagaacaagaaatgaaaaccatctatattggcggaggcacgccaacttcattatcagcgaaacagttagatgtgctactaaaaggggttcgcgaacagctaacgtttgatgaccgaaatgaatttacggtggaagcaaaccctggtgatttaacccaagaaaaattacaagtcatgaaaaactatggcgtcaatcgtctttcgatgggcgttcagacatttgatgatcgcttgctcaaaaaaatcggtcgcaagcacaccgccgcagatgtttatgaaacaatgaaatttttagagaaagaaaattttaccaatgtcagtattgacttaatctatgctttacctggacaaacattggaaagttttcgcgatactttgacaagagccttagcattggacttgccgcactattcgctttattcattaattcttgaaaataaaacaatgttcatgaactgggttcgtcaaggacggttacagctgcctgaagaagaaatcgaagcacaaatgtttgacgaaacgattgaagcaatggagaaaaaaggacgtcaccaatatgaagtcagtaattttgctttaacaggaaaagaaagccagcataatctggcttattggaataatgaccactactatggatttggcgcaggtgccagcggctatcttgggcaaactcgttacaaaaatcacggtccaatccaacattatttgaaacccttgcgagaaaatcaattgccaattgtggagactgaagaattaactcgtctaaatcaaatagaagaagagctatttttaggcttacgtaaaaaagtaggcatttctaaacaaaaattccaacaaaaatttcaggaaccaattgaagcaatttatggagaggtcattcaacgcttaatcaaagaagaattattaattgaagaagcagatatcttacgtttaacgaaaaaagggctatttgtggggaataatgtttttgaagcatttttgttaagtgaaaaagagtaa

SEQ ID NO: 2481 - DNA, 2667 bp, Enterococcus faecalis
aagaaaatggaaaagaaaatgcgtcacttgggccatgactatagttacaaaaagtttgcccattcagaagtagaaaaagttttacaacgttttggctcaacttgggatggcattaaacaccaagatattgaagaattacaagaacgttatggccgcaataaaattatgaatgaaaaaaaagcttcgcggctgcgactttttataaaatcgtatatcacgccgtttactttggtgttactagcactagccacgatttcattttttacagaatatgtctatgctgcgccagaggaaaaagatgttactggcgtgttaattatgttagcgatggtcatcttaagcggcacgatgagttttgtccaatcagtcaaatcaagcaatgcagttgaaaaattacaaaatatgattaaagttacagcgacagtcattcgtgacaagaagcaaatggaaattcctattgaggaagttgtgtgtggcgacttagtccaactatccgctggcgatatgattccagccgatttacgtttaatccaatctaaggacttatttgtttcccaatcatccttgactggagagagttttcccattgaaaaacacgcgactcatcaaaaagatagtgatcaaattgatacagaatacgacaatcttttgtttttaggaacaaatgtaattagtggcactggtttgggcattgtcattaaagttggtaatcaaactttattcggaaggatggcttctgataacggagaagagcagcagcagacgagttttgaaacaggaattaataaaacaacgtgggtgctgattcgctttatgttggtcattacgccaactgtttttctaattaatgggttaacaaaaggtgattgggcggaagcgttaatgtttgcgattgccacagctgtcggcttgacaccagaaatgttacctatgattgtaacaaccaatttagtcaaaggttctcgagaaatggctaaagaaggcacgattatgaaaaatgtcaatgccattcaaaattttggcgggatggatgtactttgtacggataaaacaggtaccttaacacaagataaagtaattttagaataccactataatattgggtgccaagaagatcaaaaagtcttggatttagcatttctaaacagttattttcaaacaggtttgcgtaatttaatggataacgccgttattcaagcggcgacacaagaaagtgatatacaatcagatgatttttataaagtagatgaaattcctttcgatttcaatcgacgtcgaatgagtgtgattatcaaagagtttaaaacgcgagaaacacgcttaattaccaaaggggcggttgaagaaatgctcttggtctgcacacaggtacttttaaatggcgaaattgtgcccttaacagagacgctgcgtcaaaaaattaccaaagacgttgaagctttaaatcgagatggtttgcgcgttctagcaattgccgataaaaaagtcgaagcggctgaatgggagtatacaactaaagatgaatcagagttgattttacaaggctatcttgctttcttagatccaccaaaagaaacagcggcggcagctattcacgccttgcatcaacataatgtagctgtgaaagtattaacgggggacaatcagtatgtgacgcattctgtttgtaaagaagttggtctggctggcgaaaaaattattacaggaaatgaacttcaacaattaaaccaagaagaattaagaaaaaccgttcaagcgtataatattttcgccaaaattacgcctgaccaaaaagttcgtattgtaaatgcgttaactgaaaatggtcaaactgttggctttttaggtgatggaataaatgatgctggagcaatgcgtgctgctgatgtaggaatctctgttgatacagctgtcgatgtggcgaaagaatcggcggatgtaattttattgagaaaagatttaatggttttggaaaaagggattttatctggacggcgcgtgtttacgaacacgatgaagtacgtcaaattaacagcaagttctaattttggcaatgttttttccgtgatcccagcaagtatctttttaccatttttaccgattgctccgattcaatcgctattattaaatctaatttacgatacttcgtgtatgtcagttccttgggacaaagtagatgaagaatacgtagaaaaaccaaaaaaatgggaaccaaaatcaattggtaattttatgcgttggtttggcccaacgagttctatttttgatattgttacctatttatttatgtatttcattgtgtgtccggctatcctaggtggctcattctttgaattaaatggagcagatcaattgctctttatcggtattttccatgcagggtggttcattgagtccttatggtcccaaatgctcgtcttgcatttcctacgaacagaaaaaatgcctttccttcaaagtagtgcttctggaattatgacgttagtcactacagcagggattgttctcggaactgttttaccctttaccgctttcggtgcagaactaggatttgtcggtttatcaccaagctatttcttgtatttaatcccgacaattgttgcttatttagcactggttgcgttcattaaagttttatacgtcaaacgttacggtcaattactgtaa

SEQ ID NO: 2482 - DNA, 957 bp, Enterococcus faecalis
tctaaagaccatcagatagccttgtcgagaagcttttcttctgctattttttgtatagttaaagaaacggcggtgaggaaaatgaaattacaacaactagaatattttatggcagtttcaaagtatgcgagttttactttagcttctcaaaagctccatacgagtcaaccttatttaagtacccagctcaaggagttggaacgtgaattaggtgcttcattaattttaagagacaagaaacattgtcggctttctccagcaggcgaagtcgtcgccaagcgaacagaaatgatttttgcactcattaaggaagcgcaagaagagattaatgaattagtgacccaaggatcgacaacgaccattcggattggaacaaacttaattgatatagataaagcatttggagaagtcttgttgttatttaatcaatcctatccgtatgtaagtattgattttaagtattattacgatcttgaaacagccttggaaacagatttaattgacattgggattgggatatttttggatacctcgattccattagagaaagaattaatttatacagaaagctatctcctttgtgtcaataaaaatcatcctttagcccatgccgatagcgtgacgattgacgaaattcgttctttaccttttgctgcatattccgatcaagtatatgaaaaaaaagtgttcaaacgttgggaacgtaaaatcaattgggaaaatcggcaaatcgtcatcgaacttccttctcttcatttagtcttagacatggtccaacgagaaaaagcctgtagcatccttccctattcactcactgatgaactaaacagacgtaacttagttggtattcctctggaagatagtccagaacgagccatctatttagttcagaataatcatcacggacattgtgaagcacaccgttatttattcgaacaattacgttatttattctag

SEQ ID NO: 2483 - DNA, 954 bp, Enterococcus faecalis
agcacaccgttatttattcgaacaattacgttatttattctaggaatagaaaaaggaggaattcccatggaactatttcgtttacattattttttagagttatgcaaagtgaaacaatttactaaagcagccgaaaatttagcaatttctcaagctgcattaagtaagcaaataaaaattcttgaagcaacgttaggcgcggaactttttaatcgccaaggccaaactaccaccttaacgccagctggattaattttagaaaaatattgttggcgcatcaccaatgagttggtctcaattgaagaagagctaaaagaaattaatcattcttccaaccatatttatgtggccacttatctctgtgatttagaatataaattgaatgacttactaatgacaacattaacggatcgttcatccaacttacaagtccacactattattacagaaaatattcttcaatccttggaaacaatggatgcagattttggtatttcctttgctgacttaccattacctgaacatattggtaaaattgatttatttacagcaaattatcaattcattttaagaaacgatcatccagctttggcaaaagccacgacggaagaaattttaaaagaactaacaatgtaccccttcgtccgtttaaataccgaattttccgagcaaaacaaattaaccaattggctagatactacgttttctaatttttctccagagaaagtcattcaagtggatactctttcacttattactcacttggtgtctcattccgatagtttcgctattgtccccgaatacacaaatattcaacttttagacaattcgatccatacactaacttaccaagaactacctaaacgaaacatggcagtttattatttaaaagaacgttacatgagtcgacaacttcaacaacttttggctgaatgccaaaaacaatttcaatag

SEQ ID NO: 2484 - DNA, 1149 bp, Enterococcus faecalis
atggtcaatacaaaaaaaattcacttacttcttaattatgatttattattgcccatttttttactcacacttttatcttctggtgtgcaatattggattgccgttaatgaaggaaaagatggaactgtgccagcattaaaacaacttttctttatttttgttggctatgcaggcatgtttttagctagtcggctgtcacagaaatttatttggaaagtagctccttttttctatgggttttcattaatcttaatgagtgctttgtatttttcctatgacaaaggaatgtatttattgacgggcacaaagcgctggttagatttagggtttattaaatttcagccatcagaaattgcgaaaattgcgtttattttaatgttggcaaaaattattgtccaacatgagcaacaagactggtctgataaatggcgttcagacaagcaacttctaaaaaaaatcgttgcggttagtgtccctgtttttttcttgatggcggtacaaaaagattttgggacatcccttgttttcgtaacgattattctatctcttttagttatttcaggaattgatcgcaaaattttaatcattattttcagtgctttagcaacgttaggcgtggtcttgattctgttagtctttacagagtgggggcacaaagtactcttctttttacattttaaacaatatcaattggatcgaattttagcatggattcatccctatgattatgtcgataaaatctcctatcaacaagtacaaggcttattggcaattggttcgggtggtttatttggcaagggtgtgcatgggattgaagtgtatgttcctgttcgtgagtctgatatggtttttacttttatcggggaagcctggggctttgtgggcagtgccaccgttgtttttctctatttttacttgttttatcaagttttagtagctggcttgcggagcaattcgcgtttttgtatgtacatctgtgtcgccctcattttttcgctggtctttcaaacggtggagaatatcggtgcggtgattggactgttgccgttaaaaggtattccgcttccgtttttaagtcaaggaggcacttcgttagtgatggctatcacttctttaggatttgtcaaaggaagagaagccgctacctga

SEQ ID NO: 2485 - DNA, 1200 bp, Enterococcus faecalis
ttagaaaaagatagaggtgagagaatgaatctacgtactttaggtctaacaaaaattcttttgacctttattatattaagtattattggcgcgttaatgatttatagcgccagtagctatgacttgttgatgcaaggcgtgaagcccactgctgtgtttattaaacaaggcattattatgtgtctcagctgggtgctaatgttcgtgatttacaaagttcgactagaagtgttatttaataagaaaattgcgattggactgcttttagtttcggtactattactgttaatggttcgactacctttttttggtgtagcagcgaatggcgcacaacgttggatttctctctttggaatccagtttcagccatcagaactttgtaattttgcgattatttattacttgagctgttatttaggtgaaaaagaaaatggcttgacaacgaagcagttaaggaaacaatggctgtttgttttggtcgttgcatttttagttttgattcaacccaaagttggcggggccattcttattttagttattggcagtgtcttgattttctcagcaagtattcatgcaaaatttagtgtaattgctgcggggattgtcgttgctagcgcggcgcttctttctaaaataattatttttctaggcgatcaccgctacttaccacatttttttgcgcatgtgtatgaccgcttagttgttttgaaaaatccgtttttatcctttcatgatcgaggatttcagccttcaatggcctatttagcaatgtataacggtgggttttggggcactggactagccaatggtatggtaaaaaaaggtggcttgccagaaggtcaaaccgattttatctttgcggtgattgtggaagaacttggtttgattggcggcttactgttgctatttcttttgttatttttagcggcctcgattttgcggagtagttgtgtaataaagaatcattgttacggcttgtttttgttaggggtcgggaccttgattttagctcaaacggcgattaacattggtggcgttttgggtttgattccaatgacgggaattcctttaccgtttgttagttacggtgggacaagttatttaatcttttcagtggcattaggaatcgtcattaaaattattgcaaacgaaaaggcgcaattaaatggtcaatacaaaaaaaattcacttacttcttaa

SEQ ID NO: 2486 - DNA, 309 bp, Enterococcus faecalis
atcatcaattttctaaacaatagtcaaaacaaaaaaaggagaataaacatggttgaaaatttttttaaagaaggaaagttgctggttattcccaagaaaaatgcgaaaaaagtccaagtgtttcaacgtgtggccaaccaatttgaatttgggaaagaatatacggaaaaagaagtcaatcagcgacttagagaaatctatgaagattatgcacttttgagacggtatttagtagattatcagtatttagaaagagataagtttggaaaaatttatcagaaatgtgagcaacacacaaaaattatataa

SEQ ID NO: 2487 - DNA, 345 bp, Enterococcus faecalis
agcatgtcaaattttaaagcgttgatcaaaaaagttgttggggataaaaaagagtacaaagaatataaacgacggattgcagcattaccagtagagtatcgacaagtatttcaagaaattgaaaaatatgcttggcatttttcagatcatagtggagccaatatgttcaatgcgttgactgatttacttgatttgtttgaagaaggagctgctaacggaacacctatcaaaaatattacgggagaaaaagtaggtgattttgctgaaacaattgtcaatgaagtcgctggcaaatggactgataaacagaaagaaaaactgaatcatcaattttctaaacaatag

SEQ ID NO: 2488 - DNA, 195 bp, Enterococcus faecalis
catgctctatccctccattttttttcatcttgtttacttgttttgaaagcaacgtccatcgctgccaaaaatcagcgagttctgcttctcctgatgaggttaagcgatagaacttccgcattggcccttttatctgaaggtttttttcacctagaccccattgtttttattgctgatcgcccgaattatggcata

SEQ ID NO: 2489 - DNA, 639 bp, Enterococcus faecalis
ggaagttatactgtctattcgcctaatttttcaggacatggcacgctagttcctgaagatattttagatcaaacaacggaacaatggtggcaagatacacaagaagcagtcgcttttttgagagaaagaggctaccaagaaattgccatttttggtttatcaatgggcgggattttcagtatgcatgcattaacggaacaattaacaggattaattggtggtggatttttctgttcaccgatctaccctgtcgaaaataaagtcccagaaaattttgtattatacgcagaaaacgtgatgaaaatcgcagaagttcctgcagaggaacaacaaagccggttgcaatcgattgagcaacgagtcaaacaacaattaggagcgattgaaacgattgctagtcagacggctgacaaactaaacaaaatccacgcacctcttttcttagcgcaagctggcaaagatgaaatgattgagccaatgggcgtctatcaaacggcccaagcactaacacaagcacgtgtgaccttacaatggtacccaaacagcggacatgtcattacggtgagtggagaacacaaacaattagagcaagatgtggtgcaatttttagcaacactaccttggaatgaggagaaataa

SEQ ID NO: 2490 - DNA, 2379 bp, Enterococcus faecalis
ggagaaataatgacaaaacaaacaattaaagagcaaattttacatttcatggaaagccaaaaaaagaaaagcttttcaatggaagaaattgcacaaggcttgaatttagaaaaaagttcagattttaaaattttagtgcaaaccattgcacaaatggaacgagaaaagtcagttagtttcaacaaaaaaggcaaagtcctgttaccaatgaaagacttattaatagaaggaacgtttcgtgcaaatgaacgaggctttggttttgtaaccatcgatcctgaagaaccagatgtttatattccgaaagaggcaacgaactttgcaatggatggagatacggttttaatcgacgtgatccaacatgcggatcctttttcagatcgcggcgcagaaggtaaagtcaaagaaattaaagagcgagcagtgagccaagttgtcggagaatttgtggcatatagtgaagaagaaatggcagaaatgggactgtatggctacatgattcccaaagataagaaattgaatcagtatactgtatcaattgcacctgaagggattaagccagtagatggtagcattgtcattgctgaaattacctattatccagatcaagaatatccaacgagtatggaaggactagtcaaacaagtgattggtcataaaaatgatccaggaatggatattttatcaatcgtggtggctcatggaattcccacagcatttcctgatgaagttttggctgaagcggaccaagtaccagaaactattgcagaaagcgatttagtcggtcgtcgggatttacgtgatcagttgattgtgacgattgatggagaagatgcgaaagatttagatgatgcagtaacggtacaaaagttagcaaatggcaatttctttttaggggtgcatattgcagatgtttcttattatgtaactgaaggaagccaattggatatggaagcgtatgaacgtggtacaagtgtctatttgacagaccgagttgtgccaatgattccgcagcgattatcaaatgggatttgttcgctaaacccacatgttccacgtttaaccatgagttgtgagatggaaattacaccagaaggagaagttatttcgcatgaaattttccaaagtgtaatccaaacaacggagcgaatgacctatacagcagtcaatgaaattttagaagagcaaaaacctgaaacgttagaacgctacaaagaactagttcccatgtttaaagagatgggtgagctgcaccatatattagaagagatgcgtatgcgccgtggtgcgatttcttttgaagatcgtgaagccaaagtcctagttgatgaaaatggtcatcccaaagatattcttttacgcacgcgtggtgtgggtgaacgattaattgaatcctttatgttggcagcgaatgaaactgtggcgcgtcattatcatgacttaaaactgccatttatttatcggattcatgaacaaccaaaagaagaaaaaatgcaacgtttctttgactttgctgcagtacttggcattcttgttaaaggaacaaaagaaaacatttcaccgaaagatttacaaaaagttttagagcaagttgaaaataagccggaagaagtggttatcaatacgatgttgctaagaagtatgcaacaagcgaaatactcagaagacaactacggacactatgggttggctgctgaatattatacgcatttcacttcaccaatacgtcgttatccagatttaattgtgcatcgtttgattcgcagctatagccaagatcaatctgaaaaaaatcaagaaaaatggaacgaagcattaccagaaattgccaatcatagttcaagtatggaacgtcgcgcagttgatgcagagcgtgaagtggacgccatgaagaaagccgaatttatggtagataaagtgggagaaacgtatgacgggattatcagctcagtcacaaaatttggtatctttgtggaactgcctaatacaatagaaggcttgattcacgtgaacaacttaaaacaagattatttccactttattgaaaatcatatggcgttagttggtgaacggacgggaatgactttgaaaattggtcagaaagttcaaatccgtgttgaaaaagctgatccagaaacaagagaagttgattttgaattgatttcagctgaggaagtcgcgccagtcgaaggaccaaaaggacgtaaaaaaggcaaagccaattcttcaactcgttcaaataatcaacgaagaaataaaaaagatgaatcatttgatggtaagaaaaagaaaaataagaaaaaaggcaaaggcaaaaaacaacctttttataaagaagcaatgaaacaaaaaaataaaaaagggaaaaagaagaagtag

SEQ ID NO: 2491 - DNA, 477 bp, Enterococcus faecalis
aggaggtcgcttatgccaaaaggggaaggaaaattaatcgcacaaaaccgcaaagctagacatgattattcaattatcgatacggttgaagctgggcttgttttacaaggaacagaaatcaaatctattcgaaatggtcgtatcaatttaaaagatggttttgcacgaattcgaaacggagaagcctttttgtataatgttcatattagtccatatgaacaaggcaatatttttaatcatgacccattacgtaccagaaaattattattacacaaaaaacaaattaataagttaatcggcgaaaccaaaaatacaggtatcacattagtacctttgaaggtctatattaaagacggctatgccaaagttttgattggtttagataaagggaaaaagcagtacgacaagcgtgaagacttgaaacgtaaggaagttgaccgacaaatcagccgaacattaaaaaataaccgacgttaa

SEQ ID NO: 2492 - DNA, 726 bp, Enterococcus faecalis
attgatttggaagagaagaaattactcttcaatatcggaccaatttggtttgatggaaccattgttttgatggtgctgttgacgtgtatcattgttttcgcctttgtctatgcttgtacgagaaatatgaagctacgacctaaaggcaaacaaacggtcatcgaatggttagtggattttattcgtggaatcattacagacaatttacctcgtaaagaagtgagcaattttcatttaatggcgtttaccctcttcatgtttgtacttgtttcaaacatcttgggtctcgttacaaaaatcgttgtgggcgacgatctcagcgtttggaaaagtccaaccgccgatccaatcgtaaccttaacgttagcgatgatgatgattgtcttaacacacttctttggtatgaaacgctttggttttaaaggctatctagttaatagttatttaagacccgttggtttcttactaccggtaaaattaatggaagaattcacgaatctattaacattaggcttgcgtttgtacggaaacatttttgccggcgaagttctattgggcttaattgctggaaccgtagcaagcgtcggattatgggttatcccactagcaattccgctagaaatgatttgggtagcattctcaatctttattggatgtatccaagcgtttatctttgtgacactttcaatggtttatatgtcacacaaaattgaaacagaagaataa

SEQ ID NO: 2493 - DNA, 270 bp, Enterococcus faecalis
tcaagaaatacgaaggacaaaaattatcttttaggaggattttacacaatggaaggattaaattttatcgcagcagcaattgcaattttcggttcagctatcggagccgctatcggtaacggacaagttatttcaaaaacaatcgagtcaatgactcgtcaaccagaaatgtctggtcaattaagaacaacaatgtttatcggggtcgctttaatcgaagctgtgccaattttaggtgtcgttgtttctttattacttttattcagataa

SEQ ID NO: 2494 - DNA, 537 bp, Enterococcus faecalis
gacttcatgctacttactacattggtagtcggtgaaacggctcctagtaccacactaggcacgatgattgttgtcagtggtgcatttttaatcttgatgctcttattaaagaaatatgcatggggagcaatcgtagatattttgacacaacgtgaagaaaaaattgccaacgatttagactctgcagaacaatctcgcgtagcagcagcgaaaatggaaaaagaacgtcaacaacaattactttcttccagatcagaagcagctgaaattattaaaaacgcgaaagaaagtggagaacagactcgccaaaaaacattaaaagaaacaactgcggaagttactcgcttacgcgaaaaagctcggacagatatttctcaagaacgtgaagaagcattgtcttcagtaaaaaatgaagtggcagatctttctcttcaaattgcagccaaaattttaaataaagaattaacaccagatgcacatgaagcattgattgattcttatattgaaagtttaggtaaagcaaatgaaactagataa

SEQ ID NO: 2495 - DNA, 552 bp, Enterococcus faecalis
gtaaagcaaatgaaactagataaatatacagttggtaaacgctacggcaaggctttgtttgagttggcagttgaaaagaaccaagctgaagcaatttatcaagaattattgacgcttcgcgaagtctatcaccaagtacctggtattggcgatattttaagtgatgatcgcttagagccttatgaaaaagacagcatcatggaaaaactagtaacaggttttagtgaaatgatgcaaaactttttgcgagtggtttacgaatatcgtcgcatgtacgatctgctcttgatgattgatgaatatgaacgacgttatgatgagcaccaaggactaattttgggttcagtgacaacagccattcctttatcaaaagaacaacatcaagcaatggaagaaaaagctgcccaattattagggtatgaacaagcgcatttagtcaatttaattgacccgtcaattgtcggcggagtggttattgaagcaaaccatcaagtaatcgatggcagcatccgcaaacaattagaacatatgcagcagaagttattaaaataa

SEQ ID NO: 2496 - DNA, 1557 bp, Enterococcus faecalis
atggctatcaaagcagaacaaatcagtgccttgattaaagaacaaatcgaaaactatcaacaacagcttgctgttgaagaagttggaacagtcacttacgtcggtgacggaattgcccgcgcccacggtttagaaaatgccatgagtggagaacttgttgagttttcaaacggttcatacggaatggcacaaaacttagaaacaaatgatgtagggattattatccttggcgattttgaaaccattcgtgaaggagataaagtacaacgcacaggcaaaatcatggaagtacccgttggggaagctttgattggccgtgttgttaatccattaggtcaaccattagatggtttaggcgaaattaaaacagacaaaacacgtcctgtggaagcaacagctcccggtgttatgcaacgtcaatctgttgctgaaccaatgcaaactggcttaaaagccattgatgccctcgtaccaattggtcgtggacaacgggaattagttattggagaccgtaaaacagggaaaacatcgattgcaattgatacaattattaaccaaaaaggacaagatgtaatttgtatttatgtagcgattggtcaaaaagaatctactgttcgtaaccaagtagaaacacttcgtaaatttggtgccttagattatacaatcgttgtgactgcaggggcttcacaaccagcaccattactttacattgcaccatatgcaggaactgcaatgggtgaagaattcatgtataacggcaaacatgtcttaattatttttgatgacttatcaaaacaagccgtggcttatcgtgaactttctctactattacgccgtccaccaggtcgtgaagcttatccaggggatgtcttctatttacactcacgtttattagaacgtgcagctaaattaagtgatgaattaggtggcggttcaatgacagccttaccattcgttgaaacacaagcaggcgatatttctgcttatattccaacaaacgttatttcaatcactgatggacaaattttcttagaaagcgacttgttctatgcaggcactcgtccagccgttgatgctgggttatctgtttctcgggtcggaggatcagcgcaaatcaaagcaatgaaaaaagttgccggaacgcttcgtttagacttagctagttaccgtgagttagaagcctttacacaatttggctctgatttagatgcggcaacacaagctaaattaaaccgtggtcgtcgtacggtagaaattttaaaacaaaaactacatgcgccactgcctgtagaaaaacaagtcttaattttatatgcgttaacacacggctttttagatagcgtgagcgtagataaaattttacactttgaacaagatttattcgattattttgatggcaaacatgcagacttattggaaaccattcgtacaacgaaagacttaccagatactgatgcattagatgcagcgattacagagttttctgaaatgtttgcagcggcaaacaatagcggagattcagccaaagaagctttagaaaaaatcgataacgcataa

SEQ ID NO: 2497 - DNA, 915 bp, Enterococcus faecalis
gcgacattgggtgcttcattaaacgaaatcaaacaacgcattgcatcaacaaaaaagacaagccaaattaccaaagcgatgcaaatggtttctgcagccaaattgaccaagtcagaaggcgcctctaaaagctttcaagaatattcttcaaaaattcgtagtgtcgttacgcatttagtagctgctcagttaagtgaattacgtgaaacagaacaatcttctcttagtgaagggaactatcatgtgatgttagcacaacgacctgtcaaaaaaacaggctatatcgttatcacttctgacaaagggttagttggtggctacaatagctcaatcttaaaacaaaccatgagtatgattcaagaagaccatgattctaataaagaatatgccttaatcgctattggtggtacaggggcggatttctttaaagcacgcggaatcgatgtttcctatgagctaagaggcttaacggatcaaccaacgtttgaagaagtccgtaagattgtgacaacggcaacgactatgtaccaaaacgaagtgtttgatgaattgtatgtttgttataatcaccacgttaactcactaacgagtcagtttcgtgtggaaaaaatgttgccaattactgatttagatccatcagaggcgacctcttacgaacaagaatatcttttagagccttcacctgaagcaatcttggatcaattattaccacaatatgcagaaagcttaatttatggggcgatcattgatgcgaaaacagcagaacatgctgctgggatgaccgccatgaaaacagccactgacaatgcgcaaaatattattagcgatttaacaatttcttataaccgtgctcgtcaaggggcgattacccaagaaattacagaaattgttgctggtgcagctgcactagaataa

SEQ ID NO: 2498 - DNA, 1434 bp, Enterococcus faecalis
ctttatgaagactggaggaaagaaattatgagttcaggaaagattgttcaagtaatcggtcccgttgttgacgtggaattttcattagatcaatccttacccgatattaacaacgctttagtcgtttataaaaatggcgaagcaaaacaaaaagtagtacttgaagtcgctttagaactaggtgatggagtgattcgttctatcgctatggaatcgacagatggtttacaacgtggaatggaagttatcgatacaggaaaatcaatttcagttcctgttggtaaagatacattaggtcgtgtgtttaacgttttaggagacacaattgacttagaagcgccattccctgcagatgctgaacgtagtgggattcataaaaaagcgccagcatttgatgaattaagtaccagtaatgaaattttagaaacagggattaaagttattgacttattagcaccttatctaaaaggtggtaaagtcggacttttcggtggtgccggtgttggtaaaaccgtcttaattcaagaattaattcataatattgcccaagaacatggagggatttccgtctttactggtgttggtgaacggacacgtgaagggaacgacctgtactatgaaatgaaagattcaggcgttattgaaaaaacagccatggtttttggtcaaatgaacgaaccaccaggtgcacggatgcgtgtggccttaactgggttaacgattgctgaatatttccgtgatgtggaaggacaagacgtgctattatttattgataacattttccgtttcacccaagccggttcagaagtttctgcccttttaggtcggatgccgtcagccgttggttaccaaccaaccttagcgactgaaatgggacaattacaagaacggattacttcaacgaaaaaaggatcaattacctctattcaagcaatctatgttccagccgatgactataccgatccagcgccagcaacagcgtttgcccatttggatgcaacaactaacttggaacgtaaattaaccgaacaagggatttatccagcggtagatccgttagcttcatcttctagtgccttggctcctgaaattgttggagaagaacactacgaagtggctaccgaagtgcaacatattttacaacgttaccgtgaattacaagatatcatcgctattttagggatggacgaattatcagatgacgaaaaagtacttgttggtcgcgcacgccgtgttcaattcttcttatctcaaaactttaacgttgctgaacaatttacaggtcaacctggttcttatgtaccagttgcggaaacagttcgtggctttaaagaaattcttgaaggtaaacatgacaatctgccagaagaagccttccgtagtgtcggtaaaattgaagatgccatcgaaaaagcgaaacaattaaactactag

SEQ ID NO: 2499 - DNA, 195 bp, Enterococcus faecalis
actactagaaaggcggctaacacaatggatagtcttactgtgaatgtagtaacgcctaatggtctagtttatgaccaccatgcaaaaatcgttgtcgcgaaaacaacagttggtaatttgttattcacccaaaacagcccccatttttttctcggggggggatggattgatcccctctttaagggcggtgtttaa

SEQ ID NO: 2500 - DNA, 330 bp, Enterococcus faecalis
gaggtaatagtattgaagaaaatgaatattatttatccaccacttgtggaacagagctttcaattttatcaagattatgaacaagaaagatatgataagtctgaattatacagaataatggttatgaagaatattattaatgaaaatggcactccaacagaagaggctcttaaaaaaggattagttaaagacttttatgaagaatatgatttatctttggaagaatttttaaaattgtacccgtgttttaataattatgaccctgattatttccagaaaatagatggtttttgggaagttcccgtttgtttaaaagaagaattaatatga

SEQ ID NO: 2501 - DNA, 273 bp, Enterococcus faecalis
atatgctgtggtccagatacatgggaaagagatgagcgtataaatttagataatccaaaagaatctatcaaaacgttttatccatcaaaagggcaatataatactatagaagttaaaaatggacacgtccgtgtaaaaaaagataatagtccagatcaaattgcggtgaaaacaggatggatatcagaaccagggcaaactagtatctgtattcctcacagattcattttagaaattgttcaacaatattctaaggattattatatttactaa

SEQ ID NO: 2502 - DNA, 1086 bp, Enterococcus faecalis
ttaaatggaggttttatgaataacctatttatttttgtttgcttttgttttatgtggttaatgatttttggagtaattttatactatgttggtctagttaatcacagatatatacatcatactttaattttgggtttagtaactattatttctggtactctatgttggttatttgtaggatactcattaagtttttttggaaatattcaatatagtatcttttatagccccttagcttctagtgaaattgtttctatactgatacaattacttttttgcttatattctgtaattatgataattggttcagtattagaaagaggtaattggaaatatattgtgttgtttgttcctttgtggattgtatttgtttatgcacctgtttgcttttcgttatggggacatggaaattggctagggaaaataggagtactggattattctggcggactagtagtccatactactgctggaattggaagtcttgttttggcaataacatcaccaatacgtttaaagaattcattaatatttaaatcacaagaaatgatagcttttgtaggaatgctatttattaccttaggatggttcggatttaatatggcaccttctggaaaaatcggtgaagaatccattcaaatttggttaaatacacttatttcaattttaggcggtagcatcagctggccttttacccaatggattttaataaaaaaagtatctatctattctataatgaatggaataatcggcggattagtaggtagtacttgctcggttggatatatatctcctgcaattagtttattaatttcggtaattgtatgtaccctttgtccaattgttattcacataatgcatctacgcatagcaaactttgatgacgctgcagattcttttgggatgaatgcagtgggtggaattgcaggatcgattttaactggtgtcatggcagaaaaaggggacttttttcttcaattatttgggacttttttaatcagtatttggagccttagtttaagtcttttgattcattatttattgaaaaaaatggtaaatgattgtgattctcaatgtattagataa

SEQ ID NO: 2503 - DNA, 198 bp, Enterococcus faecalis
atggattcttcaccgatttttccagaaggtgccatattaaatccgaaccatcctaaggtaataaatagcattcctacaaaagctatcatttcttgtgatttaaatattaatgaattctttaaacgtattggtgatgttattgccaaaacaagacttccaattccagcagtagtatggactactagtccgccagaataa

SEQ ID NO: 2504 - DNA, 1137 bp, Enterococcus faecalis
ataatggaaaataaagaagttataattattggagcaggtgctgctggcgtaggtatgggggttgctttaaaagattttggcataaataattttgctattttagagagaaagcaggtaggtaatagttttattaaatggcctgaggaaacaagatttatcactccttcttttacaagtaatggatttgggatgcctgatttaaatgcaatagcaattgatacatctccttcatatactttaggtaaggaacgtttatctggaaaagattatgctaaatacctacaattagtttcagaagaatataagttacctattaagacaaattgtaaagttcaatctattaaaaaagaaaaaactggttatttgcttgaaacaacaaaaggaattattcatgcagaatatataatttttgcgatgggagagttctcttttccgaataaatctagtattaaaggtgcttataagaatagtttacattatggcgagattaattcttggattgaaattaaaggggataagcagacaattatcggaggaaatgagagtgcgattgatgcagctattgaattagctaaattaggtaaacgagttacaatttatacagatactttggggttaaatataagagatgctgacccgagcaaaaggttagcaccacgcacaagacagagattttttgatttacgtgtaaacaaaaaaaaattagatagtattaaaatatacacaactatcaaagttaaaaaaattgaaaaaaagtctactagttatatattgattacagaaaatgggaaatcattacctgtagaaaatataccaattctttgtacaggttttaaaaatggcacaaaatctattactgcatcattgtttaagtataaggaaaatggagaggttcttttaaatgattttgatgaatcgacaatagctaaaaatattttcttaaccggtccaaatgtacgtaaaggcaataccattttttgttatatatataaatttcgccaacgttttgccgtaatcgctaatgaaattgcccgacgaaaacatattactattgacgaaaaaaaattgtcatactataaaaatcaatctttttatttagatggttgctctgggtgtgaagtaagatgtagttgttga

SEQ ID NO: 2505 - DNA, 189 bp, Enterococcus faecalis
atctctcattatttcttctttttcaatacaaacacaagacggatcaacaataagaaaatagttcctattaagccaaatagaaacaatatttattctccagtagatgtggtattgttcaagttctatttgaaactggacatgttactgattaatattggtattgatacagtatcattaagtagtaaatga

SEQ ID NO: 2506 - DNA, 339 bp, Enterococcus faecalis
ttttcttcagacgctcctttaaagaaattggtaacagatattacttatctgccttttggtaaaaagcaattgtatttgtcttcaattatggatttatacaatggtgaaattatcgcctataccatcggtgataagcaagatacggattttgttctggatacatttgatcaattgcctcaaacaacggattgtctattgcatagtgatcagggctctgtttatacttcttttgactaccagaaccaaataaaaaaaggcattaccatgagtagttcccgaaaagggacaccttcagataatgcttgcatcgaatcgtttcatgcctcactaaagtcctga

SEQ ID NO: 2507 - DNA, 309 bp, Enterococcus faecalis
ggtgctaaaaaagttcaaagaattggaaagaacgtggagccagaagtatttgtagaattagttaaaagaatgaaaggaaaattacccattactgcattgtgtcaacttttcggcatttcgcgagctacttattatcgttggactcatcgaaaagacttgggaaagttaacgcctcttgaagaagctgttcgtcgactttgcttccagcataagtttcgatatggctatcgaaagattactgcgttgattaatcaggaatacaaagtaaataaaaacaccgtacaaaagattatgcggaaatatcattag

SEQ ID NO: 2508 - DNA, 240 bp, Enterococcus faecalis
cgtgaattcaacaagaggtgcttttttttgtctcagtttattgggtcagttccctatttgtttggtcacttttattttagcaaaggtgttcttatttttatacaaaaaataatccagatgtcaatcaatcttattaattgttatctggatttttcaagctcttgttgtactaaattttatttaatttaccgagttttaattgttcaatatttaaaaatttctgtattgaaagtgagatag

SEQ ID NO: 2509 - DNA, 1182 bp, Enterococcus faecalis
tttaaggagagaaaaatgatttccagcaaatacactattagagaacaaaatgaagctcaaatacttaatcaaattataaaacatagagaaatatctagagccgaattaagtaagatcacctctttaaataaagcatctgtttcttcaattacaaacaaactaataaacgatggattcatcattgaaaaaaggatcggagaagctacaaatcgaggaagaaaacctatcatgctgacctttaacggtagttcttcagccttagtaattgcaattgatctaggctataactatatagatggcgcattagcttctttagatggaaaagaaatccatagggttcaacttattgatacctatgttaacaaaaaaaatgtccaagatttaattcataaagtattcaatcagcttacttcagattgtcctcatacccattatggcatagtaggtatgacaatagctcttcaaggtcaagttctaaataataaaattatcagtacttcctacaatgatcttgctgaaataaacctagttgaaatgttaaaccaagaatacaacttcccagtattcttacaaaatgaagctaatttatcagcgttgggtgaatatactttttcatcagatatagaaaacttagcatccattagtcttcatagtggcattggtgtcggacttgtgaaaaatggtaaactagatgttggtaataaaggttatgctggacaattaggacatactattttgtttcccaatggaagaaaatgtacttgtggaaatcatggttgcttagaaaaatattgctctacacaagtgatttatcacgaaatttcgaaagagaaaaatctcaataaaataaattcagatgtagtttctattctatataataacaaagaatcaaaagttgttaaaatgattgaacaatatgcctactatttatctattggtgttaataatgctatcatgttatatgcacctgaattagtaattttcaatagtccattaacaaaaaaaattccagatataataaacataatccaaagaaatttaaacaatcaatttacaaaagacgtattagttattaacagccctatcgaatggaatcctgtaattagtggagctatctcactttcaatacagaaatttttaaatattgaacaattaaaactcggtaaattaaataaaatttag

SEQ ID NO: 2510 - DNA, 213 bp, Enterococcus faecalis
cctagatcaattgcaattactaaggctgaagaactaccgttaaaggtcagcatgataggttttcttcctcgatttgtagcttctccgatccttttttcaatgatgaatccatcgtttattagtttgtttgtaattgaagaaacagatgctttatttaaagaggtgatcttacttaattcggctctagatatttctctatgttttataatttga

SEQ ID NO: 2511 - DNA, 2094 bp, Enterococcus faecalis
gaagaaattgaaagtgggttggaagatgtgattgaagttacaccaaaatctttttcgagaacttttgatgatgaattattgattgtagaagcttggggtgaaaatgccgttagagtcagatcgtttgtagatatgaactttgaaaatagacttaattctttaattggtgagcctgatgctttaggtacagtcataataaatcaagacaaaaataagacagaattaataaacgggaaaattagagttgtgttagaccatcgggaccgattgactttttataatgaaaaaaatggagtgctattaaaagagtttatcagattgagagctgtcaaacatgatgacggaagtgaagatgcaggtacaattgaaataactaaagattttaattcaacgctgaagttgaagtctagagaataccactctaatttacaaggtggttttcaggttacaactagatttgaatctgaatcaagtgagaagatttttggaatgggacaatatcaacaatcttatcttgatttgaagaatacagttctagaattagctcaaagaaactcacaagtatctataccattctatgtatcgagtttaggatatggatttttatggaataatccaggtataggagaggtatcatttgctaaaaacatgactcgatggaaaatggcttctactaattatattgactatgtagtaattgcgggtgataccccaaaagagatacttcgaaattatagtgatttaactggtaaagttcctaaaatgcctgaaaatttattgggattatggcaaagtaaactacgctatcgatctccaaatgaagtaatggatgttgtaaaaaaatactatgctttgggaataaaactttcaactatagctattgactatttccattggcctaaacaaggtgaatatcgatttgatgaagaatattggcctcaacctgaacaatttttaagaacattaagagatgaatataatgtagagccaattatttccatatggcctactgtacaaactgatgcaatgaattttaatgaatatctagaaaatggttacttagtgaaagtaaatcgtggcgttagattaacaatgcaaattcaaggaaatacaatttttgttgatatgactaatgagaaagcacgagaatatgtttggaacctcattaaaaagaattatgttaacaaaggagttaaatatttttggctagatgtagctgagcctgggtattctgtatatgatttcgataattatcgatataaaaaaggaaccgatttacaaattgggaatttgtatccaatcgattatttatcaatgatttctgaaggtttaggaaataatcaatcagttgttacacttgtaagaggtggatgggcaggggcacaacgctatggagctttgttatggtcaggagatattgattctagctttgaagcttttcgtaatcaagtaaatactggattaaacgttgggttggctgggttaccttggtggacaacagatattggaggatttcatggaggagatcctaaagatcctgagtttagagaattactagtccgctggttccaatatgcaacattttcgcctattttacgaatgcatggtgatcgcttaccacacagcaaaccattatctgatcatggaggaggatcaatggttaccggagctccaaatgaaatttggtcttatggtaaagaagtcgaacaaatactaacgaaatatataaaaatacgagaagaattgaagccttatattagtaagttgatgagacaggcccatgagtttggtgatccacttatgagaacattattttatgaatatccacatgatcagaatgcatggaatattgaagatacctatttatttggagatgcgattcttgttgcgcctattgaaaattataaagaaactagtcgagaagtttatttaccaaaaggtgaaagttggacaaacctatggacaagagaaagctttgatggtggaaaaacagtggtagtcgaagcagacattcaacaaatcccgatttttatcaaaacaagtgaaaaaggtaaattttcaaaattatttgatgtaattaaggaggaaaattaa

SEQ ID NO: 2512 - DNA, 798 bp, Enterococcus faecalis
ggaggaaaattaatggaagcaagtatttttcaattagtattaattgtgctgtatggattttttattaactttgaaaaaaactcaacaatgtttggaacttatcaaccggtaacagcgggttttgttacaggattaatcctaggtgatatatcaacaggtttatttatcggtggtactttacagttactatctttgggaataagtaattttggaggagcttcaatacctgactatcaaacagcaagtatcgtagcaacttttattacaattactactgggcaaaaaccatctgtaggaatctctattggtataccagtagctttattgatggtccaactagatgttatcagaaataccataggtatctggatggttcacaaagctgaagcaggtgtgaaaaaaggtgattatagtatgattaccaaaatgcaaatgtttggcgtgtttttaacagcagcaacaacaggcataccagtagcattggcagtaattttcggtccatcattaattaatacaattctatcgtatactccagaatggctaaccaatggattaactgttgctggaggtttactaccagctgtcggtatagggttactactgcgatatttacctgcaaaagaatattttagttatcttgttattggttttgtaatggctgtttatatgaaaatacctttattaggagtagcgcttgtaggggcagctattgcattaataatttataaaaaaaatagtcaagatttagtaaagaatactgtgattaatatagcaggggggatggatgacgatgaataa

SEQ ID NO: 2513 - DNA, 225 bp, Enterococcus faecalis
ctaaaatattcttttgcaggtaaatatcgcagtagtaaccctataccgacagctggtagtaaacctccagcaacagttaatccattggttagccattctggagtatacgatagaattgtattaattaatgatggaccgaaaattactgccaatgctactggtatgcctgttgttgctgctgttaaaaacacgccaaacatttgcattttggtaatcatactataa

SEQ ID NO: 2514 - DNA, 831 bp, Enterococcus faecalis
caggggggatggatgacgatgaataatatcgaacaattaaaattacgcattgatacaaaaactaaacgaagtgttttgtggagatggttttttacaagctcagtttcttctaattatgaaaagatgcaagcgctagcatattgttatgcagtattaccatttttaaaaatagcatataaaaataaaccagaagcattacaaaaagcggtattaaatcatttacaattttttaatactaatccttgggtggcaccttacattttaggtattaatgtagctatggaagagaatgctgacgaaaacacagaagaggctgtaacatctattaagacaggccttatgggcccggtagctggtttgggtgatagtttatttgtagttattccttggactatatttggtgctattgcagcaaatatggccattgatggtagtccagttggaattttgttatggattgttgtaagtgtagcgctaaaattagttagtattccattatttaatgcaggatatgcctcaggaacaaaattaattgctactatagaaaaaagtttgaaattattaactgagtcaacttcgattttaggattaatggtcgtgggggcattaataccttcagtcgttaaagctaatattactttaaactttaaacagggtaatttttcaatgaaaggtcaagatattttggatcaaataatgcctggattattgcctgcattattagttggtttagttttctgggcattaaagaagaacgttaaacctatttacttaattcttggtgttatggtattgtcaattgttttagcggctctaggtattttaaaataa

SEQ ID NO: 2515 - DNA, 507 bp, Enterococcus faecalis
aataatttatgggaggcattttcgatggaaatgaagggtattaacaatattagaattgatgatcgcttgatccatggtcaagtagctacaatgtggagtaataaattgggagtaacacgtttaatggtagtgaacgacaacgttgctaaaaatgatttacaaaagcaggttttaagaatggcagttcctgctggaatttcttcgtctatcataactgaagaaacagctattagtaatattaaaaatggcaaatatgaaggacaaaatgttctgatgattgtcaaatcacccgtagatttattaccatttattgaaaatgatttagagataaaaagaatcaatgttggtaatatgtcaaatcgtaataatactactgttttaagaccaaatattagtgtcaccgatgaagagcgatttgcttttgagaaactattaagtctagatattgaaataacaacaattatgacaccagatgataaaaagacttttttaaaagatatattgtaa

SEQ ID NO: 2516 - DNA, 447 bp, Enterococcus faecalis
aaagacttttttaaaagatatattgtaaaggagatcattatgaccaacgaagtaattttaatgagccatggccttatggcgaaagaaattttgaattcggctcaaatgatcttaggtgatcaaataaattatcctgttgtttctatgacgcctgatgatggtattgaaggtacctttaataaattagataaaattattggtactttaaatgatgcaaaaagaattgtgattttagcagatctgatgggtgggactccagcaaatactgccatgatgctagcaagtgaagactcaagaattcaggtaataactggagttaatttgggaatggttttagaatcattctttgctataaaagaggaaaatcttgtagaacatttattgaaaataggtaccgaaagtattaaaataccgaagttacaaattgctgaagaagaggaagagtaa

SEQ ID NO: 2517 - DNA, 225 bp, Enterococcus faecalis
aataacaattttaaagatgataaggagacttttaacatggtttacttcccaaaaatcgaaaaaattaaatatgaaggaacgaacacaaaaaatatgtacgcgtttcgacactataacccagaagaaataattatgggaaagactatgaaagaacatttacgatttgctgtagcatactggcacactatgacacaagacgttacagtgccgtcttcaacacgaatt

SEQ ID NO: 2518 - DNA, 405 bp, Enterococcus faecalis
atgaatacgattattgacctagcaaatacaatttttaaacctttaattgatttaggtgctgctcctttaatgactattgttttaacactgattgccctttgttttaaggtaaaacccactcgcgcattagaaggtggtcttaaactaggaattgctttaactggtatcagtgctattataggaattttaactactgctttctcagatgcaatggcctctttcgtagaacgtacaggaatttctttaaatattaccgatgttggttgggcacctttggccaccatcacttggggatctccttacaccctttactttcttttaattatggtgattgtcaatgtcattatgttaattctaaataaaacaaacacattagatgtggatattttcgacatttggcatcta

SEQ ID NO: 2519 - DNA, 327 bp, Enterococcus faecalis
ggagatccccaagtgatggtggccaaaggtgcccaaccaacatcggtaatatttaaagaaattcctgtacgttctacgaaagaggccattgcatctgagaaagcagtagttaaaattcctataatagcactgataccagttaaagcaattcctagtttaagaccaccttctaatgcgcgagtgggttttaccttaaaacaaagggcaatcagtgttaaaacaatagtcattaaaggagcagcacctaaatcaattaaaggtttaaaaattgtatttgctaggtcaataatcgtattcatttattttctccttcataagctaagataa

SEQ ID NO: 2520 - DNA, 423 bp, Enterococcus faecalis
cgactatcatggattttattaacacgacagaccgttcatcactattggctttttttcaatgtgaagataaagaagaagtttatcgttttttacaaaaaaattttaaaggagagatttaacatgatcaaaattttagctgcatgtggggctggggtaaactctagccatcaaatcaaatctgcattagaaacagaattatctaaaagaggctaccaagtttcttgcgatgccgtaatgattaaagatatcaatcaagagatgctatcccattatgatattttcgcccaaatcgccaaaacagatttgggtttcccaatcacgattcctgtagttgatgcaggcgcaattctttatcgaattccagcaatggctgaacctgtttatcaacaaatggaaagtatcattcactctttaaacaaatga

SEQ ID NO: 2521 - DNA, 519 bp, Enterococcus faecalis
tatattaaagaaacgaggggttctatggttattcaaacatcgattttttcattagatactacctatatttcaaacaaaaaaacacaagaagaagtttttgaagaagtttatttagacttgttaaaaaagaaattagttacacctgattttctaactaatttattggaacgagaacacaactatccgactggtttaagtttaacaccgattgatcctgcactaccgaatatcgccattccgcataccgaaagtacctttgtacggacgacaagaattatcccgattaaattgaaacaatccttatcatttcataacatgattatcccagatgaaacgctctctgtttcctttcttttcatgattttaaatgaaaacggtattgaacaaacgggtcttttagcgactatcatggattttattaacacgacagaccgttcatcactattggctttttttcaatgtgaagataaagaagaagtttatcgttttttacaaaaaaattttaaaggagagatttaa

SEQ ID NO: 2522 - DNA, 522 bp, Enterococcus faecalis
tattgttttattatgttttcgagaaggggatttgagtttaaagaaagggacagaattttaatagtagatacacgaggtaaggaggaaaacaaaatgcgtgtcatacttggttcagatttagatggaataaaattaaaagcagaaatgaaacaatacttattgcaagaaaaagttgaggtaatcgataaaagtgaaagtgcttcggaagactttatagaagcaacgcttgctgttgctcatgaagttttaaaggatactgaaagtttaggaatcgtttttgatggttatggggcaggtagttttatgactgctgctaaaattaaaggaatgattgtcgctgagttgtcagatgagcgttctgcatatatggcgcgagaacacaacaatgctcggatgatcacggtgggcgcaaaaattgttggaacggaactagccaaaaacataataaaagaattcttaacaggtcattatgcaggcgggcgtcatcaaatacgtgtagatatgttaaataaaatggcttaa

SEQ ID NO: 2523 - DNA, 534 bp, Enterococcus faecalis
tataaaggaagcgtttttatgaaaattgccattggttgtgatcatattgtgacggataccaaaatagcagtttctgattttttgaaagcaaagggatatgaaattttagatgtaggcacgtatgattttactcgaactcactatcctattttcggaaaaaaagtgggagaagccgtaatgagcaatcaggctgatttgggtatatgtatttgcggaacaggcgttggaattaccaatgcggttaacaaagtgccgggtatccgttctgctttagttcgcgatatgactacagcgttgtatgcgaaagaggaattgaacgcaaatgttattggtttcggtgggaaaataacaggagaattcttgatctgtgatatcgctgctgcctttattgaagcacactatcatccaacagaagacaacgaacaactaattgaaaaaattaatcaagttgaaaaacaacatccagaacaacaagatgcgcactttttcgatgaatttttagataaatggcaacgaggagtctatcacgattag

SEQ ID NO: 2524 - DNA, 303 bp, Enterococcus faecalis
agtagggatgtttatatgtcagcaaaagaaaaaacgatgaaatatggattggtaggcctctttttggggatattgttattagctcatctagatttattagctgaaaatcttagttatcttctcttaggattattacttttacttgttgcatatctaatcttggtaaaaaaattttattttttctcaaacttgattcctaaaaatactactgatataaatttaggtaaaaaatatggtacggcttctggcatcggcagtttagttatcgggattattttaataattctgggactatttttatag

SEQ ID NO: 2525 - DNA, 447 bp, Enterococcus faecalis
gaaaggagagaggaaatgacttatttagttctggtcagtcatggcgattttgctagagggttaaaaaattcattagggatgtttgctggcgatgagatagagaaagtcagagtgtttggcttacaacctggtgaatctaccgataattttggtaagcggtttctttgtgaagttgaaaaattaccgcaggaaacgaggctaatcgttttggctgatattgtaggtgggagtccacttgctactatttgtaaagtattagataagcaaaaaatgctagaaaattctctgattgttggaggagtgaattttccaatggctttaaatgcgcttctattgaaagaaactagtgaattatctgatttgaaaaaaatgatagtagcagatgcttgtcatggcattagagagttaactataactgaaggcgatgtaactgaagaggatatctaa

SEQ ID NO: 2526 - DNA, 525 bp, Enterococcus faecalis
agaggatatctaaaggagaagatgaacatgtcaatttcttttgttcgaatcgatgatcgaatgattcatggcttaattactttacgttggactaaagaaatgccatgtgatggcattatagctgtgaatgacaaagcagcaagtaaccccattttaaaggaagcatataaagcagctgcacaagataaaaaaacctttatttggacaatggcgcatttttttgatgtaaaggataaagtattagcgtctaagtcaaaatactttttgattacaaagagccctttggatatgaaaaaaattttggtagattggcattttgttccaagtgaagtaaaaatgattaatgttggaccggggaatgatcgcgaagggacaattaaattaggggataaccaatcctttacagcagaagaagcagcggcttttgaagaaattgaaaaggctggttacaaagtggattttgccttgttacctgatcaacgaattggttcttgggcgcattttaaagctaaatttggttactga

SEQ ID NO: 2527 - DNA, 870 bp, Enterococcus faecalis
aaagaggagagtagtattatgacaatcaactggatacaagcggctattttaggcctatttgcttgtctgtgttcaaattcttgtatggctggacaagcggtgggaaattatacgattgggcgtcctttagtcggcggattagtttgtggcattattttaggagatttaaaattaggaatcgcttgtggcgtagcaatgcaattagtttacattgctttggtcacacctggaggcacagtgtctgctgatgtgcgggcaatttcatatatcgggattcctttggcgatggtggcgatttcgaccaaagggttagatccacttggcggctctgcagccgacctggctaaatcggtcggcacattagttggaacgatcggaacggtattattttattctgttgccgcgttaaatttagtttggcaatcgtttggttggaaagatataaaaaaaggcaagcttgatcatttatatgccattaattttggttggccgtggatttctcatctacttttttcctttttgccaaccgtgattttaacctattttggggctacggctgttacagcaatgagagatgcattacctatggatggtcttgcaatgaaaacgctttttactgtaggtggcatgcttccgtgtgtgggaattgcaattttgttacgtcaaattgttaataagaacattgattttgtacctttttttgtagggttcacattagctgcttcattaaaactcaatttagtctcaataacgattattgcgcttctttttgctgtaattttttataaaattgctttgattaaaaacaatactaaactggttgattcaacaggaagtctaacgaatgatgacgaagaggaggacatatga

SEQ ID NO: 2528 - DNA, 816 bp, Enterococcus faecalis
acccaaaaaacgttaaagcattcttttgatttatggttttggggagcattaacttgtttttcacaacagcatatgcaaaccttcggctatctttcttcaatgcttcctattatcaaaaaactttatccaaaacatgaagaccaagtgaaagccattcaagcatatacagctttttttaacacaaatccaatgcttggaacggtcattgttggtgtgactgctagtatggaagaggctagagcaagtaagaatgaaattgatggagaaaccattaatgatatgagggcaggattaatgggaccgattgcagggattggcgattcattagttgatggtaccttgattcctatcttgttaggaatttccttaggaatgtccacgggcggttcgccaattggtgccatattttatattattgtttggacgttaatttcctattttggccaacgctttttgtattttagaggctatcattttggtgataaagcagtaagtttcttagttgggaaagaaggagccgctgttagagttgctatcggagttattggtagtatggttgtcggtggggtccttgcatcttgggtaaatgtaactacttctcttaaattaataggtgctgacggaaaagttttccttaaactgcaagataaaattgacagtatttatccaggattattaacgatacttgttaccttgttttgttggtggttaatgtccaaaaaacatgtttccgctatttggacgatgcttattttagttgttatttctctcgttggcgttttattaggtgttttcaatccaggattaacttactga

SEQ ID NO: 2529 - DNA, 729 bp, Enterococcus faecalis
ttaaaggagctttatcttatgtttcatcatatcttatcagaatttatgggaactgcattaatgatcgtatttggggtaggtgttcactgcgacgatgtcctaaaacgaacaaaatacgctggttctggtcacatgtttgcaatcactacttgggcttttggaatctctgttgttctgttcgtctttggcggagtctgtattaatccagcaatggccctcgctcaagctattttaggaatgattccatggtcttacttcattccctatgtcatcgctgaaatgttaggcggcatttgtggcgccgtcattgtttatattatgtatgctgatcatttcaagctatccgccgatagtgtcgatccgatcgccattcgtaatattttttctacaaatccgaaccaacgaaatttaccaagaaactattttgttgaaacttttgcaacattcatttttttaacatctattttagcgattgcacattcctacgaaacacaactacccattgctgttggcttgcttgtttgggcaatcggcatggggctaggtggtactacaggattcgcaatgaatcaagcacgtgatttaggtcctcgtatcgcctatcaacttttaccaatcaaaaataaaaccaataatgattggcaatatgggttgattgttcccggaactgcaccgtttttaggagccatttttgcgacacttttcgtaaaatttttcctaaaattctaa

SEQ ID NO: 2530 - DNA, 1035 bp, Enterococcus faecalis
aataggcagatcaaaccttgtgtttggtgcaaaactcagattatttttcttttcgtgaatgatcgttttgtttgttccttaattgaaaaaagcgacttgtccaattttgtaaaaaaacatagtaaaaatgttttctatgacattgcaaaagctgaagctgctgttcatcaacaaacaattgacactattcattttcatgaagttggagcaattgattcaattgttgacatcgttggcttttttatcctatgggaacagttagagattgaacaagtctattcaacgccaattacagatggaagtggcactatcacaattgcccatggagtcatgccaataccagttcccgctgtgatggaattacgtaaagaaacgaatttaatcattcaacaagactttgagataaaaactgaacttgtcacaccgactggcttagctatttttaaagaacttagtcctctatttgtcgcaccagaacaacgattaattgaaaaaataggttacggatttggcaaacgggaaacaggcaagttcaatgccctcagaggatcaatctttactgaaacacatagtaaaaaaaagaggacagaacaccatgaccaagtcttaaaaattgaaacaaatatagacaatcaaacacctgaacagttaggttacgtaatggatctattattagagcatggtgctctagatgtttttttcacgcccattcatatgaaaaaaaaccgaagtgccattctattaacggttttaacaacaacagaggaaaaagaatattttacagaactactctttaaacatacttctacaattggtatgcgttttcaaacaatggaacgtagtgtgatggaccgttctttcaaaatcttggaaacaccttttggtaaggtccatattaaaaaaaatcattatcatggcctattgaaagagtctattgaataccaagattgtgaacgaattgctaaacaatataattttacaatcgaggaagtctatcgcctcgtccaaacattaaataacaaaactattgattaa

SEQ ID NO: 2531 - DNA, 330 bp, Enterococcus faecalis
ggaacaaacaaaacgatcattcacgaaaagaaaaataatctgagttttgcaccaaacacaaggtttgatctgcctattttactgaaagattcgtttaaacctggagactatacctataccattaagttgaaaaaccatgaggggagctggacgttctcaaaagatttcacgataaacaaaaagcaagctgatcagtataataagcgttctgttgatcataaagtcaaaaaccttcactggcttaagtacctcatggcctttttaattctagttattttaggtaccgtctgctatatcttgggaaaaaagaagggaaaaatgaggttgtaa

SEQ ID NO: 2532 - DNA, 1128 bp, Enterococcus faecalis
attgtcaaattagcgttaatttacgcaagtcattggtgttccttattttggaaagtagtattatactattattgttcaatgattcacaatagaaacaaggaggaaagaaccatgtataaagcaattgtcgcagcaaaaggaaaaacaacaaaaattgttgaaaaagaatcgcgtccattgaaagataatgaagcgcggttgaaaatggaagtctgtggtgtctgtcatacggatttacacgttaagaatgcagattttggcgatgttagcggttgtaccttaggtcacgaaggaattgggattgtgacggaggttggaaaagacgttactagtttaaaaattggtgatcgtgcatctgttgcatggttttatgaaggctgcgggcattgcgaatattgtacttctggtcgagaaacgctttgtcgttcagtaaaaaatgctggatatacagttgatggtgccatggccgaagaatgcatcgtcacagacggttatgcagtgaaagtgccagaaaatttagcatcagagccagcttcctctattacttgtgcaggggtaacaacctacaaagcgataaaagaatctgggattcgtccaggtcaatggctaatgatttcaggattaggtgggctaggtaatctagctttacaatatgccaagcatgtctttaatgcaaaagtagtagctgttgatgtgaatgataatcagttagcttttgcgaaagaaatgggtgctgatcttttaattaatccagttaaagatcctgattttgctgcacaacttcaaaaagaaattggcggtgtccatgcagcagtagtcactgcggtagctaaatcagcatttaatggcgcagtcgatgcagtccgtgcgggaggaacggttgtcgccgttggattgcctgttgagacaatggatttatctattccacgtcttgttcttgatggcattcacgtagtcggatcgttagttggaacccgtcaagatttaagagaagctttccaattcggtgcagaaggaaaagttgttcctgtttgtcaaacacgtcaaccagaagaaattaatgctatttttgaagaaatggaacaaggaaaaattcgcgggcgcatggtcattgattttcgcagttaa

SEQ ID NO: 2533 - DNA, 414 bp, Enterococcus faecalis
tctgaaaaccatgaaaggatggatggaatgtttgcaaatcttactctccgtgagagacgactgcttaagcaagcacaagtgggagccacaattagctttattcttttgtttgtaccaattctgacaatcattcttttgcatactagtgacttattagcaaaatggctaggtatagttggggtaattatggttttaccattgttgtattttgcgtggcagattttaaagatagcctataaagatcaaaaagataatccaacgcctcctttgtgggttccgaaagtttatgggattgggctttcgatcaatccctatcaccggtttggaaagttaatttttatattgctagcggtactgatagttggcatcatcattagtttgcttttcacaccagcaagtcaaatcaatcactaa

SEQ ID NO: 2534 - DNA, 219 bp, Enterococcus faecalis
ttcacttataatgatgattttattgcgaaaatatctacatcagaaaaagaaagactttttcaaaaatctaatacctgttgctcaaatctagtctatttaaaaataatcaacaccctcctgctcagcaagagggtgttaattactcgttttttagtgattgatttgacttgctggtgtgaaaagcaaactaatgatgatgccaactatcagtaccgctag

SEQ ID NO: 2535 - DNA, 1122 bp, Enterococcus faecalis
tccccgtgttggccatttaaggcaatagctttttctcaaccatatatgaacgttcaacaaagagtcattgttcggaaagaagacaaagataaatttcattccactaaagatttcgaaggcgttcgtgcaggtgcccaaaagcaaacgacacaagaagaattaattaaaaccgaattaaccggtgctgtccctacttctcttcaaaaaattccagatttaattatgaatctaaaaaataataaattagatgcagtcgttatggaagaaccggttggcgaagcctatgtttctcaaaatgaggatttagcttttgctgatgttacctttgaaaaaggctcaaaagatactgccgttgcttttcctaaagatgcgcccgttttgacggagaaagtaaatgcctctattaaacaaattaatgatcaaaaattaatggacggttataaaaaagaagccaatcaattaatgttccaaaaagatcaaagctttttacaaaagtatggaaagttctaccttaacggtgcaggctataccattttcctagctttcattggtgttttgtttggtgccattttaggggcattacttgccttaatgaagttagccaattccaaaattttacgtggcattgccattgcttatattgaatatgttcgtggcactcctttgcttgttcaaatttttattgtctatttcgggacaggcgttcttggcttagacttatcaaaagtagcagctggttgtattgccctttctttaaacagtggtgcatatgtagcagaaattattcgtgctggtattcaggcagttaataaaggacaattggaagctgctcgttctttgggaatgaatcaaaaccaagcaatgcgatacatcattttcccacaagctattaaaaatattttaccagcgttaggcaatgaatttgttacagtaattaaagaatcttccgttgtttcagtcattggtgtttcagaactaattttccaagctggcaacgttcaaggagcaagttttaaacccttcttaccttatttaattgtatcgttaatttatttcgtcctaacctttactatctcacgtctattaggtgttgctgaaaggagaatgagtactagtgattaa

SEQ ID NO: 2536 - DNA, 654 bp, Enterococcus faecalis
attgaagctggtgaagttgtcgtaattattggcccttctggtagtggtaaaagtacttttttacgttgcttgaacttattagaaacaccaactggtggcagcgttgaatttgaaggaaaaaatttattagataaaaataccaacattgatcaacttcgtcaaaaaatgggaatggtattccaaaatttcaatcttttcccgcataaaaatgtcttggaaaacttaacgattagtcctgttaaagtaaaaaaagaagccgcttctgaagccacagaacatgctctttctttactggaacaagttggtttatcagataaaaaagaaaattatccctctcaactttctggtgggcaacaacaacgggtagcgattgctcgtgctttagccatgcgccctgacgtgatgctgttcgatgaaccaacttctgccttagaccctgaaatggtgggcgaagtgctatccgttatgaaaaatttagctattgaagggatgacaatggtagtggttacccacgaaatgggcttcgcaaaagaagtcgcggaccgtgtcatttttatggatgcaggaatcattcaagaagaaggcacacctgaagaaatttttgatgcgccacaaaacccaagaacacaagattttctaagaaaagttttataa

SEQ ID NO: 2537 - DNA, 1170 bp, Enterococcus faecalis
aaaggagcacctagtatggatcgcaagaatatcgcaacacgttaccaacaacctactgaaaatttactcatggatattgcaacattggcgaaaaagaccccaaatttaatcgatttatcgattggtgaccctgacttaattaccgatgagcggattatcgaacaagcagctaacgatgccaaaaatgggcatacaaaatataccgcttctgatggtagcgaggcattcattgaggcggtcattcagttttatcagtcacattatcaattatcttttcaaccgaatcaagtccgggccacagttggcgctctacacgggatgtaccttgccttacaagtgattctaaatcctggagatgaagtgattattcatgaaccttatttctctccttataaagaccaagtccttttagcagatggcgttccggtctttttaccaacctatgaagaagatggtttccaaattgatgtagctcttttgaaagaaaaaatcacgcctaaaaccaaagcgattattcttaattcaccgaataacccgacaggcgctgttttctctgaagaaactttcagagaaattgcacaggtagcgattgaacacaacttatacattctttcagatgaagtttatgaagccttttgtttccaagaaacgtttactcccatggctacgtttgctccagaaaatactatcacttttggcagcttttcaaaagcctttgcaatgactggttggcgtattggttatatgattgccccagactatattaacgaagtagccaaattaattaatgaaggcgttacgtattctgcgcctacgttgtcacagcaagcaggaatctatgcgttacaacattttgacgaatttgtagacccaatcgttgaagtgttccaaacacgtttagagtatgtggcacaacgagtagcaaagattcctttcctttcgcttcatccagtcaaaggaagtatatacgccttcattaacattcaaaaaaccggactaacttccgttccttttgtggaaaagcttttaaaagagacacaagtattagtgattcctggaaaagcatttggtgaaacaacaggcgatgagtacattcgtttagccgcaacacaaaatttagatttattaaaggaagcgttcgatcgaattgaaagaatgacctttgaataa

SEQ ID NO: 2538 - DNA, 327 bp, Enterococcus faecalis
aaaggaggcaaacaaatgactgaaaaacttgctgtttttacagggaaattagcagaggctggtgtgttaaatgagacgcagccattgtcaatgcgattacatttagaaaatatccaagcagaaagtgatccagaatccattgttcccttattttctcatggggtaattttaaacatacttgttgaacagttagaggaaagtatcccactgtctcacttgaaaaaagggaccaaagtccgtttcacagtcgtgggcttgccgccgatgactatgtcaattccaccgcatgttggcgggcaagcgattgaattgatagaagaaatctaa

SEQ ID NO: 2539 - DNA, 864 bp, Enterococcus faecalis
aaggtggggaatagagtgaatcaaaaacgagtgaccttacttttggatttaactttgttggtaggaattgttttggttgtcggcacaaccatctttatggccttaggaacgaatgatttctttgtggacttaagttgtctattaatttcagttatcttaattatcgttacctattttgtaagaattacagcggggttaacattttcgcttatatttatttttctacaattgacctatgttgtatatcagtatgtctatcatgatttgtttagctatggctcattattttggctaatcatgccgccgctctactgtttaacaatctatgcagtgacttatcaaattcgtacgattgaagaagaaaatattcgcttacgtaaagaaacttcacggttaaatgcgttagatgcagtaactaatttaagaacagcaaaaatgtacgaggaaggattcgatttattttctgatatttctacacgttatgaagcgccgttatatttagtcgtgatccaagtggcctattgggaaagtattcgtaacttattaagtcctgaacaaaaaaatgaattgctacaaatcgtgacagcggcgattaaagagacaacggatgatcgcttcttaccatactttatcgacggcacaccgccgacttgggcgttattaattttccgcgatggggatgacggatacactactagaaaagaattcaaacaacaagctcaagagaaatttacccattctgaaaccttaagaaatattactttgacattacaagtttcctataccaaatatgatcctgccgaatttaacaacgcttcagaatttttaggggatggaattaattctcttcaatatgatgtttaa

SEQ ID NO: 2540 - DNA, 1758 bp, Enterococcus faecalis
aaatacgactggtattcaaaacaaaagacgattgaaatccctttggaactgattaaagagacaaatacattgactgttgaaggccaaattattaatcaggcaggaaacgacatgtataatttaattgaaactccagcaaattggttaacgatgtatgaaggatctaacgtaaacttccaatacgatttacaattaccagagaatacgattcattctttttataatcattttgtgggagcagacacgattgcgaataaacacagtgttattttgacaccagaaaatgcatcggaaaaagaattagctgcagcgacccatgcgttagctggtgctgctcgtttgattactacctcagaagaattgttgccaatggcttctttgaacaaagaacagtcagcaccctatcagttgattattgccagctatgataaattaccagatcagtataaaagtcaaattgatagcaaacgcgtggaggaccaggctgtcttaaaatttttcaatcaaccagataagcatgttttagtagctacttctaaagatgaggacttacttgttcgtgcgggacgttatttagcaaactatgaattaatgacccaaacagataaagaagagacaacagttgatgagaataccgatacgtttagttcaactttagaatttgatggaaattatccattaacctcaacgggggacaaactagaaggggcttatcaccaagaacaaacgtactttgtcaatttaccagtggatcgaaacaatgccaatggaagtcgcgtgcatttacattttaaatacgctgaaaacttagattttgattcttctttagtgacggtctatgccaatgacaaaccaattggcagcaagaaattaaccgctgctcgtgcgaacggtgatgaattaaatctcgaatttccaaagaacttagaaattgctgatagttttgttttaaaagttgcttttgatttgaatgttaaatcaccagaagttttacgaaatggtcagactccatgggcctttattgaaaataattcgaatgcgtttattcaaacagaagaactgaatgacatattatttaacaactatccgaacatttttatcagaagccgttcttttgctgatttagcgattttattaccagaaaaaatggacgataactattttaaagtgttgaccaatctatttaacttaattggtaattatgccgaaagtaatgtcggtgagattacgtattataaaaaagcgcctaaaaatgcggcattagaaaatcataacttgattatttttggtacgcctaaggataatccgatgattcgtaagttaaacgatcaattatatttccattatgataaggacttcacacgttttgtttcaaacgagaaactgagcattgaaaaagattatggtaaacaaatcggtacggcgcagttaatgttttctccatataatgcgaaagccgcggcgttaatcttaacaggagctaaatcacaaggtgtctttttagcctctacacaagtgaatacagagaagaatacttctatgtacaaaggagatgccattgtggtcgatccgaactatcgtcgctatgattatcgtttcaaaaaacgtgtaagcaacgttagcaacgaatcattaggtaaacgaattgtcaataatcataaattaatgatttatctatttgtcttcttaattggtatgaccattattggattaagtgcgttcttcatcgtgaagaagaatttgaaaggtggggaatag

SEQ ID NO: 2541 - DNA, 381 bp, Enterococcus faecalis
ataaggaggaaacgtgcaatgaaacaaaaaacagtcactttaatagggttgttctttctggcaattctgattggtgtcgcaagtccgaccgtatatgccgaaaacaaagaacaagacaaccatacctttacacaaccttttcaaaataaaacaatctctttaacaggtacttctgtccgtagcaccatgtattttacaaaaattgattattgggacgtaaaaaaagcatcattcaatatgacctaccaaatcacacaattaaaaaataatcagacctcagatttaactgtggcagttaatggtgtgaagttttattcttggcgtcctgaaaatacgactggtattcaaaacaaaagacgattgaaatccctttggaactga

SEQ ID NO: 2542 - DNA, 1275 bp, Enterococcus faecalis
ggaggaagacaaatgaccattgctgacattgtaatgttaacagcaactatcattatttggagtctactaattgtaaatattctcttagttatttttggctatgtttattatttaaaaacagatcctgtcgcaccaccacctgtagaggacgaagacgcgccgtttgtttcaattatggtgccggcccataatgaaggaattgtcattgtgcgaacagttgaagcgttattgaattttaattatccgcaagatcgctatgaaattattgtgattaatgacaactcaagtgataatagtgctgagcttttagctaacgtccaaaaaaaggcggttaatcgaaatttgcagattattaatacagacaatataacaggtgggaaaggtaagtctaatgccttaaacattggtttcaagcaagccaagggggacgtgattgccatttatgatgcggacaatacacctgaaccgaatgcactccgttatttagttggagagttaattgctagtgaggaatacggcgcggttattggtaaatttagaacgagaaatcgcaatgcaagcctgttgacacgctttattaatatcgaaacacttgcctttcaatggatggcacaagccggtcgttttcaattatttaagttatgcacgattcctggcacaaatttcattgttcgtcgtagtattattgaagccattggcggctgggatgacaaagcgttagccgaagatacagaaatcagtttccgcatctatatgatgggctataaaattaagtttcaaccaaaagcagtgacgtgggagcaagagccacaaactttgtcagtttggttccgacaacggacgcgatgggtcaaaggcaatatttatgtcattgttaaaaatgctaaattattgtttaatcctaaagcgagtcggatccgttttgatattttatatttcttgtccatttattttctcttaatgacatcgctcgttttgtcagacatcatgttagttttatcaatgtctggttacttaacaacgaccctgcaaggatttagcaattccttgtggttgttagcgattttgttatttattttcagtacttttgtcagtattacaaccgaaaaaggcgaaatgactttagagaatatcttaattattgccttgatgtatattacatacagtcagatgtggctagtagtcgccgcttatggcatggtgatgtatattaaagaaaatgtttttcataaacaaacacaaacaaaatggtacaaaactgaacgatttaaataa

SEQ ID NO: 2543 - DNA, 1590 bp, Enterococcus faecalis
agggaattgaaaaataaacaatatcttattggctgggtgtgtttcttactctttttcgttttttgtggctttgccaaaccggcgctggctgcaccaagtaaacatgtcttacttgtctatgacagcttgaatattgctgggaaaaaagaaaatgatgtggatgctttacaacgagtgttgacgagttttggagtagaagttcagagtgtggcggtatcagattatgtacctggcgaattgctaaatgatggctatgacagtttgatttctatggtgaattggcctgaacaagccggcgttattgcctctgattttctagcagatcgagttcattttaaaggcaaacaattacacattggtcgaaacatgcgtgacgatgaaaaacaatattttagcggtacgtggaaagaattaagtcatcgtcaatatcggttagaagatgaaaaaaaccgtttttctcaagtattgccttttcaagatcaatcagttgtgctggaaaatacgcaaggtcagacggttggccgattaaaaacacaagaattagcaccagaagaatatccatttggtgtaattgagaatgggcatgcttttctaccaatgtttgaacgcaaaggcgctgtttttttagaaagcttagacgtaattagtcaatggctggaaagtgaaaaaatgtcacggccgtttttgacgatttctgattttaacccgttaagagatatgtctgtggcaacctatttgcaagaagaattagttaaaaccacgtatccttatattttatccagtacgagcgtttcacaaaacaatacgattttaccttataaactatttacgaatgcgttacgtgcgtttgcttcgacgggggtcattttcttagaaacaccggtcgttaacaatgttgatttaaatgaccaacgtgccttgaaacaattgatggagcagcagattagtttattggtcgacagacatgtctatccagtaggcatttctgctccaggatactggaatcaagaccttcaataccaagaggatggtctagcaattagtgatacagtgattctaagagaaaatccgccgattgaacgcgttttttatcgaaaccaaacgggagaatcaatcacttataagaatgctttgtttgatttaccgtatgattatttatcggggattgaatggacggataaagataatccgaatgactatcgatttccaatgccgaccaccattagtttttcatttccaaattctaaaaaagaagtggatcatctaattcaagaagtcaaggaagcaccaatagtgtttagtgtttcagaagcggatcaacatttcactgttcaaacacaaacgcagaaaatcgaatttcggaataatcggttcttcttaaacaatcaaattgtcaatggtttggctgatacaggggcttcaacagttgaaaaacaacgatttacagggttattttcattctttttcagtattacaaacaatattttgattggcgttgtcacgctgactttaatcatcctgattattttgtttatgattggacgaaagaattatcggtcgaaatatattaataaggaggaagacaaatga

SEQ ID NO: 2544 - DNA, 1530 bp, Enterococcus faecalis
ggtgaaagcatggaaaagatcaaaaaatacatgaactcggcttttgaatggttgagtcgttatatttctccaagtcttttggccgttttagggattgggttagtgacaagcattttgttattcgtttatccgattaatggcttgggagataatggcgagtattttcgtgtgttaaattcaaatagtctttatcgtgtcaatggtgatagctacgacaatgtggtctattttgttaaggacttttcaattatgcgttattttaatgaaacaacgacgcactttgtttccactcaacaatttttcattaccgttgccatttggcttaataaacttttttatagtcagacacttttcgatattcgtttcttaggtttcgtttatcttagttgttttttagtgtcaatttatattctggtgcgaggcttaaccgaagacgtatctttgaaaaaaagttatcttatctccttgttggttattttcatcttaggggatacctcctatacgatttattttaattccttttatacagaagcgacgagttttttactttctgtgagtgtcttagcattttctgtctatttttatcgggtgacgaaaccacgaacttggctcagaagaatagttttagttatcttggcacaagcagtagtacttttaataggaacaacacgccaagaatatttgctgattattggcgtaattattgctggattaggattttttgtctacttgtcacaacgttatcaacgattgtcaatgacggcctttttaattgcgttgattggttttacaacgttagcggcttttatcgttcctaacgatatctatgaacgtgatgtctaccacagtatgacgcgcggtgtaatgaaggatagtaaggttccagataaacggatgtcagagggcggaatcaacccgcaatatgggttgcaaaagggacgttcctactttgaagaatacagtcctgtgtcaccaacttctgaacaaatgaaaaaagatttttttgataaaacgagttttggatgggtgttattgaattatttaaattatccatctgaattatggcaaggactgaattcagcggtcccaaatgtttacttagtaaagcctaataatgtggggaattttgagaaaacgacggggcgtgcaccgctggaacaatctaaattttttatggtgtataaccgtattaaagccagtttttttcctaaaaactttgctttctatctattattaggcgtgattctgtttggtttatatggcgttggtttatacagaggactcaagagaaacgaacccagattagtttttcgcttctttttaatgacaggaatttatctaaatttattagttgttttcatttcaacaattattattgatggggatagtgacttagtacgtcatttgtttttagtctcagtatttttagattttctcttgttacaaattgtttctgatgttattggtaaacgaatgtggcaagatacaacaccacaagtcattggggaggtagagggaattgaaaaataa

SEQ ID NO: 2545 - DNA, 558 bp, Enterococcus faecalis
actcaaaaccacggtgttcggcaacttcttggtgtaaatatcgacttaattacgctgggttatctgtacaaagaatttgggatttcagcagactacttgcagtatcattaccaattaatagatgatggctatatttctgatgatttacctctttatcaaacgaagtttaatcatcaaacaaataaatacgaaaacaacggaacacttaatattattgaatctttattaacgattgtccatttaagtgaagtgggtatggcgaagcagactagtattgattttgtgcgaaaacaagttcagcaaggaacgctttttaactcgtatgatttaaatggatcgcccgtggataaaaatcaatctgcagctagttatgcgatagcggctttaattggtgttgccgaaaatgacaaagagttgtatcgtgcggcaattacagtacttaataattttcaaattatggattcaagcagtccgatttatggaggatttggtgataaagttacgaaacaagtctattcctataataacttaatggctcttttggcctatgatttctag

SEQ ID NO: 2546 - DNA, 1092 bp, Enterococcus faecalis
aaatccatgcagatgagaacagaaaggcatattttattaaatggggaagataatgaagaagtgattccgaaaataagtaaagtttttggaattcaaaatttatcgccaagtattggtattgaaaaagaaatgccagcgattcgtgcaatggttcaagaggttgttcgggaagtttatacgccaggtaagacgtttaaaattactgctaaacgctcggaccattcatttgaacttgattcaaatggcttgaatcaagaattaggtggggccgttattgaagccattccggaaattcaagtacaaatgaaaaagcctgatattaacttaagaattgaaattcgtaaagatgcggcgtatttatcttatgaaacgattcgcggtgcgggtggattgccagtgggcaccagtggtcgtggtatgttgatgttgtcaggaggcattgattcaccagttgctggttatttagctatgaaacgtggcgtggaagtggaagctgtccattttgctagtccgccttatacaagtgaacaagcgttacaaaaggctaaagatttagctgaaaaattagtcccttatgtaggaactattcaatttattgaagtgccctttacagaaattcaagaagaaataaaacgagttgttccccaaggctacttaatgaccattacacgacgtttaatgttacgcttaacagatgcaattcgtgaaatgcggaaaggtttagtcattattaatggtgaatcgttagcacaagtggcttcgcaaacacttcaaagtatggtagcaattaatgaggttacctcaacaccgataattcgacccgttgtttcaatggataagacagaaattatcgaaattgccgaaaaaattgacacgtttgaattagccatccaacccttcgaagattgttgtacaatttttgcgccaccgcaaccgaaaacacgacctcgcttggataaagcgcaagagtatgaagcgcgcttagacttggaaggtttaatggctcgggccttagaaggactcaaaattacagagatttcagcagaaacagcgaaagataaacaagaagacgaatttgcagatttcctataa

SEQ ID NO: 2547 - DNA, 213 bp, Enterococcus faecalis
attaaatggaacgagatggaacttgcgattccttccttcttaatcttgttaggaatgccattgacatacagcatttcagatgggattgccttaggctttatcttctatccaattacaatgattgcgtcaaaacgtgcgaaagaagtttcgccaattatgtatggcttgttctttgtttttgtcggattcatgtggatcctgaatgcgcaataa

SEQ ID NO: 2548 - DNA, 1041 bp, Enterococcus faecalis
attttaggaggacggaacatgaaagaaaaaataagttcatattttgaacttgaacaattgaatacgaatatgaaacgagaaatgttagctggtttcaccacgtttatctcaatggcgtatattttgttcgttaatccaaccgtacttggtgcttctggcatggacgaaggcgctgtttttactgccaccgctttagcgagtgccttaggttgtattttaatgggtgtgttggcgaaatatccgattgcgacagcaccagctttaggaattaatgcattctttgcttattcagtctctgttggtatggggattccttggcaaacgacattagcgggcgtttttgtggcttcattgatatttattttaattacaatttttaaattacgcgagctaattattgatgcaattcctgcagacttgaaatttgccatttcaggtgggatcgggttgtttattgcttttcttggtttaagccaaggtggcttaattgtggctaatgatgcgacactcgttggcttaggacctttgaatgttggttcaacgtgggttaccattgtcggcttagtcgtaactgcaattttgttagttcgtcgagtaccgggtggtatttttattgggatggcgatttcaacgattgttggtttagcgacaggcgttattccaatgcctgataagattatttcaagcgcgccaagtttagaaccaacatttttagtggcgttaggacatgtgaaagatatcaatacgattcaaatgtgggtcgtggttttaacgttcctattagtaacattctttgatacggctggtacgttggtgggcttagccaatcaagcaggttttatgaaggacaataaaatgccgcgtgtggggaaagctttagccgctgattcaacagcgatgttagctggttctctattagggacatcgccagttggcgcatatgtcgaatcatctgcggggattgctgtgggtggtcgttcaggaatcacagctattacaaccgggattttatttattttcagtttgctattttctccttag

SEQ ID NO: 2549 - DNA, 198 bp, Enterococcus faecalis
aaaacagtaaacgtaatatgtaactattggcgtgatggattaaaaaaggtctgtgctttggtctgtgcttttaatcaaaactatgtgtatttaactaattatgttttgttgcaaattcctattgtatcaagtaaaatggggctattcgtgcttaataatatctattcaaccaagcacgttgtttcattaataaattga

SEQ ID NO: 2550 - DNA, 294 bp, Enterococcus faecalis
tgtgggacttattcggatggtcattattcaaacagtagttacatcgtatggttggtactgataggcgtgtatttgatgtattacgtaatgacaataaaactaaaattaaggttaagatatcagtggttagccagtgtgatagttttgttttcatatttttcaatttcaggctatatagatgggggtaccgctgactggacaagttacctcatttatttttttatcagtataggtatatcaggtataactattcttttcccgttgggtttaaaaaacagtaaacgtaatatgtaa

SEQ ID NO: 2551 - DNA, 342 bp, Enterococcus faecalis
cttatgaattggggaagaataagggcattatcgtcgaaggttcctgatgaactttggtattctgtaattctattgtttactgtaccaatggaaggggttcctagttatattcgttttatcccagtaattggcatagtgtgcagtcttttagcttataaattttcccaaaaaaaagatttattagtgataatcagtcagttggcaatattaatatttgcatttatagctttattctatgtacgaagtttattctggactattctgttaacagcatgggtagtaattgaattaggaactttattagcttatattaaaaataaagatttggagagcaaacaatga

SEQ ID NO: 2552 - DNA, 243 bp, Enterococcus faecalis
agctatatatataatgaaatcggaggtttttttatgttacctatagggatagattttggcacaaaagatgctattctagcatcagctgtgttagtaattctagggatgacagttatttttcattggtcagtatgggagtttgttattacagaggcaatgattattctagcttttcatgcaggcgggaaaaaacaggataagcgtatagaagataagtataagagaatgaaaaagggggattaa

SEQ ID NO: 2553 - DNA, 354 bp, Enterococcus faecalis
cacatttgttctatgacagaaagaagtagaaaaaaggaggcgctagaagtgaaattagaattaaataatcgatcggcagttattataagtactgtatttatacttttaaacacagctgtgtggattaagtttttctttttctataatccctatcatggtgcctttgatttgttgtggacgttaccaatcggcttgataggagctattcctagtatgtatgtaaagagtgtaggattgagaatatacttcattgtgatgaatattttacttgcctttagtttcgtacttccttggatactgttggcattactaggaagcatagaagagagaatacaccagaatggaaaagattaa

SEQ ID NO: 2554 - DNA, 291 bp, Enterococcus faecalis
ggcagtaagtgttttcactgtttaagtaattttgatataattaagtacaaagaaaggttgaatgatatgaaaaagatacgtgatttttgcaatcaaggcgaaatttattttaaagaaatgactaagacaaagcgatttttcatagcattagtagctgtaataatttatatgtttgtaaaaagtatattgcataatgtagttggattttggatatctataattattggagttgctatactgtatagcatgttaattttactagcacatttgttctatgacagaaagaagtag

SEQ ID NO: 2555 - DNA, 204 bp, Enterococcus faecalis
gtgaaaactggaacagttaaaagttttaatcataaaagaggctatgggtttattattgccgaagatggatcagagatttttgttcatcaaacaggtatttgtatgccaggatttagaaaattgattgaaggccaaacagtggaatacgaaactgcagaacatgaagggcgaacaaaagcggtaaatgttactgtaattgaatag

SEQ ID NO: 2556 - DNA, 591 bp, Enterococcus faecalis
ataaggggtgctattaaaatgatagaaattaactacgatattccgggaaaagttgagcttatttccgagctaaaagaaatttttagcggagtggataaagtgattaatgatttagaacaggaaaaatctgtcctagagaaagagttagaaacgctagaaaatacgaaaacttttacggtagataatcttaagagaaaacctgaaataaataggcttttaactgaaaacagtcatttactaacacaaatgaagaaagaacgtgaggagctacagcaatcttgttttacttattttcctaataaagtaggagatattgactctcaatacagacaagcgattgaaaaacaactagagcccgtggaacaagaaatagcacttttacttaaacaattaaatgaaaaggccatgtttataaaatcagttaaagtaaaagctaatgcaatctataatcgtgagatagtagacgaaggcaataaaatcattggagttactcgacataacagaagtgtaataggtatttcaagttatgtttcagctcctaatctagtggaaagagctatgaaatatgaacgtggacaacttaaatcataa

SEQ ID NO: 2557 - DNA, 219 bp, Enterococcus faecalis
aaaattatgaaagaggtaagaaatatgacagcggaagatattaaaaaagttttagaggaatttgtagatgaagaagggcaatttgacattgataaagcttcggaagcattagaagagttaattaaagaaagtttaggtgattctatggaatcagataaagaagataaagaagataaacctgatccatttaaaaaaatcatgtctaaatatgataaataa

SEQ ID NO: 2558 - DNA, 246 bp, Enterococcus faecalis
ggcttacccttgagaagaggtattcttatgacagaagataagttatttcatttaacagataagtccaatatcaatagtattagaaaacacggtttagtaggagttaaaaaagcaaaggattttttaagaagagaatacggaacagaccatacgctctttaatcagcaaacctattttattctaaatacctacgggtggagaggttacgatctcagctgtgctacttttatgtttgtaaaaaagtga

SEQ ID NO: 2559 - DNA, 543 bp, Enterococcus faecalis
agaggatgtgtgacttctttgctttatgagcgtatccgtccagagtttcatctcactcgctggcaatattacgaaaaagcacgatatgagttaaaaggggtagagcttgaaagtgcaaaaatatttttcaacgggctaaagaacctatccgaatcagacagaaatattttaattgacgtctattatcgttcaaaagaatattgtaaatttaatcgacaaataggactatatcagtctgccagaccaatttctgatgatgcaatagcagaacaatacggaattgctaaaaaagaagtaactaaagtaagacggcaagcgatagagcatttagcggaagaaatgcggaaaattatattagccataagtacagcctttcatttgaagataggcaaagacttatatctagttaggcttataaacgaaggaacatacaaagaacagtttgttctagggaataaaagcgaagctaaagtgtttagtgcagagaaggaagatacaattagaaagtttatgcagcaagggtttgagagagagccagcatga

SEQ ID NO: 2560 - DNA, 564 bp, Enterococcus faecalis
aatctgacaaatcagacacctaaaaaagccggcactttcggcatcctaaaaaagtcaggaaagagaggcatgttatcaatggatccattcgatgaaattgttataaaaaactacctctcatttccgttggtgttgcaaaagttgctttcaataaaaaaactaagacgtattgaattttttagccaaaatatggcaacgcatattgtgtttgatgagttaggaatgactacaaaaggcttccgaccagataaagaagtagaaaagcttttgttaaagttagagctaatagataaacgaattgaacgcacactatttcgacaaaaacattttgaacggttttgggctactcttaagcctttagagcaacaattgctcattaggcgattcaagtataaagaagaggttaattgccctcaaagtcttgttgagagcgtactagatgagattgaagagatagaaacagctatttgttttatggaaaatatagaactagaagaagaaaacgagctttccgacgatgtagaagaaaacctagagaggatgtgtgacttctttgctttatga

SEQ ID NO: 2561 - DNA, 201 bp, Enterococcus faecalis
gacaaggagagtagcgttatgcaagttagaatttttcaaagtggaaatatcaataaattagagagtgagctaaacgattttttagaggagaatccgtatattaagataaaagacattaaacagacaggggaaagctacggagatgccgaggaaattttatctttaacaacggtttctatttggtatgaggaggaagaataa

SEQ ID NO: 2562 - DNA, 459 bp, Enterococcus faecalis
gtaaccaaacgaataaaacaaaaaaagacaaagaaaagaggaaatcttatgcttataatatcgacagaaaaagaaccaaattttaaatatgaagaaattacaaggaattttttatcaaatatgttggcttttacacgaggacattttactggtgatatttcacatttttcccctatcgttttagcggaaatgaaaaaagcccctaattggttagaagaagctgcaggaggtatgcaaggagtgattgtacagtctttattaaaagatgaaaatttttcgagtgtcgaacagcttaaaggtgaactaggaagactgattcgactttacttcgcattagcaaaagataatcttactgagaatcaggaaagtttgtatatagacctttttgataaatttacgttccttttgttatgttcggatgagtttataacgtatcttgatagccaaccaaaattttaa

SEQ ID NO: 2563 - DNA, 2388 bp, Enterococcus faecalis
aaattgagtatctatgtaagtaagggatttagtaaaaaaatgaagatggtagagggcatctccccttttcaatatcttgtggaatacgtaccagagaaagtaactctaggagaacaggctaccaaagaatcaatagaaccgattaagcgaaaagcaagttattttcttgctggcgaactaataggtaaacgctcaaacgataatttgttaagaaaagaattaattgctatcgattatgacgagctagaggatagagatttcgaaaattttataaaaaagattgctgaagctttaaaagggattagttatatcctctatcctacgataaaaaataatgtttcagattttggtttaagatatcggctagttatagatacagacagaagctatacaaaagaggaaaacgattgtctttggcaaaatacagtaaataaaattggtatgaaagctgatttagccagtaaaacttattcgcaagtagcaggattaccgatattaaatgagttttcatcagaaacacttattgttcgtcaacaagcgaatcctttaaaagtagatgagtatttaagtgtatcagaagaacaacaaacgtacaaagaagaaaagatcgttcgcaaggagttaaccaaggaagtagcaattaaaatggtagaggcttatgtcgaaaatgtaggagaaaaattactggaccgtgcttattatttgaacccttatatgaacattaaatacgcttttgaaacaggggagatagattttgataccgttcaggaaagtttaactcttttagctttgggtaatagcgattgggcaacccataatattgaacattttaagcgtgatacctcgcccgtcaagaatggaacgccgttcgtggattttttcggttgggcgtataacgatccttatgaagaatttgaggggatagtgttagaagagacacaggttctttattctgggaacgagttaaagtttgcactagctgaacgaaggaaaaaggaactgaaaaagcttaaaagaagttgggaaaaaagcggcggaagggggaaaccaccgacatctctatccacgttacagtgtggtcgaattctccaagaatatattgagttttgcttatttgatatggaagaaaatactcgtttagctatgtatcagccaaaagaaggcatctatacacaaaatgaaacacaaataaaacgagtgattgggtggcttgaaccgaaacacaatgctagagcggtaaacgatgtcatttttcacatttggaaagaagctaaaataaaacctaaaacggtctcaagatatcttataccagtgaaaaacggtgtatttaatcttaaaacgaaacaactagagtcgttttcacccaattatgtattcacatcaaaaattgcaacatcttacgcagaaaatccatcgttacctaaatttaatgattgggatgtagaaagctggttgaatgaaattgcttgcggagatgcacaaataactaccttgttatggcaggtaataagtgatgcgattaacgggaactattcaagaaaaaaatcaatctggcttatgggtgatggatcaaatggaaaaggaacgtatcaacagttattatataatctaattggtccacagaatatcgcaacgttaaaaataaatcagtttagtgaacgttttaaacttgctttattagtagaaaaagtggcagttattggagatgatgtaggggcagggatttacattgatgatagttcggaatttaatagtgtagtgaccaatgagactatactaattgaagttaaaaacagaatgccctatagcgctcgaatgtatgtgactgttattcagtctaccaatgagatgcctaaaatccgtaataaatctaacggaacgtatcgccgtttgcttattgtaccttttaatgcctcatttgaaggtactaaagatgattggagaataaaagaagagtacatcaaccgaaaagaagtacttgaatacgttttgcataaagcggtaaatatggattttgaacgttttatagtgcctgatgtttctaaaaagcttttagaagaatataaacaagagaatgaccctctagttgattttaaagaaacagtattcaagcctttaggaataaacaaaatccctttttatatggtttactctcaatataaagagttttgcaacgaaaataatttcaaaccattgagcaaaattaaattttctaaacagttcacatatttattagggaagaattgggcaaataaaaatgcaaaatatagcatgaatgagatagaaaaaataaaagcattgggggattttttcaactatgaagaaccgccagaaaagggagcagcctacaaatctttagtaagaaacgatttaaagctgataagttaa

SEQ ID NO: 2564 - DNA, 258 bp, Enterococcus faecalis
aggagagtgcgagtaatgtatacagaattacataaagatacaataaccgacgagttaagagatattaaacatttactgttctttttacaggagacttcagcatcgttacaagaacataaaataaactatgaaaaaggcaagaaaaattctactactttgctagcttatgaaacatcaagacgcattgatcaaatggtaaccctgcaatatttaatggagaaaaaagtaaatgcacttgctgaaatgtttaatgaatga

SEQ ID NO: 2565 - DNA, 258 bp, Enterococcus faecalis
gcagatgaaaaaaagagagtgctgagtcgtttacgccgcacagaaggtcaaattcgcgggattcaaaaaatgattgatgaagaaaaagaatgtatcgatgttatcactcagttgagtgcggtccgttctagtattgatcgcgtaatggggatgatagttgcggagaatttaaagcattgctttgaaaatcctgaaaaagatcctaaagaacaagaagagcgattagcacaagcgattaatatgattgtcaaaaagtaa

SEQ ID NO: 2566 - DNA, 1278 bp, Enterococcus faecalis
ttggtggaggaaaagaaaatgacagacaagacaaaaagttcgttggcttattggaaaaaaatcgttattttactatgtatgggctgggtaacaatctggatttatcgttccgcgctttctcctgtttatccacaaattcgtgcgtctctaaatggtaacgcttccgatacggccctagggtccatttctagcttttattttctcggttacgtagtcatgcagattcctgcaggcttcttggtagacaaaattgggaaaaaacgtgtattaattccaggctttatcttgtttgcgctggcagcattaatgattgcccaagcccaaacgattggaacaatttacttaggtagcttattggcaggcttaggatgtggttctttctatggctcggcttactcgttgacgtcgcaaaacattcctcaagccaaaaaaagttttgcaacagctattgtcaacagtggttcagccgttggttcaggtttagggatgattttatctagttatttagttgcccaaaaaggattaccttggcaagtgatgatgtacatttccgcctttatgattatttgtatgttagtggcttttcaagtgattattcgtaatcataaagaagacatggccttgattcagccaaccgttgttgatgaaaaagataacggagcggtaaaagaaaaagtgccctttaaaaaactgtttgcgccacatatgctatttgcgtatattttatattttggcacttgttatgcatattatatgattgtgacttggttacctaattttttaagtaccgaacgtggtttccaaggagcagcaatagggttatcctcttcactggtcgcatttgcctctattccaggagcgttattttttagtcggttggcggataagtacatgcataaaaaagttcaattcatcgttgttttagaatttttagcaacagccatgctcttgttaactgtacaagtaagtaatgcgacgttgttattaattgctttaattatgtatgggttcttaggaaaattagctgtagaaccgattattatttcttggctaggtgaaaatgcaccaaaaattggaattggcactactttgggcgtgtttaactttttcggcatgatgtcatctgtgattgccccagctttaactgggaaaatttctgacacaacgggttcgaaagtcatgggcttttatatcgccgtcgtgattttactaattggcacgattctttttatgcttgtcaatttaaaaaaacgcagggcagattcgtctaataaataa

SEQ ID NO: 2567 - DNA, 249 bp, Enterococcus faecalis
gtatttaaactaaaaaagaaggtaggacaaaggtcactacgtaaaaagcgtagtgcttttgttccttgtgaaacgttaaccaaaaaaatgattggtggaggaaaagaaaatgacagacaagacaaaaagttcgttggcttattggaaaaaaatcgttattttactatgtatgggctgggtaacaatctggatttatcgttccgcgctttctcctgtttatccacaaattcgtgcgtctctaaatggtaa

SEQ ID NO: 2568 - DNA, 1218 bp, Enterococcus faecalis
gggattactatgtatcaacaaccaaattttgtacggcgaacaatcatgacgccgggaccagtcgaagcccatccatcggtacttcgtcaaatgggtcaaccaattttagggcaatttgatccagaatttctacagattatggacgaagttcgggaaatgattaaagtaccttttgccacaaagaatcaacaagcctttgccattgatggcacgtcacgttcaggcttggaagcggggttatttgcgttgattgagccaggcgacaaagtgcttgtgcctacgtatggccggtttgcttatttattaggtgaaatttgcgaacgcgcccgggccgaagtcatttatttagaaaaggactggctcgcaccgtttgaacaaacaacggtgattgaagcgattaaagaacatcaaccaaaaattgttgcgatggtccatggcgaaacggcgaatgcacaaatgcaaccactggatcaaattggcgccttttgtcgggaaaatgaaattttctttgtagtagatatggtggcgacttacggcggtgttgaaacaaaggtcgatgattggaagattgatattgcggtagcaggcactcaaaaatgtgtcagcgtaccttcaggcctttctttaattacctacaaccaacgtgtagccgattatctggcgggccgttaccaaaaagagttagggcttggcgcggatgcgcggaatgaacggttcattcaaagtaactacttggatttatcgcaattagaaaaatattggggaccagagcgcttaaatcaccatacagaagcgactacaatgatttatgggctacatgaagggctgcgcttgttacttcaagaaggcatggaaaatgtctatgcacgccatcggaaaaacaatcgtattttagttgaaagtctgcaaaaaatgggcttagaaattttcgggaagttagacacaaaaacaccaacagtcattcctgtggtcattccagaaggaattgatggtgaaaaagtgcggagcttattactggatcattttaaagttgaaattgcctcttccttcggtgatttaaaaggaaaaatttggcgggtcggtaatatgggttacagcagtcgcgaagacaatgtgttgcatttcttaagtgcctttgagactgtattgaaacaccaaggctatcaatttgaaggcggtagcggtagtactcatgcattggctgagtatttaaactaa

SEQ ID NO: 2569 - DNA, 1644 bp, Enterococcus faecalis
aaaaaggaggttgttgtgatgaaaatattagctgaggtcttggctttaccaagattttctgacttacaattattatcgtctcactcaaacttaacacagcccttggaaagtgtagaaatcacggaaacacctgatgtggctgattttatccctaaaaatgtcatgattttaacaacggcaatgatttataaagatgatcaagaaaaattgaaaccttttattgactcgctaaaacaagcagagtgtacggctttaggaatcaaagttgggcggttccttgacgaaatttcaccagaaattgttgcctatgccagtgccgttgatttgcccctgattaaaattcctagcacacagccactaggcgggttgttgcatgaaattgtaggctatcttcgtgatagcaaaaccgaacagatgtctgtagcatttgacatacaaaagcgtttttcaacattattaatgcaagatgttgatgctacgcgcttcatcgctgaatttgcgaaaattttaaatgcgccaattattttattaagtccttggcaacaggtgattgcccactcgaattatttttatggcaatcaaaaatcggcggagtttttcatcgaacaattatcaaaagaccactttcaacaattggcacaagaaaagaaaatctttcgtttacaggatgagcgacaagaaaacattcaagtagctggctttccaattcgtgtgaacgattattttccctattatctattggtcttatctcctgaacagattccttatcctatttctgaatttgccattgatcaggccattttagttttgacttttatgttatttaaaaaccagaaaattgctgaatcttttgagcatctcaaaacagactttttggaccgcttgcttgatacacatcaagaagcgctgagtaaacatcaaaattggttggaactttggaaaaattatcgtttaatcaacagtgattattatcaattagcgattgtctacggcgtgactaaaccagaaaatgaaacccatattcgttatcagcaagcggaagggcaactaattttccaatggctcaaagaacaattgccggaaatcctgccagatgtcgccttgtttaaattaaaaaatcaaaataaaagtatcttgatttttcaatctaaaaaaaatgaccatttgatgattttgcaaaacctcgctgaacgtttgcaacaggctttgcctattaccattcgctttgctttaggcaatgcttatgaaaacctagaagatttgcctaattcttatattgaagcttcctcgacattagaggcttctttacacgctcaaaaaccagcgactgtgcaattgttccatcccaaaggcctagctggactttttgaaaagattggcactgaagatgttgaatacttttgccagcaacaattgaaagagttggcctatccgacggaaccgacgttacaagaattacgaaaaaccttgaaagtttttttagatttcaattgcgaaattactaaaacggccaacgctctttaccttcacagaaacaccattaaatatcgcatgaatcaatgtgaaaaattattaggcacctctatccaagagcctgagacgagtttactcttacgggtagcgttagaactttcagaaaaataa

SEQ ID NO: 2570 - DNA, 807 bp, Enterococcus faecalis
gatagaaaaggaagaattgtgatgggttataaaaataatcgagttggttaccaaaaagaattgttaacatcaagagctgtgataaaaaaagacaattacgccattattccccatgatggtttggtgcaaaatgcagtacctggttttgaaaatgtcgatatttccattttgggatcacctaaattaggtgcgacatttgtggattacattgctacgtttcataaaaatggtcaacaaacaactggttttggtggcgacgggatccaaacgttggtttatgtcattgacggtcgtttgcgcgtttcagatggtcaagaaactcatgaacttgaagccgggggctacgcctactttacgcctgaaatgaaaatgtatttagcgaacgcacaggaagcggacacagaagttttcttatataaaaaacgctatcagccgttggcaggccatcaaccttataaagtggttgggtcaattcatgaccaacaacccgaagaatatgaaggaatgacagacgtgttactttggagtttattgccgaaagagtttgactttgatatgaatatgcatatcttatcttttgaaccaggtgctagtcatgcctacattgaaacgcatgtccaagagcatggcgcgtatttaattagtggccaagggatgtacaatttggacaacgaatggtatccagtggaaaaaggggactatattttcatgagtgcctatgtgccacaagcagcctatgcggttggtcgtgaagaaccgctaatgtacgtttattccaaagatgccaatcgtgaaccagaattataa

SEQ ID NO: 2571 - DNA, 1278 bp, Enterococcus faecalis
agatggctagggaaacgtttacaatcagagtgtaatcagtcaggaggttttgtgatggacttggaaaaagttttaaaacaaagaatcgaagagttgtcagcaattgggagtgatcctgcaggagggatgacacgcttactttatacagattcgtggttggcagcacaaaagtatgtgcaaagccaaactgaggcgtttggactggaaacgcaatttgacgaagtcgggaatctgttttgtcgagtggcaggaacggaatttcctcaggaaacgattttaactgggtcacatatcgacacagtagttaatggtgggaccttagatggtcaatatggtgtcattgcttccatgacagctgttcaatatttattagacaaatatgggaaaccacggcgttctttagaagtgctttccatggctgaagaagaagggagtcgttttccaacggttttctggggaagcaaaaatgtcgttggtgaagccaaacgtgaagaagtagtcgatatctctgacaacgaaggtaaaaagtttgttgatgagatgcatcgccaaggctttgattttcggcaagagcaaactagacgtgaggacattgaagcatttgtcgaaattcatattgaacaaggcaatattttagagaacgaaaagctccaagtcggtgttgttcatagtattgtagggcaacgtcgctacacggttaacttaaaagggcaagccaatcatgcaggtactacgccaatgagttaccgtcatgatgcggtgtacggctttgctaaaatttgtgcagaagccattgatcgtgcgaacgaaattggggatccgttagttttaacattcggcaaagtcattccgaaacccaatacagtcaacgtggtgcctggagaagtggaatttacaattgactgccgtcataccgacgctgcttttttacgacattttacaggtgaattagaagaacggatgaagacaattgctcaagaattaggcttgacgattgcgattgatcgctggatggatgaagcccctgtaccgatgaatcaagcaattgtagaagttattgaacaaaaagccaaagaaggcaagtatcagtatcgtatgatgcatagtggtgctgggcatgattcgcaaattattgcgcctcattacccgacagcgatgatatttgtgccaagtattggtgggattagtcataatcctgcagaagcaacggcatttccagatttggttgaaggtgtcaagcttttagcagataccttatatgaattagcgtataaataa

SEQ ID NO: 2572 - DNA, 1365 bp, Enterococcus faecalis
atgcaagcagagttagtgattaaaaacgggttagttattttagaaactggagaagtcattacggatgtcgccgttcaaggaggaaaaatcgtagcgattgggcaagacttgtcaggagaacgtgtgattgatgcgacgggtttagtcgttagtcctgggatggtggatgctcatgttcatattaccgatcctggtggtggttaccgcgatgaatgggaagggtatgtcacaggaacggccgcttgtgccaaagggggcgtgacgacctttatggaaatgcctttaaatcagattccagcaactgtggataagacctctcttgagatcaaatacaaggcaggagaaaataaactaaaagtagatgtagggtcatttgggggcgtggtcccgaccaacttggctgatgggattcaggaacttgatgaaggaggcgtttctggctataaatgctttttgggaacgtgcggcgatcgttcaattgaaggagattttcaaaatgtcgacgattattcattatatgaaggaatgaaacaagtcgccaaaactggcaaagtgctagcaatccatgcagaaaatgcgccaattacggataaattaggcgcggtagcttatcaaaatggcgaaacgactttagcggcatatgtagctacacgtcctgtgtttaccgaagttgaagcgattcaaaaagccattttatttgccaaagaaacaggttgtcggattcatatttgccatgtggcttgtcaagaaggcgtggaagaagttttgaaagcccaagcagaaggggtagatgtgacttgtgaaacatgtacgcattatttatattttaccacggatgaacttgatgccattggtccagttgtcaaatgttcaccgccgattcgtgacgcggaccaacaagccgccttatggaaccacgtgcaaacaggcggcatcgcgtttgtaacctctgaccattctccttgtacgccagacttaaaagatacaaccaatgcttttgaagcttggggcggcatttctggtgttcaaaataacgtcgatgtgttattcgatgaagccgtccaaaaacgtggtttatccttgaaacaattcgcggatatgattgcagcaaacccagctgaccgttatcacttagcacaaaagggccgcatcagcattggtaaggatgccgattttgtactaattaaacctaatgcgccgtatatcttaaaagcagaagatttagaataccgaaataaaattagtccttacattggtcgtgaaattggggcccaagtgattcaaacaattttaagaggcgaaacaatttacgcacaagaaactggggtaaccgaggcgtttaacggcgtatttatcaaaaattaa

SEQ ID NO: 2573 - DNA, 1512 bp, Enterococcus faecalis
aaaggagagtttgtcgtggagaaaaatgtgtctcaagtaacagctcaagaagaaacagcgctgaaagcacgtggctacaatgaggatttgttgccaagtagcccgaaacaacggacgatgggcgcgcgcaatttttttacattatggatgggttcgattcataatatcccgaattatgcagcagtgggcggctttattttcttaggtttatcgccgctgcaagttatgctggcagttgtgttaagctcattcattgtagcaactttcatgaatttgaatggcgtggctggctctaaatatggcattccttttgcgatgcacttacagtctacttacggcagtctcggggcaaaactgccagggttcttaaaaggttgtgtggccgcgattgcttggtttggtctgcaaacatttacaggatcgctggctttattaattattctcgggaaattttggccgaactttttagaaattggtggatcattccagttttttggtctcaggctacctgaattaatggcgtttactcttttctggctcttaaatgtggcaataggtttcggtggtagcaaaattttgaaccggtttaccgccattttaagtccgttgatttatgtcgttattattggattaacgatttgggccattcgagctgggggcggtttaacaccaattttgtcctatcaagtttctggtgcgattcgttcagtcaatccactggtggcgtatctgattatttttaactcggttgtggccgtttggtcagcgcctggtgcgagtgtggcggattttactaagaatgcgcgctcgacacgtgctcaggttgtggggcaaacaacaggtttagttgttggttatgggattttcgctttttccagtgtggttattctgttaggtggttcgctgtattttgggattcaagaatggaatattttaaacattattgatcgtttagataatgtggcagtggtggtcttagccatgtcggttttcttattaacgactatttcaacgaatgcaacggggaacatcattccggcaggttatcaattggcggcgctatttcctaaaaaaatgacgtataaaaaaggcgtcatgattgccagtgttatcagctttctcattatgccttggaaactgatggaaaacgccgatagtatttttatttttctgaacgcaattggggctgttttaggaccagtcgctggtgtgatgattgcgaattattattttgttcaaaagcaacaaattgatttaaatgctttatacgtagataaacacaaaaaagaggaagccaatcctttttacggattaaacaagccggcgtatgttgctactattctggcgttggttctttccttaagtggtcaatttattccacaggttaaaatcattgctgatatttcgtggtttgtgggctttgccacaggttttgtgctgtacttagtgttaaaaaaatggacttgggattcaaaaaaagtgaaagaaacagcttatcaggagggaaaataa

SEQ ID NO: 2574 - DNA, 516 bp, Enterococcus faecalis
ttgatgggagaaataaaacaattaacaatagaagatgcaccagcgttacaagaaatcagcattgaaacttatacagatactttcggaccatataataccccagaaaatatgcaagcctatttagtagaagcctacaatttagaaaaattacaaaaggaattggctaatccccactctgacttttattttatctttgtcgataatcaattagctggctacatgaaattaaatcgtgagacggcacaaacggaaccgatggggccagaaaagctcgaggttgagcgattgtatattttgcctgcgtttaaaggaaagaagctggggacacaattattagaactggcggaagagaaagctcgtgaatttggtaaaaaagcactgtggctaggtgtctgggaacacaatgatgcggcgcgggcattttataaaacgattggctaccgttattatagtcaacattcgttttttatgggagacgatgaacagacggattttattttgttaaaggaattgtag

SEQ ID NO: 2575 - DNA, 447 bp, Enterococcus faecalis
gatattttaagagaaattggcatgattgcgcgggccttagattcaatcagtaatattgaatttaaggaattatctttaacacgaggacaatatctttatttggtcagggtctgtgaaaatcctgggattatccaagaaaagatcgccgaactgattaaagttgatcgaaccacagcggcgcgggcgattaagcgtttggaagaacaaggctttatttatcgtcaagaagatgcaagtaacaaaaaaattaagcggatttatgccacagaaaaagggaaaaacgtttatccaatcattgtgcgcgaaaatcaacactcgaatcaagttgctttgcaaggcttgtcagaagtggaaatttcacaattggcagattacttagtccggatgcgtaaaaatgtcagcgaagattgggaatttgtcaaaaaagggaacactcgaaattattaa

SEQ ID NO: 2576 - DNA, 261 bp, Enterococcus faecalis
gaggaaatttgtttggctagaaaaatggatttacgtatttgggtagaaggaacagtcgtcgcagcaatggcaatggccctctcttttttaccgattgaatttgccaatagtggcttggacctatcgttgggaatggtcccattagttctttattcgtttcgtcgtgggttgcttcctggagttgcagcaggctttgtttggggcatgttaaatattattcttcggtacagccatgaaaatcctcagccacgggtaatggga

SEQ ID NO: 2577 - DNA, 198 bp, Enterococcus faecalis
tatttaacatgccccaaacaaagcctgctgcaactccaggaagcaacccacgacgaaacgaataaagaactaatgggaccattcccaacgataggtccaagccactattggcaaattcaatcggtaaaaaagagagggccattgccattgctgcgacgactgttccttctacccaaatacgtaaatccatttttctag

SEQ ID NO: 2578 - DNA, 672 bp, Enterococcus faecalis
gaaatcaagtataataaaatgataaaaaggaaagaaggttgtttaatgaaaaaaatactctatggcgctctgactggttttgccctctttttggtagctggctgtacacccaaaacgcctactgctgtttcatcaacaaatgaacaaaaagaaacagcaatatcaactagtgaaacaagttcatccgtacaacaagaagcaacgacgacatcagagaagacaagtgcggtagctgtctctttagaaaaagtaacgacagcatttgagaaaaaatatccagaagctaaaataacaagtctgcagttagatacagattttggacgttatttttatgaaatagaaggcgtggatcagcaaaaagaatatcaagttgaagtgaacgcagaaacaggcgaattcacaaaagaaaaagtcgaaaccttggatgccgatgaacaaaatggcgttaaaatgcaagaagaggcacttgatttaacaaatatcatttccagagaacaagccacaaccttggctgaaaaagcagcgaaagtcggccaggcaacagattggaagttagagaaagaattaggaatcacctattgggaagtgaaagtgaaagagggccaacaaaaaatagaggtaaaaatcgatgctcattctggtaaaattttgacaactgagcgggacgattaa

SEQ ID NO: 2579 - DNA, 801 bp, Enterococcus faecalis
aggggagatgggaatttgcttgatttaatttatgtacatatagatgtaaccagcaacgcggttttatctaaaggaattacccattccgattttgttcgttcaattgtgcatcatccacagaacttactattattagatccttctgccgaagctggcgaatacgatatgcattcaggcttgaaaattattcgtggagaagaaagcgtcaatcgctattttcaatcgctacaacgtcgttggatgactgaagagattaaatggattgacttttccgatgtgacgatgctaaaagagctaacgccattagaaatttcggaacttctttattttggacacatgaagaatagtttgcattcgcctttcttttataagctacaaaatgattttgtcttttttgaatttgcagatcagatgacgcgtgtctattatcgttatattgatgaattttatcgaatctttgctgataaaattacacgtgttgttttagagaaagtcaaccagaaaaaggccttctttaaacgaaatacgcctgtcgaaaaattaagtcctgaattacttaaaaatatgaaaggtatcttgcaagaaggtgttattttttgcttccaacaaacggaagtggataaagaagaatatcggattcctatttacttggtggaagattcacttagcaagatgaaaaatacctcttaccaaaaagaagaaattttggcaacgcttgtctataatagtgaaaaacgcatttggcacattgaacaagagaatgatttcggtgaaatttttatgttggcccatgaaggctga

SEQ ID NO: 2580 - DNA, 756 bp, Enterococcus faecalis
tacattaaaaggaaggaaaatatgcgcccaaaagagaaaaaaagaggaaaaaattggttaatcaacagtttattagttttactatttatcattggcttagccttaatttttaacaatcagatacgtagttgggtggttcaacaaaatagccgctcgtacgccgttagcaagttgaaaccagctgatgtgaagaaaaatatggctcgtgaaacaacgtttgactttgattcagttgagtccttgagcacagaagcggtgatgaaagcccaatttgaaaacaaaaacttacctgtgattggtgccattgcgataccaagtgtcgaaattaatttgcccatttttaaaggattgtccaatgtcgctttattaactggtgccgggaccatgaaagaagatcaagtcatggggaaaaacaattatgccttggctagtcatcgaacggaagatggcgtttccttattttcacctttagaaagaaccaaaaaagacgaactcatttatatcactgatttatctactgtttatacatacaaaataacttctgtagaaaaaatcgaaccaacccgtgttgagttaattgatgacgttcctggtcaaaatatgattaccttaattacctgtggcgatttacaagcaacgacgcgaattgctgttcaaggaacattagcagcaacgacgcctattaaagacgccaacgacgatatgttgaaggctttccaattggagcaaaaaactttagccgattgggtggcttaa

SEQ ID NO: 2581 - DNA, 183 bp, Enterococcus faecalis
agacgccaacgacgatatgttgaaggctttccaattggagcaaaaaactttagccgattgggtggcttaataaaaaaatccttgaaaagttttgacacttttcaaggattttttgctttatttcatcacttggcgttcttgctgtttcaaacgagcaaaaccataacgaatacctgcaaataa

SEQ ID NO: 2582 - DNA, 303 bp, Enterococcus faecalis
tactttctgtttccccttggtacaatagtgttaacaaattgttcagggaaaaagagacgggagggaagtaagatgaacagtagttatttatcctatgtttttgaattgagtttgtattatttattgttgataatgagtctgccgctagtgtatgctgtcacgtatcatttatcttttagtagtatgtatacaagtgaatggttaataatctctgttttcttatctccgttagttttattatttgcaggtattcgttatggttttgctcgtttgaaacagcaagaacgccaagtgatgaaataa

SEQ ID NO: 2583 - DNA, 477 bp, Enterococcus faecalis
aacgttgtggtaactgtgttatttgtttgtttaggcaatatttgtcgctcgccaatggcagaagcgatttttcgtcagaaagtccaacaagccggtttagaatcgactattcaagtgttttcagcagctactagccactgggaagttggcagtcagccacataagggaaccagaaaaattttggagcaacaaggaatttcctatcaaggaatgcgggcgacacaaatccagccaagtgattttaaaaaatatgactatatcattgggatggatacgaataatgtggccgatttaaaagcattagctcctcaagaagagcaaccgcggattcatttatttatggaagttgtggctggtaaagaaaccatggacgtacctgatccttattatactggagattttgaggaaacttaccgcttagtggaagcaggtacctcagaatggttgaaaaaaataaaagcacagctgaaagattag

SEQ ID NO: 2584 - DNA, 603 bp, Enterococcus faecalis
aggtatatacatattaggagcggaggaatcagcatgagcggaacgcacgatacaaaacaagcaatcgcttcagctttaatagaattatgtgaacaaaaggattttcgtaaaataagtgtccaagatattaccaaaaaagtgggcttgaatcgtcaaacattttattatcactttacagataaatatgatttattacgttggatttatcgtcacgatgcattgatttacttagaaacagatatttgtttggaaaactgggaggaacaagccctgaagttattaaaagcgattaaagagaagagtcatttttactatacaacggtgacctcagattcagaagttcttcttaatgttttttccgcttcgaccaatcgcttatttatttcattatttgaacaagtcgatgttgagaaccatttaacagataaagacaaacaattttatgcgaatttcttttcctatggatgtagcggcgtcttaacgaaatggattcttgaggaatatcctcaaactcctttggaaatggcgacgcaattattccgtttagcgaaagatacagaatttatggcttatcatttgtatgaacaagaagccaatgagtaa

SEQ ID NO: 2585 - DNA, 1494 bp, Enterococcus faecalis
ataataaaaaagcttaacaaaaaaggattttcggaggacaacagattgaagaaaagtgtattatcggctctaatggtatgttccattacattaacaagcgtagcgttgccatccgcagcatttgcagatgaatacgatacaaagattcaacaacaagatcaaaaaattaatgcgttaactagccaaatgtcagatgcagaagcaaaagttgccgcgattgaaaatgatatggttgaaacggccaaacaaatcgatacattaacagctaaaaagaacaagctatcatcagaagtatctaaattatatagtgaaatttctgatttgaatgtccgtattcaaaaacgtgaagtacaaatgacaaaacaagcacgcgatgtccaagtgaatggtcaaagtgattcaattattgatgctgtcttagatgcagattcagtagcagatgcaattggtcgcgttcaagcggtctcaacaatgatgagcgccaataatgaattactagaacaacaaaaagaagacaaagcgactgttgaaaagaaaacaaagaatgttgaaaaacaaattgctgaattagaagcagcaacaaaagaattaaatgataaaacagaatcattaaaaacattgaagattcaacaagaagtggctaaaaatgatttagaagcacaacgttctgaagaacaagggaaaaaagacggcttcattaaacagaaaaaagaagcggaaaaacgtttagcagaagaacaagcacgtcaacgtgcagctgctaaaaaagcagaagaacaagcggcagcgcaagcacaagccgcagcacaaaaagcggcagcagagcaagcgaaagcaacaaaagcagccaatgaggcagcagcatccgccgctgaagaaaaagccgcaacaccagtagtagaatcatcaacaactactgaaagtaccacaacgcaagaaacaacaacttcaagtactgaaacagaaagtgttgtaacaacacctgtggcagcagcacctgaaaaagaaaaagaagttcctgtaactaacccaacgactcctgaaaaaggcaatgaagcaaaaccagggaatggtggcgtgacttcaggaaaacaagccgcaattaatgcagctttagcagatgttggtaattcttatgcaacaggttggaatcaaccaggcgaatgtttagtatctgttcgtcgctggttagcggcaggcggtattaacttcggttatggtggtccaaacagtggctatgttgcttctggcgcaacacaagttagctggagtaacgtgcaaccaggcgatgttgttcaatatgaaagtgcctatagtccagatagctggattggtggcgtgcatactgtcttggttacaggtgtaagtggtggaagtgttcaaatcgttgaagcgaacaacccaggaggttctggttatgtttcttctaactctaactggtcaccagcaccaccagcaggattccgcgctgttgtatggcgttttccaggctaa

SEQ ID NO: 2586 - DNA, 198 bp, Enterococcus faecalis
actgattgcggtactgattcaagtggcctttcatttagcagatgtcagcccgattttatttattacgcgtgtgttgggccctacattgctattgaacatggtgtggtatgttattttatcttatccactgaaaaaactgttttccgtaaaataaaaattgaaaattttgttcgtttgcgaaaaatgctcatttgttag

SEQ ID NO: 2587 - DNA, 588 bp, Enterococcus faecalis
agtgtatgtgaaaccttatgcggatgtctatggtatctccgttgtgacggtcgtgaaaagatcggcaggggaaagcgaatgattcggaaagagtatttaaaatacgtcacacctattctcttgtttttcttaatgttaattgatgctcatttaacaaagtcttttgaaacgtggacaagcaatgtttacttcgccagttctcatctgttattacttgcgtttatgtttgccgttcctaatttttctaaacgttatttattaattacttcgttaattttaggctttatttgcgatagctactacattggtattatcgggatttatacagttgcactgacgatttcggttatgttgatgtatacatttaaagaagtaattcaaacaaatttactaactggtttttttgggatcgtcatttttaccacgttgtatgaactgattgcggtactgattcaagtggcctttcatttagcagatgtcagcccgattttatttattacgcgtgtgttgggccctacattgctattgaacatggtgtggtatgttattttatcttatccactgaaaaaactgttttccgtaaaataa

SEQ ID NO: 2588 - DNA, 915 bp, Enterococcus faecalis
tcaattagtggtaaaattaatactatcagtctgaagaatatctggggtgtctttgtgaaaaaatttaatccaaataaaaatataatcattaccttaattttagtcattattttagtaaccattattagtttaactgctgcgcaacgttctgaaaaaggcaaaaccaatgtcgttcaaggtggcgtcaataatagcgttagtatggtggatcgtgtgatttcttttccagctcgtgtggtggaaaacggcttgtcttcaatgggcaatttaattaacacgtttaaagaaaacgaacgtctaaaagaaaaaattgatagctataatgaattagctgtccaaaacaataactataaacgtgaaattgatagtttaaaacaagaattgaatctgaacgaaacgttagccaactatgaaaaagtaactgcgaatgtcattacgcgttcgccggatacttggcaagacttattaattatcgataaaggaaccaatgacggcattgaagcgggcatggcggtcatggcgcaaaaagggttagtggggcgtgttattgaagtcaatgcaacgactgcaaaagtggaactactaacgtctaaaaatgttaactcgaaccatttccctgtgcgagtaacttccgcaaatggcgaatcgtttggtttacttaaaaattacgacaataagacgaatgcattaattgtgtcacaattaactggcgatgccactctgaaagaaggcgatgtcgttcagacttctggcttaggtggtaattccccagccgatttagcggtagggacagttattaaagtgaaaccagatagttttggtttagatcgtgaagtgtatgtgaaaccttatgcggatgtctatggtatctccgttgtgacggtcgtgaaaagatcggcaggggaaagcgaatga

SEQ ID NO: 2589 - DNA, 2127 bp, Enterococcus faecalis
aggagaagaattatgacagaaaaacaagtctttaaaacaacttggggcggccgcccactagaagtagaaatcggccaattagccaaacaagccaatggagctgtcttagtacgttacggcgatacggtcgttttaagtgctgctgttgcctctaaagaagcaaaagatgtagactttttcccattaactgtaaactatgaagaaaaaatgtatgcggtaggaaaaattcctggcggcttcattaaacgtgaaggtcgtccaagtgaacgtgcgacattaaccgctcgtttaatcgaccgtcctattcgtccaatgttctcacaaagcttccgtaacgaagtccaaatcacgaacatcgttatgagtgtggagcaagactgtacaccagaaatggctgcaatgtttgggtcttccttagcgttagcaatttcagatattccgtttgatggaccaattgctggtgttgacgttggtcgtattaatggcgaatatgttttaaatccaacggtagaacaagcggaacaaacagatattgaattaactgttgctggaacaaaagaagccatcaatatggttgaaagtggtgccaaagaagtatcagaagaagatatgttaggtgccttacttttcggttttgatgccattaaagaactagtggcgttccaagaagaaatcgttgccgctgtaggtaaaccaaagatggacgtggacttattacaagtggacgctgatcttaaaaaagaaatttttgatgcgtactacaatacaatgaaaacagccgtaatgacggaagaaaaattagcacgtgaagttgaaattgacaaagtaaaagatacagtcaaagaagtttacgctgaaaaattttcggaacacgaagaagaagcacaattactaaaagaagtgaaacaaattgcggaagatcttgaaaaagatgtcgtacgtgagttaatcacgatcgataagattcgcccggatggccgtaaattagacgaaattcgtcatttatcatcagaagtaagtattttaccacgtgtgcatggttctggcttatttactcggggtcaaacacaagctttatccgtttgtacattagcgcctttaggggaacatcaaattatcgatgggttgggtgtccaagatagcaaacgtttcatccatcattataacttcccgcaattctctgttggttcaacaggacgcgcgggctcaccaggtcgtcgtgaaatcggtcacggtgcgttaggtgaacgtgccttagcacaaattattccatcagaagaagacttcccttacacaatccgcttagtagcagaagtgttagaatcaaatggttcttcttcacaagcaagtatttgcgcgggaacattagcattaatggatgcgggtgtgccaattaaagcgccagttgcaggtattgcaatgggtcttgttagtgatggcgaaaactatacaatcttaacagatattcaaggtttagaagaccaccttggcgatatggactttaaagtagcaggaacgaaagacggaatcactgctttacaaatggacatcaaaatccaaggaattacagaacaaattttaacggaagcattagaccaagcgaagaaagcacggatggaaattctagaagaattaacaacaacgattgctgctcctcgtgaagaattaagtcaatatgcaccgaaaattgaaatgattcaaattaaaccagcgaaaattaaagatgtcattggtaaaggtggcgaaacaatcaacagcattattgatgaaaccggcgttaagattgatatcgatcaagacggtaacgtaagtattgcttcatcagatgctgaaatgattaaaaaagccatcaagattattgaagaattaaccaaagaagttgaagtcggtcaagtttacttagcaaaagttgtccgcattgaaaaatttggtgcgtttgttaacctaattaaaggcaaagatggcttgatccatatttctcaattagcaaacgaacgtgtgaacaacgttgaagatgtcgtgaaattaggcgacgaagtccttgtcaaagtaactgaaattgacaaacaaggccgtgtcaacgtgtcaagaaaagcgttattaaacgaagaaaacaaagaaaaataa

SEQ ID NO: 2590 - DNA, 366 bp, Enterococcus faecalis
  misc_feature (105)..(105): Nucleotide 105 is "n" wherein "n" = any nucleotide.
ggtttgtgtggaaacacacctttatcaacttgtttaggggagtcaccaacgtttcactcagtgatcagacgattattagagaaagaggtgggacaaatggcaatntcaccagaaagaaaaaacgaaatcattaaagaatacgcacgtcatgaaggagatactgtttctccagaagtacaaattgctttcttaactgaagacattaaccaattgaacgaacatgcgcgtacacacaaaaaagatcaccattcttaccgtggtttaatgaaaaaaatcggtcaccgtcgtaacttgttagcttacttacgtaaaactgacatccaacgttaccgcgaattgatccaacgtttaggattacgtcgttaa

SEQ ID NO: 2591 - DNA, 813 bp, Enterococcus faecalis
  misc_feature (780)..(780): Nucleotide 780 is "n" wherein "n" = any nucleotide.
tcccctaccccggggtggacacttattactacggcaattgaacatcccgctgtgttacgaacgatggaatacttagaaacgttaggctttgaagtgacttacttgcctgtgaatgaaaatggtcagatttcaatggatcaattcaaaaagtctttacgcgaagaaacgatcttggtttcaatgatgtatggcaataatgaaattggaaatcgattaccgattgctgaagttggtgcaattcttaaaaatcattcggcgatttttcatacagatgccgtccaagcttatggaagtgaagtcattttacctcatgaattagggatcgacttattaagtatttccgctcataaaatcaatggtccaaaaggcgtaggttttttatttaaaagcgatgcaatccaattaccacctcttttacatggtggggaacaagaagaaaaacgacgtgcgggcacggaaaacttagctggaattattggcatgggtactgccgtttcattactaacttctgcagaaaagcaagcaagaaaaacagcctatcaaagttttcaaacgattattttaaaagcgttagaagaagccaatattgatttttcaattaatggtgaaccaaccaatcgtttagcgcatgtcttaaatcttcatttaaaaggaattcccagtgatttgctcttaatgcatttggacttaagaggtattgcgatttcaacaggctcggcttgtacagcggggaactgtggattcttcgcacgtgttgacagcgatgtatgggagaaaatncctcagctattaaagaaatcaatccgggatgag

SEQ ID NO: 2592 - DNA, 768 bp, Enterococcus faecalis
ttcaatccgtggtggcgagaccaatcaaggagtaaattagcgcagcaagcacaattggcactactctatgaagtgacctgtttaaataaaccaggcttggtggatccagtcgatgcaggcgcccatcaagatatggatgttttcacttttttagaaagtagtgtggttttgactccttattttgaaaccttcgttcaagctgggacagagctacgtcatttgccgattgaggcaacatttcgcacgattcgacaagttggtttagaagcagaacgagcgatgtttgaggcaacagaaggtatcaatacacataaaggagcaattttttctctaggtatttttttagctgtctgtggtcgtctaatgatttgggagaccccttgcaccttacaattgtttcaacaaacgcttcaaacaatgacgcaagacttattggctgactttgaaaacctcgctacgaatgagctagaaaaactaacttggggtgaacgactatttgttcagcatggcttgactggaatccgtggtgaggcgcaacaaggttatcccgctgtctttgaacagggagtgccttattatcaaaaacatcaaggcacacaacaacaaaaactcattgatacgctcctttatttatcgctctatgttgaggatacgaatttgattaaacgaagtcaaaatgtccaaatttttgaagtatatcaaccgttaatccaggaatattttgcttttaggggggacacaaacgttacggggaacccctttgcttag

SEQ ID NO: 2593 - DNA, 189 bp, Enterococcus faecalis
actaatgaaattaaattggctgacgccttaattaaaaagatagttacaacgctgatttggtcagttattttgaccttatatgcctatggaaaggtctcaagagaattcaagaaagcgattgacaaataccacgaaacacagtatattttattacgaaatcattcttatcagagtatacaaatacgatga

SEQ ID NO: 2594 - DNA, 5244 bp, Enterococcus faecalis
gggaagctaatgatcttggtatttatcgtttattttaaagaaaagagggacgatcagatgaaaaagaaaattgttgaggattttaatcggaaaagtcagcataaaaaatggacaaaacgcaagatgcttaatttagcaatatcaagtggtttattatttacgtcattagcaatccctgtaagtatagctgttacctctggcacaatcagtgcatcagcagcggtcttggatatcgaactattatcaaatgttacgtcaaataatgacagtggcacttcaacgagtaatcgttggacagccgcaaaccaaaatcaaccagttaatttcacggtttctggtggcgctttagcagatgcttccgctgtgtttagtggacaaaaacaagcggtgttagtggttcctcctgagttaagaggaaatgtagctgcagcaggcagcgcagcaatcaataccaatgtcacgattgatctttcaaaagttacttttttgactgccgttttgaatgcagccaatgatttaaccaatgtgattactcaaattaccagtggggcgttagggaatttaactggtgttgatattgatttgacggaagtgaatcgtcaattggaattagttaataacattgaaaacttaggtgctgcttcatttacagctccggaaacgttagcagctgacggctcatacattagtgcaccgattagtgatggtttagggttagttttagcccaaaatgtttcaaacatcttacaagatttgaatgcggcagttcaagctttggaggcaaaaggtaccagtatcccaagtaatcttgtcgccgcagctataaatgcagccttgcttcctgtcaaaggcacggtaaacgtggctgtttcaggtgctttgcctttattagcggttggtggttcaggcgtaaatgagttagtggatgcttctttactaggcacaaccacggttactttaccaactaccgtttcaacacctcaaaatttatccaataatttagatgctcgttttgtaggaacagtcgttcaaacagatcttttagacgttaatttattagcaacagcagacggtgtatccaacatttattttgctgcaggcactactagtgaagtaaccgcaccaacaatcacaggagtaacaggtaattcaacagcaggttacgaagttaaaggaactgccgatgccaatgccacggttgaaatccgaaatgcaggaggcaccgtaataggcacaggtaccgctgatgggacaggagcgtttacagttaccgttcccgcaggtgaagcaggcgccaatgaaacgttaaccgccgtagcgaaaaacgccagcggcacagaaagcacgccaacaacgttccaaacgccagcggatgaagcaaccgtaaccgcaccaacaatcacaggagtgacaggtaattcaacggcaggttacgaggttaaaggaactgctgatgccaatgccacagttgaaatccgaaatgcaggaggcaccgtaataggcacaggtaccgctgatgggacaggagcgtttacagttaccgttcccgcaggtgaagcaggcgccaatgaaacgttaaccgccgtagcgaaaaacgccagcggtacagaaagtacgccaacaacgttccaaacaccagcggatgaagcaaccgtaaccgcaccaacaatcacaggagtgacaggtaattcaacggcaggttacgaagttaaaggaactgccgatgccaatgccacggttgaaatccgaaatgcaggaggcaccgtaataggcacaggtaccgctgatgggacaggagcgtttacagttaccgttcccgcaggtgaagcaggtgccaatgaaacgttaaccgccgtagcgaaaaacgccagcggcacagaaagtacgccaacaacgttccaaacaccagcggatgaagcaaccgtaaccgcaccaacaatcacaggagtgacaggtaattcaacagcaggttacgaagttaaaggaactgccgatgccaatgccacggttgagatccgaaatgcaggaggtgccgtgataggtacaggtactgctgatgggacaggggcatttacagttaccattcccgcaggtgaagcaggtgcgaatgaaacgttaaccgccgtagcgaaaaacgccagcggtacagaaagtacgccaacaacgttccaaacgccagcggatcctaatacgcccgtggcgacgccaattgttgagactgtaacaggtagtacaacaaaaggctatgaggtcaaagggactgctgaagttggcaccaccattgaggttcgcgatgcagctggcacggtccttggtactgcaacaactggaactgacggaaaatatacagtgactttagattcaggaacagcaacagcaaatcaaacgctgagcgttgtagcgaaaaacgctagtggcacggaaagtcaaccagcaacggcgacaacaccagctgatgtcactgcaccaacagttgataacatcacaggcaactctggttcgggttatgaaattacaggaacagcagaccctaacacaacaatcgaagttcgtgatccatctggggcagtcattggtacaggtacctctgatgcgaatggtgattttactgtaacgctaccaacgggaacgaccaatcctggggatacgttaacagtgattggaaaggataacgcgggaaatgaaagtcaaccgactgaagtccttgttcctgctgatgccacggttacagcaccaactgtaacaggagtaacaggtaattcagttgctggttatcaggtgacaggcaccgctgatccgaatgctaccatcgaaattcgtgatgcagatgggaacgtgattgcaacagggactgccgatgggactggttcctttgctgtgaaccttccagctgggacggcaaatgcgaatgaaacattgacagcgttagccaaagatcctgctggcaatacaagtacaccgacaaccttccaaacaccagcagatgaagtagtggcaccgccaagtgtcgacaaagttactgggaatacaacacaaggatatcaagtgacaggtaccgctgaacttggcaccaccattgaagttcgtgcaacagacggaacagttttaggcaccgcaacaactggaccgactggccaatatactgtgacgttagcttcaggaaaagcaacagctaaacaaacagtgaatgtagttgctaaaaatgatactggacttgagagtcaaccaactacagctatgacacccgctgatgttaccacaccaacaattggtgacattactggagattcaacaactggttatgaaatcactgggacggcggaccctaataccaccattgaagtacggaacccagatggaacaattattggtacaacgacaacggatgatcaaggaaactttactgtggaccttccagcgggagccgctaatcctggtgatacattaacagttgttggaaaagacggtgacggcaatgaaagtcaaccaacggaagtgacggtccctgaagatgcaaccgtagcagcaccaactgtgacgactgttacaggaacaactgccactgggtatcaagtaaccggcacggcagagccaaatgtcaccattgagattcacaatgaagcaggtttagttattgctacgggaacgactgatggtgctggcgcatttacaatcactcttccgacgggcacagcaacagctaacgaagccttaactgccattgcgaaagatgctgctgggaaagaaagtaatccgactgctttcaaaacacctgctgatccagatgcaccagtcgcgacacctactgttgacaaaatcactggtagcacgacaaacggctatcaagtagtaggagcagcagaagttggtacaacagttgaggtgcgtgacgccgatggcacagtccttggcatggcaactactggaactgatggcaaatacacagtgactttagagccagggaaggcctcagctaacgaaacaataactgtcgtagcgaaaaatgcaacaggaaaagaaagtcagccagctacagcaactacaccagtcgacttagccacaccaaccattgattctattaccggaaattctagtaaaggttacgaaatcactggaacggcggagccaaaaaccactattgatgtccgtgacgcagacggaaccatcattgctgctacaactgctaacgaaaccggccaatatacggtgactctaccagctggcgtagtgacaccaggagaaacgattacgattattagcaaagatggcgcaggtaatgaaagtcaaccagctacagccgttattccagcggatgttgttttagcggcgccaactattacgaaggttgaaggaaacaaagccaatggctatacagtcactggaactgctgatccaaatgtcacggttcaattttacaatagcagtgaacaattattggcaagtggcaatacaactactggaggtaccttctccgttcatattgcagcagggttagcaacagaaaaagaaacgttaaccgcactaaccacagatacacaaggaaatgtgagtcctaaaaccacatttatgacgccagccgatattacgggagaaccagagattaaaattgcggcaccaactgtttcttcagttttaggaacgtctaaagccggctacctcatcaaaggaacagctgaaccaaaccgaatcattcaaattagtaaccgactattaagaagtgtgattgctgtaggtgccaccgatgctgaaggcaacttcgctatccaattaacagcgggacaagcgactgctcaacaaagtttacttgcgacagctaccgatggcgcaggacattacagtacggctacaaccttcatgacgccagccgacccaacgaatcctggaggaggcaatggtaacactggcggaaataacggcaatacaggcggcaatacaggaaacaatggcgcaactggcgggaataatgggaatggttcaaacacaggttcaaatccaaatggaggttctggtttaggcacaacaggttctggcttaggttcactaggcaatggcctcggtacaaatggtagtggctaccaccctaaactaagtaccatcagttatggcactggaaatcacgggaaaacaggctacttacctagcacaggtgaaaaagagtcttcagccgtgacaacaagtttgtttggcgcctttgtcgcactccttgcgagcatgggaatcatcaaacgcaaacgtaaaaactag

SEQ ID NO: 2595 - DNA, 1098 bp, Enterococcus faecalis
tcccgtggtgaacgtcgggtcagtattttgaaaactgtgacacgtctacaaatgtctgtcaatgcaaaaggagacgttgggaggggcgcgatgaaactaacgattaaagaaattgctgatatggctggtgtttctgtcacaaccgtctcacaaattctgaataataaagggagtcgtttcagtgaaaaaacccgcaacaaggtgttggcggtagtcgctgaaaatcattacaaaccacattactttgcttcgaatgtaatcaaccgtcattccaaaaccattggtatgattgtgccagatgtgacggatttctttttctcaaaagtgatagaaggtgtacaaacatatctaaattcgttaggctacatgattttgttatgcaattcaaagcatgattccgatcaagcgatgcaatatgttatcgagttgattcatcggtcggtggatggcattatttatgccacgccgaatgttttgccacaaaatcatattgtaaaagaccgacgagaacatccgattcctgtcattctagtcgatcgtgggattaatccacgagatagtggacgattaatcgttaaagagtacgaaggtgcttatcaagcggtccatcatttgattcaacaagggcatcagcatattggcatgttgcgtgaaagtgccggctattatcgtttgacggaacgagtgacggcgtatcagcatgcgttacaggacaataatttaccttttcgtccgcattatgtttgtgctggggaattgaacttgcatggcggctatgctgcggcgaaagaagttttgaaaaatgaagaaatcacagcaattttttgtggcaatgatgaaatggcgatgggggcctatcaagccattgaagaagcgggcaagaaaattcctgacgatatttcggtggttggttttgatggcttggaaatttccgaatatttggtgccgagtttaacaactgtctatcagccgagttttgatattggctattatgcagcaaaatttttggtggaagctattgcagatccaacagggaaagttccaaataaagttttcgatgcgacgtttattgctagaaaaagcacaaaaccgatttaa

SEQ ID NO: 2596 - DNA, 1464 bp, Enterococcus faecalis
aaaaagcacaaaaccgatttaaaaaacagcttagaaatagaatgttcgtgtcgtttgcgttttcacaagaaaaaaataatagtaaactggtttactaaatggtttaaagctgaacgattttgttgtataatacattatcgggaaatcggagggaacgaattcatgagaatggtaaacattattgaaaagaaacgtgacgggcatcaactaacaagcgaagaaattcaatttattatcaacggatacacagatggttcaattccagattatcaggtaagtgcctttttaatggctgttttttaccaagatatgacagacgaagaaattacacaaatgacgttagcaatggtccattcaggcgaaattgtggatctttcttctatagaaggaatcaaagtcgacaagcattctacaggtggcgtaggcgacactacgacgcttattttagcgccgttagttgctagtgtcggggtcaatgtagcaaaaatgtctggtcgtggcttaggctacacgggcggtacgttggataaattagaagcgattcctggttttaaagttgaattgacagaagaacgttttattcaattggtgaacgatacaaaagtggcagtaattggtcagtcaggtgatctagcaccagcagacaaaaaactttatgcgttacgcgatgtgaccgccactgttgactcaattccattaattgcaagttccattatgagtaaaaaaattgccgcaggggcagatgcgattgtcttagatgtgactactggtgaaggggcctttatgaaagacctagcaagtgctcgtcgattagcggaaacaatggttcgcattggaaaactggcaaatcgccaaacgatggcagtaatttcagacatgtcacaacctttaggggaggccatcggaaatagtttagaaatcgttgaagcaatcgagaccttgcaaggaaatgggccagaagatttagtggagatgtgttatgtcttaggaagtcagatggtcgttttagctaaaaaagccgagacgttagacgaagcacgggctttattagaagaagcattaacaagcggtcgagcgctcgcaaaatttaaagaaatgattgaaaatcaaggcggcgacagttccgttgttgaccagccagaaaaattattaaccgcaacttatcaatttgatttacctgccaaagaaacaggcgtggtacaaaaaatcgttgccaatgaaattggcgttgccgcaatgttgctgggcgctggtcgtgctacgaaagaagatacgattgattttgcagttggcttgaaacttcacaaaaaagtagggagcccagttgaaaaaggcgaatcattactaaccatttatgccaatcgtgaagacgtgacagaagtcgaacaattgctttataaaaacattgaaattggaccaaccggcgaagagcctattttgattcacgatattattacggaataa

SEQ ID NO: 2597 - DNA, 690 bp, Enterococcus faecalis
aacaaaaagaaaagaggaattctcatcatggaattaaaccgcatgattgaccacactattttgaaaccagaagcgacagaagccgctgtccaaaaaattattgacgaagctaaggagtacaactttttctctgtatgtatcaatccttgttgggtcgcttttgctagcgagcaattagcagataccgacgtcgctgtgtgtaccgttattggctttcctttgggggcaaatacaccagaagttaaagcatacgaagcagctgatgcgattaaaaatggtgcgaatgaagtggatatggtgattaatattggtgcattaaaatcacaacaatacgattacgtacgtcaagacattcaaggcgtagtagatgcagccaaaggaaaagcgttagtcaaagtgattattgaaacagcattattaacagacgaagaaaaagttaaagcttgtgaattagccaaagaagcaggtgccgatttcgttaaaacatctactggcttctcaacaggcggcgctaaagtagcagacattcgtttaatgcgtgagacagttggtcctgacatgggcgttaaggcttctggtggcgtgcataatgcagaagaagcgttagcaatgattgaagcgggggcaacacgcatcggtgcaagtacgggtgtagcaattgtttctggcgcaactggcgaagggtattaa

SEQ ID NO: 2598 - DNA, 468 bp, Enterococcus faecalis
caattgtttctggcgcaactggcgaagggtattaattcgtatttcaaattaaacgaaggtgtggcgaaaaagatgacagtaaaacaagaatggcttgattgtgccgtagaagcattggcacacgcctatgtaccgtattctaattttcctgtgggcgcttgcttagtgactgcagacgggaaaatgtatcaaggagtcaacattgaaaatgcctcctttggtttaacaaattgtgcagaaagaacggcgatttttaaagccatttcagaagatgaacggaccttccaacatttagttgtagcaggtaatacagaggcacccatttctccatgtggcgcttgtcgtcaagtaatggctgaattctttgatccacaaatgccggtcacgctagttggtaaagatggcgcgactaaaacaatgacagttgaggcattattgccctattcatttacagataaagatttttaa

SEQ ID NO: 2599 - DNA, 1089 bp, Enterococcus faecalis
ggggcttttcggaaagtgaaacaagcaaaatttttaggtctaggattggcagcagttgccttaaccattgggttagctgcatgtggcggcaatagcaaaaagaacgccaacacaaaaggtgatccacaacatagtgtcgtaatggtcacagatacagccggcattgatgacaaatcttttaaccaatctgcgtgggaaggaatgcaagagtggggcaaagagcacaaacttccagaaggacctcaagggtacgcgtatattcaatcaaatgaagcatctgattatacatcaaacattgaccaagccatttcaagtcaatttaaaacgatttttggcattggctatttactaaaaaatgcagtagtagatgcagcggacgccaacccagaaacgaatttcgttctaatcgacgatacagttaatgggaaaaacaacgtcgcttctgcaacatttagagataatgaatctgcgtatttagcaggtgtggcagcagctaacactacgaaaaccaacaaagtaggatttatcggcggggttgaaggacctgttattggccgtttccaagctggttttgaaaaaggtgtagcagacgctggcaaaaaattaggcaaagatattcaaattacgtctacttatgcagggacatttgcagacgcttcaaaaggacgggccttagcttcttctatgtatcaagcaggtgccgacattatttatcacgcagcggcgactacaggacaaggaatcttccaagaagccaaagcgctaaatgaaacaggttcaaaagataaagtttgggtgattggtgttgaccgtgaccaaaacgaagacggtaaatatacaaccaaagatggcaaggatgataacttaacgttagcttcaaccattaaaggtgtaaatattgctgtgaaaaaaatctctgatcttgcattagaagataaattccctggcggcgaacatttaacttatggattgaaagatggcggtgttgatttaacaacagaagccctaagcgatcaagccaaaacggcagttaaagaagccaaagaacaaatcatctctggtgacgtaaaagtcccagaccaaccttag

SEQ ID NO: 2600 - DNA, 1128 bp, Enterococcus faecalis
ttgtttaaatacattaaactatttttaggaggctttacagaaatgaaaaaagcaaaattattcggttttagtttgattgcattaggtttatcagtttcacttgcagcatgtggtggtggcaaaggcaaaaccgctgaaagcggcggtggcaaaggggatgcagcgcatagtgctgtaatcattacagatacaggcggcgtggatgacaagtcgttcaaccaatcttcttgggaaggattgcaagcttggggtaaagaacatgatttaccagaaggttcaaaagggtatgcatatattcaatcgaatgatgcagctgactatacaaccaatattgaccaagcggtatcaagtaaattcaacacaatctttggtattggctacttgctaaaagatgcaatttcttctgcagcagatgccaaccctgatacaaactttgttttaatcgatgatcaaatcgatggcaaaaagaatgtcgtttctgcaacatttagagataatgaagcagcttacttagccggtgttgctgctgcaaatgaaacaaaaacgaacaaagtcggttttgttggtggtgaagaaggggtcgtaattgaccgtttccaagctggttttgaaaaaggtgtggctgatgctgcgaaagaattaggtaaagaaattactgttgatacgaaatatgcggcttcatttgctgatcctgccaaagggaaagctttagctgctgcaatgtaccaaaacggcgttgatatcatcttccatgcttctggtgcgactggacaaggggtcttccaagaagcaaaagacttgaatgaatcaggttctggcgacaaagtttgggtaatcggcgttgaccgcgatcaagatgctgatggcaagtacaaaacaaaagacggcaaagaagacaacttcacgttaacttcaacgcttaaaggtgtcggcacagcggttcaagatattgccaaccgtgcgttagaagacaaattccctggtggcgaacatttagtttatggattaaaagatggtggcgttgacttaacagacggctatttaaacgacaaaacaaaagaagctgttaaaacagcaaaagataaagtaatctcaggtgacgtaaaagtcccagaaaaaccagaataa

SEQ ID NO: 2601 - DNA, 1572 bp, Enterococcus faecalis
accttgtctcaagaagaaaacgtaattgagatgcgtaaaatcaccaaagaatttgggacgttcaaagccaacgaccaaattgatttacaagtaaaacctggtgaaatccacgcactgctaggtgaaaatggtgcaggcaagtcgaccttgatgaatatcttatcagggctattggaaccgacctcaggtgagatttatatgaatggcgaaaaagtcaacattacaagtcctactgcagccaatcgtttaggaatcggaatggtccatcagcattttatgttagttgaagcctttactgtgactgaaaatattatcttaggtagtgaacctacccatggcggtattttagaccggaaaaaagcgaaaaaagagattgaagaagtgtctaagcaatacgggttggatgtaaatcccaatgcctatattcgcgatatttctgtgggtatgcaacaacgggttgaaattttaaagaccttatatcgtggtgcgaacgttttaatttttgacgaaccaaccgcagtattaacgccacaagaaattgatgaattaatgattattttgaaagaactaaccgatgaaggcaaatcgatcattttaattacacataagttagatgaaattaaaaaagtggcggaccgttgtacggttattcgccgggggcaaagtattggcaccgtcaatgtgaaagacgtttcttcgcaacagttagccgatatgatggtgggtcgttctgtttccttcaaaacagagaaaaaaccagcgcaaccgaaagaaacaattttatcaattaaagatttagtagtgaaagaaagccgcggcttagatgcagtgaaaaatcttagcttagatgtccgagcaggggaagttgttggaattgcggggattgatggcaatggacaaacagaattaatccaagccttagcaggattaaccaaagtcgaaaacgggtccattcatttgaatgaaaaagagattactaatcgcaaacctcgggaaattacggaaatgggtgtcgcccacgttcctgaagaccgacataaatatggcttggtattagagatgacattggctgaaaatattggcctacaaacgtattaccaaaaaccatacagttcaacaggtattttaaactatcgaatgattaacaaacatgcccgtgaattaattgaagaatatgatgtacggactcctaatgaattagtaccagctcgggcgctttcaggtgggaatcagcaaaaagcgattattgcccgagaagtggaccgcgatccagatttgttgattgtttctcaaccaacacgcggtttagatgtcggagctattgaatacattcatcgtcgactaattgaacaaagagataaaaataaagctgttttattagtaagttttgaattagatgaaattttaaacgtttctgatcgtatcgctgttattcatgcgggggaaattgtcggaattgttgatccgaaagaaacgacagaaaatgaattgggcttgttaatggctggctactcattggaagaagcccgtgctgagttatcaaaagtagaggcaggtgaaactgttgaataa

SEQ ID NO: 2602 - DNA, 1149 bp, Enterococcus faecalis
  misc_feature (886)..(1034): Nucleotides 886 & 1034 are "n" wherein "n" = any nucleotide.
aggcaggtgaaactgttgaataatcgttctgaaaaaataagaaatattttagtccctgtgttatctgttattatgggtttcctcttaggggcaattattatggttatctttggctatgacccagtggctgggtatcaagcgatgtttgaaacagctttccaaggaaagaaaagtattggtgagatttttgtcaccgcagcaccgttgatttttaccgctttaggattctcggtggctaattcggctggattctttaatatcgggctttctggacaagccttatgtggttgggtggctagtatttgggtcgctttatccatgcctgatgcaccccggatgattgcgttgccggtggcgattattgttggggcagttgcaggagctttagcagcagccattccaggtttcttgcgtgcctattttgggacgagtgaagttattgttacgattatgttgaattatattttattatacacaggaaatcatattgctaataatgtcatgaaaccaagtattatggcgaacaaagggatcaccaaaatgattggtgcgaatgcatcattacgctcaccgtttttaacaagtatcagtgatggctctcgtttgaacatcggcattttcttggccttcattttccttattcttgtgtggttcttgatgaaaaaaacaacgcttggttttgaaattcggtcggtggggttaaacccatttgcttctgaatatgctggaatgagcagcaagcgaacgattattttatccatgatgatttcaggaacgctagctggcttaggtggtgcggtccaaggattgggaactttccaaaacttctttattcaaaacacatcgttgagcattgggttcgatggtatggccgtgtctctattangagcaggtagctcaatcgggattttactttccgcattactgttcgggatgtttaaacttggtggacaagggatgccgttgatagctggtgtaccaaccgaattagttgatgttgttattgcagcgattattttctttgtgggaattanttatttaattcgtttcttgttagcaaaagcgtctggtaataaaaaagaaatagcgattgtggaaacaattgaagcggcgccagacaaaaacaatcaagaggggggagacatctaa

SEQ ID NO: 2603 - DNA, 996 bp, Enterococcus faecalis
agcggcgccagacaaaaacaatcaagaggggggagacatctaatggatttagcaacaatttcctcaatcatcacgcaaacattagtgtatgcaactccgctcatcttgacagcattaggcggaacgttctcagaacgaagtggtgtggttaacgttggtttggaaggtattatggtaatgggtgctttcagttcggtcgtttttaacttgacgtttgctgatacatttggcgcggcgacaccatggattgcttgtttagtaggaggcgttgtcgggattgtcttttctctcttacatgccgttgcaactattaacttacgagcagatcatattatcagtggtactgtcattaacttgatggcaccggcgctaggggttttcctagtaaaagttatttatcaaaaaggacaaacagatatgattacacaatcatttggttatttttctttcccaggattgtcaaaaattccagtgattggtgaactattctttgcaaaaacctctttgccagctttcgtagcaattttgattgcgattttagcttggtttgtcatttataaaacacgttttggcttacggttacgttctgtgggggaacatccacaagcggcagatacattgggaattaatgtctacttaatgcgttattctggtgtcttactatccggcttcttaggcggtatgggcggagctgtctttgctcaaagtattgcgggtcgttttgggattaccacaattgcaggacaagggtttatttcaatggccgcaatgatctttggtaaatggaatccacttggggcaatgggcgcagccttattctttggctttgcacaaaacttaagtattgctggggaaaacctaccaattatttcagaaattccaaaagtttatctacaagcagcaccatacgtattaaccattttagtcctagttgtgttcttcggaaaatcatcgggaccaaaagcgaacgggaaaaattacgtcaaaacgaaataa

SEQ ID NO: 2604 - DNA, 207 bp, Enterococcus faecalis
acctgtttggtttttttcaaaatttcaacacttccttcgaattgtaaagaacagctaaaagaaaaaagaaaagttacctttatcaactcgcttttttacagtgaggcagtgcctaatgccgcttgtgttcaactgattatcctaagaaaagaaatggccccccgtcgctttgacggagggcctatttcttttcttatttcgttttga

SEQ ID NO: 2605 - DNA, 672 bp, Enterococcus faecalis
cagctttttttcaaaaatcgttggtttttctgctatacttttgtttgtagtaagcataggaaaagtggaggacgttcaatgaataaaacacgcgtagaagcatttagtgatgcagtcattgccatcatcatgaccatcatgattttagaaattaaaactcctcaagtgggtgttttggcaggtttgatagaaaatatcccatattttttatcgtttattgtcagttttatttttatctgtatcgcatggtacaatcatcattacataatgtccgtaactcattggttttctaaaaaagcgttttgggcaaataatttttggttattctccatggccttcattccggtagcaactgcttgggtgagtgaattttggtggatgcgggcacctgtttatttttatcttgttgtgtatacggtttgggattttgcctacttcttgctaacaaggatcatttatgaagacaatgtagtgaaagatccacaaggtgcagctaagttaagaaaatcgaaatcttatagtaaggcaacaaaaatcattcatctttgtcttttcgcaatcggatatatcggtatttatttttatccgcccattggcattggtgtgattttatcagaagcggttatctggtatttaaatgtgccaaaagagggagaccgcttggagtgttaa

SEQ ID NO: 2606 - DNA, 1221 bp, Enterococcus faecalis
cgtaaaataattgtcattcttgacgtatttacgaccttagaggaggaagcaagtgtgtttaaacgtgttcatttaatcgtactagattcagtcggtattggtgaagcaccagatgctgaaaaatttggagatgtcggcagtgatacactgggtcatattgccaaagaagcgggactaaccattcctcatttagaaaaacttggattgggaactattgctcctttaacaggtgtcaaagcagtggcagaccacgatggctatgctaccaaattagaagaaatttctgttggaaaagatactatgaccggtcactgggaaattatgggcttgaacatcaaaaaaccttttcgggtattcccaaacggctttcctgaagaattactgaaacaaattgaagatttttctgggcgaaaagttgtttgtaacaaaccatatagcgggacagcagtcattgatgattatggcgaacatcaaatgaaaactggggatctaatcgtttatacttcagcagaccctgttttacaaattgcggcgcatgaagacattattccattagaagaattgtataaaatttgtcaatatgttcgtgacattacgaaagacgaaccttatatgattggtcggattatcgctcgcccgtatgttggtgaaccaggtaatttcactcgaaccagtaaccgtcatgactatgctctagatccttttggccatactgttttagattcgttgaaagaaaacggcaatgatgtgatcgctgttgggaaaattaacgacatctttaatggacaaggaattactgaagctatccgcacgaagagcaatatggatggggtggatcaattattaacggtcatgaacaaagagttcacaggtttaagttttactaacttagtggatttcgatgcgctgtatggtcaccgtcgtgatgtaaagggctatgcaaaagccatcgaagattttgatggtcgtttgccagagattatggcagctatggccgaagatgatttgcttttaattacagcagatcacgggaatgatccaactttcccaggaacagaccacacacgtgaatatgtgcctttattggcttatagtaaaaaaatgacaaaacaaggcagcttgccacaaggattttattcagatatttcagcaacgattgctgaaaactttgaagttcctgcaacggaaaacggtcaaagctttttaaatcaattacaataa

SEQ ID NO: 2607 - DNA, 849 bp, Enterococcus faecalis
atcaattacaataattcgaggaggcaacacatgacaacgttaacgaatcatttaaacgaaacaactgagttcttgaaagaaaaaggggtgcaacaagcagacttcggtctaatcttaggttctgggttaggtgaattagctaatgaaataaccgatgcgattgctattcctttctctgaaattccccatttttctgtttcaacagtcgttggacatgctggacaattagtttacggaacgctttctggaaaaaaagttttggcgatgcaagggcgttttcattattatgaaggacattcgatgcaaacggtcacttatcccgttcgtgtgatggctgctttaggcattcattcaatgattgtaaccaacgcagctggtggcgtaaatgaaacatatacaccgggaaatttgatgttaatcaatgaccacattaattttacaggcgataatccgttaattggtgaaaatgatgaagaaatcgggccgcgttttccagatatgagtcatgcttacacgcaagaatatcgggaagtggcaaaaaaagtggctgcggaacaaaatattgatttaaaagaaggcgtgtatatgggcttttctggcccgacatatgaaacgcctgcagaaattcgaatgtcacggacgatgggtgcggatgcagttggcatgtcaactgtttcggaggtcattgtagctgtgcatagtggcatgaaagtactaggcatctcttgtattacgaatttagcagctggtatgcaaagtagcttaaatcatgcagaagtagttgaaacaactgaacgcgttaaaggacaattcaaagagttagtgaaagcaacactagcagctttataa

SEQ ID NO: 2608 - DNA, 714 bp, Enterococcus faecalis
accagaatgagtgtgcatatcgaagcaaaaccaggtgaaattgccgataaaattttactaccaggggatcccctccgagcaaaatatattgcggaaacttttttagagaatcctgtctgctataatcaagttcgtgggatgttaggttacacaggaacgtataagggacagcgtgtttcagtccaaggaacagggatggggatgccttcagcaggtatttatgcccatgagttaattaactcttacgatgtgaagaagttaattcgtgttggaacgtgtggttctatttcagaaaaagtcaacgttcgtgaattagttatcgcacaagcagcagcgacgcttttttccgcgattcgcaatgattttcctaaatatgattttccacaaattgcgagctttgatcttttactcaaatcttacgaaattgctaaagcaaaaggctttactacccatgttggtaacgtattgtcagatgatgttttttacaaagatagtttagatgatgtctttcgtttaggtcgatacggggtattagcgattgaaatggaagcggcaatgttatattatttagcagcaaaatttgatgtagaagcattggcgattatgacggtgagtgatagcttggtgacaggcgaagaaacaacggcagaagaacgccaaacgacgtttaatgaaatgattgaagttggtttagaaacggcaattgctaattaa

SEQ ID NO: 2609 - DNA, 906 bp, Enterococcus faecalis
gcaactcgtggtgaagattggctcttactcgcggcttgtggtaatacgaataaagaagccaacaacgctgacaaaacacatgaagtaacagataccttaggcaataaagtaaccgtccccgcgaaacccaaacggattattgcgagttatttagaagattatctagttgcattaggagaaaaaccagtggcacaatggacagttggacaaggcagcattcaagattatttagcgaaagaattgaaagatgtccccactatttcctatgacttgccatatgaagcggttctaaaatttgaacctgacttattattaatcagttcatctgctctagttgaaggcggtaaatacaaagaatacagtaaaattgcgccaacttatgtagtcaaaaacggcgaaaatgtcacctggcgtgatcaattggaagatattgccactgttttagataaaaaagaacaagcgaaaaaagtgttagaagattatgataccttaaccaaaggcgtccaagaatatcttggcaaaaaagatgctggcaaatctgcggcagtcttatgggtaaccaacaaccaagtctttatggttagcgataatcgctcaagcggaaccgtgctctatcaggacttaggcctccaagttccaaaattagtggaagaaatttctaaaaacgctactgcggattggaatcaagtttctttagaaaaattagctgagcttgacgcagaccacattttccttgtaaacagcgatgaatcagcacctcttttccaagaagcaatttggaagaacttacctgctgtgaaaaataaccaagttcatacctatgataaaaaaagtagttggttatacaacggacctattgcgaatactcaaattgttgaagatgtaaaaaaagcgctcttaaattaa

SEQ ID NO: 2610 - DNA, 1005 bp, Enterococcus faecalis
gagatgataaaaatgacattaaacggaattgatatttctagttggcaatcaaatattaatgtatgtaaagaaggggtttctgcggattttgttattattaaagcaacaggtggaacaggatatataaatcctgactgtgatagagcattccaacaagcaattagtagtggtaaaaaagtagctgtatatcattttgcaaatgaagtaggacttgaagggacagcggagcaagaagctgagttctttttaaaaaatattaaaggttatatcggtaaggccgtcttggttttagactgggaaagtactaataaaggggacgttccttgggctaaacgttggttagattatgttcaaagtaaaacaggggtaaaacctatgttttatacttataccaatgttttacaatcatataattttagctctattgcaaaagctgattatggtttgtggttagctgattacggagcaaataatccacaaggatattcccaaccaactccgccatcagttccttattggaattttatttcaatgtatcaatatacctcaaatggtcaattgcctggctggaatggtcgattagatttaaatgtattctttggtgatagaaacatgtgggacaaatacgctaatcccaaaagtaatccgacacccgctcctccagttcctcctaaacctaagcgccgttacggatatagagtagacgatttacaatttgtaaacggtatttggcaagtaagaaatgatgtattggggcagccggactttgattggacagaaaacggaattaatgttgcttatattgataagatcaatccagcaacaggagagaatactccagatcaagaattaaaagtcggagactattttgcttttcaaccatcttctgtagggattattactgaacaatactctttaaatgggaaaacaatctcgcatgttcaattcccagatgaatttatttggttgtacacagaaagtgttgagaaattaatctatgggtaa

SEQ ID NO: 2611 - DNA, 240 bp, Enterococcus faecalis
cgaaagaatacgagatttagaacggagggacaaataatggacttttctaaaattgaattgatgccattagtggtgctagggtgtttagctgtcgggtttgttattaaaaatactaatatattaaaagataaatataatcagtttattcctttaattgtgttcattttaggtatattaatctcatggtggatacaaggtaaaatcacacctgaaaataccacatatggggccttaatttaa

SEQ ID NO: 2612 - DNA, 267 bp, Enterococcus faecalis
gttggtgagaatatgtctataggagagattattacaattataacgtttgtaggtggtattatcggttttttaataaaaaattataccttactacaaaaactagatgaaacagtaaataagcttaatttattaattgatcaaactaaagaaaaacaaggcttagtagaggatgaagtaataaaattaaatgaacaaataaaatctttatggaacaatttaaaagaaaataacgaaagaatacgagatttagaacggagggacaaataa

SEQ ID NO: 2613 - DNA, 444 bp, Enterococcus faecalis
tgtagagtttggaggaagtgcaacatggataagataaaaatatggattactgtggacgaaaatcaaatggttacagattattcactaactgctaaaaaaaattatattgaaattgaagtaagcgaagaaccaaaagattatttaaactgggggttacgcaatggcaaattagttcattatcctgatgatttaaatgatctaacaaataatagaacaacttcttttgttggaaatgtaatgctgagctttgcagttatttcttgggcattgtcctatattccattaatcgggaagattattttagactatcctaaatatgctgatattaaagacgaatacgacttgcttggattgacagatgacaatatgaaaacatttgttagttacaaacgaattacagaaaaacaatatgaagaaataacaggaaactcctacaaaaaataa

SEQ ID NO: 2614 - DNA, 1200 bp, Enterococcus faecalis
aaggggctattgccgatgagggttagaagcttttgttctgattgtggcaatataggatttggtccatgtgaatcagatgtaagtatttgttcatttgaacgtgtagatgaattaccagctatagaagctgctgaagaatgtactgcgtatatattgccaaacaatagtgctcatgttttatcctttgataaaaaaagctttgtagattttaaaggtccaaaaggagacaaaggtgatattggaccacaaggacctaaaggagacaaaggggatataggccctagaggcccagaaggtttacaaggagacattggtccacaaggtttaaaaggcgaaaaaggaggtaatggacctcaaggaccaaaaggggaacaggggccggttggaccacaaggacctaaaggagataaaggcgatattggaccacagggaccaaagggagacacacctgacgttagtgatttcattaagagaaaagaggctgaaaaagggttatttgttgtgagaaatacagatgttctcacccaaaattggaatgatttcgttgaacctggcatgtatagcgtatggaaaccatctggggagaatatgcctcccaatgcaacctatggagatttggttgtgtttgccacaaatggaacagttacacagctatatagttataatggaaagtggcaaatgagaactaaacaaggaagcccaggctcttggactacatggaaagaaatagggcaacaaggaccacaaggtgaaaagggagatactggaccaactggacctcagggaccgaaaggtgatacacctgatataagtaatttagttactaaaacacaacatacaaatgatttgaataaaaagattgataaaacagctttcaatgctgttgggcaacatatttcttataatggaattactattcatatccaaaagtcaaatacaattattacatgcaatgtcgaaggtatttttaaaaaaggaaaagctaatggttggcatgaggtctcaacaagagcagaaacaagttatagaccagttaacatgattattaaagtgcctttaacaataaatatagggaatactattcaaataaataagtatgcagcattacaaatagaaacatctggtcgaatcatgattcgtgtttatggtcttcaaaatgataatgtagagtttggaggaagtgcaacatggataagataa

SEQ ID NO: 2615 - DNA, 501 bp, Enterococcus faecalis
ggggtagctataatggcagaaaataaacaagcgagtgaaggattagcagaagatttaattagaagcatggttcaaacagcttctatagaactacatttaaaaacattggttgaaaaaaggcaatctgaaatggataacggtttaatagatactaatgatttcaatcgggttaatgagcagattgacgtattaaaaaatttgaaagaagaactgtttgaagttactgaacaacgtcgacaagatatgcgtacgctgtttgatttatttgaaggtaaaggtgataaggaacaatggtgtatagttaaacacgctgcaatggcaatgtatacagcttttgaagcttggcaagcaagtgataacgatcgtttactttatcaaatatgtattgaaaaaaatgcttatttcatcaaaaaaatcactcaatttacaggagtacccattaccgaatgtgcttcttgctttagcgatatgatgaaaggggctattgccgatgagggttag

SEQ ID NO: 2616 - DNA, 696 bp, Enterococcus faecalis
acgatgatgaattatgatgatgcattgattaaagtagcagaaagaactcaaaacaatcgtaaacaaaatcgacaagatacgatgcaacgtagacatcaggtcactgaaatctatggtcaagaatatactgctcaaggggattcaaatacaccagccattgtttatttgcctgtaagtaaggaccttgtatatcacgaagtcatggagcttcaaattcgtatttctggattcgagatgcctgttaaaggtggagaaactacaaatgcttctttaaaattaaccaataccagattagaagtaggtagcacgaacattccaccgaataatcatagtcattcattaagcccaaatccacatacacatgaattaaatccaaatcctcatagtcacaatctgagtgctggcattcaaacttttccttcaacagccaccgaattccgattggaaatcagtggagtagatatcacggatgcaataaaactagagtatccatcaaattggatagatggtaatggtgtctttcctaaaagtgacgatggattattgcactataatcttttaggtatattaccacatttacagccatggcaacaaaacgttattttgtcgagtgggttaaaagaaataaaaatatatggcaatggagtgttcaaagcaactgttgcagaatttttcaagttttcacatagaaattag

SEQ ID NO: 2617 - DNA, 2580 bp, Enterococcus faecalis
ccaatgcctagtcatgatgcatcaattcagtggtttgaagcgagaaagggaaaagttgtttactctatgagtgctcgtcttggcccgaatagttacgactgctcaagcgcagtttacttatcattgatcgcaggcggttttttgccaagtggttcaatgggcaatacagaaaccttgtttggatcattagaaagtattggctggaaacagacgccgactcccaaacgtggagatatatttatttggggtgttcgtggagctagtgatggtgcaggaggacacactggtatgtttattgatggttcgtcagtgattcattgtaattatggagctaatggaatttccatagataattatcagtttattttaaataataatggtggaatgccaagtgttatttatacagatccaaaaaatgatggaggaaacaatcccacccctccaccaaaacgtgttttaagtaaagagcaacaagtcgctgtagatattagaaatgtgctttcaaaagaaggctacacaatacaagctattgctgctatatgtggtaatgctgatgttgaatgtggaatgcgccccgatatttctgaaattggcggcggtggtggatatggagtagttcagtggacaagtccgaatgcatgggaaagcggagcgaattatgttcaacgtttacttagagaagcgggcattgatggtgattataaaatggcgtcaactcaggctaaattaattcactatggtatgtttcatggtcaatggattggagttgttagtctgactgatgcaaaagagtttattaagggtacaaatgtcgatcaattaacaatagcatttctgaaaaattttgaacgtgcaggagttgagaaaacacaagcacgtataacagctgcaaaaaaatggtttgacttcttactgaattataaagaaggggattatgatgatccaactccagaaaatactaaggaaaaattacgaaatgttggtgaaattgatcaattaggtattaaaaatggaaaagtttttgtaaaaggttggcacttttcgagtgatttaccaattgaaaatatagaaatctataatgctgaaacagcgaaattaatttaccaattcaataacattcctataaaaattcgtaatgatataaaagaaaaatatcctaatgttcaagatgtcgaaaagtcaggatttgaattatcttttacgctgaaagcaaatgaagcgatatttatcaaaggtattcgaactgacgggcaagaaaaagaggagttgtattttgacaaccttttaatgtttgaaccagttgaaaatgccccagtagataattacgctgaagataatagaaaatttttcttcgaaatctttgaaaaaggaaaacttgttgcaagaggtaataagattttaaatacattatcttggggtaatgagttgatgtatgtgcctacaacttcactcgttttgccaatcacttatcgtgaatattttaaaggtcgagaagaagtgaaaatatatattaacaataaagtttttcatgggattacaagtgattatgatgttgataaggaatttgaaacaataactatacaacttgatcatataatcagcgaatgggaattccgacaagtatccaccaatttagcatgtaagaatagaacaattaatgatatttttagtactcttgattttcgatattcaaataaatggcatttagattatttacaaaactcttctcaaaaaagaatagactatgtatatagtagacaaaacaaacttgaagcattaacaaaaacatgtgagttaacagatgatatttggtggagagttggttttaattttggtagaaaattagaatttggaacttttggagaaactaaacctgttcagatatcagccgttagaaatgcgccatatcgtttaattagcgaacctaaaattgactatcagtttgatcaagtaataaatatggctactgtatatggagaaaaatcagatagtggtatgtctagtatgagtttgcgtgaagtttatttagaaccacatacacagataaaaggatttccagttcgcattcttcgaaaaggaatcaataacgaacgtggttatgattatatcaatcttgcaaagattgcttctaataataatgttgaatacacagtaattgatgaacaaagtgtaagagatgaaagtaatatatctattgaagcgagttattcgtttaatgatttagcgccatttgcagtaaatgataaaaaaattagtgatgaagatagacatcaagcaactagaactgcatatgaaacagcggttaaaagattaaaacaagcaagaagaaaatactacattgatatcacaacaactgaattaccatctgacattaatgtcggagatcaaattcgtttgctatatgataacaataaattaataacagaaggatgttctgaatatcaaaaagaaattatgaagatgagtgattggtactatattttgaaaattgagtacaattttgatgaaacaggattagaaacaaacagactgactttgagtaaaaatttatcaattgagcggaaggcagatgaacgatga

SEQ ID NO: 2618 - DNA, 792 bp, Enterococcus faecalis
aattacgtactagaaaggatgatttacatgtctaaaaattgcaagtcttgtaaggacttaaagaataggggcatagatgttgactgttgttttgaaattggcgacaaagaatgtgctagcttaggtgatgataaaggatttaatggcaagaaaaacgattgtcaagatatgcatgatttaaatgattgtttactaggtagagctgacagtgctctcgatattcatgatgattgtgattggaaaggatatttaaaaaaattagtatctacactttataatctacagaagatgacaatttgtgcaatttgtggaatttggattaaaattcatgaattatacaaattaattgagaacttgaaacaatttactccatattttcgacgaatcaatcgtgtaggtactggtatatggggagaatcttcgcatattacaaatttcaataaaactaaaataattatgaaaaataaagcggctaatcaatgggaagagcacgttactattgaaggacaagcatccttaataactagcggaataaaagctggagcaacagtagaacttacattggatggtagtctgtttgactcaggagatagttatgaaccaaatgtagtaattccggttgtattttctaatgttcgcagagatatgactacatttaacgctatattgttataccatattccttctgataaatggtatgtaaaaaatacttctggtactgatattcctttagattatggctttcgtttcagtttaacttaccaacaagggaatgttaaacctggtgagtag

SEQ ID NO: 2619 - DNA, 1131 bp, Enterococcus faecalis
gaggagtgtaaattgatgtatgattgcagaacaatttatcctcaaaaaaggtacttacaattcagagatgttgtaattggtgcatatgatatgattcaagatgcagatttgagtggtggattcaaaactaccactcaagcatttagttttggttatggtagttatactaatgcaaaacaaatacaacagtattcgactgaacaaaagttagcgttaacactaaagataaattattctatgttttctatggaccaaaaacagttttataaagaattcttatatagtgagctttctaaggttggtaagctatgggcaattgaaaatcgtcgaataatttggacatatgcttttgtagaaagtttttcagaaccttacagcattgaaaaaaacatactttctgtcgatttgaactttatattatatgaaggaatttggcactatgcagatgaaaagaaaacatttttgaaaccttacgatgcgtgttcttttgctgattgtctagaatttgaagaaatagacacttgtcaagacgatatctacggatgctgtattagttgtcaaaaaaataatataaaacataaggattgtcaaaaatgttcttgtgaatgtgattttcttactaaggaagacagtctgtgtgttaaacaaaaagatatagaaaaagattactggaaatattgtagtggtggttatcaaataatttataactgtaataaaggtcatcatctatggggatataataagatgctcggaacgaaaatttgtaagaaagagctttgcgataactatgttgctggaaagttttatagtaataccgttttggagactgatgtattcacaatgactattattggcagagtagaagatccagttattcatttaaatggtaacgcaatgcgtttaaaaggtatatatgatggagagttacttattgaatcaaatggagatgttttctatcgtgaagatgactgctgtgattttgataagttaccgattgaaaatctcgaattgatgaattgtaacacttttggatggtccataaagcatgggtacaacagcttactagtagaaacaaacgattgctgtgagccagtttgtgtatttatcaaagaggataaaattacgtactag

SEQ ID NO: 2620 - DNA, 2595 bp, Enterococcus faecalis
ggaagtcctcttttctgtgaattggttgtcgttaactttattctacagaagcgacttccttttttgtatggattttttcatttacacaaaatattttacactctcgttattggtggaaaggataacatttttgagaaattaggaagcttaatgaaaggtaaagttgacactgctatttttgatgagatggaaaatatattaaataaaatgatttctctatctaataaaatgaaaactttacaagaaaataaattttcaatatctgatattacaagtaaagttacagttataaaagatatattagaaaagttagatcctgctgattgggatattgcgaaatctggagtcgtttcatctaaaattattgatcaagcagatactactatattctggttaaataaattaagcaaaaagttagcagcattatcagaaagtaagttagaaacgggttcagtgcaaaatgtactacaaaatattaaaggcgcattacgtatgctaactaatgaaagttggagtgatttcagtggtggagttgtgccaaaagattttatagatatgacgggccaaagtgtggatggtttgaatagcattaacaaaaagctgtctaaactatcagaaacttcttttgacttaggaaaaactcaaaccatgatagcaaatctaaaatcctcattacgtatgttgcaaattaaatcttggggcgacttcgatggggggatagttgaacgtggaacattagataaactagacactgcagtttattggttaagtagtatagctaaaaaatttggaacactttctaattttgaatttgatggtggtaagttacaaggaataatagcaaatatcaaagatgctttaagattattgcaagcagatagttggaccgattttaatgaaggaattgttggtaaaagattattggaccagttagacacatcaatttactggttgaataaagtgggtagtaaattaaatgaactttcgaatttaccattagaaacaggtaaggcacaatctgttattcaaaatatcaaaggatctattcgaatgttaagaatcgattcatggagtgattttaataatggatttgttgatagggaaatgcttagcggattagatgtagctgtattatgggtcactagagtagcaaatcgtttaaaaggtctttcgggaataaatatcgaaactgacaaaataaattccactattgcaagtaccaaaggggcattaagaatgtttcaggctagctcttggcaagattacaatgaaggaatagtcaaagctgactttataaaagctttggatttagttttgataaactttatacaattagcaaatagagttaatggattagctagtatcacactagaaaatgataaagtccattcaacaattaccgctgttaaaggtgttattaataggttaacgatagatacttttcctgattcaaacacgatgattggtgaagatgttattgataaaatcgacactacagtttataggctgataacattagcaaatagaattaatcagattcctcaattaacattgggtgttgatgaattgagtaataatataaaaagtattaaatatgtcgcaacagagatggccattagtaagtggcaagggatatctgaaggcgttataagcagcgaaacgttaggtatgattgtttcatctgttagtaagttaggaacgatatcaaataaattaagtgtattaaacgcattaccatttgattggacgagtgtattaaacaacgttaaccgaatgaaatcaatcattgaactaatgaacacatttccaagtgcaaaaggactggatagtatacccgagctagtcgaatcttttaaaaaattacttattacgttacaaggtctagaatctaaatttgaaccaattgggaaatcatatggacagcaagttattaatggattcaaaaatgctgatgttccttctaaaatcaaaaaagttattgatgatttaataactaatttaagaaataaagataccgagtttaataatgttggtaaaggatttggggatagtctgaaatcaggatttacaaatgcactacaaggtttagatagtaatattgatagttatgttacatctattaataacaaaatttcttctattcaaaccaatctaaattcattaacagcgcctagtcttactgttgatgtaacagaaaatgtgaagactcgtagagttacacgtgcaaatggaggcattatacctcagtatcgagcaaacggtggaagcattatgaaacatatttttaaatccaaaggtacagatcgtgttccagcaatgttaactgctggagaatatgttcaacgtaaaaaagcagtagatcatttcggaattgactttatggaacggatcaataacttagatctaagtggagcactagctagtatcactaatcgatttggaaatagtcaacctgtctcaaatgtgatgaatagatattataatacgacaaaaaatacaagaaataacaataatacaattaaccaaaatattagtatgactggaaatcctaattttgccaatttgcgtgcaaatagatttttgagaggagtgtaa

SEQ ID NO: 2621 - DNA, 606 bp, Enterococcus faecalis
cgacaaccaattcacagaaaagaggacttccctatgaatgattttactacagaaattgtgcaaactctagtcactaaaggcgatttaaatgaattattccgttcgcacttagaaaaagcgataaacacactcctacggactgaattaacggcttttttagattacgaaaaatatgatcgcactggttttaattcaggtaattcgagaaacggttcttactttcgatcaatcaaaaccgaatatggtgaattaacattggaaatacctagagatcgtaatggtgagtttaaacaacaaactttaccagcctacaaaagaacaaacgatacattggaaaccactattatccatttattcgaaaaaggtgttacgatgtctgaaattgctgatttgatcgaaaaaatgtacggtcatcactatactccacaaaccatgtccaacatgactaaagttctgactgaagaagtaaatgcctttaaatccagagccttaaatgataagtatgtcgctatttttatggacgctacttacattccactaaaacgtcaaaccgtatccaaagaagcgatttatattgccattgtgctacagcccggggagggcgag

SEQ ID NO: 2622 - DNA, 1140 bp, Enterococcus faecalis
gccgtaccccgtggtggacacctgttgtttgatgatattccgtttttagaaaaagcacaagcagaacatgatgcatttgcagagttgttacgatcaaaagatatcgaagtggtctatttagaggacttagctgctgaagcgttgattaatgaagaggtccgccgacaatttattgaccaattcttagaagaagccaatattcgcagcgaatcagcaaaagaaaaagttagagagttaatgttagaaattgacgacaacgaagaactgattcaaaaagcgattgcaggcattcaaaaacaagaattacctaaatatgagcaagaatttttaacagatatggttgaagcggattatccattcattattgatccaatgcctaacttatacttcacgcgtgataactttgcgacaatggggcacgggatttctttaaatcatatgtattcagtaactcgacaacgggaaaccatttttgggcaatacatttttgattatcatcctcgttttgctggaaaagaggttcctagagtctatgatcgttcagaatcaaccagaattgaaggtggcgatgaattaattctttcaaaagaagtagtggccattgggatttctcaaagaacggatgccgcgtctattgaaaaaattgcgagaaatatttttgaacaaaaattagggtttaaaaatatcttggcttttgatatcggtgaacaccgtaaattcatgcatttagataccgtttttaccatgattgactatgataaatttacgattcatccagaaatcgaaggtggtttggttgtttactcgatcactgaaaaagcagatggagacatccaaattacaaaagaaaaagatacattagataacattttatgcaaatacttgcatttagacaatgttcaactaatccgttgcggcgctggaaatttaacagcagcagcccgtgaacaatggaacgacggttcaaatacattagcaattgcccctggggaagttgttgtttacgatcggaatacgattacgaataaagcgctagaagaagcaggcgtgaaattgaattacattccaggaagtgaactagtacgtggccgtggtggccctcgttgtatgagtatgccactttaccgtgaagatctttaa

SEQ ID NO: 2623 - DNA, 1059 bp, Enterococcus faecalis
agatctttaaaaaaacacccaaaaataggaggaatcatcatgaattcagtatttcaaggacgtagtttattagcagaaaaagatttttcaagagcagaattagagtatttggtagacttcagtattcacttaaaagaattgaagaaaaaagggattccacatcactatttagaaggaaaaaatatcgctcttttatttgaaaaaacttcgacacggacacgctctgcatttactacagcagcgattgatttaggggcacatcctgagtatttaggcgccaacgatattcaattaggtaaaaaagaatctgttgaagatacagcgattgttttaggtagtatgtttgacgggattgagttccgtgggtttagtcaagaagtagtggaagatttagcgaaatattctggtgttcctgtttggaatggtttaacggatcaatggcatccaacacaaatgattgcggactttatgacagtgaaagaaaactttggtcgtttagaaggaatcactttagtatatgtcggcgatggccgtaacaacatggcaaacagcttgttagtgacaggtgctattttaggcgtaaatgttcgcatttgtgcaccaaaagaattgttcccttctgatgaagtcgttaattatgcaaaagaatttgcgaaagaatctggtgcagaattaatgattacagacgacgttgctaaaggcgttaaaggagccaacgtgttatatacagacgtttgggtgtccatgggtgaagaagataaatttgaagaacgtgtcaatctgttgaaaccttatcaaattaatatggctatgttagaaaaaaccgaaaacatggatggcgatttaatcgtattacactgtttgccagcctttcatgatacgaaaacacaatacggtgaaatggttgctgaaaaatttggcattactgaaatggaaattacggatgaagtcttccgcagtaaatatggtcgtcaatttgaagaagcagaaaacagaatgcattctattaaagcgatcatggcagctactttaggcaacttattcattcctcgtgtgtag

SEQ ID NO: 2624 - DNA, 1005 bp, Enterococcus faecalis
ttgtttcgccctttaagagtttcttttgaagggcggcctattctttattatgataggaaagaaggatttgtaatggggaaaaaaatggtcgttgcactaggcggaaatgccatcctttcaaatgatgctagcgcacatgcacaacagcaagcattagttcaaacatctgcctatttagttcatttaattaaacaagggcatcggttgattgtttcacatggcaatggtccacaagttggaaatctattattgcaacaacaagcagctgattctgaaaaaaatccagcgatgccgctagatacgtgtgttgctatgacacaaggaagtatcggctactggttgtccaatgcgcttaatcaagaattaaacaaagcaggaatcaagaaacaagtggctactgttttaacacaggtggtcgtagatccagcagatgaggcattcaaaaatccaacaaaaccgatcggtccatttttaacagaagctgaagccaaagaagcaatgcaagcaggtgctatttttaaagaagatgcaggacgtggctggcgcaaagtcgttccaagtcctaagccaattgacatccacgaggctgagactattaataccttaataaaaaatgatataattaccatttcatgtggtggtggcggcatccctgtcgtaggacaagaattaaaaggtgtcgaagcagtaatcgataaagattttgcttctgaaaaactggcagaattagtggatgcggatgcactagttattttaactggcgtggattatgtgtgtattaattatggcaaaccagatgaaaaacaattaaccaatgtcactgtagcagagttggaagaatacaaacaagcgggtcattttgcaccaggtagtatgttaccgaaaattgaagccgccattcagtttgtagaaagccaacccaataaacaagcaattatcacttctttggaaaacttaggaagtatgagcggcgatgaaatcgtaggaacggttgtgacaaaataa

SEQ ID NO: 2625 - DNA, 717 bp, Enterococcus faecalis
agtatagtatttaggagaattaagatgatgatagagaaaataatcactaaaaataatcaagattttcaatacttttctgaatcagaactaacagaattgcgcaacgagagtttcgttcgctcctataaaaaaggccaagtccttttttatccaggtgatccgagaaatcatttaattttattggtttcaggtgtcattaaaattgaaaaaaatgatcgcagtggtaatttttcctatctgcattttatgaaaaagcaggctctttttccgagaatcggactgtttcaagatgaggttcattacgactccgcgattgcctatacggatattgaggttgtgtttgtgccagttaaactgtttgagcgttttctccaaaataatccccagcaattgattcattggattcaagaacaatcggtccttttaaaagaaagtatgatcaaaatccaaaaaggaacaaccaatgatgcatgtgaacggattgtgacatcactggcgatgttattaaatgatttaggagaacgaattgacaacagagaacgcgttgcaattacttgtccaattaccattaatgacattgcacgaatgagtggaactacgcgggaaacagcaagcagtgttatgaaaaaattagtccaaatgaaccgtattagctacagtcataaattcttaacttttctagatacgccattctttattgatcgattgagtaattaa

SEQ ID NO: 2626 - DNA, 1458 bp, Enterococcus faecalis
aaggatatggcagaaaaaaagaagaaaaacaaaaaacagctttcgtcttttagtattttatttattattttaattgttttaggtatcgtaacggtcttgctaaatggccagccatttaccccaagagaaattgatggcaaaatggttgaccacgtggtaggggccaaattatcggatattatcatggctccattcaatgggtttaaagatgccattgaaattaatatttttattttagtactcggtggctttttaaatattgtgacgcaaactggggctcttgaagcagggattcaatcagtcgttaaaaagttaaaagggaacgaattgaaaatcattccgattttaatgattttattttctattggtgggtcgacttatggaatggcagaagaaacaattcctttttatggtttattgagtgctaccatggtcgccgctgggtttgatacgtttgtcgcagtgggtactgtgctattgggtgcaggatcaggtgttatcggttcaacggttaaccctttctccacaggggtagcgatggatgcgttgcgaggtattggcattcagccgaatacaggaattattttaattgtcggtgctattttgtgggcggcctctactagctattctattttcattgtgatgcgttatgcgaaaaaagtgaaggctgacaaaggttcaacaattttatctttacaagaacaagaggatatggaaaaaacgtatggacaagcagcgtcgaaagaaatgccatttacgaatcgtcataaaaaaatcttaatggtattcgctttctgttttgtcattatgattgtttccttaattccatggaacgactttggagtgacgattttcaaaggctggacgtctgttttaacaggcaacagtttcggtgactggtactttggcgacttagcgatgtggttcttccttttagggatcattgctgccttgattggtcgctttactgaaaaagaaaccattgaagcatttatcgacggtgccaaagatatgttatccgttgttttaattatcgtagttgctcgcggggcatctgttttgatgtctaaaacgtatttagattcatttatccttgataaagcggcaggcttattacaaggactctccccagtcttatttgtcatcggtgcctttgttttatacttaggtttatctttcctaattccttcaacttctggtttagcgtacgtttctattcctgtaatgggtgcgttagctaaaaacattggtttaagtccagaagtgatggttatgatttttgcttcaggttgtggcttgattaatttgatcacgccaacatctggtgtcgtaatgggtggtttggaaatttccaaagttcaatatgccacttggacaaaattcatggccaaaccaatgattgtcttaggcttaattaacctaattatcttaattggcgcgatgttactctttagctaa

SEQ ID NO: 2627 - DNA, 738 bp, Enterococcus faecalis
gcaactccaacaactattgacccacattacgtcgattatgccagggaggaagcaagcatgaaaaaaattctcgtggtcctcacaaacgtctcccgttatcacggcaccgaagaaccaacgggcctctggctaggtgaagccacggagttcgtggaagaagtaaccaaagcaggattttcagttgactatgttagtccccaaggaggctatgtccctttggatccccggagtatgaaatatgtagattcatccattatggcagtttatgaaagtgctgattttcaagaacgagcgctagcacattccctctctcttgaagaaattgagccagatgaatacgcagcaatttactttacaggaggccatggcgttatgtgggactttcctgataatcctcagttgcaagcaatcactcgtagcctttacgaacagggcaaatacctaacttctgtttgtcacggaattgctggccttttaaatgtcaaagatgcgtcaggaaattatttgattgcagataaaaccattactggcttcactactgcagaagaaattttagccatgaaaaaagcagttgttcctttcttaaacgaaacaattgccaaagaacatggtgctacttttgcgaaaaagcgtccctataaagaatttgcgtatcaagatgaccgtataatcactgggcaaaatcctttttctgtccgcgctgtcgcaagattgttaattcaacaactatcaaaatga

SEQ ID NO: 2628 - DNA, 363 bp, Enterococcus faecalis
aaatacgaaccaaagaggcgaaagaatatgaaagaattagaagaaattcaaacagaatttactgcgcttagtgattttttaatcgcattgggtgatgaaaaacgccaagcaattattattgcactgttagaagaccaagcctgtgttggccgtcgtgtcactgagttaacagaggcgacacagctctcacgccccgctgtttctcaccacttaaaaattttgaaacaagccaaattaattgattgtcgcagtgaaggaactaaaaattattactcactttctcacgataccaccaaaattgagcaactccaacaactattgacccacattacgtcgattatgccagggaggaagcaagcatga

SEQ ID NO: 2629 - DNA, 1041 bp, Enterococcus faecalis
aaagagaggaaagattcaatgatgaaagccgctttaattcataaatacggacaaaaagaattagcaatcgaggaggtgcccttacccaccattcatgacaatgatgttttggtcaaaattatcgctgccagtatcaacccgattgatttaaaaacaaaagatggcaaagtaaagatgcttttagattatcaaatgccactgattttaggcagtgattttgctgggattgttgtctctgttggaaaaaatgttcaaaattttaggctgggcgatgcagtttacgggcgagtacccaaaaatcgcgtgggaacttttgctgaatatattgcagtggatcaagcggctgtagctatgaagccgaaaaatttaacgtttgaagaagctgcggccattccgttagtcggtttgacaagttatcaagcgctacatgatattatgaatgtacagccaggccagaaagtcctgattcaagcaggttcaggagggattggaaccattgcgattcaattagcaaaactagcaggcgcttacgttgccaccacaacgagtagtaaaaataaagaatgggttcaagcgttgggagcagatgaagtgattgactatcggacacaaaattttgaagaagttttatccgactatgattatgtgtttgatacaatgggggggacaatcttagaaaaagctttctcagtggttaaacctcagggaaaagttgttacattgtcaggcattcccaacgaacgttttgctaaagagtatggcttgccgctttggaaacaatgggcctttaaaatagctacccgcaagattcatcgattggagcaagccacagatgttagttatcattttttgtttatgcgtccagatggcgagcaattagctttactcactgagtttattgaacagggaaaattacagccgataattgaccgagtcgttccttttagccaaattcaagaagcggtagattattcattgacaggacgagcgcaagggaaaattgttgtgaaaatcgccgaattaataaacatggatggttaa

SEQ ID NO: 2630 - DNA, 816 bp, Enterococcus faecalis
ggagtgaagaatatgggaaagttgattggtaaattgtatgaaactaaggattattcaaaatttaaatttttaaagggaaacagagcaattaaagaaaagcgtagtttaatagaatctatagaaaaatcaggtattttagttcctatagatgtaaatgagaaatttgaaattattgatggacaaactcgttttttgatagccagaaaattgaataagtccattccttatattatttcgaaaggtctgaacttagatgatgtaattgagcttaattcgacaattaagacatggaaaattggagatttcatacgaaaatattcgatggatggtatgaacgaatataaaaaactacagtttattgtaaagaagtataaaaatatctcaccctcttctttaatatctttggctatgggaaataaacactatgatggtaattcacaagaattagtaaaaacaggtcaattttcattttataactacaaggaatttataagattattagattcttacggaaacttttgtgaagagttgaacttgagaagttcacagcaaacattttttgcttatgtagaattatttattgtaaaagatttcgattattataggttaattaatggatttaaaataaaaactaaaaatgttatagaaggaatttttcaccaaggagtcgttttggaagagtttttgaaagcatataattataaattgcatagaaattcaaacaaagcaattaaatatgaaatcgaaattgatgggaagccagtaataagagatattcaaagtatgtttttaataaaggagataaaaaatggatag

SEQ ID NO: 2631 - DNA, 705 bp, Enterococcus faecalis
aaaatggatagagaaatgagtgatatttatataacggaagaatatgaaatgttcagctttttaagaagtaatcgtgaagttacactgaacaagaaactggaaaattctattctacaaaaaggaattattcgacccattatagtaaactccacaatgcagatcatcgatgggcaacatagatatagtattgcaagaaaatatggcttacccgtgccatactatgtttccgtaaacaaagaaatgaatgacattattaaaataaataatacagcatgtaagtggcgggtaatagactatattaataaatacgtaattttaggaaatgaagaatacaaaaagttaaaagatttacatatagagaataacaaaattcccttagttgagttagtttctgtatgcatgggatcttggactaggcagaataaaatgatgacagaagttaagaatggaatgttcagtttttacaattatgaagagctaaagaatttattgaatgaatacaatgaattgaaaaaaaatactcaaattaaagatgcgggagctgtattccaagcttattttaatttgtcatctataatgaaatacaatcaaaaatggtttataaaaaaggtaaatggtttagaaatatcaagaaaagtattaggtataaggcaacctgaaaaagttttaaaattatttttaagtcaagtccagactcctgtgtaa

SEQ ID NO: 2632 - DNA, 525 bp, Enterococcus faecalis
atacctaaaagaacgccggtttacaaggtaacggaactgttattttctgatgcgcacaaaggattgttttctgccattagaaaatccttcaccaacgtaagttggcaaagatgccaagttcatttcctaagaaatatctttaccaccattcctaaaaaaaattcaaaatctttcagagaagctgttaaaggaatttttaagttcacagatattaacttagcgcgtgaggctaaaaatcgattgattcatgattatatcgatcaaccaaaatattcaaaagcttgcgcatcattggatgatggattcgaagacgcctttcaatataccgtacaaggaaattcccacaatcgactaaagagtaccaatctaattgaacgactgaatcaagaagtacgcagaagagaaaagattattcgcatcttccccaatcaaacatcagccaatcgcttaattggagccgttcttatggacctacatgatgaatggatttattcttcaagaaaatacatcaattttgataagtag

SEQ ID NO: 2633 - DNA, 1161 bp, Enterococcus faecalis
ataaatccgggcgcaaaaatcacgccacttcaaggatttacgcaagggaatcaagtcacagtcaccagtgatccttttacttatagtgcttcaaaagctttaccaagcgtttatgcggctggggcaaaaacctataagtttgttggttggtataaaggaaccaccaagccaacgaccttaaaaacaacggctactcctaattatttggtggattttgatgataatgacgatatgacggcggtctatgaagaagaaacgccgactgctgctttaactttgaccagcaccaaccgtgtcgtgaataatgacgatagtgtagattgggtggcaacactgaaaaatactagcctggcaccacttaaaacgctgacagtgaaaccagcgactacttggcctgcaggaattggtacgccgacgtcactttctgtccaattggacggacaagcaccgaaaatttatccagtaacggcgactacttggtctgaaggaatcagcttaacaggtcttgaaataccggcaggtcaaacagccaacgtgacgcttgttggcaccaaaatttcaggaacatcagaccaacgcttgacggcaacccttgatgttacaggaaattttgcgacagtgagcgccgcggatgcggtacgtctgacagatacaacccaaggaacaattacaccaacagaaggctttatcagcgtgccaacctttgattttggaaaaatgaatattgctagtaaaacgcaacaatcaggcttgaaaaaagcggccgattactacgaaaatggtacacgcaatccttacttgcgaattaagaaaaatcaaccgaattggcagatgacagcgcaactatctcaaccgaaagcaaccacagatagtctgccaacagcgactcgtttattgttaggtccagcgaatgtttcaagttttacaaattataacgaagcaaccgaacaaatcaaagcagttggtaagactagttctttgagcttaacggcgaataatgtggcaaccagtgttgtcgcaaaccaacagttcacaggtagtgacgtctaccaactggattttacgtttgagaacattaaattagaagtaccagccaaccaaggaaccaaaggacaacagtacaatgctgcggtcacttggaatttggtgactggtccctaa

SEQ ID NO: 2634 - DNA, 213 bp, Enterococcus faecalis
attttcggtgcttgtccgtccaattggacagaaagtgacgtcggcgtaccaattcctgcaggccaagtagtcgctggtttcactgtcagcgttttaagtggtgccaggctagtatttttcagtgttgccacccaatctacactatcgtcattattcacgacacggttggtgctggtcaaagttaaagcagcagtcggcgtttcttcttcatag

SEQ ID NO: 2635 - DNA, 2742 bp, Enterococcus faecalis
gtttttttcaataaatatcaagaaaaatcagcggaaattagagagaaaatggtgaattccactgatttccaggctgttttttaccaaaaaacagtggctcctccttggtataaaaggaatcattggaaatatcaagttgtcgtatcaaaatttaaaatttcagtggggcctttttttgataaaatgaaaatcatacaaaaaatcatacataggacaataaaaataacaataaaaagttacataaaaaaggagaatggcatgaatcaaaaaagaaaccgtttatttgcaatcgctttgtgtggttctttactaatcagttcattaaatggcatcccagcaattgctgaaaccatggcggccccagatgttcaaggggaggaccgccaaacagtagtcccgtcagagggggttcaaggacgggcgcccgtttcttttccagaggcagatacggaagtaggcgtaccgccagctgatgaagagctaccagaacagactgaacaagtagtcgggcaagttgaagcgtcagtgacgagtccaataatagttaatacaccagaatcactgcgtgcgcagcgagcagtgcagacattcgatattccagagaagacgtacaaaatgtcgtttttagatgaaagtggtcgttttattgatccagcgaaagtttcgattactggggatattatgaagtttactatgcaaggcgctttgacgaaagtcggggccgtggccactaataatgtgggaaccacgaagcaattgacggtgccgaaagtagctttgtctggggatacagccataaagagttatgatttttccggcatccaaaatgaaaagattactttgccgcggttctataatgttccgaaaatcacgcccagtgcgaattacactggacaaatctatccaatggcagtgacgaaacaggtgaatgttacaggagaagtatcgaatgaggaaaccacaggcgcgaggctgaatatgtttgtatcaggtatccctaaccagtttgtcttttctcgtgctagttgggacaatgatccagcgggaaatatgtttgcgcgtggctttaacatggctactgcaggcggcacaccagcttatctgactacggatgatcacatttactattatgtgcctaacaaacgggttaacatttattataatgacatgaccccgaatggcttaccagcgtatcctccagggtataatgccagtctttcaaaaacagtagttgattcagaaaattttcactataaagcgccaaaagcttttccagaattctttagttctgggaatcgtcacttccagtttaaaggctggtataaagggcctgcaagaccagcggatccaaaagccgttaagttagaaacctcattgacgccagagttcgatgtcacttacgatggtgccgataatttatatgttttttatgatgaagtgaaagaaatgaccactactattccagaagttacctataagtttggctttgttgatgaaaaaggggcgcttgttgcgccaacgaatgtagacattcaggcgaacttaacaactgtcgaggataaggtggtccagaaggtgggggctattacaggcgctaatgtaggcaatttaaaacagttaaccgttcctagccaaacactaacctatgtacctaaaattaaagttgcttcttctggggtaaccgattttcggttgactattcccaagcgctataaaattccaacagtcacacctggttcattctacactggctcaacgaccgcctatcctttggcgacaacgctgttaaggcatattagtggtcaggcagatgaacggataacaacggatggcactcgctatagtttatataatttaccgacgcctcatagctatcgtatgtacagaagtagttggcaacctgacgttaccaacacgggatttagtgcaactttaaacatggcgacgaccgagatttatccagcttatttcacgaccgataacacgatgtactatttcttagaaaaccgccgcgtcactgaacactatgttaatgaagcaggtgctgaggtaccgatgcctacaggcttcacgcaagggaatcaaacggtgattgacagtgatacttatcattttaaattggcaaaggaattgccgtttagttattttttaaacaataaagcataccgatttaaaggctggtataaaggcaaaaccaaacctaaggtattggaaacgagtcgaacgcctgagtatgatacaactttcgatgataacgatgatttaaccgttgtttacgaagaaattaaatacggcggaaatgcggtgacatttggttttgttggggaagatgggcaattgcttcagccgacagggtttcaggtgactacggatattgttgaaacaatcgatgggctgagtacggttttaagtaatgtttcagctgtcgacagtacaggcaacgttaaaactttgacgatcccgcaaaaggaatatgtattgactccccagatgaatttctatggaacaaaaaattcattgattacgattccaagacaataccaagaaatttcttttaccaaacctgccaactaccaaggactagattatccagttgcagggcgtgttgagaatatgtttagtggtaatctgtatgttgagggggcacaaccaccttacttttctgcttcgaaagtcaaagccaatcaatacaaaataattgagtttcattggaaagaagagcctacaccaaatttctcctag

SEQ ID NO: 2636 - DNA, 2247 bp, Enterococcus faecalis
ttaaccaatgaaaaaatgcccaataagctgacgtttggtcctaaaaagacgtttaaatatacggtagctacggcaccaggaggcgttacgtatgcgctgacctatttttatggagatgtcggcggtccaactagttcgcaccaaagacgaggaacagcgggtcctgtgtattattatttaacaaagcggcgtgtcacggaaaaatttgagaatcccgcaggcggggcgattcctgcgccagaaggttatacgcaggataagaaaaccattgtaacaggggaggattttacttttacccaagaaggcaccttgcctgaacgttacacaggcagtgatgggaagacgtatttatttaaaggttggtacaaagggaatgcgaaacctagcacgttggaaaccaccaaaacgcctagttatgcggtgacctatgatgacaatgacgatttgcatgtggtctatgaagaagcagtgatgaaaacctatacgttgccagcgagagaagctttgttcggctatgttgatgagcaaggaaacttgattaatcccgccaagtttaagctaagtgcgaccatgggtgaaagtgacggagccacaggggaaatgacgacttttcccacaattgatggaatcgatatgccagcaagtcaattaaagaaattagccatcccgcaaaaagtctacacacgcccagacgatgggacaatcgtaacttatggcccgcaagaagtgagtgtggaaattcctaagtattaccagacgatttcgatttcaccaactactgcgtatacaggggataaaaccaagtatccagtaccaaatgaagtgcgccgtggcatcgaaaaccccgacaacattgttagtagtttagtgggaaccactgcgtataacttgacccaaaaaagtgccacacgctatactgcccgccgttcttactggacgtggggccccacgaagacactttactcaatgagtatctattcaggaactgctgggggcaactataatttatcgacccctgatggcaccatttattattacttagaaaatcggcgggtcactgaacattttgtagacgaaagtggcgcaaaaatcacgccaccaactggctttacacaaggaaatcagctagtggtggacagtgaaaactatgtctacactgtcgcaaaagctttgccgaagatctaccaagctggtgaaaaaacctatatcttccaaggctggtttaaaggcaaaaccaagccagcaacattaaagacgacaacgaccccaagttttacaccaacttttaatgatgaggacgacatgaccgctgtgtaccaagaagcgattcccaccgcggaactaacgttaacaggtgccgttgacataatcgaaaatggcgccacaatggattactgggaggcgctactgaagaacacaggcgaagcgccgttaaccaccattaaaatcaagccaacggcaacttgggcggctggcatcggcgcacccaacacgatatttgtacaaggaacgggtcaaaacaccaaagcttttcctgtcaccaaagaacaatggacgaccggtgcaggagtgtccatcacgttggatcagcctttaccagctggcggtcaattaaaaatgaacttattaggaaccgccgttacaggaaatcctggtcaagttttaaccgctgatgttgaagtaacgggcaactttggcagtttaactgccaaagatacggtccgtattaaagacttagatcaagaaattacgagtcctgacggcgacggctttattagtaccccgacatttgattttggtaaactagcaatttcaggaagtaagcaacaatatggtttgaagaaggccgcagattactacggcaatggcactcgcaacccttatttacgcctgaatactagccaagccaattggagtttaacggcccagctatcgcaaccaaaatcagccacagacagcttgccaacaacgacccgcttgttgctaggaacggccgctgctgccagctttaccgattacaaccaaccaacagaaaccaggacaccacttggcaagaccagcaccgtgactttaaccgccgacaataccgcaacagcggtggtcgcaaaccaacagttcacaggcagtgacgtctatcagttggacttcacgtttgctaacatcaaactagaagtgccagccaaccaaggtatggctggccaacaataccaagccgccgtcacgtggaatttagtgactggcccctaa

SEQ ID NO: 2637 - DNA, 828 bp, Enterococcus faecalis
aaaacggcactcaatatgtcaaaatttgaaatttcaagctgtgtgttctttggtaaaataaataaaaaaatgctagttatcagtatcgataataacaggatactgattaagaaaggactttatagagactatagattgaatttttacatagaaagaaggagcaagatgaagcgagtaaattggaaaagatggctagttgttgggttaagttgttctttgttcatggattcagtggttggtgtgactgtgttagcggaaacgattactggggcgacggagcaaggagtagcaacatctcagtcgagtgacgaagcgagccagacgacgcaaacaaccgaagagtcacaggcaacggtcgctagtgaagcgaaaacagtaccgccacaggaaacggcaagaattgcttctcgagcgattggttattcttctgtggaagggcgcgagattccctttttctttgtggaggaagacgggacgttgtttgatcccgaccgaattacgatggcggtcaatctttccacgttttcgttttatgaagagaaattacaacgaaccccccttgagcccaccactgtgaatggcggaaagttactgtctattccaacgtcaccagcttttaaatatgatacaaataaccagaatccaagtaatatttatggcgtttctgaagtgtcgtttactattcctaaggagtatcaaagcctggacattcgaccaagtacgttttatacaggagacactacgcaatatccagtgccaacggtttttgcgaacgttgggggcaaagtgacgaactatgtgggcgccaatgcggagacggaattatag

SEQ ID NO: 2638 - DNA, 3837 bp, Enterococcus faecalis
tcggtttggcgggaatcgtacatagaaagaagggacgacatgaagcaaactaagtggcaacgattagcaaccattggcttgtgtagttctttagtaattaacgccttttctggtgtgacggcagttgcggaaaccgtgacgattgaaagtagtccgaccgccgaaagtagtgccaaggaagagacgcaagcaagtagcgtgaaggaagaaacaacgaaagccagtacggaaaatagtcaagtaacaactgacacgagtcaggaagaagcaacgaaagaagcggagaaagaagaaccgcaagcagaagtggaacaagcagaaacaccaatcattcctaaaccaaaaaaaatcaatatgaaggcaacttattcattttctgcagaaacttatcagtttggatttgtgaatgaatcaggtcaattaataaatccagatattataccaattacgtatagctatgccaaaggatcatggaagacagatggttataatcgaaagtggactagtatggttcaagggagtgcttcaaccgtaggaaacttaaagaatgtaataatgccagcaacttctgtagttatgccaccaggaccgtcatatgaaggaactcaagaggtgtacacaaacttttcaattcgcataccaaaatattatgcatcagcgagtctctacaatagagaaggtaaaattgattctacttatccgttacctgctattgcactagcaggtactagaccgctatctttgactcaaagtagtgtaattagtgcattggcgctgaccagtaaaggagacaatgtttatacaccacgggaaacattttttggaggagatcctgcaggtgtaaagtttactaattttttgtatcgtataaatgactttgatgtgaaaggtaataacataggttataagactgtgagtagcccaatctattaccatctgaccaaccgccgtgtcaccgaaaacttcgtagatacaagtggcgccaaaatcacgccaccaagtaatttcacccaagggaaacaaacggtcattaacagtgatccttacacgttccaacaaagtggttttttacccgagacctacaaagttggcacgaaatcttaccgattcaaaggctggtacaaagggaaaaccaaaaccgagcctttggccaccactaaaacacctagctataaagtcacgtatgatgacaatgatgatttgacggtggtctatgaggagttttcagggtacgagctgcctgcttcgaccaatcaatttggctttgtggatgaagcgacgaacaaattaattgcccccgaccaagtgcagatgaagtataatcttactttaaatgaaaataataaaaaaacagtaatgagcagtaacttaacggggacagatacagcgacactgaaaaacttgtccgtgcctgtcaactattttgaacaatatcgcgtcaatacgttttatggcgcgagtgacattacgtttacattgcccaaacggtacaaatcaatcaatattaccaaatcagatggcaaaaccgacccagcttttcctcttcctaaaatctataatatagatcaagtagaaatgtcacacatgcctgtgaccacttataacaagttgaaacagctgtcgggccaaacgtttggctttaatgctttagccgatcaacctgaattttatacgaaaacgttatttgggacagagtctggcatcgatgacccagtcaattattatacaatgagtggccctgtttactattatttagaaaaccgcaaagtcaccgagaacttcgtagacaccaacggcgctaaaatcacaccgccaacaggtttcacccaaggtaaaaaaacggtgattacaagcgacgcctacactttcaaacaagcaggcaccttaccagacacttacacaacaggcggtaagacctacaagttcaaaggttggtacaaaggcaagtccatactcaacacattgacaactaccaaagcgccaagttatcaagtgacctacgatgacaatgatgatttgaatgtggtgtatgaagaagaaacagttacgacagtgtatccatcagtcgatatgaactttgtgaatgaaaaaggcggggctttcacaccggcgttaacttttagtggtaagtactatgcgcaaagtacgagtgcgtacttaagaaccgatttatatgacgtgacctcaaaaaataatggtaatgggcaatatacggtaagtattaataatggtagtatgccattgtcccaagaattattgaaaaaatataataatggacaaccaatcagtgctaccaacagattacagtttaatgttgataaattagccatcgaccaacaactaaaatatgttgacagcattcaattagacacagctcaaagtagcaatctgaaatcctatagatatgtgtacacgaacaatagctcactggttttcgacccaaatgtagcaccagcagaggttgaccttagttcagaatctcttaacttgcttaattttgattcagatggcacctatttttctaatgcaaataatagacttttttacacgcatttaggatatagtggcacaccaggagttaactatcttctcgtaatgtttctttttaacgccaaacctgcggataagtcaaaacttgtatacaaagtcactcgcaaacaagtcaccgaaaacttcgtggatgtcaacggtgccaaaatcactgcaccaacaggcttcacccaaggtaaccaagtaccaatgaacagtaacaccttcaagtacacagcggcaaaagctttaccagcgacgtatactacaggtggcaaagtctatacgttccaagggtggtataaagggaaaaccaagccaagtacgttgaacaaaacaacaactccaacgttcaatgcgacctttgatggcaatgacgatatgaccgccatgtataaggaagaaataccaacagctagtgtcacattaactcgaccaaaagaagtgattgatacgaataccaatgtaatctggacaacaacgatcacgaatactagcaaagcacccttacaaaatctcaccttgaaaaaagggcccaattggtcagctggtctgacgatcccgacctttatggaagtgacaccagaaggagaaacgacaaaatcaatcccagtaaatagtacactttggacagagggggttcctttaccaaatgccgttcctatcggcaaaaaagtttcagttgctttcacaactcgcgcaacagggaaaccaaacactgttttgaaagcagaagttgtagtatttggtggtattaaagatagtacagtggataacttcgtgagaattcgtccaaatgatcaagaagtagtcacaccaacgaccgaaggcttcatcagtgtgccaaccttcgacttcggccaagtgggcgttgcaggaactaagcaacaacacagcttgaaacaagccgcggattactacggtaacggcacacggaatccgtatctgcggattaagaaaacgcaacccaattggagcttaacagcgcaactgtcacaaccaaaatcagcgacagacagcttgcctacagcgacccgcttattattaggggcggcgcctgtctctagctttaccaattacaatcaaccaaccgagttgaaaaatacggtcggtaccacgagtgccattagcttaacagccaacaacacagcaacgagtattattgccaacaagcaattcacaggtagtaatgtttatcagttggacttcaccttcaataatgtcaaacttgaagtgccagccaatcaaggtgttaaagggcaacaatacaaggccgcagttacatggaacctagttacaggtccttaa

SEQ ID NO: 2639 - DNA, 432 bp, Enterococcus faecalis
caaaaggttgttttgtctttcttgtgtaaaagggcaagaaaggctagcgagttaaaaggaggtttttcaatgaaaaaaaagcgttatttaatgattgtgtgtctactatcttctcctagttttttcataaatgttgaagcgtctgatggtggttctagttcggtggggattgaattttaccaaaatccgagaacacccgctcctaaagatcccccaccgaaaacagatgcgccagctgctgatcccaaggaaccagctggtcctccgcaaggagatcaacgaagtggtggttcgacacagaccaccacaactggctcaacgctccctcgtacagggagcaagagtcaggcaaatttgagcattctcggcttcgccttaatcggtttggcgggaatcgtacatagaaagaagggacgacatgaagcaaactaa

SEQ ID NO: 2640 - DNA, 852 bp, Enterococcus faecalis
cgcggtggaattcagtggggcaacacgctggttttcttcattggcatggtggtctttgatatggccactaccgccattaataattacatggacttcaaaaaagccaaatcagacgtctataaatatgaagaaaatattatcggacaatcaggcgtttcaccacaactggtccgcaacatgattttcgccatgattgccttcactgccgttgtgggtgcgtacttgacggttcaaaccggctggctcttccttgttttaggcgggatttgctgcttcatcgggattttctacacgtatggaccgattccgttatctcgcatgcccttgggggaaattttcagtggcttcacgatgggcttaggcatcttcgtcttaaccgtttacttgaacgtcgtcaccaatccgcctttttacttaacggtcgattttgctagcggcgcctttcgcttagacggcaatctctgggcggtgcttgcgattgtcgtggcgtccttgcccttggtctgttcgattgctaacatcatgctcgccaacaatttacgggacttagacacggatattgagaaccaccgttatacattagtctattatattgggcgcccatcggggattgtgctgtttcaagtgttagcgctagctgggtatctggtgattttattcggcttcattagtggtatttatcaatggcctgtgttaattacatttgccactttacctgtcatttggaaaaatattcaaacgtttaaacaagaattgccgcagccgaaaagttttcgccattccattaagaacttaatggttttcaatggcacctatgctttagggctattcattatcgccttacttggttag

SEQ ID NO: 2641 - DNA, 195 bp, Enterococcus faecalis
catcccttaggtgaaggactggtctttacgcaaccacaaatgaatacgtacattcgtttaaaccgtcctttcaccccttcaacaaatttcgttgttctacttttaaaatgttatactgttacaaaaaatgatttactttttgctgaatggagggccttaattgaaaaagaaatcgattggtttgttgttagctag

SEQ ID NO: 2642 - DNA, 975 bp, Enterococcus faecalis
ttgaaaaagaaatcgattggtttgttgttagctagcgcatatttgtttcacgcacgttctcgtcaaaaatccttaaaagcctgtctttttgaagattctttacgtctttcccaaattgctcgccttgaacgaaatccgaaagtcaccaaggctttttatcattggcaacgatcactaaatgaacaagtaactttgccaaaacatttacgtcatctttttcctcttcaagaaatgactcaatttcctacgatgtatcgcatgtcaaactccgttattgcgcctaccaagaaagctgtactgtacctgcatggtgggggctttacattgaatcttgcctatagccaattagactttagttataaactaattgaagatctcccttttgcaacagattattttatccctgtatatccattagcaccaaataagtcttttgctgatatttataatcattgctatgctgcttatcaagaaattttacagcattatgatcccgaagatgttattttattaggtgattctgctggtggcacattggttttaaacgtattgcagaatttagccaccgatttccctgaacgcttacccaaagctgctgttttaatttctccttggttagatggacatttagacattcctgttgccaaaagttatcaaaaaaaggacaaaatgattggcatgaactatttacaattaattgcccaagagattgacgacacggccaatcacgccacactttctttaaattgcttgtcctttgattatcaaaaatttccgccactttttttcgtgggcggcacacatgaagttttttgcccttcctatcaccaatttttaaaacaattagggccacgaccacaagatacttgccgattggtgcctggcatgcaacacgttttcgcaatgaaacaatacttgccagaaggacgacaagcgcggaaacaaattgcacagtttatccaagaacaatggtaa

SEQ ID NO: 2643 - DNA, 1404 bp, Enterococcus faecalis
caatggcattgcacatcaataagaaggaggaaaaacatggaaactttattgaatttatttgtttcaattgttagccagccagcgattctggtttcattaattgctttgttgggattagttttacagaaaaagaaattttctgatgttgttcaaggaacgttgaaaacattcgtcggctttttagttttaattggtggcgcagggctattagcgaactcgttaacgccctttgcggagatgttccaaaccgcgttaaatacacaaggcgtggttcctagtaatgaagcggttgtagcgattgccttgcaacaatatgggacaccaactgctctgattatgttggtgggcatggttgttaatattctgttggcgcgttttacacgttttaaatatatctttttgacaggtcaagcgatgatgtacgtttcgtgtttgacagccgttattttagtgggggccggttttagcgttagtttgccaatgattcttttaggtggtttatttgaaggaactttattaacagtgacacctgctctttgtcagccctttatgaaacaaattactggaaatgataaagtagcaatggggcatacagggaatattggttatgcggcaagtggctttattggaaaagtctttgggaataaagaaaagtcaacggaagatattaaaattcctaaaagttttggttttttaagagactcaaccatctcaattatgattttgatgtcgattgtctatgtgattttggctttgctggctgggacaggctatgtcgagcatgagttaagcaatggcgaaaatgcgattatcttttcattaattcaagcaggaacctttacggctggtttcgtagtggttttacagggtgtgcggatggttttaggagaaattgtgccagctttccaaggaattgctaaaaaattagtgcctaattctaaaccagcacttgatgttcccattatctttccttatgcgccaaatgctgtcttgattgggttctttgtgagctttattgtgggaactatttcaatgttagcgatggttggtctgaataccaccgtgattataccaggcgttgtcgggcactttttctgtggtgccgcggcaggtgtttttggaaattccacagggggacgtcggggagcgattttaggggctgcgtttaatggcttattaattagttggttaccgttatttattttaccagtcttgggtgatttacagttagcatcctcaacgtttgcggatacagattatttaatcccaggcctatttttaggcaaattaggtgaggcaggtccgagtcttttagtaggaggaatcattgcttttgtagtggttgttcttttggctagcgctgttttgactatgcgggagaaaaaagtcgccgaagaaaactaa

SEQ ID NO: 2644 - DNA, 357 bp, Enterococcus faecalis
tggcggctgaaaccgtcccagaaatactatcaattatccaagaaggagagaaataagatgaagatttttacagtttgtcaaagtggtttaggaacaagttttatggtgcaaatgaatatccaacaaattttagaggaagtcggtgttgatacagataattttcaaattgatcacacagatgtcgggagtgccagtggcgatatggctgattacttctttgtcgaaaaaacattgcaagatgctttagggtcaattcctgctgaaaaaatcattcctttaaatgcgattattgattacgatgaaacgaaggagaaagtcttgaaagttttagatgacaatggcattgcacatcaataa

SEQ ID NO: 2645 - DNA, 2031 bp, Enterococcus faecalis
ttacaggaggcggacacagctgtgaattataaaataagttatctccttgacgagtatgcagggcaaaaaattgcgctctctttggctcaacaaataaccgatctttcgcaacgagaattagtgacgcaactttcgacaataggcggagtagttcaacagaataccgtcagcattccaaacctttccgcaaatgaatggggaaaacaactttttcaacaacgtcaagtgatctatagcgaaacagaaagacaagcacttatttttttgctcacttattcagaaatcgaagaactatcggtgtatcattatcaaaattttttagacgtttcgaaaggcactattttagcggacatcaaaaaagtacgacaccaactagcaactgaaaacattgctttatcctacgaacgaaaacgagggttttacctagaaggagatgaatttcggattcgtcgtttcgggaaaaattggcttgcccgcctcttacaacaaaagtcgggcaccttcgctttattttgctggctcagtcagcatcaaatgagccaatacgcaaaaatacgtgacggcattcaattagccgtccaggaagcacagcttcaactggtacccagcagattggatgaaattagttactttcttgctttttctcaaaaaagattaggcaaatatggaacagtcgtctggcctgagaaccagttaattcagtccttacgcgcttatcccgtcagtcatcgtattttaagtgatttagttgggccagtggcgaatgtagaaactgagagtctttttttcacgatttgtttaatgacagccttgcaaggagaattgcgagatacgaagttagagtttttattagatatttctggtgaaattattcggaaaatggaattgttggccgttgttcaatttgaacagcctcgtgaattgctcatgaatgtgtattatcatctggttcctgcctattttcggattagctatggcttttacttgccgaatgttttaatcaaggatattcgacaatcgtatcggtcgctttatcatctttgtgaacaagcgttagctcctttagaaaaattaacgaaacggtcaatcccgtcagaggaaatcggtttttttaccatattatttggtggagaaattttcgggcaaaaaaatgaacagcggcaagaaaagctaaaagcgctaattgtttgtcccagtggtatcagttcttcgttgattttgcaatcggaattgcgtcggctatttccaatgattgaatttaaagaaacgaatgcggtgagggaaatagagaatgtatctgaaaaaagctatgacatcattttctcaacggtccctattgaaacagccaaaaaggtttatcttaccaagcccattatgagctctttggagaaaaatcaattgatgcaccaagttcaatcagattggctattgccaggtatttccatgccagatgttaaagatattttagatgcgttaaaaccttatatttccttaaaaaaaggagtcacagaagcgcagttatatcgtgttttacatcgtaaaatgaacaaaattttagaaaaagaggaggatctgcgtccaatgttatcggaattattaacaacagaaacagtccaagtcctgcctgaagttgcagactggcgagcgggaatcacagaagctgccaagccgttattaaaaaatggcagtattacggaaaagtacattgatgcaatgattcaaaaagtcgaatcgtttgggccatttatccatatctgtccagacgtagcattgcctcacgcgcgaccagaagatggcgttaatcagttaggcatgtcattactaaaaatccaaaaaagtgtcgatttattagaagatcctaagcatgaaattcacctttttatttgtttagctgcttcagataacgaaacacatttacgggccttatctagtctgacaaaaattctatcaaaaaaagaatcattacatcgcttagtggcggctgaaaccgtcccagaaatactatcaattatccaagaaggagagaaataa

SEQ ID NO: 2646 - DNA, 438 bp, Enterococcus faecalis
aaaatagacaaggagcacgcgatgatgacaatgaaaagtaaagggtcacttctggtgacgttgggaatacttttaaccgttggcattgcgagtctaattgtttcttctgagagttttgcagaagaagtagggcaaacgaatatcggtgtaacgttctatggaggaaaagagccactaaaaacggaaggtgtcattaagccaatagagcaaccagtcactgataaagataaaaaaacgtcacaacaacaagacaaagtgagcagaaaaaccactgctaaaacgaatccgactaatgcacagacgtcattaccaaggacaggtgaacgaaatagcacgtggctttacagccttggtattgcctgtttactcgtagtactaacaagtttctattatttgaataaaaaaggaaaaaggaaaaataatgtgctgtttttataa

SEQ ID NO: 2647 - DNA, 1146 bp, Enterococcus faecalis
gaggaacaaataatgaagacaatgcgctggctaatcgtcacagtttttatttgtgtgatggcattaagcatcccttctgctgtacaagcagaagaagcggatgacaacatgaatacaaaatttacagttaaacccaatattcctgagaatcaagcgaaaaatacgcaatcctactacgatctcattgtaaaaccaggacagaaacaagaagtcgaattatcattaattaataaaacagatgaagaattgacgattgatttaaatttggcgaatgctgtgacgaatgacaatggtttaattgtgtacaatgatttcgagaaaaaaccagattcaagtttaaaagtacccttgacaacattaattaaattacctgaggaacatgtaaaagttcccgctaagaaaaccgtaacagccaaaatgactgtcgaaattccagcgaatggtttccaaggattagttttgggtggtgtttatgcttcgcttgcagaagatgaaaaggaagaaaaaggaaaatcaacgggtttaaccagtcgatatggatttaatgtagcaattgctttacgaatgtcagaagatacaccgatgtatctagcagagactcttcaattagttaaattagttccgaccattgctttaggaaataaatcggtccaagcggttattcagaatccgacatccgctatttttcctgaagtacgtttagaaggaaaagtaacgaaaaaaggcgaaacgaaagaatatgccaaacggattttaccaagtgttcgttttgcgccaaattcgacgatgaacttccatttagatttcgggaaagaagatgttcgtccaggaacctatatttttgaaggaaaagcggtcttgaaagaagatgaacaacaagtgtggccgtttaagcaagaatttaccatcagtagtcaagaagccaaaaaattaaataaagaagcagtagtgaaattggtcctaccgacttggtggaatcaagctttttatggcttgttagttgcaacaattgtgagtctaattctagctatttggcgttttacgcaacagaaagcaacactgaaacaacaagcctatttacaacaagaaaaacaggcagccttgaaaaatagacaaggagcacgcgatgatgacaatgaaaagtaa

SEQ ID NO: 2648 - DNA, 714 bp, Enterococcus faecalis
ccaagatataaaggagagagtaaaatgaagaaaaaaacattggtaactttatttgcaggaacggcaattttaggggcaagcatcgctcctgcagcagcacatgcaacaacgactggtacaacaccagcaaacgtagagatgacaagtggttcattaccaggcggtacgggtgatggagatgacggaagcacacaagaaccagaaccaggctcgaatacaaattttgatttgttatatgttccaacagaattcaaatttgcttcgacagaagttagttctgatttatcagcgatttcgttagatgcgacaggtacccaaacaaaacgttatgccgttggggatgttcgtggaacacaagcgggttggtcagttactgccggcgttgctgaaatgaaaaatggcactgctactttagaaggctcaattacctttgcacaaacaggagcagtagcgaaatacgatgaaacagcaaaaacatactcacgtgatgtagctgcctttgcagcagatccaggaagtcctgaatttgctggaacaactattccagtaggtggagcagctgtatcaattgctacagcagcagttggtaaaggtcaaggtacatgggattctgaattatcaaatgtaaaattaaacattacaacacctagttcacaaattacaaatggtgcgtatacaggtaacgtaacttggacattagtggctgcgccataa

SEQ ID NO: 2649 - DNA, 981 bp, Enterococcus faecalis
ggtcaaataatgaaaaaaatgcatgttgaaagtgaatttgcaccattgcgttcagttgttttagcacaatcgcaattttgtttaccagataaatttgatgaagcggatacgacttttttaacagaggaaaatgcccgtttaacacagaataatgaagggcgtgatttagcagactttgcaccagaacaacaagtgcgttgggaaaaagaaaaagaagtcatgcaaggagtattagaatcttatggcgtagaagtatttcgtccacgtttattgacaacctatgaaaaagaacatggcaaggaattgggcgtaggatatagtaacttcttttcacgagaccctttttttacaattggcaatctcttaatagaaggaaacttaagatttcaacaccgtcgacaagaaattttaccaattcgtccgattattcagcagtggacacaagaagcagaaggctattattttgctgcgccacaacctgacatttctgaaggggctttaagtgaagcaggtccctttattgaaggcggcgatgttttagttctaggaaaaacaatttttgtgggctactctggcttggcaagtaacctagcaggaattcagtggttagccaatatgattggtcattttggttatgaagtggtgccggttcggttacatcctcatattctccacttagattgtgcgttaagcttgttgagagaaggcttgatgattgtttgtgaagaggcctttttggatggacttcctgcgcaattagcaaactgggaaaaaattcacgttactttgcaagaagcagcgtatttagtgacaaatggtctaccgcttaacgaagaaacgtatataacggaccaatcgtttacaactttaattcctcaaatagaagcaaaaggtatcaaagttgaggcaattgattaccatgtttctagaatgttaggtggttccttccgctgtacaacgcaagctttgattagagaatag

SEQ ID NO: 2650 - DNA, 1524 bp, Enterococcus faecalis
cagaagcaatacaacaacttaacactttgtttacttgttatttatcagaaatcaactaagacttgttatagtcaatgtatgggtagatatgaaggaggaaacaaggaaatgaagaaaagagctttgctaggggttaccttattaacattcacaacattagcgggttgtacaaatttatctgaacagaaaagcggcgaaaaacaaacagaggttgctgaagcgaaggcaactgaatctgaaaaagcatcagtaaaaaatgttatttttatgattggagatggcatggggaatccgtatacaacgggctatcgctatttcaaagccaatcactcagacaagcgtgttccccaaacagcttttgatacctatttggtcggacagcaagccacttatccagaagatgaagaagagaatgtcaccgattcagcttccgcagcgacagcgatggctgccggagtgaaaacctataataatgctattgcactcgataatgacaagtccaaaacagaaacagtgctcgaacgtgcgaaaaaagtggggaaatcaacgggtcttgtagcaacatctgaaataacacatgcaacccctgctgcatatggcgcacataatgtttcacgcaaaaatatggcagaaatcgccgatgactattttgatgatcaaatcgacggacaacacaaagtcgatgtgttacttggcggcggctccgaattatttgcccggaaagatcgtgatttagtcaaagaattttcccaagcgggttatggtcatgtcacagacaaaaagtcgttaaatgagaaccaagacgacaaaattttaggcttgtttgcaccaggcgggctacctaaaatgattgaccgaacggaagaagtcccttcattagctgatatgacagaagcggctcttcaacggttagataaaaatgaaaaaggtttctttttaatggttgaaggtagtcaaattgattgggccgggcatagcaatgatattgttggcgcgatgagcgaaatgcaagacttcgaagcggcgtttgaaaaggccatcgattttgccaaaaaagatggtgaaacattggtggttacaactgcagatcattcaacagggggcttgtctttaggcaaaggagatcaatacaactggttgacggagcctttacatgcggcaaaacgcacgcctgatttcatggcagaagaaattattaaaaatggtaatgtggaaaaaacagtgactgagtatattgattttcaattaagtgaggctgaattgaaagcagtgaaaacagcgtcggagtcaaaagatgttgaaaaaatcgctcaggcattaagaaagatttttgatgaacgttcgaatactggttggactactggcggacacacaggagaagatgtaaatgtctatgcttatggcccacaagcagaagctttttcaggacaaattgataatacagaccaagcgaagattatttttggcttagtagatggcaccgggcaaaaagctgagattaaagataaaggtattggcaaataa

SEQ ID NO: 2651 - DNA, 2136 bp, Enterococcus faecalis
ataaccagtgaaccaagcaaggtttatttggtgtgcttagaaagtgatacctgtcagtcatctcaattactaaatacctcctttaaaagaggtttctttagtaacctttatccaatgataaagaggacagcggtagaacgctgtcctcttttttctgtagaaactggtttttatttaaaggcgccaggtattcttttcgtgatagaaaggaagaaaaaacaaatgaatcatgaaaccattcaaaaattacaatttacaacaattcttaaagaagttcaaacacgtgcgattggcgagtatagtaaagaacggttggcgaaaatggtccctgcaacacgtttagaaacagtgcagtcccgcttaacggaaacaaccgaggcccgcttaattattgatagcggacaacacgtccctttcatgggcttgagccaaattacccgcttgcttcaacaagtgaaaaaaggcttaatccttacaccaaacgaattgattgaggtcgctgactttttaagaagtagtcagcgaatccagaagttttttgaaaaaaatcaataccaaacaccacgcctatttagttacagccagcacttagctgatttcagagcaattgaagaacaaatttatacgaaaatccataatcaaaaagttgccaccgatgcttctcgacaacttcggaaaatccggcgtcaaatcaatgaatgccaacaagaaattgaaacaaaagtcaccaaatttttacgtaataaaaataatcaactgtatattcaagaaaatatgatggtgaaaaaaggggaacattacacggtaccaatcaaagctagctataaaaataaggtttcaggcacaatcattgagcaatccaataaaggacaaacggtcttcattgaacctgtagcaattagtaaattaaatgaacaattgacactcttaaaagcggaagaaacagcggaagaatatcaaattttggcagaactaacagggttaatcaatgagcaagaacgactagtcgatcaagccgtcgatacaatgaccaccttagatattatttttgcacgaggaaagtatagtcgcgaaattggtgggattacgccaaaagtaaacaaagaagaacgcttgcgcattgttcaaggaaaacaccctcttttattagaacacgcagtaccattgacgttttctttaggagcagagtatcgaggacttgtcattacaggtgccaatgctggtggtaaaacggttgtcttgaaaacagttggcttattgactgtcatgacacaatttgggttgcaaattccagcacaagcaggcacagagattccagtattagatgaaatttttgtcgatattggtgatcagcaaaatctggaaaatgcgttaagcactttttctgggcacatgaaaaatattgcggaaatgttgcgtaatgttaagcgacacacgcttgttttattagatgaaattggcagtggtaccgagccgaacgaaggagctggcttagcgattgctatcatggaaacgatgtatcaaaagggagccttggtagttgcaacgacccattatggtgaaattaaacgttttgcccaagagcatgacgattttgtgcccgccgcaatggccttcgatcgtgaaacattaacgcccaaatatcaattgaaaattggtgaagttggcgatagtcaggcgctttggattgcacgtaaaatgaagatggagccacagctcattgaaaaggcggctcattatattcagcggaaagaataccctactaatcgaagtctatttaaacccctgaaagcaaaagaaacgacctttgccacgtttgtagaagaaacacaccgttatcaaaaaggtgatcgtgtcctattgacagaaacacaacaaattgggttggtttttacagatgagggtgaacaagaaatccaagtatttgtgaatgataaaattgaaaatgtaccacgaagacggttgaaattacaagcgaaagcacaagatctatatccgcaagactatgatttagaaagtttatttacagatttccatgaacgaaagaaactcaaagatattgaacgcggctcaaaaaaagcgcagaaacaattacgcaaagaggccgaaaaaagagcagcaagacgcgataaataa

SEQ ID NO: 2652 - DNA, 432 bp, Enterococcus faecalis
  misc_feature (152)..(152): Nucleotide 152 is "n" wherein "n" = any nucleotide.
tttgttcaagacgaaacagtgatttatggcttgtttcacccaacaggcaaagttggctatgtcaacattgcgacagttccgttaagctttgtgcgcccagcggcggaagtgcctatcgaaaccgccatcaaattgttgaaagaacatggggngcagtttccattaatattttccccgatgaaaggcttggctcacaaagaagaataccaagcagtagcagcagcttgtgccaagtatgacttttatttagagccaacaggaggcattgatttagaaaactttgaagaaattgttcagattgcggtggatgccggcgttaaaaaaatcattcctcatgtctacagctcaattatcgatcaagaaacaggggacactagaacagaagacgtgaaaacgttactaaccatgatgaaaaagacattgaataagtaa

SEQ ID NO: 2653 - DNA, 342 bp, Enterococcus faecalis
ctcccccatgtgaggctctggcttcttcaaaggtcagttaagcgccgacaacaacccactcaaccaatctttgcgacgcatcgtattgatgttgaaccagacagtcaattatcaaacatatatggtacaactggtcaagtcaactcgtaccatcaccaagcactacatactttaggaaaagatttacgcgttactgcttggtcctctgatggccttgcagaagcagtggaatcaacaaatgaacagcagcctttattagctgttcaatggcatcctgaactaatgtacgcacgtgatgccaaatcccaagcactctttaactactttgttcaaaaattatag

SEQ ID NO: 2654 - DNA, 897 bp, Enterococcus faecalis
ttgtttcgtgaaagaagaatgcgtagtatactaaaagtaatgaaaatgaagggactgaagaaacacatgactttggataaaacaaaaaaattagcaaacggcaatgaaatgccacgcctaggtttaggtgtttggcgtgtagaagatggctcagaagcaacaaattcagtaaaatgggctttagaagtgggttatcgcttgattgatacagcagccgtttataaaaacgaagtaggggtgggcgaaggcattcgtcaatcgggtattccccgcgaagaaattttcgtgacgacgaaattatggaatgaagatcaaggctatgaaaatgcgattaaagcgtttgataaaagcttagaaaaattagggttagactatgttgatttatatttaattcactggcctgttgctggtaaatataaagaatcatggaaagcattagaagaaatttacgcaagtggtcgtgccaaagcaattggcgtttccaattttcatcaacatcatttggaagatttattaacagaagcaaatgttgtgccaatggtggatcaaattgaattacatcctacgttaacacaagaaccgctacgaaaatatttagccgaaaataagattgccgtggaggcttggtctcctctaggacaaggtaatttattatctgaaccagtactagtgaaaattggtgaaaaatatggtaaatcagcggcccaagtgattattcgttggcacttacaaaatgatattatcgtgattcccaaatctgttcacgaaaaaagaattcaggaaaattttgctgtctttgattttgaattaacaccagaagaaataaccgcaattaatcagttatataaggatcatcgttttggtgcagatccagataattttgatttttacgtatga

SEQ ID NO: 2655 - DNA, 408 bp, Enterococcus faecalis
ataaataatatattttataattttgttaaaggttgtgagtgctgcgtgaaagtttcaattgaatgggcaaaaaatgatttactttctaaattacctgtaacaatttttattgatgagcgatgtgctactcgcttgacggctgacaagcgacgaacattcatcttccataatccagtcgctttacgattagggagtcgtttttttagtagtcagataatcgaaattgcggaatcatgtacattgaaagtttcctttaattggtcctgtgtttatctcttttgtatctggttacttgcagttaaactgtggattggaagcgttagcggtcgaacaattgtagttgtggcactaatcggagtgctgacttattggcgtcgttatttattaaaaataaagaaaatgacctga

SEQ ID NO: 2656 - DNA, 960 bp, Enterococcus faecalis
tatactaaaagaagaaattttagagaaagttggatttttatgttgatacttggtttagccagtactgaaacagtcgattcttctgctcctgatttagcagaagcgaccgtaaaaaaagtgagcgcgctacaacgcttttggaacaatattaattgggatgccattgtcgctaccttaattgaaaaaagtttatcaattttatttttaatttttctattttttattattcagcgaatcgggaagtatttaattgatcgcacctatgcaaattatagtaaaaagcaacattttagtgaaagccgtttaaaaacgttacacactttaatcattaatgcatttcaatatacgctgttctttttcttcatctattctcttttgaccattgtcggtgtgcctgttggctcattattagccggagctggaattgccggtgttgccattggtttaggggctcaaggattcatgaatgacttaattaccggatttttcattattttggaacaacaaatggatgtaggcgattatattcgcttattggcgttaaatattgaaggaactgttacttctgtcggattacgaaccactcaaattaaagcggttgatggaactgttcattttattccaaaccgaaacatcaccacaatcagtaacctgtctcgtgccaatatgcaagtgttaattgatgtccgcatcaatcctgaagaaggttatgaaaaaatttgtgaagtgattacagaagtcaatgaaacattaaaagaaaagtatatcgaaagtattcaaactgagccagatatttttggtatggtcgatttaggcaatggcaactttgcggtgcgaacgaccatgtatgtactaaacggcaaacaatttgcggtcaaagaagaatttctagcccaatatatcaaagcattaacagaggccggttttacgattcccaatacgcccattattgcaaaataa

SEQ ID NO: 2657 - DNA, 1182 bp, Enterococcus faecalis
agaaacttcttcatggcggctttcgattacccaaaaaatgaaggagtggcttttgtggagcaagaagaattaattgcgattagacggcaactacatcaaatacctgaaatcggtttagaagaaaaggaaacacaagcctttttacttaatgaaattgataaaatgaagcaaccttatctgcaagttcgaacatggcaaacggggattttagtcttcatagaaggcaaaaatcctcagaaaaccatcggctggcgtgctgatattgatggtttacctattcaagaggaagtggtttctgcttttcaatcaaaacgaccagggtttatgcatgcctgtgggcacgattttcacatgacaatcggtttaggggttttgaaagaattaagtcaacagcaaccagacaataactttttatttttatttcaacctgctgaaaaaaatgaagcaggggggatgttgatgtatgaagaccatgcgtttggtgagtggttacctgatgaattttatgcgcttcatgttaatcctgatttgccagtcggaactattagtaccagagtagggacattgtttgctgccacttgtgaagtgaacattaccttaaaaggaaaaggtggacatgcggcttttccgcatcaagcgaatgatatggtcttagcggccacaaatttaattcagcaagcgcaaacgatcgttagtcgaaatgttgatcctgtggttggggcagtcgttacctttggaacttttcatgcagggactgcctgcaatgtgattgccgaagaagcaactttatctggtacaattcgcacattgacagcagaaacgaatgaacaaacgcagcgaagaattcgcgaaattagtgaaggtattgcgcaatcttttcaatgtgaagtaactgttcatcttgatcagaaagggtatttacctgtagtgaatgagccagcatgtaccacgaattttattgaatacatgagcaaacaagcaacagttcaatttcaacaagcaccggttgcaatgacaggtgaagattttggctatctattgtctaaagtcccaggcacgatgttttggttaggcgtggcaagtccctacagccttcattctgctaagtttgaaccgaacgaagaggcgttattgtttggagtggaggcagttagtggctttttaaaatcattggacaattag

SEQ ID NO: 2658 - DNA, 702 bp, Enterococcus faecalis
ttggacgcatatgagattattcagtatattggcgatgccaaaaagcaaacgcttgttaaagtaacactgaaagggcaattaaaagaagtcacgtttccagaaacaattaaggtctttaataattgtaaaactgggacattgtttggcgattgggctgacgtaaaaccttttttagaagcaaacaaagaaaaaattgaggattatgttgtagaaaacgatgcacgtaactcagcaattccttttcttgatctgaaagacattaatgctcggattgaaccaggtgctttgattcgcgaaaaagttgaaattggcgatcaagcggtgattatgatgggggctattctaaatattggcgccgtcgttggtgcagggactatgattgatatgggcgctgttttgggcggtcgtgcaactgtagggaagcattgtcatattggcgcaggaacggttttagctggtgtcattgaaccaccaagtgccgcacctgtggttattgaaaacgaggttgtcattggagcgaatgcggtcgtactagaaggggttcgtgttggtgaaggtgccgttgtggctgctggggcggtagttgtggaagacgttccagcgcataccgttgttgcaggcgtgccagcaaaagtaattaaacaaattgatgataaaaccaagagtaaaacagagattttagaagaattacgtaaactctaa

SEQ ID NO: 2659 - DNA, 516 bp, Enterococcus faecalis
agaattagaaatggaggcaacccaatcatgatagggactgctgtaaaagaattattattagaaaaacaagaaacgtttttagtacccgccgaaaatgtcgccaacgtaatgtgtttaaatccattaagtcacgcggcattagtcttatcgcaagttcgctattccaagattcctgtgttagataagggagatcgctttgttggcttaatcggcttgacagacgttgtagataaaatgtttgatttgacttcagtggattttgaaaaattgaatgaatttactgtggccgatgtaatggaagtcaatgttcctgtaattggtgaatcgtgggatttagaagaagtgttacatttattagtagatgcttcttttttaccagtggttgatgataatcaacgctttaaaggtatcattacacgcaaagaaattttaaaagcggtcaatcatatggcgcatgaattagaaaaacatcatcttgttctgcctaaatcagaagaagaaatgaaagtaatttaa

SEQ ID NO: 2660 - DNA, 726 bp, Enterococcus faecalis
cagaggtgggttattatgaacaataaagcgatcatccaagcaatgaaacaacgtgtttatgaagcgaatctggctttgccaaaactgggcttagtcaaattaacgtggggcaatgttagtgaaatcaatcggtcattagggattatcgtaattaaaccaagcggcgtcaagtatcaagaaatgaccaaggaacagatggtagtgactgatttaaagggacaactattggaaaccaatgcattaaagccgtcttctgatttacccacgcatctttatctttatcaaaaaatgccagaaattggagcgattgcgcacacgcactccctgaatagtgttacgtgggctcaagcagggcgagccttacctccttacggtaccacccatgcggatgctttttatggcgctgtaccttgcacaagagcgctctctgaaagtgaaattaaagaaaactatgaagaagagactggcaaagtcattgttgaaacatttcatgaacaagaattagatcctttagcagttccaggagtgttagtttatggacatggcccatttacttggggaatgactccggaaaaagcagttgaaaacagtttgattttagatgaaatctgttcaatggcacgtttgacggaaataattaatccagatgttgaaccaattgatcattttttattggataaacactatcttagaaaacatgggatttccgcttattatggtcagtga

SEQ ID NO: 2661 - DNA, 999 bp, Enterococcus faecalis
ctgtcgaaacgcttgaattgtttcaaacaatggcagttgcaacatttattgcgggccgtgggattactgaatcaaaaaatcctgaacaagcagccaaagattttcaaaaaaaaatcgatcagatttggaagtgataaaatggcacgaattggactgtatgaaaaagcactcccgcaaaatttaacttgggcagaacgattaacatgggccaaaaagttagggtttgattttttagaaatgtcaattgatgaatccgatgaacgtttagcacgattggcttggacaccaagccagttacaagaattttctcaattaatggtgaaagaagatttttttatccattctttgtgcttaagtggtcatcggcggtttcctttaggctctttaaataaagaaacacgtgaaaaagggcggaaaattttatctcaagcgattcgtttggctcatcaattaaacatacgggtgattcaaatagctggctatgacgtcttttacgaagaaaaaactgccgaaacaagggaattttttcttcaaggtctgaaaaagggcgttgaggaagctgcacaatacggtgtcattctggctgttgagattatggatgacccttttatgaatagcatacaaaaatttctagaaattaaggaacaaattccgtccccttttttgcatgtttatcctgatttaggtaatttgtctgcttggccggaaaataatccggcggttgagcttgaaaagggaattgctgaaatcgctgctattcacttaaaagataccttcgctgtaacagacacatttgaagggaagtttcgggaagttacttttggagaaggctgtgttgattttacaggcttattgaaaacactcaagcggttaaactatagtggtccttttttaattgaaatgtggaatgaaacggatttgaattttcaagaaaaaattcaagccgcgcagcagtatctctatcccaaattagcagaggtgggttattatgaacaataa

SEQ ID NO: 2662 - DNA, 714 bp, Enterococcus faecalis
tgtctgcaaaagaaattcaagaaaaatatatggcttcagatcgttatcaaaaatctgaataaaagggtgggaaagatgaaaagaccaaacttacaaatcgctttagatcataatagcttagaagacgctttagcagattgtatgaaagtcggagaaattgtggatattatcgaagttggcactattttgtgtttacaagaaggccaaaaagcaattcgttgtttaaaacgcatgtttcctaataaaacgattgttgctgatacaaaatgtgctgatgcgggcggtacagttgctcgtaatgtcgcacaagcaggcgctgatttcatgacggtcatttgttgcgccaccttaccaacgatggctgcagctcaaaaagaagtccgagaattacaagtagaactatatggaaattggacaatgcaacaagctcgacaatggcgagaattagggattaatcaggtgatttatcatcaaagtagagatgctcttttagctggcggcagttggggagagaaagatttgaataaagttcaagaactaattgacttaggctttgaagtgtccgtcacaggtggtttaactgtcgaaacgcttgaattgtttcaaacaatggcagttgcaacatttattgcgggccgtgggattactgaatcaaaaaatcctgaacaagcagccaaagattttcaaaaaaaaatcgatcagatttggaagtga

SEQ ID NO: 2663 - DNA, 333 bp, Enterococcus faecalis
aaaatttcaagagaattaaaggaggaatttgaaatgagaatacttgtttcctgtgccaatggttctggcacgagtctaatgatgatgcggagtgttgaaaaagcaatgaaagaattaggtgtaccgattacaaaaattcatcattgcgccatttcagaaggaaaaagctctgctagccaatacgacgttgtttttactccagtcaattttttacaaatgtttcagcaagcagaaaaacgcggagtcacagtgattggcattaaaaatgtaatgtctgcaaaagaaattcaagaaaaatatatggcttcagatcgttatcaaaaatctgaataa

SEQ ID NO: 2664 - DNA, 1500 bp, Enterococcus faecalis
ggggaaaaatcaatgggggagttcttgttaaatagttggacttattttgccacgaacgttttaacacagccagcatatttgattggtttcatcgtgttattaggttatctcttgttacggaggcccttttatgaatgtttagcaggttttctgaaagcgacagttggttattttattttgagtgttggttctggtggtttggttaataattttcgccctattctagtaggattgaaagagcgatttaatttacaggcgatggttaccgatccatatttcgggcaaaatgcagtcgatgcaggattgatgaaaacctttggacgaacctttggtgatgtgatgattttgttattgattgcatttattatgaatattttgttggttcgttttcaaaaatatacaaaattgagagccgtttttacaacagggaatgttcagattcaacaagcagctaccgctttctggattttactcttttgttttcctaacttaggtaggatcgaagtactaatttttatgggcttaattcttgggtgttattgggcagttgcttcaaatttaacggtagggattacgcaggaattaacagaaggtgctggttttgcggtagcccatcaacaaatgtttggcatatttatttttgcaaaattagcagaatggttgaaaaaacgtgatcaaaagaaacatcgttcagagaaggtcgataaaaaattggaagatatcgaattaccaggatttctatccatttttaatgaaaatatggttgctacgtccattttgatgctctttttctttggcattatcttgcttgttttgggacaagattatttaattcaagctaaatttatgcaagaagggcagagtttcttcttttatatcatgaccacttcattaaattttgctgtctatttagctatcttacaattaggcgttagaacctttgtcgacgagttgacgcagtcattccaaggaatttcaaataccattttaccaggcgctgttcctgggattgatgtagcagcgactttcgggtttggctcgcccaacgcagtaacaattgggtttctctttggcgcattaggccagtttttaatgattggcttactgattctattaaagtctccgacaatcgttattgcgggttttatcccattgttttttgataacgctgtcatagctgtttatgcaaataatcgtggcggagtaaaagctgcttgtttattccccttcctttcaggtttaatccaagtaggtggctcagctttatttgctacatggattggattatctcaatatggcggttatttgggtatgttcgattgggcgacagcttggccgttatttacaatcattatgaaagttctaggctatgttggcgtatcaatggtggtgattgggttactaataattccgcaacttcagtatcgaaaaaatccagaaggttactttatgattgtcaatgattatgaacaatatgctaaaaaatttcaagagaattaa

SEQ ID NO: 2665 - DNA, 501 bp, Enterococcus faecalis
tacaccatttccttcattcttgtaagaaaggctggatgtacaatgttaacttatttttgggagcaagagcttattcattaccctgataaagaaccggttagttggcaagaggcgattcaggaaagttgtttgattttactccaaaaacacatcatcgatcagagttacgtcgatgagattatccagtgtgtcgaaacgtttggaccttatatcatcattgctcctgaagtagccatgccacattcatcagaggaaagcgcaggcgtttttggaacggccatttcttttacaaaatttaagcaagcagtcacttttgctggcgatcaagaagcaaaaacagcaacattattttttacattggcagcccaaaatcccgccgaacatctggaaaatatccagcaattgatggatttattgatgacggatggcgtgattgctgacttgttagaaacaaacacgccaatggattttaaagaagttatggagaaatatcaattatag

SEQ ID NO: 2666 - DNA, 1104 bp, Enterococcus faecalis
agcataacacaatcatttgagaagaggagtggtagcatgagcaaatcgattcatgaaattacaaaagaaagttggttgaaggcgacatttccagaatggggcacttatttaaacgaagaaattaatcagacaactgtgcttcaaggaacggttgcactctggtggcttggttgtacaggcatttggctgaaaacgcatgagaacacgaatattttatgtgatttatggtgtggaacaggaaaacaaacgcacgggaacggcttaatgaaaaatggccatcaaatgatgcgcatgagtggttgccaaaaaatgcaacctaatttaaggacacaaccttttgtgattgatccttttgaaataaaagaggtagatgctttagttgtcacacatattcattcagaccatttggatattcacacagctgctgctgttcatcaaaattgtcctaaggctctatttattggtccaaaagaagtagtgaaaacatggcagcgttggggtgttccggcagaaaaaacacgggttatagagcctggtcaagaaataaaagtgaatgatgtgaatgtagtggccttggaagcttttgatcgaaccgcgctaattacttctgatgatcctgaaaatacatttaaaggtaaaatgcctcaggacatgaatgaactagctgtcaattatctatttgaaacctcaggtggtacggtatatcacgccggagactctcattattctaacttgtttgcgaaacatggtaatcaatatgcaattgatgtttgcttaggagcatatggcgaaaatcctcgcggtatcacagataaaataacttctgttgatatgttgagaatggccgaatctttaaatgcgaaagtagtcattcctgttcattatgatatttggtctaattttatggcggatccaaaagaaatcatggaaatttggaaatttaaaaaagatcgtttacattatcaatttaaaccatatatttggcaagtgggtggcaaatttgtttatccagatgacaaagacaacttagaatttaactttgatcgtggctttgatgatgtttttgttaaagaaaatgatacaccatttccttcattcttgtaa

SEQ ID NO: 2667 - DNA, 780 bp, Enterococcus faecalis
aggaggttgtattacttgaaaagttcattagaaaccattgaaaaaaggcaacaaaacattctcgcgctgctgcaaaaaaacaaacaaatgactacctataaattagcagatgctttaaatgtttccttaagcacaattcgtcgtgatttaaatgtcttagaaactaagaatgacatcattcgaaaatatgggtattgtatttacaacgaccaaaatcagaaagactttgatcaatcaggaccggagttattaaaacaagccattgctcgtgttgcttgtagctatctaagtgattatgataccgttttcattaattcaagttccactgctttgaatattctccattatttaaaggccgaccatctgaccatcgtaacgaataatttaaaaattgccaccaagcctcatgtttctcaatacaattatattttgaccggaggcgaattacgttttcccaaagaagttctggtaggagatattgccattaacacaatcaccgcaacgcatgccgatgtttgcgtaattggctgtagcggggtcagtttagaacatggcgtcactacaaaaattttcaatgaagcaaaaattaatgagcttatgataaaacaaacaacaaaagtaaaaattctggtcgcggaccatcgaaaaatcggcttgacgtctaaatttaaaattgctgatattaccgcttttgattgtttgattacagacaaacattgctcatcaactttaattacagaacttcgtaagaccggcttgaaggttatccaagtcgactaa

SEQ ID NO: 2668 - DNA, 525 bp, Enterococcus faecalis
gagttgaaacgtatgaaaatcttggtagtaagcgataatcatggcgaccgtgactgtttagttgatttagtgaatcattatgaaggacaagtcgatgcactctttcactgtggtgattctgaattagaaccgacagatgaactttggcaaaaattcattgtagtccaaggaaattgtgatttttatgatgaatttcccaaaactgtgactaaaaaagtgggggatcaagttatttatatgacacatggtcatttggccaatgttagaatggggctcacgacacttgctttacaagcggaagaagcaggagcgacaattgccttatttggtcacactcatgtactcggcgcagagcgacacaataacattctctttgttaatccgggaagtattcgtttacctcgtggaccagttcaagagaaaacatatgccataattgaaagtacacctgaacaatatctcgttcagtattataacaaagagcaccaaccgttggaacgattaaaggcaacgtttacgaagtaa

SEQ ID NO: 2669 - DNA, 1368 bp, Enterococcus faecalis
gaggaaacgaaaatgattagacatgatagtcgtgcaccaaaagaattgcgaaagatcactattgaaaccaatgtttttaaacatccagaaggttcggtggttatttcgtttggcgatacaaaagtaatttgctcagccactgtcgaagaaaaggttcccccatttttacgaggcgggggaacaggttgggtagcagctgaatatagcatgctccctcgcgcgacgaacacaagaaatattcgggaaagtgcgaaaggaaaattaacagggcgaacaatggagattcaacgtttgattgggcggtcattgcgagctgttgttgacttagaaaagttaggggaacggagcattgttgtcgattgtgatgtgattcaagcagatgggggaacccgtacagctagtattacaggcgcttttgttgctctacgcttagcagtcaatcatttattgatgactggtgcactagcggaagacccaattaaagagcatttagctgctgtcagcgtgggtattttacccgatggttattgtgtgctggacttagattacgcagaggactcgaatgctgcagtggatatgaacatcgtgatgaccgagtctggtgaatttgtggaaattcaaggaacgggtgaagaagctaccttctcaggagatgagttaaatgccatgctcttttatggaaaaacagggattgaggaattaattgcgtatcagaaagaagcgctttatgctttagcctctgaagaagtcccttcgcaagattcagaagagaaagtgattgtcattgcgactagaaatcctggtaaagcgaaagagtttagttcaatttttggtgaaaaaggatatacagttaagacgttattagattatccgaatttgccagatgtagaagaaactggtcgaacatttgaagaaaatgctcgtctaaaagctgaaacaattgcagaaattttacagaaaccagtactagcagatgattcaggattaattgttgatgccttaggaggaatgccagggatttattctgctcgttttgctggtgagccaactaacgatgcttcaaataatgcgaaactactacatgagttaacgggcgtgccaaaagaaaaaagacaagcgcgtttccattgtacattggtttttgctgaaccaaagaaagaaagtctggtggtcgaagctgaatggccaggagaagtcggtacgattcctcgtggtgaaggaggctttgggtacgattcacttttctatgttccagagcttggtaagacggcagctgaattgtctggagaagagaaaaataaagttagtcatcgtggacaagcagtggcaaaattaaaagaacaatgggaagaatggctaaaaaaatag

SEQ ID NO: 2670 - DNA, 573 bp, Enterococcus faecalis
gaaattaaagctgccttgccaattccagttgtcggtgttattttacctggcgcacgaacatccgttaaagtcacaaaaaataacaagattggtgtcatacgtacgttagggacaatcaaaagtgcttcctatgaaatcgccattaaaagtaaggcaccaacaattgaggtgactagtttagattgccctaaatttgtccccattgttgaaagtaatcaatatcgttcttccgtagcaaaaaaaattgtggcagaaacacttcaagcactacaattaaaaggacttgatacgttgattttaggttgtacccattacccgttgttacgtccggtgattcaaaatgtgatggggagtcatgtgacattaattgactcaggagccgaaacagttggcgaagtcagcatgcttctcgattattttgacattgcccacacgcctgaagcgcctacacagccccatgaattttatacaactggttctgcaaaaatgtttgaagagattgcaagcagttggcttggtatagagaacttaaaagcacaacagattcacttaggaggaaacgaaaatgattag

SEQ ID NO: 2671 - DNA, 222 bp, Enterococcus faecalis
gaagcacttttgattgtccctaacgtacgtatgacaccaatcttgttattttttgtgactttaacggatgttcgtgcgccaggtaaaataacaccgacaactggaattggcaaggcagctttaatttcttataatgcgacagccgtcgcggtattacatgcgattactagcatttttattcgttttttcaataaaaaatcggccatttcccaagtaaactga

SEQ ID NO: 2672 - DNA, 273 bp, Enterococcus faecalis
ataaaaggcaaaggtaggatgagaatgagcaatcaagaagccattggattaattgattctggcgttggtggattaactgttttaaaggaagcgctaaaacaattaccaaatgaacgattaatttatttaggagatacagcccgttgcccatatggtccacgaccagccgaacaagtcgttcagtttacttgggaaatggccgattttttattgaaaaaacgaataaaaatgctagtaatcgcatgtaataccgcgacggctgtcgcattataa

SEQ ID NO: 2673 - DNA, 372 bp, Enterococcus faecalis
  misc_feature (344)..(344): Nucleotide 344 is "n" wherein "n" = any nucleotide.
ttgcaaaggagactgcctatgatttctttagaacatgtaaataagtattttggggagcatcacgttttaaaagatattactttgaatgtagagcaaggagaaaaaattgtcattatcggaccctctggctctggcaaaagtacattaattcggtgtatgaaccaattggaaaaagtcaatgatggttccgtcgtaattgataacattgacatcaccaaaccgaaagcaccgattcaaaaggttcgccagaaagttgccatggtctttcaaaattttaacttatatgctcacaaaacgattattgataatttaacgttagcaccgattaaagtgctgggcgttanccgacgacgaaggcctaaaccacgggaa

SEQ ID NO: 2674 - DNA, 684 bp, Enterococcus faecalis
ggggggatttccatccccggcgtggacaagtggatgagagagagactggacaatcctgtcaacatgggattcagtgaaatgacaagacgtctttcccgaaaagaaaaaggacagattgctcaatttgaagaggatttgcttcaaatggctcagttaagaaatgccatcgttcatgagcgaattgctgatgattttgtaattgcagagccaaacgaatgggcagttcaacgaattgaaacgattgaacaagctttaacaaaaccagaaaaagtagtgcctaaatttgcgaaacgtgttacagcttttgaaatcaccacttctttagaaacgttattaacgattattgcaaaaaaacaatattctcaatttccgatttatgaaaaaggtgtatttaaaggattaatcacggttcgagggattggtgtatggtttgccattgagagcaccaaaggcgaagttcacattgccaaccgaacggtgcgagaattgttggcatcaaattataaacgcagcaactatcaatttgtttcaattgaagcaaccgtttttgaagttgaacaaatgtttcgggagcagccacgcttagaagctgtgcttattagtaaaagtggccatcctaatggtgagttagtaggcattgttcgaccaagagatttagcaagtattcatagaaaaaaggaatga

SEQ ID NO: 2675 - DNA, 186 bp, Enterococcus faecalis
aaaaaaggaatgacgcgattgttagtagtatattttttaatcagtgccttattagtagggcttgaccaatggagcaaatatttgacggtccaaaacatttctttgggtgaaacaaaagaattcattcctggatttttgtcgctgacccatttaagaaataccggagctgcttggagcttattataa

SEQ ID NO: 2676 - DNA, 309 bp, Enterococcus faecalis
ggaaagatgatattcttttatgtcatcacagtaattgttagtgtcgtgattatttatttattaattaagaattataaaaaaagtatctggtattctgtaggtttatcttttgtcttagcaggtgccattgggaattttattgatcgtgtacgtttaggctacgtattggacatgctccaaacggattttatgaattttcctatttttaatgttgcagatagtacgttagtggtcggcgttatttgtatatttatttatttgattttagatgaaaaagcagcaaaggaaggcaaaaatggaacaaattaa

SEQ ID NO: 2677 - DNA, 933 bp, Enterococcus faecalis
atgaaaaagcagcaaaggaaggcaaaaatggaacaaattaacgtaacgattcaaacagaaaaaggccggattgataaagtattaagtgaacatttacccaatcattcccgctcgcaaattcaacaatggttaaaagaaaaacacgtaacagttaatggtgaaacggtccgcgcaaattacaaagttacagcaggcgatgaaattgttgtaacaattcctgaaccagaagttctagatatggtagcagaggatattcctttgaccattgtttatgaagacaatgatgtgattgttgtcaacaaacctcaaggcatggtcgttcatccttcggcagggcatcccaagggtacattagtgaacgcgttacttcatcatgcggatcacttatcggcgattaatgatgtggtgcgaccgggaattgttcatcgaattgataaagatacttcggggctattgatggtggctaaaaatgatcaagcccatgaatcattagcgaaacagctaaaagaaaaaacatcgttacgtaaatacgttgccttggtccacggtgttattcctcacgataagggagagataaatgcgcctattggtcgttccaaggttgaccgcaaaatgcaagcggtcattgaaggcggtaaagaagcagtcacgcattttactgttttagagcgttttgatgcatttaccttagttgaattacaactagaaacaggccggacacatcaaatccgtgttcacatgaaatatatcggttatccattagctggagatccgttatatggaccgaaaaaaacattgcctggcaatggacaatttttacatgcgaagttattaggctttacacatcctactacaggtgaacaattagtctttgaagcacctttaccagaagtttttgaaaaaactttacaccaattaagaaataatcattga

SEQ ID NO: 2678 - DNA, 213 bp, Enterococcus faecalis
tttcctcctcatttcttttttatctacgtcctcgctgtcttggggtcagcgattcttccttcaattgagcagctgaaaaataagtgggtttttattgaaattgtcctgttattttttccaacaaaaaatcctcctacccgtatgaggataggaggatgttggttacagtttaaaaaggtacaagggtaccatgtagcccacacaacttactaa

SEQ ID NO: 2679 - DNA, 549 bp, Enterococcus faecalis
ggaggaaattattatgccaaagaaagaattgttgacgcagtcacaatgaaacgagcgcttactcgaatctcgtatgaaattattgaaagaaacaaaggaattcaagacattgttttagtaggaattaaaacgcgtgggatatacattgcacaacgtctagccgaacgcttaaaacaattagaagatattgacgtgccagttggtgaattagatattactttgtatcgtgatgatgtgaaagatatggaggaacctgaattacattcttctgacgtaccagtctcaattgaaggtaaagaagttattttagtggatgatgtcttgtacacgggccggaccattcgtgctgcgatggacgctgttatggatttaggtcgtccgagaaaaatctctttagcagtcttagtagatcgtggacatcgggaactaccgattcgtgccgattatgtaggaaaaaatattccaacatcaaaaactgaggaaattattgtggaaatggaagagcgtgacggcgcagatcgtattatgatcagtaaaggaaacgaataa

SEQ ID NO: 2680 - DNA, 1287 bp, Enterococcus faecalis
acaacgttgtcagaaaaagaatttcgaaatgaggatgcagtcttagatattaaagacagaccgcaagcttttcactgggttggcctaagtttacaacatttatttacgatgtttggtgcaacggttttagtaccaatcttagtgggaattgacccagggattgctttagtcagttcaggattaggaacaatggtctatctgattactacaaaaggaaaaatccccgcttatcttggcagtagctttgcttttattgcagcgatgcagatgttaatgaagagtgatggttatccagccattgcccaaggtgctatgacaaccggcttggtatacctaatcgtttcattaatcattaaaaaaattggttccgactggttggataaaattttaccgcctatcgttgtaggacctgtcgtgatggttatcggtttaggcttggcggctaatgccgcaaataacgcaatgtataacaacaacgtttatgattttaaatatattgccgtagccttaattactttaggcttaaccattttttacaacatgtttttcaaaggcttcctaggattaattccaattcttttgggaattgtcagtgggtacctagtcgctttagctttcggaattattgatttaacccctattaaagaagctgcgtggtttgctttaccgaattttgaagtaccttttgttcaatatgaaccgaaattgtatttaaatgccattacaacaatggcaccaattgcttttgtaacaatgacagaacatattggtcatttaatggtcttgaataaattaaccaagcgcaactttttccaagacccaggcttatctaaaactttaatgggagatggcttagcgcaaattgtagcaggttttgttggtggaccaccagttacaagttatggtgaaaatatcggcgtgctagcaattacaagagtacacagtgtcttcgtgattggtggagccgcggtgttcgctgtagctttaggctttgttggaaaattaagtgccttgattctaagtatcccaggaccagttatttcaggaattagtttcgtcttgttcggtgtgattgccgcaagtggtttgaaaatcttaatcgataataagattaattttgataagaaaaagaatttattgattgcttcagtaattttagtcatcggcattggtggcttagtcttcaaagtaggaacttttgaattgtcttcaatggcattagcaactgtcttaggaattgttttgaatttaattttaccggaaaacgcacgtagcgaagaacagtag

SEQ ID NO: 2681 - DNA, 975 bp, Enterococcus faecalis
ttttaccggaaaacgcacgtagcgaagaacagtaggaggactggacgaatgattattacatctgaacgaattagtttaaaacatcttttaactgctgaggctttaaccgaccgtgaagtcatggggttaatccgtcgcgcaggagaatttaaacagggggcaaaatggcacccagaagaacgtcaatattttgcaacaaacttgttttttgaaaatagtactcgaacacataaaagttttgaggtagctgagaaaaaattaggcttagaagtgattgagtttgaagcaagtagaagttctgttcaaaaaggagaaacgttatacgacacagtactaacgatgtcggcaattggtgtagatgtagcagtcattcgtcatggtaaagaaaattattacgatgaattgattcaaagtaaaacgattcaatgttctattattaacggtggggacgggagtggacaacaccctacacaatgtttattggatctgatgactatttatgaagaatttggtggatttgaaggcttgaaagtggcgattgtgggagatattacacattctcgcgttgctaaatcaaatatgcagttattaaaccgtttaggcgctgaaatttatttttcaggtccagaagagtggtacgatcatcagtttgatgtctatggacaatatgtgccgctagatgaaattgttgaaaaagtcgatgtgatgatgttgcttcgcgtgcagcacgaacgtcatgatggtaaggaaagtttttcaaaagaaggctatcatttggaatatggtttaaccaacgaacgggcaactcgtttacagaaacacgcaattattatgcatccagcgccagtcaatcgggatgttgaactggcagatgaattagtggaaagtctgcaatcaagaatcgtcgcgcaaatgagtaacggagtctttatgcgcatggcaattttggaagcaattttacatggaaaggcctag

SEQ ID NO: 2682 - DNA, 1347 bp, Enterococcus faecalis
cggagtctttatgcgcatggcaattttggaagcaattttacatggaaaggcctaggtggagaaatgaagacgttaattaagaatggaaaaatcatcaaaaaagagaatcaattgattgaggcagcactttggctagaaaatggtgtgattcacgcaatcggggaatcgtttgacgaagcagattttgagcaagtgtttgatgcgaacgggcaactaatcacgccaggcttggtggatgtgcatgttcactttagagaaccaggctttacgtataaagaaacgattaaaacgggtagtaaagctgctgctcgcggtggttttactacggtttgcgcaatgcccaatttgaatccagtaccagatacggctgaaaaattaagtgaggtttacgacttaattcaaaaagatgcagtcgtgaaagttttacaatatgcccccattacagaagagctacggagtgaagttttaaccaatcagaaggccttaaaagaagcgcgcgcctttgcatttacgaatgatggtgttggtgtccaaacggcaggaacgatgtacttagccatgaaagaagcggctgcattaaatatggcacttgttgcgcacacggaagatgaatctttattatttggtggtgtgatgcatgaaggagaagtttctaagaaattaggcctaccagggattttaagtgcaacggaagcttcacaaattgctcgggatattactttagcgaaagaaacaggcgttcattatcatgtttgtcatgtttcaacagaagaaagcgtgcgcgttattcgagatgctaaaaaagcagggattcacgtaacagccgaagtttcgccacaccatttaattttagtcgatgaggatattcctggtgacgaagggttttggaaaatgaacccgccattacgtggtttagcagatcgacaagcattgattgacggcttgttagatggcacgattgactgtattgctaccgaccatgcgccccatggtttagaagaaaaacaacaatcatttttaaacgcaccttttggtattgtcggtagtgaaacggccttccaattgatttatacgaactttgtcgaaacaggcattttcacattagaacaagtgattgattggatggcagtgaaaccggcagaaatttttggattaaacgcaggaacactaacaattggtgcaccagcagatattgcagtttttgacttagcaacagctgcaccaattgatgcagaagcatttgaatcaatggctgtcaatacaccatttacagggtggacagtcaaaggaaagacacttatgacatttgttgacggagcattagcttggtcggaggaggcgcagtag

SEQ ID NO: 2683 - DNA, 267 bp, Enterococcus faecalis
acgcctgtttctttcgctaaagtaatatcccgagcaatttgtgaagcttccgttgcacttaaaatccctggtaggcctaatttcttagaaacttctccttcatgcatcacaccaccaaataataaagattcatcttccgtgtgcgcaacaagtgccatatttaatgcagccgcttctttcatggctaagtacatcgttcctgccgtttggacaccaacaccatcattcgtaaatgcaaaggcgcgcgcttcttttaaggccttctga

SEQ ID NO: 2684 - DNA, 1116 bp, Enterococcus faecalis
cggagcattagcttggtcggaggaggcgcagtaggtttgaaaaggttattgattttagaagacggaacagtatttgaaggaaaagcgtttggtgcagaaggcaatgtagtaggagaagttgtttttactactggcatgacaggttaccaagaagcaattactgaccaaagttttaatggacaaatgattacttttacgtatccattagttgggaattacggggtcaaccgagatgattatgaatccattgcaccaacctgtaaaggtgtcattgttaaagagcatgcgcgggttgcttcaaattggcgtcaacaaatgaccttggatgaatttttaaagcgcaaagggattccgggaatttcaggaattgatacgcgtgcgctgactcgtaagttacgatcagctggaacaatgaaagggagcatcattgatgccgtggatgatttgccgcatgcgtttgatcaattaaaagcgacagtcatgccgaaaaatcaagtggcacaagtctccaccactaagccttatccgagtccaggtattgggcgtaatgtggtcgtcgttgattttgggttgaaacatagtattttgcgagaattatcaaaacggcaatgcaacttaaccgtgttgccttataatacaacggccgaagagattttagaattaagtcccgatggtgtcatgttgacaaatgggcctggagatcccaaagatgtgcctgaagctattgaaatgattcaagcaatccaaggaaaagttccgattttcggcatctgcttaggtcatcagttattttcattagcgaatggtgcggatacgtataagatgaagtttggacatcgcggtttgaatcatcctgtacgagaaattgcaacaggacgcattgatttcacttcacaaaaccacggatatgccgtagatgaagcaacaattgatccagaaaaattacttgtgacccacgtggaagtcaatgatggaacggttgaaggcgtgcgtcatcgagattatcctgcttttactgtgcaatatcacccagatgcggctccaggaccgcacgatggtcttcatttatttgacgaatttatggaattaatggatgcatggaaggagcaaaactaa

SEQ ID NO: 2685 - DNA, 3225 bp, Enterococcus faecalis
cgaatttatggaattaatggatgcatggaaggagcaaaactaatgccaaaacgaacggacatcaagaaaatcatggtgattggttcaggaccaatcattattggacaagcagcagaatttgactatgcaggcacacaagcctgtttagcgctaaaagaagaagggtatgaagttgtcttagtaaactcaaatccagcgactatcatgaccgataaggaaatcgcggatcatgtttatatcgaaccgattactttagaatttgtttcaagaattttgcgaaaagaacgtcctgatgctcttctaccaacattaggtggtcaaactggattaaatatggcgatggaattatcggaatcaggaattttagatgagctaaatgtagaattgctaggaacaaagctcagtgcgattgaccaagcggaagaccgtgatttatttaaacaattgatggaagaattagaacaaccgattccagaaagtgaaattgtcaatacggtggaacaagccgtggcttttgccaaacgaattggctatccaattatcgttcgtcccgcatttactttaggtggaacaggcggcggcatgtgtgatacggaagaagaactccgccaaattgctgaaaacggtctgaaattatcaccagttacacaatgtttaattgaaaaaagtattgctggttttaaagaaattgaatatgaagtgatgcgtgattcggctgataatgcgattgtggtttgtaacatggaaaactttgatcctgtcggcattcacactggggattcgattgtttttgctccgagtcaaaccttatcagattatgaataccaaatgttgcgagatgcgtctttgaaaattattcgtgcattaaaaattgaaggtggctgtaatgttcaattagctttggacccgcatagctttaattattatgtgattgaagtgaatcctcgtgtttctcgctcatctgcacttgctagtaaagccacagggtatcccattgcgaagttagctgcaaaaattgctgttggtttaacattagatgaaatgaaaaatccagttactggaaccacttatgccgaatttgaaccagctttggactatgttgtttccaaaattcctcgatggccttttgacaaatttgaaaaaggtgctcgagaactaggaacgcaaatgaaagcaaccggggaagtcatggcaattggccgcaatattgaagaatccttattaaaagcagttcgttctttagaaattggtgcttatcacaacgagttagcagaactaagtcatgtcagtgatttggaattaacgaagaaaatggtccatgcgcaagatgatcgattgttctacttatcagaagccattcgcagaggatatagcatcgaagaattacaaagtttaacgaaaattgatttattcttcttggataaacttttacacattatcgaaattgaaacagcccttgaaagtcacgtggacaacgtagctgttttgaaagaagccaaacaaaatggtttttctgatcggaaaatcgcagcactttggggacaaacagaacaagccatcgctgacttccgcagagccaatcaaattgtgcccgtctataaaatggtggatacgtgtgctgcagagtttgaatcacacacgccttatttttatagcacgtatgaagtggaaaacgaaagcaatgtttcgaaaaagccttctgtactagtattaggttctggtcccattcgcattggtcaaggggtcgagtttgattatgcaacggttcattctgtcaaagcgatccaagcggctggttatgaagcaattattatgaatagtaatcctgaaacagtttcaacagatttctctgtttctgataaattatactttgagccattaactttagaagacgtcatgaatgtgattgatttagaaaatccgattggcgtgatcgtccaatttggtggacaaacagcgattaatttagctgagccgctcacaaaacaaggcgttaaaattcttggaacaacgattgaagatttagatcgtgcggaaaatcgtgatttatttgaacaagctttgcaagagttagcgattcctcaaccaccaggagatacggccacaagtgcagaagaagcagtcgtgattgctgatcgtatcggctatcccgttttagttcgtccaagttatgttttaggtggtcgtgcaatggaaattgtcgaaaatcaaaaggatttggaagattatatgcgacatgcagtcaaagcttctccagaacatcctgtcttggttgatagctatttattgggacaagaatgtgaagttgatgccatttgtgatggtgaaacagtactaattccagggattatggaacatattgaacgagctggcgtgcattctggtgattcaatggcggtttatccaccgcagtatctttctcaagaaattcaagcaacaattgccgattatacaaaaaaactggcacttggtttaaactgtgtaggtatgatgaatattcaatttgttattcatgaaaatcgtgtttatgtgattgaagtgaatcctcgtgcgagtcgaacagttcctttcttaagtaaaatcacagggattccgatggcccaagttgctacaaaagcgattcttggtgagaaactgactgacctaggatatcaagatggattatatcctgaaagtaaacaagttcatgtgaaagcccctgtattctcctttacgaaactacaaaaagtagatacgtacttagggcctgaaatgaaatcaactggggaagttatgggtagtgattattatttagaaaaagccttgtataaagcctttgaagcatctggcttgcatttgccaagttatggggctgtacttttcaccattgctgatgaaacaaaagaagaggcgttagaaattgctaagcgtttttcagcaattggctatagtttagtcgcaacggaaggaaccgctgactttttagcgaagcatcagttgcctgttaagaaagtgacgaaaatttctaatcctgaaggggaaaccgtgctggatgtcattcgcaatgggaatgcgcaagtggtaatcaataccatggataaaaatcgttccagtgccaaccaagatggattttcaatccgtcgggaagcagtcgaacatgggattccattgtttacctcacttgacacagcaaatgcgattttaaaagttttagaatcaagagcctttacgacagaagccatttaa

SEQ ID NO: 2686 - DNA, 801 bp, Enterococcus faecalis
aggatactgatgcagagaaagcaagaaatgatgaccattgtagctcaaaaacagttagcgccacggatttatcagttagacttacaaggcgagttagtgaaagagatgacacgacctggacagtttgtgcatatcaaggttccgcgtgcagatttacttttgcggcgaccgattagcatcaaccaaattgatcattcgaacgaaacctgtcgtttgatttatcgagtcgaaggcgctggaacggaagtgtttgccaccatgaaggctggtgaacaattagatattttaggtcctttaggaaacggctttgatataactaccgtagcagctggtcaaactgcttttatcgttggcggaggaatcgggattcccccattgtatgaattatcaaaacaactcaatgaaaaaggcgtgaaagtgattcattttcttggttatgcatcaaaagaggttgcttattaccaacaagaatttatggcattaggagaaacacattttgccacagatgacggctcgtttggcgctcatggcaacgtgggccgtttattgtcagaagcgttagcaaaaggacggatccctgatgcagtgtatgcttgtggtgcgaatggtatgttaaaagcaattgattctttatttccaacacatccacacgtttacctttctttagaagaacggatggcctgtggaattggggcttgctatgcctgcgtttgccataaaaaaggagacactactggagcaaaaagtgtcaaggtctgtgatgaaggtccgatttttaaagcaagtgaggttatcttatga

SEQ ID NO: 2687 - DNA, 948 bp, Enterococcus faecalis
ggttatcttatgatgaaaaatcctttagccgtttcaattccaggtttaacattaaaaaatccaattattcccgccagtggttgctttgggttcggggaagaatatgctaactattatgaccttgatcaattaggttcaattatgattaaggcaacaacgccccaagcacgatatggaaatcccacgccacgtgtagctgaaacacctagtggtatgctaaatgccattggattgcagaatccaggtttagaagtggttatgcaagaaaaattaccgaaattagaaaaataccctaacttaccgattatcgcaaatgttgcaggtgcttgcgaagaggactatgtggctgtttgcgcaaaaattgggcaagcgcctaacgtcaaagcaattgaactgaatatttcctgtcccaatgtgaaacatggcggcatagcttttggtacagatccagaggttgcttttcaattaacacaagcagtcaaaaaagtcgcctctgttccgatttatgttaaactatcaccaaacgtaacggacattgtgccgatcgcccaagcaattgaagcagggggcgcagacggtttttctatgattaatacattgctagggatgcgcattgatttaaaaacgagaaaacctattttagccaatcaaactggcggactatctggcccagccattaaacctgttgctattcgcttaatccgacaagtcgccagtgtttctcagttgccaattattggaatgggcggtgttcaaacagtggatgatgtcttggaaatgttcatggcaggtgctagcgctgtcggtgttggtacggccaactttacagatccatatatttgtccgaagttgattgacggattacctaagcgaatggaagagttaggtattgaatcgttggaacaattaattaaagaagtgagagaggggcagcaaaatgcacgatag

SEQ ID NO: 2688 - DNA, 555 bp, Enterococcus faecalis
gagaggggcagcaaaatgcacgatagaccaattattgcgttagattttcccacgcaaaaagaagtggctgtttttttagaaaaatttcctaaggaagaagccttgtttgttaaagtggggatggaacttttttacgcagaaggaccagcgattgttcgctggcttaaagaacaaggacacgatgttttcttggatttaaaattacatgatattccgaatactgtggaaaaagcgatgacaaatttagcaaaattaggcgttgccattactaatgtccatgcagcagggggcgttcgaatgatgcaagcagctaaggaaggtctaatcaaagggactcagccaggcgctaaggttcctgagttaattgctgtaacccagttgacttttactagtgaagaagagatgcaccatgatcaattaatcaacgttcctttagagacaagtgtcattcattatgctaaatgtgcggaaaaagcgggtctggatggtgtggtttgttcagcattagaagcacgtggtattcaagaagcaaccaagcagacgtttatttgctga

SEQ ID NO: 2689 - DNA, 774 bp, Enterococcus faecalis
gtgaccaacaacgggtcgttacgccgcaacatgctcgcgaaattgggtccacatatatcgttgttggccgacctattacccaagcagaaaatccttatgaagcctatcaagaaatcaaaaaagactggagcgaaaagtaacatgacaaaagtagcaaaaaagattgccaaagatttattagatattgaagcggtatttttaaaccctaatgagccgtttacctgggcaagtggcataaaaagcccgatttattgtgataaccgtatcacgatgagttatcctgctgtgcgtaaagaaattgcagaaggcttagcggcaaaaattaaagagactttcccagaagtcgaagtgattgctgggacagctaccgcagggattccacatgcggcatgggtagccgatattttaggattaccaatggtttatatccgcagtaaagccaaagatcacggcaaagggaatcaaattgaaggccgaatttctgaaggacaaaaaatggtagttatcgaggatttaatttcaacaggcggtagcgtgttagaagcggcagaagcggcggaacgtgaaggagcaacggttttaggcgttgcggcaatcttcacttatgagttacccaaaggaacggcaaattttgcagataaacagatgacgttactaacgttaaccaattattcaactttaattgatgctgcattagaagcaaattatatcgaagaaaaagatgttaccttattacaagaatggaaaaaagatcctgaaaactggggcaaataa

SEQ ID NO: 2690 - DNA, 381 bp, Enterococcus faecalis
gttttacctgattactatgtggaaatgaaggaagagtgtatgaaaaaaataaaaaatatggacgttgaatggagctatacaggcaacgatggaccagaacattggcatacgctatgtgactggtttgcagaaggtgctaagtttgcttatcaatcgccaattgctttagaaaaagaaagtgctgagacagtaaattctcagattacgtttcattataaaaaagaagaattcactgaaaaagaattcaaaaatacgtttcattttgtaccaccaaatacggaaagttacgtaatgtttgaaaatgttgcgtatcatttaaccgatatccattttcatatggccaaccaaaaatttggttacggggaaaacattttcggctag

SEQ ID NO: 2691 - DNA, 369 bp, Enterococcus faecalis
ccgatatccattttcatatggccaaccaaaaatttggttacggggaaaacattttcggctagaaatcccctttggggcctattaaaacaaacgggggaaaatttaattggtcggtgcctgttttccatcaccgaggaaaaaaatcgtttttcagaagcgaatcatccgatggactgggaaaacggcacgcaccaacaatggtttaatccgtcaatctttttaccagaggagcgtctacactaccattatgttggctcgttaacaacaccgccaactaagggtccagtgaaatggtttgtatttgataccattcaaaaaatggatcaagcctttttaaataaaattaaggaaggtatgttggcctctaac

SEQ ID NO: 2692 - DNA, 438 bp, Enterococcus faecalis
gtttacaaatacaaaagattatcgattgaaaacagcgtaggggatcacatgaaaattacaataccaatgacaccaaaaccacaaagcagaccaaggtttgctagacgtggaagatatgtacaaacctatgaagatagcaccatgaagacgtataaacaacaagtaaaaacctatcttaaaagagcaaaacctaaattgatagagaaagggccaatcatggcacacgtgacgttttatgtacaagcgcctaagtcagccctaagtaataaacagaagcggttagacgtaaaattagagcgcaaatactgcgataaaaagccagatttagacaactatttcaaagcagtcacggatgctgcagaaggtattctttacaaaaatgatgggcaaattgctgtgatagtttgtcaaaaaggccagtcgtcaccacaagttgca

SEQ ID NO: 2693 - DNA, 873 bp, Enterococcus faecalis
ctaatgatgaatactaaagttgcattaaagcaattaatggctacacattttattacagttgatgtctcttgtcctgaatgcggaggagcaatgacagcatggaaagaaccaactccagatactccaccaagatgtcctcccgtatgtatggaatgtggctatcgttcagtgaagaaaaaagaagcaaccactgctaagaacctttatgaatctagtctgataaaaaaggcaaaagactattttttaaacggctctgtattaacggatagaaaatcgctgcataaaaaaattggtaattattacccaagcaaccaagaatcaaccaaagctaaaaacattagtatgaaattttgcgaaaaaacactgttgggagaaatacaccatctgattttaacaggaggagttggagttggaaaatcacatctagcaattggatgtctcaacgaaatacttgttaaaagtaattattctaagaaggtactatttgtcagctatcgagagcttttagaacagttaaaatttgcgatgaatgacgaagaggcacgaaaagcaattactggtgtagcaatgtctgaaatcaaagcagcagacgtcgtagttctagatgatataggggctgaactaggcgactttaataaaagagatgaaaaaggcaacctgattcttagtagagcatcaaactttgatattgatacgctgacaggaatattggaaagtcgcatagataagccaacaattatcacctctaacctaaaatcaaaagaaattcaatattgttacggcgaaagaatagtctcaagaatggctacccattcaaatggatttatgcataggtttacaaatacaaaagattatcgattgaaaacagcgtag

SEQ ID NO: 2694 - DNA, 876 bp, Enterococcus faecalis
atgatttataggagggaggcagatatggcaagacctttaaaacaaggaattgactactttccgctttctgtagattttttaagagatataaaggttcgtaaaatcaaacgtgcgtgtggaccttacactgtcgaaatactactttgcctgctgggtaatatttatcgggaaactggttattacatcgggtgggatgaagatacgatgttcttagttgctgacgaagttggggcgaaagagggtctagttgaagagacggtaaataaggccgttcaagttggattttttaatcaagagaagttcaatgagtatagaattttgacttctaacggaatacaaaaaagatatctcgaagccactaaaaaaaggaaagaagtagttatttccgacatttacttagttaatgacaccataaaggaggaagaaaccctagttaatggcgtcgataatgaacaaagtaaagtaaataaaagtaaagtagataaaagtaaagtaaataaaaacaataaagaaaaacctgccgttcagttgtcgtctgaaaaggattttttggagaatcctttaggagacaaaaaaacagcggagctaatcgcttattattcaaaaaatgttagtcttgctactcctgtaaatatgacaaatctagcatatgatttgaaagactttaatggcgatctggatttactaaaagaagcgataaacatttgttcaaacaatgtaaaaacatatgcttattttgctggaatattaaaacagtggcgagctaacggaattaatactcatgcagattttttgaagaaagtaaataaaaaatcaaagcaaaaaaataaacgagatagcgaaccaccgctaaatgattattcaggattgttttaa

SEQ ID NO: 2695 - DNA, 819 bp, Enterococcus faecalis
atggagatgttgaaaacgaagacggcccttaccctttctgataaaaattattattcaactgaagctgactggcattatatgtcggtcagccaatataaaaattttaatgaatgcgaagcagccacaatggctagattaaaaaaaagttggttaccctgttcagatccaaaagcattgcttgttggtaattatgttcattcttactttgaatcatcaaaaattcatgatctattcaaaaaggaaaacaaagacaaaatgtattctagtagaaaaccatatgggcttctaaaagatttccaaatagctgaacaaatgattcaacgactaaaagaagaacctgcttttataaatttatataaaggggaaaaagaagtaattgttacagggcaaattgaaaatgtagattggaaagggaaaatcgattgtctaaatttagaggatggttattttgttgatataaaaacaacaaaagatattcatgaacgtaaatggaatgatagctacgcagagcgttgtacattcattgaaaactatgggtatgtacttcaaatggcagtttataaagaattacttagtcaaaagtataatagggaatttgtaccaattatagccgctgtttcaaagcagactccttctgaagtaaagctaattaccctagatgaagacaagatgcattttgaaatgatccaattaaaagaaaatattgaacatattattaaagtaaaaaatggcgaagaaaaaccaacgctgtgtggtaggtgtgaatattgcagagggcaacaacgaattactcactttactaatatgaatgatttatag

SEQ ID NO: 2696 - DNA, 942 bp, Enterococcus faecalis
aaattggaggaaattataatggggaatgaattaatagtaagcgttcaaaatagaattcaggaaatgcaacatggtgaaggattgagattacccacagggtattcggtaggaaatgctctaaactcagcatatctaattcttagcgataattctaaaggaaaatcattattggaaaaatgtcaccctacatcagtgtcaaaagctttactaaatatggcaatacaaggacttagcccagcaaagaatcaatgctactttgttccctacggtgatcaatgtacattgatgagatcatacttcggatcagtaagcatattggaacgactttctaatgtaaaaaaagtacatgctgaagtaattttcgaaggagatgaatttgagataggatcagaggatggtagaaccgtcgttacaaacttcaaacctagttttctgaacagagataacccaattattggtgcatttgcttgggtagaacaaacagacggaatcaaagtttacacaatcatgacaaaaaaagaaatagataaatcatggagtaaagctaaaacaaaaaatgtgcaaaatgattatccgcaagagatggccaaacgcacagttttatcaagagcagcaaaaatgtttatcaattcaagtagtgacaatgatttactcgtaaaggctattaatgaaacaacagaagatgaatacgataataatcaacaacgcaaagatattacacctaatccaccaaatattgaaaagcttgagaaatcaatttttaatcaagatgaaaataaaaaaattgctcaagatatgattgattccattgatttaaatcaagctgacaaagatctacaagaagagctaaatattgaatttcctgatcctagcaaaaactatttagctactggggaggtaaatggagatgttgaaaacgaagacggcccttaccctttctga

SEQ ID NO: 2697 - DNA, 381 bp, Enterococcus faecalis
aagacaatattgaaattgaaaatgtttttaattaagggagggatcacaatgaacttgcaagaagcatatgcattagataaatacttaaccactccaccagaagagttttatgaggaagaaatagacgaaacagcagattacgacaaggatagtatgggagaaactatcgcccaagaagatggtgtatttgaaatcttgtatacagtgactactgtcatgagtaatagatgtctcaaaattaaaacagagaaagcgattgttactcaacaagatattgtagattttattttagaaataggtgaagaaaaaataacatctataaaatttgtaggattaggagaaaagtatttagaaattggaggaaattataatggggaatga

SEQ ID NO: 2698 - DNA, 297 bp, Enterococcus faecalis
atgcaaaaaaacaacaataagctaaccatgtcagcccgattcggtgaatggtataaagaggcgactgaaaattgtgcagaacgagaattatacgcaacgtcgttaattgcacgtatggattggttagttgatccaaaaagtgtaaataacagtagatatgacttaaccacagcgctaaataaaaaacatagcagcgcttggtatgatgttgctactgaaatttgtaacaagcgtaaagaaacagttatacgagcactcttagaagacaatattgaaattgaaaatgtttttaattaa

SEQ ID NO: 2699 - DNA, 327 bp, Enterococcus faecalis
ttgaatagaaaaatcagaagtctaataaaagagttaacagaggaatgtgacaaagaaaaagtttctcttatttgtacagctaataaccaaggtgagacagttagtgcaatttgcggcggattagtagaactatcattttgtttaggagtccaagaaaaaaagctaagtgaaaaattaccaatacatccagaaattttgcgcaaatcagcagttgaaacattggaagaaattaaatcggataatcataaacatacttttgtagtcgaaaatgcggaagatttacaagatatattaaacagaatcgcttcaggtgagtttgatgaatag

SEQ ID NO: 2700 - DNA, 228 bp, Enterococcus faecalis
aatgaaaggaagttaaaaatgaataaaaggaaaccacgtagtttatatgaagcaagaattttagggactttgttagtattcttcatacttggtctagtaataaagaacaatattccgtttaactacttacttttaatacttggacctattattgtaatttggtttatgaaatatgacgatgctaaatatcaagaaaatttaaataaaattgaaaaggatgtgtattaa

SEQ ID NO: 2701 - DNA, 270 bp, Enterococcus faecalis
ataaaggagggaagtaatttgaagtcaaacattagtatgcaagatgtatctaagagactttctaggaatctatatatgatgatgggaactcctagagaggatacaaaaaaaatttggaaggtatctgagctttcaaaagcaagcggagttacaccatgtgttattagtcggattaaaaatgatactgaaggaaaagaaaaaccgactattgaaacagttgttaagcttgctaaagcattaaatgttgatcctgcagaattattgaaataa

SEQ ID NO: 2702 - DNA, 552 bp, Enterococcus faecalis
caaattatacgaaatgaggtaaaaatgacgagatctataaaactgaacaagcaattaagaaaagcagctttaaaaaaaggattaagccaaaagcaagtggcccaatcagtacattttgcacatactacaacaaatggtcactttaatggctacccagtaccgccagaaagtgcaatagcatataacgaattatttaacgatagtgaattggcatttgcattaggccaagagttattaggcctaataggtctagcaactggagtgaaagtaaaaaaagagccattagcgctttcggtactaaaggaaaaagaggaacgagaaagagaaaaaatcgaagtggaaaacgaaatcgattatttaatggcgattccagatgaagaattgaccgaaaaacaaaaacaagcaatattacagtattgtagcgagtattcggatgaattgttgtttgaagtttctcttatttgtaagcaattagaactaatagggatgtcatttatggatttaatgatattaagaacaccttattggaaaaataaaaaatggattgaataa

SEQ ID NO: 2703 - DNA, 189 bp, Enterococcus faecalis
ttaggaggacacaaaatgacaactaaagaaaaaattgaatttatcaaacaagtaacatctcattcagattcagaagtagagaaaattattaaaggaatgagcgataccagtattaaccgctggtatgaaatagagaaatatcgcattgatcaagaattagaagaagcagtgttaactatctattgttaa

SEQ ID NO: 2704 - DNA, 222 bp, Enterococcus faecalis
tacgtagaaggagggaaaaatatgcgagagtggcttgtggatagcagacttaaaaataaacttacccaagagcaagtagctgaaagagctgatatagaacgctcttattacaacatgattgaacgtggtaagcgtagaccaagcgtagaaattgcaaaaaaattgcaaatgttttatccatcgactggactattttttttaagtgaaaatgtaacgaaatga

SEQ ID NO: 2705 - DNA, 450 bp, Enterococcus faecalis
caaaaagttccattcttttttatgtcaatcacagtaacatcatgttactatatttctataggaggtggcattatgtttcatattaaaattaaagaattaagaactgaaaaaaaattaacccaacaagacgttgctgactacttaggaattacccgaccagcatatacagcttatgaatctggaaaaagacaaccagattttgaaactttacaaaaacttgctacactgtttgatgtcaccaccgatttcttgcttggcagaaatcacacacctgagtgggcaaataaagatgaagtgatggaattagacaaattactcgattccaatataggaatgacttatggtccagaagaaatgacagcagaagatagggaacaaattaatgacttaattgctagttatttttgggtaaaaaaacaaaaagaagctcgcaataaagatgggaagtga

SEQ ID NO: 2706 - DNA, 468 bp, Enterococcus faecalis
agatgggaagtgatttctttgaaatcagtaatttatgatctcgaagatatattttcttggactagaagttacgatccatttgaaattgctcaccatcttgatattgatatagtttatactagtaaacttccaattggttatcatggattagcagttcctgaacttaacacaatatttattgcttcatttctaaacggaagtaattattcttactttgtttgtgctcatgagctaattcatataactgaacatgatggaatcaattcattttacaatgctaatagatatagtagatctaaaatggaatatgaagctgataatggcgcgatttttttgctttgtaaatactatttatatcatgtagcatcagatgaaagcgtgaatatatgtattattgctagttattttggattaaacgaagatttttatccagatattgaaaaatgtttgcgctttattataaattaa

SEQ ID NO: 2707 - DNA, 927 bp, Enterococcus faecalis
attaaattacatatgtattttttaggaggaattaggatgaaaaaattaattagtttaggattggtttgtggttgtggtatttcactatttactgcttgttcgggaaatgatggtaacaaaaacgagagtacaattaatacatcatcaaaaattaaagagaaagctgaatcaactgagtttatatcaaaaggtgattataaagtcggtgaagatattcctgaaggcaactattatgttgttttaacagatttggaacatagtcctgaagataccaacaaattaactgaggtttatattaacatttcagataacaacaaaaaacatttaaaaacaatttatttttcacaacctggtcaaaaagagcgaattaaacttgaaaaagataataacatacaaattactgacaatggcattgaatttaagaattttactttaaaatttttaaatgattctgatttcaaagaatatatgaaaaatccagtatcaagtactgaagctagcgaacaaaaaacagttaactctgatgtttctaatagtagtagccaagataataaacaatctgatgtagctgataaaaaagaagtaggtactgaagcgaagtctgatgtagctactaatactttatcgagcgaagataaaaatactaatgacattactaagctagcagatgagccaaccttagaacaacaaaccgtcttagatactttagctaaacatcaatttaatgatatgtatccttataaaggaagcaaaatgcattcaattatcggtgtcatccaaccatggacgcaaaaagatggtaaatggtatcaaaaagtaagtgctactatagtaaatgcatatggagcaaaaagagaaactaatgtggaaatacacataactccacaaagtgcagatagtggacttgtagaaattattgattattaa

SEQ ID NO: 2708 - DNA, 1167 bp, Enterococcus faecalis
aaattatccgagaggttgatatttatggcagaaccaaagaaattagctaatggaaaatggcagttaagatttagatataaagaccctattacaaatgaatggaaaaataaaatgattactagatctactaagaaggcttgtagagatgccgaaacagaatttaaatcaaaaattatgcgtggtgaaaacactgaagcaattaaacttttagatttttatgatatttgggttgatacatttaaaaagaataaagtatctgctggacgtatgcaaaaaatagctttaactagaaataatttaaatgatttctttggtgacaaacaattgctaaaaggcgtcacaaaagtcaaataccagcaatggattaactggcttgcaaaacctggcaatatcaatgaaaaaggtctagcgtttgagactgtaagcaacagacataacattgtaaaatctatgtttttagaagctttggacatgcaatatattcattcaaatccaacaagaaatataaagttaactggccaaataccagaaaagaaatcaaataaaaccatatctattgatgatttaactaaatttaaagaagctttattatctcgtgaaaataccacaagtaaatacttcattttagtacaactatacactggagctcgttatcaagaagttgctgccttgacttgggatagtattgatgaaagtaacgaagttattaagataaaaaatgcctataagtatgatgctggccagtatagaattggccctacaaaatcagaagcaggtgttcgaaatattgatgtcccttcttctcttttctattatttaaaaaaatatgaaattgaacaaaagaaaagaatattgagaggagatttacgtaatcccaaaaattttgtttttgttagtaaaaaaaattcatggcccatctcaaattcatctgtgaataaatatataaaagaaacatgtgaactagcaaatattgaaagaatttcatctcatagttttagacatgcccgatctgacttattaatcctagccgaagcccatccaatatatatcaaaacacaggtaggacataaagagataatacagtcatatgaatacgcatcagccactgaagcaaatagaaaaaagaacaaagaaaaatatgaaaacaaatacaaagatattttgtaa

SEQ ID NO: 2709 - DNA, 1509 bp, Enterococcus faecalis
ttattggagtggagtacaatgatgaaacaattacctacagaatcaaaaaaatttgatttaaagaattggtgtattgaaaataaagcctatcttctattgatcattttaatttatcaagtggcagttttatccatcggcattatcaatttcccttacttagatgataatgctcgccaagtcgctggaatgacagattttggtacgacttacgcacgttggggcagtgaatttctctcatggtttgttcaaggaagtcgtcatttgacagatctgggcttgaccacaccgattctaacaggtcttatcttatctctcacaagcatactggcaatttatatcatcaatgaccaaaaaattagctggggttcctctttagtagctactttaattggcctcaatccttggttcctccaatgtcttagtttcaggtttgatagtccctatatggcattgagtattttttgttcgtttcttcctttttattggtggcagcgtaattcttttacgtttttcttggtttctgttttttcactgtttgttatgtttaatacttaccaagcctcgtcaggaatttatatagttatcgtcttattccttactttcaagcagttacttgctggagaaaatttcattgctctttgcaaaaaagtcgcacttgctgctatcgcttatctactttctatagtcagctaccttatcgagttaaaatttgtaccttccgcaacaaacaacattgggggcagtcaggccttaccaagtttgcacgatattcccagtgtggcttatcaaaatagttaccattatttttcagagctattgaaccagagtaatcgtttatggcttttattactgctcctactgcttgttttattttttattagtcatctatcaaatagcaaaatcaacttaggcttaagtttcctttattgtatcttgtatttaggacttgcttctctcttaagttttggcatttttattgtctattcaagaaatatcgcaggtgatgcgcctcgctatatttacggatttgctgttttcgttacaatcagcatgttaagtttatttaacaatcgacaagtgaaagcaatttatctaacttcgttacttgtggccagcttgttatcttattatattttatcgtttgttttggtgtattcttccacattaaactatcaaaaagaagcattcaatcgccaagcagctgttttaacagatgatttaaaaaatgttgtaacaaacgaacgaaaaaaagtttatttaaatacgtttttcaaaaattcaactgtttatgctaatacaagtcgaaactacccaattctttcaaaaattgtgccaccaaatgacggtctatacttccctaattacgtttggttcaatacttcatcgaatttaggattagagatggcaccactgaccgatacggatatgtctaaaaatcaaaaagtagtaagtaatcacttttatgacatttatacaaacaacaaagaaatatttgtgtttatgaaataa

SEQ ID NO: 2710 - DNA, 978 bp, Enterococcus faecalis
aggaggttagatatgactaccattcatgaatttccaaaaaactatgaacgttttattgcacaaggagaagaagcacttgtagaacataatcagatcgccgctttagaaaattttcaacaagcctatcagctacaacaaacgccgccagtaaaccaaaaaattgtccaattattgttggaaatgggtgaagctgatgaagcactagcattggcagaagcgttccaagagtcttattttgagaaccttgaaacagcggcaatttatatgcaaatttatagtcaaagtcgtcgctttattgaagggtatattttattgaagcaattacttcaaactaaaaaaataacgctagcacaacaaaaaacgttagaacagcaattaatgcaagtggaagaggcgtatcaacaattagaaacgcagcaaattcaagcaattaaaaggaacttgttagtaagcgatcaattgcccgtttatcaacaattagcgaacattaaaaccagtttatatttgcctaaaccagtatttgtggaagtcgcaaaagatttagttatgaaccaagcacttagttattttgctcgggaatggttcattgaagaattagcacttttgcaattttcagaaccactgacttttctttggtatgacaatcagcctcagacagtcttactagaaggaaaaactggaccgttaaatacgccgatctattccgaaatttgtactgaacttaggaatcgtttagaaaatgatgatccaattatgctgcagcatttggaagaagaaattcgattgcatcttgcctatttgtatccattagcagagacggttatttcagatccaactatctgggtcttgggttatttggcaacctattatcctgaatatattgaaaaagaattgactgaagcaaaaggccatcaaatcgatgctgttcaaaaagttcaacaggcgatacgaacggcatttacacaaataatgctttaa

SEQ ID NO: 2711 - DNA, 291 bp, Enterococcus faecalis
atggaaaatcaagtcgaggttatgacgtatgcacatttaaaagaaattatgcaggcgttagaagcaaacgaagcgattacagaagatacaaaagtctttattgatacaggatgggatagcgtgcaagaagtagccccagatgcggtcagtattgaaaaagttgctaaatttacagtagcagatgttttaacaaacgaaagttttgctgggtatagtttagaagaaaaggcggagaagatgaacgctgagggcgacctagaaacggcaattattattcgtaatctttactaa

SEQ ID NO: 2712 - DNA, 1284 bp, Enterococcus faecalis
aaagtgctaatttatttaacaaaaaaagattgtgagttgtttgatatggatcagtttagtacattaactgaacaagaatttactacctttgcaatgacacatcctgcaggtaactttttagaaacacccgaaatgaaacatttattggaacgacgtggctggcattgtgaatacgttggcgtcaaacgagaaggccaactaattgctgcgtgtatcctaagcaagaaaaaagtcaaaattggttatgctttcgacattgacggcggaattttgatggattatacagataaaaaatgtgtagaagcctttttcacaggcttaaaaaaatatgtgaaaaaaaatgatggcctttatttaacctttactccaaataaacaaatttgtttacgtgattttaatggcggtgaagttgaaaaggtcaatcaagaaacatttgactatttcacatcaattggttttgaacaccaagggtttgatgtgcacaattttgatggtgcgccacgttggctgtttgtcaaagatatggctggattaacagaagaagatctttggaaatcttatggaaaagatgctaaatatgacatcaagaaaacatgggaatatggagtaacaatccgagaacttcgttacgaagagctacctctctttaagaaattaacggaagaaacaagtgcacggcgtaattttgaagataaggatttagcttattaccaagctgtttatgaagagtttggcgaacgagcgaaatttatggtggcggaactaaactttgctacttatttagaaaatcttcatgagaaattacgcaaattacaagagacgctcaacgaagtcaatgaagcgttaattgccaatcctaaaagccgtaaaaaaaataaccagaaacgtgaatttgaagatgaagttcgtaccgtgcgcaaacggattgacgaggctaaagaaatgaaaacatcagatgaacctgaaattttagcaggtgccttattcattgttcatccacaagaagttgtttacttgtttagtggtacgtatgaaaaatataaacaatactatgcaccgtatttaattcaacataaaatgttaacttacacagtagaaaataacattcccaaatataatttttatggcgttgacggtatctttgatggaagtgatggggttcttaaattcaaacaatcctttggcggtcatgtcgaagaattaatgggcaatttccaatggaaagccaaaccaatgaaatatgccttatatcacgcattaaaaacaattaaagaaaaagtctaa

SEQ ID NO: 2713 - DNA, 195 bp, Enterococcus faecalis
attagcacttttcagcttaacctactttttgctttctttcaaacaaagttacctcactggctaattcttatttttcagttcttattaattatatctaattttgctaaaatgcaaacagttttcaacggaaaaaaagaatttctttggaatctttcatttttgactgaatatctttcttttataaaaaatatctga

SEQ ID NO: 2714 - DNA, 531 bp, Enterococcus faecalis
ggacactgctgtgtgcatgccaatgaacacgattcaaagcatcgttttaatattgaagggatgaggaagcaacgatttgattttccaacatcaaagaatgtattattagcagcaaaagcagctggatacattggcaaccaagacacctattggttactgtttgataagttacaagaaggtttatttgtgagaagtttaaatattgaagagccagaagtaattgagaagctagtaaaagagacaacgattgattttgctttatggaaagaagctgttgcttccgaggctgtttggacggcggttcaagaagattttgcgctagcttctgcttatggtttacaaggagttcccgcactaatcattaatcaaaaatatctaattaatggtgcagtaccgaaacagcaaatcagccaaactattcaaaaaattctcgcagaagaaaaacaacagcaaccgttagtttcattaactccttcttctgaagagtcagcttcgtgtgagtttaaggaaggcacatggacgtgtcattaa

SEQ ID NO: 2715 - DNA, 411 bp, Enterococcus faecalis
tgcgggggtgataatatgtttaacgcatatagagaatactggaataatattacaacaatgaatgcgtcagcaacacgagcacaatattggtggccacaattaattaattatttggtgttagggatttattcagcaattacgggcgtttacagatatattgaagtaacacccaatgatggaacaatcattaaagaatggaatactgtgaccattatatttttcttgctgactgctttaatttggttggcaaactttactgttcgagcaagaagattgcatgatcgcgaccacagtaactggtggattttattctatttacttccttttatcggtactttagtgatcttcattacattaattttgccaagtaaaagtcacacaagatggccagtgaatcaatcagaaatttaa

SEQ ID NO: 2716 - DNA, 1554 bp, Enterococcus faecalis
tctgataattattatacagagaaggaactcattaaatcacaccagctttcataccaagcggtttcatttctgaaattgcgttattgtttcgatgattgtttcattaaagtaaaggacttgggaggaaacaatatgattaggtttttagaaaaaaattatcggaaaatggaagaaatcattcgtgtcttatccatttctgataaatggatgactaaaaaagaacttgcaaaatatattggtagttctgagtctacttttattcgttatattgaggagattaaacagcgttggggcgaaagtttaaccattaaaacatcgcataaattaggctatcgtttagaaaactttaatgtgtccttatatttaaacgtgctgacggatatggcaaaaacgtcaacgaccacccaattgctccatgagtttatccaaaatcctggcaaaaccatcgaatattattgcgataccatcaatattagtcgctcttcttttgctcgaaaattgaagcagtgtaaccaggtcttggaaacttactctcttcgcgttatcgttgatcaaggctatcaattaactagccaaacagaagaattgcctttacgtatttttacaacctttttctttttaatgtattatggtcattatgaattgccttatcaattagataagcaggaaatcaaacaattaatgcgtcgtaatcaatgccaattaaatattattagtatggataacagttatgaacacgatttctttattatgtattttattgttgatttattaagagagcatcaaggatttcaacaacgtttccagaaaaaaacagataaaaagagtccaatcaaaatggaagattatcttttactcagtcgtcatttcactggactcagccgtgaaacctatcgggaagttctccgatattttcaaagaggcgcttttcagcaatactactccgaagaccaagaagtcatcagtcaaagaatacgtgaaaatttaaaatttaatgctttttcacagattgaacaattaacagaagaagtcgtcgacttcgctgttcacttgttaacctgtctttatttgttttctcaattagtgccttttgacacctccgaattgacacaaagggccacctttttcactcgacaaattcattttactcagcttcacttatatgaacgattaaaagcagaattgcatttcttttccgctcttttagaaacaaatctattaaactattcatcttcttatattttttggttgcttaatacttttccagaaattaaccagagtttcgactcaaaaaagattttgattattagcgacatgggcctgaatcatagtcaatatattggaaactatgtccacgatattttagctttgcatcggattcgttcaaatacgttagcaattacggaagaacaattaggtgaccatcgactcgaagaatttgacttgattattaccaatcaaccaattattgaaaccagtgttccaagtattttaattaatgatgctatcttattttctaacaaaagagaattgctcgatttattaaacttttaa

SEQ ID NO: 2717 - DNA, 3465 bp, Enterococcus faecalis
ctgttaattcataaaagaaaggagagaacagacattaaattactaaagaaatttggggttttcggcgtagtctttttacttgtctcatcctatttcataccgctcattggctatgcagaaacagccaaagaagttgaaattacatccgctcaaatgataacagatgagaatgataaaacgaatattaatatcgagttaaatcttctcaaccaaacagagcagccattacaacgagaaattcaattgaaaaatgcacagttcatggatactgctgtaattgaaaaagacggatattcttaccaagtgactaatggtacgctttatctgactttggacgcacaagtaaaaaagccggtacagctttcgttagctgttgagcaaagttcgcttcaaacagctcagccacctaagttattgtatgaaaacaacgaatatgatgtttcagttacttctgaaaaaataacagtagaggattctgctaaagaatcaactgaaccagaaaaaataactgtaccagaaaatacgaaagaaactaacaaaaatgattcggctccagaaaaaacagaacagccgaccgcaacagaagaggtaaccaatccatttgcagaagcaagaatggcgccagctactttgagagcgaatctggcactgcctttaattgcaccacaatacacgacggataattctgggacttatccgacagctaattggcagcccacaggcaatcaaaatgtgttaaaccatcaagggaataaagacggtagtgcacaatgggacggccaaacgagttggaatggggaccctactaatcgcacaaattcttatattgagtatggcggtacaggagaccaagccgattatgccatccgaaaatatgctagagaaacaacaacaccagggctttttgatgtatatcttaatgtgcgtgggaatgttcagaaagaaatcacgccattggatttggtcttagtcgttgactggtccggtagtatgaatgaaaacaatcggattggtgaagttcaaaaaggagtgaaccgttttgttgatacattggcagatagcggtattaccaataacatcaacatgggctatgttggctactcaagtgacggttataataacaacgccattcaaatggggccgtttgatacagtcaaaaatccaattaaaaatattacgccaagtagcactagaggaggaactttcactcaaaaagcattaagagatgctggtgatatgttagcaacgccaaatggacataagaaagtcattgtacttttaacggatggcgtcccaaccttctcttataaagtgagtcgagttcaaacagaggcggatggtcgcttttacgggacacaatttacgaatctacaagatcaaccaggtagcacttcttatatctctggtagctataaagcgccagatcaaaacaatatcaataaacggattaacagtacgtttatcgccacgataggtgaggcaatggccttaaaacaacgtgggattgaaatacatggattgggcattcaattgcaaagcgatccacgagctaatttatctaaacaacaagttgaagataaaatgcgtgagatggtgtcagccgatgaaaatggagacctttattatgaatccgcggattatgcaccagacatttctgattatttagcgaaaaaagccgttcagatttcaggaacggttgtaaacggaaaagtagttgatccaattgctgaaccttttaaatacgagccaaatacattatcaatgaaaagtgtgggtcctgttcaggttcaaacattaccagaagtgtcgctaacaggcgctacaattaatagtaatgagatttatttgggtaaagggcaagaaattcaaattcattatcaagtacgtattcaaacagagtcagaaaacttcaaacctgatttttggtatcaaatgaatggtcggacaacgtttcagccattagccacggcccctgaaaaagttgattttggggttccttcgggaaaagcacctggcgtgaagttaaacgtgaaaaaaatctgggaagagtatgatcaagacccgacaagtcggccagataatgtgatttatgaaattagtagaaagcaagtaactgacacagccaactggcaaactgggtatattaaattatcaaaaccagaaaatgataccagcaatagttgggagcgcaaaaatgtaacccaactttccaaaaccgcggatgaaagctatcaagaagttcttgggcttccccaatacaacaatcaaggacaagctttcaattatcaaacaacccgtgaattagcagttcctggttacagtcaagaaaaaatcgacgatactacttggaaaaacacgaagcagttcaagccattagatttaaaagtaatcaaaaattcttcctcaggtgagaaaaacttagtgggagccgtctttgaattgagtggtaaaaatgttcaaacaacattagtggacaataaagatggtagctattccttgccaaaagatgtgcgcctacaaaaaggggaacgctatacattaactgaagtaaaagcacctgcaggacatgagttaggcaagaaaacgacttggcaaattgaggtgagtgagcaaggcaaagtaagcatcgatggacaagaagtgaccaccacaaatcaagttattccattggaaattgaaaataaattttcttctttgccaatcagaattagaaaatacaccatgcaaaatggcaaacaagtgaacttagcagaggcgacttttgcgttgcaaagaaaaaatgctcaaggaagttaccaaactgtggcaactcaaaaaacagatactacaggattgagctattttaaaattagtgaacctggtgagtatcgaatggtggaacaatcaggaccattaggctacgacactcttgctggaaattatgaatttactgttgataaatatgggaaaattcactatgcaggcaaaaatattgaagaaaatgcgccagaatggacactgacacatcaaaataatttgaaaccttttgacttaacagttcataaaaaagccgataatcagacgccacttaaaggagcgaaattccgtttaacaggaccagatacggatattgaattaccaaaagatggcaaagaaacggatacttttgtttttgaaaacttaaaaccagggaaatatgttctaacagaaacctttacgccagaaggatatcaggggttaaaagaaccaatcgaattaataattcgtgaagatggttcagtcacgatagatggggaaaaagtagcagatgttttaatttctggagagaagaataatcaaattactttagacgttacgaaccaagcaaaggttcctttacctgaaactggtggcataggacgcttgtggttttacttgatagcgattagtacattcgtgatagcgggtgtttatctctttattagacgaccagaagggagtgtgtaa

SEQ ID NO: 2718 - DNA, 1434 bp, Enterococcus faecalis
tcaatgaaaaacgcacgttggttaagtatttgcgtcatgctactcgctcttttcgggttttcacagcaagcattagcagaggcatcgcaagcaagcgttcaagttacgttgcacaaattattgttccctgatggtcaattaccagaacagcagcaaaacacaggggaagagggaacgctgcttcaaaattatcggggcttaaatgacgtcacttatcaagtctatgatgtgacggatccgttttatcagcttcgttctgaaggaaaaacggtccaagaggcacagcgtcaattagcagaaaccggtgcaacaaatagaaaaccgatcgcagaagataaaacacagacaataaatggagaagatggagtggtttctttttcattagctagcaaagattcgcagcaacgagataaagcctatttatttgttgaagcggaagcaccagaagtggtaaaggaaaaagctagcaacctagtagtgattttgcctgttcaagatccacaagggcaatcgttaacgcatattcatttatatccaaaaaatgaagaaaatgcctatgacttaccaccacttgaaaaaacggtactcgataagcaacaaggctttaatcaaggagagcacattaactatcagttaacgactcagattccagcgaatattttaggatatcaggaattccgtttgtcagataaggcggatacaacgttgacacttttaccagaatcaattgaggtaaaagtggctggaaaaacagttactacaggttacacactgacgacgcaaaagcatggatttacgcttgatttttcaattaaagacttacaaaactttgcaaatcaaacaatgactgtgtcgtatcaaatgcgtttagaaaagaccgctgaacctgacactgcgattaacaacgaaggacaattagtcacggacaaacataccttgactaaaagagccacagttcgtacaggcggcaagtcttttgtcaaagttgatagtgaaaatgcgaaaatcaccttgccagaggctgtttttatcgtcaaaaatcaagcgggggaatacctcaatgaaacagcaaacgggtatcgttggcaaaaagaaaaagcattagctaaaaaattcacgtctaatcaagccggtgaattttcagttaaaggcttaaaagatggccagtacttcttggaagaaatctctgcaccaaaaggttatcttctgaatcaaacagaaattccttttacggtgggaaaaaattcttatgcaacgaacggacaacgaacagcaccgttacatgtaatcaataaaaaagtaaaagagtcaggcttcttaccaaaaacaaatgaagaacgttctatttggttgacgattgcaggcctgctaatcattgggatggtagtcatttggctattttatcaaaaacaaaaaagaggagagagaaaatga

SEQ ID NO: 2719 - DNA, 1980 bp, Enterococcus faecalis
agaacgttctatttggttgacgattgcaggcctgctaatcattgggatggtagtcatttggctattttatcaaaaacaaaaaagaggagagagaaaatgaagcaattaaaaaaagtttggtacaccgttagtaccttgttactaattttgccacttttcacaagtgtattagggacaacaactgcatttgcagaagaaaatggggagagcgcacagctcgtgattcacaaaaagaaaatgacggatttaccagatccgcttattcaaaatagcgggaaagaaatgagcgagtttgataaatatcaaggactggcagatgtgacgtttagtatttataacgtgacgaacgaattttacgagcaacgagcggcaggcgcaagcgttgatgcagctaaacaagctgtccaaagtttaactcctgggaaacctgttgctcaaggaaccaccgatgcaaatgggaatgtcactgttcagttacctaaaaaacaaaatggtaaagatgcagtgtataccattaaagaagaaccaaaagagggtgtagttgctgctacgaatatggtggtggcgttcccagtttacgaaatgatcaagcaaacagatggttcctataaatatggaacagaagaattagcggttgttcatatttatcctaaaaatgtggtagccaatgatggtagtttacatgtgaaaaaagtaggaactgctgaaaatgaaggattaaatggcgcagaatttgttatttctaaaagcgaaggctcaccaggcacagtaaaatatatccaaggagtcaaagatggattatatacatggacaacggataaagaacaagcaaaacgctttattactgggaaaagttatgaaattggcgaaaatgatttcacagaagcagagaatggaacgggagaattaacagttaaaaatcttgaggttggttcgtatattttagaagaagtaaaagctccaaataatgcagaattaattgaaaatcaaacaaaaacaccatttacaattgaagcaaacaatcaaacacctgttgaaaaaacagtcaaaaatgatacctctaaagttgataaaacaacaccaagcttagatggtaaagatgtggcaattggcgaaaaaattaaatatcaaatttctgtaaatattccattggggattgcagacaaagaaggcgacgctaataaatacgtcaaattcaatttagttgataaacatgatgcagccttaacttttgataacgtgacttctggagagtatgcttatgcgttatatgatggggatacagtgattgctcctgaaaattatcaagtgactgaacaagcaaatggcttcactgtcgccgttaatccagcgtatattcctacgctaacaccaggcggcacactaaaattcgtttactttatgcatttaaatgaaaaagcagatcctacgaaaggctttaaaaatgaggcgaatgttgataacggtcataccgacgaccaaacaccaccaactgttgaagttgtgacaggtgggaaacgtttcattaaagtcgatggcgatgtgacagcgacacaagccttggcgggagcttcctttgtcgtccgtgatcaaaacagcgacacagcaaattatttgaaaatcgatgaaacaacgaaagcagcaacttgggtgaaaacaaaagctgaagcaactacttttacaacaacggctgatggattagttgatatcacagggcttaaatacggtacctattatttagaagaaactgtagctcctgatgattatgtcttgttaacaaatcggattgaatttgtggtcaatgaacaatcatatggcacaacagaaaacctagtttcaccagaaaaagtaccaaacaaacacaaaggtaccttaccttcaacaggtggcaaaggaatctacgtttacttaggaagtggcgcagtcttgctacttattgcaggagtctactttgctagacgtagaaaagaaaatgcttaa

SEQ ID NO: 2720 - DNA, 948 bp, Enterococcus faecalis
tttctagcatcaccgaagaaatttttagaaaaacaaagagcctgggccaatcactgtcccaggctctcatgctttatttttaaggaggaagcaatgaagtcaaaaaagaaacgtcgtatcattgatggttttatgattcttttactgattattggaataggtgcatttgcgtatccttttgttagcgatgcattaaataactatctggatcaacaaattatcgctcattatcaagcaaaagcaagccaagaaaacaccaaagaaatggctgaacttcaagaaaaaatggaaaagaaaaaccaagaattagcgaaaaaaggcagcaatcctggattagatcctttttctgaaacgcaaaaaacaacgaaaaaaccagacaaatcctattttgaaagtcatacgattggtgttttaaccattccaaaaataaatgtccgtttaccaatttttgataaaacgaatgcattgctattggaaaaaggaagctccttgttagaaggaacctcctatcctacaggtggtacgaatacacatgcggtcatttcaggccatcgtggtctccctcaagccaaattatttacagatttgccagaattaaaaaaaggcgatgaattttatatcgaagtcaatgggaagacgcttgcttatcaagtagatcaaataaaaaccgttgaaccaactgatacaaaagatttacacattgagtctggccaagatctcgtcactttattaacttgcacaccgtatatgataaacagtcatcggttattagttcgaggacatcgtatcccatatcaaccagaaaaagcagcagcggggatgaaaaaagtggcacaacaacaaaatttactattatggacattacttttaattgcctgtgcgttaattattagcggcttcattatctggtacaagcgacggaaaaagacgaccagaaaaccaaagtag

SEQ ID NO: 2721 - DNA, 345 bp, Enterococcus faecalis
agagtagacaaaaacagattcattatctctgataagaaatggtggtttattatgcgtgctaagttatttttaattttgcggaatcgagtgttatcccgtgttgtctttgtcattctatttttacatgtgctttttaccacaaatgatttcacggtgttgctactcctcttactattgaattatttactcacgcttgaggatagcgcgaaaaaaaacagaaaaatccaaacttggcaggaatttaaacagtcgattgattggccctttgtcgctttttattcagggcttgctcttttagttatttcgttaatacttctgtttctctggttcaattatgcacgataa

SEQ ID NO: 2722 - DNA, 258 bp, Enterococcus faecalis
ataaagaataaacgtgttactcttggcttatcaaatttggaaggagtgttaaaaatgaaatatctggatattattgctttaattttattgattgtcggaggtttaaactggttattagttggtgcatttaattttgatttagttgcaacaattagtggcggtgcaaccacaccattagcaaaaattatctatattattgtcggaatttgtgcgatttattctattaagtttttagctcctttgttccgcgaaccatag

SEQ ID NO: 2723 - DNA, 630 bp, Enterococcus faecalis
  misc_feature (593)..(593): Nucleotide 593 is "n" wherein "n" = any nucleotide.
gaaaaatcagctctaggatatataggaaaatataagcatcaaatagggatttcgatgataaattatctttttccttgttatgattataacaaggaaaaagaaagtagggatttatttatggaattacaggtgacaaaaaaggctaaatttttttgtttggcgatggcattactaatgacattaggtatttttatcagcgctggtacaagtgtttatgcatctgaccagctagaggattcagaagttgaggctgtagcaaaaggactggaagaaatgtatgcgaatggagtgacggaagataactttaaaaactatgtcaaaaataattttgctcagcaagagatttcttcagttgaggaagaattaaatgtaaatatttctgatgcttcaacagtagttcaagcacgttttaattggaatgcattaggaagttgcgttgctaacaaaatcaaagatgagttttttgcaatgattagtatcagcgcaattgtaaaagctgcacaaaagaaagcctggaaagaattagcagtgactgtattacgcttcgctaaagccaatgggttaaagacgaatgctattattgtagctggacnactagctttatgggcagttcaatgtgggctaagctaa

SEQ ID NO: 2724 - DNA, 771 bp, Enterococcus faecalis
acactcttctactactggatacttctattatgtgtaacaatagaagaaccaaataggagatatttcctattacaaggggaaaaaatgcttaaaacagcttaccaacgatcaccgaaacaagaattagctaaaaatacgcctttttttaatgaaactgatttaacacacagttttattatcgattttgaaaatcaagaattcattcatcaccaagcagagccattaaattatcttttttatttaatcaaaggaaaagcgaaaattttaaaaacagaacgcaatggccgccaatccattgttcagtttttaacggcaggtgatttaattggcgatttaacattagttcaagcggaaacgataaccaaggacgttatcgccttaggtgaaacctgttgtttggctgtacctttagcttacgcagaaactgttttaaaaaacaaggtgctttttatgcagcaactcagccattatctagggaaaaaaatgcttcaacgggtggaccactttacaacgaatcagacctatgaactaagttatcggctagcggaattgctattggttgccgctaatcacgaagatgtttataaagaaaaacatactgagattgccgaatacttaggggttagttatcgccatcttatttataccttcaaacaatttcgagagcgcggctttattcaaaaacaaggaactgcttatcacatcaaccgcttagcgttacattcttttgtgacaaagactgaagagttagtcctcaacacgggttgtgac

SEQ ID NO: 2725 - DNA, 192 bp, Enterococcus faecalis
aaggaattccccacaaaatcaaaggaacaattctacccaaataattttggaaaccaagggacccaattaatgggtataaggaaaaatttaggacaaaaccaaaccccatttaaccccaccaaaataatcaattgtcccggattttacggtgcttatctaacaacccacaagggcttaaaaaggggaaattga

SEQ ID NO: 2726 - DNA, 489 bp, Enterococcus faecalis
gccaaccccttggttaagactagtacgaagatgcttcagaatgaagaaacggtccgctatgtgtttttgaaaaatcaaacaatcgctgaaacaagacaaaacattgctaaattttttatgggggaacctttaggaaaatatgggattgaagtgaaagaaacgggcgaaatgattggcacgattgatttgcgggtctatgaaacccataatattggagaattaggctatgtcttgaaccgtaccttttggggcaatggctacatgcctgaagccgcgacagcgttagttgaactgggttttgccaaaatgaaactcatgagaatctttgctttacatgatcaagacaatccatcttctggtcgtgtcatggagaaaattggttttacctacgaaggaacactacccaatgctcgaattagtaaagggaaaattgtcacagatgtttatcgtgggatgacactggaaacatggcaaaatcgaccaaaatag

SEQ ID NO: 2727 - DNA, 588 bp, Enterococcus faecalis
ttcgcagcctttgaagttgctggattagatgaacgaatggcggttatccgtgcgcaaattcaacctatttttcaagaattagacacgtattttgccgaacaactagcgcctgaactaggaacggagttgtttgtccatattgcgcaacatcgccgtcgcaccgtgtatccgccagaaaatacttggtcagcacttagtccgaataagcgcgggtataaaatgcagccgcattttcaattaggcatttggggcgactatgtgtttatgtggttgtcattcattgataatcctaaaaatgaaaagcagattgcgcaagcctttttagagaatcagcaattattccaagcattaccagaagatacgtatgtttccttggatcatacggttcctcaaattactccgctgccagaaacggatttagagaaagccttaactcgttttagagatgtaaaaaaaggtgagtttgaaattgggcgcatcattcccaaagatagtgacttgtggcaaaaccctgaaaaagcacgagcttatatgttggcaacctatcaacaactcctgccattgtatcaattagctgttgcccaataa

SEQ ID NO: 2728 - DNA, 4320 bp, Enterococcus faecalis
ttggtcttgtcggaatggtccagagaaagaagggacgacatgaagcaaactaagtggcaacgattagcaaccattggcttgtgtagttctttagtgattaacgccttttctggcgcgaccgcagttgcggaaacaatcacgattgaaagtagtccgacagtagcaagtagcgctaaggaagcaacatcagcaagtagcgcaacgccagaaagtacggaaagcagtcaagaaacgactgaaacgagtcgggaagaagtgacacaggaaacagtggaacaagaagatacaacggaaatagctcaagaagaaaatctgctggaaccatctggtattcaagcgaaaattatgcctagagcatttgtctgggcagctacaggaaccacgaatagaaccacggttcgtcttaacgatgtagttgattatcgaatgaaactggaaaatattacaacagatgatacaaattcagatattgttggtccgattcgaattgaatcaaaattggcagctggaatgactagaccaacgtcagttattatcaaagttggccccgaggaacaaaatgtagttataggagaaggctctcataatgccaatagtggtggcgaatattttgtttggacagagtcgactaggacggtcactgcatttatcaatcgtctacacgggcgaacttctggaaatactgggtatatcaaaacattgtattttcagacaagaattacttcgggtacacacaacgaaaaaaaatatatcgattccacgattcgatttaatggatttggcgcagtgaatagacgaaatgaaatgacgtatgtggatagattttctggtaacttaggtttgaaagggaatttaaaattttacgatgaggatggagtggctagtaaggaacaaatgagtctttccataaacccagtattatttaaatcaaccaattcgagagtagaagggacgctgttaagatatcctttaactatgacaaatgctggtagtgggctttataggtttgatacaggactaaaaaatataggtactagtaacgggggttcgtggtttttctttagtaacgatattgcgattaattttgctacagctaccaccaatagaattgataaaattgtgttagcaccacctaaagcaacacttccagacagccgaacaggtgtgatgacttccagagcgtacacatcaacaacttatacgagaagtaactatgatatttcaacatataactttactaaagcgactggtaagacatggcgtataacgaatcgtagttctaatagcggagtaagcaccaatattatgtttagtaacaatcttgtaggaacaacaggacagttcaataaagggaattctggtgctactattaattattatatttattacaaaaagctttatgagaattttgttaatagtaacggacaaaaaattacaccaccatcaggattcacacaaggaaagcgaacggttattaatagtgaagcgtacacttttaaacaaagtggcaccttgccagatacctatcaagcagacggcaaaacctataagttcaaaggttggtacaaaggcaaaaccaagccaaacaccttgaccaccaccaaagcaccaagctatgcggtgacttataacaatgatgatgatttgacggtggtgtatgaggagattgagttttttgacttcccagcgctgacctatcaattcgggttcgtggacgagtctggcaaacgagtagatgcttcaacaattgggttgacttatgacaaatggcgtggggagttgttaacaaataatgtcaatgactggaaaacagtcagtcttgaaaaaggtcaagttgcaccaaccaaaaacaatttgaaggaaattgcttatcctgcgcaatctcttgaaatactgagtgatcgaagtacacaatatagtgcggctaatttaacctttacactgcccaaatactatgggaaaatcagtgtttataacaagagtggtacttttgatgcaggctacctgtttccaaatatccaaaataataatagttcagaaccatctgttgaaggcttacacaaaaatctttctagctggtttgaactaaagaaaagtgggaaccaatcgtttgtttttaacaaaccgattccagcagcaccaatcgatgttcaggtgcctgcttacttgcgagagattgtctataatcccgatctgatatcaaatacagccgtctattatgtaatagataaacctgtctactactatttaaccaaccgcaaagtcaccgaaaacttcgtagacacaagcggtgccaaaattacaccaccaacaggtttcacccaaggaaaacaaacagcgattaccagtgacccatacaccttcaaacaagcaggtaccttacctgatacctacacaacaggcggtaagacctacaagttcaaaggctggtacaaagggaaaaccaaaaccgagcctttaaccacgacgaaagcaccaagttatggggtaacctataatgataatgatgatttgaatgtggtgtatgaagaagtaacagctatttatccagggttctatgcgcaatttgttgatgaacaaggcaaagcttttactaattcgctaactctttctgaaaattatactgagtttctcagaaagacaggcactactgtttttgaaacgaagggcgccttttacccaatggtaggtaagcgcgatgcaacagtgacaaataagtataagattgaaacaacgagtagtgttgcagtaccaaataattattggacagccatgcctgctgacattgctaatagagggtacgcattaaataacttggatattaccaatcaaatgaaatatgttgacaagatagaaactactgacacgcacactacaatgtacgattatactggagtttcggacattgggggcaaaccaaacaatgcttctcagacagaattaaatcctattgataaaacatttgttaagcaaacagataacacttttgcgataaaatcaatttggggaaatggaacgttttcgcatatagttcccaaaatgttattgttagcagaaagtggcagtttttcaagattattcgggtttgatggtactccagactacaagcaaaccgtaaactacaaagtcacccgtaaacaagtcaccgaaaactttgttgatgccaacggtgccaaaatcaccgcaccaacaggcttcacccaaggcaacaaaatacccatgactagcaacaccttcaagtacacagccgcaaaagccttgccagcaacttataccgcaggtggcaagacctatactttccaaggctggtacaaaggcaaaacgaagcctaatactttaacaaccagcactacgccaacatataacacaacttttgatggcaatgacgacatgacggcgatttataaggaagaagtgcccaaagcaagtgtcgctttaacgcgcactaccgctgaaaccgtgactagcggcggcaatgtcacctggcgcgccacaattaccaatacaagccaagcaccactaaccacggcgaccatcaagaaatcaaccgcttggacaactggcttagcagcaccaaccgccatgattgtcacgccagctggcggaaccgcaaaaacagttcccgtcacagcgactacgtggaccaacggtgttagcttaggcactgacattcccgtaggaaaatctgccacggttcagttcactacgaaagcgacggggacagcggggcaagtcttgcgcgctgggattaccaccagtgggaattacagtggtgtttctacttcggccaccgtacgtgtgaaagacaatgatcaagcaattgtaacaccaacggctgaaggcttcatcagtgttccaaccttcaattttggtcaagttggggtagcgggaagcacgcaacagcacagcttgaaaaaagccgctgattattatggcaacggcacacgcaatccctatctgcggatcaagaaaacccaagcgaattggagcttaacggcgcaactgtcgcaaccgaaatcagcgacagacagcttgccaacagcgacccgcttattattaggggcggctcctgtttcgagtttctcaaattacaaccaacctaccgagttgaaaaatgcggtcggtactacgagtgccattagtttgaatgccaacaacacggccactaggattattgccaatcaacaattcactgggagtaatatctatcagttggacttcaccttcaacaatgtcaaacttgaagtgccagccaaccaaggggtcaaggggcaacaataccaagccgcaattacgtggaacctagttacaggtccttaa

SEQ ID NO: 2729 - DNA, 294 bp, Enterococcus faecalis
accgtggcagattttcctacgggaatgtcagtgcctaagctaacaccgttggtccacgtagtcgctgtgacgggaactgtttttgcggttccgccagctggcgtgacaatcatggcggttggtgctgctaagccagttgtccaagcggttgatttcttgatggtcgccgtggttagtggtgcttggcttgtattggtaattgtggcgcgccaggtgacattgccgccgctagtcacggtttcagcggtagtgcgcgttaaagcgacacttgctttgggcacttcttccttataa

SEQ ID NO: 2730 - DNA, 219 bp, Enterococcus faecalis
gttccacgtaattgcggcttggtattgttgccccttgaccccttggttggctggcacttcaagtttgacattgttgaaggtgaagtccaactgatagatattactcccagtgaattgttgattggcaataatcctagtggccgtgttgttggcattcaaactaatggcactcgtagtaccgaccgcatttttcaactcggtaggttggttgtaatttga

SEQ ID NO: 2731 - DNA, 3318 bp, Enterococcus faecalis
ccttcatcggcttggcgggaatggtacatagaaagaagggacgacatgaagagaattaactggcaacgcttagcaaccattggcttgtgtagttctttagtgattaacgccttttttggcgtaacagccattgcggaaacagtcacgagtgaaagtagcccgacagtggcaaatagtattaaggaagcaacaccagcaagtagcgcaaggcaagaaagtacggaaagcagtcaagaaacgactgaaacgagtcgggaaaaagtaacacaggaaacagcgaaacaagcagagacaaaagcgccactggaaacaccagagataaaaacaaacacaacagcacaacctgcagaaaatagtagtgaaaatgaccgacaaacgagtatttcgccacgttgggtgccgaataatcaagtgatttatccgagaataaccttggctttcactaatgaatcagggcaagcttttgctgatgaaaacttaacgttatcagggacgtatactaaatttggatatgaagacgcaactagtttatggcgaccatatgcggttaattatccaattacttcttctaatgcaggtggtggtcaatatcgagtagctgtcaatgcaacggttcctttaccatacgattttttcacagatttaccagcaaattataggatgaatatatacgcggttgaacaattaaagattgataacacgctaaagtatgtcgacagtattgttgctgtgcccgattctacactgaggatgaccagatatagtgcgcaacaaacaactgagttaccgcagtttggaaatcatatgactccttttgtattacgcacaagagatagcatattttctaaaagcagtgaaaatgttttctctctaaacacggatggtaatgaatttttaagaatcctgagtgtcgcccccattggcactccagtagaaccagtattatacggatttgatggcactgcaacgtaccgagaaacacttaattacgtagtcactcggaaacaagtcaccgagaagttcgtagatgctaacggcgtagctatcacgccgccaacaggttttacccaaaacaagaaaacaccaatgaccagcaatgacttcaccttcaaacaagctagtactttgccggacacctatcaagcagacggcaaaacctacaaattcaaaggctggtacaaaggcaaaaccaagccaaataccttgaccaccaccaaagcgccaagctatgcggtgacctatgatgggaatgacgatttgacggtggtgtatgaggcgattcaagaaggaaaaggaatgtcatctgttcaggtgatgaataaggcgattcagaatccagtgactttgcctgatcgcatgtatcgtgtcctatttatcaatgaaacaggggggctgacatttgctgatcgttatggctttactggagaattagttgaggttgcggatggcaaagtgacgccaattggcccagtcccgactaacaataatagcgcagtaaaagaaatcactataccaggtcgggttttcgatacagaaagacctacgccgttgcaatatggagttcgcaatgcaacctttacgttgcccaaaatgtataaaaccgtaacgtatcaacctggcccaaattatacaggtacagcctactctattccagaaacgtatcgtcttagtttaagaagtggtgtcaaaagtgacatcgatacaactggatggcgaattggtcttgacccgacaacagatccacaaaagtttacgatgagcggtatatactggtcatcaatgcctataaatgttagacttgcaacactattaagtgcgactattactggtaaaggagtagaaccgagtgtctatacactagatgaaaatgcacgtatgtatctttacctagaaaatcgtcgtgttacggaaaacttcgtagataccaatggtactaaaatcaccgcaccgtcaggtttcgcccaagggaaaaaaacagtaattactagtgattcgtacacctttaagcaaagcggagatttgccagatacctataaagtcggcacgaaaacctatcagttcaaaggctggtacaaaggtaaaaacaaaccagacaccttgacgacgactaaagctcccagttatccagtcacttataatgatgatgatgatttgacggttgtctatgaagaagtcgtgatgaaaacgtataatttaccagccaaagatgtgtactttggttatgttgatgaggcagataacctattgaatacagcaggcttttctgtagaagccgaattaggtgaaagtgacgaaactgaatcaacagtattagggaaaatccaaggaactgatgaagtgatgagtaaattaaaaaaattatcgattcctggcaagtcatatgatttcccgatagataagcttaagacatacggtgcaaggtctgttaatcatacaattcctaaacaatataagacaatgtcgattacaccgctagctacttatacgggagacaaaacaaagtatcctatgagcaaagagatccggaaaaatatagaagcgccatatacggttgtttctcaagctgacggagcagaagccttcaaattaactgacgctggaactttttttagaaccagacgagctttttggacatgggacccgaataacacgttgtatgctatgggaatttattcagggacagtcggaaaaaactataacctagcttctccagagggaacaatctactattatttagaaaatcgccgagtcactgaaaactttgtggatccaagcggcgctaaaattacaccgccaacaggcttcacgcaaggaaaacaaacagtgattgatagtgataatttcacttacgctagtacgaaagccttaccagacacttatacaacaggagacaaattctataagttcagaggctggtacaaaggtaaaaccaaaccaggcaccttgacaacgactaaaacaccaagttacgccgtgacttacgacgataaagatgacatgacagcggtttatgaggaagtccaaccaacagcagaaatgacggttagtcggttactagaagtgatcccaaatgaagcttttatggtttggacagttagactaaaaaacaccagtgaagttccattgaccaacgttaaaatagccccaactgccaaatgggcggcaggtatttcaccaccaacacaattagctgttcgcattggtaatacaccaaataaaattattccagtgacggcagaacaatggcaagcaggagttaacttagatatagagattcatgtgaacggggcagccttagtgacaattcaccacggaatg

SEQ ID NO: 2732 - DNA, 390 bp, Enterococcus faecalis
atggaaatcaggcaagacggatatgaagtaaatgataaagaggttaccaaaactatgcttgcggaaaaagtagataccggaaagtttccagaaagtactaagtttacttttgcagaaatcaattatgataaagatgagaatatcaatgggaaacacaatgaggatctaaaagaaaaaaatcaaaccttaacgcccaaaaaagttccaaccacaccacgtacgccgaaacaaccggaaacaccaactgttccaagtggctatcaagaatctagtcccacagtgaagacattccctcaaactggggagaaaaattccaatgttttactgttcattggttttactttgatttttgcgacggcgggctattatttctggaatcgccgtaactaa

SEQ ID NO: 2733 - DNA, 330 bp, Enterococcus faecalis
aaagaggaaaagaagatggaattgaaatttgttgtgccagatatggccgaaacgtttggaaagttaagttatgccggtgaaggagaaattttaacagaaggatatggacggaatactacggtgattggtcgcagttaccatctatactccagcaaacaacgggccgatgatattgaggtggtagtagctgcggaagccggtgaaaaggattttgatcaagaccaaccgctaaaagccgtgaatccccatttggttgccaaaggctatgagattgaaaatcgtgggtttactgattacgtgttgtatgttgatgatttagtgaaagaatag

SEQ ID NO: 2734 - DNA, 387 bp, Enterococcus faecalis
gaggaaaagaagatgagattaacagaaggtattgtagtagattcaggactaacgtttggcaagttgcgtttttctgcattacgccgagaagttcggaaacaaaatgaggatggaacggttagtaatgaggtcaaagaacgaacctataatttgaaatcctcagcacaagggcgaatgattcaagttagtatcccggctaatgtgcccttacgcgagtttgcttatgatgcagaggtagagttggtcaatccaatcgtggatacagtcgccaattatgtttttcgagaaggaactactgtcaattggtttattaaggcagacgatttagtcttgaaacgacaaccaaatcaaggaaattgtacgaaccaaattgaaggaaagaaatag

SEQ ID NO: 2735 - DNA, 354 bp, Enterococcus faecalis
gtgaagattatggaaattaatgttgaacatattttagattgtctcgatcaatatggaaaaggtgagttaactgaggaacaactcgttaaagcattaacctatgatgaaaaaatgtttctgattatgcatcaaggtttacttggagaaaatagcgacagtgaagacgactttgatgtacaagactggttagaagaagaagagtccttctttatggttgtcgaagtaaatgaaaacttatgtcggcaggcagaatccgtcttggaagaaatcggtgtggagatgccagatgccattgaaggctttttaaatcaattggttgaaaagaaacaattccccgtagtaataaatagctag

SEQ ID NO: 2736 - DNA, 1038 bp, Enterococcus faecalis
tcggaggtggaaaccatcaaaatgtacaaagaacatcgcatacgtgcaagagatcagcatttggtttatcactttattcttggctggctaattgctttgttaatcagttggatgggtgtcttttattttcaagagtttagacaatttgatatttctagggtatcactttctactattgaaactgtttggtccatgaaggagttaatctgcttacttggaagtctcggtttttcaggagctatgctgttgctttatattcacttttttcctgatcattggcgaagcttgtggcatcggcaaaaactagctcggatgattctagaaaaccattggtatgaagtgaaacaaactcaaagtgagggctttttcaaagatttaaatagtagtcgaaccagagagactatcagttacttccccaaaatctattatcgaatgaaggagggtttactttctattcgcgttcaaatttcactagggaaatatcaggagcagctattgaagttggaaaagaagctagaaagtggattgtattgtgagttagtagaaaaggaactcaaagactcctatgtggagtatactttactgtatgatatgatcgccaatcgaattgggatagacgaagtagtggcagaaaatgggactctgcgattgatgaaaaatcaagtatgggcttatgattctttaccccatatgttaatcgctggtggcacaggtggggggaagacctatttcctcctcaccattatcgaagcactattgaagtcagatgcagaattgtttatcctcgatcccaaaaatgcagatttagctgatttaggtacggtgatgcctcacgtatattctcaaaaggaagaaatttctgcttgtgtggaagatttttatgaacgcatgatagctcgtagtaaggcaatgaaagaaatgcccaactacaaaccaggagaaaattatgcctatcttggacttccaccaaactttttaatctttgatgaatacgtggcttatatgggtgcgaatcgttttcctacaagcatcgaatag

SEQ ID NO: 2737 - DNA, 246 bp, Enterococcus faecalis
gcctgtgaaattatagcttcttcgttagctatcccgattttcatatcatggaaccttactcgtcggtatttcaccatacgtccgtatgttcctatctttcgacaagatcagccttttagacccgtacattcgcagattcgtcagtcattttcagacattcttaccatagttatctttttcagccgcccgccctatagtcagccttatgctcaaacacttaggcagatttcagacgacttcacctag

SEQ ID NO: 2738 - DNA, 1230 bp, Enterococcus faecalis
gtctatttaataacaatgaatgttgaaacagatgaagttcaaggatctggtaagaacgtggggaaatccgttatggaggtgccacgcttgaacacaaaaatacgttactgggaatattacgatctacaagaaacattcgatcagctatttactcaaagtaaaaacgggaaaaagttttatcaattatacgagttaatcatttctgaaaataatattcttttagcataccgcactatcaaggcaaacaaggggtcttcgacaccaggaacggactccttcacaattgataactataaggaaatgaaccaagcagagtttatacatcttattctcagtcagttagaaaattacaaaccaaaatccataaagcgagtaatgatacctaaacccaacggcgagaaacgcccattaggaattccatgcatgattgatcgaattatccaacagatgttcaagcaggtactggagccaatatgtgaagcaaagttttatgaacatagttacgggttcagaccattgagaagtgcaaaacatgctctaggtcgcattatgtatctcataaacatcagtaagatgcactatgcagtagacattgatatcaagggtttctttgataatgtaaatcaccgtttactgataaaacaattatggaatataggaatttgtgacaaacgagtcttagctattctttcaaaatctctgaaatcacccattcagggagaaggtatttcgagcaaaggaacgatccaaggaggtatcatttctccactattatctaatgttgttctaaacgacttagaccattgggtctcaaagcagtggcatacctttgaaacaaagtatccctatacgaaaggttacaataaatttcgtgctttaagagatacaaatctaaagcaaggctatattgtcaggtacgcagatgattttaaaatcatgactaatgattatccgtccgcattaaaatggttccacgctgtcaagctctacctaaaagacaggcttaaattagatatctccaatgagaagtctaaaatcgtcaacttgcgtaaacgcaaatcggaatttttaggattcaccatttgcgtgaaacaaaaggggaaaaatgggtttgtaattcgcatatttctgacaaaaagaaaaatcaaattaaaaaagagattaaacaaagaattaaagatattcaaaagagccctacagcacaaaatgctctcctatttaatgctctag

SEQ ID NO: 2739 - DNA, 837 bp, Enterococcus faecalis
acgcaaatcggaatttttaggattcaccatttgcgtgaaacaaaaggggaaaaatgggtttgtaattcgcatatttctgacaaaaagaaaaatcaaattaaaaaagagattaaacaaagaattaaagatattcaaaagagccctacagcacaaaatgctctcctatttaatgctctagtgcttggtgttcataattatttcaggtatgccactcatattaacttagatttgaataggatgaactacgttctttcattcactacgtataaccgattatcaaattgtagtacaagatgttatcccaacaaagcttcccctacttacaaaaagttttactcgacaacgatgaaaacgtataaagtagccggagtctatttgtaccctctttgcgacgtatctacaaaaacaatttacggatttaatacggaagatacaccgtttaccccgtttggtcgtcaaaggttggagcacaaaagcttacagtctcttgtataccaagaattaagaaaattgatggaatcgaaaatactgaatagaatggttgagtatttagataatagaatatctcgttactcaatgaaatcaggcaagtgtgagattacaaaacagtttttgccagcaaaagccgttcactgtcatcactatttaccaaaaagtcttggtggagacgacaaatttgataacttgagaattattcataaggatatccatcttttgatccataccacaaataaaatgataatcgatcactacgtcaatgaactgaaactgctgccagagcaaatagcaaaaatcaacctttatcgaaaaatgtgtaatctgcaaaacattcaatag

SEQ ID NO: 2740 - DNA, 264 bp, Enterococcus faecalis
tctccatcttttcccccgctccacaccgtacgtgagcctttcacctcatacggcgttccatctatttattttctattgaatgttttgcagattacacatttttcgataaaggttgatttttgctatttgctctggcagcagtttcagttcattgacgtagtgatcgattatcattttatttgtggtatggatcaaaagatggatatccttatgaataattctcaagttatcaaatttgtcgtctccaccaagactttttggtaa

SEQ ID NO: 2741 - DNA, 357 bp, Enterococcus faecalis
atgttaacgacgaaagaaagtgcggtgattttaaataagctcaaacaaatcgtgatgttgggtcgtcagtctggtttctttctaattctggcttgtcaaagaccggatgcaaaatatttaggagacgggattcgcgatcaatttaacttccgagtggctttgggtcgtatgagtgaactcgggtattccatgatgtttggagaagttgataaaaatttctttatgaaacgcatcaaaggtcgaggctatgtggatactggagggagtgtgattagtgagttttatacgccacttgtgccaaaagggtatgatttcttagaatccatcaaacaagtagcacaatcaaaagaaaaatga

SEQ ID NO: 2742 - DNA, 465 bp, Enterococcus faecalis
aggtgtcagggaggtgcaataaaaatgacagaggatgattctttacaatatgccaaggagaacaagaaggaaattatttcttctgttattgatggaaaagaaaaagaagaggaaaaaactgccatttttatggctggaagtcctggggctggcaagactgaggctgcccaaactttaacggtattaaatagtaatctttgtgtgattgatgctgataagtttcgtgtattatttccaggttatgttgggaataattcagatgaatttcaacgaggatcatcactcttggtagatgcagctctcgatttagttcttaaaaaaggctatagttttattcttgatgctacttttgcgacctctaaggtaaaacaaaatattgaacgggcactgaaaaagaattacaatgtgcttgtctattatgtttatcaagatccatttattgcttgggattttaccaaaaaatga

SEQ ID NO: 2743 - DNA, 213 bp, Enterococcus faecalis
cattgccaatcagttatacaaaagaaatattggaggaagagctacatgactgagaaagaaaaagttgaggaaattatggaaaagtataaccgtaacttttccacattacaaaagaatgcttctgcgaaagagctgaagacagtctttaaatttgtagcagatgaatccaaccgaaaacaacgtgaattgattggtttggataaagaaaaataa

SEQ ID NO: 2744 - DNA, 1209 bp, Enterococcus faecalis
caccttgaatttggaggtgagaacttggtacaacggaatttagattatcggttattaaaagatcgtcgcaatgaatatggtatttcgcaaaataaattagctaccgcttgtgggcttagtcgaccctatttaaatcagatagaaaacggtggcgtaactgcctctacaaaaaccatgagaaaaatttttaaccaactggaaagttttaatcccgatttacctttatcgttactgtttgactatgtaaggattcgtttccccacaacggatgcacggaaaatcattcaagagattctccacctgaaatttgattatatgctccacgaagattacgccttttactcctatcaagaacaatatgtcatgggcgatattgtggtgatgttgtctcatgaagaagataaaggagttcttttggaattaaagggtcgtggttgtcggcagtttgaaacttttttactcgcccaaaagcgtagctggtacgactttttcgaagattgtctaaaagccggtggcgtaatgaaacgcttagatttggcaatcaatgatctagtagggctattggatattcctgatttaacgaaaaaatgtcagaaggaagaatgtatttccttgtttcgtacctttaaaagttaccgttcgggggagctgttgaaagctgatgaaaaggatggtatggggaataccttatacattggcagtctcaaaagtgaagtttatttttgtttgtacgaaaaagattatgaacaatatatcaagctagggattccattagacaaaactgaaacgaaaaatcgctttgagattcgactaaaaaatgaccgtgcctatcatgcaattcaagatttgttaaagggtcgtagcattgaaagtaccacgttttccattatcaatcgttacttgcgatttgcggataaagtagaaggcaaaaggcgaactaactggccattaaatgaacaatgggggcgttttattggacggaatcggaaagagatacaactgacttctgagccgaaaccgtataccattgaacgaaccttaaattggctaggtagacaagtcgcccctacgtggaagatggccaaggagttggatcggttgaatcagacaacctatatccaggatatggtacagaatgcgcgcttatcagaccggcataaaaagattttggaacaacaaagtatggcaatcgaaaacttgattatatga

SEQ ID NO: 2745 - DNA, 1314 bp, Enterococcus faecalis
ttctgggatatcccacagtacccaagcaatttccgaataatcaatgaaaggaggtccttccacatgaaactatttgtcggtttagacgttagttctgaaaaattagatgcttgctttatgacagacgattcaacttgctctgttttaaaagaagcatcttatggaaatagtcaacttggcgcaagccagatcaaagaatacattctcgaattttctcaaaaatttgagatagagagcttagtgattggaatggaggccacatctttatatagctttcatccagctatgttttttaaagaagatcttgagttaaatcaattgaaccttatggtttcagttgaacaaccaaataaaattaaaaagtatcgtgatatttttgaagaaaacaaaaacgatcaaattgatgctttttatatcgctgactattttcgcatccaaaggcaagtcaactccatcattaaagaggaagaataccttgccctccaacacttaactagaacgcgttatcagctaattaaacagctggttcgtacaaagcaacactttatcgaaaacatttattataaatgcaacacgctttctaaagaactaaaagcagaaggtggatccgttttaagtgccacattagtaactctaatgacggaagattacacaatggaccaacttgccgaactgtcattagaagagtttgcgaacctaattcaaaaactagggaagtatcgttttaaaaatcccgaaggaattgcaaaggcaatttctaaagccatacgtagttcctaccggttaggaaaagtccatcaggactctgtagatattgttttgggtgttctagccaaagaaattcgtagtcttgaaaagttaattaaagacttagacaaagccattgacgatttagtcgttgtgctacctgaatatcaatgtttaaccagtattccaggaatcggtcctgtttatgctgcgggtatactcgctgaaattggccctatcaatcgcttttcagatgaaagcaaattggctaaatatgccggtttatattggcgacagaaccaatcaggtaactctgagtatgaaaatactcctatggccaaacgaggcaatcgttatctccgttattatctagttgaagccaccaactccgtaaggagatacgagcctgagtaccatgcgtattataagaaaaaatacgctgaaacacccaagcataaacacaaacgagccatcgtactaaccgcaagaaaatttacgcgtctggtggatacgctactacgtaaccatcaactctatatgccaccaaggagcgtgatagataaataa

SEQ ID NO: 2746 - DNA, 255 bp, Enterococcus faecalis
tttcatgtggaaggacctcctttcattgattattcggaaattgcttgggtactgtgggatatcccagaatcacgttgtctaacgacagcctcgcataatagagtttcattcattaaacctctaagccacccaatctctactaggattggtagaggtcaatggactcagctagtgtgttggaggttataccaacggttcgggtcacagactttctgtcgcagtaaaactgcagaaggtgatagcgtcttcccgtaa

SEQ ID NO: 2747 - DNA, 261 bp, Enterococcus faecalis
aagtttcttcaaaatatatattacgaggaaagtgacaagatgaatttcggacaaaatttgtatcaatggtttctaaccaatgcccaatccttagtcttactggcaattgtggtcattggtttgtttttaggatttaagcgggagttttctaaattgattggcttcctggtgattgccttgattgcggtaggtctggtctttaatgcttctggtgtaaaagatgtcttactcaatttattcaatcgaatcgtcggtgcgtaa

SEQ ID NO: 2748 - DNA, 516 bp, Enterococcus faecalis
ggaggagtcacgatggaacagatgcgtgtttatattgcgaacttaggtcgatataacgaaggcgaattagttggtgcttggtttacaccacctgttgattttgatgagataaaagaacgaattggattaaataatgaatatgaggaatatgcgattcatgattatgaacttccttttgagattgatgagtatacaccaattgaagagattaatcggttgtgtggtttagcggaagagcttgaaggaacgccgattggtgaggttgcttcagagattcaacacgctttcttcaattcatttgaagaaatggtggagcatctggataatattgtttattatccagattgtaatgacatgagtgatttagcgtattacttgattgaggaagcaggcgctttaggtgaagttcctactcatttacaaaattatattgactatgaggcttatggtcgagatttagaaattgaagggaattatttggttacgagtcgtggggtctttgagctatgtgagtga

SEQ ID NO: 2749 - DNA, 849 bp, Enterococcus faecalis
tatttcaaaggagtggaagtggtgaatattgatgaggcaaaacagcttgcaaattatttttcagacggatctcctggatatatattggaattcaataatcttgaatgggacctatatactaagaaaatagttggatttggaattcaagaaagatttggtggctctaaaggaaattccttcaaagaatttcttgtctcagaggatattagtgatcacctaaagttcaaattaatatactcattaaatgaaactatgaagcaaattgcttctattcgccaatttgaaaatccaagttcatataagtcacctaaaatgaatccacttgtgactctattgattgaagaggcatatcataagaaagatagtgcaagattgcttaatggtactaagttttcgaaagaagtgaatttagagtatattcaacaacttcctactcgtataagtaaggatattcaaaataaagatttcgattctgttttaacaaaatcaaacactatgattgatgaagtcttgaaatatatcattgagaacacaaaaggaaaaagcattgataataatactgtaaggtctaaagacttaagaaatcaagcctttgaaagactaaatataaaaattgacaaagatatggataaaagaataaaagctttagttggtgctctaaacactttgtcagacaaaattcttgagatgaggaatagtcaaggtgatgcccatgctcagggctccaggaggattgtaattaatgaagaagaagctatccttactgcgaactcagcaatgattttatgtgagtatctatttcgaaagtatgaaaagagaaaaaggttcagtgatgcaaaagagagttga

SEQ ID NO: 2750 - DNA, 747 bp, Enterococcus faecalis
ttttttatggaggtatatatgcaaaacttaataacaatggcaagtggaacacttaacgaagtttactcgggaactgagattgcaactttatttgctgaatatggagcagaatttaactcttctgttccctttatttcgactccctttccgaactttacttctaaggctaccgcgattcaaaataatttacaatctttcacagaagaacagcaatttaaaattataaaagagctttgtgaaagtgtgcttgctcaaaatccagcaaataaagacgttgctaagattttaaaactgttactaaaaaattatggttcagtttattctaatgataaaatagatagaaatatcatcaatgaaactaacacttggttgactgcttcctcaagagcaaaagaagaatttgaaaaagccatacagtcttacgacaacagcatctataaccgttatactttagacagtatcaggctggcctttgagttttttatgcaggatattttaaaaaactcaaagtctttagaaaaccagcctatcgaaggagaactcctgcccttattgagaaaaaagggcattccaaaagaaataatcaatttggtccgtttaattattaaaggacttataagctatcaaaatgaaaatgttaaacatagtcaaacattcactgacctagaagtagaatttgttatagaacaaactagtattcttatgaagctattcgcaaaaattgaaaagatagaaaatgagagctga

SEQ ID NO: 2751 - DNA, 408 bp, Enterococcus faecalis
aaagtgagccgattgaatatgaaaaaaataaaaagctacaccagtatctgggcagttgaaaaggtcatttatgcaatcaatgactttcagctaccttttcctgtgacctttaatcagatggcttggtttgttttgtccttgctgtatgtcatcgtttttgcccatgtgcctccgctatctatgatagagggggcctttttaaaatacttaggcataccggtggtggtcacttggttcatgtcgcaaaaaacctttgatggtaagaaaccactgggatttttacgatcctttctcagttatcacttacggtttaaggtcacttttgcaggaaagaaggtcaaagaacagaagaaacgatgggatgaacccatcactctagtaaggagtgtgaactatgtacccgattaa

SEQ ID NO: 2752 - DNA, 2451 bp, Enterococcus faecalis
actatgtacccgattaagtatgttgaaaataatcttgtctttaatcaagagggagaatgttttgcctactatgaacttgtgccttataactattccttcttatcgcctgaacagaagtatcaagtgcacgataactttcgtcaattgattgctcagaatcgtgaaggcaagatccatgccttacaaattgccacagaaagtagtattcgtgccacgcaagaacgatcaaaaaaggaaattacaggcagactcaaagaagtcgcgaaacaacgaattgaccttcaaacagatgcattagtatctatgattggcgatagtcagattgattatcgcttttttattggctttaaactaattgcaacagatgaagaggtcaatttaaagagtctcaagaaatctttcctttctgggcttcaagaatttgtctatggggtgaaccatcatttgatgggtgattttgtttccttatccaatgaagaaattcgccgatataccaagcttgaaaaactaatggaaagtaaattggctagaagattcaaagtcagacgggtcacaccgagtgatctgacgtatttaattgaacatatttatggcgaaaaaggcacaccgtttgaagaatatgaatttcagctaccaaagaaaaagctaaaatcagaaacgctggtgaaacgttatgatttattacatcctagtcgttgcttgattgaagaaaatcctcggtacttacgcatggaacatgaaaatcatgaatcgtatgtagcctatttgacaatcaatacgattgtaggggagatggagtttccttcttcagaacttttttattaccagcaacaacaattcacttttcccattgatacttcaatgaatgtggagattgtgaccaataaaaaagctcttgccactgttcgcaataagaaaaaagaactgaaagatttagacaaccatgcctaccaatccgataatgagacaaattccaatgtcttagatgctttggattcagtaaatgagttggaaactaccttggatcaatccaaggagtcgatgtacaaattaagttatgtagttcgagtgagtgcggaatccgtggatgaattaaaacgccgttgtgatgaagtgttcgatttttatgatgatactaatgtaaaactagtccgaccctttggcgatatgatggggctacatgaagaattcttgccctcaagcaaacgctatatgaacgattatatccaatatgttacttctgactttttagcgggacttggttttggggctactcaaaagctaggggaattagaaggcatctactttggctacaatgtagatacggggcggaatgtttacctgaaaccggcattagcttcacaaggggtcaagggttcagttaccaatgctttggctgctgcgttccttggttcactcggtggcggaaaatcctttagtaacaatctcttggtctactatgctgttctttttggtggccaagctgtgattgtcgatccaaaaggagaacgaggtggttggaaagaaaacttgccagaaattgcggatgaaatcaatattctcaacttgactagtaaaccagaaaatcaaggcttacttgatccttatgtgattatgaagaaaaagaaagattcagaaagtttagcaattgatatcctgacttttttaacaggaatttccagtcgggatggggagaagtttccagtattgcgcaaagccattcggacggttacccaaagtgatcaacgaggattgctgcaagtcattaatgagcttcgaaaggagaactctccagtcgcggaaaatatcgccgatcatatcgagtcctttaccgattatgattttgcccatttgcttttctcagatggttcgattacccaatcaattagtttagataagcagttgaatatcattcaagtagcggatttggttttaccagatgcagaaaccacttttgaagaatataccacgatggagttgctaagtgtctctatgctaatcgtcatttccacgtttgccttggattttatccatagtaatcgagaaatcttcaagattgtggacctggatgaggcttggagttttcttcaagtggctcaaggaaagaccctttcaaataagctcgttcgtgctggtcgggccatgaatgccggtgtttactttgtcacgcaaaatagtgacgatttactggatgaacgcttgaagaataatatcggattgaaatttgcttttcgtagtaccgatattcatgaaatcaagaagactttggaattttttgggttggatcaagaagatgaaagtaatcaaaaacgcctacgagatttggaaaacggccaatgcttgatgcaggatttgtatggtcgggtaggcgtggttcaggtacatccagtctttgaagaactcttccatgcctttgatacccgtccacctgttcaagagagaatggagtga

SEQ ID NO: 2753 - DNA, 585 bp, Enterococcus faecalis
gcgtggttcaggtacatccagtctttgaagaactcttccatgcctttgatacccgtccacctgttcaagagagaatggagtgaggggatgaaaaagaaactttttcggattgtgggaatcgtttttattagcatactcactctgatagttctattgagtttagttggtacggtagccgaggcgacagggctagttgatgatacagttgaatcaggaaatctatattccaaatattcactgaacaactatcaactagatttctttgtggatagctcttgggattggttgccttggaattggggtgatggcttagggaaaagcgtgatgtatggtctttatgccattactaatttcatttggacggtgagtttgtatttgtcgaacgccacgggttatgtggttcaagaagcctataaattagatttcatttcggatacggctcgaagtattggaaagaatatccaaacattggctgatattactgaaaatggactccagacctccggattttattttgggtttctattattgatgattgtacctgtcggggtgtatgtggaatatgacttgaccacgaatatcgaa

SEQ ID NO: 2754 - DNA, 2001 bp, Enterococcus faecalis
acggaattagtgaatagtcctacccccgtttcagtaaaccgcatgatgaatttgttaaaggttagccgccggacggtatatcgtgaattagaaaatttagaaacctcgctagcatcgatgggcgcgacattggaaaaagtagctcgtgggcgcttttcgattcaagcagatgaagcagcgatgacggaaattcaggctgctattttaggagaagagacacaggaactttctactttggcgcggcaacatgcgattttattgacattactgcaaacaaaagagccagtctctatgcattattttctggaaacgtattgtattagtaatacgactttttatgccgatattaaacaattagaaacacggattgctcggattccgttgacgattgctcggaatcaaggttatgaagtgactggttctgaaaaatatcgccgtcttctaatggcgaatattctaagtatggaaattaatgagtaccaattttttcattttaccgaattaacgacaaacgaccattttttctttcagtttattcatgcagaacatttagcatttgcacaaaaaattgttcagccagaagtagaaactttatttccagcattaagtgatcgcaaattacaacatttgattttaatgttaacaattgcgatggatcgggtcactgcaggtttttatttagctgatgagacctatactgggcagatgaataaggcctttctaaattgttctaaacgacttttttcaaaagtcgctgctgaaacgaaacaactatacgctgtcagtgagattgttttttttgctagcttgttaagtgatttttctaattcttttgatgaagatttttttgatgaacattttgacactcagctggcttatgaagtgaaacaactgattgaagcagtaagtcaagaaacggaagttaattttttcgaagataccaatttgtataaaatgttgttgacgcatttatcaggtgttttttctcgggcggttttacaagaagaagatttaacgaatcccattttagaacggatcatgaatcaatatcaagaaatagctgcggctttacgccaagcgttgccgcaaatttttccgcaaaagaatctatcggaagaggaaattgcctacatggtgcttcattttgccaattctttagaacggagtcccaaaattatggaagttgatattgctggtttttctcctagcggtttggcttcgacaagtatgctggaaatgcgattacggcgctactttccttttatcaaccagattcatttttttcggattgcggatttaggtaaggtgaatgttgaggaaaactatgacttagtgatttccacttcgttattaccaggatacaatggtaaatataaattgatctcaccgttacttttagacgatgaaatccgccaattgaaagaagagtttaagcggattagtcacgaaaaacgctcgcttaggaaagcgcctgtgaaaaaaataggtggcgaagaaagctacgaaacggtggtcgctttcatggaagaaattagtaaactattagaaacatttttcatagcagatttaaataatcaagcggatttagcagaaaccgttcaacaagctctcgcgcaactttccgcagatttaatcaccgatagtgcaatcgtctgtcagcaattgatgaaacgttacgagcaagcgcctattgggattcctcagacggaaatggccttattccatacctcaagtacagcagtgacacagcctgttttttgtatttttaatctggcccagccacttatgattgaaggtatggataaaaagccgatgcagttacaacgtatgttactcatgctagcgccgataccgattgatgaaacaatcgggaaaattttaggaaaaatcagtggtgcgattattatgaatgatttaaatacagaaatttttcattcaggaaatgaagccattgtttatcagttgctttcgtcattattaattgaagaaatgaaaggctag

SEQ ID NO: 2755 - DNA, 438 bp, Enterococcus faecalis
gagatgtttgaaattacagcggagcaaataatgttgaatcaatcgtatgctagttgggaggaagcacttgcagcttctggtgaattactgctaaaaaatcagttggtcacgcctgactatgtcaaagcaatgtatcaacgtcaacaaaaagtcagtgtgtatatcggtaacttcgtggcattacctcatgcggaaggacaagatgaacaagttttaaaagaagggatttgctttattcaagtgcctgatggggtcaactttggtacggaagcagatcgaaaaatagctactttgttatttgtcgttgctttaaaaagtcaacggcaactaagcatgcttcaagaattagcttttttctgttcagatctcgaaaacattcagcggctcagtgattgtcgaacaatagatgaagcgcaaaaaattctggctcaagcctaa

SEQ ID NO: 2756 - DNA, 2031 bp, Enterococcus faecalis
caatctcgtacatgtgatgcacctcctttcgaggcaagtcgccaatttgagtatagcataaaaagttgttcatttattattgaaattattataaatggaataagtacgtgttttctggttttcgtaactagagaacacgtgcttttttctttcaacttttggcacaatggtttgtgccaaagtacgactttttccagatttggaaagcggatacaatttagtcaacaagaaaagttacttgagagaaggggaataaaaatggaacaagtaccagaaaaaaataaagtatcaattaaagcaaaagtccaaagaattggcagtaccttatctagcatggtgatgcccaatatcggggcgttgattgcgtggggcgttttgacagcgctatttatcccagatggatatctgccaaataaagcctttgccacgatggttggcccaatgttgacctatttaattccattattaattggctacactggtgggaaagtaatagcaggtgatcgcggtgccgtagttggcgcaattgcgacaatgggcgtgattgtgggaaccgatattccgatgatgctaggtgccatgattatgggtccacttggtggctttacaattaagaaatttgatcagtatttccaacatcggattaaagctggttttgaaatgttagtaaacaatttttcagctggattgattggttttgcgttagctttacttggtttttcagcgattggcccaattgtcgatgcgctgactgctgcaatggcacgtggtgtggaaatcattttaaatgctcatttgattccattaacgagtatttttattgaaccggcaaaagtgctctttttaaacaatgcgattaatcatggcattttaacacccttagggacagaacaagtcttatcggctggtaaatcaattcttttcctattagaagcaaaccctggtcctgggttaggtgtcttattagcatttatgttttttggaaaaggtgcggcaaaatcttctgcgccgggagcaataattattcatttccttggtggtatccacgaaatttacttcccatatgtaatgatgaaaccgttattattcttatcggttattgcaggtggtgcgacaggtagtttggttttccaaacgttagatgctggtttacgtgcgcccgcttcaccaggctccattatagctattttagcgatgacaccaatgggttcttacttaccagttattttaggtgttttggcagcaactgctgtttcctttgcagtatccgcagtcattttaaaagcagatgcgaaagaagaaagtgatgaatttgcccaaaaagtgaaagaaacccaagctgctaaagcagcatcaaaaggattaactgtcacaaatggtagtgcttcattgtcaggaattcaacaaattatttttgcttgtgatgctgggatgggctctagtgcaatgggtgcgtctatcttacggaaaaaggtccaagaggctggtttagtacaaactgtgacaaatcgggccattaataatttgaccgatgagggaaatacattgattgtcacacaagcggaattgcaagaacgggccaaacagaaagcacctaatgcaacctttgtagcagttgaaaatttcttgaactcaccacgttatgatgaaattgtggctgaactatcaggtaccaaagaaaaaaacgacgcacaaccaacagtctccaaagcaacacctgcttctgaaattgagggagatttagcaaatgtcaatgagattcttttggttcacgatgatcgtgtcgggtcagcaacgatgggaatgaaagtcttagaagaaattttagataaagagaaaatttcaatgccgattcgaaaaattaatattaatgaattaactcaacaaacacaggctttaattgtcacaaaagctgaactaacggaacaagcacgtaaaaaagcaccgaaagcgacacacttatcagtaaaaagtatggttaatccccaaaaatatgaaacagtggtttcgctcttaaaagaaagtgcctag

SEQ ID NO: 2757 - DNA, 486 bp, Enterococcus faecalis
aacagtggtttcgctcttaaaagaaagtgcctagagaggaagaaaacaatggaaaatcttacgaatatttcaattgaattaaatcaacagtttaatacaaaagaagaagctattcgcttttgcggcgaaaaactagtcgaggcaggctgtgttgaacccgcttatatcgaagcaatgattgaaagagaccaattgctatctgtttatatggggaattttattgccattcctcatggaacagaagaagccaaaaaattagtgaaaaaatcaggaatctgtgtagtgcaagttccagagggtgttaattttggcaccgaagaagatgaaaaaattgctaccgtattatttgggattgccggagtcggtgaagaacatttgcaattagtccaacaaattgcactttattgtagtgatatggataacgtggtgcaacttgccgatgcattaagtaaagaagaaataacagaaaatttagccattgcttaa

SEQ ID NO: 2758 - DNA, 1203 bp, Enterococcus faecalis
agaagaaataacagaaaatttagccattgcttaaaggagagaataagaatgaacgcagtacattttggagcaggaaatattggacgcggctttatcggcgaaattttagctaaaaacgggtttcatattacgtttgtggatgttaatgaaaccatcattcaagcgttaaaagaacgtaaaagttatacaattgaattggccgatgcctcacatcaacaaattaacgttgaaaatgtgaccgggttaaataacatgacagaaccagaaaaagtagtagaagcaattgcggaagccgatttagtcacgacggcaattggtcctaatattttaccaagaattgctgaattaattgctcaaggaattgatgcacgtgccgaagcaaattgtcaaaagccgctggatattatcgcttgtgaaaatatgattggtggttcaacctttttagcagaagaagtggccaaatatttgaaaaacccagcttatgctgaacaatggattggttttcctgatgcggcggttgatcggattgttccattacaaaaacatgaagacccactttttgttcaagttgagcctttttgtgaatgggtcattgatgataccaaccgaaaagccaaagagattcagttagaaggtgttcattacgttgctgatttagagccgtatattgaacgaaaattatttagtgtaaacactggccatgctacagttgcctatacaggggcgttgttaggctatcaaaccattgacgaagcgatgcaggacgccttagtggtagcacaactcaaatcagttttgcaggaaaccggtaaacttttagtggctaaatggaattttgatgaacaagaacatgcagcctatattgaaaaaattattcaacgtttccaaaataaatatatttcagatgctattacacgtgtagcacggacaccaatcagaaaattaggtgcgcaagaacggtttattcgaccaatccgtgaattacaggaacgcaatctagtgtcgccgcatttattagcaatgattggtattgtctttaattatcatgatccagaagatgaacaaagccgtcaattacaggaaatgcttgaccaagaaagtgttgatacagtgatcgctgaagtaacgggcattgaagatccagaaacggttaaaaatattaaacaaaacgtagaacgctatgcgcgaccacaagtagcataa

SEQ ID NO: 2759 - DNA, 1194 bp, Enterococcus faecalis
caagttatctcccaatcgtctctgtctagaggcggtttttttgtgttacaatacaactgttcgaaggagagaagaagcatgaaaaaaattgccattattggcggcggcattatcggaatgacgttagctaattatttagatccacaaaaatttgacattaccgtttatgatgaagggctcggccaagcgactaaagcgagcgctgggattatttccccttggctatccaaacgtcggaataagaaatggtaccaattagcgcgagagggcgctgccctatttccaaagctagtcaaagattttcagctgacggaggatatttatcgtcaatcagggacagtcattttgcgcccggcagccgctttggcagacttagcccatttggcagaagagcgtaagcaaactgcacctgaaattggagaaatcacgatgttgtcagcggttcaaacagcgaagttcttaccgctacttaaggaaactccctcactttttatttctggcggcggtcgcctagatggaccagcttatctaaaccatcttcagaaacgcgccgaagccaaaggggtcactttttgttcacaacgggcgcactttcgacaactgaatcaagggtgggaaattgtcacaaattcagaaaaaaagagcgttgattttctcgctttaacacctggtcctcatttaaaggaattactcactactttaaatttatctgtggacattcgtccccaaaaaggacaattattagttttcgagaccccttttacaaacagtcagcaatggcctgttgctatgttagatggcgaagccgatttaattccttttaatcaaggaaaaattttattaggtgccacccacgaaaatgaacaagcctgggatttagaagagactgttagcgcttttcaacaactaacttctgggactgcaccatttctaaaagaagcagagcagctttttaagcaacccatgcattaccgcgtcggtacacgtgcttatacatctgatttcgctccgttttttggccctttgccagaaatgccccaccttgtggttgctagcggacttggttcatcaggactcactactggcccattcattggttaccaattagctgaatacttcaatacaggtgccttcaaaggagagctttatcaaaaaccacttagtcaatatgttaaaaacaacccctcactttaa

SEQ ID NO: 2760 - DNA, 648 bp, Enterococcus faecalis
gggcttgccatgaaagtcattatttttggcggtagcggttttttaggtcaacaaatcgcgaaaattttagtccaacgccaacatcaagtcatcagtgtttcacgtcatggaaagcctgccacgctctccgcatcttggagccaccaagtgcagtgggtatgctccgatgttactcatgacacgaattggcaagaacaagtccagcgtgctgactgggtcattgatacagtaggtattttatttgaaaatccacgaaaaaagaaaacctatcaacggctaattctgacgccagtgaaaaaaatcagctcttttttagcacaacaaaaaaagccagctaagtttttatttatttcagccaatactgttcctttccctttgagaaaatatatggatgccaaattggcagcggaggaactaatccaccaagaagtcgccgaagcagtaattttttatcctagtttacttgtaggtcaagaacgtaccggcaccatactttttagtaaatgtatttatttttttaagaaaatcccctttttaaagaacttatttattggctatgatcccgtgcctgtggcagaaatggcacaagaaattgttcacgttttagaaggcggcaattctatttacacacacagaaggacccgttaa

SEQ ID NO: 2761 - DNA, 1197 bp, Enterococcus faecalis
ggagatgaaacgaagaaaatgaagaagaaaacgataattatattgggggcagttgcggtaattgcggttgggggcatcgtaactgtgaatgcgttaaataaaaatgcacaacaagtagctgtcaagcaagcgcctaaagatgactggggaattgactattttgacgttcccgacttgcaacaaatttatattaacggtgtcatccaaccggaacaaatggaagcctttgcgcgtgatcaaaaaataacaaaggatccagagattaaggtgaaaaacggcgatgtcgtagatgcaggcacagaattatttacttatgaagatgaggcggtcacaaaagaaattgaggcacaacaaaatagcttagccaaattagaaacgaagcgggcgaatatctataataagtggaatcgggccattgataaatttaataaaactaaagaagaagaccgcacgatgtctggtgatgatttaaatgaacaatatcaaacagaagtcgatgcagtagatgaagagattaccttcaccaatgaaaccttagcggatttaggagcgaagcaatatatttccacaaaggctaatttcaaaggtcgtgtatcaattccagaagtaaaagatgccaattcaccgattttacggttaacttcagaagatctttatttagctggaaaagtgaatgaaaaggacttgactaaaattagtgttgggcaaaaagctaaactaacttctgtttccaacaatgtggttgtggatggctcaatttcttacatcgatgataatcctcctgaaggcaacagcgatgccgcgagtggcaatccagagggcggcacaacgatgtctagttatagcgtcaaaattgcgttggccaatttagacaaagtcaaaaatggctaccatatgcaagcaaccattgatttaggcgatttaggggcgattgagttaccgaaaaaagcgattcaaaaagagggtgaacaggcctacgttttagtgaatgattttggaaccatcattcgtcgtgatgtccaagtcgggcaagaaaatggcgacaaaatggcgattgaatctggcttagaatcagccgaccgagtggttatttcttcaaaaaaaccagtaaaagtcggtgatattgttgaatcagatgcagcgattgcttctgatgaatcagcaaccaacgaatcaatgacagatgcgtcgaaatag

SEQ ID NO: 2762 - DNA, 720 bp, Enterococcus faecalis
gagggcttgatggtggaagcaaacaatacaaatcaacccctcattgaattgcgggacattaacaagttctatccagtaggtaaggaaaaactacatgttttaaaagaattgaacttgaccatccatcaaggagagttcattttaatcatggggaagtccggtagcggtaagacaacgctgatgaacattattggtttcttggatcgcttaacagacggaagttatcatttctcaggaacagatgtttcaaaattgtctgaaaataaaaaatcagcctttcgcaatgaatatctaggatttatttttcaacaatttttcttgattaattctttaaatgttagtcaaaatgttcaattgccctgtgtttatgaagggaaaaaaagccgcgctgagaaaaaagcgattgctgaaaaatacctaaaaattgtcggtttggaaacaaaagccaaatcaaaagttactgaactttctggaggacagcaacaaagagtagccattgctcgttccttggtgaatgatccattattgattatggctgatgaaccgactggggcattggatagtgaaacgggtacagaaattatggaattattgaaagaattgaatgaacagggcaaaacaattgtcatggtgacacatgatgaagatatgaaaaaatatgcctcacgagtgattcatatgaaagatggtcgctttttggaagaagaggtgattagatga

SEQ ID NO: 2763 - DNA, 1230 bp, Enterococcus faecalis
atgattgctaatttatttgttagtacttttttaagcttaaaggcacataagttgcgggtatttttaacgatggtcgggattattattgggattacatcagtcgtaacgatttctgcgctaggtgaagggatgaaacgtcaagttgtgaaggcatccagtgcagtgaacgcggatgttttgaagattcattatacaatgtcggatggtagcagtgacaattttatgtcctatgaagagccagattatacgtttagccgagtggacttgaaaaaattacaagacattcaaggaattgaaagtatttatcctcaatatggtgaatcaatgatggggggcggagacaatttgtttgtaccaatggattattttggggcgcaagcgaatttatccattacgtcgactaaagggcagaatgatattttatatggtcgtgattttcaaccgagcgatgcaaatacagatgcgattgtcttaaatcatgatatctttgaagcgcaaattcggcttgatgatcctagccaactcattggaaaagctgtttcaattggtggttatatgtacaaggtgattggtattttagcaccaaaagatttagatagtttgggtatgaacgatgattgggcaactgctatgagtagttttgtttctcgagaatcatacaataaattagcgaaaacaaaagcaattagtggcatcaatattaaggttcgtgagggagcggaccgtgaagcaattttaggacaggcaatcaccattttaagtgaaaatcatcctgaagtgaaaggaacgtttaaagaaaacgaccaagaccaacaactccaacaacaaatggaagaaatggtcacgggtatgacaatgtttctgatggcaattactgcaatctccctattagtcgggggaattggcgtcatgaacatcatgtatgtgtctgtcacggaacggaaacgagaaattgggattcgtcgggccattggtgctaaaccacgagtcattttattccaatttttaatggaagcagcgtttatcacattgattggtggtttgattggtgtcggctgcggctacttattggcaactgtggtcggtgggtatatttcgattacgccaattattacgccgtccatctttgctatttcaacattggtttcggtcttcacaggtatctttttcggaattattccagcaattggtgcttcgaggatggatccgattaaagcgatttataattaa

SEQ ID NO: 2764 - DNA, 726 bp, Enterococcus faecalis
ggaagtaggtgcaatgaaataatgattattttccttttaatcctttgcgtgttaggctttgcctatacgaatgtatttggccgaaaagtctggcataaattctgtatggttatttttggtttagggttcttagcttcgttaagtcttatcgttttaaacgataaagatcattttggtatgaccgaagttactcaggacaaaacgtttgaactaaaaagcagtagttcaagcaaagatggccccaacatgttattgtaccagccgttgggcgatggttccgaaaaagtttatttatataacacaccagataaaaagaaactacaaaaaacaggaacggaaaacgtcacaaacacggttcaaaaagatgctcaaaaagccacattagtccaaaaaacgacgaaatggtcctatcaagagtcttgggccaaaacactatttggccttgctgacaacgataaccaatttgcaaaacaagaaaacaccttcaacgttgctagtgactggctagttttaagtgctgatcaagccaaaaaattaggcgaatatatggaacaacatgccgctgatatcaaaaaagaagggactgaaacagttggcaaaaaaatgatggctgctatgatggcgaatccatcaatgtcccaagaagaacaagcgaaactcaccgaacaatataccaaagagtttcaacaagaattgattcagaaaattcttagtgacatgaaataa

SEQ ID NO: 2765 - DNA, 1521 bp, Enterococcus faecalis
ttaatgcaatttaatttgaaacttacagaaaaaggagcgatatatgtgacttcacaacaacctgtggatattcacggaaaaccttataaccggtcgttactagtcggtgttttactaatcggaacattttgtacgattttaaaccaaacgcttttaacgacggccttacctacattaatgaaagaatttgatatctcagcttcaagtgtacagtggctaaccactggattcctacttgtgaacggcattatgattcccatcagtgcttggttgattaacaaattcagttcaaaaaaattatacataacagcgatgtcaacgttcttaatcggaaccatcatctgttttgtagcgcaagacttcggcatgttattgactggacgtcttgttcaagccgcaggggtcggtgtatctatgcctcttttacaaacaattatgctttcaattttcccgcctgaaaaacgtggcgctgccatgggcacaacgggaattgttatcggattagcacccgctttaggtccaacattatctggttggattattgattcttatacatggcgtgacctttttgggatggtcattccaattgtcgttttagtcctaattttagcttcatttttaatgaaaaatgtcattcaattatctaatccaagtatcgatgtcttatcggtcattctttctactctcggctttggtagcttactttacggtttctcaagcgttggtgataaaggttggggtagcccgcaagtctatggattcttaattgttggtgcgattgttttatgtctttttacatatcgacaattgcatttagaacaacctttcttagaactacgcgtttttaaatcaaaagtctttactgttgcggccattttatctggcgtaaccaacatggcaatgattggcgccgaaatggttttacctttgtatatccaaaatattcgtggcgaatctgccttccattcagggttaatgcttttaccaggagcgttagtcatgggacttatgatgccagtaactggtcgcatttttgataaaattggtgcccgtcgtcttgcgattactgggatgtttattttaacagctgcaacgttaccgtttgctttcttaacaaaagcaacacctattatttatatcattgtcctatatgcgattcggatgtttggtatttcgatggtcatgatgcctgtgacaacttctggcatgaatgctttaccaatgaatttattaagtcacgggactgctgtaaacaacaccttccgacaagtagccagctcaattggaacagctgttttgattagtgttttaacaaatgttaccaaagacggcttacctgcatcggacttattaaaaacagccccactcacttatcgcgatcaagcaacaaacgcaacactaaacggttatcacgcagctttcttcgtggcaacaatctttggcgttctcggcttggcgattactttcttcttaaataaaaaagaagcgatgcctgttaaggaagtaggtgcaatgaaataa

SEQ ID NO: 2766 - DNA, 1521 bp, Enterococcus faecalis
agatggctttattatcaaccattaaaccgctatacaaactatcaagaagccgcagaaaaaacaccaactgttccaattatttttgatgaatctttgcctgcttttcctgcacttggcttagaaacaacttatggtgaaagccatcaagaaattttgaaacgggcatatcaattagccactttaggtgtaaaaaaaggcgacaaaattattatttataaaagtcctaaattcgacacgtatttactagctgttgcagcctcatatctagcagccgttcctgtaatggtttcataccatttaccttttgaaacaattgaagtattcgttgatcgtttagaagatccttatattttatttgatgatgtgactgctgaaaaagttcaagctgttcgtaatagctctgccaataaaaaactttcggttgcttctcttttagaagctgatgccacggaagttcctcaagacgaactgactaaagacgaaattgcctacatgacccacacctctggaacaacaggtattcctaaacttatctgtcattccaatcactctatgggttggcgtacaaaatggcaaaaaaccatttttacaaaaattgctgaaaagaaattagttggctttcatatttcgccagttcattctcgttttaacattggcgtgtcttctttaatggccatgggcttccctatgatgcctttagcaaatgcttcgagcgaaaaagtcgctgaaatgttcagcacctatcaaccaatcgctgtagaaacacaccccaataacttcgttcaatgggttcgtttggccaaagaaaaacctgaagctttcgctagtgtccattattatcattctacttttgatgcaattaacaacgctacaatggtggctttcttaaaagcatctgctgccaatgaaccaattttcctacaagtttatggacaaagtgaatgcgggccaatgatcttacgagcgcatactttagaatccctaaaagattcagatgctcgtgacatgggcgttggtttagaggatttaacacaagctcgaattaccgatgaaaaaggacaagttttacctgcgatgacggacggccatatccaattcttatcaaaaggacgggccttaacatattacaaagaagatgcccgctttgcagaaaatgtctatggcgaatggtgggacagcggcgattacggaatgttagatgaacgcggccacttattcttgaaagatcgccaagtagatctaattgaaaacatcgacagtaatttagctattgaagatcatttattggatgcattagatttcttagaagaagtgattattgtccgtggcaaagaaaatgaacctcagccaattttagcggttgtccctggggaagaaatggattgggacgcttggtggacacaagtagccgatttaccacatttaaacgaacctatcattatggcttttgatgaaatccctcacacagctactatgaaagtgcaacgtttacaactagaaaaatggttgaaagaacaataa

SEQ ID NO: 2767 - DNA, 705 bp, Enterococcus faecalis
gcaagtatgaaaattttaattaaacaagatttcgacacgatgagcgaatgggcaaaaatgttacttctaagcacgatgagccaagataaacgagtgaatttatcaattaccgctggcaaaacaccagcacttgtttaccaaaaattagcctcgattgtgaaaaattcatctgactttgataatgttcattattataactttgatgaaatccccgttcctcatcaaaaggaaggcattactctgacagatttgcggacgctgtatttgacacctgcggaaatatccgagcaaaacatccatccattaactgttgaaaactttcaacaacaagaacaacggattgctgacgcaggcggcttagatttgatgttaattggcttaggagcagatggtcatttttgcgggaacatgcccactaccactcattttaaaaatgaaacctaccaagtgaccgtcactggttcagagccttggtttgttcctgaaatgatgcagccaggcatgacctttgttacgatggggccagccagcatcatgaaagttaagcatcttgtcctaattgtaaatggtgaacaaaaagctcagatggtcaaacaagtgctccaaggacctgtcacagaaacgtatcctgcctctattcttcaactccatccaaatttaacggttctcttggatgaagccgcagcgagtcaattagaaaaataa

SEQ ID NO: 2768 - DNA, 1104 bp, Enterococcus faecalis
atgaacattcaatcaattgaaacctatcaggttcgtttgcctttaaaaacgccgtttgtcacgagctatggtcgcctggaagaaaaagcgtttgatctatttgtaataacggatgagcaaggaaatcaagggtttggcgaattagtggcttttgagcaacctgattatgtgcaagaaacgttggtaaccgaacgcttcatcatccaacagcatttaattccgttacttttaacagaagcgattgaacagccgcaagaggtttcaacaatttttgaagaagttaaagggcattggatgggaaaagctgcgttagaaactgccatctgggatttatatgccaaacggcaacagaagagtttaactgaattttttggaccaacgcggaggaaaattcctgtagggattagtttagggattcaagaagacttacctcaattacttaaacaagttcagttagctgtagaaaaagggtatcaacgagtgaagctgaaaattcgtcccggttatgatgtggaacctgttgctttgattcgtcagcattttcctaacttgcctttaatggtcgatgcaaattcagcgtatacattggcagatttgcctcaattgcaacgtttagatcactatcaattagcgatgattgaacagccttttgctgcagatgattttttagaccacgcacaattacaaagagaactgaagacaagaatttgtttggatgaaaatattcgtagtctcaaagactgccaagtggcgttagcattgggcagttgccgtagtatcaatttgaagattcctcgtgtaggtgggattcacgaggcgttgaagattgccgcattttgccaagaaaatgatttattggtttggttaggtggtatgtttgagtctggtgttggtcgcgcattgaatttgcaatttgcgtcacagcctaccttttcctttccaggtgatatttcagcaacggaacgctatttttatgaagatatcatcacggaaccttttattttagagcaagggacaatgaccgtgcctcagggacttggtattggtgttacactttcccagacgaatttgctaaaatacagtcagtatcaaaaaatcatgtaa

SEQ ID NO: 2769 - DNA, 849 bp, Enterococcus faecalis
acgagtagaaagacaggggatttcatggaacggttaattcgggggatgcagtaccattatcaatggttaacaccttttgatgcaaagcgaacgacagtagtctgtttacacggtttcacaggaacgttagccacgtttgcagccgtttttcccagtcaaacaccttataacgttttaggaattgacttacctgggcatggcgcgactgctagtttggtagcgccagagcgttataccatgaaacaggtttgccatgatattgctgaactaaccgaatcgctaaatttgccttgcttttgtttattaggctattcaatgggcgctcgaacagctttaggttttgcattacattatccacaaaaggtacagcatcttttattggaaagtggatcaccaggtttggccactgccgcagaacgtcaggctcgtatctgtcaagatcatcgtttggcggaacgtcttttagaggaaccgctggtggattttattgatttttggcaagaattaccgttatttcaaacgcaaaaagccttgtctgtggcacagcaaatggccattcgtcaggaacgtttgagccaatcggcctttggattggttagtagtttgtggtatatgggcacaggagcgcaagagagttactgggaacgtctagcagaattgcagccgattcctaccgatttattggtaggcggcgaagatcaaaaatttattggaattgcgaaaaaaatgcaggcacgtcaaccgttgttgaggctgacaatttttcctgaagcaggacattgtatccatttagaacaaccaacgattttctatgaaaaggtgacagcgttattggaaggagccatctga

SEQ ID NO: 2770 - DNA, 1896 bp, Enterococcus faecalis
tggcgagttcgctgtggccttgcgttcaggtgtctttgctggtcagcaaggcgttctttatgcaggttgtggtattgttgcggattcccaagcagagctagaaagagaagaaacgaaaataaaatttcaaccgatgttacgaggaattggaggtcaggtttaatgaatcatcaagaaacaatgaccgattatttaatggcctttattgaaggcttaaaaaatagtggggttgaacaagcagtcattagtccagggtcccggtccacaccactggctttattacttcatcgggaaaccgcaatccaaacttttgtcgatgtcgatgaacgttccgctgctttttttgctttaggattaagtaaagcgagtcaaaaaccagtggtcttactttgtacctctggaacagcagctgcaaactattatccagcaatttgtgaagccaatattagccatgtgcctttagtcgttttaacaacagatcggccgcatgagttacgtcaagttggtgctcctcaagccatggaccaattacaaatgtatcaaaatcacgtgaaattatttgttgaaatggctttgccagaagcaacagaagagatgttgaattacgcctattggcaaggcgctaaaggagcagcattcgcgcaacaaacgcctgcagcacctgttcatttgaattttcctttgcgggaaccattattacctgacttagagagaaaaacaaagagttctcaacaaacggctttattcgctggtcaatcaatcctttctacagaacaagtgcaacagttagcggatcaatggtaccagaaaaacggcgtcttggttgtcggtggcagtcatacagaggaagaagcgacgttatttattcaattagccgaagctttgcaatggccgttactagcggatcctttagcaaacattgtgacacatgggcaaaatagtgaagttgttattgcacacagtgatctgtttctaaatgtggcgaccttgccacaagaaccagaagtggtagtgcgttttggttcgctgccaatttctaaaaacatcatgttatggttgaaacgcttagcaacgacagagactgctttttattttgtggacgaaaatgggcaatggcaagagcaattgaaaaaatcacaaacagttattcaggcaaaggaaaccacgtttgtagaacaactactaacggttgtcaaaccaacagaagcgacttggttagcacaatggctcctgctggaaaaaacggtctctgaagttcttctagaaacgctgaacgcgacagaattaaatgaaacaacagccagcttagctgttcaccaaacaatgaaagaaaatggtcagttatttgtatctaatagtatggctatccgctacttagatcgatttatggatagtcgcccttatcggatgtttggaaatcgcggcatcaacgggattgatgggattgtttcaactgctttaggaatgagtgccatagcaccgacacagcaaaacgttctactgattggtgatttagcgctatatcatgatatgaatggtttatttttggctaaacgttatcagttgccgttaacaattgttttattaaataacaatggtggcgggattttctcttttctatctcaacgaactttacgtgaggacgatttcgagcctttatttggaacaccgcttgatttagatttttcgttagttgctgaactttacggtgcttcgtaccaagaagtcaaaacaatcgcggagctcaagcaaattttacaagcagcggctgaagaaccacaatttcaagtgatagaagtcaaaggaaatcgccaagagaatgttcatttgtacgaatcaattttagctgaaattggtagacgagtagaaagacaggggatttcatggaacggttaa

SEQ ID NO: 2771 - DNA, 1473 bp, Enterococcus faecalis
acgaccgaaacgcatttatttttgtcattctttcccgcaaacagcaagtggaaagattgccaaacatcgtttcatgacagaagaaagagaggcgtttttaatcagatgaaattgcctgatgaattacgacaagcctatcagaagaatgcccgtcagttcagttgggtttttccattagaaacagaacaaacagccttggcaatttttgccgctggtgaaaaggcataccaaggagaacgttttttttggcaaacgccgaaaaaagattttgctttggttggcttcggatatgaaactatcttaaaaggcgcagaaacagaaacgcatcaattgaacaactttttaaaaaaagaggcggcaactcgttttcaaaatatgtctatttctggtacgggggcccttctgtttggcggtttgccttttgatacagaacaaacgcctactgaggcctggggagagttaggggaaggttggttttatctaccaagtattctatttactttttcaggttcacgtatttatggaacgctgaacttttcaggttctagtgaacaagaagtcgaggaacgttggtcgactttggtggctcagtttgatcgcttgttagctacctgtgaggagttgccagctgtagcggaaacaaagattgacaaggaagaagttgccgtgactgaatggctacaagctgtcaacgaaacagtagcagtcttaagagaagatggccctttaaaaaaagtggttttggctcgacaacttgctgtgagcagtcctgaaaaaattcgaagtaaccaagtgctcgttaatttaatggcacaacaacaaaatacgtatttgtttgctttagaagccaaagacacaagtttcattggtgcaacaccagaacgacttctgttgggtactaaagaaacgtttgcgaccgcttgtattgcaggaaccattaaaacgggtcaaacaccagaagaaacgaaaactttaggagcacaacttttacaagaccgcaaaaataccggagaacaccaaattgtggtggaacgtttagcgaaagagttggcgaagatgacgacttctgaaaacagtattcaagcacccattattttggaaaatcgagatgtacaacatctttatgtgccaatctcgggtcaacgtaaaccgggaatttcatttttggaaagtgtgatgcagctacacccaacgccagctttaggtggtgagcccaaagagttggcagtcgaatggattcgacaatatgagccagggagtcgtgggttatatggtgcgccaatcggttggatttcagggaatgatgatagtggcgagttcgctgtggccttgcgttcaggtgtctttgctggtcagcaaggcgttctttatgcaggttgtggtattgttgcggattcccaagcagagctagaaagagaagaaacgaaaataaaatttcaaccgatgttacgaggaattggaggtcaggtttaa

SEQ ID NO: 2772 - DNA, 1572 bp, Enterococcus faecalis
ctggtgatgcgacacttctttactatacaatggctgaagcacaagaaggccgagatgcatttaaagaaaaacggacaccagatttcgatcaattccctaaattcccataaaccaatgacttggttaaataaacaagtacaaaaacgtcccgatcatcctgctttttattttcaggatgaatcttggacgtttttagaagtgcaacaagaagtcagccattgggtagccacatatcaacaggtgcttgcaccagaagaaaaacgtgtggctttattcagtaagaacagcaaagagttgtatttttcaattctagccttatgggaattggggaaagagttattatttttaaatacgcatttgacacttgctgaactgacttttcagttaaaagatgcgcaagttaaaacgattattggtgcgcctgaaacgcaggctttgttagaagaaatttcttttgtcgacgttcagccaatgattaaaaaacagcatagtctttcacatcaggagtttcaacagccaagtgacttagagtcggtggcttctattatgtatacatctggaactacaggacagcctaaaggggtcttgcaacggtttaaaaatcatttggccagtgctagaggcactcaagaaaatatggggattactgctgaagattgttggttgtgtgcagtcccattatttcacattagcggattgtcgattgttgttcgacaactcgtcttaggttgtagtattcgcctttacgataaatttgatgaacagcaagtgacacaagatttacaagaaggccgtggaaccgtcatttcagtggttgcgacaatgttacaacaattattgtctgtctatcctgaagctggctacagcgccagctttaaaggaatgctattaggcggcggaccgattgctccggataaattagcgcagtgtgaggaaaaagggattccagtcattcaatcttacgggatgacggaaacgtgttcgcaagttgttgccttgaaatttgaagatgcggcactgaaaatcggctctgctggacaaccgttaaaagatatgcaaatcaaaattgttgatgaactaggacaagaacagccagaaaagcaagtcggggaaattttacttaagggaccaaacgttgtttcaggttaccttaaccagcgtcaacctgaaaaatggacagcagatggttggtttaaaacaggcgacatgggctatttagatgcacaaagttacctgtatttggttagtcgtttaagtgaactcattatctctggtggtgaaaatatttaccccactgaggttgaacaggtgttacaggcgataacaggaattaaagcagcggcagttgtaggagaaccagatgcgcaatggggagccgtcccagttgcatatgtgattagtgaccaagaaatcaccttagcgcaaattcaagaccagtgttcacgaaaactggcaaaatataaacgaccgaaacgcatttatttttgtcattctttcccgcaaacagcaagtggaaagattgccaaacatcgtttcatgacagaagaaagagaggcgtttttaatcagatga

SEQ ID NO: 2773 - DNA, 306 bp, Enterococcus faecalis
tttatgggtaaacagtattctgctcaagaagctttagatatgggcaggattaatacaggtgttccattggaacaagtagaagatgtgacaatggagtgggcagaagaaatgttaaccaaaagcccgattgctttacggatgattaaagcctctttaaatgccgatacagatggcttggctggtgtgcaacaattagctggtgatgcgacacttctttactatacaatggctgaagcacaagaaggccgagatgcatttaaagaaaaacggacaccagatttcgatcaattccctaaattcccataa

SEQ ID NO: 2774 - DNA, 192 bp, Enterococcus faecalis
gatgtaggtgagtatatgaaatattacgattattcaaggggcttaaaagccccttattcaatgcaagttattaagtcgcctaaaggacaagtggtgtgggtatttgcacaacctgttagtttatcctatctcctaattctattcttagggattgtgttaactggcttgttttggaaagaattaccattaccc

SEQ ID NO: 2775 - DNA, 228 bp, Enterococcus faecalis
ctaatgaatacaggcaatttgagtagttttttaagtacaggttttattacaattttagcggctggtgcgattatcttgattttaaaacattggaaaggtgccgaatgggcaaaaattggttcagtaattgtcattgccttaattttacaggactttgcgacgaatcaaggaaaaaatatttttgcagttgttaaatgggtattaagtttagttggaattaagatgtag

SEQ ID NO: 2776 - DNA, 996 bp, Enterococcus faecalis
gaggggaatatgaatttaaagaaaattaaaaagaaagagaagaaagaaaaaacaccaagggttaaaactttttctcaaaagaaagcgaatcgggttgtgttaattgtcgctagtgttttactggtgatgtcaggagttggtgcgcttcgagccaatgtgatggcaagtaatgtagataatttgtattcaaaagtggatacattaagtgaacaatcaaaaaagaataaagttgatagagaggagcttgattattcagccctctctttttatgtagaaaattttgcgaaagagtatttgaattataactcgaaagctagtgatgaagcgaaaaaggctcgtattgatcgattatctaaatatttatcactagatgtaaaagatgttgatgaaacagaaaatctacaagggaatgtcttacgtacgtttaaaaatacgtctttatcacgtatagagaaaatggaagattgttatttggtttatctaaatgtgaattatgaattggagaaagataaaaagactgaaaatgtgacacagaatatggttttaccaattcaagtaaaagacaatttgttttcaattgtaggacgtccttattttgtagcaagtagtttaccacaagggaaaacagtacctttaaaacagacagaaaattcaatagatgttgatgggaaagaaaaacaatctgtagagaaatttttaaagatgttttttacaaaatattcagttgggaacaaacaagaattaatgttgttaatgaaaaatccaacaacgacagcaggtcaagactcatttgtttcaatagattctggtgatatgaaattttttgatacaaagcagaaaggtgtaacaggggttcaagtatcggtcactttttcagataaaacaacaaaattaacgcatactgaggatttttcgctttggttatctaaaacggagaattcttattttattaatacgatgaaacattactttacagagaaagaaggaaatgactaa

SEQ ID NO: 2777 - DNA, 501 bp, Enterococcus faecalis
atattacagaaaaatggaaaggagttgtattttatgaatcaacatattatgccaatttttagagagcatagtaaattttaccaaaggtattcaaatgtaccagttcctgaaatgcttcgcttgcatggattcatagttgatgaaatgccaattgatgaagcagatattgtttatatggaagaatataaaaattctttacttaaaatggggattattattgatgaagtaccttttaagaaggaatttgttgcgcaatacgtttttcatggcggtataactagtttgatggcagaaggtcaatatttgagaaagcctaacggggataaaatgtacaattcgtattatttttatttgtataaagaaggctttcaaacacataaggggcatgttagagagagagtttatgttgaaaaggcgattaaatctacttttttaaaaacgtttgaaagttgtttgggcttattaagagtaggaggggaatatgaatttaaagaaaattaa

SEQ ID NO: 2778 - DNA, 570 bp, Enterococcus faecalis
tttagaggagggaaaaagttggttgaaaaaataagggaattgtcaaaagaagaatttgtcaatcagtacatgtttgattttaagtcattaattttcaaatccaataatcctgaaaaaataacagctaaacaagaaaaactcttggaatgtgaaaagaaaatcgctgtattattttatgaaacatataaacgaatgaaggggtatccgcctgatgaaaaagaactgggtaggattgttcaaagaaatttccttgaccgtttaaagttatttcgagtggaatatgatgtgattagtgaagaaaaattttgtggtctacacgtacaaatggtcaaacagcaaatgccattagaaaagtatcgatccgatgatttatcttatattttaggacgagaaaagaagatagctattaattattttatcgcacatgatgattttcctatgggttatgaagaactaatgataagtcgttctaaacaagcagttacccaaggcttggaagagttaaggggagaatttatggaaagataccataaatattacagaaaaatggaaaggagttgtattttatga

SEQ ID NO: 2779 - DNA, 732 bp, Enterococcus faecalis
ttaatgaaaaaatggattgaaaaaaacaaatattttgttggagcaattggagttattctcattgctcttttttcattccttctttttcaaaaccaacaaaaagaagaagtgaaagaagctataaatacaatggtatcaagtggtttagaggaagcagaaaagccaaaaaaacatgtagagacaaaatctagtgaaactgttcaaagtaatcaagtagatgttattactggtacggaagtacaagaagaaacacctattccaacagtgatttctttaaccgaaggcgaacgtccgtctgttaaaacgattcaaagtgcccaagtaaattttaatgaagtgtcggattctgttttggggtctattgaaattgattctattcaattaaaattgcctattttaatgggtgatagttttgacaatatgctttatggagcgtgtactgttttatcaaaacaaatgatgggaaaaggaaattatgctttagcttctcacaatgctggatatgaaggattactttttacctcgttaaataatgtttctgtaggagatttggtcaaacttaatgatcgtgaaggacattcgttcacatataaggtaaaagagcaaaagcatgttgatatgactgatacaactatgttgaatctaacaagaaagccaacattaactttaataacttgtgaccaagccacaaaaacaacaggaagaattattgtgattgcggaattagtttag

SEQ ID NO: 2780 - DNA, 2010 bp, Enterococcus faecalis
aactacaaaaaattaataatgaaaagaggaaatattttgaagaaaacaacgattattcaaggattagcaactgtaacaattttagcaggcatggcaatgccaatgatggttcaagcacaagaaagcggacaagtaccacaaacagtgaaagcagattttttccaacgtgcaagcgctaattcaatcattaatgcgccgaatgcttctgtagtgacaccagatgatgaagctggttcaaagtatagctttattgcaaaatttattaaaggtgtcactacggttgaaacaggtggtgatgggtggacgaatgatgtttacgttaatatgcctccacaaaaatgggacggaaaaatcggtcttgatgtaacgaaaacgaagaaagggcaatcgtggattcgttacaacaatgtaggtacagctgatgatgggacaccaattgatttaaaaattaccattcaagactgggaacaatacaaaaatgcacaaaatatggtgtcaaataatattgttgcctttaacaatgttagtgcgattgctacctatcaaggtgggtttagctgggtgaaacaaacatggacgtatttagaacatggaacagacaaagaaaagcccgtttcaggctactattcatggattgacgtagataatttacagggaatgacgattgacaaagattcttacaaagcaatcgataaattgtacgttccaacgaaagatacaatcattaaatacaaagaagaaaaagatggtggaaaaactttttacgattctgacgatattccattagacgatggtgataaccgtggtgattttacgttcttgtattctaatcgttctcgatttgatttcacgtacagtgaagatttcgcgacacgtgaaaagaatttagggtaccctttaccgccaaaaaataataaccagtatagttattttggctatagtgccaaaaaaccagttcggacagcgccgatgattcctactaaaacggtgacagatagtgatgaaacaaatgttgataagaataccttagaaggattaggcgaagtatatagctatacgatcacacataaagttcctgatgaaatgaaagaattttattatagcaactatgaaatgcaagacgaactgattcctgaattggaacgtgtgtctgatgtgaaagtcacggacgaagcaggaaaggacgtgaccaataaatttgaagcgaagcatgaaggcaatttagtacgtatggttgcaaaggctgacgtattaaaaacagcggatttctataatcacgaatataaattcaatttccaaacaaaaattcgtgaaggtgccagcttagataagtaccttattgatggcaagttacaaattccaaataaagcaaaaattatccaaaacaacaaagaagtcccaactgatgaaacaacaaccactgtcacaccaaaagacccgtctatcgcgaagaaaatccttgaaggcgataaagaagtggatttgaccagtgccaaagtgggcgatgaagtgacattcaaattagatgtgcaagtaccaaacaccaaagatatgacttctttagtcattcaagatgatttagaagatgttttagaagcgaataaagaagtgaaagtcactctttcagatgggacagatattacggatcaaggaaaaattagtgttgatgaaaaaacacaaaaagtttcttgggctgccaatgaaccaaacaaattaaaagaaaaacaattgtttgtgtacattaaagggaaattgaaagacgcagatttttctcaatatgtcgatgataaagggaatattatgattccaaacgtggcacaattggtgattaatgatgaaccgacagattctaacaaagtgaatgttacaactccacaagaaaaaccaaaagtattgccaaatactaatatggattttggaacaagtgcaggtgtagctacagtgattgcaatttcattaattggtgtggtcgtagcagtgaaacgacaaaaagatagcaaagagggctaa

SEQ ID NO: 2781 - DNA, 603 bp, Enterococcus faecalis
agttgtggaagggaaattaaaggaggacattttgtagtgaaaaagatttggcaattggcatgtttagaaaataattatgattcacacagctcttattttcgggatatggtaagatatttttcctatacactgttagcactacttttattctttttaggtttgtattttaacataggttgggtaagtggtttctgttttgtaggtttgatacttttaccatatatgggctttttatctcgtgataattatagagaatttgcaccgagagtatggaaaataagagatgttcgagagttagaagaattgtatcctgtagttgttgatagagtaagggatagattacttttttatgaaaagaaactctatttaaagggagatagtttgaagcatgcagattcaatgaaagaaggttttgttctttcagaaatttctttagaaaatgagttgatttttaatgctagtatagcaaagaaaagttgtatagttgttgaggagtatgtatatgaaaatgtaaattttaaagaagaattccagaataaaaagaatcaagaagctcctgtattacgctatatagtttatacaaataactttttaagtgaataa

SEQ ID NO: 2782 - DNA, 618 bp, Enterococcus faecalis
attatgagtagagaatttattgaacgcaatactaaagtagcaatttctattactgaaaaaatgaaaaaaggtaaaaatgatttacaaaaaacaaaagaaaaaattgttcaattagatgaacaaggggaattgactattccttatttaaagattacttttgaaaagctttcagaatcaaatgaagagcttttaaaagaaatttcaagatatgaatatacttatgtggttcatgaagcagaaatggcggttaaagagaaagcaatttgggaagaatttttcagtataaaaaaattgtatgataaagagctttcagaatttgccagttttaaagagaagtataaatattttgagcctaaaaatagtgaagaattaaaaaaacaagctcgagtgttgctagaaaagaaagggtatattgttgatagtccatttgaaggagattttgaaagatggattggcgtttatgctagacctaaagataaaccaacttatttagatccaactgatggagaagaagctggattacaagaattgtacagtgtagatggatttaagcaagactttgcagaatggtttgagtttgaagttgtggaagggaaattaaaggaggacattttgtag

SEQ ID NO: 2783 - DNA, 1320 bp, Enterococcus faecalis
agttgtcacattttttttggaagtaggtttaaagcagtgagaggtgttgatttaaagcgatatagaaaagagctaaaattaaaacagcaagaattggcaagtaaattaggaattgagcgttcgttaatttcaaaaatagaatctggaaaacgtgttatttctaaagagttagaacaaaagattattgatgtgttgaacttagatggtgggtatgcttcggtagaagcaaaaattgactttttgagaatacgatttaagacattagatgttcggacagttgttgaaaagttgttgcatatggatatgaactggtttactcatgaacctagagggttttatcattatactgaaacattttcgtatagctctattcggatttttcggaatccagaaaacgtgaatatgggaattatgttggacttgtctggcgaaggttgtcgtcaattagaaaaaatttttgaagaagacaacaagcgatcgtggacagaattttttcgctcactctatgatgatgatattttcgggcaaggtgttttagttgatacaaaaataactcgaattgatattgctcttgatgaattgattgtgaaagaacaagaaaattttgatttatatgttttgaaagaaaaaatggaacaagggcttgtggataccacttttaagaattttgattttagcgggggctttgcttatgaaaataaaaaaatggtaaataaaggtttgtctctttattttggtagtcgtcaatcgccattgtattttaacttttaccaaaaagattatgagttagcacgaaaagaaagtataagtgttgaggaagcaagagaaaaacatgaaattaaaaatcggtacgaaattcgcctttctgatgaaaaggcgtttttgtttgtagaatattttctttctagtggtgaaacgttggattggctagtcaaggaaattattaatcaatctttgactgtctatgacattgaagatgatatgaaagtctattgcaaagcttggtatgatgttgttgataaattggaaggtttaaaattgtctgttcaaggtgaaaaaccgtctattgagaaaacacttcggtggttatcaaattatttagccccttcattaaagatgattaaagaaattgatcatttgttaggaacaaatgagttgatggaacgtatcgatttagcagaattaaaagagaaacatgaagaaataattgaaatggtctgtgttgatgcgaaagatttattgtttaccactaatcaaaatagcagtgttcgatcttatatggaacaagaatttgatttggaggaagtatatccattttaa

SEQ ID NO: 2784 - DNA, 414 bp, Enterococcus faecalis
gtgtggaaaatgtattcatttgatcaagtaattttagagctagacaatgctattgctttgaaaacactgaaaaattgggcaaataggattgaaaaaatgactgatacacgttttgaacgccgatatgcaaagaatagtgcaggtcatagttatagctataaggttttttctattaaagatatagaaaattttcaagagttgctacgtttgcgtgaaaataatgttccgcttaatgaggcaataaatgaagtatttatgtctgatgagaataaagctacacatattaataaacaagaaattgaggatttgaaaagagatatgaggcaacttttaaaggtgtctcaatctattcttgcggagaatgcaagcttaaaagagagaattggtgcattagaacgaggaacagctgaataa

SEQ ID NO: 2785 - DNA, 348 bp, Enterococcus faecalis
agaggctctatacttagatatcacgttgggggattactaagtgaaaggagtaaaaagaaagtgaaatttaaatctcgagtacaaatgttaaactatgtgattgggaagaaaccagacatcatgaaaacagttgatcggagagcagaaaaagagggggttacagatgataatagattacttgattataaattattagtaatttctgttttagatgcagaagctgtttacgatgaagatagaccaattgaggaaaagaaattttcaacatcacaagaagttgataagtatttagaaacaagatttaaggagcatatggattctgcttggaaagaaatgtttaataagtag

SEQ ID NO: 2786 - DNA, 558 bp, Enterococcus faecalis
attagttggaaaaggaaggtttttatggattctaatgaaataattaaacgtgtcagagaacgagtatatagagaagtagagaaaaaatatactagagacgatttggatactcgtattcaagatgtattatattatcgttcagaaacatatatgaaattagttagctttgcaaatggtaaaagaattaagaagttagctgatcctagaaaatttgaaaagtttatggatacaaaaggagtaaagattgttgcagaagtacttgatggattgaataatcaaccaaaaatgcaagctatggaatacgaacaaaaggtacttactaaagtacgtcaatggtatcagaaaaagaatcaccctgagcttgtagatttggaagaagaagcatttgaacaacttgtagaaaaaaatatcatctataaaaaaatgaagaaaaggttgtatgaagaacaggataatcaaggttttgtttattcggataattttgatatgcaattgattcgtgattcatgtgatattgaagaggctctatacttagatatcacgttgggggattactaa

SEQ ID NO: 2787 - DNA, 1173 bp, Enterococcus faecalis
caagtgaaaagtagtgacggcaaaacaaaagaaaaaatcaagtttccaaaaatttattataagtctgcaaaaaatagtatttttgtttcatttgaaacagcgggtaataaatttcaggaaaaatttgaaaccattggtggttttttggaaacaacgtttcatgcagataatttaaataagattgatgaaaaaggttttgttacctatgaattagcaacagatgtgtacaataagcgtatttggattaaggatatgcaagcagacgaaggcaaagttcagttgatgaaagggttgtattggcactttgataaagatccacatttgttattaggtggaggcactggtggaggtaaaacttttacaattttgtctctgatctatgcgctttgtcgagtgggtgaggtggaaatctgtgacccgaaaaattctgacttgatggctttaggcaagttaccgctatttgcaggaaaagttcatactggaaaaaaagatattactcaatgcttggaaaatacagtggagttaatggaaacacgttttaaaacgatgaataatagttcacgttacaagatggggaaaaactatgcgtattatggattaaaaccaaaatttgtttttatagatgaatttgcggcctttaaagctgaattggcaaatgattattcaacagacggagaagtagatgagtatcttacgcaacttattttgaaagctcgtcaagcaggtattttctttattgttgcaatgcaacgtccagatggagaatttttaaaaacagcattacgtgaccaatttatgtttcgcatgtctgttggacgtctatctgaaacaggtattttgatgattttcggtgatgaaaataaaaataaaaagtttaaatatgttgaaaaaattgacggtcagaaagtctatggtcgtggatatgtggctcaaggaggaggaactgcacgtgaattttatagtcctcaagtaccacaagactttgacttcattgaagaatttatcaaaatttctaaagagttaggttatgaagatgttccaaaagaagtacaagaagaagtatctcaaaaaatatctaaacatattgataaagaagcactggcagaaattgatgaagaatttcaagcagaaaaaaatcagttatcagagttaagtgagaaatattctgcttaa

SEQ ID NO: 2788 - DNA, 339 bp, Enterococcus faecalis
atgttaaaaaaattatttagatatagaggaaggcgtattcgttattcttcaagaaacctgttggcactctatcgagtgttattttttatgccaattttagcttgtttagggtattttgttggctataaatggatttatcctttatatctttcaaatccgcctgattggaaaatatacattgtgccagcgttgataattgtaggtatttctataggtgcaattgtgctaattacattgcttattaaagcttcaattattaattcggggtatttttctaaagtggaacaacgtcaagtattagcacatatgattattgacaacgggtattacacaaaataa

SEQ ID NO: 2789 - DNA, 390 bp, Enterococcus faecalis
aagtatttgaaagatagtacagaaaaagatttgcgtgttctaaaagggacgttaatctatatagaagatattgaggaaacactcaatcgttgtggaagacagtatgaggtcttttatcacgatagggtgttttttaatgccataggaatggctttaatgcaagttggagaactaggaacaggaagcaatggattatcggtagaatttaaagagaaaaattcagataaagtagactggaataaattaaagaaattaagaaatatgtttgcacattcgtatgattcaatgaatgagcgatttattttccgcatggcaacaatgtttattccggtgtacaaagaattttgtatacaagcaatagcagaattgcaaaagagacgaggtaaataa

SEQ ID NO: 2790 - DNA, 339 bp, Enterococcus faecalis
atacgaatgatactgacacttaatgagatcaaagaacgtgtgaaacctgtagctgaaaaacacaatgttccagtaatctacatttttggttcctatgctagaagcgaagcaaaagaaacaagcgatattgattttgctgtagacataactggagaagctgatgaagaagaagcttactggaatttatatggagatttttttgaagagttgaaagaagcggtaggacatgatattgatttagtcgaattagagacattatttgattcacaagataaaccagaaagaaaagctttgcttgaaaatattttgaaggagcgtgtaaaagtatttgaaagatag

SEQ ID NO: 2791 - DNA, 447 bp, Enterococcus faecalis
tttgaaggaaatttcaaacgaaggaggtgtattaaaagaagaatgttatcagaagaattagaattaaaacgacaaaagtatagacgttttttaaatggtaaatttagtgcctatcgttgttggtgcagttttccatattatcatcaattgtatttgaatttatatgaagaaacgagtgaatatttagttcaatttttattattggataatatattttttgaaaatgaagaagcagtagtaaagttatttgaaggatttttagaacaacttgtaaggtcttatgcgtgtaaaatacatgaagattttgaacgaaaagtttgtattggttcggataatattgaagaagcgattggtaaactagatcttatgattgagacacctagtgaaaaaaatagtgaagatatacaacaagtaaagctattattagaagcggtagtaacaatttaa

SEQ ID NO: 2792 - DNA, 243 bp, Enterococcus faecalis
gtgagttcaaaaagagtgggtaaagttaataaaaaaatgggagtgattggaatgaaacaagagaaacgtccagttagaaaagaaaaagaattattggaaagtcgtagattgaatccattaaattggctagttgagagaagattgaagagcagtattgtttttcttcataaaggaagtggtaatttgaaggaaatttcaaacgaaggaggtgtattaaaagaagaatgttatcagaagaattag

SEQ ID NO: 2793 - DNA, 228 bp, Enterococcus faecalis
aagatgaatcgattagaggaattaattaagaatccaaaaaaattcaacttatcaaatgaagcgattgattcattaagggaattatttgttacttttgaaacgaacccatttttcccaatgagcaggtatgactatgctcggagatacttaatgcaactatattttgctggttttattagtagtgatttagttcaaagtattttgagtgagttcaaaaagagtgggtaa

SEQ ID NO: 2794 - DNA, 624 bp, Enterococcus faecalis
gctgcccgcccaaatcccgggcgtgtaaagacaactgaagcctcttcttcaaaagctacgaatagttcaaaaaatgatacaaaaaaagaaagctctgaaaagaaatcagaagataaatcgaaagataactctgatttaaaagcaacttacgataaaattaatgtcggtgatattatgaacagcagcgaaggcggttctacagaagatgaagtaaaagcaattttaggtgaaccagcctcttcttctacaacagatatccaaggcatctctaccactactctatcttggacaaatgtcaagggtggtgatcttcttgcatctattactgtttcattctctgatggcaaagcagcgagcaaatctgtaagtggcttgaaggttgcaaaacatgataaagttactgcagaccaagtaaataacattgctactgatggttcatattctgaagaacaagctagaaaagatttaggagacccaacagggattacttctacaaatatcaatggtgaaaaaaatgatactttaatctggatgaaaaacttagatggtgatttaggtgctactgttactgtttctttttctaatggaagtgcaatttctaaatcaagttcaggattaaaataa

SEQ ID NO: 2795 - DNA, 705 bp, Enterococcus faecalis
tttgaaaagagaagaggaacggaaatgaaaacattgctttttgatgttgatgatacattgttagattttaaattggctgaaaagaaggcgctacatgccttatttgaagaagaaaatgtaccatttacatctgaagtcgagtcaacataccaccgaattaatcaaggattatggcgttcatttgaagaaggaaaaataacaaaagatgttctccttgatacacggtttggtttattgtttgacgcgtttaatcgagaagttgatagcgttaaaatgggagaaaactaccgagaatatttaagtcaaggacatgacttgcttggcaatagtcaacgtatcttggaaaaattagcaccccattatgatttatatattgtgacaaacggagtggcaaaaacacagtatcgtcggttggaagattcgaaattaatgccttattttaaagatatttttgtttcagaagaagtgggttatcaaaaaccgatgaaagagtattttgattttgtttttgaacggattcctaattttagtcgagaaaaaacaatgattattggcgattctttgcattcagatattcaaggaggtcaacaagcgaaaattcaaactgtttggctcaatccgacctccgctccagcaacaccaaccattcaacccaattatacgattcaacagctagatgagttgttaccaattcttgggcattaa

SEQ ID NO: 2796 - DNA, 786 bp, Enterococcus faecalis
acaatgcgattagataaattactagaagaacttcagtttggatcacgcaaaacggtgaaacgattaatcaaaggcaagcaggtcactgtggatggcatcgtgactttaaatgaaagccaaaatgtcgatgcgcaattacaaatgattaaagtaaaaggacaattaatttcgcataagacccatgtgtactatatgttgaataagccaaaaggtgtggttagcgctgtctcagatgcatctaaaaaaacagttattgatttgattgcgccacaagacagacgccctggtctttatccagtgggcagactcgatggcgatacggaagggttacttctattaacagataatggacaattagggtatcaattaattcggccaaataaagaagtagcgaaatgttatgaagtgaaagtcaatggtttggtctctgcagaagattgtgctaaatttaaagatgggattgttttgcaaggaggcattcaatgtaagccagcaaaaataactgttcttgcagcgactgaaacggagagtcatgttttcctgactattcaagaaggaaaatttcaccaagtgaaaaaaatgtttttatccgtggggaaaaaagtgactgctttaaaacgccaaactatggggccgttgcggctagatccgcaattacctttaggtgcttatcgttcattaacaagagaagagttacaattgctattgccttatttttttattgaaaaacaacaaacaagcaaagcgttaccgagtaatttgaaaagagaagaggaacggaaatga

SEQ ID NO: 2797 - DNA, 612 bp, Enterococcus faecalis
gttatgtcagtacaattagaagttaaagaaagagctatccgtccacgttcactaagaaatcagctacgtcacgaagggaaagtacctgccattgtttacggttaccaaattgaaagtacaccaatctattttgaagaaaaagacttatcaaaaattttacgcgaacatggtgctaacaccgttattaaaatgacagttgatggcaaaaacatcaacacattaatgtcgaaagcacagttagatacctttactggtcaaatgcttcatgttgaattcttatctgtaaatatgaaagaaacaacagaagtcgaagcagaagttcaattaattggtgaatctgcaggtgtgaaagctgggggtaccttagctcaaaacttgtacactgttttagtggcagccacaccagacaaattgccagaatcaattgaagtagatattacaaacttagaaattggtgatgctcttacaatcgctgatttacctgaacacaaagactatgaaattttaactgatccagaagaacaactagttgctattgttgaagcacaaactgctcctgaagaagaagaaggaacagctgctgaaacgactgaaccagaattagccgaataa

SEQ ID NO: 2798 - DNA, 348 bp, Enterococcus faecalis
gtaaacaaaaaggaggtcatccatatgtttgaacgttttgatagtgaccgtagccgctatgcttcattaggtgttgtttctagcttacctagtggcttaattgatagtatttggttgattattgacttaaatctaaaaggggttatccctttaaacgacttacttcactttgatttgttgaacaataatggcaaagtgactgtccatttttctcaagaaaatagttcagtagaaatggccatcgacttaccatttagttattctacggcatatccgtcgcgaatttttgcttttgatgatggccatcgtgaaacgattttattacctgcagaaatgttagaatcttaa

SEQ ID NO: 2799 - DNA, 3048 bp, Enterococcus faecalis
gcgttttacgataattttttaggaggagaaagaatgaaaaacaggaaaatatgggtaatgctggtcggactgtttactgctttgacgaatggatttatgggaaccacccttacttttgcagaagaaaacgaagcgagccaaacgattgagcaaccctcttacatttcagatttccccaatcaagttgggcattggcaagatttggtaggaacagcagaaaaaaagaatgattctgctggtttatggatcgcaaacacgaagcaagggacaaacctcgaatctgtctctatcaatcttgatgcacgcgaacaatcttcaggagatcttgaactaacctttttatatgaagggcaaagtaacttcggattggtttttcgcggagataaacaaaagacgagtcaatggcaatcttttgcttataatcgtgacggtcgctggcagttaggacaaccaggcggtaaatggctaactaatattccgggaccaacattactaagtggtcaacaatataaactgctagttcgctatgatgggaaaaaaattcaaacattcctgaatgatcaattattttatgaaaatgaagaggttcattatcctgatggtacgtccattaatgatgactggatgggtgctgtaggaattagactatttggtaatctatcaaagctgaatatcatttctatgaaaagtggccccgttggtagcattcctgttatcgattcatctgcagaataccgagaattaaaagaaaaatggcgaaatcagcttgtttcaaaagaatatgattcaactaaccaagcgcttgtagactacgtccaaaaaatctccaatgaagcaacagaactcgatcaaacgatgaataaagagccgaaccgcagctatttatggccactagagcctggcaatacgccatcggctgatttaacgactcaatttaccaaattgcaaaaattagcgttagcctatggaacgaaggggagtacgctttaccaagatgacaaattggcagcaaccattattgatggcttagattttatggtaacgcaaaaaggatatgatgggaaaaagtaccatggaaattggtgggactggcaaattggtgtgccacagaagtttcttaatattctaatgattttagaggataaagtttctccagaaaagcaacaaatctatacaaatgcgctgagcagttatgtcccagatccgtttaaacagttgtatacaaaaccacaaggaacgtttgtggatttagcttttatcccaaattttgtgacatcaggagcgaaccgaacggacttagctttaactgttttggggttaggaattttacaaaaggatagcgggaaaattaaccaagcatccagtagtatcgtcgatgtatttaaattagtcacaaaaggtgatggtttttaccaagatggttcttttatccagcacaataacattccttatacaggttcgtatggcaatgttttggtgaaaggggttggacaaattttggccattacagcagattcatcttttcaaatggatgcaactcttgtgacagaatttgttgaaaatgttgatcgtgcctttcttcctttgatttataaaggtgaaatgctaccaaccgtgaatggccgttccatctcaagagccccagcagttggaaaaacaggctacggctcaactaccatgtataatttattaattgtggctaaatttgcccctaataattatcaaaagaaatttcaagaagccgttaaatattggatgaaggagaacccagattattatttgacaaatgctcgtgattttaatgatttacagatgactatgcaacttttaactaatccagaaattacgggagggcaacttccttttacaggcacgaaactttatgcttcgatggatcgatttgtccaacgcacacctagttatatgtttgggctaggcttgtattcaaagcgcactgcatcttttgaagcagggaataaagaaaataaacgtggctggcacactggtgacggaatgatgtacgtatataatgatgacgaggttcaatttaattccagctattggccaactgtagatccctatcgactaccaggaacaacggtagataccatttctttggcagatgaagtttcagcatttacaacaatcacatcgaaagagcaatgggttggtggagtaacgtcagacaatcaggcagtagtagggatggctcttaataaagacgggaccaaaaataatgggaaacttttacctatgaacctacaagctaaaaaatcttggtttgtattaaatgggcaaattatcgcattaggcgcaggaattaaaggggatacagaagcttcgattgagacagttgttgataatcgtttgttaaatgatgcgtatcagtatcaagtgctatcaaatattggggagattcatgagaaaaatgaaacgagtaaaaaacaatggttattactaaagtcggatcattccaatgctaatatgggttattattttccagaagaaacaacggtaaatgttaaaagtgaaactagaaaaggaacctataaagcaattaatgaagcatttccaagtgataaagaatatgtaggtgattatcgaacatttacgattcaacatggtcaacacccaacgaacgagcattatgcttatgtagttttaccaggaatcgatgaaactgatttaaaaacatatgctgccaaaaaaacagtagaagttctctcaaatacagaagaaattcaagcagttaagcaagaagaagaaggctatcttggagttaacatttggtcagaaactggcggtacaatagcagggattacctcaaataaagctatttctttaatgagaaagacacaacaacaccaaaaaacgtatactttctctgatcccacacaaacaactaagacactgactttaaaaataccaaaagattacagcacagtaattagtcaaagtgacggaatcacttatgatgatgcaacagaaacctttactattaattttgaaaatgctgcaggaagtagtaaacaaattattgtagaataa

SEQ ID NO: 2800 - DNA, 891 bp, Enterococcus faecalis
cagcgatgcttgtatttaaacgtgatggggcaaaaagcacgacacaagcaacaacaggaaatggtgattttgaaggaggatatgacggcgatgagtaagcataaactgacaaaaaaagaattaaatgcaattagctggcgttatattttaggaagccaattaaactggaactatgaacgtatgatgagttcaggatatttatacggcatcttacctgttttaaaaaaattctatggtcatgatgaagcacaatttcaagatatgatgcgcacacacaatcaattttttaacaccaatgctatttttgggaatttaattatggggattgatgttgcgattgaagagcaagatggctataaagcgaaagaaacaattattgcgctaaaaacagctctgatgggttctttggcaggcgttggggactctttattccacgttatttgggggacgattttcggctctgttgcagggacactggctcaaaatggttcggtggttggctgtgttatttggattattgcaaatattgcactattgtttggtcgggccgcgctcttaccacttggttataagcaaggggtcaaactagtgacgaccttaaaagacaagttatctgcctttacgaatgcagcaactgttcttggtgtgactgtgattggtgccttaattccttcagttatcaaggcgacagttccttttgtttataaaaagaacggggtcgaattagttattcaagatacgttagatgcgattttgccttccttagttccaatcttacttgttcttttgacttattggatgttaggtcaaaagaaactaaattccacacgagtgatttggattattttaattttatcgattgttttgagtgcctttggtattttggcgtaa

SEQ ID NO: 2801 - DNA, 804 bp, Enterococcus faecalis
gaggaaatttcaatgcatttagcagcgtatcaaattattttaattactatttatgcgtttattgctattaatgactcacttatttcaaatacgttgacgcaaccagctattgctggaatgatttctggaatgattatgggagatttaaaaactggtttaatggttggcggcactcttcaattaatgcgtttaggaattgctgcttttggtggagcatcggtacctgattatttcacaggggctgttttaggaaccgctttcgctgtaatctctggaaaaggagcggagtatggcattggtttagctgttcctgtttctctgttgatgttgcaactagatgtagtcgcccgtttttgtaatgtctttttacttcatagtgtcgataaagcgattgataagatgcaagtaaaacggattccacgtttagttttatctggttctgttctatggggactgtctcgtgccattccgattttattaatgttattagcgggggatgctgtagtaacaacgattaccgataacatgccagaatggctaatgacgggcttaaaaacagctggaggagtattacctgttgtcggtgtagggattttattacgttacttgccaacgaagcaatatatcccctatttactattaggctttttcttagcggcttatttaaaagttccaatgttaggtgtttcgatagttgggatggtagcagcgatgcttgtatttaaacgtgatggggcaaaaagcacgacacaagcaacaacaggaaatggtgattttgaaggaggatatgacggcgatgagtaa

SEQ ID NO: 2802 - DNA, 939 bp, Enterococcus faecalis
ggagggaaattcgtggaaaacattgtactaattagtcatggtagcatggctgaaggcgtcaaagttagcttagaaatgatcgttggtcggcaagaacacgtgcatacagtctcattacgaccagatagcgacaatcttcaatttgagaaagagctaaatgaaaaaatgaaagcccttaacggtacgacactgattattgctgatttactaggaggaacgccatgtaacgtggcaactaagaattatttgaacgttgacggagtggaaattattgcagggatgacgctctctgttgtgattgaagcagtggttaatcaacaggcttcgattaaagaattagtttgtttagcacaagaaaatattgttgatgtaaaggctggaatgaatcaagcggaacaagagatttcagaagccagcaaagaaaaagagttaagtaactatagtcaatatgctggaaaagaaaatattgtaaacacacggattgatgaacggttaattcatggacaagtagcgggaatttggtcgacaagtcttagtacacagcgaataattgtagccaatgatgaggcggctacagatcctttacaaaaatcatctttgagaatggcagcgccttcttcgatgcgtttatctgttcttggagtagaggctgccgctaaaaatattcaatcaggaaaatatggtaaacagcgtttatttttattatttaaaaatccgaaagatgtgctccgctttatcgaagcgcaaggacctatcaaaactgtaaatgttgggaatatgagttacaaagaaggagcacgcgaagtaacaaaaagtattcaagttttaccagaagaagaacaaatttttgaaacaatcgcttcaaaaggcgtcactgtgacagcccaattagttccaaacgatccagtcgttgattttatgaaaaaattacgcggctaa

SEQ ID NO: 2803 - DNA, 723 bp, Enterococcus faecalis
aatggaggcaatcgcatgttacctaaatatgaacaaattaaacaagaccttttacgtgaaataaaaaatcatacctttattcctggtgataaattttattctgaagccgatattaaacgaaaatatgctgttagttctatcacagctgtcaaagcactgaatgagctgaccagtgcaggttacttgtatcgtatccaaggaaaagggacctttgtttcgaaatcaaaagtttctcaaaatgtaaaattttctgatatcgagttgcattctttagactctgaaaaagttaaagtcctttcaattgaagaagataatcaagccgaaattttaaaggaattaggcttaccagctaacgcttcttattatagaatcaagcgtgtacgctattctgaagatacaccctttctcgtacatatcacacatcttcccaaaaagcttgttaaagagccgctctcaaaggacctcacagcttatgcaagtgtgtatgaacgagtccgtaaagatttttcagtagacctcttctcgttggcttctgtagaaacaaatgaaattgtctttcccgaagatgctgagttattgaatttacttcaattaagttttcgtgaacccgctgttaaacaagttaaacattcctatctcgcagatggtagtgttgctgaatatattattagttataaacattggaaatatttcaaaaccaaaatagaagtagaagccgaataa

SEQ ID NO: 2804 - DNA, 1791 bp, Enterococcus faecalis
aggggaaaaatgatgcaaacgtttgagattaaagaagactttttattaaatggacaaccaataaaaattattagcggggcgattcattactttcgaatgacacctagccaatgggaagatagcctctataatctgaaagctttaggagctaatacagtagaaacctacattccttggaatattcatgaaccagaagaaggcgtatacgattttgaaggaatgaaaaacattgaagcatttgtccgcttggcagaaaaactgaatttactagttattctgcgtccttcggcttatatttgtgcagaatgggagtttggtggcttaccagcatggcttttgaaagaaaaaggtgtgcgattacgttcgacagatcctatttttatgactaaagttcgtaactattttcaagtattattgcctaaactagcaccgctgcagataacacaaggtggaccagtgatcatgatgcaggttgaaaatgaatatgggtcctatggcatggagaaagcgtacttgcgacaaaccaagcagataatggaagaactggggattgaggttcctctttttacatctgatggcgcttgggaagaggttttggatgcgggtacgttaattgaagaggatgtttttgtgacaggaaattttggtagtcattcgaaagaaaatgctgccgttttgaaaaaatttatgactcgtcatggtaaaaaatggccgttgatgtgcatggaatactgggatgggtggttcaatcgttggggcgaaccagtgattcagcgggaaggtaccgacttggcgaaagaagtaaaagatatgctggcagtgggttctttaaatctctatatgtttcatggaggaacaaatttcggcttttataacgggtgttcggcgcgaggtgcaaaagatttacctcaagtcactagctatgattatgatgctttattaacagaagcaggagaaccaacagaaaaatattatgccgttcaaaaagcaattaaagaagtatgtccagaagtttggcaagcacaaccacgcacgaaaaaactggggaatttaggaagctttccagtaactgctagcgtatccttattcgcagtaaaagatcaaatgatgacaccgaagaccaccacgtatccattaagtatggaagaagctggctcaggctatggctacttgctttattcgtttgatttaaaaaattatcatcatgaaaataaactaaaagtggtcgaggccagtgatcgtttacacatttatgtagatggagatttagctgctacccaatatcaagagacagtgggagaagagctactcatttcagggcaaactgaaaaagacacacttgcgttagatatcctagtggaaaacttaggtcgcgttaattatggctttaaattaaataatcccacacaaagtaaaggaattcgaggtggagtgatgcaagacattcattttcaccaaggctatcaacactatcccttaactttttcacaagagcaattagccaagattgattacacagctggaaaaaatccattgcagccttcgttttatcaagtaacatttgaattagaacagctagcagacacgtatattgactgtcgaggctacggcaaaggattcgttgtggtcaatggccatcatctaggtcgttattgggaaataggacccattcattcgctgtattgtcccaaagaatttttacagcaaggacaaaatgaagtagtaatttttgaaacagagggaattgaaattgagtacttgaaatttacgaatcaagtaatcatagattaa

SEQ ID NO: 2805 - DNA, 1176 bp, Enterococcus faecalis
ggagtgatggagatgtgtagtcaagaaaataaacaaagactgatctctctaggagaaaatgtcacagatgaatggattcaaacgcaattaaatgaatgcgtttcaaaaattgctaaaaatatgcagcgtttcggaacacagtttccttcagcttgtgctacgaatggtcgatatcgtctcaaagctaacgatgattggaccaatggcttttggacaggcatgctttggctggcatatgagtggtctcaccaagaaaaatttcgtttactggcaatggaaaatattgacagctttcaacaacgattagaggagcattttgttttggaccaccatgacattggttttttatatagtctatcggcgggtgctgggtataaaattaccggtgatgagcgctgtaaacaagaagtgctagctgccgctgaagtattgtcagcacgattccaagaaaatggctccttcattcaagcgtggggccattatggtgatcccaaagaatatcgattaattatcgactcattaatgaatttaccgcttttatttgaagcaactaaattatctggaaatagggtttatgaggaaattgcctcacgtcactatcatacgttaatgaaaacggtgattaaatccgatgcgacaacttatcatacctattattttgatccagaaacaggcaaaccaaaacatggagctacgcatcaaggacatagtgatacttccatttgggcacgaggccaaagttgggcaattttagggattcccctaaacgaaacatttctccattcccaaccatttccagaaatgtatccacaaatagtggaggtttttctaactcatttgccagcagatttaattccctattgggattttgattttaatgaccaaatgccatctgacaaagatagctcggcgctggcaattgcggcatgtggtttattggaagcagacaaactacaggcttttcctcaagcgaaagagcttgccaaaggaatgatttatcaattaggagaatattatcgtacgcaaaatgattccgaaaatgaaggactgctactccatggtgtttacgcacatgcagaaggaaaagggattgatgaacccaatttatggggcgattatttttacatggaagccttaatgcgtttagcaaaaccatcatggcaaagatactggtaa

SEQ ID NO: 2806 - DNA, 234 bp, Enterococcus faecalis
catattaacttattgtattataacgtaaaagaaaataaaaagcgacctttcttgattatttctcttaaaaacaagagcgtgggacaaaaatcactttggatttttgctccacgctcaaaaactgataaacggcgggaacagaaccaacactacgcgttgctccgatctcaacaacttctaagagctaaagctctaagagttgaaggtccttcggaaataagccgaaattgttga

SEQ ID NO: 2807 - DNA, 831 bp, Enterococcus faecalis
aaaatgataaaaatcgaattgaaaaataaagacaatcagattattactggccgaatcgatcacgagaagccagaagcgccattcgtggcggagggagacacgttagcggtattagcaattaaacagtacctttatcaagttggcgataaaattgtagtgacttatacaggggctaccccttatttgatggttcaattagatgaaactttggctccttcattgatttatctaaaagaaaaagtttgggaatatcaaattccattagaagaatctgctcgaaaagcttttgttgatacggcctttcattcagcaaggcaccaaataatggttcgacaagcgcacacgtttgaaaaagacaattatcaaaatctttctatgaatacacatgaccaaaaagaatattcaggagcctatcctcatgcgtatgcaaacgttgaaacgagagacgatgctgttttctttgcgaaaaatgcgattgattctaagtttggtaacctttctcatggctcgtatccatttgcttcttggggaattaaccaaaaaaaggaggcacagttaacgattgactttggcagacctgtagaaacggactggatccgcttgctatttcgggcggactacccacatgatagctattgggaggaagtcactttagctttttcagatggtgaggaacgagtagttgccacaacgaataccacctgttttcaagaaataaagttcccaatgaaaacaacacaaactttgacattaaaatgcttacgaaaagcgctggactcttctccatttccagcgttgacccaaattgaagtattcggtcggaataaataa

SEQ ID NO: 2808 - DNA, 696 bp, Enterococcus faecalis
ataaggacaagcggggaacaccaaggctttatcaaatcccattccaaaaagaaggaaaaaacgccattttcctttgggggttatcccaaacaggaaaatgaggcccttgaaaaattcaaagcaacaatgcgggcgggtaaaaaaaataataaaattttttttatttcacacccgcatttgggtttaagccttctccccaaagcttggtggcgcataaaagagggggggggcttaaaaaaacgtatccgcttttttcttggtgatggtgaatattttcgtgttaaagggaaagttcatgatttttatttaacagaggagcaagtttattataaatggctaccttttcaagaagtagaaattgaaacaaccatttatccttttggagaatggcatgttagagtacatgaaatagtgacatcggttccattaaaagtgcgcgaaggaggattcagtctaccgttacttggaaaattttcagaaaaagaacttggtaaagagtgggctagagtcgattcaggagaattgtgttcgcaaatagttgcaattgaagggtatgaccacgcaggtattcttcaacctgaacccaatacatcgttgtttttcccaagaacaagtttaccttatttgcaaaaagagctaccaataggaacgcatcgcctgatttgtttggtaggtggtgtgacaagggaggaataa

SEQ ID NO: 2809 - DNA, 831 bp, Enterococcus faecalis
gtagtgaagaagtataagcgcttattattaatggctgggttagtgaccttagtttttgttttatccgcctgcggaaccgcgcccgtaagtgaaagtagtacaggaatttgggatcgatacattgtttattattttgcccaagcgattaagttcctatcattaggcggcagtgtcggaattgggattatcctatttacgttagtcatccggattattttattgccgttgatgcatttccaaacgaagagtatgcgtaaaacacaagagttgcaaccgcaattaaaggccttgcaacaaaaatactcttcaaaagatcctgaaacacaacgcttattccgagaagaacagcaacgtttgtatgcagagaataatgtgaatccttacattggctgtttaccactgttggttcaactaccaattatgatggctttgtatcaagccatttcacgcgtgcctgagttaaaagaaggaacgttcttgtggttaagcctcgataagccggatccgtatttaattttaccgattttagcggctgtctttacgtttgctagtacgtatctttcaagtatgagccaactagaaacaaatgcctcactaaaaattatgaattacgttatgccagcgatgatcttctttatggggatttcattagccagcagtttatctctttactgggtggtctcaaatgccttccaaacagggcaaacattgttattaaacaatccattcaaaatccgtaaagagcgggaggaagcagcacgtcaagccaaagcacgggagcgagcgcttgaacgagcaaaaagtcctaagaaaaaagggaagaaaaaataa

SEQ ID NO: 2810 - DNA, 813 bp, Enterococcus faecalis
gaaaaaagggaagaaaaaataaaggaggtcgttcagatgccgatttatgaaggaaatacaatcgaagaagcaacgcagaaaggcttacaagcacttggtttaaccaaagaggatgttacaattgatgtgttagacgaaggaaaaaaaggatttttaggtctaggaaaaaaacttgcccaaatttcaatggaaccaacgattagtgagcaagtcacagaagcggtcgaagaaacagtggaagatattgttgttgccgatgaagcaacagcagtggaagaagcagttgaggaattaaccgaagcaattcctagtctctcagaggaatcaacacattctttagaaaatctggaagacgaagctgctattattgaattagcgatgtatttaacgaatatttcaaatgaactgaacgcccctgccatggttcgcatagcgcgcgagaatggcaatattatcttccatttagaaacagaaaaacaaggtatcttaattggaaaacacggaaaagtgttaaatgcgttacagtatttagcgcaagtctttattcaccgcattgcaagcaataagctatcgattgttgtgaatgtcggaaattatcgtgaaaaacgtcatgaaattttggaacgtttagcgaaacgcaccgcggaaaaagccaaacgtactgggcggccagtcttcttggaaccaatgccggcttttgaaagaaaacaaattcatcacacgctaagtaaagatgagcaaatcaaaacccattctgaaggggatgaaccttatcggtatttagtggttgaaccagttaagaagtatttttaa

SEQ ID NO: 2811 - DNA, 270 bp, Enterococcus faecalis
ataagaatacctgttgattgtaatgctttccaaatcaagcgacgaactgctgcatcatcatctacaaccagtattttctccgtacgcatacctgttgctccccctacgtctctttacaaaactttttcatttgaatttactactggagtaattactgattatcataacataaaaaaagaaacggagacggctaaaaaatcatttaacaaagaaacgttggcaactattcagtccctgctgagagttgccaacgtttctttgtttgtttaa

SEQ ID NO: 2812 - DNA, 747 bp, Enterococcus faecalis
agagacgtagggggagcaacaggtatgcgtacggagaaaatactggttgtagatgatgatgcagcagttcgtcgcttgatttggaaagcattacaatcaacaggtattcttatttaccaaagtgaatcaattgaaaaaacaaaagatatcgtgtccagagttacctttgatttgttcattttagatgataacttggaacatgacagcgatggttactacttagtccaaatgattagagagaaatatccactggtgccaattatcttttttagtagcaaaaaagaagaagaggatatcattgcagccttggaaatgggtgtggatagttatataacgaaacctttttccttgaatgtttttaaggctcaggtgattgcttcgttgaatcgagctcgaatgattcgaaaacaattgaatgtttataaaaaagaagagctacaggtaggcgatttccgttttgattatggtcgttatcaactatttaaaaaggatttacctatttcattgtcttcgaaagaagttcaattaattcaattttttctggagaatcccgagcaagtattttctaaagaacaaatttacagcagtgtttggggtactggggatgtcgatgcgaatacgattatggtttttattaatcgtttacgaagtaaattagaagaaaacccgaaagaaccttgttaccttcggaccgtttggggcattggttatacctttacgccagatggttgcgtacaaaaaaaatga

SEQ ID NO: 2813 - DNA, 756 bp, Enterococcus faecalis
aaccgtaggagtaccttttctcctcggttttcttttcattttgtcttttcttgcgttatattttcatttttaatattatatttattatctataaaaataacctatagggaggtgcctcatatgaatccaacggttgaagcagtaaaacggaacttagatttaactagcagtaaacctctaaaaatttgtacctatgaagcctttaaaaaaaccattattttaggggatattcctgcaggtgaacggattaacgaaaaagaattttccgagcaattaaacattagtcggacgcccattcgctttgctttacaagaattagttaaagaacaattggtggaacatatacctatggtgggtatcgtggttaaagggatcagtatgaaagatgcttatgaaatttatgatattcgtaaatctttggacactttagcaaccattaaagccatggaactcatgacaccagaagattttgatgaattggaagccttacttctcgaaggagaacaatacaataaaaataaccaagtagatgacttactacagaacttttcagattttaattcctttatttatactaagagtcagatgctacgtttaaaaaaaattgtgactgatctccatgcttacttaatctatttcagagatattgcgattcgtgcctcagaacgtcgtagtattgccctagaagaacattggttaattttccgcggaatgaaaacaaagaatattgaccagtatcacacttttaacccatga

SEQ ID NO: 2814 - DNA, 1437 bp, Enterococcus faecalis
cgcttacaaaaaagttctaaaaaagaaaggaagaaaaacatgttactcactattttagcttatggtatgattatcatctttatgtatgtaatcatgaaaaagaaattgtcaccgtttacatctttagtaattattcctcttatttttactttgattgcaattgcaactggagtagcgagtccgccacctggtgctgacggtgttgtccctgaagtcaacattggaaatttcgtcttagatgggatttcaactacttcaaaaactggtattatgttattatttgccattctttacttctctattatgttggatgctggtttgtttgacccaatcactaaaaaaatgatttactttgctaaaggcgatccaatgaaagtcttgatggctactgcggtagttgctgctgctgtttccttaaacggagatggaacaaccacgaccttgatttgctgttctgcgtttattcccatctacaaaaaacttaatatgaaattgatgaatttaggtgtgcttgttatcttacaaaacaccattatgaacttattaccttggggcggtccaacagctcgtgccatggccgtactagaagttgatgccgacattctttcttatttagcacctggtatgattttatctgtattgtatgttatcttctttgttgcttatcgcatggggaaaaaagaacgtgctcgcttaggcgtgacaacgcttactgataaagaattggaagaaatgactattgttaacgacccagaattattagaaattcgtcgtccaaagaattttgcgttcaatggtattttaacgattgtcttaatcggttggttagtcctaagttcattcgttggtcaattaggtttgccttcgtggattgaaatgccaccgttattattgttcctagttggtacttgtatcgctttaatgattaactatccaaaattaaaagatcaaagcagccgcatcagtgcaaatgctggtgatgctgtgcaagtagttatcttagtttttgctgctggcgtcttcatgggcttattccaaggttctggtatggccaatgccttagcaaatagctttgttaatattattccaaaacaattagccggcgcttggggcttagtgattgcgttcatttcagcaccaggaacattctttatttcaaacgatggtttctatttcggtgtcttaccagtcctagcagaagctggacgttcttatggatttgacaatatgtctatggctttagcttccttaatggggcaagcgttccacttattaagtccattagtggcatttatttacttgctattacgtttaactggtttagatatgggccaatggcaaaaagaatcggcaaaatatgccttaggaattttcgttattttcgttgttacaattgttgctttaggtcacatgcctttatttattccacaaaattaa

SEQ ID NO: 2815 - DNA, 441 bp, Enterococcus faecalis
gctagtgttttcactaggttttttaacggttttttctataatgaacgtataccaagaattagtgaaaggagagacaatatgggcctatttaagtccttattcaagaaagagcaacacacacaggataccgagattaatgaaagcgttatccaacgtgaagcggataacttggaaaagcgatggatagatataccagcatatattcctgctgagccaaaagaatatcaattggtaagtattgtggccactgccatcgcagcaggagagtttccagaaagtcgttttgttatcaaaaaaatcgcaaaacgaaatccagaagcaaaagaagttgccattattgcagccagtatagctgcagagctttcagaagagtctcagctagttgtcaaaagaatttcaaaacaaaaccttgaggaggatcattatgttacgcaaatttaa

SEQ ID NO: 2816 - DNA, 444 bp, Enterococcus faecalis
ttgtcaaaagaatttcaaaacaaaaccttgaggaggatcattatgttacgcaaatttaaaatttcaattgatgggaaagaatatttagtcgagatggaagaaatcggtggcgtcccacaaccagcacctgttgcgccacaaccaacagcgccagttgctacgacagaaacaccagcccctgctgttgaagaaaccccagcgtcagcagcacagccagccgccccagcaggagcagatgcaatgcctgcgccaatgccaggaactgtgttaaaagtattagtcaatgttggtgatacggtgtccgagaaccaaccattgttaattttagaagcaatgaagatggaaaatgaaatcgttgcaggaaaagcaggtacggtaacaggaattcatgttacccaaggccaaattgtgaatccaggggaaccattaataacaattaactag

SEQ ID NO: 2817 - DNA, 1134 bp, Enterococcus faecalis
gaagaggaagtgatttgtgtggagacactgattcaaggtgttataggaatgggccaagaaccaggacgcattgtgatgatgctgattggtggactattaatgtatttaggaataaaaaaagagtatgaaccaacacttttagtgccgatgggtttaggaacgattttagtgaactttcctaattccggcgtattgagcgctggcggcgagccaggtccgtttaatgttctttttgattttggaataaaaacagaattattcccgttattattatttattgggattggggcaatgattgatttcgggccattgttacaaaatccatttatgttgatgtttggtgccgctgcacagtttgggattttctttacagttattatggctgttttattaggttttgatttaaacgatgctgcttcgattgggattattggtgccgctgatggcccaacgtctattttcgtagcaaataccttacattcaaaatacatgggggccataatggttgccgcttactcctacatggcgttagttccgattattcaaccagtagcgattaaagcagtgacgacgaaagccgaacgtcgtatccgtatgacttatcgggccggtgaagtttctcaaacagcgaaaattcttttcccggttgttattacgattgtcgcagggttaattgcgccggtgtcattaccattagttggtttcttaatgtttgggaacttattaagagaatgtggcgttttggatcgtttatccattacagctcaaaatgaattggtaaatattattagtatcttgctaggactatctatttccgttagcatgaactatgcagagttcttaaaagtcgatacgttgatggttattggcttagggttagtcgcctttattatggactcagtcggcggcgtgctttttgctaaattcttgaatttatttagaaaagaaaaaatcaatccaatgattggtgctgcgggtatttccgctttcccaatgtctagtcgggttattcaaaaaatggctacggatgaagacccacaaaactttattttaatgcatgctgctggtgccaacgtttcaggacaaatcgcttctgtaattgctggtggcttactattagcctttttaacatag

SEQ ID NO: 2818 - DNA, 1032 bp, Enterococcus faecalis
aaaataaaggaggttattgctgtgagcagcgtatatacaatgaaaagaatctggttgcaaaaagataaaaaagcttatcaagcttggcgcgaattaatggaaaaagccgaattgcaaacgacagaagcacttgattacaccgttggcatatatgatgacacagcattaatcgcctctggctcgctttcaggcaaaacgattaagtgcgtggccgtttgtaaaaaatatcaatctgaaaatttgttaacccaattggtggttcatctacttgaaaaactgagagaagaaaaccaattacacagttttttgtatacaaaaccaaaaaatgaacaaatttttcagtcgctaggctttcaaaaagtggttgcgaatcaagaggtgctatttatggagcaaggcaaaccagattttgccgattatcttggttacctgacacagcataaaaaagcagggccagccagtagcattgtcatgaatgcaaatccttttacgaaaggccatcagtacttagtcgaaaaagcagcccaagaaagtccgcacgtttatgtgtttgttttatctgaagataaatcgctattttcaaaagaagcacgtttcgcaatggtgcaaaaaggggtcgcccatttacccaatgtgacagtcctatctacagaagattacttagtttcgtctgcgacttttcctacctattttttgaaagaaaaagcgccattagaggtagctgcaattcaagcaacgcttgatgcaacgttatttaaagaaagaattgcgccaatacttgaaattcagcaacgttatgtgggagaagagccttattcagaagtgaccgctgtctacaatcaagcaatgcaacaagttttcggacaaacgataacgctaaccattgtcccgcgattagcgagtgatggagagctgattagtgcgacgaaagttcgcaaagcgatggctgaaggcgacaaagagacactcaagaagtttttaccagcaacaagttatcaatacttagtagaacacaagaaactaatgaggtga

SEQ ID NO: 2819 - DNA, 396 bp, Enterococcus faecalis
aggcgacaaagagacactcaagaagtttttaccagcaacaagttatcaatacttagtagaacacaagaaactaatgaggtgaagaaagtgaagattatcaaaaatgctactgcagggacagtagaatcaagtgatattatgattaccgtccaacccattgaatcaacagaaaataccattgaattagaaagtagtgtcgaaaaacaatttggcaatcaaattcgtcaggtgattacgacaactttggaacatttagatgtccaaggcgttgcggtcaaggcgattgataaaggggcattagattgtacaatcaaagctcggatgattacagttttacatcgaggcgctgaaaaagaaacgtatgattggaaggagttggactcatggaacgtttaa

SEQ ID NO: 2820 - DNA, 906 bp, Enterococcus faecalis
ttggaaggagttggactcatggaacgtttaagaagaacaatgatgtttgtccctggagcgaacgcggcaatgctaagagatgcacctttgtatggggcagattcaatcatgtttgatttagaagatgcagtttcattaaaagaaaaagactctgcccgtgttttagtccattctgctttgaaaactttcgattatggcaatattgaaattgttgttcggatcaatgctttagatgctggtggtgcagaagatattgaagcaatggtcttagctggtgtcgatgtgattcgtttaccaaaaacagaaacagcccaagatatcattgatgtcgaggcagtcattacagaagtagaacagcaaaatgacattcccgtaggaacaacgaaaatgatggctgccatcgaatcggccgaaggtgttctaaatgcgcccgcgattgccaaaagttcaactcgcttgattggcatcgcgttaggcgccgaagactatgttaccaatatgaaaacacggcgccatccagatggccaagaactattctttgctcgtagcatgattttacatgccgctcgagcagctgggattgcggctattgatacggtctattcagatgtagacaatacggaaggctttgaagccgaagttcgtttgattaaacagctaggtttcgatggaaaatcggtgattaaccctcgtcaaatcccattagttaatactatttatgcgccaacagaaaaagaaatccagaatgctaaggaagtaatctggggcattcgggaagccgaagcaaaaggttccggtgttatctccgtaaatggaaaaatggttgataaaccaattgttgaacgagctgaacgggtcattgcgttagcattggcggctaaattaattaccgaggaggaaatatag

SEQ ID NO: 2821 - DNA, 1560 bp, Enterococcus faecalis
attaattaccgaggaggaaatatagacatggtagtaaataaagtaggcaaagacattcctcaatcttatgcagagcaatacggcatttatgaaggagaattagcacacattggtgcttatcaagaagcgagccgagcaattaaaccagtgaaacctcgggagacaaaacttttaggaagtattcgtgaagcaattgaaaaaacagggttgaaagatggcatgaccatctctttccatcaccatttccgtgaaggagactatgtgatgaatttagttttagccgagattgccgccatggggctgaaaaacatttcgattgcacctagttcaattgcaaatgttcatgaacctctgattgaacacattaaaaatggagtagtcaccaacattacttcttctggtttgagagataaagtaggagccgctatttcagcaggtatcatggaaaatcctgtggtgattcgttcacatggtggccgggcacgggcagtagcagcaggcgatatccatattgatgtagctttcttaggtgcaccaagttcagacgcttatggaaatgcgaatggaaccaaaggaaaagctacctgtggttctcttggatatgcgatggtcgatgcaaaatatgcggatcaagtggtcatcattactgacacattagtaccatatcctaatacccctatcagtattccacaaacagatgttgattatgtggtagaaattgatgcaattggtgatccagatggaattgccaaaggcgcgacacgttttacaaagaatcctaaagaattattgattgctgaatatgccgcaaaaataattacacattctccttactacaaagaaagcttctcattccaaacaggaacaggtggctcttcactagcagttacgcggttcatgagagaacaaatgcttaaagatggcattaaagcaagtttcgctttaggcggaattacgaatgcaatggtggaacttttggaagaaggcttagtagaaaaaattattgacgtccaagactttgatcatccatcagctatttctttaggggaaaatgccaatcattatgaaattgatgccaatatgtatgcctcaccgcttagcaaaggggcggttattaatcaattagacacagctattttatctgctttagaagtggacacagattttaatgtaaatgtcattactggttcagatggtgtcatccgtggtgcttctggcggacattccgatacaagtatggcttgtaaaatgagtctagtgattgcaccacttgttcgtggacggattccaacaatcgttgagcaagtaaatacagtcgttacaccaggtacgagtgtcgatgtcgtagtaacagaagtcggcattgcaatcaatccaaaaagaacagacttaattgattgttttaaaaccttagatgttcctcagtttacgttagaagagttgaaagacaaagcctacaacattgttggcaccccggaaccaattaaatatggagacaaagtcgttgcgttaattgaataccgagatggtagtctaattgatgtggtacgcaatgtttaa

SEQ ID NO: 2822 - DNA, 552 bp, Enterococcus faecalis
ttgatgtggtacgcaatgtttaatggggaaaaagtaacacttttagagatgttggatgctcgcgaacaaagagctgccacacagaaggagttgttagaaacagcaccagaagctagtctcttatctgccacaatgaatattcctggagaagtaaaaaattcgcccaccttaacggctgtttttttagaagtaattgacgaagtcgagcaacaattgctggatcaagtaccgattgttaatttttaccggaatgaaaaaacaggtcctgaatattatttggcggtttcgttagccccacaagaattaaaacaaagaatggtcaaaattgaagaaacacatccttatggtcgtttagtggacctagatgttttatggggaaatgaggagctaaaaagccttcatcgaggagatttaggcttgccaccacggcgctgttttatttgccaagaagtggcgaaagtctgtggacgaaatcgacgtcacagtcttgaagcaatgcaagaaaaaataacagaaataattttgacacgaaaggagcagccaagtgagtaa

SEQ ID NO: 2823 - DNA, 1416 bp, Enterococcus faecalis
cacgaaaggagcagccaagtgagtaaaaaaattcgttttacagaaacggtgctacgggatggacaacaaagtttaattgcaacacggatgccaacctcagatatgctgccgattattaaaacaatggacgaggcaggatttcatgcattagaaatgtggggcggggcaacgtttgattcctgtgtccgctatttaaacgaggatccttgggaacgtcttcgccaaattcgcaaagaagttaaaaataccaaacttcaaatgttattacgaggacaaaatttactaggatatcgtcattacgctgatgatgtggtgcgggcctttgtcgaaaaatcagttgaaaatgggattgatattattcgtattttcgatgccttgaatgatgtccgtaatttacaaacagcaattcaaacaacaaaagaagctggcggacactgtcaagcagcgatttcttatactacgagtgaaattcataccatcgattactttgtaaaattagccaaagaattaagtcaaacaggagcggattccatttgtattaaggatatggcaggcgttttgacgccacaaactggttttgaattagtgagcaaaatgaaagatgccattgatttacctttagaggtgcatacgcatgcgactagtggtatttctgagatgacctatttaaaagttgctgaagcaggtgcggatatcatcgatacagctatctcttctttcgctggcggtacgagtcaaccagccacagaatctgtagccattgcgttagaagatttaggctttgaaacaggtttaaatatggaaaaagtaacagagattgctgactatttcaatccgattcgtgatcgctttagaagtgaaggcattttaaaccctagagttaaagatacggaaccgaaaaccttgatttatcaagtgcctggtggtatgttatcaaacttattaagtcaattaacggagcaaggtttacaagacaaatatgaagaagttttagctgaagtacctaaagtaagagcagatttagggtatccaccactagttacgccgctttcacaaatggttggaacacaagccttaatgaatgtgatttctggggaaagatattccttaataccgaatgaaatcaaagattatgtgcgcggagaatatggcaaatcaccagcacctatcgcagaagagattaagcaaaaaatcattggggatgaagaggtaatcacttgtcgaccagcggatttattgaaaccagagttgcatagtttagaaaaggaaatccaacaatatgcaaaatctgaagaggatgtcctattatatgcgatgttcccgcaacaaggaaaagactttttaggacgtcgtgaagatcctttttacgatgtaccgttacagaaagtgacagtcaaacttgacttgccagaatag

SEQ ID NO: 2824 - DNA, 1203 bp, Enterococcus faecalis
cggttgttcaaacccttgcttcatcaaatagaaaaaaggcagcccgtgaaaggaagtgacaatgtgttagaagaagttctagcaattcatcaaaaaaatattggtgtgctaagtcttgaagcaacagaagcggtgttaaaccatcatgatttagccaaaatgtatacacctggtgtcgcagaattgagtttaatgattgcccaaaatcatgaattagcgcgcgagtggaccattagtggtaagttaattgcggttattacagatggatcagctgttctgggtctcggcaatatgggcacgcaagcgggcttgccaattgttgaaggcaaagctttactttataaaaatttggcgggggtcgatgctattcctttagcactggaacaaaaatcagtggacgagatggttcaaacaattgaaaatttacaaaatagttttgcaggaatccatttagaagatatttctgcaccaaaatgttttgaaattgaagaaaaacttcaacaacgtttgaacattcctgtgtatcatgatgaccaagaaggcacagccattgtcgttttagctgggctaatcaacgcagccaaaattaaaggaaaacctttaaatgaattgcgtgtggtgattaacggagttggtgcttctggtgtagcgaccgctaagttatgtattcaagcgggaattacgcatctcaccttagtagatcgccaaggtgttttaagagaagaagacccgacattgaatccttaccaacgtgctttgcttcgacaggtaataaaaccatcagtagaaaacaaagatttagccaccgctgtcgtcaatcaggatgtttttttaggcttatcagaagcggatgtgctaacgccagccctgattaaatcaatgaaccaagacccaattatctttgctttagcaaatcctaaaccagaaattgaaccagccctcgcccaagccaatggcgtccgtttattagcaactggttcttccaaatatccgaatcaagtgaacaacattttagtttttccaggtctttttaaagggttattggcagcgaaaggcagaaaagtcgatgtcggtttgcaaatgacagtagcacgaagcttggccgctatgatttcagaacccacagtacacaaattcatacctaatgtatttgatggcggcgtatttgacacgggttttaatgctgtcctagactatatataa

SEQ ID NO: 2825 - DNA, 570 bp, Enterococcus faecalis
tggctgatggctgtttttttatggaggaggcaaattatgacgaaaaaaaatagtatgatgtacttagcaatttctaacttatttcttgtttttctaggcgtaggcctagtcattcccgtaattccccaattaaaagaagaaatgcatttttctggtaccacaatgggaatgatgatttctatttttgcgattgcccaattaatcacatcgccaatcgcaggtgtcctttcggataaaattggtcggaaaaaaatgattgcaacgggcatgttggtgttttcaatttctgagttattatttggtttagcccaagcgaaaagcggtttttatatttctcgtggtttaggcgggattgccgccgctttattaatgccgtcagtgacagcctttgtggcagatatgaccacgatttctgaacgtccgaaagcgatggggcttgtgtcagccgcaattagtggtggttttattatcggaccaggagttggtggttttattgcttatttaggtattcgcgccccgttttttgcagccgcatttttagcctttgtccgttttattttgacttgccaa

SEQ ID NO: 2826 - DNA, 456 bp, Enterococcus faecalis
aggagggtgttacccttgattagaaaaatgaagccaacagatgcagcggcgttaactatcattaataaagaacaattgggctatgaagttcccgttgacgtgacctgtaaacagattgagaaattactactagccagtgacagagagtttttatatgtttatgaagaaacgaagacaggcaagattttaggctatgtgcatgcgcaactgtatgaaacaatttattcccaaacgttattgaacgttctgggattagcagtggcaaaagaagcagaaggccgtggaattggtaaacaattaatgacgaaactagaaacggaagctaaaaagtgtaacttgtctgcgattcgcttaaattcaggggaacagcgtacagcagcacatcaattttatgaacacattggctatgtttctgataaaaaacaaaagcgattcattaaatacttggatacttaa

SEQ ID NO: 2827 - DNA, 789 bp, Enterococcus faecalis
caattgtcaatcaataatggaggaataatcgtggttcatcaattattagctcaaatggaaaatggatatatgaaaataataaaagaaaatttagttggaatatatcttcatggttcttatgcttttggaacctattgtcattcagtaagtgatttggatgtactgattgtggtttatgaaaagcttactattgatgagaagaaacaattattagattatacaattaatattttagataagtgggcaccaaaaaaagggatagaattccatgtgctacaattaaaagatacaataaatttgagttatccgattcccttcgatttacatttttctccgatacatcgttccagatatctgactaataaaaataaatatattgaagatatgatgggatacgatgaggatctagtggcacatcttatgattacaaaattatatggaaaagtactcgtaggaaaaccgattgattccgtttttggctggatagatcaaaagaaatattttagaagtattgtagctgatgtgaaagaggcaaaaaaagaaattgttcaacaacctatgtacgttattttaaatatgtgtagagtaatggcatttaagcaagagaataaaattttatcaaaaagggctggcggggaatggggcctagtacattttcctactaatcatcattcgctgatacaactagctttaaaagagtatcgaggcgaaacagttttgttagagcaatacaatgattcagaattaaatgattttgcggatattatgctttcgttattatttaagtaa

SEQ ID NO: 2828 - DNA, 537 bp, Enterococcus faecalis
aatgaaaacgcttttcgggaggaaatgctgatgtctgagctagtggttattagagaaatgcaagagaaagatatcttagcgctggatactcaatttgtccaacaaggttggccaagtcgccaagagattttaatgaactatttagaagaacaattagtcaagcaacgaacggtttttgtagcggagaaaaaggcaacgctgttaggttatgtgacgttactgccattagctaaggaaggaccttttaaaaatttatatcctgaaatagctgatttcaatgtattcttaccatttcaaaaacaaggagtggggcggttattattaaatcgtgcagaaaatgttgccaaaagttatgcagatactgtttctttgggagtaggcctgcatcctggttatggtgcagcgcaaagattatatatcaaacaaggatatgtgccagatggttcaggagtctggtttcaaaataagcagctgaaaccaaacgaacggtgtgttaatgatgatgagttagttctttatttatcgaaaaaactatag

SEQ ID NO: 2829 - DNA, 333 bp, Enterococcus faecalis
gtgctgcgctttttagagaaatggatgttgtggtatgataaaaaagaaggagtggtttcaatggattaccaagaacgattaaaaaatttaccacctgaagtcatgacagctttttcagaatcatttatttttttaatcagtaatgataaagttcaacattttcctgcacgagacttaacgcaagctgaaatgattcaacgagtgaaagagaaattaggtgaagcggtgacgtggtccttatggcaagggttcgttattgctgttaattcagaagaaacatgtgttgctgttttgcccaaatattatcaactcgatggttttgaaaatgaataa

SEQ ID NO: 2830 - DNA, 576 bp, Enterococcus faecalis
cagcaaaacttggagagttttttccaagttttttgctcttttgtgctggttttcaacaatcaagaaaatggagggaaacagatgcaaccgaaattaattattttacgtggtaattctggtagtggtaaaacaacgatagctaacgcgcttcatcagtgtcttaaagaacaatcgttattgatttctcaagatgtggtgcgcagagaaatgcttcgtgttaaagatgaaacaggtaatctaagtattgctttgttaaaacagttggtagcttttgggtatcaagaatgccagtatgtgattgttgaagggatttttcaaaaagccatttatcattccttttttcaggaaataatccatctctttgaaggaaacgttcaggtttattattttgatatttcttttgaagaaacgctgaaaagacatagccagagaaacaagaatcaagaatttggtgtcgtggaaatgaaacgttggtggctaccagaagattatttagggtttccgggagaacagcggttatctgaacaactgtctgaaaagcagattatcaggcaaattttagcagatattcagtag

SEQ ID NO: 2831 - DNA, 1011 bp, Enterococcus faecalis
tttgaggtgaggaacatcgtaaccattaaagatatagcagagcaagtcggtgtttcttcggcgacagtttcgagagttttgaactatgatgaaacattatcagttagtgatgaaacgaagaagaaaatatttgaaacagcagaaacgttaaattataaaaagcgagccagaaaaaaacaagcaggcaaaaagaaaattcggtttgtccaatggttcagcgatccagaagaactggatgatatttactatttatcgattcgtttaggtgttgaaaagcgggcagaggaattgggttttcttttagtcaaagaatctctgacaaacctgtctcaaaaaagatttgatgggacaattgccctaggaaaatttgatgaaaagcaagtggcggccttagccgccttaggcgcacctcttctatttgtagactttgatgcaatggcttttggccaaaactccattgttgttgattttgctggaagtgttaaaacaattgtgcaagaatttttggcgcaagggcatcagaaaattggtatgctttctgggcaagaatatacgaaagagtcccacgtggcattggttgatccacgttttgtcgcttttaaagaaaccttaaaagatctggacctttatcatcaagaatgggttgtcgaagcagctttttctgttgaagaaggctatcaagcgatgaaagactttattgaagaagcggacactcgtccaaccgcttttttcgctgcaagtgatacattggcgattggtgtaatgcgggcgttacaagaagcagccattcgtgtgccagaagatatttctatcattggttttaatgatattagtgtcgcaaaatatgtttcaccaacattaacaacagttaaagttcatactgaatggatgggtgagctagccgttgagacaatgaaagagttatgcttgaatccccccccagttcctagaaaaattattgtcggaacggaattcattcagcgagattcaacgaaacattcatcaaaataa

SEQ ID NO: 2832 - DNA, 1509 bp, Enterococcus faecalis
ataggagaacatcagatgatgaaagaaagtagtaaatggattgctgcatttgtagagataatcatagaaaatggcgattggacggaaacagaccgctattatttgacgaatcggattgccaaactagttggctgtgatttttttgaacaaccagaagcggttgcttgtgagcaagaaccgttgcgtgtggtggaacatcttttaaatattgcacaagccaatcaccaaatcgatgactcaattacggaagcagaacaactagaagcggagttaatggattttattacgccgaccccaaccatcattaatcagaagtttatggattattatcaagagtctccacgaaaagcaacggattatttttatcagttatgtaaaacgaataactacattaaaacgaaagcaatcgccaaaaatattattttcccaatggactcaccctatggtaaactagaaattaccattaacttatcgaagccagaaaaggatgctcgaaaaattttggctgaaaagaaaatgagtcaaaaaaaatatccagcgtgtatgttatgtatggagaatgaaggctattatggccgtgtaaattatccagcacgtacaaaccatcggattatccgactaaatttagaggacgaagcttggggctttcaatattcgccatatgcttactataatgagcatgcgattttcttggaccaacaacatcgagaaatgaaaatcgagaaaaaaacgttccagcgactccttaaaattacggagttattccctgaatattttgtgggctctaatgcagatttgccaattgttggtggttctattttatctcatgatcattaccaagcaggacgtcatacatttccaatggatttagcaccaatggaaaaaagattttctttgaaaaaatatcctgagataactgctggtattttaaaatggccgatgtctgtgattcgtcttcaaagtgatcgtcaagaggaactagttgaggcggccgaattaattttgaccaaatggcgcaattattctgatgaacgtgtctcagttcgggcctattcaaaagatggcacaccgcatcatacgattacgccaattgcccgacgcaaagggtcattatttgaattggatttagttttacgagataataatgtttcggaggaatttccagatggcatttttcatccacatccagaagtacaacatattaagcaagaaaatattggcttaattgaagtaatgggactagctattttgccaccaaggctggcacaagaattaagagaagtcgaaaagtatttattaaagcaacccaatcaaattgctgaaagtcatcgagcttgggcggatgaactcagtcagcaaaccatcactgaagccaatgtcaaagaagtgatccaacaaggaattgggacaatttttgttcaaattttaacagatgccggcgtctttaaacgtgacgaagaaggtcgtcgtgcttttgaacgatttattcaatgtatagaaaatgattag

SEQ ID NO: 2833 - DNA, 990 bp, Enterococcus faecalis
atgtctattttagtattaggtggcgcaggctacatcggctcacatgccgtcgatcaattaatttcaaaaggctatgccgttgttgttgttgataatttattaacggggcatcgttcagcagttcatgaacaagcgactttctatgaaggcgatattcgtgataaagcttttttacgtagtgtctttgaaaaggaatcaattgaaggggtgttgcactttgcggccaattctttagtaggagaatccgtggagaaaccgttaatgtatttcaataacaatgttcacggcactcaaattgccttggaagtcatgcaagaattcggagtgaaacacattgttttttcttccacagcggccacttatggcgaaccaaaagcaatgcctattacagaagaaaccccaacgaatcctaaaaacccgtatggggaaagtaaattaatgatggaaaaaatcatgaaatggtgcgacaacgcttatgaaatgaaatatgttgctttgcgttattttaatgttgcaggagcaaaaaaagatgcctcaattggtgaggatcacacgccagaaacgcatattgtgccaattattttacaagtggcattgggccaacgagcagagctaagtatttttggggatgattatgatacaccagatggcacgtgcattcgagattatgtttacattgaagacttgattgcagcacatattttggctttagaatacttgaaaaatggcggcgaaagtgacgtctttaacctgggtagcaacaacggctattctgttaaagaaatgttagatgctgctcgcgaagtgacaggtcaagaaattcctgcgacaatcgccccacgccgagcaggggatcctagtacgttaattgcttctagtgaaaaagccaaacgagttttaggctggcaaccagaagtaactgaggtcaaggatattatcgccaccgcttggcaatggcatgtgaaacatcctcaaggctataatgaatag

SEQ ID NO: 2834 - DNA, 1179 bp, Enterococcus faecalis
aaggagcgattagtgatggaagaactgttaatgaatcgatttgtagaaatatttggtgagaaagggacagcctgttattttgcccctggaagaattaatttgattggtgaacatacagattacaatggcggtcatgttttcccagcggctattactttagggacatttggtgtggcaagaaaaagagacgaccaaaaaattcggatgttttctgataattttaaagaggttggtctcatcgaattttcattagaagatttaacctattcagattcagatgattgggcaaattatcctaaaggcgttttaaattacttgattgaaagcggacacaatattgattctggcttagatgtgctcttctacggtacgattcctaatggtgctggcttgtcttcttctgcttctattgaacttttaatgggaacgatctgtaatgatttatatgctttacactgtccaatgcttgaattggtgcaaatcggtaaaaaagtggagaatgaatttattggcgttaattcaggaattatggaccaatttgccgtagggatgggagaaaaagatcaagctattctactagataccaataatatgcactatgaaatggttcccgccaaattaggtgagtatacgattgtcattatgaatactaacaaacgccgtgaattagcagattcaaaatataatgaacgtcgtgcagaatgcgaagaagccgttcgtttgcttcaaaaagagttatctattgaatttttaggtgaattagacagcgagacatttgaacaatatcaagcattgattggagatccagcgttgattaaacgagcgcgtcatgccgtcacagaaaatgaacgaactttattggcaaaacaagcgctaactgaaggggatttggaagaatttggcttattattaaatgcctcacatcgttcgctaaaagaagattacgaagtaactggcattgagttggataccttagtggcttgtgcgcaagaacaaccaggcgttttgggcgcacggatgactggtgcagggtttggcggttgtagtattgctttggtaccaaagcaaaatatagatgcatttattgaagctgttggccagagttatcaagataaaattggctatgctgctgatttttatcctgcatcaattgatgatggtgccagaaagttattttag

SEQ ID NO: 2835 - DNA, 195 bp, Enterococcus faecalis
tcaaaaagaaatgctaagaaaataaatctttatttaattgtattgtacacgttttcaattgaaatgacaattaagaaaatattaagtaaacatttgcaaaagtttagtaaatattgtacaatttgtttactagtgaaaggagcgattagtgatggaagaactgttaatgaatcgatttgtagaaatatttggtga

SEQ ID NO: 2836 - DNA, 1089 bp, Enterococcus faecalis
acaacaaagttaaatttactaaatatttacttaaaggaaggattgattattttgactatttcaactgaatcatttggacaaggaatgcttctttacacactgacgaataaaaatggtgtgactttaaaagcaacagattttggtgcgcgaattgttgcgctcgacgttcctcttacaaaaaatgaatcccgatcactcgtgctaggctttccctcagcagatgaatatttgtctaaagacttatattttggtgcaacaattggtcgaacagctggccgaattgccgatggctcctttgaactagcgggtaaaaagtatcaaacgatgattaatactcctactcaaacaacacttcacggtggcacacctgggtttgaaagtaaaaaatggcacagcgaaatccaagaggcacaagcgaatccttctgtgaaattttggctagagagtcctgctggtgaaaatggttttcctggaaatctcactgtttcagtcacgtatacattgactgaagaaaatgaatggcaaattgagtatcaggcaactacagatgaacaaacactttttaatccaaccaatcatgtctactttaatttaactggaaatcctacaatccccattgatgcgcatgagttacaaataaatgcccaaaagtttgtcccgcttgatgaaagagttttaccgcttggagaattagcttccgtcgaccagacagcttttgatttacaaaaacctaaaaaattagctgaggttttttcaagtaacgatgaacaaatccaaaagatgaacggcttcgatcaccctttcatcttaaccaatcatgatttaattaacccggatgttatcttaaaaagtcctactaaagatatcaccttagagatgttcactgatcaaccttcagttgttattttttcagcaaattttgctgataacggtcccgatattcaagggcaaaaattagtcaatcacggagcgctcacatttgaaacccaagtctgtcctggtgctgaaagatttccgttgttcggttctatcaccctctcacctgaacaggaatttcactcaacgacccgtttcaaactaatttattaa

SEQ ID NO: 2837 - DNA, 219 bp, Enterococcus faecalis
gagcacttctattatttgacatttttaatcgctccatttacactattttcaattagaaaggcggtgatgtctatgtatgcaatcaaattttttcatggctatttaactgcagatggtaaacgtacgcgagataaatcaggttgtttagtttaccactctgaaaaagaagcacaaaaattagcagataaaattggcgggagagttaaaaaaattggataa

SEQ ID NO: 2838 - DNA, 651 bp, Enterococcus faecalis
aggagcgcttacatgaaacaaaatgactttgattatatgcaaatgttaaaaggtgaattatattacgcccccaccattttacccgaaaacaaatcaacaaaaggcaaggtgttagctcaaaaaatcaatcaacttcctatcgataatgtgaaagaaattgtggccctagaaaaagaattattaggaaaaactggcaatgagttatatatcaccccacccctccatgtagattacggtcgccatattgaggtaggagaaaatttttatgcaaatatggattgcatttttttagatgtaaacaaaatcatcttcggtgataatgtcatggttggccctcgtgctagtttttatactgccggccatccaattgatccaacgattcgaactgcagaattagaattcggtacgccaattattgttgaagataacgtgtggattggcggaagtgccaccattttacctggcgttacaattggaaaaaatgctattgttgctgctggtgctgtggttacaaaagacgttcctgccaacacgattgttgggggtaatccagcaaaagtcattcgcaaaattgatgaaaacgatcagcaattttggacagaaaagcaacggcagtatcaaatcgctaagaagcaattctttaatgaataa

SEQ ID NO: 2839 - DNA, 387 bp, Enterococcus faecalis
aagaaggtgagtcatttgttagagctgtatataaattttaaaggtgaagcaaaagaagcaattgcgttctatgaagatgtttttgatacaaaatgtcaaaatttaatgacttttggcgaagcacctgaagatcctgagcatcctataaacgacgagataaaggatttagtgatgaacgcaagtatcattattgaaggaacctatgtaatgatttcagatgttcctgatatgtttggttttgaagttacggaaggaaataacctttcgctcgtggttagcacagatgatgatgaaaaaattgatcgcttatttaagcgattatctgaaggtggcactgttacaatgccgtttctgaaactttttggtccaaaaagtatggttccctaa

SEQ ID NO: 2840 - DNA, 534 bp, Enterococcus faecalis
cacttttgcgtatcttcctttataataagacaaaatgaaggagatgaaccaagcatgactgaacaaacgagagaaaacaaaaaagcagcctacgaattgtgcttacaacaattgagcggtttgttagaaatagaaacggatgctattgcaaatttagcaaactcgtccgcgttacttgcacaaacattaccagacaccgtttttgctgggtattatttatataaagatgaagaattagttttggggccttttcaagggaaagtctcttgtaccagaattaaaatgggcaaaggtgtctgtggtgagtccgcggaaaaacaagctacattgattgttgataacgtgaagacacacgccaattatatttcttgtgactcagctgcgatgtctgaaatcgttgtaccgatggtaaaaaatcatcaattggtcggtgttttagatattgatagtggtgtaacaaatagctatgatgcggttgaccaactgtatttggaaaaatttgttaccttgttactagaaaaatcagatttttaa

SEQ ID NO: 2841 - DNA, 555 bp, Enterococcus faecalis
atcgatatccacttgcatgataacggggaagtgggcgtttatacaattgataaatttttagacattttagaagaacgaaaatttactcagcgaaccgctatcagtcacgcctttgcgctgctagatgtacgaccagcagaaaaagaaaaactataccaacgcttggcaacgcatcaaacggcgattatgtctacaattccctatgatcctcgttatttattgccaccaattgatgtgttacgccaagctggtgtatcggttcatttaggtagtgatggcttttttgactcttggagttctaatgtttcaggtgatttatttgaaaaattacgtaatttttgtgaaatgacaggaaagattacagaagagcaacttactcaagcttacgtccatggctgtggcaaagtagcacctttttcatttgaagaagaacgcctttggtttacagaaggcgacgaagcaaactttatttttacagaagcagcttctacagcagaagtgattgctagaaaaccacagaaacgccagattatgttgaaaggacaatgggtttaa

SEQ ID NO: 2842 - DNA, 687 bp, Enterococcus faecalis
agccgttcaaaagggggaaaaagaatgacagcatccattgtttatttgaataatgttcgtttagaaactggttttgctaaagaccaccacgaattaacgtatactaaaaccgcacgctatactttagcgattcaagaaggcaaaatccaagcgattattccgcaaaatcaagtcactgaaaagcaacaaggcactgatttaaacggacaactggctattcccgcttttcaagagagtcataatcacttagataaaacctacctttcattaggctggcgtgctagccaacctgttaaaaatttaaaagagcgtttagcagacgaagccagtgaacttaaattgttagctccgtcaacagaacaacgagcgacggccatgattgaaaaattgattgggtatggagcctcttatattcggacacatgtcaacattgatccttatgtagaactagaaaacttctggggcgtcaaaagagccttagaaaaatatgcgcatgtgattgattatgatattgttgtctttccacagcatggattattaaaaaatccccaaacggttttactcatgagagaagctctaaaaaatggtggaacaatggttggtggtttagatcctgcaggcattgattatgcaattgaagaatctttagaaactattttcgatctggcagaagaatttcaagtatga

SEQ ID NO: 2843 - DNA, 1251 bp, Enterococcus faecalis
  misc_feature (251)..(349): Nucleotides 251, 308 & 349 are "n" wherein "n" = any nucleotide.
ttgaatgaaggtaggaaggggtttgtcatgcttttagaaaactgtaaattagaaacaggattttctactgtgaatcagcgaattgttgcgacagaaacagctagctatgatattcgaattgaaaacgaggtctgtactgcggtcgcaccgcagttaaggcctttagagaacgaaacagttatcgatgtgaatcagcaactcgttttacctgcgctaagagaaatgcatattcatattgataaaacgtattntgggggaccttggaagccatgtcgtccactaacgaaaggaattttaacacgtattgnagaagaaacttggctgttacctgaacaattaccaactagtntagaacgtgcttgccaagttattgagcagtatattcaacaaggccattatcatattcgcagtcattgtaatgtagatccatctattggaacgaaacatattgaaattactaaagaagcatttagtcgatatgaacaatacattactcatgaaattgtggcttttcctcaacacggattactccgctcacaagtcgaacctttgatgcgcgaagccttacgcatgggggcaactcatgtcggcggcgttgatccagcccttgtggatcgtcatgtggatcattcaatcgcaaaaatatttgaattagctaccacatttaataaaaaaattgatgttcatttacacgcccgtgatactttgggactttatgaatttaataaatttgttgattatacagaacaagcaaagatgtttggcaaagtcactttaagtcatgctttagccttagggagcttagaagaagcagcaattagagacattgcgcaaaaattcatcgaaacaggtattgatttgacttcgactgtaccaattggaatgcccaccatgccgattccaaccttggttgaacaaggtgttaagatctccgtggctcatgacagtttgacggatcattggtcgccttttggcagtggcaatacaatagaaaaattaaatacagccgctcaaagatttaaaattagcgatgagtatcgcttgaatcgtttatggggcttagcgagtaattttgtaacgcctcttgatcctaacgggcagcaagtttggcctaacgtcggcgattctgcagatttcctactatttaatgctgagagcactgctcacgtgattgcacgccaacagccaatccaacaactgatactaaaaggacaactggttgaagccgttcaaaagggggaaaaagaatga

SEQ ID NO: 2844 - DNA, 1677 bp, Enterococcus faecalis
aatggagggatcggtatgaagaaattaaaaatgttaggatgcgtcgggttgcttttagctttaacggcttgtcaggcgggaacgggaaactcggctgatagtaacaaagcagcggaacaaaaaattgcaattagttctgaagcggctatttcgacaatggaaccacacacagcgggggatacgacctcgactttagtcatgaatcaagtttatgaaggactctatgttttaggtaaagaagatgaattagagttgggggtcgctgccgaagaaccagcgatttctgaagatgaaaccgtttatacatttaagattagagaagatgccaaatggtcgaatgatgatccagtaacagcaaacgactttgtttatgcatggcaacaagttgcttcccctaaatcaggatcgattcatcaagctttattttttgatgtcattaaaaatgctaaggaaattgctttagaaggcgcagatgtgaatactcttggggttaaggcgctagatgataaaacgttagaaataactttagaacggcccaccccttatttgaaatcattactttcgtttcctgttttgtttccacaaaatgaaaaatatatcaaagaacaaggggataaatatgctactgatgcagaacatttgatttataatggtccttttaaattgaaagaatgggataatgcctcttctgatgactggacctacgaaaaaaatgatacgtattgggatgctgaaaaagttaaattaacagaagcgaaagtttcagtaattaagagcccaacgacagcggtgaatttgtttgactcgaatgaattggatgtagtgaataagctaagtggtgaatttattcctggttatgttgataatccagcctttctttcaattcctcaattcgtcacatactttttaaaaatgaacagcgttcgtgatggaaaagaaaatccggctttagcgaacaacaatattcgtaaagcgttggcacaagcttttgataaagaaagttttgtaaaagaagtcttgcaagatcaatcaacggctacagatcaagtaattccgccgggacaaacgattgcgccagatggaacagatttcacaaaactagctgctaagaaaaataactacttaacctacgatacagcgaaagcaaaagaattctgggaaaaagggaaaaaagaaattgggctggataaaatcaaattagaatttttaacagatgatacagacagcgccaaaaaagctgctgagtttttccaatttcaattggaagaaaatctagatggattagaagtgaatgttactcaagttccttttactattcgtgttgatcgtgatcaaacgagagactatgatttagaattatctggttggggaaccgattatcgtgatccattaacagttatgcgcatctttacttcggatagtaccttgggcggcgtaacgttcaagagtgatacgtatgatcaattaattcaagaaactagaacaacacatgcggctgatcaagaggctcgtttaaatgactttgctcaagcacaagatattttggtgaatcaggaaacggttttagcaccaatctacaatcgaagcatttctgtattagctaatcaaaaaatcaaggatctgtattggcattcatttggacccacgtacagtttaaaatgggcttatgttaactaa

SEQ ID NO: 2845 - DNA, 1095 bp, Enterococcus faecalis
ttcatacaaaaggaggccttgctaatgatgacggtcaatgatctactccatgcagaagaactacctggtttaaccttattgacgcacgagaccaatttagatgcgccaattctacaagcaaatattttagaaaatcctgatgcttttgactggttaacgccaggagaaattttattaactaccggctatattttcaaagatcagccttgcttgcaaaaacgtcttattcaagaactagcaaatatgaactgcgctgctctaggctttaaagtccaacgttatttcaatgaagttccacaagagatgatccaattagcgaatgacgtcggattaccaattctctcaatcccttataattacaacttttctcaaattatttcattggtcaatcgccgagtcaatcaacctgacgaaacgattagccaacattctgttcatatgcataataaattttatacaattatcaaagctggcggaaaaagtacccaattactggaagtattaagtgccgcgattcaagcgcctgtaatgcttttagacgagcgttttcagattatgaatcattttgatttacctgatgcgccaacaagaatcaccagtattttaaataacgcgactctcaaaaaacagtttgagacagctttaaaagcccagaacaatgagctcctattattttataaagaaccattgactgttgaattttccttagcgaaccatcagttatctttgcgaattttacccatcaaaaagaaaaatctcagcttatcttacttagtgatttggcaaactaccaaaaaattacagacgattgatttattatctgtggaggtctgtgctcactaccttttaccacaacttcaattagaatcttcggaaaatttaacaacgatgctaaagatcggggcgctgtttcaagaccttatccaagaaaaaaataccaatcctcaagcttggggggaatttagtaattatctgcaattaaatgaaaaagatacatttagtctcttgcttgttgccattgaacaattggaacaactgtttaatccgactatttcgatgaataacattgggcatcaattgaatcatattttataa

SEQ ID NO: 2846 - DNA, 543 bp, Enterococcus faecalis
gaaaatcctgcgcaggaagaagccacctaccttgcacaaaccactcatcttgccaagaatttactagagcaactaatgaaactgaatccaaaattatcatttaaattagcgattgggccaactgtcaaaaaaatcaccaatctgtgtgattcttataaattagcacaagaaacattccacttagcacaagcaagtcaagaattacaacaacgaactattttgaattatgacgacctctttttttatcgtttaatgatcgaaaccctgaccaaacaagccaaacaaaaaatatatcaacgattgattgaaccattagaaaaagaagatcaaaaacatgaaagttccctactagaaaccatcaacacctactttcaatcgaataaaaatatttcgttgactgccacaaatatgtatgtacatcgtaatacaattatttaccgcttaaaaaaaatagaagagattcttcacttaactttagaatttcctgatagttcgctacaactaagtttggctgtttatttatataaacaaaaattactataa

SEQ ID NO: 2847 - DNA, 222 bp, Enterococcus faecalis
ccaagcagcttatatggctcgatatgcaccaatttctgtaatgattattcgctaacaaaattgaaacagttaaaaaagccgccacgatttactattcgtggtggcctttttatagtaatttttgtttatataaataaacagccaaacttagttgtagcgaactatcaggaaattctaaagttaagtgaagaatctcttctattttttttaagcggtaaataa

SEQ ID NO: 2848 - DNA, 429 bp, Enterococcus faecalis
ataatgaaattttcaaaaattatggttggtgttgaagagtcgccagatgcgttaaaagcatttcattatgctatccaaaaagcaaaagaagaacaagctgaattggttattgtttcgattttagaagagaaagagattaatgtttaccaatcgttagataaaaattattggcaagaacagttggcgaaattagagaaacaaacggaaaaatatcaacaagaagcgttagcgaatggcatcgataaagtaagtgtaattgtcaatgaagggaacccaggagaattaattattaataagcttattcctttgaataaaccagatttgttaattattggctccaagtcaactagcaaattaaaaagcttttttggtagccaagcagcttatatggctcgatatgcaccaatttctgtaatgattattcgctaa

SEQ ID NO: 2849 - DNA, 882 bp, Enterococcus faecalis
  misc_feature (13)..(84): Nucleotides 13, 22, 24, 34-36, 38-45, 64, 69 & 84 are "n" wherein "n" = any nucleotide. 1               5
cattccccttatncccgggcgncngtgccaattnnnannnnnnnnggctctcgggcccccaccnctccnccttttcccttctcntcctttcccttcctttccctcttttcttcctccccccttctaactatggcaacttgcgttaactctttattattgattatgggtgtggccgtttttaaatccggcagtgtcaaagatccttcattctttggtttgtttgatgctttatcaaatccagcggttatgagtaattctattttagcgcatattgcaggttctggaattttatcaattttatttgcggtagccttattggcatcaggacaaaattcaacaattacaggaacgttaactggtcaaatcattatggaagggtttattcatatgcgcgtaccaatttggttacgtcggatggtcacacgtttgttatctgttattcctgtcttaatctgtgttttaatgaccagcggaaaaagtacagtggaggagcatattgcgattaataatttaatgaacaattcacaagtttttctagcatttgctttgccattttcgatgttgcctttactgatgtttacagatagccgtgttgaaatgggtgaacattttaaaaactcgtggttaattaaattgttaggctggggtttctgtcattggcttaatttacctccatatgaaaggtttactgatcaaattgaacgattcttcggtgataatccgacagcgagtcaaattacgttagccgataatattgcctatgtcatcatagcactcgtcatcctcttgttagtttggacggttgtggaattatataaaggcgataaacgatatgcacagcagcttgcagctatggagcaacaagtagaggaggttaaataa

SEQ ID NO: 2850 - DNA, 267 bp, Enterococcus faecalis
accattgaaggcacaatagtaggagggtttaaattgaaaatttcagatgtcacagtgtataaagtaaaaccaagatggatttttgttaagatctcgactgacgaaggaatcgaaggctggggagaaatgatctcaggaactaaaacagaaacggttgttgctggagcttatgagataggaaaccggctgattggacgtaatccgtttgaaatcgagcgcctcttccaacgaaatgcatcgatctttcttccgaagcggtcctattaa

SEQ ID NO: 2851 - DNA, 573 bp, Enterococcus faecalis
cttcattatctatggaaggatagatgccaatttcagatgctgcacaaaaatggtcacaaaaaaaatcaaaaggtacacgtttatttatcggattggatgctgcagttggtgttagttaatccagatgttatcacaacagaattgatcattattgcactaacgattgcattagctttagtattgccaggaaaccgtgtgttaccattcgcagatttagcggttgttcctttccgcgtggcaatggtcgttgccttgactcgtggtaatttattaaaaaatatcattattggcttagttgtgacagcttcattgctatggtgtgggtcagctactgcgccaatgctgacagcaattgccaaatcggttggtattaacttaggaacttcttcaatgttaatctcatcatttgctgcgacttccatgatccaaagttatttggtatttatcgcatttgcttacaaaccaatcatcggtattccagtgttgttattagcctttgcgggcgcatggtattacttcgatggtatcaaaaaagttaatcatgaaatggatgaaccattgaaggcacaatag

SEQ ID NO: 2852 - DNA, 186 bp, Enterococcus faecalis
ctaacaccaactgcagcatccaatccgataaataaacgtgtaccttttgattttttttgtgaccatttttgtgcagcatctgaaattggcatctatccttccatagataatgaagtcatcttaggtatcaaaaccaaaacagctgacatgctgacacctaattgtcaaaccgctttgatatcatag

SEQ ID NO: 2853 - DNA, 768 bp, Enterococcus faecalis
ctgatcaaaggagctgaaaaaatgaaaatcattatgaacgtctttaacttctttattgacgctggaccaacagttatgttgccagtcatcatcacgattattggtttgatttttgggttaaagatttctcgtgcttttaaatcaggtttgacattaggtatcggttttgccgggatcaagttgatattggactttatgacgaccaatgttggaccagctgccaaggcgatggttgatcgaactggtgttaaactagatgctttggatgttgggtggggttcgattgcggctgttacttgggcatcgccaatcattccaatcttgatttttgccattctattggtcaatatcgttttgctgattttgaaacgtacacatacgctggatgttgatatctggaactatcaccatatggcaatcgttggtgttatggtgtattttgtgactaaaaatgtctccttaggtgtaggtgcatcagtagtgatggcaattgcgacttttaagatttcagactggtcgcaaccgatggtagaaagtttcttcggaatccctggtgtttctttaccaactgtttctgcgctctcatcactggttattgcttggccgttaaattggctgctggatcgtatcccgttattcagaaaatcaaaattcaccatcaaagatgcacaaaaatatttgggattttttggtgattctatgatcatggggttagttatcgggatggtgattggtgtcttagccggctatgatatcaaagcggtttga

SEQ ID NO: 2854 - DNA, 297 bp, Enterococcus faecalis
tataaggaggaaatcataatgaaacgaattttagtagcatgcggaaatggtatcgccacttcaacagtagtagcaacaaaagttagagagtatttgcaacaacatggcattgatgtttcaacgactcaaacaaaattgatggaagttccaggaaaagttcaagactatgatctattggtgacgactggtcaatttgatggtcaaacaggtggtgtaccagtaatcaaagggatgccgattttaacaggtatcggtgccgatcaaacaatggaagagattttgaacttactgaaataa

SEQ ID NO: 2855 - DNA, 474 bp, Enterococcus faecalis
ataggagtgaggcctttggaactttatttgaatgaggaactcgtttttcgaaatgttcaagcaaaaacagatagtgaagtcttagcgtttttggcaagcgagatgtacaaaaaaaactacgtgaaggaggaatatattcaagcaatccaagaacgggaaaaagaataccctactggattaccatcaacaccaccaggaatcgcaattccccatgcaaactatgaaatggtcaataaaacaactttagcaattgcgactcttaaagatccggtcctatttcataatatggaaaataacaatgagcagttaccaatccaaattgtgatcatgatggcgattggggaaccacatgggcaagttgaaatgttacaaaaaattgttggaatcatacaagatgagccactgcggcaagaaatgatcagagcaggcaatgatactgaattattagaactattaaagaaagcggttttttaa

SEQ ID NO: 2856 - DNA, 645 bp, Enterococcus faecalis
gacaaagatcttaaggaggaaaacatgagactagcagattatcctaaattgacagtgatcatgcgtggttatacttttgatcaggcagatgctattttacaagcaatgcaggaatttgaccatcaatttgccgtagagatgacaatgaacacaaaaggagctcttgaaaatatacatgaactaaatcaacgttatggtgacacgacttatatcggcgctgggacggtaaggacattagaacaagcccaagcctgctatgaggctggtgcaaaatttttattaggaccacatatgttcacaaaagaaatgttgtcttacgccaataagaaaggattattggcggtacctgccgcaatgactccttcagaagtcgaccgtatgtttaaagaaggagctgatattgtaaaagtatttcctgcagcggttgttactccgcgttttttcaaggatattcaagcacctttaggtaagttaccactaatgggggttggtggaatcagtaaggagaatgcgaaagagttttttgaacaaggtgctagctatttaggtcttggttccggtatgttcaacaaacaagacatcgaagagctaaatgttaaaaacttagcacgttcgatgaaagaattaattgaggttattaaatag

SEQ ID NO: 2857 - DNA, 2103 bp, Enterococcus faecalis
aagctttccggaaacgtatgtgaacaagtatataatgattttgtcaggaggatagtcaaaatgaataaacgaattcgtgaaatactcaaactgattattaaaaaccctgaaatgaaactttccactttaacaagtgaacttgatttgacacgtcgtcaaatcaattacgcgatcaatcaatttaatgaagaattgaaaacaaagaacattccgttaattcagagaagtcattctggaaatattacggtaccaatcgaggttatccaaatgatatcacagcctgattacgacataggtgatgatcaggaacttgtcgttctcactgatagtgaaagacaagcattgatagtgatgactctgatcgctaatatcgattacatcagtctagatcatttggtagatgcggttgatgttagtaagacgactgttatggaagatatcaaacgaacggaaccgttcatcagaaattatagtctgacaattcgatataatcggatgaatggttaccaattggttggttcggaacaccgtatcttacagctgttatcggatctagtaaaacggtatccgatttttcgccgagaaatgattcgcagaaaattggcacaagatgtttctgaagaagaaatcgtccatttgatccataacatggaacaaatgttgcatcttagttattctgatgagtcggtagactatttgcagacatcagcgagatttttagtaagccgtgggatcaagatgtcagataagcacgcgttttttcccgatgatgtgacggatactcctgaattccgaatgctgatgatcttggtacatgaaacaggttggagtctatccaaaagttatatggagtggttcacgttattatttttaacttccaatatttttgagagcaaaactactcaaaattatgattcggatcaagaattgcgaaaattgatcagccaaatggttgaaaatttccaaaatcaaacgttgattttgatcgatgaccgagaagactttgaacgtaggatactgagtcatctgcgtccagcctgttttcgaatacgctataacttgagtttaggagtttattcaatagatagtctgatcaaggatagtaatcatgcgattttgattgatttgatgaaagaattgattattcctattgagaattggctaaataaggcctttccaaatgatgaattagatcttttatcctattactttggctatcaattaagtaatcataataaattgaataagcaacgacaaagggctgtagttgtttgtactaatggtgtcatggtctcaaagttagtacgagccaatatggaaaaactttttccagagatccattttttagcttccctatctgtgcgtgatttctacaaatttgaagctgattatgatctggtctttactacgacgccactaaaaagttctatgctgcagtttatgatcgagccaatcatgacatatcagcaacaaatcagtttacgatatcgagttttgagtgatttaggaattactaaggttgatcgagcaatggatgaattgttaacaatcattaggaaatatgcaaatatcaccaatccagtttcgttgcgagaagaactgcagtactttttgatcaaggaagatggaagcacgccgctggacaacttcaaggtattgccttcattgacttattacttgcggccgagttatgtacaaatcgttgaagaagagatgtcttgggaacgagcagtggaggtggcttgccgaccgttattggaacatcaaatcattgactcgcgttttatcgctgattgcttggatcaaatcagacaaccgggatatgcaggttacttgggaatgaagacttgcattccccatacaacggtcgataaaggtgtaatcagtgacggtgtcagcattttagtttgtaaaaagccgatacgatttcctaatggtgaagatgtcagcttgattttgccgctttcattttttgatttaacgaagcatctgcgagccatcaatcaaatcgctgatatcgccaaagatgattcattgattgagcagttattgattgctgatgacgaaaagacagtttatcaactattaagacaaagatcttaa

SEQ ID NO: 2858 - DNA, 1245 bp, Enterococcus faecalis
aaaggcgatttgaatgaattattccgtgtccatttggaaaaagctgtcaatacgcttctcaaaacggagttaacggctttcctcgattacgaaaagtacgatcgcattggttttaacacgggtaattctcgtaacggctcctatgaccgtacggtcaagaccgagtacggggaacttcatctccagattccgcgcgaccgcaacggcgagttcaagcaacagactgttcctgcttatagacggacgaatgataccttagaggagaccgtcattcacctcttccgaaaaggtattaccatgtcggaaatcgcagacttgattgagaaaatgtatgggcatcactacacgccccaaaccatgtccaatatgactaaatcatttacggaagaagtcacttcatttaaggaacgtgagcttcatgaccgttatgccgctatttatatggacgcaacctatatccctttaaagcggaaaaccgtcgccaaggaagccattcatatcgcagttggcattcgcccggacggttcaaaggaagtgttgagctatgcgattgcaccaactgaatctatcacgatttgggaagagattttaatagacctccaggaacgtggcgtgaaaaacgtcctccttttcatcacggatggcttaaaggggatggcaggggccgtgcagcggttctaccccaaagcccgttttcaacattgctgtgtgcacgtttcccgtaatatcagtcacaaagtgcgtgtcgatgatcgtaaggaagtctgtgatgattttaaaatggtgtatcaagcgtcatctaaaaaggcggcattggaagcacgtggtgcttttgcggaaaaatggaaaaccagttatccaaaaatggtggaatcgatcctttcgaacgattacctgctcactttctatgatttcccattagccatacgcaagactatttactctacgaacttgattgaatcctttaataagcaaatcaagaaatacagccaccgcaaggaacagttccaaaatgaagagtcgatggaacgtttcttagtctcgtcttttgatacttacaaccaaaaattcctaggtcgcagtcataaaggtttccaacaggccgaaggcgagctcgaacaaatgctgagtcaaccgatggagaattggaaacaatctacagtagggaagaaccatttacacaaaattattgacgctcccaaaagcattgtttttagcagtttaatattattctttttcaattag

SEQ ID NO: 2859 - DNA, 588 bp, Enterococcus faecalis
aatatgtcaaccacaattgaagtgaacaaacaaagcgtgaagcagtttcttgaaactgggaagatcaaaaaatttgttattccagaatatcaacgtccctatgcttggactgacgagcaaatccaagtactgtttgatgatttagcggagtacacagcaaacaataacgagagtacttactttttgggaagcattgtggcttatgaaaatgatcataacgagcaagaaatcattgatggacagcaaaggataactacgctatttttatttttgagagctatctatgctaaattagaaaatagttgtgaaaaggaagctttattcttgaaaagccaaattgaacctgcgttatgggaacaagatgacttaacaggtgaggttaaaccagataaaattctgattatgtctcgagtaatgtgggacgaggggaatgaagaatttgctagtattctagtaagtggtgaagcagatgttaaatcaaaaagtaattattcgaagaactatattttaattcaacatctattaaatgagtatgcaacaaacgaaccactatcattttatcgttttatcagtaaaaaggcgatttga

SEQ ID NO: 2860 - DNA, 3045 bp, Enterococcus faecalis
gaggtgattcatttggtagagaacaaagaaattcgttttgagcaggatattgagacttcactgactacgtatggcaaatggaagaaagaaacattcaatgaatcaaactttgatcccataattggtttggattgtcaaaaattgctaggctttgtccagaagactcaaccaaaacagtgggtacgtcaccaacgaaactataacaatgatggagaagtcaagttccttcaacgctttaatcaagaggtagaaacccacggcatgttacatgtattgcgcaatgggatcaaagaccgcggtgtgcgctttaaagtagcttacttcaaacctgcttcagagctgaatgatgaaaggatggaaaagtatgaagcaaatagttttacctgtactcgccagtttgcttacagtcctaataaccataaaaccattgatatggttttgtcgttaaatggtattccgctcgttgctttagaattgaaaaaccagtacactggtcaaacagtagaaaatgccaaactccagtttcaaaaagatcatgatccaaaagaattggtatttcgttttaatcgccgcttcttagtctattttgcggtggaccatacagatgtttatatgacgacaaagttggacggtaaaaaaacgtacttcttgccattcaatcaaggttccaatgggccgggaagagttggtggagcaggcaatccgtccaataaagatggctacccaactgcctacttgtgggaaaaggtgcttactagagacaatttgatggatattatccaacgttttatgaatctagagattaaaaaagaaaagcaaggcgacagagaagtcacaaagaaaacgttgatttttcctcgttatcatcagttagatgtggttcgaaaattggttgcagatgtaaaaagccatggtagtggagaaaattatttgatccagcatagtgctggttctggaaaatctaatagtattgcatggctggcataccatttagcctctattcatgatcaactgaactacccaattttttcatcaattattattgtgactgatcgaacagtattggatcgccagttgcaaaatactatcatgaactttgatcatcagacaggtttggtagaaacgattgacgatcgcaaatcctctcaagatttaaaagaagccattaatgatgggcgtaagatcattattaccactttgcaaaagttcccagtgatctatcaggaagtagatcaagtggaaggtcgtaattttgctgtgattgtggatgaggcacattcttcacaaactgggaacagtgcccagaagctaaaagccgctctttcggacaaatctaaatccttggaagagtattatgaactggaaggcgaagttgacgatgtattaccagatgctgaagatgaactagttcaacaattggcagcacaaggtaaacatcaaaatttaagtttctttgcttttaccgctacaccgaaagaaaagacattggaaatgtttggtacgaaacaaccagatgggcatttcgaaccctttcatgtttactcgatgcgccaggcgattgaggaaggctttatcttagatgtgctgaagaactatatgacctatagtacttcctacaaaattgcccgtgaaattgaagataacccagaattaccaaagagtgaagcaacccgagcgattgttcgtttccaatcattgcatccttgggcagttgctcaaaagacggctgtgatggttgagcaattccgagcggttactcgtacagctattggtgggcaggcaaaagcaatggtcgttaccgcatcacgcttacacgctgttcgctatatgaaagaatttaaaaaatatatagcgaacaaaggttataatgatttgaatgtgttggttgctttttctggtttggtagtacatggagagactgaatatacagaaacgaagatgaatgtcacaaaatctggtgagaatgttcgggagaatcaattaaaggaagctttccatacagataattttaatatcttgattgttgctgaaaaatatcaaacgggttttgatgaaccgttgctgcataccatgtttgtcgataagaagttaaagggtgttaaagctgttcagactttatcacgactcaatcgaacaatgcctgggaagaaggatacctttattcttgattttgtaaatgatgttgaagatattgaagctgctttccaacccttttatgaacaaacaaatttgagagaagaaatcaatgttaacttgatttatgatactcaaagcaagctacgaaaatttaatgtttacaatcaaggtgatattgaacgtgtcatgaaattggtgaaacaagcccaaaagcaacagaatgagcgcttgcttggacgaatttctagcatgtttaagccgattatggatcgctatgaggaaatgaataaggataatcagtaccagtttcgggtgactctacgtaactttagcaagtggtatgattatatttcacaacttgatcggttattcgatatggaattattggaggagcggatttttactggatacttgctgaagtttctacctaaagaaacacgagagaatattgatatttctgataaagtaaagttggaatattataagttacgtcaggatttttccggtgaaattcatctagtgaataaagaaggcgagctagtaaatccaaagacaattgatgcaggaatcaaaccgccggatgaacgagactcactagaagaaatcattcataaaatcaatgaacgatttcctaatgattttgatgaaggagatcgagtattagtagagattttgtatcggtcatttgcagataacccagatttgaaggttgtcagcatggctaagaataacgatgctcagatgtttgaaaaatcgctgttccctgatgtatttaaagataaggtgatggagcagtatgagaaaaacaatgcagcttttgagaaaatgtttgggcatgatgataggtactttgatctagtatatacattagttgctagagatttatacaagttattacggacgaaataa

SEQ ID NO: 2861 - DNA, 585 bp, Enterococcus faecalis
atgacctacaaacatcttaccatagacgaactgacaatgatagaatcatattatcttcaacataataaaccggttgaaatcgctaaccgaatgggacgtgctatacaaactatttataatgtagtcaataagttcaagcaaggcaagactgctcttgattattggcaccagtataaagaaaataagaaaaaatgtgatagaaaagtcattcaattacctgctcatgaagtagattacattaaagagaaagtcactcttggttggacgcctgacgtcattatcgggcgaaaagaaaggcctgtttcatgcggtatgagaacactttatcgtttattttctaaagggatatttgatattgacacactaccgatgaaaggtaaaagaaaacccaatggccatcaggaaaaacggggaaaacaacaatatcagcgctcaatccatgatcgacctgataattatcctgatttcaattcccaaattttggggccccctggggggggtgtaaaaatatttttggctcccccccaaaaattcccccccccttctttttttgtaaaaaaattatttctttttttttataaataa

SEQ ID NO: 2862 - DNA, 291 bp, Enterococcus faecalis
ctgtggaaaagattttctaactggaaagccattagtaaccaacacgatattgatatatattttgcggaccctggaacactttctcaacgcccattaaacgagaattctaacgggattctgcgtcataatggactgccgaaatcaatggattttagagaagtgaatcagacatttatttccagtgtcagcaatcaacgtaatcatattccaagaaaatcattgaattacagaacaccaattgagatatttttgagctatgtacaagaagcattttattctaacttaatttga

SEQ ID NO: 2863 - DNA, 393 bp, Enterococcus faecalis
ttggagatacgtctgacgtattcaattggattttggatcgcatgcggtcatgggggcgataaaatgagcgatatacgcaattggacaaagatttggtatatagagcgagtgttttataaattgtgggatagggtcgcgttacctcgtcccgtaacacaaacatttgcgatatggtttgggattagcttttttggggggatttttcgaatttttccatttgttatggaacatacgattactcgacaaattttttgtccgtggttatttgcttttttaatgacacgaaaacaatttcaaagtttgtcttctcatatttcttctcatatttttcatcacactcatatttcttggcttgctgaaaagggttatcctttgaaagcgatcatggattga

SEQ ID NO: 2864 - DNA, 309 bp, Enterococcus faecalis
ggaatatcaagtgaaatttttatcagttgtgctctgtggtgttgtgtattgtcattagttcaatgtgtattaacagggaggaaaaagcaaatgaatttttttcaaaatgtgtttaccgattttgttggggattttaagtatttgattatgttggcgatgcttgatggtgcggcctatattgcctttgaacggaaagcaagcaaagccattccattgattcttgtgctggcagtagctgtttggttagttggagatacgtctgacgtattcaattggattttggatcgcatgcggtcatgggggcgataa

SEQ ID NO: 2865 - DNA, 240 bp, Enterococcus faecalis
aggtacttggttttgtccctttatccagtagagggaagtatcaattgtatttgttggatttaccaccctagcttttcactggtgattgaaggaacatacgataaaaaaagtggtaaatatttttatgatttctattctatgaaacttgatcctaaaacaaagaaaagtaagcagcaccggatttattgtacgcatgttcctgtaaaagtaatgtatcgccgtgtgagaaattatttataa

SEQ ID NO: 2866 - DNA, 993 bp, Enterococcus faecalis
ggagcgattcaaatgttatttcttaaaaaagaagatattatcaaaagtttttcaatgagagaagccatcgatgcggacaaaaaagcattgtcattgtattcagcaggaaaggcaagtgtgcctcttcgcaccaatatcgatgtgccaaaaagcaacggacaaagcttatatatgccagcttatgtagaaggtggcgaaggcgcgctaggtgtcaaaatcgtttccgtgtatcctgaaaacatcaagaaaaacttaccaagtgtaccagcaacgatgatcgtattggatccagaaacgggtatggtatccgcttgtttagatggtacttatttgacacaattaagaacaggcgctgttcaaggagcagcaacagaacttcttgcaaaagaagatgctaaaatcggcgcgctgattggaaccggcggacaagcacagtcacaattagaagcaatgttgaccgttcgtaaattagaagaagttcggatttttgatattgattttgagcgtgccagccaatttgctgaagaaatgatgcaacaattttctgtaacgatgcgcccaacaaaaaccaatcaagaatgcgttgaaggagcagacatcatcacaagtgtgaccacttcaaaacgtgcgacattctctgctgagtgggtcaaaaaaggtgcgcacatcaatggagtcggtgcttacacaccggaaatgtgtgaaattccacgagaaataatcaaagccgcagatattgttatttttgataccatggacggtgttctaaaagaagctggggacttcatttcaccgctgcaagatgggtatattcaaagagacagttatcatggggaactaggccaactgatcaatgaagaattggtcggtcggacaagtggagaacaaatcacgatcttcaaaacagttggttcggctgtattagatgtggtagttgcgacagaaatcgttaagaaagctaaagaaaataatttgggaaaattgatttattaa

SEQ ID NO: 2867 - DNA, 891 bp, Enterococcus faecalis
gaggaaatttttatgattcggaatattttgctggcactaattgtcgcaatcaatctatattttattatttactttctaagagaccttttcaaaaacaaacaaaatttcaaagaagaaccaggggatatgcgtctgttgcccttcacgtcatttatcaccttctttctttcaacatttggcgtttccgactttgctatcggaaccgtcctttatccaaagttgaaatgggtcagcatgaaaaaactacccggaacgttgaatacccaatgtgtagtaccggtagccgtcatggcattgtcttatatcactgctatcaacgtagggatcaagacattagctgtttgtattatctgccaaattatcggtgcatatttaggaccaagatttgtcgtgaagttaccagagaaaacgatcaaactgtttgtcggcataggattggtcattgctgcattcttaatttttatgggacaaatgaattggattccctcaaacggaacagccagtgaattgtatggcggaaaattaatcttggcaggatttttactctttgtctatggcgcattgaacaatatcggcattggttcttatgcgttaacaatggtaactgtctacttgctaggcttgaatccagttgcagcctttcctattatgatgggggcttgtacattctcagtaccgatcggcagtgttcaattcattaaatttgatgaatacagcagaaaaatcacacttttcacttcaaccttcggtgtattaggggtattggtcgctgtattcctagtcaaatctttagatacctatattctgaaatggatcgtgattttggtcttactatacagtgcatatacgatgttgagcagtcaattaaaaaaagctacagcaactaattaa

SEQ ID NO: 2868 - DNA, 804 bp, Enterococcus faecalis
tcaatggaaacgattattcaaatcatgaaaaaatatgatttttcagagatggaaacaagagtgtataccaccctattagaaaaaggtaatcttacaggatatgaagtaagtaaaatctcaggtgtgccacgctcgaaagtatataacattttggaaaaactattaaaaaagaatttgattgtcgtcaataaatcagaacctaaactttatcatgccatctcggcaaatgagtttttagagaaattagaaaaaagtgttaaaaatgatctttcttttcttaccaagaatttagggatgataaaagaaaaagatgaagaagacatgctgtggaaagttgatggcatcgagtatgttctggataaagcagagcatttggtgaaaaacgcaaaagaaagtttgctcatccaagtttggcatgagaatctcacggattcactgctaaaggcgttgcagcaggccgaaaaaagagtcgataaatttgtactgattttattcagttctacccatgaatatgatcttcccttagaaaagtattacattcatggttttgaaacagacaaactcgctgactttggggcaagatggatcaacatcgtcgctgatgagcaagaagtcgtgtttggcaccattaatgaagaactgcaatcaaccgatgtcacttggacaaaaaaccacgccatggtcaatctagcaaaagaatatgtcaaacatgatgcatatacactaaaagtgattgcagaatcttctgaagaacttaaagcaaaatatggtgaggactttgagggaatcagaaagatttactag

SEQ ID NO: 2869 - DNA, 216 bp, Enterococcus faecalis
aaaaagttttttatgaaatgggcaaaaaagttttttcgcccattgttttgtcctaccattcgttgtaaaaacattgtcgccgatgatcgcttagattgggtatacgaaagtgaccaacaaaaaagtattggaataaaaagaaatcacactgaaatctcccaaaaggacaagatggttttaataaaaaactttcttttaatacatttgttaatttga

SEQ ID NO: 2870 - DNA, 348 bp, Enterococcus faecalis
aatctcccaaaaggtcgtccacctcggagacaacttgctgccgaaaatagtagttggggctatgaacaaaccaacgttactttttggcaaattattaaattaaccgaaaaaacagcatggtttcgccccatcaaaaagcaaactgtaaaaacatatacttctatgagtggagaaactatgccaataccaaatcaatttatcgattatccacttgcacgaatcaaagacagcattgttagaaaacaaattaatccagccttatatcccaataaattatacggtaatcgcagttgggatacattttaccgctatgataatcaactggtttatgaaagcagttattactaa

SEQ ID NO: 2871 - DNA, 282 bp, Enterococcus faecalis
ttgtttccaattttacagagaatgaagacattttatcaaggtgtcagctatttatacacaataatgccagcgctgaagaaaatttataaagatgaaccagaaaaactgaaagagacggcaagcgcaaacttagaattttataacacgaatccacaaatgttgccatttattaccagcatgcagttggcgatgtatgataatgatcaaagtgtctcagatacacgcagcattaagatggcacttatgggacccctatcaggaatcggagactcgattgcttaa

SEQ ID NO: 2872 - DNA, 591 bp, Enterococcus faecalis
tttgggattgcccccttattttcaacaatatttgcaggattagcgatggacggtctgggatttgctccgatgggtttttggttatcgatgttaatctcaatgctagtcatcaaattattaatgggatatttaggatttaaacttggaacgagtgtgatcgaaaccttaagtgataaaattggtaaaatttcttcagcagcaaatattgtcggagtgactgttattgcggcattagctacttcttttgttaaggcaaatatcgccattaagtattcacataatgtagaatctggtgaaaaacaagtaattgctattcaagatattttagataagattacgcccaaaatgcttccagtcattttaactattttagttttttatttgatcaagaaaagaaaatggaacacgtatcaattattaattttttttatttgtgattgggattctagcctctgtcttagggattttagcatagtaagtgagcgtagtaaggggcagggttttcgatttcgagtaaaccttgtttccttatttataagttttctgagtgatgggcataatattttttcagttaacggaaataaaatttga

SEQ ID NO: 2873 - DNA, 684 bp, Enterococcus faecalis
gtgatgggcataatattttttcagttaacggaaataaaatttgaaagcgagaacacgatgaatcttcaaaaaatcgaaaactatcaactaaagttttatcagcaagattggctttcaggatatttggaaaaacattcaaaacttttggaaccactttttgaacgtacttattttctattaaaagatcagattatttacaatgatgcgatggatatggaagcctgttctattccgtattctctaaaagaatatacatggaatcgatatcctggagatgacccagaatggctctttatgttgagtcgacaaagttttcttctagatttatcacaggcatacgcgttaacaaaagaaaaatgctatttacaaaaatggcgcagtctgcttcttgattttattcaagaggaaggcgaaccaaattctactaataggaatgtttggcgaccccttgatgttggaattcgagtgatgaactggctgaagagtttgacttatatttctattgctgattataaacaattgggaattgataaagtgttgcgaaacgctttgctggttcatctcgagtatttggagaggagctatatcgataagtacagacttagtaattggggagtattggtaactggtggaatggctgctatggatctatttcttccagaactagtgaacagagtaaactaa

SEQ ID NO: 2874 - DNA, 495 bp, Enterococcus faecalis
gaacagagcgcattgtatcaatatgaagttttgatgacgtatgtatatctattacagatttctgaatatcttgaaatatcattgccattggatcttcgaacgaaattgaagatacctatcttatctacctactatatagcggataatcaagatgttctgaatcctatcaacgatagcgatcatgtcaattttcgatatgtatatgatagctatcgtaatatgaagaaagaacttggaaaacactgcagccagagaaacttttttcgtggtgaatcaagtggtttaatgttttataaaacagaggatatttattttacgctttttaatggattgtatggaagctcacatggtcatgtttctacagggagttttacgctacaattacagggtgatgatttgatatctgatagtggttgttacagttatgtcaacaaagcagagtggcttcaaccgaaggagtgtgattcgcataatacaatgtttattaaggattga

SEQ ID NO: 2875 - DNA, 207 bp, Enterococcus faecalis
gaaacaaaaatgttggttgaaagttgctttttggcaaacttaataacgacaaaaacagcacaagaaacaactatttctcaactttctactgcctcaaatgaagtattagtacattttataagccatcaaagaagaaattgctccaatagaggaatgatgtttagttccctttttcatatattagttgtttggcatagccatctctaa

SEQ ID NO: 2876 - DNA, 450 bp, Enterococcus faecalis
cgacaaaaacatacccaggaggacttttacatgacccaagtacattttacactgaaaagcgaagagattcaaagcattattgaatattctgtaaaggatgacgtttctaaaaatattttaacaacggtatttaatcaactaatggaaaatcaacgaacagaatatattcaagcaaaagaatatgaacgaacagaaaaccgacaaagtcaacgaaatggctattatgagcgcagctttacgacacgtgtaggcacgctagaattaaaagtacccagaacacgtgatggccatttttcacccacagtgtttgaacgttatcaacgaaacgaaaaagccctcatggcttcaatgttggaaatgtatgtatcaggcgtttcaactcgtaaagtatcaaaaattgtggaagaacttgtggtaaatccgtctctaagtccttcgtttctagcttaa

SEQ ID NO: 2877 - DNA, 249 bp, Enterococcus faecalis
agtatcaaaaattgtggaagaacttgtggtaaatccgtctctaagtccttcgtttctagcttaacagaacagctagaacctatggttaacgagtggcagaatcgtttattatcagaaaaaaattatccttacttattgacggagttccccttcttaaagttccaaaagaaaatccgtttccccccaaagccgtcctttaccgaatggaattacccacgaagggaaacggcaaattttcgggcttcttaa

SEQ ID NO: 2878 - DNA, 327 bp, Enterococcus faecalis
gacttcttaaaggttttaggaaagataggaattgtggaggaaggtggaaaaatatttgggagaagagaaattggcttttcccacaataaaggtggggagggttttttaaaggccaggcattatccctgtgggccgattaggaaaaaaggattccgaacccttgaacacggttttcgtttaggatattcaagaaaatgtgttccagtttttctcgccttccgccaattggaattaagaagcccgaaaatttgccgtttcccttcgtgggtaattccattcggtaaaggacggctttggggggaaacggattttcttttggaactttaa

SEQ ID NO: 2879 - DNA, 780 bp, Enterococcus faecalis
  misc_feature (731)..(740): Nucleotides 731 & 740 are "n" wherein "n" = any nucleotide.
ggggccaatcccgtcgtgtggacttatattgttgacagggtttctgctgcaccatgggttggacttgaaaattttcgaatcattatggaagatagttttttttgggaagcagttcgtaataccttagcgattagtttaatgaaactttttttaggattcgctattccgattatcttagcggtaatgatttttgaaatgagagatggacatttaaaaaaagtgattcagacaatttcttatattccgcactttttttcttggatcgttttaggcgggatgttgatttcgtggctttcaacaaatggctttatcaaccaagtcatgatgtcgttaggcttaatgaatcagggcgtcaatcatttgttagatcctgataagtattggtggattgctgttctttctgatttgtggaaagaagtaggttggggcacgattctctatcttgctggtatgtctcgcattgatccaacgttttatgaagccgcgagaattgatggtgcttcaaaattaacacaaatccgaacgattactttgcccttattagcgccgattatttcgttgaacttaattctaaatgttagcggtttattgggatcgaacttagatcaaacgttggttttaatgaatgctcaaaaccgaaacaaatcagaagtaattaattcatttgtttatcgtatggggctaaacgcaaggggacttttcttatgccacggcagttggtttagggaatntcggttatntcaattggttttattattcaattacagatcgcattactag

SEQ ID NO: 2880 - DNA, 1026 bp, Enterococcus faecalis
  misc_feature (46)..(55): Nucleotides 46 & 55 are "n" wherein "n" = any nucleotide.
acgcaaggggacttttcttatgccacggcagttggtttagggaatntcggttatntcaattggttttattattcaattacagatcgcattactagaaaaaatgaacaatggtcggtcggttattttataaaggaagcaacagctgtgattaaaagaaaatcaaaagaaaacaaatggttttactttttcaatacgttaattcttgtgttgttttctttattaattatcgtgccaatttggaatattttagtttcctcagtttcgtcaagttcgggtttagccggtaaaggcttggttttatggccgaaaggatttacgctagaaaattatcggaaagttttttcggatagtagcattccgcgagcgtttttgatttctgttttaaaaacagttattggtgcgtcgacgcatacactgttctgtgcgattgtcgcctatggacttagtaaatctagactagtcgggcgtaacatttatacaacgatgggtgtcattacaatgtactttggtgggggcatgattcccacgtatcttttgattaagtcattaggactcttagataccttctgggtatatatcattccagctttatttagctattatgatgtagttatcttaatgaactttttccgagaaattccaccatctttagaagaatccgccaaaatagacggcgccagtgagtttcaaattttttataaaatctttttacctttaacaaaaccggcattagccaccatcattttatttaatggggttggtcaatggaatgactttatgaccacaaaattatatattaccaaagaatatctgtatccattgcagatgaaaatttatgaaattattgttcaatcaaacttgagtaccatgacagagagcggcagtacagatatggtggtgcaggcaacgacacgtggtgttcagctggcaacaattgtcattacaacgataccaattttaatcatttatccattactacaaaaacactttatcggcggtatgatggccggtgcagtaaaagaataa

SEQ ID NO: 2881 - DNA, 1803 bp, Enterococcus faecalis
aattattgttcaatcaaacttgagtaccatgacagagagcggcagtacagatatggtggtgcaggcaacgacacgtggtgttcagctggcaacaattgtcattacaacgataccaattttaatcatttatccattactacaaaaacactttatcggcggtatgatggccggtgcagtaaaagaataaagaaagtagggaacaatatgaaaaaagttttaggcggtttattggtggcaacggcggtcgttagtttagcggcctgtagcggtggggaaaagaaagctagctcagatgtctcaattaaggatcggtatgaattagatgaaaagacgcctgcttggaagttagataagaagaaagaaccgaccaagattaaatggtatattaactcagattggacggcgctgccttttggaaaagacgtgaccactgcgcagattaaaaaagacttaaatgtggatattgaatttatttccggcgatgattcaaaattaaatgccatgatttcaagtggagatatgcctgatatcgtgacattaactgaaaaaactggacaagcagcattgaaagcagattcttgggcctattctttaaacgatttagctaaaaaatatgacccctatttaatgaaagttgttaaccaagatacgtttaaatggtatgccttagaggatggaaaaacatatggttaccctaattactctaatacaaaagcggattatgaaagtggaaatatcccagtaaatgataattttgttattcgtgaagatgtctataatgcattaggcaagccagacgtttcaacaccagaaaattttgaaaaagtcatgcaacagattaaagaaaaatatcctgagatgaccccaatgggcttcaccacagtgggcgatggtgcaggaccatttttagacaaattacaagacttcttaggtgttcctttagaggataaaaatggtaaatactatgatcgaaatttagataaagaatatttagaatggttaaaaacatttaatgatgtttaccgagcaggcaatattagtgatgatagcttcacagatgatggggcaacgtttgatgaaaaagtgaaacaaggaaattatgcaaccatgctcgttgctggaaccagtggtcaaggtgggaacttcacagaatttatgaaaaaatctggcacacgttatatagccattgatggaccaagtagcacttctggccgaaaaccaacattaaatcaaaccggcatttcaggttggttaagtaattacattacgaaagatgcgaaagatccagcaaaagtcactcaactgttcacatatttaattgatgaaccgggacaaattttaacaaaatatggcgttgaaggagttacttatgcgtacaatgatcaaggaaaaattgattatttaccagaagtgaaaaaattagaacaaacagacaatgatgcctacaacaaaaaatatggcattagtcgtttcctatactttaacaacgaccgtgtcaataaactaaaagtaccaatggaaagtgctttaacgcaaatgcaagaatggggcaaaggaaaattagtcccacatttcgtaattgaaaatattaatccagatgcaggaacgccggaagctcgtgcgaatgaagcgattgaaaccaaactaaatacaaccgttatttcaatgattcgtgcgaaagatgataaagcctttgacaaatctttagaagactacaaagcattcttaaaatcaaataaatgggatgcaattgaaaaaataaaatctgagaaaatggcggaaaacagagacaaacttaagtaa

SEQ ID NO: 2882 - DNA, 654 bp, Enterococcus faecalis
gtaagagaggaggagagaaaagcggataaagcaacgagaaatccgcttttctcttttaatatgaataagctatttgcatatgaaggttggtattatcggattttttcttttattgccaacttgatcattattaattttctctttttaattacctgtataacaggcatctttagcggtgtcggcttaattgcgttgtatcgaacgatctatcgtttgtatcgtgaaaaagatattcctgttttgcgaacgttttggacagcgttaaaaaataatatcatgcgaggttttattttaacaggtgtcttgttcgctgcttttttactgggcggtattgtcgtaacaagtttatttaaaatagccactagtttaggtttcttagctatttttctattaagttttgttgcattatttttgacgagttttctttttctcttttccgtttttaattggtccgttaaaaagacactaggtgagacggtttatgtggtcttaagtaatagtgcaaatgcgattattttgtttattttacctcttttaacgtttgtttttttctataagcttaatttgtttttatatattgcgttaggatttgggacaacggcttttcttcaagttgcgttttttcagaaagtgttaggtgtggtacatgaatga

SEQ ID NO: 2883 - DNA, 927 bp, Enterococcus faecalis
gtgtggtacatgaatgagtattttgagttttggcaaaagaccaaggaagaacttcaaaaaataccgctagatatccatcggcgggtcattgactatccattggaaaatgttcaagtggaacaggtcgactttttaagtttcctaggtgagcgcatctttggctatttgttacttcctaaaacggcggggaaacagccaatagtgattgactgtttaggctatatgaatcatattcaagaaccttggcaatttgctcattggacacaaattggttgtgcttgttttgtcattgataatcgaggtcaagggggattaaccaaagatcgcgtgccatatcaaacaatttggcatgaagcaccaatgggacgaggatttctagacaaagaagattggtaccaacgccgcttgtttgccgaccatttacgtagcgtagaggtggtgcggacctttactgaaattaatcaggaccaaatcattcttcgtggtggttcccaagggggtggcgtagtgttaatggtgaacagtttagtcgacttcccgattttagctacttttgcagatgttccaagtcattcttgtttagaaaatagagtagcagaaggaacgggttcgtatcaaattattcatcagtacttacaagagcatcctcaagcgcatgaaaaaattgccgcggtccttccttattttgatagtcgtcactttgtttcgcaaattaaaaatccagtctttgcttctgttgggagtcacgatccgatatgtccgatgaaagattttttcccttcttatcatcagataaaggcaagaaaagcagtcagagtgtattggaaaaaaggccatggtggcggtgaaacaacccagatccgtcgtgagatgcgtcaaattcaacaactattgcaggaggttaaaaatgaaaatagctacgtataa

SEQ ID NO: 2884 - DNA, 876 bp, Enterococcus faecalis
aggcaagaaaagcagtcagagtgtattggaaaaaaggccatggtggcggtgaaacaacccagatccgtcgtgagatgcgtcaaattcaacaactattgcaggaggttaaaaatgaaaatagctacgtataatgtccgggtagatacagagtatgaccaagattggcaatggtcttttcgtaaagaggctgtttgtcagttaatcaattttcatgattggagcctttgttgtattcaagaagtacgaccgaatcaagtcagggatttaaaggcgtatacaacattcacctgtctttctgcggaaagagaaggggatggtcaaggagaaggactagcgattctctataacgaacaaaaagttcaggctattgatacagggtatttttggttatctgaaacacctcagcagccaagtatccatcctgaagctggctgtccaagaattgctttgtggggactatttaaggaaacgactcaaaatacgccttttttagtcatcaatgttcatttggatcatatttcagctcatgctcgtttagcaggaatgaccgttatcttagaggagttacatgacaaaattgcacagtatccaactttattaatgggcgattttaatgcagagtcgggggaagaggttcatcaacttgttcaaaaaaaatttcaagatagcaaaaatttagctactcattatggcccaagaggaacatttcaaaattttacttacacaaaaccttgggcggaattagaagaaattgattatatttatgtaaaaggttggcaagtacagcaaaccgcaagtttaacagatagtatcgatggacgttttccctccgaccattttcctttagaagcagaagtatgtattgaagaaaggtga

SEQ ID NO: 2885 - DNA, 2184 bp, Enterococcus faecalis
aagcagaagtatgtattgaagaaaggtgagagtatgaaagaaaatcaactgattcaattagtcgaagaaatgacaattgatgagaaaattaatcaattattacaattagcagcagcgttttattcagataaagcagaagaaaagaccggccctatgtcagagctaggactaagtcaagaaacgattgatacggcggggacaacactgggtgtttccggtgcaaacgaagcaaaacgtgttcaaaaagaatatatgcaaaatcatcgattaaatattccaacacttttaatggcggatattattcatggtttcagaaccatctttccgattcctttggctttaggaagcacttgggatgaagcagcggttgaaaaaatggcggagatttcagcaaaagaagctgctgtttcaggattacatgtaaccttttcaccaatggttgatttagtgcgcgatccacgttggggacgtgtcatggagtcaacaggtgaagatccattactcaacagccgcttagctgctgcaatggttagaggttaccaaggagaaaatttaaaagaagacaattggcgagtagccgcgtgcgtgaagcactttgcggcatatggtggtgccttagctggtcgggattataatacggtagatatgtctgaacggcagctaagagaaatgtatttacctggctataaagctggattagatgcgggtgcaaaacttgtcatgacgtccttcaatacagtggatgggattcctgctacaggcaaccaatggctgtttagagacgtattacgaaatgaatttggatttgaaggggttgtgatttcagactggggagcgattaaagaattaattcctcatggcgttgccaaagatgaaaaacaagcggcagaattggctatcaaagctggtgtagatattgaaatgatgaccacgtgttatccagattatttaaaagaattacttgaagaaggccggattgctgaaacacttattgatgaagcagttatgcgaattttaaaactaaaaaatgagctaggcttatttgaaaatccctatcgtggtgcggatgaacaagcggaagcagaagtgattttaagcaaagaacatcgagaaatagctaaaaagattgctcaaaaatcaatggttcttttaaaaaatgaaaatattttgccttttacaccgcaagaaaaaatcgcgcttgtcggcccaggggcccaatcacaagatattttaggggcttggtcatggcaaggaaagaaagaagaagccatttccctcgtggctggggcccaaaaattaaccacaaatcttctagttgcccaagaaccctttgattactttgaaccgaccgcggcggccattgaagaggctttaacgttagctagtcaagcagataaagtagtagtggcactaggcgaaacagattggatgagtggggaagctgccagtcgcagtgatattcgtctacccgaaaaacaattagcggtagttgcacaaattattgagaaaaatcccaatgttgttgtcacggtctacagtggccggcccttagatttgcaagggatagatgttgcaaaaggaattgtgcaagcttggcaacctggaacagaagggggcaatgcgctagcagaaattttgtggggacagtacaatccaagtggtcgtttaagtatgtcgtttccagaaacggttggtcaagtgccaattttttacaatgtcgacaatactgggcgtccttatgagtcagcaccagaagaaaaatatgtttctaaatatttagatgtctctaattacgctaaatatccctttggatttggcttaagttatagtcatttctcttatcaaccaattcaactaagtgcattaacatttaccaaagaacaaccagtcacggtctctgttttagtaagaaataacagtccaatcgctggagaggaaaccgtgcaattttatgtacgtgatttggtgggacaagtggttcgcccaattaaagagttaaaagatttccaaaaagtttggctggaaccaaaggaagaaaaagaagttcagtttcttctttcagaggatatggtgcgctatgttcattcagacaatcaggtaaccagtgatgcaggtgaatttatcgtaatgattggtggaaatagtcgcgatgtacaaaccgcaacagtcacgttaaatgaataa

SEQ ID NO: 2886 - DNA, 3279 bp, Enterococcus faecalis
gttatgcagataaagaagcttaagcaagcagacacagttgctacatttctagagacaggtgatttaaaagaattgaatagctgtggcatgatgattaatcaattagaaggtaatcctttagacggcagtatgaaccaactctatttgcggataattacaggggacacaattaattatcgaccaatgattggttccaacagtcaaagtgatttttatctttcagataatcaattgacatggcggggtgaatttgaagcggttcgttaccaagttgactttcgtttggggccaagcaatcaatggttctggcgggttaatgtcactggaactggcttagtagatattgtttatggtcaagatattggcttagcgacaaaaggagccgttcagtcaaatgaagcgtatgtgtcgcagtatcttgatcatcacatttggcaagagggcgaagagcttgttgttttatcaagacaaaatcaaccgcaaaatgagaagtttccagcccttattcaagggagttttcaaaaattagtaggctactcaacggacggctatcaatttttcggacgttcatttaaacaaataaacacaccagaagcattggggaaaagatatttagcaaatgaagtctatcaatatgaatttgcttacaccgctttacaaacggaagccgtccaattaacgaatgaaagtaaggaatttgttttttatggtgcggtaacagaaacacatccgcaagcattagctgaaccttttttatcgaaagaagccttacaagctatttatgaaactgtgacattcgattcattagaaggaacacaggactatcctccgaaacttttaggagaacctatcacaggaaatccattaacagaagaagaattggccgcactttatccccttcagacacaaattgaaaaagtagcaggtcagacgtattcctttttcacggaaaattaccatcatgttgttcttcaagaaaaagaaattgccatggaaagagcgcatggccacattttattaagtggtaaaggcttaacggttgacgaacctttgcttagtacgacagtgtatatgtatggcattttcaattcacaagtagttttaggaaatacgaccatgaacaaattaatgagtaatagccgaaacgctttaaacgttatgaaacgctctggtcaacgaatctacattttagagaatggcttatggcgcttactaacaatgccttctgcttttgaaatggggttgaactctgctacgtggtattataagttgccaaaggatacaattcgtgtacgcaccttcacttcgcctgattcaagagtgattcaattggaagtgaccagtcaaaaggatgcatatatgtgggctgtttctaaccatttgttattaggaccggaagaagtaccaacctatcaattagaacaaactggcaaaacgcttcgagtgacgggaaatcattctgccacagaaaattattacccagaactaacctatgcattgacagttgataaatcatttcaagtaaccgatagcacattatttggtggagctgaagcagaattattagtcttggcaatcgaaaagacccaaaaattttcactacttattacgggcagtatagaggaccaatcattagtcaatacaccattagattttgaaaaagcagaaagtcaatatttggcattcattaatggcttgttacatcattttgagttaacacacacagactcaagtgtgcagcaaatgaatcaattaactcgttggtatactcataatatgctcgttcattatttgtcgccacatggcttagaacagtatggtggagcagcttggggcacacgagatgtgtcgcaaggaccgacagaatttttctttgcgacgcaacagcctaagatcgtggcctccattattcagcatctatttgaaaatcaatttgaggacgatggcaactggccgcaatggtttatgtttgaccgatacgaagaacaaaaagccagtgaaagccatggcgatattatcgtctggccattgaaagtagtgactgattatttggaacaaaccgcagattattcaatcttagctacggaaatcccttatacaagtcgcaaagataatcacaaaacaaaagaaacagcatctttatttgaacatttgaaaaaagaaataaattatattgaacaacattttttaccagaaacttttctatcttgttatggcgacggcgattgggatgacacgttacaaccttatgataatcgtcttaaagagcaaatggctagtagttggaccgttgccttaacgtatcaagtgttgaaaaaatttgcggctttaattacggaaatcgatgctacttatagtcagcacttagcaattttagtcgcaggaataaagaacgattttcaaaaatatatgttggcagatgaaacgattccagggtttatttatatggaaacgccagaaacttttgaacaaatgattcacccaaatgaccaaaaaacagggattcaatatcgattattgccaatgactcgtagtatgttagctgaattattaacaccggaacaagtaagtcatcatttagaaattattgaaaaagaattaacgtttcctgatggcgtgcgcttaatgaacaaaccagcgaactatcgaggcggtgtgagcactaattttaaacgagcagaacaggcggctaattttggtcgcgaaattggcttacagtatgttcatgcgcacattcgctatacagaagcgatggcgaaaattggtcagcgagacaaaacctggcaagcattaatgcaaatcaatccagttcaattaaaagaagtggttcacaatgcagagttacgtcaagccaatgcctattttagtagttccgatggcgattttaaaacaaggtatgaatcacaagaaaattttggtaaactaaaagatggaagtattggggtaaaaggtggttggcgaatttattcaagcgggccgggaatttatttaaatcaattaattacagctgttttagggattcggcaaaaggcccaaagtgtagtttttgatcccatgttaccagaaaaattgtctggtttaacactaacttaccaattgtttgataaacctgtcacatataaattttatccaaatcagtcagcgaaaatagttatcgatggtcaagaggttccgtttaagtttgaagaaaacccttatcgagaagggggaatggaagttcaaaaagacgaggtgctttcattattaaatgaagcaagtgttattgaaatttaccattag

SEQ ID NO: 2887 - DNA, 969 bp, Enterococcus faecalis
tccatggtaggaattaaagatattgcaaaaaaagcaggcgtatcaatctcgaccgtttcttacgcattgaatggtagttcaaaggtaactgaagaaacacgaacgcgcatccaagcaattgctgaagagctaaactatgttcctaacatggccgctcgcacattaaaacgtcgtcaaaccaatattattggtgtctatttggctgattatggcggtagtttttatggtgaattgttggagggaattaagaaaggcttagcactgtttgattatgagatgattgtctgcagcggtaaaaagtcacatcttttcattcctgaaaaaatggtggatggggcaattattttagattggacatttccaacaaaagaaattgaaaagtttgctgaacgaggccattcgatcgttgtccttgatcgaaccactgagcataggaatattcggcaagttctcttggataaccgtggcggtgccacgcaggcaattgagcaatttgtcaatgtgggttcaaaaaaagttcttctgctttctggaccagaaaaaggttatgatagccaagaacgattggctgttagtacacgagaattaactcgttttgggataccttatgaaattatccaaggcgattttaccgaaccttctggctatgcggctgctaaaaaaattttgagtcaaccacagacagaaccagtcgatgtttttgcttttaatgatgaaatggcgattggtgtctataaatatgttgcagaaacaaattaccaaatggggaaagacattcggattattggttttgataattctgaactaggtgcgtttgtgcaaccgcgattagcaacaattgcctattctaaacatcgatggggcatggtggctgcagagaaaattattcatttaatgcggggagaagctgctgagagcgaacacatttacacacgttttatagaaggagaatcttttccgtctgaataa

SEQ ID NO: 2888 - DNA, 561 bp, Enterococcus faecalis
ggactttatatgaggaaaccctacattttaatgagcttactcgttctaagtaccttattaagtgcttgttcaactgtaagtggcagcccagcaagtcaaagtgcgcccgcacctgatgaagtgttggcgacaagtattgggacgtatgaaaatcgaacattgttggttccagatgggcgtttagccttaactgccttgcataaaggaaaagattatcaaggcaaaccaatgttttatgtcctgtttgaattaaccaatacaaccgaaaaaacacaaaatattcagctaatgattcaaagttttatggaagttagtcaaactgtccacggaaaagcccaaaatttacaatatgcagtcttaacagattcacctttccaagacaaattagatcgtttagcagatgaaatcaatcctggtgaaacaatccaaggcgcttacccgtatgaatttattaatgagaacaagccggtccattttaaatttagagatcgccttctcagtctggatgaacccattgcatcagaagaaattaccattacagaaaaaagtttggtccgctag

SEQ ID NO: 2889 - DNA, 726 bp, Enterococcus faecalis
aggaggactctgatgcggacaaatacacgttataaagaaatttatgcagctataaaacaggatattgaagcaggtgtttatccaattaaccaaaagttaccccaaggtcgtcttcttgcagaaaaatatcaggtcagcgaactaaccattacaaaagccttacatttgcttgtgcaagaaggttatgttgtcagacgacgtggctcgggcagctttgttcaagactttcaaaatcgaaccattactaaattttctccgttaaccggcacttactcaacctacgatggaaaagttgaatccgtggttttaggctttgcaacagaagtacctgagccttgggtgactgaaaaattaagtattacagaagaagagttagtctacaaaattattcgcttacggattatcgaagatgtgccctcaattattgaatacacttggatgcccgttgctttaattccgaacttgacaatgaaagaattgaaagtctccatttatcaatatatttcggaacaattgcatcaaaaaattcaaagtgcgcgggtcagcatttctgggattcgtccttctccgttggaaaaaaaatatttaaacttaaccgataatgatttcctgatgcgtgcagaacaaattgcttacctaggcaatgggcatatttttgaatactcaattgcgaatcatattcctagtgaattcacttttgaaactgtcttaattgcagaaaaatag

SEQ ID NO: 2890 - DNA, 1458 bp, Enterococcus faecalis
cacagaaaagagggaggtatgacaatggaacatcatcaactaaaagcatttccgcaagattttttatggggctctgcttcggcagcttatcaagtggaaggtgcttggaatgaagacggcaaaggcgcatctgtttgggatgaatttgttcggctaccaggaaaaacgttcaaagagacaactggcgatttagccgtcgatcattatcatcgtttcaaagaagatgtggctttaatgaaacaacaaggtttaaaagcatatcgtttctcgattgcatggacacgaattttacctgaagggcgtggtcgagtaaatcaagcgggactgaaattttattcagatttaattgatgagttattagcggcaggaattgaaccaatggtaactttgtatcattgggatttgccagctgttttgcaaaaagaatatggtggctgggaatcaagaaaaattattgatgattttgtggcctatgcgaaaattttatttgacgctttccgtggcaaagttcgctattggattagtttaaatgaacaaaatgtgtttacttcgttaggttatcaattagccgtgcatcctcccggcgtaacagataataaacggatgtatgaggccaatcatattgctaatttagccaatgcagcagtgattaatgcgtttcatgaattagaaatgcctggcaaaattggccctagctttgcttatacgcctgtttatgccgttgatgcgcatcctgccaatgttttggcggcagaaaatgcagaagatttgttgtcgcatttttggttagatgtctatctttggggagaatacccaattgccgcattaaattacttacaggagcaaggtgtggccccaacgataaaagagggcgatttagcgttactacgttcagccaaacctgattttctaggtattaattattatcggacggatacggttgctgctaatccattagatggcgtcggaatagggaagatgaatacaacgggtgaaaagggttctgaaacggaatctggggtaccgggtttatttaaaaaagtaaataatccatatgttgaacggacgaactgggattgggccattgacccgcaaggtttgagaattgccttacgacaattagctagtcgctatcaagtccctattttaattactgaaaatgggttaggcgaatatgataccttaacagaagataaacaaattcatgatacgtatcgcattgattatttgcgaagccatatccaagcgattcaagaggcgattacggatggtgtttcagttattggttattgtacatggagttacaccgatttactgtcgtggctcaacggctatcaaaagcgttatggttttgtctatgtggatcaagatgaaacacaaaaaggttccttagaaagaatcccgaaagacagttattattggtatcaaaaagtcattgaaacaaatggacttatctaa

SEQ ID NO: 2891 - DNA, 1068 bp, Enterococcus faecalis
gaaaagagtgtggaaaatatgacagtaaaaatggggtttattggatttggtaaaagtgccaaccgctaccatttaccttacgtaatgattcgagaaacactagaagtgaaaacgattttcgatttacatgttaatgaaaaagcagcagcgccctttaaagaaaaaggcgtaaattttaccgctgaccttaatgaattattgacggatccagaaattgaattgatcacaatctgtacacctgcgcatacacattatgatttagccaaacaagccattttagctggtaaatcagtgattgtggaaaaaccattttgtgatacgttagaacatgcagaggaattatttgctttagggcaagaaaaaggggtagtagtgatgccttatcaaaatcgacgtttcgacggcgattacctagcgatgaagcaagtagtagagcaaggctttttaggagaaatcaatgaagtggaaacacatattgattattatcgaccaggaagtatcacggaacaaggacctaaagaaaatggttcgttttacggactaggcattcatttaatggatcgcatgattgctcttttcgggcgtccagatcaagtcacttatgatattcgtaataatgaagtgagcgaggcagtcgataattattttgacgttgatttacattatggttcaaaattaaaagtaaaagttaaaacgaatcattctgtcgctagtccgtatccacgttttattgttcatggcagcaatggctcgttcatcaaatatggtgaagatcaacaagaaaatgatttaaaagccggaatcatgccagatgcaccaggctttggagaagattcaccaatgtattatggagaagtgacctaccgtaatggcaatggcgactggattaaaaaacaaattaaaacgcctgtaggtgattacggtcgttattatgatgccgtttatgaaacgttgaaaaatggtgcaccgcaactagtaactaaagagcaagcattaactaacatcgaaattttagaagcaggttttcttaacccaagtccaagtgtttatcatttgaaagaaaactaa

SEQ ID NO: 2892 - DNA, 222 bp, Enterococcus faecalis
caagcctttttctctttgaaaaattattttatgaagtatactaatattaactataaagtagtttacttgcatttatactggatattcgatatcctatttaaggctcttcaattgagcgagcatcacaaaagacattttagtagcaattcttggggaagtagtgctactaagatgtctttccacttttttatttttactaacaatatacgtttcttatattaa

SEQ ID NO: 2893 - DNA, 519 bp, Enterococcus faecalis
aataggaaagacaagaaagtttggttaacgaaagaaccaaatcagaaaggaggacaaccagtggagagttggctttttttactactgattgccttgattgcgtttgttgcaaaaaatcaaagtttattaattgcgtcagttgttgtgcttgctttaaaagctttaccaaatagtgcgaaaatcatgtcgtggttgtcagataaaggcattaatttaggcgtcacaattatttcaattaccattttagtcccgattgctacaggacaaattggcttaaaagatttaatccaatcattcaaaacaccgatgggatggctggggatactttgtggaattctggtggctgttttatcctcaaaaggagtaggtttaattaatcaatcgcctgagattacggtggccttagtttttggaacgattcttggcgtcgtttttttaaaaggaattgcagctggtccgattattgcatcggggatgatgtacgtaatcattactacctttcaagtctttcaacactaa

SEQ ID NO: 2894 - DNA, 471 bp, Enterococcus faecalis
ttgtcgccttttctattgctcttttcaaaaaaagcagtaaagaaacaagcaaataacaaaacctttgaagagcggcatagcgacaagctaccctcttccttttacatactatttaaaggagtgaggcaaatgtctctgactatttctgaagaagtaaaacaacgtttagcccctttcttaactgaaacgaacaccttcttgttggtagcaaatgacggctctaatccttattcttccgcagaaggttgttgtatgattggcgatcgtttcattatcgttcctgttgatcaagcagaagcgccttataccgaaacaattgctaatgattcttttcacgtctatacttcgacgtatgaccaaatgtttttaacagggcatttacagctagtgattcatccgaatgcgggaaccattactttaaaaaatgaaagtggcatattagatagtaatgtggacatttatcaacactaa

SEQ ID NO: 2895 - DNA, 246 bp, Enterococcus faecalis
aaagtcgggatgtttgccgttattggcgcgttaggtttaggtgtcgccttccgcgatagctttacagaactttcaacaccaaagaaagcagcgattattttatcttacgtaggtgcgattggttcaacagtcctagggttcacatcagcaacaaaaaatccatttgttttagctgcaacagttgtcttagttgtcgccttttctattgctcttttcaaaaaaagcagtaaagaaacaagcaaataa

SEQ ID NO: 2896 - DNA, 792 bp, Enterococcus faecalis
  misc_feature (10)..(773): Nucleotides 10 & 773 are "n" wherein "n" = any nucleotide.
aaagtgcganaccttcaaaataagaaagtagaacagaaagaagaggagaacaaaatggcattaattgaattacgtcatgtaaaaaaagagttttccggtaaagcgggtaaagtcacggctttaaaagatattgatttaacagttgaatcaggtgatatttatggcattattggctattcaggtgcaggaaaaagtacgttggttcgcctattgaatggacttgaaacacctacagaaggtgaagtagaaattcaaggacaagatattgcattgttgccaaataaagaactacgaaacttccgtaaaaaaattgggatgatctttcaacattttaatttattatggtcacggacggtcctagaaaatatcatgctcccattggaaattgctggcgttccaaaacaaaatcggaaaagccgcgcagaagagttaatcaagttggttggtttagaaggacgggaaaccgcctacccaagtcaactctctggtgggcaaaagcaacgagtggggattgcccgtgccttagctaacaatcctgacattttgctttgtgatgaagcaacgagtgctttggatccgcagacaactgatgaagtgctagaattactactaaaaatcaaccaagaattaaatttaacggttgtattaattacccacgaaatgcacgtgattcgtaaaatttgtaatcgcgtagctgtgatggaatatggtgaaattgttgaagaaggtaaagtgatcgctattttcaacaagcttcaaaaagatgccggatntgccccaatggttgccaac

SEQ ID NO: 2897 - DNA, 786 bp, Enterococcus faecalis
tgtttgttccccatgcgaaaagtggacaaaaacggcaaaaaaggttttggctcaacagtcattcctaaccgtggtgcatggttagaaatggaaacagatgcgaaagacatttcttatgttcggattgaccgcacacgtaaaattcctttaactgtgttagttcgtgctttaggtttcggttcagatgataccatcttcgaaattttcggcgacagcgaaagcttacgcaacacaattgaaaaagatttacacaaaaatgcaagtgattctcgtacagaagaaggcttgaaagacatttatgaacgtcttcgcccaggcgaaccaaaaacagcagatagctcacgtagcttgttaactgcacgtttctttgatccaaaacgttatgatttggcaaacgttggtcgctacaaagttaacaaaaaattagacttaaaaacacgtctattaaacttaaccttagcggaaacgctagttgatccagaaactggtgaaatcattgtcgaaaaaggcacggttttaacacaccaaatcatggaaacattaggcgaatacattgacaacggcttaaacagcgtaacttactatccaagtgaagatgctgtagtaactgaaccaatgacaatccaagtgattcaagttctttcaccaaaagatcctgaacgtatcgtaaatgtgattggtaacggctatccagacgaacacgtaaaaacagttcgtccagcagatatcgttgcttcaatgagctacttcttcaacttaatgggaagatatcggcaatgtcgatga

SEQ ID NO: 2898 - DNA, 672 bp, Enterococcus faecalis
atgtttactaagcaaacctttgataataatatctatatgaaaatttttcgctggctttacattttatttatcggtaatctagggcttctcttagtgaacattccttttttcatagcggtgattagcttagacattgatccacgaaacctcccactttttgtagtaacgttgttgccgatggggacagggatgattgcacttttaggtttaatcgatacttttaaagaagaaaaggagctggatccatttaaaacttttttccaaaagtttcgtcagtttgggttaagaggctttcttatcagcttgcttggattaggaagtagcatcatcagtgtgacagatatattcttttttgccaaaacaacgattggtaaatggtttattccattgatggtccttctgctaatttttgggttagctattatgctgaatgcttggtattttcaagtacgaaacccgcaagcttcttttaaagatgtgtttcggatttctgtttactatggactgcggaaatggtatgtcagctgtctaaatgtttttttactattctcaatgtttgcaatgatgtttttgaagccacagtttgggtttgttgtaacccctgtcctgttcctagggattatttatttaaatactgggaaattgcatgaaaagcaaaaaaagaataaataa

SEQ ID NO: 2899 - DNA, 918 bp, Enterococcus faecalis
atggaatcaacatcaagagaaagtttaggaggagaaaagatggaagcaactttttcaaaaaaagaaaatactcgaaaagcaaaaacgaaaaaagcagaaaaagtcacacctggtgggatccttgtaatcattctcttaactttacttgcgttaattactttggtgcctttcatttggatggtttcagcatcatttaaaacaaacaatgaagttttcaccattccaattcaatggattcctaaaagttggcatccagaaaactattccgttatttgggaacgcattccgttgttaactttctttaaaaatacattatttttaagtattgtgattacgattattcaactatttacttcaagttttgcagcatatggcttttcaaaaatgaattttagaggaagagatacactttttattacgtacatcgcaacaattgctattccttggcaatcgtatatgattccacaatttattatgatgcgtcaattaggtttgactgacacgttatggtcacttgttttattacaagcatttaatgcatttggggtttttttactgaaacaatattacagcagtattccagattcactatgtgaaagcgcgcggattgatgggttaagtgagtggggaatttattggaaaattattttaccattaactaaaccagctttagctagtctcacgattattacttttgtgaatacatggaatgactatatgggacctttcatttatttatcttctactgagaataaaacgattcagttaggtttgaaaatgttcgtcggtttatttgatgctgaatatgccttaatcatggccgcatcagtggtttctattttaccagtagggattgtctttttagcaatgcaaaaatactttgttgaaggtattgctacatctggaatgaagaattag

SEQ ID NO: 2900 - DNA, 915 bp, Enterococcus faecalis
cagaatacaattatggaaattacttcaaaaacaaaaacagcaaataaattgagacgaaaaaatacgtggactgcgttatcttttatcgcaccaaactttattggctttttcctcttcactttaatcccggttatctgttcactgattttagcttttatgagttgggattctttttcaacccctgaatttgtcggaatgaaaaatttcaccaaaatgattcatgatgatacgttttggatttcgttaaaacaaacgtttatctatacgattggtgttgttccgttaacattgatttgctcattaggactagcgattttgttgaatcgtaaaattagagggatgaaattttttagaacggcttttttctttccttatgtaacgtcattagttgcgattgcggtcgtttggaatatgctatttcatccaacgatgggaccaattaatcaatttttgaaattatttattgaaaatcctcctggctggacatctagttctacttgggctttaccagcaattatcatcgttagtgtgtggcgctttatggggtattatatgattttgtatttagctggtttacaaagtgtgccaagagaattatatgaagcagcgtcaatggatggcgcgggtaaatggaatcaatttttaaatgttaccttaccttcactacgaccaacgacctttttcgtgactatcatgcttgtaattaactgtttcaaagtgtttgacttagttcaagttatgactggtggtggaccaggacgtgcaacgaatgtgttagtttacgaaatttacaatgaagcctttgtcaaatttaattttggttatgcatcagccattgcgatggtcttattcatcatcgttctagcgattactgtggcccaatttaaatggaatcaacatcaagagaaagtttag

SEQ ID NO: 2901 - DNA, 222 bp, Enterococcus faecalis
atcattttggtgaaatttttcattccgacaaattcaggggttgaaaaagaatcccaactcataaaagctaaaatcagtgaacagataaccgggattaaagtgaagaggaaaaagccaataaagtttggtgcgataaaagataacgcagtccacgtattttttcgtctcaatttatttgctgtttttgtttttgaagtaatttccataattgtattctgttaa

SEQ ID NO: 2902 - DNA, 1296 bp, Enterococcus faecalis
atagcggaggtagtacaaatgaaattttggaaaaaaggcttaacagcggcagcgctgttagcagtggcggcagtaactttaacagcatgtggtggttcaagtgaaaagaaagcaactgaaaagagtgaagatggcaaaacaaaattaacagtaactacttggaattatgacacgaccccagaatttgagaaattattcagagcttttgaagcggaaaatcctgatatcactattgaaccggtggacattgcttcagatgattatgacacaaaagtaacaacgatgctttcatcaggagatacgacggatattttaaccatgaaaaacttactttcatattctaattacgcgctacgcaatcaattggtggatttaaccgatcacgttaaagatttagatatcgaacctgccaaagcaagttacgagatgtatgaaatcgatggtaaaacctatgctcagccttaccgtacagatttctgggtattgtattacaataaaaaaatgtttgatgaagccggaattgcctatcccgataacttaacttgggatgaatatgaagcgttagcgaaaaaattatctaaaccagaagaacaagtatatggtgcctatcaacatacttggcgctcaaccgttcaagcgattgctgctgctcaaaacaatgccaatttgattgaaccaaaatacaattatatggaaacttattatgatcgcgcattgagaatgcaaaaagatcaatcacaaatggattttggaacagcaaaatcaacaaaagtaacgtatcaatcacaatttgaaaattcaaaagcggcgatgatgtacatgggtagctggtacatggggactttattaacaaacattgatgatggcaaaacaaatgtcgaatgggggattgccgaaataccacaacaagaaaaaggcaaagcaactacctttggctcaccgacaagttttgcaattaataaaaacagtaaaaaacaaaaagctgctcaaaaattcttagactttgcttcaggtaaagaaggtgcaaaacttttagcagaagtaggggtggttccttcttataaaacagatgaaattgataaaatctactttgcaagaaaaggaatgccttcagacgaagtctcacaaaaagcctttaacccagatacaattaatttagaattcccatctgataaaaacggtgccgcaattgataaagtattacaagaagaacatgatttaattatggtcggcgacgaaaaaccaaaagatggtattgctaacatggaaaaacgtgtcaaagcagagatagactaa

SEQ ID NO: 2903 - DNA, 1158 bp, Enterococcus faecalis
ggggagaaatacacaatgacagaaaatggacagattgagtggttgccgaagcaaatcagttttgctttaaacaaagttagaggaaatttagagacatttaaagaattagttccacccgcggcaagtttaaatcaaatttattatcctgaagaaaatattgactggacggccagcttttggccaggaatgttatttttagcaaaggaattaacaaattcaacagagttcgatgaggtgattgccacacagatggcttcttttcaacatcgcttggatgaacaaattgagctggaaacacatgatataggctttttgtatattttaacagccattgctgattatcaagtcaatggtcatgaggcctcaaaagaaatggccttgcaagctgcggacttattaatgaaacgttattcaccaaaagccaagattattcaagcttgggggaatttagacgatccagagcaacgaggtagaatgattattgattgtttaatgaacttaccattattatactttgcagcaaaaatgactggcaagcaagagtattatgaagctgcctacaatcatgcgaaacaaacacaaaaatatattgtgcgagaaaatcacactacgttccatacgtattattttgatacggaaacaggcgaagccttgtacggaaagacacagcaaggatactcagatgattcttgttgggctcgcggccaagcctggggaatttacggctttacgttaagttatttatatacaggagatagtagttttctggaaacagcaaaaaatgttgctgattactttattcaagaattaccagaggacaaaatctgttactgggatttaattttcaatgaagggagtgaagaagaacgtgatagctcatctgctgcaattgccgcatgtggcttactagaattatctcgtcagcttccattaaatgatgaaaaacatggctattatgaaaaggttgcgctagaactattacaagcattagcggaaaagtatacaacggttttacaaccagagtcgaacggcctattgcttcatggtgtctatgataaaaaaacaaatacaggagtcgatgaatgcatgatttggggcgactacttttatttggaagcgttaactcgtttagcgaaaagctggtattctttttggtaa

SEQ ID NO: 2904 - DNA, 1818 bp, Enterococcus faecalis
ttgaaagtgaggagaatcatgattcagccacgaattagacagaatccttttgaaacatacgaagaagttgcagaaggatttgaagatttattagcgccactggaattgttttttgatcgagagtatcaaggtcatctggatttagggacacacggaacggtttattctaaagggacacgtgatgcggaggcatttttacgaccattatggggactaggtccttatgtaacgcaaaatgaaagtgagtatttgaatgactttctaacgggaattatcgaaggaaccgatcctgagagttcatcttattggggaaaaacaaaagattatgatcaattgattgttgagatggcagcattaagtacatttcttttgttaaacaaagaaaaaacgtgggaccaattaacaaaagaacagcaaaacaatttacacagttggctgatacaagccaatgaaaacattattccgccaaataattggcatttctttagagtgttgctgaatttagcgatgaaacattgtgaaatgccgtattcaaaagaacagatcgctgttgatttggctgtaattgatcgtttttatgtcggtaatggttggtattatgacggagtcgagacacaagttgattattatgtttctttcgctattcattattatagtttattgtattgtcgttttgccccggaagataccgcaagagtggctattatgaaggaacgagcaactttgttcgcgcaagagtttaaatattggtttactcagccaggagaagcgattccctttggacgtagcttaacgtatcgttttgctcaagtgtcattttttagtgctttagtttttgcagatgttgaagcattgccgtggggtgagattaaaggtctaatcagccgacatcttcatcaatggatgaacaaagatatttttacaacagatggattattgtcggtaggttatgattatcaaaatatggtctttgccgaaggctataatggtcctggttcaccttattgggcctttaaaacattcattttgttagcggttccaaaagatcatccttattggcaagcagaaacacagcctattagctttccagaaaaacacttaccttcaccagaaagtcggaactactatcaagtaaatgatgcagggacacatggtttaatgtttccagcgggacaatttattaattatcaagctcatgcgcatgataaatatagtaaatttgtttattcttcccattttggtttcagtactataaagagtgattattggtattacgaaggtgcttatgataattgcttggctttagctgaagacgaccactatttccgcacgaaaggattagatgatcagtacgaaattcttgatgatcgtatcattcatcaatggcatccttggtccgatgtagcaatcaaaacgacaattgtaccattagaaggccaacatttacggatccacgaaattgagacacaacgtgcattagtggcttatgaaggtggcttctcaatcccgctcttcgatgaaaaggtcacttgtgtttctgatcaaatggctgaggtaaaaaatgcaaaaggtgtgtcaaaagtagaaaatatcaacggcttttctgaagctgcgattattcgaacagaaccgaatacaaatttactttatccgttaacggagttgccatatttgaaagcaaacttgtcgaaagggaaacatcttttaatttcattggtgacaggcgtactaccgaatgaacaaattgagccagttaaagttaggttaaaagaaaatcagcttttagttgaagaaaaagttgtaattttggggaattag

SEQ ID NO: 2905 - DNA, 408 bp, Enterococcus faecalis
ttcgatggagaaggtggtttagtgaaaagattttcattttttttactaattttacttgctttaacaggttgtaaatccggtgaaaaagaatttgatgaagaatctcttcaaaatctaaaggaaacggcacagtcttattcagaaacagaattacaaaatggtgacgttcgtttaaatgaatatatttctttgaaaggggagattgttgagagtgacagtcgttccagtttaataaaaaaaggtgatcgttttattttgaaaagtggttctagtaaatatcaagtttttaatgagcaaaagaaaaaattgaagattggtgacgaagtgacagtttacggagaatattacggctttttgaaagggacattaattgaaagtgaggagaatcatgattcagccacgaattag

SEQ ID NO: 2906 - DNA, 1026 bp, Enterococcus faecalis
aaaaaagtaaaaaaagctttttcttgcttttttttactaaaaagaaatatactatatgctataatagtacttgagaaggaggcatttagaatggcaactatcacagatatcgcaaaagtcgcgaatgtttcaatttcaactgtatcgcgagttctgaactatgatccaaacttatccgttacagaggaaaccaagcgaaaaatttttgaagcagcagaaaccctgaattatgcgaaatataaaactaaaaatagaaacaaacagcaggagcaactgacacctaacctttccgtacaaacagctccgcaagagccttcgattgccgtcgttcagtggcgttcagatgacgaagaactaacggatatttactatatgtcgattcgtttaggcgctgaaaagcgggccgaagagttaggttacaatattctaaaagtttctcaattggaacaacataaccttcaagggattgatggcattttggcaattggcaaattcactcaaaagacgttacaagagttgcagcaactgcatcccaatctttgtgtaattggcagtaatttcccattggaagaatttgattctgtaaatactgatttttatcaagcaaccgagattgccttaacccatcttttggaattgggccacgaaaaaattgcctttattggtgccgaagaaagcgaaaatatgtatggtttccgtcgctataaaacaccgacaaccaacgcttatcttgacattatgcagcattatcacttgtttaacgaagattattttatcttaaaagaaaatggcatgttggatgtcaaaacgggggaacaattgacagaagaagcgttagaaaaatggggaaatgatttacctactgcgattcttgcttataatgacgcctttgcaatcggtgtgatacatacgttagccgcacacggtataaaggttcctgaagaaattagtgtcatggggatcaatgatatctctatttctcaatatgttctcaccgccgctatcctctgtccatgcctttactga

SEQ ID NO: 2907 - DNA, 222 bp, Enterococcus faecalis
aggttcctgaagaaattagtgtcatggggatcaatgatatctctatttctcaatatgttctcaccgccgctatcctctgtccatgcctttactgaagaaatgggcgagacaggcattaatttattgcacaaacgaattcaaatgcctagcattcttcgtagagtcctgttaaacacagaattggttgtccgccaatcgacaactagcccacgccagaaataa

SEQ ID NO: 2908 - DNA, 867 bp, Enterococcus faecalis
tatataataaaggtaaaactaggagggaagcatatgacgtgtatttcattatcgattttaaatcaagaacaagaagttagaaaagctaagatagatgattcagattctttgaaagagttaactattacaggaaaagattttgtttgtttagctgctcgggattgtcaattacaagacggcgatgtgattcaagtttgtttagatacgcccaatacttatttaatggtgaagttagatgctacgcttgacagcagtttgatttatgttccagaacaaaaatggacgtttccaatcataaaaaatgaaaacgctatcgaagcgcgagcagcgtatcgttttgaaaccaagaaaccttatataagtgtgcgtattgccactaaagaagaaattaagagttatcgtaattgggcgttaaatccacatgatttacaacattttactggtgcgtatcctcatgcatctgccaacgtggaaacgcgaaatgatgccactttttttgcttgtaatgcgattgatggtaccttcgctaatctttatcatgggccgtatccttatcaatcatgggggattaatcagcagttagatgccgcattaaaaattgaatttgggcgtgaagtcttgttggataaagtgatcttaacattacgagcggactttccccatgataattattggcaacaagtgactttaaaattttccgacggtacacatgaagtttttaaaactgttaagactgagcaacgccagagctttacctttgcgaaacgggcagcggagtgggtgatactaacagagttaattcaagcagatgaaccatcaccatttccagcattaacacaaattgaattatttggtcaaaacaaataa

SEQ ID NO: 2909 - DNA, 1185 bp, Enterococcus faecalis
agaagtcttacacatttcttgggaggaataatactgatgagaagaattgcaaatgtgtataaggatgaaaagagggggacttggtatttttctttaactctgggctatgatcgtttcggaaagagaatacaacctactagaagaggatttaaaacgcaaaaagaagcaaaagatgcgatggaagaattaaaaaagaattactctgactctcaagagatttatttacaaggaattacttttcgagaattttataagaagtattttttcccttggtataagcttgggacgattgagaaaacttatgtaaaaactgataagactttaaaacgcgcgttagcttatttcgggaaaatgcaaatggaaaaaattagaccgattcatattcaagagtttcaacaatttcttgttcaagaatgctttgtcacgaataaagaagggaaaatacgtccgctatcgaataattatattaagcagatttttaataagttacggattatttttaaacgtgcgatggttttggaagtcattgatgagaatccagtagatactattgggaaaatcagaactcaacgatcggttgtggcattttggactgttgatgaattcaagaaagtatataattgttcatatcgctgtgatttccaagaagcattttataaacgaatgatgcgctttttgttcgtaactggactaagaagtgaagaactttttgcgctacaatggccagatattgattttcataaaggtacttgctgcgtgaataaatcactctatattcgaacaagaacagattatgatttctcagatacaaaaaatgcttcaagtatccgaacgattactctagataagcaaacgatagtagacttgagggaatggaaagagacccaaaaaacgatcggggatgacttaggttttatttttacctttgatggattaccgccgtccccaaagacctttttaggtcgagtaaaaaaattagctgaaatagctggtgtcaaaccaattcacttacatggattacggcattctcatgtagcttttttgattgagcataacaacaatatctatgctgtttcaaagcgtttggggcattcctctgttaagacgactttggataagtatggtcatctgtatcctaatacaaaccaaactttagcagatgaatttaccaaatttgaagtgtaa

SEQ ID NO: 2910 - DNA, 216 bp, Enterococcus faecalis
gagctgacagctgaaaaagaaggtggtagaatgaagacagccactcggcaagatataataaagttgggtttttcacagtattacgctgataaaatcttcaaggaatgtaagacacttttaattactaaagggtactctttttacaaaaataaaaaaataaaacgaatacccgtcagtatcattgaagaagtcttacacatttcttgggaggaataa

SEQ ID NO: 2911 - DNA, 225 bp, Enterococcus faecalis
aaaaaagtgataagtgtttggaggaaatacgaaatgaaatcattggtagaacttgttattttagttcaaaaggatgatgaagaagcgttcgctcagattgtgaacaaatttaaaccgttactaattaaggaatcttgtagaaatgggagttttgatgaagattgttatcaagagtgtatgattaggttatatttagctttgaaaaagtttgaaatacgtgaatga

SEQ ID NO: 2912 - DNA, 186 bp, Enterococcus faecalis
acaaggtgtaacaaaaaagcgtcaacgtattctaaagaaaatacgagaacgtttactacgttagttaaaaaaatatataagaatcgtgatccaccagagctttcactgaaaaaaagtgataagtgtttggaggaaatacgaaatgaaatcattggtagaacttgttattttagttcaaaaggatga

SEQ ID NO: 2913 - DNA, 492 bp, Enterococcus faecalis
gaggatattggcagtatagaaacacaccctaacttgtccgtatatctttttcctttcgaatttccaaaggaagaagtggctgcgatgaaacagaactttgatgttacaaaatatgatgctcaaattataaattatattaaaaaaaccgttcataatactgcgataaattactttgtaaaaaattccagaatagaagaagcagaggttatttctggacaaaagtttcttgatttcttaattgaagataagactttctttgtaaaagaaatgatcagagttgaaacagataatttatcatttgaattcgacaatttagatttagctactgaatttgaaaaattaaatagggaagagaaatcctttttaatgcgaaaatatattcttggatattcggattatgaaatttcaattcaattatcgttaagtagacaaggtgtaacaaaaaagcgtcaacgtattctaaagaaaatacgagaacgtttactacgttag

SEQ ID NO: 2914 - DNA, 558 bp, Enterococcus faecalis
gctaaaaatttatcatatttaaaaaataaatttcaaagttatcgtccagtttcatacagtccttttgtttttaataatgaaaggggaagagagaatatggatattcgtgatgaaaaatgtcatgtgtatgaacagctgaaactgttaatggaggaaaggagggaactttcaagacagtattatgatttaaaagagtacttgattcatttagaagaagacaagattgtttcggattctagtgatgaactatctcaagaaactaaattttcaaatttcaaaagtgaaaaagtgcttcaggattatttaattcagcgaaaaatgattggcactcatcaacgaaattacaaagattatgggtttattattgcatcgattttaaaagagtcaggaaaacctttgtcaggtaaacaaatatatcaggaattagctaaaaataatgatattcttcccgattatagaaatttcgtgaataatattcttccaaaaataaatcgagatgattcaatctctgtggagcgtgcaatgagaggatattggcagtatagaaacacaccctaa

SEQ ID NO: 2915 - DNA, 768 bp, Enterococcus faecalis
tatttttatcttattaaaaaagggggaagctcaatgacaagagtactgataattgcaagaagtcctttagcggaacaagagttggaatgtacacttcagcggtcattcgatgaggtcttttgttcttctgaattgatgaaagaggtcgaaaaatactcgttagttactcaatatttttcagtggtcatttttagtgatacaatctccaccagtgaaatggccacatacttaccatattttaagaaattgggcttgtctattctgcgaaaaggacagaaagatcaattgaaaacaacagaatatacgtatctaatagatgaaattgacgattggtttgatgaacaaacatcaccgaacgtgctgatagagaaaattgttaaacttgataataaatctcaaaaaaacaggatacctaaccttcgtataattgaatcggtacaaaaatcaatagttaaacgagatcaggttatcatttattttacgaaaaatgaacgtaaattattgtactatctatataaatctaagggtaaatgtgtttcaaggagagaactgtgtcaattaatgtggggagaggaaataagcaattcttccctgagtcaattatctacattagtagcacatgtgcgagaaaaattaacccatgtcgggtttgaggagttatggataaaaacgatttgggggagaggctatattttaagtgatgaatttatcgactatttgtctcaaaataatactttcagtaaaggtcgtgtgtctaaattattgtag

SEQ ID NO: 2916 - DNA, 237 bp, Enterococcus faecalis
tacaccataggaggagagttctgtttatacgagtatggattgattcttgaatcgtattcttgcctaactttcctctattttgttattaaggtatggtccatagggtgtggacattggtgggaaatcaacagaattattagtagactttggtttgatgtttataacttagtgtatgtagttgaagctgcttattatatcttgattatgttaagcagcttaatatttttatcttattaa

SEQ ID NO: 2917 - DNA, 3018 bp, Enterococcus faecalis
ttaatgaaaaagcgcgtagttatgactattgcggggattatgggaggaacctttacctcgagtgctgttgcattagcacaaacaaaaacaagtgtggaagaaaggggtccagtacaagagagtacgatttcaataccagacagtgagatattggcggaggaaaaggaggtagcagcaacaatagagtctactaccacgacgtccaccataaagacaaccagcgatagcctcgaaaaagcccttgaggcaactacctcagagacttcttcgacagaatcggggagcgcaagtcagtcaagcgcttcacaacataggaaagaaatagaaacagaggaaacttctctaaaagcacaaactacatcaacggttttaacagggatgataggaacgagtcaatggagtttagatcctacatctggagaattaactataggcccaggagtttttagtgatgatgtatcatctgcgttcgactccatatcaaatgttaaaaaggtaacattttctggaccggtgaaagcaggaaaaagtttaaaaagtttattcagtagctggtttgcgctattgtccattgaacgtctggattatctggacacgagtcaagtgacagatatgagttatatgtttactaattgtactggattacaaacgttagatgtatcaaattttgatacgagtcaagtgactaatatgagtatgatgttttataattgtcgtggattacaaacattagatgtatcaaattttgaaacgagtcaagtgacagatatgagttatatgtttgatgcttgtagcggattacaaacattagatgtatcaaattttgaaacgagtcaagtgacagatatgagtagtatgtttgatgcttgtagcggattacaaacgttagatgtgtcgaattttgatacgagtcaagtgactaatatgaggggtatgttttttctttgtactggattacaaacgttagatgtatcaaattttgacaccagtcaagtgacagatatgaataatatgtttgctgggtgtaaggctttacagacactagatttgtctaattttaatacaaatcaagtgacagatatggctgggatgttttcgtcttgtgataaaatccaaacagtaaatgtgtcaaattttgacaccagtcaagtgacaaatatgaggggtatgttttctcattgttgggaattacaagcattagatgtaactaagtttgatacatccaaagtgacagatatgagtgatatgttttatggttgtaaggaattacaaacattagatgtgtcgaattttgatacgagtcaagtgatatatatgagtgacatgtttggtgagtgtagcggattacaaacattagatgtgtcgaattttgatacgagtcaagtgatatatatgagtgacatgtttggtgagtgtagaggattacaaacattagatgtgtcgaattttgatacgagtcaagtgataaatatgagtagtatgtttgctgattgtagaggattacaaacgttagatataactaattttgatacgagtcaagtgacaaatatgagtagtatgtttgctgattgtagaggattacaaacgttagatataactaattttgatacgagtcaagtgacaaatatgagtaatatgtttgatggttgtagaggattacaaacattagatgtatcaaagtttgatacaagtaaagtaaccggtatgatttatatgtttagagattgtagcggattacaaacattagatgtaactaagtttaataccagtcaagtaacatatatgtggaatatgttttctggttgtagtggattacaaacgttagacttatccaattttgataccagtcaagtaacaaatacggatgagatgtttgataattgtgatgccctaaaaaagataacattgggggctaaatcaatatttgggactaagactaatactaacttgccgtctatagcagatacttctttgtatactggaagatggattggagtaaacacgagtaacacttatagtgatagtaatacatttatgtctaattatgacggatcagttccagatacgtatgtatgggaaaaagctagcgttctaaacagtactttagagccttcttcagtaagggttcattcagaaagtgaagtagaatggacttggaaaataactaattcgtcgtctaagtcagccgagaatgtttactcagatataaccttacctgagggtcttaaaattgacaagaatagtgtaaaaaagaacaatttgcctgtgtcggtagatgatattaatggtatgaacaatttaggaacactatctagtaacgaaacagttacatttacgtttaagacaatagtatcagggaaaccagataaatggttggaattaatgggaaaagtgacttgggaagataatggcatccgcacagtcaatagttctaataaagtgaaaatcatcgatgaggagcaaaaagataaagggaatcaaacaaatgatttagagttattatcagttccagttgggtttcgttatggcatcttgaacaaaagtaacacaccacaaactatccatttaaatgcgagaaattatcaaactcacacgaacgttgtcacggatggtttctatacacgtttgagggatgatcgcacaaaagataacggttggaaactaactgcgcagttatctgattttagcgatgagacaaattcaacggtgttaacgaattctgggatagctttaaaaatggaaaatatgaaaattgaatctataaaaaatcgagatactccacaagagagtattgatcaaaatccaacaggaacaccttcaactgttagcacgaatgaaacgctgatatcaggacaagcagcaaaaacattgatcaatgcacaggcaaatgaaggtcacggtacgtggcaagtacggattccttttgataaagtgtccgtgactgtaccagcgaatacaggggaaataaataaaaattatacagcgactttgacatggtcattagatgatacaccatag

SEQ ID NO: 2918 - DNA, 243 bp, Enterococcus faecalis
aaagtcaacggaattactagtagattgtggtttgatgtttatttctttattatcaatagttgcatctgttctattatatctcaactggcaagaacagttacagtattttctaaactgataaaaagaagtaacttcaatgacgaaggaaagatgtgtcatttgaagatagtcaacttacaattatctaatggcaaaaaagctattgcatcatggtttcaaattaatcaattaaaagctctttaa

SEQ ID NO: 2919 - DNA, 1509 bp, Enterococcus faecalis
gtgccctttacccggggtgagacactatactgttctagcaatcaattaactactttagatgtcagccaaaatactaggttacatcttttagactgttcttacaatcaattaaccgttttagatgttactaataatgttgatctagccattttagtttgtttgagcaatcaattaactgttctagatgttagcagccaaaatacaaatctattttctattgattgttcttacaacgagttatcagatattaccaatctgaataatttaacgaatttgcaaacttttgatgcaagtgagcaaactatttcaatacctgtaccaacaatctcaaatagcaatcaggcttcagtggatattttaaagacaactgctcataggggattaaccccaagcaacataagtatcgatccttcacccagtttttcgacgaatggggatcaaataatgttatctagtgtgactagagaatcaatgataaacaaatcaattaggttttcttatgcacctcaagatttaatagaaggttctacaacaggaactaaatcatttagtggcacaatcaatttttttgaagttagcaatttaactagtgatttaaaacctaatttaaaaaaagtatattcaggagataaagtagaatggacttgggaaataattaatacatcttctaaacaagcgtcgaatatttattcggaattaaatttacctgttggattaattattgatcaaaacagtattataaagaacggaaatgtagcaacgataaatgatcttaacggaacgaataacctaggagcattagattctaatcaaacaataaaatttacttttgaaactatagtatctggaaattcaggagaatggctggaattaaacggaaaagtaaattgggaagatcatggggctcgttttgtgacaagttcaaatcaagtgaaaataatagatgatgaacaaaaggataaagctgaagagacagatgagttagagattctttcagtaccacaatcttttaaatatggcatcctaaataaaagtaatgtcgaacaaatcattcatttgaacacaaataattaccagacaaatacttcggtggttacggatggattttatacacgtatgagagatgagcgtcctagtcttagtggatggaaactaactgcacagttatctgattttaaagatgttacaaattcaacggtgttaacgaattctgggatagctttaaaaatggaaaatatgaaaattgaatctataaaaaatcgagatagtccacaagagagtattgatcaaaatccaacaggaacaccttcaactgttagcaccaatgaaacgctgatatcaggacaagcagcgaagacattgattaatgcacaggcaaatgagggccacggtacgtggcaactaaggattccttttgataaagtgtccttgactgtaccagcgaatacaggggaaataaataaaaattatacagcgactttgacatggtcgttagatgatacaccatag

SEQ ID NO: 2920 - DNA, 231 bp, Enterococcus faecalis
taccgaactattcccctttctaccgaaaaaacggcgccgcaaattgaacaagaatttctccaaaatggggtacgtctttttcactcgagccgctttactgtgcaaaatcagccagatgcttttttacgaatttccttggcctccaatcagcttgaggtattggcgaaaggattaaccattatccaagaactcttaccgacattaaacgaaaagaaaggacattccctatga

SEQ ID NO: 2921 - DNA, 516 bp, Enterococcus faecalis
ggtattggcgaaaggattaaccattatccaagaactcttaccgacattaaacgaaaagaaaggacattccctatgaattcattgccaatatttgaaaaagcagtgggcacgattaccctgctttccgaagaaaaacaaaatgccgaatatgaaggctttttatgtcaagttaatgaatcgcaacaacttatccgcagtcgcttagccaaaaaaacgccgaaaaaagaaggctattttgtagccttctgggaaaaaaatcaacaaaatcagaacgaagcctttgatgcaacggaagcccctgaaatgttagcaattgtcattgctgatcaagaaaagcaaggtctctttcttctgccaaaagaatgtttaatccaacaaaaaattctcaaaacgcatcaacaaaaaggcaaaatggcggcccgtttttatccttcttggtgccaaaaccttaatcaaaccgccaaaaaaacacaaaaatggcaactaacttactttactgatttatctaaatactaa

SEQ ID NO: 2922 - DNA, 1320 bp, Enterococcus faecalis
aaatgtaagcggaatcatttttgttggaatgctaaaaaagggagtagagttatgagtaatgaaaatattgttttagcaagaaatacagagcgtgcaccaaagcatcatttcgcagcccaaacagtcgcattttcccactataatcatttgtcggcacaattacctattgagccaacctttggacaattggtagaaggtggcattcgggcccaagcgacacaatgtttgaaaaatatccaagcggttgttgaaagtatcaaccatgtgatgagtgacattgtcagaatgaccatttttgtcaaagatatgcgggatgctgccgcagttgaggaggtctatgcggccttttttacccattattatccagctaaaacagtggtcgccgtcgcagatttgccgttaggcgcttctgttcaaatggaggcacttgtttcaaatggggaaggaactatccctaatgcacctcaagctggggatttaattaaattaacaaatcagactgttcaggcaccaattgatgctctagccagtcaaacggtcgcgttttctcactataacaatctgtctgcacaattgcctatagatcctcaaacgggcagagttgtggctggctgtgttaaaacgcaaacaaagcaatgtttgaaaaacataaaagccattttaaccagtattgatgtgccttttgatgatattgtgaagatcaacatttatttaaaagatttatctaagctggaagctgtcaatcaagtacatgccgcttttttcccagattcaggaattgcgcgcacggtcaattatatgccagcacgaacagtgattgctgttgctgatttaccaatgggcgcggcggtgcaagtagaagcggtggtttctcatggggatggtacgccaccacaagcgattgaagatcgacatggattaattattgaagcaaataatacagagcacgcaccgaagtgtccattttcgacacaaactgttgctttttctcattacaaccatctatcagctcagctaccattggaccctaaaacaaatgcgttagtcgctggcggaatcaaggaacaaacgacgcaatgtttagaaaatattaaagcgattattgaaagtgtggatcacagcttagctgatctggtgaaagtgaacatttttgtgaaagagattgaagagctggcggcagtagatgacgtctaccaaacgtacttccctgaaaggacgcctgcaagaagagtgattggtgtgacggatttaccaaaaggtgctcacattccaatcgaagcgattgctgggaacgcagaaggtacgccaccaattggttaa

SEQ ID NO: 2923 - DNA, 1035 bp, Enterococcus faecalis
aaagtgtcttttccattgatgcgggaagaaaatattttttccgtggagcaactggaagaattagtggccaaagctagtcaaaatgggtacacagatgtccaattaattttaggaaatgatggcttacggtttatcttggatgatatgtcggtcaatgtgaatggtaaaaaatacaaccacaaccgggtttcaaaagcaatccaacgaggcaacaacgcatattacaatgatcctaatggcaacgcgttaacacaaaaagaaatggatcggttgttggcttttgcgaaagcgcgcaacatcaacatcattcccgtgattaacagtccaggacatatggatgccttgttagtggccatggaaaaactagcgattaaaaatcccgcttttgatggctcaaaacgaacagtagatttagggaaccaaaaggcagtgaatttcacaaaggcgattatcagtaagtacgtggcttatttttccgcgcatagtgaaattttcaattttggcggcgatgagtatgcaaatgatgtcgatacaggcggttgggcgaaactgcaatcttctgggcgctacaaagattttgtcgcttatgcgaatgatttagctaaaataattaaagatgcgggcatgcagccaatgagcttcaatgatggcatttattacaacagcgacgattctttcggtacatttgacccagagattattatttcttattggacagccggttggagcggatatgacgtagccaaacctgagtactttgttcaaaaaggacacaaaatttttaataccaatgatgcgtggtattgggtcgctggcaatgttgattctggcatttatcaatatgatgatgctttagcaaatatgtcgaaaaaagcatttacagatgtgccagcaggtagcccgaatcttccaattattggaagtattcaatgtgtttggtatgatgaccctcgtcgtgactatgattttgaacgaatttatacgctaatggatacgttctcggaaaattatcgtgagtatatggtggttaaataa

SEQ ID NO: 2924 - DNA, 1671 bp, Enterococcus faecalis
gcgggaaaagatttttatagaaaatactcatttttccagtttctattttgcaaattcgttattttttgttattctattgatggttgtgtatgcgctttctttttaggtggatacacaaaaatgaacggagtgcagaaaggaatggtgttcaaagtggggaacaatttatcgacaagaaaaggagaaaacagagaaacaattgtcagttggctgggtctttcgttattggttggcttggcgtttatcttatttagtctgtttcatcaaccaatgatcagccaagccaatgagccgacccaagagaaacattttatggtttattatcgggcttggcgtgacaaaacgatgcaaggagttaatacaacattgccagatgaaaattggctaacgatgcacgatattccttatggtattgacattgtgaatgtctttagttatgtgccaaaaggacaagaagcacttgcacagccattttatgatacgttaaaaaatgagtatgcgccagcactgcatgcacgaggtgttcgtttagttcgtgggattgattacagcgagctattaaaagttccttatgcaggaacaacgcctacagaagcagaatttgatgcttatgcgaaagagttgttaaccaaatttgtcgatgatttaggaattgatgggttagatattgacatggaaactcgtccaagtgaaaaagatattgttctatctaatggtgtcattcgtgcattatcaaaatacattggaccgaagtcgggaacggatcgtccatttttgtatgataccaatgcagaatatttaccacctttacaagatgtcagtgactgtttcgattttctcgcgtatcaacagtatggcagcgatgaccaacgcacgcaacgagcattaaataatttaagtccggttctcaatggggaacgatttgttccaggattaactttcccagaagagcaagatcgcaaccgctggtatgacacaaaagagccgtatatggaaagtaacatgtataaagtagctcgttattcttatgaaaataatttagggggcatgttcctctatgccttagatcgcgatggtcgcacctataatgaagacgatttaaatcagataaaaccttctaatttactttggacaaaaacggccattgcagagagtaaaggcgtttctcttgcagagatgaaagcggctgcgcaacactatttaaaacgaattagctacgccaacacagaccttgaagcacaaaataaagccgcagaagcagtgacacaagcaacaacgctttatgatgtgaataaagctattttaggtggcgattatggccaagggatttcaaacacctatgatgctgaattagaaaaaggcctgttagccattgacttaaccactttatatcgtgcgttggatcaagcagttacagccattgaaaaggcagaaagctatacaccagaaacgattcaagcactacaaacaacaaaagagacagtcgccacagaacttgcgggaaaaacgtatacagccgcacaagtgactacttggcaaacggaggtccaaacagctttggataatttaaaagagaaacaaacacaacctttaaaaagtgtcttttccattgatgcgggaagaaaatattttttccgtggagcaactggaagaattagtggccaaagctag

SEQ ID NO: 2925 - DNA, 213 bp, Enterococcus faecalis
aaacattgtaccgtaaaaggactgttatatggcctttttacttttacacaattatacggactttatctatttttagaaacatataatgataatctgaaaaaaaattcaaatataaatcatgatatgcgatatcatttagatttaaagcatagagcagttattgatgatgagataaatttcaaacgagtagatcccaaaaaattcaaacagtga

SEQ ID NO: 2926 - DNA, 1203 bp, Enterococcus faecalis; identical to SEQ ID NO: 2422

SEQ ID NO: 2927 - DNA, 399 bp, Enterococcus faecalis
ggttcgacagcatggatactattcacattatttagaaaagttagagcaaaactactggcaataacagatttaggaggagtggaaatgagtattgcattaccaaaacaaaaacatttaagaggtccgttacttgattacctgagaattgcagaggataatggcgacttgtttgcatggagaaaggcgtgcgaaattgggcgagaaatattctcaggtgatttttcagacaatgctaaaccattaattgttatatacaaagatggatattcagaagtatttaacacaagagctgatgtaatttcagcgtgtcgaattggaaatgaaactttgcgaaaatgtttggagactggtgaacaagatagattgggtcgctgttatgactatgccattttagagtag

SEQ ID NO: 2928 - DNA, 774 bp, Enterococcus faecalis
aattatgagtttggagggggagcaatgggaaagaatttactcagagagaagaagcgattaatacgacaaaaaattctttttctgacgggtgaaaacgaatcttggatgaagaatccagaaatcgtgaaagaagtccagaggctctctaagcaactagagtcagatcttatagcggataagcgaccattacccagtttagatcctgataaattaacaaaagagaagtaccaacatttcttagatttaggttatcaagtaggagatattaagaaagctttaggactaggcacaacaacctttcaaaattggcgaaaggctaacggaatagaaaataaaattaatagaaaacaaaagaaagaggagagtaaacttatgaaatttaacattaatacagcaagtttattattaccaggaacatttggagcagaaggaaaagagtgtattacgatttcaaaaagtgggttggctttgagcggtccagttgtgagacgactaaacaaacctgaatgggttcaattgtatttagatgaatcaagattagcattgtttgtcattccctgtaaagcgacggacgaaggcgctagaagttgtgtaaatccgaagtcaaaaaagaaagcagggtatcgtaaaagctggtcaggtagcattttagagaaggtatcaaaagccagcaagatggatattgaaaatcatcgttaccatgttgaaccagaaagcgttgaaggcaacccaactgctcttggttttgatttaacgaaagccgtaaaaaattaa

SEQ ID NO: 2929 - DNA, 213 bp, Enterococcus faecalis
attgatgagggtgaaaaaatgaaaataatcaaaattagaatttttattaatactggatcttttacaatggctacttttgatacagaaatatttgctgaaacattcaaaaatttaacttcaatactaaatgacgataaatataaatacaaatttgtaaaaatcggtgatgtgattattaaaccagtagagattacgagaataattaaactataa

SEQ ID NO: 2930 - DNA, 240 bp, Enterococcus faecalis
aaggaacagaacatgaaattcaaaaatgtggaattaatatcaaaaaacggtatcgataaaaaaattgaatcagttgatattgatgaacttacaaaagaagaatacgtgatgctaaggaatctaggattaggtgaccaactatctcataaaacgagcatgacgcttaacgaaattgaaatcaaacttgatattttcggtaaagtatctatatcacaagggttctatgtattaattaattag

SEQ ID NO: 2931 - DNA, 366 bp, Enterococcus faecalis
ttagaaagcggaaggagtgattatttagatcgaataaaaaagataatggagcttaaatcaagagccgaagcgctagaagttatggaagaatccttgaaaaaagggtttaaatatgtggtcagagactgcgacagcgaatatctttcctttttttccttgaagcctaaaaaatatatggacctaggttcgtggggttatgttaatgaaaatgcacaaggtgcattgccatcaattgtggttcttagaaatacagatattactgaaatttcatggagtaataaacaaccgataataattactgaatttttgaagtatcaaaaagctggactagaagacgaacttttcagagtggaggaagcagagtga

SEQ ID NO: 2932 - DNA, 342 bp, Enterococcus faecalis
atttttgaagtatcaaaaagctggactagaagacgaacttttcagagtggaggaagcagagtgaaacaatttaatattgaattagtaagacgtgacaaagtgaaagtggagcttgatccaaattttttcaacgaggaatggtttaaagaattccgtcagttcttttatgactatgaaactttggaagaaatagcagagtatatcgcatttaatgttgtgcacaataataatgaaactttcatcgatgggattggtatacctttgcaaaatggaaaacgtccatactggattaaaaaagacgaagaagtaaacgagcacataaacgttatttataagttatga

SEQ ID NO: 2933 - DNA, 354 bp, Enterococcus faecalis
gtaggaggaagcggaatgaaccaaagacagaaaaagaaaagaatgacaaaagccttaaaaattttaaatcaagcagaagttattgagtttgattgtgaaggtgaggatgtcttgtatatagatattgaagataccccagaaaacgtaaaacttgtgactaaagcatgtagcatcttagggttggataagaaaaagtttattgctgactgtagagaagatagacaagatgaaggaactttggatttatcaagtggttggtttacgttaattcgtgtagaaccgaaaaaattcactatctggtatagtgtagcaaatggcttctatttggttcgttgtttagatgaggaaaattaa

SEQ ID NO: 2934 - DNA, 441 bp, Enterococcus faecalis
ggaaaattaatgtctcatttaacaaataatgaactactgattatcagtttcttaatcaaagatggaattaaagcctttgattttcgtggtggtttccgcgattgctggttcaccgaaaaagaatcgaatgaattagccaataaaatagaaaaaatatcagatattattttcgagcgggatcgtgacgaattttggtatgaaaatgaagataatgacagagtacaccatttgaaaattttacctaaatacttcgaagcagtcgtttcaggtgataaatgttttgaaatccgaagaaatgatcgtggatataaggtaggcgatattcttcgactaaatgaatatcaagacggacaatatacaggtcgctttcatgtcgtggaaataacgtacattacagattatgcgcaacaagatggctatgtagtgctggggattaagtaa

SEQ ID NO: 2935 - DNA, 318 bp, Enterococcus faecalis
atgaaaattattgctaaaggtcgagggactggaaaaacaacagagctagttaaagaatcagctagaacgggtcagtatattttagcatcgaataaatcgcatgtccgagctattgaacaaattgccaaaaaagcaggcgttactattccatatcctgttacggtggatgagattgtaagcatggaccgctttacatgtgccagttctattcaacgagagggattgctagtggatgaagcaattatggttttaagtaaactaattggcttaaaaatcactggggccactatatctcttgaaggagaacaacaatgctaa

SEQ ID NO: 2936 - DNA, 219 bp, Enterococcus faecalis
aggagaacaacaatgctaagttatccagaattatatatactgggccgtcaagtagacggcgtgtatgttgagtacctgcatggatcagagcaagccgatttatttttcgattatacaattgctcgtgatgaaagaaatcatatgaataaaaccaatatgaaagatggcgcttgggaaattttaaagtatggcagcccgatcacgctaaaggagaattaa

SEQ ID NO: 2937 - DNA, 195 bp, Enterococcus faecalis
tcagaggtggattatgtggactttaagccagccaaactatccgaattagagaattttgatggaaagcatgttataatactagttagcaacgggcaaacaaaagtagccgatctgcctgaacatggaattgttgaagtaatatctcatgctggtaaagtaacgtttattgaacaaaaaattaaagaaaaattttaa

SEQ ID NO: 2938 - DNA, 624 bp, Enterococcus faecalis
gtgtctttttgtatttttattagaaggagcgattcgccgatgttagaccaacacggaagagagattttgattcaggaatataagtctgatttaaaagacgcaagtcgtcagcatcgacgaattgcaaagaagaagtatcaaattgaaaaaaatggcagattagaaacaattgatgaccgcactgcagaagatataaaggaacagtccatttatgctgaaattatttcatctaccaaatatgcgttatattggcttgaacatggaattgagcgacctcttgatgaggaggcagcaaaaaaaatacctaaatatcgcagagctaaacatattacaaatatggataagatatcatacgaaatttattgtaaccagtatgaatctgcacgtaattaccctattactgaagagaaacaagagatgttgattcaacttaaagagttgttatcaacgttcagcgagagagagcgtgatttgtttgattatatccataatcagcaacttacttatgcagaagctgctgaaaaaatggatattaaagtagggactgctaaatccatgtcacaacgaattaggaataaaattgatgcttatttcgaatatggacatcagatttcattattttaa

SEQ ID NO: 2939 - DNA, 276 bp, Enterococcus faecalis
gcgttccacacaaatttaaataggggatacattatgaattactggtacataagtttaagtaaaaattacccaccaaaaataactagacaagttgaacttcatcgacactatgctgttgttgaatgtatacaacgtgtaaataaaaaagaaatggtagctctagaattgaattttctaggttatggattttataaagacaatcacattcaagaaaatttaacacataaaaaaaggagtgttcgttatgaaagaactaatcaaagtatcagtcaatga

SEQ ID NO: 2940 - DNA, 744 bp, Enterococcus faecalis
cacataaaaaaaggagtgttcgttatgaaagaactaatcaaagtatcagtcaatgaaaatgatgaacagttagttagcggtagagagttacacgaatttttgctggttggaacgccttataaacgatggtttgtacgaatgacagaatatggatttgctgaaaacgttgattttaccgtgattgccaaaaatgtccatgacgagacagcttttggtggcgttcgtactgttactgatcacgctatgaccttagatatggctaaagagatttcaatgattcaaagaactgacaagggtaaacaagcgcgacaatattttattcaactagaaaaagcttggaataatcctgagatggtcgtgcaacgcgccttacaaattcaaacaaaaaaagttgaagctctacaattagaaaatgagcaattgaggcccaaagcgttatttgcagatgctgtcagtgttagccatactagtattttgattggtgagcttgctaaattgattaaacaaaacggtgtagacgttggtgctaaacgtttattttcatggttacgtgaaaaaggatacctgattaaaagaaaaggtaccgattggaatatgcctacacagaagtcaatggatctcgaattatttgaagtgaaagaaacgactattgcacgttccgatggtagtgtaagtatcagtaaaacgcctaaagttactgggaaaggtcagatttattttgtgaataaattcttgtcagaataa

SEQ ID NO: 2941 - DNA, 705 bp, Enterococcus faecalis
gattcaaattcacattgttttaattctccaaattcaacacgactaagggtatcaataatcttatatttctttgacataaaattctcctttactacaattatatcacgaaaagaagaaaatattatttttagctgctatatgttctatctgcttcagtgtttttgtatttatatttgtattaggaaagcaactgttatttatatgttactatatacacaggaggagataattatggaacttaaaacattacgtgctttaacattaaaacatatcaatctttcaatcaacatgttaaacaatccaggattgtttaacacaagtgatagttcatttaatattttaatagaagaacaaatatttattactctagcttttgtaggaagttttttagaacgatcaaataaaaacatctacaaagataaaacattacttggttacaaatatctttggaattatagcaagcatggagaaacaccttttaaatttgttgctttagatgtaaagccaagttttacctttcccctagttattactaaaaaatttatttttggaaaaagctattgtgtgtgggatgaaatgccatttgatgatgacccccgaaataaaaaacagtttgccgcttaccaagaaacccttcaaggtaaaaatatgaaaaactcactgcaagagttgcttactataatcgaacagttaaatgaaatataa

SEQ ID NO: 2942 - DNA, 726 bp, Enterococcus faecalis
cagctaaaaataatattttcttcttttcgtgatataattgtagtaaaggagaattttatgtcaaagaaatataagattattgatacccttagtcgtgttgaatttggagaattaaaacaatgtgaatttgaatcctacaaacaatttgtaaaaaaatataaatggtttgaaaacgtctttttttcctttgagttagcgaataaatcggtgaaacaattcaaagactttgaaaaacacataaattcgaaagaaaataaatatgatataaatgaaattcacgcaactggattataccatataactagcttggttttatttctaagattatttatcgacaattcaaaaagttactcaaccaaggtgtcttcagagtgtaaactattcatcaaaaaaacagagaaaaatccaagtataaaaatactgaaagctttaagagattattctcaacattaccacttaccagtggaaaatactcatagagtatatgatatatttaacgaaactatgacaacaaaatttataatcaccaagtctgatcttttaaaaaataaagaaaacaaacgcaaccttgctattatcgaacaatatcctgatcatgaaataaacattggtgaaaaaattgatgaatgttatcaaacgaattacttttctttatgggagatcattttggaggaatttaccaattcatatttcaggaagagaccaaaaaatatattgcgcaaatag

SEQ ID NO: 2943 - DNA, 744 bp, Enterococcus faecalis
aaaggggaggtgaagttaatggcaaatcagatgaaagaaccaactaaaaaaattaaagagagatatgatttgtttgttgattactacctccagtctttcaatgcgacaaaagctgctgttttagtaggttattccgaaaaaacagcaaggcaacagggacataaattactaacaaatgcttacattaaagaaaaaattcaattggaaatgaaaagactacgcgatcgtatgaaggacgagggattgcgtagtttttcaatgctattagatatagcaatgcaaactgaagggaaaatacaagctcacaacgaagctgagatagcaattgataaaataaagtctgaacttagcgatttagagctcgaaatgcttaaggctgataacgacttagaaaaagtacaaaaggcggcagatgccatcgatggacgaaaaagagagatgaagagccacaaaagaagtcttttagagcaaattgactccataaaaaaagaatattttgaactgaatcttgaaagagttgtgttactaaatgaattgtcaaagcatcaatctcgttatcttgatgccaaggaatgggaaaaattacagagtctaaagaaatctattttccaagacattttagaccgaggtggctttaaagcaattgaccagatacagcatagcggaaaagtggatgttaatccgcttgcgaatttgtcggaagaagaattgaggcgattagcaaatggaccaagagcaacttga

SEQ ID NO: 2944 - DNA, 1440 bp, Enterococcus faecalis
caaatggaccaagagcaacttgatgcattagctaacgctgcattggaagaactagctagacgaaattatggagatttcttctatttgtcacatggtaaacaatgggatttattaagacatcagaaatacattacagatcgacttcaaaaaataattgatggggagcaaaagtattatattattgaaatacctccccaacacggtaaatctactgtaattacagagacatttccagcttattatttaatgaggcatccagatagtctggtgatggttgtttcttattcaaaagaattattccaaaagtttggtagaaagaaccgcgaaaagttccgcttgttttcggaccaattattcggcttacaaataagttctgaaacttcatctgttagtgaatggggagttgaaggtcatctaggctcgctttacagtacttctattttaggtggtgcaacaggacgtggagcaaggcttttaattatcgatgatccgataaaaaatagagcagaagctgaatctaaaacaattcgcgataaaatatataatgagtggcaagacactttctattctcgtttaacggcggatgccagtgtcattgtaatcatgactagatggcatgaggatgatttagcaggtcgtctgttaaaagaacaaacactgccttgggaagaaattaaaataccagctatagccgaagatgacgacttactaggaagaaaaccaggagaagcgttagcacctgaaattgggaaagatgaggagtgggctgctaaaacaaaagcagttactggttctcgtggttgggctgctttgtaccaacaacgaccgacgccagcaggtggtaacattttcaaacgttcatggattaagttctatgtgccaacattatccaaaaaaattgaattaagtttaggcgatgacgtggttattttaccacgtctttttgatagacaagctcagtcttgggactgtactttcaaagacaccgaaacatctgactatgtatctggtcaggtatggggcaagaagagagccgatttttatttattagaccgtcatcatgagcgtatgggcatagttgagacgatgaaagcaattgatgccatggctgctaagtggccaaaagctcgcggtatttacattgaagataaagctaatgggacggcggtaattgaaatgcttaaaaatgaattgagcggtatcattgcagtaaatccagaaggcggcaaagaggtacgggcaaacgctgttgctcctatatgggaagctggtaatgtctatcttccgcacccattagtttgtccttgggtagatgatttcattaacgaactagtagcattcccaaatgctgaacatgatgacgacgttgacagcatgactcaaattcttaacaaaatgattggcaaagtaagtttaagagaaaggtatctcgacaattaa

SEQ ID NO: 2945 - DNA, 1395 bp, Enterococcus faecalis
atggggaatatagcaaacgaagctaagttattaaagctggatggtaaagcatatcgaaatgattttatgcttggaaatggcaaaggccacgctagagacaacttatctagacaaagaccaggaacgagcaagagattgtcatgctcacaattagagtcgctttactcgtctaactcgatggcgaaaaatatcgtagacattccagcagaagacttaactagaaatgggtggagtctcaaaatgcaagatgataaagtaaaagctctgtacgaaagtaagctgagacaactgaaagctaaggaacgattacaacaattattcacgtatgaacgattatatggagatggattcgtaagtattggaacaatagagaaaagagagtactctctaagtgagccattagactttgagaatattaaaagtgttccgtatattaatgcattttcaggcaaaaagattagtaatagaataattgatgaagatgtttttagtccaaactatggacagattgaatcttttgaagtcaataatagatcaaacaacagtcgcatacaccttctaaataatacgacttacagcagagctacaacaattcataggtcacgagttttacatcaacaaaatttgagatttgaagatgaattagaaggatcatctttattagagaatctttatgatatcttaactgtagctgacacatctgtttggtcagtcggacaaattctgtatgattttatttttaaagtatacaagtcagcagatgttagaagtcttacaccacaagacaaactagaaattgaaactaagatggattatcaattcagaacagaagcaattgctatcatagacaaggaagaaagtcttggtaaagagagttcttcggtagcaggtatcggtgaacttttagactttgtttgggattatttagcaggcgctgctcgaatgcctaagactgttttaaaagggcaagagggcggaactgttactggagcacaatatgatgtcatgaactactattctcgtataactgctatacaagaaaatcagctaaggccacaccttgaatatctcatgcggtgtctaatgtgggcagaggacgaatgtggtggtcgacttgaccctgattcaatcgaatggtccgttgaattcaatccgttatggaacgttgatagcaagacagatgcagagattagaaaactcactgctgaaacagataagatttacattgaggcaggtgtatctgatcctgatgatgttcacgaagctcgctttggtcgttttggcataacagaaacctctaaatttaacgcggatagcttgtccagggatgagttagataagatggctgctgtagtttatgaaaattacaaacaggacagagataatgaaaaataa

SEQ ID NO: 2946 - DNA, 1188 bp, Enterococcus faecalis
tttatgaaaattacaaacaggacagagataatgaaaaataatccaaaaacgagatatccgttacgtttagaagaaagctatgctaaaaacattcagaaggccgtaaaagaaatagaaaaagtttcattatatgaatttgataagtatctagcaccgatgatagatgataaaaatattgttaatgattccaacttaattaatgatggattattcgatgccgcatcgaaactaatcagaaatgcgcaaacatactttttaggtattcttcaaaacagaaccgcacaaaaaatagttcgtaagcatattaatagtgtcaacgcatttaacaagtctaatgtgaactctcaacttagcgctagaggaataaacccactacagactgaaaaatggttagacagctatgttcaagctaaaatagcggaaaacatcagttatgtcactaatattcgtgatgattactcaaaaaagtttgaacaggttatttatcgcggaatcacagaaggcaaatcttcaaacgagataagagaagagcttgttcatcaagctggtatgtcatcagacaaagcagcgtttattgctcgtgatcagacaggtactattttaggtcagatgaatagtgaacgccaaaaacgagcgggatttcaagcttttagatggagtgatagtggagatgaacgagttagggattctcatcgagaacgtaacgggaagatttacttttatgctgataatccattattaccaggcgaagaatataattgtcgctgtgttgctgaaccagtcgacgatgaagaattgcttgaagaaagcattgatcttggcctttctaatcaagaagagcatgcggtcaagacatatgttagctctgaagcttacaaattaaacgataagctcagaaatggttatcagttagatgaaagcgacttgaaattgatagacaatttagacaaagcgttaggcaaaatgaccaactatgatggtgaagtaacacgttccatgttttttgatagcagtgatgacctagtgaggtttgctaacaactacaatttaaatgatgttgttcaatttcctgaatacatttcgactacaaaagacatttactcagagcaagactcgttaagatttgttataatgagctcaactggaaaagatttaggttcttacaacactctcttcaccacaggttgg

SEQ ID NO: 2947 - DNA, 909 bp, Enterococcus faecalis
  misc_feature (727)..(727): Nucleotide 727 is "n" wherein "n" = any nucleotide.
tccgtgtggaaaggctttgggaaacatgatagcagcgcgcgtgtagaaacaggaggcccttggtttaaccaaacgcaatttcatttgaatacgcgtttagaacaagcctttcaaccaattgaaatcgacaatacccaattttatttgttgccttattttgaaccgattgcggctcgcttatattttgaagatgaaacgattcgaacgattcaggcggcgatggaaaaagttgtcgcgaaaatgcaggaatcttttctccccaataaaaaacaggtgttagttagtcatttttttgtcgctggcagtgaaaaaactgattctgaaacaaaattaacagtgggtggtttggatgttgtaccgacggctttgttagagccttttgattatgtcgcgttgggccacttacatggaaaaaatgcgttgcaggcacctaatgctcgatacagtggctcgcctgtaaaattttctttatcagaaatgacacaagaaaagggtgtttggcttgttgaaacagaagctgaagttcattttcaattccgtgctttgaaaccattgcgagacattcaacaattgacgggctcgtttcagcagttaacggatcccgctttttatcaagaagtgaatcgggaaaattatttacatgtccaattaaccgaccgagcgatcattcccaacatgatgaatcaattgcgaaaaatttaccccaaaattattgggttggaacgtntgaatggtcgagaaacaagcagcggaaatcagaaaaaagtggtacaaatagaacaacgttcaccagaagaacatctgcatgacttttttaacgatgtgacaggagaagccttgacagaacaacaagcacaatgggtccaagaagaactgagtacacttaatcaattagaaagaaggaagtaa

SEQ ID NO: 2948 - DNA, 270 bp, Enterococcus faecalis
aaaacttcggaccgtatattaatgaaaccatggattttacgaagtgtgaaagattcttcactttttctaattagtggaaaaacagggtctgggaaaacaacgatttttgatggaatgagctatgctttgtttggtgaaagttctgggaaattacgtataggcaaagaaatgcgttccacatttgctgacccctcagaagccactgaaattactttgctttttaaacataacgagtatctctatgaactgaaccgccttcccgaacaataa

SEQ ID NO: 2949 - DNA, 312 bp, Enterococcus faecalis
  misc_feature (280)..(280): Nucleotide 280 is "n" wherein "n" = any nucleotide.
ctttttaaaaaacgtggcacaggagtccgtaaacaaagtgccaaaatttctttaattgtcaaagatgctcaagggaaagaactactatcctattctaaaagacgcgaagtggacgaactcattcaagaattattgcatttgaatgccaatcaatttgctcaaattgtattgttaccacaaggagagtttcggacttatttaattgctacaagtgatgaagaaaaagaggttttgcgtaatttattcggaacagaattgtatcagttgttcagcgaatatntaaaagaacgcttaagaattgccaatcattag

SEQ ID NO: 2950 - DNA, 2457 bp, Enterococcus faecalis
cactttttgaaaaacttcaattatctagaaagccaacaacaagaggctcatcaacaactattagttgaaagagaacaaattgcaaccttaaaacaagccaaacaagcaaaagagcaagttcgttatgccattgaagaacggcaaaacttgcaacagcaaaaagaagaattactggaaaagaaagcaaaacaagctgaacaggaaaccgtcattgagcggctaaaggaacagattcagcaattaaaatggagccaaaaacagcaatctttagctgaaaaagtctttgaaaaacgaagcgaaaaacaacaaaaagagcaagaaacaaagtccaaacaacaagctcttatggaaacacaacaagcattgacagattggcaagcaatcatgagtgagttggaagaacaacaaccattgattgctgaaaaacaagaacgtcttcaaacgattcaacgtcaattaccacaataccaagaatatgaacagttagcccaacaacaaatagcagaacaagccaattatcaagccattcaaaaagagtatgaatcttgccaacaggaaaaaataacattagcggataaagtggcgacagccaaacaatttattgaacaagaaggaacacttgaaaaagcaaattttgaatgttctagtgtagcagatcattggcaaaattttgtagaacgttggcaaaaaaatcaaaaagcttggcaaaaaattagtcaaaaccaaggggaattgcacgagttgacacaacggtttgctgttgaacagcaacaaaaaagcgccgaagaagcgaagttgcagacaaagaaaagtcaatgggcctctttacaaatccaacgattaagcttgttacttgaagagggggaaccttgcccagtttgtggctctttagaacatccaaaacaacaaactcatcaagaagtttccttagaagagattgatcaagcggaacgggaattaacggaagttgaaaaaacggttcaacgatttactgaaacgctctctgcattaggggcggaaaagcaacagaaagaaagccaattacaagaacaggaagctgcgtatactgaggaacaagaacaattagcagcgcagtttgctgacttgcagttgccgttaacaggactaactttttcacaagtaacacctgcagaaattgcggaagttgagtcgcaattagctaaagaaaaacaacaaatagcacaaaaactaacggaaatttcagtcgaaaaggaccatctagcggaactagaagaacaagtagctgaaaattcccaacgctttgaagtgctccgacaacaagtagaaacaatgcaacaaagtctggaaagaatcactatccagcagcaaatgattgctagccaattattggatgcaaccgtcacatacgaagaaatgaccaaacaacaaactttgcttcaagaagaactctctgcatttgaacgtcaaaaagaaaacgtgacgacacaaggagaaaccttgaagaaagaagaaatgatccttgaaagtacgttgacgcatttggagaaagaacaacaaacacttcaacaaacagtcgcacaacttgagagtcagttaaacgcagttttaacggaacaaggagtgacagaggaccaattgacggagtggttgaaagaggtaccgacactagaaagtcagcaagaacaaattgctttatttgaacaagagcaaacccaactgactatccaactcgctgaaattgagaaaaaattatctagtgatacgttcccagaattatctttaatcaccacagaaattgaacaaataacacaacaaattgaagaacaagaaaaaaaatactatcaactgcatgaaaaaatgcaaaataaccaacagttggttcaagaaattaatgcgcaaagaacaacaattgaagacaagtttgaggaagttgctgcactacagcagttggcagatacggtgaatggcaataatcctaaaaaaattagttttgaacggtatatgttacaaacgtatttagaaagagtgctgacagtcgctaatcagcgtttagaccgcctgaccaatagtcgttatcaatttgaattgaatcacgaagcaggcagttatcggaatcaaacggggctagaaatcaatatttatgatgacaattcagggacggtacgcagcgctcacacgttatcaggcggggaaagttttatagcagcgttagctttggcactttctttagcagaagtgattcaagaacaagcaggcggagtcttaattgatgcgttgtttattgatgaaggctttggttccttagatgaagaagcattggaaatggcaatggaggcgttagaaacgattgaaaatgaaggccgcatgattgggattattagtcatattggcgaattaaaagcacgaattccacaacaattacaaataaaaagcaatgggaatggtcaaagtaccgttcactatcagctagcttag

SEQ ID NO: 2951 - DNA, 3222 bp, Enterococcus faecalis
cttagtagaagaggaggtgagtcgatgaaatggagtattccagagcgaatcgttgaacaaggacgcgaatatatgcaagaaggccgggtcttatctatcgttcaaaatccagaaaaaaggatctggttgtctgaggttttaggggaagaactttatcttgttgaattggatggtaccgccaaagaacaagatgtttgtgaatgtcaatattggatggaacatggctattgcaaacatacagtggcagttgaactggcactgaaacaacgaggcgtgtcaagaattattcaagcgaatcaaacagtcagttttgagaaaacaaatcgatcaacagctgaaatgtttaccaaaggctttgccaaattaagcaaagcttctgccgaagttcccttgcagcctttacgtttagaatttcatttagatgtgatcgaaacgaataattactatccagaattatcaacgattggtctttctttaaaaattggtttggaaggcaccaaacctaaaacatatattgtgaaaaatattggtgattttttacaagcatatgaaaaggaaatgacttttatggtgaataaacaacaccaatttactttgctacatgattctttttcaatggagattcaagaaattttaacagaacttgcggcaatttatcataccagccaattattaggtgcaaacggtattcaagttaaagggaaaatcgacaaacgttatctattattaccaattgatcgcagtcaatcgttagttgaaaaaatgaatcgaacgggtcagtttatattgaccaatcaaactcataagtatcgctatctaacgttcaaagaaaccagtttgccacttacgtttacagtgcaaaaaaccgaggaacaaagcttcaaattaactattcagaatcctattacaacgtttctagcccactatcactgggcgattgcggatcaaacggtttatttactaacagaagagcaggaagccatctacaccacgttacttcaattaatgaaacgcttggaagagccgtccattatttatgaaaaagaaacagtttctgatttatttagtgaagtgttaccattattggaaaaaattggtcgagtgtctgttgaagaatcagttgaagaattagtcgtccatcatcctttaaaagcagtctttatttttaagaaaattaaaggtcggattaatgctcgaattgactatcactatggagaagtcattttctcgacaaacccgaaatatgctcaattacctgaagtcaatcaagaaatcgttcgagataaagcaaaagaaacagcaattaagcaacaatttcaacagtttgcctatcagcaaacaaccacaggctttgaaaaagtcttacctgctggggagtccttgtattatttctttaaagccgaggttccagctttccgtcaattaggagaagttcggatgggacggaaattacgggaattgtatttagatgcccagcatcatcaaccaacgattgaagttgcggaaggggattcttggttagatattcggtttgatgtcactggcattgatgaaaccgaaatcgatgcagtattgactagtctgctacgtaatgatgctttttatacgttaaaaagtggtgaaattcttgcttttgactcagaggaatttttccatacaagtgcaattttaacgaagcttcgaaaaaatatgcatcaagaagacaatgtcattcatgtgcccaaaaaccaaggcctcatgatcgaaagtttattagaagacaacgagcgggcacatttttcagattcctttaaaaaaatggtcacggatttaacgcatccagaaaactttgaagcgcaagtccccaaaaccttacaagcaacgttacgccattaccaagaaacaggttataaatggctgaaaatgcttagccattatcaatttggcggtattttagctgatgaaatgggtttagggaagacactgcaaaccattacctatttactttcggaaaaagaagaagagcgcttgaaagggacagctttgattgtcgcacctgcaagtttaacctataactggttagccgaagtcaaacgttttgcgccaaccttaaatgttcaagtggtttctggcaaccgccaagaacgagcagcgcttttacaaaatagcaccgaagatattctgattacttcttatgcaagtatgcgacaagatgttcagctttatcaggaaatgcgtgtcggctatttgattttagatgaggcccaaatggttaaaaatagtggaactaaaacggcgcaagccttaaaaagtttaaaagtaccgcaacgttttgcattaagtggcacaccaattgaaaataatttagatgaactgtggtcaatttttcaaatgatcttaccgggattgttcccaggcaaaaaagcctttcgagaaattaagccggaagaaattgccaaaatgattcaaccattcattttacgacgagacaagaaaacggtgctcgcagacttaccagaaaaaattgaaaataatatgtacagtgtcttaacagaagaacaaaaaacggtttatttggcctatctaaaacaaatgcaagcagatgtcagtcaaatggatcaggcgaccttcaagaaaaatcgcatgagtattttagcaggcttgacccgtttacgacaaatctgttgcgatccacgtttgtttattgaggattacacgggaggttctggcaaagtggaacaagtcaaagactttttagtggctgccaaagaaaacaatcgtcgtgtcctattattttctcagttcacaagtatgctttctatcttagaaaaagaattgaatgaattaggtttagagacgttctatttacgaggaagtacgaagcctcaagatcggttaacgatggcgaatgccttcaatgaaggagaaaaagatgtcttcttaatttcattgaaagcagggggaactggactaaatttaactggtgcagatacagttattttatacgatttatggtggaatcccgcagtcgaagaacaagcggctggtcgggcacaccgcatgggacaaaaaaaggttgttgaagtgtggcggatgattgcagaaggaacggttgaagaaaaaatgaattccttacagcaagaaaaacgcgagctgttccaaaaagtgattcaaggaaatgaagagcaattagcgaaaatgacggaagaagatattcgcacaattttaagcattggagaatag

SEQ ID NO: 2952 - DNA, 960 bp, Enterococcus faecalis
ttgctatcttatttaaagagaaatggagtaattcgtttgaaacaaaaagaatatatggaatatcggccgctaggtgaagaaattgaacggattcgtaaaggaaaaaatattcctctgcgtgtctttgatgaaaatggtgtttctagtcgaagttatcaacgctttgtccaaggaaatagtgaattgcgtatttcggatttagccattattgtcgaaatcttgtctatttcgccgatggaaatgacagaaaaattaacgccaatgtccaaaacagttttagctaaggagcagtttaatcaagcaatctttagtaaaaattttcaagaaagtagtcgaatcgttgcagattatcgggcgtattatgagaaatcgtcttttgctttaggaaagcaagaagtaatgtattcgatgttggcgttggaatatctttttaaccctcaaacagttgtgacaaaagaagagattattgcattagaaaatcagattctggaacgattaattaatgccgatgtgtatactatttttaatttgaaatttttagcattacaaaaaaacgttggcttgcagccgtttccaacttcgttactttttcgtgtactacaatctgtcaatgagcgggaaattattgatattcgctcgctagaaattatcgagcaagtaattattgattttttatttgcggcgattgtcagccaaaatgttccccatattcttcatgtattaagcatgtttaaagaatatgaagtgggtgaaaataactggcgaatgatcctctggaaaaaaatagcagaaaaaatagaaatgattttaaccaatgaagaaatattcgcagattggtcaatctttaaagaacaaatcctcttatctatcacattgtttttaccaaaagccaaacaagaattttttgctgggcaattggaaaaaatagaggatagtttaaaagaaataaaagaaaactag

SEQ ID NO: 2953 - DNA, 234 bp, Enterococcus faecalis
aaatgggttcaattacgacaaactgtccaaattaatttgtatagacaagacaaagagcgccaaatagggttttctacccctatttggcgctctttgtcgctaaacacaaccagaatgtattatgacaaattctcaattatgcctagttttcttttatttcttttaaactatcctctattttttccaattgcccagcaaaaaattcttgtttggcttttggtaaaaacaatgtga

SEQ ID NO: 2954 - DNA, 2199 bp, Enterococcus faecalis
ttaagaaaatatcaggaggtgaagtttatgaaaaaaatgtgcatctccgcagttagtgccttacttttggctaatagtttattacttcctgtaacaactttcgccgaaacgaccgaaacaatcgcatcctccagtgaagaaaatgtttcatctgtttcagaagaaaagattccagaaacttcatcggcagaagagcaaaattcagcaaccagtagttcggagattccccaatcagaagagttaacgactgttgaaacaagtgaagagccgccaaatgaagcactagcgataacggaagcacaactgatgatgccccaattatacgcaggtgctgtcttagataaagcgacgcctatcagtacactatttcctgatccagcctttgcggaaaatatcagaaaacagttaagcaaatctcggatctctaatactgtcacccaagcagaattggataaactgaataaagttattttagaaaatgtcgttgtttctaatgtggaaggagttcaatacctaagaaacttagaagaattatcttttcaagattcactcaatgtaacagatttgagtccttttgctaaaggtgaatttaagctattacgttttttatatatgagaaacaataaaatagctgatcttagtccgttaggtcaagcaggattaattaatttagaaggcttgtatgttgagaacaatcaattaacgacattaaatggacttgaaggaatggctgctttaaaaaatttaagtatccaaaatacgacagatcatccgtcaaaaatcacgccgaataatcgagtaacttccttcgacccgcttcgttctcttcgtaatttagaaaccatttgggctgccaataatcagattgctactttagatgggcttacggaagcaaataacctactccgtctttatgtggaaaataatcaattaaaaacaattgcgcccttggcgaataagccacgtctagaagagttgagtattatgaatcaaacgattgctagtctggaagctttaagcactgttcctaatctgcgtgtactgtatgcaagaaacaatcaaatttcttccttgtcaccgttagagaaaacactcaatctaacagttttagatgtgggagaaaatcaaatttcagatatcagtccgttaaaaggcttaacggccattacagggctagatgtatctaatcaaatgattatcttatcttctgtcgattatattgctgggaaaccactgcaattaaaaaataaggtggtatctcgtgatggtcaactatttccaccgctgacgattagcccttatggaagttacgatgctacaaaaggactgtttgaatggaatttacccaaagctcatgaaggcgtttcttatatctgggaatcaacagataaagcatacttagggaacttttctggaacagtcgtccaacctgtcaaagaagttttcttaagtgaaacgaaactatcttggtcaaaagagcgtatagaaaagtcgatggaaaaaacaatcgatattgatgactttcaaaaaacagccctgcctttttattggcaagatgtcgatgctgggaatagattacaatttattgtcaaaaaagagggtcaagaaatccagaaattagcagatgaaacaaccactaattctaaaacatttaaggaaaaagccttgttattaccagaactaacttatggaaaacagcagttggtcgtggaagtctatgataaaggctacaagattgacgaattagcgctaacagtcactgtggttggctctgtcaggttcaaaacggtacccacagcgatttcctttgggaatgagctgcaaatcgctagtagcacgacccaatatccaattgtttccatggatcaaccattagtgatacgggatactcgtcaaacggggaataattggtcgcttgcactaaccgttacttcagatttcaaatctgaatcaggtgctacgttgccgaatattttaaaatttagaaccaaccatcgcttacaggacattccagaaggccaatcgattcttgttcacaaccaagccaatggacatcaagaaacaaatatttctgatcaatggaaagaaaatgaccaagagttgttattatctgttcctggagggacggccaaagcagaagaatacgaagcaaaactaacttggcacttgatggacgtacctgatggcagtgcaaaatag

SEQ ID NO: 2955 - DNA, 372 bp, Enterococcus faecalis
ggggtgagtcttatcaaaaaaatagttagcggtgtattgctattaggattgatttcatcagttgatgtatttgctgaaacaaatgcctatccgacaaatgcagaagtttctttttatggcgagtatgaaccaccagccaacaaagaaaaaccagatggtaagataccacagcgtttccccaagcagtcggaagcaataccagcagtgagtggagaatcattgaagcattcaacaagtaaaacggttgatcaaaaaggctcaggcttcttacctcgaactggtactaaacagcaacaaatgtttaattatctcggaataatagtcatctttatggctagttttattttaaaaaaaagaaagaaggaacaataa

SEQ ID NO: 2956 - DNA, 807 bp, Enterococcus faecalis
aaaaaagaaagaaggaacaataaaatgaaaaaaattatcttagcaacaatcccagctatcactttaggcgtagctattgcaccagaagtgaatgcagaagaaaaaaactatgaatcaaatgctatcgttgaatttacaccggatgcctctatcaacaaaccagtcgatccagtgaatccagataccgaaaaacctgttgaaccctttgacccaacgacaccagacacaggcaataagccaaatgaaggaacaactggtccactaagtatcgattatgcttctagtttagactttggcaaaaataaaatttcaaataaagatgaaaaatattatgcaaatccacaatactttttcttggcagacggttctggtcctgatttgactaatcctaaaccaaattatgtacaaatttccgacaaacgcggaacgaatgccggttgggccttaacagttaaacaagaaacacaattaacagcgacaaaagaaacattaaataaagttttagacggttcagaaattaaattaagtcaaaacaaagcagtgtctaattccaaagcagtcacaccaactgcgcatgaagtaactttagtagctggcgattcatcaaatgtgatgtctgccgctgaaggtcaaggttctggaacttggcttagtgcgttcggtgggattgaaaaagtggaagttgacggtgaaagcgtagataaaaatacagcgatcacattaactgtaccaggagcaacaccaaaagatgctgttcaatacaaaactgttttaacatggacaatcgctgatttaccaagcgtataa

SEQ ID NO: 2957 - DNA, 795 bp, Enterococcus faecalis
aagagaaggagcactaacatgaaaaaaatgaccatcgcaagcagcttaattttagcaaccatcgcggtaggcacactaccagttcaagcagaggaagtggctaatcgcgacacagatgctattgaaaaatttaaagcaccagatgaaaaagatcctaacagcaaaaatcctgtagtggatccagaagacaaagacggcaaagatcctgtgacacctatcgacccagtaaatcctgacaaaccagttgatgaaggttatacaggccccttaaccttggactatgcttcaagtttaaactttggtgaaaatatcatcagcacaaaagatgaaatctattttgcatcagcacaagttttaaaagataaaaataatgttgaaaaaacgggtccattatttgctcaaattacagataatcgtggaactttagaaggctggactttatctgcaaaacaaaattctgcatttacttctgctacaaaaggtctgacacttgaaggaactgaaattgtctttcaaaacgcttcagctgtgacagcaggacaaagcgctgcaccaacaagtttagcgagcgtaacttttggtacagttggtgaaagtcataacgtgatggtagccgcaacagatcaaggtgctgggaaatggtcatacttatacggcaatgctagttcaattgctgaagttgacggccgtcaagtaatgaaagatgttcaattaaaagtgccaggtaaatcagttaaattaaacgatgcctacaaaacaacaattacttggacattagctaatacgccagtataa

SEQ ID NO: 2958 - DNA, 1032 bp, Enterococcus faecalis
agcgaaatgaaaaatagatattttattctgatgatcctaagtttttatttctttgcttttgggattgaaacctcagcagcagaattacgatttagtgttgaaacagaaattccagaaaaccaaatagataaaacaaaaacatattttgatttaatgatgaaaccagaccaagaacaaattttgaaagttcgagcggccaatagtacagatgaaaatttagtgattgatgttagtgtgaagtcggccacaacaaacagcaacggagtgattgaatatggtgagtcgttgacagctttagataaatctgcaccagcagatttatcagaaatcattcaactgaaagacggcggtgagagtgttgaattgcctgctaaaagtgaaaaagcagttgaattgcgagtgaagatgcctaaagaagagttttcagggcaactagcgggcgggatcacgtttagtgaaaaagtcgatgaaacgaaagacaagcaaaaagaaaatacaaacggcttagcaattgaaaatcgctatgcctatacagtagctgttttacttcgagaaaatgaaacagttgtacaaccagaattgtctttagagaaagttgaaccgacacaaagaaatgcgcgcagtgttatttctgcaacactgttaaaccatgaagcagcctatcttcaatcaatgaaagtaacggcaaatgttaaaaataagaaaacaaataacgttattttagagaaagaacaagaagatatgcaaatggcgcccaattcaatttttaatttccctattccttatgaagaaaatgaaatggaagctgggacgtatgtattggcaatgactgtggaaggctcaggaaaaaaatggcaatttacgaaagaatttacgatctcaaaagaggaagcaaaaacatttaatgagaaagatgtaaccgtcaaaaaaacggaatctaaacttatttatctcttaatcggtttattgatccttttactgataatctgcctgttcatcattttacgtctgaaaaaacaaaaaaataaataa

SEQ ID NO: 2959 - DNA, 714 bp, Enterococcus faecalis
atgagaaccattgtttttgatgttgatgacacgctgtacgatcagcaacaaccctttcgaaatgcgatgactaaaattttcccaaacgttgcgacagaggatatgcatgaattgtatcttcgttttagacaccacagcgatgaaacgtttccgaaagttttagccaatgaatggtccctagatttcatgcggtttttccggatgaatgaaacattaaaggatctaaactatccaggaatttcacaagaagaaggaaaaattttccaacaagtttatgaagaagaattggataatattacgatgcatccagaagttactaagcttcttgatactttacaagagaaagaaattccgatggggattattacaaatggtccaacagaccatcaatttaaaaaagttaaacaattgaatattgaaaaatgggttccaagccaaaatatcattatttctcaaagtacgggttttcaaaaacctgaaaaggaaatttttgatttagcctgtaatcaattttgtatggaacctgaacatactttatatgttggtgatagttatgacaatgatattgtaggcgcacgtaatggtggctggcattctctttggtttaaccaccgctctcgtgaactaccaagttgccaacctgcatcacaccttgcagaagtcacttgtttcaccgaactttgtccgactgtggagaaattatttaatctttaa

SEQ ID NO: 2960 - DNA, 216 bp, Enterococcus faecalis
ataacacatgttctgatagaagttagaattttgcaagagacagtctttttccgtataatgaatgagaatgaagggggagagttagggagttatgttaaagcgtttttttgggtattatcggccgtatcgtcgattatttattttggattttgggtgtgccgtttttgcggggctgttagagttggcttttccagtagcagtcaaccaagtaattga

SEQ ID NO: 2961 - DNA, 1722 bp, Enterococcus faecalis
ggagttatgttaaagcgtttttttgggtattatcggccgtatcgtcgattatttattttggattttgggtgtgccgtttttgcggggctgttagagttggcttttccagtagcagtcaaccaagtaattgataagattatgccaaaaggagattttcgcctcattgcattagctagtgcgggcttatttgcattttatataatcaatacgtttttacaatttattgtggtttattttggtcatatgttaggcgtgaatattgaaacagatatgcgtgaagaattatatcaacatctgcaaacacaaccgtttgagtattatgataatcaaaaaacagggaaattaatgagccgtttgaccactgatctttttgaaatttcggaagtggcgcatcatggtccagaagacgtctttattacgattatgacgttagcaggttcttttttattaatgttaaccattcacgtgaaattagccatcgctacgtttattttattgccatttatcacgattgcgctaggctattttaataaaaaaatgacaaaagcgaatacggatatttacgataatttaggtgaatttaatgctgggattgaagcgtcagtaagtgggatacgtgtcacgcaatcttttgcaaatgaaccgtttgaacgaaaacagtttaattatttaaatcaaatgtatcgaaaatcgaaattatatttttataaggtgatgggtgtcagttccgcctataattacttattaattcgtctgataaatttattttcattaatttttggtgcgtattatacaattaaaggagaaattacagaaggtcagtttgtaggatttattttattagccaatatttttattcggccgattgaaaaagtcaacaatatgattgaaagctatcccaaaggatttgctggctttaaacgttttacggaagaaatggacaaacaaccgtccatcaaagatttgccaggagctgttgctgtttcacatttagaaggaacgattgcctataaggatgtttcatttgcttatgaagatggcacaaaagttttagaccatatcaatttaaaaattcaacctggtgaaaccgttgctttcgttggacaaagtggttcaggaaaaacgaccttgtgcaatctgttgcctcgtttttatgaagtcagtagtggtgaaattacgattgacggtagaaatatccagaaaatgaccttggcttcattacgtaagcagattggaattgttcaacaagatgtgtttttattccctggaacattacgagaaaatattgcttatgggaatttaaatgctacagaaatagacattcaacaagcggtgaaattagcacatttagaacatgtaattcagctaatgccagatggcttggacacaattattggcgaacgtggcgtgaaattatcgggcggtcaaaagcagcgagtggcaattgcgcgaatgttcttgaagaacccgccgattttaattctagatgaagcgacttctgcattagatacagaaacagagcaagtgattcaagagtcattaaactcgttagctgacgggcgaacaacattaattattgcccacagactggcaacgattaaacatgctgatcgaataatcgtagtgagtgaccaaggaattttagaagatggaacacatgaaactttgtacgcgcaaagaggccactatcgtcgcttgtacgatgctcaatttagaacataa

SEQ ID NO: 2962 - DNA, 699 bp, Enterococcus faecalis
tggaccaatttagtcgatttatcgcaaaaggatggtcgtgctggcgtaagcgctggtcttttaacataccctccattaatggttggtgatatcgtgttgtacaacgctgacttagtgccagtcggagatgatcaaaaacaacacttagaattaacacgtgattttgtggaacgcttcaacaaacgttacgcccaaaaaaatcaagaaattttaacgattcctgaagtaaaaatcgctgagcaaggtagtcgaattatgagcttacaagaaccaacgaaaaagatgagtaagtccgatacaaatgtgaagggctttatttcaatgcttgatgagccagcagtaattcgcaaaaaaatccgctctgctgtaactgattcaactggtgtaattgaatataataaagaagaaaagcctggtattactaacttactaaatatttattctgctgcgacaggtcaaactgttgaggaacttgttcaagcatacgaaggcaaaggctatggagacttcaaagcagatttagcagaagcagtagttgccttattagaacctattcaagtgcgctaccaagagcttctagcttcagaagaattagatatgattttagatgagggcgcagaaaacgctcgcctggtagccaacaaaacacttcaacgaatgaaaaatgctgttggtttgggaagaaaagttcggcgctaa

SEQ ID NO: 2963 - DNA, 297 bp, Enterococcus faecalis
ggggaaagatccaacgatgtctatcgtaaattagcactttattcccaagatgataataaaaaagtaactgctgaatatgaaatcacggttcctaagctaatcgtttcttctgaaaatttcaacatcgttcacgggactgtcaaaggtgatattgaggtgaaagcaaatggctttactttaaatggtaccaaagttaatggcaatattacttttgataaacaagaatacaaagattctgctgacttagaaaaagatggtgccactgttactggtgaagtcaccgtagccaataattaa

SEQ ID NO: 2964 - DNA, 645 bp, Enterococcus faecalis
atgcagtttttaaaaaaatatggcggctattttttagttttaggggtcttacttgatttttttacaccttattatgtcggattcaaagatcaaggttacaatcaattgacagaagtaattagcttattaggtgatgtgaatagtccagttagggaaaactttaatcggttaactatcattgcgggaatgttgatgttagcaagtttacctaggatatatgctattttttccagaaaaacgaaaaaaggtgcttggttagtagtggcaatgattggcgcttatggtttatttgattgtattttcagtgggctcttcagcgtagacacttcaagcgctggcacagttgctgccgcgcttcataacggaggatcagcagtcggttatacaggctttttgttgttatcaggcgtcttaaccattatctacagtaaatacggttcgcaaaaaaataaaaacctttttggctttttgtttattttatgtatgcttgcagccggcttatatggcttagcaaggattccacagttgcaacaggtaaaaccatttaattatttaggcttatggcaaagagtgagttcattttgtaattatctaccaatgctggcactgtgtttacaaactaaaaccaatgacaaatttgattga

SEQ ID NO: 2965 - DNA, 195 bp, Enterococcus faecalis
aaaaatcaagtaagacccctaaaactaaaaaatagccgccatatttttttaaaaactgcatctattcacctcaattttgattttttatttactttaagtatagcatatcaaaaattccaaataattaaactttcttttccactaaaaaacttttcgtcaacgcgcgacgaaaagttttactttaggattcaatag

SEQ ID NO: 2966 - DNA, 747 bp, Enterococcus faecalis
agggattttaaaaacagcgcgattgaaaaatatttaaatagtgtccttaaagatttgtcgccagaacgttttttaaatcaatggacacaagcgttgttttcattaggaacgttgactaaaaatgtttcatcattctttttaaatgcatttttgacgttgattatctcaatatatgcgctggtatttaagcaatctattttgacatttgttgaaaaggctgcccacaaattgctgtctgaaaaagtgtacaagcaaacacaaacttggttaaatacaacgaataaaattttctataaatttatcagctgccaatttcttgatgcttgtataattggcgtttcatcaacgattttgttaagtattttgaatgtgaaatttgctgtgactttggggattttattaggtatttgtaatatgattccttattttggttcgatttttgcgtcaattgttgctggtgtgattacgcttttcacaggtggtgttactcaagcaattacggtgttactagttttattaattttacaacaaattgacggcaatattattggtcctcgaattatgggagatgccctaaatgtcaatccgattttaattattgtttcaatcacgattgggggagcgtacttcggcgtcttagggatgtttttagcagttcctgttgctgcaatcattaaaattattgtctcggagtggctaaatgaatcaaaagaaaatgataagattgtagattctattgaatcctaa

SEQ ID NO: 2967 - DNA, 444 bp, Enterococcus faecalis
ttgaagaaatacaatgttgattggaattactgggttgtccgctttttatttgtaatggcgctgattgttggctatttattaatcacgaattatcagcactttgtccatagtgtttcgggtttattaggcatcttatccccattcattactgggtttgtgattgcttatttattgagtggaagtcagaaaaaaatcgagggattactagaaagagttcctttaccagtcgttaaaaaagcgaaacacggcttgagcgtactccttttgtacctgattattttgtttatttttgttttgacattaaactatatcgttccgctactcattagtaatttagtagatttagcaaactctttacccactttttatgatcacatggttcagtttgtaatgagtttagaagataaagggattttaaaaacagcgcgattgaaaaatatttaa

SEQ ID NO: 2968 - DNA, 216 bp, Enterococcus faecalis
ttggggatgcttcaggaaacactacgtttggtatttttacaacaggtgccgataaagatttcattatggataactttacggtcacagtggaatcaaaaaaataaatttagtctatctaagcaacttggtctacaagttaaacgtacttgtagcccaagttgcttcttttatgaaaagaagcaaggtctagtgcctcatttttatactgcagaataa

SEQ ID NO: 2969 - DNA, 4080 bp, Enterococcus faecalis
tttagagatggacgttccaaaaataaaagaatttatttttggaacgcccctttaattgttaataatgaaagcgtgttcaaaaatgttagggggctgatttatcagatgaaacatggaaaaataaaacgatttagtacattgacactattggcaagcgcaacgattttagtaccattaagtacgtctgcagaagaaacaacaaacagcagcactgaaacaagctcatcaatggtggaacctaccgcaacagaagaaaaattgtggcaatctgattttccaggagggaaaactggtgagtggcaagatgtgattggtaaaacaaatcgagaattagcaggagagtcattggcgatttcacgagatgcagcagcaggtaataatgccgtatctttaaatttagattcccctaaattagctgatggtgaagtagaaacaaagtttaaatacactgctggaagcggtcgaacgggtgtgattatacgtggtaataccaaagatagctgggtttttgtaggctataacgcgaatggcaaatggttagttgaaagccctaattcgtggaatgattcaatttctgggccaacgttaaatgaagatacgaattatttgttgaaagtacgttatgttggtgaaaaaattactatctggcttaacaccacgttgatttacgaaggagaacctgttttggccaatggagacaaaattccaacagaagccggacatgtgggtgtccgtttgtggtacgacaaaaaaattgtcaattatgactattttaaaaatggccccgtagatagcattccagaaattgtgccagaagtgacacaaattgcgccagtcaaagtttttacaaaaattggtgtcgcaccaaaattaccgaaacaagtaaaagtgacctataatactggtaaagaagccaatgaagcagtccgttggaatgaaatcgatcctgatgcatataaagaaccaggaacttttgaagtcgacggtactttggaaaatacaaacatcaaagcaaaagccagcattgttgttgctaaagacaatgaagctgaaaaaggcgacaaaatctcttccgcagatttaacagccgtggttgatccacaatttccacgaattattcgctacgaagaccctcagagtaatcaagtgatttttaatggccaacacgagaaaattgaccaagtaatgattgatggcaaagcatataaagcaactgctgaaaaacagaagagtgaagcaaatcaagccgtttataacgtagctgtcccagaaattggtttgcgtttcacaacgacattgactgtttccgaaggccaagaattagctatgaaactctcagatattcgtgaagaaggaaccaaaatacacacaatttcaattccaaatcaaggcttgatttctgtcaatagtacagatgaaggggcgacttttgctggcgttgtgatgaatactgggacaaatgcaaataacggaaataaaaatggtgatactatccaagatttaactacaacaagccaagaagaaacgaaaaaatatatgtatggtttcttaaatacggcgaattatgctgcaagtttttggacgaacgcctatggagacggctctgtcgatggtagtgacaacaatcgaatccataaacaaacaaaagaagcggcgactggttttgtaacaaccttgtcaagtggggcatggacctatcgaccatttgatgcaccggaagattacacaactggagaaacgccagaagtgaaagttaaattctcaaaagatagcaacgacgacaatcgggtggattggcaagatgcggcaattgggttccgttcaattatgaataacccaatgggtgcggaaaaagtccctgaattagtcaaccaacggattccttttaactttgctagtcaggcgacaaacccattcttagtgacgttagacgaatcaaaacgtatttacaatttaacagatggattaggacaaatgaatttactaaaagggtatcaaaatgaaggacatgattctgcgcatccagattacggtgctattggtcagcgacctggtggggaacaagcgttgaatcaattaattgatgaaggacataaattaaatgccgttttcggtgtgcatattaatgacaccgagtcttacccagaagcaaaaggatttaatgaggaattagttgatccaacgaagcgtggctgggattggttagatccgtcttattttattaaacaaagacccgatacattgagtggtcgtcgctatgagcgctttaaagaattaaaacaaaaagcaccgaatctagattatatttatgttgatgtttggggcaaccaaggcgaatcaggttgggcaagtcgtcaactaagtaaagaaattaattcactcggttggtttacaaccaatgaatttccgaatgctttagagtatgactcggtttggaaccattggtctgcagaaaaagattacggcggtacaacaacgaaaggctttaacagtacaatcgttcgttttattcggaatcatcaaaaagacacttggattatttccgacaaccctttgttaggtggagctgaatttgaagcctatgaaggttgggtgggtaaaaccaattttaatacctatcgccaaaaaacttttgccattaatgtcccaactaagttcttacaacattaccaaattacaaactgggaaactacaacagcagcagatggtcaaatctatggcacaattaaattagcgaacggtgctgaaaaagtgaccgttactcaagcagatgctaattcgccaagaagcattacgttaaatgagacagaagttctaaaaggtgatgcgtatctactgccttggaatgtcaatggtcaagacaaactatatcactggaatccaaaaggcggtaccagcacttggtcattggataagaaaatgcaaggaaaaacgaatttacatttatatgaattaacagatcaagggcgtattgacaaaggcgcaattgccactacaaataaccaagtgaccatccaagccgaggctaatacaccgtatgtcattgctgaacctgacagtattgaaccgatgacatttggaacaggaacaccatttaaagatcctggatttaatgaagccaataccttaaaaaataactggaaagttttccgaggtgatggagaggttaaaaaagatgccaatggtgattatgtctttagttcagaaaaagaaagaaccgaaatcaaacaagatatcaatcttcctaaaccaggaaaatatagtttgtatctaaacacagaaacacatgatcgtaaagccacagtaactgttaaaattggtggtaagaaatatacgcggacagtgaataattcggttgcccaaaactacattcaggcagatattaaccatacaagcaggaaaaatccgcagtatatgcaaaatatgcgaattgattttgaaatcccagataatgccaaaaaaggctcggtgacattagcggttgataaaggcaattccgttacaaaatttgatgatttacgaattgttgagcgtcaaacggatatcatgaacccagacaaacaaacagttattaagcaagattttgaagacacacaagcagttgggttatatccgtttgttaaaggctcagctggtggtgtagaagatccacggattcatttatcagaaagaaatgaaccttacacacaatatggttggaatggaaaccttgtttcagatgtattagaaggcaactggtccttgaaagcccataaacaaggagcaggattgatgcttcaaacaattccgcaaaatattaaatttgaaccgaacaagaaatatacggtccaatttgattatcaaactgatggtgaaaatgtctttactgctgggaccattaatggggagttgaaaaataacaatgactttaagccagtcggtgagttaacttcgacagcagcagatggtcaaaccaagcattatgaagcagaaataattggggatgcttcaggaaacactacgtttggtatttttacaacaggtgccgataaagatttcattatggataactttacggtcacagtggaatcaaaaaaataa

SEQ ID NO: 2970 - DNA, 423 bp, Enterococcus faecalis
gacaggagaaaatcgatgagtgaacatttagttttagtaagtcatggccgtttttgcgaggaattgaaaaaaagtgcggagatgattatgggaccgcaagaaacaatttccactgttgctttattaccagaagaaggtgaagctgactttttagaaaaatttgaagcgattacggaatcgctagaagattttgttgtctttgctgatctactaggggggacaccttgtaatattttatccaaaaaaattatgcaaggtgcttcgtttgacttatatactgggatgaatttaccgatggttatcagctatgtaaatgcaagtttattagcgatcgaaggtgactatgttaaggaatcagcagaaagtattgtgaaagtcaacgaattgctgctaaatgttgcagtagatgatgaggatgaataa

SEQ ID NO: 2971 - DNA, 192 bp, Enterococcus faecalis
tcatctccgcactttttttcaattcctcgcaaaaacggccatgacttactaaaactaaatgttcactcatcgattttctcctgtcttacttattttgaaataacacctaacgcagacaatgcgacacagacaattaatacgataaaaatggctttagtagacgtcatattctttttacctagcatccaataa

SEQ ID NO: 2972 - DNA, 876 bp, Enterococcus faecalis
ttccgagtgggccagcagccaaaaaagaacatgcagcgaatgattcagacgaaggagagattgaagatgacgaaatctaattataaattgacgaaagaagattttaaacaaattaatcgcagaagcttgtttactttccaattaggttggaactacgaaagaatgcaaggatcaggttacttgtatacgattttgccgcaattgcgtaaaatttatggggatgatacgcctgaattaaaagaagtaatgaaaacacacacgcaatttttcaatacttcaaacttctttaatacaattattacagggatcgatttggccattgaagaaaaagaaggcattgctggaaaacaaacagtttcaggtttgaaaactggtttaatgggaccgtttgcagcaattggggattcaattttcgcagctttaattccaactatttttggggcgctagctgccaacatggcgattaatggtaacccaactggtatctttatctggattgttgctcaaattgccgtgatggtcttccgttggaaacaattggaatttgcgtatcgcgaaggaatttctttggtaacaactatgcaacaccgcttaactgccttaacagacgctgcaactttactaggggtcttcatggttggcgctttagtggcaacgatggttaatgtcaaactatcatgggcaccaagtattggggatgtaacacttaacatgcaaaataacttggatatgattttaccacgtctacttcctgcaggaattgtcggtggcgtttattggatgctaggtaaaaagaatatgacgtctactaaagccatttttatcgtattaattgtctgtgtcgcattgtctgcgttaggtgttatttcaaaataa

SEQ ID NO: 2973 - DNA, 921 bp, Enterococcus faecalis
caaaataggagggaacaaaaaatgaatatcttatggtggcagatcttattattaacattatacgcaggataccaaattttagatgaattacaaatttattcttcattaagtgcgccagtgtttgcaggtctttttgcaggattagtgatgggggatattaaagcaggacttattattggtggaagcatgcaattaactgtattaggagttgggactttcgggggtgcctccaaaattgatgctaactcaggcacgattcttgccacagcattttctgtgtctttaggaatgaaccctgaacaagcaatcgctgctattgcagtaccagttgctagtttaatgattcaattagacattttggctcgttttgcgaatacctactttgcacatcggattgataaaatggtcgaagatatgaactacaaaggaattgaacgtaacttcttaatgggtgccttaccttggtctctttctcgaatgattccagtcttcttagcacttgcttttggtggtggtttagtacaaaaagttgtatctgtcctaaatggcgatttgaaatggttaggtgatggcttgtctgttgctggggcggtcttaccagcggtcggttttgcaattttactacgttacttaccagtgaaaaaacatttcccttatttaattcttggttttactgtaactgctttactaggaacaatctttacaaacatgcaacttttaggaacatctgttgcgagcgttgtgaaagacttcagtggtgtatttaacgcactaccaatgttagcagtcgctttaattggtttcgctttagccgcaattagctacaaaaatggtcaaatgattccgagtgggccagcagccaaaaaagaacatgcagcgaatgattcagacgaaggagagattgaagatgacgaaatctaa

SEQ ID NO: 2974 - DNA, 501 bp, Enterococcus faecalis
agaaatgaaagagggattacaatgagtattattggcgtaagaattgatggacgtttgattcatggacaagtggcaaatttatgggcgacaaaattgaatatttccagaattatggtcgttgatgatgaagttgcagggaatgccattgaaaaaagtggcttgaaattagcaacaccagctggcgtgaaactaagcgtgttaccagttgaaaaagctgctcaaaatattttagcaggaaaatacgactcacaacgtttattaattgtggtacggaaaccagatcgtttattaaaactagtagaacttggggtgccgattaaagaaatcaatgttgggaacatgtctcaaacaaacgaaacacggtcgattactaagtcaatcaatgtggtcgatcaagatattgaggtttttaaagagttaaatgctaaaggtgtccatctgattgctcaaatggtgccaagtgacaaagcggaagactttatgagtttgataacaaaatag

SEQ ID NO: 2975 - DNA, 1851 bp, Enterococcus faecalis
ataaagagctttctttatttagcaattatccagcaattgaaagcgtttactagaaagggtgacaatgtggacagatttgaaattaaagaggagtttcttttaaatggtcaatcatttaaaattttatcaggcgccattcattattttcgtgtagatccctcagattggcatcattccctttataacttgaaagctttaggcttcaatacagttgagacatatgtaccatggaatttacatgaaccgcaaaaaggaacatttcattttgagggaatattagatttggagcgctttttaaaattagcacaagaacttggactatatgcgattgtgcggccgtctccttatatttgtgcagaatgggagtttggcggttttccagcctggctattaaatgaaccaggacggatgcgttcgaataatccaacctatctgaagcatgttgcggaatattatgatgttttaatggaaaaaattgttccgcatcaacttgctaacggtggcaatattttaatgattcaaatcgaaaacgaatatggttcatttggcgaagaaaaagcgtatttacgggcgattcgcgatttgatgattgcacgcggcgtgacagcaccattttttacttctgacgggccatggcgcgcaacattgcgggcaggcagcatgattgaagatgatattttagtaaccggaaattttggctcaaaagccaaagaaaatttcggtatgatgcaagccttttttgaagaacatggtaaaaaatggccgctaatgtgtatggaattttgggatggctggtttaatcgttggaaagagccaattattaaacgagatccgcaagaattggctgaatcagttagagaagcattagcattaggcagtataaacttatatatgtttcatggcggcaccaattttgggtttatgaatggctgctccgcacgaggaaccattgatttaccacaaatcacttcctatgattatgatgcgccacttgatgaacaagggaatccaaccgaaaagtattttgcgttacaaaaaatgcttcacgaagagtaccctgcgttaccacaagctgaaccattagtaaaagaatcttttgcgcaaacagcaattcctttaaccaacaaagtgagtttgtttgcgactttagaaacgattagtcagccagtggtcagcgtttatccgcaaaccatggaacaattaggacaaaataccggctatcttctttaccgaacaagcattgaaaaagatgctgcagaagaaaagctaagagtgattgacggtcgtgatcgtctgcaattatttgtcaatcaggtacatcaagcaacgcaatatcaaacggaaattggcgaagatatttacgttacactgccgcaagagaataatcaaatcgatattttaatggaaaatatgggtcgtgtcaattacgggcataaactatttgcagatactcagaaaaaagggattcgaacgggtgtcatggcagatttacattttatgacgcaatggcaacaatattgtttacctatgacaagctgtgaacaggtagactattcaagagaatggcagcctgatcaaccaagcttttaccagtatcatgtggagttagcagaagtgaaagatacatttattgatgtttctaaatttggcaaaggaattgtttttgttaaccaaaccaatcttggtcgtttctggaatgttggtccgacgctttccttatatattcccaaaggattattaaaagaagggcaaaatgagatcgtcatttttgaaacggaaggaacgtaccaaccagaaattcagttagtaaaagaaccactatataaagaaatgaaagagggattacaatga

SEQ ID NO: 2976 - DNA, 957 bp, Enterococcus faecalis
ttgggaggcatagctgtgatagtaacagtaacaatgaatccgtcaattgacatctcctacctattagatcatctaaagcttgataccgttaatcggaccagtcaggtgaccaaaacccctggtggcaaaggactaaatgtcactcgcgttattcatgatttaggtggagatgttatcgctaccggcgttcttggtggttttcatggggcgtttattgcaaatgagttaaagaaagcaaacatcccccaagcatttacgtcaatcaaagaagaaacacgtgattcgattgcgattttgcacgaggggaatcaaactgaaattttagaagctggaccaactgtttccccagaagaaatcagtaacttccttgaaaatttcgatcaattaattaagcaagcagaaattgtcacaatttctggcagtttagcgaaaggattaccatcagatttttatcaagaattagttcaaaaagctcacgcacaagaggttaaagtgctactagatacttctggtgatagtttaaggcaagttcttcaaggaccatggaaaccgtatttaattaaacctaatttagaggaactagaaggattgctagggcaagatttttcagaaaatccattagcagctgtacaaacagctttaacaaaaccaatgtttgcgggaattgaatggattgtcatatctttaggaaaagatggtgcaattgccaaacatcacgatcaattctatcgtgtaaaaattccaacgattcaagctaaaaatcctgttggttcaggagatgcaaccattgctggtcttgcatatggactagccaaggatgccccagctgccgaactgctaaaatggggcatggcggctggaatggctaatgcccaagaaagaatgactgggcatgtagacgtagagaacgtgaagaaacatcttatgaacatccaagtagtcgaaattgctaaataa

SEQ ID NO: 2977 - DNA, 1038 bp, Enterococcus faecalis
cgatttatgactataaataatacaacatttggaggaggaactatgcttacgttaacagctggaaaaaaagcggcaatggatcgtttgtcaacccaagaaggaatcattagcgcattagccattgatcaacgaggtgccttgaaaaaaatgatcaaagcgctagatgtagagccaactgatgcacaaattgaaacgtttaaagaattagtctcgaaagaattgacaccttatgcgtctgccattttattggatccagaatatggattgcctgctgcaaaagcacgcgataccgaggctggattgttactcgcttatgaaaaaacgggctatgatgcaacaactccgggacgattgcctgatttactagcagattggtctgttttacgcttgaaagaagaaggcgcagatgcgattaaatttttactatactatgatgtggatgaggatccagaaatcaatcatcaaaaacatgtattcattgaacgcttaggaagtgaatgtgcagaagaagacctaccattttacttagaattagtttcttatgatgcacaaatagcagatgcgacttctttagaatatgcaaaagttaaaccgcataaagtgaatgaaatgatgaaagaattttctaaaccccaatataaagtagatgtattgaaagtggaagttccagttaatatgaattttgtagaaggttttgcgccggctgaaacagcgtatacaaaagaggaagcggcgaattatttcttagaacaaagtcaagccactgatttaccatttatctttttaagtgccggtgtctcaacagagctattccaagaaacactacgtttcgctaaagaagctggttcaacatttaatggtgttttatgtggccgtgctacgtggaaaaatggcgtgaaacctttcgttgaagcaggagaaactgcggcttgtgattggttaaaaacagaaggccgagaaaacattgaaagtttaaatgaagtcatcgcagcaaccgccagctcttggcatgcgaaagttcaagtaaacgaagggtaa

SEQ ID NO: 2978 - DNA, 1188 bp, Enterococcus faecalis
ttaggagagttaagtatgtttacagcagaaaaagaagaactagaacaactaggagcggaaatcactacacgtgaaattcgtcagcaacctgagctttggcaagaaaccgtgacactttatcatgaaaatcaaacagctttggaaaactttttaaaagaagtccaggccaaagcgcaaggaaaacgcacaagagtaatttttacaggagcagggacttcgcaatatgtcggtgatacggttgtaccttatctccgagcacacggcgacacacaagccttttcattcgaaagtattgggacaacggatattgtggccaaaccagaagattatttgattaaagacgaaccaacattgttagtttcgtttgcaagaagtggaaatagtcctgaaagtttagcggcagttgaagtagctaatcaagtggtcgaaacaattcatcatttagcgattacttgtgccgaagaaggacaactagcacaaataagtcaaaaagaagaaaacagctttttattcttaatgccaacacgttccaatgatggtggttttgcgatgactggtagcttttcttgcatgactttgggtacattactactctttgatcaaacagcctttgagcaaaaacaagattatgtaaccgctctaattaaattaggtgaagaagtgctatcccgtgaagaagaattaaatgaaattgttaaccttgattttgaacgcattgtttatgttggttctggaagtttagctggtttgacaagagaagcgcaattgaaaattttagaactaacagccggcaaagttgccacaatttttgactcttctatgggcttccgtcatggaccaaaatcatttattaatgaaaaaacaataatgtttggttttgttaataatacaccatacacaagagattatgacttggatatcttagaagaagttcacggtgacgaaattgcggcgggtgtttttgcgattgctcaacctggcaaacgtaatttctcaggttcaactattgaatattccgcagaaactgctctattacctgatggctatttagcattagcagatatcatggtagcccaaacagtcgcacttttaacatctattaaagttggaaataaaccggataccccttcaccgacaggtacagtgaatcgtgtggttaaaggcgtaacgatttatgactataaataa

SEQ ID NO: 2979 - DNA, 756 bp, Enterococcus faecalis
ccagttagggtaaaggagaaagttatggaaaatgcctttaaaaacaaagctttgtatcatcaacttgttgatttgctgcaggaacgaatcgaaacatgcatgattcctcatgacaagttgccctctgaacgtgaattgactgcacaatatggagtgagtcggacgacggtccggttagcgctacaagaactagaaaatagaggttccatctatcgtcgtcatggcaaaggaacatttgtttcagatataaaaaaagaggccgctgatttagctggcgcatatagttttacagaacaaatgaaagggctgggtcgaaaaccacatacccgtatattatccttcgaaaaattggaagcggataaatttatttgtcagcatttgaatctttcgttaggagaggcagtttttaaattaagtcggttgcggattgctgataacgagccattaatggttgaagacacatacttgcctgtgaaatttttcttatcactcacggatcaattactacgtagcaaaccattatatgatctattttcggaagattttaagcaaaccgttcgtttagctgatgaagaattatacgctagcattgcgtcaaaagaagatgccaaattattgatgattccggaaggagcgccagtccttcatttagcacgccagacatataacatgaaaaatgaaattattgaatttacgttgagtgtggcgcgagcagatcaatttcattatcagatacgccatattcggaatagttag

SEQ ID NO: 2980 - DNA, 912 bp, Enterococcus faecalis
gtgcaagaaatggaaaatagaaaagaattagcgattgtctcctgttgcaataccaactttgtaccgcatcttgctgctatgtttgtttcaattttagaaaatagtccttcagcggcagctgttcatttttatgtgattgatgacaatatcaattttgaaagcaagcaactactgtattttacgattaaacatacccaaatcaatgcagagttaacatttttaaaaatcaacccccattttttcaaaaatgttgtaaccagtgaacgaattcccaaaacagcttactacaggattgctattccagagctgtttagaggaagccagatcgaacggctgttgtatatggattgtgacatgattgccttagatgatgtcgcaaaattatggacagttgatttaggtgaaaatatcatcgccgctgtggaagatgcagggttccatcaacgtttggaaaaaatggcgattcctgcagaatctatgtgttattttaactcaggcttgttgctaatcgatgttaaaaaatggttgaatttagatgtaaccactaaagtcttaagatttattgaagaaaatccagataaattacgtttccatgatcaagatgcattgaatgcggttttacacgaccgttggaccctgttgcatcctaagtggaacgcccaaggttatattctgtcaaaagcgaaaaaacatccaactatttatggagaaaaacaatatgaagaaacgagaagagcaccatccattatccactttactggccatgtcaaaccttggacgaaagaatttcagtggtataccaagcgttattatgatcaatatgcgaataggacggcctttcgttgtgtcaacacattcaatcaatatttatcttatacgaaaattagtagaaggattgaatatgctcaataa

SEQ ID NO: 2981 - DNA, 864 bp, Enterococcus faecalis
aagaggagagtggttttgatgagaaaaaatcagaagattgtgccaattgtgacagcttcagacgaaaattatgctccttatttgaatgtaatgatgacaactgttttagaaaattgtcatgcggagagacctgttcatttttatgtgattgatgatgggctgtcgctatctagcaaaaaagcactccgagaaacggttagtagtaactcacaaaatgcaactgttgaatttctaacagcagacaaagaagtctatcaaaattttttagtgagtgatcatattacaacgaccgcatacttacgcatttctttaccgtcacttttacaaaaatatagctataaaaaggttctttatttagatgcagatacgctggttttagatgatattgtccagttgtatgatacgccattagtgaaccaaacgattggcgcggttattgatcctggtcaagcatatgccttgaaacgtttgggcatccattcctccgattattattttaattcaggagttatgattattgatattgaccgatggaacgagaaagcaatcacccaaaaaacaattcagtatctagaagaaaatggggaccgcatagtttatcatgatcaagatgctttaaacgctgttctttatgaagattggctagctctagaaccaagatggaatatgcagacgtctttagtttttaatcgtcatgaagcgcctaatgtagcctatcaaaaattatatacagcgggaaatcaagagccagcgattattcattttactggacacgataaaccttggaatacgttagaaaatcatccttatacagctctttatctaaacaagttaaagaaagtaggtgcaagaaatggaaaatag

SEQ ID NO: 2982 - DNA, 495 bp, Enterococcus faecalis
cgacaaaaacatacccaggaggacttttacatgacccaagtacattttacactgaaaagcgaagagattcaaagcattattgaatattctgtaaaggatgacgtttctaaaaatattttaacaacggtatttaatcaactaatggaaaatcaacgaacagaatatattcaagcaaaagaatatgaacgaacagaaaaccgacaaagtcaacgaaatggctattatgagcgcagctttacgacacgtgtaggcacgctagaattaaaagtacccagaacacgtgatggccatttttcacccacagtgtttgaacgttatcaacgaaacgaaaaagccctcatggcttcaatgttggaaatgtatgtatcaggcgtttcaactcgtaaagtatcaaaaattgtggaagaactttgtggtaaatccgtctataagtccttcgtttctagcttaacagaacagctagaacgcctgtataagccgttaatcaccacaagt

SEQ ID NO: 2983 - DNA, 477 bp, Enterococcus faecalis
atgaagcagcaatatacagcaactgttgttatggctacctataatggagaaaaaaatatcttagaacagttggattccttaaaaaatcagtcgaaaaaaattgatgaagtattaatttgggatgactgctctacagattctacagttaaaataattgagaactttatttctgaaaataaattaggtgaaacgtggcatttgcaaatcaacacggaaaatttaggttggcgcaaaaatttctttaatctattgaatgctgctactaaagaaattgtttttacgtgtgatcaagacgatatttgggatgcatctaaaattgaagtgatgtgtgaagcttttgcaaacactgatgttaaagttttagtaagtgattatactgaattagtagaacctgggggattagcagaggaattaaaaaaaattgattcagttaaattgcctaatcaaaaagcagaatgctcaccacgggtaaggccg

SEQ ID NO: 2984 - DNA, 837 bp, Enterococcus faecalis
gagagtaatatcatgcaaaaacttacgttaaaagaggttcaggcgaaggctgttgaaatattagtgtatatcgataatatttgtcgatctaacaacttgcattatacattgttttatggaacattgattggtgtagaacgtcataaaggttttattccttgggatgatgatattgatatagttatgccaaggccagattatgaattgttaattaaaatccttaaaaacgattctaactatcaattactttcttttgaaacacggaaacattttcgttatccttttgcaaagttagttgatcctaatactgtagctcattccaaacaatattttggtggagaagataaggacttaggagtttttgtagatatttttccaattgatggtatccctgatactcaaaaggagagaaatgaactaagaaagataacggaacagtatcggttaaacttaatggatactttaggtttaagctatgcacgaagttttcatcttagtaaggcattaataaaattaataactcgttatcctaatcattttaaagtgaaaaaagtaggaaacaatcaatattggcgtgatttatatcaaacagaggcaaaaaaaaccccatttggagcaacaaaacattgtggttatctagaatggattcatatagattggggtgtatttcctaatgaatggtttttggaatatgaggatgtagagtttgaaggacataaatttatggccattaaaaaccgaaaacaatttttaactttacgttatggagattatatggaaatgcctccagtagaagaaagaatcactcatcatccctatgatttttaccaaaaataa

SEQ ID NO: 2985 - DNA, 240 bp, Enterococcus faecalis
ttttcttgctatctaaaatgtttaactctggtaacattcctgtttagcgttcgaattaaaaattatatggattttgtgttagataaccaaattgtgttagtcattttaatttctggattactgataactgaagtcattttaacaagacgttttgcaacagttatcttttggttatacttaggtaaaattcagtatcgcactgacatggaaaatgatttgattagaggaaatgagcaatga

SEQ ID NO: 2986 - DNA, 1248 bp, Enterococcus faecalis
ttggaggatatgatgattattaatttatcacagcagatgcaaaaaatagaaaaaaggatagctataccatatattgttttttttgagttagttctaatttgtcgaatggttagcatttattcgactttaccaacaaaaatagattcattatttaccttgataattatgctattgtcaggtgtttacttcatatgtcacttcttgccaatttttatagaaaaaaaacaaagaagaatagaatactggctaattgcttttataggaattttatttttaacaacatttattaatcatacgtatgctttttcagagaacattaagttgatcatttggcaatgtatctttttcttttccgtttacgaagtagggcgttcgaatgataaatctgtttttaaagcttttgagtatgtacttttaattgtttggaccgcattagtcatcgttgggttatacttattttttgcgcgaatcagcttttcaaaaccagtagagtctttgtattacggaatgagaatcggtttttttgaaaatcgattatatggtgtttttgtggagcctaactatgcatgtaccatctcattagtttgtattttggttggcgtgcggaattttattaataccaatagcaaatggttaaaagtggtttgtgcaatggtgatttttctacaatttagttatgtagcattgtctggatcaagatcaggagttattcagttgatttcaatggtaattttcgggatgttctttacaatttggttctttcaaaaaaatacatccaaagcagttataaaaaaagttgtgcaagcagtattagtttcttttttctgtggtgctattgttttcgggggcttacagttaataaaaaaagggtatattgctactgcaaattcagtgaatattgaagtaccaaaagtcttagataataaagaaaatgacattcttggaaataagaaaattactactaagagaccagatgttgaggggacagacgatatttcaaatagtcgatttgctctttggcaaagtgcgatagatttaatgaaattaaatcctatatttggcacttctccaaaaggttttgcagatatagctaaagataaattgcctcaatctcatattgctaagacagctcaaacaccgcatagttttttcttccatttattagcagctacagggatttcaggtacaattgtatttctaattttcttgctatctaaaatgtttaactctggtaacattcctgtttag

SEQ ID NO: 2987 - DNA, 993 bp, Enterococcus faecalis
aaggtagcggaaattgatatgcccaaaattagtattattgttcctgtatacaatgtagaaaaatatttagaaaaatgtgtacgctctattttagctcaaacgtttactgactttgaattaattctggtggacgatggctctccagacagttctggagcaatgtgtgatcagtttgctgaacaagatcaacgggtaaaagttatccataaagaaaatggtgggctaagcgatgctcgtaatgctggaattgaaatagcaacaggtgagtatttaggtttcgtagatagtgatgattacattgcagatgatatgtatgaactattatatacaaatatcgtaaaagaagatgccgatttatcaatctgtggtatttatgatgtctatgaggggaaagagccaattgtaaaaagtttaatacagggaactttttccagagaagaagcattattgttaattttacaaggaaatattatctccgtacatgctgtaaataagttatataaacgaaaactctttgcggatttaagatatcctaaaggaaagtatcatgaagattcatttattatagtagatttgttgtctgaatgtcagaaagtctctattgattcaacacaaaaatattactattatcatcgaatgggcagcattaatacagaaacattttcagataaacaatttgagtttatagaagcttgggagaagaatgaacttaaattgaaaggtaagggagcagttatagaagaagctgcccatcaaagagtttgttttgcgaattttttagtattagataaaattttgattagtaatgctccgaagaaaaaagaaacgaaacaaattgttcgctatcttcgggaaaactttatttttattatgaaaaataaagtttttacaaaaagtcgtaaactatcaatgattttacttatgtttggtcttcctttttataaaataccaattaaattgaaaagaaaatatatagaaaaaacaatagattaa

SEQ ID NO: 2988 - DNA, 270 bp, Enterococcus faecalis
tatttccttgtaaaattaacaataatgcttcttctctggaaaaagttccctgtattaaactttttacaattggctctttcccctcatagacatcataaataccacagattgataaatcggcatcttcttttacgatatttgtatataatagttcatacatatcatctgcaatgtaatcatcactatctacgaaacctaaatactcacctgttgctatttcaattccagcattacgagcatcgcttagcccaccattttctttatggataa

SEQ ID NO: 2989 - DNA, 1071 bp, Enterococcus faecalis
tggagggataccatgttatttacagacgataattatttatcagacgttgaacgagttttagagaagacaccagattggacgaaagtaactaataaatctgtttttataactggtgcttcaggcatgattgggacctttttaattgatgtgcttatgtaccaaaataaaacgagaaatgcgaatatttcgatctgggcgatgggacgaacattgtcgcgtttagaagagcgatttactagttatctagaagatccgttattccatatagttatcggagatgtcacagaagaaattcagatagcagaagcttgtgactatgtgttgcattgtgctagtaatacacatcctaaatcatatgccagtgatccaattggaacgattatgaccaatattgctggtacgcagcatattttagattatgcggtcaaagcgaatagtgaaaaagtgttatttttatcaactgttgaaatctatggagaaaatcgtggagatcttgataaatttacggaagactattgcggctatattgactgtaacacgctacgggccggttatcccgaaggaaaaagagcaagtgaatcattatgtcaagcctatattcagaaatatggtattgatgttgttattccaagaattagtcgtactttcgggcccacgatgttactttcggatagtaaagcttcttctcaatttattatgaatgcagtccataaagaaaacattgtgttaaaaagtgcagggacccaactatattcttatgcatatgttgcagatattgtatctgctcttctgtttttattagttaaagggcaaaaaggggaagcttacaatgtttcaaacgaacattgcgatattacgttacgtacttttgcggaaacattagccaatgtggctggaacaaaagtgattcatggagaagccaccgtccaagaaaaacaagggttttctaaagcaacaaaagcactactagacaatcaaaaaatctacgcattaggttggcggccactgtacgacagtatggaagaaccattaaaacatacaattaaaattttagaaggtagcggaaattga

SEQ ID NO: 2990 - DNA, 651 bp, Enterococcus faecalis
ctagttagagaaaggattttgtatcaaatgattacagctttaattattgccggtggggtcggtaaacgaatggggcaggagattcctaaacaatttattatggtagaggaaaaaccgataattatctacacattggaatcttttcaaaagcatccactcattgatcgaatcttagttgtgtgtaaaaaaggttgggaacaaacactagatgcctatgcaaaagagtaccatattgacaaattacaatggattattccaggaggaaattctggtcaagaatcaattaacaatggggttaatttcttaaaagaacattcaaacccagaagatactattgttatccatgacgggattcgtccattagttgatgaattagttttatctgatgtaattgttaagtgtcaagaatacggaaatgcagtgacttcgttgccatataatgaacaaatttttgtaaaagaaactgaggaaacaacacgacaatatattaatcgtgaaacattacgtcgcgtgtcaaccccacaagcctataaatttgaaaaattaacttgggcttacgaaaaagcattccgtgagaatattggtatttctgaatcgtcatacacgaatactatgatggtggatttaggcgaaacactgcattttgcttag

SEQ ID NO: 2991 - DNA, 606 bp, Enterococcus faecalis
atgattttactacagaaattgtgcaaactcactctagtcactaaaggcgatttaaatgaattattccgttcgcacttagaaaaagcgataaacacactcctacggactgaattaacggcttttttagattacgaaaaatatgatcgcactggttttaattcaggtaattcgagaaacggttcttactttcgatcaatcaaaaccgaatatggtgaattaacattggaaatacctagagatcgtaatggtgagtttaaacaacaaactttaccagcctacaaaagaacaaacgatacattggaaaccactattatccatttattcgaaaaaggtgttacgatgtctgaaattgctgatttgatcgaaaaaatgtacggtcatcactatactccacaaaccatgtccaacatgactaaagttctgactgaagaagtaaatgcctttaaatccagagccttaaatgataagtatgtcgctatttttatggacgctacttacattccactaaaacgtcaaaccgtatccaaagaagcgatttatattgccattggtatacgagaagacggcactaaaagaattactgagttatgcgattgctccaactga

SEQ ID NO: 2992 - DNA, 672 bp, Enterococcus faecalis
aacgtcaaaccgtatccaaagaagcgatttatattgccattggtatacgagaagacggcactaaaagaattactgagttatgcgattgctccaactgaatcaacatacgtttggaatgagctgctacaggatattaactccagaggagttcaagaagtcttgctttttattacggacggcttaaaaggcatgaaagatactatccatcaaatttatcctaaagcaaaatatcagcattgttgtatccatgtatctcgtaatatcgctcataaagtacgtgtcaaagaccgaaaagaaatctgtgatgactttaaggctgtttatcaagctaactcaaaagaagaagcgaataccttcttatccggcatgattgagaaatggaagaaaaactatcctaaagtgacgcagtcactcatagaaaaccaagacttattaactttttatgattttccacctagcattcgtagaaccatttactcaaccaatctaatcgagtctttcaataagcaaattaaaagatacagccgtagaaaagagcagtttcaaaatgaagaatcactagaacgctttctagtcagcatttttgatacatacaatcaaaaatttctaaacagaagccataaaggttttcaacaggtaaccgatacattagtttcaatgtttactgagtaa

SEQ ID NO: 2993 - DNA, 378 bp, Enterococcus faecalis
attacattattcgcagtccagaagatggagcaaatagcgtctcgctttattggtcgtgatgatcgagaagtgttttttgttatgtgtttaaatacgagaaataatgttgttgcagttctccgttgtcatgttggttctttgaatgcctcactagtacatccacgcgaggtgtttaaatcagcaatcctcaataacgcagcaagtgtcattgtagcgcatcagcatccaagtgatgatataacaccatcgaaggaagatattaacgttacaaagagattagtcgaagccggaaagttactagacatcgaagtacttgatcatttagtagtaaacagtgataacggttttactagcctgaaagaaagaggctatatttaa

SEQ ID NO: 2994 - DNA, 333 bp, Enterococcus faecalis
tttgtgcaaccattttgtcaacgtgggcagtccctacacaaaatgcttttgcagaagaaacaggaaatgatagctagcatgacggatgttgatagaagacagcaagagattgatgacacgtatgattataaagtacctgcattaaataaaattagagaagacaaattggaaatgtgttttagaaagttgtttcccgatgttaagtctgatatggaacacttagaaaagattttgtttacagtaaacgaaccatccatgcattcagattttgaatacggacaagccatagttgacttgaaggaaaaggcttatataaaaaattataaagattga

SEQ ID NO: 2995 - DNA, 216 bp, Enterococcus faecalis
ataatgcaagaaatagaaatcggtaaaatttattattgtgaagttcctagtttggaaggttcttttgaagttcaagttttacaaatgctaaaagacaactgtgttttagtgagagtcgtacgttgtacattaatgcaaagtaaatatttaaagaaaaacaaatatcgttttattgtcaatatcaagtccctaaaaggacgatcgttacacttttaa

SEQ ID NO: 2996 - DNA, 630 bp, Enterococcus faecalis
tggcaaatgtatttagcttatttaagagtttcttccgacgatcaaagtttagctcggcaacataagctaattgaaaattggtcagtcaaaaataatattgctgaagacgatttaaaaattttcgaggaaaaagtctctggaaaaaatattgaaaacagaccagagctgcaagagcttatttctttcatacgtgaacgagatacgattattattcctagtcttgatcgattagcaagaaatagtaaagatacaaaagacttacttcaattgtttcgtagtaaaggtgcttctattgaaatattagacctaccgtcgtttaatggggtaactgaccctgcattaagagacttgctaacaaatttagtcatagaagtgtttagctatgttgctgaaaacgaacggaaaaaaatcaaagagcgtcaaaaacaaggcattgaaattgcaaagaaaaatggtcgttatactggtaaaaagattcaataccatgccaatgcaacaggaaaaaacaaattgatttacgatgaaattgttgatggtctgaagaaaaaagaaactatttctaaaatagcaaagaacgcaggagttacaagaaaaaccgtttatcgagtaaaaagagatttaggaatgtaa

SEQ ID NO: 2997 - DNA, 513 bp, Enterococcus faecalis
atgaaattaaatagtataaatgatttatttgctattataggtgttattgctaacatacttttttcgtgtttgaattttagatttactcaaaagaacaaaaagaacaaactcagtatagaacaaatgaaaaaagacattgaaactgatttaaaaaatgaccataaagaaagaagaaaaattgaagaatatacttctttaatggaaaagtgtaaagcaactgatgcaatttttagctttttaagaaaaagtgatgagataatcacacgtgaaaatatagatttagaaaatgagattagtaaacttgaatctatcttttccgatataaattctcttaagtatttaatcgtcgaagaaaattcggatagctttttagaatttgaaaaatatctaacagatcttatagataatagaaataatgaattaatgagacaaaacattgcaagattccttactaaattagtttctgaatggaaaagtattatttctcaaaatatggataaattaagatattaa

SEQ ID NO: 2998 - DNA, 360 bp, Enterococcus faecalis
aatcaaggtattattgggaatcccagcttaaatcatagataccgtaagggattttattctttatttaaaactttgcaacagaaccattcaattgataattattatatacaatttaaaggttttgactttaatagctctaccgaatttaagttagcactttatgcacaattttttattgaaaaattaaataggtttcaagaaatagttgaagatagtgattttaacacttttaatagccataaaccgatgagaggtacttatataaaatttctcgaaaattataatgatttaaaatctaccaataattatcaatttggaaacttgtcttatgagatgataagtaaagttctaagtttgtga

SEQ ID NO: 2999 - DNA, 705 bp, Enterococcus faecalis
aaaaagatagcaggaggaatgacgatgaatcattttaaaggaaagcaatttcagcaggatgtgattattgtagccgtgggctactatcttcgttataaccttagctatcgtgaagttcaagaaatcttatatgatcgtggcattaacgtttctcatacgacgatttatcgttgggtgcaagaatatggcaaactactctatcaaatttggaaaaagaaaaataaaaaatccttttattcatggaaaatggatgaaacgtacatcaaaattaaaggaaaatggcattatttgtatcgagccatcgatgcagatggtttaaccttggatatttggttacgtaaaaaacgggacacacaagcagcctatgcttttcttaagcggttagtgaagcagtttgatgaaccgaaggttgtagtcacagataaagccccctctattacaagtgcctttaagaaactaaaagaatacggcttttatcaagggacagaacatcgtaccattaaatacctgaataatttgattgaacaagaccatcgtccagtaaagagacgcaataaattctatcgaagtttacgcactgcctctaccacgattaaaggcatggaagccattcgaggattatataagaaaacccgaaaagaaggcactctcttcgggttttcggtctgtactgaaatcaaggtattattgggaatcccagcttaa

SEQ ID NO: 3000 - DNA, 246 bp, Enterococcus faecalis
ccgtgggctactatcttcgttataaccttagctatcgtgaagttcaagaaatcttatatgatcgtggcattaacgtttctcatacgacgatttatcgttgggtgcaagaatatggcaaactactctatcaaatttggaaaaagaaaaataaaaaatccttttattcatggaaaatggatgaaacgtacatcaaaattaaaggaaaatggcattatttgtatcgagccatcgatgcagatggtttaa

SEQ ID NO: 3001 - DNA, 231 bp, Enterococcus faecalis
tgttactgtagaaagtttgtggcggtttggcaaatccaattgaaggagcgtggtgcctatgggcttattagcttatcggacgtactctgtagaaaggaaatgcctgatttgttctcattggatcaaatcattgctattatcggagcagcagcagtagttattactgccgtagcgaaagctagcgattcgattttagcttggttaaagttcaaaaaagaacaaaaaaaatag

SEQ ID NO: 3002 - DNA, 705 bp, Enterococcus faecalis; identical to SEQ ID NO: 2999

SEQ ID NO: 3003 - DNA, 246 bp, Enterococcus faecalis; identical to SEQ ID NO: 3000

SEQ ID NO: 3004 - DNA, 705 bp, Enterococcus faecalis
atatttataaggtcaaaaacttttaagtttttgacctctttgttttttcgtgctatacttggaattatcaagtgtcaaaaacttatgttcagaaaaggtgagggaaaattggccatttatgggtattcacgagtcagtactagtaatcaagattacaaaacccaaattcgaaaattagaagaagctggagcagaaaaaatcttcagtgaaaaatacacagggactaaaaaagaaggaagaaaagaattagaagagctgctttcaattgtaaaagttggcgataaagttttggtgacaaaaattgatcgattggccagaagtatcgttgatttaaattcaattatttctacattaaatcatgaaggtgtgactatttcttttttagatgatcacttaacatttgaacctgataagaaggactctatgcaaacgttaatgatgaatatgctgggtagctttgcgcaatttgaaagagatttaatcgtgacgagaacgcaagaagggaaacagtggcatcgagcgaacaataaaaattatcgagaaggacgtccgaaaagagttctaaatgataaatacaaacatgcactagagataatggaaacaaacagcatgcgagaagtggaaaggaaaacaggtatttctttatctactctcaaacgaatcaagaaacaagcaaaggaagaacagttacttaatgagaaataa

SEQ ID NO: 3005 - DNA, 411 bp, Enterococcus faecalis
tggaaacaaacagcatgcgagaagtggaaaggaaaacaggtatttctttatctactctcaaacgaatcaagaaacaagcaaaggaagaacagttacttaatgagaaataattcaggagtagttataatggaaaatagagagaaaattattcaattgttcaaaaatcctttagtaacaggttatgggattgagataatgtcaaacgggcgactttattcagcaaacttccaaagatataagaatcgagcaaagaaagaagagaacccattgattatttttgagagcatgacagaaaaagttgagcaggtatttttagaattagctgaagaagtcatacgaacgaaccctaaaacaaaacaagaattcaatgaaatgattagagaatatagttataaggagaatagcaaatga

SEQ ID NO: 3006 - DNA, 213 bp, Enterococcus faecalis
caaatgatagctcgaaaaaaatatgatcattttggtattgaaattggtatgtggaaccgagacaatgtagtaaataaaatagagtgtgattgtggccaacgggccaataaagtacgaggcaagcatgaattttttgaatgtgctgactgtggtcgttgttaccataaagaacttggagaatatgtgccacttgaaaatagtaataagggataa

SEQ ID NO: 3007 - DNA, 246 bp, Enterococcus faecalis
aaaagaaagaaggaaaaagttatgaagaataatcaaatggaaatcaagttaaaggaaatcatggataaacaaggaatgacaattgacgaactgaaaagaaatgtacaaatagacccagtattactagatggaatgtacaatgaaggactatttgatgatacaaaagtaggtgtacaaacaatcagtgagttaatgattgccttaaatatttcaaaaataaatgaattagtaccaaaagtaaaataa

SEQ ID NO: 3008 - DNA, 204 bp, Enterococcus faecalis
aacgttgaaggccagttgagcaaagcgaaactaattattcgtcttttcgggtttgaccatgttcctggtataaaaaattattcgtatttaaatagaaatatttttattatttccgcctgcagatcaccatttaatcatgtaaaagcgaacgttaaaacaccttcattgcataactaccgatcaatatttgtgaaaatggcttag

SEQ ID NO: 3009 - DNA, 276 bp, Enterococcus faecalis
gatgagaaaaaaggaggtttaaacatgaaaaaaaatattctagaagaatatagagctactaaaaataaaggagaagattttttacattggttattggttaggaaattgaatacctttggaaaagtagttatcgcgattatattatggctgttgtggttaaaatacgcattcaatctagtattcatggtgaactttctaaaagtaatagtattaattacaattatttactggctggctgatatctacttgcgcgttaaaaacaaactaaaaaaataa

SEQ ID NO: 3010 - DNA, 618 bp, Enterococcus faecalis
ctcgaaaggacggttttttgcatgaaatttgattattccaaagaacctcggagagatgttctttgcatcgatgtaaaatccttttacgcgagcgtagaatgtgtagaacgtggcttagatccccttaaaacaatgcttatagtgatgagtggtgcggataatgcaggcggacttgtacttgctgcttcgccaatggcaaaaaaagtcctgggaatttctaatgtgactcgtaaagatgaagtgcctgatcacccagaattgcttattgttccaccaagaatgaatttatatatgaagcgaaatagtgaaattaataatctgctcaaacggtttgtggcagatgaagaccattctgtttttagtgtagatgaaagcttcattgatataactgcttctctgaagtattttaattgtgatactgcttatcgattggccaaaattattcaacgtgtcatttataaccatatggggctatacgtcacgattggcattggagataacccattgttagcaaagctggccctatataacgaagcaaaaaatacaccaggttttgttgcagaatggagatatgaagatgtacacagaaaaagtttggtctatctcccctatcactga

SEQ ID NO: 3011 - DNA, 828 bp, Enterococcus faecalis
caaagctggccctatataacgaagcaaaaaatacaccaggttttgttgcagaatggagatatgaagatgtacacagaaaaagtttggtctatctcccctatcactgaattttgcgggattggcaatcgtatggctgctcgtttaaagatgtcaggaattgagtcgatttatgatttagcacaagcagatccttatctattaaaacaccgctttggtgtcatgggattacaactgttcgcacatgcttggggcattgatcgtagttttttaggagaaaaaagccaggtggccaaagaaaaatcattcggtaatagtcaagtattacctagagactatgctcgaaaggatcaaattgaattagtgctgaaggaactttcagaccaggtagcaaccaggttgagaaattcaaattgtcaaactgaatgtgtttcaatttttgttggttattctaaaggacaagttgatggactgggcaggtctcattggcgaaaacagcttaaaatcgctcgtagcaacaacacaaaagtgttaaccgagcatgttttgaaactttttcgagaaaactatgttcctggcatggatattcgaaatttaggagtctcctttggaaagctggtttgggatactacacttcaaatagatctcttctcccctcctgaagaacaaataataaacaatcagttagactttctaattgataaaattcgtcagaaatttggttttaaagcattgatccatgcgtcctcacttcttgaaggggcgacagctgtgaatcgttcgggcttagttggtggtcatgcaggtggcaacgtcggtcttggaggttaa

SEQ ID NO: 3012 - DNA, 222 bp, Enterococcus faecalis
caaatgaagaaaactaaaaaggaatttacaccttataacgattatgtagaccgcccttttgatttgaagtggccaactgctttccctttaggagagttgcaagcagcaatcaaagaaacggatgaatttaatgcacgagagattgaaagactgccacagcaatctcaagtacaaatagaatacttattagaacgctcaattaaacaaaataaagctgcttga

SEQ ID NO: 3013 - DNA, 243 bp, Enterococcus faecalis
ataacgaataggaaggatggtcttttgaaatacacaattgctgggattttatctgtgattattatgtttggtgcggtaatttttgtcttttttggcaaaaagccagttgaagaatctgttcacacatcaactgaaacaacagtgaaatcatccactgaaatttctgaaagtagtacagtttcttcaactgctaccactgaatcaagtactgaaatcacgagcgtaagcagtgatgaaagttga

SEQ ID NO: 3014 - DNA, 543 bp, Enterococcus faecalis
aatagaaaatggaggcgaatgattatgcatcaagtttatgtagatattattgttgacgcaattattgaacagtatcaaacagaagaaaatttttactccgcttatcaaattcaagcagccgattggcaagcttggaaagaaggccaatttggtttggacaatgaagtcatgcaaaaaattaagaatttgtttacggattatgagtggatgctgactcaaaaaatactccgccaaaccatcttatttccggaaaaacgtaacctagctgtttcggaatataaacggttaaaaacaacaattgccaaaaaatggctacaatctgatttgggcgttgtagaattaattcctaacaataaacaagaacaagaaattgctgctggttatattgatttgaaagtgacgctggcctatggtgaatggggttttgatgatattattacattccggttaccagctacgattcaacgacaattggaaggttcaaaagttgaattattagattgggtcaatgaaaatctgatggatacttacgtaggtgaataa

SEQ ID NO: 3015 - DNA, 969 bp, Enterococcus faecalis
ggacttcttttgacaaaaaaattatatcaatggggcatcgtaggattaggtggaattgcccacgaatttgcttcaacgtttaaacaagaaactagccaacttgcagctgttgcttcacggacattgtctaaagcagaacaatttgccgctgattattcaatccctaaagcctatggttcttatgaagaattgctagcagatgaaacaatcgatgttgtctatatagcagtgccaaataaacaacatgctgaacacattttaaaagcgctccaggccggaaaacatgtgttgtgtgaaaaagctattacgatgaacgcggcagaattaaaacaagccttggcagttgcagaaaaaaatgaccttattttagcagaagccatgactatttttaacatgccactatacgacgaattacgtcgcttgatggatgctggcaaatttggtcagttaaaaatgattcaagcaccatttggaagttacaaagaacccgatcctaaaaatcgcttttttaatcctgacttagcaggcggcgcattgttagatattggtacttatgcggtttcgtttgctcgttggtttctcagctcacagccagacgttttagcttctagcatggttcccttctctactggcgttgatgaacaatcggtgacattgcttcggaataaagaaaatgagttggctactatttcattaacattccaagcaaaaatgccaaagcaaggaattgttgcttttgaagatgcctatattaccattacagattatccacgcgcagatgaagcgattgttcactacaacgacggtacggttgagaccatcgtttctgggtactcagctgaagccatgaattacgaaatctacaatatggttgaagcaatcaaaggtacacaacccaatcgctccttatttttcacgacagaagtcattgatattttggaccagatgcaaaaattatggcagaattaa

SEQ ID NO: 3016 - DNA, 1356 bp, Enterococcus faecalis
gaaatgaacggagagacaaacgtggaacaaattcaaattattgattcaaacaaacatgttggagaaacagtaaaaattggcgcttggattgctaacaaacgctcaagcggaaaaattgcctttttacaattacgtgacgggacagcctttttccaaggtgtcgtgttcaaaccaaatttcattgaagcctttggtgaagaagctggtacagaaaaattccaagaaattaaacatttatcacaagaaacagcagtcatggttactggtgttatcaaagaagatagccgttctaaattcggctatgaaatggatatcactgatttagaagtcgttggcgcttcagaagattacccaattacgccgaaagaacacggcacagatttcttaatggatcatcgtcatttatggttacgttcaagcaaacaacatgcgatcatgttagttcgtaacgaaattattcgtgctacttacgagttctttaacgaacaaggattcattaaaattgatagcccaattttaacaggctcagcaccagaaggcacaacagaattatttgaaacagattacttcggacaaccagcattcttatcacaaacaggtcaattatatgcagaagctggtgcgatggcatttggaaaagtctttacttttggaccaactttccgtgcggaaaaatccaaaactcgtcgtcacttaacggaattctggatgattgaaccagaaatggcatacacaactcatgaagaatcactagatattcaagaagcctacgtaaaacatttaattaaatcggtattgaaaaatcaacaatatccattggatgttttagaacgtgatacagcgttactggaaaaatatgtttcggagccattcaaacgtattacttacgatgatgcgattgagttattacaaaaagaagaagcaaacaatgattatgatcacattgaatggggcgaagactttggtagcccacatgaaacctttatttcaaattactatggcgttccaacattcattttaaattatccaaaagcaattaaagccttctatatgaaaccacatccgacacgtgaagatgttgtaatttgtgccgatttaattgcaccagaaggttatggtgaaattatcggtggttcagagcgtgcaactgattatgattatttgaaagaaaaagtagctgagtttggcttatcagaagaagagtacagctggtatttagatttacgtaaatacggttctgtgccacattctggcttcggattaggtttagaacgtgctgttacgttcattactggtaatgaacacattcgtgaagcgattccattcccacgtatgttaaaccgtatttatccatag

SEQ ID NO: 3017 - DNA, 1200 bp, Enterococcus faecalis
atgaacgtatcaaatcgagcacagcaattgactccttctgttacattagcagctgccgccaaggcgaaagcattaaaagcaaaaggtgtagatgttttaagcttaacggttggggaaccagattttgtaaccccgaaaaatattcaaaaagcagcaattgcttcaattgaggatggaagagcaagttattacacaccttctggcggcattcctgaattaaagcaagcaattgtctcttatgtggaacgagaatatcaacttcgttatcaacccaagcaagttattgtgacagatggtgccaaatatgcgctgtatctattatttcaagccattttgaacgttggggacgaagtgattatccctgtcccttattgggtaagttatggtgaacaagtcaaattagcagaaggcaagccagtatttgtatcaagcacgcaagagcaatcatttaaagtgtcagtcgcacaattagaagctgtacgaacggacaaaacaaaagcaatcattttaaattcaccatctaacccaactggtgttatttatacggaagaagaattacgccaaattggtgaatgggcagttgctcataatatcctcattattgcagatgatatttatggtcgtttggtgtacaatggacatcggttcacaccaattgcaaccatctcagaagcaattcgtcaacagacaatcattattaatggtgtttccaaaacatatgcaatgacaggctggcgcattggttttgcagtcggggatgaaaaaattattcaagcaatgacacaactcgcttcacaatccaccagtaatccagtcgcagttagccaatatgcggcaattgaggctttaacaggtgaacagtcgacagttgaagacatgcgtcaggcctttgaaaaacgcctaaatcatatctatccaaaagtagcagctttgccaggcgtttcgctaataaaacctgaaggcgccttttatctattcccgaatgtcaaaaaaacgttagaaatttgtgggtatgataacgtgactaactgggtggaagatttattacaagaagcgcatgttgctctggtaacgggagagggctttggtgcaccagaacatgtgcggatgagctatgcgacagatttaatgacgttagaaaaagcgattgagcgaatgaatgactttatagaaaagaaacgaattcagcacaacgcctaa

SEQ ID NO: 3018 - DNA, 540 bp, Enterococcus faecalis
gacccagtaagtttagagaggatggaaggatttttggaggaattagaagaaaagaaagagaagaaacggattactgtccttttaaccctattggcaatccttttagcaattcttgtaacaataattatcttttttgtacgaaccaatcaaccaatggcccaagccaaaaaagaagcaactgcaattgccaaaacttctgctaatttagaaacagttgataaattttactggtttacacgcaaaaatacgtattttactttaaccggcaaaaatgataaaggcacagagattgtcgtgattgtccctaaatcgggagaaaaagtcacggtcttaaatcaaaaagatggtcaaactgaacaacaaataacagacattgttgctaaagcccatcccgatgaatcggtgatgaaagctacgttagggctttatgataagcgccctgcatgggaagtggtcaccgaaaatgatcaaggagtactgacgtattatctgatgagctttgataaaggcgaagagatcaacgttgtcaaagatatttaa

SEQ ID NO: 3019 - DNA, 2790 bp, Enterococcus faecalis
atgaaaggcgtgaagtcattgaaagacaaacaagtgtatgcagtagttgaccttgaaacgactggaacagatcctacaagtgatcggatcattcagtttggatgcgttctcgttcaagatggaaagattattgcgaactttgcgacagatgtgaatcccaatcaagtagtaccaaaacaaattcaaagtttaacggggattagtaatacgcaagttcaaaaagcgccttattttgaagatgtagcacatacaatttatcattatctggaagatactatttttgtggcgcataacgtccactttgattataattttttagctcgtgaactggtacggtgtggcacgccgccacttactattccagccattgatacagtggaattggcacagatttttttaccgacagaaaaaagtttccgtttaagtgatttgtcggaaagcttaggtttgtctcatgagaatccccatcaagcagatagtgatgcgcaggttacagccgaacttttgttattaattcaagaaaaaatgaaatctttaccattagtcactatggaaaaaattgcggaattaagtcaacagacagcgcgggaaaccagtgcctttattcaacaaacgtatgaacaaatgaaaaaacaagtcacaccattaaatccagcttatcaagtggtcagtggcattgctttacgcaaaaaagaagttcctctttttgaagaaacgttctatcagactagcacgtatcccaaaactaaaaaagccaaagaaaaactgtttggcgaacgtttcgcttatcgtgcggaacagagtcggatgatgaatttagtctatgatcattttacagaaggaacgacaaaagatttatttattgaagcggcgactggaacgggaaaaacattaggctatctgttgccgatgagctatttagcaacgccagaaaaaccagtcatcatttcaacagtttcgattgttttacaaaatcaattagtggaaaaagatttaccattagccaatcaaatctgccaagggaaattacgaggcattgttattaaaagccatcgacactatcttgatttacaatgctttaaggcaacgttgaatcagccaactccgcaaaaacaatacgctctttatcaaatgggcgttctcgtctggttgctagaaacagaaacgggcgatttagatgaactacaattgacgaatttaaatcatttattctggaaagaagttacacatcgcggattggattttctttcaaaaaaagatgaactttatgaagttgactttttaagacatctgtataaaaaagtcgctcaaagtaacgtgttgattgttaatcatgcatttttggcgcaagagtcgctaagaaaacaaccgttattacctgaaagtccgtggctaattattgatgaagcacatcatttaccagacatcgctagtcggatggcgagcgaacgagtgaacagtgtgatactaaaaaaacaagtcacgcattttattgaaaaagaacaactttttgttgctttacagcaaatttttcaacagttttctgaagagcagcggtttgtaaaaatttatcagcaaggtttactggattttgtggatgaatggcaagattttctttttgaattgcatcgtttatttagtaaaacacagaagcggatagaccatcaggagttgcttttaaccaaagaacgtattgattatttatctgctgcgggagaaaaacatagtcaaacgctccagcttttactgcaggagctgttaactattcaaagtaagttacagcaaacaattatgagtcagttggaaacctttagtttggctgatcgcattgtttttgttcgcttgtttcaattttttgatgaaattgaacgtattcatcactgttttaccatttatcttgatgattggcgtccacgttgggtaaaagaatatttaccacaaaatgaagaccatggcttgattgaaattcatgacttagaagctagtttgcttcctgaaacaaagtggtatccgcggtatgaacgaattatttatacaagcggcacattgaagtttggcaacaataaaaagtatttaccgcaacggttaggtttaacagaggtgacgttcaaaaccctgccaacgccttataactatgcagaaaatgcgcgagtctatgtaccggaagaagcagtagccattcaaaatgcctcttcctatgaaatgggtcagtacatttcagataccattgaaaaattgatggcgcaagaggaacgttcgatgttggttctttttacttcgcatgaattattgtccaccgtgtatcatcaagtccagccaagattattggaaaaaggacaagaggtcctcgcccaagggattagcggcagtcgtgaaaaaattcttaaacggttctctaatggaaaaccaaatgttttgctaggagccgatagcttttgggaaggtgtggacttaccaggaacagctttacagttattgatagtcacgcgtttgccttttgaaaacccgaaacgaccacttgtgcaagcaaaatatgcgtatttagaagcagaagggatacaaccatttgctcaagaagcggtaccgaaagcagccttacgtttgcgacaagcactgggccgtttaatccgttctgaagaagacagaggggcattgctgattctggatcgtcgtttagtcactgcaaaatatggcaaacgattaatcaaagcgtttcccaagggactctcagtaaaagaagcgcccatgcctgaaattttagaagaattaaaggaatttttaaacaaataa

SEQ ID NO: 3020 - DNA, 1398 bp, Enterococcus faecalis
gaaaatcagaagaatttctcctgtatactaaaggtatctatcattaaaaaatggttattaacggagaaaaaggaagtgaatctcatgactaaaacacttgaaacacaaccagaagagaaaacggtctttctttgtaaagaaacgaatccagattttttaggacgagaaatttatgcagataatgttgaaacaccgtataatttttacttaattcgcaagctttatttagcgaaagagtatcaaaatttagcagaaggggaacaattttttgaggctttatgcgaaagttgggatgaatcagaacagtttgaagagttaattgttaaaaagatttatgtctatgttgaaacggagttaatgtactacactgtttattttggaagttttgagccgacaactcgtgacttacgatccgcactgaaacaatggatgtatgaaataccgacaactaaaaataaaaaaacagtccgtatgaatgaaaccaatgtgcaagtagtgccgcaagaaaatcaattaacggaattagctggtgaaattgctgtcttacgtgaaatgttgacacttttaaaagaaaatttagcctccttaaatgaagccgttaatcaaacgagaaatcccgtcatttctagacaaataaaaacgatccatttgaaaagagcttctcctgtgatagccgcagaacaggcatcgctgaaagtatcagaggatactaatctggaacaaccagacgtcaatctctcgcctgataatcgggaaaatcaagaaggtgaaacaactgtagcaacaagtgaaccagcgccaattaaagaagcgctgccagaaaaaaaacaagaaaaccagcagagtaccgcggcaaaacctttatttacttttccacaagaaacagaaaaaagctcgctaaattcagtgaataagtctgccgaaaaagaagaggagcagaagccagaaaaagaagctgtctctatggaaagtgagaaagaaaattcatcaagtcggacaattcctgcggactttcaacgacaattggacgaattagaagaggaaatttatcgtcgctttatgagtcgccatttagaggatactgatggaaatcaagcagtaccgaaaataactattgaaaaaagacagttagaagcacaaatgtttgaagcaaaagcattctcacaatcatttaaacaagttcaaaagaaaaaggcaggagacgtgcgaatttgcaatcagttaagttgtatgaaattagaaaaaggattagataaatttttagacgaagttacagaatatgttgaaaagcggacactatttaataaaaaggttcgttgtccgctcccagtaatcagagaattggaaggctatgggcaattaaaccagtatatgcagaaaatccttgactgttattaa

SEQ ID NO: 3021 - DNA, 1500 bp, Enterococcus faecalis
atgaagagctttattttttttaataagaaaggaattggttatatggacaaaaagcaattacgatggttcaccgtcgggttaattgcctttaacatggtctggggtcttggaaatgttgtgaataattatgcacaacaagggatttcagtggtcacttcatggcttttgattttagttttatattttattccctatgcgttaatcgtaggacagttaggttcaacatttaaagacagtaatggtggagttagttcgtgggtgcaaaataccagtactaaacgtctagcctattatgcagcatggacttattgggtagtgcacattccttacttggcacaaaaaccacaagcaattttaattgccttaggttgggcagttcaagggaatggaaacctagtcaatacgatgccaatcgtaacggtatcatttatttcattaataattttcttggttttcttgttattatcaacaaaagggttaaccaccttaaaagtcattggtggtttagctggaaccgccatgtttgtgatgtctattttattcattttattagcggtaggcgcaccatttattaattcaacggttgaatttgcgacgccaaacatgtcacaagtcagcacctatattcctaaatttgactttagttattttacaaccgtatcgatgttagtttttgcggtaggtggcgctgaaaaaatttctccttacgtaaatgcaactaaaaatccagccaaagagttccctaaaggaatgattttcctagcggcaatggttggtttatcggctgttttaggttcatttgcaatgggcatgttattctcaagtgacaatattcctaaagatttaatggcaaatggtgcctacagtgccttccaaaaattaggcgcatattatggtgttggtaatctcttaatgattgtttatgctttgacgaatacagtgggtcaagtggctgcgctagccttttcaattgatgctccactgaaaattcttttagctgaagcagatccagaatttgttccaagttggttacgtaaacgtacgaaaaaaggtacgttaattaatggttacttattaacaggtattttagtaagtattattatcgctttaccaatgtttgggttgaaggacatgaacgaagtggttaaatggctaactaacttaaattctgtagttatgccaatgcgttacttgtgggtcttctttgcctatatgcttctaaacaaagcatacaaacaatttaattcagaatataaatttgttaaaaatcctaaaattggttttgtgtttggtctttggtgtttcctatttacagcctttgcttgtatcctaggaatggtgcctaaatttgagtatgcctcagaccctcaaggctggttgttccaattagcttctaacattgtgacaccaatcgtcttaattctattaggaatgattttaccagcaattgcacgtcgcgagaaaaaagacacgattttgccaattgattcagcagaataa

SEQ ID NO: 3022 - DNA, 4371 bp, Enterococcus faecalis
aaggaggttcattttgtgacagaaaaagcacgcgatttatttgataaactgatgacgcaaattcagttagatgacacagcgaaagaacatcccttaattcaaaatggccggattgacaaggtcattgttcaccaacaaagtcgcttatgggaatttcatttaagttttgatgaattgatgccagtgatgctatatcaaacatttatgcaacaattggaactagcttttcaacaaattgcgcaggtttccgttcaaataaccacaaatcagacaacatttacagaggaacaattaacggattattggcaattggccttgttaaatagtcaatgcaatacgccgttagttcagaaagtcttaaaaacacagacaccacaatttgaagatcggaaaattatcttacctgttgataatgaagcagttattccttatttgaagcaacaatatttaccaattattgaggaactttatttctcttacgggtttcctaaatttcatattgaaccaaaaatggatcaacagcaagctgcagaagtgctgaaaaaatttgaagagcaaaaattagaacaagccgcagcctttcaacaacaagctgctgaatcgcttgttaaacatgaacaaatgaaaaaagaaaaacaacaacaagcgcctgcgtttgatggtccaattcgtttaggtcggaatattcccaatgatgaacccattatgccaatgggaaacatactggaagaagaacgtcggataacgattgaaggctttatttttgataaagaagtgcgtgaattgcgttctaaacgaaaaattttaattttgaaaattactgattatacttcctctttcgtggtgaagaaattttcgaatggggaaaaagatgaacaagtttttgatgcgattcaaccgcaaagttggattcgtgttcgtggtagtgtacaagaagataccttcatgcgtgatttagtcatgaatgctcaagatttgatggaagtcgcccatgcgccaagaaaagactacgcgccagaaggtgaaaaacgtgtagaattacacatgcatagtaacatgagtacaatggatgcgaccaataaagtcggtgacttggtggcgcaagcggggaaatggggtcataaggccatcgcaattacggatcatggcggcgcccaagcgtttcctgatgcccatgctgcaggtaaaaaagcaggcgttaaaattttatacggcgtggaagccaatattgttgatgatggtgtacccattgcttacaacgaagaacatattgaattaacagatgctacctatgtggtctttgacgtggaaacaacggggctttccgctgtttatgatacaattattgaattggccgctgtcaaaatgcacaaaggaaatgtcattgagacttttgagcaatttattgatcctggccatccattatctcaaacaacgatcaatttaactgggattacagatgaaatggtgcgcggttcaaaatccgaagaagaagttttacgcatgtttaaagagttttcagaaggaactattttagtggcccacaacgcttcttttgatatggggttcttaaatacaagttatggcaaacatggaatacctgaagcggctaatcccgtcatcgatacattagaattatccagattcttgtatccacatttcaaaagccatcgtctaaataccttatcgaaaaaatttggcgtcaacttagaacaacatcaccgcgccatctatgactcggaatcaacaggtcatttgtgctggattttcttaaaagaagcgaaagagaatcatgatatgcatttccatgatgatttgaatcgtcatattggcgaaggagactcatacaaacgagctcgacctttccatgcaacgattttagcaacaactcaagcaggattaaaaaatctttttaaattgatttccatgtccaatgtagattattttttccgagtaccacggattcctcgttcgcaattatcgaagttaagagaaggacttttaatcggttccgcatgttcaaacggcgaaatttttgaagcaatgatgcaaaaaggtgtcgaagaagcaaaaaatcgtgccaaattctacgattatattgaagttatgcccaaaccagtttacgcgccattaattgaacaagaattggtgaaaaatgaagcagatttggaagaaattattagtaatctggtgaaaatcggtgacgaacttggtaagctggttgtcgccactggaaatgttcattatttaaatgaagaagatgccatctatcggaaaattttagtcgggtctatgggcggcgctaatccgttaaatcgccatagtttaccaaaggttcatttcagaaccaccgatgaaatgttaacggaatttcaatttttaggacaagacatcgctaagcgaattgtagtagaaaatcccaacaaagtcgctgatttatgtgaagaagttattccagtaaaagacgatttgtatacgccgaaaattcctgggtctgaacaagagatcactgatttaagctacaatcgtgcgcgcgaattgtatggcgatcctttaccagaaattgtcgaaaaacggttagaaaaggaactgaattcgattaacgggaatggtttctcggtcatttatttaatttctcaaaaactggtgcataaaagtaatgaagatggctatttagttggttcacggggctctgtcggttcgagttttgttgcgacaatgacagggattactgaagtaaatcctttagcgccacattattattgtcctgagtgtcaatattctgagttctatgaagatggttcctatggttcagggtttgatatgcctgaaaaagcctgtccaaaatgtggcgctcgattgtttaaagatggtcacgatattccttttgaaacgttcttagggttccatggcgacaaagttcccgatatcgatttgaacttttctggcgattatcaagccgaagcccataactacacgaaagttctttttggtgaagaatatgtctaccgggcaggaaccattggtacagtagccgacaaaacagcgtatggctttgttaaaggatatgaaagagatcataatttacatttgcgtggtgctgaaattgatcgcttagccaaaggttcaacaggggttaaacggacgactgggcagcatcccggcggtattattgtaattcctgattacatggatgtttatgactttacgccaattcaataccctgctgatgatcaagaggcagaatggaaaacgacgcactttgatttccattccattcacgataatattttaaaacttgatattctaggacatgatgatccgaccgtgattcggatgttacaagatttatctgggattgagccaaaaaccatcccaacagacgatccagaagtgatgcgtatttttgaaggacctgatgttctaggtgtggatgcagagcaaatttattctaaaacaggaactttaggaattcctgaatttgggacacgtttcgttcgaggtatgttagaacagacccatccatcaacttttgcagaattacttcaaatttctggactgtctcacggaaccgatgtgtggctagggaatgcagaagaattgattcgtcgtggcgaagccaatcttgctgaagtaattggttgtcgggatgatatcatggtttatttaattcatgctggtttggacagtgggatggcctttaagattatggaaacggtacgtaaaggacaatggaataagattcctgatgaactacgggatacgtatttaaatgcgatgaaagaaaacaacgtccctgactggtatattgattcttgttctaaaattaaatatatgttcccgaaagcccatgcggcagcatacgtattaatggcgttgcgggtcgcttactttaaagtttatttcccaatcttatattactgtgcgtttttctccgttcgggcggatgacttcgacttagtggcaatgtcacaaggaaaagaagctgtgaaagcacgaatgaaagaaattacggacaaagggatggacgcctccactaaagagaaaaacttattaacggttttagaattatgtaatgaaatgttggaacggggctataaatttggcatgattgatttgtacaaatcagatgctgaaaattttgtgattgaaggggataccttgattgcacctttccgagcagtgccaagtttaggcctcaacgtagcgaaagccattgttgctgcgcgagaagagcaaccgttcttatcgaaagaagatttggcaacacgaggcaaagtttctaaaacgttaattgaatacatgaatgaaaatggtgtcttaaaagacttgccagatgaaaaccaattatcattatttgatatgttataa

SEQ ID NO: 3023 - DNA, 414 bp, Enterococcus faecalis
gaaatattaatggcaatcaaaaaaatgaaaagcggaagttataaagtcgaagtattttatcctaaagaagtaagagaaattctgggtgttacttcacagcgatacagaaaaacgttctcttccaaaaatgaagctctggtagctgaaaaagatattcttaaaaaaattgaaaaagtacaacttgaaaaacatgaacgagcttttgaattaaaagcaaatatttctttcaaagaattttatgaacaggtctggttagacatgtattgcaatggttctagtgggagaaaccgaatgattccatcagaacaaacgattttaaacactaaagacctgtttcgtcttcatattctacctatgttcggtagttactctctctttgaattgaatacaaataaagatttagttttgcgataa

SEQ ID NO: 3024 - DNA, 273 bp, Enterococcus faecalis
atgaacgaactcactattttattgtctgacactcaaaaacaaagattacaggaagccattcacaaactactagaaaatgaaatcacacaatttcaaattgatttaggattaaataatcgttatcttaaaaagcatcagctatgccaatatcttaatctctccaacaatactattgataaattaattacagttggacttccacgaatcagtattaacggaatagtactttatgataagttggagattgataattggttaaaaaaatatgcttaa

SEQ ID NO: 3025 - DNA, 840 bp, Enterococcus faecalis
ttgcgattgctacatggatacaatcaaaaaatcattgaaacccctacgtacattgaaatttgggaatatgaacaattaatcttaacaaaacgaaaaacagataatgatgaaaagaaagaaaaacctgattggctaaaaactacaaaacagacatttgatgatttaaccgcacaaggacaatatgacagtttaaagagaaaacaaaaacattacaaaaatcaacgctttgtcgttgctcgactcattgatatgaatttggataaccagacaaaatttttaactttaacttttaaaaagaatataacagatatagcctatacaaatagtgagttcaaaaaatttatgaaccgactaaactaccatttatacaagacaaagaaagcccaaattaagtacctagctacgtgggagaaacaaaaacatggcgctattcattatcacgttattttattcagcttcccctatttacctcatgcagaactaacagctatttggggacatggactaatcaaaatcaacaaaattgacatagatagcgctgaaaatagaggacggtatgtcagcaagtattttgataaagatttagaactaaaagagcataagaaaaaagccttctttaaatctcaaaacttgaagcatccgctcgaaataaaaagactgacagatcgaccttatgaagtaaaagatcaaaaagtcttatttaccaacaattatgtaagtaaaagacctgtcttctttcaagactggaatgaacaaaatatcccaaacaaagaaataggttttgaagaacaaaatgttcgttacacaaaaatcaagaaaaatggaggaacgcataaatga

SEQ ID NO: 3026 - DNA, 525 bp, Enterococcus faecalis
agccacactagttccaaacaaatgactgattacttcaccgcccatgacgtgctaaaaaaagtagaggggctgaattccctctgtactttaaacaaatgggcaaattttattcaaaaagagtgcgattaccaatttcactatgattatattcgttttgccagtcacacaagaactaaaagaacgatcaatcaccgcaaaaccagaatgttttcactggaagaaatccaaaaatttcaaaaagtaataaaactgatccctatattgggcagaaatacttctttacgaaaactttttgataagaaacatcatttagataccatgaatcatagtgaattactaactgaaatcatcaatcaaattgaagttaagttggcaaataaagaggagttgtttcaagcattaacaaaaaagtaccaacaattggaaagaagctatcaaacattagaacaacgcttggctcaacttgaagaatcactatccacccaagagcagacttccagcgggtggtttcgacgaaagcggtag

SEQ ID NO: 3027 - DNA, 339 bp, Enterococcus faecalis
ggatatgaaatggcagtaaaaattaacgatttaactttacctaaagaaaagcttgaaaatgaataccaagtagtccaagtctccctttggcaaaaagacggcgaagcgttgggctggacgtatgaatgtgttcttccaaaactccgatttgaaaaaatcagtgtcaaagttaaaagtgaagctcctgtaatcacgaaagaaacattagatgaaaaaggtatggcaatcgttcgatttgataatcttatgattactccttggggtcgtgtaaatggacaatttgttagctatggactaactgctacagcctataaagccacactagttccaaacaaatga

SEQ ID NO: 3028 - DNA, 894 bp, Enterococcus faecalis
tgcattatttgttatgattgttttgataaaaattggcttttaaccattgaggagattgagctttatgaaaccaaacaaaaaaaagtaggcgaaagaattcgagaaattaggacaaatctaggctacagtatggacgaatttggaagtttattaggtgattctccacgaagttctgtgaacaattgggaaaaaggggtcagtattcctaaaagagataaactagaaaaaattgcgatattagggaatatgttaccagaccagatactatatggtcgagcagatgaatatttatatgatttaattgatagcagtttcaatgttaaattcagcgataatattctttatgaaatttttgaaagtgtaccacctgaaaagcgttcttatgatgatttgatgtggttagccgttgcgaaatattttattgataatggtacatatggaaaagttgttggaaaattcaattatatttcaatgctaggtataccgaacctttatacaggaagctatcaaaatgaatttattgaacaacgtgaagattataaacaacaagaagttaaatactatgtatatgcagatccggaaaaaaacatattacacattatgccatttgttcctaatgagaagaatatagaactgctttatgaatttcctgaattattagaacaacaagcagatcacgaagtatttactgcaaattttgaacaaattgggcttaccttaaaaggatcaaccattgtgtattatggaattgataaacaaaaattagaagctaaaacacaggcatataaatatgatgaagcggttgatttatatagaatagctcaactaccagaaactttatcaatgtttgatgatgaaatccaaaagcaaatttcgtttttaaaaagtaaataa

SEQ ID NO: 3029 - DNA, 384 bp, Enterococcus faecalis
acatggtatagtataataattttagattgttgttcgtatagacatggattttgtaaaatagcaggaggaaaccttatgacatcggaaaaagaaaataaagaattactaacaaagaagaatcagccgattaaaatcattactcaacaagatatcaatgcgctagaaataacacttgaacaacttcaatcatggacatcaacattagagatattaaacaaattttttgattttgaacaagaaacaattaataaaaaaaagatcattcgaaaataccatgcaaatgcccaaatattcaaaatctttctcaatgactttctacaacgtactgagagtttagaaaaacagcttgaaaatttaaaaagaagagaaaaggttagaatttag

SEQ ID NO: 3030 - DNA, 231 bp, Enterococcus faecalis
atgaacgaaaatgaaggtggtagaaaagtggaagtgctgatcaacgatttattagcagaacgtcaaatgtctttaagagaactcgcaagattgtcgggaattgagccttcaaatttaagcaatttggcaaatggaaaaagacagaaaatttatttagaacacattgaaagaatcgcagatgcgttggagattgatgatatatcgaggatattaaagttgaataggaagtag

SEQ ID NO: 3031 - DNA, 1212 bp, Enterococcus faecalis
cgacaaccaattcacagaaaagaggacttccctatgaatgattttactacagaaattgtgcaaactctagtcactaaaggcgatttaaatgaattattccgttcgcacttagaaaaagcgataaacacactcctacggactgaattaacggcttttttagattacgaaaaatatgatcgcactggttttaattcaggtaattcgagaaacggttcttactttcgatcaatcaaaaccgaatatggtgaattaacattggaaatacctagagatcgtaatggtgagtttaaacaacaaactttaccagcctacaaaagaacaaacgatacattggaaaccactattatccatttattcgaaaaaggtgttacgatgtctgaaattgctgatttgatcgaaaaaatgtacggtcatcactatactccacaaaccatgtccaacatgactaaagttctgactgaagaagtaaatgcctttaaatccagagccttaaatgataagtatgtcgctatttttatggacgctacttacattccactaaaacgtcaaaccgtatccaaagaagcgatttatattgccattggtatacgagaagacggcactaaagaagtactgagttatgcgattgctccaactgaatcaacatacgtttggaatgagctgctacaggatattaactccagaggagttcaagaattcttgctttttattacggacggcttaaaaggcatgaaagatactatccatcaaatttatcctaaagcaaaatatcagcattgttgtatccatgtatctcgtaatatcgctcataaagtacgtgtcaaagaccgaaaagaaatctgtgatgactttaaggctgtttatcaagctaactcaaaagaagaagcgaataccttcttatccggcatgattgagaaatggaagaaaaactatcctaaagtgacgcagtcactcatagaaaaccaagacttattaactttttatgattttccacctagcattcgtagaaccatttactcaaccaatctaatcgagtctttcaataagcaaattaaaagatacagccgtagaaaagagcagtttcaaaatgaagaatcactagaacgctttctagtcagcatttttgatacatacaatcaaaaatttctaaacagaagccataaaggttttcaacaggtaaccgatacattagtttcaatgtttactgagtaa

SEQ ID NO: 3032 - DNA, 2463 bp, Enterococcus faecalis
atgaagaatgataacactctttctgaagaaggaattgatacagataaaggaatagttggttcaatttttgaaagtatgctatcggatactttatcagaaattaaaaatttagataatgttaaaatacagaagatagtagaaaatatagggaaatatgataaaaaagagtttttgcaaagacttgctgcactaagaattccctttgaaaatagagataaggctgtattattggatgcaacaactacagcaacactgaattggttatcggaaaacaactggaattttaatgggctttcaatgagctatggtaaattcaaaaaagttattcaacagattaaccaattagactctaaaatggctattgatccattggataatccctatatagataatatccaattttatggtaatcataaggtaatgcctggaataaattttgcaagctcgtataatttgcaaatgatgatccagtctatatttttatcaaatcgtacaaagttatctgatgagaaaaatagatatatatccattttattaaatgataaccttatggtttctaccgatgtttgtaaaaaatgtcagattccaaacgaattaccatcattcactcgcgaaatatttattcctaataaaactaagcttgaaagttatatgaaacttgtgcttttagttaaaaaattacctggaatacatgaaatatcaataatgaaagaagatgttgatttagaaaagcaaaaaccattttcccaaaaccaacatctctttttaactaagccttatctggatactggggaaggcgtacttatattagacataacatctgtcgctaacgcattatccagtaaaattgccacaataatatctgaagtatacgtatttgaagaaatgtggaatgatataagaaagtcttttaagagattgaaacatgaaaaaattgctgagaataattttgctataaaattactggatgaaagaaaatataaggaggcaatttttaatattgccaatgataaattacttatagcttttggtatttttggtggtatagaagaaaatattgattatacagaaaaaataaccagcagagtagaattaatagtagaaaaactaaataaacataatattatgaataatcaattgttcataattataatagttcatactttaggaggaagtgtgtatatttcacttaaattaagtaatatatatagaaatattccaatggcttactttaacgcaatggaacttagagcaatctcacaagtagaaactgatgatatatttttacctagatttatgaaagctaaaatgcaattatcggaacctggactgttaggagcttttggcgaaggagattttatacccgctattatgttttcggaaaatgatttgtcgttttatgttgctgatgatatagactatagggaaatgaatattcatatagggatagaagatacctcagattattatttaaaagctcagaaaaaatatagagaatgcttattttactctacatttgacagaaattggtatacttcgacgaaagaagagtttagtaatagatatttagttaactacacgtccggtcaaagattccagtgctttattgaaacaaggaatgggaaaattattgaagttattacagaaaaatttgagagtagtggagaaatcgatatattatttaatagctttgatttagtctcatattggttggaacaatacttttcaataaatgaactttctgaaaatcatgtaatatatttgcgcatagaagaaattttagaaaaatattatttagtggatgaagttaatactgaggaacccgcaataaatataagcaagacagaaaacattattatatggaatattacttcaccaatttatcaaaaaataggaatggcaaaaacaagtagttatgaacggaagctcattagtgaactcattgatacgcttgaaacttctgatttggatactttagatcgaatattttatcctgaatataagaaaaaaatgactggtttgcttattgatgataatggtaaacttagagttcctactcacggatttcaacttttaaaaattagtgagtacgagacgaaccagttgttggatgagttaggagaatacttgaagggacaaggctatgtatatggtgcgattcctaaaaaagacaatctacaattttgtaataaaatagttggttttttgtattctattttagaaagagaagcaaatgtattcaataaaaatcaattgttaaaacttttaatagctcaaattgaaacccttcttcctgtacaattaagaggagaatcatcctataataatgatatagctctttcagttcaagagaaagatcgtttttttgagcagttaaatgaggataatagaaattcaatagcgactaaatttttgttacaatatgtagttgcatcaccaattactggagaacaaaatgtatga

SEQ ID NO: 3033 - DNA, 1071 bp, Enterococcus faecalis
atttttgtacaatcaaatagaattggtattaagaagaaagactttaaaaatgtaaattcggcaatgttagcttctaggaatcttcaattggcaaactctaatttacctatttcggagaacagaagatatgttgaaagagtgaaccaactttttaaatctaagttagatagtgcatttgttgaagcatttggatattcatatgaggaatttaatttagtgataggaggtctaatagatacacacaataatttagagaaaatagtatggattgaagaggaagaggagttagttcgcaaaatatttaatgatttagacaaaaaaattagtgagattaaaatagtatcagtattaaattctattgctcttgtagaaagagaaaaatatttaactccaccaataggatttgaaaaactagatattttcccttggagattcaatcgtcgattgtcattcattagaagacctctagtaaagtatgaaaataagtatatgtttggaattaggaatgtaatacacgctcataaatatttaatgcgactgatttggggtggatgtttaaaaacaaatagtcgtaagatgaaagatgttatgtctaaattacgaaatatactaggtgatgaatttaatgatcgggtaaaaagtatactcgaaacatatcctaacttacaagtaatgaaaggggtatctaaaattggaaagaaacgtatttctggtgaaaataataatacattgggcgatatagatgttttcgctattaatcgaaaacaaaaaaaattatttgttatcgaaaccaaagattttagcttttcaagaaatccctatgaattagctatggagcaagaaaaagtatttataggagataaagcttttttaaacaagcacttaaaaagaagtgattggattcgcaaaaatttaaaatatgtgattgataattatgatttagaagatggaaagtgggaaattgttactatgtttgttgtttcagaacatttgataacaaaagacttggtagatactaaaggtgttaaatttatttcattgaaagagctagattataatatgttccattaa

SEQ ID NO: 3034 - DNA, 435 bp, Enterococcus faecalis
attagagggttaaaatatatgaaaaaagaaattcgcgtagtaggagcaatcatagtggagaaggggaaagttttgtgttgtcaaagaggacctgaacgtgcattagcaaatctttgggaatttcctggtggaaaaatcgagaatggtgagacggaagttcaagcgcttgaacgtgaattgcaagaagaattaaaaatagaagtaacgatcgtcaaggaagagtatgctttttgtcgatatgagtatgattttggtttcgttaatttaactacatttatctgttatttagaatcaggtgaacctcagttgacagaacatctacaaattaaatggctaacgccaaatgaattaaaccaacttgagtgggcgcctgctgatattcctactgtggaaaaattagtagaaaaaggtgtgggaactgaacaaaatggataa

SEQ ID NO: 3035 - DNA, 546 bp, Enterococcus faecalis
  misc_feature (513)..(513): Nucleotide 513 is "n" wherein "n" = any nucleotide.
aaaaaggtgtgggaactgaacaaaatggataatttagaattggcgttacaaaaggcatttattaataaggaaactctaggtgacgaacttacacctaaatttattgttaacaatcccaaaaaacatgattatttattgaatacattgagtaaagatttgaaaagctgtaagactttttttatagccgttgcatttataacacctagtggcttaaatgcaataaaaacacaactggctgatctggctttgcgtggaatctctggaaaaatcttaacatcaacatacttaaattttaatgatccacacgtatttcgagcattgttgaatattccaaatgtagaagtacgagtttctaaaaaagaaggttttcattcaaaaggatatttgtttgagatggaggattatcaaagctttgttattggtagttcgaacctaacaatgtctgctttgaaacttaactatgagtggaatgttagattaacttcaagagagaatggcgagatggtttcttcntattcaaaagcatctcattcaagaatggcatga

SEQ ID NO: 3036 - DNA, 2223 bp, Enterococcus faecalis
  misc_feature (32)..(32): Nucleotide 32 is "n" wherein "n" = any nucleotide.
cttcaagagagaatggcgagatggtttcttcntattcaaaagcatctcattcaagaatggcatgaggcacagtcgctaaccctagaatgggtcgatgcatttgaaaaaaattatcatcctattgttaatagaaagatgttagtgcaagatgtttctgaaaacgagtgtttagatacgcaatatattttgccgaactctatgcagaaagaagcgcttagaagtttaaaagcgcttagagaaacgggcgcaactaagggaatgattgtttcggcgactggtacagggaaaacgtatctagcagcatttgatgtgcagcaattccatcctaaacgtgtattatttattgttcatagtgagctaattttaatgaaagcattagaatcattcaaattgattttaggtggaaaagatgatgattatggtgttttatcagggaattctaagaattttgatgcaaaatatctatttggaacaattcaaacagtatctaaaagtgaatatcaagagcgtttaggaaaagaagcgtttgactatattttgattgatgaagtccataaagctggagcgaaatcttatattaaagccattgaatttttcaatcccaagtttttattgggaatgacggctacacctgaaagaacagataattttaatatctttgagctatttgattataatgtagcgtatgaaatacgtttgcaagccgctttagaggcagaactgctttgtccattttattattttggcgtaactgattatgaaaaagatggtgaaatcattgatgaaacaaccgatttaaaacgtttgctacagaaagaacgagttgattttttaataaaaaaaattaactattatggttattcgggagatagtcctcgaggcttggtgttttgtagtcgtaaagacgaagcaaggcagttagcagagatgtttaacgatcgtggaattccgagtgcttatttatctggtgaccataattttgataaaagagaaaaggaaattaagcgtttagatactggagagattcattatatattcacggttgatatttttaatgaaggcattgatatccctaaagtaaatcaagtaattatgctgcgaaatacgcaatctagtattatttttattcagcaattaggtcgggggctaagaaaagacccatcaaaagaatttgttacggtaattgattttattggtaattataaaaataactatatgattcctatggctttatctggagatagttctcaaactaagaatagtttacgtcgcgatacaattgatgtgacgtatatcagtggtttatcttcaattaattttgaaaaagttgctcgtgaacgtatctttaaatcaattgatcaagctaaattagatgcgatgtcggaactaaaagctagttattttaagttgaaaaatcggttgaatagggttccttacctgaatgattttcaagtgttagatggcgtggatccattgttgattataggtaaagaaaaaacatactataatttcttggagagaattggggaaacagaagctaaattaagtgaagaagaaaacggtgcactaaaatttgtttctgtagaattgctatcaggaattcgcccgcatgaactttatgttattgaagaatttttaatgacagataaagaacagttatctttagaggaaatcacagcgctgtttgatacgtttaacctgacgtatacgacagatactctagcatctgttgttaaagtcttagatttatctttttacgaatcaacaattagaaaacgttatttgttatcacaaatgtttaagatgaaagaaaattgtttacaaataacagaaaaattcagagagtttaaaaagaattcttatttcatcaatttgatgttagatgtaatccatacagggattaacaaatctatggagtatgatttatcccaaccgttaaatttatacaaaaaatatcgtcgtaaagatgttttacgattattaaatatgaactttaatcaaaatgaacaaagtattggtggctatacaaacagtaataatcattttgctatttttgtaactttggataaaggcaaagattttaaagctgcacgtattgcttatgaagatgaatttattgatgaacgaacattcaatggtatacaaaagcgcctagaaatctacgctcgccagaagttcaacttttgcggaatcctggggaatataaatttcatttatttgtga

SEQ ID NO: 3037 - DNA, 297 bp, Enterococcus faecalis
acgaacattcaatggtatacaaaagcgcctagaaatctacgctcgccagaagttcaacttttgcggaatcctggggaatataaatttcatttatttgtgaaacggaaatataatcaaaaagagaacgaaacagatttctattatctaggcgaagtagcccctcttcaagaaactatccaacaagtcgaaaaacaagacaaagagggtaagaaaaaaagcgtcgttaaactagactttaccttagaaacacctgtagaacctaatatgtatgaatttttaacgcagaacacaaactaa

SEQ ID NO: 3038 - DNA, 2337 bp, Enterococcus faecalis
cccgtgcaacaacccccacgaaccgatgtgtatcgacaatacatcggtagccaaggtagcgcccaaaaagccatcgaacaatgcaaagccgctatgttgtatcccccattgggtatgcctttattaatccatggagccagtggcgtcggcaaaagctttttggcaaaactgatttatgagtatctaaaaaacgaacaaatcatcggcctggaaaaattctatacctttaactgtgccgattatgccaataatcccgaattgctatcatctattctcttcggccataccaaaggcgcattcactggggctgaatcagaaaaacaaggactcttggcccaagctaataattccgtactctttttagatgaagtacatcgattatccaacgaaaaccaagaaaaactctttcagtttatggatacagggaccttccgccctattggtgaagaaggaaaaatggtgcattccaaggtccggctactatttgcgaccaccgaaaacccgaaaaaagtcttattaccaaccttttatcgccgaatttccgtaatcgtctcacttccgaacttcaaagagcgccccattcgagaacggattgcgattttgaaaaacttattccaccgagaagcgaaacgaatgaccaaagacatcaacgtggacgaagatatctttacggcattattagaaaatgaagaccctggcaacgtggggagtttatcccacaaagttcaccccctttgcgcctcgcaattacaattaaatttggcccatccaaccggtctccttggggaatgcactcaaccaatgattgcgattcctttaaacaaaaaagtgttagaagaatacacactttcttccgatattttcgcaacatttgaagccttatttacaaaagaaaaaacactggcccacttaaaaactgaactgacacaattcattaaatattgtttagacgatgaaataaccttggaaaatgattattttttacaaaacctagtcacggaagtccaaaccaaaaacaaactaattattaaccaacctgagcaaactgaaaaaccaatgaaagatgttgctaaattgctgaaaattttaccgccaacatttaacgaaacagtgctccttccagtccaaacacagttaaaagaacactatccgcgaacggtttccctcgtgaaaaacttagtcagtccgctgccagaagaataccgtttcttgacagaggtactcttatctgtattactcagcggagaaatttctgaaacgattccttaccaagcgctcctcgtggcgcatggtgaatcgactgccacaagtattcaagccgttgccaacaaattatgtggtacctatattttcgatgcgattaacatgcccttaacctcctccgtccgagatatcgtcgccgaagttaaagagtggctttctcagcgggacacatcacaaggcgtcattatgctcgtcgatatgggttctctgacacaactttataaaagtttgaaaccgcaaattcttggagaacttttggtgatcaataacctgaccactgcctatgcgttggaaattggtcatcaattaatgaacgaacaacttttctatggtattgctaaaaccgctgaaaaaaaatttaaaaccgatgtacagtactttgaaggcttttcagtagaaaaaaatatcattgtctctagtatttcaggtctggatattgccaagcaaatcaaacaaatctgtcaaaaatacctgtatactgacattaaagtcattactctaaaatacaaagatttggtaaacacgttagacattgccaacgccgaagaaaattatttaaaagaaacctcgctcattttgacgacgtcttacttagacaaccatacgaatgttgctagcgtgaatctcttagacatgttagacgaagatgcaggaacccagttgatggaacctttccaaaacttgatgcatcccaataacattgatagcatgattaacgaatttgttcacttcttctcgaaagaaggcttgtcagaaaaactagaatttctaaatcctgacgtcattattaaacaagtcgaaaacgttacaaaaaacattgaaaaacgcttcgacctcacactcagcggcaaaatgaaatttaacttaatgatgcacaacgcgctcatggtagagcgaaccatgctcggcgttgaagactatgaaatccctgctaacctcgaggaactaaccattaaccaaaaaccatttttccaaaatgctaaaaacattttctatactctagaacagttttatcgaatagagatttccaactgggaactctatgtgatttatgaaattttgtcttctcggtga

SEQ ID NO: 3039 - DNA, 237 bp, Enterococcus faecalis
atcatgcgcttggagacctaccaacacttagttgatattttagaaaccagcaacaccccgatgagcacacaagaaattgccacaaaaattcaattaagccgctcggtaaccagcttatacttaaataaattattggaaaaaggtgaagtccaacaaacgggaaaaaaacccgtttattggcaattaacccgtgcaacaacccccacgaaccgatgtgtatcgacaatacatcggtag

SEQ ID NO: 3040 - DNA, 867 bp, Enterococcus faecalis
aggcagcgcgaaagaaatcgaagaggaggactttttcgcatgaagttaaaagagaatttatctaaagaagagaaaaaaatgatgcgctctgttttctggcgttcttggacgatgaacgctagccggacaggagctacacaataccacgcagtgggtgtcatgtacactttactcccagttatcaatcgtttttataaaaccaaggaagaacgggcagaggcattggtgcgtcacaccacttggttcaatgcaaccatgcatatcaataacttcatcatggggctcgttgcttcgatggaaaaacaaaacagtgaagacgaaaattttgatgctagctctattacagcagttaaagcctcattaatggggccactttcaggcatcggtgattccttcttctggggcatcttacgtgttattgctgctgggattgggatttcattagccagcactggttcgccattaggggcgattgtcttcttacttttatacaacgttcctgcgttcttaattcactattatgcgttgtatagcggctattcaatcggtgaaagttttatccaaaaaatgtacgaatcaggcggaatgaagatactcacaaaagtatcaagtatgctaggcttaatgatgatgggcagtatgactgcttcaaatgtaaaattcaaaacgattcttgaagtttccgttaaaggaagcaaagacgtagttaaaatccaagactatttggatcaactattcgtcggtatcgtaccattagccgtgacattacttgctttctggctattacgcaaaaaagtcaatgttaacgtggtgatgtttggtatcatgttcttaggcatcttgctaggattactaggcatctgttaa

SEQ ID NO: 3041 - DNA, 819 bp, Enterococcus faecalis
acaatgcttatgcatgcaacaatggcagccttagctgtatttatctgttttgctgggaattatttaactggtcaaagtatgatggaacgtcccttagtcgttggattagtcacaggaattttaatgggcgacatgaaaacaggggtcttaatgggggcctctttggaagcaattttcttaggaaatgttaatatcggtggtgttatcgcagcggaacctgtaactgcgactactttagccacaacgtttgcaattatttcaaatgtcgaacaaaaagccgccatgacgttagccgtaccaattgggatgttagccgctttcgtggtgatgtttttaaaaaatgtctttatgaatatctttgctccttctcttgacaaagcagcacgtgaaggcaaccaaaaaatggttgtgacactgcattacggaacgtggattatttattatttaatcatcgcttcgatttcatttatcggaattttagcaggaagcgggccagtaaatctgtttgttagaagtattccacaaaatttgatgaacggcttaagcgcagctggcggacttttacctgccgttgggtttgctatgttaatgaaactgttatgggataataaattagccgtcttttacattttaggctttgttttaaccgcgtacctacaattaccagccgttgcggtagcggtcatcgggacagtaatttgtgtcgtgagtgcccaacgggatgtagaatttcgcgacattctaaaaagaaaacctgcggcgtcttctgcggttgaaggcagcgcgaaagaaatcgaagaggaggactttttcgcatga

SEQ ID NO: 3042 - DNA, 504 bp, Enterococcus faecalis
gaggaaattaaaatgattacacaagtacgagtagacgacagattaattcacggccaagtagccgtagtttggaccaaagaattgaatgcccccttattagttgtagcgaatgatgaagcacccaaaaacgaagtaatgcaaatgacgttaaaaatggcggtccctaatggtatgaaactattaattcgctcagtcgatgatgcgattgatgtcttcaatgatcctcggggcaaagacaaacgaatttttgtaattgtgaacagtgtagcggacgctactaaaattgcgaaaaacgtgacagatattgaaagtgtgaatgttgccaacgctggccgctttgataaatcagatccagccaccaaaacaatggttttcccaagtgtccaattaaaccctgaagagttagaagctgccaaagaattagccagtttgactcacgtggaaagctataaccaagtcctgccaaccaactcaaaattaagtttaaaacaagccgtcaattaa

SEQ ID NO: 3043 - DNA, 516 bp, Enterococcus faecalis
acagtttcaagagcgttaaaaccctttcaaatcaaggatttagagttctctttttttggcacagaacttgctttatataaaagtgaggtgaaaagaatgaaaagaaaatttttaattgctagtcacggaaacttagcgaaaggcttccaaagttccttggatattctcgcagacaaaggaaaagagctggcggtcatcaatgcctatgtgactcctgaggactacacgccaattattcaaacgtttcttcagtcccttggcgcagaagaacaagctattattttaacagatttatatggtggtagtgtcaatcaaaaaattgttcaagaagtcatgacgacaaaaccagacaatgtttttatcatttccaatgccaacttagccattgccttgtcgctgattttcttaaaagaaggcgaaaagctaaccaaagaagatattcaagcagcaattgctgaagcacaaattcaattcgttgaattaaacccatcaaatgaagaagaaaactttttttag

SEQ ID NO: 3044 - DNA, 948 bp, Enterococcus faecalis
ggagagttacgaatgactgatgctcttgtgatacaagatttacgcaaagtgtacgcttcaggtgttgaagcgttgcgggggattgatttaacagtcgaagaaggcgatttttatgctcttttgggaccgaatggcgcaggaaaatcaacgacgattgggattgtgacctcgttagttaataagacttcggggaaagtcaaaatttttgggtatgatttagatacggagatggtgcgggcgaagcaacagattgggttagttccgcaggagtttaacttcaatccgtttgaaacggtccagcagattgtggtcaatcaagcgggctattatggggtgtctcgtaaagaagccatgaaacggagtgaaaagtatttaaaacagtccaatttatgggaaaaacggaacgaacgggcgcgaatgctttctggcggaatgaaacgtcgcttgatgattgctcgcgcgctgatgcatgagccgaagttattgattttagatgaaccaactgcaggtgtcgatattgaattgcgccgtgaaatgtgggcctttttacaagagttaaatgcgcagggaaccacgattattttgacgacccattacttagaagaagctgagatgttgtgtcgcaacattgggattattcagtctggtgaattgattgaaaacaccagcatgaagcacttgttagcaaaattacaatttgaaacgtttatttttgatttagcaccttatacgcaggcgccagttattgaaggctatcaaagcgtatttgaggacgagttaacgttagcggtggaagtggaacgaaaccaaggagtcaatcacttgtttgaacagctaagtcaacaaggaatcaaagtattgtcaatgcggaataagtccaaccgtttggaagagctcttcttgaagattaccgaggatacgtaccaaagggaggatcaacatgtttag

SEQ ID NO: 3045 - DNA, 822 bp, Enterococcus faecalis
  misc_feature (788)..(817): Nucleotides 788, 804, 814, 815 & 817 are "n" wherein "n" = any nucleotide. 1               5
agattaccgaggatacgtaccaaagggaggatcaacatgtttagtctgtattttactgctttaaaaagtttagctgtgaaggaaaccaaccgttatttacggatttgggtccaaacactggtaccgccagtaattacgacgtccttatattttgtgattttcgggaaaatgattggcgggcgaattggcgacatgggcggtttttcttatatggaatttatcgtgccaggtttaattatgatgtcagccattacaagttcgtacgccaatgtttcatcttcctttttctcacaaaaattccagaaaaatatcgaagaaattctcgtggcgccagttccaactcatgtgattatttggggatttgtgattgggggcgttggtcgtagtattttggtcggtgcgttagtcaccatcatttctctattttttgtgccattgcacgttgtttcttggctgatggtcatcatgactttattgatgacagcgattcttttttctttagctggtttgttaaatggtatttttgcgcaatcctatgatgatgtatcgattgtgccaacctttgtgttacagcctttaacctatttgggtggggttttctatgccatttccatgttgccgccattttggcaagctgtctcaaaagttaatccgattgtttacatgatttctgggttccgctacggtttcctaggggttcaagatgtgccaattggtatttttatgaccattttaatcttatttattgtcgggtcctatggcatttgttcttcctatagagccctgtntacaccgagctttggnccccgaatgnngngaccc

SEQ ID NO: 3046 - DNA, 2130 bp, Enterococcus faecalis
actatatcagaaatcgaggtgcaagaaatgtattcaattattgtaaatggtcaaagtgaaacctgtgaaacaaacaaaaaattaatggactttttgcgggaggatctgggcctaactggaacaaaagatggctgtaaccaaggctcttgcggtgcatgtacggtgttagtaaatggaaaggcttccaaagcatgtttgtttactctagaaaaattagctggtaaagaagtcacgacaatcgaaggtttaagccaacggcaaaaagatgtctatgcctatgcgtttgcaaaaacgggtgcagttcagtgcgggtattgcatccctgggatggttatttcggcacaaggattattgaacaagaaacccgaacccacaaaagaagacattcagaaagctatacgaggaaacatttgtcgttgtacaggatatgtgaaaataatagaagccattcagttagctgctaaaatgttttgtgaagaagcgagcattccagaagaacattcaaatggtaaattaggggaagacttccaacgggtcgatgcagtggagaaaaccttaggaacagggatttatgtagatgacattgacatagaaggaatgcttcatgcatctgctttgcggagtgcctatcctcgcgcaaaagttctatcaatcgatagtacccaagcattggcgcatcctgactgtgtggctgtgttcacagctaaagacgttccaggaaataataaaattggtcatttagaatttatttccgattgggatgtaatgattccagaaggagaaataacacggtatgttggggatgcagtagcactcgttgtttcaaaaagaaaagaaaccttaccagagataaaaattttagtggaagttgattacgaagaaatgataccgcttacttcttgtgaagctgctttagcagaaggtgcaccagctattcatgaaaagggcaatatcttgtctcatgaacacttggtacgtggcaatgcagaggaagtgttagaaatttttgcgtttgtagtgacaggacattattccgtaccaattaatgaacatgcctttatggagcccgaatgtgcgattgcacaacctgaaggtgagggcattttattctttagtgcgggtcaaagtatctatgatgaacaacgggaagtggctcggatgctagggctagacaaggaaaaaattcatgttcaatcaaaacttgttggtggtggttttggtggaaaagaagacatgagtgttcagcatcatgcatccttagccgcttggttattgaagaaaccagtaaaagtactgctaagccgtgaagaaagtttgatggttcatcccaaacgccatggcatggaaatggactttacgaccggctgtgatgaagaaggcaatttaactgcaatgaaagcagtgatttatgcggatactggggcctatgcttctttaggaggaccggtattgcaacgggcttgtacacatgcggcaggtccctacaagtatcaaacgattgatgtggaagggtttgctgtatatactaataatccgccagcaggtgcatttcgcggatttggtgtttgccaaacggcttttgcaattgaaagtaatttaaacttgttagcagaaaaagtcggactatcaccatgggaaatacgctttaaaaatgccgtcgccccaggagatactttaccgaatggacaattggtctcgaaaaatgcagcgttaaaagaagccttgttagcggttaaagacgtctatgaacaagcggaagttgctggaatttctagtttctttaaaaatagtggcgtgggtgtggggctacctgatacagggcgttgtattatttctgttgaagaaggaaaaatacatgtccgcacaagtgctgcttgtatcggtcaagggatggcaaccgttacgacgcaaattgcctgtgaaacattaaatttaccaccagaaatgattgttgcggaagcccctgatacaagaagaacaccgaattcaggaacgacaacggcttcgaggcagtcactcttcacaggagaagcaactagaagagcggcaatgcaattacggtatgagcttgatatgggacgtgctttaagcgatttggaaggcgaaaaattttatggggaatattcagcg

SEQ ID NO: 3047 - DNA, 1038 bp, Enterococcus faecalis
agaacaggatgtagtatcggaggaactgaaatgagagaagtatttcagcgtttgaaacaggcaatattggaaaagcaagacacgatgttattaacgattggtacaagttcaggatccacaccacgaagtcaaggggctagaatgctggtttccgccgaaggtagaatagccggaactgttggtggtggggcggttgaatttcaggctgaacaagtggcaaaaaagctagttcttgagaaagaaaatgcacaacgtcaatttattttagccccgaataatattgctgatttaggtatggtctgtggcgggaatgtcacgatttttttccattatctttcatgggaaacgccatttttaaaggagttgtgtgaatccatagaaacgcattttcaaaataaccaacaaggttggttagtgactgaactagatcaaaacaatttaggaaaagtatccttttatagtgaaacaggcgaattgattggttccacttcttgggagggggaattaagtttgctacctaaaggtatccattgtgagcaaaaagaggacataatttttttaacagaagcgatcctccaagtagggaaagtgtatatttttggaagtggtcatgttgcacgcgcattggtacctattttaaactatttatcgttttattgcgttgtagtggacgatcgtccagaatttttgacggcacaagcttttccacaagctgaagaactacgggtgattcctttagaaaatttagctgcgtttattgaaataacggcggacgattatggtatagtaattaccagaggacacaattttgatttcatcgttgccaaacagttattggaaacaccagccaaatatattggtgtgatggggagcaaacacaaaattgcttcacaagttcgacggttaaaagaggtcggttatacaatgactgaaattgaaagaattttcatgccaattggcttagacattgcagccgaaacaccagaagagttagcgattagcatcgcgggagaattaattcaacagcgctatcaataa

SEQ ID NO: 3048 - DNA, 387 bp, Enterococcus faecalis
aaaaatgaacgaataaaggaggagaagatgtttacgtattccctaaacttaaaattaaaaacagatcggaacttttttggtcctggcgttgtcgaagttttacaaaaaattcagcaaactggttcactaaacttagcggcaaaaaagatgaaaatgtcttataataaggcatggcggattgtgcgggtagctgaagaagagctatcttttccattaattatcaaaagcgttggcggttgtaatggtggcgggtcaattgttacggatcaaggaaaagagttgattgatcaatatcttttatttgagaaaaaagtgtatcaacaggtagaggcatgctttgaagaaatatttaaagaacaggatgtagtatcggaggaactgaaatga

SEQ ID NO: 3049 - DNA, 1341 bp, Enterococcus faecalis
aaagaagaaggaaacgatcctatgaatgaaaaaaaagagcaagcattatttgaatatgatgcgaaactatcaatttctgaagcaattccgatgggattgcaacacgttgtcgcagcagtagtagggattgtcacaccgggaatcatgattgccaaagtttgccaattaagtcctagtgatacgactattttgattcaaacatcattgattttttcagcagttgcaacgttaattcaacttttccctatttttggaaaagtgggttcacggttaccagttatgatgggggcaagttttgcgtatgtaccgattttgatggccatcggagctgattttgggattgcagcaatttttggttcccaattagttggcagtattcttgttattattgttggtttgttcattaaaaaaatccgtgtgttgtttccgcctttagtaacaggaacggttattttaagcattggactatccttgtttcctgttgcgattaagtatatggcaggaggagctggtagtgctgattttggttcagcccggaattggttagttgcattattaacctttgcgattgtcttttacttcaattattttgcaaaaggatttttgaagttatccgcaattttaaacggaatggttattggctatttgatttctttagctttagggatggttagttttgagccagttcaaaatgctaaaatcgttcaggtaattaccccgtttcactttggactggattttcaattggtaccaatctttacgcttgtggtgatgtttattgttgatgctgttcaagccatcggtcaatttacagcaacaacggttggggcaatggatcgggatgcaacggatgaagaattatctggcggaattatggggagtggtttcactaactttattggcagtttatttggatcaatcccagtggcaacttttggacaaaatgttggtctggttacggtaacaaaagtgattaataaatatgttctggttttcgcttcagttatattattaattgctggttttgttccgaaagtagctgcattattaactacgattccttacgcggtaattggtggcgcaacgatttcagtttttgcttctatttctatgacaggtattcggatgattgcttcgcaggaaatgactcctcgaaatactggggttgtcggaacagctctagcatttggaattggtgtcacattgtctactggaagcttagctggttttccaacttgggtaacaacgattttcggtaattcggaagttatcttaaccactttggtagcagtccttttaaatgtcattttaaaaccaaaaaagcgtgtagcacttgagtga

SEQ ID NO: 3050 - DNA, 405 bp, Enterococcus faecalis
agaatcatagaatggaggaaaacgatgacaaacaaaatgattaattctgcacaggcaccagctactgtaggaccttattcacattctgtcttagcgggaaatacgttgtacatttctggacaactaggattagatccgcaatcgggcgaaatgaagactacagtggaagaacaagcaaaacaagcttttatcaatttaggttcgattttaaaagaggtcgagatgacctatgataatgttgtgaaaacaacggtgtttttacaacatatgtctgattttagcaaaattaacgaaatctatgggaattacttttcagaagttttgcctgcacgttcttgtgtagaagtagccaagttgccaaaagatggtttatttgaaattgaagcagttgctgtcaaaggataa

SEQ ID NO: 3051 - DNA, 954 bp, Enterococcus faecalis
ggtgaagcaatgggcaaacgcgtcgtagtagctttaggtggcaatgctttaggaaataatttgacggagcagatgactgccgtaaaacagacctccaaagcgattgcagatttgattgaagcaggatatgaagttattttatctcatggcaatggtcctcaagtggggatgattcaattagctatggaagaattttcctttaataatccacaatatccagttgttccgttatccatgtgcgtagccatgagtcaaagttacattggctatgatttagagaatgcgctacaagaagagttgcgtcaacgaaatataagtaaagccgtcaccaccgtagtcactcaagtggtcgtggatgaaaatgatccggcgttcaaaaaaccaacgaaaccaattggtcgcttcatgacaaaagaagaagcagaacaattagtcaaagaaaaaaatatacaagtgatggaagatgctggccgtggttatcgccaagtcgtcgcttctcctaaaccaaaaaatattgtcgaacttctcacgattcaaacattggttgatgctggccaaacagtcattgctggcggcggtggtggcatcccagtcattcaagaagggaaccgactaaaaggtgtcaatgcagtcatcgacaaagatttttgtagtgaacgactggctgaacaagtggatgctgatctgctcgtgattttaacagcagttgaaaaagtttgtattaattttggtaaagaaaatcaagaagccttagggaatgtttcaacagaaaaaatgaaacaatatgcgcaagaaggtcagtttgctccaggttcaatgttaccaaaagttgaagcagcgattaagtttgctgaatctaagccaggtcgaaaaacattgattacgttattagaaaaagccaaagaaggattatctggaaaaacagggactttaattgaaaataaagaatcatag

SEQ ID NO: 3052 - DNA, 1287 bp, Enterococcus faecalis
tttggttcgttgtgcagccgtttatgcggcattaccaacggtctattgtggttaagtaaaggattattagacaagaaaaaaggagcagatggaatggaaacgtttaaagaatatattgagaaattagataaattagaatttgaaaaaatgtacgaaaatgactttttcctaacttgggaaaaaacaagagatgaattagaagctgttttcacagttgccgatacattacgctatttaagagaaaataatatttcaactaaaatctttgatagtggcttggggatttctttattccgcgacaactctacaagaacacgttttagtttcgcttcagcgtgtaatcttttgggcttagaagttcaagatttagacgaaggaaaaagtcaaatttctcacggagaaactgttcgtgagacagcaaacatgatttcttttatggctgatatcattggtattcgtgatgacatgtacattggtaaaggcaatgcttacatgcacgaagtatcagaatctgtccaagaaggatataaagatggggtattggaacagcgcccaacgttagtgaatttacaatgtgatattgaccatccgacgcaagcaatggcggatgcgttgcatttaattcatgaatttggtggcattgaaaacctgaaagggaaaaaagttgccatgacttgggcgtattcaccatcttatggaaaaccattatctgttcctcaaggaattgttggtctaatgacccgtttaggaatggatgtcgtcttagcacatccagaaggttatgaaattatgccagaagtagaagaagttgcgaagaaaaatgcggcagaatttggtggaaactttactaaaacgaatagtatggcagaagcattcaaagatgcggatgttgtttatccgaaaagctgggcaccttttgcggcaatggaaaagcgaactgaattatatggcaatggtgaccaagcaggaattgatcaattagaacaagaattactttctcaaaataaaaagcacaaagattgggaatgtacagaagaattgatgaaaacaacaaaagacggcaaagctttgtatatgcattgtctaccagctgatattactggcgttagttgtgaagaaggcgaagtggaagcttctgttttcgatcgttatcgggtcgaactttacaaagaagctagctacaaaccgtatgttattgcggctatgattttcttaagtaaagtaaaaaatccgcaaaaaaccttaacagaattagcggataaagcgacaccaagagaagtaaaataa

SEQ ID NO: 3053 - DNA, 549 bp, Enterococcus faecalis
acgtggtacggtgactgtttcgcaaatttccattcttcaccaagtcggtatccttttgcggatgcatgtaccttatcactagaccgtcgaatgactgctggagaaacttgggaaagttgtttagaagaaattcgcaatttaccagctgttaaaaaatatggagatgatgtgacggtttcaatgtacaactatgatcttctttcttatacggatttaacttatgaaattgaatgttatttcccaacgtgggtaattccagaaaatcatgatgtaacaaaagccttgatggaaacgcataaatatctctatggagaaacacggaaaggctctgtagaaacagtggaaatgcgtgaagaacgcccattgttagataagtggaccttctcaacaaatggcgtttcaattatgggacgtaatggtattccttgtattggtttcgggccaggggccgaagcacaagcacatgcaccaaatgaaaaaacttggaaagatgatttggttcgttgtgcagccgtttatgcggcattaccaacggtctattgtggttaa

SEQ ID NO: 3054 - DNA, 798 bp, Enterococcus faecalis
aaaaattttatggaggtaaaaggaatggattttaatgcagtaaatgcagcagcagaaggttacagagaagatatggtcaaatttttaagagaccttgtcaaaattccaggagaaagtgcagaagaaggcaacaaaattgcgcgagcaaaagccgaaatggaaaaattaggtttcgataaaattgacattgatcctcaaggaaatttacttggttatatggggtctggtgaaaaattaattgcttttgatgggcacatggatactgtcggaattggtgaaatgagtaactggaaatttgatccttacgatggctatgaaacagaaactgagatcggtggtcgcggtacgtctgaccaagagggcgggattgtttcggctatttatggcgctaaaatcatgaaagatttaggtctattatcagaaaaatacactgctttagtaacagttactgtccaagaagaagactgtgacggcttatgttggcagtacattatcaaagaagacggtatccgtccagaatttgttgtttcaacagagccaacagatggtgggatttatcgtggtcaacgaggccgaatggaaattaaagttgatgtcaaaggcgtttcgtgtcatggctcagcaccagaacgtggagataatgccatttacaaaatggcggatatcttacaagatgttcgtgccttaaacaacaatggagatacagaaagcacagcgattcgtggtttagttcgtatgttagatcctaagtacaatccagagtggcaagaagcccgttttttagacgtggtacggtga

SEQ ID NO: 3055 - DNA, 1227 bp, Enterococcus faecalis
agcaacttaaaaatagaaggaggagaagtatttttggaaaaaattaaatggacagcaaatgaaatgccgaagacggaggataagtacttacctctgatgtctaaagaaaaaattgagaaagctttggcttttcacaaaagttttccacagtattcagaaacaccattagcagaattgaatcatatggccgcgtatctggggttaaatgatttctttgttaaagatgaatcttatcgctttggtttaaatgcttttaaagtattaggtggttcgtttgccatggctaactatattgccgaaaaattaaagaaagatgtttcggaactaacatatgatgaattaacttctgatcaattacgatcagcttttggacaagctacgttttttacagcaactgatggtaaccatggacgaggagtcgcttgggctgcgaataaattaggccaaaaatcagttgtactcatgccgaagggttcaacacagacgagaaaagaaaatattgaaaaagaaggcgcaaccgtcacaatcgaagaagttaattacgatgaatgtgtgcgaatggctaataaaatggccgaagaaactgaaaacggtgtcatggttcaagacaccgcttgggacggatatgaaaaaattccgacttggattatgcaaggatacggaacgatggcgttagaagcctctcaacaattaagaaagtttggctctgaacgacctagtcatgtttttgttcaagctggtgtcggcagtttagctggtgcagtgattggttattttgctaatgcttttccagaaaacccaccgattatggtcgtagttgaggcacaggcggctgactgtttatatcaatcagcaattaaaaaagacggagaaattcgctttgtcgatggtgatttacagacaattatggctggcttagcatgtggagaacctaatacgatttcttttgatattctaaaaaatcatacatccttctttgtttcagcgccagattgggtttctgaaaaaggaatgcgtatgttgggcgcgccattaaaaggggatccgcaagttgtatcaggcgaatctggggcagtagcaatgggcttagtagctacagtgatgcaagatcccgactatcaagaattacatgaggcattgcaactggatgagacgtcaaacgttttaatgttttctaccgaaggggacactgatccagacaattataaaaaaattttatggaggtaa

SEQ ID NO: 3056 - DNA, 1374 bp, Enterococcus faecalis
atgtctattctgctcaaaggtggaaccgtcgtatctgcatataatcgtcgtcaattggatattcgaattgacggcgagcaaattgtagagatgggggcaaatttaccagtagaaaattctcagattgaggatgttacggggtgttatgtattaccaggctttattgatgcgcatacgcatctggaattaaataatggcaaaggttcgttaagtacggcggataactttaccactggaagccaagcggcggtggccaaaggtacgactacggttattgatatggctacacctaataaaggcggctcattgaaagactgtttagctacttggaatcaattggctgaaggcaagagttcatgtgattatacttaccatatgtccatgattgaatggaaaccaacgatagctgctgaaattcaggaaatgattgctgcaggtattacttccttcaaaatgtatatggcttatgataatttgcggaccacagatgcggaaatttttgaagcgatgaaggaaataaaaaaagttaatggaatgttaggcgttcattgtgaaaatggtgatttagtagatgaattaatccaatcatatgtttctcaaggaaagctaaccccgcactatcatccgttatcaagaccggcggctgttgaagcagaagcggtagcaagatatttgatgatagcggaaatggctgatttgccggttaatattgtgcatttaagcacaaaacgatcattagaagcggtggaacgggctcgtcaaagaggacaatcagtctatgtagaaacttgccctcaatatcttttactagatgatcacttgtatgatgcgcctaattttgaagcagcaaaatatgtctgctcaccgccactacgcaaacgagaggatcaacgggctttgtggcaagggattaaagagggggcaatcaatacaatatcgacagatcactgcagttttaatttttacggacaaaaaacagttggcaaagatgattttagtaaaattcccaatgggatgccaggtgttgaaacgagaccagaattaatttacacggaaggtgtggcgaagggccgaatcaccttggaaaaaatggttgctctgctttctgaaaatattgctaaacaattctcgatgtatccacaaaaaggtgtggtgcaagaaggcagtgatgccgatttagttgtttgggatcccagaacaaccggcgtgattgctgcgagaacgcagttacaaaatgtcgattatacgccgtatgaaggatttgaaacacaaggacaggctcgaatggtttatttaagaggtcaaaaagttgctgaagctgggcaagtcatcttggcaaatcaaggaaaatttgtttttcgtaaagcaacttaa

SEQ ID NO: 3057 - DNA, 3024 bp, Enterococcus faecalis
ataaaaggagtgacgttaatgagtgatattatgcatcccatctcaattgaggctttattaaattggatttttagtgagtatcaacaagatggcacaatttttggcattcgtaaattttatcatgcggatcctacaaaaacgatttcgttatttggagaaaaaatggaaaccccttgtggtccagcagcaggtcctcatacacaattagcacaaaatattattgcggcctatttaacaggttctcgtttttttgaagttaagacagtccagatactggatggagaagatttacctgtgagtaaaccatgtatcgcagcagcagatgaatgttacaacgttgagtggtccacagaattgcgcgttccccaagcttatgatgaatacgtcaaagcatggttcgttttgaagttacttagtaaagagttcgagctaggtgacccgaatggtttcatttttaatatgagtgttggctatgatttggcagggattcaatcaccaaaaattgatcgttatattaacgaaatgcagaacgcagaaggaacgccgatttgggcggaatgccaagcagctgccaaaaaatatctatcttattttaaaaaagtagatgacttatatatcgaagcaattagtcctaaagtctgtcattctattacgctgtcgactttacacggttgtccatcagacgaaattgaacgaattgcggcctatttattaagtgaaaaagggctccattcctttattaaatgtaatccaaccatgttaggttatgaatatgcgcgtcaaacgatggatgagctagggtttgattatatggtttttgacgatcaccattttaaagaagatttacaatttgaagaagcagtaccgatgttacaacgtctgcaattattagctaatagtaaaaatctaagcttcggagttaaaattacgaacactttcccggtaacgattgcagcaaatgaattacctggtgatgaaatgtacatgtcaggacgttcgctatttcctcttagtatttcattggcacaaaaattatcagaagcatttgatgggaaactacaaatttcttattctggcggtgcagatattttcaatagtaaagaaatattcgatgctgggatttggccaatcactatggcaacgactctgttgaaacctggtggctatcaacgaatgaatcaagttgctaatgtattaagcgcagcagaatatcctcagatggtccatgtcaacttggataaattagctcaagttgttgagaaagctaaaacacaagcgcgttaccaaaaatcaattaaattaccagaaagtaccaaactaagaaaaacagttccgttaacagattgttatattgctccttgtcgaagtgacggtggttgtccaatcaatcaggatattcctgcttaccttcgttatgtcagtgaaggtaattatttaaaggccttgcaagtaattgtcgataagaatccgttgccttttattactggaaccatttgtgcacatccttgtatgactaaatgtacacgtcaattttatgaagaatctattcatattcgggaagtgaagttagaagcagctgaacatgcttatgatgaattattgacgacactagaaaagccacagccaaaagaaaatgcacctaaaacagctgttgtgggtggaggccctgcagggatctctgctgggtatttattagcacgtgaaggcatgcctgttactgtgtttgaaaaatccgagacaattgggggcgtttgtagccagattgtaccagaatttcgaatttctatggaatctgttcaaaaagacgttcagttagcggaatttatgggagccgaattccgtacaggacaagaggcgccatcattggcggaattgaaaaaccaaggctatacgaatgttatttatgccattggtgcatggaaacatggggtccttcgtttagaatctggtcgagcattgaactcgttagaatttttaaaagcaaatcgagaaaatccaacgattaatccttacggagaacaaattgtcgtcgttggtggcggaaatacagccatggactgtgctcgtgcagccacaacattacctggtgttaaaaaagtctcagtggtttatcgtcggaataaacgcaatatgccagcagatgaagaagaactttatttagctttagaagatggtgttgactttttagaattactttcgccaattaaacatgaaaatcaacaattaacttgtgaaaaaatggtcctaggtgaacgagatgcctctggacgccgtcgaccaattggtacaggagaaatgattgatattcctgctgatacagtgattgccgctgttggtgaaaaagtagatacagaattttaccaagcattaggcattcacacagacaactatgggaaagtcgtttcaaatcaagaaacattggaaacaaatataccaggtgtctatgtcattggtgacgctaatttaggaccagccacaattgttgaagcaatcgctgatgcaaccaaagcggccaataatatttgtcttgtccacaatcatcactatgaaaaagataatttaaatagtgatgtcgcatttgttagaaacaaacggggtatccttgtgacagacgagatgtcttgtagtcaagctagtcgttgcttagaatgctccacaatttgtgaatcttgtatggatgtctgtccaaaccgagcaaatattgttgtgtatgtcgaaggaaaaccacaaattgtccatgttgatcggatgtgtaacgaatgtggcaactgtgaaacattttgcccttatgcaagtgccccttacaaagacaaatttaccttatttaacagtgaagctgatttttatgacagtactaattcaggtttctatgttcaaaatcctgtggataaaatttgtttactgcgtctatggggaacggtgtcaacaattcaattaacagatcaaggattagatgtaccagaagatttaattgcattaatggtaactatgattgaagaatatgcttattgtatgcaagcataa

SEQ ID NO: 3058 - DNA, 1371 bp, Enterococcus faecalis
acgtggggaataggttggaaaataggagaagaatacatgttattaattggaaatgggcgtttaatcactcgggatgcgcagaatcatttttttgaaaatgggtgtgtggcgattgatggtcaagttgtgaaacaagtcggaacaacagaagaattaaaacaagcttatccagaagcgacatttattgatgctaaaggtggagtgattatgccaggctttattaacatgcacaatcatatttatagtacctttgcacgtgggttaagtttaacgaattatcatcctaaaaatttcatggatattttggtagatcaatggtggcgaattgatcgtgccttgacattagaagacacttatcaaagtggtaaggttgcttatttagatagtattcgcaacggcgttacaactgtctttgatcatcatgctagttacggagaaattacagggagtttaacccaattatctaatgcagcggacgagttagggattcggacctgcctttgttatgaagtttctgatcgcgatggtgagcagaaaatgcgggaagcagttcaagaaaatgccgcctttattaaagccagttccttaagaaatgatgatatgcaaaaagcgatgatggggatgcatgcagcatttactttatcagatgcttctttagaattatgtgcagccaatacgccagatgggattggttatcatattcatattgcagaggatttagccgatgttcatgattctttgaaaaaatatgggaagccgattgtgaaccgattatttgatttagggattttaggaaaacagacaatggcaggccattgcatccatattggacctcatgagatggaattactaagagatacagacacaatggtggtcacgaatccagagtcgaatatggggaatgcggtcggttgcccacctgcgatgcgcatgtttaatgagtatggtattttgatgggtcttggcacagatggttatacgaatgatgtgacggaatcctataaggtaggaaatgttatccacaaacatcatttagctgatccaaatgcggcttgggcagaaattcccacaatgctgtttgataataatccgcaaatggctaatcgctattttaaaacaaagctaggcgttttagaacctaatgcagcagcagacgtcattattgttgattatcatggcccgacaccaatgacaaaagagaattataacatgcacattttattcggcatgaatggtgggatggtcactgacacggtgattaatggagaaattcggatgcgtaatcgtgaagttcaaggaattgatgaagagaaagtttggcatgatgcgcaaacgcaagcacaatctttctggaaacgagtaaatcaatag

SEQ ID NO: 3059 - DNA, 234 bp, Enterococcus faecalis
catgtattcttctcctattttccaacctattccccacgtttagcaaacgcttacaaatcaatcgctcaatcattcacgaatatagcttgtctagcttttctaatctatatttcctacgaaaagcatttgaagcgcttgcatttttttactaacgaactcattaacttgattaaagtatatcaccttaccttaaaaaaaacaatgctacataaaaaatattttttagaattttga

SEQ ID NO: 3060 - DNA, 678 bp, Enterococcus faecalis
aaactgtttgtgccaggcacattagaaaggagcttatttatgttatccgacgaaaaacttacttttttaacacaaattgctaaaggtttagctggtcaatttggggaaaactgcgaagtcgttatccaccaaatcaatgaagacaatattaacaactctattgtttccattgaaaatggtcatgtctcttctcgtcatctgggcgatggaccttctcaagtagtcttagaagccttaaaaaaagaccctagtgagttgaatgatcatattaactatctaacccgtacccatgatggtcgtattttaaaatctagtacaatgtattttaaagatgagaatggtcaactcgatggtatttttgctattaactacgacatcactacattgattgctgcagagtcaaacttaaaatctttgatttccactgcagaacctgaagaagataaagaccctgattacattcctcaggatgttaatgagttgttagacgatttaattcatgaatcagtcaaattagttggtaagccggtcccattaatgacgaaggacgataaaatcaagtgtattcaatttttaaacaataaaggcgccttcttagtcactaaatctggggacaaagtttctaacttcttcaatatttctaaatatacgctatacagttatattgatgcgaaataa

SEQ ID NO: 3061 - DNA, 534 bp, Enterococcus faecalis
aaacaactagtttatagaaagtggggattgctcatgaaaaatcgtgcattacttttaattgactttcaaaaaggcatcgaaagtccgacgcagcaattgtaccgtctaccagcagtgttggataaagtcaatcagcgtattgctgtctaccgccaacaccatgcgcccattatttttgttcaacatgaagaaaccgaattaccttttggctcagactcttggcaactttttgaaaagctggatacacaacccacagattttttcatccgaaaaacacatgcgaatgccttttaccaaacaaatttaaatgatttattgacggaacaagccgttcaaacgttagaaatcgctggtgtccaaaccgagttttgtgtggacactacaattcggatggctcatggtttaggctatacgtgtttgatgacaccgaaaaccacttccaccttggataatggacatttaaccgcggcacaaattatccaacatcatgaagctatttgggctggccgctttttgacttttttgagcctgtga

SEQ ID NO: 3062 - DNA, 2307 bp, Enterococcus faecalis
gagaaacagatagtttgtagaaagaaaggcgacaagatgaattatagagaattaatgcaaaagaaaaatgttcgtccttacgtattgatggctcgttttggtttagaaaaagaaaaccaacgtagtacacgagaagggcttttagcgacaactgagcatcccacggtttttggtaaccgttcttatcatccatatattcaaacagattttagtgaaacacaattagaactaatcacgcctgtagcaaatagcggcacagaaatgcttcgttttttagatgccattcacgatgtggctcgtcgttcgattccagaagatgaaatgctgtggccattaagtatgccgccacaattaccaacaaaagatgaagagattaaaattgctaaattagatcaatatgatgcggtgttatatcgtcgttatttggcaaaagagtatggcaaacgaaaacaaatggtcagcggaattcattttaattttgaatatgaccaagccctgattcagcaattatatgatgaacaatccgaagtgacagattgtaaacaatttaaaacgaaagtgtacatgaaagttgcccgtaactttttacgttatcgctggttaattacgtatctttttggggcttcaccagttagtgaagaccgctactttagggtctacgacgaccaaccgcaagaacctgttcgcagtattcggaatagtacgtatggctacagaaatcatgacaatgtgaaagtatcgtatgcctcattggaacgctatttagaagatattcatcgcatggtggaaaatggtttactttctgaagaaaaagaattttatgcgcctgtgcgcttacgtggcgggaaacaaatgtctgatctgcctaaaacaggtattcgctatatcgagttgcgtaatttagacttaaatcctttttcacgtttaggcattgtggaagatactgtggatttcttacattatttcatgttgtatttattgtggacagatgaaaaagaagaagcggatgaatgggtgaaaactggggatatttttaatgaacaagtggctcttggtcatcctcatgaaacgattaagttaattgcagaaggcgatcggattttttcagaaatgattgatatgttagatgctctaggcattcgcaaaggcaaagaagttgtcggtaagtattatcaacaactgcggaatccacaagacaccgtttctggcaaaatgtggacgattattcaagaaaactccaacagtgaactgggaaatatttttggaaaccaatatcaaagtatggcctttgaacgcccttatcaattagctggtttccgtgagatggaattatccacacaaattttcttatttgatgcgattcaaaaaggtttggaaatcgaaattttagatgaacaagaacaatttttgaaactgcaacatggcgagcacattgaatacgtcaaaaatgccaacatgactagcaaagataactacgtggtaccattgattatggaaaacaaaaccgtgacaaagaaaattttgtctgcagcaggtttccatgtgcctggcggtgaagaattttcatcttttattgaggcacaagaagcacatttacgctacgccaataaagcgtttgtcgtgaaaccaaaatcaacgaattacggtttaggaattacgatttttaaagaaggagcttcgttggaagactttacggaagcgttacggattgcttttaaagaggacacagcggttttaattgaagaatttttacctggaacagaatatcggttctttgtgttagataatgatgtaaaagccatcatgttgcgcgtgccagccaatgttaccggagatggcaaacacactgtagaagaattggtggccgctaaaaatagtgatccattgcgggggaccaatcaccgtgcaccactagagttaatccagttaaatgatttagaaaaactaatgttgaaagaacaaggtttaactatctattctgtgccagaaaaagagcaaatcgtgtacttgcgagaaaattctaatgttagcacgggcggggattcgattgatatgaccgatgtcattgatgatagttataaacaaatcgccattgaggccgtagctgctttaggagccaaaatttgtggcattgatttaatcattcctgacaaagacgtaaaaggcacacgtgatagcttaacgtacgggattatcgaagcgaactttaatccagccatgcacatgcatgtgtatccatacgctggacagggtagacgcttgacaatggacgttttaaaacttttatacccagaagtggttcaataa

SEQ ID NO: 3063 - DNA, 186 bp, Enterococcus faecalis
aagttgtatgacggtggctctgagttagagaggcaggtgatgcctatgtgtatccgatgcactttaacgaaaggagcattttttttgtcaatcgaagcgacattggaattgatgattagttttgcaacccttgttgcgttactgattttcggtatccttgaagcaacgaaaaacgataaaaaataa

SEQ ID NO: 3064 - DNA, 453 bp, Enterococcus faecalis
atggcgaatgatgacttacaacaacgtctggataaaggaatgtacggtacgcccctcgttaatcctgaagaacaacacaaatacatgggcacatttcgtgaacgctgccgtctctccatgaccgtcgctgaaatgaaagatgcacagaaccaaaaacatttattagaagaattagcgaagcatcctgaagttacagtacttttaaatggcgaaatctcttctgacctgcaaagtacctatattaaattattaaatcagcatggcgcaaactttaagattgttaacaattttgtggagaacaaccctgactctctcggcttactgttagctgaaaaacatgcagtcgatgaacctgtgattgacgttacagaaaaatatcctcaagcaacagaaacgccaaaagaagagccaacagctaaaaaaagcttttggcaaaaactatttcactcataa

SEQ ID NO: 3065 - DNA, 297 bp, Enterococcus faecalis
aaacggagttttctcatgaaaaagattggtttgtttgttctactattacttttcagtttattgtcattagtgataggggtgaaggacattgcactttttcagttgtttcaattagatgcgcagcaacaatttgttttatttaccacccgtgttccccgcacgttgagtttaatcattgctggtagtacgatgagtatttctggattgattatgcagcaactcacacaaaataaatttgtcgctcctagtgtcgctggaacaaccgatagtgcaagcttggtgcttgtcttaaccacg

SEQ ID NO: 3066 - DNA, 612 bp, Enterococcus faecalis
gaaaataaaatgacaaaacaagtaaatttcagaccagaagtgaaaaaagtgacatctaaatcaaacggaaatatcgaagtgctattagtggttagcaacgcttcattaaaagggaaatatgaaagtttaaacgaatttttaggtaaaacagtatcaacgaccattgagccagaaacagtagaatacaaggtaccagttaacaagcagaccaataaaccgaatgtcgaatatattgtgaataacgacggaacagttgaagttctaaaagaagaacaaacttctttagaaatgggcgatgatgtgcaagaagttgaagaagttgctgtgcaagtatcgaaagaaaccattgacgaattcatcaagaaggcaacaacaatcgaatggccagaatcagtaacaatcaacgttcgtggcgtgttgcatcgaatcgatgaaggggaagccttagaagaaattgcagctgatcatgatgtttcagttgaaaatctaatcaaccaagttgaacttgcacgccaacattttgcaccgtttgcagattcttggagcaaaaataaagagaacatcattttccctgaaaagacagttgaagatgatgaagaagaaatcgaataa

SEQ ID NO: 3067 - DNA, 207 bp, Enterococcus faecalis
gtgttcattttgcttgagatttattatacgccaacatccgcaattattgcggatgcactggctaaaacatatgaagtcgtttctttagaaacagctagaaatattgccaagaaatttaaggctagcttgaagcagaaaacggatctttatgtaattgagggaattttgattgatgctggttataaaaaagagccagtgaatttatag

SEQ ID NO: 3068 - DNA, 762 bp, Enterococcus faecalis
ctaatctcctttggacctgctacaaaatcaattggagaaggccttggcgggattgtaaattatgttgtaggtcctcttagaaaactaaatgttgttagtgaaaaatcttatattgattttgtagaaaagattaattctaaaaccgatagtatccctgtagataacagagatgattcgaaattagggtttgctttaaaaacaatggaagacgctagatatcagttagaagatgaagatatgcgtgaatacttttctaatttacttgctggattagttgataacagaaaaaatcaagattcttcgccaaggttttcaattattttatgtgaactaacgactatagatgcaaatctattaaaaaaattgtataaacttagtattaccccaactataaaggttagagtacaggctcctaatggtaacggtatagattatatagaaaatttaatccttactcagaaaggaattgttgaaaataatttttctgatttaagtccctctttacaaactttacgctcttatggattaattgatataagaccttctattgaattaacacaaaaaaaacatacaaaaatttatgatgattttgaaaattcaacttattttaaaactttgaaatataatcttaatagtttttttgcaaacagttctttttttaaagatacagggtttagcattataagtattcgtggctccatacatgtaactgaccttggctttttattctgttcaaaaattttttctagcgaagaagagtag

SEQ ID NO: 3069 - DNA, 183 bp, Enterococcus faecalis
atggaacaattcttattaacaaaaactggtaaaaaacaaattgatataaagggtacgggaatggatcataacgaaattgtctttacgttagctgctactttagttggatatagcaaagaattaggcctaacaaaagcaatactaaacgaaagtatgtacgtgctgtggaaagatggtgaataa

SEQ ID NO: 3070 - DNA, 300 bp, Enterococcus faecalis
ccttgtttatttcctttcatgctcgtttattttgggattagggctatatttaggaggttccagtgtatgagttatccagaagtttatatcataggaaggcaagtcgatggcgtttatgttgaatacttacatggagcagagcaagccgatttatttttcgattatacgatagctcgtgatgaaagaaatcatatgaataaaaccaatatgaaagatggtacttggaaaattttgaaatatggtagaccgataacggtcgaattaaacaataaaaaagccaaccgaccaatggttgactaa

SEQ ID NO: 3071 - DNA, 585 bp, Enterococcus faecalis
gtaaagaaagctgccaacaaaaaaagccggatttctccgactgtggataatgtgtggataaccttgtggaaaagtcgttatcattataccacaaatcacaaacgggggaatcaaaggatggtactttttgacgtaaagaaatatgaaacaccggatgcaaaggacgtagatatggagcaaactaaacataacgtcagtgtgttcctgtctgcctatcttgctgctagatgtcgtgttggccagccgagggaaccaaaagtaacagcttcattctctttggttccaccatccacggccaaaaacacttttgaagccgagcaaatgttaatccagaaagaagaagcccaagaagagtttgattatttgcataagctttttgttagaggttattctgcgattcagcatccgcacaaaccagatgttaccgagcgaagaaaaagaatcttctatgatcgatatatcaacggtaatccaatctatctagcagcgcaacgaaactgcatcagcgaagaatcagtgaaacaagaatctaacatgattattgttcaatttgcttcagcgctggaactggttgcttttaagtag

SEQ ID NO: 3072 - DNA, 426 bp, Enterococcus faecalis
aaggggataagtaagacaatgcgtgtattaattagaagttcagcatctggttcagagtattgggataccgaagaaaaaagaaatgtgtttgtacctaaaggtcaagaacctgattttgaagttactgaaaatcctgaatcaatgctaagtaaagaagctgatttacatgttggtggattaccaattactgtagggaatgtaacgattgatactgatggaattaaaggcgaacgattattaacaactgcaagtgctgctgatgatgaagaacaagatgagcttgttccgtctgatgatgaatctgttgtattagaagaaatgaatgtaaaagaattgcgtgaatatgcaaaacgaaaaggtattgagattccaagtgctgtacgtgcaaaaggtgaaattctcaatattattaaagaatctgaataa

SEQ ID NO: 3073 - DNA, 378 bp, Enterococcus faecalis
ataatgcgctattgccagtttgaaggttgctctaatacaacagaaaaaggagcttattgttccgaacatgctaggaagtcaagaaaaaagaaaaagccaatcaatgtttatcatcatgataacaaatcattttatcgaacaaaagaatggcaagatgtcgctgactttgtctatgaaagagaaggtggttgctgtcaaagatgtggccgttttgtatttggaaggcaagcgcatcggcatcatgtgattccaatcaagaagaacgaaatgctcaaacttgatccaaacaatattcgtttgttgtgtccgaagtgtcatgtgattgaagaaaatgaagcagatgagaaaaaagtttttccatcttattttaaaaaatga

SEQ ID NO: 3074 - DNA, 456 bp, Enterococcus faecalis
aaaatgaccacaaaagcgcaacgcaaagcgattattgatgaaaaagttaatcacgaaaaaacgcgaattttagaaattatgcgcaagtctgatttatacactattactcttgatccattgattgaatcatacttggatatttttgaagtttaccaatacaaatacatgctgtggaaagaaaaaggatttcccgaaacccaaaaaacaacaaacaaggctggagctactaacaatagcaagcatccactagcgcaacaagtcgaagtttgggccgataaaaaaatgaaagcattggatttattaggattgaccaataagtcaaaaacaggcagacaaattactggtggttcaacagctagagcagatgaagaaatgaaacggccagaagaaaagcctgtaaatgaattggcagaacatcggaaaaaatggcgtaaaaaggcagggaatgaaacatga

SEQ ID NO: 3075 - DNA, 1731 bp, Enterococcus faecalis
aacatgattgaacctggtgtaaattatgctgatttatttgcgaaagaagttcgaaaacatcctaagaaatatccgaaaacggttcgtttagcaatagatcgttggtatcgatggaagaaacgaaaagatatttggtttgatgttgatcgtgcaaatgaaatgatggactgggtagaatcttttattgttcatacaaaaggcgatatggtaggtaaaccatttcttttagagccatgggaaaaattcatttattcttggatttatggctgggtaaaagaaaatgaaaaagggcaagtagtccgtgttactcgtgaggcatacgtacaaataccaaagaaaaatgggaaaacattaatagccgtaggggcgttgggatatgctatgtatggcgaaggtgccttatctgtcgattgctatgcatgtgcttctgattttgcgcaagcccagtatgctgctaagccttttgccgctactatcctaaataatccagtgctattagatgggactaaaatatttaaaggtccaaaaggcaccgtttcaagtattacgtatgactatttacatggagatatggcttatacaaataagtttattgttcagacaaaaaacattgataacatagaaggttccaatccatattttgttttaaatgatgagctgcataaacaagagaaaatggaacagtacgataactttaaatctgcacaaatttcattgccacagccgttaatgtttaatatttctacagctggtaaaggaagtagttcggttggtattcgtgtttataaagaagcaaaagaagtcttgaagcgcgatgataatgattcaaactttgttttgatttatgaaccaaataagggatacgattggacagatagaaaagtttgggaaatgtgcaatcctaactggggaatatctgttgatttgtctgctttagaatcagcctttaaaactgcgcaacgttccgctcactcgaaagctgaatttttaacgaagcatttagatgtgtttgtgaatggtgcagataatttctttgaacaagatcaagtggaaccgtgtttggttcccacaaatgaattaggtaacttaagtggtgagccatgttggattggtttggacttatctaaaagtcgagatttaacttgtgtatcattaaattttcctacatgggatgccgaaggaaaagcgatactcaaagtaaaacaattatattttattcctagtgaaaatattgattttcgagaaaaggaagataatgtgccatattctgaattagcagaacaaggatttgttgaattttgcgatggtaagttaattgatcaagaacaaatatttcattttattgaagattgcatggatttttatgatgttcaacaagtcaattatgatccagcgatgagtgaccgattagttgaaaaattggaaaatttaggcttggaatgtgtgcaagttgatcagtacgcaagagtattgaactcgccgcttgaagatgccgagcgattattttatgagcaaaggattatgtttgataatcctttatttttgtattgcgctttaaatgtggttgtcaaaatggattttcaaggccgtaaagtaccaagtaaaaaccagtcaaagagaaagattgatggatttgttgctttcctttgtgcgcataaggaaacaatggatcaaatgattgatgtcaacgaagatgatatggatgaatatttagattctatctatcgataa

SEQ ID NO: 3076 - DNA, 1242 bp, Enterococcus faecalis
agaggcggtgagattttgaagctaagagatagactttcaaatgcagtctatggatttttggaaaagcgtggctggattgaagatatttatggcaatgtaacaagatattcacaacgttttgttaacgattcttctattatggaatcgtctgatgtttatgaattggtacaagatatttctaatcaagttgcactagcagaaccagtagtaattgggcctgatggcgaggaagtgaaaaatcatttcttgttaaacatattgaaaaatcctaatgattatttaactggttttgaatttgcaaagcttgaaacaaatacattgttaatcaatggagaagcttttcctattacagataatgaccagttacatttgggatatggtgttcaaacgaaattagatgatcgtttgattgaaagattttcaatgaatggccaaccaataccagggagtatgattcgtcatataaaaaatattggtgtggattccttaaaaggtgctggaattattgatcttgcaaaaagcacactagaaggtgttttaagtgctgaaaaggttttgacagaaaaatataagaaaggcggcttgctcgctttcttgttaaagctggatgcgcatatcaatccaaataacagcgctcaacaaaagatagtaaaagctattttaaatcagttggaagaaacgcaagataatgatagtcattcagttaaaatgattcctttgggcaaaggatactcaattgatactttaaaaagcccaattgatgatgcagctattcttaattatttgggtgtttacaaaaaagacctaggaaaatttttaggaatagatgtaaatacttatcaagcattaatgagaacagatattgaaaaagcaatgatgtatctgcacaacaaagcaattaaaccaatattaaaaaataagagcgagcattactcggctcttttttttatgcctaattctggttatcgagtggaatggaaaattaatattttggactttgtaccttattccaccaaaacaaatattgggtacaacattgttcgaactggtattaccagtcctgataatgtggcagaaatgcttggttttcctagacaaaatactgaagcaacacaagccgtctatatttcaaatgatttaacggaaatcggcaaaaagaatgctaccgataactcattgacaacagaggatgacttgaagggaggtggtaagaatgaagaaacaggaaattcggacatttga

SEQ ID NO: 3077 - DNA, 588 bp, Enterococcus faecalis
agggaggtggtaagaatgaagaaacaggaaattcggacatttgacatcacaaaccttaaaacaagaagcgaagaagatagtcaaacacagattgttactggttatgcggcggtgtttaatagtccaacagaattatgggaaggcctaaatgaagtgattaagcctggagctttcagtcgtgctttgtcaaattctgatgttcgttgtttattcgatcatgactggggcaaagtattagggcgcacaagaagtggaactttgaaacttgaagaagatgataagggactacgatttgaagttgagttgcccaatacaactgttgccaatgacttgattcaatcaatgtcacgtggggacattaatcagtgtagctttggtttttatccaacggaagaaacttgggattatagatcagacccagttttaagaactatccatgaagtcgaattgtatgaagtttctattgtttctttacctgcttatgaagatacagaagcagcactatcaagaaacaaacaagaaatgaagcaagatattaaaactagaaaaaaattaattgaaaaaatcaaaacagcgcttgaagcgtag

SEQ ID NO: 3078 - DNA, 1377 bp, Enterococcus faecalis
gaggaatttattatgaacaaagaattattgcgtcaattacaagctcgtcacgagaaacgattaagtgatttacaaggcaaaattgaatctggagaagtgcgtgaagcagatttagattcagttaatgaagaaattgatggtttaatcgatgaattaaaagccattaaagctgaattaggggatgataattcagaatctggtgatggtgaaggcgatgacgggaccgctaaatctgataatactgatgatgaaagtaaagaagatcgtgagaaagatacgaacggaaacaacgatgataaaaacgaagaaaatcgtggcggcatgattagccaagaacagcgtgatggtttgttacgcacaattcatgaaggaatggaggctagaaatgtgatgtctaatgaacaacgtgaaaaacaaattcgtaaagcatttgctgattttgttattggtaatatttcagaaagtgaagcacgtgcattaggtattgaaacaggcaatggttcagtgacagtaccagaagtgattgcatccgaagtgatttcttatgctcaagaagaaaacctattgcgtaaatacggaactgtgattcgcacggctggcgatgtgaagtatccaattcttgtgaaaaaagcagaggctaatgtaaacaaaaaagaacgtacgacagatattactgaaacagcgattcaatttgatgaaattctacttgatccagcagaatttgatgcattagcaactgtaacgaaaaaactattaaaaatgtctggtgtgccagtagaagatattgttgtagaagaattgaaaaaagcatatgttcgcaaagaaattaattatatgtttaatggcgacgatgcaggaaatgaaaacccaggagctttagctaaaaaagctgttgcatttgaaaaacctgtagatttaacagctgcaggtgctggtcaaaaattatatgatgcattgattgaatttaaaaatacaccagtaacagaagtaatgaaaaaaggtcgttttattattaatcgtgcagctttaactgctattgaaaaaatgaaaacagatgatggattcccattgttacgaccattcacgcaagcagaaggtggtattggttatcaattagttggttatccagttgattggaccgatgcagcagataaaaaaggtgaaccagatacaccagtattatattttggtgatttttctgctttcaaaattcaagaagttattggagcgttagaaattcaaaaattggttgaaaaattctctggaaaaaatcaagttggtttccaaatttacaacttgttagatggccaattagtttactcaccattcgagccggctgtttatcgttatgaaattacaaaaccagtaggtggttaa

SEQ ID NO: 3079 - DNA, 291 bp, Enterococcus faecalis
gtggttaatgtgaataacgaagctgaaacattatctttagaagaaaaattcaaagcacatattcattttgaagaggggatggatgattccatgctctctttttatttaaatatggcaaaaaattatgtaaaaactgcaactggagggcaagaagaatatttaattttgatggttgctggtattgcttatgaatatcgtgtttcagaagatgaattagataaggcgttgaatgcgatcacgccatttatcatccaaggagtgattcaacatgccgaagaggcagacgaatag

SEQ ID NO: 3080 - DNA, 333 bp, Enterococcus faecalis
ttcaacatgccgaagaggcagacgaataggtttcgatggaaagcggacttgctaaatgtaaaagaagaaacagattcgaacgataaagtagttacgacctataaacttaataggcttttatggtacgaagatattggagtaactgcacaagaaaaatatctttcacagcaagccaaaacagacgttgtcagacggattaaagtgagattggataaatctatcacagaaaagtttagcgctgttagaatcgattctgtgacctataaaatcactcgtatttacacaaatatggataaacgagaaatggagttgagtttggcttatgtcgattag

SEQ ID NO: 3081 - DNA, 348 bp, Enterococcus faecalis
gtttggcttatgtcgattagttttgaaaaattgagaataactctgaaatcagtaggcgtacctgtgacacgtgataaagcggaaaaaggaacggactatccatatattgtttattcaaatgttagtcaaggtaaaaaaatggcatcgtctaaagtgcatagacgaatgccctactatcaaatctctttttatacaacaggtactgaaaaggatttaattgctttagaaaatgcattggaggaagctggtattccttacactgattttgtaggcattcaaggcgatgaaaatgatgatactgtgacaaatttttacacatatgtgaggtgtattgaagatggaaaataa

SEQ ID NO: 3082 - DNA, 375 bp, Enterococcus faecalis
ggtgtattgaagatggaaaataataatggttttgcagatatggcagactatttaggaaagctttcgcaagtagatgcgacaaaattatcaatagaatcattaaccgctgcagctaatttttatatggaaaaattactacccaatatacctaaatcgcttctaaaaaagaagcacatggttgatcaagtgaaagtaaatattaaagataatgaagtacaagtagcttttgaagatacagctttttattggcgattcgctgaaaatggaacagtaaatcaaaaagcgcaacattttgccagtggaacatttgaacaaaataaagatcaaattgaaaaaattatgactcaacaaatattagatttatggaaaggatga

SEQ ID NO: 3083 - DNA, 684 bp, Enterococcus faecalis
aaaaattatgactcaacaaatattagatttatggaaaggatgagtaaattgggaaaacaagatgtgtattattttgaaggcttagatgacatcttaattgccatgatgaccacaaaagatgcagtaggtacagaaccagcatttggcgaggttgttcgtttgccaatagccacaaaattgggaattaaaggaaatggaacagctttagaaaaatgggcatcaagtaaaatgttccgacgcgtaagtcgtgaaacgaaacatgaaattgcgctagatcatgtgggcattcctattgcggtgatggatgaaataaaaggattaatcgctcaaagtggagtgacttttggtaaaaacactgcgcgagaatttccttattttgcctttgggtttatcggaaatattgaaaatggtggaaaaaaagctgtttggtatcctaaaacgcagttatcaaatgttattgatgaagaatacactactgcagaagatgaaaccaaaattgatgatgtaactgctaactttgtttcaactggtttaacatacaataatgttatgtattcaagttttgattctaatcgggatagtgcttcaatagaactatttgaaaaatttatcgcacaacctgtttatgacgaagaacaatggaagaaactagcaggtccttcacgtggaggtggcagtgaataa

SEQ ID NO: 3084 - DNA, 459 bp, Enterococcus faecalis
ataatggcaaaattagcggattatgggattgttatttcagatacacccacagttactattcaagggcatcagtttcccattttgttaacgatggaaacaatggagtatattgctgatgtttatgatgatgactattcaaaatttgaagcagatatgaatgaaatgattaacaagagtggtggtcgtatttcatcaaaagatttatcagcttctgatttaaaaattatgcgtgcattgatttacggcatgctaagaactggtggattggaagaaacgccagaaaccatttttaagtttttaggtatgagtgccacaattgttgaaatttatggtgcatgtatggaaatatttgcaaagcagaattttcaagttgaagacttaaaaaaatccaagaagccacaagattatcaaactccgaaaaaaaggaaaaacaaaaagaaaaagcctcaacggaaatag

SEQ ID NO: 3085 - DNA, 261 bp, Enterococcus faecalis
agacttaaaaaaatccaagaagccacaagattatcaaactccgaaaaaaaggaaaaacaaaaagaaaaagcctcaacggaaataggaacgccgtgggctttttatttatatgtagctctcactcttttgggatggagtgaggacttttttttaaaagcaactcccaacttgtggcttaagtcatatattcagtggttagtaagtaatacggagtttgaaccacccagaagtgtgacaatggataaaagtccttggtggtag

SEQ ID NO: 3086 - DNA, 2319 bp, Enterococcus faecalis
gaaaggagcgctaacgtgtcaaaacaagaatccgatgttgtcttaaattttaagatgaatggagaaataaactattcacgaacaattaaagacattaataaagaaatgaacttagcggctaccgagtacaaaaaccaggtatccgcaatggataaaaatgcaactcaaactgaaaaattaacagctacaaagaaaaaattagaaaaacaattatctttagctgaacaaagaacaaaattattacgtgaggaatacgaaaaatcagtaaaagaaactggtgaatattcagagcaatcacaaaagctgtataagcgtttattggaatccgaaacaggtgaaaataaactgcgttctgcattgcaaagtaccaatgaagctttgaaagagcaaggtaatttatcaataaaaacagctgaaaaactagccaaaattgaaaaagctggagacaaaattaaatcagttgggcaaaaactgtctgttggattaacagcaccaattatgggaattggtgctgcttctattgccgcattcaaagaattagatgaatgtttggataatataacaacagcaacaggggctactggtagtcagctagaatctttacaagccagttttaaaacagtagcaggtcaaatacccgcggatatgcaagatatatcaactggtattggtgaagtaaatactcaatttggcttaatggataagcaattggaagatacaacaggccgaatgcttaaattttcagaaattaatggctcagatgtttctcaatcaactattaatgcaaaaaaatcaatggacctttttaggttgtctattgaggatttgccaatgattttagattcagtatctaaaactagccaagatactggagtaggggtagatcagttatttgatgccgtaaatagaggtgcgccccaactcaaagctatgggacttggtttttctgaatcaactacgttaataggtcaaatggaaaaagctggtattgattcagcaggaactcttggctatttggcaaaagctagtgtcgtatatgcgaaagataataaaaccatgcaagaagggcttagcggaactattgaatctattaaaggggccacaactgaacaagaaaaactcactattgctagtgaagtttttggaactaaagctgcttcaaaaatggtagaagctattgatagcggagcgttgtcaatggatggtttagcagattcagcaaaaaacgcagctggcactgtggatcagacgtttagtgatattcttgatccaattgaccaagcaaagttggcacaaaatcaatttaaaatagcaatgggtgaacttggagaacaagtacaaatagcattattaccagcatttcaagctgcaacggatgcaataaaaaaagtttcagaatggtttggaagtttaacagatagtcaaaagcaaaccatactgaaaatagctggtgttgaggctgctatcggtccagtattagtagttttaggaacacttgctagttccattagtagtttgattccagttattgcttttattgcgtcgccaattggtttagtaattgcggcggttgccgcttgggtagctgcaatcgtagttgcatataataaaatcggttggtttagggattttatcaatacctcctttaaagtaattaaagatattgtggttggtgtatttaatgttttgaaagatacgacaaaatctacttttgatttcatcacaggatttattggtggtgccatggatggggctgcaaaaattattggcgattatgtaaatgaaattaagcgtatttttggcggtatcgttgattttgtaacgggagtatttactggagactggtcaagagcgtggcaaggtgttgttgacatttttggtggtatttttgaaggcatcgctgcagtagctaaagctccaatcaatgccatgattacgttaatcaatggatttattggtggattaaacaatataaaaatacctaaatgggtgccaggaattggcggtaaaggatttcatattggaaaaatcccttatttagcagaaggtggaactattctaaatggccaagccattgttggtgaagctggtcctgaactattaaccgctaaaaacggcaagacaacagtaactccattgtcaccagaagaaaaagctcgtggaattggtggtgctttgaaaggtggcaacactattgagcaacatgttcatattggccaagtagatgcaaataatccgagtgagttagatcgaatgaatcgcaagctttataaagcaagtgcgcaagctttctatgacttaggaggtgttccaacgtga

SEQ ID NO: 3087 - DNA, 732 bp, Enterococcus faecalis
cttaggaggtgttccaacgtgatttttatgaatcctgatgaaccaaatttcatttggaaagatttgaatgcagttcgtgatatggggtgcattatcgaaaatgagctgtcagaggttttaccaaataaacgatatgaaacgtattcgattatcggaagaagtggtgaatttaatgaaacgttcaatgattatgaaccctttgattatgaaattgaagatgtaactattccatatgaaaatttagcggcagtcaaaagatggttaactggtaaaagtaaacttattactcacaatgatgaagataaatatttagatgctatttgtacaatgagtaaaccaacttcattcaaaaatgaatggggtgttttttatacctttaacgttgaatttagatgtcaaccgttcaaaagaaaagtaaacgaacaaccaaaagtgattaaaacaaaatcaattgaaattactgatcacggtgatgaaattgcttttccttatatcgaaattaattcaaaaggtggcgatattacgttaaacattggtagtaactcactaacgattttgcgtacacaatcaggaatcgtcactattgataccgaaaagggaaaagcaatacaagaaggaaatccactatttacacgcggcagttggataaaaacgaatcccggtcaaaataaattaaatatatcaggaaattttatagaagctaagttttggaataggagcgcgtatttatga

SEQ ID NO: 3088 - DNA, 2808 bp, Enterococcus faecalis
gagcgcgtatttatgacacaaaattttatttatgcctatactgctattcctgaaaatttaaacgataacggaatggctttgccagattggcaagatttaccagaaattaaccgtgtgttaaatggtgtgtatcgattctatggtaactatgcaagagatggccagtatcgctcatacttaaaaaaaggaaactttctaaaggcacaagttgaagatggatcatatcaatattttgagatttacaatattaaaaaaaatctgcagtcagtttcagtgacagcgagacacattggttttatggcaaataagaatttcattattgattcgttcactgctaacggaaatggcacgcaaattatgaataatttaaaggctgcattaacgtttaagcaacggtttaactatttgtcgaatgtcggtactacacatcaatttacagcaaaacaagtaggtccaatcgatgcaattattggttctaacaatggcaatcaaaatttaacaggtgttactggtggagaattagagatggataactttaatttgaaattagtaaaacaaattggagcagataatggctttagaattgattttggaattaatttggaagctatagatgaggactatgacgacgaatcaattataaacagtctttttcttatcggtggcgtaccagacaatgattatgaccaagataaagagccaatcacgtatggctttttagaaattgctggtgtaaatgatagtaacagaagaattggaaaacgtgaaaattcggaatgtaaaacagttgatgagcttaaaaaatggggccagtcattgtttgataaagaccgcattcatgaaccaaaagtaacgcacactattagcatggtagcattagaacacactttggagtatgaagacatgtacgaagagctttcttctttgcattttggtgatgtagtacatgttagagcaaaagaagtcgatattgaagtaacggagcgcatggtggaatatacttggtttccgactttaggcaaatttaaaaatattgttttggggaatgatttatcactttacacctcaacagtaaataatcaaactcaagagctaaaacaaaaaattgataatcgaacagaaacattagtacaaaatgttttaaatgcaacggcatggattactggaaacagtggtggacatgtcgtttttcgtccagaaaaggccccgtctgaaattcttatcatggacaaaaacaaagtagctaccgcaaaacgtgtgtggcgctggaacttaaatggtttgggttattcctccaacggcgtgaatggtccgttcgaacttgctatgacttctaagggagaaatcgttgctgattttattaaagtgggcattattaacgcgaatgttttacaaacaagctttaataaagcaacagacgatgtactaaaattagtagctggtgctttgcaaatttggaacaataagaaaaaaatcatggaattgactaaaaaagggatggaattttggaatggctctagtcatattgggacaattggtacgaaaggaaatccctttccaggggtagtagataaaaatggaaatcctgtagtttctgatgggaattcattgctattagtcgcagataatcccaaaaaaattattggtttgtctaaccaatcaggaacaggacatttaattactggtcctacacagttttttgttggaaataattttaacttttttggtccgaatggaagtaaagcaattctgacagttgatcgattgattgtgggcggcaaagaagttatacctggtcaaaatggtggtggcggttctggagctggaacaggtggttatccatcagaagttacaagcgatgcagataaatttgcttgggacttatggagttacctattagctaacggatacagcaaagcagctgctgcaggtatccttggaaatgtacaaggagaagttggtccaagtatgaacccagataccgaacaaataggcggtccagcttacggatgggttcaatgggacggttcagcatatccattggtaggcgcaccaacttggaatggccgagaatatgtacaacgcttaatcgcagctgcaggtatcaaacaagactataggacgtcattagcccaagctcaattaattaattggtgtatgttcaatgggcaatggttaggacaagtaagtccattaacagttgatgaatttaaagttgtcagctcgcctaaaacagctgcttatgcgtttgaattaaactttgaacgtccagctgcagcacatccagaaagacaaacctatgcacaagcatggtatgacaaattcaaagatttgaaagcttctactgcaacaggaaaagctggcatagaacatttggagaccttaatgggcaaatggcttggtaatgggcaatgttatgccgttccagccgaatattctggttttatgggcggctgtggtttaggtgcaggaacaatttatggcttttcacatgtaattggtgatacatcatctgctgcagatattggtgaagcatatgattggaatgcggtaggttggcgagtaatccaaaatccaacgtatcaagatttagtagtaggagcaatcgtcaatattagacgaggtggccaatggggaacaggttggacagtagacccaacatatggtcacacgggcgtgatttacggcttaaataacggacgtatccaaacgatagaacagaatgccgagcaaggacaaattgtcgcaaaatatgaccgattatattttgctaattctattcaatcgattgttattccaccaaaataa

SEQ ID NO: 3089 - DNA, 927 bp, Enterococcus faecalis
cgagaggaggatttttcaatggttaaatggcaagcaacgctaagtacaactgaaccttacaattacattgggattcagaatgtacgacaaggaaatcgaaacacagaagtcttagaagccatactagttgaaaatgctttgccacttgatttaacaggttgcgaagttttttttgaatcagttattgataataaatatccgattcaacgagcagcaaaaattgtgaatgccaaaaaagggattatccagtatacctttgatgaatattctatgcagtcattgcatagacaggaagcatacttcagtattcataaaggcgacaatctaattggctcaacgcagaacttttcttactttgttgtgaatgctgcttctaaaacagaaggtgaaatggggtcatattggcagtcaatcgaggatttgatagctgatatgactgcttttattaatgaaaacaagggcgatttcacagcgtggatgaacgctagaaaagaagagtttgaaaaatggcgtaaaaatcaacaagatacttttgaagcttggcggaacggccaagaaacagattatctaaaatggttcgaatcaatcaaagatattttaaaaactattgatccaggcggaacaatgttagccgagctaatggatgcacgtgtagacatacaaggagtacgtcataattcactttctgagcgtttattggctgatatgaactatttgtatcatcggttagaggaacggctatacaccatcaaatacggtaatgtaaacacgttagaaattttagaggatgattcattttctaagaatcatgaagttgaagtattgggaacagttaatcatccaattgaagaaggggcgttaattatagcgacagttgatgattcaaaacaaaatgtttttacgattgaaggtgtagacaatggttga

SEQ ID NO: 3090 - DNA, 321 bp, Enterococcus faecalis
acaatggttgatgctaaaagaatgatggaaactgatgaaaatgggattaaacgtcagttttttcctatgacacacgtatcggcaatccttggattaacagagataatggctggtaattcaaaagtatcttcagtaaatggacatacaggcgcagtcattattacgcgtgcagacctagatttacctattgatgggattatgatttcgaaacaggagtatgacaaaatgttaaaaatcatagccgattatgaagatggaaaactaggtggttctggtgttgagtttgaaaaagtaaaaggagatgaagaaataaatgcctga

SEQ ID NO: 3091 - DNA, 318 bp, Enterococcus faecalis
atgcctgatttatatgtagtgaaaaaagacggcgtagctattgatgtacaaactagtacagctggcgttgttggattaaatgaatttgttgatggaaaaattagtggtgctgaagcaggcactgtctcgtctgtaaatggtcatacaggtgaagttattttaactgcttctgatgtaaaagcactgccagacacaactgttattccaacgcttcctagcaatgccacttctgaaaaagacggtttaatgtctaaaacggataaagcaaaattggatgcattaccagtttttacatttgaaaaggtaggtgaagcgtaa

SEQ ID NO: 3092 - DNA, 558 bp, Enterococcus faecalis
agcgtaatggcagatatcgttcagctaaaagaaaatggtgttgtaaagtatatgaaaacacatgcagatgctattgacggcgtggaaggaaaattagtaaaggccgttggaaatgagactgttttagggacaaagaattttcaagatgggattcaaatcggtggtaaatctgtatcggttaatgcaaaaccgacctatgaggtggtgaaagactactgggatggaactggagcttatttgacagaatctcaatcagtaacaatttcaaatagcagcaatgtggatgaaattgttttgatattctcgcgttacaacgataacggtggcggtattgttcactcaataccagttactccgaatattacgaaattaaaatacgaattaccagcagttgcatgggtaggttctgcttcaacagacccaacaatagcgtataaaaaaatatctatttctaaatctggtacatctttagtgattacaggagatactgcaaacacattaaatgaagcaaataaaaaaattgtttttagagaaatcggcgttatgcgtcgtaaatag

SEQ ID NO: 3093 - DNA, 393 bp, Enterococcus faecalis
ataggagtggataataaaatgaaaaaaatatataaagtgctctacccagtaggatttcaaattttcgaagttcaagatgattatgttgtagccttgccatttgtagaggagaaaccactagaaaatttagtgaatgaacaatcccaattctttaacttttcagaacaaaaatgggaagaagcagtgacacaggattatacaaaaaaattgaatttgttagaaaatcttgctaatggcttagaagtttcaaatagtgagttaaaacaagcaaatgaaaagctaactgctaaagcagaatcacttgcacaaatcaattctaagacgatgcttacttctcttcaaaatacaagagaaattgatgctattaaagaacaaatcggaggtgcaaaataa

SEQ ID NO: 3094 - DNA, 252 bp, Enterococcus faecalis
agggatggagacgataacttgaaagatgatcctttaattgaaatcgtcgatcgtttggcacggattgaaacaaagttggataatcatgaacaattaagagagaaagcagacatagcgctctcaatggccaaaaacaatgaaggcgatattgcggaaataaaagagaatcaaaagtggacgtggcgaacaattgcaggaattggggtttctgttgctgtctatttaatcacgaaatacttaggaggaatttag

SEQ ID NO: 3095 - DNA, 321 bp, Enterococcus faecalis
aggcgatattgcggaaataaaagagaatcaaaagtggacgtggcgaacaattgcaggaattggggtttctgttgctgtctatttaatcacgaaatacttaggaggaatttagaaatgatattaccagacaagtattacaaaatcatcaagtggggagtgcttactgtgcttcctgcaagttctgttttgattgccacgctaggtaaagcctacggttggcaacaaacagatatggctgttttaactatcaatgccattgcaacttttttaggagtagtaacaggtgtgtcagcatataatttaaaagacaaggagaagtaa

SEQ ID NO: 3096 - DNA, 1326 bp, Enterococcus faecalis
tttaaaagacaaggagaagtaaaaatgaaaaagaaaattttagtaggagcgcttgtcgctctattttttatgcctttaaatgtatttgctgcaaaaggtgaccaaggcgttgactgggcgatttatcaaggcgaacagggtcgttttggttatgcacatgataaattcgccattgctcagattggcggctacaatgctagcggtatttatgaacaatacacatataaaacgcaagtagcaagtgctattgcccaaggtaaacgtgcgcatacctatatttggtatgacacttggggaaacatggacattgcgaaaacaacaatggattactttttgccacgtattcaaacgcctaaaaattccatcgttgcattagattttgaacatggagcgttggctagtgttccagatggatatggaggatatgtaagttcagatgccgaaaaagcagcaaatacagagacaattttgtacggtatgcgcagaataaaacaggctggctatactccaatgtattacagctataagccatttacactaaatcatgtaaactatcaacaaatcatcaaagagtttcctaactctttatggattgctgcgtatcctatcgatggtgtgtcaccatatccattgtatgcttatttcccaagcatggatggtattggcatttggcaattcacatccgcttatattgcaggtggtttagatggtaacgtagatttaacaggaattacggatagtggttatacagatacaaataaaccagaaacggatacgccagcaacagatgcaggcgaagaaattgaaaaaatacctaattctgatgttaaagttggcgataccgtcaaagtgaaatttagtgttgatgcttgggcaactggcgaagctattccagattgggttaaaggaaacagttataaagtgcaagaagcaactggaagcagagtattgctagaaggcattttgtcatggattagcaaaggtgatattgaactattaccagatgcaacagttgtccctgataagcaaccagaaacaacacatatagttcaacatggcgaaacattatcaagcattgcttaccaatacggtaccgattatcaaactttagcttcgttaaatggattggctaatccaaaccttatttaccctggacaagttttgaaagtaaatggatcagcaacaagtaatgtttacacagtccagttgggtgataatttatcaagtatagcggctaaacttggcacgacttatcaaacattggcagctttaaacgaattagcaaatcctaacttgatttatccgggtcaaacgttgaactattaa

SEQ ID NO: 3097 - DNA, 465 bp, Enterococcus faecalis
  misc_feature (441)..(441): Nucleotide 441 is "n" wherein "n" = any nucleotide.
cgacaaaaacatacccaggaggacttttacatgacccaagtacattttacactgaaaagcgaagagattcaaagcattattgaatattctgtaaaggatgacgtttctaaaaatattttaacaacggtatttaatcaactaatggaaaatcaacgaacagaatatattcaagcaaaagaatatgaacgaacagaaaaccgacaaagtcaacgaaatggctattatgagcgcagctttacgacacgtgtaggcacgctagaattaaaagtacccagaacacgtgatggccatttttcacccacagtgtttgaacgttatcaacgaaacgaaaaagccctcatggcttcaatgttggaaatgtatgtatcaggcgtttcaactcgtaaagtatcaaaaattgtggaagaactttgtggtaaatccgtctctaagtccttcgtntctagcttaacagaacagctataa

SEQ ID NO: 3098 - DNA, 606 bp, Enterococcus faecalis
  misc_feature (208)..(208): Nucleotide 208 is "n" wherein "n" = any nucleotide.
ccaaagatggcgaccgttgaaattatcggctttcatgattcaaaagtgggcgaaagcgaagagacttggacaacattttttgaatacctaaaagaaccccgtttaaaaggtacggaactcgttatttctgatgcgcacaaaggattgttctctgccattagaaaatccttcaccaacgtaagttggcaaagatgccaagttcacttcntaagaaatatctttaccaccattcctaaaaaaaattcaaaatctttcagagaagctgttaaaggaatttttaagttcacagatattaacttagcgcgtgaggctaaaaatcgattgattcatgattatatcgatcaaccaaaatattcaaaagcttgcgcatcattggatgatggattcgaagacgcctttcaatataccgtacaaggaaattcccacaatcgactaaagagtaccaatctaattgaacgactgaatcaagaagtacgcagaagagaaaagattattcgcatcttccccaatcaaacatcagccaatcgcttaattggagccgttcttatggacctacatgatgaatggatttattcttcaagaaaatacatcaattttgataagtag

SEQ ID NO: 3099 - DNA, 1581 bp, Enterococcus faecalis
caatccgtgttgaagagccttggtcatgcgcctacctatatcacaaaaatcaatgactttagctcagatgttagtgaagcggcccttacccttggaaccgagatcgttgtacccaattcagaaagccaaggaaaagatagtgtggatttgattcgggatagtttgttttcgattcaagtccaacaaccttggttactactgcaatttgatgattccaacatagaagaaattggtgaagaccgggtcaacaagattctatctgtgagtccagatgaaaacaaaggcaaagatcgggaagaagcggtcaaggcagagattgaagacaatgacaatgcgaatctcagtattaccaagaccatgaaccgtttagggatcgtggtctttttggtattgttcaatattggcatttccttctttgtttttcttctaacagggattatgttgttctcgcaaattctcttcattatctttgcgatgtttctgccaattagtttcttattgtccatgttgccgacttatgagagtttgggcaagatggcgattattcgtttattcaatacgattatgatgcgagcgggtgtcaccttggtgattacgactgcattcagtatttctacgatgtttttcaatatttcggctacctatcccttctttatggtagcttttctacaaattgtgacctttgccggtatctatttcaaattgggtgacattatgagtatgttcaaccttcagagtaatgacagtcagtcaatgggcagacgggtcatgcgaagaccgcaaatgttgatgaaccgtaaattgcggcaactcaatcgaaatgtgggccgaactctggcttttggcggtgctgcagcagttgggaataagttggcaaaggaacaatcaaaacccaaatttaagccagcaggttcttctctacgaaagaattcacgattacctaacgatcgcgaggtatcctcagactcggctaaggagaatccaatttcaaataataagaaacaatcccgaatgaatttgactgggagaaaaataggcaaagttctggatacccaggctttggtgaaagataaggcaaaacaagtaaaggatcaggtacggaatacgccgaccaacttgaaatacatcctccataaaggtctggaaaagacgaaaaaagcaccgaaagaatttaagcgagggcttgttcaagaaaaagcagatcgagagaagctgcgagacaaacaacgacaacgcagagatgagaaaatggatgaaaagcgaaaaaacttgggcgaagtaacagaccgtcatggaaaaagaagaagtaatgtttcgataaaagaggatccaaaacctcagaaggataggatactgaaaaatgaacttccaaaacggattgtgatggtaaaaccgaattctgaggtaagtagaagacttgttaaacagaatttggttgcgagagagaataaccaactattaagtaagaaaaattctttccagcaagttaagcaacgatctactcttccgaagagagccaatcaaaaagtacaaagaataatgaaggctcgtccaaaaccaaagtcgggtgataaaaaatga

SEQ ID NO: 3100 - DNA, 1008 bp, Enterococcus faecalis
aaaatgaatttaaaagaattgagtgtcatttcgttaaccatgttgatgctctcttttatgggcatcttgatgtgtgtaagcttattgtttggggaagatagtgaggggagtggtacttctggtatttctcctggtggcaatagtgtctcagaagaagtcttgaaacatcgctcaatggttgaaaaatatgctaaagaatcggacatattagactatgtaccaattcttttggcaatcatccaagttgaatctggtggcacaatggaggacgtcatgcaaagttctgagtctgcgggtttaccaccaaattcattaagtaccgaagcatctatcaagcagggatgtatttattttgcttccttggttaagagctccaaagaactagggtgtgatcaagatagtattattcaagcctataactatggtggcggctatttgaattatgtcgcaaaaaacgggaagaagcatagttttactttagccgaatcattttcaaaggaaaaatcgggtggtcaaaaagtagactaccccaacccaatagcgattaaagaaaatggcgggtggcgctataactatggcaatatgttttattgcctattagtgaagcaatacctgaccacgacacagtttgatgataaaacagtccaagggatttttgacgaggcttttaagtatgaaggtactgcctacgtatttggcggttcgagtcccgcaacgggttttgattgtagtggattgacccagtggtgttatgccaaagttggtctgaaacttccccgggtggctcaagatcagtatgatgtcatgactcatattgacttaaaagatgccaaacctggtgatttaattttctttcactcaacctatgatgccggtacttatgtgactcatgtaggtatttatgcaggagagaatcgcatgtttcacgcaggaaatccagtgggttggacgaatcttacagaaagctattggcagcagcatctgattggagccggccgatacaattaa

SEQ ID NO: 3101 - DNA, 930 bp, Enterococcus faecalis
gagaaaagaggaaaaataatgaagataaaaattgaacggattcaaaaggaaaagatgtcaaaaaagaaaaaagagcggacaatttcagtgggcaagcatcgaaaaatggtgcttgccctttggcttttactgtcatgtagtcttgcttttggtatctacaaaaatttcaccgccattgatcagcatacaactcacgtaaaaatggttgtaaaagaaaaagtaataaatacttctggagttgaaagttttacaaagaattttgtgaaagaatacttttcatggaagaataacaaggaagtaattgaaaagagaatgagtaatcttggacagtaccttacagaagaaggccttgctttgagtcaagatatggttcgagtagatattcccactagttcagaagtaaactcagtaaaaattctagatgttgaaaaacgttcgaaagattttgtcgtttcatttttagtagaccaaaagattacagaagggaaaaagtcagaacaaatttcttctgcgtatcgagtgaagatatttgaagatgaaaaagaaaatcatatagtgacgagtttaccaactatgattagtaagccaggtaaggcaaaatatgaagtaaaacaagtagaaagtgattctgacattgatgcaaaaacaacgcaagaaattactgagtttctagagacatttttcaaactttatccaactgcttctgaaaaagagctagagtattatagtgaaaatgaatctatgagccaagttagtagcgatcttagatttgtagaaataaccaatcctatttatcttgaaaaggacggttcggtacaagtaaaaatcgtagtaaaatacctaaatgaaattgaaaaggtgacaaatagttttcaatacaatctattgttaaacaaagaagaaaattggaaaattattaatggagaataa

SEQ ID NO: 3102 - DNA, 1257 bp, Enterococcus faecalis
aaaaaagaaagtcccttctgtagaatagagttaccacaacacattcacagaagagaggacttccctatgaacgattttactacagaaattctaaagactctagcgaacaaaggcgatttgaatgaattattccgtgtccatttggagaaagcagtcaatacgcttctcaaaacggagttaacggctttcctcgattacgaaaagtatgatcgcattggttttaacacgggtaattctcgtaacggctcctatgaccgtacggtcaagaccgagtatggggaacttcatctccagattccgcgcgaccgcaatggcgagttcaagcaacagactgttcctgcttatagacggacgaatgacacgttagaggagaccgtcattcacctcttccgaaaaggtattaccatgtcggaaatcgcagacttgattgagaaaatgtatgggcatcactacacgccccaaaccatgtccaatataacaaaatcatttacagaagaggtaacggcgtttaaagggcgggagcttcatgaccgttatgccgctatttatatggacgcaacgtatattccgttaaagcggaaaaccgtcgccaaggaagccattcatatcgcagttggcattcgcccggacggatcaaaggaagtattgagctatgcgattgcaccgactgaatccatcacgatttgggaggaaattttattggaccttcaagagcgcggtttgaaaaatgtcctcctgttcatcacggatggcttaaaggggatggtaggagcgattagtcggttctatcccaaagctcgttttcaacattgttgtgtacacgtttcccgtaatatcagtcacaaagtgcgtgtcgatgatcgtaaggaagtctgtgatgattttaaaatggtgtatcaaacctcatctaaaaaggtggcgttggaagcacgtggtgcttttgcggaaaaatggaaaaccagctatccaaaagtggttgaatcgattctttcgaacgatcacttgctcactttctatgatttccccttggccatacgcaagagtatttattctacgaacttgattgaatcctttaataagcaaatcaagaaatacagccaccgcaaggaacagttccaaaacgaagagtcgatggaacgtttcttagtctcgtcttttgatacttacaaccaaaaattcctaggtcgcagtcataaaggctttcaacaggccgaaggcgaacttgaacaaatgctaagccaactgattgagaattag

SEQ ID NO: 3103 - DNA, 240 bp, Enterococcus faecalis
gaaacgttccatcgactcttcgttttggaactgttccttgcggtggctgtatttcttgatttgcttattaaaggattcaatcaagttcgtagaataaatactcttgcgtatggccaaggggaaatcatagaaagtgagcaagtgatcgttcgaaagaatcgattcaaccacttttggatagctggttttccatttttccgcaaaagcaccacgtgcttccaacgccacctttttagatga

SEQ ID NO: 3104 - DNA, 291 bp, Enterococcus faecalis
tatatgagcaagcacagtaagtgtacggacacttacgaaaaaaatgatgaggcagccctttgggatctgcttctttttttatcaatttttaacttgttagggtgtaccctaagaccccgaaatacattcaaaggaggattacctatagcaaatagaatacgaaatgaaaggcttgaaattaaattaacagaagaagaaaaggctctttttgaggagaaaagaaaacttgcgaaatgtaaaaatatgagccatttcatccgcaagtgtgttttagaaaaagaaatatattaa

SEQ ID NO: 3105 - DNA, 183 bp, Enterococcus faecalis
aaggtgtgtagaatgttattgaaagtagctataaaatgctattgtgtaaaaaataaaggaggaataatttatgaaaaaatagtaccaagaggagcatgcctattacttgcattatgtttgagcttaagcgcagttgggtgtcaaaaaagtaaaaataaaagaaggacaatccataagttctga

SEQ ID NO: 3106 - DNA, 417 bp, Enterococcus faecalis
gcgcagttgggtgtcaaaaaagtaaaaataaaagaaggacaatccataagttctgaagaggaaggcatgtcaattaatgcaaatggcaaaaatgaaacttttaagccatcagattatacattggaggcaaagaaagaatatgtttatgaatatttagggcttaaatttaaactctcagacaaatttagaaattatatagctgataaaaagatagcgatgttagatgatcaaagtcctatagataaagaactaaagtatgctattttgacatttgaaaaaatgacagaagaacaaaagaatgcagttatagaaaagatgggcgatggatataaaaattggcaaaatgagcttgaaagaattgggactattggtatatttgaaaaaaatacatcagaagaaaaaaatctaaaattataa

SEQ ID NO: 3107 - DNA, 678 bp, Enterococcus faecalis
aaaaaatacatcagaagaaaaaaatctaaaattataaaatgtgatactcatactaaaataggagtttcaagtgatggaaaatacgattgctatttaagcacaaatagcggagctgaaagtaatcttctggatgaattaaaaagaactgagattcaaattatagataaaaaagaacgtcctaaaaatggttttgtgctatcagaaaaaactgatttagaaaatacagaagcatttaacaaagaatcggttaaagatttacgtaaactatcaacaaaggacataaatggcaaggattttacaagtaaagattttgagaagtatgatcttactatggtaaatgtatttgcaacttggtgtacagcttgtgtaaaggaaattcctgatttggttgaggttcagaatgaaatgaaaagcaagggtgtaaatatcgttggagttgttacagatcctgttgatgataacggtgaaaacaaggaagcaattgaaaagtcaaagttaatacatgaaaagacaaaggcttcatatcctttcttaatgccagataagacaaactttaatggtagattgaatggtatacaggctatgccagagactttctttgttgatagtaatggagaaactaaagttgtcttggataaggcgataagaatttgtatggagtgtattggaattggatag

SEQ ID NO: 3108 - DNA, 306 bp, Enterococcus faecalis
gaatttgtatggagtgtattggaattggatagaattaaaaatattataaatggtagtacaaaaaaagataaatataaaataagagatcgttttaagcatttatttcaatccgtttggtttttaattactaattcttactttgaagggtttaagactggtaaaatctacggggggaatttaaagaaaatttgtgttccgggtataaattgttattcatgcccgggagcaaaaggttcttgtccaataggatcactacaggcagtaattggaaattcaaaatataagattagttattttattatatag

SEQ ID NO: 3109 - DNA, 456 bp, Enterococcus faecalis
tattacttgtatttttcattaatattacctttatttttggttgatattttaggtcagggttctccgtatttttgtaaacttatttgtccgattggtatgctggaaggaggattaccacttgttttattaaataaaagtatgagaagtacgataggtttcttgtattattggaaaggaatcattctaatagttactttgttactttctataattatatatagacctttttgtaaatatatatgtccacttggagctatttactcaatttttaaccctatttcaatatttagatatagattggataaggataagtgtattaattgtggaaaatgtaaaaaagtttgccaaatgaataaagattcagttgagaattgcaatcatctggagtgtatcagatgtggacgatgtaaaaatgcttgtccagtggatgcaattagttatggagtaagaaaatag

SEQ ID NO: 3110 - DNA, 240 bp, Enterococcus faecalis
ttaacattaaaatatttaccatctttttttgttattgatattgaagaattagaactttcatataaagccttttctatttcattgcttgatttcattattgttaaacaagaatacaagcaagaaagaactatagttaatatgataaaaattattaaagttctatttttctttcttgtaatatatgctatagcattttttatcactttcctaactactcctctctattttcttactccataa

SEQ ID NO: 3111 - DNA, 1296 bp, Enterococcus faecalis
agaggagtagttaggaaagtgataaaaaatgctatagcatatattacaagaaagaaaaatagaactttaataatttttatcatattaactatagttctttcttgcttgtattcttgtttaacaataatgaaatcaagcaatgaaatagaaaaggctttatatgaaagttctaattcttcaatatcaataacaaaaaaagatggtaaatattttaatgttaatcaatttaaagatattgaaaaattaaaagaaattgaagaaaaaataattcaatatgatggattagcaaaactaaaagatgctaaagtagttagcggagaacaaagaataaatagagaagatttatctgacgaatttaagaatgttgtttcactcgaagctacaaataatactaaaaaaaatattttatttagtagtggagtatttacaattaaagaaggtaaaaatatagaagaaaatgataagaattcaattattgttcatgaagaatttgctaaacaaaacaatctaaaattaggtgatgaagttgatcttgaattactagatattgaaaaaagtggaaaaataaaaagtcataaatttaaaattatagggatcttttctggtaaaaaacaggaaacatatacaggattatcttctgattttagtgaaaatatggtgtttgtagattattcaacaagccaagaggtattaaacaattcagaaaataatgaaattgcaaataaaattttaatgtattctggtagtgcagaatctacagacttagccttaaacaaattgaaagagcttaaaattgatgagtcaaagtattttgttgaaaaagattctaatgcgtttgaagagtctttagagtcagtgagtggaataaaatatataataaaagtaatgacttattctattatgttagttgggatggttgttctttcattaatcttgattctatggttaagggaaagaatttatgaaataggtatatttttatctagtggaacatctaagatacaaattataatgcaatttatattcgagttaatattcatatcgataccaagtataatatcttccttatttttaggaaatgtattactaaaagtaattgtagatggattcattaactcagaggattcaatgatttccggtggaagtttaataaatagtagtagttttatgtcaaatataacaacgcttggacaaagttatttaatattaataagtattattgttttatcagttgtatttgcttcttcattaatgttaatcaagaagcctaaagaaatcttatcaaaaataagttag

SEQ ID NO: 3112 - DNA, 666 bp, Enterococcus faecalis
gagaaaataatggatatattagaaataaagaatgtagcatatagttatgcaaattctaaagaaaaagttttgtcaggagtaaatcaaaaatttgaacttgggaagttttatgcgatagtaggaaagtcaggaacaggaaaatctacacttctttccttacttgctggacttgataaacctcaaacaggaaaaatattgtttaagaatgaagatatacaaaataaaggatatagtaatcatagaaaaaataatatatctttagtatttcaaaactataatttaatagattatttatcaccaattgaaaatattagattagtaaataaatcagcagatgaaagtatcttgtttgaactaggtttagataaaaaacaaataaaaagaaatgttatgaaattatctggtggacagcaacaaagagtagctattgctagagcattggtatcagatgctccaataatactagctgatgagcctactggtaatctagacagtgttactgctggagaaataattaatatattaaagacattagctaaagatagaaataaatgtgtaatagttgtaacacatagtaaggaagtagcagattctgcggatatcattttagaactaagtggtaaaaagttgaaaaaagtaaataaaatgaatttggaggttgaataa

SEQ ID NO: 3113 - DNA, 1218 bp, Enterococcus faecalis
ataatgataaaaaatgcatttgcttatgtaactagaaaaagtttaaaatcattaattatcatattagttattttatctatgtcaactttaagtctcattagtttatctattaaagatgctacggacagagcttcaaaagaaacatttgctaatataacaaatagtttttctatggagataaatagacaagtaaatccaggaacacctagaggtgggggaaatgtaaaaggtgaagatattaaaaagatatctcaaacagatagtatagactcctatgtaaaaagaataaacagtgttgcagatttagttgattatgatattattgaaactcaagagactcttgcgaatcaatcacctgaaagagcaaagaattttaaaagaacagttatgttaactggggttaacgactcaacaaaagaaacaaaatttgtatcagaagcatataaattagtagaaggaaagcatttagaaaatgaagataaaaataaaatcttaatgcataaagatttagctgaaaaaaataaccttaaagttggagataagataaaaataaaatctaatttatttgatgctgataatgagaaaggtgcagatgaaacagtagaagtagaaattaaaggtctattcgatgggcataatagcggtggagtaagtgcagcacaagaactatacgaaaatacattaatcactgatgttcatacagctgctaaagtttatggtaataccgaagatacagctgtataccaagatgcaacattctttgtaaaaggtgataagaatcttgatagtgtaataaaagatcttgggaaaatagatataaattggagagaatataatttgattaaaagttcatcaaattaccctgcattacaacaatctatatcaggtatttactcaatttcaaataaattattttttggctcattaatatttgcaggagttgtagtttcattattattattcttatggatgaatgctagaaagaaagaaatagcagtattactatcattaggtatatcaaaattagaaatttttggtcaattcctaattgagatggtatttatatcaatccccgcattcgttggttcctatttcttagctcaatatacagctgacaagcttgggaataatatattgaataaggttactggtgatatagctaaacaaatagctaaacaatctgcatctagccaattaggtggtggggcaagaagctga

SEQ ID NO: 3114 - DNA, 183 bp, Enterococcus faecalis
gtggtggggcaagaagctgaaggatttaacaagacattatcaagtttagatatcaatgtattacctaaattcatgatttatgtagttatatttatgagtttagtacttcttgtatcattgattatttcttcattcaatatattaagaaggaatccaaaagaattattaattgacaataattaa

SEQ ID NO: 3115 - DNA, 225 bp, Enterococcus faecalis
aaagtttctgccacagatccaaaatgcgcttcactacagctattcaaatggaccattggaatgtttaaacaaccacatcaaagtattaaaacgcaatgcgtacggctttcgcagcttttacaatttcaaactacggatcatgattcgtcatggcaaaacatttttaaccaaataaacagaacaggaagagggtttcttctttctgttctgtccaaattattctaa

SEQ ID NO: 3116 - DNA, 789 bp, Enterococcus faecalis
attcaaatcggttcgacatgtgaccagtgcaatgagttttatcatgatggacggacaaagccatgcattattggatattgtcgaaaatcgacgcttgccttatttagaacgctattttctcggttttcattagcgactcgtgaagccgttcaatggattgttattgatatgtatgcgccttatgtttcattggtgaaaaagcttttcccgaatgctcagttgatcatcgaccgtttccacatcgtccaacatattggcagaaccttcttgaatcatcgagtgaaagaaaccacggcacggcttaaaggaacttcccactctcaacgagggttagggaaaaaattgaaacgctattggaaactcctacaaaaagaagaagcaaagttaaactacgaaaaaagggtttggcgtgccagttttaaagattatttgactgaaagtgagattgtcgatcgactgttatctgcttgtcccaacctgcgccaaggctatcagttataccaagacattctttatgcggtaaagaaaagagatcagtcattatttgaggactgtttaaacagagaagtcagcggtcttcctgaaacctatacaaccactttacgaacgtttaaaaagtttctgccacagatccaaaatgcgcttcactacagctattcaaatggaccattggaatgtttaaacaaccacatcaaagtattaaaacgcaatgcgtacggctttcgcagcttttacaatttcaaactacggatcatgattcgtcatggcaaaacatttttaaccaaataa

SEQ ID NO: 3117 - DNA, 423 bp, Enterococcus faecalis
aaaagaatatatgagtatcgcacttatctggagttgaagaaacaacgatttaaatgtaagtcttgccaaagaacattcgtagcggatacctctgtcgctgaaaaatactgtttcattagtcaaaaagttcgttggtctgttattgctcgcttaaaagagaatacttccatgacggaaatcgcccgtcagaaaaatatctccacttcttcggtctatcgtgtcatgaagagattttaccgcccattgaatcctttcaaacagactttgccaaaggtcttatgctttgatgaattcaaatcggttcgacatgtgaccagtgcaatgagttttatcatgatggacggacaaagccatgcattattggatattgtcgaaaatcgacgcttgccttatttagaacgctattttctcggttttcattag

SEQ ID NO: 3118 - DNA, 666 bp, Enterococcus faecalis
gtggaggtatatatgaaaatattaactgttgaagatgataatatgataagagagggaataagtgaatatctttcagaatttggatatactgttattcaagctaaagatggaagagaagccttgtcaaaatttaatagcgatataaatttggttatcttagacattcagataccttttataaatggtttagaagtgttgaaagaaattagaaagaaaagcaatttaccaattctaatcttgactgcatttagtgatgaagaatataaaattgatgcatttactaatttagtagacggatatgtagaaaagccattttcattgccggtcttaaaagctagaatagattctttaattaagaagaattatggacatttagagaagtttgaatataaggatctatcggttaattttaatagctatacagctaaaataaatggtgaagaaatagatgtaaatgcaaaagaactagaagtattaaaatgtttattggataataatggacaagtgttaacaagaatgcaaattattgattatgtatggaaagatagcgaagaaactccttatgatcgagtaatagatgtatatataaaagaacttagaaaaaaattacaattagactgtataactactataagaaatgtaggatataaattggagagaaaatga

SEQ ID NO: 3119 - DNA, 576 bp, Enterococcus faecalis
  misc_feature (415)..(558): Nucleotides 415, 417, 418, 435 & 558 are "n" wherein "n" = any nucleotide. 1               5
attggagagaaaatgaaaaaattaaagatatttccaaaaatgttcatacaaatattttctgttcttggaataataattatattagttcattcattagttttttttatctttcctaaaacatatttggagacgagaaaagaaaagattcataatatggcaaatgaaatttctagtaatatgaatggaaaagaaataaaatatatagaacaaactttggagttttattccaagagtagtgaaataaaagtattcataaaagaaaaaaataataagaatgaaatacaaatcaaagataatataaatgttaatttagaaagtgatagtaattctttgataattgaagaaaaagaaataaagcttaatgatggtaaaaaaacaaatctacaatttgtttctacagctgaaatatgccaananngaatcccgtccccaacncaaagaggaaagaaaaaaagatgcccctctttttttttccgccgcttctttctcgtaagaaagaacaggattgtggtctcggcgggggtgtctttttccttgggggcgggcgtccgctcgctntgtgctaataagatgtag

SEQ ID NO: 3120 - DNA, 765 bp, Enterococcus faecalis
atggagtttttttgttttgctcttcctgatgaagatggagaaggaaaacaaccaattaatgagttgttttctactttattaagaacaattgacgaattggaatttaaaaataaagaaattttaaaattagaaaagttaaaatatgacttttttaaaggtgcatcccatgaacttaaaacccctcttgctagtcttaaaataatactggaaaacatgaaatacaatattggaaaatataaagaaagagatatttatattaatgaatgtattgaaatcgttgatagtttaacaaaaaatatttctcagatattatcagttcatcctatagaaaatttgaataatgatgaagaatatttgaaaataaatgatacattagaagacatattaaaaaagtatgaaatattagcaaatcaaaagaaaataactgtcaataattatatattagacgagaatgtttatataggaaaaacagctttaaagattattctatctaatttgattagtaatgcggtaaaatatactgatgtaaatggggtaattaatattgggatagttaatgattggttatatatagagaattcatacggtaacaataaaatttcgaatatggataaaatatttgatgttaaatttgatttaaataaggaaaatagtaatggattaggtttatatattgtaagtaatattctgaataattacaatatagaatataaagtattgcaggatgaagaattttttatctttaaaataaaaatattttcttaa

SEQ ID NO: 3121 - DNA, 1023 bp, Enterococcus faecalis
ttgaaatgtattcaattcgggcattcccgtaacgggattattcacgtacatttaaacagaatatgcggagttgatttaactattcctagagatcggaatggcgaactttctcaacaaacactaccagcatataagcgaaccaatgattcattagaaacgaccattatccaattatttcaaaaaggcattactatggctgaaatctccaaattaattgaaaaaatgtatggtcaccactatacgccacaaacaatctccaacatgagtaaattggtggctgaagatgttttagcttttaaagaaagaacgttagaagccaattattccgttatatttatggatgcgacgcatatccctgtgaagcgacagactgtttcgaaggaagcagtgtatattacgattggtattcgtttggatggaaccaaagaagttcttgggtttactattgccccaactgagtctgcttatatttggaaagaagttcttcaagatcttagaaaacgtgggttagaagaagttttattagtagtgacagacggattaagcggtattgaagaaagtatccatagtgtgtatccgaatgcccaatttcaacaatgttgtgtgcatgtatctagaaatatcgctcataaagttcgtgttcgagatcgaaaagaaatttgtgaggatttcaaattggtttaccaagcgaattcaaaagaagaggcattggatcacatcgactttatgattaggaaatggaaaaagcagtatccaagagtcgtcaatttactcttgaatcctgccctattaaccttttataatttccctcacgccatcagacgaacaatttattcgacgaacctgattgaaggctttaataagcagctaaaacgatatactcgaagaaaagaacaattccctaatgaagaatctctagagagattcttcatttctcaatttaatcaatataaccaaaaatttttaggtagaattcacaagggatttaaagaaattcaggatacattagagtcgatgatttaa

SEQ ID NO: 3122 - DNA, 873 bp, Enterococcus faecalis
tctcacttctttatggaggtgataattatgaacgttggttttattggagccggcaaggtaggttgttcattcgggaagtatttccaggaacataaaatacaagtaacaggattttatagtaaaagcgaagactcgtcattagcagcttcgaattttacatctagtaaacaatatttaaacttaagagaattagtagatgaaaatgatactattttcattacgactcctgatggtcaaattcaggaggtatggcaagaaattaaaaattatcaaatcaaaaacaaattaatctgccattgcagtggtgcaatatcttcagatatcttttcaaatatacaggactatggtgcttatggctattctgtccatcctatgttttcaatatcagataaatataattcatacaaaaaattaaaaaaatcttttataacaattgaaggcgatgaaaaatatgcaaagtttttatgtgatttcttcaaaaagttaggtaatagtactgtaattgtatctaaggagaataaatctctttatcatgccgcatcagtagtatctagtaaccttgtgctaggacttattaatacaagcgttacatatctaattcaatgtggatttactgaaaaaatggcaattgaagctttatatccattaattgaatttaatattagaaatataaaagaaaaaggaattatagaaagtttgacaggaccagttgaacgttgtgatatttcaacaattaaaggtcactgtgaagttttatcagatgaagacagagctttatatatgctattatcaaaaaatgtattagagatagctatgttaaaaaatattaatagagattatagtgaattagaaaagtatttaggagagagttag

SEQ ID NO: 3123 - DNA, 828 bp, Enterococcus faecalis
atgaaaaatacagcagttacatttaaagaatctaaattaagaaatgaaaaattaacaatgcttacagcttatgactattcaacagcaaaaataattgatgaagctgggataaatggaatattagtaggagattctcttggtatggtatgtctaggacatgaagatacactttcagtaacaatggaagacatgattcatcatactagagcagttacaagaggagctaagaacactttagttgttgcagatatgccatttatgtcttatcaaacttcagtatatgattcagtagttaatgcaggaagattaataaaagaaggacgagctcaggttgttaaattagaaggagggatagaagtatgcgataaaatagaggctatagtaaaggcttctatacctgttatggcgcatataggtttaacacctcaatctgttaatgcatttggaggatttaaggtacaaggaaaggacaaggaagctgctaaagaattaataagagctgctaaagctgtagaaaaagcaggagcattcgctgtagtgttagaatgtgttccaactaagcttgcagagttaatttctaaagagatatcaatacctacaattggtattggagcaggtgcagggtgtgatggacaaattcttgtatatcaagatatgttggggatgtatagtgattttacccctaaatttgtgaagaaatatgctaatttatcagaagagatgaataaagcatttacaaaatatatagaggaagtaaaagatggagtttttccaggtccagaacatgggtttaaaataagtgatgatgttttagaaaaattatattaa

SEQ ID NO: 3124 - DNA, 885 bp, Enterococcus faecalis
tgttttagaaaaattatattaaaagggtcaagaaatatggttatatttaaaacagtaaatgatgttagaagtcaagtaaaagagtggaaaaaacaaggcttaaaggtaggattagttcctactatgggatatttacatgaaggtcatgaaagtttaattagaaaagcatcaaaagaaaatgataaagttgttgtaagtatctttgtaaatccaactcagtttgggaaaaatgaagatttaggtagttatccaagagacttagaaagagatatagaagtatgcacaagaggtagagcaacagcaatatttaatcctgaagttgaagagatgtattgtgacaatgcaagtacttttgttaatataactggattaacagaaggtttatgtggagctagtaggccaatacattttagaggggtttgcactgttgtaagtaaattatttaacataataccagcagatagagcttattttggagaaaaggatgcacaacagttagctgtaattaaaagaatggttagggaccttaatattgatatagacgttgtagggtgtccaattataagggaagaggatggactagctaaaagttctagaaacacatacttaagtttagaggaaagatcttcagctactattttaaataaatctttaactttagctaaggaagccttaaataatggagagagagatagcttaaaaataattgagataataagtaaaaatataaatacttgtaatttggcaaagattgattatgtagaagttgttgattctttatcattacaaagagtaaattatattgaaaaatcagttttagttgcaatagcagtatttataggaaaaacaagattaatagataattttacatttgaattacaatag

SEQ ID NO: 3125 - DNA, 408 bp, Enterococcus faecalis
ggggctataataatgaaagttacaatgttaaaaggaaaaatacatagagctaaagttgaacaagctgagttagattatgtaggaagtattactgttgatatggatttattagaagcagcaggaatatatgaatatgaaaaagtacaaatagttgatgttaataatggaaatagatttgaaacttatacaatagctggagagagaggaacagggatgatttgcttgaatggagctgcagctagatgtgtatcaactggagataaaataattttaatggcatattgtgaattaaatgaaaatgaggttaaggatcatagacctaaggttgtttttgtcgatgataataataaagttgaaagagtaacatcatatgaaaaacatggaaggttatcagatataattctttag

SEQ ID NO: 3126 - DNA, 222 bp, Enterococcus faecalis
gacaatcggaatagtatacggaaagaagttctgcaccttataaaatttgtcaaaaaaactgttgccattccattaacgagttctgttctttttcatacagatcaagggtctcaatatacctcttttgaatttagaaaatttatagaggatcatccgattgtccactcactttcaaaaccaggttatccgtgggataacgccgttaccgaagcttttttttaa

SEQ ID NO: 3127 - DNA, 918 bp, Enterococcus faecalis
tattttaaagcaagcagcgctgatattcggacgaagagacaagtaatcgatgcgaataagcatctttaccctatatcagcgatgtgcagaatattaggtctatcacgtcagtcctattattatcaatcaaaaccaaagaaagacgaatcagaacttgaagaagtagtcgctgaagaatttatcctcagccgaaaggcctacggctcaagaaaaataaaaaaagccttatcaaaacgaggcattcagatcagccgacgaaaaattagtagaatcatgaaaaatagaggattaaaatcgagctatactgttgcttattttaaagtacatcattctacttgcaatgaagccaaaacgacaaacgtattgaatcgtaaattcttaagagacaacccattagaagcgatcgtaacagacttgacttatgtacgagtcgggaaaaaatggaattatgtctgtttcattttggatctgttcaatcgagaaattctcggctattcttgtggagaacataaagatgccgttctagtaaaaaaagcatttagccgtatcagacaacctctgacagaggttgagatttttcatactgatcgtggaaaagagtttgataaccaagctattgatgaattattaacgacttttgacatcaatcgatcattgagtcataaaggctgtccttttgataatgccgtagctgaatcaacttataagtcgttgaaagtagaatttgtctatcaatacacatttgaaaccttacaacaattggatttggagttatttgactatgtcaattggtggaaccaccttcggttgcacggtacacttggctacgagacaccggttggttaccgtaaccagagattggcgcagcgaatccttgataatgagctcggatgtgctaacgctagcgaggcagtctaa

SEQ ID NO: 3128 - DNA, 348 bp, Enterococcus faecalis
ctagacagaaaaattaaggtgtgtagactagaagaaaacataccaggaggaatttttatatctaagagaacacgaagaactttttcacaagaattcaagcaacaaatagtcaatatttacttagctggaaagccacgtgtagaaatcattcgagaatatgaactaacggcttcagcatttgacaaatgggtaaagcaatctaaaacgagtggttcattcaaagaaaaagataatcttacgcctgaacaaaaagaattgttagaactacgtaaaagaaaccagcaattagaaatggaaaatgatattttaaagcaagcagcgctgatattcggacgaagagacaagtaa

SEQ ID NO: 3129 - DNA, 309 bp, Enterococcus faecalis
aattattttaatataagtacttcagatttaataaaggagaaatatctaatgaaaaaaattgatttaataaatatgataggtatgtcaatagggatattagtaaatatagtaatgttcacagattggctccgggtgttattttctaatcttattcccatacggtatataggcatttgtggaattatactttcaatattagaactttttgaaagcagaaatacaatgaatagaatatttgcttgtattatattaattgttaatctattgcctatggtctattttacttttttatattttgcactgggatga

SEQ ID NO: 3130 - DNA, 1365 bp, Enterococcus faecalis
ccattaatcctatgcaggtggttgcttcgcggtttttctttttctacaataagatcaagaggtgattacacgatggctagaaagaaaagaaatcctgatgccgaaaagttagctgaatccattctgaatgcctatcaacctgaatctgtcgatgacatgcaagatgctttgaaagatgtgtttgggcccctttttgaaaaaatgcttcaaggagaattgaataatcatttaggttatgatgcccattctaaagagcctaaggaacacgataaccgtcgaaatggctatggaactaaaacgcttaaaaccagttttggtgaagtagctattgatgttcctagagaccgggaagcttcctttgaaccagagttaattcctaagagaaaacgagatgtctccgacatcgaagggaaggttctttccatgtatgcacgaggaatgagtcaacgagatattgccgcaaccgtcgaagctatctatggctttgatatttcccatgaaatgatttcagatatcactgacgctgtccttcctgaattggaagaatggcaagcccgccccctagcaaagtgttatgcctttctattcgttgattgtatgtatgttactttacgagaaaattatgaagccaaagaatatgctgtatacaccattcttggctatgatctcaaaggaaataaggagattttaggattatggttaaatcaaacagaatctaaaaatcgctggatgcaagtatttgatgaactgaaagcacgtggtgtcgaagatgtctttttcatttcgatggacggtgtttctggcctcgaagaaggcgcaaaagcgatctttccatcggtaattgttcagcgctgtattgttcatcttgttcgaaatgcattgcgctatattccaagtaaggactataaggaagtctgccgagatatgaaaaagttctacggtgcttcttctctaaacgctgcacatgctgcttttggcagttttcaaaatcggtggtctcattattctggtgctgtagatgtctggaaacggaactttgcacatgttgaacaactatttgattatggtagtgccattcgaaaaattatgtacactaccaatgcggttgaaagtgtccactccagcttcagaaaagtcacaaaaaaaggagcgttctctaatgagaatgcactcctaaaactactttatttacgcacgaaagaattacacgcgaagtggtcaggtggtcgaattcaaaactgggctatggtgcttaagcagttaatgatcaacgagaccttctcctctagaatgaaaagtatgcgatttaccttccgtaacaacggtaggtttattcaactatgtgtccgatcaaaatttatctga

SEQ ID NO: 3131 - DNA, 1302 bp, Enterococcus faecalis
atagcgctttctaaatattttttgaaggagtcaatcataatgagtgagaaaataatgaatacaatccagaataaagtttcacctatagttactaagattgggaatcaacgatttttagtagcgttaagagattcatttatgggtacgatgcctgtaataatgacaggttcggttgcaatattattaaatgcttttttagtagattttcctatgcaatttggctatgagaagattactgattattttcaatggttagtagatataaataatttgatatcaaaaggaagcatttctattgtttccttactgtttatttattgtttaggagtaaatattgctaaaatatataaaacagatactttgtcttcaggactagtcgccctgtcttcatttattatttctataagtaattctatgacttcaacttataatttatcgaataataataatattgacttaacaacactatttactgatgttgagggaataacagttacaggtaacagtttaaatgtgactatatcaggattgttgcctggtacacaaattaattcaaatggttattttaccgcaataatcataggttttttatcttcaattattttttgtaaactcatgaataaaaattggacaattaaattacctgatacagttcctccagctatcgctaaaccatttttatcaattattccggctttagtttctctttatataattgctattttgacatttttgttaaatagaattacaggaaaaattttaacagatgtaatttacgaaatattacaacgccctatgttaggactttcccaaagtttttttgttgttatattagttgctttcttagttcaatttttctggtttttcggtattcatggtggaaatgttatggcacctattatggaaggtgtatttggagtagcgcttttagttaatttagaagcttatcaaaacaatgaaactattccttatgtttggacaagtgtatcatacggatcgtttgtctggtatgcaactttaggtttattaattgcgattttttgggtatcaaaaaatagtcattataaagaagttgcaaaacttggaattatgcctgttttgtttaatattggtgaaccagtaatgtatggattacctactgtattaaatcctattttatttattccatttttgttatgtcctgctgtaatgtctagtgtggcttatttagtaacagattttaagttgggtttctccagtaacacaaaatgtaacttgggtaataccaccggtcttatatggattcttttcgacaggatttga

SEQ ID NO: 3132 - DNA, 183 bp, Enterococcus faecalis
cagattttaagttgggtttctccagtaacacaaaatgtaacttgggtaataccaccggtcttatatggattcttttcgacaggatttgattggagatcaattattttatcaattattaatttatttttaaccacgttaatttatttgccatttgttagaatggcaaataagaaaattggataa

SEQ ID NO: 3133 - DNA, 1857 bp, Enterococcus faecalis
tatattaaggaaggagaagacatgcaaacgtttgagataaaagaagaatttttggtagatggaaaaccaactaaattgattagtggcgcaatccattattttcgcatgacaccggcacaatgggaagatagtttatacaatttgaaagcactgggtgcgaataccatagagacttatattccttggaatctgcatgagccagtggaaggcgtctatgactttgagggcatgaaagacatcgttgcttttgtgtcattggcgcaagaacttggcttgatggtgattttgcggccatctgtctatatttgtgcggaatgggaattcggcgggctacctgcttggttgctgaaagagcacgtgcgattgcgttcaactgatccacgatttattgcaaaagtccgtacttatttcagtgtgcttttaccaaaattagttcctttgcaagtgacacatggcggaccagtcatcatgatgcaagtcgaaaatgaatatggttcttatggcatggaaaaagagtatttgcggcaaacaaaacaggtgatggaagaatttggcatcgatgttccgttatttacgtcagatggtgcttgggaagaagtgctggatgtgggcacactgattgaagaggatgttttcgtgacaggaaatttcggcagtcattccaaagagaacgctacagtgatgaaagcatttatggcaaaacacgacaaaaagtggccgattatgtgcatggaatactgggacggttggttcaatcgttggggagaaccgattatcaagcgtgatggccaagatttagctaatgaagtcaaggatatgctagccttaggttcattgaatctctatatgttccatggcggaaccaattttggtttttataatggttgttctgctcgtggtgtgttggatttgccacaagtgactagctatgactacgatgcgctattgacggaagctggcgagccgactgagaaatacttccatgtacaaagagccattaaagaagtatgtcctgaagtgtggcaagccgagccccgcaggaaaacatttggttctttaggaacattccctgtgcaaaacagcgtctcactgttggcggtaaaagaccagatgatgacggcccaagaaacgatgtatccaataacgatggaagaagcagaatctggttatgggtatatgctttattcagtaaacttaaaaaattatcatcacgaaaataagctcaaagttgtggaggccagtgaccgattgcatctttttgcagacggtagcctgcagacaattcaatatcaagaaaaccttagggaagaagtgatgatcaagggtacgccagagaaagaatggattgaactagatgttttagtagagaacttaggccgagtgaactatggctttaaattgaatgggccgacacaagtgaaaggcattcgtgggggaatcatgcaagacatccattttcatcaaggctatcggcaatatgcattgacattgtcagcagatcaactcaaaaaaatcgattatactgccggtaaaaatccggcccagccttctttttatcaagctgaattcacattgactgacctcgcggatacatttatcgattgccgcagctatggcaaaggggtggtcatcgtcaacggtatcaatttaggtcgttactggcaaagaggaccgattcattccttgtattgtccgaaagagtttttgaagaaaggcacaaatgagatcgtgatttttgaaacggaagggatagaaattaatgagctcatcttttgtggacaaccgatagtcaagaaacttttgactaatgatttttctgaaataggttcaaatatccataaccatatagacagctag

SEQ ID NO: 3134 - DNA, 417 bp, Enterococcus faecalis
aggagcatattgatcgtgcaacaaaacaacaatgagatatctacacaacaccaatttgatgcctactgtaaaaaagtattacgcaatgaagctaagtctattcgaaaacgaaacgataaaataaaagaaaatgaggaaccattaaatgatttaaatgaaggtaagtattcacaaactcatttagatgagcaagatgtttatttcttatttggaatggagatattaatttcagatcagaagttatcagcagcaattgatcagttatcggatacaaggaaaaagattgttttactttattattttgcaggttttaatgatactgagatcggtaaaattttcaacatgagtacaagtggtatctggtatcaacgaacgaaagcggttgaacaattgaaaatggaatatggcttatggtag

SEQ ID NO: 3135 - DNA, 270 bp, Enterococcus faecalis
acaattgaaaatggaatatggcttatggtagacaaacaaaggaaccaacattacccattagttcctatatctattatcttatctgctttgaaagaagacccaatttcaatcaaaatgatacttaaacattaccacggttatataactaagttatgtttaaaaaatggatttaatgaggtggggcaatttattacctatgtagatgaatatatgctaagacagctagaaattaaattgatagaggctatattgaaatttaaagttaactaa

SEQ ID NO: 3136 - DNA, 381 bp, Enterococcus faecalis
aattcctatgtacttttgacaaaagtggctgatagattaattattgttaatagaaaggaagagacaatcatgtcgaagaataacaataaaagtaattcatcagagttagaaaaatatttgtttcatccagaaaagatagaggattctaataataaaatgaagaggataaatcaactaccattagttttaacgaataaagatttaaaagaacaatttcaaataagtgatagtactttaaaccgtcttataaaattaggtgattttccaagctgctggtttggcattagaggacattaccttagagatgacattttagaatgggtaaaaaaaggaaatgaagaatatttttgcgatcagtttcgtttattacgattattgtag

SEQ ID NO: 3137 - DNA, 1179 bp, Enterococcus faecalis
atggaaaatatgagtcgttttaaaaaacatattactgcaacgggaaaaattacttggtactttcaggcttttcgaactacgagacgaggttttaattctaaacgtgaagctcagcttgcttatcttgaaatggaaaaacaacacagaaataagcaaaaaaggcttgctagtaatgataaatttagtgttgttagtcaaaagtggtttgaatattatcgatcactaaacgaacaaaaggtggcaacgtatgataaacgagaagaacaggtgaaaatacttaatcgatggattggtggtaaaaaattaagtagtttatcatcagaagaactacaaaaattccttttcattttaaaagaaaagggaattgatggcgttaatgttggttatgctaaaaatagtttacaatctcttgttcaggttctaaatatggtttttaattattgtaagaaaaagaatttgataaatgagaatccaatgaagtttgttaaaatgcctaaatatcagttatctcttaaagatttaaaagagtctgtcaacagtttagaagataagtttttaacagtggatgaattacgagcttttttaaactatgggatagtttatgaagagttacccatgtctgttctttttcatgttttgttttatactgggtgtcgtgtgagtgaagcgcttgctttacagcctcaagatatagattttgaacgaaatgaaattttgttttataaacagacagcagtaaaaggaaaaagtaaagattttcgaatagaaactacaaaaactgttagttctgcaagaagagtacccgtcacaccattagtaatggagaaattacaagaattaattgatgtattaaataaaacaaaaagaaatagtaattttgttgtagatgaaacttatttatttgtttatctcgatcctggaaagcgtggagttccttatcgtcgtgaatatgtaaacgatcatgttaaacgttgtgtagagcgatgtggaattaacaaagattttcacacccatttggctcgtcatactatggctagtttagtggcagagtattgcagttgggatgttttaaaggatcgtttaggtcatacagacagtacaacctcaaaaatatatcgccatttaacatcaactgaaaagttaaagcctctgactgcttttaattctttagaaggttaa

SEQ ID NO: 3138 - DNA, 183 bp, Enterococcus faecalis
aatggaataatttttatgtttgctatagttttgagggtagtgattcttttaataactgtcaagatagtagattactttgcgaatactcctgaagtacaaatacagagaaaacttcctgagtttgaaaaagtgccaccttatgatccaagagataattcatttctgatacaaattattctttaa

SEQ ID NO: 3139 - DNA, 258 bp, Enterococcus faecalis
ttcatttctgatacaaattattctttaagtaatacaacgactaagtttatttaccaaaccattacaataagaaaaggtgcaagtatacctaattactattggtatgatgatggtcaatttagaggaaatctaaaacttcaacgttggcaagactacggagaagatccaaacataagaggatatatctgtacttatggaggctacgttaccaatggttcaagcccggcgcaaagaattgtcgatattaatgaacaatag

SEQ ID NO: 3140 - DNA, 429 bp, Enterococcus faecalis
gagggagtaatcatgaaaaaaatcgggtattttagttgtattatttttttcatgtttttggtaggttgtagtaataacaaaaaagaaaacggcaatcttttgaatgccagttcgtttcctttaatactcaccacgattattgaaaaagaagaagacctaacgaaaggttcaatttttttcaacaaggataaaaccatgacgcttgaaaaagaatatttagttaatcccaataatgaagacacaaaaaaaacaagtagaacagaaaaaaaggtatataaaaatattaaaatacaagaaaataaagagagctatgaaattataggtcaattggacaaaaaaacgaaaaaaatagagtttaaaaaagttgatgaaggtaaacgtatatctgatgcagaaggtaatgtgtatggtgattttggtggtaaatag

SEQ ID NO: 3141 - DNA, 447 bp, Enterococcus faecalis
gctttcataattcaactcatgattatgcaacgttatatccaaacgggattgttcaccactaaagaaatacaagcggaaatagcaaccatggagaactctcttaaaaaaatattgggcgaaacatttcaaacaactctctggcgatacccaggaggtcatatgtcatggggaggtacagaaaaatctgatgaattattcaaacaacttggcatccattggattgactggaatgcgatggttggagatgcggagccgttagacagacagcctactacagtcgcagaaatgctcgctttccatcaacattcacttgaggtttatccggattataatattagagtagtcttaatgcatgattcagtagataaggaattaacaaaacaagcattgccacaattaatagagttttatcaagcaaatggttatcaatttggtgtcttatattag

SEQ ID NO: 3142 - DNA, 411 bp, Enterococcus faecalis
ccaaagaggagtgaaagtatgcgacataagaaaagaaaattcaaaataaacgggtatgtattatttagtgcgttaatcctcattgttcttgttttcattcaaacgttcctattaactcaacccaagataacaagtaaaaatgatgatactacgcagacatcgactaaaaattcaactgcaaaaaaagattccccgaccaagttagaaaaggaatcaacacacatgactatttcatcaaaaaaatatgcttactcagcagacaaaatcagaaaatatataactggagaagaaccttacaaaggtgaaaaattagtattcttaacctttgatgatggcgttaataatcaaataaccccacaagtcctagatacattaaaaaagtataacgtccacgcaatttttttcttgtag

SEQ ID NO: 3143 - DNA, 594 bp, Enterococcus faecalis
gaaagggctgtggaaatggatcatcaacaggtgttgaaaaatgaaattaaacaatatttagtgagtaaaaactgtgagaagacgtattatcattgtatggaagttggagagtatgcctatcaactcggtgaaaaatatttaactagtccagaaaaagtaagtattgcaggatatttacatgatatctctgcggtttatccaaataatcagagaattagtgtcgcacaaaaatatgggattgaattaaacgaaacagaaatggcctttccaatgataattcatcaaaaaatttctaagtctattgcgaaaatggattttggtattgaagacaatgaaattttatcagctattgaatgccatacaacattgaagaaaaactattcggacatagatttagttttgtttgtcgctgataaaataaaatgggatcaagaagggaagccaccatacttagatggtttattacaagctttaaattgttctttagaaaatgccgcatatttctatatcgattatattttgaaacacgatattaaagtcgtgcatccttggttatgggatgcttacaatcaacttaatttgataattaaataa

SEQ ID NO: 3144 - DNA, 477 bp, Enterococcus faecalis
aagcacaacagtagccaagcgagtcaaatgagcacggagtcaaaatctagtacaactcaaagtaattcttctgcttctactaaaactgaaaatcagttgtggtctgtgcaaaaaaaagcacagttacaacaatttatggctgactgggggcaacggatgaaccaaacgtataaagaatatataccaggaaatttaatcaattttaatggcgtccaagcgcctgatggtctagtaggaaatgttactatgcaaccagcgattggtcagcatcccatttatttagaatggtctgaaaatggacaagtgaaggatggatatgcgttagttgctgtttactctgatgcagaaacgcaaccagaaatgcaaaagcatttgtatttattcaccatcgttaacaatcagcccttagttttagtgacgatgccaaatcaaggacatccttatgatatgccatttatcggcccaaggttgggggaa

SEQ ID NO: 3145 - DNA, 441 bp, Enterococcus faecalis
tcaacaactgaattggtgagtacgaaaccagttgataatataaatactacgaaaagaagtgaagtaactgaaaaaagtagtactaaacctatgcagattaaagataaactagcagaagaaaaagtatctgatacttaccagttggtggaggactttggaaatacttatgcaaatttttctagtatcaatgatcgtaacgaaaaattaaagaaattaatgactgctgaatgtgtaaagaaaaatggtattgatgtgaaaactggcgcaaaattggaaagtaaaggtgaagtaagcgcaatatatcaaaatgacaaaaaggaatacgcagtcttacttgattgtgaacaaaacggaacaaaaacaagagtacttttactggcaaaagtgcaaggaaataaggtagcggaaatgacctataattcagtgaaacaagagtattaa

SEQ ID NO: 3146 - DNA, 225 bp, Enterococcus faecalis
ctagcatgtaatggttctaaattagataaaacaggtgaagaatttaaaaattctataatgaaagattcttcatatggtgatgaatattcagaagatggttttagttttttaatatataaagataaagacactaatcgttatttggctgatgtttgggttcctgttaaagatgaaactagcgcattggagtatttttattattatgacgaatcttcaccaagggat

SEQ ID NO: 3147 - DNA, 183 bp, Enterococcus faecalis
ccgtccggtcgtaggttcgagtcctacaaggtccattgtgacgttgtttatagttttatttttatcatggaggattacccaagtccggctgaagggaacggtcttgaaaaccgtcaggcgggtaaaaccgtgcaagggttcgaatcccttatcctcctttgttcaggaactaaatttccttga

SEQ ID NO: 3148 - DNA, 249 bp, Enterococcus faecalis
agattcaactcaataagaaacaacacccagtgtggtggcgatagcgagaaggatacacctgttcccatgccgaacacagaagttaagcttcttagcgccgattgtagtgaagggtttccctttgtgagagtaggacgtcgccacgcgaattgttgtttttggaggtttagctcagctgggagagcacctgccttacaagcagggggtcagcggttcgatcccgttaacctccattttttgagccgttag

SEQ ID NO: 3149 - DNA, 204 bp, Enterococcus faecalis
ccaagttgcttttacttatccattctttggttaagtcctcgaccgattagtattggtccgctccaactatcactagccttccacttccaacctatctacctaatcatctctcaggggtcttactttcttaaagaaatgggaaatctcatcttgaggtgggcttcacacttagatgctttcagcgtttatcccttccctacatag

SEQ ID NO: 3150 - DNA, 372 bp, Enterococcus faecalis
aaggtaacggaggcgcccaaaggttccctcagaatggttggaaatcattcgaagagtgtaaaggcagaagggagcttgactgcgagacctacaagtcgagcagggacgaaagtcgggcttagtgatccggtggttccgcatggaagggccatcgctcaacggataaaagctaccctggggataacaggcttatctcccccaagagtccacatcgacggggaggtttggcacctcgatgtcggctcgtcgcatcctggggctgtagtcggtcccaagggttgggctgttcgcccattaaagcggcacgcgagctgggttcagaacgtcgtgagacagttcggtccctatccgtcgcgggcgttggaaatttga

SEQ ID NO: 3151 - DNA, 252 bp, Enterococcus faecalis
aggtgcggtaaaacgcactggaggaccgaacccacgtacgttgaaaagtgcggggatgaggtgtgggtagcggagaaattccaaacgaacttggagatagctggttctctccgaaatagctttagggctagcctcggaattgagaatgatggaggtagagcactgtttggactaggggcccatctcgggttaccgaattcagataaactccgaatgccattcatttatatccgggagtcagactgcgagtga

SEQ ID NO: 3152 - DNA, 1317 bp, Enterococcus faecalis
  misc_feature (1316)..(1316): Nucleotide 1316 is "n" wherein "n" = any nucleotide.
cttggggacgtatcaatgaagaaagaatcaatgtcacgtatcgaaagaaggaaagcacaacaaagaaagaaaacgccagtacaatggaagaagagcactactttattcagctcggcgttaattgtttcatctgtaggaacgcccgttgcgttactaccagtgactgctgaggcaacagaagagcagccaacaaatgcggaagttgcccaagcacctactacggaaactggcttagtagagacaccaacaacagaaactacgccaggaactacggaacaaccgacaacggattcgtcaacaacgactgaatcgacaactgaatcatcaaaagaaacaccaacaacaccaagtaccgagcaaccaacagctgattcaactacacctgtggaatcaggaacgactgattcttcagtagcagaaattacgccagtagctccttcagcaaccgagtctgaagcagcgcctgcggttacacccgatgatgaagtaaaagtaccagaagctagagtagcttctgcgcaaactttttcagcgttatcaccgacgcaaagtccttcagaatttattgccgagttagctcgttgtgcacaacctattgcgcaagccaatgatttatatgcatcagtgatgatggctcaagcaatcgttgaaagtggttggggagcaagtacgctatctaaggcaccaaactataacttatttgggattaaaggcagctacaatggacaatctgtctatatggatacatgggaatatttaaacggcaaatggttagtgaaaaaagaacctttccgtaaatatccttcttacatggaatcattccaagataatgcgcacgtgctaaaaacaacttctttccaagcgggcgtttactattatgctggggcttggaaaagcaatacaagctcgtaccgcgatgcaactgcttggttaacaggtcgttatgcgacagatcctagctacaatgctaaattaaataatgtcattaccgcatataacttaactcaatatgatacaccatcttctggtggaaatactgggggcggaacagttaatccaggaacaggcggctcgaacaatcaatcaggaacgaacacgtactatactgtaaaatcaggagataccttgaataaaattgccgcgcaatatggtgtgagcgttgctaatttacgctcatggaacggcatctctggcgatttaattttcgttggtcaaaaacttatcctgaaaaaaggtgcttcaagtaacactggtggctcaggcacggtgggttctaaccaaaatccatcagggaaggacaccttactatacggttna

SEQ ID NO: 3153 - DNA, 1203 bp, Enterococcus faecalis; identical to SEQ ID NO: 2422

SEQ ID NO: 3154 - DNA, 717 bp, Enterococcus faecalis
atctatgaagaacgagagggaacagtcatgaaaaatcagtttaaaggaaaacagtatgactatcgaattattatagaagccatcgggttatactatcacttttctttgagctatcgtgattgtgccaaaatcatgcgtaaatttagtgttggcgtggatcataccacaatttaccgctggaacaaagagtatggaaaaatcctttatcatctatggaataaacgtagatccttatcaaaatcctggcggattgatgagacctatgtcaaagtgaaaggtcaagatcggtatctttatcgagccattgattcgaagggcaatacgttagatatgtggctacgaaaccatcgtgatactgtctctactaaagcctttttcaagcgtctaatcagagtctacggtcaaccacgttccattgtaacagataaatatgctccttcattaaaagcgatcaaagagctgaaagaagaaggaattctataccaaaaagtgaagcattggaagtcgaaatacctcaataatattcttgaacaggatcaccgacagttgaaggggaagcttccttatggcaacaactttcagtccacctatacagctgcagtaacgattaaaggaatcgaagttgtttctgctttatacaaagaaagtcgaagagaaattggtctcttcgacttttccccgtgggaagaaattgatactctattcaaatcagcttaa

SEQ ID NO: 3155 - DNA, 249 bp, Enterococcus faecalis
aaagccttgtattgcaagcaatacaaggctttttatgctataatagaattgatagtaaagtttaatgacggtggctatccaatcgaaagtgaggtggtgcgtatgaacgtacttccaaaatctatagaaaggagaagccttttgtccgtttcggaaagtttgcaactaatgcttgcgtttggtgggtttacattgaccctaatcacaaccattgttgccattctgaactataaagacaaaaagaaataa

SEQ ID NO: 3156 - DNA, 192 bp, Enterococcus faecalis
ataacttataaaaactctgccaccgtctttagcggtgctatcaatgagggcgtattaccagtacgtcctctttacataattattataccacattttgtgcgaaaaggtaggcgaatgcctaccttttttcatgcgcgcctaaacgacggtggcggtgggagtgtggcgcgcatgaaaaaacagatctattga

SEQ ID NO: 3157 - DNA, 501 bp, Enterococcus faecalis
aaaatcagaaagaaggaaacaatcatgattcaattatcagctgtcgggcgtttaacaaaaggagccgaactacgtaccaccactaacggaaagagtgtcgcaaacgttacattggcttgtaagcgaaaaagaccagacactaacggaaatgtgccgaccacatttattcaatgtgttttatggggcaaacccgcccaagtctttgcaaaatacacgcaaaaaggcgcattagttggtgtaaatggggaactacaaactcgttcgtatgatgaccaacaaggcgttacgcattatgtgacagaattagttgtagaagattttgagtttttagagtccaaagaaaccgtacaaaaacgagaagaaaaacaacacgcagtcccacaaggacaatcaaccccaacggttaatgaacaaccagcaatgaatcaagcaccaacacaacaaaatgtctaccaacaaccgtccatgaacgggttgtctgaatatggctacaatcaatag

SEQ ID NO: 3158 - DNA, 1326 bp, Enterococcus faecalis
aaaacaccaaaaccattaaccccacccaaagccttttttaactggtgtactgcacaaataccaacgtatgaatggcaaaacaaaaaggagacaattcttgcgagttctcgcaagaattgccccaccataaaaaaacgattaacgaaatactcacgattatcgtttccaacgaaattttactcctttggaatcattctcgttcgtgcaaaacgaattgaaattcaaacccatagttattggcagacgattacagatggaacagaaacccttatctatgagccgtcaaaccttgaacggttttcaaacgatacccatgttaaagcccattatgagaacggacattggcatgagggcttgttagcaaattatggttacatgagtagtgcttacacgaacactgttttttatccaaataactggcaagaaaatctaacgaccaattcggaattgaaatacctcaagttacctgtaattagtcgccaagaactggcgcatatttataaataccgcaatgaaattgagtttttgcaaaagataggcgcaactactctagcaaacgaaatactttttaatgacgaacgaaatgtttttggcacatggcataaaaaagtagatatgcgaattattacgaagaactggctaaaagccaataaacagcgactaaaaaccaccaacccaacgtttcatatgcttatgctagaaaaaactttgaaggagcgaaaagttgcgagaatagaaggtattgaaaattatttacattattcacaaattaagcaattacctaaagaagtgaacttaaccaagtttcaacattggtttatgcgaaaaggcgagcgttttagctactatatggactatttacacatgctagaggaactgaatacaccatttactgatgatgtgcttttccctaaaaacttgcaactagcccatgacaatgccacaaatacgttgaatttacttgaaagagagcttgaagaacagcaataccaagaacgaaaaaaacaactgaaagcattagaaaccgaaattgacgacttactttttctcgccccacattcgttgcaagaaattgtggaggaagggcaggtattgcaccattgtgttggtagccaacattaccttgaacaacatacaaaaggaaaaacaacgattgtttttatccgaagaaaagaagaaccagataaaccatattttaccttagaataccgtgaaaaaagagtgatacaagtgcaagggaaatacaatcggggacacgtaccagaagaagtagaagaagccattgaacaatggcaaatagagattgaaaaagccatgccctcataa

SEQ ID NO: 3159 - DNA, 765 bp, Enterococcus faecalis
ggaaacgttatggactttcaaaatatacaaactgtaaaagaattaagatacgcactgaaacaatacaaacaaacactcgcaactacgatttttgatgatacacaaggctatatcagtgtcgcctttaaaaaagaagtgatagaaaaagacggaaaaaacgttcagtttttatgtttttatcctaattatgaggtcgctctttatccagtcgaaacgttactggcttaccttgaaaagttacctgaacaagcaatcgttacgattaaagaccatgacggtaactactcgtcactttttctaacaattgacgaaacgatagaccaaggaaacaactaccaatggctagtgattagcgacaaaaattcttacgaacgatttttctttacagctcaagaaagcacgcaagaacaagcttttgagaaaatgttaaaagaactagaaaccgaccatgacagtacactagaagttgttcataactggttatgccgacaaacagacgaagcgctttttctaggtattctcaaagaagatagaacgttaaaaggtgctatgacttactgcataggaaaagcccaagaacaatccaaagaccaatcaagcgccatggtggcggacgaagtggttttcagttggataaaagagtatttcttattagagaaattaccagaaaccaaagcagttggtaaagtaacgaccaaaaaatcagaaacaaaacctgaaagaaaagaggtggacgaacaaattgatttgttcgagtgcgtatga

SEQ ID NO: 3160 - DNA, 273 bp, Enterococcus faecalis
aagtatatgagaaacagaattgaagaactaaaagaacaagcaagaacagaattaaacgaatggggattgattattgacggttgctttgagggcgactttgaaacatggataggctgttatgcacgaccaaaagacaaaccgacagcccttgacccaatcaacgaagaagaagccaaagaacaagcaaaatatgcggtcaatggtttccctcaagattttacagaatggtacgagtgggaaattaacaatggaaaacttaaaaatttactataa

SEQ ID NO: 3161 - DNA, 462 bp, Enterococcus faecalis
cgtgctgttcactgtttgttacagtaccatagccagtcgaaaaaacaagggtatataaacgagcaagctcgcccttgttttttctttatgtctacggtcctttctcggcacagcgaacgacacgaacacactggcgaaaatgaacaacctaatcgaaaacgaaaaaggggggagactacaccgtttgacgaaaagaaatttttgaccgtccagcttcacttcctcaaacgcctaacaaaaatggttgttcaaaaatcaaaaccgaaaggagctgaaaacatgaataccccacatttaacattcaaactggaacatgccagaaaagaacaccagaaattaagtgaagccattatcacaaatgacacagtgacgttactacttaattatggttgtttgaaaaatgcgaatgaccgtttatatcaactagaatattttctaaatcataaagaatggaaggactga

SEQ ID NO: 3162 - DNA, 195 bp, Enterococcus faecalis
cactgttctgacatcagaaaaggaatttttgaccggaatgcccttgaccttcaccaattcattggtgttcttctggaagaagaaaagctttttaatcatattctacgtgcttttgtatttcatgtaggcagctatttaaaatcatcgagtagtttattaatacttcgaatttttcaacataaatttcaggaatag

SEQ ID NO: 3163 - DNA, 504 bp, Enterococcus faecalis
ttgggagtgagttttatgagaagaatagagaaagaattcaacaaaaagctagccggttacgaaagagagttaaaaaaattaggctgtctggatgatgaaacaggacttattcccataagcaaaagacgatggcatgtcatttggtggcgacctgatacacctgcaaaaacaatcgtgagatcctatcgattaacgctagataatgaaaacttatgtattttaggagatgtagaaatcactatttatcatgatggaacatatggtatttctaaagaaggtgtccctatttttattaatgacttattgtctttaaaaaaattatttaccattttctatggaacaccttttaacttaaattttgaaaaaattcgctgtgttagttttaacaggtattgtattactattcctgaaatttatgttgaaaaattcgaagtattaataaactactcgatgattttaaatagctgcctacatgaaatacaaaagcacgtagaatatgattaa

SEQ ID NO: 3164 - DNA, 789 bp, Enterococcus faecalis
caaatgaatccattactttataactactttattgatgaaacgtcttctaaaaaaaatatgataaaagtattgagtttattacatgaattaagaatcatttctcgttcacaactgttattgttacttaacataaatgcgaatgttgctgaaagaacgatgaatcaaatattaaaatatcttaaagacaacaacttgattgacaaaataaaaaaaggtaatcaagcttgttatttcctgacaaaggaaggtcaccagagtattggtggctattatactttgccaaaggtaccagaatataatttgcaacaccatttacaaataaatgattatttaatcaaaatgctggaactgacaaaggatagaaaaaatttgaaatttgttctgtccgaacgaaggcaagtctttgaaaccaaagaccttgccaacaatcgaaatcgaaaaaaatattttgttgctgattttattttccgttttagaagtaaagaaaataaagaagtcaattggtcatttgaaattgagttgacgatgaaaactaggcggcgatatcgggagggcattttcccaaagtacattgcagaattaaaacgtctgccgtatgctcgactaatttatgtgacacctagtccgttaatcgaagaagaactagaacgatttaaagggtattttatacgaaaagaaggtgaagataatgcagaagtatttgatcgcctgcatattttttcagccgaagaatttgaacaggaaattaaacgattattagcagaagatcaatttattaattgggagtga

SEQ ID NO: 3165 - DNA, 351 bp, Enterococcus faecalis
attattgaaaaaaacggcctaaaggtatgcctaatagtatgcctaaaggtatgcttaaaagtatacctaaaggtgtgcctaattaagaaaggtggaacccgtcctcggcgcttggtatcaaaggctttctccgcctgcaaaattcctgaccattttagcgcaacgtggggtgaatacccctcttatacgctaaaatggtcaggaattttgcaactacgaaaaaaataccaagcgccgaggacaaacagaatagagaaaaaaataatgagtaaagtaataaaaaataaagaaaaaagtttaaaagatgaagttcaaaagatcaacccctaccccagtcttggggtctcataa

SEQ ID NO: 3166 - DNA, 2223 bp, Enterococcus faecalis
gacaacctcgtgcaaggaaataatttgtttaacaatggcttgctacaaccaaagaaaccgccaatagggcaagaacaacaaaaaatgactcgctaccaccaactccgactagtctttggattagtcggagttcttttatatccttttgcgattttaggcagtattccattattaattggtctagcggttgataaaaaagacaaggctgcaaatgtatttgatatggattatgagagttttttgaaacgaaatagtattgtttttcttagtttttcagctgtgttatttgtaataaatgtctttgcatttatcctctggattcccagagggtatctgtctgcgtatcttcttttccccttaaatcttcttcatacagcactgcgttttaattgggagacaatagtcgctttacttattgggtcaagtggaatgggagccatttttttggcattttcttcatttgtggcaaaacgaaaagtgatttcaaaggaagacgaacggaagaaaataaccgaatcaaaagcctacaaagaccgagaaaaaaataaatttgaagagtcgcaacgcttcacagatgaacaagaagaagcgtatgaagaagcagtagaaacggttgatattgacaagtataaagaattatccaatcaattattgcttggtacaagtgagttcgggttgccgtatatcatcaacttttcagagttcaatcagcatgttcttgttcccgcaacgacaggttcaggaaagacaacattactacaattaatcgttcaacacgccgtaaaattcaacctccctgtcattctcattgatgggaaaggcgcacgcgatacgctagaaagtatgcgagagattgcacggtattatgataaagaagtacatgccttcacagacgatggcgacatgcgatataacccagtagaacacggaaatgacgtgtcgattcgagataagttggtgtctttagcagaaacggaaagtgttttctattccagtgccgcgaaactattgttagaaaataccgtccaactgattgatttattttctacacgtgacgacgtgaatcgaaagttagaagacattcaaaaatacttattacctcggaatgttttgcgtttgtttgcggataaaatcgaagaaaaaaatccaacgctctatgagatagaagtagaagtcaagcaagcaaaaccaaaaaagaaatcaaagaaaaatgaaacgaaagtcccgattattgatgaagaaatggacgaagtaagtgaagcaaccacaccaacaaacgacgaggtaacgagtgaagatttagaactagaagaaggtgacattcctcctgtagagacagaaatcattgtcttaaacccaaacactttacagctagacgatttttattatttgttaaaacgaaatcttttttatttgtcaaaaaaagaaaaaataatgtttgaacgtttgtttacacgttacgaacacaaagactcacccttttatttatatgccacttctgaatcattacaaaccaatatcaacatgttattagacagtgagttaggccatttatttgatacaacaaatgcaaaaagtgttcttgatgtccaacaaattgtccgtgaccgttcacttgtttatgtgtcattcaatggattaatttacaaagaatatatccgtacattggcgcaaatgttagtcggtgatgtgaattattttgcgtccgaaatgtatcgaaaaaatgtcaaacgtgaagtcattgtgatctttgacgaacctgcttcttatttaaatgaacagtttattgatatggtaaacaaaggacgaggagcgggtgttcatggaattttcacaccgcaaacgatggcagatattgcgaagttaggtgacaaattaatggagcaattagtcggaaatgtaaacaccgtattcattggaaagactaacgaaaagggcgaagcggagtattggagtgaaacaatgggaacgtatcaagatatagatgtaacgtccgtcactgaacaagaagatggctattcagacgtcggaaaatcagattggtcaggtgatcgaggcacaaaacgcaacgtcgatcgcttcaaagtgaacccaaatgtaataaaaagtttgcgtacaggagagtttattatttacagaaccgcagaaaatgtgaatgtcccgccacagaaagtttatgtgcgaaatgcactagaatggttgagaactcacaatggaatttga

SEQ ID NO: 3167 - DNA, 909 bp, Enterococcus faecalis
cccttaccccggggtgagacacgcaggaaacaggcacaagaagaacgtaaagcagctattaaaaaacgtcaagaagaagcaaggaaacatggtaaagcagaaactggcttaaaacaacgaccattaaataaagaacaagaaaaacgtagtgcactacgccgtgagttgaagccaaggcctcaacataaagcgccaaatgctatcgaaaaagcacaagaaggattaagacaagcgcacgaaaaaggacgtatgcaagaacagaaatctgaagaacaactcaaacggcagcaacatgaatcagctcgtcaaaaagaatatgaaaaagatcgattgaaaaaacaggaatcacttaaaaaaattaatgatcaaagcgacgaatcaaccaatttaacagctttaagaaatcaaaatcggcgtactggacagcgaagtaaaaaacgcgaaacaggtcatcaaacacttatgaaacgacaaggagaaaaagtacttcaaccaacaaataaaccaaaagatatgaaaaaacaagtggttgctcgtagtccaagacgaacaggacaaccaacgactcgtcaaaatatccaaccaaaagtagcggcccaaatggtcaaacgaagtggtggaacgttgggaagtaatcctgcctatcgacgtccagaagtacgtaaaaaaatggatcaagtgaagcaagtaacgcaagttgatgtacctcaaacgcattctacaccacaacgtgtacaacccaaggtaaatgagccaatcacacgtatgaatagacataatacgccaataattaagaaagaaaagagaactaaacaatcaccagttgttcgcagagaacgcaagaaacctggtacacagaagataacaaacaaacctaaaggagtgagacaacctcgtgcaaggaaataa

SEQ ID NO: 3168 - DNA, 252 bp, Enterococcus faecalis
gggatgaaggtggataaaagaattgaagctgtgacaaaatttttagagtctttaggaactgtagaagattacaccgaggatgtagctgttaagtatagaaacttgattctgaaatcgtatgaattatacgagaataagtataacgatactgttgacgacagtttatgtatagaagtttggtcaaacgggacttatgttcttacaaacgaggattatcttatgccgccgagatcttcacctctggaagtcgcc

SEQ ID NO: 3169 - DNA, 471 bp, Enterococcus faecalis
aaaaattggtacctggttgaaagacttaattttcaaaccaaatgccggctttattttcccaataaaaggttggcgattttgatggaatataattacacacgagaatttaaacaacctcacaagatttacagtatcaaaggggtagcattgccttttgcgccaaacggcattcgattggaacaaatttttgtaggtattggtatccttattctcttattgatattcgcgattatttcatttgtcgctaaaatcaatttttttaccacaattattgctaatttttggttgattcttatagtaggagtgggcgtccttgtgtggacgctcttttctttaaaatgggataataagagctttcttgattatctaattggtcgaggaaacttcttgtatcaaaagaaaaaaagatatgaacatgggctacttgtccaattccataaagaaaaagtccaatacaaagttagaaaataa

SEQ ID NO: 3170 - DNA, 276 bp, Enterococcus faecalis
atggagtgtaagaatatgtttgatttatctggtttagcaaataatatttcctcacaggtgattatattattggtgattttaggactggtatccttagttgtagcggttgcaacacaaggggccgcacgaggaattgcgacagtctgcttaatcttaattttaatcgcgttggttttagtgttaaaagatgctgaaaaaattggtacctggttgaaagacttaattttcaaaccaaatgccggctttattttcccaataaaaggttggcgattttga

SEQ ID NO: 3171 - DNA, 1038 bp, Enterococcus faecalis
aagatgagtaacaaaaaggctgtattcaatccacaagcagggaagcaagcccagaaagaaaaagtgaggaaagagacacgtgtttcttcattggttcaaataatccgagcaatcttcaggaagaaagagaaagaaccagaaaattctcgaaccattcgtttttcgccacgttcggcgaaaagtatttactcaatggtgtttttccttttatttttcttgataagcttatttttattaatgagttttggacgattaaacacgcttacaaggcttgcgatgcaaaagcaagtaaatcgtgaggaaattattgaaagcgtgaataaaggcgtagctgcaagtgatcaattgaaatatgacggaatgaaacttgtggatcgattatttacagtgtcctcaaaattagaaggaaaagagtactgggaagcgcaaataaccccttatttagctgctggattgcgtgcagaagatttaggtcttgataagacaaatgatgaccgcgttgcacgaaatgtacgctttattcgattagaaacagttgattataaagaatcactttacagcttgtactatgatgtccgttttactgaagggaaagaatggcgccaagtgcaagtgattttgcctgttagttatgcagaaaatgaactgaagttgcttgatagaccaacgttaatgaatttagcgaagacaagtgagagtaacaaagttgtgtatgacgagcaacgttttatacctaaaggaaaagaagtcaatgaagaagaaacaaaaaaactaacggaatttaccaatcgtttctttgaattatatgtaaaaaatgatgaaaagttaggactaattgcgaatgtaaaaggactagaacatgcgacgttagaaaaagtagatattacaagtctaagagaaacaggccaagggatctatgatgttcgaggaacctatcaattcagttatgaagggaaaagtccgctaacgtctaacttctcattacaaattgaagcaacaaaagatagttattttattaaaaaaatgaatggagtgtaa

SEQ ID NO: 3172 - DNA, 321 bp, Enterococcus faecalis
agattaatgcacgaaaatcatgtgaatgaaaaggagacagccgtagaaaatacggaacgtattgctaaaaattatgcgtatgaacgcccagcgattcaaacggcgctatttatcttatggcgggtgcataataagcagtatcaaaccggcgctcggatattttacgacgaattagaaaaggccaccaagacgtctaagaccgcttataaagaagcattagcttttttagaaggtgcaggcatggtggtaaacgaggttgtcgtagaaagtaaagtcccccaatcgttaattcaacgttacgggattttaaaagatgagtaa

SEQ ID NO: 3173 - DNA, 417 bp, Enterococcus faecalis
gtgaggaaaatcagtaaaaaagtacgaattacaacgcttattagtttaatgcttgttttaggggggataatcctctttttatttatggtaaaacaaaatgaaaaggcaatgctcaatcaggaaaaggagcgagcggccgtagttttagcagacaatgaaacacgtgtcttatttttttacaaagatacgtgtgctgattgtcaaaaggtctatccgatggtttacgcagaggaccggggcgaaaacaacattgtatttatcaatttaaatcaaccgaaaaaccgtcactatataaagacctatacgttggaaaaagtaccaacgtttgttacaccgaaaagaagatacgtaggaacagatacgagaaaaattcagcaattaattgctgaaaataacgacgaaagaagtgaagattaa

SEQ ID NO: 3174 - DNA, 645 bp, Enterococcus faecalis
ttttattcaaggaaagggagcgtagcaatgagggagcgtttaaagcaagcacaaccactagtgatcgttcttttacttgttttactgaccactttaggaggcggttatttcaatgagaaaaaagaaaatgcacaaataaaaaatcaaaaagagaaagagcagcaagtcctaaagaaaactttagaagaaaaaaacggacaattgaatgatttatcgagaaaaattgaacaattattggatgaaaaagaagatcctgttaatgagccattaacaaaagcagtgaatgccttattttcacttgtgtttgactatgattctagcaataaagaacaaacagtcgctaaaagaaaagaaaaagcaactgtttatgcgacagagcaagggctatccggggtattcccaagggattcagataaagttgttcctagtgttgtgaccgtttctcaattagataaggcacctgaaatttatcgaaccacacaaaaagatacaggaaaagaaaaaacagcattggtccggctagaatattcagttcgaatcgcaggaagccaagcgcaacgtggaaattttatttataaggtaactttcaatgaagaaagcaagaaatttacaaccattgagaatttaggtgaggaaaatcagtaa

SEQ ID NO: 3175 - DNA, 1281 bp, Enterococcus faecalis
gagcgtaccatgaataagaaaagaattgtctttgggcttctctcttttttcttacctatatttttagtctttggaggcttacttttttttcttttattattaacgagtacgtcagatacttcaaaaaatgattgtattcagccaagtataaataatccaactgatgcgacagatacacctaaatcgatcgagcagtttgtaaaaagccataaagatgcttaccttttatcatggaaagcaggtggctttttaccgtctgctagtatttctcaaacgatggtagaaaatgggtttaattttactaacccatcggggacgtcattttggcaggcgcacaatatgggcggtgttaaaacgtcaaaaaaagaagattttcctgtaactttagcaacattcggccaagattctgttgatatttctggtacaaagctagggtcaaacgtcggagatggcactggtggggcatatacctggtttaaagactacaatgctggaattgttggaaaagcagaatttatggcacaccagacactgtatacaggtgctatcaataatactgacggattaagtactttatcagctatttattcaggaggatgggctacagaccctacttacctcatgaagttacaggccacatacaacagcttaggcaaacagtttcaatggttggaccaagaagcaatacagaaatatggtaacgcaccgtttaaaaagagcgaacttgtcccaaatattcccggaaaatcgccaatcacaaacgaaaaatctggtaaaaattctgattgcgttgttacttcagatacatccgatcaagttacaggacaaaatactgccccatcattagaagtaccaagtgcttataaaggaaagttaacacttccgcctatcgattcgaatgattacgctggaaataactatccttttggacaatgtacgtggtacgcctataatcgtatggcgcaaattggcaaaccaattgaatggttttcaggggatggcggaaatggcgcaggttgggctaattctgctcgtgcgaaagggtacacagtagtaaaaggaaaaccaagtgttggttgggcagctagtatgcaaggtggcataggaggttctgcaccgccctatgggcatgtggcagttgtagagtatgtcaattctgacggcagtattcttgtgagtgaagcaaatgttattaatcaaggctctggtacgcgttcatggcgagtattagacagagcaacggttgaacaaattgattttattcaaggaaagggagcgtag

SEQ ID NO: 3176 - DNA, 195 bp, Enterococcus faecalis
gcaaacagtttcaatggttggaccaagaagcaatacagaaatatggtaacgcaccgtttaaaaagagcgaacttgtcccaaatattcccggaaaatcgccaatcacaaacgaaaaatctggtaaaaattctgattgcgttgttacttcagatacatccgatcaagttacaggacaaaatactgccccatcattag

SEQ ID NO: 3177 - DNA, 240 bp, Enterococcus faecalis
gtaagaaaaaagagagaagcccaaagacaattcttttcttattcatggtacgctcctatctatacgctagcttatactttagctttgcgttttttaaagatgacaaacccagatactacagacaagataccgcctacggcagataaaaagatattcatttcttcacctgtgtatggtaaaaccttcattttaccgtccttaccttttacttctacatttccgctaggtaatactttgtaa

SEQ ID NO: 3178 - DNA, 921 bp, Enterococcus faecalis
tggaacgaccgacagaagaagattttgaacttacaaattaaaattaaaatggaggaaataatgatgaaaaaaattctttttgctagtttatttagtgccacactactatttgggggaagtgaaatttctgcttttgcacaagaaattatccctgatgatactacgacaccgcccattgaagtaccaacagaaccaagtacaccagaaaagccaacagatccaacaccgccaattgagccacctgtagaccctgtagagccacctattacaccaacggagcccacagaaccgacagagccgacaacaccaacagaacctgaaaaaccagtagagccaacggaaccgacaacaccaacagaaccgacaactcctacagagccaagtgaaccagaacaaccaacggagccaagtaaaccagtagaacctgaaaaaccagttacaccaagcaaaccagcagaacccgaaaaacctgtgacaccaactaaaccaacagaacctgaaaaaccagtacaaccagcagaaccaagcaagccaatcgacgttgttgtaacgccaacaggggaattaaatcacgctggaaatggtacacaacagccaacagtccctattgaaacaagtaatttggcagaaatcacacacgtgccaagtgtaacaacacctattacaactacagatggagaaaacattgtagctgtagaaaaaggtgttccacttacacaaacagcagaagggttaaaacctattcaatcaagttacaaagtattacctagcggaaatgtagaagtaaaaggtaaggacggtaaaatgaaggttttaccatacacaggtgaagaaatgaatatctttttatctgccgtaggcggtatcttgtctgtagtatctgggtttgtcatctttaaaaaacgcaaagctaaagtataa

SEQ ID NO: 3179 - DNA, 900 bp, Enterococcus faecalis
aacctatgtaagggtgagtttatgtatatctcttttgatttagaagcaacacaagcagaaaaaatagctttaccagtccatcaacgattttcgctcgttcaaggtcttttgttacttgaacaagccaatcaagaagttttggccacaaaacaaggaggcacgatagcctattttttatatacaggaaaagaacaagaactacctattttagaagcggaacttttattaccggtcaaacaaaaggatatgttagacgtattacttgaaccagtcacaaatgatccaacgcttgatccaatagaagtaaaaaacttcttacagttagttaatcaatcgttgccaaagaagcaacgagctaaaagtaacaaaaaaagtacagaaaagaaggcaactattgatacaaaaccagtgaagaaaaaagtttttttgtccgttagtcttatcacacttattggattgatactacttatgagtggttttttattagggaaaaccaattctacaccttatcaagaaaaagaattagaggtgaaaaaagaactcaataccttaacagaacaagtcaatgagcaaaataaagtagaaacatttactcgattctttctaactaattactattcaggaaaaacagatgccaaaaccagacaagcagttttaaaaaagtttgtaaaaaaagaaaccttatctgattttttatcggagaaaagccgagcgagaagtatgtttccctgggaagtaaagaagaaagacaaacaatggacgatagcgttcattgttgtattaatcaacgaaaaagacgagcaatcgacaaagaaaattacgtttacagctgaagaaacaaaagaacaactggtcgtaatggaacgaccgacagaagaagattttgaacttacaaattaa

SEQ ID NO: 3180 - DNA, 291 bp, Enterococcus faecalis
tgcctgacacaaaaatataggagggaaaaaatgattattttatcaggactttttattttagggataggaatagttggaggttatcagctagccacgttacctaaattaattgaaatgaaacagcacaaagcaatacagaaccatttcaatgttaaaggaaatgagtacacctattatcaagaagacagtgaaaattacattttatccttggaagatacagaatatcgaattaaattttccaagaacaccccgttaaaagtggtattcactgaaattttagaacctatgtaa

SEQ ID NO: 3181 - DNA, 408 bp, Enterococcus faecalis
gtaaaggagacagaaaagccaatgtatgtatcttttattctaagttgtttacttggattttctggctacagtctattaaataggctaaattcgttggaatttgtggatgcttggttagacaaagaaacacaaaaaatcacactaaaacgctgtttttatgatacgtctttcaagaaacaaacactaaaagagttagaacgagtatatttccaattaaaagaaataatcaacgtgcaaataaacaagcggtctttaaatacgaatgacatacgtaatgtacgagagctagaggaaaaacaacaagaaataaaacgattcatgttagacgttttagaagatgcttattggaaagaattagcaaatatgccagaagaccaacgacacttagacgattgggatttcttttga

SEQ ID NO: 3182 - DNA, 414 bp, Enterococcus faecalis
agacgaaaagaaggacgaactgattgtccttctttttttagttatggaggggaaaaattggaagcagtagtagcagaaagagaggcaaaggggatgaaagaaattgccatccaagaaaaagatttgaccttacagtggagaggaaacacaggtaagttagttaaagttcgattgaaaaatacacgtgcaatggaaatgtggtacaacaaacaaattaccgaagaaaacattcaagagatcaccacgttgaatattattaaaaatggaaaatctttggcattagaagtatatccagaaaaaagtatctatgtgaaaccaaatttaggcagaattaatgtgcctgtcttttttatcaaaacacctattaatagaggagtatttgaagagattttcggcgaaacgttaaaagcataa

SEQ ID NO: 3183 - DNA, 3927 bp, Enterococcus faecalis
tacatgaatcaacagactgaagtaaaaaaacgttttaaaatgtataaggcaaagaaacactggattgtaacccctattctttttttaggtgtattaggagctgtaggattagctacagataatgtacaagccgcggaattagatacgcaaccaggaacaacgacggtgcaacccgataatcccaacctgcagtcacgaaatgaaacacttaaaacggcagtatctgaagaagcagcattacaaaaagacactacttctcaaccaaccacagcagaagaagtagtgccgaaaggaattgctgctgaacaaagttcagctacctcaaatgataccacaaacgtccaacaaccaacagcagaagcagaaaaatcagcacaagaacaaccagtagtcagccctgaaacaaccattgaacctctagggcagccaacagaagttgcaccagcagaaaatgacgctaataaatcaacgtcaattcctaaagaatttgaaacaccagacgttgacaaagcagttgatgaagcgaaaaaagatccaaacattaccgtcgtggaaaaaccaactgaagacttaggaaatgtttcttctaaagatttagctgcaaaagaaaaagaagtagaccaactacaaaaagaacaagcccaaaagattgcccaacaagcagctgaattaaaagccaaaaatgaaaaaattgccaaagaaaatgcagaaattgcggcaaaaaataaagcggaaaaagagcgctacgaaaaagaagtggcggaatacaacaaacacaaaaatgacaaaggctatgtgaatgaagcaatcagcaaagacttagtttttgattcaagcattgtgactaaggatactaaaatagacaagattacaggtggcaagtttattaaagcctccgattttaacaaagtaaaccaaggacaatccaaagatatttttacaaaattaagtaaagatatgaatggaaaagcaacaggcaacttccaaagctcaaaagtatccgctgttgagtttggacctaaaggcggctacgcggttcttttagaaaaaaacaaaccggtcaatgtcacgtatacaggcttaaatgctagttatttaaaccgaaaaatcacaaaagcagagttcatttatgaacttcaatctgcaccaagtcaaagcggcaccttaaatgcagtattttcaaatgatcctatcataacagcatttgttggtactaaaaatgccaatgggaaggacgtaaaagttcgcttaaccattaaattatatgatgctaatggcaaagaagttttaccagagaaagaccatgcctttgcctatgcgttatcgtcattaaactctagtctaggaacaaattatagtgtagaacatgcggaatttgtttcagactttggttcaaaaaatgagttcaagtatattaatggttcctacgtaaagaaacaagcggatggaaaattctactcaaccgaagaccttgattatgggacaggtccttcaggactaaaaaatagtgattgggacgctgtaggtcataaaaatgcgtactatggttctggtgttggtctagctagagagggtggacgtatttctttctctttcgggatgacaaccaaaggaaaagtcaatctatctggtgcgcaatggtttgcttttagtaccaatttaaatgcgaaatcaattagaccatatcaaaagaaagggaatccaaaagaaccagaaaaagcaacgattgaattcaatcgatacaaagccaatgtggttcctgttcttgttccgaacaaagaagtcactgatggtcagaaaaatatcaatgatttaaatgtgaaacgtggcgattctttacaatacattattacgggagatacgacagaacttgccaaagtagatccaaaaacagtaacaaaacaagggattcgagatacctttgatgcagaaaaagtgacgattgatttatccaaagtgaaggtttatcaagcagacgcaagtctaaacgaaaaagacttaaaagctgttgctgcagcaataaattcaggaaaagctaaagacgtgaccgcttcttatgaccttaatttagaccaaaacaccgttacagcaatgatgaaaaccaacgcagacggctccgttgttttagcaatggggtataaatatttacttgtcttgccgtttgtagtgaaaaatgtagaaggcgattttgaaaatacagctgttcagctgacaaatgatggcgaaacggtaacaaatacagtgattaaccatgtgccaggtagtaatccttccaaagatgtaaaagcagataaaaacggtacagttggcagtgtttctctacatgacaaagatattccgttacagacaaaaatttattatgaagtgaaatcttccgaacgtccagctaactatggcggaattaccgaagaatggggcatgaatgatgtgttggacacgacccatgatcgtttcacagggaaatggcacgctattacgaactatgatattcaaattggtaaagaaacccttaaagcaggttcagatattacaaaatatattgaattgacaaataaagacggacaagatcttacttttacgatgaatcaagcattattggccgccttaaatgaaggaagcaataaagtaggtaaacaagcttggtctgtgtatctggaagtcgaacggattaaaacaggtgacgtagaaaacacgcaaacagaaaactacaacaaagagcttgttcgttctaatacggtggtgacacatacgcctgatgatccaaaaccaaccaaaaccgttcataacaagaaaggggaagatattaaccatggaaaagtggctcgtggtgatgttctttcttatgaaatgacctgggacttaaaaggatacgataaagactttgcttttgacacagtcgatcttgcgacaggcgtttctttcttcgatgattacgatgaaacgaaggtgacaccaatcaaagacatccttcgtgtcaaagattccaaaggggtagacattacgaaccagtttacaatctcatgggacgatgccaaaggcacggtgacaatctctgccaaagacccacaagcctttattctagcgtatggtgggcaagaattgcgtgtaacgctccctacaaaagtcaaagccaatgtttctggggatgtttataattcagcggaacaaaatacatttggtcaacgaattaaaaccaataccgttgtcaaccatattccaaaagtgaaccctaaaaaagacgtggttattaaagtcggtgacaaacaaagtcaaaatggcgctacaatcaaattaggggagaaattcttctatgaatttacaagtagtgacattcctgcagaatatgcgggacttgtggaagaatggtcgcttagtgacaaactagacgtcaaacatgacaaatttagtggacaatggtctgtgtttgccaattctaattttgttttagcagatggaaccaaagtgaataaaggggacgacatttcgaaactattcacgatgacctttgaacaaggggtagtgaaaatcacggccagtcaagcctttttggatgcgatgaatctaaaagaaaacaaacacgttgcacactcatggaaagcgttcattggtgtagaacgaattgcggcaggagacgtttacaatacaatcgaagaatctttcaacaatgagaagattaaaacgaatacggtagtgacacatacgccagaaaaaccacaaacgccaccagaaaaaacagtgattgtaccaccaacaccaaaaacaccgcaagcaccagtagagccattagtggtagaaaaggcaagtgtagtgccagaattgccgcaaacaggcgaaaaacaaaatgtcttattaacagtagctggtagtttagttacaatgcttggtttagcaggcttaggatttaaacgtagaaaagaaacaaaataa

SEQ ID NO: 3184 - DNA, 219 bp, Enterococcus faecalis
aaaatatctttaaaattaaataataaagtcaaaggagcgacatatttcgctcctttttattgtaatcattggaataaattgaaaaataaaaaaatagccaatcaaaatggttggctgatcgtattaaaggcagaagaatctaccaaatttaggagccaaccagtttccgctggtcaacaaaaaataaatggattgtctcggatggagacacttaaatag

SEQ ID NO: 3185 - DNA, 2787 bp, Enterococcus faecalis
caactacagcgttacaacaatggcgtaaagacaatgggtatcccatttacaataaaaataataagaaatgaggaaagcaaaatgaaaaagttcgcaagtgcagggttaagtattttagtcgcaacaggggtagcaggtattgggggaaatgaagtacaggcagcagaacaagcgcaaccaaaaacacctgaaaacagttctacagaacaaccaacagtgaaagctacagaaacaacggagcaagccattactgaaaaacagcaacaagtaacagagaaacaagcaattgtcgatcaaaaacaacaagtcgctgacactgcgaaaaaagaaaaagacgccattgatcaatctgttaaagaccaacaagcagtggtcgatcaaaacaaagacgcattggatcaaagtcaacaagcagtgactgaccaacaagcagttgtagacgaagctaaaaaagtcgtggatgaagcaacaccttcagccattgaaaaagctaaagagcaagtggctacggatacacaggctgttgatgaacaacaaaaagtagtggatcaagctcaaacagatgttaaccaacaacaagctgttgttgatgaaaaagcaaaagaaacgaatgctgctaaagtgcaaaatgaaaaagatcaacaagcagtaacagctgcgaaacaagaacaagccaagcttgaagaattagcgaaaaatgcggaagcggaaaaagcaaaggcagaaaaagaacaagcagcaaaagaagctgaactggctaacaaacagaaagaagaagccaaagctaaagatcaaaagacgaaggacgatcaagcagtcgcagaccaacaaagcgttgtgataactagtcaagagaaagtagcagacgcaaaagcagatacagctgcgaaacaggcagacttaactgcgaaagagaatgttttgaaagacaagcaagcagcaacgaaacaagcgcagaatactttagatagctcaaaagaagagctaaaaggacataaagggattaacttgcctgccaatttcacacctgattattacaaaaaattatctgaacaagaaaaacaagcaatggaaaaagaagcattagcattaaataaagtttttcctgaaaatcaagcagatgcggcaaaagcaacggaaatgatcaatgtcaaaaatcctaccgaaaaacaaaagcaacaaatgagcgattacgttgtaggacttatcaatgatgttcgcgaaaagcttgggttacaaaagttgaagatttctaaccaagctatgaaatttgcttgggatgtagcaaaatatgataatcccaaagagtttgatcatgacgtaaatgcgattaatcgtgcagcaaaagaaaatggttttaaagagtatccagggcaaaacttttatgaaaatctaagtatgggctattttgaaacgattaatggcactatttctcaactagagtttgaaaaagctgctcgaaaaacaattgctgatatgctctttgacgatgaaagttcagcgtattctcatatagattcattgctaaaaggggacacaacaaacatggcagtttctatttcaggagatttaaatgatatttcagcaaaaatccatatcattagctataatcaatcaaaattagttgaagcaaatacctatgaagaaggcactgctccagtctttaagagtaaagaaacccttcaaaaagaagtagcaaccaatcaagaaaaattagctactgcacaacaagcagaatcagacgctcaacaagcaaaaagtgcaagtcagcaagccttaaatacagccaaaacaacacaagcaacagcagaaaaagaactatctgttcataaagcgacattggctaatcttcaagcagttgcgactaagagtacgacaaactatgaagaaaaagtacgacaaactgcaacggcagaaaaaagcctgcaacaaacaaaagatcaattggcaacaattaatgagttaattcagaatcgagctgctgttttagaaaaagcgaaaacaaacgttgcggaagcacaagcgattgaacaaacgtctgctaaagtgctgaaagaaaaacaagcagcacaacgtgcggaagaagaagcattgaagagcttgcaagaagtcttagctatcgccaaagaaacactcggcaaaaaacaagcccaattaaaagtcagtgaacaagcgttatctcgattagaaaatgcacaaccaaattatgaaaaagcggttaaagccttagaaaaagccaaaaaaacattagttcatgcagaagaagcatacactatttctctaaaatcattggaagaacttaaagaacaacaaactgttgctacacttgcttatacacaagcacaagaagaccttgctaatgcgaagttagagctacagcagtaccaaggtatattaagagacttagaagcacaacaagccgaacagcgccgacaagaagcgttgcaagagcaagtagcaaaagagcaacaacgccttgaacgagaatcaaaacaacaacaaacgttagtagcaagtgctacttcggcagacaaaacacctggtctacaacagttatctttttctaaacaaaaagagcaaccaaaagcacaagcattgacacattcagaatctcgtaagacgaaacaggtagcaaaagccccagattctttaccacatacaggagaaaaaaataataaatggttagctatagctggtctgatattagctttgttaggagctgcgggtattataagttttattagtagaaacgagaagaaagtaaaaaatatctttaaaattaaataa

SEQ ID NO: 3186 - DNA, 312 bp, Enterococcus faecalis
gaaaatatgacaaaaaaagtgcaaaatatctggcgtaaagaaatgttagcattgatgaatgaagacgcagactggtataggaatgaagataccgagcgttttaaacgaatacaagaacttgcaaaaaagatagaaacagcaagcaccagacaattttcttctcatattagcaaggaaagatttgaagcctatcaaagaatgggtttacagtttaaagaaatagcagaagaattccatataacaactacagcgttacaacaatggcgtaaagacaatgggtatcccatttacaataaaaataataagaaatga

SEQ ID NO: 3187 - DNA, 276 bp, Enterococcus faecalis
gtagtgaatttgggtttttatacttggtctttttgtttgttagttttaactaacatgcgcaattcaccaatagctaggttagctatcgaaaaaggatgcagaaaagcacacggacacgaaggtgaaaactggctacacgtcaacttttttgcagaatttgggagatccttaaaaaatgaatactacaggacttatctagtcaatcagcgtgtctttaaagggctaggtaaggataaactacctaaagagtacggtcagaataaaggcggtacgtga

SEQ ID NO: 3188 - DNA, 1116 bp, Enterococcus faecalis
ggaattaaaaagtgcgtactgttttttttgacatgcttgcgtgataatagcggtagcttcaaaaaaataaccaagaaggagactacatacatgaaattaagtatcttagatcaattaacggttcctaaaaatcaatcagcaagcgacacattacaagaagccaaagagctcgctcaattagcggaaaaacttggttacacaagaatttggtatgccgaacatcacggctcagacgcctttgccagtgcaacgccagaaattttagttgcacatattgctagtgccaccgaaaaaattcgtgttggcgcgggtggcatcatgaccatgcattatgcgccatttaaagtcgcagaaacgtttaaaacgttagcagctttatatcctgatcgaatcgatttaggcatgggccgctcgcctggcggcagccctttaactacgttggcgttaaataatggtcagccaccacagctagaccaatttgataaattacctgaaattttactctttttaagagaggaatttcctgaaaatcatttatattctaaaatttcagctgttccgcgggaagttctattaccacaaccttggttactaggtgctagcaaagaaagcgcacgttcagctggtgaatatggcattaatttttcctttgctcagtttattcatggacatttgcccaaagaagtattgtccgcatattacaagcatttccgaccagtaactgaacaacaagagccgcaagtgagcgctgcgtatttcacttttgccgccgacacgaaagaagaagcagaataccatgcggctagtttcgagcattatatctttgccaccaaacatgggcttccaaataaaattttatccccagaaaaaaaccctacttttccccttaaatggaaagggacaaatgggtttaaaaaaaaaataaacaacgctttgtttttgggggttaaccaaaaaattgggggagattttccccccaacaaaaaaaaaatggggttgaaaaaaaaacaaggtttaccccccccagtttttgaaaaaaaaaaaagggcgtttccttttgttggaaaccccttccccagaaatatttttttaaaaggggaattgaaaaatttttta

SEQ ID NO: 3189 - DNA, 696 bp, Enterococcus faecalis
aaaattctccgctatggctttttgatgctttgtgttaaaatggaacatatgtacgcaatcagcaattggaaaggtgacaacatgtacgaatatattattggaaaagtaacgtttgttagcccatactatattgtcgttgaaacaaatggcattggctatcagatttcagtcgataacccgtatcgctattcaggaaaaatggatacggatattaaactatatcttcaccaagtcgtgcgggaagatgcacaacttttatttggttttggcagtttagaagaaaaacaattgttcttaaaattaatcagtgtctctggaattggacctaaaagtggcttagctatcatggcttctgtggctgatcatggtggtttaatcaatgcaattgaaggggaagatgttacatatttaacgaagttcccaggtgttggcaagaaaacagcccaacaaatgattttagatttaaaaggaaaattaggcgaattagagtcttccgaagcagcggttgcggccatgaccgcaaccgaagcggtgacaacaagcaatcaagcattggcagaagcgttagaagcattaagtgccctaggctacagtgaccgagagattaagcgtatcactaagcaattggaagcgttaggtgagacaacgacagatgtttatttgagcaatgcgttaaaattcatgatgaaacgctaa

SEQ ID NO: 3190 - DNA, 1029 bp, Enterococcus faecalis
ggaggaataacgatgacagaagaagaacggttgctttcagctgcaagtcaagaagcagaagcttcaattgaaaaatcgttacgtccacaatttttagcacaatatattggtcaagataaagtaaaacaagaactaacgatttatattgaagcggcgaaaaatcggaatgaagcgttggatcatacccttctttatggtccgccaggtttagggaaaacgacaatggcgatggtcatcgccaatgaaatgaatgtgaacattcgtaccacaagtggaccagccatcgaacgggcgggagatttagtcgctattttgaacgaattagagcctggtgatgtgttatttatcgatgaaattcatcgtttgccgcgagttgtggaagaaatgctgtattccgcaatggaagatttttacattgatatcatggtcggtcaaggaaccacggcacatcccgttcattttccgttaccgccttttactttagtgggcgctaccacacgggcagggatgctttcagcgccattacgagatcgttttgggattatttctcacatggagtattatcaagagcaggatttaaaagaaatcgttctccgttccgcggatatttttcaaacggagatttttgaggaaggtgcctttgaaattgcgcgccgctcaagaggaaccccccgaattgctaaccgtttgttaaaacgtgtccgtgattttgcccaagtccaatcagatggcaaaatcgaccgagcgattgcagacaaagcgttaaccttactgcaagtggatcatcaaggcttggattatgtcgatcaaaaattgttgaaaacaatgattgatttatacggcggcggtccggttggtttaagtaccttgtctgtaaatatcggtgaagaaaccgaaacggtggaagatatgtatgaaccctatcttattcaaaaaggtttcattaaacgaacaccacgaggacgaattgcaacgccatttgcgtatgcacattttgggtatgattatttagagggtcgtaaaaattaa

SEQ ID NO: 3191 - DNA, 477 bp, Enterococcus faecalis
ttatatcatgatacgataattcatatcgataagaaagaggtgataaaattgacagaatacatctacttagctagcgaacaacctttatctacaggcagtataactttaaatggactgagcaagcccactggcaatctattaaataaagcgttcttcttttttataaatgattttgaaggtgatccaccaggtaaattttcatacagcaactatttaaaaacattgaattatcaggtttgctctatgtgttctctaccgtcagataatcaaaatattgaaacaccctcagcaatcgctcttcttggctacatccgaaatcattttaaaaatacctgcacaactaagttatatattttgtccgctttaaatggttttgaaaacaaaccgatatcaaaaacagttactcgcaaactgtctgatttatcttacaaagatttatattatcaagagatgaaacttttaaaaattattcgttaa

SEQ ID NO: 3192 - DNA, 852 bp, Enterococcus faecalis
ggtgaaatgctaaatggaaacaaaagaaagcaagccttaaccgcttgctttcttttgtttcacgtgaaacgtttgttcttatttagaagagcggcatatttcagctgttgtagttatactgtgtttgtaatcgcttttaaattggagggatcaatgttgaataaagaaatcaaaggggcattaattgtttcttgccaagcgttggcagacgaaccgttgcatagttcttttatcatgtccaagatggctttggccgctaaacaaggaggggctaaaggtattcgagcaaattctgtggtagacattcgagcaatccggaaagaggttgatttaccaatcattgggattattaaacgagattatcctgacgcagaagtatatattactgcaactatgcgtgaggtagatgaattaatggctgttcagccagaaattatcgctctcgatgcaacccattcgaaacgaccaaatggcgaaacgttagccacatttttcaaaagaataaaagaaaagtatcctaaccaagaatggatggcggattgttccacgctggaagagatgattgaagcagcggagttaggttttgattatattggcacaacgttagtcggatatacgccgcaaagtgaaaatcagcggattgaacaaaatgattttgaactgttaagagaagcaaagaagcattttactacaccaatcattgcagaaggaatgattgatacgccagcaaaagtccaacgtgtcctggagctaggtacttatagcgtggtggtgggatctgttattacacgaccgcaaaaaattactgaaaaatttgtggaagctacgaaaataaaacagaatcaagcataa

SEQ ID NO: 3193 - DNA, 2481 bp, Enterococcus faecalis
tcaatacacttcgatacggtcgctttttttctagagaaagttgaatctttcaataataaaaagggatacactccatttggcatagtccttgctgataataaatcagtgtataaagcgctatcattttataggaggggttttatgaagggtttatcaaaaaagaaacgggtgtctacttggttagcgttaggaatcaccgtagtcagctgttttgcgttaagcagggaagtgcaagcaagtgttgaaagaacaaaagttgatgaatttgcaaatgttttagatgtgagtgcatcaccaaccgaacggacgaatggcgtatacgataccaattattttaataatttttctgatttaggtgcatggcatggctactatttacctgaaaaaagcaataaagagctactgggtggttttgcggggccattgattattgcggaagaatatccagtaaacttggcggcaagtttaaacaaattaacggtcaaaaataaaaaaacgggagaaacctatgatttaagccaaagcaaccgcatggacctgtcttattatcctgggcgcctagagcaaacctatgaattagacgatttaacgattcatttagctttaatttttgtcagcaatcgaacggcgcttatccaaacgacacttgaaaacactggtgaagagcccttgtcacttggagcaagctggacaggtgcggtctttgacaaaattcaagagggaacggaaaccttagatattggcactcgtttaactgctaaagacaatgacattcaagtgaattttggtgaagtcagagaaacgtggaattattttgctacgaaagacacaaaatatacgattcatcatgcggataaagtttcaacaaaaattgataatcggaattatacagcaaccgctgaaccaattgaattgaagcctaaacaaacgtacaacacctatacgacagaaagctatacttttacaaaagaagaagaggcaaaggaacaacaacaagcacccgaatataccaaaaatgcggcgcgctatttcaaagagaacaagcaaagatggcaaggatatctagataaaacgtttgatcaaaagaaaacagcagaatttcctgaatatcaaaatgcgctagtcaaatcgattgaaacgattaataccaattggcgaagtgcggcaggtgcctttaagcatgacgggattgttccgtccatgtcttataaatggtttattggtatgtgggcttgggattcgtggaaagcggatgtagcaacggctgattttaatcctgagttagctaaaaataatatgcgggccttgtttgattatcaaattcaaaaagatgataccgtacgtccacaagatgcaggagcgatcattgatgctgtcttttacaatcaagacagtgcgcgtggtggtgaaggtggcaactggaatgaacgaaattctaaaccaccattggctgcatgggcagtttggcatatttatcaagaaaccaaagataaggaatttttaaaagaaatgtatcccaaacttgtggcttatcataattggtggtataccaacagagaccacaataaaaatgggatagcagaatatggaagcatggtcagtgatgctcactggcaaaaagacgacaaggatcaaatcattaaagataaaaatggccaacctaaagtggatgatgatgctgttattgaagcagccgcgtgggaaagtggcatggataacgctacacggtttgacaaagaaggtgtgggcaaaggcgacgttggagttaaagtttttgaaaacaaaaataaaggaaaagtagtggggtattcgattaatcaagaatcagtggatttgaatgcgtatctctacgctgaaaagggctatttagcttcgatagcagaagaactaggcaaaaaagaggactataagaactatcaaaaagaagcgaagaaactaaaaaaatatattcaagaaaatatgtttgatgaaaaaacaggcttcttctatgacttacaaataaatgaagacggctcgaaaacaaaattgttagtcaatcgtggcaaaggaacagaaggctggttgccgctctgggcaaaagtagcgaccaaagaacaggcggcggcagttaagaaaaacatgatgaatcaagaaatgttcaatacctttatgccattcccaacggcatccaaagacaatgaaaaatttgctgcaacgaaatattggcggggaccagtttggcttgatcaagccttgtttggtgtagaagctcttcaaaactatgactatacaaaagaagcgaaagaaatgacacaaaaactcttcttacatgccgaaggattgatgggagaaggccctattcatgaaaattatgatccactgacagggaagggcttaagtacgaaaaactttagttggtcagcagcagcgtactatttattgtataaaaacaccttattaagtaataaccccacaacgcaaactgcttttgagataaaatag

SEQ ID NO: 3194 - DNA, 930 bp, Enterococcus faecalis
aagggggatattatggatgtgctaggtgctctaaaatattttagaaaaaagaaaaaaattgctcagaaagatgttttgccaaaaaaggggaaacaaacctatcgaagaatcgaaattggtgaagccaagctaagttacgaggatttaatgacggcattacagtcattggggattacttttaatgaatttttttttatggtatctgatacgagaatcatggcttcttcagaagtcaaacatcaaattgaatgttgtcaaatggggttgaacaatacaagtgaaaaaaagaatctgattcattatttttatcaattagagcgcaatcctcataaaaatgcgttggaaatgtctatttacacagatattaaattaacgtttagtaatgattgggaggaaattccagaatttgatgaaaccgatcgaatggtaattctcgcgcttatctctagcaaaagctactatacatactacgattatcaaatggtgactaatcctgccgccttgttttctgaaaatgaagtccttcagattcttgagcagatgtttcctgtcaaagatgctgaattacgtgatacccaaacactaaatgttgcctatggtttttacctaaatatcattactggggaactttataagaaaaattatgcgaaagctcgggaatatttagcgctagtgagtgttaccacgattcctgctgaaatctactatattcattttaacttacgttacttaaaaaaccttacgtattatctgtacactggcaaaatgagatattataaagaagtaatcgccgttattgatatgattgaaagctttggggatgcacgtttggcggaaggcatgaaaaaagaaatgcttcagctgacggctggtcggacatttaatttagaaaaaggtcagtttccattgaatattgtcactgaaaaataa

SEQ ID NO: 3195 - DNA, 717 bp, Enterococcus faecalis
ataagaaagaagcccaacaggcaaaaacaaaaatatttagagataattgaggagttaccgccaatgagaaatgttttacaagactacttagatgaacattcctttcgagtcgttgtaaaaaagaagaaaaattatttaacttatgaaggactgcaagatcgttatgcctatattttaaaaagtggcatcatcaaaactagcgttatttccaaagacggtcgtgaatttaatttacgttatatcaacaatttggaaattgtttcattgctacgtgatgaatattcagaatttattgatgcaccttttaatattcgcatcgaatctccacaagcagaactttaccaaatcgaccgtgttcaattttggcgggatatcaataatagtaaagacttgcaaatgtatgtcaaagaatactatcgggaccgtttaatgcattccatgaaaaagatgcagcaaatgttgatgaatggcaaatttggggccgtttgtacacaaatctatgaaatgtacgattcatttggcgtagaaacagaggaaggtattttaattgatttcgtggtgaccaatgaagaaattgcgcatttttgtgggataacttctgctagtagcgttaaccggatgatgcagcaactaaaagagttaggggcaattgaactacgtaaccgcaaaattttgattaaagatttagatatgattagagataacattattgtttaa

SEQ ID NO: 3196 - DNA, 921 bp, Enterococcus faecalis
ggtaatagtagaaagggaggagatttaatgacagaaccaaacttaaaagacccaagaaagttattttatagtgatggatttccgcaacaagatcaagaaactcccgcattacaggacaaaatggtccctaaaccagattgtggggaagacagctatgtcggaaatcacaaattagaaaatcgtcgggtattaattacaggcggtgattctgggattggacgagctgcggcgattgcttttgctcgtgaaggcgcagatatcgccttacattttttcccaggtgaagaaaaagacgccgaagaagtggcgcactatatacgagaagctggccgaaaagtcgttcttttgccagcagatttaagagataaacaggcacctgaagaattggttgcacaagctcatgaagcattaggcggcttggataccctcgttttaaatgcagcccaacaaatttcctgtgccgctattgaagaattaccaatggaacaagtgatagacactttccatgtcaatattattgcgatgtttggcattgtcaaagcagcagtgcctcacttgcctgccggaagtagtattgtgacaacgacttccgtccaagcctttaatcccagtgagcatttgttggattatgcagcaacgaaggcatcaattgccaactttaccgttggtttagcaaaacaactggcaccaaaaggcattcgggtaaatggcgtggctccaggaccaatctggacaccgttacagttagatcatggacaaccaattgaagagttgccagaatttgggcaacattctttactggaacgtgcgggtcagcctgctgaattagcccctgtttatgttttcttggcgtccaatgatgcaagttatgttacggctcaagtttatggcgtaactggtggagaagcaattaatctttag

SEQ ID NO: 3197 - DNA, 585 bp, Enterococcus faecalis
gagggatgttccgtgaataaagttgttaaaatacttttgcttctaggttcactgattttaatggcattatttggcgcggtggccatcaccacttggtcagccgatacagcttggcaaccaccagataatgtccaatggttcttgcaagacaacgagtacgcacgtcaagcaatcttttgggtagcgctggttttactaggaattatgctctttctctttttattcattcttttattcccaagaagaaaaggcacgtttgaattaaaagaagagcaaggaaagttagtgttacaccgtaaagccatcgaaggatttgtacgctctagcttgcaagacagtgactttctggaagcaccaaccattcgtgtaaaggcgacaaaacggcgcattaaggtcaatgttaaaggcacactgaaacgaacggcagatttaattgggcaaacagaagcttggtcaaaaacaatggaagaacggcttgctcgtttggtgggaactggtcacaagattacgattgatgttcattttgaagatattcaatcaatgaaacgaccacaacaacagcaaacacaagcacgtgtggagtag

SEQ ID NO: 3198 - DNA, 204 bp, Enterococcus faecalis
gagggatgtacaatggttgaatggataaaacaatatgccgttccgttaattggtggcctagtcggcttggtttttgcaatcttgtttctgtcaatcggcttctttaaaacattgttagtggtactcctgacaggactaggtatttggctaggtttgtatttggaacagacaggcattgtcaaaaattattttcatcataaatag

SEQ ID NO: 3199 - DNA, 525 bp, Enterococcus faecalis
gaggttttggctatggaaaatgcaaatgtatcgattgttaaaggtgagttgacgtttgaggataaagtaatccaaaaaattattggcattgctttggaagaagtcgacggtttgttaactgtggacggtggttttttctcgaatttacgagataaaatgattaacagtgaagatgttacaacaggcattcacaccgaggtcggcaaaaaacaagtcgcagtggatatggacattgtagccgaatacgggaaagatatcgagaccatttatgatcaaatgaaagaggttattactcgcgaagtccaacaaatgactcacttggaagtaatcgaagtcaatgtcaacgtagtagatatcaaaacacaagcagagtaccaagaagaaagtgaaacggtccaagataaacttggcaacgccgctgaagcgacaggtagttttatgtcaaaacaaaccaacaaagccaaacatgcggtaactaaaggcaagacaaaagtcaaagaaaacacggcacctcgtgttcaataa

SEQ ID NO: 3200 - DNA, 564 bp, Enterococcus faecalis
accatgagtaacgaaaaattcaataatgtaccaaaaccagcaggaaacggaccacacacaccagaagatcatgcaatcaaaggtgaattaacatttgaagataaagtcgttcaaaaaattatcggtttagccttagaaaatgtcgatggtctattaacagtcgatggcggctttttctcaaatattgctgaaaaattagtaaacacagataacgtcacagcgggtattgataccgaagttggtaaaaaacaagtcgctgttgatatggatatcgtggtagaatacggcaaagatattcaagacatttacgaaaaaatgaaagaattaatcagtcgtgaagtgaaaaaaatgacccacttagatgtgattgaagtgaatgttaacgtagttgatatcaaatcaaaagaagaatacgaagaagatagcgaaacggttcaagataaagtcacaggcgctgccaaaagtaccggtgaatttgcttctgaacaaacagaaaaagcaaaaaaagctgtgaataaaggaacagaacaagtcaaagaaaatatggaaccacgtgtagaataa

SEQ ID NO: 3201 - DNA, 258 bp, Enterococcus faecalis
agggaggaaacaatcatgggctttatttgggcattaattgtcggcggggtcattggggcaatcgctggagcaattactaaaaaaggatcatcgatgggcattattgccaatatcattgcagggttagttggttcaacaattggtcaagccattttaggcacatggggaccaagcttagctgggatggctattgtgccatcgattatcggggcagtgattttagttgccatcgtttcatggattttaggacgaaaatag

SEQ ID NO: 3202 - DNA, 1281 bp, Enterococcus faecalis
caacacaaaataaacagaacaaaagagagaggaattcaaagaattatgacagaacaaacaccaacaaagcttttgaataaaggctttatcagtattacagtgattaatttcattgtctatcttgtttattatttattaatggttattattgcggtgattgcgcaagatagcttacacgctactttaggtcaagcgggtttggcctcaggaatttacatcatcgggacattgcttgcacgacttttcatggggaaactccttgaactgattgggcgcaaacaagtcttacgttatggggctttgttttatcttttaacgactgttgcgtatatgtatatgccaagtatgggcattctttatctggtccgttttttaaatgggtttggttacggaaccgtttcgacagcgaccaacgcaattgttaccgcctatatccctaaaaacaaaaaaggggaagggatcaattattatggtttgagtactagtttagcagccggcattgggccatttattgggatgttattgttaaatgtttccaacttccatgtcattattaacttttcaattattttaattttgttaacaaccattgcttgcttcattttcccagtgaaaaatattgagttaacacctgaacatcgtgaagctttatctaaatggaattttgatagttttgttgaaaagaaagttttatttattacatttatcgcctttttaatgggtcttgcttattcaagtgtcttatctttcttatcttcttatgtcaaagtaatcgatttagttgacgtcagcaccttcttctttatcgtctatgcggtcgtgattaccttaacacgtccatcgacaggtcggattttcgatgtcaaaggtgaacgctacgtcatgtatccgagctacattttcttaacactaggcttattcttattaagtatgactacgtctggttggatgttattagtttcaggtgggttaattggcttaggttatggtactttcatgtcaaatggccaagcggtttgtcttcaagaaagcccaagtcctcaccgtatcgggattgctttatcgacttatttcatcggtttagaccttggattaggggttggtccgtacgttttaggtgaattacgtaactttatgtcattccaacaaatgtacttcttagcaggctgtatcccaatcgtttgtaccattttatatatggtcttccacaaagctaaaaatgatgccaaagatttgtctcttgaaacgattgaagagattgaacacggctcagaactataa

SEQ ID NO: 3203 - DNA, 219 bp, Enterococcus faecalis
acacggctcagaactataaatggacaaggagtgatttcaatgcctaacgatgaacggattttaaacgttttacaacaaacactaacggaaattcaacgcatgaacacgcgtttagctaaaattgaaacagagttagccgatgtcgatcaacatcacgcgactttggatcattacttgcaagagctagaattggtgacagaaaataacaacgtcatgtaa

SEQ ID NO: 3204 - DNA, 468 bp, Enterococcus faecalis
gacctttgtcacgattgccaatccatttgtgcaagaaagctttttaaaagaagcacttcaaaaaatccaagtctctacaaagatgtgaagcgccttacaattgaaatgcttccgacattgattggcaatgaaaaattgttagttgactgcttgtttattcttttttgtacattgaaaacgaaatctttaccaccgattcgtgtcttagtaaggaccaatcaaagtaatttaattttagataccctttatgaaaagctaagtaaagccgtggataaaaaattaatttttgtcgcttcaccagaaaagcctttcgatgtaattattacagatatcttttcagaagttagtgtcaaatcaacggttcccacttattatgttgatttttctgctagcattggtgaactagcgcaaagcttagaaaatttaaatacacaaattgtcaccaaacaaagtccacgccacttttaa

SEQ ID NO: 3205 - DNA, 1137 bp, Enterococcus faecalis
attgcgtggggaaaacagtttggagggaatcggatgttaacagggttacttgatgtaccttatcgtaaaagttttgctcttttagaagagttactcgaacgtcgtgaagcagaagaacaaacattggcgatttctactttagcgactcaattaaaaatgcaacaaaataccattctacaatctgtagctttgctccaaacagaaattgaaaaaaacggctgggagaacttattttctttatcagcaaatgccaaagaaatcacattttggtttgcaccctatttccaactgtcgtttttgatgccctactttgtcaaaaaaagtttcgcgtatcaagtactgacctatgcctttaaccataatgcaattgatagcaaacattttgaaaaagtcctagagatttcttcatcaacctttacacgaaaaattggacaattaaaccaatggctccaaaaatatcagattgaaatcaatttaaaacgtaccaatgtgttggtgggcaaagaaaaagatatccggattttctttatgatgcttttttggaacaattactctgaaggggattggccgttgcacacgattactaaaaaagaagtccatagtctctttcgacgtttaaaacactctgtttctttcaatacaacacaagattttacaaaagacttgattttttctgcggtgattttagcgcgttggaaagagggcttttttatcaaagaaactttcgtggaggaagaagcgattgttaatccctttgttaatctgagtgaatttgaattgttttttaaagaagaagccttacaccaagttccaacaaaatttatacaaaaagaaggcctttttgcctttttcttattgacgattagtgtcagctacgccacacaagatgtcttggaaattcctgcagcacggatgcatatggtccagctattaggctcacccattaaagagatcatttatcaactaacgtctttttatcaaattaaattgacatttcacgagtatctttatctatatacttctatccaaaatttaagtgtcttttttaagacctttgtcacgattgccaatccatttgtgcaagaaagctttttaaaagaagcacttcaaaaaatccaagtctctacaaagatgtga

SEQ ID NO: 3206 - DNA, 1509 bp, Enterococcus faecalis
ccaattagaaaggtggttattatgtataacttattaaccaaacaggaaattcagttactttccctaattgaatacttgtatgacagtaaagaaaaagtccccatgcaagtactccgacgaaaatatgaattttcccattacaatatcaacaatttattgaatcaattaactttgttaatttctcgagtcaatacacatgaaaatgtacatattcgtattattaataatcaacagtccatagaattagtcgccgatgaaaatatcccgattgagttaatgaaagaagctgttgtccgcgggtcactaacctatatgttagccctggatttacttttaaaacgctacacttcagccaaagatttttgtgaagagcactttattaacttttctatttttaaacaagtcagtgaccgtttaaataatcatctagctagatttaattgttatttaaacttaaaaagacgagaaaaaatttgtggtaacgagaaagattttcgcagtttcttttattccttattcttcatttcaggaacttctctagtaccatttctatctaagactaatcaagcacaattgcagaacttcattgaaatcatcaaaaaccgttacccttactttacatatactgatttacgcaaattaaaattaattatgtccataggtttactccgttatcaatccggttttacaatcaccaattatccagaagttgctgctattaatttggcctttccttattcagaattccaactattagtgaatgattgttttattgatgaacaaaaagagcctgacacttggcaagctgagattcatttttattatgatttcttcagcacattaacgatgtactctctggtccaaatggaaaccatcaactttgccaacttagcgatcatgggaatggataacagtccacacgctacttggatttttgaaaaatgtacgcaattacagttggatttaagcgcaatagaagtggtctttttgttggttaatttatccaatgccagtgaacgactgattcatttccctgtggaagaggaattgagctatgaggttgctaatgtctctttgtatgaaaaacaatacccaaatgtttcacgaacaaccaactatttcttaaagcgtttgccttttgacaaacaacatccactagatgcgttatttaaagaaaccatttttttaattattcggagtgttttattaaataaacaaattcctgttaaaattttacttcattcatctattaatcagatacaagaaaattggttagcgaaggaaatcaataattattgcgatgttcctttgaaatttgttaatcatattcaagaagtgcctgacttagtcattactgacaaaaataatccgctttttcacgccagtaaaactttttattggcatcccgttccttatttagacgaatactataacctaaaacaagtagttcgcaaaatttattttgctaaattgcgtggggaaaacagtttggagggaatcggatgttaa

SEQ ID NO: 3207 - DNA, 6165 bp, Enterococcus faecalis
aataaaaaattggtacgaagtgaacgttctcttctatgtgtcgttagtagaggaaggatgaaagaaatgagaaagaatggtccaatggtaaaccgttggctctacgggttgatgtgtttgttacttgttctaaattatggcacaccactcatggctttggcggaagaggttaacagcgatggccagttaacgttaggagaagtgaagcaaaccagccagcaagaaatgaccttagcgcttcaaggaaaagcacaaccagtaacacaagaggttgtagtgcattatagtgccaatgtgtcaatcaaagctgcacattgggcagcgcccaataatacgcgcaagattcaagtggatgaccagaagaaacagattcaaattgaattgaatcagcaagcgttagcagatacgttagtcttaacgttgaaccctacagctacagaagatgtgacgttttcttatggacaacagcaacgagcgttgacgttaaagactggtactgatccgacagaatcaacggcaatcacgagttcgccagccgcatcagcgaatgaaggttcaacagaagaagcatctacaaactcctctgttcctcgttcgtccgaagaaactgtcgccagcacgacaaaagcgatagaaagtaaaacaactgaatcgacgactgtcaaaccgcgcgtagcaggaccaacagatatcagtgattattttacaggtgatgaaacaacgattatcgataattttgaagatccgatttatttaaatcctgatggaacaccagcaacaccgccgtataaagaagatgtgaccattcattggaactttaactggtcgattccagaagatgtgcgagaacaaatgaaagcaggcgattacttcgagtttcaattacctggcaatttgaaacctaataaaccaggttcaggtgatttagttgatgcagaaggcaatgtctatggaacctacacaattagtgaagatggtacggttcgttttacctttaatgagcgaatcacgtctgaaagtgacattcacggggacttttctttagatactcatttgaatgattcagatgggcggggcccaggagattgggtgattgatattcctacacaagaagatttgccgcctgtagtgattccaattgtcccagataccgaacaacaaattgataaacaaggccattttgatcgaacgcccaatcctagtgcgattacttggacggtagatatcaatcaagcgatgaaagatcaaacaaatccaactgtgacggaaacatggccaacagggaatacctttaagtccgtgaaagtctatgagttagtgatgaatcttgatggaacaattaaagaagtgggtcgcgaacttagtccagatgaatataccgttgataaaaatggcaatgtgacgattaaaggtgacaccaacaaagcgtatcgtcttgagtaccaaacgacgattgacgaggcggttattccagatggcggcggcgatgtgccttttaaaaatcacgcgacgttaacaagtgataataatccaaatgggttagatgctgaagcaactgttaccgccacatatggcaaaatgttagacaagcgcaatatagattacgacgaagccaatcaagaattcacttgggaaattaactacaactatggtgaacaaaccattccaaaagaccaagcagtcattacagacacaatgggggataatttaacgtttgaaccagattctttacatttatattcagtgacatttgatgacaaaggaaatgaagtcgttggagcagaacttgtggaaggaaaagattacaaagtggtaatcaacggagacggttcctttgcaattgactttttacatgatgtgactggcgcagtcaagattgattataaaaccaaagttgatggaattgtcgaaggcgatgttgccgtgaataatcgtgtggatgttggcactggtcagcattcagaagatgatggcacagccagtcaacaaaatattattaaaaacactggtgcagttgattatcaaaattcaacgattggttggacgttagctgtgaatcaaaataattatttgatggaaaatgccgtgattacggatacgtacgaaccagttcctggcttaactatggtacccaattcgttggttgtcaaagatacaaccactggtgctcagttgacgttaggcaaggatttcatggtagaaataactcgtaatgcagatggtgaaacaggctttaaggtaagttttataggggcgtatgccaaaacaagtgatgccttccacataacttatactacctttttcgatgttaccgagttagacgctaacaatcctgcgttggaccattatcgaaataccgctgccattgattggacggatgaagcaggaaacaatcatcattcagaagatagtaaaccgtttaaacctttacctgcttttgatttaaatgcgcaaaaaagcggtgtttacaatgccgtcaccaaagaaatcacttggacgattgcggttaatttaagtaataatcgtttagtcgacgcctttttgacggatccaattttaaccaatcaaacctatttggctgggagcttgaaagtctatgaaggcaatacaaagccagatggttcggttgaaaaagtgaaaccaacgcaaccgttgacggatatcacaatggaagaaccaagcgagaaaaaccaaaatacttggcgtgttgattttcctaatgatagtcgtacgtatgtgattgaatttaagacgtctgttgatgaaaaagttatcgaaggttcggctagttatgacaataccgcatcttatacaaaccaaggttcttcacgtgatgtgacaggaaaagtttctattcaacatggtggcgaatcagtgaaaaaaggtggcgaataccacaaagatgatccagatcatgtgtactggcatgtaatgatcaatggcgcccaatcggttttagacgatgtggttattactgatacaccctcaccaaaccaagtgctagatcccgagtcattggtgatttacggtaccaacgtaacagaagacggaactattacgccagataaatctgttattttagaagaaggaaaagattacacactggaagttaccaccgataatgaaacaggacaacaaaaaattgtcgttaaaatggcccatattgaagcaccttattatatggaatatcgtagtttagtgacttcttcagcggcggggagtacagacacggtatccaaccaagtgtcaattactggaaatggttcagaagtcgttcatggggatgacaatggcgatgtggtcgttgacattgatcacagtggcgggcatgccacagggactaaaggcaaaattcagctgaagaaaacagccatggatgagacgactattttagcaggcgcccatttccaaatttgggaccaagctaaaacacaagtcctacgtgaaggtacagtagatgccaccggggttatcacatttggtgggttgccacaagggcaatacattttggtggagacaaaagcaccagaaggctatacagtttcggacgaattagctaaaggccgagtcattactattgatgaagaaacttcagccgaaggagcacaaccaaccattattaaaaacgatgtcaataaagtatttttagaaaaaatggatgagaagggtaaaaagttagtcaatgctcgctttaaattagagcatgccgtaaccacgccgtttactcattgggaagaagttccccttgcgccggatcgaaccaacgcgaatggccagttagaggtggatagtttaaaaccagggctttatcagttcacagaaatcgaagcaccgacaggctatcttttagacacgacccccaaacgattcatcgtgacacaaaatacgagcggacaaattcgtgatgttcatgtcaaaatgcttaattaccaaggttctgctgaactaattaaaaaagaccaagcaggcaatccattagcaggtgctgaattttcagtccttgacaccacaggacaagcagttcgagaacacttagtttcggatgcaaacggaaaagtcacagtgacggatttagccccaggaaaatatcaatttgtggaaaccaaagcgccagcagggtaccttttaaacactgaaccaagtgctttcacgattgcagcaagcgatcggggcaaaccagcaacagttatagcaacggctaactttgttaactatcaaggcacggctaaattaatcaaaaaagatgtgaatggacacttattaagtggtgcgacatttaaagtgcttgatgcgaagggagaaacgattcaaacaggcttgacgacaaataatcaaggggaaattgttgcagagcacttagccccaggaaaatatcgctttgtagaaaccaaagcgccaacaggctatttattaaataccacgccagtcccatttgaaattgctgagaaaaatgctggtaaaccagcggtcgtggttgctagtgacaactttgtgagttacaaaggggctttccaaatcgtgaaaacgaatagcgcagaccaaccattagcaggtgctgtttttgaattatatgatcacaataaacaatcattagggattacagcaacgagtggcaaagatggcaaaattatctttagagacttggcgccaggtacctattattacaaagaaatcaaagcaccaaaattaccagatggcgcagattatattatttatcctgaattagtaaaagtagaaattcgtggtgatttcaaaggtgatccggagattttccaattaggggccttcgccaatttcaaaggacgcgccgtctttaagaaaattgatgccaatgcgaacccacttccaggaacgatttttaaattgtatcgaatcgaaaacggggaaaaaatctttgaaagagaagtaactgctgaaaaagatggttcattggctatggaggatttaggtgctggtagctatgaattagatgaactggatgcaacggatggctatatcgtcaataaacaacccatttattttgtagtgaagaagaattcaaatgataaacaaccactagatgagttagagtttgtaaattatcaagcagaagtaatgggacgtaaagtcaacgagcaaggtcaaaccttagcgggtgcagtttttgcaatttacaatgccgatgagcagaatcagccccaaggttcaccgataacattcttgaatcgtgcaggagaaaaagtttctgaaataacaacggataagactggcgaaatttacgctaaagggctaaatgaagggcattacgttttagtggaaacgaaagcaccaacaggctatctgttagacacaacgctacatccatttgatgtaaccgcccaattaggaaaagagcagccaattgctttaggcgatcttatcaattatcaaggaactgctcaattaaccaaagaaaacgaaacaggtgaagcattggcaggtgcggtgtttaaggtcattgatgaaacagggcaaaccgtagatggacaaaccaatctgatgtctgacaagcaaggcaaagtcattgcgaaaaacttagcaccgggaacgtatcgttttgtggagacacaagcgccaactagctatcttcttaatgaaacgccaagcgcaagctttacgattgccaaagacaaccaaggcaaaccagccactgtggtacttaaagcaccttttattaattaccaaggtgctgccaagctggtgaaaattgatcagcaaaagaatgccttagcaggtgctgaatttaaagtgacagatgcagagacagggcaaactgtcgctcgttcattacgttctgacaaccaagggttagttcaagtgaaccacttacaaccaggaaaatatacctttgtggaaacaaaagcaccggatggttaccaactgtctaagcaagctgtcgcattcactattgcggcaacagcgaaagacaaacctgaactcgtgaatgcgggcacgtttgttaacgagaaacaacctgtatccaaaaaaacaaaaccaaatcagccaacaacgaaacaagcagctagagagacaggttggcttggtttaccgaaaaccaacacacaagtcaattacttctttgtctttatcggcctcatgttggtcggtttggcaagttggctcttctataaaaagagcaagaaataa

SEQ ID NO: 3208 - DNA, 930 bp, Enterococcus faecalis
agatatgaggatagaatgatgaaaaagatgatggttttatacaacgaaacttcaggaagtagtgaaagtaaagagattgcagaacgctttaaaaaagctgcagaagcgagaggggaagcggttattttgcaaccttccaatccagacattgatcctgaagaaatgcggaaaaatgccaaagaaaatcaagtgggtgtcttggtcgtcattggtggtgacgggaccattcatcatgccgttcaaaattttaaagacaccattcgtgactatcaaatagggattattccaggtggaacagtcaataattttgcacgtgtgttaagtattcctttgaaagaagaagacgcctttgagaccattttggcaggacagaccacaccagttgactttgggatggtaaatcaagatgtgatgatttcgaccttaacgattggactattagcagatacagcagcaaatgtgacccaacaggagaaacaaaaatatggtcctttagcctttacaaagcaatttttccgcttattaatgaaaaagaaaaaatacaaactaaaaattgatggcgatgaaagacgttggcatggcaaagcccaattattaacgatgaccatgacgaattctgctggtggctttaccaatttcgatgccaatgctacgccagatgacggcgaagtccacattatcattttacctaagttagttttttacaagtttgtctattatttacctaaaattatcagaggacaattaaatgaaattcctggtgtcgtgtatttctctgggagtcaatttaaaattagtggcgaaaaagacaagaaagtccaaacacgaacagatggcgaccctactgatgatttaccgattaaagtaacggtggaagctgggggactcaacgtgtttgttcctgaaacgtccacatctacgaaagaataa

SEQ ID NO: 3209 - DNA, 1509 bp, Enterococcus faecalis
acagtgaaatgggatgaatatgttgatatattcgatacagatgtcgtttctaaaattattattttaagaaacttgccaattaatgaaggctggattgacatcaatgagttagcagaagaattacaattaaacaaaaaatcagtcaaaaaatacgtagaacttctaaaagatgacattacgtattatgttgtggataatgatgcttctttggcttttgaaaaggggcatggctatcgcttgaacttggcgtctagccaagcgttccagaaactttatacagcaatttttcgggatagtttaacttatcaagtaatggaagatttattctggggtcgatttaatggaattgtgccagcgacagcaaagtatcatactagtgatgccacgattcggcgcttgctcaaagggtttacagaaattttagcaccattgggtttagtaattaataaaagtacttggaaaattgaaggcaatgaagcgtatttgcgccattttgcttacactatttttatggacttaatccgtgatacttggccttttgactatatacaagaaacggaagtcgcacaaaccgtccaaaaaatgatggcttttttcaacgtagaagttgcggaaacggtgacacgccgagttaaatatatggtcgctatctcaaaagtccgtagtgcgcaaggcgccgaatatcgaccttcagccgagcaagaaacttatttagaaggtaataaacattaccaagcctttatagaagagatgacagctacaacccttttccttaacaaaaacgatttaacttttgtgtactttttcttgttagccaatgaccaattttatcaagatgaagccactgcacaagcaattttagcgcattttgatgagactgaagcacctgtttacatgttgactcatttagtccaacatttcttattagaagaaatacacatgacgccgcaattggagaaaattcgtccgcaaattttttattatttgtttgctacacatttatttgccgaactttactatgtccaaaatgtgaaaatgtacaatgtcttttggaataaaatcaaagaaaaatatccggttcttttagcagagttaattcaaggtttaaatcaactttacgaacaaacaggcaatgaattatttacaaataaagaatttttggctttgcgttattctagtgttttggcgctttccaatgatttaattcatcgcgaacaaaaaattgttttagggttaaaatcaggcttgccagtactggaagaagaacgggtgaaactttcgattgaaaataattttcgtcggttttatgcattggaagttttacgatacagtgaagcaagcaaagaagaatggcaaaatattgatttactattagtgacttctttggcagatgtggaaacgggccatccagagatctttttattttcaagtgagttaacgtttgagcaatataatcgtttgaaccaaaaaatagtaaaaattaacgagaaaagaaccacgtcactttaa

SEQ ID NO: 3210 - DNA, 300 bp, Enterococcus faecalis
ggtttctcacaagaatttttctatataatagaaagagcaagggaaggaaggcgggataagatgaaaaaacagatggaacaaattgaagaaatcttaagttgtgaagaaaatagtgcaggcatccgattaaaggaattggttgaagctttagaattggaagtcacaaatcaaaacttgttaaaggtaacaagtatcttacatatgaatccaaaattcaaaaaaatttatgcatacgaagacagtcgtgttattacgctgtatcaacttttacaaaataagccgttggaagtaacggaatga

SEQ ID NO: 3211 - DNA, 1962 bp, Enterococcus faecalis
  misc_feature (1938)..(1938): Nucleotide 1938 is "n" wherein "n" = any nucleotide.
gccgttggaagtaacggaatgaaaagagggaaacacatgaagaaaacaatgctcattcttctatttggtttattgacagtggttggtctgccaatggtgaccgaagcggttgaaccagttaacgcaacagatacaacgatttttggtgcgcaagcgatggtgcctaatagcacagaagatcaaacagataagttacagacgttgctgagtcagacagcaaaggaaggacgggcattatttttaccacagggaagttatgctctgtcaaaagatattgcgatttcttcaaattatcaattaattggcgatacaacaggagccactattttacataatgctacaggtgcaccgattcagctaacagacacaacgtacgggacgaaaaccaatgtacgacttcaaaatattgcttttgacggcatcaatgtgaccttaaaattgacgaatcaattaacgctagcaaacaatatcttttataatccattaaaaggattcgtggtcaatttaaatgcagacattggcgttaagatttcaggcaatattttcatgcgagacacggcacatatgcaatcgggaggtgattttaaccgagcgatttacattggtggttattcaacgccaagtcgcttccagtatatgtcagatgtagacatcgtggacaatctatttggtttaaaagtgacagaattagatgcgattaaaagtaccagtcgttcagacttagcagcgactattacacgtttgcaaacagccattgaagccggtgctatttcagtacctaatgaacaaaattatctatccaccggggttaattcttttaatatgctgaaggatgtaactgttcaacataattttttctattcaccctatgataatgaaaacttgaatggtctagtgggagatcatgcaatttatttccgtggcgcccaaaacatcacggtagtagggaatcatttacgcagactacaaaatggtccagctggcggatttaagtttaaatcaggccgtaatattacgattatgaataattatttgcgaaatacaggtctcattatgtatggaacaccagagatcggtttggcagaaacacaagcagagggggctatttcagaactctctaactggttagtggctaataacatttttgattggaagtattgggacaatcaatatgcaattgggatggaatacaatcgacatacaggaaataacaatgtgttcaatggcgtatttatcaacaatcagtttgttaactaccataatattccgcaaaaccgacgtcgggaattgttaatcgctagtggcggtgggttccgaccagaaacgagttttgtgaaagacaatactcgagatgatggccttaaaaacggccaattattggtagaaaattggacagaggcggactatcgcttaatgccagcaacatgggaatcattaatttcaccaacactttatgagcaatataaaaatacgccaattccggttagaaatactttagcaacccctgtggctacaacgattgtgcaaggacaatcaatcgatccgcagcaactggttgctaatacaaatgacgcggatgaagcagtcccagccgctaaaatcgtcaatccagaggtcttaaatgaaatcggccaacaaaaagtgactgttcaattaacttatgaaacagggtcattggtaacagtgaacgtaccggtgacggtagaggcccctgcaaaaaagcttgatttgtcccagctacaaaccgtttatgcttcgattggtgaagcaaaccaatatacagtttactcttggcagctattcactgccattgggcctaaaacaattgttccttcctattatcagcaggcgacacaattgttagcagaaggtcaggagagtcaggacaaaacccaagagcaagtggatcagttaacaagtaatttgcaatctgtaatngaatgccagtcttcaccacgagtt

SEQ ID NO: 3212 - DNA, 741 bp, Enterococcus faecalis
tacatggaatggagttttccttggctatcaatagatggcgacagaatgtacgatgatagcgacttctcgaaattttttgagggtcttttttcttatggcgtttctctaacaacagctaacgcattaaaggttactgccagtcctaatggcgggatgaaagtacaagtagattcaggctatgcatttgtcggtaaagtcttcttgaatagtactacaaaagctttaagtattgatgtagcaagcagtatgcaagacaggacggatagtattgtggttcgcgtggataaaagtgtgcgagatgtatttttagctgttaaaaagaacgatacgacagtaacccgtacatcggacgtttacgagctacagttagcgacaataagagtgccccgaaatgtttctagtattacaggcgatttaatcacagataaacgggcagatacgaaagtatgcgggtattcttcgccgtttcaaaaggttaacgtttcagggttagaagagcaatacggtacaatactaaaaaaaattgcggaagccaacaagacgagttatgaaaaaatcctaaatgattttaaaaactatgttgcaaaagcgcaaaccgatatggattctaatattgaagaaattatccaatcaggtaatggaaaggtaagtgcttttgatgttttaattcacgaatggtttgcagctttaaaaaatgaattagatacaaatcaagcatcaaatttacagaatcaaatcaat

SEQ ID NO: 3213 - DNA, 1113 bp, Enterococcus faecalis
cttccggccgttggtaggtggtgtgtaatggagttagaaattttcactcaggatcgagataatcaatggaaatttatttccgaaaaagtatttgatgggtttaaaagtttaactgttaaattaaattactatacctattcaacgtttgagctgtttgttggtttgacacctgaaaatatacaaatatttgttccagacactgttatttatatggaagggctctatttctatgttgatgccgtagttgtagacgatcaggcaacagcacaaataaaggtgtcggggaaatcacttcttgggaaatcattagatcgtattgtttaccgaatttataataaaacggcaccgccagagcaaattgtttgggaacatcttaataatgaagtagtaaacccttcggatgtaaaaagaaaaattcaatatttaaaattggattcccgagctaatttagggaatacgtctatccagtatcagaatagttatggtgtcgtagccgaagaagtggaaactctttgcacatcctacgattttgggataagagagacagctactaaattaggcgttcctggtaatacgttatctatttttaaaggtcgagatgtttcgagaacgattgagttttcagacgaatacgaaaatctaacaaaagcggggtatcagaacaataactttgatgaatcttcaaccgctattgttttcggtgaaggtgaaggctcggaacgtaaaagtgtagtggtgggtaacgagaaaacaggtctacaaagaaaagagttatacgtagatgctcgagacttacaaaagacaactgacgaggtcactttgacagattcacaatacctcgaagtcttgaaaaatagagggaataacaaactttcagaacgtaaacgaattttaacactaagtggtgaggttcccacaagctctaaactgtttaaattaggtgaagattatcaattaggtgacacgatcactattaaatcaaatctttacaacttgaagaaaacatcaacaattacaaccatcaaaaagacctatgattctaaggggctttttattgaaccaattttcgggaaagaaacacctaccatttttgatgttttgggcagggaatag

SEQ ID NO: 3214 - DNA, 888 bp, Enterococcus faecalis
gaggtaggttggatgtacgaacttatatacaagaactcggaaggttctttgattagtttcggtgttcaaccaccttttaccgttaaaagtaaaacaggcttcggagctgttgaaaataagatcataacagaagaacaatatggactagatggtgttattaaagtttcggagcgtttagataagcgcgatttaacgataaaaggtgaaataattgctagaggaacaaaggatcttttcaatttacagcatgaaatgataaaaacgttaaatcccaaaacaccaggtacgttgatttacagagtatttgatcgtgagtttcaaattgatgtgttagtagtaaaagctcccgacctgccagatccagctaaaaatattacacaggcttttacgtgtacctttctagctttagatccgtattggtctgatatgagtaaatataatacgttaattcccctagccgttgccacaaaaaaacacatgtggccgttagaaataacgaaagggtatgagtttgctacactaaaaagtggtgagattgttcctgtaaccaatgatggtgatgtatcagtgggaggcacgttctatttttctttaggtgcagaagctaccgatccagaagtgtataacgtaattactcaggaatttttccgatttaaaggttcatttgaagcaggtactaagtttaaactggtaactactcgtggacagaaagaagcaatcatgacggacccaaacggtgttgaatctaacgctatgccattgcgagaccctaattctacctttctgcagcttgaaaagggtgataactattttcaagtgaaagccactactggtattggtaacgtaattgtacaacttgacttccggccgttggtaggtggtgtgtaa

SEQ ID NO: 3215 - DNA, 3159 bp, Enterococcus faecalis
ggtgtcttaatgggcgaaattttcaagctttttggtacaatcggtgtcgataatggtgaagccaataaggctttggacgagacggaatctaagggacaatcaacaacaagtaaattagtggggttctttaaaaaagcagcgctagcaattggtgctgcttttgccgtagaaaaaatcgttaattttgggaagctaagcgtagaagccgcggcaagtgcacaagctttgaatgcacaatttacccaggtttttggtaagttagaaccattagcacaaaaaatggtagatggcatgggtaaaaaaatgaatatcctacctaaccgtataaagccgacattttctcgaattacttcaatgtttaaaggcttagggctagatacagaagccgcaatgaagaaatcagagcaagcaactaccttagcggcagatgctgcagctttctatgatgtttcactggaagatgcttcaagttctcttacttcgtttctaaaaggaaactacgaagccggtgaagcgatagggatttttgcaaatgatactcaaatggcgcagtttgctatttctcagggagtagtaggttctacaaaagattggcaaaatttagatgaagcgacgaaacaagctactcgtttagattatgctagcaacatgcttaaacaagccggagctgtaggacaggctgctcgcgaagccgacggatatgaaaacgttatgggtaacttaaaacaagcgtggcaggactttttagcaaaaataggcactcctattttaggaacggtcgtttcgattattcaaagcattacgaaaggcttaagtggcttaggtgataaggtagctgcagttataccagactttgggggattccaaaaatcggctatggatgcatttaacggcattcaaaattcaggttttgtgatgaatcttcagtgggcttttaagtggattagtgatgctataaaaaatgtagctcagattgtacaaaaagaactgcctgaaataaaagggatttttgaggatacgggcagtcaagtgtctatgatatttacgaaattggcaggagtatttagtacatggtcaattacttttgccgatattttcacagctgtagtacctaaagcgatagaaatttttaaatctgcatttaaaacaataaatacagtagtattacctgcgattgaaaaaatcgtagaggtgatttgggacatatcaggagctgtgagtgaggttattgtaaataatgtcatccctgctttttctaattttacaaaggctataactaaaaataaagctatttttagttctttaaaagctattatagttggagtaggagccgccttagcaacctataaaattatcatgaaaggtgtattaacagctactaaaatagcttcaggtgtcacaaaagcctatactgcaattcaaacagcttttaacgcagtgttaaacgccaacccttttgtgttgattatttcggcaatcgtggggttagtagcggcgttaatttattttttcacccaaactgaaacaggacaaaagatttggaaatcttttactaagtttctagttgatacatggaactccgttaaagataaagcagtagagatatttaatggtatagccgattttataaaaaatacgtgggattcaatcgttaaaacagctagtgggttaaaaggtagcttagtaaaaacgtggaatgatattaccgctaaagtctcagaaatttggaagaaattcacggatgctggcaagaaaacatttgatggtttcaaaaaaacagtagaaaacgtttttaacggcattaagaattttctacaaacagtgtggaatgtaatatacgctgtagtaggggcgataatcgttaatacaattaatatctggaaaggtatttttgatggttttaaagcgtattttcaatatctatgggatctcataaaagcaattgctaccggtgtatgggaaaaaataggtgataccgtcacaggaataattaacggtttcattggagttattaagggtatttttgatgcgtttaaaactttctttcaacagatatgggatgctgtcgtttactctgtaacaatcgcttggaacggaattaaaaatacagttacttcagtttctacggctattaaaaattttgtcactcctatatttaatgctattaaaacgacgattactaatgtctttaacgcaattaaaaacacagcaactaacgtttggaatgctattaaaacaacaatctctaatgttgtgcagactatccttaactttgttacaccgatatttaatactatgaaaaacacgataacaaacatttttaatgccattagaaacacggcttctagtgtatggaatagtattaaaacgactatttccaatatcgttacttctgttaaaaacacagtgataaatatttttaatgctttaaaaaattcaattacaaacatttttaacgcaattagaaatacagcatccacggtgtggaatagtattaaatcgaccgtgtctaatatcgttagtgcaacggtgaacaccgttaagaatttatttaacggtatgaaaaataccgtttcatctatttgggatggtgtaagaaatactattagtaatgtagttaacgcagtgaaaaatactatttcaaatgtatggggtggtattacaggaacagtttctaatatctttaatggtgtaaaaaatgctattgatgggccaatgaatgcggctaaaaatctagtgaaaaatgtagtagatgcgattaaaggtttctttaactttaatattagctggccgaaaattccgctgcctcacttttctattagtccggccggttggtctgcgggcgatttattgaaaggtaaaataccaagtttgggcatagaatggtacaaagacggcggtatcatgacgcaacctaccatatttggcatgaacggaaataacgcaatgataggtggagaagcaggggctgaggctgtcgcaccgattgacacgctgttaggatatgttgaaactgcagtgagaggtgtaatggctgaacaaaaagacggagatatcaatgttacacaatatattacaagtcccgagcctttaacgcctagagaaattgcaagagaaacaaaatacaagttgcaagaccttgcaacactgagaagatag

SEQ ID NO: 3216 - DNA, 738 bp, Enterococcus faecalis
ggcagcggaattttcggccagctaatattaaagttaaagaaacctttaatcgcatctactacatttttcactagatttttagccgcattcattggcccatcaatagcattttttacaccattaaagatattagaaactgttcctgtaataccaccccatacatttgaaatagtatttttcactgcgttaactacattactaatagtatttcttacaccatcccaaatagatgaaacggtatttttcataccgttaaataaattcttaacggtgttcaccgttgcactaacgatattagacacggtcgatttaatactattccacaccgtggatgctgtatttctaattgcgttaaaaatgtttgtaattgaattttttaaagcattaaaaatatttatcactgtgtttttaacagaagtaacgatattggaaatagtcgttttaatactattccatacactagaagccgtgtttctaatggcattaaaaatgtttgttatcgtgtttttcatagtattaaatatcggtgtaacaaagttaaggatagtctgcacaacattagagattgttgttttaatagcattccaaacgttagttgctgtgtttttaattgcgttaaagacattagtaatcgtcgttttaatagcattaaatataggagtgacaaaatttttaatagccgtagaaactgaagtaactgtatttttaattccgttccaagcgattgttacagagtaa

SEQ ID NO: 3217 - DNA, 348 bp, Enterococcus faecalis
ttttttctcttctatcgccagcttattgaaataaaagacggcgaacaccgaattaaagatttgttgttcaaaaggtacggagatccgatatcgttacttcgtacctatcgtttgtgtgacttaatggaatttattttttatgttcaagaagtggaacaagaagaaaaaatctacaatcagtggttacacacacagatgacgcagtctttaaaagaatttaaagaccaacaaaaatacagacctttacgtaaaaataaagcgaaatctaccacaaaagaagaacaacaaaaagcattagattttgctagtcaatttgttaaacctcgaaaagaaggtgaggtgtcttaa

SEQ ID NO: 3218 - DNA, 486 bp, Enterococcus faecalis
agaacggcttatcagtcgttcttttttacatggaggaataacaaaatgactttagaaatgcgtgaactaaaaggtgatgacttatttacattacttgccatcataggaaagcttgatgtgaaagacgagtttatcaatttatttgaaaaaaatattgaatctgctgaaaaagttgtaccgttggaccacaaatcaaaagagccaacaaaagcagagcagaaaaaaattgatgcagccaaagaaaaagctgacaaagaagctactaagcgtggcattgaaatgggcgcagcgatgttgcaaaaagtcatgcttaacttaaaagatattaagagtgatattaacggacttttagcagagttaacaggcgtttctatacaagaaatttcagctcttggattaaaggagtatacgactttattagtcgatttctttaagaaaccagaactagctgattttttctcttctatcgccagcttattgaaataa

SEQ ID NO: 3219 - DNA, 651 bp, Enterococcus faecalis
cggtcgattggaggaaaaaagaatatggcactacctaaaacaggttatacaaaaacaaccgcagacaattttgtcattgattctgcgacagtatttactgattttaaatacgataaagagaaagaggagtttaccggtattcccatgggggcaacttctggtggtgtagaaatcaaaacagaactttcttaccgtaaagtggaagtagacggtgcttatattatggacgtagtaggtttgaatgtgcttgaatcagccacagctacgatgaaagccaacttgattgaattaacagcagaaaatttacgccgatcattaaatgctacgatgacagatgctactacagatgaagcacctgctggttataaaattattaaacctaaacgctatttagaagaaggggactatatccctaacatggccgttgtgggtattcataatggaacgaaacagcctatcatcgttgcgttagataacggattagtgaaaagcggacttgaaattaaaacagaggatggcaaagaggtagtaattgaacaggaaatcacagctaacgcttcttatgaacagctaataaatgacgaattcccattccgtatttattacccaagtacatcgaaaaatcctatagagctaactgagagcttgtag

SEQ ID NO: 3220 - DNA, 387 bp, Enterococcus faecalis
gtgatggaagagtttatacgagagctggtaagaatcttacaagagatacacccagaaacatttttagaaacgaatcctcgaaaagaggtcatctatccatatgccacctttgattttgattccgagcctattcgtagaaatcaagatggtttttatctggatattgatatttttgacaaaaataattcatttttaaacttgcttgttctagaagacaagtttaaaacagctctttgttacaaaagggtactaactccagaactaaatctcatttttagttttcaaggatcaaataaaataccaacaaaagaagagctgttaaaaagaagaaatgtccgcttttatgtagcggtcgattggaggaaaaaagaatatggcactacctaa

SEQ ID NO: 3221 - DNA, 432 bp, Enterococcus faecalis
gtggcgaagaatgactttaaatttatcagctacaaagacaaggtaaaaaaagagttagacgcgacggcagaacgggggatgactaaagtcctcatgattatcaaagctgctgcaaagtctggtgcgccagttgaaacaggacagttgcgggaccggatagactatcaacttaaggctgttggaggaaaagtggtcggcattgtcggctcgccagaacaatacgccatttatgttgaattcggaaccggagaatttgctgaaaatggctcaggacgtaaaggtggatggttctttgagggaccagatggagaatggcattttacaagaggtcagaaaccacaaaagtttttaagaaacgcgtttcggcagaataaagaaaaagtcatcgaaattctagggaaagaatacggagctacatttaaagggggataa

SEQ ID NO: 3222 - DNA, 357 bp, Enterococcus faecalis
aaaaatgaggtggggataatgtactcacctcaaaccttttttctacaagaggtcaaaggccaaaagcctgacggattaggcgggcttattgacgattggggcttgtttaaagaagtttctggatatatcgacttggtgacaggaacagatgaaacaacgaaacagaacgcatttgtagaagaatctacacacattcttattattcccgaatttattgaggggataacagacaatatgcgagtggttgatcaaacaaatcgttattacgatattacgtattccgataatcctgttggcataaagcatcacaatgaaatttatttgaagtttgaaggtgttttaagtggcgaagaatga

SEQ ID NO: 3223 - DNA, 546 bp, Enterococcus faecalis
gaggtggctaacttgattatcagcattgaagaagcaaaaaaaattgatccatcggttactcagagtgacttagacgcgttcgaacagacagttaggcaactaaccaataataattttcaaaacgttcatatacgctttagggatgttgtttttaagggtaattctattgtgttaaaagataaccctcttggtttacgagtaggtgatacgattcaaattagtaattctaaagtaaacgattgcctaacaactgttgaagctatcacagaaaagacactggaaacagatgttgaagagcctttttttgatggctctttttctggtgcttttattacaaaagtaaaatatccagcagatattaaaatgggtattgaagaacttttacgatttaaaaaatcgatgggcgcaaagttaggcattaagtcagaatctatcgctagaatgtctatcacgtattacgatgtgaacgctagtgataatatcgagggctttcctgcagcaaagttcagttttttaaataaatataaaaaaatgaggtggggataa

SEQ ID NO: 3224 - DNA, 324 bp, Enterococcus faecalis
agtagctattttaaaagcagtaaaaaaagcgtaacgcctactaatccagcaacgggtatcacgcctagtcagaaaacatggacgggtgcagtaggcgcaactaagacatttactattgcagctaatccagtagatgccacaaacgcacaagctgtaatttcagcaattacagtgatatctagtaatgagagtgttgctactatcactaaaaataaaaacggtggatttgatggctcaattattgcagaaggtaaagcgacatttgaatttacttccggtgcgtttacaacctctattgcagtaacaggtacacctgcatcttag

SEQ ID NO: 3225 - DNA, 879 bp, Enterococcus faecalis
ttggaggaattttttatggctacaaaattttacacgaaacaatatgcaggcttattagccaaaattacagagaaaaaatcttattttttacgtgcgtttggaggagagttgcagacgtcggatgctgtaaaagatagcgacacatttttgatgctaaaaacttcagatacacctgtggtaatgcaaccctacaacactggtgaaaacgtagcgtttggtacaggaactggcaactctaatcgttttgggccacgtaaagaaattaaatctattgatacaacggttccttatgaatctccgttagcgattcacgaaggagtggataatatcacagtaaacgatgacgctgacgcagtagtagctgaaagattagaggaacaagcgattgcttgggctgagtatatcgacggtttattaggtaaagcattatctgatgcagcctctgaaacgattcggtttgaattaaccagtgaaggagtaactaagctgttctcaacggcgcataagacttttgtgaataatttagtttctaagtctcttgcttgggttgcttatgttcaccctgatgtttatgattttttagtagacaatggtttagcaacaacaactaaaaattcaagtgctaacattgatgaacaaacaatatataaatttaaaggttttgtattggttgaaattccagaaagcaaattacaaactggggaaatggctcaattttccgcggatagcgtaggtattgcgggcgttggtatttctgtaacacgtgctattgactccgaagattttaacggagtagcaatccagggagctggaaaatatggtaaacacatccctgaaaaaaataaagtagctattttaaaagcagtaaaaaaagcgtaa

SEQ ID NO: 3226 - DNA, 579 bp, Enterococcus faecalis
aaaacgatggaatggatcaaacaaattttagcaaaacatatgaaagaagatggtacgttggatatggaggctgctaataaagaaattgacaaagaatttcctgtaaatgcagtaccaaaagaccaatataataatctttcaagccagttagctgaagcaaataaaaccttaaaatcgctagaagctaaaacaaaggacaatccggatgttcaaaaagaactagctgatttaaaagaaaaggcagacgcgttggaaaaggaaaacaaagatttgaaaatcaatagccaagtatctgctgcattacaaagtgcaggggctaaggatattgattatgctttatttaaattaggtgagttagaacttgacaaagatgggaatgtgaaggacttagaaagtaaagtgaaagacttgaaagcttccatccctgattactttgaaaagaaggatacactcgatgataagtcgaaaaaaaagactgaaaataaagcaggctatcaaccaattgataacaaactgccaaaagggaaggaaccaaacgaaaaagatccatttgaagcaatcttatcaaaatacgagtaa

SEQ ID NO: 3227 - DNA, 264 bp, Enterococcus faecalis
cactcacccattaagcggctgagtgctatttttatatctaagggaggccataagatggaagatccttacgcttgtttagatgtagactaccaagagttttacgaatgggtatcaagccaagagcctgattttgaacaggccacaattgttgtacagcggccaaatggagaggtcactatttattacagtcaaaatggaagtttgcagctgctaggcatgctagatatagcaaaacaacaagtattagatgatatgaggagttaa

SEQ ID NO: 3228 - DNA, 210 bp, Enterococcus faecalis
caattcttgggtaaggtagatgtggattataggcgtagcgctttagagatgactgataaggaatttgatgagttatataagctgctagacacagcgaaaacgcctgaggaacgtgagcggttgagacaggaatattatcaacaacataaacttaatcaacccactttgctagatagatggcaagcggatgcagataattataacgaatag

SEQ ID NO: 3229 - DNA, 1470 bp, Enterococcus faecalis
ccccaaatgtcccaactcaacaaatggcagaaggagctacaggctctacagaaagccaattaccaggaaacggataatcagctatttaatgtttatcgtcaatcattaatcgacatcaaaaagcggctaaaagtttatacagaaaatgcagaaagtctttctttttccacccgtttggaagtagagagactttttagtgttgctgatgaaattaatgccattcttcagttaaactcaccgaaagttgaaaaaactatcaaaggctattctgcaaaacaagctgaacagggatattatggactgtggtatacgctagagcagtcacagaatatagcactaagtatgccgttaattaaccatgattatattatgaatctcgtcaatgcacctgtagcgggtaagaggctctcaaagcgtttatacaagtaccgtgatgaattagcccaaaatgtgactaacaatatcataacgggcttattcgagggtaaaagttatgctgaaatagctagatggattaatgaggaaacagaagctagctacaaacaagcattacgtattgcaagaacagaagcaggacgtactcagtctgtcactacccaaaaaggatatgaagaagcaaaagagctgggcatcaatattaaaaagaaatggcttgccacgatcgataaacatacacgccgaacccaccaagagttagacggtaaagaggttgatgtagacgaagagtttaccattagagggcattcggcaaaaggtccgcggatgtttggggtagcatcagaagatgtgaattgccgatgtacaacaattgaagttgtcgacggtatcagccctgaacttagaaaagataatgaatctaaagagatgtcggagtttaaaagctatgatgagtggtatgcagatagaatcagacaaaatgaatcgaaaccaaagccgaattttactgagctggacttcttcggtcaatctgatctgcaagatgatagtgataaatgggttgctggattgaagcctgaacaagttaatgctatgaaagattatacatcagacgcatttgctaaaatgaataagatactccgaaatgaaaaatataatccaagagaaaaaccttatcttgtcaatattattcaaaatttagatgatgctattagtaaatttaaattgaaacatgatataataacttatagaggtgtatctgcaaatgaatacgatgctattctgaacggaaatgtattcaaagaattcaagtctactagtatcaacaaaaaagttgccgaggattttttaaattttaccagtgcaaataaggatggtagagtagttaaattcctgattcctaaaggaacgcaaggcgcttatataggaacgaacagttcgatgaaaaaggaaagtgaattcctactgaacagaaacttgaagtatacagtggagatagtcgataatatattggaggtgacaattcttgggtaa

SEQ ID NO: 3230 - DNA, 1533 bp, Enterococcus faecalis
atggaagctttacttagtgaagacgtgaagattatcgctagtgctttaaaggcggcgattgacaaagatcgaaaatctacctcaaaaagagaggcagagacaggtattcggtactataaccatgaaaatgatatcatgaacaatcgtatcttttacgtagacgatgagggggtactgcgagaagacaaatacgcctcgaatgtacgaatcccgcacggctttttcccagaaattgttgaccaaaaaactcaataccttttatctaatcctgttgaatacgaaacagaaaacgaagaacttaaagagtatttagcagagtattacaattctgaatttcaagtagtgctacaagagcttgtggaaggttcaagccaaaaaggttttgagtatgtttatgcaagaaccaatgcagaagatcgattgtgttttcaagtggctgatagtttaaacgtgtttggtgtatacaatgaatacaatgaattacaacgtatttgccgtcattatatcactgaaatcgagaaagacggcgagacagtcgatatccatcacgcggaagtgtggactgaccagaacgtttattttttcgtagctgaggataacaaagattatgaattagatgaagctgaaccaattaatccaaggccacatgttttagcagttgatagcgataatgaaagcttattgcaacgaagctacggacaaatacctttttatcggttatcaaataataaacaggaaacgacggatttaaagtctattaaggcactgatagatgattacgacttaatgaattgttttttatcaaacaatttacaagattttgcggaagccatttacgttgtatcaggtttccaaggtgacgatctttcaaaattaagacaaaatgttaaatctaaaaaggttgttggtactggttcagatgggggcttagatgttaaaacagtaacgattccaactgaagggcgtaaaaccaaaatggagattgacaaagaaaatatctataagtttggaatggcctttgattcaactcaagtaggcgacgggaatatcaccaacatagtgataaaagcacgttatacactattaaacatgaaagccaacaagactgaagccagactacgagctttactagaatggatgaataagcttgttattgatgacattaatcgtcgttatactaaagcatttgacccaacagaagtttcatttacgtttactagagaagtaatggtgaatgaaacagatattgttaacaatgagaaaaccgaagcagagacaagaaaaattatccttgaatctatcttgcaagtagcacctcgccttgacgacgacaacgttttacgccttatctgcgaacagtttgaccttgactgggaagacgtgaaagaggcattagaagaggcggaatatacgcaaggtttgacggacaacaccgatgaagaagaaacggcggtgaccccaaatgtcccaactcaacaaatggcagaaggagctacaggctctacagaaagccaattaccaggaaacggataa

SEQ ID NO: 3231 - DNA, 1263 bp, Enterococcus faecalis
ttctacatgagccctaaaaagcgaaaatacttgaacttaatcaaaacgaacccggtaattttcggaaatttagttgggtttaccgacttagcagaactgcacaatgattggctaaagtcttttttgttcgagaaagacgatcaaacgctattggctcatcgtggctcatttaaaacaaccacattggcgattgctattgcattgttgatggttctttttcccaacaaaaatattatcttcttacgtaagaccgatacagacgtcgtagagattattttacaagtggctaaggttttatctagcaaatactttaaaacgcttgtatttgcattatatggtgttgaattggtgcttttgaaagagactacaacagaaatagataccaacttaaaaacatctacccggggaacatctcaattacttggtatggggatttatgcttcattaacaggtaaacacgcggatatcgttatcactgatgatattgttaacattaaagaccgagtaagtcgtgctgaacgagagaaaacaaagctgcagtatcaagaattgcagaatgtgaagaatcgtgagggccgttttattaacacaggcacgccttggcataaggaagatgcaatttctaaaatgcctaacgtcaagaaattcgattgttacgaaacaggattaattgacaaagaacaacgtaaagcgttacagcagtctatgacaccgtcgctctttgcagcgaactacgagttaaaacacatcgctgatagtgaatcgctatttactgcaccgacctatatcgataacactaaccttatttataacggtgtagcacacatcgacgcggcatacggaggtggtgatagcacagcatttaccatttttaaagagcaaaaggacggaaccattatcgggtttggcaagaaatggcagaaacacgttgatgattgcctacctgaaatattgcaactacatcaatactaccaagctggaacattttacactgaaacgaacggcgataaaggttatttagctaaacacctaatcgaacgaagtcaatacgtgcaaaagtatcacgaaaaaacaaataagtttatcaagatatcttcttatttgcggaagtattggagccgaataatttggcttgaagacacagacaaagaatatatagccgagatactagactatacagagaacgcagagcacgacgacgcaccagacagtgcagctagtctgcttagagaaattaagaacacaaataaatggctatactag

SEQ ID NO: 3232 - DNA, 540 bp, Enterococcus faecalis
tatactgttatcagtaaaattacgcagaaaaggcaccttcccaagaaaatgggaaggtgtctatttttgatacagaaaggcggtgaggtcatggcgaagtacacagagtggctaaccgaggaagggttaatcaaaatcgaaggatgggcacgagatggcctcatcgataagcagatagcccagaatatcggggtagcttattcaactttcagagaatgggtaaaaaaatttccggcactttcggcatccttaaaaaagggaaaagaagtcgttgatagacaagttgaaaatgctttatttaagagtgctacaggctacgaatataccgaagttacagaagaactaacagagaacggtatggaaattacaaaaaaggttaaaaaacaagtagctcctaatccaactgcagctattttctggttgaaaaatagaaagccggacgaatggcgagatcgaaaagaaactgaagtttcaggcgtgcttaatatctccgatgcagctgtcgaaatcgagcaatttttcgaggatgattctacatga

SEQ ID NO: 3233 - DNA, 483 bp, Enterococcus faecalis
ttctgtataaaaatgtacaagttacggttaatagtgaaagcgatgaacaagaaggtaggtgaaagtacattgtacgaatggttagtcagctatcaaaaattagaacaagaaatctattacttagactgggagctagaaacgtataaaaaagagttagaaagatggtgtgacccagaggatttaggaagatacacactaacaaaagattccaaagcttctaagttggaagatattatcgaagacttagaaaaacgtttagcgtggaaaatgaactcaatttacgatttacgaaagctagtttatagtttcaaaggattagatcaaaaaatcttagtagcaaagtatatcgaagggctatcgttaaaacaaattgcgggagaatttgggcatagctatggctatatcagaaataaacataaccagattttgaagaaaatcgaaaaaagtgacaatgatgtgacaattcccattgataaatcgtga

SEQ ID NO: 3234 - DNA, 1380 bp, Enterococcus faecalis
ttgagtttgaaagcaacgttacatccctatcaggaatactctaagaattttattcttgatcatccttactgtgctttgatgttagatatgggactagggaaaaccttatccagtttgacagctattgacgagttgttacacacgtttgaaattattgaaaatgtgttagtaattgccccattatcagttgccgagaaaacttggaccgatgaaattgaaaaatgggaccatctgcagcacctcactttttcaaaagtgttaggaaacccaaagcaacgtgaagaagctttattcaaaaaggcagatgtctatttaatcaatcgtgaaaatgtggagtggttagtcaattactatcaacgaaactggccctttaaaaccgtgattatagacgagttatccagttttaagtcaagtagtgccaaacgatttaaagcattacgaaaagtacggccgaagatggaacgtgttatcgggctaacaggcacaccttccccaaacagcttgatggatttgtgggcgcagatgtatttattggaccaaggcgaacggctaggaaagactatcacacaataccgtaataaatattttgtccccgcacaaaaaaacgggcatatcgtgtattcttggcaattaatcccaggagcagaagaagcgatttacaacaaaataagcgatatatgcgtgagtatgaaagcaaaagattatttgcgactgccaccgagaacggaaaatattatcgagctagacttgaacccgacaagctggaaacagtacaaagagctagaacgggaatacgtgttagaactcgaaggaacagacgttgtagctagtaatgcggctacactatcaaacaagcttttacagctgtctaacggcgctgtatacgacgaaaacggcgacggaagggaaatacaccaagaaaagttaaatgcgctagaacgcgttatagaggacgcacaagggcaatcggttttagtcttttatcaataccaacatgacctagaaagaatccaagcacgatttaaacaagcaaaggctttaaatgtgtctgacggggatattgagaaatggaacgagggaaaaatttctttacttttagcccatccacaatcagcagggcacggactaaatttacaaaaaggcgggcacattatcgtgtggtttgggcttacatggtctttggagttttatcaacaagccaatgccagattagaccgccaaggacaaacacagcctgttattattcatcacttagtgacgaaaggaactattgacgaacaagtaatcaaagctttacaagcaaaagaacaagggcaatcagcgctaatggctgcagtgaaagccaaaattgaggagtataggggggataaacttggataa

SEQ ID NO: 3235 - DNA, 405 bp, Enterococcus faecalis
cacggtatttttaaacggaggttgaagaaaatagatctgatggaacacatcaaccaatatcttatcagatgggaggccgaagtaatgcaaattgagaacgacattgaaaagtatctagttaggcagataaaacgcataggagctttatgttataagttcacttccccaggaactaggggtgttcctgacaggattattttatatcaaggcaacgtgtttttcgttgaattaaagaggcctggaggtaaaccaagaaaagaccagttaaaaattatagagaaattcaaagagcagcttatcccagtgtttgtcattgacagcaagcaaggagtggatatgttaatctacgcaatgcaaagcggtatagcaagagttatgcctgatatgtcccataaaaaggagtga

SEQ ID NO: 3236 - DNA, 2244 bp, Enterococcus faecalis
cacaagagactgtcgaagactacaaaaaaatgccaaagtctaagccagggcgaagttaaagacgttggggcgtttattggtggttggttaaaagaaggacgacggaaaagaggaaacacgcaacagcgtagccttgttacgttagatgccgacagcacgacgttagacttttgggacgatgtacagctgttatttgaccacgctgcagctgtctacacgacacacagccatttagtaaaaggtccacgttatcgcttgattattccgttaagtcgcccagtgaccgccgaagagtatgagcccctagcgagaaagcttgcggagtttttcggcatggataacttcgatgatacgacctatcaggcagaacgtttaatgtattggcccagtcattcgatagacggggaatatttcaccgataacatcgatttgccgtgggtcgatcctgacgaaattctaagccaatacgaagactggcgagatgcaagtttttggccagaaagttcccgtgggcattctatccgcgaaagacaagcaaaaaaagcaggcgacccattagagaaaaaagggattgtcggggcattttgtcgcacgtatgacatcatttcagcgattgaaacctttttgcctgacatctacgggtccacaggaagagaggaccgttggacgtttttagaaggttctactagtggtgggctagtgatttatgatgataagttcgcttattctcatcacggtacggaccctgtaggcgatcaactggtgaacgcgtttgaccttgtccgtatccatctatttggcgatttagatgaagacgtcaaacctacgacgcggattgaccgttatccatcgtttaaagcgatgcgagagttcgcaatggaagacaagcaagttaagaccttgattcagagtgaaaagctgtcacaagcactagaagactttgacggcgagctagacgaattggaagaggacgacaaagactggtttacaaaattggacctcgaaattgacgaatacggtcagattatggcttccgcgaaaaatttagaagtcattatgctgaatgacccgaacctcaaaaagaaaatttttatgaacagtttttctaatcgtattgaggtgaaagacaacttgccttggcggaagttagatcgagacaagatgtggaaggacagcgacgatgcggggttacgggtatatatcgaaaaaatttacggtattgtgaaccgtggcaaaatcgatgatgcgctagtccaagaaatcgaaagaaactcatatgatccagtgaaagaatacctagagagcttgcactgggacggagtgcctcgcgtagaaactttactaatagactacttaggcgcagaagatacaccgttcattcgagtagttacgaaaaaatttcttacagctgccgtagggcgtatttttgtgccagggattaagtttgactacatgctagtgactagcggtccgcaaggaataggaaaaacgctattgcctgcaaaattggcgggagactggttttctaacagcttagaaggtgtgacggggaaagactcttacgaagcgttgcaaggtgtttggatcatggaaatgggcgaattgtcagcgacaaaaaaagcagacattgaagccaccaagcattttattagcaagcaagaagacattttccgcgttgcttacggtcggcataagtcctattttaaacgccgttgtgtcttttggggaacaacgaacgacaacgagtttctaagagataaaacaggaaatcggcgtttttggccagtagatgtcggcattcaaccgattaaaaataaagtgtgggaaatgaccgacgaaacgcgcaatcagatatgggcagaagccgttgagttgtggcaagcaggagaacctttgtatctaacagacgaacaagaaaaactagcactagaagcccaagaaatgcacacggaaacctctagcatggaaggcgaaatccttgaatatttggaaatcccaataacggaagattggtacaaacgaagtaagcaagaaagacgagagtatattcaggggtgggggacggatattcaggaagaaggcgagattgttagaaacaaagtatgtattgcagaggtttggaatgaattgtataacggagattctaaaaacatacatcctggcaaaagctgcagaaattcgtcaagttttaagccatttatctgggtgggaagaaaaacagcaaaggtaataaaggacgtttaa

SEQ ID NO: 3237 - DNA, 222 bp, Enterococcus faecalis
aagaaaggaagcggaaagatggaacagccagaaaaaaacatcaaattagcctatgatggtgaaatccatcttgcagtgggtgcttcaaaaaccgagaaaaaatggaaaaatcggcagatgtcttggtcggattttacccaacgattgaaaacgccgacagtgacacaagagactgtcgaagactacaaaaaaatgccaaagtctaagccagggcgaagttaa

SEQ ID NO: 3238 - DNA, 306 bp, Enterococcus faecalis
aaaatgaaactaaaactagttgatgttgaaactaatcctcacgaagaagaagtggggacatgtgaattttgtatgagtgttgaaatggtcaatgagcccgtttttgtttttaaaaaagatattggggaactcgttcgtgttaaagcattcatttggagttggggtttttatgatgaggaaaatatcgaaaatatcgtagattttgctgcttatgtcaacgaacaggagtttgacgaagagcaagagctagattatagctggttaactaatctaatttacgagtacgaatatggaaaggattgttaa

SEQ ID NO: 3239 - DNA, 252 bp, Enterococcus faecalis
gaggttcagataatggcactaaattatgtaaagttagaactgacaactggtggagttttttcaactgggaaagtttttgaatttagttacagtgattatgaaaattttaagcaccgctttttaaaacgctttggaaatatttgttcaaataagaaatttaaagatttgataaaaaatacaaacgattttgaggaattagaatttgtattttttgatagcgatgattgggaattgaaaatcactaaaaattag

SEQ ID NO: 3240 - DNA, 1965 bp, Enterococcus faecalis
caaatgaaaacgttaaatattgatattgaaacgtattcggatgaagacttaaccaaagttggggtttataaatacgctgatagccccaactttgaaattttactttttgcttattcggttgatggtcagcctgtcgaatgtgaggacttaacaattagcgaaatacctgacgagatagtggctgcgctaacagataagaacgtgcttaaaattgcatttaatgcccaatttgagcgcgtttgtttgtctaagtatttaggtattccgtactacttagaccctgcacaatggcactgtacgatggttcacgcaaacgaattagggttgccagcttctttagggcaatgtgcgaaatatttaaacatcgaacagcaaaaagacacaagaggtacgcaactgattaacttcttttctaaaccgtgtaagccgaccaagaaaaacggcatgcgtacaaggaatttacctgaacacgctcccgaaaaatggcaaacgtttatagagtattgtattcaagacgtcaatgtagaaatggctatcgcgaataagttgaatcgcttccctgtccccgaaagtgagtggaagctttacaccttggatcagcggattaacgacagaggggcagaaattgaccacgaattggcaacggctgctattgatattatggccgatttaagcgaagcgggattaaacgaaatgaaggctttaacaggattggaaaatcctaacagcttagcgcaactgaaaaagtggctagaagaacaaggaacgcctttcgagaagttaggaaaagaggttgtgttaaaggctctagcattaggaaacttgcccgagaatgtggcggaggtattaaaattgcgccttagtttgtctaattcaagcacgaaaaaatatctgatgatggataatgcacgttgttcagataatcgcattcatggcattttacaattttacggtgccaaccgcacaggacggtgggcagggcgattattacaagtacagaacttgcctagaaactatttaagtgaaattgattttgcccgtcagcttgtgaaagcaaaagatgttgaaggcatcgaattaatgtatgaagatgtgccagacacattgaaacaacttatccgaacaggtttagttgccaaagaagggcatcggttcatcgtgtctgacttttcagccattgaggcccgagtgattgcttggtatgccaaacaagattgggtattagaagtattccgcacacacggcaaaatttacgaagcaacagcggcgcagatgttccatttaggcgaagtgacggactacgactggaaaagccacgaaggtaaagacatgcgccaacgtggaaaagtggcgacattggcgcttggttaccaaggcggaccaggggcgcttaaagcaatgggtgcattagaaaacggcattgaagaacacgaattacaagacattgtggaccgttggcgtacagccaataaacgcattaagaacttttggcatgaaacccaaaaagctgtgattgactgtttacaaaacggcggcattaaaaaaggccctcgtgggttgaaattttataaaaaagcaggattcttgtttattcagctaccaagcggacgaaaactagcgtatgcaaaagcgcatttaaaagaaggtgactacggtcctgctattttttatgaagggcaaggcgataaagtcgctttcacggaacagcaaacctacggcggtaaattggtggaaaacattgtccaagcaacggcaagagacgttttagcagaagcgatgcagaggcttgaacgtgagggctatcctattgttttccatgtgcacgatgaggcagtagccgaagtgccagaaggggaaaaatctattgaagaaatgaacaaaatcatgtctgtagttcctgattgggcggaaggcttgccgttaaacgccgaaggatttgaaacgaaatattacatgaaagattag

SEQ ID NO: 3241 - DNA, 555 bp, Enterococcus faecalis
gaaaaaatgaaaccaactaaagcacgtttaagaaaccatgtgattactttaaaaaattcagtggaaaaagaaataagagcgaaaaagacgaaggctattcgtgcacatattgaatcagagtggctgaaaattgatcctgaatttgagaaattgcatagatatttcagctcacttagaattcgccaaaacgtaaaaaatgaacttgtcgatttgttagaagaaaacagtttggaaatatggagcttttatcgcgatacggatgctagagattttgaaacctataagaaagggtttcttgaaaaacttaagtataactcaataaaagggcttgcgaaagtagaagctgtttacgatcaagaaatccaagaggtaagagaaacgtacaatgcgattattgcaaatgtagaaagagtgcctgctaaacaaggagtggcttatcttgaagagctagggatcaacgttgatgtttttaaagaggaagaagcacagcttccgatgattgccgttgataaaagtaaattgcggttaccatctgaaacggctgatagcaaatga

SEQ ID NO: 3242 - DNA, 255 bp, Enterococcus faecalis
aatgccccttttcttttgaaaggagaaattgaaatgggtaaacgaccaatttatttgcctattgaattacaagatgtttttgagctaattgaagagagaaaactggattctatatattttgaaaacggtagccgtttagaatccgtcagattgcaccgttgggaattcaaagaattcggagatactaatttttatgtcaaacaagaatatacaccagtagaagatcagggggtaggaaaaaatgaaaccaactaa

SEQ ID NO: 3243 - DNA, 585 bp, Enterococcus faecalis
gaatttaaaatggcaaaagtaactggaacgaaagtaattacaaatcaagtgagattaagttttgtgcatgtgttagaacctcatgcgatggaagaagggcaagagaaaaaatattcttgcatgttgattattccaaaagacgataaggaaacccttaaagcgatgaaagaagcaatcaaaacagcctatgaaggcgcaaaaggggataaattaaaaggcgttaaatttgagcgcttgaaaactacgctacgcgatggcgatgaagaaatggacaccgaagaacgcccagaatttgaaaacgcaatgtttatcaacgtatcaagtaaaacgaaaccacaagtcgtaaaacgtgaagatggtgtgcttgtaaaaacagacgatccagacgaagtctattcaggtgtttatgcgattgcatctattaacttttatgcttacagtactgcaggaaacaaaggggttactgctgggctaaacaacattttaacgttatgtaaaggggacttcttaggcggtcgtgccaatgctgaatccgattttggtgacctagaatgggaagacgaagaagacgatatgtttagctaa

SEQ ID NO: 3244 - DNA, 345 bp, Enterococcus faecalis
aaggtgggggataaaatgcctcaaaaatcatgtaaagaaaagcctgtgatttttagcggtaaaggttattacatcacaagagaagatacacgcaatgttgggctttatgtattcagtgagaataaagtgttatttaaaggatattttaacacgattgaagcggcgttatcgtcgttagttactaactcattgcttgtagatgaaacgtggacaatgaacctaaaaaactataaagaatctattttagagatgaaagaacaaatcatctcggacattaaacagtattttacagaacaagcttctaattcgttagatgatttagaagaagacgaattatttaactaa

SEQ ID NO: 3245 - DNA, 261 bp, Enterococcus faecalis
aggggtggagtaatggctatgaaaaaaattgacacacaagaggcaatagcttcaactctaaaaaagggaatggagaaagcggagcattcaggaattaacgtatctgaggatgaatttactgtcatacagccttttgatgatttaaatgcggttattgttaccgttgaaaacagcacaggaaatcgccctgtaaatattaaggtgacagatacggtggttatcttagaacgtcaagaaggtactttggatgtatttaagtag

SEQ ID NO: 3246 - DNA, 1179 bp, Enterococcus faecalis
ataagcatgccagtaggaaatcatgccttattaggggcgagtagtgcgcatcggtggctaatatgcccacctttggcacgactagaggaaaaagtaaaagatcgcggcagctcttatgcggaggagggaacaactgcacacgaattagcagagttgtatttggcgaagcggtttaagctattaaccgctagagcggtaaactcacgattgaaattttttgaacaagaccatccgtattgtgatgaatccatgaaagaatacgtcaccgcttattgtgatttagtagaagaacgtgtcaatcaatacgaaaatgccacagtcgaattagaacaaaaagtagatttttcaaaatgggtcccagaaggatttggaacttcggacgtggttgtcttatcagataagacgattgaaattatcgacttgaaatacggcaaaggtgttcctgttgatgcgtatttaaaccctcaactgatgttatatgcgcttggtgcggtggataagtacgacattatttacgaatttgaaaccgtgcgaatgacgattattcaacctcgtttagacaatatttcgacctttgaaattgaaaaagaagaattattatactgggctgataattacgtggcgcctcgagcagtgcaggcttgggaaggtacaggagaatggacgattacagacgacgttgtgaagttttcaaaagttcgtgcccaactacggccacgtgcggagagaaatttccagctgattgataagcacgaactgaaagaagcaccgcttttaaccaatgaggaaattgctgaaattttagaacgtgcgccagagataaaaaaatggctggaacatgtggaaacttacgctttacagaaagcaagggacgaaggcgaagagttccctggttggaaagtagttgctgggcgaagtaatcgaaaaatttcagataatgaagggctactgatggttttagaagccgaaggatttgaagatgaagacattttaaaaccgcaggaactgaaagccattgggcaattagaaaaagttgtcggcaagaaaaaatttgcggaattagctgcagacttcattatcaaaccagaaggaaagcctgttcttgttcctgaaagtgacaagcgaccagcgttaaacagcgtagaaaatgcgcttaatgattttgaaggggtggagtaa

SEQ ID NO: 3247 - DNA, 483 bp, Enterococcus faecalis
aaaatggcaaacatctatttaaatattgaagcagattcagcacaagagttaaaagaaattttatcgcagttagcaacagacaacgttgtagaagtcacgcaatctttaaatacagcggataaaaaagctacagaagaagtagaaaaagcagcgaagaaagaacctgcaaaaaagaaaaaagcaactgcgaagaagaaagaagaagtttctacggcctcaacctcagacaccgaaccatcgaaaactggggagaaagtcgcgcctactgattcagaaacagaagaagtatcagcaacagccgatttacacctaggggcaacaaaagcagatgtgcaagaagcgatgagaaaggctatggataaaggcaagcgacctatgataaagacctgctttagtcgttacaacgcagaaaaactttcagacttgaaagaagagcattacggtaaatttatcactgacttagaaacgttggtaggtgaataa

SEQ ID NO: 3248 - DNA, 198 bp, Enterococcus faecalis
caactcatgttatcgccgtacaagaaaattagacgaaaagcgggcatgtcacaagaagaattagcaaaaagaatgctacttcctgtgaagctgataaaagtttatgaaaaacgtaatgtagacccaccgttgcattatcacgcaaattttaaagcgattttcaatgtaacagatgaagacattaaccaattaaaataa

SEQ ID NO: 3249 - DNA, 255 bp, Enterococcus faecalis
aagttgatgagcgataaaaagatagtacttcctgactttttaacatcgaagcaaaaagagcagatattaaaagcatataaatggggaaaaccaatcattgtgaaaggtcagcaggggcctacaggaaaaacaacgcttgttaattgccttagaaaacagggaatccaagcatttgaagcatgggaatgtttaaccctagagctaaaccagataggaagtgtagcaactcatgttatcgccgtacaagaaaattag

SEQ ID NO: 3250 - DNA, 711 bp, Enterococcus faecalis
cacgaaaaaggagaaacgcaaatgagaaactattatcacgtaaaaacacaagaagcatatgataacttaatggcatttttggaagaacaagggtatgtctgggctacaggacttgagcctacaaaaaccgatttatggaaatggcataaagaaaaaacagttattgaagtaaataaagcgaatagagaattgtcaattattagtgctccttttctagagcatatattaggaattactgattttattgaatggacagcaacttcacctaaaaaatcaattgaagtctcaaaagaatttgataaatgggtacagaaaagtaaagaagcacatattgattataagagttggtgtatttggcaaattaataagatgggatgggatcattggttagaagatcctattacagatgaagagttgcttaccgggaaaggccttgagtggacgaaagaagtagaagaaaatcgagaactgcatacacgtgcgattcttgatggttacacagtgaaaaaagaaccaatgtatgaaattcctttgccatacgcgataaatgctacgggaaaacagcaatatttatcttacaacactgaaaagaatcgttttgtttgtacagcaaaatcagacaagctaaaacaacgtttcacagaaacagaactaaaagaagaagtacctggattttatcgggaattggcggtgaaagttgatgagcgataa

SEQ ID NO: 3251 - DNA, 195 bp, Enterococcus faecalis
atgttaacagctaatgaagcttttttagtacgtgaagcagtacgagaaaagattgaaacgttaagagatgcagtacgtcacgaaagtgcaaagcatccgacaatgcaggacctccgcacgctaaagcattttcaagcagagttagaacgttacgaagttgcttatcaaaaaatgctcaacgaagtggggtgttag

SEQ ID NO: 3252 - DNA, 213 bp, Enterococcus faecalis
aagatttgcagatgtttacattggaaagaaaggatgattacagtgaaaaaaatatatcaattaagacgtatagcggcactgttggttgtattcggactaggtctattggtaggtggcaatattggaccattaatccaaaacatttatatagcggtttttatcatttggcttttaatttatgatttagcgcttgaagatcgtgaggtgaaataa

SEQ ID NO: 3253 - DNA, 252 bp, Enterococcus faecalis
cggttctgtgatggttttagggaggtgaaagcaatgaaaaaattacacaaaatattgcaaaaggctagcgtggaattttatgaaacattttatggatcaattgactacaaacttttagatgccgctcaatttaaagaatttgaaagaaagattaatttacgttattgctgcacagatccagaaaaaaatatctcaatttatgaggtgtacgatgaaagatttgcagatgtttacattggaaagaaaggatga

SEQ ID NO: 3254 - DNA, 243 bp, Enterococcus faecalis
gaaccgcatgcacagattaattccgtaggaggttttacaaaaatgattatttgctacaaaggcgaagatttaaaagtgcaagacacttgtagcacatacgacaacatttcagttgtgttgtttaaagggcaaaaacgagtgtataaccatcgaacaaatgaaattgtaggcggcgatgaacgtttgccagaagcaaaagcaatccgaaattttaacggttctgtgatggttttagggaggtga

SEQ ID NO: 3255 - DNA, 288 bp, Enterococcus faecalis
gagggggtaaggggtatgccaaaaccggttaaggttgatctggaagctgtcgaacagaatccagatcgtgcgtcaattaaatatggaaataaagccgtagtacaaaaaatgtactcaatcactaaatctagtttagagaaatggctggctttaatgcaggacacgccgcaattttcgtctggtgtaattcatccaacacataagattgtattaattgagttagatgtgtttgatgagtttgttcgctggatggataaaaaccgttacaagaaaagaaagggcggatag

SEQ ID NO: 3256 - DNA, 357 bp, Enterococcus faecalis
aaaatgaactatgcacacgaaatgcccgcactaacggcagaagacattgttaaatcaagactgcatttaattgtcaaagatctatttaaagaagtttttaaaacgaacaacagaattaatcgatgcagagaaaaaatttcatcaagctcattatgcgatggaacaaatcgttattggaaagcacaagaaaatctagatgcatcaattcgtgaaaaaagttttttacttcatcaactactgcagttagatgtgtcttatcgatggacagaaaaactacatcaggaccgttattcttttgttaccgattatgtggctgtgctagttgaactaaacgagctaaagcatgagagggggtaa

SEQ ID NO: 3257 - DNA, 231 bp, Enterococcus faecalis
atgagaggagatgttcatatgaattgtacaagagggtctttgcgagcagcgagaatcaaaaagtcattaactcaaaaacgtttagctgagttaactggtgttactgaaacaactattcgtaatatagagaatggccgttcctgcccgagtttcaaactatcaattatgttagcaaaattacttaatgtagattttgaaactttgtgggaatacgattttcgtaattcttaa

SEQ ID NO: 3258 - DNA, 375 bp, Enterococcus faecalis
aggagctttaaaatgacctcatttgcgctgagattaaaggaattaagaaaaaataaaaaaatgtcacagcaagaacttgcaacttttttaggtatgaaaagagaaaatatttctaactatgagcgaggggtaattaccaatgtatctagtgatacattagaaaagatttcagaactttttgatgtatctatagactatttgctaggaaaatcagatacatctaatcagaaaaatgaatcgatggctaaacaagtaatgatgcgcatggatacagatggactttcttcaaagcaagtaaaagaactagaggatgagatggaacgtttcttttcatggagaatagaagaaataaaaaaagaaaatttaagtgaataa

SEQ ID NO: 3259 - DNA, 705 bp, Enterococcus faecalis
gtgaataattacaaggtggttttcaggatgacagtagaagtagacgagtaccttaacttttgcggtaccattaacgaatttatttcagcacacatgttatgtttgggaatgagtgttaataattatgagcatagatatatttgggatgaaatattaacatctaaatcaattaaaataaggccctttccatttgaaaaaacagcacgtagatctatatcaggtatgattattaaagatgattacgagactacgctagcttataattctaacatgggcgaaaaaagaaaaaatttcacgatatctcatgaacttattcacgccatgtatcatttagatagcgaaaataaggtattcaccgacacaaaagatactttatcctattcactggcagatatcttaccagaatttcaagcgaacattggagcatcttctatactactacccgaacctgttcttattaatgagctgaaaaaaggaactcctccttattttatctcaaaccgttacggtatatctgaacaagctatttttatgagattacttcagcaaatgcaggctagttttgaagcatcttacgttgccgcctatgatacggccaataagataatgaacggcaactctaaaaatttggcaattgaattaggacgaaacttagaaagaaaaattttatacagcaaccctttttatgaagcaattacgctataa

SEQ ID NO: 3260 - DNA, 552 bp, Enterococcus faecalis
atcgaaagaaggatgatagaaatgaaaaaaatgattaaatttgcaggcattgctcttatttttgcagctcttctctctgcctgtagcaacgcaaaaaataatacacaaaagaaagccgaaactgctgcccagtcaagcactattgaagcttcagacagtaacgaaaacgagcctaatacagaaaacataacccaagcagttaaacagttagaagaaaaatttaactctgacgagaaattagtaaaaatagatgttaaaaataatgttaaagatgacacatcagataaccctcacgctgtcattacggttaaggtaattaatgatgaagcaaaaaaaaatatggaagaaatgcagactgcgatagattccaactcaggtacagaggcacaaaagactgccatatacggaattcaattaaatgttgaagaagtagccaaaacattagaaaatgataacgatgttatttctttcatcacaccttacacgaatgggaacgacagaaccatagcaaaatcaactaaaaatgaaaatattattccgttagtaaaataa

SEQ ID NO: 3261 - DNA, 1239 bp, Enterococcus faecalis
gttcccataaaaggagagttgaatatgtgggtagaaaagaaaaaggataaaaaaggaaatatcacataccaatatcgcgaaagatacaccgaccctcggaccggtaaaacacaaaaagtcaccacgactttagcaaaaaatacaaaacaagctgagaatgcagcacgtcgtgagttagaaataaaaatccaaaagatactgaccgactacgaagaagagaaacgtctagaaaatttaatcaaaaacgagggcgtaataccaaatgataaaacgttagaagatatgataaaagaatggtttgattatattcaggatccaaaatcaaaagaacgtaaaaaaggttccacgctctcgggatatagctatggcattgattcactcttaaatgagttcttagtaatagaaaaagataaacgaatccaggatttaacttttgatgatatacaagcattttatgaccgtatgatttttgactttgaatatcaaaagtcctatataaaaagattccgtgcgattatccgtggtgcatttactctcgcctataagaaaagatacattaaaaatcttgatgccattaatctttctaaaatagtaacgccagcaaaaacggtggatgatcttattaatgagcaagtacctagatacttagaaaaagccgaggctgaacaaatatttcaagttttaaatggatacaacccactttatacgcaaatactcgaactacaatttcacactgggatgcgttttggtgaattgattgctttagaatcaaaaaactttcacgacggatttttgttagatattcatggaacttacgatcatgcaacacgtagtcacacccgaggacaaaaagtcccgccaaaaacaagaaaatcatttcgtactattgagttaggtgatgctgcagtacagattataaaagaccgcatgtatcataaccacttcattaaaaataaaaattctgattttttattcgtgacgtcaaatgaccgtccttatgatttaggcactattaatagttttattgctagccaccaaattgaatttaatacatccacaaaagttagcacgcatgtgtttagacacactcatataagtatgttagctgaaaaaagcatacctattcaagtaattatggatcgggtcgggcatgaggacagagagacaaccgaaaaaatatacatgcacgtcaccaagaaacaaaaaacagacttggttaagaccctaaacgagttataa

SEQ ID NO: 3262 - DNA, 1401 bp, Enterococcus faecalis
aaggacgatgaaaatatgacagcaattgaaccaaaattaacagagaaattccatcaagatttcttgaacaataataaacaaaatgccttacgacgtagtgtagtaaaaaatggtatcagcgcttcaggtgaatctgtacaaggagccgtgaataacgtacccgtcttttcagtcgacttagctactggaaaagtggccaatcaaaaacaaagcggtcgctgctggatgtttgcggcattaaatacatttagacatagaatgttaaatgcgtttcaattaaaagattttgaattatcacaaaactatacatttttctgggataaatatgaaaaatcaaactatttctatgaaaatattattgcaacagccgatcaaccgttgactagtcgtaaagtggcctttttattagcgacaccacaacaagatggtgggcaatgggatatgatcgtttcaatttttgataaatatggcgtagtgcctaaaacggcaatgcctgaaagcagcaacagttccaattcacgtgatttaaacaactatttaaataaaaaattacgcaaagatgcaacaattttacgtagtttaattgaaaaaggcgcttctgctgaagaagtccaaaaaaacaaagaagcaatgttacaagaaatttataatttcttagcaatctctttaggaacaccgccagaaacctttgattttgaataccgtgacgaagaaaaaaattatcatttggatcaaaatctaacaccgcaaacattctttgaaaaatacgttggcgttaatttacatgattatgtaagtattattaatgctcctacagaagataaaccattcaacaaaacatacactgttgaaatgttagggaatgttgtcggcggcaaagaagttaaatatttaaatgtagaaatggctgctttcaaaaaattagctgctgcacaattggaacaaggcgaatctgtttggtttggttgtgatgtcggacaatcttcaacacgtgacacaggaattatggcattagacgtttacgatatgaacgatctttttgatattgattttacgatgactaaagcagaacgtttagactttggtgaaagcttaatgacacacgccatggttttaacaggtgttgatatcgttgatggtcaaacaacaaaatggaaagtggaaaatagctggggcgaaaaagtcggtgaaaatggcttcttcgttatgagcgatgcgtggatggacgaatacacttatcaaatcgttgtgcacaaagatttattaactgatgaacagaaaaaagcttgggaacaagcgccaactgttttggcaccttgggacccaatgggagcccttgctacgcaagggctagactctttctttttgggaaaagggcacaaaaagggcaaaaataattaa

SEQ ID NO: 3263 - DNA, 459 bp, Enterococcus faecalis
tctctgccattgagaaaatccttcaccaacgtaagttggcaaagatgccaagttcacttcctaagaaatatctttaccaccattcctaaaaaaaattcaaaatctttcagagaagctgttaaaggaatttttaagttcacagatattaacttagcgcgtgaggctaaaaatcgattgattcatgattatatcgatcaaccaaaatattcaaaagcttgcgcatcattggatgatggattcgaagacgcctttcaatataccgtacaaggaaattcccacaatcgactaaagagtaccaatctaattgaacgactgaatcaagaagtacgcagaagagaaaagattattcgcatcttccccaatcaaacatcagccaatcgcttaattggagccgttcttatggacctacatgatgaatggatttattcttcaagaaaatacatcaattttgataagtag

SEQ ID NO: 3264 - DNA, 225 bp, Enterococcus faecalis
acttacatgatgctttttgtcttacttaatttactcttaaaactaattcttaagcagctgcttttgtcaaaagcacataggaatttcacctctccccaagtttacggcgagccttacggaagtatcattatcccaacttcacatcatcactttttattgactataaaaattattttagaatatttatcgctccttctttacgataagagatcatggcgtaactaa

SEQ ID NO: 3265 - DNA, 3921 bp, Enterococcus faecalis
ttcttgaagcaacaaatgaaagcaaaaaaacaatataagacatataaagctaagaatcactgggtaactgtccctattctttttctaagtgtgttaggagccgtaggattagctactgataatgtacaagccgcggaattagatacgcaaccagaaacaacgacggttcaacccaataaccccgacctgcagtcagaaaaggaaacacctaaaacggcagtatctgaagaagcaacagtacaaaaagacactacttctcaaccgaccaaagtagaagaagtagcgccagaaaataaaggtactgaacaaagttcagctaccccaaatgataccacaaacgcgcaacaaccaacagtaggagctgaaaaatcagcacaagaacaaccagtagtaagccctgaaacaaccaatgaacctctagggcagccaacagaagttgcaccagctgaaaatgaagtgaataaatcaacgtccattcctaaagaatttgaaacaccagacgttgataaagcagttgatgaagtaaaaaaagatccaaacattaccgttgttgaaaaaccagcagaagacttaggcaacgtttcttctaaagatttagctgcaaaagaaaaagaagtagaccaactacaaaaagaacaagcgaaaaagattgcccaacaagcagctgaattaaaagccaaaaatgaaaaaattgccaaagaaaatgcagaaattgcggcaaaaaacaaagcagaaaaagagcgttatgaaaaagaagtcgctgaatacaacaagcataagaacgaaaacagctatgtcaatgaagcgattagtaaaaacctagtgttcgatcaatctgtcgtgacgaaagacactaaaatttcgtcgattaaaggcggaaaatttatcaaagcaactgattttaataaagtaaatgcaggggattcaaaagatatctttacaaaattacggaaagatatgggcgggaaagttactggcaacttccagaattcctttgtaaaagaggcaaatcttgggtctaatggtgggtatgcggttcttttagaaaaaaataaaccagtgacagtgacctatacaggactaaacgctagttatttaggacgtaaaattacaaaagcagaatttgtttatgaactacaatcctcaccaagccaaagtggaacgttaaatgcagtattttcaaacgatccgattatcacggcttttattggtacaaacagagtcaatggtaaggatgttaaaacacgcttaacgattaagttctttgatgcgtcaggtaaagaagtactaccagataaagatagtccatttgcgtatgcgctgtcttctttaaattcaagtttaacgaataaaggtggccatgcggaatttgtttctgattttggggcgaacaatgcgttcaaatacattaatggttcgtatgtgaaaaaacaagcggatggaaaattttactcaccggaagatattgactatggcacaggaccttctggattgaaaaatagtgattgggacgctgtaggtcacaagaatgcctactttggttcaggtgtaggtctagccaatgggcgtatttccttttcttttggtatgacaacaaaaggaaaaagtaatgtgcctgtatctagtgcgcaatggtttgcctttagtactaacttaaatgcgcaatcagtgaagcctattttcaattatgggaatccaaaagaaccagaaaaagcaacgattgaattcaatcgatacaaagccaatgtcgttcctgtacttgtgccaaataaagaagtcactgatggccagaaaaatgtcaatgatttaaatgtgaagcgtggcgattctttacaatacattgtgacaggggatacgacagaacttgccaaagtagatccaaaaacagtaaccaaacaagggattcgagatacctttgatgcagaaaaagtgacgattgatttatccaaagtgaaagtttatcaagcagacgcaagtctaaacgagaaagactcaaaagctgttgctgcagcaattaattcaggaagagctaaagacgtgactgcttcttatgatcttcatttagatcaaaacaccgtcacagcaatgatgaaaaccaacgcagacggttccattgttttagcaatggggtataaatatttacttgtcttgccgtttgtagtgaaaaatgtggaaggcgattttgaaaatacagctgttcagctgacaaacgatggtgaaacggtaacaaatacagtgattaaccatgtgccaggtagtaatccttccaaagatgtaaaagcagataaaaacggtacagttggcagtgtttcgctacatgacaaagatattccgttacagacaaaaatttattatgaagtgaaatcttccgaacgtccagctaactatggcggaattaccaaagaatggggcatgaatgatgtcttggacacgacccatgatcgtttcacagggaaatggcacgctattacgaattatgaccttaaagtaggggataaaacgttaaaagcaggaacagatatttctgcctacattcttttagaaaacaaagacaataaagacttaacgtttacgatgaatcaagcactattggccgccttaaatgaaggaagcaataaagtaggcaaacaagcttggtctgtgtatctggaagtcgaacggattaaaacaggtgacgtagaaaacacgcaaacagaaaactacaacaaagagctgatgcgttctaataccgtggtgacgcatacgcctgatgatccaaaaccaaccaaagccgttcataacaagaaaggggaagatattaaccatggaaaagttgctcgtggtgatgttctttcttatgaaatgacctgggacttaaaagggtacgataaagactttgcctttgatacagtcgatcttgcgacaggcgtttctttcttcgatgattacgatgaaacgaaggtgacaccaatcaaagacttacttcgtgtcaaagattctaaaggggtagacattacgaaccagttcacgatctcatgggacgatgccaaaggcacggtgacaatctctgccaaagacccacaagcctttattctagcgcatggtgggcaagaattgcgtgtaacgctccctacaaaagtcaaagccgatgtttctggggatatttataattcagcggaacaaaatacatttggccaacgaattaaaaccaataccgttgtcaaccatattccaaaagtgaaccctaaaaaagacgtggttattaaagtcggtgacaaacaaagccaaaatggcgccacaatcaaattaggggagaaattcttctatgaattcacaagtagtgacattcctgcagaatacgctggtgttgtggaagaatggtcgattagcgataaactagacgtcaaacatgacaaatttagtggccaatggtctgtgtttgccaattctaattttgttttagcagacggaaccaaagtgaataaaggggacgacatttcgaaactattcacgatgacctttgaacaaggggtagtgaaaatcacggccagtcaagcctttttggatgcgatgaatctaaaagaaaacaaaaacgttgcgcactcatggaaagcgttcattggtgtagaacgaattgcggcaggagacgtttacaacacgattgaagaatctttcaataatgaaacgatcaagactaatacggtagtgacgcatacgccagaaaaaccacaaacaccaccagaaaaaacagtgatcgtgccaccaacaccaaaaacaccacaagcaccagtagagccattagtggtagaaaaggcaagtgtagagccagaattgccacaaacaggcgaaaaacaaaatgtcttattaacggtagctggaagtttagctgcaatgcttggcttagcaggcttaggctttaaacgtagaaaagaaacaaaataa

SEQ ID NO: 3266 - DNA, 414 bp, Enterococcus faecalis
agacgaaaagaaggacgaactgattgtccttctttttttagttatggaggggaaacattggaagcagtagtagtagaaagagaggcaaaggggatgaaagaaattgccatccaagaaaaagatttgaccttacagtggagaggaaacacaggtaagttagttaaagttcgattaaagaatacacgtgcaatggaaatgtggtacaacaaacaaattaccgaagaaaacattcaagagatcaccacgttgaatatcattaaaaatggaaaatctttggcattagaagtatatccagaaaaaagtatctatgtgaaaccaaatttaggcagaatcaatgtgcctgtcttttttatcaaaacacctattaacagaggagtatttgaagagattttcggcgaaacgttaaaagcataa

SEQ ID NO: 3267 - DNA, 186 bp, Enterococcus faecalis
ttttttgtgtttctttgtctaaccaaacatccacaaattccaacgaatttagcctatttaatagactgtaggcagaaaatccaagcaaacaacttagaacaaaagatacatacattggcttttctttctcctttacttatgcttttaacgtttcgccgaaaatctcttcaaatactcctctgttaa

SEQ ID NO: 3268 - DNA, 408 bp, Enterococcus faecalis
gtaaaggagaaagaaaagccaatgtatgtatcttttgttctaagttgtttgcttggattttctgcctacagtctattaaataggctaaattcgttggaatttgtggatgtttggttagacaaagaaacacaaaaaatcacactaaaacgctgtttttatgatacgtctttcaagaaacaaacactaaaagagttagaacgagtatatttccaattaaaagaaataatcaacgtgcaaataaacaagcggtctttaaatacgaatgacatacgtaatgtacgagaactagaggaaaaacaacaagaaataaaacgattcatgttagacgttttagaagatgcttattggaaagaattagcaaatatgccagaagaccaacgacacttagacgattgggatttcttttga

SEQ ID NO: 3269 - DNA, 291 bp, Enterococcus faecalis; identical to SEQ ID NO: 3180

SEQ ID NO: 3270 - DNA, 900 bp, Enterococcus faecalis
aacctatgtaagggtgagtttatgtatatctcttttgatttagaagcaacacaagcagaaaaaatagctttaccagtccatcaacgattttcgcttgttcaaggtcttttgctacttgaacaagccaatcaagaagttttggccacaaaacaaggaggcacgatagcctattttttatatacaggaaaagaacaagaactacctattttagaagcggaacttttattaccggtcaaacaaaaggatatgttagacgtattgcttgaaccagtcacaaatgatccaacgcttgatccaatagaagtaaaaaacttcttacagttagttaatcaatcgttgccaaagaagcaacgagctaaaagtaacaaaaaaggtacagaaaagaaggaaactactgatacaaaaccagtgaagaaaaagttttttttgtccgttagtcttatcacacttgttggattgattctacttatgagtggttttttattagggaaaaccaattctacaccttaccaagaaaaagaattagaggtaaaaaaagaactcaataccttaacagaacaagtcaatgatcaaaataaagtagaaacatttactcgattctttctaactaattactattcaggaaaaacagatgccaaaaccagacaagcagttttaaaaaagtttgtaaaaaaagaaatcttatctgattttttatcggagaaaagccgagcgagaagtatgtttccctgggaagtaaagaagaaagacaaacaatggacgatagtgttcattgttgtattaatcaatgaaaaagccgagcaatcgacaaagaaaattacgtttacagctgaagaaacaaaagaacaattggtcgtaatggaacgaccgacagaagaagattttgaacttacaaattaa

SEQ ID NO: 3271 - DNA, 876 bp, Enterococcus faecalis
tggaacgaccgacagaagaagattttgaacttacaaattaaaattaaaatggaggaaataatgatgaaaaaaattctttttgctagtttatttagtgccacactactatttgggggaagtgaaatttctgcttttgcacaagaaattatccctgatgatactacgacaccgcccattgaagtaccaacagaaccaagtacaccagaaaagccaacagatccaacaccgccaattgagccacctgtagaccctgtagagccacctattacaccaacggagccaacagaaccgacagagccgacaacaccaacagaacctacaactcttacagagccaagtgaaccagaacaaccaacggagccaagtaaaccagtagaacctgaaaaaccagttacaccaagcaaaccagcagaacccgaaaaaactgtgacaccaattaaaccaacagaatttgaaaaaccagtacaaccagcagaaccaagcaagccaatcgacgttgttgtaacgccaacaggggaattaaatcacgctggaaatggtacacaacagccaacagtccctattgaaacaagtaatttggcagaaatcacgcacgtgcctagtgtaacaacacctattacaactacagacggagaaaacattgtagctgtagaaaaaggtgttccacttacacaaacagcagaagggttaaaacctattcaatcaagttacaaagtattgcctagcggaaatgtagaagtaaaaggtaaggacggtaaaatgaaggttttaccatacacaggtgaagaaatgaatatctttttatctgccgtaggcggtatcttgtctgtagtatctgggtttgtcatctttaaaaaacgcaaagctaaagtataa

SEQ ID NO: 3272 - DNA, 240 bp, Enterococcus faecalis
gcaagaaaaaagagagaagcccaaagacaattcttttcttattcatggtacgctcctatctatacgctagcttatactttagctttgcgttttttaaagatgacaaacccagatactacagacaagataccgcctacggcagataaaaagatattcatttcttcacctgtgtatggtaaaaccttcattttaccgtccttaccttttacttctacatttccgctaggcaatactttgtaa

SEQ ID NO: 3273 - DNA, 1281 bp, Enterococcus faecalis
gagcgtaccatgaataagaaaagaattgtctttgggcttctctcttttttcttgcctatatttttagtctttggaggcttacttttttttcttttattattaacgagtacgtcagatacttcaaaaaatgattgtattcagccaagtataaataatccaactgatgcgacagatacacctaaatcgatcgagcagtttgtaaaaagccataaagatgcttaccttttatcattgaaagcaggtggctttttaccgtctgctagtatttctcaaacgatggtagaaaatgggtttaattttactaatccatcggggacgtcattttggcaggcacacaatatgggcggtgttaaaacgtcaaaaaaagaagattttcctgtaactttagcaacattcggccaagattctgttgatatttctggtacaaagccagggtcaaacgtcggtgatggcactggtggggcatatacctggtttaaagactacaatgctggaattgttggaaaagcagaatttatggcacaccagacactgtatacaggtgctatcaataatactgacggattaagtactttatcagctatttattcaggaggatgggctacagaccctacttacctcatgaagttacaggccacatataatagcttaggcaagcagtttcaatggttggaccaagaagcaatacagaaatatggtaacgcgccgtttaaaaagagcgaacttgtcctaaatattcccggaaaatccccaatcacaaacgaaaaatatggtaaaaattctgattgcgttgttacttcagatacatccgatcaagttacaggacaaaatactgccccatcattagaagtaccaagtgcgtataaaggaaagttaacacttccgcctatcgattcgaatgattacgctggaaataactatccttttggacaatgtacgtggtacgcctataatcgtatggcgcaaattggcaaaccaattgaatggttttcaggtgatggcggaaatggcgcaggttgggctaattctgctcgtgcgaaagggtacacagtagtaaaagtaaaaccaagtgttggttgggcagctagtatgcaaggtggcataggaggttctgcaccgccctatgggcatgtggcagttgtagagtatgtcaattctgacggcagtattcttgtgagtgaagcaaatgttattaatcaaggctctggtacgcgttcatggcgagtattagacagagcaacggttgaacaaattgattttattcaaggaaagggagcgtag

SEQ ID NO: 3274 - DNA, 645 bp, Enterococcus faecalis
ttttattcaaggaaagggagcgtagcaatgagggagcgtttaaagcaagcacaaccactagtgatcgttcttttacttgttttactgaccactttaggaggcggttatttcaatgagaaaaaagaaaatgcacaaataaaaaatcaaaaagagaaagagcagcaagtcctaaagaaaactttagaagaaaaaaacggacaactgaatgatttatcgagaaaaattgaacaattattggatgaaaaagaagatcctgttaatgagccattaacaaaagcagtgaatgccttattttcacttttgtttgactatgattctagcaataaagaacaaacagtcgctaaaagaaaagaaaaagcaactgtttatgcgacagagcaagggctatccggggtattcccaagggatgcagataaagttgttcctagtgttgtgaccgtttctcaattagataaggcacctgaaatttatcgaaccacacaaaaggatacaggaaaagaaaaaacagcattggtccggctagaatattcagttcgaatcgcaggaagccaaacgcaacgtggaaattttatttacaaggtaactttcaatgaagaaagcaagaaatttacaaccattgagaatttaggtgaggaaaatcagtaa

SEQ ID NO: 3275 - DNA, 417 bp, Enterococcus faecalis
gtgaggaaaatcagtaaaaaagtacgaattacaacacttattagtttaatgcttgttttaggggggataagcctctttttatttatggtaaaacaaaatgaaaaggcaatgctcaatcaggaaaaggagcgagcggccgtagttttagcagacaatgaaacacgtgtcttatttttttacaaagatacgtgtgctgattgtcaaaaggtctatccgacggtttacgaagaggaccagggcgaaaacaacattgtatttatcaatttaaatcaacctaaaaaccgtcactatataaagacatatacgttggaaaaagtaccaacatttgttacaccgaaaagaagatacgtaggaacagatacgagaaaaattcagcaattaattgctgaaaataacgacgaaagaagtgaagattaa

SEQ ID NO: 3276 - DNA, 321 bp, Enterococcus faecalis
agattaatgcacgaaaatcatgtgaatgaaaaggagacagccgtagaaaatacggaacgtattgctaaaaattatgcttatgaacgcccagcgattcaaacggcgctatttatcttatggcgggtgcataataagcagtatcaaacaggcgctcggatattttacgacgaattagaaaaggccaccaagacgtctaagaccgcttataaagaagcattagcttttttagaaggtgcaggcatggtggtaaacgaggttgtcgtagaaagtaaagtcccccaatcgttaattcaacgttacgggattttaaaagatgagtaa

SEQ ID NO: 3277 - DNA, 984 bp, Enterococcus faecalis
aaagaaaaagtgaggaaagagacacgtgtttattcattggttcaaataatccgagcaatcttcaggtcgaaagagaaagaaccagaaaattctcgaaccatttgtttttccccacgttcggcgaaaagtatttactcaatggtgtttttccttttatttttcttgataagcttatttttattaatgagttttggacgattaaacacgcttacaaggcttgcgatgcaaaagcaagtaaatcgtgaggaaattattgaaagcgtgaataaaggcgtagctgcaagtgatcaattgaaatatgacggaatgaaacttgtggatcgattatttacagtgtcctcaaaattagaaggaaaagagtactgggaagcgcaaataaccccttatttagctgctggattgcgtgcagaagatttaggtcttgataagacaaatgatgaccgcgttgcacgaaatgtacgctttattcgattagaaacagttgattataaagaatcactttacagcttgtactatgatgtccgttttactgaagggaaagaatggcgccaagtgcaagtgattttgcctgttagttatgcagaaaatgaactgaagttacttgatagaccaacgttaatgaatttagcgaagacaagtgagagtaacaaagttgtgtatgacgagcaacgttttatacctaaaggaaaagaagtcaatgaagaagaaacaaaaaaactaacggaatttaccaatcgtttctttgaattatatgtaaaaaatgatgaaaagttaggactaattgccaatgtaaaaggactagaacatgcgacgctagaaaaagtagatattacaagtctaagagaaacaggacaaggggtctatgatgttcgaggaacctaccaattcagttatgaagggaaaagtccgctaacgtctaacttctcattacaaattgaagcaacaaaagatagttattttattaaaaaaatgaatggagtgtaa

SEQ ID NO: 3278 - DNA, 276 bp, Enterococcus faecalis
atggagtgtaagaatatgtttgatttatctggtttagcaaataatatttcctcacaggtgattatactattggtaattttaggactggtatccttagttgtagcggttgcaacacaaggggccgcacgaggaattgcgacagtctgcttaatcttaattttaatcgcgttggttttagtgttaaaagatgctgaaaaaattggtacctggttgaaagacttaattttcaaaccaaatgccggctttattttcccaataaaaggttggcgattttga

SEQ ID NO: 3279 - DNA, 471 bp, Enterococcus faecalis
aaaaattggtacctggttgaaagacttaattttcaaaccaaatgccggctttattttcccaataaaaggttggcgattttgatggaatataattacacacgagaatttaaacaacctcacaagatttacagtatcaaaggggtagcattgccttttgcgccaaacggcattcgattggaacaaatttttgtaggtattggtatccttattctcttattgatattcgcgattatttcgtttgtcgctaaaatcaatttttttaccacaattattgctaatttttggctgatccttatcgtaggagtgggcgtccttgtgtggacgctcttttctttaaaatgggataataagagctttcttgattatctaattggccgaggaaacttcttgtatcaaaagaaaaaaagatatgaacatgggctacttgtccaatttcataaagaaaaagtccaatacaaagttagaaaataa

SEQ ID NO: 3280 - DNA, 498 bp, Enterococcus faecalis
gaggaaataatcttgattaataacgttacattagttggacgattaacaaaagacccagatttaaggtatacgcaaagtggaacagccgtaggtcaatttacgttggccattaatcgcaactttaccaatgctaacaatgaaagggaagcagactttatcaactgtgttatttggcggaaagcagccgaatcattggcaaattatgctagaaaaggcaccttgatcggtttaaccggacgaattcagaccagaaactacgacaatcaacaaggacaacgggtctatgtgacagaagttgtcgttgaaaactttcaattattggaatcaaaagaaatcaatgaacagcgtagggggcaatctacggggcaagcaacgtttgataaaagtgctacaagtaacgaacaaccagcaacagagaaccagacccccgatccattggatccgttttctccagagaatagtccattggatatttctgacaatgacctgccattttga

SEQ ID NO: 3281 - DNA, 570 bp, Enterococcus faecalis
atgcaaagaaagacaagtgaatcgatcacttgtctttttcgttcactgaataatcaaataatcagaaaaggcggtgagagattgaagtatcagtttttaatttcttactttgaattagaagtttttgtagcagcgagtgtgaaaaacttccaaatgatggaagaagaactgcttgaaaatagaatcaaagattaccaaaagaacgcacagaaacagacaacgttgttctattgggaaatggacggcgaaggaaaagaagacagagatatctaccacaaaaaacgtcctacccctgataatgcgtatttattatattctgaagaactagagtcagaaaaactggtagaagcagagaaagaggcaataaaaattgctgaaaaagttgggacaaatggttttcaatttatgcaaaagaataaagaaattgctgtttttattaaactgaaagggaattggttttggctacctttaacggacttgtcaaaagttccggattttcaatctccgttactgtcgttcagtaaaataaatgaaggggaacaattcttttcctctcttttgaaaacgtaa

SEQ ID NO: 3282 - DNA, 300 bp, Enterococcus faecalis
ataaacaaaaaaggacgagtggacagggcactcgttcttttttttggtcaaatgattagagcgatgacagtaaacaaaatcaataaaaaaagggaggtatatgttatgtacaaatttatattgtatacgttattgattattttaattgtatttcaacatattaagtatgaagaatggtttttcaaaaataatggaagagcagtaatggtgaaagatcattcaactaaatgggcccttttggtaactagcgttattgttttcgaagtttttctttttggcagcataatctttttgtattaa

SEQ ID NO: 3283 - DNA, 2532 bp, Enterococcus faecalis
atgaaaaaaatagggattaaaaagaaaggagttgataaggtgccactaaaaagtaaagagccacgcttagactttccaattgaagccattacggataattttctttttacgacctctaatgacgtatgggtaggttataaacttgcacaccaagtatttcctttgaataatctagactttttcaaggaatacatagaggacggaaaaggcgtattcgagcaagacacgttcgactaccattttatgaatattccagaatactttgatctcgacgaacagattgaagcgacgatcgataacttggtaaagggaagcttcgcggatttaggagaaacctattttcgacaagcgggcgatattctaaaggacgaagtccaaatgaacaaatatagtacgtatttgtttattcgttttaccgcacctatacaagttgctaatcctatggagtatatagaattgttcaaggaagttggacgtaaggcaatcaatgctttaacaggggttcatgtaccagttagccaactttatcgcgcatatcaaggattagaaaacaagatttacaaagacttatcaaattttaaaaatgtggaacgcatggatccaagaaccataggtcgattgttttattatttctttcaccgtgcaaatacccgtttacctgaacgaacgttacttccggaagaaatgacggaggggattattgaaaataacacgggatatatgactattgaacaattggataaaacacattaccttgcttttttaccgttgatcagtttgccaacgagtatgtttggaagtgcgattatacaaaacttgcaggatagtttgagtaccacgattgaaacccatgtcaaggttacatttcgccacccagataaagataaacgcgatgtacacaaacgtcgtaaaagaatctatgaacaggacaaagagcaaacacaagttgacggtattttagacgaagacgaagtgattttatttggggaagagcgattgcacgaactaagtaaaaagatacgtagtaaagaacgacgattgtgtcgtatgacgacaacgtttgtactttcagccgatagtaaacaagcattagaagagaaaataaaagaactcgaatttgttttggacggtacagactacaagttgtatcgtccgctagtcgaccaattaacattgtttaatcagtgtttaattggcgctaagagtcaatttaaaagctatgagcatgttgtttcaacaggttatgtagcggaccttggaatggatttagaaaaagaaattggtaaccgctatggcatgcctctaggtcgtgtcataactgctaaaaaattcaagtccgtacaacaggcactttctttatcaagcaaaatcgtatggtttttcccaaacttgactaaaaaagccatagaaggcgcacaatatacaaatgggaatacgctaatcattggcccgcctgggcaaggaaagtcagtacttgttaagtacattttcttgtggttaacgtttttaggacaaaaaatactttatattgatcctaaaaatgaaaccgtcctttttttcaaacgagcattagataagttcggacatattccagaatttaaagctttgtatcaacgcattaactttgtttcgctatcaagtgaagaaaggtatcgaggaatgttagatccattgctatttctgccaagagaagaagctattcaaaccgcacgaaacgtgttagaaaattttggtgaagttacgacagacagtcacactgcaagtgataagaagacgctgattttagattctgtcaatgcggtgatgaaaggtaaagggaaaaaacacctaacgaaagtaatcgaggttattcgcgaaaaagaccctaaattagcaaatttaatctctggccacaatgttgggttaggcaaaattcttttagggaacgattacagcgaacctattcgctttgaaaatcaaatcaatgtcttaggtacccaggggcttaaaatccctacacaagcggaaatagacagcggacgattaaacaatgaacaaatcgcaggcatgtctattatggaagttattatgaaaatgacaacgatcttctctacagataaaactgaagatgctgcgattattttcgatgaagcgaaaggatttgaagacacggcccaaggacgttttctaattgaaggaagtttacgccaaggacgtgcgaacatgaccgatatataccttgtcacacaagcgtttatggattatgataaagaagataaaaaagaactattgtcttataaatttgcgttccggccaaaccaaaaagaagcacagaaaaaagttttagaattttttggtatggatacgaacccagcaaatattcagttaattaatgaactaaaatcagggacttgtttattccaagaccatcgagggcgtagccagcctattgcaattgatgttttattcgatagttggttaatggccgtttcgtctactaataaagaggatgaagctactcaaatggcgttggcaatggaacaaggatcataa

SEQ ID NO: 3284 - DNA, 426 bp, Enterococcus faecalis
tggccgtttcgtctactaataaagaggatgaagctactcaaatggcgttggcaatggaacaaggatcataaaaaaggagaagtgagcatgaaaaaagtactaccttttattgccttagtcggcttgttattgttgtcaggttgtggaacagatatgaaaaagatattgactgccgatggtggtaaatggaaagtggaagaaacacgtgcaacttacactttttttgatgacggtaaattttcagctaatgactcagaggatagtgttagtgggacatacacttatgatgaaaaaaataaaaaaataacctttgacattactagcagaaactctttcattatggaaaaagtagaatacaaagataacaagattacaggggaaattggcgaaaaacaaagaacacttataaaacaaaaaacagaataa

SEQ ID NO: 3285 - DNA, 2358 bp, Enterococcus faecalis
agaggtgatactttggataaaaagtcactgataaaagcagccttactacttttagtcggctgtttttttgtgtttacacaaactacatcggtcaatgccgcacctaaacctgatgaaaataaggttattgttacggagccaactactaatgtagatacaatatatgatacttacaaagacaatgcttttgagttaatgactaaagaaaaagaaaaggattctgcttttggggttaaagaagcaattactaacgcttctgcagcagtcaaaacatttgtatgggctggggtaaaaggactcggagagtttaatgcagttatggtaaaaacactatttagtatggatattataactgctattaagcaaccgattatgaacctaacgtctagcatagcaactaatatgttaggaattgcgggaacgattggtattgcctttgtctttgttattttaggtgtaaaatttattggacaacaacgatacaaacggttttttggtatttttttaatgacgattcttatttttacgggtctttccgtcctaaaagatgccaacacgtccaattctttgtttgatatgatgtttagtgtagataaagaagttgagaccgcatttgtaaatattaatccggtcttaggtgatgttagtgtaccaatgacagagaaagggaaagataagaacggaaatgaagtagagcaaaaattatctgcagatcaacgagcaaaaagtgcaggaaatttaattgcttcacgtgttttttacaccaatgtgtatgaaccttacttgctcatgaactatggaacaagtgatgttaataaaatccgtaagaaaacagtaaagtataaagataaagaatatgatcgaatcaacttattgttagacaacgatatgaatagcgaagaaaataataagttaatggaagaagttgtaaattacgaaagtaaagacttaaaaaaccgttcaattatgtattataacaactggaccaatactttttatggcttgttttatctggtagttaacttcattcaaacagtggtgtatttcctgttaagtttcttacgattaattattgcggtcattcaattgttcctattgccgttgttaccgttattgttgttcgcaggactctttttaactgaaaccaacgtctttgcgaattactttaaaacctttggcatgactatttttatgaagggaatggttggttttgcgactattttctttgcaagtttcttatcactaggttttcaattaagcaatcagacagaaaacgtgtggcagaagatattaacgatacttatttatcttcttacaccgcttggcttgtatgtcttccggaaattctttgctaatcttgtcacgggccgtgtttcactttctgatggtgtcgggtttatcggaaatccttttggcacagaagctaatatgcgtagagcggcaaaagaacaaaagcaagagaataaggagcgcaggaaacaggcacaagaagaacgtaaagcagctattaaaaaacgtcaagaagaagcaaggaaacatggtaaagcagaaactggcttaaaacaacgaccattaaataaagaacaagaaaaacgtagtgcactacgccgtgagttgaagccaaggcctcaacataaagcgccaaatgctatcgaaaaagcacaagaaggattaagacaagcgcacgaaaaaggacgtatgcaagaacagaaatctgaagaacaactcaaacggcagcaacatgaatcagctcgtcaaaaagaatatgaaaaagatcgattgaaaaaacagaaatcacttaaaaaaattaatgatcaaagcgacgaatcaaccaatttaacagctttaagaaatcaaaatcggcgtactggacagcgaagtaaaaaacgcgaaacaggtcatcaaacacttatgaaacgacaaggagaaaaagtacttcaaccaacaaataaaccaaaagatatgaaaaagcaagtggttgctcgtagtccaagacgaacaggacaaccaacgactcgtcaaaatatccaaccaaaagtagcggcccaaacggtcaaacggagtggtggaacgttgggaagtaatcctgcctatcgacgtccagaagtacgaaaaaaaatggatcaagtgaagcaagtaacgcaagttgatgtacctcaaacgcattctacaccacaacgtgtacaatccaaggtaaatgagccaatcacacgtatgaatagacataatacgccaatcattaagaaagaaaagaaaactaaacaaccaccagttgttcgcagagaacgcaagaaacctggtacacagaagataacaaacaaacctaaaggagtgagacaacctcgtgcaaggaaataa

SEQ ID NO: 3286 - DNA, 2268 bp, Enterococcus faecalis
gacaacctcgtgcaaggaaataatttgtttaacaatgggttgctacaaccaaagaaaccgccaatagggcaagaacaacaaaaaatgactcgctaccaccaactccgactagtctttggattagtcggagttcttttatatccttttgcgattttaggcagtattccattactaattggtctagcggttgataaaaaagacaaggctgcaaacgtatttgatatggattatgagagttttttgaaacgaaatagtattgtctttcttagtttttcagctgtgttatttgtaataaatgtctttgcatttatcctctggattcccagagggtatctgtctgcgtatcttcttttccccttaaatcttcttcatacagcactgcgttttaattgggagacaatagtcgctttacttattgggtcaagtggaatgggagccatttttttggcattttcttcatttgtggcaaaacgaaaagtgatttcaaaggaagacgaacggaagaaaataaccgaatcaaaagcctacaaagaccgagaaaaaaataaatttgaagagtcgcaacgcttcacagatgaacaagaagaagcgtatgaagaagcagtagaaacggttgatattgacaagtataaagaactatccaatcaattattgcttggtacaagtgagttcgggttgccgtatatcatcaacttttcagagttcaatcagcatgttcttgttcccgcaacgacaggttcagggaaaacaacgttacttcaattacttgtccaacacgcagtcaaatttaattttccggtgatattgattgatggaaaaggcgctcgagatacattagaaagtatgcgagaaattgccaaattttatgacaaagaagtgcatgcttttacggatgatggcgatatgagatacaacccagtagagcatggaaatgacatatctattcgagataagttagtgtctttagccgaaacagaaagtgtcttttattcaggcgcagcgaaagctcttttgcaagtaacaattcaattgttagacgagtttaaaggagccaaggttactttatctggagacactcgtacgacagaaaccgttgaacgaagtctaccatttgttcaacgatttttacttccgagaaatgttttacacttatttgcggatgcgattttaccaaacaatcccaaactatttgagattgaagtagaaaagaaaatacaaaaacctaagaaaaaatcagtgaaagaaggaagcgagatactgcctgattcagaccttgataaagaagaaaaagaggaagattcacaaattaagaacagtaaatttagaaacatttcccaactaggaatagcacaaaaagaaacggaaacgattgtccttaatccagaaacattagatttagactcgtactatttattactaaaacgaaacctaagatatttgccaacagacaaagaaacaggagaaaatatcaaacaaaaattgttcgaacgattatttattcgttatgaacataaagattcaccgttttatttgtatgccacatcagaagcattacagacaaacattaacatgttattggacagtgagttaggaaaattatttgatactaaaaacgcaaaaaatgttctcgatgtgcaagaaattgtcaatcaacgaaagttagtttacgtatcgttcaatggattgatttacaaagaatatatccgcactttagcgcaaatgttagtcggagacgtaaattattttgcttctgaaatgtatcgaaaaaatgttaaacgtgaagtccttgtgatttttgatgaacctgcttcttatctaaatgaaacgtttattgatatggtaaataaaggtagaggtgcaggtgtttacggtattttcacccctcaaacgatggcagatattgcaaaattaggcgataaattaatggaacaacttgtcggaaatgtgaatactttgttcattggaaagaccaacgaaaaaggtgaagccgagtattggagtgaaacaatgggaacgtatcaagacattgatgtaacttcagttacggaacaagaagatggttattcagatgttggaaaatctgattggtcaggagatagaggaaccaaacgtaatgtagatcgcttcaaaattagtccaaacaagataaaagaattgcgtacaggggagtttattatttatcgtacagcagaaaatgtaaacctcccaccacaaaaagtttatgtgcgaaacgcactcgaatggttacaaaaaagtaattcaaaatag

SEQ ID NO: 3287 - DNA, 801 bp, Enterococcus faecalis
aaatgcggtgatactttgaaaccattactttacaattactttattgattattcaaaagaagataagatacacttgattcttttgtgtttactacatgaattgagagttgtatcggtaaaacaacttattgacttttgtcaatttgataatatggcaaaaaaaagtagtgtatacggtaatctaaaaaaactgaaggaaaaaaatctagtggaatgttcccaaatcggattaacaaaattttattacctaacaaaagaaggccataattacattggtgggtactacaccttgccaaaagttcctgaatacaatttacaacaccacttacaaattaatgattatctgataaaaatgttggaactttgtaataaccacccgcaccttaaagcggtagtatcagaacgccgtaaagtatatgaagtaaaagacgagaagaaaaatcaaaaaggcgtaaaatactttgttcctgacttcatttttatgtttttggatagtattggacgagaagtagagtggcaatttgaaatagaattaacactaaagacaaaacgacgttatagtcagggtgtgtttccaaaatacattaaacatttaaaaaattatgaagatgcacgcttaatttatgtaacacctagttcaatcattaaagaagaacttgatatgtttaaagaatattttattgacaaagaaggggacgagtacaaagaagtgtttgatcgattgcatgttttttcagctgaagaatttgaaagtgaattgaaacgattactagaaaaagataaattcattaattgggagtga

SEQ ID NO: 3288 - DNA, 504 bp, Enterococcus faecalis
ttgggagtgagtttcatgagaagaatagagaaagaattcaacaagaagctagccagttacgaaagagagttaaaaaaattaggatgtctggatgatgaaacagggcttattcccataagcaaaagacgatggcatgtcatttggtggcaacctgttacacttgcaaaaacaatcgtgagatcttttcgattaacgctagataatgaaaacttatgtattttaggagatgtagaaatcactatttatcatgatggaacatatggtatttctaaagaagctgtcccaatttttattaatgatttattgtctttaaaaaagttaattactattttctatggaacaccttttaacttaaattttgaaaaaattcgctgcgttaattttaacaggtattgtgtctctattcctgaaatttatgtcgagaaatttgaagtattaataaactacttgataattttaagtagctgcttacatgaagtgaaaaagcacgtagaatatgattaa

SEQ ID NO: 3289 - DNA, 282 bp, Enterococcus faecalis
aagaaggaaagcaaaatgctaacaacaaaagaaaaaaacagattaaaaaaaatggtagaaggaaacaaaacgtttcattattcttatgtcgatagacttagacaagatgtaagatattacgttaatcaatgtgaatcagctgttaaagctagagaaagcatggaaatcttagaatttatctacagtctattttctgataaagagataccagcatggtacacaaaagcagaccttgaaaatgataaaaaatcaattgaaaaattggaacgctgggcagcttag

SEQ ID NO: 3290 - DNA, 558 bp, Enterococcus faecalis
aaaattggaacgctgggcagcttagctgttcagcagcaatcagaaagggcgattagcatgaaatttatcaaagatgtaacgacattagaagaattgaaacgcgtatataaaaagctagctttaaagtaccacccagacatgggcggtactgataaagaaatggcgcaaataaataacgagtatgaagcgttgttcgataagcttaaaaatacacacaaaaataaagaaggtgagtactaccaaaaagaaacgacagaaacaccgcaagaatggcaagaaatcatacacaagttgttaacactaaaaatggaaaatgtttcaattgaagtgataggcgcattcttatgggtatcagggaatacaaagccttataaagaagagttgaaagctttaaatatgaaatggagcaacaacaaaaagtcctggtatttagcccccgatggatataaaaaacgcagtaagaaaaaatacaatatgagcgatattcgcaatatgtatggttcgcaggtagttaaagaagaacaagccaaacaaaagacattaacagcaacagcctaa

SEQ ID NO: 3291 - DNA, 261 bp, Enterococcus faecalis
ggaggaagtacaatggaacaacaacacccgactattcacacattaaaaattgaaaccgagtttttcaaggcagtaaaagaacggcgaaaaacatttgagataagaaagaacgatcgtaattttcaagtaggggatattttaattctcgaagaatatatgaatggcatgtatttagatgatgaatgcgaagcggaagttatttatataacggattatgcacaacgtgaaggttatgtggtgctaggaattgaattacattag

SEQ ID NO: 3292 - DNA, 489 bp, Enterococcus faecalis
aaaattagattatacgtccaaagaggttttacctctttggacgaccaaataaaaagaaagaaggaatcaagaatgattaaaacaagtgcagtaggaagattaacaaaaagttcagaactaagagtaacgtcaacagggaaggccgttgccaattttgcattagcttgcaaaagagaaagacttgataaagaagggaatgcccaaacgacttttattcaatgtgtaatctgggggaaacctgcagaggtgttagcaaaatatacgcaaaaaggttcattaattgcagtaaatggtgaattgcaatcacgttcttatgatgatcaacaaggacaaacgcattatgttacagaattagtcgtagcaggctttgaatttttagaatcaaaagaaactgtacaaaatagagaacaaaaacaacaaatgccagaaatggcgaacgccgaaccgttttatggtatggatgatatggaaccgcctgcttatcattaa

SEQ ID NO: 3293 - DNA, 597 bp, Enterococcus faecalis
aggagggagaaaatgaaaaagttaatcggtaaaaagtggctgctgcttacagcagtagccacttttttattatcaggatgcgcaagtcttgaacaaaaagcacaggatagtgtaaaagaagttactgaaaatgttactcaaactatttcaaacgatcaacgtataccagctgattttgttaggcacgtggatggcgataccacagtattaaaaattgacggaaaagaacaaaaagttcggtttttattaattgacacacccgagactgtgaaaccgaaaacaaaagttcagccgttcggattggaagctagcaaacgcacaaaagagcttttgtctactgcttcagaaattacgtttgaatatgataagggcgataaaacagatcgttacggacgagcgttgggctacatattcgtagatggaacattactacaaaaaacgcttgtaagtgaaggattagctcgtgttgcctatgtaaaagagcctacaactaagtatttggcagaactagagcaagcccaagaacaggctaaaaatgagtcactcggaatctggagcataccaggttatgtgacacaacgggggtttagtaaataa

SEQ ID NO: 3294 - DNA, 360 bp, Enterococcus faecalis
attattgaaagcttttggcgagaaattataacacaatatgttgtcgataacaacatattgtgttataattatatacataaaggaggggtaaaggtggctactacaaaaaagaaacctatacatgtaaatgttgatgaaaatttaaaagaagaagcagaacaattatttgatgatttagggttaaatatgacaagtgcaattacgattttcttaaaacagtctattaatgagcaagcaattccttttatgattaataagggaaacaaagagactctacaagcattaaaagacattaaagaaggaaatgttcatggtggattttcttccgtggaggatttaatggaggatttaaatgcttga

SEQ ID NO: 3295 - DNA, 276 bp, Enterococcus faecalis
atgcttgaaatattttacacgaaccaattcaaaaaagactttaagaaagcaaagaaacaaggaaagaatttagagaagttaaaagaagtattagtacttttacaagaacagcaaacattgccgccaaagtataaagaccacgcactaacaggaaattatataggtacaagagagtgccatattgaaccagattggttactgatttataaaattgacggtgataaattgatcctaactttagctcgaataggctcacatagtgaattatttcgatga

SEQ ID NO: 3296 - DNA, 1167 bp, Enterococcus faecalis
ggcggtgagaagatgaaagtttctgacgttatttcagttattttaaaaagtggcattcgtgaatacaagtatttaaacagcaaaattaaaccaatcggctataaagctgaagggaaaaaaggtgctatttttgggtttagatcaaaggagttaatgacggaatctcgtggaatcgttcttacttctcaagaagccttagctgaaaatgaagataaatttactcattggacccctaatgtttatagttatggtgcatatgctgatgataatagaactattgttaaaggccacaacgaaagaaacttgcaacaaatcaatacttttgtaatcgattttgatcgctcactaggtgaaatattagattctcaaatgattctcgatgctgcaattgatctggaactgatgccaacgctaattttagaaactccagggggatttcaagcgtatttcattcttgaaaatgcctggtacatttcttcaaaaaataattatcaatcaatcgaagtggccaagagagtatctgaaaatttaagaaaagcatttgctgaagtattgccttcggtcgatttggggtgcaaccattttggtattgcacgtattcctagaacagacaatgtagtctattactacccagcactgacacatgatatgcaacaactaatccagtggtccatgaaatttgagccaaaaagaacacataaaaaaccgaatcttaatgttgttgctgtaaagatgaatcagattaaagagcagtgggttaaagttttaattgataatccgcaagtcgtcggtactaaaggaaaactaggacgaaacaatgtaatttttactttatctttggcttactatgcgtcaaaaattgaacaagaccgctgttttgatgatatggatgtattcaacagttctttgaattatcctctatcagtttcagaaataaagagaattgttaagagtgcttactcaggtaaatataaaggcgcaagcaaaacctatgtgcaagaactagtgtcaaattggggattagaatcgttatctgaggaaaaaatgtttacacagcaaagaaatacttggtacaaatttaagaaggaacgtcataaaagaaaaaaatctcacctttccgaatggaaaaaagatattttagattaccttgagaacccagtgttatag

SEQ ID NO: 3297 - DNA, 378 bp, Enterococcus faecalis
attaccttgagaacccagtgttatagatatcgacctgaagttagtatgaagaaaacagatttgcaagcggctgttactttcaatgggcaatcgattcctaaaacatcacttgaccgtgcactacaagaattagtggccgaaggtaaattatttgtacaaacaaaagccggtaggggtggaggactagtacttgctactcggaaagcattaattcgtacagttattcaagtaaaacagcaagtcaaatatgcttataaacagggtattaacacattctttaaagaagctgatatgttactaacactgtttgaacaaactgataaaaacagtcggagagccagagaatacaaacaattaaaactatggaacactggataa

SEQ ID NO: 3298 - DNA, 1326 bp, Enterococcus faecalis
caacggagggtgataaaaatgaagaagtacaaaaagttttgttttttaggtgtttggttattacctttggttttagctagttgtggtacaaatactgctacaaatgattcacaagatataaccgaaaaaaaagtagaacaggtagcgactttggctgcagggacacctgttcaaagtttagatccagcaactgctgttgatcaaacgagtatgactttattatccaacgtgatggaaggtttatatcgattagatgaaaaaaatcaaccgcaaccagcaattgcagctgggcaaccaaaagtgacgaataatggcaaaacatataccattgtgattagagatggcgctaagtgggctgatggtacacaaataactgccagtgattttgtggctgcgtgtcaaagagttgtagatcctaaaacagcttctccaaatgtggaactgttttctgctataaaaaatgccaaagaaattgcttcaggaaaacaagcaaaagatactttagcagtgaaaagtattggtgagaaaacattagaaattgaattagttgaaccaacaccttattttactgatctgttatccttaacggcttactatccagtacagcagaaagcaattaaagagtatgggaaagactatggtacttctcaaaaatcaattgtaacaaatggagcatttaacttaacaaatttagagggagtaggcacttctgataagtggacgatttctaaaaataaagagtactgggatcaaaaagatgtttctatggataaaattaacttccaagtagtcaaagaaattaatacaggaataaatttgtataatgatggacaactagatgatgcacctttggctggggaatatgcaaaacaatataaaaaagataaagaatattcaacaacattaatggccaatacaatgtttttagaaatgaaccaaactggggaaaataaacttttacaaaacaaaaatgcccgaaaagcgattagctatgctatcgaccgggaaagtctagttgaaaaattactagataatgggtccgttgcttctgttggcgtagtaccaaaagaaatggcttttaatccagtaaataaaaaagattttgctaatgaaaaattagtggaatttaacaaaaaaaaagcagaagaatattgggataaggcaaaaaaagaaattgatttatccaaaaatacttctttagatttacttgtaagtgatggagagtttgaacaaaaggcaggagaatttctgcaaggacagttacaagatagcttagaagggttctgttgcaaagttttaaatctactatcaaataaggtagaataa

SEQ ID NO: 3299 - DNA, 705 bp, Enterococcus faecalis
aaaaagatagcaggaggaatgacgatgaatccttttaaaggaaagcaatttcagcaggatgtgattattgtagccgtgggctactatcttcgttataaccttagctatcgtgaagttcaagaaatcttatatgatcgtggcattaacgtttctcatacgacgatttatcgttgggtgcaagaatatggcaaactactctatcaaatttggaaaaagaaaaataaaaaatccttttattcatggaaaatggatgaaacgtacatcaaaattaaaggaaaatggcattatttgtatcgagccatcgatgcagatggtttaaccttggatatttggttacgtaaaaaacgggacacacaagcagcctatgcttttcttaagcggttagtgaagcagtttgatgaaccgaaggttgtagtcacagataaagccccctctattacaagtgcctttaagaaactaaaagaatacggcttttatcaagggacagaacatcgtaccattaaatacctgaataatttgattgaacaagaccatcgtccagtaaagagacgcaataaattctatcgaagtttacgcactgcctctaccacgattaaaggcatggaagccattcgaggattatataagaaaacccgaaaagaaggcactctcttcgggttttcggtctgtactgaaatcaaggtattattgggaatcccagcttaa

SEQ ID NO: 3300 - DNA, 246 bp, Enterococcus faecalis; identical to SEQ ID NO: 3000

SEQ ID NO: 3301 - DNA, 222 bp, Enterococcus faecalis
attattaggtatactactgacagcttccaaggagctaaagaggtccctagcgcctacggggaatttgtatcgataaggaatagatttaaaaatttcgctgttattttgtacaataaggataaatttgaatggtaccataaacgaccgtttatggtaccttttcattttcctgctttttctaaatgtttttggttctgttgcaaagttttaaataaagaataa

SEQ ID NO: 3302 - DNA, 204 bp, Enterococcus faecalis
gtaccgttacttatgagcaagtattgtctatttttaatagttatctattatttaacgggaggaaataattctatgagtcgcttttgtaaatttggaaagttacacgttactaaagggaatgtagataaattattaggtatactactgacagcttccaaggagctaaagaggtccctagcgcctacggggaatttgtatcgataa

SEQ ID NO: 3303 - DNA, 783 bp, Enterococcus faecalis
cttctgtatttatttatagatgtaatcacttcaggagtgatttacatgaacaaaaatataaaatattctcaaaactttttaacgagtgaaaaagtactcaaccaaataataaaacaattgaatttaaaagaaaccgataccgtttacgaaattggaacaggtaaagggcatttaacgacgaaactggctaaaataagtaaacaggtaacgtctattgaattagacagtcatctattcaacttatcgtcagaaaaattaaaactgaacattcgtgtcactttaattcaccaagatattctacagtttcaattccctaacaaacagaggtataaaattgttgggaatattccttaccatttaagcacacaaattattaaaaaagtggtttttgaaagccatgcgtctgacatctatctgattgttgaagaaggattctacaagcgtaccttggatattcaccgaacactagggttgctcttgcacactcaagtctcgattcagcaattgcttaagctgccagcggaatgctttcatcctaaaccaaaagtaaacagtgtcttaataaaacttacccgccataccacagatgttccagataaatattggaagctatatacgtactttgtttcaaaatgggtcaatcgagaatatcgtcaactgtttactaaaaatcagtttcatcaagcaatgaaacacgccaaagtaaacaatttaagtaccgttacttatgagcaagtattgtctatttttaatagttatctattatttaacgggaggaaataa

SEQ ID NO: 3304 - DNA, 795 bp, Enterococcus faecalis
atggctaaaatgagaatatcaccggaattgaaaaaactgatcgaaaaataccgctgcgtaaaagatacggaaggaatgtctcctgctaaggtatataagctggtgggagaaaatgaaaacctatatttaaaaatgacggacagccggtataaagggaccacctatgatgtggaacgggaaaaggacatgatgctatggctggaaggaaagctgcctgttccaaaggtcctgcactttgaacggcatgatggctggagcaatctgctcatgagtgaggccgatggcgtcctttgctcggaagagtatgaagatgaacaaagccctgaaaagattatcgagctgtatgcggagtgcatcaggctctttcactccatcgacatatcggattgtccctatacgaatagcttagacagccgcttagccgaattggattacttactgaataacgatctggccgatgtggattgcgaaaactgggaagaagacactccatttaaagatccgcgcgagctgtatgattttttaaagacggaaaagcccgaagaggaacttgtcttttcccacggcgacctgggagacagcaacatctttgtgaaagatggcaaagtaagtggctttattgatcttgggagaagcggcagggcggacaagtggtatgacattgccttctgcgtccggtcgatcagggaggatatcggggaagaacagtatgtcgagctattttttgacttactggggatcaagcctgattgggagaaaataaaatattatattttactggatgaattgttttag

SEQ ID NO: 3305 - DNA, 261 bp, Enterococcus faecalis
tatatcttttatatagaagatatcgccgtatgtaaggatttcagggggcaaggcataggcagcgcgcttatcaatatatctatagaatgggcaaagcataaaaacttgcatggactaatgcttgaaacccaggacaataaccttatagcttgtaaattctatcataattgtggtttcaaaatcggctccgtcgatactatgttatacgccaactttgaaaacaactttgaaaaagctgttttctggtatttaaggttttag

SEQ ID NO: 3306 - DNA, 276 bp, Enterococcus faecalis
tatagaagagaggcgggaacagtgattacagaaatgaaagcagggcacctgaaagatatcgataaacccagcgaaccatttgaggtgataggtaagattataccgaggtatgaaaacgagaattggacctttacagaattactctatgaagcgccatatttaaaaagctaccaagacgaagaggatgaagaggatgaggaggcagattgccttgaatatattgacaatactgataagataatatatcttttatatagaagatatcgccgtatgtaa

SEQ ID NO: 3307 - DNA, 909 bp, Enterococcus faecalis
atgagatcagaaaaagaaatgatggatttagtactttctttagcagaacaggatgaacgtattcgaattgtgacccttgaggggtcacgcgcaaatattaatatacctaaagatgaatttcaggattatgatattacatattttgtaagtgatatagaaccgtttatatctaatgatgactggcttaatcaatttgggaatataataatgatgcaaaagccggaggatatggaattattcccacctgaagaaaagggattttcctatcttatgctatttgatgattacaataaaattgatcttaccttattgcccttggaagagttagataattacctaaagggcgataaattaataaaggttctaattgataaagattgtagaattaaaagggacatagttccgactgatatagattatcatgtaagaaagccaagcgcaagggagtatgatgattgctgcaatgaattttggaatgtaacaccttatgttattaaaggattgtgccgtaaggaaattttatttgctattgatcattttaatcagattgttcgccatgagctgctgagaatgatatcatggaaggtcggcatcgaaacaggctttaaattaagtgtaggcaagaactataagtttattgaaaggtatatatccgaggatttgtgggagaaacttttgtccacctaccggatggattcctatgaaaacatatgggaagcattatttctatgccatcaattgttcagggcggtatccggtgaggtggcggaaaggcttcattatgcctatccggagtatgataggaatataacaaaatataccagggacatgtataaaaaatacactggtaaaaccggctgcctggatagcacatatgccgctgatatagaagagaggcgggaacagtga

SEQ ID NO: 3308 - DNA, 750 bp, Enterococcus faecalis
acgaggagagttcagatgaaagaaaacaaatatgatgataatatattttttcaaaaatacagtcaaatgagtcgctcgcagaaaggactggctggtgcgggagaatgggagactttgaaaaagatgctacctgattttaagggtaagcgtgtgcttgatttaggatgcggctatggatggcactgtatatatgcgatggaaaacggtgcttcctctgtagtaggtgttgatatttctcataaaatgctcgaagtagcaaaaggaaaaacccattttccacagattgaatatgaatgctgtgccatagaagatgtggatttcccagaggagagctttgatgtaatactaagttcgcttgcgtttcattatgtagcagactatgagaatttaataaaaaagatatataggatgctgaaggctggtggcaatttagtttttacagttgaacatcctgtttttactgctcatggaacacaagactggtattataacgaaaaaggagaaatactgcatttcccggtggacaattattattatgagggcaaacggacagctatgtttttggaagaaaaggttacaaaatatcatagaacactgaccacatatctaaatacactgctttcaaatagttttataataaatcagattgtggagccacagccgccagagaacatgatggatattccggggatggcggatgaaatgcgacgcccaatgatgctgattgtatcggcaaaaaagaagatgtaa

SEQ ID NO: 3309 - DNA, 891 bp, Enterococcus faecalis
cgaataaaggaggatgtttatatggtaggtaatgttattcaaatagtaacagagaaattatcatctttgccttttatagaaggcatcgtattagggggctcacgtgcaagaggcacccatacagaaaattctgatatagatatcggaatctattacaattcagactcatttgacctgacagcgattaatcaaattgctacagaattggatgataaaaatagaaacaaccttgttgtgcctcccggagcgtggggtgattggattaatggcggcggatggttatttataaatgggtatcatgttgacttgattttacgtgatataaaacgggtagaacaaataatcaaagatacggagcaaggaattgttactgccaattatcagaccgggcatccccatggttatataagtgcaatgtatcgtggagaattagcgattagtaaaatactatatgctaagaacgaaagcttatgcgaattaaaaaagcaggcagaaatttaccctactgctctaaagaaaagcttgatgaacttttttatatttgaagctgaattctctttaatgtttgtaaaagcaaatgcgggggtagaggataaatattatattgcaggccatgtttttcgtattatttcatgcttaaatcaagtactatttgcatgtaataatgcttattgcattaacgaaaagaaagctataaaactgcttgaaacttttgaatataaacctgaaaaatatgccgaaagagttaatcatatttttgaagtactcggtctttctctttttgaatgctacgatatgaccgagaaactttataaagaagtgaatgaaattgtatcggagataaataactttttaaacgaggagagttcagatgaaagaaaacaaatatga

SEQ ID NO: 3310 - DNA, 240 bp, Enterococcus faecalis
acttggaggtgctgtatgactacggcagaaatgattaaagaactgtgtgagcaaatgaatataagtgtttccgaacttgctagacgtattggccagactccacagaatttcaataaaaaattacaacgagaaacagtaaccttggatgagttgaaggccattgctgatgtgctaggtgtcaagtttgtgcaggcatttattttaccagatggagaagaaataaaaatatctaacgaataa

SEQ ID NO: 3311 - DNA, 1578 bp, Enterococcus faecalis
aaagcgaggaataaagtgacagagaaaaatataatggttattcctgctcgtaaaagagtaggaagtacagccgcaaaagaaaagataaagaaacttcgtgttgctgcctattgccgtgtttctacagaaacagaagaacaaaattctagctatgaggttcaggtctcacactatacagagtttataaagaaaaataatgaatgggagtttgctggcatctttgcagatgatggtatctctggtacgaacactaaaaagcgtgacgaatttaatcgcatgattgcagagtgtatggacggtaacatcgacatggttattacaaaatccatcagccgatttgcgcgtaacaccctagactgccttcaatacattagacagctcaaggataagaacatatcagtttattttgagaaagagaacatcaacaccacggatgccaaaggtgaggttttgctgactattatggcatctttggcacagcaggaaagccagagcctttcacaaaacgttaagcttgggctacagtaccgataccaacaaggaaaggtgcaggtcaaccataagcgatttatgggctacacgaaagatgaagatggaaatttaactattgtccccgaagaagctgagattatcaaacgcatctaccgagaataccttgagggtcagagtctagtgggcattggtcgagcccttgaaaaggatggtattttaacagcagcgggaaaaccaagatggcgaccagaatcagttaagaagatacttcaaaacgaaaaatacatcggagatgcccttctgcaaaagactgtcacagtagattttctgaccaagaaacgagtgaaaaatgaagggcatgttccccaatattatgttgaaaatagccatgaagcgattattcctaaagagttatttttgcaggcgcaagaagaaattcatcggagaagcaatatctacacaggagaaggcaagaacaaaagaatttacagtagcaagtacgctttaagtgccatcaccttctgtggagattgtggcgatatttatagacgggtctattggaatatccacggaagaaaagaatttgtctggcgatgcgtgactagaatcgagcaaggtcctgaagtttgtaagaaccgaaccgtaaaagaagatgaactttatggtgcagtaatgactgcgattaataagctacttgcaggtgggaacaatatgataaagacactggaagagaatattcatgctgtgattggcgaaaccacagaataccaaatttcagagattaacaactcactagaggaaaaacaaaaagaactaatcaagctggcgaacaagggtcaagactatgaccacttagcagatgagattgatgagctgagagacaagcgacagatccttttagtagaagatgcctccctcagtggcgagaacgagcgaatcaatgagctgattgaatttatccgcaagaacaaattccgcaccttagaatatgatgataagcttgtaaggaagataatccagagcgttacagtctatgaaggccacttcgtcatagccttcaaatctggcatcgaaatggaaatatga

SEQ ID NO: 3312 - DNA, 417 bp, Enterococcus faecalis
atggcatatattccatatggatacaaaattcaagatggagtggttactgtcgatgaaaaggcagcaggtcaagtaaaggtattctttgagaaatacatatcaggactatcccttacagtggctggcgaacaggcaggtattgaaaagacacattctgtgatggggcgcattttgaaaaacgtcaactaccttggaaatgatacgtatccagcaattattgataaagagatatttgataaagctgaagaagttagagataaacgtgcaaaggatttaggacgagtggtagagcttgccgctttcacctctccccctcccaaagaacgattcaaaatgaaaaaggcagataataagatgccagtggatccttttgaacgagcagaatacttatacagtctgatagaaagcgaggaataa

SEQ ID NO: 3313 - DNA, 330 bp, Enterococcus faecalis
ctattggaagaacgcaatacccttattgcactgatgtccaaaggtttcctagaacctgctctttttaatcaggaacgaaatgttttagatagtgagattaaaaatcttactaccgaaaaaacaaacctggtaacgaactctgcgagtggggttttgcgagcaaacgagataaaggacctcattaattatgtgtcagcagataattttaatggtgactacacggaagaactatttgaagaatttgtagtgaacatcattgtaaattccagggatgagctgacattcaatttgaaatgcggtctttccctgaaagaaaaggtggtgagataa

SEQ ID NO: 3314 - DNA, 198 bp, Enterococcus faecalis
gatagtatcgaagataaagaaagttgctccatgttgtttttgcgagatggggaaatcaaagccacattgacaaccatgatgaataagcttgctttcagtcataagctaatcctagaaccacttttcaagtcagttagccaaatcgatgaagaaagcgaccgtgaaagaatggacgctattgataagctaatggagtaa

SEQ ID NO: 3315 - DNA, 696 bp, Enterococcus faecalis
ttaatgagtacggttattttagctgaaaaaccaagccaggcattagcctacgcaagtgctttaaaacaaagcaccaaaaaagacggttattttgagatcaaagacccactatttacagatgaaacgtttatcacctttggttttgggcatttagtcgaattagcagaaccaggtcattataacgaaaagtggcagaactggaaacttgaatctttgccgatttttcctgatcgatacgattttgaagttgcaaaagataagggaaagcagtttaaaattgttgctgaacttctcaaaaaggcaaatacaattattgtcgcaacagatagcgacagagaaggtgaaaatatcgcctggtcgattatccataaagcaaatgccttttctaaagataaaacgtataaaagattatggatcaatagcttagaaaaagatgtgatccgaagcggttttcaaaatttgcaaccaggaatgaattactatcccttttatcaagaagcgcaaacacgccaaattgccgattggttgatcggcatgaacgcaagccctttatataccttgaatttacaacaaaaaggcgtacaaggtacattttcattaggacgtgtacaaacaccgactttatatctcatttatcaacgccaggaagcaatagaaaactttaaaaaagaaccttttttcctgaataattcatag

SEQ ID NO: 3316 - DNA, 648 bp, Enterococcus faecalis
ctgattggttattgcaaccgagagaattttagaggttggttgaaaatggctaaaattggttatgcacgtgtcagtagcaaagaacagaacttagatagacaactgaaagcgttagagggcgtttctaaggtcttttcagacaaattaagcggtcaatcggtcgaacgcccacaattacaagctatgcttaactatattcgtgaaggggatatagttgttgttactgaattagatcgattaggacgaaataataaagaattaacagaattgatgaatcaaattcaaattaagggggcaaccctggaagtcttaaatttaccctcaatgaatggtattgaagatgaaaatttaagacggctgattaataatttagtgattgaattgtataagtaccaagcggaatctgaacgcaaacgaattaaagaacgccaagcccaaggaattgaaattgctaagaaaaaaggaaaattcaaagggcgacaacctaaattcaaagaaaatgatccacgtttacaacacgctttcgatttatttttgaatggttgttccgataaagaagttgaagaacaaactggaattaatcgccgaacgtttagaaggtatcgatcaagatacaacgtgacagtagatcaaagaaaaaaacaatga

SEQ ID NO: 3317 - DNA, 195 bp, Enterococcus faecalis
gttgggcataataggaggagtaaaatgaaaaaatttatttatcgagttttagaaaatgacgaagtggtggctatttttaatgagcaacaatatgcgcaagattttatcgcttacgaaaagacaatttctgataagcaatttgaaattgaaaaagtagatatagctgattggttattgcaaccgagagaattttag

SEQ ID NO: 3318 - DNA, 624 bp, Enterococcus faecalis
aatttgtgcatttataatcttatacccgtatttcaaaggagattaggtatgacttttgactataatttaaagaaagaagagtacttccaatcgataagactatatacaagaaattatgacagagaaggaaaacgtaaaataattgttaactacttatcgggtacatttttattacttgtctccctatgtatgattttatcactttatattcaattaaataattttaaaaagacacttccagattacatggttagaattttgataaatcagttatttacgaaacattttgcttatttagcgatgatagttctgtgcttcgtcttagggattgtaattatatacaatggatacatttatcccagccgtagaaaaattgaaaacagtattgatttaaatatttttgaaccaagacaagtagaaataaacgataagggtatttttagttggtcattaaataatgaaacggagaaaaattcatatttttggaaagacatagaagatgtttttgaaacaaatgaattttacttaatgaaaattagtaaaaagaaaatttttgttttacctaagagaatgctgtccacaaaaatccaaagtgattttatagagaaacatgttacgaaataa

SEQ ID NO: 3319 - DNA, 555 bp, Enterococcus faecalis
aggagggaaattatgaatagtattataggggaaatggatttgacgaaatattttattcttttaatttttccattttttttactgtatatatttaaattttttttaaatcaatcatttgttagaaagagtaatattccgaagagagaattaaaagaacaaaaaataaatctaatagagttacaaaagaagagttttgcatactacagctttttaataaatatatattttgttttgcatttggtaatggttatttttttagggatgtttttaggatctttttatgaatatggatactttacaaatcaatcgaacgctatatcatatgcttttttgactttggttacagctctaattattttattaatcaacttacttgtagcagttttaagaataaaatttttgcatacagatcaaggaaaactgtacgtagacacacataaaaatgtatttttactaaatcgtaagcaaaaaattgcttggttttcaatacacatattatctgttatattggtaggttttaatatattattatttcttaattctactgtgtattag

SEQ ID NO: 3320 - DNA, 2184 bp, Enterococcus faecalis
caaatggatgaaatggttttaggtacacaaaagtggttaaataagacgtatggaaatgtttctgggttcaataaagtaccagaaaatgggaaaacgggctggccaactatctatggattacgtcgagcattgcaaaaagaaatgggaatccaagaattatcagataattttggtcctaccacggaacgttattttaaagaaaaagtagaaaaacagttaaatgaacgttttggggcaggaattggaaatattgtgaaaataatgcaaggtggcttttggtgtaaagggattaatccttacgtttctggaactgaagcagttgatgggttaatgacaggtctcacaacattagcgattaaaaaatttcaagaaatggcaggattagcacctagtgggtacatgaatgcaatgttaatgaaagccttacttgatatgagtgcattcgcgttggtgccaggaggggacaaaaatattcggtcaatgcaacaatctttaaatgctaagtataatcgttattttggcttgttgccatgtgatggtgtgtatcaaagagacacgaatagtgctttaatttatgcacttcaagcagagatgggtatggatgaaaacacagcaaacggattttatgggccaggaacaacggctaagacaccaacattaactgttggatctactggtaatttcgtaaaaattctacaatgggcgttgtatgtaaatggatttaatcaatctgcagtatttagtggttcatttacctcttatattgcagctgaagtagaaaacttccgattatttatgaatctacccccctataacacttccgcggatatgacggtaatcaaaggtcttctatcaagtgcaggaaacactgatcgtgcagccagtgcttgtgacatggctactcaattaacgaaacaacaagcacaactaattaaagacaatgggtattctattgttggacgttatttaacaggtagcgtaggagtgggagcaaataaaaaagataaaaatctgactcttgaagaaattcaatccattactagtgtggggttaagtatttttcctatttatcaagatggcggatgggaagaaagctactttaacgaaggaaatgggttaagagatggatctttagcgcataacgcagcatttaaactagggtttccttatggagcgactatttactttgccgttgatgtagatattttagatggtaacattccaggaacggtcttaccgtatatcaagaaagtaaaagaatctttagatgcaaatggcatgtacaaaactggaatttatggtacacgaaacgtctgtcaacaagcaattgatgctggatttgttgaacattgttttgtatctgatatgtctacaggatttagtggaaatctaggttttccaatgccaaaagagtgggcatttgatcaattctatgaacatagtgaattagggtttcctattgataaagtggccgtatctggaagagaccatgggaccaaggcattttctacaacaatcggtaatttaatccagttagaaacaattaaattactgaatgctttagggaaaaattttacaatcaaagatgtaggtattaaacttgatactcctacacaaattattagttcaccaactcttgatgtttattttaaatcaagcgcctcttggacacataaagtagatgattcaggaatgtctattagtattaaaaacggtaaaattgatacaaaagtatacgtaaatccgataaaagagtctttgaattcgtataaagatttactaaagaattataatgaaaatcaagttgatgaaatgcttaataagctagcgccagttattaaaaatgggtatattgaaactggtttttgcgctagaaataatttaattggaacgaaattggtaattaaaaaggaaatcggagattctgaaaacaaaggaactttacaacttgaaattgaactatatcctaagcctctgttaccaactgatattaaaatacctcaacccgattatgataaagcatatagagatattaaaaatggtcatgttccacaattaaatgtagaagttattctaaaaggcgttctaattggtgcactagcagtggttattattattggaatagcttcgggagcagcagaattagcaggagcgataacagcattttttgctgcattagcttaa

SEQ ID NO: 3321 - DNA, 555 bp, Enterococcus faecalis
aaaagaaaagaaagaggagaaataattatgaaaaaaagtctatttattttaggaacaattttgttaacaacaattgcagtacaaacaggaattgagacgtacgctagcaataattcctttaatcaggaacagattgaatcaaaggctagtaagccaaaaacacaatattcagaattagaatttgatacgcacgaagaagcaaaagataacattcaagtaatcccagaaaaaagtggggtcccagtagatttggggaataatgttattggctatcaagaagggggagctgggtctcgttttattactttccatatcaaaaattatggtgtttttattcgtaccaattcaattttaggacaagacaacgttgctttatctaaggaagttgttcaagttttatcaagtattgaaaaatatccggaaacggatcatggattaattcgggcagattttgcttcagggatgatgtcaattacttgggcttcagatacgttcgtaaaaagtgttactagctctgatttacgagtaagcattgaaaaagctttaacaaaataa

SEQ ID NO: 3322 - DNA, 480 bp, Enterococcus faecalis
atgaaatgctgtgtgaatctttataaacatacagataaggagagttctatggataagatacaagaactgattattcatatgggactagaaagtaaccatatgtttattctagcaatgatttgctgcgcaatgattattgatttcttatcaggagtttttgccgcaaaaatgaatccaaaaatagactttcaatcaagaataggaatcaatggaattttaaagaaaatagctgcactaatgttactcatattctttatcccgttagcaatgactattccaggaaatacaggtacaggattactctatgtactctactttggatatttattaatggaaattcaatcaatattagaaaattatcaaaaaataggaatcgatgtttcattgtttcagaatttcataaacagatacagtaaaagtacgatggataacaataaaacaaataattcaaatgaaaaagaaaagaaagaggagaaataa

SEQ ID NO: 3323 - DNA, 702 bp, Enterococcus faecalis
ttattttatgtcacaaaatggatattttcattacatacatttataaaaatagaaggtagtgattatgtgaagttttgggcagaagtaactcggttatcagatatctataggtttacaaataaggaagaagatttgataaatgtaatggaatatatggaaagatatataggtgtatctgcaaaaaatgcaaagcatagaagcgaactctataagctttgtatcccgtatgaagattttataagttcttttgatttggccgtatgggaagcgcttgaaacatatgcaggacaagaaaaagtagaacatacttttaaaaatattgttctttttagaatgaatcttgctgaaaaaagtgtgtggcgattatacaaaagcaatacatgtgatagcgctgacaagaatggtatttcttatgactctgcacgttggaacgagttagatagtaatacgtgtcaacaaaaagatgcaggaatagatatagaagaagcaatttgctataaagagatgctaaaaaactatataaaaaaatttcctaaacaaagcaaatttatcctcttgttgttacaaggatatacgtcatgtgaagcttcaaagctatgccaatggggttccaactatgatgaaaagagtagaaagagagcacaaagaacgaaacaacattttaaaaagtttctaaatgaaatgctgtgtgaatctttataa

SEQ ID NO: 3324 - DNA, 1776 bp, Enterococcus faecalis
ggtgattttatgaattatagtcaaaaagcagtaaacctatgtaaaaaatattcttccttttcacttaaagctgtagcaggaagagacgggattttgtcaattgggtatggtcatttatcaaatgacagacacccaattaaatcaggaatgactatcacggaaagccaagctgaacaaattttacgtgatgatttatctgaacatgcaacattaatatccaagcttctggcaattaaagcaacccaaaatcaatttgatgcattagtttctttctctcattcaaaaggattaggttttttaccaagttcagatgttatgcattttacaaacacaaaggaatttaattcggctgcaagagaaatgaaattgtatgtctatgacatcggaagcattaaattaccaaaacttgttgaacgaagaaatgctgaggcttcactttatctagaaggggcttctggaaatactgagacaaataaccaagctcgtattgggtttgatgtcatgattcgttggatggaaggtaaaaaagcccaaggtgttacttacagtatggattaccgattaggaccaaactcttatgattgttctagtgcagtatattttgcattaagagaagctggtttcattcctcctactacttatccaggaaatacagattcactttttggacaacttgagcgtgtaggttggtcacaattaccactgataaatgggaactatgctactcaaagaggagacattttcatttggggaattagaggcaattcaggtggagagttcggtcatacagggatttttattgatgaaaatatgattattcattgcaatgccagtacaaacgttggtatcacaataaatagttatgatcaatattgggttagtgctggacgtcctacagctgctatttatcgttttggaggtgcttcaaaaccatatcctggagattcttctggttcaaaaggagattcagtgaatccttcagcgggtgtattttatccaagtatgagattaccggtaagtggtgatacagatcctaatagtccagctttagattactacgaagctggtcaggctatcgtttatgatagctatgtttttgctaatggctatgcatggattagttacgttgcaggttcaggcttgcgccgttatgtggcggtaggaccagatgatggtcgaacagacactgtatggggaacaggatttttaaataataccccttcaggatcgggttcaaatacgggaagtgcattgagtggtgtattttatcctagcatgagattaccggtaagcggtgatacagatccaaatagcccagcattagcttattatgaagctggtcaggccattatctacgatagttatgtttttgccaatggttatgcatggattagttatattgcaggttcaggattgcgccgttatgtggcagtagggccagatgatggtcgaacagacactgtatggggaacaggattttttgataatggtggagatcctggttcacaggcacaccctaattctattgggttggtacctaaagcaggtaattttgttccaaatcgcaagcttccggtcagtgctgacaccgatccaaatagtgctgcattagattattacgaagcaggtcagtcaattggttatgacagttatattttcgaaaatggctatgcgtggattagttatattgcaggctctggattgcgccgctacgtggcggtgggaccagatgatggtcgtacagatactgtatggggcaaaggattctttaattag

SEQ ID NO: 3325 - DNA, 843 bp, Enterococcus faecalis
aatcacctcaatattttttgtcgcgacttttttcgtatacgcctatatatgttgataataatatctatttgtgacaatagaataagtaattcttttgttttattattaagtacgataaaattagttatagattgtataaggaggaatattatgaaaaaattagtttttgttgctttagttgttcttttaacagggtgtagttctcagaaaacaaatgaatctaaaaatcaagaaaaatctgccactaacacgacttcagtgcaaaaaagtactactaattatagttctagtacagaatcaagctctagcaccgaaataaaagaaacttctacaagttcaagtacgaatcaggtttccacaactcctaaaagtgaaccatctacaaatgtagaagaatcaaattctttagaatcagcaccttatgctgtagatattagtaatttaaacaatccactagtattcaattttaatggaatgaatgtgcctaattcagttactttagagaatttaaattcaacacctacagcaacctttcgaactaaattaattggggctgaaaatagccaattgaaagaatctattaataaatatgagttatctataaatacaattcccacaaaagagattagaatattttcatcgggcgataatagcattagaacagttaaagtaaatacagaattaattttaggaagtaatatttattcaaactatgaacgaaatatatcaggtaatttatacttgtttatcaataaaaatggaaccatatctttaataactcctaattacgcaggcaatgttactgatgatcaaaaagatgttatgcaagaagtaactcaataa

SEQ ID NO: 3326 - DNA, 282 bp, Enterococcus faecalis
atattacttcctaaaattaattctgtatttactttaactgttctaatgctattatcgcccgatgaaaatattctaatctcttttgtgggaattgtatttatagataactcatatttattaatagattctttcaattggctattttcagccccaattaatttagttcgaaaggttgctgtaggtgttgaatttaaattctctaaagtaactgaattaggcacattcattccattaaaattgaatactagtggattgtttaaattactaatatctacagcataa

SEQ ID NO: 3327 - DNA, 204 bp, Enterococcus faecalis
aaaggatggatcagaatggctataaagaaaggtaataagcgtgcacaatctaatttaaatttaaaacaacaagaagggttaaagtatctcaaaacaaaatatagaaaaagcgaatcgaaaattcttgctatcggtcttgaaatgttattagaacaagagcaagcgggcttgctaattcaaaactttataaaaggtgactactaa

SEQ ID NO: 3328 - DNA, 687 bp, Enterococcus faecalis
agaatagtaagacccaggagaataccaatggatgaaaaaaggaaagataaaatacaacggttgttaacactagcgaacgatgcgaatgatgaagaatcaatgacagctttagcaaaggcccaggaattgatgctagcctatgggattgatgaagaagaagtgtttcattatcagcaacaccaaaggcaagaaaaggttatagataaagtgatttacaaaggaagaccgcataaatgggtctacagactagctgggatcattgcaaagaattttcgcgtgaagaactactatcaaagttcttcagatatagaattacattatgtgggactatcaacagatgtagagattgcagaaattacatttttatatgcaaaaggtagtgttgccttttgttcaaaagagtttatgaaacaaccggagatcaagcggaaatataaaagaaaatggcaattaaaacaagattatattgagggctatttaacggcccttagttcggtatttgaaaagcaagtacttaccaatggctatgaacttgcactgcagttacctgtagctgtccatgaagaagtctcaaagctaggcttggttaaaggaaaagacacctcacaccaggttgaaaacttcgatgcttttcattcaggttatcaggaaggcttacagtttaaaaataaagagctaatcaactaa

SEQ ID NO: 3329 - DNA, 351 bp, Enterococcus faecalis
gaaaggtgggaaatgagcatggaaatacgggaattaattataatagaagatccttgcttttatcaatatacgacgataaaagaacttgaatcgtttaatacgtctgaattaacgattgctcttagtgtgcttagaaaagagcagcgtcgtttgaaagaaaaagtgtatcattctggatctggcgaccaagtggataaaaataacgttaaattaatcaacaagtacagagccaatcttgaaaaactgctgtttattaagcaagggtatattccggatgcaatcacccaaaacatgattgatacattgattaaaaacaataaaaaatctatacggaagcttcaaaatggttaa

SEQ ID NO: 3330 - DNA, 471 bp, Enterococcus faecalis
cgaattaaaaaaaatattgcttttggaggaatacaaatgagaagattaagtaatacgacaatggccaacgaaactctaaaaaaagaagcatggtatagaatgatgcttaccgacctatcaagttctgtcattgatgagttcatggaaacagggaaatgccattacaccagcaattactttcaaggtgaaaatattttagtcactgaagaaatagaggcaatcataaagacggccgaaaagaagtatggcttcctggtgtactatgtaactgaaaataaaacagcggatggccagagatttttatcattattctacgttggacgcgatactagtgattggctttactgtcacagggatttagaatcttataggcaatatgtgtatgtagttaatacgacgaatcctgcattttcaaaatttggaatgattcaatttgatccaatactaggcagtcttttacgaacttcatag

SEQ ID NO: 3331 - DNA, 768 bp, Enterococcus faecalis
gttttgaaaaaaataaaaaacagaaagaagcgagtaagaatgactagacttgaacaagcacaagggaaattgcaacgactaaaaagagaaagcgaagaaatgcaccacttaatcagggcggaacatgaccgtatcccttttggacagcctaacattattggccgtggggacatttataagaaagtaaatggctatcatgatcgtgcaattaaattactgaaggaacaagaaaaacaagaaaaaagagtggaaatgctggaaaaggtagaagactttaaggaaaaaaacgagctaattaaagacgttcatgtggtcggtaaatcaagttatgcgacggttggcgcaaaaacaagtgtcaataacattgattactttaaaaatgaactaaaagagcttgaaaaggctaacgaaaaagcaaaagcctataacaagacaaaaccagcaattaaggcgagaacctacggtgcagcaatcacgaaactaaaaaataaaattgcgaccttggaacaaatgaaggaagctgatgaaaacaaggtggtgagtgatagaacaaaagagctgatagaaagcggtgcagtgacgcagtggaagaaaaaaccaatattctatttcgttaaagggttgcgaaaagtagcactagaaattgacgaaaatggagaattcttcatttctaactattatccggcttgtacagatgcagataaggaatttatcaataagttattagatcctgcagctgaaagcacaaaaaaagaaaccttttgctga

SEQ ID NO: 3332 - DNA, 705 bp, Enterococcus faecalis
aaaaagatagcaggaggaatgacgatgaatcattttaaaggaaagcaatttcagcaggatgtgattattgtagccgtgggctactatcttcgttataaccttagctatcgtgaagttcaagaaatcttatatgatcgtggcattaacgtttctcatacgacgatttatcgttgggtgcaagaatatggcaaactactctatcaaatttggaaaaagaaaaataaaaaatccttttattcatggaaaatggatgaaacgtacatcaaaattaaaggaaaatggcattatttgtatcgagccatcgatgcagatggtttaaccttggatatttggttacgtaaaaaacgggacacacaagcagcctatgcttttcttaagcggttagtgaagcagtttgatgaaccgaaggttgtagtcacagataaagccccctctattacaagtgcctttaagaaactaaaagaatacggcttttatcaagggacagaacatcgtaccattaaatacctgaataatttgattgaacaagaccatcgtccagtaaagagacgcaataaattctatcgaagtttacgcactgcctctaccacgattaaaggcatggaagccattcgaggattatataagaaaacccggaaagaaggcactctcttcgggttttcggtctgtactgaaatcaaggtattattgggaatcccagcttaa

SEQ ID NO: 3333 - DNA, 246 bp, Enterococcus faecalis; identical to SEQ ID NO: 3000

SEQ ID NO: 3334 - DNA, 1065 bp, Enterococcus faecalis
aaagaaggggtgttattcatgtttgattattcgaaagaaccagtaaatgattattttctaatcgacatgaagtctttttatgcgagtgtcgaatgtatagaaagaaatttagatccattaacaacagaacttgttgttatgagtcgaggtgacaatactggttcaggattgatattagcttcttctcctgaagcaaaaaagcggtatggtattacaaatgtgagtagaccacgtgatttaccacaaccatttcctaaaacactacatgttgttccaccacgtatgaaactatatatcaagcgaaatatgcaggtaaataatattttcagaagatatgtggctgatgaagatctactgatttactcgatcgatgaatcaatcttaaaagtgacccgatcactgaatctttttacgactgaaggaacacgaagccaacgtagaaagaagctcgctcaaatgatccaagaacgtattaaagaagagctaggattgattgctgcagtaggtgtcggagataatcccttgttagccaaacttgccttagacaacgaagcgaagaacaatgaaggatttattgccgaatggacgtatcaaaatgttcctgataaagtatggaatattcctgaaatgacagacttttggggtatcggttctcgaatgaaaaaaaggctcaaccaaatggggatcatgagtatcaaagatttagctaattggaatccatacaccattaagagccgtttaggcgtgattgggttacagctgtacttccatgcaaatggtattgatcgaactgacatagcaataccactagaaccgtcaaaggaaaaatcttatggcaattcacaagtgttaccacgagattatactagaagaaatgaaatcgaactggtcgtaaaagaaatggctgagcaagtagcaatccgtattaggcaacaccactgtaaaacaggttgtgttcatttacacattggaacgtcgatcttagaaacgagaccagggttttcacaccagatgaagatacctatcacggttctgttgcaaagttttaaatctactatcaaataa

SEQ ID NO: 3335 - DNA, 4404 bp, Enterococcus faecalis
tcgatgtttataaagaggagatggaggaagcagatggacaagacagtaattaagccttttgaagaaattaaatataaagtgtatggttataccttacccgaagtcccaaatcataatggttatgtgaaaattggtgatacgacacgtgaagttgtaacgagaatttttgaacaagtaggcacagctggattaaaccctaaaatattatttgagaaagtagctcgaaaatctgatggagaatggtttcgtgataaggatttacatcggtttcttattttaaatggaatagagaaaaaggattttaatagtcgtgctgatgagtggttctattttaatggaacgctggaaaaggctgaagagttaacgaataaatttattaaccgtgattatgatgaaatacaaattgacgacaaacgttcggattatgtattaagaaatgaacaacaacaagcagttgaaaaaacttatgagtattatcaaagtaatcaggagccaaaagagtttctatggaatgctaagccgcgttttgggaaaacgttaacaacttatgattttataagaaatttaaatgcaagaaatgttttaattgtaaccaatagaccggcaatcgcgaattcatggttcgatgattttaacaaattcatagcttggcaagagccacaaatgaagttcgtatcggaaacagatgcactaaatggaaaagcgatgactagagatcagtatcttgaatttattgatacaacttctcatgctaatcccacgcaaattgcctttatttcattgcaggacctaaagggtgctgaatttgcagggggtatgtataagaaactagaatgggtagctggactaaactgggacttgctcgtaattgatgaagctcatgaaggaatcgatactagaaaaactgatatagcatttagccaattaaaaagagactttaccctgcatttatcaggcactccgtttaaagccttagctaaaggtgatttttctgaagaacaaatatttaattggtcgtatgtagatgaacaagaagctaaagaaaactgggatccaacaattggtagcaatccttacgaaagtttacctactttaaatttattcacgtatcaaatgagtaaaatgatagaagatgaagtatcggcaggattaacaatagaggaagaaaaaaacgttgattatgcatttgatttaaatgaattttttagagtgaaagaaaatggacgatttgagtatgaagaaagtgttgttcgctttttagacaatctatcttcagggaagtttccattttctgaaaatcaatatcgtaatgaactaaagcatacattttggcttctaccacgtgtgaattcggcaaaagcacttgaaaaattattaaactctcatccaacattcaaagattataaagtagtacttgcagcaggagatggtgttagtttacatgatggcgtagaagcagaagcgcttgatttgaaagaaaatacaaaaagctttgataaagttagaaatgcaattgagcaaaatgataagacaataacactttctgtgggtcaactgacgactggtgtgacgattccagaatggacagctgtattaatgttaaataatattgagtctcctagtttatattttcaggctgcatttaggtcacaaaacccttatgaatatgaggaagatggtaaactttttagaaaagaaaatgcgtatatctttgacttttcaccagatcgaacattaagactttatgatgaatttgctaacaacttgtctagtggtagttctaaaacaagcgaggaaagaaagcgcaaaataaagaagttattaaatttctttccagtaattgctgaagacgaagaaggtacaatgcacgaaatagatgcatctgaagtattaacgatacctacacgaattacttcacgagaagttgttaaaagaggctttatgagtaacttactatttgctaatatatcgggtatcttttcaggagattcaccatttaaagagattttagataaaataccacctgagaaaaataaaagattagagaaaccgagagaaatacctgtcacaaatccacatttaaatgacgatggagaagtagaaataccaaaagaagtagtgataggcaaatcgaaggaactatttggtgaaaaaatatatacaacaattgaggtcgttgatgatgttgtatcttcattagaagaagctgaagaaaagcagaaagaatctattaaaagattagctaaaaatataacagagtcattttcagaaggttttactaggctgaaagattcttttaatttaaacaaaggacaaactgataaattaaaagattcagtaaataattccatcgaagatattatcaatgaaaagagtttaactttaagtaatcaagtaaaagaattagaaaaagaatatgaaagcaaaatacaagaagcagaaacaataaaagatgagagtatattaaaagcagcaactcaccactatgaaaaacagaaacaaaaaattgaggagtcttttacagaagaaattaacaaagaagttgaaaaaacgatcaatactgttgtggaagaacaaatagaaaaagtggaagaaaagaaaaagaagacaacagaagatgatgttcgagatcatttacgaggatttgcccgtacaattcctgcattcttaatggcatacggagttgaagatacaagattagaaaattttgaggttaatattgatgaagccacattcgaagatttgacgagtattacaatagaggaattcaagaggctccgtgatggatttgagtatccagataataatggggaaactaaagttatcccaggattattcaatgaagttgtatttaatgctagtatccaggaatttttggagacaaaaaaccgtttggcaaattattttgatgatagcttgcaagaggacatttttgattatatcccaccacagaaaacaaatcagatatttacaccaagacgtgttgtaaaatcgatggtagattccttagaaaaaagaattccaggaattttttcggataaaacaaggaaatttgcagacttatatgttaaaagcggtatgtacattacagaaatagtcaagagattaaatcatggattaaaagatcagattccaaatcaacaggaacgtattaaatggattcttgaaaatcaagtttatgcatgtgctccaagtaatattatttataatattgccaagaactacatattgggagaaatggagcatgtttctaatacaaatattattgaacttgatacactggctttggcaaaggaagcaaagttatcagaatgtatttataaggaattcggagatgttaagatgaaatttgatgtaattataggaaatcctccatatcaagaagaaaatactgaaaggaatagagatgacgctatctatcacttattcttagatgaggcgtacaagatcgcagagaaggttgttatgattacgccagcaagatttttatttaatgttggatcgactccaaaaatttggaatgaaaaaatgctaaatgataaacacttatctgttgaaatgtatgaacggaaaagtgaaaaaatctttcctaatacatcgattattggtggaatcgcagtcacttatcgtgatgcctcaaaaatcctaggacctattggaacttttacaccgtatcaagaattaaattcaatattgagtaaagtaaaagaaattaaccaagaaagtaactttagttcactgatgttcgtacaaaataaatttaatttagataagctatatcgtgattttccagattttgaaacacgtcttggaggaaatggacgtgaacgccgtttaacatcttcaatatttaatgtattacctgaaattttttcagataaaaaaacaaaagaacataatctggcaatttacggtagagaaaataataagcgaacatataaatatgtctctaaagaatatattgaggaacatccaaatatgtataaatggaaggtttttgttccagcagcaaatggtgcttcgggtacaataggagatagtccagcaagaattattagtttcccggtcttaggtgaacctaattctggtcatacccaaacctttataagtttaggagcttttgatacgaagtttgaaggtgaagcgttgttaaaatacatcaagtcaaaattcgcccgtgcgatgctaggtgtattaaaagtaacgcaaaataataagactcaagaaacatggtcaaaagtgcctgtattagatttcacaaaagattctgatatcgattgggagaaacccttgcctgaaattgatcagagtatatataaaaaatttagtttgaatcaaaatgagattgattttatagaaaaccatataacgtaccttgatgaagaaagtttaaataatttataa

SEQ ID NO: 3336 - DNA, 834 bp, Enterococcus faecalis
aaaaataaaattaaaaaacgtctcgtattaaatataaaaaacgaaagaagtgacaaagaaaggagggtactatgtttgaatgaggaaattattaaatctaagcttcgtgttcaaaaacatggagaagtatttacccctaaaagaatagtaaaaaaaatgctaaatatacccgagataaaagaggcttgtgaaaatttaacagcaacgtttttagaaccggctgctggagaaggcgcttttttattagtaatactcgagagaaagttaaacatggtatctaaaaaatacaataacgatttaattcaatatgaaaattattctttgctcgccctgacaacactatacggaattgaattattggaagataatgcccaaatatgtgtgatgaacatgtttcaacaatactatgataactacaaagaacaagttgaacatcataatggagaattaaagaaaaaagtattagatagtgcaaagaaaattatttcattaaatattgttaatggtaattttttaacgagaaagtcgagagatggaaatcctttagtattcagcgaatggcaacctgttaacatgaggaaaacatcgaaaaatattaaaatacaaagaacagagtatacattggatgaagtatatggaagtgtaaaaaaagaaaatggtcgagcaattaataatttaatacaggagacagtacaactagatttgtttgatttttgggaagatgaaattgaaaacatacatgaagtgcaaaaagaaatgcgatatatacctgtcaaaataatcgatgtttataaagaggagatggaggaagcagatggacaagacagtaattaa

SEQ ID NO: 3337 - DNA, 1212 bp, Enterococcus faecalis
cgacaaccaattcacagaaaagaggacttccctatgaatgattttactacagaaattgtgcaaactctagtcactaaaggcgatttaaatgaattattccgttcgcacttagaaaaagcgataaacacactcctacggactgaattaacggcttttttagattacgaaaaatatgatcgcactggttttaattcaggtaattcgagaaacggttcttactttcgatcaatcaaaaccgaatatggtgaattaacattggaaatacctagagatcgtaatggtgagtttaaacaacaaactttaccagcctacaaaagaacaaacgatacattggaaaccactattatccatttattcgaaaaaggtgttacgatgtctgaaattgctgatttgatcgaaaaaatgtacggtcatcactatactccacaaaccatgtccaacatgactaaagttctgactgaagaagtaaatgcctttaaatccagagccttaaatgataagtatgtcgctatttttatggacgctacttacattccactaaaacgtcaaaccgtatccaaagaagcgatttatattgccattggtatacgagaagacggcactaaagaagtactgagttatgcgattgctccaactgaatcaacatacgtttggaatgagctgctacaggatattaactccagaggagttcaagaagtcttgctttttattacggacggcttaaaaggcatgaaagatactatccatcaaatttatcctaaagcaaaatatcagcattgttgtatccatgtatctcgtaatatcgctcataaagtacgtgtcaaagaccgaaaagaaatctgtgatgactttaaggctgtttatcaagctaactcaaaagaagaagcgaataccttcttatccggcatgattgagaaatggaagaaaaactatcctaaagtgacgcagtcactcatagaaaaccaagacttattaactttttatgattttccacctagcattcgtagaaccatttactcaaccaatctaatcgagtctttcaataagcaaattaaaagatacagccgtagaaaagagcagtttcaaaatgaagaatcactagaacgctttctagtcagcatttttgatacatacaatcaaaaatttctaaacagaagccataaaggttttcaacaggtaaccgatacattagtttcaatgtttactgagtaa

SEQ ID NO: 3338 - DNA, 2709 bp, Enterococcus faecalis
ttggcagttgaaaatatctccattcgtattaaggacaatattaaagatatagaaaaagaactagatagtttagatcgacgaatagctaaactaaaaggtcaacgccctgctatcgagtggaatactacgaaactaaaaaaagcaaaagaagaaataaaaaatattaatgttgatataaaaaaattgcaagcacagaaagcaaccattaaggcagatgtaaatactaaagatgcaaaagaaaaaatatcagccttaaatcaacaaattaaacaactacaatctaggaaagcaaatttacaaatagtaacaactcagttgcaaggttcagaagcacaacttcgcaaactagacaatgagattagtcgattgaataatcgtaaggctatgttacaaattgatagtcgtggtctaggagaaactggggaagaaagtcgaaaattacaaaatagtcttcgaagtatgagtgaacgaacctacaagataaatgtttcatcaaacctggataagttaagtgggttagctaacaatgcaagtaataaaatattaggagcattcaatcctttaacatccaaactaaatcaaatgcttggtatagggctagccgtaaaggcagttgataaggcgaccaatatgattacaaattctatcgatggttctatttcaagattagatactttaaataactttgaaaaagtaatgtcaaatatgaatatttcagccgaccaagccgatctcgcaaaaagcaaacttgtaaaagggctaaatgggttgccgacaactttagatgatgctgttgcttcagtacaaaggtttacagcaaataataaagatgtacagaaatctgcggatatattcttggcattaaataatgcaattttagcgggtggcatgtcacgagacatacaatcaagcgcacttgagcaaatatctcaatcttattctaaaggtaaaccagacatgatagaatggcgctcactactaacagcaatgcctgcccaagtggatcaaatcgggaagagttttggtttaacatctgatcaattgggagaagctttaagaaatggaaatatctctatggatcaatttatggatagaattgtggagatgaataaaaacggggcagaaggattcaaatcgtttgaagaacaagctagaaattctgttggtggcgttcgaactggtatgtctattatgaattcagctataacacgtggagtgacctcgattatcgatacatttgataagatggcgaaggataaaggcctgggaggaattgctggtatatttggaaaaattggtgcttcttttgaaaagaaccttaaaaaaataggagcattagcagaggaacattctgaggatatttttcgtttctttgacaaaggaatgcaatttttaagtaaaattgactatgcttctttttttaaaggtttaggagaaggcttaaaagagttgaaaaatgatgcaaaaaaaatgtttgattattttaaacctcttttagacaaactaggtgacggaaacactatggaaggaattggcaaattaattcctcgtttattcgaactaggtctagcattaaaagctgtttcaataggagctaaggggttatcagtagtgtctaaggtttttggtgtatttagcaaactaaaaattcctaaatttggaaaaggtggaggagcatcagaaatcgtaaaaccattagagagtttaaaatctattgggactggttttttaaaaaatgctggtaaccttgcgttattattcggagcaataaaagtgcttgaagaaggcgcagaagcaatgaaacaactagatgaaaaaataccaaatgattttacagggctagctaaaaaaacagcgagcatgagtctggctatcagtgcaattggtggtctggcttttatagctagtaaattaaattttactgataatttaaaagggattgcaagtattgcattaatctcagtagatttaatgattgcaagtgaagcgatgaaccaactcaatgagaaagtaccaaacaatattggaattgtcgctaagaaactagggagtttatcaattacaatcggggctatggcaggattagttgttattgcaggcgctttttcatctactaatccaacgatggctatatcaggattagctagtgtagcactcctatcactagaattaatgattgcaagcgaagcactatcacaattaaatgaaaaagtaccttcagatattgcaacaatagctaaaaaggttgctaatatcggtatagcaattggtgcaatgggtcttttagttggagtaataggtggtttaagtattgctacattccctgcagcaatcgctggtttggcagctgtagcactactagcaggagaattaatgctagtttctgaatcaattaaccaattgaataaaaaggttcctgaagatattacaagtgttaaaaataagcttgagagtttagaagaaattttaagctatatggcgaaatccagtattggaaaaatttcatctttattcaaaggaataataggtacttttactgcatcgacatatgtacaagttatcgatggtttgatagaagtgtcaaatggattgaaacgtctagctagtgcttcagaagatataaatagtgcaaaacttgtaaataatatatatgacatcaataaagcagttgaagttattgggggagcgtcaataattttgtgtaaataa

SEQ ID NO: 3339 - DNA, 375 bp, Enterococcus faecalis
aacttttactgcattagcagaaaatcacccagaagtgttcaaagaagcagatgcttttttcggataatcgtgcgtgacagtttaaacaatggtgtttcattacaacaagcgcaagaaacgtattttgctaagtttaatcattattcgtatatggctcattttgtagcaaaaatcttaggacaacgtcccagccatgtattgagtggttggggcgtttctgaattgattgtagcgtatggccattatgctaatgagcaaagttatcaaaactttatggattggaagtcgtcacaagaaaatgcaccaaaacctaagcaaccacaaccatttgttgttcaatttatatcgcaagatgagctggaggaggtggaataa

SEQ ID NO: 3340 - DNA, 603 bp, Enterococcus faecalis
gaaaaggggatttttgtaatgaaacaaagcgatttaacgaaaatgattacaaaaaatgatgtaattgatatgaaacataaaatggataaaactcaggatacaagtaagccatatgcagtaattgacaacgataatattgctgttgttggtgacgcaaacgagattcaaaaagttgaagaaaactatgtgatcaagtttcgtgttccaaaagaattctttgaagaaattccgtatggagcaactactgtagataaatatgttattttcgaagttgaatacagtaatgcaagtgtaacaggtatgaatgatttaaaaattgtagatgcacttttgaacattcaaccatttttgaaggagttttatcaaaaagacgaagacggcaaagtaactattgtggaaaagacagatcgagaagttcttaaaatgttatcaacatcagaggacgaagttatttatggattttataaagtggtggcagctttcttaggtgtagatgaagagttaatcgaatacatgcttccattttcagtgattgaaacttttactgcattagcagaaaatcacccagaagtgttcaaagaagcagatgcttttttcggataa

SEQ ID NO: 3341 - DNA, 1347 bp, Enterococcus faecalis
gagggattagacatgggaaaatgtaatacagagcaagttctttcaatgattggtgttaacaaattaacgaagacacaggaactgtttttttcggttctacaggacaatgactcttgtgtaaaaattaaaaccagtgactacttggaaatcattggagacaaatcagcattcaataaatatttacgaccagaggatgcatttaattgcttagcagaaggatgtagaaacacaggtggattattaattacaggcaacgaatttccgttaggggctacctttaaaaaagttactgatgcgactgatttttatgctggtgcaaccactttttatttagatttgccaaaagatggaacatatactatcgaatttaaaattgcagcaattaatgacaatagttttgtaaatgctgatgtatatagaaaaaaattcactggaactaagggctataatcctatttttattgatttttcagtcgttcctgaagaagttttaggcgaaggttggcaagcaaatgaacgtggtgttcatgtgtcaattactgtgacaactgaagaagaaattccattaaaacaaattcatatttcttcgattagtttttacaactcaatcgaagaattacaaaatgatgaagttgtaacgattggatgtatcacagaatacggtggagacatgactatggatgttgccgacagtgtatgttttggtgctaagtacgatccatcaagcgctagtattactcgtacattcacaggtggcaaaacaagcggaaactactggttacttaatccatttatgcgtcgaggggatttatcaaaagggtggacagttgttaaagagaaagataaagttcgtgaactcactattgacggccgacgttatgggtatatcttgttaaacggtttatcaaaacaagaatgctctttctctaaagctttagttgcaagtgaatgtaactttactgatgcagaattaactaaagtcaacctcccagatgtagcagtattaaacgaaaaacaataccaaattattaagcatggcgaatatgatggatatttaattgttcatgaacgtttgatcggacagccattgttgtatgcataccctaaagaggtttctattgagcaatacgtcggtgaagatgacgcatatgaaggacgccgtgtacgtctattcttcccaactgttcagacagatggtgtgaaagtgaactatattttcaacaatgtattagttacttcattccctacgactttaagtaatacagatgaaactacatttgaatttgaagtatctattcaaaaggataacaatggtcgattctttgaagttcagaaaattattgaataa

SEQ ID NO: 3342 - DNA, 453 bp, Enterococcus faecalis
gaggtatatcaaatggcgaaacgtgcaatcaatgcattagcagcagatggtgaaacgacttatcagttatcagctaaagactatacaatcggtgattctgaagtcacaggtgtatatgataatgaaaaagctgtaactattaaattatttgtagacgacgtagcagtggatgagatcacacctgataattcaaaaaatatttatgctatttctacaagtaaaactactattgttaaagatagtaaagtggaagttgcagaatatgatgcagataagaatgaattaacaaaaattctagttactgtaattgacccaaatggaggaggaaatgagatggatgaaaaagaaaagattgataaattcatttcacgaaaattaacagtattaaatgaaaaagacggtattgtctatgaacagctagcaatccgagttattcaagttaatcaaaaataa

SEQ ID NO: 3343 - DNA, 390 bp, Enterococcus faecalis
atggcactaaaaaagatagttattcaatcaattgaaaaagagatagataattatgcaaaaaaaatggaaaaaattataaaagaagaagctcacgttaaaacaggagcgttgagagattcgataacaatagaaaaggaaagtgatgggagtagattaataggagttgatgtcgcgaaactgaaatccgatcctcgcaatgttggaggcttagattactctattccttattacaaaggtcatagtggctacacgataaggccaagaaaggcaaaggctttgagttgggttggtaaagatggcaaacgtcattttgctaaaagtgtttatataccaccccacgcaggtgatccttttttgaagcgagctgtgttacgtagaccaaaattatag

SEQ ID NO: 3344 - DNA, 219 bp, Enterococcus faecalis
agtatgaaagttcgatttttaggcgttcgtgaacacattagcgctacaggttgttcgtcctgtggagcgaaaaggtatgccagtggtttaaagacagaaaagacatttttcttaccaagtggaaaaagattagatgttgagtttaatcatgaatatgaaaccactgatacagacggaatgtttttgcttgaaagtgggcatttcgaggaagtgttttaa

SEQ ID NO: 3345 - DNA, 720 bp, Enterococcus faecalis
ggtgcttaccttatggatgaaatcattgagcaactgaaagaattttgcgattgctttccttgtgatgtagaggacaacaagttagagaaaacaattaaagaagcaattcatttaataagtttattaacttgttggactcaacgtccttgcgaaacatttttaatgagtgagagacaagaagtatttgatatggacaattatttaccttgttcgtgtgatgatggaattatggaattagatttattctatgcaccatttgctttagcatcattccgagttttttctgtacatcgagaaggtgtaaaagaaatcattagagaattagatgaaaaagaatttggttatagcgttgtaaaagacaaattacttgttgatattcgaaactacgcaaatagggaaaacggatgttgtgtttgtaaaaaagaacaccagttgcttgtcttatatgatgctggatttgaagagttgcctcaatgtttattacaacttttctgcgatttaattcatgtaatttacaacaagaataactgtgattgtcatgcttgtgctacttgtcaagataattctgatagcggctttattgcaaatgaaacgatgacaacagatgagttagtagaaagctacctcaataaactagtaatagacagctaccgaaaacaattaggtcttattagcctttgtggtaaaagtctagaacagatttgggggattagagtatga

SEQ ID NO: 3346 - DNA, 1182 bp, Enterococcus faecalis
cagatggtattagaagttaatcaagccatcgttaatgaatcgctacaaacagagcaagttatggaacaactaagctctactgtagatgtcattgtcgataatatcgaaaaatatacaaatgctgctcgttatggtaaaggaaataattatgctttaaataacttgcgaacagcagttcaaaaccaatttcctttagttgattggttattaagcacaagcctatctcaaatgattgagaacgcttggcaaaatggctcattgccaactgtaactgatgaagatggaaatgtttatttaaaagcacctttaaatgtatttacgacaccaccaaaagatactacaggtgaatgctgttggttaccttttgatatttcagcatgtgggggcaaagcaccaattaacattctatgtttaaaagattgtgtggatatgttaaatcacttattggaccgtaagttaaaagttcaatcaaatgatttaattggtttctttaagcaagcagggcagacttatgaagaagttcgtgatttcatgaatcgtgaaagtatggctttttatactgccaatacaattgttaatggacaactagatgttacaacacctatcttaaaaaaattccatgggttaatggaaattttaaaacgcccagaagttttcaaaatgcaaggaacaaatattttagcagcatttgattctattggatatcgtatggatgttctaggtggatcattcatttttgcagctcatccattaactgtagcaagcattaaaaatgccattcgtcctaatcgttacggtattcttccagacggctggaccattaacggagaaagtattttctataaaggagcacaagttttacctgataaaactgtaccagttgatgttgaaaacggcacaggcgttatttggcaattgtctggtgaatccgtaggtgtattcttgggaacaactttgcgtcctgctgaagactatattattcgcaatcaatttacaacaacacacgatctaaataaaggatgcgcaacagaatgtgatatttattacaacttaggaagtgtagttacaaataatgtagctcgattagctgtaattacagatgttcctttggctgctggaatcaacgcctactcattagctaatttattagatcgagtatatgtagaaacattagctccctag

SEQ ID NO: 3347 - DNA, 1071 bp, Enterococcus faecalis
gttataagatcatcgatattgttagagatgaggtgtaacatgtttgattttatcaagaaacgtgatgctcaaacgcaagcacgaaaacgtatgaaaaaggatttagacgaaattttcgaatttaataatgaagaaaaacagcaacatacactgaaccacattgttcaactagctaataatgatttgaaggaaattggctgggttcgattactggatgaaggaacagtattatacggtgatggaagtattcgaagttatataaaacgtggaactataaaagaattttatgactctttagaagatgattatattggctatatcaatattggacacattaattttgctacgttaccaatatttgttggtcagtggactaaaaatgatttgcgcttagtagatattggagaaaaccgtcaagcattagaagtcaatatgaaaattgatgaaagcttatctgttatccaagatttgcaaaaaatgccatatacaattggtatttcagccgaatttatggcaagttatgacgaagaattatcttacgaatatgaatttccagttattgaacatctttttatcatgggatttggcatcgttggagatgtaggtaatgtgaatagtagcggtataaatttatccgcagaggaggcagacaaaatggctttagcagatttatttggcaaaaaaaaagaaaatgatcaagaaacgatcaaagaacctgaaactaaacaaacagaatcaaaagaagagcccaaagaacctgaagtggaaacaaaaaaatcagaggaacagaatgttgaagaaaatgacaaaaaagaatctgaagcggaactttccgaaaaagaagaccatacatttgaacaactttataatttatctatggagcaaaatgaaaaaatggttgttgagcttgaacagttacgtgctgaaaataaatctttaaaagaagaaaaattgaagcaagaacaaacaaatgaaaatgctgttcaacgcttggaaaaattgatgaatcgtattgaagtttcagcgttaccaaaagcaactggatctactaaaaataaatggggggaataa

SEQ ID NO: 3348 - DNA, 324 bp, Enterococcus faecalis
gaagggggcgaaggaatgaactactttaaattagttgacggtattcgttcccctcagtctatcgatgtagtacgttcagaaaacggatataaaaaatttggttggatacgtgtccttccagatgaacgatatccgttgggagacgatgaagcatttattcaatcattagaaaatgctagtgttgaaaagctttactccgacaaattagttactgagctcgaaaataatggaattcaatttgaagtctttaacggcggatgttgtggcggaaaaatcaaaaaagtaagttataagatcatcgatattgttagagatgaggtgtaa

SEQ ID NO: 3349 - DNA, 243 bp, Enterococcus faecalis
tccaggggaaaattcaaaaccagaagaaaaagctggcgaaaaataaaactaggaagtgtcagtatgaaacaatttaaaaacaatttagagatgtttcgttacattgatgccattaataaagagcctagtagagaatttaaaattgagccattacgagaagagattattattgaacctatcgaagaagacgtagaatcaaaagctaataaaaaagctaaaaataagaagggggcgaaggaatga

SEQ ID NO: 3350 - DNA, 333 bp, Enterococcus faecalis
actatggcgaaaattaagttaccaatcgtaacaattaacgcaaaaggtggcgctcaatatgttgttgaaggcgtcgaagcagtaaatgcgttaactcaattagaaaattatcctgaacgtggtattcgtatcaaagttgatgggaaaatgacagtaattacagaaggttgtttatgttctgcagctgttactggagaggttgaagtagatgttcctgaaatcgtttgtgcagaagtagagtgtgaaccaatttccaatattttaccaaatccaaaaaatccaactgatccaggggaaaattcaaaaccagaagaaaaagctggcgaaaaataa

SEQ ID NO: 3351 - DNA, 588 bp, Enterococcus faecalis
gcaaggatgaaatcactttctaatattgctttagagtacaccacaacaagtaatgaacaaaagcaacgtgaattatttttgttattagtttcctacttcctaactctttatgatatggaaaaagaaaactttgctgatgaacttggtatttccagtgagtttgtagaagatgctcaaattaagtttgattacatgaagaaaattgaactgacattacaaaatatgcgtgagactgtacagagtgaaaaaggcaaagatagtgaagctctaactgctctatattttaatcgaattttaaatacagatggaaaaaaagctaaagaattagctcaaatcgaaactgtaaaacatttaactcgacttgatcgttctaagaaaattagaaagagatggaaagcattttcaggatgctgtgatgtgtgtagagcaatggatggagtaacagtagctcttgatgagccattcatgtatcaaggtcaagttgttgaattgagcagtggtgaacgttatatcaacaattacgctgcgatggacacgccaaatgctcatccaaacgataaatgctctattgaatttattatcgaataa

SEQ ID NO: 3352 - DNA, 546 bp, Enterococcus faecalis
ggaggaaattcagttatgagtattttagaggatttaagcaaagcaaaaaagaaagcaaaaccatatgcagtagtcggtggacgtgaggtttatgattatgactctttagagaaaaaagttgaaatcgatcaagccgaagcgaaagttggtggtggccaagtagatttagggaaaatgaaaccgacaaaagatggatgggggtataccgacatgggaaatagtttctcggcaattcctcaagatatcttatttgtcaatcgttataaaaaagaaaatgatgcttatttaatcgtaacagactatcgtgccattaaagaacaatctagtggtcaaatttatgcgtcaagtgttcaagcgctggttattaaaaataaaggcgaaaaaggtgaagaaaagatgtatctcgaaagtattcgaaatgtatctgatactgaatttatcaacgattttactggagaattgtcaaacctttccatggcaaaagtttttgaagctattgataaagataaggtgaaagaagtgagcaaggatgaaatcactttctaa

SEQ ID NO: 3353 - DNA, 1281 bp, Enterococcus faecalis
atgtctgaaactgaattagttgggaaagatgaactattaaaaacgatgactatgtgtaatagttgtcctgattttaatttaaacgatttaagaggtaagggtgataacaactatcagctttatgattggttaattcataatttgccaacagcacaatatgttcttggtaagttagtaaagcttattctttctaataacttaactacaggcgatgaaaaacaagatgaaatattgaataactttctatatggtcaaacgaatccagaaggagttaccaactatcacgtacttgttcaatcaattaaggaatcaattgtatacggtcgatcaggtttacgttttttatctaaagatgatggattgattaacgtaaagtgtaatcattttggcgttgctcaaatattgaataaagaacattacggatataaagaattgattggtttcgttattgacaaaaaaggtcgagctattacagatgtcgatctcagtgaaggagaaattgattcagaagaatactttaaaaaaggaatatttgtttttaaaaacaatgacaatattttattgccacccgaaaaattcgttaatttaagggttgatacatctactcctaaaggatcgagtgtctttgattcggatatccaacgagtcttgcttatagcttcggtatataaacgactactatacgatatcgaatatgatggcgcaggaagattaattttctgggcagataatgccaatagtaatgaagaaagctcaaataaatttttgaacgacactgaatcggcaaccaaacgacggcaggataaatataaaaaagaagttgaagaaataatgaagctcgtaaaagacagcaattcaacaagcgttttagcagtttcaaatgcttttaaaaagatggaccacttgccacgtgtaactaaagcgacggagtttcttagttatttaaatcaggaaggcgagattatggcgcaggtattcggtgttcctaatgttctgcttggattaggtaaaatcagtgggaatatatcaatggaaaaagtaatagataatgcaatgcttaattcaattattcctttacgtgaaaatattgcgactcaaatttcgagcatactaacaaataatttaaaggttccaaaagtctattttgataaatatgaactaaaatctcagtcagatataaatgataggcgattgaaagttttaactgttgctgagcgacttaaagcactaggtaaagatgatttagctaataaaattattaaggaggaaattcagttatga

SEQ ID NO: 3354 - DNA, 1590 bp, Enterococcus faecalis
cagaagaatacattaggggtctgtttaataatgacactggaaatagcacagaagagaacaattaagcttttaaaaagttcaacgcccaaagaaaaacttaataagtttgtaaaaggttatgttccaactcactataagagattaagtatatcaatggaaaaagcaatagaactagccataattggggcaaccgaaagtttagcatattatggtgatcgattatattttacgcaggctctattgatgggggctgtggtaagtggagagtatgacaacattattgtcgtcaccccttcacagtatggtaaaagttggttgagttcaacaatatctgtttggctcgctgatcacaatcgacgttgttacgtggcgggtggtaaaaaagataccactgatattatcatgcaacatgttacagatacactacagactgttgatgaatcaattgcaagaaaattattagagcccgttgataagctagaaagacttcaaacgggtttatccaaaagaaagatttctttcagtggcggaggatcgattgaagggatttcattaggtgaacatttcaaaggaaataaatctggaaatcaagcgattggtcgtggtggagattatattattgatgaatcagcgtttgtctcaaatgaaacatatgctgagcttggtcgtagaaattttgccaatgtggatggtaaaaactatctatcttttgaaatatctaacccacataataaaggtcgattttatgacaaactaactcaagagaatattccaaaaggcatgttggttgtatgggcagatgttaggaccgcctttgaagaagatcgagttaaaagtattgaacaagtaataagttctgaattttttcaaaataaatctacatgccaacgttactttttatgtgagcttccagacgaaaatgaagatggaatgtttggaacacctcaaacagaagaagaacataccgaaaaagattgggagtatttccttggtgtagacagtgcttataaagggaaagataaaataaaagctacgttatcagcattagatgcacaaggacaagtacatgttatagacactatagaaattgaaaaaggtgattggcaagacggtgtgactagtaaaaagataattactcaattgttgatgattatagaacattttgatgttaaaggtgtatgtgtcgacgtaggttacggtgtttatattgtagaaggtttagcacatattaacggagatttcgaattacacggcataaattttggtgctggtacaactaaagaaagggtggaaaaaaaccactactcggcaaaatacggggcaaataagcgtgctgaaatgcacattgacttacaagaaaacattgataacagaaatatttttttcactgaaaaagtatatgaagaagttatagatgaactagttcttataagtagcaagatcaagtctaacggaaaaacagccattgttccaaaggaagaaatcaaagctaagttgggccactcaccagatacacttgattcagttcttctatcgctacatgcgattattctatataaattaaacgaacgattctatatctattcttga

SEQ ID NO: 3355 - DNA, 450 bp, Enterococcus faecalis
agatatcaggtaatgatacggcggtggttgatgatggctggaaatgataatttaaaaccattttcagagcgaagcgtggatgaagctagagagcttggaagaaaaggcggaaaagcaagcggagaagttagacgaaaaaaagctgacttgaaacgagctatttctattgttttatcatcagaagtaccaagctctaaaatggctaagacgctaaaagaaatgggatatgagaacactaacgagatggccatggtcttatctatgacgcaaaaagcaattaagggagatgtcaaagcagcatcctggatttccaatattattcaacctgcaaaggtagagcatgaagttgaaatgagtgtgggcgttgatgagaagcggaaagtagcagaagaatacattaggggtctgtttaataatgacactggaaatagcacagaagagaacaattaa

SEQ ID NO: 3356 - DNA, 522 bp, Enterococcus faecalis
aatttaggaagattattaaaaaaatgggaataccttcataaggaagtagggaattttcatactgctttagaagaagctggatttttagtaaaacaagaattgatttggaataaaaatagtatggttttaagtcgtcaagattaccattggaaacatgaaccttgcttatatggttgggcttctgggggcagtcattcttggtattcagatagaaagcagactactattcttaattttgacaggcctacagttaataaggaacaccctactatgaagccagttgcactattcgattatcaaattaaaaatagcagtaagcagggagactgtattttagatttgtttggaggttctggtactacgttaatagcatgtgagcagaatgaaagagaagcctatttaatggagttagatccaagatatgttgacgtcattatagctagatgggaagcattcacaggagaagtggctgtgaagatatcaggtaatgatacggcggtggttgatgatggctggaaatga

SEQ ID NO: 3357 - DNA, 729 bp, Enterococcus faecalis
gccatctttgggttcatccaagaagccaaagcggaacaagccattgaagcattaaaagaaatgtcttcaccaaatgctaatgttcgccgtgatggacacgtcattactgttaaaagcgatgaattagtgccaggtgacattgttttattagaagcaggggatgtcgttccagccgatttacgtttattggaagcgaatagcttaaaaattgaagaagcagcgttaaccggtgaatctgttccagttgaaaaagaagtaaccatcttagagggaaccgatattggtatcggtgaccgaatcaatatggcttattccaatagtaatgtgacgtatggacgtggtcttggcgttgtggttggcacaggaatgaatacagaagtcggtaaaattgctggcatgctagcaagcgaacaagaaacggaaacgcctttaaaacaaaacttaaaccaattgggtaaaatgttaacaattgccattttagtcattgcagcggtgatgtttgtggtaggaatgatgaatggtcgttcatggattgacatgttattaacgtcaatttcgttagctgtagcggcaattccagaaggattaccagcgattgtcacgattattttggctttaggtacccaaaaaatggccaagaaaaatgcgattgtccgtaagttaccagccgttgaaacattaggaagtacagacattatctgttcagagacagtcttcaccaaaggatgg

SEQ ID NO: 3358 - DNA, 420 bp, Enterococcus faecalis
catcctttggtgaagactgtctctgaacagataatgtctgtacttcctaatgtttcaacggctggtaacttacggacaatcgcatttttcttggccattttttgggtacctaaagccaaaataatcgtgacaatcgctggtaatccttctggaattgccgctacagctaacgaaattgacgttaataacatgtcaatccatgaacgaccattcatcattcctaccacaaacatcaccgctgcaatgactaaaatggcaattgttaacattttacccaattggtttaagttttgttttaaaggcgtttccgtttcttgttcgcttgctagcatgccagcaattttaccgacttctgtattcattcctgtgccaaccacaacgccaagaccacgtccatacgtcacattactattggaataa

SEQ ID NO: 3359 - DNA, 705 bp, Enterococcus faecalis
agactgcttttagcaggctgtaacacaaccaataataaaggcacgaccgcaacgagtgattctgtcgctaaatccagtgaaagcaaaacaaaggattcggtcgacttaaattcactagatttaccacaactagatgacaaagttgccgaagatcaagacttagtccaaatggttacttcaatgggaaatattgaaatcaaactatttcctaaacaggctccaaaaactgtcgagaactttatgaaacatgccaaagatggctattatgatggcttgactttccaccgcgtcatcaataactttatgatccaaggtggcgatcctagcggtgatggaactggcggaaacagcatctggaataaaccatttgaagatgaattttcaaaccagttatataacattcgtggcgcgttatcaatggcgaatgcaggacctaatactaacggcagtcagttctttattgtccaaaatacagatgatcaatctgatggtcttttatatgatgattatccaaaagcaatcattgatgcttacaaaaaaggcggctatccttctcttgataaaaaacatactgttttcggtcaagtaaccaaaggaatggatattgtcgataaaattgccaaagtcgaagttggtgccaacgataaaccaaaaactgatgttaaaattgaaaaaatcaatattcttcaagaagcaaaaaaataa

SEQ ID NO: 3360 - DNA, 249 bp, Enterococcus faecalis
  misc_feature (204)..(204): Nucleotide 204 is "n" wherein "n" = any nucleotide.
gaaagaaaaataaaaggaatgaccgcaatggataatgctcaagtgaagagaaaacatttccgttttccagcttatgatgatgaacagggcgtaaaattaccaacagataatgaacgtaacttatttcaagatgatctgattggtaaagcaatgtctggtacaaataaactggcaattctggcgaagaattctttacaaggcgcnccttcggtccaacaaccaacaagaaattcttgcctcttcatatga

SEQ ID NO: 3361 - DNA, 546 bp, Enterococcus faecalis
ttcttatatgccccatgcacaaaaagtttaagagaagaccaagaagtcattgaaacaatgtttcgtaaaattttaagggaaatggcgctacatttaaacaacgctgcaggagagcgaaatttggtcatgcattgtgcagatttaaaaacctttattcgtacaggtgagacgtgggccaaaaatcatgccgagaatcaattgctgtctaccaatacgtactatttagagtactttgcgatgagaaaaatgcaaagtaatattctaaaaaacatgttggaattattagaagatattactgttgatgcgcaacaagttcgctatattcaacaattattggaatatacggcagaaacatttgcagagaataatgatggacaagaaattatgaatcgaattaagaccgtttatgaaacctatcgcacaaaaccattgccgcaaacaagaagtgaatttgaaaatcgggcgcgactctttcagtttttacaattgtttcagtcattcattcaagtcaaagcggactttgccaaattacaactagataaataa

SEQ ID NO: 3362 - DNA, 540 bp, Enterococcus faecalis
aggcgcggcgaaagggaaaaaagaatgctttttgtcgttattgggacaggaattggcggagcgatttttcgcaatggtgaattgtacaaaggcgctcatttatatggaggcgagtttggactgaactttttaagtaatggccaaacattcagtgaaattggcacagctgtcaaaatggctcagcgctattgtgaacgaattggagtcgaaaaacaggcggtgacaggagaagaagtttttgaactggcacaacgaggggatgagattgctcgcgaagaagtcaataatttttatgattatttaacacaaggattattcggcttacagttttcttatgatcctgaaatgattgtactcggatgcggtgtttctgctaaagaatgcttattagcagagattaatcgccggatgctaacgcatttaccaacctttgaattaaaagatattgttccagaaatcgtgacctgccattatcaaaatgatgccaacttgattggcgcagccgccaactttcaagcaaaaacgaattgggaactataa

SEQ ID NO: 3363 - DNA, 657 bp, Enterococcus faecalis
  misc_feature (147)..(475): Nucleotides 147, 471 & 475 are "n" wherein "n" = any nucleotide.
accaaaggaaggcccccaggaagttcatttcattttcaggggtttccagtaaatggtggattcaagagaagattctccaggaaatccgtttcctattttaacataggaaccgatttaggaaaagaaaggaggaacccatgcgagtanttcgtaacagaataccaacccagcctgggttggaacagtttgaagaggaagccccagcgtttgaaacagattttaaaggaaaatgttcttaaagttgaacatatcggtagcacatctgtgcctaatttagcagccaaaccaattattgattttttgttcattgttggagaaattgaaaaagtagacctgttacaatgcgaatttgaaagaatcggttatgaatatatgggggaatttgggctatcaggacgtcgttatttacgaaaaggcccgataaaaagaacacatcatgtgcatatttatcagtttgacaatacgcaaganattntgcgccatcttgcttttcgaaattatttacgagaaaatccggcaattgctacaacctatggtacattaaaaaagcaattggcccaagcacaccccgatagcattgataaatatatggatggcaaagatgcgttcattaagaaaatagaaaaagaagcgttgaagaaatattgggaaaaataa

SEQ ID NO: 3364 - DNA, 381 bp, Enterococcus faecalis
cccggcttttttggtggccaagctggctgtgcgatgattggccaagcggtcattaatgttaaatctggaggacgaaaacggctttctactttgatttcaggtattaccctccttctattcatttttgtttttaaatccgtgatggtagccattcctacagctgcattgattgggatcatgatgacagtggcagtcgacacctttgattgggaaagtttgcagcttttccgaacttttgaaattactgaaattgttattttactcgtgacagtgggtgtgatcgtctatacgcataatttagcgattggaattattctaggtgttcttttaagtggtcttctttatcattttttcaaaaaagaaccaaaaaaaagttgctag

SEQ ID NO: 3365 - DNA, 285 bp, Enterococcus faecalis
acgatcacacccactgtcacgagtaaaataacaatttcagtaatttcaaaagttcggaaaagctgcaaactttcccaatcaaaggtgtcgactgccactgtcatcatgatcccaatcaatgcagctgtaggaatggctaccatcacggatttaaaaacaaaaatgaatagaaggagggtaatacctgaaatcaaagtagaaagccgttttcgtcctccagatttaacattaatgaccgcttggccaatcatcgcacagccagcttggccaccaaaaaagccgggg

SEQ ID NO: 3366 - DNA, 768 bp, Enterococcus faecalis
taccctacccgtggtgaggcatgtttccgctcctggaaagcgaacccgcaagatattaaagtgactgatttattgattcaatactatcagcgctacttaaataatgaggaaattgaatcgacaatctctgccatcattcgtcgttatgaagatctttttgatgaattacacttggataaagcagttttagctgatattgctatttcgattcgccaattagccactttaccaaaagaaaacaatgcttttttatttgactattttttagctagcggtgaggacaataatgccaaagttgttgccagttttttcaagcaaaatggcttagatgctcgctacattagtccaaaagaattaggtctcctagtgacacctgagccaggcaatgcccgcattttaccaaaagctttagagaaaattagtgtctatcgtgagactcaacaaatcttggttattccaggtttctttggttatacagaagccggcgaaatttgtactttttctcgtggcggttccgatatcacagggtccattgttgccgcaggtgttcaagcagatttgtatgaaaactttaccgatgtggacggaatttatgtcgcccatcctggaattattgaacagcctcaaacgattcaagaattgacctacagagaaatgcgggagttagcttatgcaggctttgccgtcctccacgacgaagccttaatgcctgcctatcgcgcaaatattccagtcgttatcaaaaataccaacaacccacatcatccc

SEQ ID NO: 3367 - DNA, 612 bp, Enterococcus faecalis
  misc_feature (596)..(596): Nucleotide 596 is "n" wherein "n" = any nucleotide.
tcaaccccgtttgaggacgaaaaaggccgcttgctttatgaatatgccagtcagttaccgctagttgaaatggacacggcgtattacgggattcctcccaaagaacgagtagctgaatgggtcaaagcagttcccgaaaactttcgctttgtcatgaaagtttatagtggaatcagttgtcaaggtgagtggcagacctattatgcaagtgaagaagaaatgatcaccgcctttttagaaagtatggccccattaattgaaagtaaaaaattatttgcctttctggtacaattttcaggaacatttggttgtacgaaagaaaatgtcgcttacttgcaaaaaattcgtcactggtttaaagacctacccatcgccattgaattacgaaataattcatggtatcaaccaaactttgtaaaacaaatgttgcaatttatgaaagaaaatcaattttcacttgtgattgtagatgaaccgcagattcctacgaatccagtgcccttttatccttatgtaacgaatcctaatctcgtgctcttccggtttcacggacgtaatgcggctggctggttagccaatgatgcaaaatggggaanaaaaaaaaccccttaa

SEQ ID NO: 3368 - DNA, 777 bp, Enterococcus faecalis
cagatgcaggaacaaggacactattcttgggatcaagttttagtgggtgtggtagatgcagatggtttttctagtgaaaatattgtcaatgagctaactgctgttttcacagatacaacagtctgtgctgcgcaaacaaggatcaaaatgaaagatgtcacaaattttatgtttattgcacaagatgttgagttttttacgattaataattttattcaaaaagcgcgtcgagcaacaaaaaccatcggacttggtggcaatggtcagttttttcggttatcaatgattaccgaacacttaggctatcagccttggggaaatgctttgttggatgactatgagttaaccattaaattaatgctgaaagagttatcgattgcttatattgacgaggcctttatggctcaagaagcactgagagatgtgaaacgttttattcgtcaacgaagtcgttgggttcaaggaaatttagattgtctagcgtatttacccagggtgattaaatcaaagtcattaacgctaaggcagaagtgtggaatctattattttttagcgcaaccctttattaatctcgtagcggggatgctcgtttttgtcttaactgggcttcaactgcaacacttgtataggttaggcttttcgttatcgctggtcattagttttgttttgcccgtcagtatttcgttagttttcggcattttttttacaatcaactattatcgcgagttgcaaaattttcaactaaaagtacctgcagcactgtcttcaccaagggaa

SEQ ID NO: 3369 - DNA, 432 bp, Enterococcus faecalis
cagaaagaaatgatccaattatcggatcaaccaaaaaactggcaagaagcaatcacatttgccgcacagccgctattatcagaaaataaaatagaagaaagttatatcaaagctatgatcgagcgcgtggagcagtatggtgcgtttatccatattggcgatcacatcgcattacctcatgctcgtccagaagatggcgtaaacgaagtagggatgtctttgctgaaacttcaacaacctgtggatctgcttgataatccagcccatcccattagtttgttcatctgtttagctgctatcgataatgaggcacatcttcgggctttggcaaatttaacaaagctactttctaataaacaaaatcttcgagatttattacacgcatcaacaaaagaagaaatattagcgatcataagaaaaggagacgaatga

SEQ ID NO: 3370 - DNA, 555 bp, Enterococcus faecalis
aaggaatttaaaatcatgaacccaactattcaaccttaccaatttaacataattaaagaacaagtcgctgtgttactaaatacctatacgtctgttaacgatgctacgactgtcaaaactgtccaggccctatgtgccgaaaaaatcaatgggttatttccagaagaacaccctgctgttacgattttgttggacaaagtgatggatcgtcgtttaacacgcgcacgtgctgaaaaatatttagatgaattaaaagaaaccgtgttgccctttaaagaaccttcaacaccacaagtcacgaaagtctttcgcaaagtgaaaaagttaaagattcctgagtgggaaaacatggatttacggaacaatacctatgtcggttggaacgacgctgggactcagaaaaaatttatcttagcttatcgagaaaataaattaatcggcgtccacggcaccctttcacccaccattgttaaaggtgtttgctccatctgtcaaacaatcacaaatgtgtctatgttcctagctaccaccaaatcaggcggcgacggaacctaa

SEQ ID NO: 3371 - DNA, 528 bp, Enterococcus faecalis
acccaatcccgtggtttaaggcccacttcgttcaattacagtatacttatcaataaaaggagaatcctacctatgattaaaaaagtcaaaaaagaagcacttacaacggcgcattacgctcttctttatgaggcagatccctcaaaaaaaatggtggcagattacattacccgcggcatttgctttgactatcagactgaagaacttcaaggaattttagtcctgttgccgactcacccacggacattggaaatcgtaaacatcgctgtctcagaagaaagccgagggcggggcatcgggcaagaattattacattttgccattgattttgccaaaaaagaaaagtatgattccttggagattgggactgggagcacaggctttcaacagctatatctctaccaaaaagtcggttttcgaatgacacatattgaaccagatttttttatccatcattatgatgagcctattatagaaaacggcttgcctttaaaggatatggttcgcttacggttacatttaagttaa

SEQ ID NO: 3372 - DNA, 714 bp, Enterococcus faecalis
agacccgtgactttagatggcgttcctgacattcaggatgttcactcattaattgaaattttagaaattatgggtgctaaaattacttttgaaaataatacattaattattgacccaacagaagttgtttctgtgccaatgccaaaaggaaaaatcaatagcttacgtgcatcctattattttatgggctcacttcttggtcgatttggggaaggcgttgtcggcttacctggcggttgttacttaggccctcgtccaattgatttacatatcaaaggatttgaagcattaggcgctcatgtaaccaacgaacatggggcgatgtacttgagaacagacgaagctggcttacaaggaacccgaatttttatggatatggtatctattggcgctacaatcaatgtcatgttagccgcagttaaagccaaaggcaaaacgattattgaaaatgctgcgcgtgagccagaaattattgatattgctacattattaaataacatgggtgcaaaagttcgaggagctggaacggatgttattcggattgaaggagtcgaaaaattacatggctgtcgtcactcgattattccagatcgaattgaagctgggacttatttagctatggcagcagctatgggtgaaagaatcaaggttcgaaatgttatttatgagcatttagaaagcttcattgcgaaattgcaagaaatgggcgtttag

SEQ ID NO: 3373 - DNA, 663 bp, Enterococcus faecalis
agtgagggaaaactaatgcagttttttagtccaattattattaaatttgctctaggtattaatggattaattgtccaaattaatttgatgggaatagcgaatttggcgcccacatcggatatggaccaagtgcaaaactatgtattggggggcattattggtggtgttattcataatgattcaattacggtgctccaatttgtattagtgttaattttgtggacattattagtcttaattttaaaatttgcaaaagaacacaatcgctatgtgaagcaaattgtggatggtaaacccattactttaatcaaggatggacaggttgtggtgaaggaatgtttgaaaaatggtatttctgcaaatgatctaatgtttaaattacgagcaaatggtatttatgaagtccagcttgttaaacgggcggttttagaacaaaatggtcaattaacaatcgtcgaatatggcgatgaaagtattcgttatccgattattgtggacggtcaagccaacatggatgtcctagagttaatcaaaaaagatgagcactggctattaacgcaaatccaagaacaaggatttcaaagattacaggaaatctatttaggtgagtatttatctggacagttaagtttatcgccgtatgaagaaaaaacgattgcttag

SEQ ID NO: 3374 - DNA, 192 bp, Enterococcus faecalis
ttttgcacttggtccatatccgatgtgggcgccaaattcgctattcccatcaaattaatttggacaattaatccattaatacctagagcaaatttaataataattggactaaaaaactgcattagttttccctcactttactttatgatttcaatcgctggtgttaataaatacgtttcttgttacgtataa

SEQ ID NO: 3375 - DNA, 246 bp, Enterococcus faecalis
gggagactaattgtgtattcattaaacttgtttaagggggtcaatatcccaatgatccacggaaccaaaatcagcattcacatgtttacaaatgaaaatttggtggaaccaatggcacaggaaaaaaaattttctccagaaaaattttatgtcaatggtacacaattgggtgacggaaccttagttaaaattgaggaagtttttaacaaaatgagtttaagaacggatcagcatttttatacgtaa

SEQ ID NO: 3376 - DNA, 747 bp, Enterococcus faecalis
  misc_feature (44)..(44): Nucleotide 44 is "n" wherein "n" = any nucleotide.
acacggttgtatcgtgaaaaacaattaacgttagaaacaacggntggcagattatcaacacgaatgattgatgtatttgccccaattggttttgggcaacgtggtttaattgtagcgccgccaaaagcgggaaaaacaagtgttttaaaggaaattgctaatgggattacagaaaatcatcctgatgtggaattgattctgttgttaattgacgagcgccctgaagaagtgactgatttagagcgaagcgttaaaggcgatgtggtttcttcaacttttgatcaacaaccacaaaatcatacgcgagttgctgaattggttctggatcgagcaatgcgcttagttgaagacaaacgggacgtagttattttaatggacagcatcactcgtttagcaagggcctataatttagtggtcccgcctagtggtcgaaccttaagtggcggaatagatccagctgcgtttttcaaacctaaacgattttttggtgctgccagaaatatcgaagaagggggcagtctgactattttagccacggcattggtggatacaggtagccgaatggatgatgtcatctatgaagaattcaaaggtacaggcaacatggagctccatttatctcgtgaattagcagaacgccgtattttcccagcaattgatattaaaaaatcaagtacgcgaaaagaagagttgctaatgacaccagaacaactagaagaaacggcagtcttcaccacgagtggccca

SEQ ID NO: 3377 - DNA, 441 bp, Enterococcus faecalis
tcccaatggtcgacatttgcaataaatcccttacgcttatgttatcataaatcggaggttatgaggatgaagttagatatggtcggtattatcgtcaacgatatgacacaagcactctctttttaccaaacgctaggttttaacgtgctggaagaagcttcgcctgattacacagaattacaaaacaatggcgtcaggatttctttaaattcactacaaatgattactggtgtctatgggtttgcgcctagccagcaaggcgataaaatcgaacttgcttttctttgtgaaacggccgcagaagttgataacaccgtgaaaaaaatgagccaagctggttacattgtttttaaagaaccttggaatgcaccttggggccaacgatacgcaatcattaaagacgtggatgcaaatttaatttcactctttgcccctctataa

SEQ ID NO: 3378 - DNA, 189 bp, Enterococcus faecalis
ctaaaggagatgagaaatgtgagtgttaccctatctagaaaaattgttaatattatttccattttgggcattgttgcaaccataattgcaaccatctattttatccgattaggtgtcttcaaggacttccatgtattaagacgaacaatatgggaatctggccttcctcggtccaataattccaggtga

SEQ ID NO: 3379 - DNA, 816 bp, Enterococcus faecalis
  misc_feature (37)..(37): Nucleotide 37 is "n" wherein "n" = any nucleotide.
gtaatcgaaagtatacgaacgaggaattgtcaatggngaaaagtatatgttattggaaattttaaaggtggggttggtaaaactaaaacagtaaccatgcttgcatatgaaagtgcactacaattaggacgaaaaacgttagtaattgatctagaccctcaaggaaacgctactagagtattagctaagacgggagatttagccgaaatcacttatactgttactgaagcttttcaagaaggtagtcttgaaccagcaatcaccaatatctcagaaaaccttgatctcattccagctaacactgcttttagaaatctcaccaaaattttaatgacaaaatttccgtctaacgaatttgaccaaataaattacttaaatacattattaaaaccccttaaagagaaatatgacgcaatttatattgacgttccaccaactatttcagattttagtgataatgcaatgcttgcagcagattactgtattattgttcttcaaacacaagagttatctttagacggtgctcaaacatatatcgcttatatgcaatacttagctgacacatacgataatgatttacaggtcttaggtataattccttgtatgttgcgtcctgcgggtagggtagacaataaagtattagaacaagcaaaagaattatatggaggaaatgtattaaacactgttgtaaaatatcaagaacgtgtaaaagtctacgatgttgaaggaattaaaattagtcataattacacaggtaaagcagacggttgggacgttaaagcgcataaaggtatttatgacgtattaatgaattag

SEQ ID NO: 3380 - DNA, 408 bp, Enterococcus faecalis
cgccccatccccgttgtgaagacaagagatgccagtagtgccgtgatccaagaaagcgatacgttagaccgcagcatcgacgacttactgctggattatgaaacaacaaaccaagaatttgcccagttggtcattgcaatcaatcagcgaaatgcggtcgccaaaatcggtgaacaagaaacgattgctgctgcattagagaaacgggaagctttaaggcgttcgcatgcgatgctaacggcaacattggaagcagccaaggttgctccacggatgggacgtaatgagattcgtatgatccgaacgatcgataccaagcaaatcaccgaccgtttgaatcaaaccgcaaaagccttacgtgaattagacgggcagattcaacaaacaaattggcttgttgatttataa

SEQ ID NO: 3381 - DNA, 201 bp, Enterococcus faecalis
agaaaacgcaaggcgcctggcactcatcttcctccctccctacagccctcagttgaacctaatggaaggcgtttggaagtggctcaaggaatcggtcatcttgaccacgtccagaaaatcaaacagtcggtccgcggtttcttagctgatgtaaacgagcgtccccttgaggtgattgaccgactgtgcgtgcggatgtaa

SEQ ID NO: 3382 - DNA, 504 bp, Enterococcus faecalis
ttcaaatatatgggatttgacgggaacttgttcgaaacgtatccgatcatgtttaacaccatgatgaaagctctagaagatcggcaagtacttctgaatccaaaagctgtttatcgattattgaaagaaaattcttcaaaagcattgactgacaaatatcatttggactttcgagaattctcagatgatttccatcaatacgaaacgcttgatacacgtcaacctgtcacattcgatcatgtgtatgacacattgacgcaattgaaacaacaaggatctaaacattatatcttgactcatcgtacgatcgcttcgactcgcgaattgttagtaaaagaaggaatgttagaattttttgaagaaaacgcaaggcgcctggcactcatcttcctccctccctacagccctcagttgaacctaatggaaggcgtttggaagtggctcaaggaatcggtcatcttgaccacgtccagaaaatcaaacagtcggtccgcggtttcttag

SEQ ID NO: 3383 - DNA, 771 bp, Enterococcus faecalis
gtcattttattatcaaatattctgaatattataagaattggagttttatctatgagtgacaaagaacaacttgagaaattagacaaatcctttctgggacaaccgaaaggactagcaacactgttcttcacagaaatgtgggaacgtttcagttactacggcatgcgtgctattctaatgtattacatttacgataccgtagccaatggcggtttaggtctccccaaagcaactgccttagccatcatgtccatttatggatcaatggttttcatgtccagtatcattggcggttgggtctctgaccgtgtcttaggttcaaggaaaactgtttttattggtggtttgctaatcattgctggacatattgttctcgctaccccatttggtgtccccgccttattcctttctattatgttgatcgtatttgggactgggatgttaaaaccaaacgtttcagggatggttgggcatctttattcaaaaactgacttacgtagagatgcaggcttctccattttttacatggggattaatatcggagccttaatcgctccccttgttgtcggaactttaggactagaatataattatcatttatgcttttccgttgccgcagtatggatgttcttcgggctactacaatattatttccaacgacgtaaatctcttgctgggattggtcaagccccaactaatccaatgtctaaagaagaacaaaagaaattggctaaagcatttatgttggcaattgtcgttggcttaacttaa

SEQ ID NO: 3384 - DNA, 621 bp, Enterococcus faecalis
gacacggtacaatcagcaggtttttcccctcttattgttagtgcgatgtcgttttttatttttgcaggatctgctcagtttgtaacagttagtatgttgactggcggcagccctatcttatctattgtgttagcgactttcttagtaaatgcgcgtatgattcttatgggaatgaccattgcgccttactttaaagccgaatctctcggtaaaaatctctggttgggaaccttactgacggatgaaagttttgcactaggaatgaataaattaaaccacaccaaaggacgtttaagttttgagtggtttaatgctgccaatttgatttcctatgcgacttgggttttttcgacgatcatcggtgcctatctagggcgctttattgcaaaccctcaagcattaggtcttgagtttgcggtcgtggctatgttcattggtttactctatctgcagataattagtgatcgttccatgaaaatcgctttacaactcatcatggtcctgattacttttggtttgatgtctattggtctaatttttattcccagtaatttaattgtcttagttgtcacgttaatcgggtgtggaataagagtgatgataaaacatgccttcttctga

SEQ ID NO: 3385 - DNA, 687 bp, Enterococcus faecalis
  misc_feature (5)..(83): Nucleotides 5, 33 & 83 are "n" wherein "n" = any nucleotide.
cctanccggtgtgaagagccaatgcctttttgnaaaaattacgtgtacacggacacaacaaagtccaacctgcaggtgcagcnggaaaaagcagaagtttctgaagatggactaacatacaaaattaaattaaataaagatgcaaaatggtcagacggtaaaccagtgactgctaatgactatgtttacggatggcaacgaacagttgatccagcgacagcttctgaatatgcttatctgtatgcctctgtaaaaaatggtgatgccattgctaaaggggaaaaagataaatcagaattaggaattaaagcagtcagtgatacagaattagaaatcactttagaaaaagcaacaccatactttgattacttattagctttcccatcattcttcccgcaacgtcaagacattgtggaaaaatatggtaaaaattatgcatcaaacagcgaaagtgctgtctacaatggtccattcgtcttagacggctttgatggtcctggtacagatacaaaatggtcattcaagaaaaacgatcaatattgggataaagatactgtgaaactggactcagtagatgtgaatgtcgtgaaagaatcaccaaccgcgttgaacttgttccaagatggacaaacagacgatgtcgttctttctggtgaattagcccaacaaatggccaatgacccagct

SEQ ID NO: 3386 - DNA, 660 bp, Enterococcus faecalis
ctaagggcccaagtaatgcctttatgtttctcgtgggggggcttaaaactagagaaggcactaaatgtttttgcaatcaacgttcaaggcaaaacaatgttagatattggttcctccacaggtggttttaccgatgttgctttacaaaatggggctcgtttgagttacgctttagatgttggctataaccaactagcatggaaaattcggcaagatgaacgcgtggtggtaatggaacgtaccaattttcgctatagtaaacctgaagatttcactgaaggggtgccggatattgcaacgattgatgtttcctttatttcattacgcttaattttgccacctcttcatgatattttgaaaaaaggcggtagtgtggtggcgttaattaagccacaattcgaagctggcaaagagtttgttgggaaaaaaggaatcgtgcgtgatccagaaacccatcaaatggttgtggaggaaattacacgctttgccatgaataacggttatgatgtgaaaaacttagatttttcaccaatcactggtggcgaaggaaacattgaatttttggcacatttagtttctgttgaaggggaaggatcctatcaagcgccaaaatccattgaaaaagttgtcgcgcatgcgcctcaaaaattagcggaatga

SEQ ID NO: 3387 - DNA, 771 bp, Enterococcus faecalis
gtgctaacgggcgataatgacattgtccccaaaaaagtctttaaagatgtacgcattgaagtttcccatggcttattaggttctcaaattgaagcaatgacagatgaagagttgcgggcgcaagtagaagaaactaatttatttgccacattatatccgatgcaaaaatttcaaattagtgaattgctacaagcaaaaggtcatacggttggttttatgggggatggcattaatgatgcaccggcattacgaaaagctgatgtgggcatttcagtagatactgcagctgatattactaaagatgctagctcgattattttactggaaaaaagtttaaatgtattggaatctggtgtgattgaaggacgaaaagtatttagcaatatgatgaaatatattaaaattaccatcagttctaattttgggaatgtcttttcaattttagtagccagtgcctttttaccatttctaccaatgctttccttacaactcttgattcaaaatttgatttatgatgtggctcagttgacaattccttgggataatgtcgatgaagaagagttattaagccctgttcggtgggaaacgaacggactagcgaaatttacggtatgtattggcccggtaagtagtattttcgatattctaacgtatcttgtcatgtggtttgtgtttagtgccaatagtttggcaactcaacatttattccaaacaggttggtttatggtgggacttgttagtcaaactggtcttcagcccgggaagggcgaa

SEQ ID NO: 3388 - DNA, 243 bp, Enterococcus faecalis
ccctttataccaccttcttttaggggggaaggaatcaccgccagagggggaattcttccagatgacacaaaaccggggggatggcgcttgtataaccggttagctggtaaaaaaaagatgtcccataaggaagccagttttttcatattgaaagatgaaaaaggagctaacattgagttggttccgggggatgtgttgatccagccaaagggttcagccctgaagcggtatcccgctccttaa

SEQ ID NO: 3389 - DNA, 732 bp, Enterococcus faecalis
acccaactcgtgttgaagactgctcgtgtcatcgatacagcgcaaatctatggcaatgaatctggcacaggagcgggaattaaagcaggcttagcggcaactggtttgaaccgtgaggacttatttgttacctcgaaagtttggaacgcgcatatttcctatgatgaaacaattcaagctttcaatgatagtttggaacgtttaggtttagattatttagatttgtatttaattcattggccaggaaataattcttacaaagaatcatggcaagctttagaaactttatatgctgaaggaaaagtgaaagcaattggtgtcagcaacttccaagttcatcatttagaagatttactttcttatgcaaaagttgttccggtaattaaccaagtggaactacatccaaaattggatcaaaaagaagtgcgtgatttctgtgaaaaacatgatatcaaagtccaagcttggtcaccattgatgcaaggccaattattatctaatgaaaccattttggcgattgctgagaaccataataaatcagcagcccaagtgattttacgttgggatattcaacaagatatcttattagcggtgaaatctgtccacaaagaacggatgattagcaatgcagcggtctttgattttgaactaagtgcagaagaaatggcacaaattaaccaattgaatgaatcgttacgtgtgggaccagatccagacacgtttgatttctaa

SEQ ID NO: 3390 - DNA, 288 bp, Enterococcus faecalis
  misc_feature (214)..(214): Nucleotide 214 is "n" wherein "n" = any nucleotide.
ctaggaggagatacaatgagtgaagcagttaaaggtttttcagtagtcaaccacgtggggattacagtcagtaatttggatgaatcagtgaagttttatgaagcattaacaggaacaaaaatcgcaaatcgtgatgaaattggtggaaaacggatggcccaaacacaaaggttagatgatacattaatcaagtatgccaatgtgcatctagaanacatcaatattgatttattaaaatatgttaaaacaaaatcaaaaaaaacttcttattccaacgaaacaaattaa

SEQ ID NO: 3391 - DNA, 216 bp, Enterococcus faecalis
aaaattggatgcaccaacgaaaagatcgacttcacttatattagtgatcctggtcatatcgcttacttttccggttacgaaagcgaacctcatgaacgcgtgttagctttgtttatcgctgcggacgaccaatcatttttatttacacctgcattggaagtcgaagatgccgcaaaagagtacttggacttatcccgtttatggttatttagatag

SEQ ID NO: 3392 - DNA, 630 bp, Enterococcus faecalis
ctttgtttatcgctgcggacgaccaatcatttttatttacacctgcattggaagtcgaagatgccgcaaaagagtacttggacttatcccgtttatggttatttagatagcgaaaatccttgggaaaaaattgcggctttattaaataaacgaacacaaggcacaccacgctttgctttagaaaaacaagctctttctttagctcgtttcgatcaattgaaaacctatttcccagctagcgatttttcgcatgatgttacgcctttaattgaaaaacttcaattaattaaaacagaacctgaaattcaacgtttactagaagctggtagttgggctgatgtcgcttttgagattggcttcaaagcaattcaagcaggcgttgcggaacaagaaattgttgcagaaatcgagtatcaattaaaacgtcaaggtattcgctcaatgagttttgatacgttagtcttaacaggaaaaaacggagctagtcctcacggggtacctggcgaaacaaaaattgagccccatgacttagtgttatttgatttaggtgtcgttcataatggctattgtagtgatgccacacgaacagtcagctacttggaaccttctgatttccaaaaagaaatttat

SEQ ID NO: 3393 - DNA, 657 bp, Enterococcus faecalis
ggaatgaaactaaacgggattattatgatagcggttgttggaagcgttttatctagctgtggttggcaaaaatcgaaagaggaatcacagaaagtacaaaccgtacaaacaaacaatgtaaatactgaagaaacaagagcaatttcagcaaccgaagttagtcaaaccacggcgttggaattagagcaaacaacgcaaacacaagaattaactgaattagttacagaagaagggacgatttggaatcagcaaaaagcaaaacagttaggacaatacatggaaacctggggtcaagaacgcaatcagaactatcaagcgtaccaaccaggtcactctgtagctttttacacgattcaagtgcctgatgatttattgagttatgaacctaaaatacaaccagctattgggaacaatcccatttggttaaattggtcagaaacaggcagcgaagggggttattgtctggtggcagtatactctgacagtgcgacacaagttgcccagaagcatgtctatttatttactttagtgaatggtgaagctaaagtttatgtgagtaaagaacagccagtagaggagcaaccttatttgtttttaaaagaaacaagcaatacagaactgaaagaacaattcacaaatcttgtgaataatctttaa

SEQ ID NO: 3394 - DNA, 435 bp, Enterococcus faecalis
acgtcgtatccatttcttgctttaatgtcagttgtttttggaccagtagctggagggctaattggtttgatcggtcacacgttaaaagattttaccacgtatggtagcgcttggtggagctggattatttgttcaggaattattggtattatttttggcttcgctggtcgtaaaatggatcttcaacatggtgaattcacaacaaatgacatggtgcgtttcaatattttccaagcctttggcaatatcgtcgtttggggcttaatcgcgcctagcttggatattttgatttatagtgaacccgcaagtaaagtgtttacacaaggcgtattcgcgactgtttcaaatattgtcgctgtggggattattggaacattgttgatgaaagcttatgcatcaacaagaacaaagaaaggcagtttatcaaaagattaa

SEQ ID NO: 3395 - DNA, 207 bp, Enterococcus faecalis
  misc_feature (29)..(139): Nucleotides 29, 103 & 139 are "n" wherein "n" = any nucleotide.
aggagaaaaagtttaatcgttgggcctantggttatggtaaatcaacattggcgcaatgtatcaacggggtaattcccaatatttatgaaggttacattcaangaacagctaccgttgctggtaaaaatatccaagacnacaagtctatttggatttgttcttttgatgttagagctgtttttacaagataccgatgggcagtttaa

SEQ ID NO: 3396 - DNA, 600 bp, Enterococcus faecalis
aaaggaggagtcaagaaagggccaactaccattggtgattttagcaaagtgcaggatttagataatgaaattagtaccaattatgtaggtgaagtagataaaaatgaattagttgaaggcgccttaaaaggcatgtctgaagccattggagacccatactcaacttatctaaatgaatctgctgccaatgatttaaacgaaagcttatctggtgattttgaaggaattggtgccactatgacaatgaaagatggcgaaccagttgtagcagaggcccctgtagcagattccccagctgaaaaagcgggaatcaaagaaggcgatattattgaaaaggttgatggtacagctacaaaagggatgaaactagcagaagtcgtctcaaaagtccgaggtaaaaaaggaacttccgttgaattgactatccaaagagagggagaaactaaaaatatgtcaatcaaacgtgggaaaattcccgttaaaacagtgactggtgagttagacaaaaatgatgcacaaattggctcgattaaaattacgtcctttggtaaacagacatatcaagaattgaaagaaacaatcacgaatttaagtgactaa

SEQ ID NO: 3397 - DNA, 258 bp, Enterococcus faecalis
tccccgtggtgggcacttcgtaaaggggtctctaagggctctggtgtcaaaaatctttttaacaccttgggattaaacggcattccgacttatgcctttggtgatggcatcaatgatttggcgctgtttgaggcctgtgattatggaattgccatgggtaatgcgcgagaagaactaaaagaaaaagccacctttatttcaactaaaaatactgagaatggcattgttaatggcttgaaaaaatttgatttactataa

SEQ ID NO: 3398 - DNA, 252 bp, Enterococcus faecalis
gaaacatcctatcctaaacatagaaaaacaaaggggtcaataaaaatggacaaccaatggttactttacggaattagcagtgttgtattaattattttaatcagaagaacaatcctatcaggaaacatcgtattaagttgtttgttgggagcgattttgctgattcaagtagtgggagtagctctctgtgcacagcagaaaaagaaaaatgaacatacaaaagaactaccttcttctaaagtacatcaatag

SEQ ID NO: 3399 - DNA, 780 bp, Enterococcus faecalis
  misc_feature (714)..(738): Nucleotides 714, 735 & 738 are "n" wherein "n" = any nucleotide.
tacactaaaagtgaactcgaaatgaaaggagccattcctttggttaatagcgaaaaaagaaaacaattaattattgatacatgcattttagctggaaaaattatgctggaaagcggatctgaagtatatagaaccgaagatacaattactcggattgcagcaaatgctggcgagccagagagcgtttgttacacgacggctacagggattttcgtgggctttcgttccagtaattatacgcaattagaaaacatcccccagcgctcgattaatttggaaaaagttagccttgtcaatcagttatcaagagaatttgcgcaaaaagagattactttaccagagctttatcagcgcttaactctattagaaacagatacccccactttttcaatttcgttacgcttgttagcagccgggattgttagttgtacgttaatgtacatttttggtggcacttggcaagattttattgcaactttttttgttggcgtgattgggtatgccagttatctttttacccaaaagttattccaagttccttacctcgattcattcgcagccgcttttgtcattggtttgttggcctatttggctgtgcattttcacttagcggtcaacatcgataatatcattaatggttgcggtaatgcgttagttccaggtgtggcgaatacgaactcttttcgcgaacatttaaccgggccacctcatcancgggaacggcgcaaagggaanaancttattttattgctgggttcgttggccctgggatttgcctga

SEQ ID NO: 3400 - DNA, 213 bp, Enterococcus faecalis
  misc_feature (67)..(91): Nucleotides 67, 88 & 91 are "n" wherein "n" = any nucleotide.
tgcgttagttccaggtgtggcgaatacgaactcttttcgcgaacatttaaccgggccacctcatcancgggaacggcgcaaagggaanaancttattttattgctgggttcgttggccctgggatttgcctgaattttaaaattattattgtaagggatgttcaaatgggaacaatttttccccctccccttaagtttttaaccaaagtgtaa

SEQ ID NO: 3401 - DNA, 567 bp, Enterococcus faecalis
cttgaaaaattccctaaagtcgacattttagtgaacaatatggggatttatgagccaatggaatactgggacatcgatgacgccacttgggaaaaattttttactgtgaacgtgttgtcaggcaatgcattagcaaaagcttatctacctaaaatgcttgcacaagattttggtcgcattattttcatcgctagcgaagaagcggtgatgccttctggcgaaatgccccaatatagcatgacaaaaacgatgaatctttccttagctaaaagtttatccaacttaactgttggcacacatgtcaccgttaacacggttatgcctggctcaacccttaccgaaggtgtagaaaaaatgttggaagatatgtacgctgattcagacattcccaaagaggattgggaaaaagatttcatgaaaaatcatcgttctcgttcacaaatccaacggctcattcgaccagaagaaattggtcgttttgttacctttgtggccagcccagattcttcttctttctcaggagaagccttaagaatcgatggcggcttagttccaacaatcttctaa

SEQ ID NO: 3402 - DNA, 327 bp, Enterococcus faecalis
  misc_feature (53)..(53): Nucleotide 53 is "n" wherein "n" = any nucleotide.
gcactgagtcaccttttgcttttgcgtttggaggaatgggtggcgtattcgcntaaaaaaattcaactgtattttcaagcgaatcgtttaaaatcagccattcgtacaattattttaggaagtgttgtggcagtcttcgcccgctggttttggcatttttgggcgggtgtattggtttggggcatgtatgcaccaaaaggaatgagcccatatctctattcctttgttctaaacggtacaagtaccgtcgtcaattgtttgtatgtaagtctagttctaggcttattggcaaaagtagcaccgcaattatttgttcctaagaaataa

SEQ ID NO: 3403 - DNA, 429 bp, Enterococcus faecalis
ggtaaaaaacaggtaattagtcatgggagtttaattcaaacttatttggaaagggaggcagaggaatggatccaacataaagtaaccttcaaggcaatttttaaactgattacgctctcttcccaacatttcttttcggcatttttagaagattctcaagatcaaaagaataaagaaaaggaacgcagtgcgcttttacaagagctccaagttgctgccgcccaaaaatccttagtggtcttacaattgaaagaagtccctacagcgcataaattcgaaacggtgattggctggattgtctcaaaaaatatttcggacaatatcgttgttcgtttacaaacggatgaacaacagttgcgcatgattcctgttgcttctgtcatgaaagtcagcacgttagccaatcgtcaccaacgtcaaattcactag

SEQ ID NO: 3404 - DNA, 531 bp, Enterococcus faecalis
  misc_feature (527)..(527): Nucleotide 527 is "n" wherein "n" = any nucleotide.
ctaaacaacaagagacgagtgaacagatcactcgtcttttttttgtacaagtgtaaacaaatagtgattgcaaagaaaggagttgataaggtgccattaaaaagtaaagagccgcgcttagactttccaattgaagccattacgaataattttctttttacaacctctaacgatgtgtgggtaggttataaacttgcacaccaagtatttcctttgaataatttagactttttcaaggaatacatagaggacggaaaaggcgtattcgagcaagacacgttcgactaccattttatgaatattccagaatactttgatctcgacgaacagattgaagcgacaatcgataacctggtaaagggaagctttgcggatttaggagaaacctatttccgacaagcgggtgatattctaaaagacgaagtccaaatgaataaatatagtacgtatttgttcattcgttttaccgcacctatacaagtaactaagacctatggagtatttagaattttcgccgaagtgccgtnttta

SEQ ID NO: 3405 - DNA, 456 bp, Enterococcus faecalis
aagtacgacattaaaaatttacaagcttggaaagaaagaaaaagtgttcttacacaagatgatttagactacttgattaaatataaatatgaatcactggataattttggattaggaataacacctattgaaaactttcctgataaagaagttgcaattcaatacattaaagatcaatcatggtatattttttttgaatccattttagattcttataatgatagtgaagagaaattattagaagtagatgctagttatccttttagatatttcttacagtatgctcgtttatttttacttgatttaaactcagagttaaatatttgtacaaaagaattcattattaatttattagaaactttaacacaagagcttattcacttaacaagtaaaacattagtgctagatttgcatacttttaaaaaaaatgaacctctaaagggaaatgatagataa

SEQ ID NO: 3406 - protein, 305 aa, Enterococcus faecalis
SIRGAEAGTIGAGLCKGSGEAIGIAGPSVLIAFLIGGAVLFIVMSGLGKLVLDGGDTHHGLSGLVRPFLGAHSADFIDWVYYSMWTINIIAEAVAAASFLQLWFPNIPAWFFVFILAILTTLINLYSVRLFAETEYWLAFAKISVIILLIIFGVYLVGQQMLGSGVFPTLQSITDHGGFAPHGMKGIVNSLLVVIYSYGGSELIAITVSEADDPKKAIPKAIRGVMGRIISFYIIPLFLLLIIFPWNTLAGTTVSPFVMVFEKMNIPFAADIVNFVIILNPCFLLLILEVYASSRLLYFRLKDKK

SEQ ID NO: 3407 - protein, 246 aa, Enterococcus faecalis
MPFRGEEALLLTGCGAQGGTTEKSSEADSNKPVKIVAVGSTALQPLVDAAKDQFTQEHPNYTVSVQGGGSGTGLSQVADGAVTIGNSDVFAEEKDGVDASKLVDHRVAVVGMGPVVNKEVGVKNLTKQQLIDVFTGKVKNWKEVGGKDQEIVVINRANGSGTRATFEKWGLDGAKPVQSQEQDSSGTVRKIVEQTPGAISYLAFSYMDDSTVALSIDGVEPKEEHVKDNSWKIWSYEHMYTKGEPN

SEQ ID NO: 3408 - protein, 208 aa, Enterococcus faecalis
QRQRVALASALIIEPKLLLLDEPLSNLDAKLRVAMRIEIKRIQQQLGITTVFVTHDQEECFSISDKVAIMNNGVIEQYDSPETIYRLPRTKFVAEFIGFENFFSVEKMEAGHYRTQTNQIVKTTNPEPNVTTTVATIRPEDIEIVSEAATNTVAGTVAVRTFLGKSYQYEVETALGTLLVNGTSEQLYETNETIHLAFPAEKLVILEK

SEQ ID NO: 3409 - protein, 178 aa, Enterococcus faecalis
LTFGRHVLYERNAVWLFDCGEGTQLQILKSSIRPRKIEKIFITHLHGDHIFGLPGLLSSRSFQGGTEPLEIYGPVGIADFVKTSLRVSQSRLSYPLKFIELTKENDVIFKDKQFTVRCNILDHGITSFGYRIEEAAHEGELQVEKLQALGIPSGPLYGKLKRGETIVFDGQEINGQAF

SEQ ID NO: 3410 - protein, 216 aa, Enterococcus faecalis
FILLMHNSNSLAGDFKIGPAKTGMLADSERVEAVVRNLQKVDFGPLIVDPVMVAKGGHHLLEAEAVQTIKEQLLPLATVVTPNLPEAEVLLETTIKTEQEMQTAAKKLQQLGTKNIIMKGGHSTNQQAADYVLMEDGSSFWLSAPRIVTKNTHGTGDTFSACIAAELAKGTPLEAAIVIGKQFIQGAISQAISVGHGHGPTNHWAQLTQDIQVIKA

SEQ ID NO: 3411 - protein, 169 aa, Enterococcus faecalis
WREKMAKQKNFYDTYDALFQKPKWSFFPVTRTDTAKQLPNPNKKVVKPQTMKEKKLEKNKKIIWIGIAVAIGFIVYIDLAEKDDYWDYSASSEDVYPLKEAGLTTTGPVDLEKPLKVTIEENKLLFNQCYQIEIIGDADIETSGGKELFNFTFYRGISRYKISTAYHFL

SEQ ID NO: 3412 - protein, 184 aa, Enterococcus faecalis
KGVHDLNGIMVLLVGTGYIGWVTYRNVRTYFRYKKNLKKYQTTHHLTDSDLEMYQRIMDELKKQIIYLNELTNKSRNLKKIEQVKLGVASAKGIFKHLVKYPEAITHFSDFLYHKVPEILRASERFLSIKEDKLSTEEITLATNGILSTIRVLSESITDDYERLVSEASEEIALSKKLVERKNG

SEQ ID NO: 3413 - protein, 85 aa, Enterococcus faecalis
REVIYVTQLKKLCQNRLAIVLTAVFFFWLKTIIAYYADFSLGVEGTIQYFILWINPIATTLLFFGLSLYIKKPKPALAILLIIDI

SEQ ID NO: 3414 - protein, 123 aa, Enterococcus faecalis
LGGAIGRGEGSVLVVSNKKDSRIKRVVEKFDLDYVARALKPTARGFKLAEKKLGLKPSEMLMVGDQIMTDIRGANAAGIRNVLVQPIVDTDGWNTRINRFFERKIMKYLSKKHPEMTWRGGLE

SEQ ID NO: 3415 - protein, 121 aa, Enterococcus faecalis
TENYEILIKKTSRNDMERRIRMTEAIHCIGCGAIIQTENPHELGYTPKTAFEKGMETGEVYCQRCFRLRHYNDIQDVQLTDDDFLRLLNGLGTEDALIVNVVDIFDFKGSPYSRTTSFYRR

SEQ ID NO: 3416 - protein, 197 aa, Enterococcus faecalis
  MISC_FEATURE (62)..(62): Amino acid 62 is Xaa wherein Xaa = any amino acid.
FFPRRSLPQGGTGMDSLKGMAIFATVVDKGSMAAAAQSLGMTPSAVSQQIRKLESRAQVTLXHRTTRRLTLTEAGEAFYRSCAQMLAIAEEAERRLGEWRDAPVGELRLAAPVGFSGTLITQALKPLLENHRQLRLQLFFQDERIDLVAERIDLAIRVGNLADSSLVARHLGDWASVLCAIPAYLSRRAPISLNRAP

SEQ ID NO: 3417 - protein, 70 aa, Enterococcus faecalis
WAPGGSNRPESRKARWPNRRGGAPPGWSRRDCRRVSPGRCARRPDRCARPGRTAAGATGGGSPATVSAPG

SEQ ID NO: 3418 - protein, 121 aa, Enterococcus faecalis
  MISC_FEATURE (78)..(78): Amino acid 78 is Xaa wherein Xaa = any amino acid.
LDDLARWACFLALFPVIFPQAQSPARRNRHGFAERHGDLRHCGGQGLDGSRGPEPGHDPFGSQPADPQAGEPRPGHFXASHHPPADPDRGRRGVLSQLRADAGDRRGSRAAAWRMARCAGG

SEQ ID NO: 3419 - protein, 107 aa, Enterococcus faecalis
NNLFGIKAYGNQPKVNLETKEYVNEVWITIQGDFRVYDNWEESMRDHTKLFVDGVDWDPNLYEKVLLAKNYKEAAQALQDAGYATDPTYADKIIHVIEEYNLNKYDR

SEQ ID NO: 3420 - protein, 218 aa, Enterococcus faecalis
INTTVKHGGMMTMSEKWIPEIMTPLKQDIVKMPEIIRQASGIKIFGRKIKSIIFTTDIAIIRNTDAQAVIAVYPFTPHPAITKGIIEAADIPVFSGVGGGLTQGMRSAYMSLFAEAQGSMGVVLNGPTPIETIKMVDEAIDIPIISTVTSIHTPIDEKLAAGVDMINISAGKDTAATVRYFRGKYPELPIIATGGPTESSIHETIIAGANAITYTPPS

SEQ ID NO: 3421 - protein, 229 aa, Enterococcus faecalis
  MISC_FEATURE (2)..(223): Amino acids 2, 5, 6 & 223 are Xaa wherein Xaa = any amino acid.
TXAGXXIQPRGQDQVDKQRADFKRLGVAGDWEHPYVTLDPSYEAAQVRVFGKMAEKSYIYKGLKPIYWSPSSESSLAEAEIEYKDVKSPSIFVAFNVKDRKDILDEDTAFVIWTTTPWTLPANQGIAVNPKFTYVLVEADGRKFVVAKDLLETVQSEIGWENVTVLKEFAGQEMEYMTASHPFYERESLVILRDHVTLDAGTGLVHTAPAHGEDDYIAGDQYXLSVVSL

SEQ ID NO: 3422 - protein, 321 aa, Enterococcus faecalis
  MISC_FEATURE (310)..(310): Amino acid 310 is Xaa wherein Xaa = any amino acid.
QLNRKGCEQMAKETNVKLVTVSVFVATFMTAIEGTIVSTAMPTIVGSLHGMEIMNWVFSIYLLTNAMLTPIYGKLADKIGRKPVFMIGIIIFILGSSLCGFAQDMLTLIIARAIQGVGAGAILPVALTIIADMYTLDKRAKILGLNSAAWGIASIFGPLAGGFIVDTVGWHWIFFINVPIGLVLLGLISIFLVEPKRERTKMPMDILGSVTLMVVLLTLLLGFQMISDNGFTLVTFGCLSLSVLFFVAFVMIEKRAQEPVIDLHLFNQPTFVLVNLIAALISGFLMGIDVYIPMWMQGVLGKSAGIGGLXLPPMSLLWMAG

SEQ ID NO: 3423 - protein, 134 aa, Enterococcus faecalis
YGGYARHGGGAFSGKDATKVDRSASYAARYIAKNIVAAGLAKKVEVQLAYAIGVAQPVSISINTFGTSDLPESKLIEAVRKNFDLRPAGIIEMLDLRRPIYKQTAAYGHFGRTDIDLPWEQTDKVEALKASLAE

SEQ ID NO: 3424 - protein, 63 aa, Enterococcus faecalis
KVSIKESSNREYLLSRTCLKTEPEKFYQFVKTLYHPDAQPNIIHQENGPIRANETGKNCFTKY

SEQ ID NO: 3425 - protein, 179 aa, Enterococcus faecalis
KQSQKSFINSLKRSIIQTHNLISFTRKMAQLEQMKRGKIVSQNIDGLHRKAGSQEVVDFHGNLYECYCQTCGATVPWQDYLLSDRHADCHGQIRPAITLYEEGLSEEAIEKAIQAVASADLIVIVGTSFQVHPFCDLIHYKQPTATILAINQTPLFLQQPYYFLEAKAETIFAELTIKE

SEQ ID NO: 3426 - protein, 131 aa, Enterococcus faecalis
NGLDQGAFLAPTLLANGTNAMCVAQEEIFGPVATVIKFETEEEVIRLANDSEYGLGGAVFSQDINVALRVARGVRTGRMWVNTYNQLPAGAPFGGYKKSGIGRETHKSMLDAYTQMKNIYIVTKEEADGLY

SEQ ID NO: 3427 - protein, 122 aa, Enterococcus faecalis
NNPDVDEEAMVNLFFNVRDAAYTIIEKKGDTFYGIAVALARITKAILNDENSVLPLSVYLEGEYGQNDIYIGAPAIINRQGVKQVIEIPLTDAEQEKMEASASALKEVIETAFAKFEAEEAK

SEQ ID NO: 3428 - protein, 90 aa, Enterococcus faecalis
RPDLREVINQPFGVTETKGAYDVIVNVNGGGYAGQSGAIRHGIARALLQVDPDFRSALKRAGLLTRDARMVERKKPGLKKARKASQFSKR

SEQ ID NO: 3429 - protein, 195 aa, Enterococcus faecalis
HVTFQDFLLFTLTLNLGDRKSESYALQWKHVDLQNGTILLVQSKDKLGNLTPTKGRKNSKFQLPSSLIELLMKWKKEQAQELLQLGIKQNAEQFLFTYIDRKGNVNVPVHIDYLNYRINSVKRRHKHLINTSSHKLRHTFSTLAYEGGATMEQISRALTHSDTKTTEVYVNTPNIVDLSTYEKFEQRLAEAKNIK

SEQ ID NO: 3430 - protein, 251 aa, Enterococcus faecalis
NPVVKSLPSLTDFCGIGRRMAKRLNRLGIDSVYELAQANPHLLQETFGMMGLQLYAHSWGIDRTFLGKKAPHKAEKSFGNSQILPRDYARRDQIELVLKELTEQVAARLRKAHCQTECITVYVGYSKGQIDREGRTGWRKQQTIPATNNTKVLITYVLALFREHYLAGTDVRQLGLSYGKLVWNESLQLDLFSEPEEQISEMELNYLIDKIRQKFGFQALIHTSSLLEGATAIHRSGLVGGHAGRNVGLGG

SEQ ID NO: 3431 - protein, 65 aa, Enterococcus faecalis
  MISC_FEATURE (38)..(57): Amino acids 38, 56 & 57 are Xaa wherein Xaa = any amino acid.
EDNIMKRTKKEFTPYNEYHDRPFELKWATAFALGELQXRIEASDEYSKRAFERLPXXNHEEIEEY

SEQ ID NO: 3432 - protein, 281 aa, Enterococcus faecalis
  MISC_FEATURE (54)..(54): Amino acid 54 is Xaa wherein Xaa = any amino acid.
PATQISFPFINAGEAGPLQLEMNLTRAKFEELTSDLVERTKVPVRQALKDGGLXPSEIDEVILVGGSTRIPAVVEAVRKETNKEPNKSVNPDEVVAMGAAIQGGVITGDVKDVVLLDVTPLSLGIETMGGVFTKLIDRNTTIPTSKSQVFSTAADNQPAVDIHVLQGERPMAADNKTLGRFQLTDIPAAPRGVPQIEVSFDIDKNGIVNVRAKDLGTQKEQTITIKSSSGLSDDEIERMVKDAEANAEADKQRKEEVDLRNDADAFLFTVDKTLDDLHHEP

SEQ ID NO: 3433 - protein, 238 aa, Enterococcus faecalis
PFRFEESLVMPYYGYARQDRKARAREPITAKLVANMIEKAGATRMLTLDLHAVQIQGFFDIPVDHLMGAPLIADYFIEHGIQGDDVVVVSPDHGGVTRARKLAEFLKAPIAIIDKRRPKANVAEVMNIIGHVEGKTCVLIDDMIDTAGTISLAANALKEAGAKDVYASCTHPVLSGPALQRIEDSAIERLVVTDSIYLSDDRKIVKIDEVSVGELIGDAIKRIHENKPVSPLFETKNK

SEQ ID NO: 3434 - protein, 446 aa, Enterococcus faecalis
ENETIESFTNQIGNKLGIGNKLYNNGVIYLVAVKDRQARLEVGYGFEEIIPDSLTDEITDSTVKDFYKLKDFNAGIHIVTIRIKELLTIDTISKTTSLHKVSFWQKIWLYLLGIGRSLKPWLIIVFIIVMLYFLWELRNAGKELSARLALVDMANRYKEDVAMFYNGGISSKAIVLGEQSVEFKAAKARLEKNILYPENSKKEIIIPAYYDMDFAFGEVTPKKFIYNYVAQWKDLRSSSMCACFWKVNQPWIYLPRFWIGEVYWEKVPEKKLPACRISGINDNLISAYLKIILFPLSILLKHPFLVSVTLIIYVQVSLSEQSFPSTVFTLITEILTFLEDEDSLVPMVSLVYFLIPVFFLFGYIKSIGVGLQNRLHLDSMIRRFLKEIQQVSSEKSKSLKQLANDLDNQQYKIEKKLLRKKIREKKITNKKASKSFYPIRHSLHQR

SEQ ID NO: 3435 - protein, 167 aa, Enterococcus faecalis
HPVVKTMTGAAGRAIETALVQQTKHYFDNGDFVVFAIDGHDPLDRYHPENKLFPPHNVLGTDGRNLFGSLADFYQAHKNEATIYWMDKRHYSAFSGTDLDIRLRERGITELCLTGVCTDICVLHTAVDAYNLGYQLMIPERAVASFDEQGHEWALRHFKQTLGATIL

SEQ ID NO: 3436 - protein, 93 aa, Enterococcus faecalis
ISQTVGGIASITAFTVIFNGVLTYALGRIALKWFKINNPIAKGLALGAAGHALGVAVGIEMGETEAAMASISVVVVGVVTVLVVPFFATVIGL

SEQ ID NO: 3437 - protein, 240 aa, Enterococcus faecalis
LGIKNKVVYASKAFSCLAIYQVLKEEDIACDVVSGGELFTALKGGMEPAEIEFHGNNKTPEELRYALDNKIGTIVIDNFYEIDLLEELLATRNQTQKVLFRVSPGVDAETHDYILTGQEDSKFGFDVASGQATEALVRLLSNPSFDVQGVHCHIGSQIFAVEGFLAAVEKMFTILEDWRQVHQFTACVLNMGGGFGVQYMQQDEPLAPATFVEKIVYSLKGHCEQLGYPMPEFWIDPGRS

SEQ ID NO: 3438 - protein, 189 aa, Enterococcus faecalis
  MISC_FEATURE (9)..(9): Amino acid 9 is Xaa wherein Xaa = any amino acid.
HYYEGHSMXTVTYPVRVMAGLGAHSVIVTNACGGVNESFVPGDLMLITDHINFTGENPLIGPNEDAMGPRFPDMSQAYTPDYQATAKAAAEKLGLDLKEGVYMGYSGPTYETPAEIRMSRTIGADAVGMSTVPEVIVAAHSGLKVLGISCITNLAAGMQANLSHEEVVETTQRVKQSFKALVKETLTLL

SEQ ID NO: 3439 - protein, 166 aa, Enterococcus faecalis
TLWWTVIRIETQQGQKGQMMDTYDLLPVFQKIQLFLQTSKEKQVVANHEDEIKQLYQGFEKEFGRPLSPIELEMIGQWLNTDHYSPELIRLALREAVLNQAYSLKYIDRILLAWERKNITTKEQVAADQKKRKDSMIQNEIEQQGQTQESLPKVTLHNWLNPEDSE

SEQ ID NO: 3440 - protein, 185 aa, Enterococcus faecalis
  MISC_FEATURE (174)..(175): Amino acids 174 & 175 are Xaa wherein Xaa = any amino acid.
IKRRWAMLSKEKTMEAIEIMYEMFPNAECELKHKNPFELLIAVILSAQATDVSVNKATPGLFAAFPTPEALAAAPVEEIIAKIKTIGLYRNKAKNIKACAQQLLERFNGEVPQTRDELVSLPGVGRKTANVVMGDAFGEPAFAVDTHVERVSKRLRICKVNANVTEVELRPIAXXNTNMLGRPDI

SEQ ID NO: 3441 - protein, 273 aa, Enterococcus faecalis
LSCKNTHSEIIFKWYRRIKMSQFLKVIGIIAVLLVIIGDAAYWLILKKFTPEAETPAMYNQERMVKTIGDQLKETDVQKARTKAPLIIEKNITELQQAIANGTLTYEELTAFYLDRILQFDQIDNGMNSISEINPQAIKEAKAFDQQASQTPKKPLYGIPVTLKENINTTNMISSAGAYALRTFKPKEDAEVVKKLTEAQALILGKVNLSELANYMSMKAPSGYSSKHGQTLNPYGPLKITPSGSSSGSGASVTMNIGAFSLGTESKGVQHGD

SEQ ID NO: 3442 - protein, 206 aa, Enterococcus faecalis
RLPSRRLAGKEAVFKVTVHEVKAKELPELDDEFAKDVDDSVESLDELKEKFRKELTEAKEAAAEEAKDEEAIRLAVENAEIVELPHVMVHDEVHRSMDEFLNNMQRQGISPEMYYQLTGSTEEDLHKQFEGEAETRTKTNLVIEAVAKAENIEVTQEDIDAEVKDLAEQYNMPEAQVRKVLNNDMLEHDIRMKRAVETITETAVEK

SEQ ID NO: 3443 - protein, 179 aa, Enterococcus faecalis
MEGVFHLQFFSYKITFERCVKMDKNYSKIKYGLVVFGILCLTYNLWEFFTAKYSTKQGVTFVIECLLGIGLIFLPDLVNKFLKIIMPPTIVYFYWFFLFISVFLGTSLHMISIISFWDKILHFVSPMLLTAVGYGIAGFLLKKTKYADVSPVVIFIIWGLHLHGFVASSGNSGKLSGIP

SEQ ID NO: 3444 - protein, 105 aa, Enterococcus faecalis
RQKHTQEDFYMTQVHFTLKSEEIQSIIEYSVKDDVSKNILTTVFNQLMENQRTEYIQAKEYERTENRQSQRNGYYERSFTTRVGTLELKVPRTRDGHFSPTVFAR

SEQ ID NO: 3445 - protein, 225 aa, Enterococcus faecalis
  MISC_FEATURE (221)..(221): Amino acid 221 is Xaa wherein Xaa = any amino acid.
NIFRNVILYRIFNNALNLFAFQCKMYLGHVKVLLGMFLSLKTLYRKRTVIWPFYFYTIIRTLSKNMQLEYPLTNHMKGNIVLTQEKTAIAYYRVRSETVMLTDVEKKLKTKRKVARALNRLKANDGFEINLLPVNADIRGKMGAMRSLIDSNNYEVGVDKLMKTAMVLEQEMGMVYEYTWIIGVPLIKKDLAVDLKETVTNSISNVSEKFVKGLSFDVELXEYWE

SEQ ID NO: 3446 - protein, 410 aa, Enterococcus faecalis
WKKFMGGILAISPGLFLGREGPSIQLGAVVGQGYSQWRQSTKSEEKILISSGASAGLAAAFNAPIAGLLFVLEEVHHSFSPLVWLTSFSAAISANFVSLHFFGLQPVLYIGPVKSLPLEYYWTLVLLGVLLGLLRWIYQKTLLSLPKVYGKIKGLSSNYYGFVSFILILPIGYFFPHLLGGGNQIVLALGNQPTTIWALVGLLVLRFVFSMVSYGSNLPGGIFLPILTLGAIIGTLYGSLLVQYVGMDPIFVKNFLIFAMAGYFTAIGKAPLTAIILVTEMVGNFSHLMSLGVVALVSYITIDSLGGKPIYESLLERLVPSKVSNIRGHKTIIELPITAESSLDDTMVRDFVWPKQMLLTSIRRGESEILTHGDTVMHVGDVLIILTDEQLAYQVEKEIYQKTLPNDLVK

SEQ ID NO: 3447 - protein, 135 aa, Enterococcus faecalis
PFPLGEGLVQHGEKVDQFGRVFEAAFATTENGHLLSGPMKRLLGLLLQVLWSQQVNHFDFQFKNFIIWFIRLGFPVAFPKEILSADYAEQVLLHTETLGPPMVLEKIGQLGAALKPTPDQLLTTIERYQEILKEI

SEQ ID NO: 3448 - protein, 141 aa, Enterococcus faecalis
GEIMSYSEKMVQALQAENLAEAQLMFEEALKKDDENTLADLGETLLSLGFLEEAKQIFQQLLEQFPDADGLNIPLAEIAIENNEIDDAFIYLEKIPETSDSYVQSLLVTADLYQVLGIPEVSEAKLKEAANLMPEEPLIQF

SEQ ID NO: 3449 - protein, 64 aa, Enterococcus faecalis
SKGVKRMSSFRYILVTLLKILVVISLVIILFVVGTMIGYGLIGNGNPMDVFDEKIWTHIMNFFK

SEQ ID NO: 3450 - protein, 130 aa, Enterococcus faecalis
DNEGVGWKMQATVTEIGKHAIDDSEKMIILFGETATDTLKQHAVIQSFPEKDQVTLAEGDHLKIGDTNYTITKVGSFANSNLQSIAHSTLIFADAPTDEDDVIRNGVYLTPHQLPKITIGTTIDYLVNGA

SEQ ID NO: 3451 - protein, 156 aa, Enterococcus faecalis
EVNILINNVTLVGRLTKDPDLRYTQSGTAVGQFTLAINRNFTNANNEREADFINCVIWRKAAESLANYATKGTLIGLTGRIQTRNYENQQGQRIYVTEVVTESFQLLESREVNEQRKEQATGKATFDKKSMDKPDPLDPFSPENSIVDISDNDLPH

SEQ ID NO: 3452 - protein, 77 aa, Enterococcus faecalis
LKELFVNTSFYITINELNKVGHKATLSVKAKAKNLRKLGQLIKEYRSCNCKYLKDKVTEIIGDDGRVYLDRISERMD

SEQ ID NO: 3453 - protein, 145 aa, Enterococcus faecalis
DLFGNYYSFYLKIGTLLLGYSTERSVGKVLEGLPLETVYFYALVGSAVLAFLLIIFGDVFNFDGPVDPMLIIPWIAFTSLFGYLGEELTAVNSWLILIVSGILSTIIVFFLNFYVLVPLKNSEATISISENDMKVRLNQHIGRRG

SEQ ID NO: 3454 - protein, 244 aa, Enterococcus faecalis
RVIINEKLVKLFGIKVGDQLNLENSDNQTYHVKIAAIAENYTGHFVYMTPKLYQTMTKQKPEYNTEFLLFDKKLSSKQETSIGEALTKQPKVLNITFLTAMKGSFDDMLKSLDIVIWVLIAVSGSLALIVLYNLTNINVSERIRELSTIKVLGFYDREVTTYVYRENIILTFIGIIVGCFFGKILHQYILATVEVDLIMFSPIIHWPSYLYSAVITMCFTLFVMVIMHRKLKKINMIEALKSNE

SEQ ID NO: 3455 - protein, 68 aa, Enterococcus faecalis
KNRGGTTMNLINQKLFDFECDAYHDGEFTRVSTEDILGKWIFSSFIQLIFFLVLYDLSPYARFYNPGW

SEQ ID NO: 3456 - protein, 266 aa, Enterococcus faecalis
EDMNVHVIFKQIIRILFQSFTEEQGLRIIKKRKGAKVMRNEMMHRPVVKPELVEYMRTKQKKLPGELGAVEAEANEAGVPIIPHETVVFLQFLLGQLKPKNILEIGAAIGFSSSLMAQFVGEDGHVTTIDRFDVMIKKAKKTYQRLELEEKVTLLEGQAAEILPTLEGPYDFIFMDSAKSKYIEFLPECLRLLPVGGVLMVDDVFQAGTILDPAEEVPKKNRAIHRKLNQFLDVVMAHPDLTSTLVPLGDGVILITKEKETIILDS

SEQ ID NO: 3457 - protein, 68 aa, Enterococcus faecalis
  MISC_FEATURE (15)..(57): Amino acids 15 & 57 are Xaa wherein Xaa = any amino acid.
VLGKLAKAQIRRKIXIQELSNSSRAKVLEPSQVREFGYWFQYKSLSVKSIPDVFLFXISDLNRQSSKI

SEQ ID NO: 3458 - protein, 123 aa, Enterococcus faecalis
  MISC_FEATURE (8)..(41): Amino acids 8 & 33-41 are Xaa wherein Xaa = any amino acid.
KNPHKKKXCLFFFPPPLLREQPPPKIFGKQEMXXXXXXXXXLNFNATAQQHVDQGMSLTLFMRSEIPEGLYEWKETPKQTTRDLNILRHYAFNKGIKSIYYIRTFTDDAEEIGSNQGASSPQI

SEQ ID NO: 3459 - protein, 85 aa, Enterococcus faecalis
WTLMESNQIAKERNQFFHNSENSDYASGAYFDKYIEGNFTPKFDKVKEFFKDIQIPTAEDWAAKRDEKKKFFFYYHRPPPPFFFF

SEQ ID NO: 3460 - protein, 73 aa, Enterococcus faecalis
  MISC_FEATURE (48)..(48): Amino acid 48 is Xaa wherein Xaa = any amino acid.
FSKAVFHMIFSEKKCVSPMRLIRLFGLKRFPFLDIWEQHQIPKASVNXSLRHGFIRADRISQSQGISIKMNHG

SEQ ID NO: 3461 - protein, 62 aa, Enterococcus faecalis
FSYGKFLQYPKTRSVLWKNLSKSNELIEAIENYIYYYNHHRIKEKLNWKSPVEFRQFNQKTA

SEQ ID NO: 3462 - protein, 162 aa, Enterococcus faecalis
NPIGSENMTGLARVIRGHVITAFENVSLWHERDISHSSAERIIIPDTTILLNYMLNRFGNIVKNLTVFPENMKRNMDATYGLIYSQRVLLKLIDHGMTREEAYDLVQPKTAYAWDHQTAFRPLLDADEKITSVLSKEELDDAFDYHYHLKNVDTIFERVGLG

SEQ ID NO: 3463 - protein, 168 aa, Enterococcus faecalis
LNLLSTTTMSKLHKNIYIAMLVAQGVIIGLIENMIPYPFAFAPGAKLGLANLITIIAIFTMRKRDSFFLVCLRLILTTLLGGTLSTFFYSASGALLSYFGMLLVKQLGPKRVSIIGISAVGGFLHNVGQLLTTSFFAHSWAPMLYLPFLSLFGLLSGIAIGIAANYLL

SEQ ID NO: 3464 - protein, 265 aa, Enterococcus faecalis
GVIDVTNVADLTSVEKIIVLDFGSQFNQLITRRIREFGVFSELLSHRTTAEEIRKIAPKGIIFSGGPNSVYDKDAFSIDPEIYELGIPILGICYGMQLMTHNLGGKVEPAANREYGKAELEILGDATLFQGTPAKQTVWMSHGDLVTEIAPGFEKVGTSNDCPIASIEDANRKFYGVQFHPEVRHSEYGNDLLRHFAFDVCGCTGDWSMENFIDMEVAKIREQVGDKKVLLGLSRGVDSSVVRVLLPKAIGEPINLYLRGPGIIT

SEQ ID NO: 3465 - protein, 246 aa, Enterococcus faecalis
RHTIIGSGRVDSVNRRTTKRSTLSIKERTTMTIGFIFDLDGVITDTAKFHYQAWKALADSLGIPIDETFNETLKGISRMDSLDRILVHGHRENAFTPAEKEALAQQKNDHYVQLLEQLTTEDVLPGVVPLLQQAQARHIPCAVASASKNAPLILEKLGVRAYFATIVDPDSLSKGKPDPEIFLAAADSIGVLPQNAIGFEDAQSGIDGLKAAGIYAVGLSASQPLIGADMQVSEMTELSVDALLNR

SEQ ID NO: 3466 - protein, 116 aa, Enterococcus faecalis
ELSWQLYQEALYSDYRDIQGGTTAEGIHTGVMAATIHVTLATYAGVDTRQNELSICPNLPEHWQALAFQFIHQGVTYQFSLTQTSVTITADRDTQLLVQGALIPLTAERPKEVHYQ

SEQ ID NO: 3467 - protein, 238 aa, Enterococcus faecalis
LKGYKNKFKHGVSIHTRLALTVTATFLFLGTLFFNISEYRHFPVDSSFWQRLFNSWFLSVTPRTAGFYSVDYLKMSNPGLIVTILWMFIGGTSGSTAGGLKTTTFGVLFLQFRAIFKGKQRVEFHERTIPERVVLQAFTLFFLATFLCVTASVILSFTETLPLKNGIEYIVFEVISAFGTVGLTMGLTPDLTVFGKLVIIFLMFVGRVGVYTVLLSLIKKGLESQSKVQYPKESVMIG

SEQ ID NO: 3468 - protein, 115 aa, Enterococcus faecalis
ERLGKSVESSISKRISDDWLIEKEGNSMEFLGILCLILITTTLAGVACKRVGIPAVIGQLLVGIVLGPAMLNIVHQDVFVHDFSEIGVIMLMFIAGMECELELLKKYAKTIVMGP

SEQ ID NO: 3469 - protein, 61 aa, Enterococcus faecalis
LPVVKSQMVYSRHGLSEWNALNQFTGWADVHLAPEGVEEAKEAAVKLKKQASNSTLLILLF

SEQ ID NO: 3470 - protein, 194 aa, Enterococcus faecalis
RSKRSGRKIKEAGIEFDVAYTSVLTRAIKTCNYLLEYSDQLWVPQIKSWRLNERHYGKLQGLNKKETAEKYGDEQVHIWRRSYDTLPPLMEATDEGSAANDRRYAMLDQRDIPGGENLKVTLERALPFWQDEIAPALKDNKTVLVAAHGNSLRALAKHIEGISDEKYMDLEIPTGKPLFYELNDDLLLKEKYYL

SEQ ID NO: 3471 - protein, 206 aa, Enterococcus faecalis
LDPTNIFRFRQNQTAVGSADIFSHLIENYFSISTGADVQDFVSEGLMRTVIKNCPIALENPEDYDARANLMWASSLALNGLTGRGKQGVWSCHPMEHELSAFYDITHGIGLAILTPRWMNYVLSEQTVGKFAQFARNVWGIVEQEEEVAAKKGIQALYDYFVACGIPMTLPEVGIEADKFEEMAQQAVDHSAIAEKGLCTIGWQRI

SEQ ID NO: 3472 - protein, 348 aa, Enterococcus faecalis
SEKRNKAILSIGGYMAKWLLITAIIGLFMGALSAFFLKSLTYVTDVRLANPWLLFILPISGVVFTYFYTRFGKNASRGNNLVIEQGNGGEEDIPLRLIPLTLFGTITTHLFGGSVGREGTAVQMGGAIANAVGKVFKLSALERQVIIISGISAGFSSVFGTPLAGTVFGLEVLAVGKVRAEALFPSFFAGLFANFVTESFGVTHTHYPMGKIPTWSVELFVKLFLASICFGLAGWVFSRSIVFLKKTYANWFANVYLRAFLGAAIVVLFVLVLNNQRYLGLSLPLLEDAFAGNAQPFDFVGKLFFTVLSLGAGFQGGEVTPLFEIGATLGSSLAPLLHLSTPFLACVY

SEQ ID NO: 3473 - protein, 369 aa, Enterococcus faecalis
NFRGEDPPWYILERMIYQYDETTTKNGYYQQIIEKIILLGEAKRFVTELAYLIQRLIIDHLHVIGDIYDRGPAPDKIMDRLMSYHSLDIQLGNHDMIWLAAYSGSLACLANVVRICARYGNLDLLEERYAIDLTALKKFSLETYKENPAFAPKKNPYRALTEAEKQVAMRVQQAIAIIQEKLEGQIIGRRPDFNLAHRLRLDKIQGETITFDECRYTLINSCFQTVSEEQPYQLTREEKQIIDDLLTQFQSSPRLTKHMRFLMEKASLYLVYNQNLLIHGCLPLNADGTFQVYTFKGHSYSGKALVDFFQEMLEEAYAQPASTDDYATDCLWYLWCGEGSSLFGKRAMKTFERYFLAEKETHYEEKNPY

SEQ ID NO: 3474 - protein, 75 aa, Enterococcus faecalis
MYKLEKYRPHSEADSHESINFDYTQGKEKLFPLESACVLLTAVKTEIALINHQLSVFPHVLIGKVALQKRFGNSC

SEQ ID NO: 3475 - protein, 159 aa, Enterococcus faecalis
NEEKRMIGISSCLGGICCRYDGKSQEQEALKQLVTNGKAIMICPEVLGELPIPRPPAEIIGGDGFDVWANTAYVYTDNGEDVTETFKAGAQRAYQKLKALQITTLILKEKSPSCGSQLIYDGQFSGIKKAGVGVATAYFIQQGMTVYSEETWQLADISF

SEQ ID NO: 3476 - protein, 108 aa, Enterococcus faecalis
KFTKHFVKKKLTPLIWILTGKEEPFEKNLRLKILGAEELLYKTLSVPEKSLSRPKSYFPGLLKTYPEPKLLSQRTYLILPLVNWGESCWNQHTFVNFFAPHSVPLKLN

SEQ ID NO: 3477 - protein, 344 aa, Enterococcus faecalis
RQITIIGAGLAGSEAAWQVANAGVPVDLYEMRPVKKTPAHQTENFAELVCSNSLRGNSLTNAVGVLKEEMRRLNSIIIGSADQTAVPAGGALAVDRDSFSETITEKIKSHPLITIKNEEITDIPEGIVIIATGPLTSESLSQKIQEFNGSEGFYFYDAAAPIIDKSTIDMDKVYLKSRYNKGEAAYLNCPMTEEEFNAFHEALVNAEVVPLRTFEKEKFFEGCMPIEVMAQRGIKTMLFGPMKPVGLEDPKTGKRPYAVIQLRQDNAAASLYNIVGFQTHLKWGEQKRVFRMIPGLENAEFVRYGVMHRNSFMNSPELLKPTYQSKKRDDLFFAGQMTGVERIC

SEQ ID NO: 3478 - protein, 60 aa, Enterococcus faecalis
  MISC_FEATURE (2)..(2): Amino acid 2 is Xaa wherein Xaa = any amino acid.
LXIPGLWTVHMNRCMLYNVNGYYDLLAAFFDKMVETNFLTEADRAKIFISDSLEKNWCIY

SEQ ID NO: 3479 - protein, 92 aa, Enterococcus faecalis
SMDPDVLLFDEPTSALDPEMVGEVLKTMKNLAHTGLTMVIVTHEMEFARDVSDRVIFMDKGVIAEEGTAEDIFVHPKEARTKEFLHRILTKN

SEQ ID NO: 3480 - protein, 81 aa, Enterococcus faecalis
KSSRQVTTLNENFKVVILYKKIYKRLDWHQIKAYDSFVNKCEIKHNLSWRGSLEVQQSQTIYLMGTVIDVFIGPKCLKTGK

SEQ ID NO: 3481 - protein, 269 aa, Enterococcus faecalis
LKGFVRKSRLVALKKNGQFPTCKIMIQLCNRLELPLGELFPRVGIKQPEILEKMEEAEFLLITSEHDQLQTILKNIPFDEIKDSQLLLEYYYLQGFVMIFQNASLMDCLFTFEKLLFEEQKYTSDIYRLLAFTGIGMAYAKEGEIEKAEFYFNKVFKEIYLYTIQSMEDTWRVLNVVFHCGVFYAEKGDLETSDALLEYAISICSDNHVTYYLARAAFQLAKNPLAEENPQEQILELLQDARAYAKINKNRILLEAIQTLKETILSKGN

SEQ ID NO: 3482 - protein, 131 aa, Enterococcus faecalis
  MISC_FEATURE (13)..(13): Amino acid 13 is Xaa wherein Xaa = any amino acid.
IYSPKCAWLRIFXKTAHQDRSLFPAKEIVYLATMGGAKTLGLAEQVGSLEVDKKADITLIETQSVNMFPIFDAYSALVYSANASNVEAVWVNGQQLVANKELQQANLKEIKEKLYQAMNTFVKEAKKRAAL

SEQ ID NO: 3483 - protein, 111 aa, Enterococcus faecalis
VRRIAKERRKMSRLVSTYQRNESIKKIAVMAITALTSAVGLNFFLIPAKVFSAGMNGIAQIIATLLYTNLGIHINTGIFILFLNIPVFILGFVKLGKQSTILFQSSPRGWA

SEQ ID NO: 3484 - protein, 85 aa, Enterococcus faecalis
NKIVDCFPNFTNPRMKTGMFKNKMKIPVLIWIPKFVYNNVAMICAIPFIPAEKTFAGIKKKFKPTAEVKAVIAITAIFFIDSFLW

SEQ ID NO: 3485 - protein, 176 aa, Enterococcus faecalis
YDEAKNILGGFYMAAKEASFDVVSEVNMEEVKNAIQIALKELKNRFDFKGSIADIKLENDKLVVVAEDDYKVEQVKDILFGKLVKRNVPIKNIHFSESEKALGGTARQYGDLISGIDKENAKKINTAIKNSGIKVKSQIQEDKIRVTGKSRDDLQKVMALLRELDLPMALEFNNYR

SEQ ID NO: 3486 - protein, 137 aa, Enterococcus faecalis
ERGFKMKKFSKFLLSLVVVTGLLLPTAADAYQVEQDPIDFGGYFPGYATNELIVLHESGNGNNVGLNSLDNETAYMKRNWTSAYVSYFVGSGGRVKQLAPVGQIQWGAGATANAKAYAQIELARTNNKETFKKDFAA

SEQ ID NO: 3487 - protein, 65 aa, Enterococcus faecalis
MKINWKHKFTSRKFWAAVTGVIIALLAVFNVDDLTSEKVVTLVAAIGLLAAYIVGEGFVDSNRDN

SEQ ID NO: 3488 - protein, 81 aa, Enterococcus faecalis
QSNDYSCHCSPKLSACEFMFPINFHLAPPKNVLNQLNKIVIAPLETNIASITFHIFSVLSFFSSSFLSSASLFLFKIAFRI

SEQ ID NO: 3489 - protein, 83 aa, Enterococcus faecalis
LDQGSSMADGLEAVAQVVGFLHFEGTYLGKKGTFTACEKGTFTQGLLDCPSKLFQASGELAGLSGRYTYEFSQEEALLHLDFV

SEQ ID NO: 3490 - protein, 313 aa, Enterococcus faecalis
IKLLRRKIMKNTRNTVPSLLIIILLVGFPQISESIFTPILPALSSAFNIHDSVAQLTMSIYFVAFAVGVLFWGILSDTIGRRPNMLLGILCYLIGNIGLFLSPTFPWLLFFRLIQAFGASVGSVITQSMMRESFNDLQRGKIFAQTSAALSLSPAIGPLVGGLVQTYFGYQHVFSTLIVMAVLLLFYSFYRLPETFHLGNTLTKAPFWSVAKRLSFDSKVWCYGLLIGGINGLLFSYYAEAPFIFINHFGFSSVQYGFLGLVLAVSSILAAVLINWLLGYWSAEKIAFAGLLLSIFAACCLLIMTQFEHNHWS

SEQ ID NO: 3491 - protein, 330 aa, Enterococcus faecalis
RRWRFTLQERRCLIVWVYTLKPLKQLRRYGLIHYVSRKMKYVVIYMNEENIESNMEKINQLHFVRSVDKSYRPDVEMNFAEKIGTKAAYQEQEDRRLCSRGIIYRDSLSRECLMQKSEKCYEKFQTFFTLFVIMNYKRMIDKGVETMRVISGEYGGRRLKALDGDNTRPTTDKVKESIFNMIGPYFDGGMALDLYSGSGGLAIEAVSRGMDKSICIEKNFAALKVIKENIAITKEPEKFEVRKMDANRALEQFYEEKLQFDLVLLDPPYAKQEIVSQLEKMLERQLLTNEAVIVCETDKTVKLPETIGTLKKTRETVYGITQVTIYRQEA

SEQ ID NO: 3492 - protein, 92 aa, Enterococcus faecalis
RFIVRRRKMRKIALFPGSFDPMTNGHLNLIERSAKLFDEVIIGVFINTSKQTLFTPEEKKYLIEEATKEMPNVRVIMQETQLTVESAKSLGA

SEQ ID NO: 3493 - protein, 153 aa, Enterococcus faecalis
KRKGKRGMVMRPNLRFYVQTINDIVKTTEDIGEVMNPYYEEVRQAIDKNKVNDLTAERIAEIQAKFKEGTEKYELMLKKVGTLKPTPQVLGIHKKFQHAYTEYVAGCNEMILATDPETGIDADLFNASEEKQDQATDELTFAITRMSNILLKK

SEQ ID NO: 3494 - protein, 66 aa, Enterococcus faecalis
  MISC_FEATURE (20)..(20): Amino acid 20 is Xaa wherein Xaa = any amino acid.
RSWSLTQVFLLLKTTSLSLXFKPFENFYFELKQHFFNEEDETNQLNERLEEMKIAFEQLTDDYNVL

SEQ ID NO: 3495 - protein, 100 aa, Enterococcus faecalis
LGINKGRQVLLTYLGNEGNWSLVVRASNINGESPDDLAKNVVNILEQETLPAPNTVGQITLNVAGTTDYNRNSVVWQAGTVVYSVHHFDPIQAVKMATSM

SEQ ID NO: 3496 - protein, 157 aa, Enterococcus faecalis
TAKGGYLEMKKFLRVFLIFIGVFFLASCGSKIETKTFVGSPQDGIDSTLTYTYQGDKVLTQTAKNIVSYDKLGITKEEAKTALEPVSKQYEDIKGLDYKLTYEDKQAIEKLTINYEKLDYDKAKKVDGIQIDGDSSKGISMKKSQELVESQGYTEQK

SEQ ID NO: 3497 - protein, 64 aa, Enterococcus faecalis
  MISC_FEATURE (2)..(8): Amino acids 2, 7 & 8 are Xaa wherein Xaa = any amino acid.
MXMDLSXXRTMVYSNKVKPGILKELNAHDAEHVHTFLDDIVGAIAAAAASRLAHSQPDLSDITK

SEQ ID NO: 3498 - protein, 432 aa, Enterococcus faecalis
RHIDWSELKDMSLGHVMELFGESPEEESNDDKKEESTEDNLIVSDSEDVSGLEASLQEGASEETHDSVEESIPATEETPTHSTEEKLATDEAVNLEETTEETTEETTTVEAETAEVSETVKSEEEALTEISGTEVISTTSEEEIFSQPPIEDQDVTPNETLQAYIQAHRADTEMSENPSEETAETQELENSGEAVLTQAETPTESISDSEEGLTSAASLEAPSDADATEGKVSDSGVIPPMNETGNAQPAPAPKKPSKKVVFVALAVVLLTGGSAWAYHDQTQKAAAQEAAALTKKTDTLKDELAAFYTTKEQVFIKPDMVTVSPKKLSKQVAEIKDSEDYSQLNKQIPTLKEKPQNIPQIKQFIWGRRIVHGAMSLIPGDSSWLDQTKFPLKKLTRKMNPFGPNWIEPSQFDQSETHQLPTNFPKNLKKAG

SEQ ID NO: 3499 - protein, 116 aa, Enterococcus faecalis
  MISC_FEATURE (95)..(95): Amino acid 95 is Xaa wherein Xaa = any amino acid.
AFLAIVIKWLGFLGSVGVFLFIFGGVIKGSFNKLLNETYFYSEHVGHPEYAPKQTKTEEGSVGNPVGAIIASIYWPLVVALYLFINFVLGDWRFXWLIFMFAGIFYNTIQAFLHKH

SEQ ID NO: 3500 - protein, 157 aa, Enterococcus faecalis
TGLLLTHPIVEVIAMWQLKKEQNVPIYRSIMEMIVQKIQTGELLPGEKIPSERKLAEYLSVNRSTVVHALDELVDLGWIVRKRRSGTIVNEGKWGVMMTPRTDWHRYLKQNVFKQVHPLVTEIELRAKQNLPTDLDMYTGESPLDLIPSVDFPALNW

SEQ ID NO: 3501 - protein, 152 aa, Enterococcus faecalis
KTWLIICKTKFGLRLRSVGENPQAADTLGINVYAMRYSGVLISGLLGGMGGAVFAQSISGNFSAGTIVGQGFISMAAMIFGKWNPLGAMGASLFFGFAQSLSIIGAQLPVISSIPPVLLQIAPYLLTIIVLVVFLGKASGPKANGKNYIKSK

SEQ ID NO: 3502 - protein, 136 aa, Enterococcus faecalis
TKCSLSKGHLHRGVNTMPKEEILTGPAVIKIVSTYMGPEHVELVQKALTYAEKAHEGQVRQSGEPYIIHPIQVAGILAELHMDPHTVATGFLHDVVEDTDVTLDDLKEEFGEDIAMLVDGVTKLGKIKYTSSPRVD

SEQ ID NO: 3503 - protein, 86 aa, Enterococcus faecalis
NTVLVAYEESAKQGEKSQLAQVLSTCQPGARLCVLFGPEGGFAPQEIEQFLQAGAKLCGLGPRILRAETAPLYLLSVVSYQMELLN

SEQ ID NO: 3504 - protein, 63 aa, Enterococcus faecalis
ERDKEFPIEVTIACGLPKGDKLEWIVQKGTEIAAQSVDSAFKKKTSGGQSETTGGGGEERRKI

SEQ ID NO: 3505 - protein, 200 aa, Enterococcus faecalis
EKLMIEKKDFDTIRKAFLIYDTNFNNHMFTYTYQHRKTKKLLEMNVQFEAGNFMHLCGVDYYQIDKQGSCKFRFKATQFYRALKNNKVSLRGIKPKDDGTTGQKLQVIPLLEMLISPGVRICDGGKFYNLQYEKAIRSGKMIVALTCKENNKKYVPQSLLSLINQPRKSQSKSLTESHEVIKISKSELNSTSVIEVYDKF

SEQ ID NO: 3506 - protein, 61 aa, Enterococcus faecalis
IIQKVTVLNGSTSERYVEAYLSFHFHYSAFSRKVRINLALIREILKAVKEEKNLWAFSLCL

SEQ ID NO: 3507 - protein, 96 aa, Enterococcus faecalis
ILRMTTVPYKSAKEGLMNSYYYAFRDRRQKKRDFRKLWIARINAAARMNGLSYSKLMHGLKLAEIDINRKMLADLAVNDAAAFTALAEQAKDALSK

SEQ ID NO: 3508 - protein, 128 aa, Enterococcus faecalis
IDMPSLNERKKPMTFQETISAYIQERYQITPDFPFKKHPDYLVFRHPRNAKWFALIMPLDAQLLGATENKQLTILTVKLAPELIALLKNQPGYFPAYHMNKEHWLSLSEEIPLSQVFSFIDESYQRSY

SEQ ID NO: 3509 - protein, 67 aa, Enterococcus faecalis
  MISC_FEATURE (8)..(66): Amino acids 8, 17, 39, 40, 45-47 & 66 are Xaa wherein Xaa = any amino acid. 1               5
WTNRCTNXIIVSNLRRXVYIITYFLMININLNGGVRGNXXVTKKXXXTKPVQLILFPTTPPVLSFXN

SEQ ID NO: 3510 - protein, 79 aa, Enterococcus faecalis
YELNIIAPRSRQRRKLKMAKVCYFTGRKTSSGNNRSHAMNSTKRTVKPNLQKVRVLIDGKPKKVWVSTRALKSGKIERV

SEQ ID NO: 3511 - protein, 169 aa, Enterococcus faecalis
  MISC_FEATURE (29)..(70): Amino acids 29, 30, 59 & 70 are Xaa wherein Xaa = any amino acid.
RWGILILFQEKNTFCSQKLPKHSFKHLLXXVDTDTQLALQEALQRFPQAEMTIIGATGXRIDHLLANLCXPFEPRFQGVLRQIRLCDRQNSIQYYAPGSYIVPKEPDKEYLAYCCLTPVENLTLRRSKYLLTNQDVPYPTSYASNEFIEEAAAFSFDAGMIAVIQSKDK

SEQ ID NO: 3512 - protein, 102 aa, Enterococcus faecalis
LINKISIRSLRFFHTIRPSSCFTIKTPKNYLDRILSHQLFSRKVHVLAFSKKVDPFSNSGSEVAKFGKCFGIFRIKFVVKLTTKFCPILTTLIVKIGQSRAI

SEQ ID NO: 3513 - protein, 134 aa, Enterococcus faecalis
FLGVFIVKQDDGRIVWKNLSDLILILLINQFIEKHEIKSSRQYHRKLLENPNSAPSMWFINQKYGSWKNLLVSLGCDNGEYGKWAKISEKDLLKIVESFITVEKITSQRMYEKRSVGKDVPSLSTLKKRFGQHS

SEQ ID NO: 3514 - protein, 170 aa, Enterococcus faecalis
AHCVYKDINVLRGLVGQSVILGPIIFMLIQIIQVVIPIIPGGVSCAAGVLIFGPTMGFVYNYVGIALGSIIIFLLGRNYGKPFIMSLVSDKTYNKYIGWLDNEKRFERLFALAIFFPIAPDDALCLMAGLTKMSVKKFTLIILLSKPASIYLYSLALIYGGTFLTSLLGM

SEQ ID NO: 3515 - protein, 103 aa, Enterococcus faecalis
SFYYGILVETGGLLMFSYFKNSIVNTLDFLKGTTAYFRDVLLMHGFMLFVLLPLLTSLSKLVLKESGIDYISYDNLGGNCYATSLCPFDFSTNWAVNFTGALL

SEQ ID NO: 3516 - protein, 151 aa, Enterococcus faecalis
LGCQFYWRSVMNLPFYCLMSILLEKKQPITLTQLLHGTLLQIKKVRGNNFLFFLAYFFLILPLSGLNFPSYLLTRIKNPPFILEFNLAKRLHNNNGFLMLQMIIFNLAIPIAFGLSHLIYLKLGFREFLKSYLANIQNGAFSTIYGAFYFL

SEQ ID NO: 3517 - protein, 78 aa, Enterococcus faecalis
LVRLVIGSRKSSRRKEEMRRILVLTKNILVEQTFQQQLQHLNYEIFCTNCCEETIEHELTFFNYFDAIVLSASPRGWE

SEQ ID NO: 3518 - protein, 181 aa, Enterococcus faecalis
KVAKFHGDIPPRERKRVMRQVQNLDYQYVVATDLAARGIDIEGVSHVINAEVPHELDFFIHRVGRTGRNGLNGTAITLYSPADDEAITQIEQLGVSFKPKEIKNGEIVETYDRNRRTKREKSREELDPTLIGLVKKKKKKIKPGYKKKINWAIEDSNKKKRKIERRQKDRSARKAKKNSSN

SEQ ID NO: 3519 - protein, 268 aa, Enterococcus faecalis
ILETGGENVWVSTFHSMCVRILRRDVDQIGYNRNFTIIDPSEQKTLMKRILNDLNIDSKKYDPRSILGTISNAKNELQTPEKVAEMQGSLYEEIVAKCYEAYQKELRKNQCMDFDDLIMNTIRLFNEQPDTLAFYQNKFHYIHVDEYQDTNHAQYTLVNLLAARFKNLCVVGDADQSIYGWRGADMQNILDFEKDYPDASVILLEQNYRSTKNILAAANDVIKNNRNRREKELWTENIDGEKIVYYRGDTERDETQFIVSQIQKEMRE

SEQ ID NO: 3520 - protein, 352 aa, Enterococcus faecalis
WADFPGVKDAVLFVAAACSSKPEAKINTEPYSDRQTMLGTYVQIRIYDDGKEDVLPKAFARVKELGDKITVNQPGSEIDEINQEAGVKPVKVSDDLYPLLKKAYEYSKDSRGGFDMAIGPITSMWHIGFDDARKPSQAEIDQALKLVDYTKVKFNDKEQTVYLEEKGMQLDLGAIAKGFITDEVVKVLKDNGVTTAIVDLGGNVYVLGHSPRGKDMDWTVGIQDPNKARNTVLGQVKESNKTLVTSGIYERYLKVDGKTYHHLFDRETGYPFDNDIAGVTIITDKSIDGDGLSTAVFSMGVKKGLEYVESLKGTDAIFVTKDDKVYISKDIECNFDIRKDSGYTNGKPADLK

SEQ ID NO: 3521 - protein, 89 aa, Enterococcus faecalis
ICPEIGPLKTRPLIRKGKETGKSRLNSNTFKDTSKDIFSRSLFQIGRFPIGIARVFADVKVAFDIFADVDFVIFGDENGIGSFQTFDIF

SEQ ID NO: 3522 - protein, 166 aa, Enterococcus faecalis
MSEAAIAKKETLVQAAAEKFESAASVVIVDYRGLTVEEVTNLRKQLRDAGVEMKVIKNSILSRAAKKVGLDGLDEVFTGPTAVAFSNDDVVAPAKIIDEFAKDAKALEIKGGVIEGKVSSVEQITALAKLPNREGVLSMLLSVLQAPVRNVAYAVKAVAEKNEEVA

SEQ ID NO: 3523 - protein, 322 aa, Enterococcus faecalis
YPVVDIIDATSALMNHPGIAIVLATGGAGMVKSAYSTGKPALGVGPGNVPAYIEKTAKVKRAVNDLIVSKSFDNGMICASEQAVIVDKEIYASVKAEFEAHNVYFVKPNELQKLEDAVMNEGKYAVNPAIVGNSAEKIAELAGISVPKGTKILVAELEGAGPEYPLSREKLSPVLAMMKSNNAEHAFELCEAMLNLGGLGHTAVIHTEDEELQVAFGLRMKACRILVNTPSAEGGIGNIYNEMIPSLTLGCGSYGKNSVSKNVSAINLINIKTVAKRRNNMQWFKLPPKIFFEKNSLQYLQKMENVERVMLVCDPGMVQFGY

SEQ ID NO: 3524 - protein, 108 aa, Enterococcus faecalis
QRLSIARAFLKNAPILILDEITASLDVENEKRIQESLNRLIQDKTVLIISHRLKSIEKVNKIVVMDQGKVVDQGTHSELYRRSEIYKNLIKKTKLSEKFVYEKEAQSR

SEQ ID NO: 3525 - protein, 137 aa, Enterococcus faecalis
RKNYYIVCKIGGCRIMTKGYVKSVTELIGQSPVVKLKRMVPEGAADVFVKLEFFNPGGSVKDRIALSMIQQAEADGRLKPGQTIIEPTSGNTGIGLAMVGAALGYPVKIVMPDTMSIERRKLMQAYGADLLLTPGAE

SEQ ID NO: 3526 - protein, 196 aa, Enterococcus faecalis
SIINPWCRMNERGNCKSYSISRRTRYFMPLQFNNPANPMVHEQKTGKEIVDVFGKRGLDAFVSGVGTGGTVTGVGHELKRIFPDIEIVAVEPTESPVLEGGEPGPHKIQGIGAGFVPEVLDTTVYQKVAAVSSEDALETARLMGPKEGILVGISAGAAIKAAIDLAVELGAGKRVLALVPDNGERYLSTALYEFPE

SEQ ID NO: 3527 - protein, 292 aa, Enterococcus faecalis
LPATMGQVPSWFGIWTIMAPCLGKNEYAVESLLTVGNGFLGLRGTTPEMTISDDHYPATYIAGLYNTAASEVAGQVVENEDFVNAPDNQHIALKIGDATDWLTISPDTLQQLHRQLNLKTGLFVAEMILKDADNQQIKLTTKKIANMAQPNDYHLQYTFEPLNFSAPITLKTVTDGSVYNYNVARYRNLTAKHFQVTALSAQENKTVIEVCTNQSNLSVRETSLITGDFFEKEAITIQEEAEKIAQVVTVMAHQGTRYTLEKQVFVQASHAEQSWQVPFTPKDSFAAAAHES

SEQ ID NO: 3528 - protein, 341 aa, Enterococcus faecalis
QITKKRVTYQMVEMALRNVYKKYDNAEHYSVTDFNLEITDREFIVFVGPSGCGKSTTLRMIAGLEDITEGELSIGDKVMNDVAPKDRDIPMVFQNYALYPHMTVFDNMAFGLKLRKYDKAEIKKRVENAADILGLTEYLQRKPAALFVGQRQRVALGRAIVRDAKVFLMDELLSNLDAKLRVAMRAEIAKLHQRLETTTIYVTHDQTEAMTMADRIVIMKDGFIQQIGSPKEVYNTPKNMFVAGFIGSPAMNFFKVTLNNGVISNQHGLKLAIPEGRNKELVEHGYEGKELIFGIRPEDIHSEQVALTAMKDAVIKSEVVVSELLGAESMLYTKIGDTEFI

SEQ ID NO: 3529 - protein, 164 aa, Enterococcus faecalis
LPLGGHCPRCHHNNSRVIDSRQADDGRAIRRRRECENCSYRFTTFERIEAAPLLVIKKNGDREEFNRDKILRGLIRSAEKRPVAMEQMVQIVDNVENRVRSLGENEVSTTLIGEYVMEDLVNLDEIAYIRFASVYRQFKDMSVFLKELQDIVDKAKSSSPDSEN

SEQ ID NO: 3530 - protein, 102 aa, Enterococcus faecalis
KGGLSLKGNRQRIQPKNIFQAVIDSPLSDQEKEVLTFLYQPIVGANAFSLYWLLLSETTDSEENGSLFHADLISLLDLSCQQLEEACYKLEGIGLLKTFYKT

SEQ ID NO: 3531 - protein, 162 aa, Enterococcus faecalis
IPRGGAFALCLCFGVIATSLGFLEKQPLQKANSFGFAILGLMLFVFDGLKQATPEMLMDLFLPMIGIIVIGVIGMYIFSAIVGRVLGVSKEMAFAVSLTALYGFPADYIITNEVIQSLTEDEQEQAALTSHLMPPMLVAGFVTVTIVSVILAGIFSSILLSL

SEQ ID NO: 3532 - protein, 107 aa, Enterococcus faecalis
KRGVSMKKIKALVKQHAQEMIAFRRDLHQHPELQFEEFRTTEKVAAVLDQLGITYRKTEPTGLIAEIVGGKTSRVVALRADMDALPVQELNEELAYKSLEPGKMHAC

SEQ ID NO: 3533 - protein, 239 aa, Enterococcus faecalis
TMERLQKAIAHAGVTSRRKAEELIVKGRVKVNGQVVKELGTQVSKQDTVEVDGVPIYQEEYGYYLFYKPRGVISAVSDDKGRKVVTDYFTDVTERIYPVGRLDYDTSGLLLLTNDGSFSQKLTHPKHEVDKVYVAKIKGVPTKRDLLPLAKGIRIDGKRTAPANFQILSADIKTGSSVVELTIHEGRNHQVKKMFQAVGFPVQKLKRERYGELTLQGLRPGQYRDLTKKEISQLLNQAK

SEQ ID NO: 3534 - protein, 102 aa, Enterococcus faecalis
DCVENTVGGIQMELIGHGHSCIEIRLNDGTNLLFDPFINGNPLADVSLADLHPDYILITHGHSDHIGDMLAIVQANKATIIAIAEVATYAHSLGIRLFKTDW

SEQ ID NO: 3535 - protein, 166 aa, Enterococcus faecalis
  MISC_FEATURE (41)..(41): Amino acid 41 is Xaa wherein Xaa = any amino acid.
FAIPGVRLLVVGAPLTGYLTDKIGPGILTFGGLLLLCCTSXMYMFLDMNSPIWYYVIATAIMGLGNALFQSPNNTMVMSSVEKQDLGVAGSMNSFARNLGMVIGIALSTTILYRGMSEAYGERVTTYLANRPDIFIVGMRETFFVAFLLCVAAFILTILRFRKTTK

SEQ ID NO: 3536 - protein, 221 aa, Enterococcus faecalis
QFLKKQKLAILGRSVSGKSTLASLIRGDLRHTSGEFFLGNIPTEAFGETMTEYIGVMHQAPYLFRTTILNNIRIGREEASEAEVWAVLEKVGLKEMVAQLPEGLQTMVDEAGLRFSGGERHRLALARILLQDTPIVLLDEPTTGLDPITEQQLLETFFEALKDKTVIWITHHLQGVTLMDQVIFIEDGQLEMSGTPEELLATNAHYQKLYRIDRGISSFEE

SEQ ID NO: 3537 - protein, 70 aa, Enterococcus faecalis
FLEGGVDSTGAPFSAQIAPVLSIEHCSFAFENQAKKVLTDLSLTIPEKTKISDFRAQCFRKEYVGFAHSW

SEQ ID NO: 3538 - protein, 291 aa, Enterococcus faecalis
SNVTKGKGSFVQAPKHPLHTSLNKVLFLLPFADDLSVGNFYSGLAPTIQAAGLEVFMTSPNFLREKNAADIVNEFAGLVYYAATSNDYLDLLFELALMNFPVVVLDKKIHDLPFATIQSDNFAGGKTATERLIGLGHTKIGYILSGSPALQSVRQRYLGYLQALKEANLACHTAITETNLLDEHNFKQYFEAHQLTAVVCDNDFSALHCVRNCKNLGIHVPEELSIIGFDDIQAAAFVEPPLTTMAQDFKEMGKLAGEVLLQTMQQDLQIIEDIQVPVTLIERETISTVSK

SEQ ID NO: 3539 - protein, 127 aa, Enterococcus faecalis
AKQKEIHLEGLVPYPQVRFNQEGSNFSYFSEDLVEIPEQESVIHTTDRGTLMNLLVETNAYASGSGVVTGFTKKEIRLVPLAPALENRICLLFPKNREISPIGRYFIKELKALFKKEVDTKTFSTKE

SEQ ID NO: 3540 - protein, 261 aa, Enterococcus faecalis
GEMMERKLFAFDIDGTLLNSEKKALDSTREALAKLREQGHLVTLATGRSRYMAQEVIWDLDFTNYVLCNGAAAFVDHEQYYQNLLHAEALERLAQDSDQRGLGFACVGLDDIKKSNQHRAEKMEIAMNSFHFHSPAYDEHFYRQNDIYQALAFYDAEDQCTFEEEYPEFRFIRWHQHSVDVVPKDGSKSATLTYLAKRVGIDAKNIIAFGDGENDRQMLSHAGIGVAMGNASPSIQKVATMVTDTNDNDGIWKALKEMKAI

SEQ ID NO: 3541 - protein, 202 aa, Enterococcus faecalis
FLENLNEQLAVGMRVKVPFGNGNRHVQGFVLAIEPVAATVLDETNVQLKELVAVLDLKPVLNTEMLALADYMKEKTFAFKITCLQTMLPSVMRADYQKYIYLTDELSEELQDQLFYGLEEISWDQAQERGLLPQLMALRKQQKVDIRYEVTTRNKVKMVRFIQAAKEFEQLEEIRLGLRKGAKKKEQLLYYLQRLGTEKIPL

SEQ ID NO: 3542 - protein, 80 aa, Enterococcus faecalis
  MISC_FEATURE (28)..(77): Amino acids 28, 54 & 77 are Xaa wherein Xaa = any amino acid.
MKRPKNGWCTFIEKKTYRDPFANQTFDXTTAWSVNAQHKVVLETILQSVQEPQXQTYLLERCSGNRENQILLSGLGXIPF

SEQ ID NO: 3543 - protein, 189 aa, Enterococcus faecalis
KYLMLYEIYLMFNHEQPPLQAHQHQEGDNPGPIENGKATFSAEELKDNSNGWITYHSLDRLKRATGADALLKPAMVNTGTSANKDIRPAGFISGKANHSRGHLIGRQMGGSGDDPRNLTTLYQNPVNTPYMTKYENQIRAALNRGETVRYRVTPVYNGNDLLAEKIILEAKSLKTNSPIDFSVTILNKQ

SEQ ID NO: 3544 - protein, 89 aa, Enterococcus faecalis
TNNKEELSLDFEQLKETLPDAKPQTFLQAILSQPQEEDAELTFSEEIDEQFVENCKFLASPETISETDVEHWREQEFLVVAQSLDGRLS

SEQ ID NO: 3545 - protein, 545 aa, Enterococcus faecalis
RTLALDLPFKFAFSWHTEKFFLGCFVLSVSLLFLCTLAGSLGVGALLYSVIIGVLGFADYQKMFYRVEPIYPDDLKMITEVSLLKEMVGLWPCIFVVPLGCVTLFFLRKAFYKSFFLSKKKQTIRVLSLVLSIGLFSYIGDFNNPQNLLRKAYNKTALWIPYSQKMNYYNTGFIGGFLYNLKVEAMDQPKGYSKEAISEITQKYQKLAEAKTLPSNEQPNIVFVMSESFSNPDHLKGLSIIGNPLADYQQIADKTYSGQMLSQNYGGGTANIEFEALTSFSMELMNAQMTTPYTMMIPKMTELPSIVSLLKEQKYQTTAIHPYNTSMYKRKDVYKILGFDQFINEKTMNYTDKLENNPYISDQAAYQEVTTLLKEKEQPQFIHLVTMQTHMPYENKYTTSNYFSQGNGNQVALNNYLQDIAYSSEALKNFLQEIEKMPKRTLVVFWGDHLPSIYDENIQALNEGAALHQTEFLMYDTANQLTQKNQHQAIISPFYFAPSLFKQNGLPPTGFYAMPNEVQQTLPAFGQRGITILGGGNGKKQFYMN

SEQ ID NO: 3546 - protein, 283 aa, Enterococcus faecalis
ILMVVKLTDVAKLAGVSPTTVSRVINNYGYLSQKTIDKVHQAMEELNYQPNGLARSLQGKSTQLIGLVFPSVSHPFFGELIETLERKLFVQGYKVILCDSEKDPEKERAYLRMLAANKVDGVITGSHNLAINEYENVSLPIVSFDRFLAPGIPIVSSQNFQGGQKATEALFASGAQKIAIITGANNTGAPSDYRLAGYKQTMEKYGAEKTILQIDNGTSTTLKNLEIERLLQNKTVDGIFCTDDLTAITVMNIAQKLKNIIPEKFKIIGFGRGTKLILKNCPP

SEQ ID NO: 3547 - protein, 245 aa, Enterococcus faecalis
LPALWDTWFNLKEGMKVMVVGRISLYENSGSYQIYIEHMEPDGVGALYQALAELREKLGKEGLFEGPKQQLPRYPKRIAVVTSPSGAVIRDIITTVKRRYPIAQLVLFPTLVQGEQAADDIVRNIQRADAQSDFDTMIIGRGGGSIEDLWPFNEEKVARAIHAATTPIISSVGHETDVTIADMVADVRAATPTAAAELPVPVLNEELLRISERRTRLEQSFLYFLQQRTERFQRLQNSYVFKQPE

SEQ ID NO: 3548 - protein, 124 aa, Enterococcus faecalis
AGSVVKSVWRLVRQREIEGEVDILDIDYLIKEIVPELPKHRAEDSIFDYLENDLGLAISYAQKEITVEPLTEMDKQLIGEVEGNHVVVVRSIMNLEDTRCFGYTESRHRLNKFKFVEFARRRKL

SEQ ID NO: 3549 - protein, 229 aa, Enterococcus faecalis
QNDGNFIIWVAQSLARNLHPLSAQAVTTGNTPLQVEFGGGTLDNETGNAGDNTAPDPTVPNTNFDLVKIPKAVTFNTTKISDSLQNISSTQQYLGYAIGDIRGTKEGWHVTASATLANGSEALAGNLNFSQIGYYSKFDATKQIYVYLTDAESLANYEADPTTPDFSGTNIPLSGDAIAIATASSGKGQGIWYSGIRTMNLEVTTPYQQIKAGAYTGNITWNLVAGTSI

SEQ ID NO: 3550 - protein, 70 aa, Enterococcus faecalis
RKYIYSKNYPSSLRLRAFFAAKEVKKSRDRVIDSCYILYQYISFQNLIYIVYFNQYDSLKQVSLFVIKKS

SEQ ID NO: 3551 - protein, 164 aa, Enterococcus faecalis
KMAEALMITVFLGLLIILQIIDQKKIIVFAQSSPVRKSLSILLTVAILLIFWPAHLTDQIKLVAFASVILINGFLKEGLAKDSVVRFGVLNGNFNRYPQVQVEKLGDDKSFISFYKSKNNSFSMIFDKDQTEMMDVFQELDIHSKITLDQSSEEKRAVVKKDNE

SEQ ID NO: 3552 - protein, 239 aa, Enterococcus faecalis
KMNATEELHYIDSYQKVDEVVERVASIRERFGDAMDIGVDFHGRVHKPMAKVLAKALEPFHPMFLEEVVLPENEEHFKEVADSVAVPLATGERLYTRWQFKNLFKQGTVDIIQPDVALCGGILETRKIAAMAEAYDMAVAPHAPYGPVALAATLQVDSCTPNVFIQEQSLGIHYHKGFNLLDFVKNKEVFQYKDGYVDLPSKPGLGLEMDEDKIKEIAQEGLIWTNPQWKNYDGTIAEW

SEQ ID NO: 3553 - protein, 270 aa, Enterococcus faecalis
TSNTSESSTSSTTSETSNTNESNTPSTTSETSNTSESSTSSTTSESSSTSESSTPSTTSESSSTSESSTSSTTSETSNTSESSTPSTTSESSSTSESNTPSTTSETSSTSESSTSSTTSETSNTNESNTPSTTSKTSSTSESSASSTTSATNNTSESSTPSTVNESSQSKGQNSVIYAVESNQDPNDAQSNSKPSAKASQTKESVAENQATKQIQTNQESSGTVKKADNTTKIAKKKFPKTGEQSSAVGSFLGLSFLSLAIATYCFKVKR

SEQ ID NO: 3554 - protein, 204 aa, Enterococcus faecalis
  MISC_FEATURE (15)..(15): Amino acid 15 is Xaa wherein Xaa = any amino acid.
NRRETDLKQNSETSXTSESSTSSTTSETSNTNESNTPSTTSKPVIQAKAAPQARQVKQAIQMKATHQVQLAKPVIQAKVVPQARQVKAVVPAKAARQARQVRAVVPAKAAPQARQVKPVIQAKAARQARQVRAVVRVKATRQAQPAKPVVPAKVVPQVRQVKQAIQMKATHQVQPVKQVVPAKVVLQVQPAQPTIQVRVAPQAL

SEQ ID NO: 3555 - protein, 80 aa, Enterococcus faecalis
QPLEEAVAHKRYSGPIMGDADILVVPTIDVGNCLYKSLTLFGHAKVGGTIVGTKVPVVLTSRSDSTESKFHSLRFAMRQV

SEQ ID NO: 3556 - protein, 232 aa, Enterococcus faecalis
KKEQKTMETVLVINPGSTSTKLALFANHDCLAEETLRHSVQELAPFENVVSQTSFRKQMIAEFLETHNIIQLAAVVGRGGLLKPIPGGTYLVDQQMLEDLRTERFNTHASNLGAILANEFAEKYHVPAFIVDPVVVDELQPLARISGLKGIQRRSVGHALNQKAVARKIAEDLGKTYEQSNFIVVHLGGGISLGAHQKGRMVDVVNGLDGEGPYTPERSGALPLDGLFTTEW

SEQ ID NO: 3557 - protein, 149 aa, Enterococcus faecalis
TQSVLSYLETSLLTKWQAHQQQQLMALTLKETQHLDVTVVQAIVNGELLSYLQQQLLQKTQGDFFVYRLILQAEEPTKEPIYLAASPNLLTALEKTYLDPVIFEDTTKELLRYPEFAGIFSMDEQWRLESLRLAHEQINEDFTIQEDPL

SEQ ID NO: 3558 - protein, 175 aa, Enterococcus faecalis
RLYYSGGPTMKLLAVEIVGFGKWQQQKITFESGNQLLYGANEVGKSTLYQFIQAMLFGFPTKGKRKRDYAPKNGGSYGGRLWLAHPVFGEVQVERFKEKNKGQAIIYYQQQMGDEKTLQQMLHPLTKKLFQEVFTLPPEPPIRLTVEPKRLPLLVTMGSRIHNLRYEIFLRNQKS

SEQ ID NO: 3559 - protein, 267 aa, Enterococcus faecalis
EKLEIEVLKTGKSFGYGKVLTVLKSSEQRVPVKDENFTKVGISPLQHLAYGAQLSFKTQQVENVMQRVAKLQEVPVLPTIGMNDPWHYRNKAQIPVRKIDNQLQTGFFRKNSHDLIPMEHFYIQDPEIDAAIVKIRDIMRKYSVKPYNESDNTGNLRHIVVRRGYHTGEMMVVLITRTPKLFPISKIVPDILEAIPEVVSIVQNVNPKRTNVIFGDETILLHGSEKITDTIFDLKFEISARSFYQVNPQQTEVMYQKVKEYAALTGN

SEQ ID NO: 3560 - protein, 192 aa, Enterococcus faecalis
RDFMPDVEIPKEELMAIIEEAMSAPNSTNLNSWRFLIVTEKEQKEALYEVSMQQPAVKGAAAVIILLGDLTAYTVANADEISAKAVAQGTMTEEIRQGINENVSWYYDVSEEQKREWLMLDQGLVAMQLMLSAKDRGYDTVAMSGFETEAVRKLFNIEDHLVNGLIIPIGKAQTPGFETVRRDVSEVVTWLD

SEQ ID NO: 3561 - protein, 181 aa, Enterococcus faecalis
LAKYLTIPAQIGGMMVSAIISDTLLFKSPTCTQERLDAAHALADIAEINLEGYGLDLLKAGTNLSDKSAEVLLDLDAKSFPMNGKTVRVAQVNTVDLAEVLDRQAELEAAMAAENAANNYDLFVLIITNILDSDSELLAIGAEQAKIEAAFNVTLVNNRAFLPGVVSRKKQVVPQLTEVFN

SEQ ID NO: 3562 - protein, 259 aa, Enterococcus faecalis
TSGRKIILRQLKAAFATEAKLEQFLSEMIDCQLIIRENRQYRLNFPIYTAAEVASLPLAEDELPKFKGTVTEQLFWLAESFWPQVFPEEEDYFFGVSGGLTFYQKQRLASAQLSIITLEKEKTEVPTMPRYFDYLGKEQSLPEAFSALYDLLGDVNPEYYLSQARRVIKQALRGRKVSTVPNIFQESLHLTQVITIDQDHLKLLLPVATEQAEPLEAQSDILAFYYEKIANRSAIERLVFMQQLIEQLGTNSLSYLRIN

SEQ ID NO: 3563 - protein, 105 aa, Enterococcus faecalis
  MISC_FEATURE (22)..(26): Amino acids 22 & 26 are Xaa wherein Xaa = any amino acid.
EFKIEDYLPLGNIMVSVYLPFXTEQXHLPETLREHGYVVTQSVAYGREGERMVLEILSPRKNERTLYKLINQLEPRAFIISYEPKFISGGFWTKKVRKRNDAISH

SEQ ID NO: 3564 - protein, 82 aa, Enterococcus faecalis
RSRLRRSAWKMSEMKQIDQLWILPTEAGYKIGLTAEAQEDLGKITFATFPKVGQTLAKGDSLIELEAEKAVSEFSNLSHHGV

SEQ ID NO: 3565 - protein, 127 aa, Enterococcus faecalis
  MISC_FEATURE (2)..(2): Amino acid 2 is Xaa wherein Xaa = any amino acid.
RXKKEGVEMYTLYEYPKCSTCKKAKAWLDQQGVKYQAIDIKATPPSSEQLAKWMKETGLPVRRFFNTSGVLYREQGLKDLVDSFSIEEASQRLAADGMLIKRPILLKDNTFLTNGFKEADYEGVLGK

SEQ ID NO: 3566 - protein, 228 aa, Enterococcus faecalis
YVDRTLKSEFWLIAKMLLIAIPVIVLVLLLKNNWTIFFFLAIFGGVFLMSGITWKIIVPVFILAALVGAGTIYLITTETGRDLLSKLGVEAYKFDRIDLWLNPFHTDPDRSFQPALALTAIGSGGLFGKGFNVSDVYVPVRESDMIFTVVGENFGFIGGCFIILLYFILIYRMIRVCFDTNNEFYAYIATGIIMMILFHVFENIGANIGLLPLTGIPLPSISQGVLPF

SEQ ID NO: 3567 - protein, 169 aa, Enterococcus faecalis
ILAGRMKKMKKATMLTYLEEQLEKHLGDYEVGLDWDRKNHTIEVIVRLYAENNEQVAIDDVDGTLSEEEFIEFEDGLLFYNPQKSVVDDEEYLVTIPYEGKKGLRKAVLDGFIHYLKVVLDEGQSDLLDFLSDETAEVFELHWEPADFEAMIKKVAETEKEQWIAYPSY

SEQ ID NO: 3568 - protein, 315 aa, Enterococcus faecalis
FRGENMKWTEVKVETASEAVEAISNIMMEAGASGVAIEDALDIENFESDLYGEILDKEQFTHIKEGAIVMAYFPETTFLPEILPFMKENILRLPEYGLSIGKNEMTISEVAESDWATAWKKYYHPVRVTRFLTIVPSWEAYHAQDEAEKIITLDPGMAFGTGTHPTTRLTLQALETVLRGGETVLDVRTGSGVLSIASRYLRAKDVYAYDLDEVAVAAAKENMDLNPIAADVHVSANDLLKGIDHSADVIVANILADIIVLMIEDAWRLLKQDGTFIISGIIEDKKAMVLEALTKVRLVVDQLFNQGDWYAIILN

SEQ ID NO: 3569 - protein, 123 aa, Enterococcus faecalis
NKRRCFYMTIIANYIRQQPQHQTQLTEIYQAILAVVPQETTEKIAYGMPTFYLNGNLVHFAAAKQHLGFYPTPSAIQRFSKELRPFKTSKGAIQFPYTQELPLSLIQEIVKFRVQENMKTGSH

SEQ ID NO: 3570 - protein, 128 aa, Enterococcus faecalis
TEERILQKVGKPMTKPKIYTMTFASVYPLYIQKAERKNRTQAEVDEIIYWLTGYDEKGLQQQLAQKVTMETFFEEAPNFNENAQLIKGVICGYRVEEIEDPLMQKIRYLDKLIDELAKGKAMEKILRT

SEQ ID NO: 3571 - protein, 101 aa, Enterococcus faecalis
AEFLHGTLEIVDETTPVTLFIGEDEQRPLAERVAKLLPKICANYTIIDSKAYELPGISEKYRGRVVSFLLMHAVTQRIDAHVEKLNCHPLEIRRYYRQFDY

SEQ ID NO: 3572 - protein, 282 aa, Enterococcus faecalis
LATPRREALEVVLSDGTKVKGELVGTDAYTDLAVIKISSDKVDQVAEFGNSSKITVGEPAIAIGSPLGSDYANSVTQGIISSVNRNITNKNESGETININAIQTDAAINPGNSGGPLINIEGQVIGINSVKIVQSTSQVSVEGMGFAIPSNDVVNIINQLEKDGKVTRPALGITMSDLTGISSQQQEQILKIPTSVKTGVVVRGVEAATPAEKAGLEKYDVITKVDGQDVSSTTDLQSALYKKKVGDKMEVTYYRGSKEMKATIDLTIDKSALTQQNNRSNQ

SEQ ID NO: 3573 - protein, 121 aa, Enterococcus faecalis
FSDTLEKDDTPKIVVGFVKSCKTHPDSDHLSITQTEVDNGEILQIVCGAPNIKAGQKVVVAKPGAMMPDGLMIWPGVLRGEESFGMICSAKELRLPNAPAKKGILELPFDAEVGSAFAVGE

SEQ ID NO: 3574 - protein, 123 aa, Enterococcus faecalis
AWSGAVKIQTPAGTIEITNDVIATVVGGAATDIYGIVGMASKNQIKDNLNDILRRENYSRGVVVRQEDNGIAVDVYTIVSYGTKISEVSRNVQEKVKYNLETLLGVTANSVNVFVQGVRVLPD

SEQ ID NO: 3575 - protein, 177 aa, Enterococcus faecalis
VNVTEISAGQFQEMVQAGATRLHTNAEYVNSLNVFPVPDGDTGTNMNLSMTSGAKAVADSRSEKVGELAGALSKGLLMGARGNSGVILSQLFRGFSKQIPEVTTLNAKDLAAAFTHGVETAYKAVMKPVEGTILTVSREAARSGERKAKETDDCFEVMTAVVAGAKRAFSENTDLLP

SEQ ID NO: 3576 - protein, 295 aa, Enterococcus faecalis
KGANQSMSLNVIALGGNAILDTDPTDEGQKAVVNHAAKYIAEFVAKGEQVIVCHGNGPQVGNLLLQQKAGESEKNPALKLDTCVAMTQGSIGYWLQNALTNEFEKRNIAKPVISVVTQVRVDKEDPSFKKPSKPIGPFYTKEEADAEAAKDGSTYVEDAGRGYRKVVPSPMPKEIVEKEAVRALVEADVLTICSGGGGIPVVAEDGQYVGVEAVNDKDFSARVLAENVDADRLIILTGVDNIYINYNQPDQKALEQISVAEAEEYIKEGHFAAGSMLPKIEPALDVLKVPIHHDW

SEQ ID NO: 3577 - protein, 217 aa, Enterococcus faecalis
FVPGEEAARAAAEEGPQEKISLKEIFSNRNLLAAFILCFTSIYANFVIITWLPQFLIAERGFTGASVGFISSLVPWAFIPGALIFARLNDKTGATKKLVFTLVPLAILSVFAIAFVTNRTLLISVLILYGLTGKLALDPIMVTFVTKHAPKAALGTTLSAYNFIGMSGSILAPYVTGYLADTAGSMQVGFYLSCVLLVIGLLAFAFLAKDESKPKLG

SEQ ID NO: 3578 - protein, 362 aa, Enterococcus faecalis
  MISC_FEATURE (358)..(358): Amino acid 358 is Xaa wherein Xaa = any amino acid.
PIPVVSNCVGGHKFYDRKEIKDILAYLSLIANPDDSISFERIVNEPKRGIGKSSIEKLRLFADTHGWALLEAAQNVDLANISGKAGKELGNFGMMIQDLTKTVPYLTITELVKETLQRSGYREALMAQNNLESQARLENLDEFLSVTQEFDKRFEAQNNDDPNGEETKLADFLTDLALVSDLDNLEESSSQVTLMTLHAAKGLEFPVVFLMGLEEGVFPLSRAMLEESELEEERRLAYVGITRAEEALFLTNAYSRTLYGRTQYNRPSRFLEEIEAERLMKQGAAANLQKAPARTFDPKVFKPSASKPAYTQPATKSVSNKVASGGEKVSWQAGDKVQHKAWGVGTVVRVGGSAQDLXLDIA

SEQ ID NO: 3579 - protein, 288 aa, Enterococcus faecalis
YGRSCLWGRQYSLYHTTRTKALGGKQMSKIVIALGGNALGNSSKEQLAKAQTAAKSIVDLIEQGHQVVIAHGNGPQVGKIRLAFEETSQSPEDVVPFPECTAMSQGYIGYHLQQAIDEELVARNLGEQPVVTLITQVVVDPKDPAFTKPTKPIGGYYDEETAKQLMAETGNVYQEDAGRGWRRVVPSPKPIDIYEKVSLRTLVDAGQIVIACGGGGVPIAYDGPVYHGVDAVIDKDFAAAKMAELIEADVFVVLTAVEHVFVNFGQANQQALTDVTVTAMRQDSSQRN

SEQ ID NO: 3580 - protein, 99 aa, Enterococcus faecalis
VHKLCCPVKNVTIKGSFKIDFVEGTMPREDGDICIASYMNFLITNDGVIVPQYGDENDHLALEQVQTMFPDKKIVGVNTVEVVYGGGNIHCITQQEPKR

SEQ ID NO: 3581 - protein, 181 aa, Enterococcus faecalis
TNWRISNNNHARRMAATVSTLTKRKRRIIRRNHMLLGSHVSMSGKKMLLGSAEEAASYGSTTFMIYTGAPQNTRRKPIEEMNIEAGQAFMKEHNLSNIVVHAPYIINLGNTIKTENFGFAVDFLRQEIERAQALGATQITLHPGAHVGAGPEAGIKQIVKGLNEVLWQAQIPQIALAVHHG

SEQ ID NO: 3582 - protein, 108 aa, Enterococcus faecalis
PMPIWHSPLLFSRFQYFRKVFFTRVVGPLPFISLGAIKRPVALYHMGLMGNEAVRSWFQEAYQEQVSTKLNMGKSCLRFTNPKRIPYELIGELVTTITLEEWLQQYQH

SEQ ID NO: 3583 - protein, 92 aa, Enterococcus faecalis
FDPWCPDLYKSNKDLITKPTTTKQALDGLLPHLVKGSRIILVVYYGHEGGSEELDLVTNYTQALPQDVYSVLRYEFINQKNQPPVLFCIEKK

SEQ ID NO: 3584 - protein, 229 aa, Enterococcus faecalis
SRLEVRDMANVLEMKNIYKKYGEKHTEVIALKELSFAVQPGEFVAVIGPSGSGKSTFLTIAAGLQAPTSGEVIVGGQSLNKLTKKQRLAQRFQKIGFILQSSNLVPFLTVEDQFHLIEKVDKSRKNSELKEQLLETLGLKELRNSYPRDLSGGERQRVSIACALYHEPDVILADEPTASLDTEKAFDVVKLLAKEAKEKDKGIIMVTHDERLLKYCDRVVRIRDGELTE

SEQ ID NO: 3585 - protein, 72 aa, Enterococcus faecalis
MLQTALLAVLGVAIGLALTGITVLFLPEAMPYATNGPRMILFSVLLILSALIGGAFSIRTIAKIDPLIAIGG

SEQ ID NO: 3586 - protein, 244 aa, Enterococcus faecalis
HMTNIVSVLKKVDHQSLVLFDELGAGTDPQEGAALAIAILDSLGAKGAYVMATTHYPELKVYGYNRAGTINASMEFDVDTLSPTYRLLIGVPGRSNAFEISKRLGLDNSIIEAAKQIMDGESQDLNEMIEDLENRRKMAETEYLEARHYVDESAALHKELKEAYQVFFEEREKELQKARKEANKIIAEAEENAETIISDIRKMQLESGQQGGVKEHQLIDAKTQLSQLHHDETKLDRHRLFKRI

SEQ ID NO: 3587 - protein, 180 aa, Enterococcus faecalis
KQEYKNIFGGVVHDQSASGQTLFIEPKQILEMNNRLRQQQIAERNEITRILAELSAELVPYRREITHNAYVIGKLDFINAKARLGKELKAVVPEISQANHVVFKQARHPLLNPEKAVANDIVIGEEYQAIVITGPNTGGKTITLKTLGLLQLMGQAGLPIPVEEESKMGIFNRSICGYRG

SEQ ID NO: 3588 - protein, 96 aa, Enterococcus faecalis
SVVKSDGSAAAPVAVAGPAAGGAAEEQTEFTVELTAAGDQKVKVIKAVREATGLGLKEAKAVVDGAPAPVKEAVSKEEAEALKAALEEVGASVTVK

SEQ ID NO: 3589 - protein, 65 aa, Enterococcus faecalis
RRSRSFKSCFRRSWRFSNSKIIHSTFECSRTLVLQGFFFIKLLNGGKVSELIVKIIFSFNKDKHS

SEQ ID NO: 3590 - protein, 145 aa, Enterococcus faecalis
LKNYLPQIRLSLIYVYDLNSDVVNNLSDQTLVDLINQVKVDYANQNYPSDVRGDYGLAAMADKIKANDYTSINQSAESVSSDTTNTESTLQTTTSSSKKATTSSSTEHKKGIFPSTGEKKSVLFTIIGIILLSLVSIFIIKNKKK

SEQ ID NO: 3591 - protein, 314 aa, Enterococcus faecalis
KYLVGHRSYLSLDVAPGAGGYPRGRIIEVYGPESSGKTTVSLHAIAEVQRNGGTAAFIDAEHALDPQYAEKLGVNIDELLLSQPDTGEQGLEIADALVSSGAIDIVVIDSVAALVPRAEIDGEMGASHVGLQARLMSQALRKLSGSINKTKTIAIFINQIREKVGVMFGNPETTPGGRALKFYATVRLQVRRAEQLKQGTDIVGNRTKIKVVKNKVAPPFKVAEVDIMYGQGISQEGELLDMAVEKDLISKSGAWYGYKEERIGQGRENAKQYMADHPEMMAEVSKLVRDAYGIGDGSTITEEAEGQEELPLDE

SEQ ID NO: 3592 - protein, 60 aa, Enterococcus faecalis
  MISC_FEATURE (23)..(23): Amino acid 23 is Xaa wherein Xaa = any amino acid.
LSCLMWMGSDMDNSLFNDLVLTXKRRHLSCSVSVSFFLTSRIHSLSIHLRVILLDLLLLL

SEQ ID NO: 3593 - protein, 173 aa, Enterococcus faecalis
SFFLFLAFKYLSASYFLLYNCSICKTRRYFMKRKHFLLSFFVMMVTLLTFISGTSAHAEGKKYTIGTDLTFAPFEFQDSKGKYIGIDVDLLDAIAKDQDFEVDLKPLGFDSAVQAIQSKQIDGMIAGMSITDERKKSFDFSDPYFDSGLQLAVNDGNDKIQSYVDLKGKTGCG

SEQ ID NO: 3594 - protein, 284 aa, Enterococcus faecalis
KAKRVAVKVGGEGANFLEKNKEKYDYTIKNFDDATGLYKALENGEADAIVDDYPVLGYAVKNGQKLQLVGDKETGSSYGFAVKKGQNPELIKKFNAGLKNLKDNGTYDKILNNYLATGDETNTQDAGEQMKKITPKKEKYVIASDSTFAPFEFQNAQGDYVGIDVDLVKRAAELQGFTVEFKFIGFSSAVQAVESGQADGMVAGMTITDDRKKAFDFSVPYFDSGIQIAVKKGNDKIKSYDDLKGKKVGVKIGTESADFLEKNKKKYDYSIKYLDTTDALYSAL

SEQ ID NO: 3595 - protein, 415 aa, Enterococcus faecalis
AMKIFVWILLFLLVINVIAALITVFRKPRSISSVLAWMMTLIFLPGIGFIIYLFCGRGIDGQEVFKLSDDEKQMVQRIKEKVDVDNKKAGRDKRYDLLYDAKVLNRYFRNMDASPLAKRNSLQLFTDGQEKFQALFEDIRAAKETVHVEYYAFFNDTIGNQFLDVLIEKLHEGVEVYLIYDPWGSPGANKKFFARYVDAGGKVAPFITSRDMIRKTRLNYHLHRKIVVIDGKIGWTGGFNVGDQYLNVTEKFGYWRDTHIRLVGTAVFSLQEIFIMDWNASVKYPEERMTYHEKYFKLPEDHEVEHLSLQVVSDGPDSEEEILKSGFVRMIFSAEKSVWIQTPYLIPDDSMINALLVAVRSGVDVRIMIPCMPDHPFIYRATQYYANYLHKRGIKIYIYDSGFIHAKTMVIDDEL

SEQ ID NO: 3596 - protein, 60 aa, Enterococcus faecalis
MNLQRYNMSNGQPFIGRAALMDTMGDLFTNTLGAFVMGVYTYIRSKGNPEYLENYAIKRK

SEQ ID NO: 3597 - protein, 71 aa, Enterococcus faecalis
PITCDSKFRGRFCLYCALVGAFGIKLLAPHGGIFVVFLLSNPLLYLLFILIGAIISGIVYGLLKKPVEVPA

SEQ ID NO: 3598 - protein, 463 aa, Enterococcus faecalis
  MISC_FEATURE (262)..(262): Amino acid 262 is Xaa wherein Xaa = any amino acid.
FSKQRKFKKKPEEKAEQEQTTPAPESNRKYIIAVTACPTGIAHTYMAEDALKKKAKEMGVDIKVETNGSEGIKNRLTAEDIARADGVIVAADKKVEMNRFDGKKLVNRPVSDGIRKTEELINLAISGEAPTFHGSDSAASDQEDSAEGSIGSRIYKDLMNGVSHMLPFVIGGGIAIALSFMIDQFIGVPQDQLANLGNYNDVASWFNQIGGAAFGFMLPVLAGFIASSIGDRPGLVAGFAAGALANAGGAGFLGALIGGFLXGYVVVLLRKVFKGLPKSLDGIKTILFYPVFGLIITGLLMLVINIPMKAINDALNHFLLGLDGTNAALLGALLAGMMAIDLGGPVNKAAYVFGTATLASTVAEGGSVVMASVMAGGMVPPLAIFVATRLFKNKFTKDQQDAGLTNIVMGLSFVTEGAIPFAAADPLRVIPSFVVGSAFTVRWLVRLVSNYWHHMEEFSSSSY

SEQ ID NO: 3599 - protein, 244 aa, Enterococcus faecalis
KRNHLSKIENQVLDYILTHMTEISSQTIYEVAQALFVSTATISRTAKHLGYRGFQELKYAIVQSVQSESTESDSRSFQAITQQLIANVQDSFQQMDEAKVAEMLKMIERANTIEVFGVGGSFPICTDFARKLTFLGKKAYARSDWDEQAAAVKNLDGQDLAIFVSYTGETKGILAYARVAQEQQVPMISLISTKGSTLEKLSTTTLFAKGTTRYHQRVDLSSRIAVICLFDTVLLMYAEAKQPR

SEQ ID NO: 3600 - protein, 319 aa, Enterococcus faecalis
  MISC_FEATURE (2)..(2): Amino acid 2 is Xaa wherein Xaa = any amino acid.
RXFIPQCSPPFFFGILKPIGKWEAKVWRAFEKIPAFQQWQKVEAIHRGWSTDLKFKVTKNQETFLLRIFQQEELLAKQQEYQFIKKVAALGFPSSKPFLCAPIPESEQGYMLLTYLEGEDLSDVLPALSPKRQLNLGVEAGRYLNKIHKLLLPERISQREIAQNLYEKKQSQLNKYKESQFCMPYQQPIISYLEKQLPLLQQRPVVYQHGDFHVGNFIYLPTRQVGVIDFNRWDFGDPYEEFYKLQFFSRNVSPLFAYGQLQGYFAGKVPTLFWQFQKLYTFHAGLYSLVWALSFGEKEIRTMEQQYQQLIGLLTTEFG

SEQ ID NO: 3601 - protein, 200 aa, Enterococcus faecalis
VNTNASSCSEIIVDFWQQHLAELTMTDNAARLLYAGIVGDTGRFLYPSTSAHTLAVAAQLRTFNFNAADLNRELDQMPLKVAKLAGYIYQNLEIDANGAARVVLPQSILNSYDIVDSETAAIVSMPGKIEDVLSWAIFVEQPEGYYRVRLRSKGPIINTIAKKHHGGGHPLASGANARDAAEIEVIYQEIQAACQEWAQK

SEQ ID NO: 3602 - protein, 95 aa, Enterococcus faecalis
TLDKDRYSMKTYEKIKQLRENREITQKEISNALDINVSVYNKIELGIRPLREEELTAIADFFNVSIDYLTGRTDNPTTPSNNQKEAGQNIISHFR

SEQ ID NO: 3603 - protein, 153 aa, Enterococcus faecalis
YPNNTVQHAGVILGLGGVAGHGHYGYPHGDLGYFGRLAINVNYSAVTAACLLMKKADFDAVGGFEEAFTVAFNDVDLCLKVQALGRDNVWLHEAELYHFESQTRGYDDKGKKKKRFEQEKVMMEEKWGPLIENDPFYNPNLTRDIPNFSLRID

SEQ ID NO: 3604 - protein, 128 aa, Enterococcus faecalis
MQLRMTKWSEKMEQQLTTRKEKQPLRNQAEQSARLVDHLLRWRYLLAAVIFILLVAFKVHGSSLNMWDAYVSEYADGQKSSLIAGEPRGVRSDEWLVQTPFSLSQTQTSLITHNDVITLNGQDLVVSY

SEQ ID NO: 3605 - protein, 66 aa, Enterococcus faecalis
TSAASRVTSKETIQAISKVVPSFWGGSADLSASNNTMVAAEKDSNLVNTKAVIFGLVFANLQWLQQ

SEQ ID NO: 3606 - protein, 278 aa, Enterococcus faecalis
YNGCCRKRFEPGQYEGRNIWFGVREFAMAAAMNGIQLHGGSHVYGGTFFVFTDYLRPAIRLAALQKVPVTYVLTHDSVAVGEDGPTHEPIEQLASVRCIPNVHVIRPADGNETVAAWRIAMTSTETPTILVLSRQNLPVLEGTLEHASDSVQKGAYVLSPQKGEQPAGILIATGSEVNLAVEAQAKLAEEGIDVSVVSMPSFDLFEKQSAEYKESVLPKAVTKRVAIEAAASFGWERYVGTEGKTITIDHFGASAPGGLVLEKFGFTPENVVNTYKSL

SEQ ID NO: 3607 - protein, 168 aa, Enterococcus faecalis
  MISC_FEATURE (7)..(93): Amino acids 7, 9, 11, 21, 70, 71 & 93 are Xaa wherein Xaa = any amino acid. 1               5
VATLSIXGXTXISLLVVQLIXGTERSRIFSIFVLSGAFVAPIIVRLSDYYPERKIVLIGLLMQFGSFIYXXLGGTHVFLLILAIIVLDIVTQXGQVANQTRVQNLGEEASNRNNTVFMFFYFIGGSLGSLIGTLMWQNYGWSGVTLTGIGFQLFALFFHFMLFAPKKK

SEQ ID NO: 3608 - protein, 332 aa, Enterococcus faecalis
SRTSWSNTVSYLMKPKAAELGMTNTTYYNCSGAQASAFNGLYQMQGIDPNGDNVSTARDLASLTYHFLKNYPEILEITNKPVVKTMVGTPYEETFEAYNYSLPGAKYGYQGVDGLKTGSSPTGGFNYIATVKQGDFRLIEVILGVGNWQNQDGEYERHVAGNALLDYAYTTYERKKLLDKGPQTIDHKKVTLANDLYGVVPKGSQPTFKLVAGQVQVDTPLTLLNSTVQAPKVAYQEVKPKQTTAEAAEESNEHSGDTTVAEPNHFIPKSIATSVLVLFGLIFSVITRQLQKRLERQKKHGKESSKTASMRTIFLSAAVLSFLCAVGLFLLF

SEQ ID NO: 3609 - protein, 63 aa, Enterococcus faecalis
CLPRGDNYTMGPEDALEAIAYLNPEITIPIHYNTFPVIQQNPAIFVEQVVGGKVLNPGETILV

SEQ ID NO: 3610 - protein, 442 aa, Enterococcus faecalis
EEIMATKHDQILKHIEDLPIGDRISVRSIAKSLSVSEGTAYRAIRDAENIGLVSTIQRVGTIRIERKLKKHIEKLTFGEVVRIIEGDVLGGSSGLDKVLNKFVIGAMTETAMTRYITPGSLMIVGNRQGVQKLALENGAAVLITGGFETSEEIAQLADRLGMPVLRTTYDTFTVATMINRALSDQLIKKDILLVSDIYTALEKTNYLLTTQTIADYQALSESTHHSRFPVVNKKLRLVGIVTTKDVIGKSEHLTVDKVMTNDPNVVKKMMSVASVSHQMIWDGLEVMPVVEDDLALVGIVSRQDVMKAMQLVQRQPQIADTISDQISGEVMPVEENGKETTRFRFSVAPQMVNSVGTISFGVLSEIISNVTQRTMLMNQKRNVLIEQVNLHYLRLIQLESELDIRPRILEIGRRSAKLDIEVYLENVIVAKAIVVCQVMERT

SEQ ID NO: 3611 - protein, 77 aa, Enterococcus faecalis
WRERRRLQRMDVVKEIMAAIKQYETIIIHRHQRPDPDAIGSQVGLAELLRASFPEKNIYQVGGPVEGLECHRHGKGK

SEQ ID NO: 3612 - protein, 138 aa, Enterococcus faecalis
  MISC_FEATURE (28)..(28): Amino acid 28 is Xaa wherein Xaa = any amino acid.
HLEHQGSFLPYRQRKNLGVPMIFVRKAXSLTMDEELFTASVYSFTKQVTSQISISRKFLSDADKVLIIDDFLANGQAAKGLVELCQQAGAKVEGIGIVIEKSFQDGRQLLKNMGLNVVSLARIASLSEGTVTFLEEDA

SEQ ID NO: 3613 - protein, 222 aa, Enterococcus faecalis
RNGDVFRGGCIILETKQLNTPQQTETPNGKAAVLGLQHLLAMYAGAVAVPLLIGTGLNFDSQQMTYLISIDIFMCGVATLLQLTVNKFFGIGLPVVLGCAIQAVAPLIMIGTNKGVGAIYGSIIASGIFVVLIAGFFSKIKRLFPPLVTGTVITVIGLTLIPVAVEKMGGGLATDKSFGDPKNLLLAFVTIALIIVVQVWGRGFIKSIAVLIGLVGGTILAA

SEQ ID NO: 3614 - protein, 132 aa, Enterococcus faecalis
RLIIHLAEEKLMGYKPTQRDIVIIDFAPSKGYEIRKRRPALVMSKDSYNISTNLVIVCPITSLDKERPFLVPIYSEKLHTSDNAVSKVNTLQVYSLDYTEQAQRRIKYVDTLDEETFYEIAQKCLQNFSFAV

SEQ ID NO: 3615 - protein, 82 aa, Enterococcus faecalis
KMEVLAMTSTKTRKQGNSLVITIPATLGVKEGEEFVILRKNNGSIALIPKVEDFFENTAEGEFYLPELAIDYSPSGGEVDGL

SEQ ID NO: 3616 - protein, 297 aa, Enterococcus faecalis
RKVIQQLKQQELKYTALYTDYAGHEKELTKELAETTLLPWSEDLDVSTFPILVVLGGDGTLHNVINSLLPYDSTIPLSYIPCGSGNDFARGVGLSRNIDKALHQILRTRRPKEIQTIHYVKANQEEIGLATNNVGLGLDAAIVEKTNESSSKKALNKFKLGSLSYISSIIHVFFRQKGFPILVEMNGKQYTFNRAFLCTVTNHPYFGGGVSIMPTANPRKAVVDLVVVERINIFKILWLIFLLLRQKQGKSKHFHHFQSSKIRIVSTIPQTIHADGEILGKRSIDMVYTTQKRLFWF

SEQ ID NO: 3617 - protein, 274 aa, Enterococcus faecalis
MMNYEIFLNKEDQRSYSLLRHLEESPTLSGTFIALREELSMSNFLVKKTLEKLKADIDNLKLSDSLTLVVSDVDVTLEIDGNYSSKLLLTKYLTESLSFKLVLSYFRGNYSLTKFAECNHVSTSVAYSTLQRLKKALKEYQIYFSKREIVGNQKAISFFLYKLFTLSNQPISELYSVKVYNEAKRVLQSVELNYTFTTYERRNFFHYLAIMINNEGRAVEGIDTRALNTFSEELIKKSQVAWALASKSLTYTIVFFLYLHGKLEKKYVMSDHGM

SEQ ID NO: 3618 - protein, 60 aa, Enterococcus faecalis
RKPSSKKSQHQVFFTDELFDASHITIVPNSTGGAGTEGQNTFYLNFIRELVGTAIYGRKN

SEQ ID NO: 3619 - protein, 142 aa, Enterococcus faecalis
LKYLAIYVRKMDKYKHLLLWSTLLLSFFQVTNVQAAEERNPIYNPTNPTEEIYPIENTGTPEKMEETNESTMTSETQAEESSEDVSKKEVTTNNPKTNEESLLPRKVSIKYFSRMNYLMLAISPLYQIAQAVLERRGKTLFT

SEQ ID NO: 3620 - protein, 185 aa, Enterococcus faecalis
  MISC_FEATURE (180)..(180): Amino acid 180 is Xaa wherein Xaa = any amino acid.
KKVEPNLLLKKVSPGQINARNVILVNLQNDQKTYINQVAFSAEITKKGHEEVLYKEEKANMQIAPNTNFSVPIALKGQPLKPGDYHLSMTVVGNKDAAGSFKKSINNESISFRNQWQFEKDFTINGEVAKELNEKDVTLEENHSNLYLMIGLLLLLIVILIIAWLIWRKKKQEKNEREIXRVLNF

SEQ ID NO: 3621 - protein, 266 aa, Enterococcus faecalis
  MISC_FEATURE (92)..(92): Amino acid 92 is Xaa wherein Xaa = any amino acid.
QPVGKTWPFFYASLARGIDDVPTMYKYNIILANSDGDDQKEVTVLNNLLAKQVDGIIFMGHRITDDIRGEFSRSKTPVVLAGSIDPDEQVGXVNIDYTEATKDATATLAKNGNKKIAFVSGALIDPINGQNRMKGYKEALAENGLSYNEGLVFESEYKFKARINLAERVRNTGATAAFVTDDELTIGLLHGMLHAGVKVPEEFEIITSNNSLLTEVSRPRLSSITQPLYDIGAVSMRLLPKLLIKEEIEEKTVVLPYGIDQKRSTK

SEQ ID NO: 3622 - protein, 206 aa, Enterococcus faecalis
KNAKFIHPATVSIMNDLLRSVVDSANTTKFKPTLAGLNPHLASADWVGKTGTTDEFKDSWLIVSTPTVTLSSWAGHDLPAPMTMTSGDNNGNYMANLANALYYANPELFGIGQKFELDPSVIKSKVSEFTGEKPGSITYNGAKFNTPGKTTTSYYAKDGAPQSTYKFGIGGTDSNYASYWGNLAPRATTNNNNNNNKNNDNKKNNN

SEQ ID NO: 3623 - protein, 241 aa, Enterococcus faecalis
MSKFMWGGIVMSKNGKVISIINMKGGVGKTALSVGISSFLSEKKDEKVLLIDSDPQFNATQAFIDPEDYLKSEKTIFKLFKPQTELHQSFVMPKREELVTKINKNLDILMGDLNLVLVNKSSDSGLIKRLKRFITKNNLRNYYDYIIIDCPPTLTLYTDSALVSSDYYLIPNRIDRYSNIGISSLNRAIGDLIDQEDLELKCLGLIYTMVQNHLSDKQKEVKAELESNKAMENIYVFKSST

SEQ ID NO: 3624 - protein, 178 aa, Enterococcus faecalis
NLRGDDRDLRIQKNYTRRLGERTDLSKGYISQLERDLSSPSMETFFSILEVLGVTPEQFFSQQPLEQKIVYNEEESTLYYDEEHGYELKWLIPASNEKEMEPVIITFDKNGEYKTFEPSLSETFIYVIDGSIRLTLGEATYIAKKGQTMYYQATEPHQISNNGRGKSRALIVATESYL

SEQ ID NO: 3625 - protein, 127 aa, Enterococcus faecalis
LWRQNRIYKGRNGGVYPVRNHVISFENVVKQFDDEPVLKNVSFEIEEGKFYTLLGPSGCGKTTILRIIAGFNDVTSGDVYFDGKRINDVPANKRQVNTVFQDYALFPHMNVFDNVAFGLKIKKLSKA

SEQ ID NO: 3626 - protein, 74 aa, Enterococcus faecalis
IEKKVKEALRLVQLPGYETREISEMSGGQRQRVPIARAIVNEPKVLLLDDPLSALDLKLRTAMQYELRDLQQRL

SEQ ID NO: 3627 - protein, 72 aa, Enterococcus faecalis
  MISC_FEATURE (64)..(64): Amino acid 64 is Xaa wherein Xaa = any amino acid.
ITFIFVSHDQEEALSMSDEIFVMNKRHIVQSGTPLHIYDEPINHFVADFVGENNIVDGVNAGRXFNFHWGGK

SEQ ID NO: 3628 - protein, 152 aa, Enterococcus faecalis
TIIILAIVVIALFIVWKYYAEALWLFINTALIAGVGNSLLKLFFMRQRPTLEHLVTEHTYSFPSGHAVGSTLFYGTILLILPIFIKNKTVRLCVQILLGIGIFMIGVSRIYLGVHFPSDILGGFCLGLAWLLLSYPIYLEKRFVWRFQSKQR

SEQ ID NO: 3629 - protein, 235 aa, Enterococcus faecalis
LFKRLKGLSERRKISDFIKLSDNDMISHLRMEGKYEFHQADDEIAKHTHVMFTFTDGTQLRYLDVRKFGRMTLVPKNQGHQYKGILALGPEPTPDVFQLATFQQGLKKHHKAIKPLLLDQKLVTGLGNIYVDEALWQAQIHPEQPADSLKPAEVATLYQAIIDVLARAVEAGGTTIRTYLNALGEAGTFQVALNVYGQTGLPCNRCGTPIVKTKVAQRGTHYCPQCQQLKGRRLK

SEQ ID NO: 3630 - protein, 229 aa, Enterococcus faecalis
MKKTVVYSLLFGTMLLGATVPAEAATVVFDSEQSIVFTPSTDGTDPVNPENPDPEKPVRPVDPTNPDGPNPGTPGPLSIDYASSLDFGSNEISNKDQTYFARAQTYRNPDGSASELATANYVQVSDLRGTNAGWVLKVKQNGQFRNAETLHKELTGATVAFTEPSVRSNATDVLPPTATANIQLDAAGAETVVMQAPEKTGAGTWITLWGQAEKVTAKNQQRRSSPRNG

SEQ ID NO: 3631 - protein, 119 aa, Enterococcus faecalis
KAVYQANSKEEANTFLSGMIEKWKKNYPKVTQSLIENQDLLTFYDFPPSIRRTIYSTNLIESFNKQIKRYSRRKEQFQNEESLERFLVSIFDTYNQKFLNRSHKGFQQVTDTLVSMFTE

SEQ ID NO: 3632 - protein, 253 aa, Enterococcus faecalis
RRMFAKTIIDSDAFLDMPLSSQALYFHLAMRADDDGFINNPKKLQRMVGCGEDDLKLLMVKKFILVFESGVIVIKHWKIHNYIRSDRYKPTLYQEEKNQIVEKNSKAYTFKAESSVGGQPADYQRLPQESIVQSKLGQSQGSSSENDCLKMIYHFYEENGFGTLASKTSQDFKYWLQDFIQKGASQEEACQLILHALGIAVDRNKRNYGYVNAILKSWEQQNYLSVHEVLVNDKKQVLEHAPQMTEEYQELGF

SEQ ID NO: 3633 - protein, 110 aa, Enterococcus faecalis
RKEEISMHATDQTFQILLSQLLEKVEDRCPECGSEQYVWQQKNKDGTERCAPTCWSCGYKMLKKHEQQANQQRSQESFMARTQKFFHQGSLIADDALRQCRLTNYQTTEL

SEQ ID NO: 3634 - protein, 143 aa, Enterococcus faecalis
PMEEINLHFTGDMHAITTANNALAALLDNHLQQGNELKIDSRRVIWKRAVDLNDRALRQVVVGLGGPFQGVPREDGFDITVASEIMAILCLAQNLTDLKERLSRIIVAYNDQREPVTVKDLNVAGALTLLLKDALKPNLVQID

SEQ ID NO: 3635 - protein, 300 aa, Enterococcus faecalis
FKSIEGTPAFVHGGPFANIAHGCNSILATKTALHLGDYVVTEAGFGGDLGGEKFLDIKVPSLGKAPDAVVIVATIRALKMHGGLAKDQLAEENLPALQKGFANLEKHIQNMQRYDVPVVVAINEFTQDTEKEIQLLKEACQALGVPVELTSVWAQGGAGGTNLAKTVVAEIEADTKQFQPLYNPRQTIEEKIQAIVQTIYGGEQAIFSPKAQKQIADFTKNGWDQLPICMAKTQYSLSDDPQKLGRPEGFTITIRELVPKIGAGFIVALTGDILTMPGLPKVPAALNMDVDETGPASGLF

SEQ ID NO: 3636 - protein, 236 aa, Enterococcus faecalis
YNRHCRIFHQIKIKEVNLLEKTHFSKKYLIVNEVLNAVTHGIGAGLSIAGLVILLVKGARLGSPIHVVSYAIYGSMLILLFLSSTLFHSLIFTRAKKVFQVFDHSSIFLLIAGSYTPFCLISIGGWLGWTLFSLVWLIAIVGIVYKSLTLHKQETVKNISTIIYIVLGWLCIIAARPLYESLGFTGTALLVAGGVSYTLGAAFYSLKNVRFMHVVWHLFVMLAAILSGFLFAHHGE

SEQ ID NO: 3637 - protein, 123 aa, Enterococcus faecalis
RKSDKFMTNVKIVTDSSCTMEKSLRDELNIHMMPLSIMVDGVVYPNDDHLPGEKFMDMMANAKALPKTSQPPIGEFVELYDRLGEDGSEVISIHMTKGLSGTVEAARQASNLSSSKVTVIDTD

SEQ ID NO: 3638 - protein, 305 aa, Enterococcus faecalis
LLNNKQTLFQELHTTDYKKHLHYLTERVTFNVSSFSFERRGIIMTTPVTGRIHSTENFGTVDGPGVRFIVFTQGCRMRCQFCHNPDTWKIGSGGRVVTTDEVLEEALRFRSYWGEKGGITVSGGEPLLQMDFLIDLFKKAKAQGIHTTLDTCGKPFTREEPFISQFDELMKYTDLLLFDIKHIDNEQHKLLTTQSNDNILEMATYLSEIDKPVWIRHVLVPQRSDYDEYLIRLDAFIKTLNNVDKVEVLPYHTMGKYKWEELGIPYPLEGIEPPKNDRVENAKKLLHVVDYRAYLARLQTGLDHG

SEQ ID NO: 3639 - protein, 144 aa, Enterococcus faecalis
SQYRGEEARSGKPLARAANPSYQEGKCLGEKNGLLASLNSTARLEYTIALDGISNTQTINPNGLGKDDDTRINNLRNVLDGYFDKGGYHFKIYLFTNELLLDAQAHPEKYPNLTIRVSGYAVKFRDLTPEQQADVISRTSHDRL

SEQ ID NO: 3640 - protein, 92 aa, Enterococcus faecalis
AERLPVGRSLWRPPSHCQGCHQPLQLYELIPVVSILLQRFRCRKCQQPVAKCYLLAKLVMGGLTASCFFAGLTIDALILWWWLNNAFHIILD

SEQ ID NO: 3641 - protein, 98 aa, Enterococcus faecalis
VSPNLKRGQREVSVQLDTPKIYSCSHRLGHNYWQKIVASATEVPVKNSPTNPVTKDPLVPWLPENNVRRLGKNKNKKDQSVSKTNADPQFSASKAQKN

SEQ ID NO: 3642 - protein, 132 aa, Enterococcus faecalis
TLKSFPGTLMDIAEFKDRNYDTLVAGGVPATSRPVLLGITKASLETNSFLSAASFQETTRVLTDAAIRGKKDPLLGLKENVIIGKIIPAGTGMARYRNMEPKEVGVASENVYSISDIEAQMAAEDAMKNINK

SEQ ID NO: 3643 - protein, 308 aa, Enterococcus faecalis
MQKSYKLEGLDCASCADKIEKSVQKIHGVEKARVDFMAEKMTLEVESGHDLEVENEARAVIGKLESDVKVISLKDVKEEEGRNPNKNRLIRIIIAFVLFLALIIIKPSNNWVALASYLVVYVLIGGDIVKRAVTNIFRGEVFDENFLMSVATIGAFFIGEYPEAVAVMLFYQVGEWFQSAAVDQSRKSIAKLMDIRPDSANLLVNGQIKAVAPDTIEIGQQILVKPGEKVPLDGQIIDGSSMVDTSALTGESVPRTVKVGDEILGGFINKNGALTINVTKKFGDSTVSKILDLVENASSKKAPAEEFI

SEQ ID NO: 3644 - protein, 435 aa, Enterococcus faecalis
ILVATVRIIMEKENRELKGISFTKKMVISLVGGLIVGLGFLFLREHLIRSNQGAVWQTINQILFQDISDPEKGQSAIGLFYIIGQLFINGLQLVIVPMVFTSITLAICHITDTQKLGRISYKTIFGFLSMSLIALLTAGIVGYSVYLTGAFNVSLSETLAPVEVSTSGNPLMVIVNAVTKNIGSAFSDNGAILAVVVLAVITGLCINALGDKIRVFKKLIEEVNAMVTLFLTFVITKFAPIAVFMLLVRTFASYGIDYLKPALVYVVTTTATLLAFLMIGYPLFILFATKLNPVPFIKKIMKVVVFGFSTSSSAATLPLNTKTTVEELGVDSDVAAFVLPLGMTINMNGTAIMQVIAAIFVAGVAGYEVTPANIALIAILALMSSIGTPAAPGAGGIILFTILTGLNYNNEIAIATYSLILAINRPIEMLVTSLN

SEQ ID NO: 3645 - protein, 288 aa, Enterococcus faecalis
PALNAWWANDEKVQRILANNYDWLGELSLIDFLRDVGKNFTINYMMSKESVKRRIETGISYTEFAYQLLQAYDFLKLYETEGCLLQLGGSDQWGNITSGIELLRREQEVQGFGLTMPLITKADGTKFGKTEGNAVWLDAEKTSPYEFYQFWINTDDRDVVKFLKYFTFLTLDEIATIEEEFTANPGQRAAQKALAKEVTTLVHGEAAYHQAVKISEALFSGDIQSLSAEEIKQGFKDVPTYEVQPEDPLSLVELIVTSKNRTNPDVQPRERCSKWERIYVNGRPWHQN

SEQ ID NO: 3646 - protein, 138 aa, Enterococcus faecalis
ESEAKVVDGEIRRREIVKRLRETEKPISATRFAKAFDVSRQIIVGDVALLRATGVEIVATARGYMLEQPLEGIERKIACQHTPEQTREELSVIVAKGGEVVDVSIAHPLYGELIGSLRIQSEKDIDKFMDKYHKEHAT

SEQ ID NO: 3647 - protein, 214 aa, Enterococcus faecalis
FQGDYGYNISVGKNFYANFNNVFLDVCPIEIGDNCMFGPNVQLYTAEHPLQAAKRNSGMESGKRIIIGNNVWIGGGAIVLPGVTLGDNVVVAAGAVVTKSFPENCVIAGNPARIIKELTEDDAPTTSLEQQRAKINQIDKELVRLLEQRMDVVAEIAAVKKKAGHAVFDSEREQQVLETILNHVENAEYEETLSETFQGIMDAFKRFQEKHLGE

SEQ ID NO: 3648 - protein, 280 aa, Enterococcus faecalis
IGAIVMNSLGAVIKEIRKNRKLTQKMLSEDICSQSVLSRIENNEELPNVLVMQQLCDRLGVTVDQIMRYKSGDVHVVTYSFEKMAEYFRHKKYQLLLNYLKENRIEEQLYLDTDWQKYYYYLGSCELFVLNDYEKAIASLRKGLSFTYKADKLNVSDLEIQLISCLGATYGYMGNRVEAERFLSLSIHYFNQLPNERSNAELTKIFFNYADFLFKNYTEKDAEIYVDQGITWARKKNSYYYLSELLNLKYLVLMRKNKHEEAERYLNLAQQMKNVESGNL

SEQ ID NO: 3649 - protein, 169 aa, Enterococcus faecalis
  MISC_FEATURE (110)..(164): Amino acids 110, 128, 144, 147, 150 & 164 are Xaa wherein Xaa = any amino acid. 1               5
NKERRMKMKTFIFADKFFLKSDVKGPGYLEITDGIFGNYTKDEPQGDVKIIREEGKWIAPGLVDTHIHGYMNHDVMDNDAEGIKVMSEGLLSCGVTSFLPTTLTSSKERXTDVARTIGSSLQRSTGAXIQGIYFEGLSLLKNLXAHXIKXFWENPTLILPRNGXNSPAN

SEQ ID NO: 3650 - protein, 103 aa, Enterococcus faecalis
  MISC_FEATURE (94)..(94): Amino acid 94 is Xaa wherein Xaa = any amino acid.
FLTPWPTFVIGLSLAIPMTACAYTIEADPINFTYFPGSASNELIVLHESGNERNLGPHSLDNEVAYMKRNWSNAYVSYFVGSGGRVKQLAPAGXNSIWRRFFS

SEQ ID NO: 3651 - protein, 273 aa, Enterococcus faecalis
  MISC_FEATURE (5)..(5): Amino acid 5 is Xaa wherein Xaa = any amino acid.
LLLAXIQYGAGSLANQKAYAQIELARTNNAATFKKDYAAYVNLARDLAQNIGADFSLDDGTGYGIVTHDWITKNWWGDHTDPYGYLARWGISKAQLAQDLQTGVSETGETVIIQPGKPNAPKYQVGQAIRFTSIYPTPDALINEHLSAEALWTQVGTITAKLPDRQNLYRVENSGHLLGYVNDGDIAELWRPQTKKSFLIGVDEGIVLRAGQPSLLAPIYGIWPKNTRFYYDTFYIADGYVFIGGTDTTGARIYLPIGPNDGNAQNTWGSFAS

SEQ ID NO: 3652 - protein, 188 aa, Enterococcus faecalis
IFLCYKHKFSIFGSGGTIMDGILPLWKERGMTSHDCVFKLRKILHTKKIGHGGTLDPDVEGVLPICVGKGTKVIEYMVDSGKTYEGEITLGFATTTEDVSGEIVEKKLVTAPLSTEQIDQAMAEMTGEITQIPPMFYAVKVNGKRLYEYARNGEEVERPQRKAMIYSFERTSEPIFNESAHTQSWRFK

SEQ ID NO: 3653 - protein, 132 aa, Enterococcus faecalis
RMNRKEKTNLDSRIDYGVILPVFLLSLIGMLSLYVALYNDPSKPKIGSLLMKQGLWYLVGGLSIVIIMHFSSKLLWRLTPVFYALGLVLMGLLLKFYDPVLAEQTGSKNWIRFGGTTFQPSELMKIAFIFMS

SEQ ID NO: 3654 - protein, 220 aa, Enterococcus faecalis
KDSLKDGNLSVYQSELISEHLLSSHNEAITATKTLFFSYMPFTISDEEFYQEIVPIIYQHRFITPFIDITLRIMDLEFFQERYPIVFNSCRQFLFALDCSAFEFSKLSLFFDLLLVLSRLYDQRNEKSTINLYVNFTQGEKYTQFIKEQIKIFESFSIHFHSAIRPDTDLVVSDYLPKTLFSVKCLIWLAPPRASDWQNFGNEIVRINKELQQTKQRKSE

SEQ ID NO: 3655 - protein, 84 aa, Enterococcus faecalis
TESKGKSGDLMQSRKVLWDTKKGWKHRGKFPTWVSNFSRKRKRKQKEAGCDEWTGVQAYNYGLDYIQFVNEPGGIQSAETHPSH

SEQ ID NO: 3656 - protein, 77 aa, Enterococcus faecalis
HRTYLKRKSLDDSMRRVRKIIYKIMLLLFVGLVAGLGYLGYKIHQNVETVMTFEKQVEAEVKKNKIPEYKTLALAII

SEQ ID NO: 3657 - protein, 315 aa, Enterococcus faecalis
KNPVGNHPMMLVFQGLFFAAIYYFGFGLAITKFNLMTPGREEGDGEETPDVAEGDNKFASLVRRIYDGLGADANVTSIDNCTTRLRLTVNDTGKVDQAKIKATGFPGVKVIDDTNIQVIVGTEVQFVADEMQRLYNHQAPATPVKETPVSQSVVEEKAPVSTKETELYSVANGKVIPISEVPDDVFSAKMMGDGFAVVPTDGEVSTPVAGKITSIFPTKHALGIQTDSGIEVLLHMGLDTVELQGGPFTLHVEEGQVVKQGDKIATIDLAALEQAGKKSDLIVVFTNQDIVAQYDLQKAGQTTSMNDVIGNVTVK

SEQ ID NO: 3658 - protein, 227 aa, Enterococcus faecalis
PPCGEDGRGGADVCDGARRMKKLQVLLSQIEDKYFLASEEIIQHAETVLGEKLNEHINIGLSDHIAFAAENIQNNIIVRNKLLSEIEILYSEEFAIAQWAVEYLTQTLEIPFSYDEAGYIAIHIHSARSGRTDNSKSIREVTIVSEIIHLIEQELAIDIHDDKNSLSYSRLVNHLRLFIHRFQQNQYAVLDEEILEVVKKKYAESYEISKKVQVLLMRNFHYQVPNE

SEQ ID NO: 3659 - protein, 204 aa, Enterococcus faecalis
KLNSLCEELRIMKAYMQRMGRSLMLPVAVLPAASLLVGIANWIVGTIGASPATTFLMNGGLAILNNLALLFAVGLALGMSKDKDGSAALAGLVAYLVPKTVLAPASIQAIKGFKDIAEVNPAFNSMDNNVFVGIVAGLVAAAMYNRFSGVKLPMALSFFSGKRLVPIMSAISMLAISAVLFFFWPVVYNGLVAFGKGISSLGFV

SEQ ID NO: 3660 - protein, 202 aa, Enterococcus faecalis
RLTVNVLGEDHMLPKYEIIKRDIIEKIESGEFSTGEKVYSEGDLKRKYNVSNTTVVKALNDLVNEGYLIRRQGEGTFVRKNLKHRKVFFSEKLSMSNNEKQKSVEETITLVSEEFTDKEIAQILGDKSGSKALLKLTQIALTNDFPWKIQNRYLFADKLRDDSVKRLIEGASLSDELGLQGNMANLPDDDGGEHDFINEGFR

SEQ ID NO: 3661 - protein, 63 aa, Enterococcus faecalis
KRTILFALRISINKKAILPPLFLSTINKTICSLIHLTKSKFTTTLDTVHFIYTINKSVKFYDY

SEQ ID NO: 3662 - protein, 87 aa, Enterococcus faecalis
NFMIINEGSVSMAKSLICLFRERKYRCNQYIVQNFQTVIFFILVFYFLLFGFGPQYLIFVSIFTVMFKLNYKKKLHFLGFDKVRIIV

SEQ ID NO: 3663 - protein, 354 aa, Enterococcus faecalis
YEKYCTESKGSKKKILAYINNNLQNLIVRNVIRPTQRYADMLEFSYHPNCFSNAIEREKVLHNMWAYPYKNKKVVHYEFSDLIDGDIPIFYNNISKTSLIASDGCLVEDFYQESALNRCLNKINDLCDEDISIQTVWLEIALNIYNPYKYINDLKNQNSNKYIYTGLELNGKIIQACQKIEKKIFKRAIFNKKTNTVNWIDIKLDQDWNVGILNNNMYDGLPGIFIFYVALKYITKNHKYDYVIECIKNSIYTIPSEDILSAFFGKGSLIYPLLVDYRLNNDINSLNVAVEIADMLIEKKPINNGELKNDWIHGHNSIIKVLLLLSEITEDEKYRKFSLEIFEKLSEEPYFNFR

SEQ ID NO: 3664 - protein, 409 aa, Enterococcus faecalis
RISRISKKKSFELYSQKMPTEEQQQFTDFFSSLNRMPLTKKNDVEIFTDGTEKFNALMADIKKAQHSIHIEYYAFVTDHIGTKILNLLEKKAAEGVEVRLLYDAFGSKGTKVHHLNELKKNGGFVQTFITSQKALLKFRLNYHDHRKIVVIDGKVGYIGGFNVADQYAGTTKKFGYWRDTHLRIQGPAASLLQMRFLMDWNVSSPEKNRVAYQLDYFFKLEALVPEANTSIQMIASGPNSDREQIKLAFIKLITSAKKRVWIQTPYLVPDDSVLAALKVAAASGVDVKIMIPDKPDHPFIYRATQYYGRLLMKENIEILIYNGGFLHAKTMIMDDEVCTVGSANQDIRSYKLNFEANAVLYDKKIIDQLEAIFLEDRKKCTTMTPEVVRDMSKWLIFKQQISRLFSPIL

SEQ ID NO: 3665 - protein, 281 aa, Enterococcus faecalis
GGYFRMKKRLLPIFFLILLTFGLALPVSAAENSIDDGAQLLTPDQINQLKQEIQPLEEKTKASVFIVTTNNNTYGDEQEYADHYLLNKVGKDQNAILFLIDMDLRKIYISTSGNMIDYMTDARIDDTLDKIWDNMSQGNYFAAAQTFVQETQAFVNKGVPGGHYRVDSETGKITRYKVITPLEMVIAFAAALILSLVFLGINISKYQLKFSSYQYPFREKTTLNLTSRTDQLTNSFITTRRIPKNNGGSGGMGGGGSTTHSTGRGTFRWGVSKFLQFFIFF

SEQ ID NO: 3666 - protein, 129 aa, Enterococcus faecalis
KKLEAETLTFCKECAILIEEVRKMEKVKTESFVLCPKFEKSFSILGKKWNGLIIDVLLERGPQRFGELKEKIPMLSDRVLVERLKELEAEGIITKAVRCGEGNRLEYFLTEKGEDLDLALELAFARDGP

SEQ ID NO: 3667 - protein, 128 aa, Enterococcus faecalis
  MISC_FEATURE (21)..(34): Amino acids 21 & 34 are Xaa wherein Xaa = any amino acid.
TPPLGKQLIPHHQTVRREQPXSMLIEAEELIQNXPETTQDDLLIHGIIDGYIELDNQCILYDYKTDHVKGTSPQAISEIVERYRGQMNLYRRALQEATHKEVSHVYLILLNGGVIIDMQTGNVVDFIK

SEQ ID NO: 3668 - protein, 398 aa, Enterococcus faecalis
RENRMEAYKQSVDTVTKEVSVNTETGLTQQEAQQRLKENGRNQFEEAKKDSVLKKFIHSLSDFTTIILLVAAAISFYTAIVTEHGEYFEGILIIAIVIINAVLAIVQEGNAEKSLAALQDMNKQSSVVLRDGKVIEVDAEELVVGDVLVLEAGSMITADARLIQASQMRVEESALTGESEPVEKDPTYVGHDDDGLGDQINMIFKGCTVVNGRGRAVVTATGMNTEMGKIAGLLNNSDQQKTPLQKRLNQLGKRISLLALGAAAIVFIIGELQGEPLLEMFMTAVSLAVAAVPETLTVIVTLTLAYGVQKMAKKHAIIRRLPAVETLGTANVICSDKTGTLTQNKMRVRRVWHRGDEVTDTEDAMTDEAMEVLKMAALCTDSIVEQEVEDANAGYAHP

SEQ ID NO: 3669 - protein, 241 aa, Enterococcus faecalis
GPIRGEELHFTRLRNDKPAYVELNNEVLKEIPLNPGEYIAEDISCLYDRELSVLMVQRNIHSLSPSGIEDYFTEMSDDLVEIELLPVVNKEIISKALANEKFRKLELRAGSMNTTSDRSGLRKVLGPFMELFEKFEGTNFVIEISSGRSKKDLSEDQMKEVITAIEQDKSLFSSAIVSAKKSKEVPVEKYDLINGKLYVYRSFDLPDGAFLKSDSVIDNIKNYYFHPNEGGYRKQIIDAVK

SEQ ID NO: 3670 - protein, 83 aa, Enterococcus faecalis
DIMNKEHHIFFWIFPFLTGAVFVLICSLTQFSYNDKGFDNLLDSMINFTSIIIGFYSAFYGILITIKDTSFMKNIRGSAIEKN

SEQ ID NO: 3671 - protein, 285 aa, Enterococcus faecalis
GGKTMKKVLMGVLSLGLLLGAATGCTSDQEKAAGKTKASSEKTEATSGASANGYTDPSELKDSYDVVIVGSGGAGMTAALQAKEAGMNPVILEKMPVAGGNTIKSSSGMNASQTKFQEKEGIKDSNDKFFEETLKGGKGTNDQELLRYFVDHSAEAIDWLDTKGITLSNLTITGGMSEKRTHRPADGSAIGGYLVDGLVRNVREEKIPLFVDADVTDLVEENGQIDGVKVKMKDDKEKTVKAKAVVVTTGGFGANEKLITQYKPELKNYVTTNPEGTTGEGSQMA

SEQ ID NO: 3672 - protein, 286 aa, Enterococcus faecalis
LSQSSVGHKSIRPVSHVLSFFMSSFTKLINNWRYFMNKFFTAQRLKDTAYVTVGAFILAISINAVLLPNKLVAGGANGISIVINYVFGISPAIVLYAINIPLLVLCFLLLGKEVGVKTIYGSLIYPFFVGITSGMPVLTHNIFLAALFGGIITGAGLGLVFRGNASTGGTAIISQIVNKYFKVSLGIAILFVDGLVILSAMYAFNADIVLFSLICLFTIGRVVDMIQVGLVRSKNVMIISPKYVAIQERLLRELDKGVTLVPIEGGYRNAKGMLLMTVIREKDFPA

SEQ ID NO: 3673 - protein, 274 aa, Enterococcus faecalis
MSEQLTRSSKHIQKALKKQKAYKRATAVAGTSMILAPVVGAAVPAQAESSQQAFINEIGNSAAAVANSNDMYASVMIAQALLESSYGSSGLASAPNYNLFGVKGSYNGQSVYMPTKEYLDGQWVTVTAAFRSYNSYAESFQDHANVIRSTAFGDTYHYSGVWKSNTSSYRDATAALAGSYATDPGYAEKLNWLIEAYNLTQYDWGAPVAQTTSYSDTTGTVDTTIDTAAFATATAETVASQSYTVANGDTLWDIAARFGTTVDNLISDVPHGTS

SEQ ID NO: 3674 - protein, 116 aa, Enterococcus faecalis
MKKQQSGLTNQVTFLLALTCGVVVANMYYIQPIGTQIAQAFQVSIGSIGFVTMLTQLGYALGLLFLVPLGDVVDRRKLIIRVTALSSLSLSAAFFAPSFLLFCTLFLFLIGAGSLL

SEQ ID NO: 3675 - protein, 567 aa, Enterococcus faecalis
IDQWNLKNEATAKNLDKVKRLLQVPYFGKIGVTFEDSPEEPENFYIGVNDFTSLEEETRIHDWRSPIASLFYDNVLGKTAYTAHQQTIPVQLDLKRQLIIEKDQLINYFDTTIAIQDDVLLHSLEEDASPYMKDITTTIQQEQNQIIRDETQPLLLVNGIAGSGKTSAIMQRIAYLLYQHRAEITADNILLLSPNSTFIDYISQVLPNLGERNPLNLTLLQFLRFTTKESWPMEEETDYFERITRSEATEQEHVIRSKEFATFLLSNPEKAVVQPHFFRPLTFKKQTLFTSETIFKLYQETPADLSIRQRISATKEKLTSLWTRYLLKQAHSKKMLDQFQDLTEAEQVRYFGTVITEDNEKHLADFALKRLKKKYRSITAAIKNDAWLDQWAFFETFYSLFTEKSYQKETAVFTADEIVALILVKHAFIENLANQQMAFILVDEVQDYTEAQLLLLLTLFPKASFTLAGDENQAIFNTAIEFSEAHDLLVNETSRSVGTYQLLNSYRSSIEITRLFQTLRTQPDQLTIVPIRHDGEYRHLFLVTLRLTILKQPSLPLQPLNSKKAPP

SEQ ID NO: 3676 - protein, 164 aa, Enterococcus faecalis
  MISC_FEATURE (123)..(123): Amino acid 123 is Xaa wherein Xaa = any amino acid.
QKYSPLKRQNRFCSADYQSLLIEKRQNDQSDKKFKGEKKMNKKVFSFSLLLVTLFSLLGMTTNASAEENGEFRVGMEAGYAPFNWSQKNDAHGAVPIQGNSYAGGYDVQISKKIADGLGRKLXIVQTKWDGLAPALQSGKIDAIIAGMSPTAERKKEFAFTNPL

SEQ ID NO: 3677 - protein, 102 aa, Enterococcus faecalis
GDTTMVAFIIYWAAIIACIAWGVLSIWFSVFYLSRKENGNLWAFAFFNVIAIIALAIVLLVYKTWDFGILTYSSLIYTILASLGVLTVLQAILGREPKAVKA

SEQ ID NO: 3678 - protein, 250 aa, Enterococcus faecalis
KCVEIYVFLAYTDEVKKRTRSVRMNKKVPYLIVAPGLVLLLFFLMIPLITSILPTIFTDHGLTLNQYVTFFKDDYNVSIFWRTIRVSLIVTGISIVLGIPTAYFIAGVSKKWRGFLMAMTLFPLLTNSVIRSFAWINILGKNGVVNTLLLKTGLIEQPLNLLYTEFAIIIGSVYLFLPTMIMTLVGVMENIEGEMLEAAETLGANPMTAFRKIVLPLSIPGTIVGSILVFTGTLTAYTTPQLLGGNQKMM

SEQ ID NO: 3679 - protein, 150 aa, Enterococcus faecalis
KKSSGITNEKGEEEKTLSKCFGLLVILFVLTGCSGSRNSQQEVVIEKSANNDKARQFVDQKNPHLGTQLEAEFYTKQEAIEFLQNGLGIPTNDSAFHYTFKQSNKGSYVVQIRSEKNSVSKENELFGYYQVYQDGIIVKMMEKDQTFQEN

SEQ ID NO: 3680 - protein, 252 aa, Enterococcus faecalis
KNREEVHQPKITYEQRFNANDSTSELMAVNQQAGQKPVSVHPELYQLIALWKKHSCDPASHLNVTIGPLVQTWRIGFKDARVPSEEEIKACLKKINPEKIHLNPLKQTVFLEEEGMKLDLGALAKGYIADLLIAYLKEVHVTSALINLGGNIVTLGPSTHQNKKWRIGIRNPQESRETISLLVEVANQSVVTSGIYERSLTEAGRVYHHLLDPTTGYPLETEMASLTIISDASVDGEIWTTRLFGDPIPQTL

SEQ ID NO: 3681 - protein, 224 aa, Enterococcus faecalis
QRVSRYSSHYPFIEPKKKGQLIMKKIIGLVGTNSEQSTNRQLLQFMQHYFAQEADIELVEIVDFPMFNKPEDKVLPEIVKTVAEKIEAADGVIISTPEYDHAVPASLMNALSWLSYGIFPFVDKPVMITGASYGTLGSSRAQAHLRQILDAPELKARIMPSSEFLLAHSLQAFDENNALKDSEQIDKLAGLFADFCVFIEITEQLKHAHAQNKKEAENFSWETI

SEQ ID NO: 3682 - protein, 99 aa, Enterococcus faecalis
RNGVNKMKLIGIVGSNADSSYNRLLLQYIGKEFYKMFDLEILEIKDIPMCNQSKDQTNSVLIQNMNRKILQADGVIIATPEHNHTIPAGLKSVLEWLSF

SEQ ID NO: 3683 - protein, 66 aa, Enterococcus faecalis
LPVVKTVNVTEVEQTLMRKVPKELWVKTHHTMIFFGRYHCLARAPKCEACPLLYMCQEGKERMKGK

SEQ ID NO: 3684 - protein, 232 aa, Enterococcus faecalis
RKIGDEMTENAPKFKQISAEIEKKIRDGLYVSAQKLPSEYDLAKEYNCSRLTIRKAIDDLIRKNILVKRHGKGSYVMSQAKIQSGRAGLQGFTEAAKAYGKKSQTEVISFEEVVHPAEKIREALQVGKNEAIYELIRRRMLDGEPMTVEKIYLPQAYVQGHTKQDFEGSLFCLIEKNVEIAYSHQEIEAILVEAEFSEFIKISCWGQPLLKVPLLSPMPPETTPQIYMEVPL

SEQ ID NO: 3685 - protein, 226 aa, Enterococcus faecalis
FQQTKFLKNQINLQSIWINTNTIGATSMFSTMMASSLIKAYRNKVFNLLLLPVYIGGVLGTWVSQSKTSFAILVGFILVDNLLPKRFLQRSKVWLFGFVGVAALGPLLFYLCAESDTVDLFTGRERIWHEFFAKWLSDPQHIKVGMEPFVASWKPLGTHNAFLFTLSNFGVIGYLILFGFLVSMILLIGFRKKTLDRLQVSLLLGFLLIWIHSFMEDILLAPPWML

SEQ ID NO: 3686 - protein, 433 aa, Enterococcus faecalis
TISYKEIIINMEGDNMNIIDELAWRDAINQQTNEERLRELTENTSISLYCGVDPTGDSMHIGHLIPFMMMKRFQLAGHHPYILIGGGTGTIGDPSGRTTERVLQTMEAVQHNVDSLSNQMKKLFGKDAEVTMVNNYDWLSELSLLDFLRDYGKNFNVNTMLAKDIVASRLESGISFTEFTYQILQSIDFYTLHKKHNIQLQIGGADQWGNITAGLDLIRKKEGPEAKVFGLTIPLMLKADGTKFGKTAGGAIWLDPKKTSPFEFYQFWLNQDDRDVIKYLKFFTFLDKEEIDALAEKVEKEPGKREAQRRLAEEVTRFVHDDAALEEAQKISEALFSGNIKDLTIEEIEQGLEHVPTVEITKDAKNIVDWLVDTEIEPSKRQAREDVSGGAISINGDRVTDLDFAVDPTQHFDGKFVAVRKGKRNDFLAKVMD

SEQ ID NO: 3687 - protein, 91 aa, Enterococcus faecalis
SDAAMVTTLYDNEEGAAVLINSNFAVDQGLNPKKDAIALEKESSPYANIIAVRKEDENNENVKKLVKVLRSKEVQDWITKKWNGAIVPVNE

SEQ ID NO: 3688 - protein, 282 aa, Enterococcus faecalis
LKYNFWNGGKKMLRFFPQKNKYVEEASQYAFDKQGQIPQHIAIIMDGNGRWAHNRRLPRIAGHKEGMDTVKKITKHASHLGVKVLTLYAFSTENWKRPTDEVNFLMQLPVDFFDTFVPELIKENVKVNVMGYQEFLPSHTQDTVKRAIEQTKDNTGMVLNFALNYGARAELLTAMKQIAAEVSEKAYTADEITEETIADHLMTGFLPTELRDPELLIRTSGEERISNFLLWQIAYSELFFTKALWPDFSGDTLETAIASFQNRNRRFGGLKETTETEGSDPQ

SEQ ID NO: 3689 - protein, 65 aa, Enterococcus faecalis
SSFWWSKRNYRNRRERSAVRQRVITAIVALIIFIPIIWYGGFAIEIAAVALAVVGVYELFRMKGL

SEQ ID NO: 3690 - protein, 347 aa, Enterococcus faecalis
LLAMISNYESGKTIPRADSILKLISVLQFPRSFFSADTFELYSGATFFISRIAATNKVTDMQKERLKYVQEVYKVLATYVNFPKVCLPELIEKSIYEITEEEIVKKAEELRKIWGLDLISPVPNLIQLAEQNGVIISEANMSNPTLDAVSRWMIGRPFIMLTDNHESAVRRRFNVAHELGHILLHNGVESIHEYSQTELKNIIEYQANLFAAHFLLPSAAFSDSLLSISLEYYIDLKKYWKVSLQSMIQKIYTLALINDDQRLYLNKRIAKNKWKTKEPYDEQLTIEQPEVFQKVYHMILEHQVIPASQLNQAFKLPKEEIEKILGTAIQTEQDKTEIVLELLRSNK

SEQ ID NO: 3691 - protein, 133 aa, Enterococcus faecalis
EQLFKRSRTKQKLFLNYYVLTSNQKEGGITMAKLFAYQIGQNPRIQTDLLVDPQLFEDEHGCMGAVGFGLADCVQTGMFTDIEVIKRYLHEATYVFINGDFDRLSYLEIGIALSVAQNTLFDVSTTGKGSHGR

SEQ ID NO: 3692 - protein, 362 aa, Enterococcus faecalis
  MISC_FEATURE (325)..(325): Amino acid 325 is Xaa wherein Xaa = any amino acid.
QKKLKQLVKFKKDKRGKYYFTASLGFDEVTGKRIQKMRSGFSTIKEAREAYAEIISNFGKEAYSSNSTMLYEEFFYTIFLPYYKGRVKERTYNNRLSTIKNTFAYFFKMKLKSIAPVHIQKWQNELLEQYENTYVRNIYGLFQMSLDRAVVLGMISSNPAKIVGNVKKSKKEIDFWTKEEFEKVIKTFYIEDYYQNFSFICIWLLFMTGMRIGEATALTWKDVNLDGRYLTVKNSLYYKNAQTYEFVSPKTRASIRTIYLDEDTVHYLRDWKKRQDDVGGIEFVLSYNSVPTQKHTVRHIIKRHAKLAEVHDIRIHALRHSHASXIISMGTNALLIKDRLGSEEVQTILGTYGHLYPSNSLE

SEQ ID NO: 3693 - protein, 101 aa, Enterococcus faecalis
QLVLKMALQLDNGAEILLHIGINTVELKGRAFETFVKVGERVRLGQKLLSFDKQIIQAAGYDPTVLVIVTNTAEMAVIETTKQTEITPQTNLFFMQVKEQN

SEQ ID NO: 3694 - protein, 492 aa, Enterococcus faecalis
DNQTNRDYTTNKFIFHASKGAKLMVKQFKNDFLWGASSSAFQIEGAWNEDGKGLTVADYNSFKKSAVQADTKVASDFYHRFKEDIALMKELGLKTYRFSLSWARIIPTGDGEINQAGIDFYNAVIDTLLENDILPFVTLYHFDLPFALVEKYNGWADRRCVSAFQRYAQVCYQAFGDRVKNWQVTNEQNLMIRVDERMNMYDVAPENVEKIRAQMDYHMFVAHALATNDCHQLVAGGKVGPSVSSTMTYPSSNKPEDVWAARMNDNFKTNYALEMYCFGEYPGYYQEYLTKCGIYPETQPEDQAILKAAKPDFIALNYYRTLVASYLPTDEQHPLGTKEKDIDFDLYGYFKIEKNQHLKTSKYGAQIDPTGLRLVLNDYYRQYRLPLIITENGLGTPDHLTEDGKIHDDYRIAYLHDHIAACHAAISDGVELFGYCPWSVMDILSSHQGFKKRYGFIYVNREDHELKDLRRIKKDSFYWYQSVIKNNGLSEE

SEQ ID NO: 3695 - protein, 133 aa, Enterococcus faecalis
DSLPLEPARVQAVHQELKQQITWETLGYSTIDAQNIATRFTQNTYQALGILTDIANHSDLQLKVITINNPYLATAKIGTFKWETVTPEVGGDHETADNELTTPTPTVASLQEIDVEIEYDENEIEFTYEIKSN

SEQ ID NO: 3696 - protein, 75 aa, Enterococcus faecalis
TIEATYEDESADLELEGKAAQDKIMTLLDGLSIKTATNEQIKEHITKKLAVNEQVKQFEFEANFTDKTEIEFVLK

SEQ ID NO: 3697 - protein, 79 aa, Enterococcus faecalis
  MISC_FEATURE (68)..(68): Amino acid 68 is Xaa wherein Xaa = any amino acid.
YNSAIKTALTKMSMLFFYERIEIFIRMIEKLSLIRPGCDNIVMQVKGSVNMPEKLQLVIITGMSGAGXTFAVQSFEDMG

SEQ ID NO: 3698 - protein, 208 aa, Enterococcus faecalis
VTCGEQRLVPVQARGTKVLLSILGNHEGAGFANFPTYESADAFAAQLEQVVNTYHLDGIDFDDEYAEYGKNGTPQPNNSSFIWLLQALRNRLGNDKLITFYNIGPAAANSSANPQMSSLIDYAWNPYYSTWNPPQIAGMPASRLGASAVEVGVNQNLAAQYAKRTKAEQYGIYLMYNLPGKDSSAYISAATQELYGRKTNYSPTVPTP

SEQ ID NO: 3699 - protein, 402 aa, Enterococcus faecalis
SLPWCKTDFMAVYSEPIKWAIIIFPFLAFFISGALLIYEYRKYGSFVWTRAMILYSFVFYLLCAYFLVILPLPSRAEVAQYTGPTMELRPFHFISGILNETVFSIKDPSTYLPALKQHAVLEPLFNVLLVLPFGVYLRYYFKCSFLKTVLASFLLSLFFELTQLSGLYFIYPRSYRLADVNDLINNTVGGIVGYWLTPLFTFLLPTREEIDATSYEKGQTVSLLRRFFAWGIDWLVIGFVQGLLVFGLNFIPAYKNWATNYPIFSDRMWFFIMVFAVFIVMMKLTNGQTLGKKVVRIRVVETGHEKIRLKALFVRYGYLYFVYGLISIYLANATELLNSSNRMLQMVSLLLYLFCLILYLLFLINVLLTLIRKKRRLFYEKASHTYTVSTLEVAKTKESAGE

SEQ ID NO: 3700 - protein, 263 aa, Enterococcus faecalis
DNGNTHFVGEKAVDGDETTRWSADKQDEQWLIVDLGEVKNIGELVLQLHAESPVYEILVSTDGESYQSIFKEKNGKGGQPTKKYIDGNNVQARFVKYQQMKMWQHTNKQFYSSSIISFEAYEKKRLPEAIKLLTENLTISEKRKQQLAFEVSPAGVDITEDQIEWSSSDPTIVTVDQTGNLTAVKSGEAKVTVKIKGTEISDTIPVTVVAENKQYAEMRAKWKMRLLGTTQYDNDADVATVSCPQLVPEKILVCGGNIFFLPP

SEQ ID NO: 3701 - protein, 70 aa, Enterococcus faecalis
KTTFWGDETTTELFEKPEVYDAIVKGIEFMIDTKKYYGTYYTGNWWDWQIGSAHPLTDTLILLHDDLLNT

SEQ ID NO: 3702 - protein, 151 aa, Enterococcus faecalis
VKTMEIHFDKVTSDNRKAVENLQVFAEQQAFIESMAENLKESDQFPECESAGIYDGNQLIGYAMNGRWQDGRVWLDRFLIDQRFQGQGYGKAACRLLMLKVIEKYQTNKLYLSVYDTNSSAIRLYQQLGFVFNGELDTNGERVMEWTHQNK

SEQ ID NO: 3703 - protein, 85 aa, Enterococcus faecalis
TRGEFMKTKIGKTVILSAFLFTSFLLLSGCTSAGEEMEKTIDRQKEKVDKTVDKQKHKNENSMESYDEKVDRSLDSQEDKIDTTE

SEQ ID NO: 3704 - protein, 165 aa, Enterococcus faecalis
PLKCNTAVVLVLILNLVKEADKMSVYQHILVALDGSDQSEKAFHEAVRIAKEEQATLYLATIINDAEFTTSPFSFEELYDLEKHKSEEMLTGKAKQASEIGVKTVKKIVELGSPKRYLANTISENYAIDLIVLGATGRGAIQRTLIGSTTDYVVNHALCNVLVVR

SEQ ID NO: 3705 - protein, 191 aa, Enterococcus faecalis
IQFVVATAILANCEDWVVNTGVFYVFVADLYRHATILSKEGQSLEPLKTPESLLVAAVDTTIAAQNMAIAAESMDLGICYIGGIRNDLDTVAKRLSLPELTVPLFGLTIGVPETLNGVKPRMPFENILSENHYQSDKLTDMHTYDELLKDYYASRSSNAQTADWSQKSLSYFSYNRRPEVKIFLQKQGFDV

SEQ ID NO: 3706 - protein, 389 aa, Enterococcus faecalis
LNRTNGQVNKIAVSLIRQFDEQVSGIEGILKLTLGEPDFYTPEHVKKAAKEAIDANFSHYTGMSGLLDVREAAAYFMKEKYHLTYQPATEILVTVGATEAISASLLAILEQGDKVLLPAPIYPGYEPIITLAGAEPVYLDTRDNDFVLTPEMIEAAMAEHGEQVKAIILNYPSNPTGVTYNRQELQAIADVLKKYDIFVISDEIYSELTYDESHVSIAEMLRDQTILINGLSKSHAMTGWRIGFIFAPAILTAEIIKVHQYLVTAAATVSQKAAVRALIEGMHDAEIMKEEYRKRRDFVYEQMTQLGFEVARPNGAFYIFAKIPTGYEQDSMKFCIDLAQKEAVALIPGISFGPEAEGYVRIIYASDMDKLTTAMERIAHYMATLRVTH

SEQ ID NO: 3707 - protein, 80 aa, Enterococcus faecalis
TTALNVQEPNKFKGFVWGFYSNSRQIFLVNFTKGNQPAIFFNEAIRRTVEHQGLAVSAPLLPFGNLNMAFRKINKLGELF

SEQ ID NO: 3708 - protein, 60 aa, Enterococcus faecalis
VAPKPCFNLSYGKKGPCCVNHRFERSGAQQIQRVRLGVLFEQPPNIPCEFHEGKPTGDFF

SEQ ID NO: 3709 - protein, 478 aa, Enterococcus faecalis
RMSMKKQFALFFTLLLLGSSMPVGAFAEGNNLVAENSSVAETTAEATTAEATETTATSETTEATEESTTETESSTESSESATTESTETSGTETTDSTTDSTSTSTTESTTDSTSTSTTESTTDSTSTSTTESSTTPTTTPSSSKEQPKPGTSTSESKQPAKPVTPTAPAEKPVEQPAASTPQPEIVPPVTNETVGLVEDDETFTVSKTKKTEEFIQEIGESARKVAKDKNLYASVMIAQAILESGSGNSKLSQKPNYNLFGIKGDYKGQSVSFITYEDNGFGNLYTVEAKFRQYPTYKESMEDYAKLLKNGLDSNKDFYHGVWKTEAKSYKEATRFLTGKYATDKDYHKKLNALIKTYDLTYYDKEKATVEPMESNFPAYNGKNYDTFNSYAWGNCTQYVYNRITQLGKRVDLTMGNGQDWGETGRARGYKVSRTPKAGAAVSFPAGVLGADNTYGHVAFVEKVFKDGSILISEMNVK

SEQ ID NO: 3710 - protein, 163 aa, Enterococcus faecalis
RNFSGKIDEKRRGAPMKTPTFGKREETLTYQTRYAAYIIVSKPENNTMVLVQAPNGAYFLPGGEIEGTETKEEAIHREVLEELGISVEIGCYLGEADEYFYSNHRQTAYYNPGYFYVANTWRQLSEPLERTNTLHWVAPEEAVRLLKRGSHRWAVEKWLAAAS

SEQ ID NO: 3711 - protein, 157 aa, Enterococcus faecalis
NKSETKRFSLHFTFIYATINVGNIIKFEREFLTMKMAHTCVRVKDLEASLDFYQKAFNFEESRRRDFPENKFTLVYLTLPGDDYELELTYNYDHEAYDLGNGYGHIAISTDDLEGLHEKHQAAGFTVTDLKGLPGTAPSYYFVVDPDGYKIEVIRER

SEQ ID NO: 3712 - protein, 147 aa, Enterococcus faecalis
GCDVIMTKKIIGIAGNQLLQAAEVFHGNQVTYTPQGFVSAVQAAGGVPLVLPIGPKELAATYIQQIDKLLLAGGQDVAPEFYGQEPHIKLEETNRDRDEFELALIEEALKQNKPIFAVCRGMQLVNVALGGTLYQDLSMYPQWSVKH

SEQ ID NO: 3713 - protein, 276 aa, Enterococcus faecalis
HEKSGIKLKKKRGSKEVKKLLITGGAGFIGSNLANFYSQQYQVFVIDDLSMGRVSNLQQTEQLVFIKGSVTDQQLLDEVLSKHSFEYIFHLAAVASVASSVAQPLETHEVNFLSVLKILESIKKYQKKLKRFVFASSAAVYGAEPTLPKRETSVICPLSPYAIDKFAAERYVLNEYHLHGVPTSAVRFFNVYGLNQNPASPYSGVLSILMDRYIQLEQGQVSQFQIFGDGQQTRDFIYIEDVLTALNLVATKSEALGHVYNVGTEVAISRLHHELP

SEQ ID NO: 3714 - protein, 178 aa, Enterococcus faecalis
HYSLKFLQLFNQMNWGKIFFWVALFFYLLLLPILIKRITKSKEMPESTIPLLTIMTAPGSLCLAGYISMGGHLYMPLVVFLLILSQCIYGIVVVNLYKIMQVTFYPSYAAFTFPLVISATALVKVKPLFAEKVGLTSLLNILSTFELLLAVAIVSYVFIRYCIFLFQRENNTKKVELN

SEQ ID NO: 3715 - protein, 124 aa, Enterococcus faecalis
ILISPSVTILRFGDDATIGLGRNPQRIRLFASITILLLSGLSVALVGSVSFVGLVVPHVMRTVSGENYRRLIPFSALGGALLVLVADLIARMVNPPFETPFGIITALIGIPFFLYLFRKGGKLG

SEQ ID NO: 3716 - protein, 291 aa, Enterococcus faecalis
RRETRMTQKKVSRWVAILIVGIILTACISLTQGELSVSVMDLKALILGQGSQAKQLLVWDFRLPRIVLAVLAGAALGLSGAILQGITRNPLADTGILGINAGAGLAVILFISFVETTSITTFALPLVALVGGLLAAVGILVIAYHHRLGLTPVRMVLAGVILSTGISALTLLITSKIDTEKYRFVTMWQAGSIWGSNWFFVGALLPWLVIGFFFAMKRHRLLDILQLGDETAISVGIAVKKERIVSLLLAVMLAASAISVTGGINFLGLLAPHIARKCGFTQQKQVLPLAA

SEQ ID NO: 3717 - protein, 80 aa, Enterococcus faecalis
TIFQDVLAVDVFTNVCVVCVAYLAKYQSLSTVIKRGDNRGNTLWENVPHNSPLRGVFLLFVGLFYKKHSKNLVIITFFVG

SEQ ID NO: 3718 - protein, 142 aa, Enterococcus faecalis
HDEQNARVEGFRHEKLQTPTLLLFRYPKASISPSGYLQVETVPIALIATIDNKLITVSNGPNDIVHGIQKEAFTHQDLSIEKALILALSWKMALSFNKNLQALIQQTNKLEGELQVATENSQLYQIMDIQKSLVYFEAALTD

SEQ ID NO: 3719 - protein, 204 aa, Enterococcus faecalis
TAILSATVERISLPHSKYGIAAYYIIASSEASSNLQRFDGIRYGYRSENVQNLEDVYVNSRSEGFGTEVKRRIMLGTFSLSAGYYDAHFKKAGQVRTLIKQDFENVFADYDLIIGPSTPTVAFGLGENINDPITMYMYDILTVPVNLAGLPGMSIPAGFSEGLPVGLQIIGKHFDEHTMYKAAYAFEQATDFHTKKPVILGGND

SEQ ID NO: 3720 - protein, 266 aa, Enterococcus faecalis
TSDRFPYEKTSHFRGERLMNFETVIGLEVHVELKTNSKIFSSAPAHFGAEPNSNTNVVDWSYPGVLPVMNKGALEFGMKAALALNCEISKETHFDRKNYFYPDNPKAYQISQFDQPIGHDGWIEIEVEGKKKKIRIERVHLEEDAGKNIHGTDGYSYVDLNRQGTPLIEIVSEADMRSPEEAYAYLEALRSIIQFTEVSDVKMEEGSMRCDANISLRPYGQEEFRTKAELKNLNSMNFVKKGVAYEEKRQAKVLLSGGEIHKKHAL

SEQ ID NO: 3721 - protein, 155 aa, Enterococcus faecalis
VEMVKTLYSILHRSLDLTIWVVFFLFNMYMPTVRADDLVYVNRLDKLGYLGASIEHYKTWSSRVIIELFLMFFSKHLMLWKLLNSTIMTGSIVLLCKYVFNKLYSKNLLLVFSIFCLIPLTIMGETGWIATTLNYQWPVAFGLLAFYPFFPSVKR

SEQ ID NO: 3722 - protein, 77 aa, Enterococcus faecalis
FNVVAIQPVSPIIVKGIRQNIEKTSSKFLEYNLLKTYLQSNTIEPVIIVEFNNFHNIRCLEKNIKNNSIITLELHVL

SEQ ID NO: 3723 - protein, 211 aa, Enterococcus faecalis
SSKSCQIAIGITKDGDREIIGFMIQSGESEETWTTFFEYLKERGLQGTELVIFDAHKGLVSAIRKSFTNVSWQRCQVHFLRNIFTTILKKNSKSFREAVKGIFKFTDINLAREAKNRLIHDYIDQPKYSKACASLDDGFEDAFQYTVQGNSHNRLKSTNLIERLNQEVRRREKIIRIFPNQTSANRLIGAVLMDLHDEWIYSSRKYINFDK

SEQ ID NO: 3724 - protein, 278 aa, Enterococcus faecalis
PATPSLSNFGGRVWEKLPGEDAYYFHAFHKKQPDLNWENPELRKEIYQMIRFWLNKGIAGFRVDAINFIKKDLTWTNLPADGADQLAKVTKASRNMPGMSDFLNELKEKAFAGFDIVTVAEAAGVNYLNLSEFIGETGYFDMIFDFKWADLDVKSGSEWFYRIDWSWNDLRTLIFKQQEAMQEAGWSANFIENHDQPRATTKYLKEQAQQPNAVKTFGAMYFFLRGTPFIYQGQELGMTNFERGSIDEFDDISSIDQYYRAIKERFTPQRSLVTCQFA

SEQ ID NO: 3725 - protein, 162 aa, Enterococcus faecalis
KKDLRPKEALSLVNLRSRDNARTPFPWNDSMYGGFSSVKPWLGMVDNYKEINAEAEIKNSQSIFHFYKRMIAFRQKSPYTDILLYGTFEGLSNLPDNVIAYKRKLNEKTIYAFFNFGEAVPIPHYLVNGTVIFDTQSEEREQLVQQGTLLKSYQGLLITINE

SEQ ID NO: 3726 - protein, 91 aa, Enterococcus faecalis
EEYNMAENYQQAAKDIIQLIGMDNIISVTHCQTPLRVILKDHEQVDGKQLEKIDLVNGVFYNGGQYQVILGTGIVTKVFDEIEKIGINVVF

SEQ ID NO: 3727 - protein, 70 aa, Enterococcus faecalis
  MISC_FEATURE (29)..(29): Amino acid 29 is Xaa wherein Xaa = any amino acid.
ITLFFRSSEGTLVPHSFVRKKRNSPKVLXSDTLVILSFCSQGNYGIRYTKIYVNILNRQSIFYLFNWGIN

SEQ ID NO: 3728 - protein, 255 aa, Enterococcus faecalis
FYIFLEKGMSEQMAIYILEDQIIQAKALEVLLTNILHSRNIYKETIHLFSRSDELLQVAHQDAQLNIFFLDIQMNNHIQAGFEVAKEIRKTDSESLIVFISTHTELVLTSYKYMVSALQFIQKNVDFLDFQKEVETCVDAYIQQKENIKTKSEYIIINLKASSIKMDINDIYFFQTEYDHRVSMVGKNFKREFYGTLSKIEQLHPDLIRVHQSIIINKKYASKLNYKTHLLTMRDGTEVPVSRRYYTQVKALFLT

SEQ ID NO: 3729 - protein, 252 aa, Enterococcus faecalis
FSAILEEEGDMLIDWILKNIMDMDQEDQSGKTQWTKYYLTVYFSGLFNLLMILILSVLFGTLSETFIVYVVLIFLRPVAGGWHAKTKWLCRLESIVIYVAIPFVLKNSSVSLPFIYKILLMCLLVVLFYWYAPQGTAIEPVQPSDLNVLKKQSLIRVCLLILCSLFVKEKIASVILYGLVIQGLMILPVTKNLIEGSVFMKFGKKIIKNVIEKRVAKVSDGVGTKPRLNQNSPNIFGQWMGQTEKPKKNIEK

SEQ ID NO: 3730 - protein, 239 aa, Enterococcus faecalis
SSDNPILFFPCRKIGFFCMTKKRIKKFVEDGSLIGGFQMNNKVQKMVSIAMLAAIGTVLQFVAFPIMPAFSFLKIDFSDIPILLGMFLYGPLAGVITAFVRSLLHLFLTGLAPQNMVGDFASFLASSIFTLPIFYFFGKKKNIRTNRIVGLVSGILALTIFMSIANYFVITPIYLQLYGVTTQQFLGTSLASYVAIGIVPFNLIKGLLVSGVFLVLHAKLLPWLSKKQHTIQKKTPLTK

SEQ ID NO: 3731 - protein, 212 aa, Enterococcus faecalis
GDYTMSKLLVVKAHPLTKEESRSVRALETFLASYRETNPSYEIEILDVYAPETNMPEIDEELLSAWGALRAGAAFETLSENQQQKVARFNELTDQFLSADKVVIANPMWNLNVPTRLKAWVDTINVAGKTFQYTAEGPKPLTSGKKALHIQSNGGFYEGKDFASQYIKAILNFIGVDQVDGLFIEGIDHFPDRAEDLLNTAMNKATEYRKTF

SEQ ID NO: 3732 - protein, 394 aa, Enterococcus faecalis
MERESMDKKQTTDKRLSWFWRWFLNNQVVTALLIVLLVLLIILTFTKVSYLFKPVWQFFGVVGLPVIMAGILYYLLNPIVDYLEKKQISRVWSIIGLFILIVALLIWGGIVIVPKIREQSVSFVNHFPQYIDTIDQKSQEILSDPLFAQFREQLEAAGDKVVSSLGTIIKNVSTFTVQGIGNFFGAVATIFVAIITMPFILFYLLKDGKNLAPYLMKFLPVKMRKPTLKVLAEVNDQFSSYIRGQLTVAFAVAIMFMIGFSVIGLDYAVTLGIAAGFLNLIPYLGSFLAMIPAVFLGIVSGPALLIKVLIVFAIEQTVEGRFISPLVLGSQLSIHPVTILVVLLTSGKLFGIVGVILGIPVYAAAKVIITHIFEWYQIVSGLYDEDKPDQQEFT

SEQ ID NO: 3733 - protein, 300 aa, Enterococcus faecalis
TLLFLFQWLFFGIVCILIVPITFFITSLTTPKILAVDLLMLFFLSGIIFVSFMRIMYVSMHLFEARYAVETLDSLYLEMKQDQLKYGNETQIKNCDIAFENVSFSYKEECVLENFNLVLEQKRIYALVGKSGSGKSTIAKLISGFYNVDKGQIKIGGKPLNHYSKDTIINTIAFVFQDTKLFNQSIYDNVSIANPQAPASKVFDALRLAGCESILEKFPEREHTLIGSKGVYLSGGEKQRIAIARAILKDAKIVIMDEASASIDPDNEYELQKAFQYLMKEKTVIMIAHRLSSIKSVDEI

SEQ ID NO: 3734 - protein, 68 aa, Enterococcus faecalis
RESSVSTAYLASNKCMLTYIILMKETKIIPLKKNNINKSTANILGVVREVIKKVIGTIKMQTIPKNSH

SEQ ID NO: 3735 - protein, 418 aa, Enterococcus faecalis
DKSAIYISIFFIFLNLLLGAYIFYNRKISDIIFVTVIGQILMTLTIMIVTFAGRWFTFPRSVLGYSFIIGIIVLSLWRILVYYLYLKVSNERKVVLLGKENQVMRSIQNFMSDKNNKHKVTSVVVSNYYENLKKIIDEIDIVYISSNVDENEKVKLYQLIVKHKKKIFLDTSFENLIMLKPNMMNFEDESIIEVSNFEIQPEENFIKRLFDILVSVCLFVITSPLMLIAAILVKATSPGPVIYKQTRITLDQREFSILKFRTMSVTAEAKSGPVLSTSNDSRVTTVGKYLRALRIDELPQLINVIRGDMSIVGPRPERPFFVDQFNQENPNYYLRHNVRAGITGYAQVYGKYASDYNSKLNFDLLYIKNYSLLLDMKILLQTIKILFDKVSSRGLDESEEREELTMDYCKENAIRIYR

SEQ ID NO: 3736 - protein, 208 aa, Enterococcus faecalis
DPLMSEYSEKRLEESNEMKEKQKKKTVSVREASIVLLIIVAAIATGVIGLKISPNITILFVIALILGYAMFRKVPFDQMHKGIVDGLKPGIIPIFIFILVGALIAVWIQAGIIPTIMVFGFKMISVKWFVPSVFIVCAIVGSAVGSAFTVMSTIGIAFFGIGSTLGLNPALVVGAIVSGSVFGDKMSPLSKSTNLAAAIVEADLFKHI

SEQ ID NO: 3737 - protein, 295 aa, Enterococcus faecalis
LPVVRIQPFCQLVRHSPELSKLCEKCDARGGLEAVRTGQPFIYRCHFNIVDMAIPIIVDDQYVGAIMAGEVLLEDHQEELEQVLTMNDAFIQEFLVTHQELYQQYPVLELADLEKSATLIADLSQYIISEAIKKDYLINTYKQSLQISSRKEELEPLNMIQKDIQQTLLTAQLTPSSAYQTKNKQLQPVLDALWENKSLRLNLQELADLVHLTPTYLSRLLKEEFGIPFSQFYRQLKITWAKQLLLETDKTIAQISEDLGFVEDSYFVRIFKQETGETPLKYRRRENRAYKNDDS

SEQ ID NO: 3738 - protein, 382 aa, Enterococcus faecalis
  MISC_FEATURE (327)..(328): Amino acids 327 & 328 are Xaa wherein Xaa = any amino acid.
AGPCGGDGGAGAEKAKGGSEKTAAKQEFKVVVQQEMPSADLSLGTDTISFTALNNAYEGIYRLDDKSKPQPAGAKEKVQVSDDGLTYTVKLREEAKWSNGDPVTAADYVFSWQRTADPQTGAEYAYFLEMIENGADIVAGKKPVSELGIKANGDYELEIKLAKPTPYFDYLLAFPLFFPQHQATVEKYGKDYAASSEKAVYNGPFVLANFEGAGSDTNWTLEKNENYWDKDNVKLDKINFDVVKEAPTALNLFQDGQADDVILSGELAQQMAKDPELVIEKEARTSYLEFNQRDKNSPYNNVNLRKAISAAIDRNALVDKILGDGSXXATGLIPEGMSYSPTDDTDFADENKKIVEYSPEKPKYMGQSDDGLGLNTLPMDIV

SEQ ID NO: 3739 - protein, 175 aa, Enterococcus faecalis
SRCDITVQLFPEQAPKTVKNFVELAKKGYYDGVIFHRVIPDFMIQGGDPTGTGMGGESIYGEAFEDEFSRDVFNLRGALSMANAGPNTNGSQFFVVTNQNVPAQMMSQLEDAGFPEEIIEAYKQGGTPWLDFRHTVFGHVVDGMDVVDEIGGVQRDAQDRPTFDVVMDTVEIIGE

SEQ ID NO: 3740 - protein, 76 aa, Enterococcus faecalis
RIEGEEANLLEKYRYPMALALFAVILPFIGTFFTYVDQQGIVHEPGFYTIIIGEILLLFSGIWFVRVYLAKRKRKN

SEQ ID NO: 3741 - protein, 125 aa, Enterococcus faecalis
KNHQGGINTFGYVGTAAAYQTGEEWLTALLDYLKENIDFALSFFREELPSVRVMEPEGTYLLWLDFSSYSLTDRELRDTLIHKGKVVLNPGISFGPQGSQHMRLNLACSKETLEEGLLRIKKAFN

SEQ ID NO: 3742 - protein, 335 aa, Enterococcus faecalis
MALLLFFLFIALLGFGILKINNRSILGGITLASGTLLSLVTLLFIGLDKIYLHFKNGDLITLAIAYLLIPAVFIGICLYFIFNSRTMQTKEGKSVTAKLSAGLGLNLLIALPAFLYLLSVGTAQIPYVLFLFLLFLLLMDLLLTFLFAAYVLYSWMYQMIPLKKAVDYIIVLGSGIRSEEVPPLLKSRLDKGIEYYEKNPTAKFVVSGGQGPDEPVAEAFAMKKYLLSQNIPAEAILMEDQSTTTYENMLFSKAIIQADWQKMPSDSKQPSVIFSTNNYHVLRGAMYAHRVGLKAEGVGAPTALYFLPTALIREYIALLVHDKRMCLIALNHGLG

SEQ ID NO: 3743 - protein, 71 aa, Enterococcus faecalis
YNQPLFLKESFGTSMNTRRKQQIERSAKDPLTIEKVRTEKAHKVFALCQLIINIERLVKQLISSALSPPTI

SEQ ID NO: 3744 - protein, 95 aa, Enterococcus faecalis
GEKMITVSIAGGSQPEILQLVKKALKEAEQPLQFIVFDTNENLDTENLWKYVHCSDEAAVAQEAVSLVATGQAQILLKGIIQTHTLLKEMLKSEH

SEQ ID NO: 3745 - protein, 540 aa, Enterococcus faecalis
FFMTKSVKFLVLLLVMILPIAGALLIGPISFGAELSKSSIVDKVELDHTTLYQGEMTSIKVSFSDKENQKIKPGDTITLTLPDALVGMTENDSSPRKINLNGLGEVFIYKDHVVATFNEKVESLHNVNGHFSFGIKTLITNSSQPNVIETDFGTATATQRLTIEGVTNTETGQIERDYPFFYKVGDLAGESNQVRWFLNVNLNKSDVTEDISIADRQGSGQQLNKESFTFDIVNDKETKYISLAEFEQQGYGKIDFVTDNDFNLRFYRDKARFTSFIVRYTSTITEAGQHQATFENSYDINYQLNNQDATNEKNTSQVKNVFVEGEASGNQNVEMPTEESLDIPLETIDEWEPKTPTSEQATETSEKTDTTETAESSQPEVHVSPTEEENPDEGETLGTIEPIIPEKPSVTTEENGTTETAESSQPEVHVSPTEEENPDESETLGTIEPIIPEKPSVTTEENGTTETAESSQPEVHVSPAEEENPDESETLGTILPILPEKPSVTTEENGTTETAESSQPEVHVSPTEEENRQDPHNAHG

SEQ ID NO: 3746 - protein, 171 aa, Enterococcus faecalis
RRFIMERIPCDQYFMRQSVLLSLRSTCTRLTVGATIVRDKRIIAGGYNGSVSGGTHCIDEGCYVVDNHCVRTIHAEMNAILQCAKFGVPTEGAEIYVTHFPCLQCTKMILQAGIKKIYYLKDYRNDAYALNLIEQVGPTVEKVTLVPKYFAELQWGEEFATLEDNPSSAEE

SEQ ID NO: 3747 - protein, 226 aa, Enterococcus faecalis
KMRNYILKGGQTMDWLKQLPKKWLLLGSGVFMVILITLLVGIYLMVNKELQVDTTMWEETSLTTTTEVATDATKERAETMIYVDIKGAVKVPGIYQLKNQQRIWDALALAGGVSEEADTTQVNYAQKVKDQMIIYVPKKGEPVAQSLETLQESAPAQQNQEEKINLNTATEAELQTISGIGAKKAQEIIRFRDEQGPFKTVEELKNVPGIGEKTVERLKDMLTVTG

SEQ ID NO: 3748 - protein, 364 aa, Enterococcus faecalis
PPCGEDTNNDGAKIMNKKTEKFSFKSLIPMVLALLLIGLFIVPIPYYIEGPGTTENLKEFVTVDGKKDTQSGAFYLTTVGIRSATIFSAIKANFSDFQEVMSKKELMGDSSNSEYNRIQQYYMDSSKNAAIEQALKLAKVPYEMKFKGVYVLAMEDNSSFKGKIEVGDTVTGVDGKSFKSSEELMNYIKAQKVNQKVTVQFIQDGKAKEATGKLIELPTDKKAGIGIGLNDHTEIDSSIPVSIEAGDIGGPSAGLMFTLQTYEQLSHKDLRKGHEIAGTGTMNSQGIVGRIGGIDKKVVTASENGAEIFFAPDDEITSEMKKVEPKIKSNYQEAQEAAKKIGTKMKIVPVKTVQDALNYLEKLK

SEQ ID NO: 3749 - protein, 181 aa, Enterococcus faecalis
LPMGLEKKDLTTLQSLKDVETVVPRYTIDATIGPQNNAVKLFGYRKNQAGSVNYQVVDGRLPKQTNEIALDTLAKTRYDYKMGDKITLNDAAIKEKGLKQTHFTVVGFINSPEYIDNTSRGTTTVGSGTLNFFGVVSEKAFDSQRYPELLISFRSLKHQNTYSSDYEKKREQALNQVKEAL

SEQ ID NO: 3750 - protein, 471 aa, Enterococcus faecalis
LHRGEDRLRRMLLQRPDILILDEPTNHLDIETLSWLESYLPSYAGALLIVSHDRYFLDKVVNEVYELSRKKMTHYKGNYSKYLELKAEQLASEWKAYEKQQEEINKLEDFVAKNLVRASTTKRAQSRRKVLEKMDRLDRPQGDEKSAHFLFDSEKVSGNVVLQVEDAAIGYDQEHILSEPIHLDIRRKEAIALVGPNGIGKSTLLKSIIDRIPFIKGSKTFGTNVSVGYYDQEQANLHGNKTVLAELWDEHPTTPEKEIRSILGGFLFSGDDVEKTIPLLSGGEKARVALAKLAMDRDNFLILDEPTNHLDIDNKEVLENALIDYEGTILFVSHDRYFINRIATKVVELSEKGSKLYLGDYDYYLEKKQEEEEIAALLANEEAAKKPEPVTAKNTFYQNKEQQKLLRTLQRKITQVEENLAQLDTTIAQLEAQMSQPDILENHVELLALNQQLDEVRQQQDELLEQWENSV

SEQ ID NO: 3751 - protein, 111 aa, Enterococcus faecalis
RSGRPGLLMKKYNPENQPKAWLFLLPSLGIILLFSVYPLFRSLWMSFQKGSLINQRYAGLENYQRVLNDPIFYKALKNTALYAFAVVPIALIISLAIAWIIFEKVKHKSFL

SEQ ID NO: 3752 - protein, 406 aa, Enterococcus faecalis
NFSERTHFLLKKYINFTYFYLNDTALLSRLQEINVKIKRYAIKCFFGGWVMIEVIDLKKVFDNGFEALKSVNFTIEQGDLVCLLGPSGCGKSTILNLIAGLLHPSDGDIQFRQQSVVKTAPKDRNIGFVFQNYALYPHMTVLENVMFPLTVGSKKVPKAEAQAIAEEYMKLTNIEELSHKKPGTLSGGQQQRVAITRALVQKPDVLLLDEPLSNLDARLRLKIREEIRRLVKEVGITTIFVTHDQEEALSISDKIILLNEGVIQQNDEPQNLYLEPNNLFVAQFIGNPIINLLSVEVKDGKMYHKSFEIPLERFEQARFKMPMTDGKYTFASRPEDVVPAETGLFTTTTDLVELIGRERILRFTLGNEQVKSIVSVEEAIEEGDTLSFDFSYKKVFIFNEAGDRVY

SEQ ID NO: 3753 - protein, 243 aa, Enterococcus faecalis
QVDLIIALTKAQQLDAMFKAIQPMITEKTYVLCLLNGLSHEDVLEKYVPKENILVGITMWTAGLEGPGRVKLLGDGEIELENIDPSGKKFALEVVDVFQKAGLNPSYSSNVRYSIWRKACVNGTLNGLCTILDCNIAEFGALPVSESLVKTLISEFAAVAEKEAIYLDQAEVYTHIVQTYDPNGIGLHYPSMYQDLIKNHRLTEIDYINGAVWRKGQKYNVATPFCAMLTQLVHGKEELLGAK

SEQ ID NO: 3754 - protein, 359 aa, Enterococcus faecalis
PPPHSRRCKDTIKRIEPMELQKALKEVREQKIAPVYLLIGTELYLTELFKTTLMKELLTEEDDQFNFFSFDMEETPLSAAIAEAETIPFFGDYRLVFVENPYFLTAERKTNGVEHDVNLLLNYLESPSPTTVLVFMASYEKLDERKKITKALKKNATVVDVNPMDEKAIRQYISQTIESEGYTIRSDAFDLLLQLTDLNLSKIMGELQKLYLYALETKTITRGAVQELVPKSLEHNVFDLTNEVLSGNSEKAVQLYEDLLLQGEETIKLNAILLNQIRLFLQTKILAKMGYQQANIADTLKVHPYRVKLALQQVRRFELSRLERLYDELVENDYRMKTGQMDKELLFQLFILKLTAQAK

SEQ ID NO: 3755 - protein, 343 aa, Enterococcus faecalis
FPPLWCQIRGLFTPRSPVMDYTNERLVSYFMAELKKFGKKKRALFIKMDPAVHYQDFHLGEEHQPHAEATSIIETLKEAGAKYQGLTMDMGATIQPRFQANIYREDFSEEQLSKSTKKMIKTAEKKGVVVQQGHVDFVDEFEKVIQSTMERQHISLRNSDYFKKLLNIYPEDSFIMLAQVNLKERLDSTRQRYDKNQKDLSNLKENQVKKRHNLEELDASLTRELKELEENIAEAGEIVTVAGALAVTFGPTSEILYAGLDDRYKRYMPTYVTWRDAIQECFNRGCESCNMGGLEGSLNDGLIKFKANFNPTINEFIGEFDLPVNKLLFKASEYAYKLRKQKK

SEQ ID NO: 3756 - protein, 91 aa, Enterococcus faecalis
FTKEKAQPVSLFVAGVLGSATNTILVMNMIYFLFNSAYAEIIGKAGTAVYLAIIATIFSSGVPEALVAGVAASAIASVLLRLMKRNATQKL

SEQ ID NO: 3757 - protein, 255 aa, Enterococcus faecalis
RIKLMKKSVITSSMLAVLLSGFLVTPISAYALERSKGTTEETVASETSLTERQMSSGVTEEMNPSIINSQEETETTSTSSTSDSTTEVSTSEVTTVNDTENSSDDTETTLETSQSNEDTPIAPAKAEEKVPDINYQTHIQDIGWQGVVKNGEISGTSRRSLRLEGIKMNISNSDLAGSVQYRTHVQEIGWQGYVKHNQLSGTSGKSLRLEAIQIRLTGEIANAYDVYYRVHIEDKGWLNWAKNSESACSLSAAKR

SEQ ID NO: 3758 - protein, 75 aa, Enterococcus faecalis
EAIQIKLVKKGEAAPEGYGKALLIGNEAKRPDDIKPTVNYQTHVQNIGWQGVVKNGDITGYNWEYFTTGKHSNST

SEQ ID NO: 3759 - protein, 249 aa, Enterococcus faecalis
WGEDMVIRYDKAFIKDFKETDEGYLTITACPITRPGVFPYRRTDGGLSMEAKLPDELFSKATVLSANAKPMTDDHPTEPVTAANYNKYSKGMTHNDAHVLDNKLLVSFTITDAETIKKINDGKRELSIGFQADVSKETGVYNGMQYDSVQRNMQINHIAIVDEGRAGPEVAIRGDSVAFMIDTKDKQTGGNGMSKLIIDSKEFEVDSIVKAKFESLEAKLDAAEQRKANVEKLEGERDAIDGIAHEFGH

SEQ ID NO: 3760 - protein, 75 aa, Enterococcus faecalis
LKEVIKMAKEKKASSKEENKKELSKTTQKTIHTVSEGETASEIATRYHMSLRKLLDLNELESSNQVTEGIRLLVE

SEQ ID NO: 3761 - protein, 109 aa, Enterococcus faecalis
VGAIFYTQKTGGTLMDSQKFIDLCKKHVVDFANSQLDYTDQKKISESDIYVVWLAKTLQNNKALLSTNLFDGMYYEVTFNGDKNELYFDAYKKWRNIRFDVTEGGDQNG

SEQ ID NO: 3762 - protein, 144 aa, Enterococcus faecalis
GATTMEKANLDWNNLGFSYIKTPFRYISYWRDGKWEEGTLTDNNQLTISEGSPALHYGQQCFEGLKAYQCADGSVNLFRPDENAKRLQKSCARLLMPQVPVETFVSACQEVVKANLAYLPPYGTGGTLYVRPYMIGMCQRRVWG

SEQ ID NO: 3763 - protein, 158 aa, Enterococcus faecalis
TEFKEEILMPWNMNDYPTSMKNLAPLIRKKAIDIGNALLADGYPDDRAIPIAISQAEKWYQEASAADKKAFEQEANPTKQDSHKQDKHAGKLLTAAVNVKYKDGQWLVISDSAEKASNTFTHKQEAIERAQEIARNKQTKLKIYKQDGTLQETKEYTE

SEQ ID NO: 3764 - protein, 363 aa, Enterococcus faecalis
PGPVIVFIGGGHLAKMMALSAREMGFRVGVLDPQIDCPAAQVADWQLLGAYNDPEALEKLAKRAQVITYEFEHADVDALTAIQHLANIPQGTDILAITQDRLMEKSFLEDNNIVIAPYATIVSPTDIQEAIDGIGYPCILKNTRGEGRYVLHSTSDLAPSMNLLREGTCVLEAWIPYEKELSVLISGNGRGEFATFPVVETIKKERKLHETIAPARIDDEVSGELQRIAKVIAKAVGLVGTLSIEMFYTETGGIYVNKILPRPEDAGNFSIDACSFSQYDTHIRGLCNWPMPTIQLLSEAVTVNVLGNEAYETMDIINEHPDWHFHYYGHSEAKAQRAMGHITILTKEIDETLEEIKETKIWS

SEQ ID NO: 3765 - protein, 130 aa, Enterococcus faecalis
  MISC_FEATURE (88)..(88): Amino acid 88 is Xaa wherein Xaa = any amino acid.
GTMIDRYTRPEMGAIWTDKNRYKAWLEVEILADEAWAELGEIPKEDVQKIRENASFDVARILEIEAETRHDVVAFTRAVSETLGEERXWVHYGLTHTDVVDTAYGYLMKQANDFLRKDLQHFTGDGPSPS

SEQ ID NO: 3766 - protein, 362 aa, Enterococcus faecalis
KEDRLVGRIVLIVVSVLVLMMAIFGFTFYKYVDAGLQPLDKNNKKLVQVHIPEGSSNKQIAAVLEESNVIKSGMVFNYYVKFKNLTDFQAGYYQMSPSMTLDEIGEMLKEGGTPEPTKIADGKVTIPEGYDIDKIGEAIEKNTDFKKADFIALMKNEDFFNQMKAKYPDLLESAATAEGVRYRLEGYLFPATYDYYKKATLPEFVEQMIAKMNTVMEQYTPTIHAKNLTNQQVLTLASLVEKEGVKEADRKQIAQVFFNRLAADMPIQSDISILYALGEHKETVTYADLEVDSSYNLYKNTGYGPGPLDSPSEESIKAVLNPTPSDYLYFVADISTGKVYFSKTYEEHQVLVDQYVNNSSSE

SEQ ID NO: 3767 - protein, 515 aa, Enterococcus faecalis
YDTDGKAVSAESVFSEADYKQATALELATLVREKKVTSEELVKIALAITKRENPTLNAVITLREEAALTEAKALQDTGQPFLGVPLLLKGLGQSLKGESNTNGFGFLQDQVAGGTSTFVKALQNAGFIIIGQTNYPELGWKNISDSKLYGVSVNPWNPNHYSGGSSGGAGASVAAAFVPIASGSDAGGSIRIPASWTGTVGLKPSRGVIIGNSNSAKGQTVHFGLSRTVADTNALFETLLTKKDLPAGHLSQAQPIAYTTESPAGTPISAEAKEAVAEAVAFLKDQGYTLVEVKHPVDGERLMKNYYTVAAGSAGIADFMARQKLKRPLERNDVELLTWALFQTGKNITSEETTAAWTDIALQAQAMDEFYQQYPILLTPTTAATAPSIDNPLLKPEHAAQMEKIDQLSPAEQKQLIYDQWLTAFTYTPFTQQANLFGHPALSVPTYVSKEGLPLGIQFNSALNEDRTLLQLGALFENNHKINQPHVEEPDKDKEPDSSGRTRLRPRTPCQWRTG

SEQ ID NO: 3768 - protein, 60 aa, Enterococcus faecalis
  MISC_FEATURE (5)..(14): Amino acids 5 and 14 are Xaa wherein Xaa = any amino acid.
EQETXTSEGPIQRXDQNPNQNPNPHKSGKTNSEFFPKIFAEFLPPIRNPISPKVLLPFPD

SEQ ID NO: 3769 - protein, 145 aa, Enterococcus faecalis
HPRLVRTNAYRLHDVAGAENWLLKALELGEKTDESRLTLSNLYITEERFEEVITILNDLEETDHPYAEWNLAKAYNELEDFAVAKVHYEQAAQELSHEPEFLKEYALFLREEGELEKAKHLLYHYLEHEPGDVDMQSVLADMEER

SEQ ID NO: 3770 - protein, 151 aa, Enterococcus faecalis
ETTMFVSLSEKKKFLTWLVNTAPFGRREVLWILNYLLTHDAILNNVHFVENVEKTDRGIRVVPDGLGKEPLLLFIQAQEFTDPEQIFHEIRMNWRKALYLECVFPQAGETNQYFSVLEDNRLGHGMDQLDHEVAPPIDLFFEQEKKPPRMG

SEQ ID NO: 3771 - protein, 148 aa, Enterococcus faecalis
HPSPWSRPLIKPETPFFWRNTQIHGIHESDVVNAPKFPEVWQQIQHCFQPNRLVVAHNASFDCSVLAGCLDYYGLEQPNYLSLCTVKTSRKLFPEFPNHKLNTVCENLNITLNNHHDALEDSRACAEILLQQEQRFGVEPLKKLVLVK

SEQ ID NO: 3772 - protein, 72 aa, Enterococcus faecalis
TFKKISIGEIIQFLFPAKALSLSVASWQEITSFLLHNFSPKTKIFQKGRDDVFDSLLIHRLSQKCVALKKPI

SEQ ID NO: 3773 - protein, 101 aa, Enterococcus faecalis
SKKNDLLILALLGTTKLQILINYALQPIYYLIFILPLAAFLANKLIQQFIHDFFSEVPGLMHIDSYMQGIFLPLTGSLLFICCCVFLILFRKLNRLIKRET

SEQ ID NO: 3774 - protein, 66 aa, Enterococcus faecalis
RPNCGEYTQPASTLSLRANRSACQDLTATRIATLVRIAGALFYEWDNVLFAHLVLLIIYSVTSCQS

SEQ ID NO: 3775 - protein, 286 aa, Enterococcus faecalis
IMVLLLKRKSCQTKGQLGECKMKNKRLTFVVSLLAIYLIGAFFVNQKVTNSKKETVTVGVLQFVSHPALDEIYKGVEEGLKENGYDKGKNLEIIFQNGQADQSKLAIMSQQLVQKKADVLIGIATPAAQALANTTQEIPIILGAITDPVSAGLVKDNQKPGGNITGVSDQSPLSAQMDLLKELIPAAKKIGILYASSEENSRYQVAEAQKAAEAKGLTVKTYAVPSSNEIAQTVQVMTKETDVIYIPTDNTIANAMQTVVGEANRTKTPIIPSVDTMVDQGLFNTD

SEQ ID NO: 3776 - protein, 292 aa, Enterococcus faecalis
KRCFLLEILQRQLLFKLAVCQGIGNLGILKVLQEAIAQKRVDFSSTEIIRIAEIKKYRELFEQSWLHHTIHSEALYIRQCQHQFMTILDAVYPKLLREIYNPPAILFYRGNLQLLSRRKIGIVGARYATSYGLRVTEALVPKIVKEGFTIVSGLAKGIDSRSHEMAIQNGGQTIGILGTGLDVYYPYEKKELQQTMKQNQLVLTEYVNGSGPKKYHFPARNRIIAGLSLGVCVMEARKNSGSLITAQAAMDYGREVFAVPGSIFQSFSTGCHELIQDGAKCVQTIDDICAEL

SEQ ID NO: 3777 - protein, 73 aa, Enterococcus faecalis
HYYSKIKQEIRLMGRLWRIIILGYGFKNNAGYGTKELLFGLENTGVTPNHRRTFAPIKDMILKIKHFFYVFLF

SEQ ID NO: 3778 - protein, 215 aa, Enterococcus faecalis
EKIESLLNKVEELCFYFKHDEAYDLLKDYPDDIESSNRILETKFFYYKGITSLLGKKNNSEALFYLHRGSEISRDINIYNILSMNAIGILYELEDDIEKAKVYYDKSLQLLSEFKLDYPLEQCRIYYNTAKFYSLIKDYAKSIELSDKGIEINRTHSSIYSLDCLLYEKAFNKQMLGLDAVEDYRIAYYFTRFFENKKLLTYIEKDMQEFNISFK

SEQ ID NO: 3779 - protein, 184 aa, Enterococcus faecalis
SLIASLGSLKEVDRAAILNETDTALPPHHAEIAKLTNREHRTGDLATALEGADVFVGVSAPGVLKPEWIQQMNEQPVIFAMANPVPEIFPDEALAAGAYIVGTGRSDFPNQINNVLAFPGIFRGALDARAKKITIEMQIAAAKGIAKLIPDNELTPTNIIPDPFQEGVAKVVAESVRNAVKETN

SEQ ID NO: 3780 - protein, 258 aa, Enterococcus faecalis
KRTLRSQMTGGISMLFLTYDPQLNPTGLEIYKYISHNIEKVPYMTIRELADEIHFSKTAIWRFCQKFECEGYTDFKFKLKNYLSERKKTAQPKSLDETMLIHFLQRSSEELLEGRIVQAAELLAKKEFVLFIGEGTSKVLAEFGEIYFSSIYNLSASVSHLFSHPVSKLSEETAKKVGVIALSVSGETQKVRQNIDYFIEMGIDVIAITNSEKSTIAQLSTVTIPYYITTEKSSIADVTSQLPALFLIEKLAKTVSTM

SEQ ID NO: 3781 - protein, 254 aa, Enterococcus faecalis
KFMKQKREWGKMSNKKLIINADDFGYTPAVTQGIIEAHKRGVVTSTTALPTSPYFLEAMESARISAPTLAIGVHLTLTLNQAKPILPREMVPSLVDEAGYFWHQSIFEEKVNLEEVYNEWDAQIISFMKSGRRPDHIDSHHNVHGKNKKLLGVALALARKYQLPLRNASRSIETKDYLELYQDVRTPDEMLYQFYDKAISTETILQLLDMVVCSEGEVFEINCHPAFIDTILQNQSGYCMPRIREVEILTSQEV

SEQ ID NO: 3782 - protein, 79 aa, Enterococcus faecalis
RSFSMLFSIKKSEWLGNERNDLFAGLVSSVAILPEVIGFAIIAGVHPLSAVFASAVTLLVITFHGPPSGNGSRCLFTTI

SEQ ID NO: 3783 - protein, 321 aa, Enterococcus faecalis
QFPCPCPKQVSSIWLRSLGAATIAILLGIFLGNTFVRGANLNRGTKVAESKLLEFSVVLLGTTVTFQTIAQIGLQGVAFILIQMSLTIIFAYLIGKKLAFSDNMSLLMAGGNAVCGSSAIASIAPAIQADEEEKGQIITLVNLLGTVLMLTLPILSGILYGTNLLARSALIGGTLQSVGQVVASANMVNENAVQLAMLFKIMRIVLLVAVVYLFGRFKQSKTAESEAELVEVTKKSSALPWYVVGFFIACVFNSLIHFPVVISETAHFFSSWFEITALAAIGLRLDFKKFFQEGKRFLIYGLSVGTVQVVLAILLLALLQF

SEQ ID NO: 3784 - protein, 124 aa, Enterococcus faecalis
GLPLRNYKVNDSFLWEILTIVKQDANLFNLNGETAVGNMAVGLGSYCSTHWKSLKLNWIFENFYIKLFTIILNVKIRILSYEQKGVFFMKSQKRLYQSYSKLFRLANSFLVPALSKYLPFGYVA

SEQ ID NO: 3785 - protein, 80 aa, Enterococcus faecalis
  MISC_FEATURE (55)..(68): Amino acids 55 and 68 are Xaa wherein Xaa = any amino acid.
TITSQPYRHISNSGLTIQIEEISVLFNNGQNFPQEGIVYLVITERQTLPLPAKPXNAMGPNRVYLPRXFHTLPYWLIKQK

SEQ ID NO: 3786 - protein, 399 aa, Enterococcus faecalis
RPQLIDEREKEVENLINQQHQELERIASLSKEEAKSIIMKSTEEELNHELTLMVKESEQRAKEESDRKAKNLLSLAIQRCAADSVSETTVSVVTLPNDEMKGRIIGREGRNIRTLETLTGIDLIIDDTPEAVVLSGFDPIRREIARMTLEKLIQDGRIHPARIEEMVEKSRKEMDERIREYGEQAAFEVGAHTLHPDLIKILGRLRFRTSYGQNVLNHSIEVAKLAGVLAAELGEDVQLAKRAGLLHDIGKALDHEIEGSHVEIGAELAAKYKENSVVINAIASHHGDVEATSVISVLVAAADALSAARPGARSESLENYIRRLENLENISNSFEGVDSSFAVQAGREVRVMVKPEEISDLESVRLVRDIRKKIEDDLDYPGHIKVTVIRETRAVDYAK

SEQ ID NO: 3787 - protein, 291 aa, Enterococcus faecalis
QEMYKMGEKKMEVTEKMTEFQLEKAATLKTIAIRAKKVGEMVDFYKKVMGFVLKSEENNLSIWGTREAGTQLLILEETRKAEDFHNEEKQMAYFSIKVPTEKEFLQIAQRVLEQDYPIDESFQIGTRQSMFITDLEGNQFEIFHDEATANSTSEKQPIVLKDLISEDLEPHQGLAAGSYLAHVQLKTNNQKEIKAYYEEVLGLKRNEKDQFVLEDGKATIGFQKPETSEVDQLPDPHLGLDFFTIKLSDQEHILAMEQQLTAKNQEFFIDQKKAIVTVFDPIGLEWWFVLK

SEQ ID NO: 3788 - protein, 159 aa, Enterococcus faecalis
TFPLILKIEGEKMYEKTKWKIQKMMKKGVFSGASFCFIEGEKEESNCWGLAQVKPTKEQLTSAMLFDVASLTKVVGTTTVILQLVEEGKIILDQSLQTYYPSFQDSNITIRHLLTHTADLQGYIPNRDQLNAQELKDAYNHSFHAVKARRKKPVFTTSW

SEQ ID NO: 3789 - protein, 227 aa, Enterococcus faecalis
FRGEGGLTIFIKNSTYQATDSALKISQSATQEKNYDYYTNGQKNDTALIFYPGALVAPASYSEWAQEVATKGYDVYVVHFPLNLAVLAPNAAEQIIKDHPQQNFVLAGHSLGGVMASRFVAENEQRIKGMIYLASYPDEKGALNKKNLPVLSITATNDGVLNWTSYQKAKQFLPKDTQYVSIEGGNHAGFGNYGVQKGDSKATISNEQQQTEISQLIVAWLQSRPNK

SEQ ID NO: 3790 - protein, 158 aa, Enterococcus faecalis
PQLKFFVVLWCPSRVPNKNHVLIFKTAQEALTLGFRPCKRCQPTGQVVPNEEWVVQIKQFIDRHSAEPLSLDYLAQACHGSPFHLQRTFKEQTKQTPSAYLTSVRIRQAQELLLHSPLTIQQIAKKVGFQTAAYFATTFKKETGVTPSVYRSKNEPKK

SEQ ID NO: 3791 - protein, 400 aa, Enterococcus faecalis
IPVVRHMDIVEQETEQTHASSENDEPMAPTPASVSVGNSTLKSTLSTGTYNQDIITLSYEYSVTLIGLAINDRPIIAIQLPTEISSQLDNDTLKQQDFLTLLTGTVSYPGTATQDIHSSTNGVSLSYSSTYHSVYLTFPSSTLVLLPGTKWSAAISFDVGALYKRGISIPPALNGKDYPIRGTFTDVGTGLGAINIIIGNNTKTGIISKAQLSLGNYPVPQVTPAKLTQPNHLDTTVTGTIQQVQDPNYNYSVQLTLNRHDGTTTPIVVKGISVDAAGNFSTSLASPLEYGDTLSTIVFARSKTSTDYIQSSPSADQSVNWSIQPVTNVVANAGSTQLSGKDSQVSNGTYQVKVQINGGSISTTSLDSNGHFQFANLPTFQGGETVSLWVQGLSNRTGLP

SEQ ID NO: 3792 - protein, 111 aa, Enterococcus faecalis
SSTPESSTGESSTPGTGSGRVLQMESTAYSWREAGASNLSATGIDLSKESNVVAVDPSVIPLGSLVKVSGYGFAIAGDTGGAIQGNIIDVHFDSVDQCRLWGRRQVTVEIQ

SEQ ID NO: 3793 - protein, 168 aa, Enterococcus faecalis
RRITMIRSATKEDGQAIARLVLVILKDMELPILEEVSEEQMIDLLAEATAYPTYRYGYQRILVYEHAGEVAGIAVGYPAEDEKIIDEPLREVFKKHGLAEDVRLFIEEETLPNEWYLDTISVDERFRGMGIGSKLLDALPEVAKASGKQALGLNVDFDNPGARKLYAS

SEQ ID NO: 3794 - protein, 448 aa, Enterococcus faecalis
QWWDEKNLKTMDLIFLGIGAVVGTGIFVVTGVAAERYAGPGLVLSFLVAAAAIILSGLCYAEFASRIPVIGGPYAYMYVVFGEIVAWMTGWMIICEFFLAVSSVASGWSGYVHGFLDSLGFSLPQALSGAYNPTNGTYIDLIAMLVVVAVTFWVSLEAKTALRLNNLMVFVKFGIILLFVLVGIFYVKPTNWQPFIPYGFSGVFSGAALVFFAFLGFDAVSMAAEEVNNPKKDIPKGIIGSIIISTLLYIVVTLVLTGIVPFTDLGVKDPVAFAMRFINHGAIATIISVGAILTLLTVTIAMMYSLARVIYAISKDGLLPQFMSKIDEKRHTPKNATYVAGFLAMVFAGIVPMEMLAELTNIVTLFYLMFLALGIIKLRTMKGEPQAGEFKVPLVPVLPLISIVVCAALMFQLSLATWQVFGVAVVIGLAIYFFYGRHHSIVRFETKE

SEQ ID NO: 3795 - protein, 80 aa, Enterococcus faecalis
  MISC_FEATURE (77)..(77): Amino acid 77 is Xaa wherein Xaa = any amino acid.
GFRKMTKGGFFCMSQKETFYITTPIYYPSGKLHIGNSYTTIACDAMARYKRLMGFDVFYLTGVDEHRPKIEKKTAEXECD

SEQ ID NO: 3796 - protein, 483 aa, Enterococcus faecalis
VGLPWGKVLLLVIVISAAVLYLIGYFMRKKNQEQLDELEVRKEALFDLPVFEEIDDIKKMHLVGQSQNSFREWNQRWVELSTRSFAELESQIYEVENQNEIFRFMKAKKAVVEANETMTEMEAEVEVIRNGLKELRESEERNSLEVQKALDVYEELSKSLKDDKASFGPAYSEIQKQLRNVEIEFTQFVTLNTSGDPIEAREVLEDAERHTYELEDLMKRIPPMYEELNETFPDQLKEIEEGYNQLLADDYVFPEQNFAEEIQHAKKRVENSMADLEKTEIAAVEVANRDTATAIDALYEVMEREIEAKKYVVTNQKIIDDYISHSLKNNRQLMIELDHVSQSYTLNNNELGRSRGFQTEIEEIIRRQKDLEPRMKEHTVPYSEIQAFYKECYKILDDIENQQLEIDASLKELRKGEKVAQEKVDEYEFRLRSIKRYVEKQRLPGLSADYLEFFYVATDRIEDLSRALNKMRINMDEINRLCD

SEQ ID NO: 3797 - protein, 134 aa, Enterococcus faecalis
  MISC_FEATURE (99)..(99): Amino acid 99 is Xaa wherein Xaa = any amino acid.
TTTELVYAAALNEPMMPYANRYRHSHENIRTGLEYNMFLISTEFRWADAFMKLEPDWKPCKHRRSIQSKNLFLKGSQPHLSPIFFSRSLTKGGLRKTLXFMAWGVMKFIFKSYKGRDIGEKGGGVYFEKRGPTQ

SEQ ID NO: 3798 - protein, 200 aa, Enterococcus faecalis
GLLMNGIPTVIEQSSRGERAYDIYSRLLKDRIIMLSGPIDDNVANSVIAQLLFLDAQDSEKDIYLYINSPGGSVSAGLAIFDTMNFVKADVQTIVLGMAASMGSFLLTAGQKGKRFALPNAEIMIHQPLGGAQGQATEIEIAARHILDTRQRLNSILAERTGQPIEVIERDTDRDNYMTAEQAKEYGLIDEVMENSSALN

SEQ ID NO: 3799 - protein, 180 aa, Enterococcus faecalis
RFERMRFFMDISVIDATKVNTETGLHIGESNAPVKMIEFINVRCPYCRKWFEESEELLAQSVKSGKVERIIKLFDKEKESLQRGNVMHHYIDYSAPEQALSALHKMFATQDEWGNLTLEEVATYAEKNLGLKEQKDATLVSAVIAEANAAHIQFVPTIIIGEYIFDESVTEEELRGYIEK

SEQ ID NO: 3800 - protein, 194 aa, Enterococcus faecalis
KMEKLVERFLTYVKVNTRSDANSQTTPTTVGQVVLAKMIETELHELGLADVHYNEQNGFLTARLPGNQPAAKSIGLIAHLDTADFSAENIRPQVITNYDGQDVLLNQEQGIVLSVAEFPNLKEYQGETLITTDGTTLLGADDKAGIVEILAAVEYFLAHPEVARGDVWLAFGPDEEIGRGADQFDAPNFPVPFT

SEQ ID NO: 3801 - protein, 181 aa, Enterococcus faecalis
SSKKFKAEWTKAQADVGKKVKLSLLAADTDQGKRIAEYVQSQLQENLPGLEITISSQPSNNVNQSRREKNYELSLSGWIAGSSELDSYFNLYAGESSYNYGNYHNAKYDQLVEEARTINANNPEKQFAEYKEAEDILLNQDAAQVPLYQSASNYLINPKLKGISYHLYGDYFHLRNAYLTE

SEQ ID NO: 3802 - protein, 585 aa, Enterococcus faecalis
  MISC_FEATURE (581)..(581): Amino acid 581 is Xaa wherein Xaa = any amino acid.
LVAQFGSYLIATLLLLAGIFLMSMWDFQQIVDHFQSIQDRLSHVSAKSQARQEEKEAKRAAKKEAKAAERQAKIEAAAQQKLQDRERMEQAAAERLTKTPVETHQPMVEEPAAPTPVQIDSFQQQNQAMPVPPIAATKPQREQEEEAADEAGVLEFEISEEAEDRDYQLPPTDLLDTIQATDQSGEYEKIEKNIGVLEQTFKSFGVDAKVVKASLGPSVTKFEVQPAVGVKVSKIVNLTDDIALALAAKDVRMEAPIPGKSLIGIEVPNSAISTVSFRDIVEAQPSHPDKLLEVPLGRDISGMVQTADLSKMPHLLIAGSTGSGKSVAINGIITGILMQAKPHEVKLMMIDPKMVELNVYNGIPHLLTPVVTNPRKAAQALQKVVQEMEFRYEKFAATGVRNITGYNQLIQQKNAEDGENRPILPFIVVIVDELADLMMVASNEVEDAIIRLAQMARAAGIHMILATQRPSVDVITGIIKANVPSRMAFAVSSGTDSRTIIDTNGAEKLLGRGDMLFLPMGENKPIRIQGAFISDQEVERVVAFVTDQQETEYRESMMPTDEPTTSGGGEAPQDELFEEAXNLVV

SEQ ID NO: 3803 - protein, 257 aa, Enterococcus faecalis
GSLDQYRTGDFTLIRRTFVKDEDKLVQALEDAKKAEAMVLHTIINDHLVAIANQFFNEHQLFHFDILTPPVAEIERLTGVAPMREPGALHHLNENYFKRIEAMEFAVKYDDGKDPRGFLEADVLLLGVSRTSKTPLSLFLANKNLKVANLPLIPEAHLPKQLFEMDPKKIVGLTNDPNVLNGIRKERMRAYGLPENTSYSDIEKIRRELAFANDLYQKLGCIVIDVASLSIEETASMILNALNLEDHSYYSTETSED

SEQ ID NO: 3804 - protein, 271 aa, Enterococcus faecalis
  MISC_FEATURE (11)..(11): Amino acid 11 is Xaa wherein Xaa = any amino acid.
VTLKKWGPVFXFALTKRSRNTMKIRVPATSANLGPGFDSCGIALSAYLTINVLGESEFWEIQHTLGEEISTNEENLLIQTALKIAPELTPKVIRMVSDIPLARGLGSSSSVIVAGIELANRLAHLNLSPKEKVRLATEMEGHPDNVAPAILGDFVVASHVENQVYHVKHHFPMCDVIAFIPEEPLFTEKSRAVLPEKLAYKEAVAASSIANVMIAAILNGDLPLAGKMMEQDKWHETYRRSLVPHLKEIRRLTQAKRCLWFFLKRGLVQLC

SEQ ID NO: 3805 - protein, 116 aa, Enterococcus faecalis
  MISC_FEATURE (98)..(98): Amino acid 98 is Xaa wherein Xaa = any amino acid.
QTRHGRIPGCSLSPEQFKKFNRLTGKFVVQDGFFIEPCLVVSLSWNYFNILKRLKSKAGETFVAFFTGNGLKDPDTAMETEVAISKMSDVEEMGPGFXFCTYEKESQHYENKSTCH

SEQ ID NO: 3806 - protein, 107 aa, Enterococcus faecalis
SCSTKPIIGATSMEQLQHFRFNKAFLGTNGAHLEFGLTTPDPEEAALKALAIHQAETAYVLLDHTKFNEVTFTKVEELESVTLLTDYCPAESLQGFQQKTILMEANK

SEQ ID NO: 3807 - protein, 321 aa, Enterococcus faecalis
IASRIPAKNYFNGGKQMIYTVTLNPSIDFIVHVDHLQIGDLNRMTNDFKLPGGKGINVSRILKRMETESTALGFLGGFTGSFIADWLKKEEIQTNFTPVSADTRINIKLKSDTETEINGLGPALTNEEIQELKQAVSRVQAGDIVVLSGSTPASLRKGFYEELIQIVKEKGAEFVIDTTGEDLMNALSQKPLLVKPNNHELAELYHTTFTSIEDILPYGHRLLEEGAQHVIISMAGDGALLFTTEGVYRSNVLKRPLKNSVGAGDSMIAGFIGNFSKTQDPLEAFKWGVACGSATAFSDDLASEDFIQELIHEVTIEKMSE

SEQ ID NO: 3808 - protein, 596 aa, Enterococcus faecalis
DGSILRNIRTRPLDKENLRLQESLTSIGNGYMGMRGNFEEHYSGDHHQGTYLAGVWYPDKTRVGWWKNGYPEYFGKVINAINFIAMDLQIDGQTIDLATTPYEDFSLELDMQNGVLSRQFTIQTPKNKVRFSFERFLSLEKKEAAYIHLTIEMLEGTGTITLHSKLDGDVQNEDSNYEEHFWEERAIETQETLGFVTTKTIPNNFEIERFTVTAGMRHFIDGASVVPTYTQQPLALTAELTVSLNEGETTAITKEVLVVTSRDVPETQQITRVNELFAEMTTLYPEAKAGQAAAWAKRWQLADVVIEGDDEAQQGIRFNLFQLFSTYYGEDDRLNIGPKGFTGEKYGGATYWDTEAYAVPLYLALAKPEVTKNLLKYRHNQLPQAIHNAQQQGLKGALYPMVTFTGVECHNEWEITFEEIHRNGAIAYAIYNYVNYTGDEDYLKDAGLEVLVTIARFWADRVHFSQRHKQYMIHGVTGPNEYENNINNNWYTNTIAAWVLRYTRESYLKFQEETTLKIADDELAKWADIVENMYFPVDNELGIFVQHDTFLDKDLMPVSDLPLSELPLNQHWSWDKILRSCFIKQADVLQGIYFFQ

SEQ ID NO: 3809 - protein, 107 aa, Enterococcus faecalis
KVGESMIELKTTDLHRNTCQLTLFNRQRFKLYNGTTERIVYDFSGRNLLINPVSFDTEQDMERFFRLVKLIYFDGKVVGYRGCSELPLKLECRAFQKMDRQVPTTGM

SEQ ID NO: 3810 - protein, 60 aa, Enterococcus faecalis
IIPQASHFKKNENACYLVFYFFNNLTDNKKSGEHIHELYTFPAAPTFIQLIKTIHCKNFS

SEQ ID NO: 3811 - protein, 578 aa, Enterococcus faecalis
KDTIKGAGFLMEWIEIKHATQNNLKNISVNIPKKQLTVVTGLSGSGKSSLLFDTLAAESRRELNDTFSSFVQNYLPKYGRPEVEKIENLPVAIVIDQKKVAGNSRSTVGTYTDIYTFLRLLFSRAGSPFVGYSDTFSFNHPDGKCPTCDGLGKITEINLHQLVDYDKSLNKGPIDFPTFTVGNWRWKRYAHSGLFDLDKKIKDYSPEELALFLYAPQQKLANPPKEWPHTALYEGIVPRMQRSILHTDEGKRHQKYLNHFVTVKRCPDCLGSRVNERVRSCKINQKSIADAVDMPLTELHSFIRSMDLSLIKTIQEELLVRLEALINIGLSYLTLGRATETLSGGEAQRIKIAKYVNSALNDIMYILDEPSAGLHPKDIERISRALLNLKNKGNTVVLVEHNPQLIREADFIIDIGPFAGENGGHVQFSGTYDAFLVSKTLTSQALQEPLPLNDQPRKARKSLSIEHATLHNLNNLSVEVPLGVLTVICGVAGSGKSSLAEEIYQKAQADNQEIIHLSQKSITANLRSTPMTYLNIFDKVRKLFAEEKHVIPALFSYNSKSACSTCKGTGIMVSDMSF

SEQ ID NO: 3812 - protein, 142 aa, Enterococcus faecalis
PKKTIIYWSCTFCILFISLILALENNGPYLISNLVMVPFFVFAYLGIARSFNMTETSLIVRDVLWFRKKALPLSQIEKVTYNEKSIEIFSSEFKEGSKVFLMKKKTIPLFLEALKVKKPELKVAEDHSLGLHKKEEKNKSES

SEQ ID NO: 3813 - protein, 345 aa, Enterococcus faecalis
ESSRQTMKKARVIYNPTSGKELIKKNLADILSILEECGYEASAFATTPEENSARNEAHRAARAGFDLLVAAGGDGTINEVVNGIAPLKRRPKMAIIPAGTTNDYARALKIPRDNIVKAAEVIKKNQTVKMDIGQAGKNYFINIAAGGHLTELTYEVPSELKSIFGYLAYLAKGAEMLPRVKPIKMRMTYDEGVYEGNASMFFLGLTNSVGGFEQIVPDAKLDDGKFSLIIVKTANIFEILHLVALMLNGGKHVEDHRLIYTKTSYLHAETLEKNNKMMINLDGEYGGDAPMTFKNMHQHIEIFANGDALPSNAIMGSVLTGSDEIVVESADEAEEAYKRVFTTSC

SEQ ID NO: 3814 - protein, 335 aa, Enterococcus faecalis
LPNSRGRIRHANAFNETDNHAGHQTDKTEMNGWIWERKYEIDSLCYPVQLAYLLYKNTGMTEQFNSDFVEGVKKILNVFTTEQDHAQSPYLFERDTWRQEDTLVEAGKGTPVGKTGMTWSGFRPSDDACQYGYLVPSNMFAVVILGYIQEIFSDVLEDATIGAIAKKLQEEIEEGIQTFGRTKNQNNETIYAYEVDGLGNASVMDDSNVPNLVAAPYLGYCSTEDEQYLTTRQTLLSKENPYFYEGKYAKGIGSSHTPENYVWPIALAMEGMTTKDKAEKERILDLLVATDAGTHLMHEGFDVDNPENYTREWFSWANMMFCELVMDYFDIRVEK

SEQ ID NO: 3815 - protein, 129 aa, Enterococcus faecalis
HPSGKIGGKVMTKKKVYIVSHSHWDREWYLPYEEHHMRLIELVDNVLDLIENDPEFNSFHLDGQTIILDDYLQVRPEKKEAVKKAVQAGKLKIGPFYILQDDFLISSESNVRNMLIGHLESQKWGAPVQ

SEQ ID NO: 3816 - protein, 68 aa, Enterococcus faecalis
  MISC_FEATURE (54)..(54): Amino acid 54 is Xaa wherein Xaa = any amino acid.
IQCSKHADWAFRKSKMGSTSSIRLLPGYIGNMGQTPQMMQLANLLAAAFGRGVXTDWALITKFLEKRL

SEQ ID NO: 3817 - protein, 429 aa, Enterococcus faecalis
PFEEHSSKNKQKPTTSSGGNVFLLILNVIIRVFQSLVVFGVILIVLGGSLGLGIGMGYFAFLVEDTQPPTKEELQKEISDITEVSKMTYADGTPIANIKSDLIRTRINGDQMSPLLKKAIISTEDEYFEEHHGVVPKALVRALISDATGIGGSSGGSTLTQQLVKQQILTDETTFKRKANEILLALRIEKYFSKDEIVTTYLNVSPFGRNNKGENIAGVEEAAKGLFGKSAKDLNLPQAAFIAGLPQSPIVYTPYTNTGALKDDLSLGMKRKDFVLFSMYREKAISQKEYEEAKAYDLKKDFLPTEQANVNTEGYLYYTVLDKAVEIVMDLDMKKAKVNRDDLDQVGLDQYEEQARREIQSQGYTIQSTIDQNIYNTMQTAVANYGYLLDDGTAHVDGNTMIDTGHILMDNATGRILGFIGGRNFHFYP

SEQ ID NO: 3818 - protein, 62 aa, Enterococcus faecalis
KLGLNCRSSSWVLRLYQFSVYGPAIDQGIMGSESPPGNYPPNYAEGAEIWLIPPMLDFKSFA

SEQ ID NO: 3819 - protein, 214 aa, Enterococcus faecalis
GNGGTGKWTSQSALDLGVPLPLITESVFARFISAYKEERVKASGILSKPAAFNFAGDKKELIEKIREALYFSKLMSYAQGFAQLRAASEEYGWDLPFGEIAKIWRAGCIIRAQFLQKITDAYEKNPALENLLLDEYFVEITKKYQQAVREVVAIAVQAGVPVPTFSSAIAYYDSYRSDRLPANLIQAQRDYFGAHTYERTDKEGIYHYSWYNEE

SEQ ID NO: 3820 - protein, 184 aa, Enterococcus faecalis
RERTINQMSNILIIEDEKNLARFVELELKHEGYTTEVHYNGRTGLEAALNNEWDAILLDLMLPELNGLEVCRRVRQVKNTPIIMMTARDSVIDRVSGLDHGADDYIVKPFAIEELLARLRALLRRIDIEGDKNVAKQTTITYRDLTIEKENRVVRRNSEMIELSTTRIRITINANGKRERRLGT

SEQ ID NO: 3821 - protein, 161 aa, Enterococcus faecalis
VTFQVLPKNDGLELFISKNVAMDDLSSLEGLSEVNADVSELIRKQIEADKAAADELDEMEATDETNRNVIFELDNFEAMIQLSKEVFMQSVLTNLYTYNDRYYLQVLFLTDELEKTNVDNEIAQILEFAHKTTVTQDTLVEYGTCIMERSALELTRYYFND

SEQ ID NO: 3822 - protein, 281 aa, Enterococcus faecalis
  MISC_FEATURE (251)..(264): Amino acids 251 & 264 are Xaa wherein Xaa = any amino acid.
EVKIMLTALTADNQELFSLIDCSIDELTQIRSEQAFVCPMCHQSVILKAGPIKIPHFAHRKKNSCWYEAEAETEEHLRLKQLFAEKCLREKLSFQVEAYLPTLKQRPDLLIGKIAIEIQCSPLPIKRLVERTETYQTHGYQVVWILGERLVPKDKLTQLTKQFLYFSESLGFYLWSANKKQERIELLCHIEESQCQQFYRRKQSWDFYEKQLLEIFRLPTANLNLLPDRRHTGQLMHDYYQKLTPQLVAGXAHWLEPKAFYIRXRVSTSPGTLLGCYHSGE

SEQ ID NO: 3823 - protein, 81 aa, Enterococcus faecalis
  MISC_FEATURE (7)..(53): Amino acids 7, 39 & 53 are Xaa wherein Xaa = any amino acid.
GFPQHAXFKGNSSLRRKALRFTPRSGNTQGVYLEKLTPXSGYKKLWVLANEHXRQQVGASIFDNNHASIGQCAVYLAVNLN

SEQ ID NO: 3824 - protein, 249 aa, Enterococcus faecalis
FTIVERVSFPTTTPEETMKKVIEFFQQYPLKAIGIGSFGPIDIHVDSPTYGYITSTPKLAWRNFDLLGTMKQHFDVPMAWTTDVNAAAYGEYVAGNGQHTSSCVYYTIGTGVGAGAIQNGEFIEGFSHPEMGHALVRRHPEDTYAGNCPYHGDCLEGIAAGPAVEGRSGKKGHLLEEDHKTWELEAYYLAQAAYNTTLLLAPEVIILGGGVMKQRHLMPKVREKFAELVNGYVETPPLGKILGDASFRR

SEQ ID NO: 3825 - protein, 408 aa, Enterococcus faecalis
RGGREHAIAKKLQQEDKVKTVYCAPGNPGMSGDNIRTVPIGEEQQTELIQFAKDNQIDWTFVGPETPLIEGIVDAFQAAGLLIFGPTKAAAIIEGSKSFAKDFMQKYQIPTAEYRVFRRLAPALEYIEQQGVPIVIKADGLAAGKGVVVAETKAAAKRALVAMMEDQQFGASGQTVVIEEFLQGEEFSLMAFVSNEKVYPMVIAQDHKRIFDGDAGPNTGGMGAYTPVPQVPEEAVQQAISQVLKPTAKGMVAEKRPFQGILYAGLIQTATGPKVIEFNARFGDPETQVVLARLESPLSEIISSLLVKEQPTIAWNELASVGVVVAAEGYPNQYKTNLPLPEMSGATIYYAGVTRSEQALVSAGGRIFLAEATASTLEEARKKVYQTLDNYSFPGMYYRKDIGVKGLI

SEQ ID NO: 3826 - protein, 283 aa, Enterococcus faecalis
TGEDGRVASVNIGETLKEARLQKNISIDELQQMTKIQKRYLEIIEQNDFESLPGTFYVRAFIRQYASAVGLDGNQLVDIYDGKEPAIVEEPKPVYEELEGSRKQLHDEEKQSSWLLRNLPAIAFSLIGLAIAVVVLYIMWQDQKAEPIIQTPATSASVEKPKESSQAPESSTQSSTPPSSSSEPEKKTAVAVVSDANNQVTATVKDANSPINITFKGTEGSCWIGVMVDGNYTYQHTLQAGETQTTALPANAANATLILGASNNVAIQVDGADLTMVLPTGMK

SEQ ID NO: 3827 - protein, 92 aa, Enterococcus faecalis
IFVICCSSSIEMFFCNLASFSVSPIFTLATRPSSPVYFVNLSIVSSVFFNCQGKHSRPLRIPQKKPTEDNKIERFQRFFFFLNSWFIARFLL

SEQ ID NO: 3828 - protein, 97 aa, Enterococcus faecalis
RLSTVGHGAYSALIGIIIAMLLNMFLLHSNAVEFFISILMVLIFSGITAYDNQRIRQVYAQTGDQAGTGMAVFFALQLYLDFINLFLAFLRIFGKNN

SEQ ID NO: 3829 - protein, 382 aa, Enterococcus faecalis
RILGPFYIHWRIFLGIFTGGNFWNFEVQTAVGNVLNRSVVNLGVSFVKTLFKVRRLLKLGVCRVVIFNIIVDDMEEEGILPDTPECSPPKSEVRVEWTTFRVVLFCLIAIIFGIGVGTYNTNYLSHTPDRKPVTISHRGVNGNNGVQNTLDSLIETNKAKPDYVEMDIQETKDHQFIVMHDFNLRALTGVNKRPNQLTLKELTNMNVTENGQTAKMVSFDDYLAKANQLKQRLLIEIKTTPQDSPDLVQRFVKQYRENIFENGHILHTLTYDTAMALKKEEPRFYVGYVIPFNIVGPPKMPVDFFTMEYSTMNRNFVNAAHHDGKKVYAWTANDEDVMTRMIFYGVDGIITDQLSLLNETMKTDLENPTYSDKLLNFAIGMG

SEQ ID NO: 3830 - protein, 377 aa, Enterococcus faecalis
FSPARAARIAQKTRQLKPIVDEARRNFNAENEKVIVDYIPFTLDGQRENVRTRETNLGNLIGDAIMSYGQDAFSQPADFAVTNGGGIRADIKQGPIKVGDVIAVLPFGNSIAQIQVTGAQVKEMFEMSVRSIPQKDENGTILLDDAGQPKLGANGGFLHVSSSIRIHYDSTKPGTRLASDEGNETGQTIVGSRVLGIEIKNRQTQKFEPLDEKKQYRMATNDFLAAGGDGYDMLGGEREEGISLDSVLIEYLKSATSLRLYRAATTIDLAQYKEPFPGERIVSISEEAYKELIGGGETPKPDPKPDPKPTPETPVATNKQNQAGARQSNPSVTEKKKYGGFLPKTGTETETLALYGLLFVGLSSSGWYIYKRRNKAS

SEQ ID NO: 3831 - protein, 95 aa, Enterococcus faecalis
RGGPFPSVRQLSEGFINGHYAIASFFITPMSLLLSNLARQQVISNLLNYRLVGIVLGSLLGFAGAYVFTTALRFYNRAYSIDETFENQQEERGVL

SEQ ID NO: 3832 - protein, 220 aa, Enterococcus faecalis
KSTRRKRRFMKITYPLPPNLPEQLPLLTNCQLEDEAILENHLYQQIDLPNQEVRNLVFRDAVFDHLSLANGQFASFDCSNVRFEACDFSNVEWLSGSFHRVTFLRCNLTGTNFADSYLKDCLFEDCKADYASFRFANFNLVHFNQTRLVESEFFEVTWKKLLLEACDLTESNWLNTSLKGLDFSQNTFERLTFSPNYLSGLKVTPEQAIYLASALGLVIT

SEQ ID NO: 3833 - protein, 81 aa, Enterococcus faecalis
EMIPKFLLFQKKRWLNPKIVHLKIEAQVKCLRWFFQKINNNLIRKNRQNQLFGYFFKIFLGNHQTKGTCQINGLFRGDFKT

SEQ ID NO: 3834 - protein, 85 aa, Enterococcus faecalis
VLSKNQVRLFMKNKSRQFLKNNWPYMLASFFIPFLIMAIIYLSIGIYPGSSRSVLASDAFSQFSNFHASFNNVLHGKQIFSVRGS

SEQ ID NO: 3835 - protein, 444 aa, Enterococcus faecalis
NRRTNYMSMFLDQVTIDVKAGKGGDGMVAFRREKYVPDGGPAGGDGGRGGDVVLVVEEGLRTLMDFRFNRHFKATPGENGMSKGMHGRGSEDLLVKVPPGTTVRDAETGALIGDLIENGQTLVVAKGGRGGRGNIRFASPRNPAPEIAENGEPGQERKIELELKVLADVGLVGFPSVGKSTLLSVISSARPKIGAYHFTTLVPNLGMVTTSDGRSFAAADLPGLIEGASQGVGLGTQFLRHIERTRVILHVIDMSGMEGRDPYEDYLAINKELASHNLRLMERPQIIVANKMDMPEAEENLAKFKEQLAKERTDEYADELPIFPISGVTRKGIEPLLNATADLLEVTPEFPLYEDEVVEEETVRYGFQPEGPEFTIDREPDASWVLSGEKLEKLFEMTNFDHDETVMRFARQLRGMGVDEALRARGAKDGDIVRIGNFEFEFVE

SEQ ID NO: 3836 - protein, 291 aa, Enterococcus faecalis
TTLGILKQCDHVSFTIPDGKILGLIGQNGAGKTTTFRLILNFLTQDSGSVLWNGQPLNEKEYNIIGYLPEERGLYPKITIEDQLIYFASLRGKTKKEIEPKIDFWMEKFQVKGKKTDKVKSLSKGNQQKVQLIATLIHEPKLIILDEPFSGLDPVNAELLKDGIIELKNQGSCVIFSSHNMDNVEKICDHLVMLKNGRMVLDGQVHEIRQQFGRTKLFLESPLSVEEVAATAGVKEAHLRQDGVLEATLENAEVGKVLFDKATANGYIPMFNQQPPTLEEIFKMKVGGQDE

SEQ ID NO: 3837 - protein, 82 aa, Enterococcus faecalis
  MISC_FEATURE (41)..(41): Amino acid 41 is Xaa wherein Xaa = any amino acid.
VGKMSKFWIIATDVYKKNVKSLSFLIMILAPFLLVGIVYLXGSLASGFSGDTTIGLVSENQALVKELTKNRTDDFSFKAVSS

SEQ ID NO: 3838 - protein, 552 aa, Enterococcus faecalis
MSTLKGQDMVVGYNSPSWNLATLAKPFTWGYVLLGKEYGLSWYWNLKLIGLILFSFEIGLIVTRRNKYLALLASVWIPFSSALQWWFVSPVGDLVFFGLGFLVGIYNYFYYHSSVRRRVICAITAVIMASGFVLVIYPALQVPLGYLILLFLILFFLEFRKKIKLDKWDGVLIGGALLMTAIIVGGSLYGSLDSLKAVMDTAYPGKRVSLGGDMPKRDILLFLTNWKMPFQDVPYSNNSEISSFYQLFFVILPLSPFIFYKKIKENIYGFVLFVYCLFNLVWMSVQFPTIFDKLTLWSYVPKQRAMLSFGFAAVLLSLWFIDYLWNRQAKIPMMAWLWALRLNVVLYFFVLYTGNLLLYVTRMDIIGVLVVATVLIVALFKRWRTLFVLVLLGIIMVSGAFVNPISRGVSAVYGKKLAVEVEEINKKDPNQLWVGERLMYGYLPMLGVHTFNGVAFTPDLEAWKPLDPKGKDTFIYNRYAHINVEVGNQTPVLELMQKDAIIARLSPEKLKEYGIKYAVVYKPLEPLDTPTIHFEKLYGPDQNGAYIYRIND

SEQ ID NO: 3839 - protein, 63 aa, Enterococcus faecalis
CTTVKIKHTVIDGKRLYFDGTAMQLFGHWIKWLLLTIITLGIYGFWLNIRLQQWITKHTHTLS

SEQ ID NO: 3840 - protein, 69 aa, Enterococcus faecalis
QSVILLFEKTRNLCYTLISIKGYLCYFGGVTDSTGIVELELRFVGYGYVKTLQLNITAKNENNSFALAA

SEQ ID NO: 3841 - protein, 84 aa, Enterococcus faecalis
KDNVIGIVRGGNELSLAYRKKELKPLFDKVLALFVPLYFSKNGDGGSRTRVQTYCHLNLYVHRHSFKGSLYSVPSDRHSVLLVW

SEQ ID NO: 3842 - protein, 123 aa, Enterococcus faecalis
EDIMKKKLIVLLLALFLTACSNNTGGKNSDASSTEVSTKQQTTQSSKKDSSNPDTTPTCTSSITIETTENLKNRELNPTDDVSKTRRQLYEQGINSSTITNKELKEYNSQAKEQKKASSPRIR

SEQ ID NO: 3843 - protein, 154 aa, Enterococcus faecalis
QKMALVKIVYASMTGHTEEISETLEEQFQEAGVEVQREECSEVDVDFFDDADACIIATYTYGDGELPFEFEDFFDELTEKDLAGKPFGVVGSGDREYGEFFCKSAHDFVGAFEKAGAKKVAETVEIENNAEEEDIEMLKTFVKSVATTLSDSVA

SEQ ID NO: 3844 - protein, 145 aa, Enterococcus faecalis
KGTMKVGISMFNILQSTQLSSNTFDFWLEAPRIATHAQAGQFVILRIDEKGERIPLTIAETNPQAGSIRIIFQVIGKTTAALSQLKTSDSLLDITGPLGMPTEVKQYETVMVVGGGVGIAAIYPIIKALKEAGNPSDYDFGSTNS

SEQ ID NO: 3845 - protein, 70 aa, Enterococcus faecalis
KKQATRVITILGARTAELVLLQEECRRYSDELIITTDDGSLGKKGLITEAKEEIIARESVPWHWGDGAHH

SEQ ID NO: 3846 - protein, 241 aa, Enterococcus faecalis
MDQRKKCATRFSNRHASARTSLWREQLPNRIAAATTDYLAGGNHMQIKQTNAAIYASLILILTFELSFSQSILANLAVFMGCVIFLIGQRKSRLLLWLFFLPLLPAIGTFWSIYLHGTSSQQAWLLFSRTYAFAGLGLAFAVGVDFEELLLLLEQKGLAPNFVYGILVVVHALPEVKREINDLKEASLLRGKTFHFWSPMLYVKTLLVAVSWRDKYTEAMSAHGYEEGATRSRNVQFGLFT

SEQ ID NO: 3847 - protein, 266 aa, Enterococcus faecalis
QNDLVCDHDFSDYADVVDQVVTLKNGQFEKQPLTFIKTKPQTFQLTTSVVKQPMLQLKNFRLSQGKRVLLEEKEALLFKGITTLTGPNGAGKSTLLKAIVQRQKYQGKMFLAGRRLRASKKLYQHMTLAVQQANRQFVTLTLREELLFGQNMTAEKRRKQEEALTFLGLKEKLEHSVFQLSEGQKKMVQLISLLSLDLDCLLLDEPFAGLDERACNYFVEWIKEKSAQQDFLIVTHRLEPLSGVSNYRIELLQQQLIIWQEGTTCK

SEQ ID NO: 3848 - protein, 556 aa, Enterococcus faecalis
KDVFHSMICQNCQQNEATIHLYANVNGQRKQLDYCQSCYQKLKNQANNSPQNMGQDPFGFGSLDDLYRSLSRQMQQGNPYEQQTPPTQFGDGGNGGQPPRGGAGAGQGLLGEYGINITEAARQGDIDPVVGRDQEIKRVIEILNRRTKNNPVLIGEPGVGKTAVVEGLAQKIVDGDVPQKLLDKEVIRLDVVSLVQGTGIRGQFEERMQKLIEEITEAENVILFIDEVHEIVGAGAAGDGNMDAGNILKPALARGELQLVGATTLNEYRIIEKDAALERRMQPVQVDEPTVAETITILHGLQKRYEDYHHVKYTDEAINAAANLSNRYIQDRFLPDKAIDLLDESGSKMNLTIQLVDPKTIDKKLAEAEQQKQQASAEEDFEKAAYYRDQINKLQAMKEKQISDEETPVITEKDIEAIVEQKTGIPVGDLKEKEQTQLKNLAVDLKAHVVGQDDAVDKVAKAIRRNRVGLGKQNRPIGSFLFVGPTGVGKTELAKQLAFELFGSEDSMVRFDMSEYMEKHSVSKLIGSPPGYVGYDEAGQLTEKFRRNPYNLILLE

SEQ ID NO: 3849 - protein, 451 aa, Enterococcus faecalis
WAIPWRIAITNLKEIGEYLVDIHGQNEHQELMQSERHIDMLDEFGGKKLLAVKEKYTQAYQEYRALEAKVRKRQKNEKEFAQRMDMLHFQSDEIASAQLVAGEEEQLLEERNKLNNFQKIADALTISYAALNGEDDSSLDKIGTSMDELASIESLDSEYKTLSDTVQNAYYLLQEASGDLSRLIDGLELDEGRLNEVENRLELIRQMKRKYGDSIETILSYYEEITKELAEADFLEGGTGDLEALLAEKQQAAHQQALALRKERKRLAKELEQQILTELKELYLERTEFEVRFTELEHLQENGLDGVEFYITTNPGEPLKPLVRVASGGELSRVMLAMKTIFSQTQGITSIVFDEVDTGVSGRVAQAIADKIYQISENSQVLCITHLPQVAAVADEHYFIEKEIVAGRTETSVRILSEKERVNEIARMLAGSEITKLTIEHAQELLAMAKK

SEQ ID NO: 3850 - protein, 260 aa, Enterococcus faecalis
TRVEDSRRKTQKMYWSGRPEIGEVQGDYYHHEVVFDGGYTALIDVVVKDQQIQLVEFDERGPKNYYSEEWAGVTKRLSGYANFQANNARTDQSLVTVVNTMTFLENQMVAENRLDGAFQTAKGQSNSANNGYLPAARALAKEIKEPSKEHYTSLTEDFEEGLSGRLTVITLKDSGKITDLRYDEYFADTEEEIKDAKLKAYSRQSKYFSKDYAQKSGENFKKEVDDLRKKAIEENKLVSPTNEEAWSENYQSLVKKITSQ

SEQ ID NO: 3851 - protein, 107 aa, Enterococcus faecalis
GDKMKLVNVTNSYKQLVNKQLENTDAYFVKVYSAGNTTAVYSEAAHHVEVLIMNKNRRIRPTEVKEILAKLLKRLPKEAYDPDEISIIELNHVTEVSVPLKVSLMEN

SEQ ID NO: 3852 - protein, 73 aa, Enterococcus faecalis
KEKLVDLGYDPAMGARPLRRTIQEQIEDGIAEYILDHPENHQLVAALDNEGKIIVTGAQEVTKTETSTSDQAE

SEQ ID NO: 3853 - protein, 396 aa, Enterococcus faecalis
GHPRAGHNCYETDEEMTKIFTEYRKTHNQGVFDAYTAEMRLARKNKIITGLPDAYGRGRIIGDYRRIALYGIDYLMEQKKKDHDNTGNKEMTDDVIRLREEISEQYRALNDLKQMAASYGFDISRPAANAQEAIQWLYFGYLGAIKSQNGAAMSIGRISAFLDIYIQRDLEAGLITEFEAQEMIDHLIMKLRMVKFARTPEYNQLFSGYPIWATLSIAGMGIDGRSLVTKNDFRILHTLTNMGPSPEPNLTVLYSSHLPEGFRTYAAKIAKESSSIQFENDDLLRENWGSDDCAIACCVSATVMGKDMQFFGARANLAKAVLYAINGGVDEKTKMQVAPKYRPMTGDKLDYHEFMERYKDILDWLAELYVNTLNIIHYMHDKYAYEAPQLALMDTD

SEQ ID NO: 3854 - protein, 72 aa, Enterococcus faecalis
LIATLCTYGAPRALNRGIGYQYPHNFENGWVNQQYLPDKLKEARYYEPIDIGKYEQALHQQLKRIQEWKQKK

SEQ ID NO: 3855 - protein, 84 aa, Enterococcus faecalis
LATPVTTASNSTSIRIILSSKKKQLARANCLEIFIKMVKSVDAGNRPRVLNPQDKQVGSSIAVLNYQKKRHVTNFDTSRIPRYQ

SEQ ID NO: 3856 - protein, 70 aa, Enterococcus faecalis
RKCSFLPLLKKETATESQQFIERFGRYYLIIAILGVLAAIFNRPLLSIGFIFFVLLLSTLFSLTFAKKMS

SEQ ID NO: 3857 - protein, 171 aa, Enterococcus faecalis
KQLMIFFTLKGAVIMLQQYQKIMIAIDGSDEADLAFKKAVNVAKRNDAELLLAHVVDTRSFQSVSSFDGALAEEAMSMAKETLDTYQQQAVDMGQTKVSSVLAYGSPKNIIAKELPKEYNIDLIMLGATGLNAVERLFIGSVSESVIRNASCDVLVVRTDLDNKLPKNEEK

SEQ ID NO: 3858 - protein, 333 aa, Enterococcus faecalis
GGIEMKTIHFPTELWVGEGALANLETLHDRRVFIVTDPFMVDSGFVNEVTKHLTKSEWQIFSDIIPDPPIDKIAAGIKHLATFQGDTILALGGGSAIDAAKAMKFFGKRTLQTQIAEFIAVPTTSGTGSEVTNFSVITVAETGTKIPLVTDEIQPEIAILDTNLVMSVPPKITADTGMDVLTHVIEAYVSTEANPISDALCEKVVRLVFDNLEIAFNEGSNQQARENMHLASCMAGMAFNVTSLGLNHGIAHAAGARLHVPHGRMNAMLLPEVIAYNSGLANGKVTNEPTAKRYAQLANCLNDTQTTNARIGVQQFIRQIKQLRPKLNMPAHF

SEQ ID NO: 3859 - protein, 87 aa, Enterococcus faecalis
  MISC_FEATURE (33)..(71): Amino acids 33 & 71 are Xaa wherein Xaa = any amino acid.
EKSWFCLETACPNNEKMKRTDLKANLGSFSDGXERAPKSQLGLNPQFSTKLIVITHLEIYTKFFYKKQLVXNTTLSVFIGKTISLSS

SEQ ID NO: 3860 - protein, 132 aa, Enterococcus faecalis
RKGGWKMTWGAIATWRMAHDGLLKATEELQQGGAAGTAVEQLIKEVEDYPFYKSVGYGGLPNEEGILEMDAAYMDGDTFAIGAVAGITDVKNPISVAKALSKEKFNSFRVGAGATKYSMLHGFDRDKPHQGN

SEQ ID NO: 3861 - protein, 425 aa, Enterococcus faecalis
PVQKDLFYEDLTKIMAIRSVKGSPKKEALFGEGPKRALEETLKLAERYGFQTGIVNDAVGYAQWGTAEEYLGIIGHLDVVPEGSGWSVPPFQLTKKNQRLYGRGILDNKGPILACLYGMKLLKELGYQPKKTIRLMFGTDEESGSGDIPLYLEKENAPVFGFTPDCKYPVVYGERGIVNYEITTTIPDDSSEQIGQIIGDQAKDHVPDQLSVVIAGKTTAITGKRAPSNAPELGKNAITLLAQKISEEQLVKGNLLQYFDWLTASFHEKHYGEGVALDFKDQDSGQLILTPYALEKRGQQLVLSLAVRYPVSITENEVTTQLTKALFPESEVTVIRRLPSTLFPKDERNVQKLTKVYEQITGLDGTPVTTTGATYARFMPNIVAFGPSFPGQKGIAHNQDEYMDEKDLLLNLEIYMQAMIALTEA

(The sequence listing continues in the following parts.)
